United States Patent Application Publication US 2014/0004565 A1 - sequence listing, part 106

SEQ ID NO: 2643454 - RNA, 19 nt, Artificial Sequence
  Description of Artificial Sequence: Synthetic oligonucleotide
aaacuggucucuggggcug

SEQ ID NO: 2643455 - RNA, 19 nt, Artificial Sequence
  Description of Artificial Sequence: Synthetic oligonucleotide
auacacucccuuguagaag

SEQ ID NO: 2643456 - RNA, 19 nt, Artificial Sequence
  Description of Artificial Sequence: Synthetic oligonucleotide
cacuaucuuauuauauuaa

SEQ ID NO: 2643457 - RNA, 19 nt, Artificial Sequence
  Description of Artificial Sequence: Synthetic oligonucleotide
ccuauuauauaggacgcag

SEQ ID NO: 2643458 - RNA, 19 nt, Artificial Sequence
  Description of Artificial Sequence: Synthetic oligonucleotide
caucuugcucaucaaccac

SEQ ID NO: 2643459 - RNA, 19 nt, Artificial Sequence
  Description of Artificial Sequence: Synthetic oligonucleotide
cuguaggaaauggugauga

SEQ ID NO: 2643460 - RNA, 19 nt, Artificial Sequence
  Description of Artificial Sequence: Synthetic oligonucleotide
agaugcuucuuuccaacuu

SEQ ID NO: 2643461 - RNA, 19 nt, Artificial Sequence
  Description of Artificial Sequence: Synthetic oligonucleotide
agcauaguacggcuuucca

SEQ ID NO: 2643462 - RNA, 19 nt, Artificial Sequence
  Description of Artificial Sequence: Synthetic oligonucleotide
agggcggcacucuucucac

SEQ ID NO: 2643463 - RNA, 19 nt, Artificial Sequence
  Description of Artificial Sequence: Synthetic oligonucleotide
gcauagaucaggacagagg

SEQ ID NO: 2643464 - RNA, 19 nt, Artificial Sequence
  Description of Artificial Sequence: Synthetic oligonucleotide
aaauacucagaaggugcau

SEQ ID NO: 2643465 - RNA, 19 nt, Artificial Sequence
  Description of Artificial Sequence: Synthetic oligonucleotide
guaucugcauagaucagga

SEQ ID NO: 2643466 - RNA, 19 nt, Artificial Sequence
  Description of Artificial Sequence: Synthetic oligonucleotide
ggaaugagccaggucaggg

SEQ ID NO: 2643467 - RNA, 19 nt, Artificial Sequence
  Description of Artificial Sequence: Synthetic oligonucleotide
uggucucuggggcuggcga

SEQ ID NO: 2643468 - RNA, 19 nt, Artificial Sequence
  Description of Artificial Sequence: Synthetic oligonucleotide
cacucuucucacaguacug

SEQ ID NO: 2643469 - RNA, 19 nt, Artificial Sequence
  Description of Artificial Sequence: Synthetic oligonucleotide
uaggacgcagggucaaacu

SEQ ID NO: 2643470 - RNA, 19 nt, Artificial Sequence
  Description of Artificial Sequence: Synthetic oligonucleotide
gaaggugcauggcagcaaa

SEQ ID NO: 2643471 - RNA, 19 nt, Artificial Sequence
  Description of Artificial Sequence: Synthetic oligonucleotide
ggcgaggugggaaugagcc

SEQ ID NO: 2643472 - RNA, 19 nt, Artificial Sequence
  Description of Artificial Sequence: Synthetic oligonucleotide
ucugagcauaguacggcuu

SEQ ID NO: 2643473 - RNA, 19 nt, Artificial Sequence
  Description of Artificial Sequence: Synthetic oligonucleotide
aauuggaaaucugguuuua

SEQ ID NO: 2643474 - RNA, 19 nt, Artificial Sequence
  Description of Artificial Sequence: Synthetic oligonucleotide
cauagauuacugugguuaa

SEQ ID NO: 2643475 - RNA, 19 nt, Artificial Sequence
  Description of Artificial Sequence: Synthetic oligonucleotide
caugucaaauucucauaga

SEQ ID NO: 2643476 - RNA, 19 nt, Artificial Sequence
  Description of Artificial Sequence: Synthetic oligonucleotide
gcucaucaaccacagaaac

SEQ ID NO: 2643477 - RNA, 19 nt, Artificial Sequence
  Description of Artificial Sequence: Synthetic oligonucleotide
uaucugcauagaucaggac

SEQ ID NO: 2643478 - RNA, 19 nt, Artificial Sequence
  Description of Artificial Sequence: Synthetic oligonucleotide
uaaaagaguucuggugaaa

SEQ ID NO: 2643479 - RNA, 19 nt, Artificial Sequence
  Description of Artificial Sequence: Synthetic oligonucleotide
gagcauaguacggcuuucc

SEQ ID NO: 2643480 - RNA, 19 nt, Artificial Sequence
  Description of Artificial Sequence: Synthetic oligonucleotide
acuguuuccuuaauaguua

SEQ ID NO: 2643481 - RNA, 19 nt, Artificial Sequence
  Description of Artificial Sequence: Synthetic oligonucleotide
ggaagaucuuccuccggcc

SEQ ID NO: 2643482 - RNA, 19 nt, Artificial Sequence
  Description of Artificial Sequence: Synthetic oligonucleotide
ggugcauggcagcaaauuc

SEQ ID NO: 2643483 - RNA, 19 nt, Artificial Sequence
  Description of Artificial Sequence: Synthetic oligonucleotide
uggugggaacuguaggaaa

SEQ ID NO: 2643484 - RNA, 19 nt, Artificial Sequence
  Description of Artificial Sequence: Synthetic oligonucleotide
gggugugugaguaugguuc

SEQ ID NO: 2643485 - RNA, 19 nt, Artificial Sequence
  Description of Artificial Sequence: Synthetic oligonucleotide
cuggggauuagaaccaaaa

SEQ ID NO: 2643486 - RNA, 19 nt, Artificial Sequence
  Description of Artificial Sequence: Synthetic oligonucleotide
ugguuuuauuuuggggugu

SEQ ID NO: 2643487 - RNA, 19 nt, Artificial Sequence
  Description of Artificial Sequence: Synthetic oligonucleotide
aagcuucauacaugcuaaa

SEQ ID NO: 2643488 - RNA, 19 nt, Artificial Sequence
  Description of Artificial Sequence: Synthetic oligonucleotide
gaucaggacagaggcagca

SEQ ID NO: 2643489 - RNA, 19 nt, Artificial Sequence
  Description of Artificial Sequence: Synthetic oligonucleotide
ucucacaguacugguccug

SEQ ID NO: 2643490 - RNA, 19 nt, Artificial Sequence
  Description of Artificial Sequence: Synthetic oligonucleotide
auuuuggggugugugagua

SEQ ID NO: 2643491 - RNA, 19 nt, Artificial Sequence
  Description of Artificial Sequence: Synthetic oligonucleotide
agguuugguuuuguuaacu

SEQ ID NO: 2643492 - RNA, 19 nt, Artificial Sequence
  Description of Artificial Sequence: Synthetic oligonucleotide
agaucaugucaaauucuca

SEQ ID NO: 2643493 - RNA, 19 nt, Artificial Sequence
  Description of Artificial Sequence: Synthetic oligonucleotide
uuuccaucuugcucaucaa

SEQ ID NO: 2643494 - RNA, 19 nt, Artificial Sequence
  Description of Artificial Sequence: Synthetic oligonucleotide
agaucaggacagaggcagc

SEQ ID NO: 2643495 - RNA, 19 nt, Artificial Sequence
  Description of Artificial Sequence: Synthetic oligonucleotide
gaugcuucuuuccaacuuu

SEQ ID NO: 2643496 - RNA, 19 nt, Artificial Sequence
  Description of Artificial Sequence: Synthetic oligonucleotide
aguccauauguagcccuuc

SEQ ID NO: 2643497 - RNA, 19 nt, Artificial Sequence
  Description of Artificial Sequence: Synthetic oligonucleotide
uacucagaaggugcauggc

SEQ ID NO: 2643498 - RNA, 19 nt, Artificial Sequence
  Description of Artificial Sequence: Synthetic oligonucleotide
caucaaccacagaaacaac

SEQ ID NO: 2643499 - RNA, 19 nt, Artificial Sequence
  Description of Artificial Sequence: Synthetic oligonucleotide
auguagcccuucucugguc

SEQ ID NO: 2643500 - RNA, 19 nt, Artificial Sequence
  Description of Artificial Sequence: Synthetic oligonucleotide
aguacugguccugaaugaa

SEQ ID NO: 2643501 - RNA, 19 nt, Artificial Sequence
  Description of Artificial Sequence: Synthetic oligonucleotide
ggacgcagggucaaacugg

SEQ ID NO: 2643502 - RNA, 19 nt, Artificial Sequence
  Description of Artificial Sequence: Synthetic oligonucleotide
ugaugaccuugacuugaaa

SEQ ID NO: 2643503 - RNA, 19 nt, Artificial Sequence
  Description of Artificial Sequence: Synthetic oligonucleotide
uacggcuuuccaucuugcu

SEQ ID NO: 2643504 - RNA, 19 nt, Artificial Sequence
  Description of Artificial Sequence: Synthetic oligonucleotide
gaguagguccaacaugagu

SEQ ID NO: 2643505 - RNA, 19 nt, Artificial Sequence
  Description of Artificial Sequence: Synthetic oligonucleotide
ugccugcccacuaucuuau

SEQ ID NO: 2643506 - RNA, 19 nt, Artificial Sequence
  Description of Artificial Sequence: Synthetic oligonucleotide
uggcgaggugggaaugagc

SEQ ID NO: 2643507 - RNA, 19 nt, Artificial Sequence
  Description of Artificial Sequence: Synthetic oligonucleotide
uuagaaccaaaagcuucau

SEQ ID NO: 2643508 - RNA, 19 nt, Artificial Sequence
  Description of Artificial Sequence: Synthetic oligonucleotide
ccagguuugguuuuguuaa

SEQ ID NO: 2643509 - RNA, 19 nt, Artificial Sequence
  Description of Artificial Sequence: Synthetic oligonucleotide
agcuucauacaugcuaaaa

SEQ ID NO: 2643510 - RNA, 19 nt, Artificial Sequence
  Description of Artificial Sequence: Synthetic oligonucleotide
ucucuggucuggugggaac

SEQ ID NO: 2643511 - RNA, 19 nt, Artificial Sequence
  Description of Artificial Sequence: Synthetic oligonucleotide
uucucacaguacugguccu

SEQ ID NO: 2643512 - RNA, 19 nt, Artificial Sequence
  Description of Artificial Sequence: Synthetic oligonucleotide
ugcccacuaucuuauuaua

SEQ ID NO: 2643513 - RNA, 19 nt, Artificial Sequence
  Description of Artificial Sequence: Synthetic oligonucleotide
ggcggcacucuucucacag

SEQ ID NO: 2643514 - RNA, 19 nt, Artificial Sequence
  Description of Artificial Sequence: Synthetic oligonucleotide
uagcccuucucuggucugg

SEQ ID NO: 2643515 - RNA, 19 nt, Artificial Sequence
  Description of Artificial Sequence: Synthetic oligonucleotide
ucuggucuggugggaacug

SEQ ID NO: 2643516 - RNA, 19 nt, Artificial Sequence
  Description of Artificial Sequence: Synthetic oligonucleotide
uagguccaacaugagucca

SEQ ID NO: 2643517 - RNA, 19 nt, Artificial Sequence
  Description of Artificial Sequence: Synthetic oligonucleotide
cuauacaugguugguaacu

SEQ ID NO: 2643518 - RNA, 19 nt, Artificial Sequence
  Description of Artificial Sequence: Synthetic oligonucleotide
gguaacuguuuccuuaaua

SEQ ID NO: 2643519 - RNA, 19 nt, Artificial Sequence
  Description of Artificial Sequence: Synthetic oligonucleotide
auagaucaggacagaggca

SEQ ID NO: 2643520 - RNA, 19 nt, Artificial Sequence
  Description of Artificial Sequence: Synthetic oligonucleotide
gugggaacuguaggaaaug

SEQ ID NO: 2643521 - RNA, 19 nt, Artificial Sequence
  Description of Artificial Sequence: Synthetic oligonucleotide
auagauuacugugguuaaa

SEQ ID NO: 2643522 - RNA, 19 nt, Artificial Sequence
  Description of Artificial Sequence: Synthetic oligonucleotide
aguucuggugaaaaucauu

SEQ ID NO: 2643523 - RNA, 19 nt, Artificial Sequence
  Description of Artificial Sequence: Synthetic oligonucleotide
caacaugaguccauaugua

SEQ ID NO: 2643524 - RNA, 19 nt, Artificial Sequence
  Description of Artificial Sequence: Synthetic oligonucleotide
auuugguaauacacucccu

SEQ ID NO: 2643525 - RNA, 19 nt, Artificial Sequence
  Description of Artificial Sequence: Synthetic oligonucleotide
ugguaacuguuuccuuaau

SEQ ID NO: 2643526 - RNA, 19 nt, Artificial Sequence
  Description of Artificial Sequence: Synthetic oligonucleotide
ugagcauaguacggcuuuc

SEQ ID NO: 2643527 - RNA, 19 nt, Artificial Sequence
  Description of Artificial Sequence: Synthetic oligonucleotide
gguaauacacucccuugua

SEQ ID NO: 2643528 - RNA, 19 nt, Artificial Sequence
  Description of Artificial Sequence: Synthetic oligonucleotide
gguuuuauuuuggggugug

SEQ ID NO: 2643529 - RNA, 19 nt, Artificial Sequence
  Description of Artificial Sequence: Synthetic oligonucleotide
uggggugugugaguauggu

SEQ ID NO: 2643530 - RNA, 19 nt, Artificial Sequence
  Description of Artificial Sequence: Synthetic oligonucleotide
aguaugguucuggggauua

SEQ ID NO: 2643531 - RNA, 19 nt, Artificial Sequence
  Description of Artificial Sequence: Synthetic oligonucleotide
ccaacaugaguccauaugu

SEQ ID NO: 2643532 - RNA, 19 nt, Artificial Sequence
  Description of Artificial Sequence: Synthetic oligonucleotide
auauaggacgcagggucaa

SEQ ID NO: 2643533 - RNA, 19 nt, Artificial Sequence
  Description of Artificial Sequence: Synthetic oligonucleotide
gcccuauuauauaggacgc

SEQ ID NO: 2643534 - RNA, 19 nt, Artificial Sequence
  Description of Artificial Sequence: Synthetic oligonucleotide
gguuugguuuuguuaacua

SEQ ID NO: 2643535 - RNA, 19 nt, Artificial Sequence
  Description of Artificial Sequence: Synthetic oligonucleotide
guagcccuucucuggucug

SEQ ID NO: 2643536 - RNA, 19 nt, Artificial Sequence
  Description of Artificial Sequence: Synthetic oligonucleotide
acaugccccagguuugguu

SEQ ID NO: 2643537 - RNA, 19 nt, Artificial Sequence
  Description of Artificial Sequence: Synthetic oligonucleotide
uuccaacuuugggaugaca

SEQ ID NO: 2643538 - RNA, 19 nt, Artificial Sequence
  Description of Artificial Sequence: Synthetic oligonucleotide
augagccaggucagggcgg

SEQ ID NO: 2643539 - RNA, 19 nt, Artificial Sequence
  Description of Artificial Sequence: Synthetic oligonucleotide
ugggugccugcccacuauc

SEQ ID NO: 2643540 - RNA, 19 nt, Artificial Sequence
  Description of Artificial Sequence: Synthetic oligonucleotide
uucucuggucuggugggaa

SEQ ID NO: 2643541 - RNA, 19 nt, Artificial Sequence
  Description of Artificial Sequence: Synthetic oligonucleotide
uuuccaacuuugggaugac

SEQ ID NO: 2643542 - RNA, 19 nt, Artificial Sequence
  Description of Artificial Sequence: Synthetic oligonucleotide
guaugguucuggggauuag

SEQ ID NO: 2643543 - RNA, 19 nt, Artificial Sequence
  Description of Artificial Sequence: Synthetic oligonucleotide
aggugcauggcagcaaauu

SEQ ID NO: 2643544 - RNA, 19 nt, Artificial Sequence
  Description of Artificial Sequence: Synthetic oligonucleotide
aacaugccccagguuuggu

SEQ ID NO: 2643545 - RNA, 19 nt, Artificial Sequence
  Description of Artificial Sequence: Synthetic oligonucleotide
caaauuccagguauuccau

SEQ ID NO: 2643546 - RNA, 19 nt, Artificial Sequence
  Description of Artificial Sequence: Synthetic oligonucleotide
uauaggacgcagggucaaa

SEQ ID NO: 2643547 - RNA, 19 nt, Artificial Sequence
  Description of Artificial Sequence: Synthetic oligonucleotide
guacggcuuuccaucuugc

SEQ ID NO: 2643548 - RNA, 19 nt, Artificial Sequence
  Description of Artificial Sequence: Synthetic oligonucleotide
acagaggcagcaagugggu

SEQ ID NO: 2643549 - RNA, 19 nt, Artificial Sequence
  Description of Artificial Sequence: Synthetic oligonucleotide
ggucuggugggaacuguag

SEQ ID NO: 2643550 - RNA, 19 nt, Artificial Sequence
  Description of Artificial Sequence: Synthetic oligonucleotide
agggucaaacuggucucug

SEQ ID NO: 2643551 - RNA, 19 nt, Artificial Sequence
  Description of Artificial Sequence: Synthetic oligonucleotide
ggucucuggggcuggcgag

SEQ ID NO: 2643552 - RNA, 19 nt, Artificial Sequence
  Description of Artificial Sequence: Synthetic oligonucleotide
cagcaagugggugccugcc

SEQ ID NO: 2643553 - RNA, 19 nt, Artificial Sequence
  Description of Artificial Sequence: Synthetic oligonucleotide
agaaggugcauggcagcaa

SEQ ID NO: 2643554 - RNA, 19 nt, Artificial Sequence
  Description of Artificial Sequence: Synthetic oligonucleotide
gugccugcccacuaucuua

SEQ ID NO: 2643555 - RNA, 19 nt, Artificial Sequence
  Description of Artificial Sequence: Synthetic oligonucleotide
uaguacggcuuuccaucuu

SEQ ID NO: 2643556 - RNA, 19 nt, Artificial Sequence
  Description of Artificial Sequence: Synthetic oligonucleotide
cucacaguacugguccuga

SEQ ID NO: 2643557 - RNA, 19 nt, Artificial Sequence
  Description of Artificial Sequence: Synthetic oligonucleotide
caaacuggucucuggggcu

SEQ ID NO: 2643558 - RNA, 19 nt, Artificial Sequence
  Description of Artificial Sequence: Synthetic oligonucleotide
cuggcgaggugggaaugag

SEQ ID NO: 2643559 - RNA, 19 nt, Artificial Sequence
  Description of Artificial Sequence: Synthetic oligonucleotide
gcaagugggugccugccca

SEQ ID NO: 2643560 - RNA, 19 nt, Artificial Sequence
  Description of Artificial Sequence: Synthetic oligonucleotide
cucccuuguagaagaugga

SEQ ID NO: 2643561 - RNA, 19 nt, Artificial Sequence
  Description of Artificial Sequence: Synthetic oligonucleotide
gucagggcggcacucuucu

SEQ ID NO: 2643562 - RNA, 19 nt, Artificial Sequence
  Description of Artificial Sequence: Synthetic oligonucleotide
guccauauguagcccuucu

SEQ ID NO: 2643563 - RNA, 19 nt, Artificial Sequence
  Description of Artificial Sequence: Synthetic oligonucleotide
gggaaugagccaggucagg

SEQ ID NO: 2643564 - RNA, 19 nt, Artificial Sequence
  Description of Artificial Sequence: Synthetic oligonucleotide
gaccuugacuugaaauacu

SEQ ID NO: 2643565 - RNA, 19 nt, Artificial Sequence
  Description of Artificial Sequence: Synthetic oligonucleotide
agugggugccugcccacua

SEQ ID NO: 2643566 - RNA, 19 nt, Artificial Sequence
  Description of Artificial Sequence: Synthetic oligonucleotide
uuccuccggcccuauuaua

SEQ ID NO: 2643567 - RNA, 19 nt, Artificial Sequence
  Description of Artificial Sequence: Synthetic oligonucleotide
auugcaggaguagguccaa

SEQ ID NO: 2643568 - RNA, 19 nt, Artificial Sequence
  Description of Artificial Sequence: Synthetic oligonucleotide
ggugugugaguaugguucu

SEQ ID NO: 2643569 - RNA, 19 nt, Artificial Sequence
  Description of Artificial Sequence: Synthetic oligonucleotide
ccuugacuugaaauacuca

SEQ ID NO: 2643570 - RNA, 19 nt, Artificial Sequence
  Description of Artificial Sequence: Synthetic oligonucleotide
cuggucucuggggcuggcg

SEQ ID NO: 2643571 - RNA, 19 nt, Artificial Sequence
  Description of Artificial Sequence: Synthetic oligonucleotide
gacgcagggucaaacuggu

SEQ ID NO: 2643572 - RNA, 19 nt, Artificial Sequence
  Description of Artificial Sequence: Synthetic oligonucleotide
ugccccagguuugguuuug

SEQ ID NO: 2643573 - RNA, 19 nt, Artificial Sequence
  Description of Artificial Sequence: Synthetic oligonucleotide
ccaacuuugggaugacaaa

SEQ ID NO: 2643574 - RNA, 19 nt, Artificial Sequence
  Description of Artificial Sequence: Synthetic oligonucleotide
gugugugaguaugguucug

SEQ ID NO: 2643575 - RNA, 19 nt, Artificial Sequence
  Description of Artificial Sequence: Synthetic oligonucleotide
ggugggaaugagccagguc

SEQ ID NO: 2643576 - RNA, 19 nt, Artificial Sequence
  Description of Artificial Sequence: Synthetic oligonucleotide
ggaguagguccaacaugag

SEQ ID NO: 2643577 - RNA, 19 nt, Artificial Sequence
  Description of Artificial Sequence: Synthetic oligonucleotide
cccucugaucugagcauag

SEQ ID NO: 2643578 - RNA, 19 nt, Artificial Sequence
  Description of Artificial Sequence: Synthetic oligonucleotide
agguccaacaugaguccau

SEQ ID NO: 2643579 - RNA, 19 nt, Artificial Sequence
  Description of Artificial Sequence: Synthetic oligonucleotide
caugccccagguuugguuu

SEQ ID NO: 2643580 - RNA, 19 nt, Artificial Sequence
  Description of Artificial Sequence: Synthetic oligonucleotide
cuugcucaucaaccacaga

SEQ ID NO: 2643581 - RNA, 19 nt, Artificial Sequence
  Description of Artificial Sequence: Synthetic oligonucleotide
cugagcauaguacggcuuu

SEQ ID NO: 2643582 - RNA, 19 nt, Artificial Sequence
  Description of Artificial Sequence: Synthetic oligonucleotide
agaucuuccuccggcccua

SEQ ID NO: 2643583 - RNA, 19 nt, Artificial Sequence
  Description of Artificial Sequence: Synthetic oligonucleotide
cacaguacugguccugaau

SEQ ID NO: 2643584 - RNA, 19 nt, Artificial Sequence
  Description of Artificial Sequence: Synthetic oligonucleotide
ggcagcaagugggugccug

SEQ ID NO: 2643585 - RNA, 19 nt, Artificial Sequence
  Description of Artificial Sequence: Synthetic oligonucleotide
acccucugaucugagcaua

SEQ ID NO: 2643586 - RNA, 19 nt, Artificial Sequence
  Description of Artificial Sequence: Synthetic oligonucleotide
augccccagguuugguuuu

SEQ ID NO: 2643587 - RNA, 19 nt, Artificial Sequence
  Description of Artificial Sequence: Synthetic oligonucleotide
guuuuauuuuggggugugu

SEQ ID NO: 2643588 - RNA, 19 nt, Artificial Sequence
  Description of Artificial Sequence: Synthetic oligonucleotide
gcauaguacggcuuuccau

SEQ ID NO: 2643589 - RNA, 19 nt, Artificial Sequence
  Description of Artificial Sequence: Synthetic oligonucleotide
gugaugaccuugacuugaa

SEQ ID NO: 2643590 - RNA, 19 nt, Artificial Sequence
  Description of Artificial Sequence: Synthetic oligonucleotide
aggucagggcggcacucuu

SEQ ID NO: 2643591 - RNA, 19 nt, Artificial Sequence
  Description of Artificial Sequence: Synthetic oligonucleotide
gaguucuggugaaaaucau

SEQ ID NO: 2643592 - RNA, 19 nt, Artificial Sequence
  Description of Artificial Sequence: Synthetic oligonucleotide
ccggcccuauuauauagga

SEQ ID NO: 2643593 - RNA, 19 nt, Artificial Sequence
  Description of Artificial Sequence: Synthetic oligonucleotide
cccagguuugguuuuguua

SEQ ID NO: 2643594 - RNA, 19 nt, Artificial Sequence
  Description of Artificial Sequence: Synthetic oligonucleotide
ggcacucuucucacaguac

SEQ ID NO: 2643595 - RNA, 19 nt, Artificial Sequence
  Description of Artificial Sequence: Synthetic oligonucleotide
gcaggaguagguccaacau

SEQ ID NO: 2643596 - RNA, 19 nt, Artificial Sequence
  Description of Artificial Sequence: Synthetic oligonucleotide
cugguccugaaugaacccu

SEQ ID NO: 2643597 - RNA, 19 nt, Artificial Sequence
  Description of Artificial Sequence: Synthetic oligonucleotide
cuuccuccggcccuauuau

SEQ ID NO: 2643598 - RNA, 19 nt, Artificial Sequence
  Description of Artificial Sequence: Synthetic oligonucleotide
ggugggaacuguaggaaau

SEQ ID NO: 2643599 - RNA, 19 nt, Artificial Sequence
  Description of Artificial Sequence: Synthetic oligonucleotide
cccacuaucuuauuauauu

SEQ ID NO: 2643600 - RNA, 19 nt, Artificial Sequence
  Description of Artificial Sequence: Synthetic oligonucleotide
cucauagauuacugugguu

SEQ ID NO: 2643601 - RNA, 19 nt, Artificial Sequence
  Description of Artificial Sequence: Synthetic oligonucleotide
gggaacuguaggaaauggu

SEQ ID NO: 2643602 - RNA, 19 nt, Artificial Sequence
  Description of Artificial Sequence: Synthetic oligonucleotide
acgcagggucaaacugguc

SEQ ID NO: 2643603 - RNA, 19 nt, Artificial Sequence
  Description of Artificial Sequence: Synthetic oligonucleotide
guccaacaugaguccauau

SEQ ID NO: 2643604 - RNA, 19 nt, Artificial Sequence
  Description of Artificial Sequence: Synthetic oligonucleotide
gguccaacaugaguccaua

SEQ ID NO: 2643605 - RNA, 19 nt, Artificial Sequence
  Description of Artificial Sequence: Synthetic oligonucleotide
ccugcccacuaucuuauua

SEQ ID NO: 2643606 - RNA, 19 nt, Artificial Sequence
  Description of Artificial Sequence: Synthetic oligonucleotide
cucuggucuggugggaacu

SEQ ID NO: 2643607 - RNA, 19 nt, Artificial Sequence
  Description of Artificial Sequence: Synthetic oligonucleotide
gaguccauauguagcccuu

SEQ ID NO: 2643608 - RNA, 19 nt, Artificial Sequence
  Description of Artificial Sequence: Synthetic oligonucleotide
ccagguauuccaucuuccu

SEQ ID NO: 2643609 - RNA, 19 nt, Artificial Sequence
  Description of Artificial Sequence: Synthetic oligonucleotide
cggcccuauuauauaggac

SEQ ID NO: 2643610 - RNA, 19 nt, Artificial Sequence
  Description of Artificial Sequence: Synthetic oligonucleotide
aucuuccuccggcccuauu

SEQ ID NO: 2643611 - RNA, 19 nt, Artificial Sequence
  Description of Artificial Sequence: Synthetic oligonucleotide
uggggcuggcgagguggga

SEQ ID NO: 2643612 - RNA, 19 nt, Artificial Sequence
  Description of Artificial Sequence: Synthetic oligonucleotide
cccuauuauauaggacgca

SEQ ID NO: 2643613 - RNA, 19 nt, Artificial Sequence
  Description of Artificial Sequence: Synthetic oligonucleotide
gguugguaacuguuuccuu

SEQ ID NO: 2643614 - RNA, 19 nt, Artificial Sequence
  Description of Artificial Sequence: Synthetic oligonucleotide
caucaccaauuugguaaua

SEQ ID NO: 2643615 - RNA, 19 nt, Artificial Sequence
  Description of Artificial Sequence: Synthetic oligonucleotide
ggucagggcggcacucuuc

SEQ ID NO: 2643616 - RNA, 19 nt, Artificial Sequence
  Description of Artificial Sequence: Synthetic oligonucleotide
cccuuguagaagauggauu

SEQ ID NO: 2643617 - RNA, 19 nt, Artificial Sequence
  Description of Artificial Sequence: Synthetic oligonucleotide
gcuggcgaggugggaauga

SEQ ID NO: 2643618 - RNA, 19 nt, Artificial Sequence
  Description of Artificial Sequence: Synthetic oligonucleotide
ggcuggcgaggugggaaug

SEQ ID NO: 2643619 - RNA, 19 nt, Artificial Sequence
  Description of Artificial Sequence: Synthetic oligonucleotide
ggggcuggcgaggugggaa

SEQ ID NO: 2643620 - RNA, 19 nt, Artificial Sequence
  Description of Artificial Sequence: Synthetic oligonucleotide
gugggugccugcccacuau

SEQ ID NO: 2643621 - RNA, 19 nt, Artificial Sequence
  Description of Artificial Sequence: Synthetic oligonucleotide
gcccacuaucuuauuauau

SEQ ID NO: 2643622 - RNA, 19 nt, Artificial Sequence
  Description of Artificial Sequence: Synthetic oligonucleotide
gguccugaaugaacccucu

SEQ ID NO: 2643623 - RNA, 19 nt, Artificial Sequence
  Description of Artificial Sequence: Synthetic oligonucleotide
ggggugugugaguaugguu

SEQ ID NO: 2643624 - RNA, 19 nt, Artificial Sequence
  Description of Artificial Sequence: Synthetic oligonucleotide
ccaggucagggcggcacuc

SEQ ID NO: 2643625 - RNA, 19 nt, Artificial Sequence
  Description of Artificial Sequence: Synthetic oligonucleotide
ccuccggcccuauuauaua

SEQ ID NO: 2643626 - RNA, 19 nt, Artificial Sequence
  Description of Artificial Sequence: Synthetic oligonucleotide
cggcacucuucucacagua

SEQ ID NO: 2643627 - RNA, 19 nt, Artificial Sequence
  Description of Artificial Sequence: Synthetic oligonucleotide
caggucagggcggcacucu

SEQ ID NO: 2643628 - RNA, 19 nt, Artificial Sequence
  Description of Artificial Sequence: Synthetic oligonucleotide
ggcuuuccaucuugcucau

SEQ ID NO: 2643629 - RNA, 19 nt, Artificial Sequence
  Description of Artificial Sequence: Synthetic oligonucleotide
gggcggcacucuucucaca

SEQ ID NO: 2643630 - RNA, 19 nt, Artificial Sequence
  Description of Artificial Sequence: Synthetic oligonucleotide
gccaggucagggcggcacu

SEQ ID NO: 2643631 - RNA, 19 nt, Artificial Sequence
  Description of Artificial Sequence: Synthetic oligonucleotide
gggcuggcgaggugggaau

SEQ ID NO: 2643632 - RNA, 19 nt, Artificial Sequence
  Description of Artificial Sequence: Synthetic oligonucleotide
gccccagguuugguuuugu

SEQ ID NO: 2643633 - RNA, 19 nt, Artificial Sequence
  Description of Artificial Sequence: Synthetic oligonucleotide
ccccagguuugguuuuguu

SEQ ID NO: 2643634 - RNA, 19 nt, Artificial Sequence
  Description of Artificial Sequence: Synthetic oligonucleotide
aaauaaauagcacaucugc

SEQ ID NO: 2643635 - RNA, 19 nt, Artificial Sequence
  Description of Artificial Sequence: Synthetic oligonucleotide
aaaugggagaaauuuaccc

SEQ ID NO: 2643636 - RNA, 19 nt, Artificial Sequence
  Description of Artificial Sequence: Synthetic oligonucleotide
aauuaaacccaaucuauac

SEQ ID NO: 2643637 - RNA, 19 nt, Artificial Sequence
  Description of Artificial Sequence: Synthetic oligonucleotide
aaugggagaaauuuacccc

SEQ ID NO: 2643638 - RNA, 19 nt, Artificial Sequence
  Description of Artificial Sequence: Synthetic oligonucleotide
ucugcuaucaaaauaauaa

SEQ ID NO: 2643639 - RNA, 19 nt, Artificial Sequence
  Description of Artificial Sequence: Synthetic oligonucleotide
aaauauacaaauuucugaa

SEQ ID NO: 2643640 - RNA, 19 nt, Artificial Sequence
  Description of Artificial Sequence: Synthetic oligonucleotide
aaucuauacagcuuucuag

SEQ ID NO: 2643641 - RNA, 19 nt, Artificial Sequence
  Description of Artificial Sequence: Synthetic oligonucleotide
aauaucauuggugugguuc

SEQ ID NO: 2643642 - RNA, 19 nt, Artificial Sequence
  Description of Artificial Sequence: Synthetic oligonucleotide
gagacaauuacacagaaca

SEQ ID NO: 2643643 - RNA, 19 nt, Artificial Sequence
  Description of Artificial Sequence: Synthetic oligonucleotide
gaaaauaucauuggugugg

SEQ ID NO: 2643644 - RNA, 19 nt, Artificial Sequence
  Description of Artificial Sequence: Synthetic oligonucleotide
auaaauuucaaguaucaca

SEQ ID NO: 2643645 - RNA, 19 nt, Artificial Sequence
  Description of Artificial Sequence: Synthetic oligonucleotide
aucaaucacacauugaaag

SEQ ID NO: 2643646 - RNA, 19 nt, Artificial Sequence
  Description of Artificial Sequence: Synthetic oligonucleotide
uuaaguuagucacagguga

SEQ ID NO: 2643647 - RNA, 19 nt, Artificial Sequence
  Description of Artificial Sequence: Synthetic oligonucleotide
uauacaaauuucugaaagg

SEQ ID NO: 2643648 - RNA, 19 nt, Artificial Sequence
  Description of Artificial Sequence: Synthetic oligonucleotide
uuuaaaagcuugcauagcu

SEQ ID NO: 2643649 - RNA, 19 nt, Artificial Sequence
  Description of Artificial Sequence: Synthetic oligonucleotide
aagacgugaagucacauca

SEQ ID NO: 2643650 - RNA, 19 nt, Artificial Sequence
  Description of Artificial Sequence: Synthetic oligonucleotide
uuucaaguaucacaaauga

SEQ ID NO: 2643651 - RNA, 19 nt, Artificial Sequence
  Description of Artificial Sequence: Synthetic oligonucleotide
aauaaauuucaaguaucac

SEQ ID NO: 2643652 - RNA, 19 nt, Artificial Sequence
  Description of Artificial Sequence: Synthetic oligonucleotide
aauaaauaaauagcacauc

SEQ ID NO: 2643653 - RNA, 19 nt, Artificial Sequence
  Description of Artificial Sequence: Synthetic oligonucleotide
uucucauaaaugaagggug

SEQ ID NO: 2643654 - RNA, 19 nt, Artificial Sequence
  Description of Artificial Sequence: Synthetic oligonucleotide
augccuaucugucucagcc

SEQ ID NO: 2643655 - RNA, 19 nt, Artificial Sequence
  Description of Artificial Sequence: Synthetic oligonucleotide
acuuaaguuagucacaggu

SEQ ID NO: 2643656 - RNA, 19 nt, Artificial Sequence
  Description of Artificial Sequence: Synthetic oligonucleotide
aacaauuaaacccaaucua

SEQ ID NO: 2643657 - RNA, 19 nt, Artificial Sequence
  Description of Artificial Sequence: Synthetic oligonucleotide
auaucauuggugugguucc

SEQ ID NO: 2643658 - RNA, 19 nt, Artificial Sequence
  Description of Artificial Sequence: Synthetic oligonucleotide
uguguuuugggucaagcug

SEQ ID NO: 2643659 - RNA, 19 nt, Artificial Sequence
  Description of Artificial Sequence: Synthetic oligonucleotide
ucuauguucuaagaguugg

SEQ ID NO: 2643660 - RNA, 19 nt, Artificial Sequence
  Description of Artificial Sequence: Synthetic oligonucleotide
uuuuauucguuguuuuggg

SEQ ID NO: 2643661 - RNA, 19 nt, Artificial Sequence
  Description of Artificial Sequence: Synthetic oligonucleotide
uaaauaaauagcacaucug

SEQ ID NO: 2643662 - RNA, 19 nt, Artificial Sequence
  Description of Artificial Sequence: Synthetic oligonucleotide
uauuguucuagcaacugca

SEQ ID NO: 2643663 - RNA, 19 nt, Artificial Sequence
  Description of Artificial Sequence: Synthetic oligonucleotide
uugagagagacaauuacac

SEQ ID NO: 2643664 - RNA, 19 nt, Artificial Sequence
  Description of Artificial Sequence: Synthetic oligonucleotide
uauucguuguuuugggugg

SEQ ID NO: 2643665 - RNA, 19 nt, Artificial Sequence
  Description of Artificial Sequence: Synthetic oligonucleotide
uguucuaagaguugguucu

SEQ ID NO: 2643666 - RNA, 19 nt, Artificial Sequence
  Description of Artificial Sequence: Synthetic oligonucleotide
aaucacacauugaaaggcc

SEQ ID NO: 2643667 - RNA, 19 nt, Artificial Sequence
  Description of Artificial Sequence: Synthetic oligonucleotide
uuauucguuguuuugggug

SEQ ID NO: 2643668 - RNA, 19 nt, Artificial Sequence
  Description of Artificial Sequence: Synthetic oligonucleotide
auuuuauucguuguuuugg

SEQ ID NO: 2643669 - RNA, 19 nt, Artificial Sequence
  Description of Artificial Sequence: Synthetic oligonucleotide
ucuagcaacugcaaaauau

SEQ ID NO: 2643670 - RNA, 19 nt, Artificial Sequence
  Description of Artificial Sequence: Synthetic oligonucleotide
auaaaugaaggguguugcc

SEQ ID NO: 2643671 - RNA, 19 nt, Artificial Sequence
  Description of Artificial Sequence: Synthetic oligonucleotide
uaagaguugguucuguaac

SEQ ID NO: 2643672 - RNA, 19 nt, Artificial Sequence
  Description of Artificial Sequence: Synthetic oligonucleotide
aguucugugagugaugcac

SEQ ID NO: 2643673 - RNA, 19 nt, Artificial Sequence
  Description of Artificial Sequence: Synthetic oligonucleotide
ugcuaucaaaauaauaaaa

SEQ ID NO: 2643674 - RNA, 19 nt, Artificial Sequence
  Description of Artificial Sequence: Synthetic oligonucleotide
aaaugaaggguguugccca

SEQ ID NO: 2643675 - RNA, 19 nt, Artificial Sequence
  Description of Artificial Sequence: Synthetic oligonucleotide
uauacauauuaaauaaaua

SEQ ID NO: 2643676 - RNA, 19 nt, Artificial Sequence
  Description of Artificial Sequence: Synthetic oligonucleotide
aauuucugaaagguguguc

SEQ ID NO: 2643677 - RNA, 19 nt, Artificial Sequence
  Description of Artificial Sequence: Synthetic oligonucleotide
aaguuagucacaggugacc

SEQ ID NO: 2643678 - RNA, 19 nt, Artificial Sequence
  Description of Artificial Sequence: Synthetic oligonucleotide
auugguccccauuuuauuc

SEQ ID NO: 2643679 - RNA, 19 nt, Artificial Sequence
  Description of Artificial Sequence: Synthetic oligonucleotide
uuuagcuuguccuacugac

SEQ ID NO: 2643680 - RNA, 19 nt, Artificial Sequence
  Description of Artificial Sequence: Synthetic oligonucleotide
acauugaaaggccccaaac

SEQ ID NO: 2643681 - RNA, 19 nt, Artificial Sequence
  Description of Artificial Sequence: Synthetic oligonucleotide
gacaauuacacagaacaug

SEQ ID NO: 2643682 - RNA, 19 nt, Artificial Sequence
  Description of Artificial Sequence: Synthetic oligonucleotide
uguccuguuuaaaagcuug

SEQ ID NO: 2643683 - RNA, 19 nt, Artificial Sequence
  Description of Artificial Sequence: Synthetic oligonucleotide
uguucuagcaacugcaaaa

SEQ ID NO: 2643684 - RNA, 19 nt, Artificial Sequence
  Description of Artificial Sequence: Synthetic oligonucleotide
ugagugaugcaccccaucc

SEQ ID NO: 2643685 - RNA, 19 nt, Artificial Sequence
  Description of Artificial Sequence: Synthetic oligonucleotide
caugguugaaggaaauggg

SEQ ID NO: 2643686 - RNA, 19 nt, Artificial Sequence
  Description of Artificial Sequence: Synthetic oligonucleotide
acagcuuucuaguuuuagg

SEQ ID NO: 2643687 - RNA, 19 nt, Artificial Sequence
  Description of Artificial Sequence: Synthetic oligonucleotide
auuaaacccaaucuauaca

SEQ ID NO: 2643688 - RNA, 19 nt, Artificial Sequence
  Description of Artificial Sequence: Synthetic oligonucleotide
acaaauuucugaaaggugu

SEQ ID NO: 2643689 - RNA, 19 nt, Artificial Sequence
  Description of Artificial Sequence: Synthetic oligonucleotide
agugaugcaccccauccac

SEQ ID NO: 2643690 - RNA, 19 nt, Artificial Sequence
  Description of Artificial Sequence: Synthetic oligonucleotide
gaagucaucaaucacacau

SEQ ID NO: 2643691 - RNA, 19 nt, Artificial Sequence
  Description of Artificial Sequence: Synthetic oligonucleotide
aucuauacagcuuucuagu

SEQ ID NO: 2643692 - RNA, 19 nt, Artificial Sequence
  Description of Artificial Sequence: Synthetic oligonucleotide
uuuuauuguucuagcaacu

SEQ ID NO: 2643693 - RNA, 19 nt, Artificial Sequence
  Description of Artificial Sequence: Synthetic oligonucleotide
aaauagcacaucugcuauc

SEQ ID NO: 2643694 - RNA, 19 nt, Artificial Sequence
  Description of Artificial Sequence: Synthetic oligonucleotide
uccuacugacuuaaguuag

SEQ ID NO: 2643695 - RNA, 19 nt, Artificial Sequence
  Description of Artificial Sequence: Synthetic oligonucleotide
uaaauagcacaucugcuau

SEQ ID NO: 2643696 - RNA, 19 nt, Artificial Sequence
  Description of Artificial Sequence: Synthetic oligonucleotide
cauugaaaggccccaaacc

SEQ ID NO: 2643697 - RNA, 19 nt, Artificial Sequence
  Description of Artificial Sequence: Synthetic oligonucleotide
aauagcacaucugcuauca

SEQ ID NO: 2643698 - RNA, 19 nt, Artificial Sequence
  Description of Artificial Sequence: Synthetic oligonucleotide
auaaauagcacaucugcua

SEQ ID NO: 2643699 - RNA, 19 nt, Artificial Sequence
  Description of Artificial Sequence: Synthetic oligonucleotide
auuacacagaacaugaagu

SEQ ID NO: 2643700 - RNA, 19 nt, Artificial Sequence
  Description of Artificial Sequence: Synthetic oligonucleotide
aguaucacaaaugaaaaua

SEQ ID NO: 2643701 - RNA, 19 nt, Artificial Sequence
  Description of Artificial Sequence: Synthetic oligonucleotide
uaaaugaaggguguugccc

SEQ ID NO: 2643702 - RNA, 19 nt, Artificial Sequence
  Description of Artificial Sequence: Synthetic oligonucleotide
ugaucuucuccacaggccu

SEQ ID NO: 2643703 - RNA, 19 nt, Artificial Sequence
  Description of Artificial Sequence: Synthetic oligonucleotide
uguguccuguuuaaaagcu

SEQ ID NO: 2643704 - RNA, 19 nt, Artificial Sequence
  Description of Artificial Sequence: Synthetic oligonucleotide
cuuaaguuagucacaggug

SEQ ID NO: 2643705 - RNA, 19 nt, Artificial Sequence
  Description of Artificial Sequence: Synthetic oligonucleotide
acaugaagucaucaaucac

SEQ ID NO: 2643706 - RNA, 19 nt, Artificial Sequence
  Description of Artificial Sequence: Synthetic oligonucleotide
uugguccccauuuuauucg

SEQ ID NO: 2643707 - RNA, 19 nt, Artificial Sequence
  Description of Artificial Sequence: Synthetic oligonucleotide
ucccuuauacauauuaaau

SEQ ID NO: 2643708 - RNA, 19 nt, Artificial Sequence
  Description of Artificial Sequence: Synthetic oligonucleotide
aguguggaaguucugugag

SEQ ID NO: 2643709 - RNA, 19 nt, Artificial Sequence
  Description of Artificial Sequence: Synthetic oligonucleotide
ugaaggguguugcccaugg

SEQ ID NO: 2643710 - RNA, 19 nt, Artificial Sequence
  Description of Artificial Sequence: Synthetic oligonucleotide
uauaucucaaccagguuuu

SEQ ID NO: 2643711 - RNA, 19 nt, Artificial Sequence
  Description of Artificial Sequence: Synthetic oligonucleotide
gacgugaagucacaucagg

SEQ ID NO: 2643712 - RNA, 19 nt, Artificial Sequence
  Description of Artificial Sequence: Synthetic oligonucleotide
ugacuuaaguuagucacag

SEQ ID NO: 2643713 - RNA, 19 nt, Artificial Sequence
  Description of Artificial Sequence: Synthetic oligonucleotide
acaauuacacagaacauga

SEQ ID NO: 2643714 - RNA, 19 nt, Artificial Sequence
  Description of Artificial Sequence: Synthetic oligonucleotide
caaucacacauugaaaggc

SEQ ID NO: 2643715 - RNA, 19 nt, Artificial Sequence
  Description of Artificial Sequence: Synthetic oligonucleotide
uuacacagaacaugaaguc

SEQ ID NO: 2643716 - RNA, 19 nt, Artificial Sequence
  Description of Artificial Sequence: Synthetic oligonucleotide
agucaucaaucacacauug

SEQ ID NO: 2643717 - RNA, 19 nt, Artificial Sequence
  Description of Artificial Sequence: Synthetic oligonucleotide
uguggaaguucugugagug

SEQ ID NO: 2643718 - RNA, 19 nt, Artificial Sequence
  Description of Artificial Sequence: Synthetic oligonucleotide
uuuaggcucccuuauacau

SEQ ID NO: 2643719 - RNA, 19 nt, Artificial Sequence
  Description of Artificial Sequence: Synthetic oligonucleotide
gaacaauuaaacccaaucu

SEQ ID NO: 2643720 - RNA, 19 nt, Artificial Sequence
  Description of Artificial Sequence: Synthetic oligonucleotide
aaguaucacaaaugaaaau

SEQ ID NO: 2643721 - RNA, 19 nt, Artificial Sequence
  Description of Artificial Sequence: Synthetic oligonucleotide
ucucauaaaugaagggugu

SEQ ID NO: 2643722 - RNA, 19 nt, Artificial Sequence
  Description of Artificial Sequence: Synthetic oligonucleotide
gaaguucugugagugaugc

SEQ ID NO: 2643723 - RNA, 19 nt, Artificial Sequence
  Description of Artificial Sequence: Synthetic oligonucleotide
uuugggucaagcuguauuc

SEQ ID NO: 2643724 - RNA, 19 nt, Artificial Sequence
  Description of Artificial Sequence: Synthetic oligonucleotide
auuccacccggucacaauc

SEQ ID NO: 2643725 - RNA, 19 nt, Artificial Sequence
  Description of Artificial Sequence: Synthetic oligonucleotide
ucucuauguucuaagaguu

SEQ ID NO: 2643726 - RNA, 19 nt, Artificial Sequence
  Description of Artificial Sequence: Synthetic oligonucleotide
caagcuguauuccacccgg

SEQ ID NO: 2643727 - RNA, 19 nt, Artificial Sequence
  Description of Artificial Sequence: Synthetic oligonucleotide
uuuauuguucuagcaacug

SEQ ID NO: 2643728 - RNA, 19 nt, Artificial Sequence
  Description of Artificial Sequence: Synthetic oligonucleotide
caggcaaagcuuuagcuug

SEQ ID NO: 2643729 - RNA, 19 nt, Artificial Sequence
  Description of Artificial Sequence: Synthetic oligonucleotide
uguccuacugacuuaaguu

SEQ ID NO: 2643730 - RNA, 19 nt, Artificial Sequence
  Description of Artificial Sequence: Synthetic oligonucleotide
uaucacaaaugaaaauauc

SEQ ID NO: 2643731 - RNA, 19 nt, Artificial Sequence
  Description of Artificial Sequence: Synthetic oligonucleotide
guuuuaggcucccuuauac

SEQ ID NO: 2643732 - RNA, 19 nt, Artificial Sequence
  Description of Artificial Sequence: Synthetic oligonucleotide
uccacaggccuucacaaga

SEQ ID NO: 2643733 - RNA, 19 nt, Artificial Sequence
  Description of Artificial Sequence: Synthetic oligonucleotide
agcuugcauagcuucuucc

SEQ ID NO: 2643734 - RNA, 19 nt, Artificial Sequence
  Description of Artificial Sequence: Synthetic oligonucleotide
agagucucuauguucuaag

SEQ ID NO: 2643735 - RNA, 19 nt, Artificial Sequence
  Description of Artificial Sequence: Synthetic oligonucleotide
ucacaagacgugaagucac

SEQ ID NO: 2643736 - RNA, 19 nt, Artificial Sequence
  Description of Artificial Sequence: Synthetic oligonucleotide
uguugcccaugguugaagg

SEQ ID NO: 2643737 - RNA, 19 nt, Artificial Sequence
  Description of Artificial Sequence: Synthetic oligonucleotide
caaauuucugaaaggugug

SEQ ID NO: 2643738 - RNA, 19 nt, Artificial Sequence
  Description of Artificial Sequence: Synthetic oligonucleotide
ucacacauugaaaggcccc

SEQ ID NO: 2643739 - RNA, 19 nt, Artificial Sequence
  Description of Artificial Sequence: Synthetic oligonucleotide
cauuuuauucguuguuuug

SEQ ID NO: 2643740 - RNA, 19 nt, Artificial Sequence
  Description of Artificial Sequence: Synthetic oligonucleotide
aucaggcaaagcuuuagcu

SEQ ID NO: 2643741 - RNA, 19 nt, Artificial Sequence
  Description of Artificial Sequence: Synthetic oligonucleotide
ugagagagacaauuacaca

SEQ ID NO: 2643742 - RNA, 19 nt, Artificial Sequence
  Description of Artificial Sequence: Synthetic oligonucleotide
uuagucacaggugaccaug

SEQ ID NO: 2643743 - RNA, 19 nt, Artificial Sequence
  Description of Artificial Sequence: Synthetic oligonucleotide
acaucugcuaucaaaauaa

SEQ ID NO: 2643744 - RNA, 19 nt, Artificial Sequence
  Description of Artificial Sequence: Synthetic oligonucleotide
ugaugcaccccauccaccc

SEQ ID NO: 2643745 - RNA, 19 nt, Artificial Sequence
  Description of Artificial Sequence: Synthetic oligonucleotide
uuuugggucaagcuguauu

SEQ ID NO: 2643746 - RNA, 19 nt, Artificial Sequence
  Description of Artificial Sequence: Synthetic oligonucleotide
uucacaagacgugaaguca

SEQ ID NO: 2643747 - RNA, 19 nt, Artificial Sequence
  Description of Artificial Sequence: Synthetic oligonucleotide
uucaaguaucacaaaugaa

SEQ ID NO: 2643748 - RNA, 19 nt, Artificial Sequence
  Description of Artificial Sequence: Synthetic oligonucleotide
aagcuugcauagcuucuuc

SEQ ID NO: 2643749 - RNA, 19 nt, Artificial Sequence
  Description of Artificial Sequence: Synthetic oligonucleotide
gaaaugggagaaauuuacc

SEQ ID NO: 2643750 - RNA, 19 nt, Artificial Sequence
  Description of Artificial Sequence: Synthetic oligonucleotide
guuguuuugggugggagug

SEQ ID NO: 2643751 - RNA, 19 nt, Artificial Sequence
  Description of Artificial Sequence: Synthetic oligonucleotide
uuuuaggcucccuuauaca

SEQ ID NO: 2643752 - RNA, 19 nt, Artificial Sequence
  Description of Artificial Sequence: Synthetic oligonucleotide
aaagguguguccuguuuaa

SEQ ID NO: 2643753 - RNA, 19 nt, Artificial Sequence
  Description of Artificial Sequence: Synthetic oligonucleotide
ucuaguuuuaggcucccuu

SEQ ID NO: 2643754 - RNA, 19 nt, Artificial Sequence
  Description of Artificial Sequence: Synthetic oligonucleotide
acuguguuuugggucaagc

SEQ ID NO: 2643755 - RNA, 19 nt, Artificial Sequence
  Description of Artificial Sequence: Synthetic oligonucleotide
acaaucacaaucuccugau

SEQ ID NO: 2643756 - RNA, 19 nt, Artificial Sequence
  Description of Artificial Sequence: Synthetic oligonucleotide
cuugagagagacaauuaca

SEQ ID NO: 2643757 - RNA, 19 nt, Artificial Sequence
  Description of Artificial Sequence: Synthetic oligonucleotide
uuguccuacugacuuaagu

SEQ ID NO: 2643758 - RNA, 19 nt, Artificial Sequence
  Description of Artificial Sequence: Synthetic oligonucleotide
ucacaggugaccaugccua

SEQ ID NO: 2643759 - RNA, 19 nt, Artificial Sequence
  Description of Artificial Sequence: Synthetic oligonucleotide
uaaguuagucacaggugac

SEQ ID NO: 2643760 - RNA, 19 nt, Artificial Sequence
  Description of Artificial Sequence: Synthetic oligonucleotide
cuucacaagacgugaaguc

SEQ ID NO: 2643761 - RNA, 19 nt, Artificial Sequence
  Description of Artificial Sequence: Synthetic oligonucleotide
uuuauucguuguuuugggu

SEQ ID NO: 2643762 - RNA, 19 nt, Artificial Sequence
  Description of Artificial Sequence: Synthetic oligonucleotide
acaauuaaacccaaucuau

SEQ ID NO: 2643763 - RNA, 19 nt, Artificial Sequence
  Description of Artificial Sequence: Synthetic oligonucleotide
uuaaaagcuugcauagcuu

SEQ ID NO: 2643764 - RNA, 19 nt, Artificial Sequence
  Description of Artificial Sequence: Synthetic oligonucleotide
gguguguccuguuuaaaag

SEQ ID NO: 2643765 - RNA, 19 nt, Artificial Sequence
  Description of Artificial Sequence: Synthetic oligonucleotide
aaggguguugcccaugguu

SEQ ID NO: 2643766 - RNA, 19 nt, Artificial Sequence
  Description of Artificial Sequence: Synthetic oligonucleotide
aucacacauugaaaggccc

SEQ ID NO: 2643767 - RNA, 19 nt, Artificial Sequence
  Description of Artificial Sequence: Synthetic oligonucleotide
agcuuucuaguuuuaggcu

SEQ ID NO: 2643768 - RNA, 19 nt, Artificial Sequence
  Description of Artificial Sequence: Synthetic oligonucleotide
cuguuuaaaagcuugcaua

SEQ ID NO: 2643769 - RNA, 19 nt, Artificial Sequence
  Description of Artificial Sequence: Synthetic oligonucleotide
ucaggcaaagcuuuagcuu

SEQ ID NO: 2643770 - RNA, 19 nt, Artificial Sequence
  Description of Artificial Sequence: Synthetic oligonucleotide
acgugaagucacaucaggc

SEQ ID NO: 2643771 - RNA, 19 nt, Artificial Sequence
  Description of Artificial Sequence: Synthetic oligonucleotide
uugaaaggccccaaaccaa

SEQ ID NO: 2643772 - RNA, 19 nt, Artificial Sequence
  Description of Artificial Sequence: Synthetic oligonucleotide
uuagcuuguccuacugacu

SEQ ID NO: 2643773 - RNA, 19 nt, Artificial Sequence
  Description of Artificial Sequence: Synthetic oligonucleotide
ugaaaggccccaaaccaau

SEQ ID NO: 2643774 - RNA, 19 nt, Artificial Sequence
  Description of Artificial Sequence: Synthetic oligonucleotide
gaagucacaucaggcaaag

SEQ ID NO: 2643775 - RNA, 19 nt, Artificial Sequence
  Description of Artificial Sequence: Synthetic oligonucleotide
agucacaggugaccaugcc

SEQ ID NO: 2643776 - RNA, 19 nt, Artificial Sequence
  Description of Artificial Sequence: Synthetic oligonucleotide
uucugugagugaugcaccc

SEQ ID NO: 2643777 - RNA, 19 nt, Artificial Sequence
  Description of Artificial Sequence: Synthetic oligonucleotide
gacuuaaguuagucacagg

SEQ ID NO: 2643778 - RNA, 19 nt, Artificial Sequence
  Description of Artificial Sequence: Synthetic oligonucleotide
ucacaucaggcaaagcuuu

SEQ ID NO: 2643779 - RNA, 19 nt, Artificial Sequence
  Description of Artificial Sequence: Synthetic oligonucleotide
cuguauuccacccggucac

SEQ ID NO: 2643780 - RNA, 19 nt, Artificial Sequence
  Description of Artificial Sequence: Synthetic oligonucleotide
ggaaaugggagaaauuuac

SEQ ID NO: 2643781 - RNA, 19 nt, Artificial Sequence
  Description of Artificial Sequence: Synthetic oligonucleotide
agcuguauuccacccgguc

SEQ ID NO: 2643782 - RNA, 19 nt, Artificial Sequence
  Description of Artificial Sequence: Synthetic oligonucleotide
uaguuuuaggcucccuuau

SEQ ID NO: 2643783 - RNA, 19 nt, Artificial Sequence
  Description of Artificial Sequence: Synthetic oligonucleotide
uaggcucccuuauacauau

SEQ ID NO: 2643784 - RNA, 19 nt, Artificial Sequence
  Description of Artificial Sequence: Synthetic oligonucleotide
guauaucucaaccagguuu

SEQ ID NO: 2643785 - RNA, 19 nt, Artificial Sequence
  Description of Artificial Sequence: Synthetic oligonucleotide
agagacaauuacacagaac

SEQ ID NO: 2643786 - RNA, 19 nt, Artificial Sequence
  Description of Artificial Sequence: Synthetic oligonucleotide
uacagcuuucuaguuuuag

SEQ ID NO: 2643787 - RNA, 19 nt, Artificial Sequence
  Description of Artificial Sequence: Synthetic oligonucleotide
ucugaaagguguguccugu

SEQ ID NO: 2643788 - RNA, 19 nt, Artificial Sequence
  Description of Artificial Sequence: Synthetic oligonucleotide
gucaagcuguauuccaccc

SEQ ID NO: 2643789 - RNA, 19 nt, Artificial Sequence
  Description of Artificial Sequence: Synthetic oligonucleotide
uccuguuuaaaagcuugca

SEQ ID NO: 2643790 - RNA, 19 nt, Artificial Sequence
  Description of Artificial Sequence: Synthetic oligonucleotide
gucucuauguucuaagagu

SEQ ID NO: 2643791 - RNA, 19 nt, Artificial Sequence
  Description of Artificial Sequence: Synthetic oligonucleotide
aguuagucacaggugacca

SEQ ID NO: 2643792 - RNA, 19 nt, Artificial Sequence
  Description of Artificial Sequence: Synthetic oligonucleotide
ccaugguugaaggaaaugg

SEQ ID NO: 2643793 - RNA, 19 nt, Artificial Sequence
  Description of Artificial Sequence: Synthetic oligonucleotide
uagucacaggugaccaugc

SEQ ID NO: 2643794 - RNA, 19 nt, Artificial Sequence
  Description of Artificial Sequence: Synthetic oligonucleotide
gaguguggaaguucuguga

SEQ ID NO: 2643795 - RNA, 19 nt, Artificial Sequence
  Description of Artificial Sequence: Synthetic oligonucleotide
caaagcuuuagcuuguccu

SEQ ID NO: 2643796 - RNA, 19 nt, Artificial Sequence
  Description of Artificial Sequence: Synthetic oligonucleotide
uauguucuaagaguugguu

SEQ ID NO: 2643797 - RNA, 19 nt, Artificial Sequence
  Description of Artificial Sequence: Synthetic oligonucleotide
ucuauacagcuuucuaguu

SEQ ID NO: 2643798 - RNA, 19 nt, Artificial Sequence
  Description of Artificial Sequence: Synthetic oligonucleotide
guccccauuuuauucguug

SEQ ID NO: 2643799 - RNA, 19 nt, Artificial Sequence
  Description of Artificial Sequence: Synthetic oligonucleotide
ccaaaacaaauaugcaaag

SEQ ID NO: 2643800 - RNA, 19 nt, Artificial Sequence
  Description of Artificial Sequence: Synthetic oligonucleotide
uuaggcucccuuauacaua

SEQ ID NO: 2643801 - RNA, 19 nt, Artificial Sequence
  Description of Artificial Sequence: Synthetic oligonucleotide
aaugaaggguguugcccau

SEQ ID NO: 2643802 - RNA, 19 nt, Artificial Sequence
  Description of Artificial Sequence: Synthetic oligonucleotide
cuagcaacugcaaaauaua

SEQ ID NO: 2643803 - RNA, 19 nt, Artificial Sequence
  Description of Artificial Sequence: Synthetic oligonucleotide
uguuuugggugggagugug

SEQ ID NO: 2643804 - RNA, 19 nt, Artificial Sequence
  Description of Artificial Sequence: Synthetic oligonucleotide
agguguguccuguuuaaaa

SEQ ID NO: 2643805 - RNA, 19 nt, Artificial Sequence
  Description of Artificial Sequence: Synthetic oligonucleotide
agcaacugcaaaauauaca

SEQ ID NO: 2643806 - RNA, 19 nt, Artificial Sequence
  Description of Artificial Sequence: Synthetic oligonucleotide
cucuauguucuaagaguug

SEQ ID NO: 2643807 - RNA, 19 nt, Artificial Sequence
  Description of Artificial Sequence: Synthetic oligonucleotide
ucauuggugugguuccaac

SEQ ID NO: 2643808 - RNA, 19 nt, Artificial Sequence
  Description of Artificial Sequence: Synthetic oligonucleotide
uccccauuuuauucguugu

SEQ ID NO: 2643809 - RNA, 19 nt, Artificial Sequence
  Description of Artificial Sequence: Synthetic oligonucleotide
uuggugugguuccaacagu

SEQ ID NO: 2643810 - RNA, 19 nt, Artificial Sequence
  Description of Artificial Sequence: Synthetic oligonucleotide
caagacgugaagucacauc

SEQ ID NO: 2643811 - RNA, 19 nt, Artificial Sequence
  Description of Artificial Sequence: Synthetic oligonucleotide
ucuaagaguugguucugua

SEQ ID NO: 2643812 - RNA, 19 nt, Artificial Sequence
  Description of Artificial Sequence: Synthetic oligonucleotide
gaccaugccuaucugucuc

SEQ ID NO: 2643813 - RNA, 19 nt, Artificial Sequence
  Description of Artificial Sequence: Synthetic oligonucleotide
guugaaggaaaugggagaa

SEQ ID NO: 2643814 - RNA, 19 nt, Artificial Sequence
  Description of Artificial Sequence: Synthetic oligonucleotide
uggugugguuccaacaguu

SEQ ID NO: 2643815 - RNA, 19 nt, Artificial Sequence
  Description of Artificial Sequence: Synthetic oligonucleotide
gcuuucuaguuuuaggcuc

SEQ ID NO: 2643816 - RNA, 19 nt, Artificial Sequence
  Description of Artificial Sequence: Synthetic oligonucleotide
gguugaaggaaaugggaga

SEQ ID NO: 2643817 - RNA, 19 nt, Artificial Sequence
  Description of Artificial Sequence: Synthetic oligonucleotide
cuaagaguugguucuguaa

SEQ ID NO: 2643818 - RNA, 19 nt, Artificial Sequence
  Description of Artificial Sequence: Synthetic oligonucleotide
augguugaaggaaauggga

SEQ ID NO: 2643819 - RNA, 19 nt, Artificial Sequence
  Description of Artificial Sequence: Synthetic oligonucleotide
uugggucaagcuguauucc

SEQ ID NO: 2643820 - RNA, 19 nt, Artificial Sequence
  Description of Artificial Sequence: Synthetic oligonucleotide
uugcccaugguugaaggaa

SEQ ID NO: 2643821 - RNA, 19 nt, Artificial Sequence
  Description of Artificial Sequence: Synthetic oligonucleotide
caauuaaacccaaucuaua

SEQ ID NO: 2643822 - RNA, 19 nt, Artificial Sequence
  Description of Artificial Sequence: Synthetic oligonucleotide
gauccugaucuucuccaca

SEQ ID NO: 2643823 - RNA, 19 nt, Artificial Sequence
  Description of Artificial Sequence: Synthetic oligonucleotide
cuugcauagcuucuuccca

SEQ ID NO: 2643824 - RNA, 19 nt, Artificial Sequence
  Description of Artificial Sequence: Synthetic oligonucleotide
uuccacccggucacaauca

SEQ ID NO: 2643825 - RNA, 19 nt, Artificial Sequence
  Description of Artificial Sequence: Synthetic oligonucleotide
cugacuuaaguuagucaca

SEQ ID NO: 2643826 - RNA, 19 nt, Artificial Sequence
  Description of Artificial Sequence: Synthetic oligonucleotide
uucuagcaacugcaaaaua

SEQ ID NO: 2643827 - RNA, 19 nt, Artificial Sequence
  Description of Artificial Sequence: Synthetic oligonucleotide
guccuacugacuuaaguua

SEQ ID NO: 2643828 - RNA, 19 nt, Artificial Sequence
  Description of Artificial Sequence: Synthetic oligonucleotide
augcaccccauccacccag

SEQ ID NO: 2643829 - RNA, 19 nt, Artificial Sequence
  Description of Artificial Sequence: Synthetic oligonucleotide
ugcccaugguugaaggaaa

SEQ ID NO: 2643830 - RNA, 19 nt, Artificial Sequence
  Description of Artificial Sequence: Synthetic oligonucleotide
cuaguuuuaggcucccuua

SEQ ID NO: 2643831 - RNA, 19 nt, Artificial Sequence
  Description of Artificial Sequence: Synthetic oligonucleotide
ccuugagagagacaauuac

SEQ ID NO: 2643832 - RNA, 19 nt, Artificial Sequence
  Description of Artificial Sequence: Synthetic oligonucleotide
ucguuguuuugggugggag

SEQ ID NO: 2643833 - RNA, 19 nt, Artificial Sequence
  Description of Artificial Sequence: Synthetic oligonucleotide
cuacugacuuaaguuaguc

SEQ ID NO: 2643834 - RNA, 19 nt, Artificial Sequence
  Description of Artificial Sequence: Synthetic oligonucleotide
ggucaagcuguauuccacc

SEQ ID NO: 2643835 - RNA, 19 nt, Artificial Sequence
  Description of Artificial Sequence: Synthetic oligonucleotide
aaguucugugagugaugca

SEQ ID NO: 2643836 - RNA, 19 nt, Artificial Sequence
  Description of Artificial Sequence: Synthetic oligonucleotide
caucaaucacacauugaaa

SEQ ID NO: 2643837 - RNA, 19 nt, Artificial Sequence
  Description of Artificial Sequence: Synthetic oligonucleotide
aagucaucaaucacacauu

SEQ ID NO: 2643838 - RNA, 19 nt, Artificial Sequence
  Description of Artificial Sequence: Synthetic oligonucleotide
ggaguguggaaguucugug

SEQ ID NO: 2643839 - RNA, 19 nt, Artificial Sequence
  Description of Artificial Sequence: Synthetic oligonucleotide
ucugugagugaugcacccc

SEQ ID NO: 2643840 - RNA, 19 nt, Artificial Sequence
  Description of Artificial Sequence: Synthetic oligonucleotide
aggccccaaaccaaugaac

SEQ ID NO: 2643841 - RNA, 19 nt, Artificial Sequence
  Description of Artificial Sequence: Synthetic oligonucleotide
aguuuuaggcucccuuaua

SEQ ID NO: 2643842 - RNA, 19 nt, Artificial Sequence
  Description of Artificial Sequence: Synthetic oligonucleotide
cacccggucacaaucacaa

SEQ ID NO: 2643843 - RNA, 19 nt, Artificial Sequence
  Description of Artificial Sequence: Synthetic oligonucleotide
auucguuguuuuggguggg

SEQ ID NO: 2643844 - RNA, 19 nt, Artificial Sequence
  Description of Artificial Sequence: Synthetic oligonucleotide
cacaggccuucacaagacg

SEQ ID NO: 2643845 - RNA, 19 nt, Artificial Sequence
  Description of Artificial Sequence: Synthetic oligonucleotide
gugaccaugccuaucuguc

SEQ ID NO: 2643846 - RNA, 19 nt, Artificial Sequence
  Description of Artificial Sequence: Synthetic oligonucleotide
uucuaagaguugguucugu

SEQ ID NO: 2643847 - RNA, 19 nt, Artificial Sequence
  Description of Artificial Sequence: Synthetic oligonucleotide
cauuggugugguuccaaca

SEQ ID NO: 2643848 - RNA, 19 nt, Artificial Sequence
  Description of Artificial Sequence: Synthetic oligonucleotide
aaauaucauuggugugguu

SEQ ID NO: 2643849 - RNA, 19 nt, Artificial Sequence
  Description of Artificial Sequence: Synthetic oligonucleotide
acaaucuccugauccugau

SEQ ID NO: 2643850 - RNA, 19 nt, Artificial Sequence
  Description of Artificial Sequence: Synthetic oligonucleotide
cacaucugcuaucaaaaua

SEQ ID NO: 2643851 - RNA, 19 nt, Artificial Sequence
  Description of Artificial Sequence: Synthetic oligonucleotide
uguuuugggucaagcugua

SEQ ID NO: 2643852 - RNA, 19 nt, Artificial Sequence
  Description of Artificial Sequence: Synthetic oligonucleotide
ugccuaucugucucagccu

SEQ ID NO: 2643853 - RNA, 19 nt, Artificial Sequence
  Description of Artificial Sequence: Synthetic oligonucleotide
cugugagugaugcacccca

SEQ ID NO: 2643854 - RNA, 19 nt, Artificial Sequence
  Description of Artificial Sequence: Synthetic oligonucleotide
cuuuagcuuguccuacuga

SEQ ID NO: 2643855 - RNA, 19 nt, Artificial Sequence
  Description of Artificial Sequence: Synthetic oligonucleotide
uuucuaguuuuaggcuccc

SEQ ID NO: 2643856 - RNA, 19 nt, Artificial Sequence
  Description of Artificial Sequence: Synthetic oligonucleotide
guaucacaaaugaaaauau

SEQ ID NO: 2643857 - RNA, 19 nt, Artificial Sequence
  Description of Artificial Sequence: Synthetic oligonucleotide
ccagucacuguguuuuggg

SEQ ID NO: 2643858 - RNA, 19 nt, Artificial Sequence
  Description of Artificial Sequence: Synthetic oligonucleotide
caugccuaucugucucagc

SEQ ID NO: 2643859 - RNA, 19 nt, Artificial Sequence
  Description of Artificial Sequence: Synthetic oligonucleotide
agacaauuacacagaacau

SEQ ID NO: 2643860 - RNA, 19 nt, Artificial Sequence
  Description of Artificial Sequence: Synthetic oligonucleotide
uauuccacccggucacaau

SEQ ID NO: 2643861 - RNA, 19 nt, Artificial Sequence
  Description of Artificial Sequence: Synthetic oligonucleotide
uuugggugggaguguggaa

SEQ ID NO: 2643862 - RNA, 19 nt, Artificial Sequence
  Description of Artificial Sequence: Synthetic oligonucleotide
ugguccccauuuuauucgu

SEQ ID NO: 2643863 - RNA, 19 nt, Artificial Sequence
  Description of Artificial Sequence: Synthetic oligonucleotide
gcuguauuccacccgguca

SEQ ID NO: 2643864 - RNA, 19 nt, Artificial Sequence
  Description of Artificial Sequence: Synthetic oligonucleotide
cuuguccuacugacuuaag

SEQ ID NO: 2643865 - RNA, 19 nt, Artificial Sequence
  Description of Artificial Sequence: Synthetic oligonucleotide
acauugguccccauuuuau

SEQ ID NO: 2643866 - RNA, 19 nt, Artificial Sequence
  Description of Artificial Sequence: Synthetic oligonucleotide
cuccacaggccuucacaag

SEQ ID NO: 2643867 - RNA, 19 nt, Artificial Sequence
  Description of Artificial Sequence: Synthetic oligonucleotide
uaucauuggugugguucca

SEQ ID NO: 2643868 - RNA, 19 nt, Artificial Sequence
  Description of Artificial Sequence: Synthetic oligonucleotide
guucuaagaguugguucug

SEQ ID NO: 2643869 - RNA, 19 nt, Artificial Sequence
  Description of Artificial Sequence: Synthetic oligonucleotide
auuguucuagcaacugcaa

SEQ ID NO: 2643870 - RNA, 19 nt, Artificial Sequence
  Description of Artificial Sequence: Synthetic oligonucleotide
cacaaucuccugauccuga

SEQ ID NO: 2643871 - RNA, 19 nt, Artificial Sequence
  Description of Artificial Sequence: Synthetic oligonucleotide
acaggugaccaugccuauc

SEQ ID NO: 2643872 - RNA, 19 nt, Artificial Sequence
  Description of Artificial Sequence: Synthetic oligonucleotide
uccacccggucacaaucac

SEQ ID NO: 2643873 - RNA, 19 nt, Artificial Sequence
  Description of Artificial Sequence: Synthetic oligonucleotide
guguuuugggucaagcugu

SEQ ID NO: 2643874 - RNA, 19 nt, Artificial Sequence
  Description of Artificial Sequence: Synthetic oligonucleotide
agacgugaagucacaucag

SEQ ID NO: 2643875 - RNA, 19 nt, Artificial Sequence
  Description of Artificial Sequence: Synthetic oligonucleotide
aggaaaugggagaaauuua

SEQ ID NO: 2643876 - RNA, 19 nt, Artificial Sequence
  Description of Artificial Sequence: Synthetic oligonucleotide
accaugccuaucugucuca

SEQ ID NO: 2643877 - RNA, 19 nt, Artificial Sequence
  Description of Artificial Sequence: Synthetic oligonucleotide
ugggaguguggaaguucug

SEQ ID NO: 2643878 - RNA, 19 nt, Artificial Sequence
  Description of Artificial Sequence: Synthetic oligonucleotide
ccugauccugaucuucucc

SEQ ID NO: 2643879 - RNA, 19 nt, Artificial Sequence
  Description of Artificial Sequence: Synthetic oligonucleotide
gcaaagcuuuagcuugucc

SEQ ID NO: 2643880 - RNA, 19 nt, Artificial Sequence
  Description of Artificial Sequence: Synthetic oligonucleotide
gcuuuagcuuguccuacug

SEQ ID NO: 2643881 - RNA, 19 nt, Artificial Sequence
  Description of Artificial Sequence: Synthetic oligonucleotide
caacugcaaaauauacaaa

SEQ ID NO: 2643882 - RNA, 19 nt, Artificial Sequence
  Description of Artificial Sequence: Synthetic oligonucleotide
uguauuccacccggucaca

SEQ ID NO: 2643883 - RNA, 19 nt, Artificial Sequence
  Description of Artificial Sequence: Synthetic oligonucleotide
gccuucacaagacgugaag

SEQ ID NO: 2643884 - RNA, 19 nt, Artificial Sequence
  Description of Artificial Sequence: Synthetic oligonucleotide
caaucuccugauccugauc

SEQ ID NO: 2643885 - RNA, 19 nt, Artificial Sequence
  Description of Artificial Sequence: Synthetic oligonucleotide
guugcccaugguugaagga

SEQ ID NO: 2643886 - RNA, 19 nt, Artificial Sequence
  Description of Artificial Sequence: Synthetic oligonucleotide
uccugauccugaucuucuc

SEQ ID NO: 2643887 - RNA, 19 nt, Artificial Sequence
  Description of Artificial Sequence: Synthetic oligonucleotide
aggccuucacaagacguga

SEQ ID NO: 2643888 - RNA, 19 nt, Artificial Sequence
  Description of Artificial Sequence: Synthetic oligonucleotide
ccccaaaacaaauaugcaa

SEQ ID NO: 2643889 - RNA, 19 nt, Artificial Sequence
  Description of Artificial Sequence: Synthetic oligonucleotide
ugagagucucuauguucua

SEQ ID NO: 2643890 - RNA, 19 nt, Artificial Sequence
  Description of Artificial Sequence: Synthetic oligonucleotide
gagagucucuauguucuaa

SEQ ID NO: 2643891 - RNA, 19 nt, Artificial Sequence
  Description of Artificial Sequence: Synthetic oligonucleotide
aagguguguccuguuuaaa

SEQ ID NO: 2643892 - RNA, 19 nt, Artificial Sequence
  Description of Artificial Sequence: Synthetic oligonucleotide
gucacaggugaccaugccu

SEQ ID NO: 2643893 - RNA, 19 nt, Artificial Sequence
  Description of Artificial Sequence: Synthetic oligonucleotide
acaagacgugaagucacau

SEQ ID NO: 2643894 - RNA, 19 nt, Artificial Sequence
  Description of Artificial Sequence: Synthetic oligonucleotide
cccggucacaaucacaauc

SEQ ID NO: 2643895 - RNA, 19 nt, Artificial Sequence
  Description of Artificial Sequence: Synthetic oligonucleotide
cacacauugaaaggcccca

SEQ ID NO: 2643896 - RNA, 19 nt, Artificial Sequence
  Description of Artificial Sequence: Synthetic oligonucleotide
gucaucaaucacacauuga

SEQ ID NO: 2643897 - RNA, 19 nt, Artificial Sequence
  Description of Artificial Sequence: Synthetic oligonucleotide
cuaucugucucagccuuga

SEQ ID NO: 2643898 - RNA, 19 nt, Artificial Sequence
  Description of Artificial Sequence: Synthetic oligonucleotide
cacaagacgugaagucaca

SEQ ID NO: 2643899 - RNA, 19 nt, Artificial Sequence
  Description of Artificial Sequence: Synthetic oligonucleotide
ggcucccuuauacauauua

SEQ ID NO: 2643900 - RNA, 19 nt, Artificial Sequence
  Description of Artificial Sequence: Synthetic oligonucleotide
gaugcaccccauccaccca

SEQ ID NO: 2643901 - RNA, 19 nt, Artificial Sequence
  Description of Artificial Sequence: Synthetic oligonucleotide
gugagugaugcaccccauc

SEQ ID NO: 2643902 - RNA, 19 nt, Artificial Sequence
  Description of Artificial Sequence: Synthetic oligonucleotide
uucguuguuuuggguggga

SEQ ID NO: 2643903 - RNA, 19 nt, Artificial Sequence
  Description of Artificial Sequence: Synthetic oligonucleotide
cuauacagcuuucuaguuu

SEQ ID NO: 2643904 - RNA, 19 nt, Artificial Sequence
  Description of Artificial Sequence: Synthetic oligonucleotide
ggccccaaaccaaugaaca

SEQ ID NO: 2643905 - RNA, 19 nt, Artificial Sequence
  Description of Artificial Sequence: Synthetic oligonucleotide
cuguguuuugggucaagcu

SEQ ID NO: 2643906 - RNA, 19 nt, Artificial Sequence
  Description of Artificial Sequence: Synthetic oligonucleotide
auagcacaucugcuaucaa

SEQ ID NO: 2643907 - RNA, 19 nt, Artificial Sequence
  Description of Artificial Sequence: Synthetic oligonucleotide
guguugcccaugguugaag

SEQ ID NO: 2643908 - RNA, 19 nt, Artificial Sequence
  Description of Artificial Sequence: Synthetic oligonucleotide
guggaaguucugugaguga

SEQ ID NO: 2643909 - RNA, 19 nt, Artificial Sequence
  Description of Artificial Sequence: Synthetic oligonucleotide
caggugaccaugccuaucu

SEQ ID NO: 2643910 - RNA, 19 nt, Artificial Sequence
  Description of Artificial Sequence: Synthetic oligonucleotide
gugaugcaccccauccacc

SEQ ID NO: 2643911 - RNA, 19 nt, Artificial Sequence
  Description of Artificial Sequence: Synthetic oligonucleotide
cuauguucuaagaguuggu

SEQ ID NO: 2643912 - RNA, 19 nt, Artificial Sequence
  Description of Artificial Sequence: Synthetic oligonucleotide
uucuaguuuuaggcucccu

SEQ ID NO: 2643913 - RNA, 19 nt, Artificial Sequence
  Description of Artificial Sequence: Synthetic oligonucleotide
agcuuguccuacugacuua

SEQ ID NO: 2643914 - RNA, 19 nt, Artificial Sequence
  Description of Artificial Sequence: Synthetic oligonucleotide
aucauuggugugguuccaa

SEQ ID NO: 2643915 - RNA, 19 nt, Artificial Sequence
  Description of Artificial Sequence: Synthetic oligonucleotide
acccagucacuguguuuug

SEQ ID NO: 2643916 - RNA, 19 nt, Artificial Sequence
  Description of Artificial Sequence: Synthetic oligonucleotide
augaaggguguugcccaug

SEQ ID NO: 2643917 - RNA, 19 nt, Artificial Sequence
  Description of Artificial Sequence: Synthetic oligonucleotide
cuucuccacaggccuucac

SEQ ID NO: 2643918 - RNA, 19 nt, Artificial Sequence
  Description of Artificial Sequence: Synthetic oligonucleotide
gucacaucaggcaaagcuu

SEQ ID NO: 2643919 - RNA, 19 nt, Artificial Sequence
  Description of Artificial Sequence: Synthetic oligonucleotide
gggucaagcuguauuccac

SEQ ID NO: 2643920 - RNA, 19 nt, Artificial Sequence
  Description of Artificial Sequence: Synthetic oligonucleotide
ggugaccaugccuaucugu

SEQ ID NO: 2643921 - RNA, 19 nt, Artificial Sequence
  Description of Artificial Sequence: Synthetic oligonucleotide
gugggaguguggaaguucu

SEQ ID NO: 2643922 - RNA, 19 nt, Artificial Sequence
  Description of Artificial Sequence: Synthetic oligonucleotide
ggugggaguguggaaguuc

SEQ ID NO: 2643923 - RNA, 19 nt, Artificial Sequence
  Description of Artificial Sequence: Synthetic oligonucleotide
ggguguugcccaugguuga

SEQ ID NO: 2643924 - RNA, 19 nt, Artificial Sequence
  Description of Artificial Sequence: Synthetic oligonucleotide
cagucacuguguuuugggu

SEQ ID NO: 2643925 - RNA, 19 nt, Artificial Sequence
  Description of Artificial Sequence: Synthetic oligonucleotide
ucacuguguuuugggucaa

SEQ ID NO: 2643926 - RNA, 19 nt, Artificial Sequence
  Description of Artificial Sequence: Synthetic oligonucleotide
ccggucacaaucacaaucu

SEQ ID NO: 2643927 - RNA, 19 nt, Artificial Sequence
  Description of Artificial Sequence: Synthetic oligonucleotide
gcuuguccuacugacuuaa

SEQ ID NO: 2643928 - RNA, 19 nt, Artificial Sequence
  Description of Artificial Sequence: Synthetic oligonucleotide
guguggaaguucugugagu

SEQ ID NO: 2643929 - RNA, 19 nt, Artificial Sequence
  Description of Artificial Sequence: Synthetic oligonucleotide
cauugguccccauuuuauu

SEQ ID NO: 2643930 - RNA, 19 nt, Artificial Sequence
  Description of Artificial Sequence: Synthetic oligonucleotide
ccuaucugucucagccuug

SEQ ID NO: 2643931 - RNA, 19 nt, Artificial Sequence
  Description of Artificial Sequence: Synthetic oligonucleotide
guauuccacccggucacaa

SEQ ID NO: 2643932 - RNA, 19 nt, Artificial Sequence
  Description of Artificial Sequence: Synthetic oligonucleotide
caucugcuaucaaaauaau

SEQ ID NO: 2643933 - RNA, 19 nt, Artificial Sequence
  Description of Artificial Sequence: Synthetic oligonucleotide
cccagucacuguguuuugg

SEQ ID NO: 2643934 - RNA, 19 nt, Artificial Sequence
  Description of Artificial Sequence: Synthetic oligonucleotide
ccuguuuaaaagcuugcau

SEQ ID NO: 2643935 - RNA, 19 nt, Artificial Sequence
  Description of Artificial Sequence: Synthetic oligonucleotide
gccccaaaccaaugaacaa

SEQ ID NO: 2643936 - RNA, 19 nt, Artificial Sequence
  Description of Artificial Sequence: Synthetic oligonucleotide
gggaguguggaaguucugu

SEQ ID NO: 2643937 - RNA, 19 nt, Artificial Sequence
  Description of Artificial Sequence: Synthetic oligonucleotide
cccaugguugaaggaaaug

SEQ ID NO: 2643938 - RNA, 19 nt, Artificial Sequence
  Description of Artificial Sequence: Synthetic oligonucleotide
gguauaucucaaccagguu

SEQ ID NO: 2643939 - RNA, 19 nt, Artificial Sequence
  Description of Artificial Sequence: Synthetic oligonucleotide
ccauuuuauucguuguuuu

SEQ ID NO: 2643940 - RNA, 19 nt, Artificial Sequence
  Description of Artificial Sequence: Synthetic oligonucleotide
ccaugccuaucugucucag

SEQ ID NO: 2643941 - RNA, 19 nt, Artificial Sequence
  Description of Artificial Sequence: Synthetic oligonucleotide
ccaggcccuugagagagac

SEQ ID NO: 2643942 - RNA, 19 nt, Artificial Sequence
  Description of Artificial Sequence: Synthetic oligonucleotide
ggcaaagcuuuagcuuguc

SEQ ID NO: 2643943 - RNA, 19 nt, Artificial Sequence
  Description of Artificial Sequence: Synthetic oligonucleotide
cccauccacccagucacug

SEQ ID NO: 2643944 - RNA, 19 nt, Artificial Sequence
  Description of Artificial Sequence: Synthetic oligonucleotide
gccuaucugucucagccuu

SEQ ID NO: 2643945 - RNA, 19 nt, Artificial Sequence
  Description of Artificial Sequence: Synthetic oligonucleotide
ccuacugacuuaaguuagu

SEQ ID NO: 2643946 - RNA, 19 nt, Artificial Sequence
  Description of Artificial Sequence: Synthetic oligonucleotide
gguguugcccaugguugaa

SEQ ID NO: 2643947 - RNA, 19 nt, Artificial Sequence
  Description of Artificial Sequence: Synthetic oligonucleotide
guguccuguuuaaaagcuu

SEQ ID NO: 2643948 - RNA, 19 nt, Artificial Sequence
  Description of Artificial Sequence: Synthetic oligonucleotide
cugaaagguguguccuguu

SEQ ID NO: 2643949 - RNA, 19 nt, Artificial Sequence
  Description of Artificial Sequence: Synthetic oligonucleotide
cagccuugagagucucuau

SEQ ID NO: 2643950 - RNA, 19 nt, Artificial Sequence
  Description of Artificial Sequence: Synthetic oligonucleotide
ccacccggucacaaucaca

SEQ ID NO: 2643951 - RNA, 19 nt, Artificial Sequence
  Description of Artificial Sequence: Synthetic oligonucleotide
guuuugggucaagcuguau

SEQ ID NO: 2643952 - RNA, 19 nt, Artificial Sequence
  Description of Artificial Sequence: Synthetic oligonucleotide
ccccaaaccaaugaacaau

SEQ ID NO: 2643953 - RNA, 19 nt, Artificial Sequence
  Description of Artificial Sequence: Synthetic oligonucleotide
ggccuucacaagacgugaa

SEQ ID NO: 2643954 - RNA, 19 nt, Artificial Sequence
  Description of Artificial Sequence: Synthetic oligonucleotide
cguuguuuugggugggagu

SEQ ID NO: 2643955 - RNA, 19 nt, Artificial Sequence
  Description of Artificial Sequence: Synthetic oligonucleotide
ggugugguuccaacaguuu

SEQ ID NO: 2643956 - RNA, 19 nt, Artificial Sequence
  Description of Artificial Sequence: Synthetic oligonucleotide
ccccauuuuauucguuguu

SEQ ID NO: 2643957 - RNA, 19 nt, Artificial Sequence
  Description of Artificial Sequence: Synthetic oligonucleotide
aggcucccuuauacauauu

SEQ ID NO: 2643958 - RNA, 19 nt, Artificial Sequence
  Description of Artificial Sequence: Synthetic oligonucleotide
gcccaugguugaaggaaau

SEQ ID NO: 2643959 - RNA, 19 nt, Artificial Sequence
  Description of Artificial Sequence: Synthetic oligonucleotide
gguccccauuuuauucguu

SEQ ID NO: 2643960 - RNA, 19 nt, Artificial Sequence
  Description of Artificial Sequence: Synthetic oligonucleotide
ccacccagucacuguguuu

SEQ ID NO: 2643961 - RNA, 19 nt, Artificial Sequence
  Description of Artificial Sequence: Synthetic oligonucleotide
ucacggaucaccauggagc

SEQ ID NO: 2643962 - RNA, 19 nt, Artificial Sequence
  Description of Artificial Sequence: Synthetic oligonucleotide
cugaacauuggcaaagucc

SEQ ID NO: 2643963 - RNA, 19 nt, Artificial Sequence
  Description of Artificial Sequence: Synthetic oligonucleotide
auggcaucaucuaagaggc

SEQ ID NO: 2643964 - RNA, 19 nt, Artificial Sequence
  Description of Artificial Sequence: Synthetic oligonucleotide
auuggcaaaguccacgcgg

SEQ ID NO: 2643965 - RNA, 19 nt, Artificial Sequence
  Description of Artificial Sequence: Synthetic oligonucleotide
ucuaagaggcacuagugug

SEQ ID NO: 2643966 - RNA, 19 nt, Artificial Sequence
  Description of Artificial Sequence: Synthetic oligonucleotide
ucagcgacagcgaagcuag

SEQ ID NO: 2643967 - RNA, 19 nt, Artificial Sequence
  Description of Artificial Sequence: Synthetic oligonucleotide
aacauuggcaaaguccacg

SEQ ID NO: 2643968 - RNA, 19 nt, Artificial Sequence
  Description of Artificial Sequence: Synthetic oligonucleotide
uugagcaagaacuggcggg

SEQ ID NO: 2643969 - RNA, 19 nt, Artificial Sequence
  Description of Artificial Sequence: Synthetic oligonucleotide
ucaucuaagaggcacuagu

SEQ ID NO: 2643970 - RNA, 19 nt, Artificial Sequence
  Description of Artificial Sequence: Synthetic oligonucleotide
ucucccaugacagcaaugg

SEQ ID NO: 2643971 - RNA, 19 nt, Artificial Sequence
  Description of Artificial Sequence: Synthetic oligonucleotide
acuggcacacccaugaggc

SEQ ID NO: 2643972 - RNA, 19 nt, Artificial Sequence
  Description of Artificial Sequence: Synthetic oligonucleotide
ucauugaacucucccauga

SEQ ID NO: 2643973 - RNA, 19 nt, Artificial Sequence
  Description of Artificial Sequence: Synthetic oligonucleotide
aaacauggcaucaucuaag

SEQ ID NO: 2643974 - RNA, 19 nt, Artificial Sequence
  Description of Artificial Sequence: Synthetic oligonucleotide
gaacauguacucaucauac

SEQ ID NO: 2643975 - RNA, 19 nt, Artificial Sequence
  Description of Artificial Sequence: Synthetic oligonucleotide
gaagucauguuccagacgu

SEQ ID NO: 2643976 - RNA, 19 nt, Artificial Sequence
  Description of Artificial Sequence: Synthetic oligonucleotide
aaguccacgcgguugaggu

SEQ ID NO: 2643977 - RNA, 19 nt, Artificial Sequence
  Description of Artificial Sequence: Synthetic oligonucleotide
agcagggucagcgacagcg

SEQ ID NO: 2643978 - RNA, 19 nt, Artificial Sequence
  Description of Artificial Sequence: Synthetic oligonucleotide
agaucauugaacucuccca

SEQ ID NO: 2643979 - RNA, 19 nt, Artificial Sequence
  Description of Artificial Sequence: Synthetic oligonucleotide
aauguccucuuuguccagc

SEQ ID NO: 2643980 - RNA, 19 nt, Artificial Sequence
  Description of Artificial Sequence: Synthetic oligonucleotide
aacauggcaucaucuaaga

SEQ ID NO: 2643981 - RNA, 19 nt, Artificial Sequence
  Description of Artificial Sequence: Synthetic oligonucleotide
ugaagucauguuccagacg

SEQ ID NO: 2643982 - RNA, 19 nt, Artificial Sequence
  Description of Artificial Sequence: Synthetic oligonucleotide
cuagaugcccugcaguggg

SEQ ID NO: 2643983 - RNA, 19 nt, Artificial Sequence
  Description of Artificial Sequence: Synthetic oligonucleotide
aagcuagaucauugaacuc

SEQ ID NO: 2643984 - RNA, 19 nt, Artificial Sequence
  Description of Artificial Sequence: Synthetic oligonucleotide
uugggucacaguaaacaug

SEQ ID NO: 2643985 - RNA, 19 nt, Artificial Sequence
  Description of Artificial Sequence: Synthetic oligonucleotide
agcuagaucauugaacucu

SEQ ID NO: 2643986 - RNA, 19 nt, Artificial Sequence
  Description of Artificial Sequence: Synthetic oligonucleotide
uuguaccaggcucuccucg

SEQ ID NO: 2643987 - RNA, 19 nt, Artificial Sequence
  Description of Artificial Sequence: Synthetic oligonucleotide
aguggccugggccacacgg

SEQ ID NO: 2643988 - RNA, 19 nt, Artificial Sequence
  Description of Artificial Sequence: Synthetic oligonucleotide
ugugauaggcugagagucc

SEQ ID NO: 2643989 - RNA, 19 nt, Artificial Sequence
  Description of Artificial Sequence: Synthetic oligonucleotide
auaggcugagaguccaggg

SEQ ID NO: 2643990 - RNA, 19 nt, Artificial Sequence
  Description of Artificial Sequence: Synthetic oligonucleotide
cuugagcaagaacuggcgg

SEQ ID NO: 2643991 - RNA, 19 nt, Artificial Sequence
  Description of Artificial Sequence: Synthetic oligonucleotide
aucuaagaggcacuagugu

SEQ ID NO: 2643992 - RNA, 19 nt, Artificial Sequence
  Description of Artificial Sequence: Synthetic oligonucleotide
uuccagacguuguaccagg

SEQ ID NO: 2643993 - RNA, 19 nt, Artificial Sequence
  Description of Artificial Sequence: Synthetic oligonucleotide
cuugaagucauguuccaga

SEQ ID NO: 2643994 - RNA, 19 nt, Artificial Sequence
  Description of Artificial Sequence: Synthetic oligonucleotide
guagaaugaccacuugagc

SEQ ID NO: 2643995 - RNA, 19 nt, Artificial Sequence
  Description of Artificial Sequence: Synthetic oligonucleotide
uucccguuucaccaggggc

SEQ ID NO: 2643996 - RNA, 19 nt, Artificial Sequence
  Description of Artificial Sequence: Synthetic oligonucleotide
caucuaagaggcacuagug

SEQ ID NO: 2643997 - RNA, 19 nt, Artificial Sequence
  Description of Artificial Sequence: Synthetic oligonucleotide
ugcuccugaacauuggcaa

SEQ ID NO: 2643998 - RNA, 19 nt, Artificial Sequence
  Description of Artificial Sequence: Synthetic oligonucleotide
ugcaugcugcuucagcacc

SEQ ID NO: 2643999 - RNA, 19 nt, Artificial Sequence
  Description of Artificial Sequence: Synthetic oligonucleotide
ugaggccugcuccugaaca

SEQ ID NO: 2644000 - RNA, 19 nt, Artificial Sequence
  Description of Artificial Sequence: Synthetic oligonucleotide
gauaggcugagaguccagg

SEQ ID NO: 2644001 - RNA, 19 nt, Artificial Sequence
  Description of Artificial Sequence: Synthetic oligonucleotide
uguuccagacguuguacca

SEQ ID NO: 2644002 - RNA, 19 nt, Artificial Sequence
  Description of Artificial Sequence: Synthetic oligonucleotide
ucccguuucaccaggggcu

SEQ ID NO: 2644003 - RNA, 19 nt, Artificial Sequence
  Description of Artificial Sequence: Synthetic oligonucleotide
uccggaagcugguggaagg

SEQ ID NO: 2644004 - RNA, 19 nt, Artificial Sequence
  Description of Artificial Sequence: Synthetic oligonucleotide
acagcaaugggcgucucuc

SEQ ID NO: 2644005 - RNA, 19 nt, Artificial Sequence
  Description of Artificial Sequence: Synthetic oligonucleotide
agguagaacauguacucau

SEQ ID NO: 2644006 - RNA, 19 nt, Artificial Sequence
  Description of Artificial Sequence: Synthetic oligonucleotide
aguaaacauggcaucaucu

SEQ ID NO: 2644007 - RNA, 19 nt, Artificial Sequence
  Description of Artificial Sequence: Synthetic oligonucleotide
ugagcaagaacuggcgggc

SEQ ID NO: 2644008 - RNA, 19 nt, Artificial Sequence
  Description of Artificial Sequence: Synthetic oligonucleotide
gaccacuugagcaagaacu

SEQ ID NO: 2644009 - RNA, 19 nt, Artificial Sequence
  Description of Artificial Sequence: Synthetic oligonucleotide
ucacaguaaacauggcauc

SEQ ID NO: 2644010 - RNA, 19 nt, Artificial Sequence
  Description of Artificial Sequence: Synthetic oligonucleotide
gacgccuuccggaagcugg

SEQ ID NO: 2644011 - RNA, 19 nt, Artificial Sequence
  Description of Artificial Sequence: Synthetic oligonucleotide
aaaguccacgcgguugagg

SEQ ID NO: 2644012 - RNA, 19 nt, Artificial Sequence
  Description of Artificial Sequence: Synthetic oligonucleotide
cccaugacagcaaugggcg

SEQ ID NO: 2644013 - RNA, 19 nt, Artificial Sequence
  Description of Artificial Sequence: Synthetic oligonucleotide
acuagugugauaggcugag

SEQ ID NO: 2644014 - RNA, 19 nt, Artificial Sequence
  Description of Artificial Sequence: Synthetic oligonucleotide
uguaccaggcucuccucgc

SEQ ID NO: 2644015 - RNA, 19 nt, Artificial Sequence
  Description of Artificial Sequence: Synthetic oligonucleotide
gugugauaggcugagaguc

SEQ ID NO: 2644016 - RNA, 19 nt, Artificial Sequence
  Description of Artificial Sequence: Synthetic oligonucleotide
cagacguuguaccaggcuc

SEQ ID NO: 2644017 - RNA, 19 nt, Artificial Sequence
  Description of Artificial Sequence: Synthetic oligonucleotide
cuaagaggcacuaguguga

SEQ ID NO: 2644018 - RNA, 19 nt, Artificial Sequence
  Description of Artificial Sequence: Synthetic oligonucleotide
acacccaugaggccugcuc

SEQ ID NO: 2644019 - RNA, 19 nt, Artificial Sequence
  Description of Artificial Sequence: Synthetic oligonucleotide
gaugcccugcagugggugg

SEQ ID NO: 2644020 - RNA, 19 nt, Artificial Sequence
  Description of Artificial Sequence: Synthetic oligonucleotide
gaaugaccacuugagcaag

SEQ ID NO: 2644021 - RNA, 19 nt, Artificial Sequence
  Description of Artificial Sequence: Synthetic oligonucleotide
cacuggcacacccaugagg

SEQ ID NO: 2644022 - RNA, 19 nt, Artificial Sequence
  Description of Artificial Sequence: Synthetic oligonucleotide
cccaauguccucuuugucc

SEQ ID NO: 2644023 - RNA, 19 nt, Artificial Sequence
  Description of Artificial Sequence: Synthetic oligonucleotide
caccagguagaacauguac

SEQ ID NO: 2644024 - RNA, 19 nt, Artificial Sequence
  Description of Artificial Sequence: Synthetic oligonucleotide
ugggcgucucuccaguggc

SEQ ID NO: 2644025 - RNA, 19 nt, Artificial Sequence
  Description of Artificial Sequence: Synthetic oligonucleotide
accagguagaacauguacu

SEQ ID NO: 2644026 - RNA, 19 nt, Artificial Sequence
  Description of Artificial Sequence: Synthetic oligonucleotide
gugaccacguuguccagcc

SEQ ID NO: 2644027 - RNA, 19 nt, Artificial Sequence
  Description of Artificial Sequence: Synthetic oligonucleotide
gucacggaucaccauggag

SEQ ID NO: 2644028 - RNA, 19 nt, Artificial Sequence
  Description of Artificial Sequence: Synthetic oligonucleotide
acggugcuccaccagguag

SEQ ID NO: 2644029 - RNA, 19 nt, Artificial Sequence
  Description of Artificial Sequence: Synthetic oligonucleotide
aaugggcgucucuccagug

SEQ ID NO: 2644030 - RNA, 19 nt, Artificial Sequence
  Description of Artificial Sequence: Synthetic oligonucleotide
gaucauugaacucucccau

SEQ ID NO: 2644031 - RNA, 19 nt, Artificial Sequence
  Description of Artificial Sequence: Synthetic oligonucleotide
cuagaucauugaacucucc

SEQ ID NO: 2644032 - RNA, 19 nt, Artificial Sequence
  Description of Artificial Sequence: Synthetic oligonucleotide
caggucacggaucaccaug

SEQ ID NO: 2644033 - RNA, 19 nt, Artificial Sequence
  Description of Artificial Sequence: Synthetic oligonucleotide
agcgaagcuagaucauuga

SEQ ID NO: 2644034 - RNA, 19 nt, Artificial Sequence
  Description of Artificial Sequence: Synthetic oligonucleotide
cagcgaagcuagaucauug

SEQ ID NO: 2644035 - RNA, 19 nt, Artificial Sequence
  Description of Artificial Sequence: Synthetic oligonucleotide
aaggggcuagaugcccugc

SEQ ID NO: 2644036 - RNA, 19 nt, Artificial Sequence
  Description of Artificial Sequence: Synthetic oligonucleotide
cuccugaacauuggcaaag

SEQ ID NO: 2644037 - RNA, 19 nt, Artificial Sequence
  Description of Artificial Sequence: Synthetic oligonucleotide
cacccaugaggccugcucc

SEQ ID NO: 2644038 - RNA, 19 nt, Artificial Sequence
  Description of Artificial Sequence: Synthetic oligonucleotide
cauuggcaaaguccacgcg

SEQ ID NO: 2644039 - RNA, 19 nt, Artificial Sequence
  Description of Artificial Sequence: Synthetic oligonucleotide
ugauaggcugagaguccag

SEQ ID NO: 2644040 - RNA, 19 nt, Artificial Sequence
  Description of Artificial Sequence: Synthetic oligonucleotide
aaggcgcccagggaagggg

SEQ ID NO: 2644041 - RNA, 19 nt, Artificial Sequence
  Description of Artificial Sequence: Synthetic oligonucleotide
ggucacaguaaacauggca

SEQ ID NO: 2644042 - RNA, 19 nt, Artificial Sequence
  Description of Artificial Sequence: Synthetic oligonucleotide
uccagcagggucagcgaca

SEQ ID NO: 2644043 - RNA, 19 nt, Artificial Sequence
  Description of Artificial Sequence: Synthetic oligonucleotide
gcacuagugugauaggcug

SEQ ID NO: 2644044 - RNA, 19 nt, Artificial Sequence
  Description of Artificial Sequence: Synthetic oligonucleotide
gaggcacuagugugauagg

SEQ ID NO: 2644045 - RNA, 19 nt, Artificial Sequence
  Description of Artificial Sequence: Synthetic oligonucleotide
agcaaugggcgucucucca

SEQ ID NO: 2644046 - RNA, 19 nt, Artificial Sequence
  Description of Artificial Sequence: Synthetic oligonucleotide
caguaaacauggcaucauc

SEQ ID NO: 2644047 - RNA, 19 nt, Artificial Sequence
  Description of Artificial Sequence: Synthetic oligonucleotide
guuccagacguuguaccag

SEQ ID NO: 2644048 - RNA, 19 nt, Artificial Sequence
  Description of Artificial Sequence: Synthetic oligonucleotide
aggucacggaucaccaugg

SEQ ID NO: 2644049 - RNA, 19 nt, Artificial Sequence
  Description of Artificial Sequence: Synthetic oligonucleotide
gguggcuggggucacuccg

SEQ ID NO: 2644050 - RNA, 19 nt, Artificial Sequence
  Description of Artificial Sequence: Synthetic oligonucleotide
caugacagcaaugggcguc

SEQ ID NO: 2644051 - RNA, 19 nt, Artificial Sequence
  Description of Artificial Sequence: Synthetic oligonucleotide
guucccguuucaccagggg

SEQ ID NO: 2644052 - RNA, 19 nt, Artificial Sequence
  Description of Artificial Sequence: Synthetic oligonucleotide
cauugaacucucccaugac

SEQ ID NO: 2644053 - RNA, 19 nt, Artificial Sequence
  Description of Artificial Sequence: Synthetic oligonucleotide
uccucgcacuggcacaccc

SEQ ID NO: 2644054 - RNA, 19 nt, Artificial Sequence
  Description of Artificial Sequence: Synthetic oligonucleotide
ccagguagaacauguacuc

SEQ ID NO: 2644055 - RNA, 19 nt, Artificial Sequence
  Description of Artificial Sequence: Synthetic oligonucleotide
gaaggggcuagaugcccug

SEQ ID NO: 2644056 - RNA, 19 nt, Artificial Sequence
  Description of Artificial Sequence: Synthetic oligonucleotide
uccguucccguuucaccag

SEQ ID NO: 2644057 - RNA, 19 nt, Artificial Sequence
  Description of Artificial Sequence: Synthetic oligonucleotide
gucacaguaaacauggcau

SEQ ID NO: 2644058 - RNA, 19 nt, Artificial Sequence
  Description of Artificial Sequence: Synthetic oligonucleotide
ggcaucaucuaagaggcac

SEQ ID NO: 2644059 - RNA, 19 nt, Artificial Sequence
  Description of Artificial Sequence: Synthetic oligonucleotide
uggcacacccaugaggccu

SEQ ID NO: 2644060 - RNA, 19 nt, Artificial Sequence
  Description of Artificial Sequence: Synthetic oligonucleotide
uccagacguuguaccaggc

SEQ ID NO: 2644061 - RNA, 19 nt, Artificial Sequence
  Description of Artificial Sequence: Synthetic oligonucleotide
acugcuguguccaucccca

SEQ ID NO: 2644062 - RNA, 19 nt, Artificial Sequence
  Description of Artificial Sequence: Synthetic oligonucleotide
gaagcugguggaaggcgcc

SEQ ID NO: 2644063 - RNA, 19 nt, Artificial Sequence
  Description of Artificial Sequence: Synthetic oligonucleotide
ggcuagaugcccugcagug

SEQ ID NO: 2644064 - RNA, 19 nt, Artificial Sequence
  Description of Artificial Sequence: Synthetic oligonucleotide
cauacagcagccggaugag

SEQ ID NO: 2644065 - RNA, 19 nt, Artificial Sequence
  Description of Artificial Sequence: Synthetic oligonucleotide
cucccaugacagcaauggg

SEQ ID NO: 2644066 - RNA, 19 nt, Artificial Sequence
  Description of Artificial Sequence: Synthetic oligonucleotide
agggaaggggcuagaugcc

SEQ ID NO: 2644067 - RNA, 19 nt, Artificial Sequence
  Description of Artificial Sequence: Synthetic oligonucleotide
uccauccccaauguccucu

SEQ ID NO: 2644068 - RNA, 19 nt, Artificial Sequence
  Description of Artificial Sequence: Synthetic oligonucleotide
cacugcuguguccaucccc

SEQ ID NO: 2644069 - RNA, 19 nt, Artificial Sequence
  Description of Artificial Sequence: Synthetic oligonucleotide
guggaaggcgcccagggaa

SEQ ID NO: 2644070 - RNA, 19 nt, Artificial Sequence
  Description of Artificial Sequence: Synthetic oligonucleotide
cuccguucccguuucacca

SEQ ID NO: 2644071 - RNA, 19 nt, Artificial Sequence
  Description of Artificial Sequence: Synthetic oligonucleotide
cugggugaccacguugucc

SEQ ID NO: 2644072 - RNA, 19 nt, Artificial Sequence
  Description of Artificial Sequence: Synthetic oligonucleotide
ugguccagugagcucugcu

SEQ ID NO: 2644073 - RNA, 19 nt, Artificial Sequence
  Description of Artificial Sequence: Synthetic oligonucleotide
aucaucuaagaggcacuag

SEQ ID NO: 2644074 - RNA, 19 nt, Artificial Sequence
  Description of Artificial Sequence: Synthetic oligonucleotide
ggugacgccuuccggaagc

SEQ ID NO: 2644075 - RNA, 19 nt, Artificial Sequence
  Description of Artificial Sequence: Synthetic oligonucleotide
uuccggaagcugguggaag

SEQ ID NO: 2644076 - RNA, 19 nt, Artificial Sequence
  Description of Artificial Sequence: Synthetic oligonucleotide
ugagguggaaggagccaaa

SEQ ID NO: 2644077 - RNA, 19 nt, Artificial Sequence
  Description of Artificial Sequence: Synthetic oligonucleotide
augcccugcaguggguggc

SEQ ID NO: 2644078 - RNA, 19 nt, Artificial Sequence
  Description of Artificial Sequence: Synthetic oligonucleotide
aaugaccacuugagcaaga

SEQ ID NO: 2644079 - RNA, 19 nt, Artificial Sequence
  Description of Artificial Sequence: Synthetic oligonucleotide
aguccacgcgguugagguc

SEQ ID NO: 2644080 - RNA, 19 nt, Artificial Sequence
  Description of Artificial Sequence: Synthetic oligonucleotide
cagcaaugggcgucucucc

SEQ ID NO: 2644081 - RNA, 19 nt, Artificial Sequence
  Description of Artificial Sequence: Synthetic oligonucleotide
agacguuguaccaggcucu

SEQ ID NO: 2644082 - RNA, 19 nt, Artificial Sequence
  Description of Artificial Sequence: Synthetic oligonucleotide
uccugaacauuggcaaagu

SEQ ID NO: 2644083 - RNA, 19 nt, Artificial Sequence
  Description of Artificial Sequence: Synthetic oligonucleotide
uggggcugccugcaugcug

SEQ ID NO: 2644084 - RNA, 19 nt, Artificial Sequence
  Description of Artificial Sequence: Synthetic oligonucleotide
ugcggccauccacaucugc

SEQ ID NO: 2644085 - RNA, 19 nt, Artificial Sequence
  Description of Artificial Sequence: Synthetic oligonucleotide
cagugagcucugcugcugc

SEQ ID NO: 2644086 - RNA, 19 nt, Artificial Sequence
  Description of Artificial Sequence: Synthetic oligonucleotide
cuggcgggcggccuugggg

SEQ ID NO: 2644087 - RNA, 19 nt, Artificial Sequence
  Description of Artificial Sequence: Synthetic oligonucleotide
gagcaagaacuggcgggcg

SEQ ID NO: 2644088 - RNA, 19 nt, Artificial Sequence
  Description of Artificial Sequence: Synthetic oligonucleotide
gaaggcgcccagggaaggg

SEQ ID NO: 2644089 - RNA, 19 nt, Artificial Sequence
  Description of Artificial Sequence: Synthetic oligonucleotide
uggggucacuccguucccg

SEQ ID NO: 2644090 - RNA, 19 nt, Artificial Sequence
  Description of Artificial Sequence: Synthetic oligonucleotide
ucuccucgcacuggcacac

SEQ ID NO: 2644091 - RNA, 19 nt, Artificial Sequence
  Description of Artificial Sequence: Synthetic oligonucleotide
augagguggaaggagccaa

SEQ ID NO: 2644092 - RNA, 19 nt, Artificial Sequence
  Description of Artificial Sequence: Synthetic oligonucleotide
augacagcaaugggcgucu

SEQ ID NO: 2644093 - RNA, 19 nt, Artificial Sequence
  Description of Artificial Sequence: Synthetic oligonucleotide
uaccaggcucuccucgcac

SEQ ID NO: 2644094 - RNA, 19 nt, Artificial Sequence
  Description of Artificial Sequence: Synthetic oligonucleotide
caggggcucgcccaggcug

SEQ ID NO: 2644095 - RNA, 19 nt, Artificial Sequence
  Description of Artificial Sequence: Synthetic oligonucleotide
gggucagcgacagcgaagc

SEQ ID NO: 2644096 - RNA, 19 nt, Artificial Sequence
  Description of Artificial Sequence: Synthetic oligonucleotide
gaacauuggcaaaguccac

SEQ ID NO: 2644097 - RNA, 19 nt, Artificial Sequence
  Description of Artificial Sequence: Synthetic oligonucleotide
acguuguaccaggcucucc

SEQ ID NO: 2644098 - RNA, 19 nt, Artificial Sequence
  Description of Artificial Sequence: Synthetic oligonucleotide
agugagcucugcugcugca

SEQ ID NO: 2644099 - RNA, 19 nt, Artificial Sequence
  Description of Artificial Sequence: Synthetic oligonucleotide
cugcuucagcaccugggug

SEQ ID NO: 2644100 - RNA, 19 nt, Artificial Sequence
  Description of Artificial Sequence: Synthetic oligonucleotide
cuuuguccagcagggucag

SEQ ID NO: 2644101 - RNA, 19 nt, Artificial Sequence
  Description of Artificial Sequence: Synthetic oligonucleotide
caauguccucuuuguccag

SEQ ID NO: 2644102 - RNA, 19 nt, Artificial Sequence
  Description of Artificial Sequence: Synthetic oligonucleotide
acccaugaggccugcuccu

SEQ ID NO: 2644103 - RNA, 19 nt, Artificial Sequence
  Description of Artificial Sequence: Synthetic oligonucleotide
cuuggggaagcuggggcug

SEQ ID NO: 2644104 - RNA, 19 nt, Artificial Sequence
  Description of Artificial Sequence: Synthetic oligonucleotide
gcuagaugcccugcagugg

SEQ ID NO: 2644105 - RNA, 19 nt, Artificial Sequence
  Description of Artificial Sequence: Synthetic oligonucleotide
guccacgcgguugagguca

SEQ ID NO: 2644106 - RNA, 19 nt, Artificial Sequence
  Description of Artificial Sequence: Synthetic oligonucleotide
cuugggucacaguaaacau

SEQ ID NO: 2644107 - RNA, 19 nt, Artificial Sequence
  Description of Artificial Sequence: Synthetic oligonucleotide
ggcaaaguccacgcgguug

SEQ ID NO: 2644108 - RNA, 19 nt, Artificial Sequence
  Description of Artificial Sequence: Synthetic oligonucleotide
cacuagugugauaggcuga

SEQ ID NO: 2644109 - RNA, 19 nt, Artificial Sequence
  Description of Artificial Sequence: Synthetic oligonucleotide
gcugccugcaugcugcuuc

SEQ ID NO: 2644110 - RNA, 19 nt, Artificial Sequence
  Description of Artificial Sequence: Synthetic oligonucleotide
ucaggucacggaucaccau

SEQ ID NO: 2644111 - RNA, 19 nt, Artificial Sequence
  Description of Artificial Sequence: Synthetic oligonucleotide
guuguaccaggcucuccuc

SEQ ID NO: 2644112 - RNA, 19 nt, Artificial Sequence
  Description of Artificial Sequence: Synthetic oligonucleotide
cuggcacacccaugaggcc

SEQ ID NO: 2644113 - RNA, 19 nt, Artificial Sequence
  Description of Artificial Sequence: Synthetic oligonucleotide
aggggcucgcccaggcugc

SEQ ID NO: 2644114 - RNA, 19 nt, Artificial Sequence
  Description of Artificial Sequence: Synthetic oligonucleotide
aggggcuagaugcccugca

SEQ ID NO: 2644115 - RNA, 19 nt, Artificial Sequence
  Description of Artificial Sequence: Synthetic oligonucleotide
cacguuguccagccagcug

SEQ ID NO: 2644116 - RNA, 19 nt, Artificial Sequence
  Description of Artificial Sequence: Synthetic oligonucleotide
gcaaugggcgucucuccag

SEQ ID NO: 2644117 - RNA, 19 nt, Artificial Sequence
  Description of Artificial Sequence: Synthetic oligonucleotide
aggugacgccuuccggaag

SEQ ID NO: 2644118 - RNA, 19 nt, Artificial Sequence
  Description of Artificial Sequence: Synthetic oligonucleotide
accuugggucacaguaaac

SEQ ID NO: 2644119 - RNA, 19 nt, Artificial Sequence
  Description of Artificial Sequence: Synthetic oligonucleotide
agcgacagcgaagcuagau

SEQ ID NO: 2644120 - RNA, 19 nt, Artificial Sequence
  Description of Artificial Sequence: Synthetic oligonucleotide
ccugcaugcugcuucagca

SEQ ID NO: 2644121 - RNA, 19 nt, Artificial Sequence
  Description of Artificial Sequence: Synthetic oligonucleotide
acagcgaagcuagaucauu

SEQ ID NO: 2644122 - RNA, 19 nt, Artificial Sequence
  Description of Artificial Sequence: Synthetic oligonucleotide
augaccacuugagcaagaa

SEQ ID NO: 2644123 - RNA, 19 nt, Artificial Sequence
  Description of Artificial Sequence: Synthetic oligonucleotide
gucaggucacggaucacca

SEQ ID NO: 2644124 - RNA, 19 nt, Artificial Sequence
  Description of Artificial Sequence: Synthetic oligonucleotide
cugccucacugcugugucc

SEQ ID NO: 2644125 - RNA, 19 nt, Artificial Sequence
  Description of Artificial Sequence: Synthetic oligonucleotide
gucacuccguucccguuuc

SEQ ID NO: 2644126 - RNA, 19 nt, Artificial Sequence
  Description of Artificial Sequence: Synthetic oligonucleotide
gguagaacauguacucauc

SEQ ID NO: 2644127 - RNA, 19 nt, Artificial Sequence
  Description of Artificial Sequence: Synthetic oligonucleotide
agggucagcgacagcgaag

SEQ ID NO: 2644128 - RNA, 19 nt, Artificial Sequence
  Description of Artificial Sequence: Synthetic oligonucleotide
agggucaccuugaagucau

SEQ ID NO: 2644129 - RNA, 19 nt, Artificial Sequence
  Description of Artificial Sequence: Synthetic oligonucleotide
uggcaucaucuaagaggca

SEQ ID NO: 2644130 - RNA, 19 nt, Artificial Sequence
  Description of Artificial Sequence: Synthetic oligonucleotide
cagcaccugggugaccacg

SEQ ID NO: 2644131 - RNA, 19 nt, Artificial Sequence
  Description of Artificial Sequence: Synthetic oligonucleotide
caagaacuggcgggcggcc

SEQ ID NO: 2644132 - RNA, 19 nt, Artificial Sequence
  Description of Artificial Sequence: Synthetic oligonucleotide
ucgcacuggcacacccaug

SEQ ID NO: 2644133 - RNA, 19 nt, Artificial Sequence
  Description of Artificial Sequence: Synthetic oligonucleotide
ggccaggugacgccuuccg

SEQ ID NO: 2644134 - RNA, 19 nt, Artificial Sequence
  Description of Artificial Sequence: Synthetic oligonucleotide
gcgacagcgaagcuagauc

SEQ ID NO: 2644135 - RNA, 19 nt, Artificial Sequence
  Description of Artificial Sequence: Synthetic oligonucleotide
cacggaucaccauggagcu

SEQ ID NO: 2644136 - RNA, 19 nt, Artificial Sequence
  Description of Artificial Sequence: Synthetic oligonucleotide
agccaaagcuggcggcacu

SEQ ID NO: 2644137 - RNA, 19 nt, Artificial Sequence
  Description of Artificial Sequence: Synthetic oligonucleotide
aggcgcccagggaaggggc

SEQ ID NO: 2644138 - RNA, 19 nt, Artificial Sequence
  Description of Artificial Sequence: Synthetic oligonucleotide
gcuagaucauugaacucuc

SEQ ID NO: 2644139 - RNA, 19 nt, Artificial Sequence
  Description of Artificial Sequence: Synthetic oligonucleotide
gucagcgacagcgaagcua

SEQ ID NO: 2644140 - RNA, 19 nt, Artificial Sequence
  Description of Artificial Sequence: Synthetic oligonucleotide
cagguagaacauguacuca

SEQ ID NO: 2644141 - RNA, 19 nt, Artificial Sequence
  Description of Artificial Sequence: Synthetic oligonucleotide
cacgcgguugaggucacuc

SEQ ID NO: 2644142 - RNA, 19 nt, Artificial Sequence
  Description of Artificial Sequence: Synthetic oligonucleotide
aagaggcacuagugugaua

SEQ ID NO: 2644143 - RNA, 19 nt, Artificial Sequence
  Description of Artificial Sequence: Synthetic oligonucleotide
ucucuccaguggccugggc

SEQ ID NO: 2644144 - RNA, 19 nt, Artificial Sequence
  Description of Artificial Sequence: Synthetic oligonucleotide
caccuugggucacaguaaa

SEQ ID NO: 2644145 - RNA, 19 nt, Artificial Sequence
  Description of Artificial Sequence: Synthetic oligonucleotide
cgacagcgaagcuagauca

SEQ ID NO: 2644146 - RNA, 19 nt, Artificial Sequence
  Description of Artificial Sequence: Synthetic oligonucleotide
caugcugcuucagcaccug

SEQ ID NO: 2644147 - RNA, 19 nt, Artificial Sequence
  Description of Artificial Sequence: Synthetic oligonucleotide
gacguuguaccaggcucuc

SEQ ID NO: 2644148 - RNA, 19 nt, Artificial Sequence
  Description of Artificial Sequence: Synthetic oligonucleotide
cuggggucacuccguuccc

SEQ ID NO: 2644149 - RNA, 19 nt, Artificial Sequence
  Description of Artificial Sequence: Synthetic oligonucleotide
agcaccugggugaccacgu

SEQ ID NO: 2644150 - RNA, 19 nt, Artificial Sequence
  Description of Artificial Sequence: Synthetic oligonucleotide
agcucugcugcugcagggu

SEQ ID NO: 2644151 - RNA, 19 nt, Artificial Sequence
  Description of Artificial Sequence: Synthetic oligonucleotide
cucuccucgcacuggcaca

SEQ ID NO: 2644152 - RNA, 19 nt, Artificial Sequence
  Description of Artificial Sequence: Synthetic oligonucleotide
guaccaggcucuccucgca

SEQ ID NO: 2644153 - RNA, 19 nt, Artificial Sequence
  Description of Artificial Sequence: Synthetic oligonucleotide
aacuggcgggcggccuugg

SEQ ID NO: 2644154 - RNA, 19 nt, Artificial Sequence
  Description of Artificial Sequence: Synthetic oligonucleotide
gccaggugacgccuuccgg

SEQ ID NO: 2644155 - RNA, 19 nt, Artificial Sequence
  Description of Artificial Sequence: Synthetic oligonucleotide
gcaagaacuggcgggcggc

SEQ ID NO: 2644156 - RNA, 19 nt, Artificial Sequence
  Description of Artificial Sequence: Synthetic oligonucleotide
ggcugagaguccagggucc

SEQ ID NO: 2644157 - RNA, 19 nt, Artificial Sequence
  Description of Artificial Sequence: Synthetic oligonucleotide
ucacuccguucccguuuca

SEQ ID NO: 2644158 - RNA, 19 nt, Artificial Sequence
  Description of Artificial Sequence: Synthetic oligonucleotide
uggcaaaguccacgcgguu

SEQ ID NO: 2644159 - RNA, 19 nt, Artificial Sequence
  Description of Artificial Sequence: Synthetic oligonucleotide
caucaucuaagaggcacua

SEQ ID NO: 2644160 - RNA, 19 nt, Artificial Sequence
  Description of Artificial Sequence: Synthetic oligonucleotide
caugaggccugcuccugaa

SEQ ID NO: 2644161 - RNA, 19 nt, Artificial Sequence
  Description of Artificial Sequence: Synthetic oligonucleotide
aagucauguuccagacguu

SEQ ID NO: 2644162 - RNA, 19 nt, Artificial Sequence
  Description of Artificial Sequence: Synthetic oligonucleotide
gcgaagcuagaucauugaa

SEQ ID NO: 2644163 - RNA, 19 nt, Artificial Sequence
  Description of Artificial Sequence: Synthetic oligonucleotide
gaacuggcgggcggccuug

SEQ ID NO: 2644164 - RNA, 19 nt, Artificial Sequence
  Description of Artificial Sequence: Synthetic oligonucleotide
caggugacgccuuccggaa

SEQ ID NO: 2644165 - RNA, 19 nt, Artificial Sequence
  Description of Artificial Sequence: Synthetic oligonucleotide
gacagcaaugggcgucucu

SEQ ID NO: 2644166 - RNA, 19 nt, Artificial Sequence
  Description of Artificial Sequence: Synthetic oligonucleotide
ccaggugacgccuuccgga

SEQ ID NO: 2644167 - RNA, 19 nt, Artificial Sequence
  Description of Artificial Sequence: Synthetic oligonucleotide
ccuugaagucauguuccag

SEQ ID NO: 2644168 - RNA, 19 nt, Artificial Sequence
  Description of Artificial Sequence: Synthetic oligonucleotide
ugacgccuuccggaagcug

SEQ ID NO: 2644169 - RNA, 19 nt, Artificial Sequence
  Description of Artificial Sequence: Synthetic oligonucleotide
gggaaggggcuagaugccc

SEQ ID NO: 2644170 - RNA, 19 nt, Artificial Sequence
  Description of Artificial Sequence: Synthetic oligonucleotide
ggaaggcgcccagggaagg

SEQ ID NO: 2644171 - RNA, 19 nt, Artificial Sequence
  Description of Artificial Sequence: Synthetic oligonucleotide
gucucuccaguggccuggg

SEQ ID NO: 2644172 - RNA, 19 nt, Artificial Sequence
  Description of Artificial Sequence: Synthetic oligonucleotide
gaggccugcuccugaacau

SEQ ID NO: 2644173 - RNA, 19 nt, Artificial Sequence
  Description of Artificial Sequence: Synthetic oligonucleotide
gcugguggaaggcgcccag

SEQ ID NO: 2644174 - RNA, 19 nt, Artificial Sequence
  Description of Artificial Sequence: Synthetic oligonucleotide
aagcuggggcugccugcau

SEQ ID NO: 2644175 - RNA, 19 nt, Artificial Sequence
  Description of Artificial Sequence: Synthetic oligonucleotide
ggccugcuccugaacauug

SEQ ID NO: 2644176 - RNA, 19 nt, Artificial Sequence
  Description of Artificial Sequence: Synthetic oligonucleotide
ggcacuagugugauaggcu

SEQ ID NO: 2644177 - RNA, 19 nt, Artificial Sequence
  Description of Artificial Sequence: Synthetic oligonucleotide
cgcacuggcacacccauga

SEQ ID NO: 2644178 - RNA, 19 nt, Artificial Sequence
  Description of Artificial Sequence: Synthetic oligonucleotide
agcuggcggcacugcgcag

SEQ ID NO: 2644179 - RNA, 19 nt, Artificial Sequence
  Description of Artificial Sequence: Synthetic oligonucleotide
caaugggcgucucuccagu

SEQ ID NO: 2644180 - RNA, 19 nt, Artificial Sequence
  Description of Artificial Sequence: Synthetic oligonucleotide
gccaaagcuggcggcacug

SEQ ID NO: 2644181 - RNA, 19 nt, Artificial Sequence
  Description of Artificial Sequence: Synthetic oligonucleotide
ugcccugcaguggguggcu

SEQ ID NO: 2644182 - RNA, 19 nt, Artificial Sequence
  Description of Artificial Sequence: Synthetic oligonucleotide
cagggucagcgacagcgaa

SEQ ID NO: 2644183 - RNA, 19 nt, Artificial Sequence
  Description of Artificial Sequence: Synthetic oligonucleotide
cuagugugauaggcugaga

SEQ ID NO: 2644184 - RNA, 19 nt, Artificial Sequence
  Description of Artificial Sequence: Synthetic oligonucleotide
gcacuggcacacccaugag

SEQ ID NO: 2644185 - RNA, 19 nt, Artificial Sequence
  Description of Artificial Sequence: Synthetic oligonucleotide
ccguucccguuucaccagg

SEQ ID NO: 2644186 - RNA, 19 nt, Artificial Sequence
  Description of Artificial Sequence: Synthetic oligonucleotide
ggcacacccaugaggccug

SEQ ID NO: 2644187 - RNA, 19 nt, Artificial Sequence
  Description of Artificial Sequence: Synthetic oligonucleotide
cuucagcaccugggugacc

SEQ ID NO: 2644188 - RNA, 19 nt, Artificial Sequence
  Description of Artificial Sequence: Synthetic oligonucleotide
gacagcgaagcuagaucau

SEQ ID NO: 2644189 - RNA, 19 nt, Artificial Sequence
  Description of Artificial Sequence: Synthetic oligonucleotide
guccauccccaauguccuc

SEQ ID NO: 2644190 - RNA, 19 nt, Artificial Sequence
  Description of Artificial Sequence: Synthetic oligonucleotide
acgccuuccggaagcuggu

SEQ ID NO: 2644191 - RNA, 19 nt, Artificial Sequence
  Description of Artificial Sequence: Synthetic oligonucleotide
cguucccguuucaccaggg

SEQ ID NO: 2644192 - RNA, 19 nt, Artificial Sequence
  Description of Artificial Sequence: Synthetic oligonucleotide
cucgcacuggcacacccau

SEQ ID NO: 2644193 - RNA, 19 nt, Artificial Sequence
  Description of Artificial Sequence: Synthetic oligonucleotide
cagcuggcccacuggucca

SEQ ID NO: 2644194 - RNA, 19 nt, Artificial Sequence
  Description of Artificial Sequence: Synthetic oligonucleotide
cuuccggaagcugguggaa

SEQ ID NO: 2644195 - RNA, 19 nt, Artificial Sequence
  Description of Artificial Sequence: Synthetic oligonucleotide
ccggaagcugguggaaggc

SEQ ID NO: 2644196 - RNA, 19 nt, Artificial Sequence
  Description of Artificial Sequence: Synthetic oligonucleotide
ggucacggaucaccaugga

SEQ ID NO: 2644197 - RNA, 19 nt, Artificial Sequence
  Description of Artificial Sequence: Synthetic oligonucleotide
aggcugcggccauccacau

SEQ ID NO: 2644198 - RNA, 19 nt, Artificial Sequence
  Description of Artificial Sequence: Synthetic oligonucleotide
cggaagcugguggaaggcg

SEQ ID NO: 2644199 - RNA, 19 nt, Artificial Sequence
  Description of Artificial Sequence: Synthetic oligonucleotide
cugcggccauccacaucug

SEQ ID NO: 2644200 - RNA, 19 nt, Artificial Sequence
  Description of Artificial Sequence: Synthetic oligonucleotide
gggugaccacguuguccag

SEQ ID NO: 2644201 - RNA, 19 nt, Artificial Sequence
  Description of Artificial Sequence: Synthetic oligonucleotide
ggguggcuggggucacucc

SEQ ID NO: 2644202 - RNA, 19 nt, Artificial Sequence
  Description of Artificial Sequence: Synthetic oligonucleotide
ccaaagcuggcggcacugc

SEQ ID NO: 2644203 - RNA, 19 nt, Artificial Sequence
  Description of Artificial Sequence: Synthetic oligonucleotide
ccagugagcucugcugcug

SEQ ID NO: 2644204 - RNA, 19 nt, Artificial Sequence
  Description of Artificial Sequence: Synthetic oligonucleotide
gccacacggugcuccacca

SEQ ID NO: 2644205 - RNA, 19 nt, Artificial Sequence
  Description of Artificial Sequence: Synthetic oligonucleotide
gcaucaucuaagaggcacu

SEQ ID NO: 2644206 - RNA, 19 nt, Artificial Sequence
  Description of Artificial Sequence: Synthetic oligonucleotide
ugacagcaaugggcgucuc

SEQ ID NO: 2644207 - RNA, 19 nt, Artificial Sequence
  Description of Artificial Sequence: Synthetic oligonucleotide
gggucacaguaaacauggc

SEQ ID NO: 2644208 - RNA, 19 nt, Artificial Sequence
  Description of Artificial Sequence: Synthetic oligonucleotide
gcgucucuccaguggccug

SEQ ID NO: 2644209 - RNA, 19 nt, Artificial Sequence
  Description of Artificial Sequence: Synthetic oligonucleotide
cuccucgcacuggcacacc

SEQ ID NO: 2644210 - RNA, 19 nt, Artificial Sequence
  Description of Artificial Sequence: Synthetic oligonucleotide
cucgcccaggcugcggcca

SEQ ID NO: 2644211 - RNA, 19 nt, Artificial Sequence
  Description of Artificial Sequence: Synthetic oligonucleotide
ggaaggggcuagaugcccu

SEQ ID NO: 2644212 - RNA, 19 nt, Artificial Sequence
  Description of Artificial Sequence: Synthetic oligonucleotide
gggcgucucuccaguggcc

SEQ ID NO: 2644213 - RNA, 19 nt, Artificial Sequence
  Description of Artificial Sequence: Synthetic oligonucleotide
cugcuguguccauccccaa

SEQ ID NO: 2644214 - RNA, 19 nt, Artificial Sequence
  Description of Artificial Sequence: Synthetic oligonucleotide
guggcuggggucacuccgu

SEQ ID NO: 2644215 - RNA, 19 nt, Artificial Sequence
  Description of Artificial Sequence: Synthetic oligonucleotide
ccaugaggccugcuccuga

SEQ ID NO: 2644216 - RNA, 19 nt, Artificial Sequence
  Description of Artificial Sequence: Synthetic oligonucleotide
ggggucacuccguucccgu

SEQ ID NO: 2644217 - RNA, 19 nt, Artificial Sequence
  Description of Artificial Sequence: Synthetic oligonucleotide
cccguuucaccaggggcuc

SEQ ID NO: 2644218 - RNA, 19 nt, Artificial Sequence
  Description of Artificial Sequence: Synthetic oligonucleotide
gcccaggcugcggccaucc

SEQ ID NO: 2644219 - RNA, 19 nt, Artificial Sequence
  Description of Artificial Sequence: Synthetic oligonucleotide
gggccaggugacgccuucc

SEQ ID NO: 2644220 - RNA, 19 nt, Artificial Sequence
  Description of Artificial Sequence: Synthetic oligonucleotide
ccucgcacuggcacaccca

SEQ ID NO: 2644221 - RNA, 19 nt, Artificial Sequence
  Description of Artificial Sequence: Synthetic oligonucleotide
ccugggugaccacguuguc

SEQ ID NO: 2644222 - RNA, 19 nt, Artificial Sequence
  Description of Artificial Sequence: Synthetic oligonucleotide
ccguuucaccaggggcucg

SEQ ID NO: 2644223 - RNA, 19 nt, Artificial Sequence
  Description of Artificial Sequence: Synthetic oligonucleotide
ggcugcggccauccacauc

SEQ ID NO: 2644224 - RNA, 19 nt, Artificial Sequence
  Description of Artificial Sequence: Synthetic oligonucleotide
ccagacguuguaccaggcu

SEQ ID NO: 2644225 - RNA, 19 nt, Artificial Sequence
  Description of Artificial Sequence: Synthetic oligonucleotide
ggcgucucuccaguggccu

SEQ ID NO: 2644226 - RNA, 19 nt, Artificial Sequence
  Description of Artificial Sequence: Synthetic oligonucleotide
gcaugcugcuucagcaccu

SEQ ID NO: 2644227 - RNA, 19 nt, Artificial Sequence
  Description of Artificial Sequence: Synthetic oligonucleotide
cagcgacagcgaagcuaga

SEQ ID NO: 2644228 - RNA, 19 nt, Artificial Sequence
  Description of Artificial Sequence: Synthetic oligonucleotide
gugacgccuuccggaagcu

SEQ ID NO: 2644229 - RNA, 19 nt, Artificial Sequence
  Description of Artificial Sequence: Synthetic oligonucleotide
ggucagcgacagcgaagcu

SEQ ID NO: 2644230 - RNA, 19 nt, Artificial Sequence
  Description of Artificial Sequence: Synthetic oligonucleotide
gcacacccaugaggccugc

SEQ ID NO: 2644231 - RNA, 19 nt, Artificial Sequence
  Description of Artificial Sequence: Synthetic oligonucleotide
ggcgggcggccuuggggaa

SEQ ID NO: 2644232 - RNA, 19 nt, Artificial Sequence
  Description of Artificial Sequence: Synthetic oligonucleotide
cacacccaugaggccugcu

SEQ ID NO: 2644233 - RNA, 19 nt, Artificial Sequence
  Description of Artificial Sequence: Synthetic oligonucleotide
ccacguuguccagccagcu

SEQ ID NO: 2644234 - RNA, 19 nt, Artificial Sequence
  Description of Artificial Sequence: Synthetic oligonucleotide
ggcgcccagggaaggggcu

SEQ ID NO: 2644235 - RNA, 19 nt, Artificial Sequence
  Description of Artificial Sequence: Synthetic oligonucleotide
gcccagggaaggggcuaga

SEQ ID NO: 2644236 - RNA, 19 nt, Artificial Sequence
  Description of Artificial Sequence: Synthetic oligonucleotide
gcgcccagggaaggggcua

SEQ ID NO: 2644237 - RNA, 19 nt, Artificial Sequence
  Description of Artificial Sequence: Synthetic oligonucleotide
cgccuuccggaagcuggug

SEQ ID NO: 2644238 - RNA, 19 nt, Artificial Sequence
  Description of Artificial Sequence: Synthetic oligonucleotide
gcaccugggugaccacguu

SEQ ID NO: 2644239 - RNA, 19 nt, Artificial Sequence
  Description of Artificial Sequence: Synthetic oligonucleotide
cccagggaaggggcuagau

SEQ ID NO: 2644240 - RNA, 19 nt, Artificial Sequence
  Description of Artificial Sequence: Synthetic oligonucleotide
aaaguccugguuuucaggc

SEQ ID NO: 2644241 - RNA, 19 nt, Artificial Sequence
  Description of Artificial Sequence: Synthetic oligonucleotide
aagccugucagguauuccc

SEQ ID NO: 2644242 - RNA, 19 nt, Artificial Sequence
  Description of Artificial Sequence: Synthetic oligonucleotide
gaugcgcugagauaggagg

SEQ ID NO: 2644243 - RNA, 19 nt, Artificial Sequence
  Description of Artificial Sequence: Synthetic oligonucleotide
gaucuuuggacuuccuggg

SEQ ID NO: 2644244 - RNA, 19 nt, Artificial Sequence
  Description of Artificial Sequence: Synthetic oligonucleotide
uuuguuggcuucuccaugc

SEQ ID NO: 2644245 - RNA, 19 nt, Artificial Sequence
  Description of Artificial Sequence: Synthetic oligonucleotide
agaccuagcagccgggccc

SEQ ID NO: 2644246 - RNA, 19 nt, Artificial Sequence
  Description of Artificial Sequence: Synthetic oligonucleotide
gauaggaggggaucuuugg

SEQ ID NO: 2644247 - RNA, 19 nt, Artificial Sequence
  Description of Artificial Sequence: Synthetic oligonucleotide
ucaauggccgccuucuucc

SEQ ID NO: 2644248 - RNA, 19 nt, Artificial Sequence
  Description of Artificial Sequence: Synthetic oligonucleotide
ggaucuuuggacuuccugg

SEQ ID NO: 2644249 - RNA, 19 nt, Artificial Sequence
  Description of Artificial Sequence: Synthetic oligonucleotide
uuugcugucaccagccgcu

SEQ ID NO: 2644250 - RNA, 19 nt, Artificial Sequence
  Description of Artificial Sequence: Synthetic oligonucleotide
gaaaaguccugguuuucag

SEQ ID NO: 2644251 - RNA, 19 nt, Artificial Sequence
  Description of Artificial Sequence: Synthetic oligonucleotide
uccaggucacugauggugg

SEQ ID NO: 2644252 - RNA, 19 nt, Artificial Sequence
  Description of Artificial Sequence: Synthetic oligonucleotide
aggguguuuccucuugacc

SEQ ID NO: 2644253 - RNA, 19 nt, Artificial Sequence
  Description of Artificial Sequence: Synthetic oligonucleotide
agcaucuucagguauuccu

SEQ ID NO: 2644254 - RNA, 19 nt, Artificial Sequence
  Description of Artificial Sequence: Synthetic oligonucleotide
ugugcaugcaguguggcug

SEQ ID NO: 2644255 - RNA, 19 nt, Artificial Sequence
  Description of Artificial Sequence: Synthetic oligonucleotide
ucacugaugguggucacgg

SEQ ID NO: 2644256 - RNA, 19 nt, Artificial Sequence
  Description of Artificial Sequence: Synthetic oligonucleotide
ugguuuucaggcuuaggcu

SEQ ID NO: 2644257 - RNA, 19 nt, Artificial Sequence
  Description of Artificial Sequence: Synthetic oligonucleotide
uucuccaugcaugacaccu

SEQ ID NO: 2644258 - RNA, 19 nt, Artificial Sequence
  Description of Artificial Sequence: Synthetic oligonucleotide
guacgaguggcacugggag

SEQ ID NO: 2644259 - RNA, 19 nt, Artificial Sequence
  Description of Artificial Sequence: Synthetic oligonucleotide
aggcuuaggcugcaguuac

SEQ ID NO: 2644260 - RNA, 19 nt, Artificial Sequence
  Description of Artificial Sequence: Synthetic oligonucleotide
aucuuuggacuuccugggc

SEQ ID NO: 2644261 - RNA, 19 nt, Artificial Sequence
  Description of Artificial Sequence: Synthetic oligonucleotide
acagccacggacuuuggcu

SEQ ID NO: 2644262 - RNA, 19 nt, Artificial Sequence
  Description of Artificial Sequence: Synthetic oligonucleotide
caugacaccuccuccuggg

SEQ ID NO: 2644263 - RNA, 19 nt, Artificial Sequence
  Description of Artificial Sequence: Synthetic oligonucleotide
ugugugauuggggugguca

SEQ ID NO: 2644264 - RNA, 19 nt, Artificial Sequence
  Description of Artificial Sequence: Synthetic oligonucleotide
uuccguuuguggaagccug

SEQ ID NO: 2644265 - RNA, 19 nt, Artificial Sequence
  Description of Artificial Sequence: Synthetic oligonucleotide
ugcaguuaccccucagcag

SEQ ID NO: 2644266 - RNA, 19 nt, Artificial Sequence
  Description of Artificial Sequence: Synthetic oligonucleotide
gguuuucaggcuuaggcug

SEQ ID NO: 2644267 - RNA, 19 nt, Artificial Sequence
  Description of Artificial Sequence: Synthetic oligonucleotide
cugggacccauccaggucc

SEQ ID NO: 2644268 - RNA, 19 nt, Artificial Sequence
  Description of Artificial Sequence: Synthetic oligonucleotide
uaggaggggaucuuuggac

SEQ ID NO: 2644269 - RNA, 19 nt, Artificial Sequence
  Description of Artificial Sequence: Synthetic oligonucleotide
caugcaugacaccuccucc

SEQ ID NO: 2644270 - RNA, 19 nt, Artificial Sequence
  Description of Artificial Sequence: Synthetic oligonucleotide
acggacuuuggcuggggac

SEQ ID NO: 2644271 - RNA, 19 nt, Artificial Sequence
  Description of Artificial Sequence: Synthetic oligonucleotide
uaccccucagcagagcugg

SEQ ID NO: 2644272 - RNA, 19 nt, Artificial Sequence
  Description of Artificial Sequence: Synthetic oligonucleotide
augguggucacggugacug

SEQ ID NO: 2644273 - RNA, 19 nt, Artificial Sequence
  Description of Artificial Sequence: Synthetic oligonucleotide
gacaccuccuccugggacc

SEQ ID NO: 2644274 - RNA, 19 nt, Artificial Sequence
  Description of Artificial Sequence: Synthetic oligonucleotide
guugcagggacagccacgg

SEQ ID NO: 2644275 - RNA, 19 nt, Artificial Sequence
  Description of Artificial Sequence: Synthetic oligonucleotide
aauggccgccuucuuccuc

SEQ ID NO: 2644276 - RNA, 19 nt, Artificial Sequence
  Description of Artificial Sequence: Synthetic oligonucleotide
cuuccgacugugugcaugc

SEQ ID NO: 2644277 - RNA, 19 nt, Artificial Sequence
  Description of Artificial Sequence: Synthetic oligonucleotide
caugcaguguggcugugag

SEQ ID NO: 2644278 - RNA, 19 nt, Artificial Sequence
  Description of Artificial Sequence: Synthetic oligonucleotide
auaggaggggaucuuugga

SEQ ID NO: 2644279 - RNA, 19 nt, Artificial Sequence
  Description of Artificial Sequence: Synthetic oligonucleotide
ugguacgaguggcacuggg

SEQ ID NO: 2644280 - RNA, 19 nt, Artificial Sequence
  Description of Artificial Sequence: Synthetic oligonucleotide
uccgacugugugcaugcag

SEQ ID NO: 2644281 - RNA, 19 nt, Artificial Sequence
  Description of Artificial Sequence: Synthetic oligonucleotide
uucagccgcuguuuuaucu

SEQ ID NO: 2644282 - RNA, 19 nt, Artificial Sequence
  Description of Artificial Sequence: Synthetic oligonucleotide
cuggguugcagggacagcc

SEQ ID NO: 2644283 - RNA, 19 nt, Artificial Sequence
  Description of Artificial Sequence: Synthetic oligonucleotide
aaguccugguuuucaggcu

SEQ ID NO: 2644284 - RNA, 19 nt, Artificial Sequence
  Description of Artificial Sequence: Synthetic oligonucleotide
ugcaugacaccuccuccug

SEQ ID NO: 2644285 - RNA, 19 nt, Artificial Sequence
  Description of Artificial Sequence: Synthetic oligonucleotide
cuugagggcucacuccccg

SEQ ID NO: 2644286 - RNA, 19 nt, Artificial Sequence
  Description of Artificial Sequence: Synthetic oligonucleotide
acugcaccgacucuguuuu

SEQ ID NO: 2644287 - RNA, 19 nt, Artificial Sequence
  Description of Artificial Sequence: Synthetic oligonucleotide
cuggcuuuuccggucaucc

SEQ ID NO: 2644288 - RNA, 19 nt, Artificial Sequence
  Description of Artificial Sequence: Synthetic oligonucleotide
acccacaggcuucuugagg

SEQ ID NO: 2644289 - RNA, 19 nt, Artificial Sequence
  Description of Artificial Sequence: Synthetic oligonucleotide
augcaugacaccuccuccu

SEQ ID NO: 2644290 - RNA, 19 nt, Artificial Sequence
  Description of Artificial Sequence: Synthetic oligonucleotide
aggaggggaucuuuggacu

SEQ ID NO: 2644291 - RNA, 19 nt, Artificial Sequence
  Description of Artificial Sequence: Synthetic oligonucleotide
ugugagggaggagaugcgc

SEQ ID NO: 2644292 - RNA, 19 nt, Artificial Sequence
  Description of Artificial Sequence: Synthetic oligonucleotide
ugcgcugagauaggagggg

SEQ ID NO: 2644293 - RNA, 19 nt, Artificial Sequence
  Description of Artificial Sequence: Synthetic oligonucleotide
cacggugacugugugauug

SEQ ID NO: 2644294 - RNA, 19 nt, Artificial Sequence
  Description of Artificial Sequence: Synthetic oligonucleotide
ugacaccuccuccugggac

SEQ ID NO: 2644295 - RNA, 19 nt, Artificial Sequence
  Description of Artificial Sequence: Synthetic oligonucleotide
cuuaggcugcaguuacccc

SEQ ID NO: 2644296 - RNA, 19 nt, Artificial Sequence
  Description of Artificial Sequence: Synthetic oligonucleotide
ucuuccgacugugugcaug

SEQ ID NO: 2644297 - RNA, 19 nt, Artificial Sequence
  Description of Artificial Sequence: Synthetic oligonucleotide
uuaccccucagcagagcug

SEQ ID NO: 2644298 - RNA, 19 nt, Artificial Sequence
  Description of Artificial Sequence: Synthetic oligonucleotide
uuggacuuccugggcaagg

SEQ ID NO: 2644299 - RNA, 19 nt, Artificial Sequence
  Description of Artificial Sequence: Synthetic oligonucleotide
cugugccuggcuuuuccgg

SEQ ID NO: 2644300 - RNA, 19 nt, Artificial Sequence
  Description of Artificial Sequence: Synthetic oligonucleotide
ucagccgcuguuuuaucuc

SEQ ID NO: 2644301 - RNA, 19 nt, Artificial Sequence
  Description of Artificial Sequence: Synthetic oligonucleotide
ucaggcuuaggcugcaguu

SEQ ID NO: 2644302 - RNA, 19 nt, Artificial Sequence
  Description of Artificial Sequence: Synthetic oligonucleotide
gggguggucauacugcacc

SEQ ID NO: 2644303 - RNA, 19 nt, Artificial Sequence
  Description of Artificial Sequence: Synthetic oligonucleotide
cugugugcaugcagugugg

SEQ ID NO: 2644304 - RNA, 19 nt, Artificial Sequence
  Description of Artificial Sequence: Synthetic oligonucleotide
aggggaucuuuggacuucc

SEQ ID NO: 2644305 - RNA, 19 nt, Artificial Sequence
  Description of Artificial Sequence: Synthetic oligonucleotide
ucuugagggcucacucccc

SEQ ID NO: 2644306 - RNA, 19 nt, Artificial Sequence
  Description of Artificial Sequence: Synthetic oligonucleotide
guuuucaggcuuaggcugc

SEQ ID NO: 2644307 - RNA, 19 nt, Artificial Sequence
  Description of Artificial Sequence: Synthetic oligonucleotide
uggucauacugcaccgacu

SEQ ID NO: 2644308 - RNA, 19 nt, Artificial Sequence
  Description of Artificial Sequence: Synthetic oligonucleotide
gcugugagggaggagaugc

SEQ ID NO: 2644309 - RNA, 19 nt, Artificial Sequence
  Description of Artificial Sequence: Synthetic oligonucleotide
gcaguuaccccucagcaga

SEQ ID NO: 2644310 - RNA, 19 nt, Artificial Sequence
  Description of Artificial Sequence: Synthetic oligonucleotide
uccugggcaaggcuuuugu

SEQ ID NO: 2644311 - RNA, 19 nt, Artificial Sequence
  Description of Artificial Sequence: Synthetic oligonucleotide
acggugacugugugauugg

SEQ ID NO: 2644312 - RNA, 19 nt, Artificial Sequence
  Description of Artificial Sequence: Synthetic oligonucleotide
gugauugggguggucauac

SEQ ID NO: 2644313 - RNA, 19 nt, Artificial Sequence
  Description of Artificial Sequence: Synthetic oligonucleotide
acgaguggcacugggaggu

SEQ ID NO: 2644314 - RNA, 19 nt, Artificial Sequence
  Description of Artificial Sequence: Synthetic oligonucleotide
gugacugugugauuggggu

SEQ ID NO: 2644315 - RNA, 19 nt, Artificial Sequence
  Description of Artificial Sequence: Synthetic oligonucleotide
gaggguguuuccucuugac

SEQ ID NO: 2644316 - RNA, 19 nt, Artificial Sequence
  Description of Artificial Sequence: Synthetic oligonucleotide
cuuuuccggucauccggcg

SEQ ID NO: 2644317 - RNA, 19 nt, Artificial Sequence
  Description of Artificial Sequence: Synthetic oligonucleotide
caaggcuuuuguuggcuuc

SEQ ID NO: 2644318 - RNA, 19 nt, Artificial Sequence
  Description of Artificial Sequence: Synthetic oligonucleotide
guggucauacugcaccgac

SEQ ID NO: 2644319 - RNA, 19 nt, Artificial Sequence
  Description of Artificial Sequence: Synthetic oligonucleotide
gacagccacggacuuuggc

SEQ ID NO: 2644320 - RNA, 19 nt, Artificial Sequence
  Description of Artificial Sequence: Synthetic oligonucleotide
uacugcaccgacucuguuu

SEQ ID NO: 2644321 - RNA, 19 nt, Artificial Sequence
  Description of Artificial Sequence: Synthetic oligonucleotide
cagccacggacuuuggcug

SEQ ID NO: 2644322 - RNA, 19 nt, Artificial Sequence
  Description of Artificial Sequence: Synthetic oligonucleotide
cagguauuccugguggcgc

SEQ ID NO: 2644323 - RNA, 19 nt, Artificial Sequence
  Description of Artificial Sequence: Synthetic oligonucleotide
ccuucuuccgacugugugc

SEQ ID NO: 2644324 - RNA, 19 nt, Artificial Sequence
  Description of Artificial Sequence: Synthetic oligonucleotide
ggcacugggagguuucuug

SEQ ID NO: 2644325 - RNA, 19 nt, Artificial Sequence
  Description of Artificial Sequence: Synthetic oligonucleotide
uguuggcuucuccaugcau

SEQ ID NO: 2644326 - RNA, 19 nt, Artificial Sequence
  Description of Artificial Sequence: Synthetic oligonucleotide
cucagcagagcuggguugc

SEQ ID NO: 2644327 - RNA, 19 nt, Artificial Sequence
  Description of Artificial Sequence: Synthetic oligonucleotide
auggccgccuucuuccucu

SEQ ID NO: 2644328 - RNA, 19 nt, Artificial Sequence
  Description of Artificial Sequence: Synthetic oligonucleotide
cagccgcuguuuuaucucc

SEQ ID NO: 2644329 - RNA, 19 nt, Artificial Sequence
  Description of Artificial Sequence: Synthetic oligonucleotide
cugcaguuaccccucagca

SEQ ID NO: 2644330 - RNA, 19 nt, Artificial Sequence
  Description of Artificial Sequence: Synthetic oligonucleotide
aggucacugauggugguca

SEQ ID NO: 2644331 - RNA, 19 nt, Artificial Sequence
  Description of Artificial Sequence: Synthetic oligonucleotide
agccacggacuuuggcugg

SEQ ID NO: 2644332 - RNA, 19 nt, Artificial Sequence
  Description of Artificial Sequence: Synthetic oligonucleotide
agauaggaggggaucuuug

SEQ ID NO: 2644333 - RNA, 19 nt, Artificial Sequence
  Description of Artificial Sequence: Synthetic oligonucleotide
aguuaccccucagcagagc

SEQ ID NO: 2644334 - RNA, 19 nt, Artificial Sequence
  Description of Artificial Sequence: Synthetic oligonucleotide
acuuuggcuggggacccac

SEQ ID NO: 2644335 - RNA, 19 nt, Artificial Sequence
  Description of Artificial Sequence: Synthetic oligonucleotide
uccguuuguggaagccugu

SEQ ID NO: 2644336 - RNA, 19 nt, Artificial Sequence
  Description of Artificial Sequence: Synthetic oligonucleotide
uggucacggugacugugug

SEQ ID NO: 2644337 - RNA, 19 nt, Artificial Sequence
  Description of Artificial Sequence: Synthetic oligonucleotide
cuccaccuuccguuugugg

SEQ ID NO: 2644338 - RNA, 19 nt, Artificial Sequence
  Description of Artificial Sequence: Synthetic oligonucleotide
agccugucagguauucccg

SEQ ID NO: 2644339 - RNA, 19 nt, Artificial Sequence
  Description of Artificial Sequence: Synthetic oligonucleotide
uccugggacccauccaggu

SEQ ID NO: 2644340 - RNA, 19 nt, Artificial Sequence
  Description of Artificial Sequence: Synthetic oligonucleotide
gcagagcuggguugcaggg

SEQ ID NO: 2644341 - RNA, 19 nt, Artificial Sequence
  Description of Artificial Sequence: Synthetic oligonucleotide
uccccuugcucaggcaggg

SEQ ID NO: 2644342 - RNA, 19 nt, Artificial Sequence
  Description of Artificial Sequence: Synthetic oligonucleotide
gcugcaguuaccccucagc

SEQ ID NO: 2644343 - RNA, 19 nt, Artificial Sequence
  Description of Artificial Sequence: Synthetic oligonucleotide
ggugacugugugauugggg

SEQ ID NO: 2644344 - RNA, 19 nt, Artificial Sequence
  Description of Artificial Sequence: Synthetic oligonucleotide
gaagccugucagguauucc

SEQ ID NO: 2644345 - RNA, 19 nt, Artificial Sequence
  Description of Artificial Sequence: Synthetic oligonucleotide
gcacugggagguuucuugg

SEQ ID NO: 2644346 - RNA, 19 nt, Artificial Sequence
  Description of Artificial Sequence: Synthetic oligonucleotide
uguggaagccugucaggua

SEQ ID NO: 2644347 - RNA, 19 nt, Artificial Sequence
  Description of Artificial Sequence: Synthetic oligonucleotide
ugccuggcuuuuccgguca

SEQ ID NO: 2644348 - RNA, 19 nt, Artificial Sequence
  Description of Artificial Sequence: Synthetic oligonucleotide
cagaccuagcagccgggcc

SEQ ID NO: 2644349 - RNA, 19 nt, Artificial Sequence
  Description of Artificial Sequence: Synthetic oligonucleotide
ggguggucauacugcaccg

SEQ ID NO: 2644350 - RNA, 19 nt, Artificial Sequence
  Description of Artificial Sequence: Synthetic oligonucleotide
agggaggagaugcgcugag

SEQ ID NO: 2644351 - RNA, 19 nt, Artificial Sequence
  Description of Artificial Sequence: Synthetic oligonucleotide
cuccugggacccauccagg

SEQ ID NO: 2644352 - RNA, 19 nt, Artificial Sequence
  Description of Artificial Sequence: Synthetic oligonucleotide
agaugcgcugagauaggag

SEQ ID NO: 2644353 - RNA, 19 nt, Artificial Sequence
  Description of Artificial Sequence: Synthetic oligonucleotide
ugcugguacgaguggcacu

SEQ ID NO: 2644354 - RNA, 19 nt, Artificial Sequence
  Description of Artificial Sequence: Synthetic oligonucleotide
caguuaccccucagcagag

SEQ ID NO: 2644355 - RNA, 19 nt, Artificial Sequence
  Description of Artificial Sequence: Synthetic oligonucleotide
ugggucuugcugguacgag

SEQ ID NO: 2644356 - RNA, 19 nt, Artificial Sequence
  Description of Artificial Sequence: Synthetic oligonucleotide
uuuucaggcuuaggcugca

SEQ ID NO: 2644357 - RNA, 19 nt, Artificial Sequence
  Description of Artificial Sequence: Synthetic oligonucleotide
gcuuaggcugcaguuaccc

SEQ ID NO: 2644358 - RNA, 19 nt, Artificial Sequence
  Description of Artificial Sequence: Synthetic oligonucleotide
uggaguccugggcccgccg

SEQ ID NO: 2644359 - RNA, 19 nt, Artificial Sequence
  Description of Artificial Sequence: Synthetic oligonucleotide
ugcugucaccagccgcucc

SEQ ID NO: 2644360 - RNA, 19 nt, Artificial Sequence
  Description of Artificial Sequence: Synthetic oligonucleotide
gggcagaccuagcagccgg

SEQ ID NO: 2644361 - RNA, 19 nt, Artificial Sequence
  Description of Artificial Sequence: Synthetic oligonucleotide
uugcugguacgaguggcac

SEQ ID NO: 2644362 - RNA, 19 nt, Artificial Sequence
  Description of Artificial Sequence: Synthetic oligonucleotide
uggaaaaguccugguuuuc

SEQ ID NO: 2644363 - RNA, 19 nt, Artificial Sequence
  Description of Artificial Sequence: Synthetic oligonucleotide
ggacccacaggcuucuuga

SEQ ID NO: 2644364 - RNA, 19 nt, Artificial Sequence
  Description of Artificial Sequence: Synthetic oligonucleotide
uccaugcaugacaccuccu

SEQ ID NO: 2644365 - RNA, 19 nt, Artificial Sequence
  Description of Artificial Sequence: Synthetic oligonucleotide
ugggacccauccagguccc

SEQ ID NO: 2644366 - RNA, 19 nt, Artificial Sequence
  Description of Artificial Sequence: Synthetic oligonucleotide
guuaccccucagcagagcu

SEQ ID NO: 2644367 - RNA, 19 nt, Artificial Sequence
  Description of Artificial Sequence: Synthetic oligonucleotide
gggacagccacggacuuug

SEQ ID NO: 2644368 - RNA, 19 nt, Artificial Sequence
  Description of Artificial Sequence: Synthetic oligonucleotide
guggaagccugucagguau

SEQ ID NO: 2644369 - RNA, 19 nt, Artificial Sequence
  Description of Artificial Sequence: Synthetic oligonucleotide
ucacuccccgcugugccug

SEQ ID NO: 2644370 - RNA, 19 nt, Artificial Sequence
  Description of Artificial Sequence: Synthetic oligonucleotide
gaggagaugcgcugagaua

SEQ ID NO: 2644371 - RNA, 19 nt, Artificial Sequence
  Description of Artificial Sequence: Synthetic oligonucleotide
ugauugggguggucauacu

SEQ ID NO: 2644372 - RNA, 19 nt, Artificial Sequence
  Description of Artificial Sequence: Synthetic oligonucleotide
uccuccagugccuccucuc

SEQ ID NO: 2644373 - RNA, 19 nt, Artificial Sequence
  Description of Artificial Sequence: Synthetic oligonucleotide
ugugauugggguggucaua

SEQ ID NO: 2644374 - RNA, 19 nt, Artificial Sequence
  Description of Artificial Sequence: Synthetic oligonucleotide
uggcugugagggaggagau

SEQ ID NO: 2644375 - RNA, 19 nt, Artificial Sequence
  Description of Artificial Sequence: Synthetic oligonucleotide
ucaggcaggggcagaccua

SEQ ID NO: 2644376 - RNA, 19 nt, Artificial Sequence
  Description of Artificial Sequence: Synthetic oligonucleotide
ugguggaguccugggcccg

SEQ ID NO: 2644377 - RNA, 19 nt, Artificial Sequence
  Description of Artificial Sequence: Synthetic oligonucleotide
cuuuuguuggcuucuccau

SEQ ID NO: 2644378 - RNA, 19 nt, Artificial Sequence
  Description of Artificial Sequence: Synthetic oligonucleotide
aggcuggaaaaguccuggu

SEQ ID NO: 2644379 - RNA, 19 nt, Artificial Sequence
  Description of Artificial Sequence: Synthetic oligonucleotide
gcugggucuugcugguacg

SEQ ID NO: 2644380 - RNA, 19 nt, Artificial Sequence
  Description of Artificial Sequence: Synthetic oligonucleotide
augacaccuccuccuggga

SEQ ID NO: 2644381 - RNA, 19 nt, Artificial Sequence
  Description of Artificial Sequence: Synthetic oligonucleotide
caccuuccguuuguggaag

SEQ ID NO: 2644382 - RNA, 19 nt, Artificial Sequence
  Description of Artificial Sequence: Synthetic oligonucleotide
ugcuucagccgcuguuuua

SEQ ID NO: 2644383 - RNA, 19 nt, Artificial Sequence
  Description of Artificial Sequence: Synthetic oligonucleotide
gucacggugacugugugau

SEQ ID NO: 2644384 - RNA, 19 nt, Artificial Sequence
  Description of Artificial Sequence: Synthetic oligonucleotide
uuccggucauccggcggcg

SEQ ID NO: 2644385 - RNA, 19 nt, Artificial Sequence
  Description of Artificial Sequence: Synthetic oligonucleotide
gaccuagcagccgggcccc

SEQ ID NO: 2644386 - RNA, 19 nt, Artificial Sequence
  Description of Artificial Sequence: Synthetic oligonucleotide
aucuccucaauggccgccu

SEQ ID NO: 2644387 - RNA, 19 nt, Artificial Sequence
  Description of Artificial Sequence: Synthetic oligonucleotide
ccaugcaugacaccuccuc

SEQ ID NO: 2644388 - RNA, 19 nt, Artificial Sequence
  Description of Artificial Sequence: Synthetic oligonucleotide
cuucagccgcuguuuuauc

SEQ ID NO: 2644389 - RNA, 19 nt, Artificial Sequence
  Description of Artificial Sequence: Synthetic oligonucleotide
uuccugggcaaggcuuuug

SEQ ID NO: 2644390 - RNA, 19 nt, Artificial Sequence
  Description of Artificial Sequence: Synthetic oligonucleotide
cccuugcucaggcaggggc

SEQ ID NO: 2644391 - RNA, 19 nt, Artificial Sequence
  Description of Artificial Sequence: Synthetic oligonucleotide
gagggaggagaugcgcuga

SEQ ID NO: 2644392 - RNA, 19 nt, Artificial Sequence
  Description of Artificial Sequence: Synthetic oligonucleotide
uggaagccugucagguauu

SEQ ID NO: 2644393 - RNA, 19 nt, Artificial Sequence
  Description of Artificial Sequence: Synthetic oligonucleotide
gcuuuuccggucauccggc

SEQ ID NO: 2644394 - RNA, 19 nt, Artificial Sequence
  Description of Artificial Sequence: Synthetic oligonucleotide
gguggucacggugacugug

SEQ ID NO: 2644395 - RNA, 19 nt, Artificial Sequence
  Description of Artificial Sequence: Synthetic oligonucleotide
ggagaugcgcugagauagg

SEQ ID NO: 2644396 - RNA, 19 nt, Artificial Sequence
  Description of Artificial Sequence: Synthetic oligonucleotide
cauacugcaccgacucugu

SEQ ID NO: 2644397 - RNA, 19 nt, Artificial Sequence
  Description of Artificial Sequence: Synthetic oligonucleotide
ucagcagagcuggguugca

SEQ ID NO: 2644398 - RNA, 19 nt, Artificial Sequence
  Description of Artificial Sequence: Synthetic oligonucleotide
cauccggcggcggcgcugg

SEQ ID NO: 2644399 - RNA, 19 nt, Artificial Sequence
  Description of Artificial Sequence: Synthetic oligonucleotide
cuggaaaaguccugguuuu

SEQ ID NO: 2644400 - RNA, 19 nt, Artificial Sequence
  Description of Artificial Sequence: Synthetic oligonucleotide
ggaggagaugcgcugagau

SEQ ID NO: 2644401 - RNA, 19 nt, Artificial Sequence
  Description of Artificial Sequence: Synthetic oligonucleotide
ugguggucacggugacugu

SEQ ID NO: 2644402 - RNA, 19 nt, Artificial Sequence
  Description of Artificial Sequence: Synthetic oligonucleotide
uauuccugguggcgcucuu

SEQ ID NO: 2644403 - RNA, 19 nt, Artificial Sequence
  Description of Artificial Sequence: Synthetic oligonucleotide
ucauccggcggcggcgcug

SEQ ID NO: 2644404 - RNA, 19 nt, Artificial Sequence
  Description of Artificial Sequence: Synthetic oligonucleotide
gguuucuugguggaguccu

SEQ ID NO: 2644405 - RNA, 19 nt, Artificial Sequence
  Description of Artificial Sequence: Synthetic oligonucleotide
cuagcagccgggccccuga

SEQ ID NO: 2644406 - RNA, 19 nt, Artificial Sequence
  Description of Artificial Sequence: Synthetic oligonucleotide
guguuuccucuugaccuuc

SEQ ID NO: 2644407 - RNA, 19 nt, Artificial Sequence
  Description of Artificial Sequence: Synthetic oligonucleotide
ccucagcagagcuggguug

SEQ ID NO: 2644408 - RNA, 19 nt, Artificial Sequence
  Description of Artificial Sequence: Synthetic oligonucleotide
gacugugugcaugcagugu

SEQ ID NO: 2644409 - RNA, 19 nt, Artificial Sequence
  Description of Artificial Sequence: Synthetic oligonucleotide
uugcagggacagccacgga

SEQ ID NO: 2644410 - RNA, 19 nt, Artificial Sequence
  Description of Artificial Sequence: Synthetic oligonucleotide
gguacgaguggcacuggga

SEQ ID NO: 2644411 - RNA, 19 nt, Artificial Sequence
  Description of Artificial Sequence: Synthetic oligonucleotide
caggucacugauggugguc

SEQ ID NO: 2644412 - RNA, 19 nt, Artificial Sequence
  Description of Artificial Sequence: Synthetic oligonucleotide
auacugcaccgacucuguu

SEQ ID NO: 2644413 - RNA, 19 nt, Artificial Sequence
  Description of Artificial Sequence: Synthetic oligonucleotide
uccggucauccggcggcgg

SEQ ID NO: 2644414 - RNA, 19 nt, Artificial Sequence
  Description of Artificial Sequence: Synthetic oligonucleotide
cggacuuuggcuggggacc

SEQ ID NO: 2644415 - RNA, 19 nt, Artificial Sequence
  Description of Artificial Sequence: Synthetic oligonucleotide
gguggcgcucuucccggag

SEQ ID NO: 2644416 - RNA, 19 nt, Artificial Sequence
  Description of Artificial Sequence: Synthetic oligonucleotide
uccccgcugugccuggcuu

SEQ ID NO: 2644417 - RNA, 19 nt, Artificial Sequence
  Description of Artificial Sequence: Synthetic oligonucleotide
ccuuccguuuguggaagcc

SEQ ID NO: 2644418 - RNA, 19 nt, Artificial Sequence
  Description of Artificial Sequence: Synthetic oligonucleotide
cuuuggcuggggacccaca

SEQ ID NO: 2644419 - RNA, 19 nt, Artificial Sequence
  Description of Artificial Sequence: Synthetic oligonucleotide
gggcaaggcuuuuguuggc

SEQ ID NO: 2644420 - RNA, 19 nt, Artificial Sequence
  Description of Artificial Sequence: Synthetic oligonucleotide
uggcuucuccaugcaugac

SEQ ID NO: 2644421 - RNA, 19 nt, Artificial Sequence
  Description of Artificial Sequence: Synthetic oligonucleotide
uuccgacugugugcaugca

SEQ ID NO: 2644422 - RNA, 19 nt, Artificial Sequence
  Description of Artificial Sequence: Synthetic oligonucleotide
ggucacggugacuguguga

SEQ ID NO: 2644423 - RNA, 19 nt, Artificial Sequence
  Description of Artificial Sequence: Synthetic oligonucleotide
gugcaugcaguguggcugu

SEQ ID NO: 2644424 - RNA, 19 nt, Artificial Sequence
  Description of Artificial Sequence: Synthetic oligonucleotide
cacuccccgcugugccugg

SEQ ID NO: 2644425 - RNA, 19 nt, Artificial Sequence
  Description of Artificial Sequence: Synthetic oligonucleotide
cacggacuuuggcugggga

SEQ ID NO: 2644426 - RNA, 19 nt, Artificial Sequence
  Description of Artificial Sequence: Synthetic oligonucleotide
cuuccguuuguggaagccu

SEQ ID NO: 2644427 - RNA, 19 nt, Artificial Sequence
  Description of Artificial Sequence: Synthetic oligonucleotide
caggcuuaggcugcaguua

SEQ ID NO: 2644428 - RNA, 19 nt, Artificial Sequence
  Description of Artificial Sequence: Synthetic oligonucleotide
gagauaggaggggaucuuu

SEQ ID NO: 2644429 - RNA, 19 nt, Artificial Sequence
  Description of Artificial Sequence: Synthetic oligonucleotide
gugagggaggagaugcgcu

SEQ ID NO: 2644430 - RNA, 19 nt, Artificial Sequence
  Description of Artificial Sequence: Synthetic oligonucleotide
ggcagaccuagcagccggg

SEQ ID NO: 2644431 - RNA, 19 nt, Artificial Sequence
  Description of Artificial Sequence: Synthetic oligonucleotide
gugugcaugcaguguggcu

SEQ ID NO: 2644432 - RNA, 19 nt, Artificial Sequence
  Description of Artificial Sequence: Synthetic oligonucleotide
ggggcagaccuagcagccg

SEQ ID NO: 2644433 - RNA, 19 nt, Artificial Sequence
  Description of Artificial Sequence: Synthetic oligonucleotide
gugugauugggguggucau

SEQ ID NO: 2644434 - RNA, 19 nt, Artificial Sequence
  Description of Artificial Sequence: Synthetic oligonucleotide
ggaagccugucagguauuc

SEQ ID NO: 2644435 - RNA, 19 nt, Artificial Sequence
  Description of Artificial Sequence: Synthetic oligonucleotide
cuuccucuccaccuuccgu

SEQ ID NO: 2644436 - RNA, 19 nt, Artificial Sequence
  Description of Artificial Sequence: Synthetic oligonucleotide
cugggucuugcugguacga

SEQ ID NO: 2644437 - RNA, 19 nt, Artificial Sequence
  Description of Artificial Sequence: Synthetic oligonucleotide
aggcuucuugagggcucac

SEQ ID NO: 2644438 - RNA, 19 nt, Artificial Sequence
  Description of Artificial Sequence: Synthetic oligonucleotide
aggcaggggcagaccuagc

SEQ ID NO: 2644439 - RNA, 19 nt, Artificial Sequence
  Description of Artificial Sequence: Synthetic oligonucleotide
agccgcuguuuuaucuccu

SEQ ID NO: 2644440 - RNA, 19 nt, Artificial Sequence
  Description of Artificial Sequence: Synthetic oligonucleotide
gggucuugcugguacgagu

SEQ ID NO: 2644441 - RNA, 19 nt, Artificial Sequence
  Description of Artificial Sequence: Synthetic oligonucleotide
ccucuugaccuucuuccga

SEQ ID NO: 2644442 - RNA, 19 nt, Artificial Sequence
  Description of Artificial Sequence: Synthetic oligonucleotide
gcggcgcugggucuugcug

SEQ ID NO: 2644443 - RNA, 19 nt, Artificial Sequence
  Description of Artificial Sequence: Synthetic oligonucleotide
caggcuucuugagggcuca

SEQ ID NO: 2644444 - RNA, 19 nt, Artificial Sequence
  Description of Artificial Sequence: Synthetic oligonucleotide
cacugggagguuucuuggu

SEQ ID NO: 2644445 - RNA, 19 nt, Artificial Sequence
  Description of Artificial Sequence: Synthetic oligonucleotide
ggaguccugggcccgccga

SEQ ID NO: 2644446 - RNA, 19 nt, Artificial Sequence
  Description of Artificial Sequence: Synthetic oligonucleotide
ggcuuaggcugcaguuacc

SEQ ID NO: 2644447 - RNA, 19 nt, Artificial Sequence
  Description of Artificial Sequence: Synthetic oligonucleotide
gguggucauacugcaccga

SEQ ID NO: 2644448 - RNA, 19 nt, Artificial Sequence
  Description of Artificial Sequence: Synthetic oligonucleotide
guggucacggugacugugu

SEQ ID NO: 2644449 - RNA, 19 nt, Artificial Sequence
  Description of Artificial Sequence: Synthetic oligonucleotide
gacccauccagguccccuu

SEQ ID NO: 2644450 - RNA, 19 nt, Artificial Sequence
  Description of Artificial Sequence: Synthetic oligonucleotide
ccgaggguguuuccucuug

SEQ ID NO: 2644451 - RNA, 19 nt, Artificial Sequence
  Description of Artificial Sequence: Synthetic oligonucleotide
ccgacugugugcaugcagu

SEQ ID NO: 2644452 - RNA, 19 nt, Artificial Sequence
  Description of Artificial Sequence: Synthetic oligonucleotide
uggcacugggagguuucuu

SEQ ID NO: 2644453 - RNA, 19 nt, Artificial Sequence
  Description of Artificial Sequence: Synthetic oligonucleotide
guggaguccugggcccgcc

SEQ ID NO: 2644454 - RNA, 19 nt, Artificial Sequence
  Description of Artificial Sequence: Synthetic oligonucleotide
ccaccuuccguuuguggaa

SEQ ID NO: 2644455 - RNA, 19 nt, Artificial Sequence
  Description of Artificial Sequence: Synthetic oligonucleotide
guguggcugugagggagga

SEQ ID NO: 2644456 - RNA, 19 nt, Artificial Sequence
  Description of Artificial Sequence: Synthetic oligonucleotide
gacuuuggcuggggaccca

SEQ ID NO: 2644457 - RNA, 19 nt, Artificial Sequence
  Description of Artificial Sequence: Synthetic oligonucleotide
ggcucacuccccgcugugc

SEQ ID NO: 2644458 - RNA, 19 nt, Artificial Sequence
  Description of Artificial Sequence: Synthetic oligonucleotide
guauuccugguggcgcucu

SEQ ID NO: 2644459 - RNA, 19 nt, Artificial Sequence
  Description of Artificial Sequence: Synthetic oligonucleotide
ggcuggaaaaguccugguu

SEQ ID NO: 2644460 - RNA, 19 nt, Artificial Sequence
  Description of Artificial Sequence: Synthetic oligonucleotide
cgcuguuuuaucuccucaa

SEQ ID NO: 2644461 - RNA, 19 nt, Artificial Sequence
  Description of Artificial Sequence: Synthetic oligonucleotide
ccggucauccggcggcggc

SEQ ID NO: 2644462 - RNA, 19 nt, Artificial Sequence
  Description of Artificial Sequence: Synthetic oligonucleotide
cucacuccccgcugugccu

SEQ ID NO: 2644463 - RNA, 19 nt, Artificial Sequence
  Description of Artificial Sequence: Synthetic oligonucleotide
gguggaguccugggcccgc

SEQ ID NO: 2644464 - RNA, 19 nt, Artificial Sequence
  Description of Artificial Sequence: Synthetic oligonucleotide
ggaggggaucuuuggacuu

SEQ ID NO: 2644465 - RNA, 19 nt, Artificial Sequence
  Description of Artificial Sequence: Synthetic oligonucleotide
ccgcuguuuuaucuccuca

SEQ ID NO: 2644466 - RNA, 19 nt, Artificial Sequence
  Description of Artificial Sequence: Synthetic oligonucleotide
gccccugagagguccaggu

SEQ ID NO: 2644467 - RNA, 19 nt, Artificial Sequence
  Description of Artificial Sequence: Synthetic oligonucleotide
ccgccuucuuccucuccac

SEQ ID NO: 2644468 - RNA, 19 nt, Artificial Sequence
  Description of Artificial Sequence: Synthetic oligonucleotide
ggcaaggcuuuuguuggcu

SEQ ID NO: 2644469 - RNA, 19 nt, Artificial Sequence
  Description of Artificial Sequence: Synthetic oligonucleotide
ccguuuguggaagccuguc

SEQ ID NO: 2644470 - RNA, 19 nt, Artificial Sequence
  Description of Artificial Sequence: Synthetic oligonucleotide
gcuggggacccacaggcuu

SEQ ID NO: 2644471 - RNA, 19 nt, Artificial Sequence
  Description of Artificial Sequence: Synthetic oligonucleotide
gcgcugagauaggagggga

SEQ ID NO: 2644472 - RNA, 19 nt, Artificial Sequence
  Description of Artificial Sequence: Synthetic oligonucleotide
cagugccuccucucuuucu

SEQ ID NO: 2644473 - RNA, 19 nt, Artificial Sequence
  Description of Artificial Sequence: Synthetic oligonucleotide
gcuggguugcagggacagc

SEQ ID NO: 2644474 - RNA, 19 nt, Artificial Sequence
  Description of Artificial Sequence: Synthetic oligonucleotide
ccgccgaggguguuuccuc

SEQ ID NO: 2644475 - RNA, 19 nt, Artificial Sequence
  Description of Artificial Sequence: Synthetic oligonucleotide
ccccugagagguccagguc

SEQ ID NO: 2644476 - RNA, 19 nt, Artificial Sequence
  Description of Artificial Sequence: Synthetic oligonucleotide
ccgggccccugagaggucc

SEQ ID NO: 2644477 - RNA, 19 nt, Artificial Sequence
  Description of Artificial Sequence: Synthetic oligonucleotide
gcaaggcuuuuguuggcuu

SEQ ID NO: 2644478 - RNA, 19 nt, Artificial Sequence
  Description of Artificial Sequence: Synthetic oligonucleotide
auccggcggcggcgcuggg

SEQ ID NO: 2644479 - RNA, 19 nt, Artificial Sequence
  Description of Artificial Sequence: Synthetic oligonucleotide
ccacggacuuuggcugggg

SEQ ID NO: 2644480 - RNA, 19 nt, Artificial Sequence
  Description of Artificial Sequence: Synthetic oligonucleotide
ggcuucuugagggcucacu

SEQ ID NO: 2644481 - RNA, 19 nt, Artificial Sequence
  Description of Artificial Sequence: Synthetic oligonucleotide
ccuggcuuuuccggucauc

SEQ ID NO: 2644482 - RNA, 19 nt, Artificial Sequence
  Description of Artificial Sequence: Synthetic oligonucleotide
cgaggguguuuccucuuga

SEQ ID NO: 2644483 - RNA, 19 nt, Artificial Sequence
  Description of Artificial Sequence: Synthetic oligonucleotide
ggcccgccgaggguguuuc

SEQ ID NO: 2644484 - RNA, 19 nt, Artificial Sequence
  Description of Artificial Sequence: Synthetic oligonucleotide
cagggacagccacggacuu

SEQ ID NO: 2644485 - RNA, 19 nt, Artificial Sequence
  Description of Artificial Sequence: Synthetic oligonucleotide
ccuagcagccgggccccug

SEQ ID NO: 2644486 - RNA, 19 nt, Artificial Sequence
  Description of Artificial Sequence: Synthetic oligonucleotide
ccccuugcucaggcagggg

SEQ ID NO: 2644487 - RNA, 19 nt, Artificial Sequence
  Description of Artificial Sequence: Synthetic oligonucleotide
gggacccauccaggucccc

SEQ ID NO: 2644488 - RNA, 19 nt, Artificial Sequence
  Description of Artificial Sequence: Synthetic oligonucleotide
cuccccgcugugccuggcu

SEQ ID NO: 2644489 - RNA, 19 nt, Artificial Sequence
  Description of Artificial Sequence: Synthetic oligonucleotide
ccaggucacugaugguggu

SEQ ID NO: 2644490 - RNA, 19 nt, Artificial Sequence
  Description of Artificial Sequence: Synthetic oligonucleotide
cccucagcagagcuggguu

SEQ ID NO: 2644491 - RNA, 19 nt, Artificial Sequence
  Description of Artificial Sequence: Synthetic oligonucleotide
cugggcccgccgagggugu

SEQ ID NO: 2644492 - RNA, 19 nt, Artificial Sequence
  Description of Artificial Sequence: Synthetic oligonucleotide
gcccgccgaggguguuucc

SEQ ID NO: 2644493 - RNA, 19 nt, Artificial Sequence
  Description of Artificial Sequence: Synthetic oligonucleotide
ugggcccgccgaggguguu

SEQ ID NO: 2644494 - RNA, 19 nt, Artificial Sequence
  Description of Artificial Sequence: Synthetic oligonucleotide
ggggaucuuuggacuuccu

SEQ ID NO: 2644495 - RNA, 19 nt, Artificial Sequence
  Description of Artificial Sequence: Synthetic oligonucleotide
gccgaggguguuuccucuu

SEQ ID NO: 2644496 - RNA, 19 nt, Artificial Sequence
  Description of Artificial Sequence: Synthetic oligonucleotide
gcggcggcgcugggucuug

SEQ ID NO: 2644497 - RNA, 19 nt, Artificial Sequence
  Description of Artificial Sequence: Synthetic oligonucleotide
cgcugagauaggaggggau

SEQ ID NO: 2644498 - RNA, 19 nt, Artificial Sequence
  Description of Artificial Sequence: Synthetic oligonucleotide
cgccgaggguguuuccucu

SEQ ID NO: 2644499 - RNA, 19 nt, Artificial Sequence
  Description of Artificial Sequence: Synthetic oligonucleotide
ccgcugugccuggcuuuuc

SEQ ID NO: 2644500 - RNA, 19 nt, Artificial Sequence
  Description of Artificial Sequence: Synthetic oligonucleotide
cgggccccugagaggucca

SEQ ID NO: 2644501 - RNA, 19 nt, Artificial Sequence
  Description of Artificial Sequence: Synthetic oligonucleotide
gccgggccccugagagguc

SEQ ID NO: 2644502 - RNA, 19 nt, Artificial Sequence
  Description of Artificial Sequence: Synthetic oligonucleotide
ggcggcggcgcugggucuu

SEQ ID NO: 2644503 - RNA, 19 nt, Artificial Sequence
  Description of Artificial Sequence: Synthetic oligonucleotide
ggcgcucuucccggagcuu

SEQ ID NO: 2644504 - RNA, 19 nt, Artificial Sequence
  Description of Artificial Sequence: Synthetic oligonucleotide
ccccgcugugccuggcuuu

SEQ ID NO: 2644505 - RNA, 19 nt, Artificial Sequence
  Description of Artificial Sequence: Synthetic oligonucleotide
gcgcugggucuugcuggua

SEQ ID NO: 2644506 - RNA, 19 nt, Artificial Sequence
  Description of Artificial Sequence: Synthetic oligonucleotide
gggcccgccgaggguguuu

SEQ ID NO: 2644507 - RNA, 19 nt, Artificial Sequence
  Description of Artificial Sequence: Synthetic oligonucleotide
cgaguggcacugggagguu

SEQ ID NO: 2644508 - RNA, 19 nt, Artificial Sequence
  Description of Artificial Sequence: Synthetic oligonucleotide
ucgaauacaaaucaugugg

SEQ ID NO: 2644509 - RNA, 19 nt, Artificial Sequence
  Description of Artificial Sequence: Synthetic oligonucleotide
aaugcuuuccccaagcucc

SEQ ID NO: 2644510 - RNA, 19 nt, Artificial Sequence
  Description of Artificial Sequence: Synthetic oligonucleotide
gaaaugucgauucaccccg

SEQ ID NO: 2644511 - RNA, 19 nt, Artificial Sequence
  Description of Artificial Sequence: Synthetic oligonucleotide
ugucgauucaccccgacag

SEQ ID NO: 2644512 - RNA, 19 nt, Artificial Sequence
  Description of Artificial Sequence: Synthetic oligonucleotide
uuuucuaaugcuuucccca

SEQ ID NO: 2644513 - RNA, 19 nt, Artificial Sequence
  Description of Artificial Sequence: Synthetic oligonucleotide
aaaucauguggaaaugucg

SEQ ID NO: 2644514 - RNA, 19 nt, Artificial Sequence
  Description of Artificial Sequence: Synthetic oligonucleotide
ucucgaauacaaaucaugu

SEQ ID NO: 2644515 - RNA, 19 nt, Artificial Sequence
  Description of Artificial Sequence: Synthetic oligonucleotide
ucuugaaugaucucaucug

SEQ ID NO: 2644516 - RNA, 19 nt, Artificial Sequence
  Description of Artificial Sequence: Synthetic oligonucleotide
cuugaaugaucucaucugg

SEQ ID NO: 2644517 - RNA, 19 nt, Artificial Sequence
  Description of Artificial Sequence: Synthetic oligonucleotide
augggagaaucucagacuc

SEQ ID NO: 2644518 - RNA, 19 nt, Artificial Sequence
  Description of Artificial Sequence: Synthetic oligonucleotide
uugucucgaauacaaauca

SEQ ID NO: 2644519 - RNA, 19 nt, Artificial Sequence
  Description of Artificial Sequence: Synthetic oligonucleotide
auacaaaucauguggaaau

SEQ ID NO: 2644520 - RNA, 19 nt, Artificial Sequence
  Description of Artificial Sequence: Synthetic oligonucleotide
gaaugggagaaucucagac

SEQ ID NO: 2644521 - RNA, 19 nt, Artificial Sequence
  Description of Artificial Sequence: Synthetic oligonucleotide
gagaaucucagacucgugc

SEQ ID NO: 2644522 - RNA, 19 nt, Artificial Sequence
  Description of Artificial Sequence: Synthetic oligonucleotide
ucauacauagugcucagau

SEQ ID NO: 2644523 - RNA, 19 nt, Artificial Sequence
  Description of Artificial Sequence: Synthetic oligonucleotide
cuggauuugggaaugggag

SEQ ID NO: 2644524 - RNA, 19 nt, Artificial Sequence
  Description of Artificial Sequence: Synthetic oligonucleotide
ucuaaugcuuuccccaagc

SEQ ID NO: 2644525 - RNA, 19 nt, Artificial Sequence
  Description of Artificial Sequence: Synthetic oligonucleotide
cugcaugucauacauagug

SEQ ID NO: 2644526 - RNA, 19 nt, Artificial Sequence
  Description of Artificial Sequence: Synthetic oligonucleotide
gaaugaucucaucuggaag

SEQ ID NO: 2644527 - RNA, 19 nt, Artificial Sequence
  Description of Artificial Sequence: Synthetic oligonucleotide
auagugcucagaugguccc

SEQ ID NO: 2644528 - RNA, 19 nt, Artificial Sequence
  Description of Artificial Sequence: Synthetic oligonucleotide
ucaaugaccacuuuuccuu

SEQ ID NO: 2644529 - RNA, 19 nt, Artificial Sequence
  Description of Artificial Sequence: Synthetic oligonucleotide
aaucauguggaaaugucga

SEQ ID NO: 2644530 - RNA, 19 nt, Artificial Sequence
  Description of Artificial Sequence: Synthetic oligonucleotide
ugcaugucauacauagugc

SEQ ID NO: 2644531 - RNA, 19 nt, Artificial Sequence
  Description of Artificial Sequence: Synthetic oligonucleotide
cuugucucgaauacaaauc

SEQ ID NO: 2644532 - RNA, 19 nt, Artificial Sequence
  Description of Artificial Sequence: Synthetic oligonucleotide
uggaaaugucgauucaccc

SEQ ID NO: 2644533 - RNA, 19 nt, Artificial Sequence
  Description of Artificial Sequence: Synthetic oligonucleotide
cauagugcucagauggucc

SEQ ID NO: 2644534 - RNA, 19 nt, Artificial Sequence
  Description of Artificial Sequence: Synthetic oligonucleotide
gaggugucuauguucggcg

SEQ ID NO: 2644535 - RNA, 19 nt, Artificial Sequence
  Description of Artificial Sequence: Synthetic oligonucleotide
aagucugaggaguucuucu

SEQ ID NO: 2644536 - RNA, 19 nt, Artificial Sequence
  Description of Artificial Sequence: Synthetic oligonucleotide
ugcaccccaagucugagga

SEQ ID NO: 2644537 - RNA, 19 nt, Artificial Sequence
  Description of Artificial Sequence: Synthetic oligonucleotide
aaugucgauucaccccgac

SEQ ID NO: 2644538 - RNA, 19 nt, Artificial Sequence
  Description of Artificial Sequence: Synthetic oligonucleotide
cauguggaaaugucgauuc

SEQ ID NO: 2644539 - RNA, 19 nt, Artificial Sequence
  Description of Artificial Sequence: Synthetic oligonucleotide
acuugucucgaauacaaau

SEQ ID NO: 2644540 - RNA, 19 nt, Artificial Sequence
  Description of Artificial Sequence: Synthetic oligonucleotide
uaccguuuccucagcaggg

SEQ ID NO: 2644541 - RNA, 19 nt, Artificial Sequence
  Description of Artificial Sequence: Synthetic oligonucleotide
cuuggaugggaccuggcgc

SEQ ID NO: 2644542 - RNA, 19 nt, Artificial Sequence
  Description of Artificial Sequence: Synthetic oligonucleotide
uccccaagcucccugaaga

SEQ ID NO: 2644543 - RNA, 19 nt, Artificial Sequence
  Description of Artificial Sequence: Synthetic oligonucleotide
agaaucucagacucgugca

SEQ ID NO: 2644544 - RNA, 19 nt, Artificial Sequence
  Description of Artificial Sequence: Synthetic oligonucleotide
caaaucauguggaaauguc

SEQ ID NO: 2644545 - RNA, 19 nt, Artificial Sequence
  Description of Artificial Sequence: Synthetic oligonucleotide
gaccuugucagugacccgg

SEQ ID NO: 2644546 - RNA, 19 nt, Artificial Sequence
  Description of Artificial Sequence: Synthetic oligonucleotide
aucucuguggcaccugggg

SEQ ID NO: 2644547 - RNA, 19 nt, Artificial Sequence
  Description of Artificial Sequence: Synthetic oligonucleotide
ugaggaguucuucuccuug

SEQ ID NO: 2644548 - RNA, 19 nt, Artificial Sequence
  Description of Artificial Sequence: Synthetic oligonucleotide
cuaccguuuccucagcagg

SEQ ID NO: 2644549 - RNA, 19 nt, Artificial Sequence
  Description of Artificial Sequence: Synthetic oligonucleotide
uuugggaaugggagaaucu

SEQ ID NO: 2644550 - RNA, 19 nt, Artificial Sequence
  Description of Artificial Sequence: Synthetic oligonucleotide
gaaucucagacucgugcag

SEQ ID NO: 2644551 - RNA, 19 nt, Artificial Sequence
  Description of Artificial Sequence: Synthetic oligonucleotide
uuggaugggaccuggcgcc

SEQ ID NO: 2644552 - RNA, 19 nt, Artificial Sequence
  Description of Artificial Sequence: Synthetic oligonucleotide
gaccacuuuuccuucucgg

SEQ ID NO: 2644553 - RNA, 19 nt, Artificial Sequence
  Description of Artificial Sequence: Synthetic oligonucleotide
cucgaauacaaaucaugug

SEQ ID NO: 2644554 - RNA, 19 nt, Artificial Sequence
  Description of Artificial Sequence: Synthetic oligonucleotide
agcauggcguggaagaggc

SEQ ID NO: 2644555 - RNA, 19 nt, Artificial Sequence
  Description of Artificial Sequence: Synthetic oligonucleotide
ugaccacuuuuccuucucg

SEQ ID NO: 2644556 - RNA, 19 nt, Artificial Sequence
  Description of Artificial Sequence: Synthetic oligonucleotide
cuucaaugaccacuuuucc

SEQ ID NO: 2644557 - RNA, 19 nt, Artificial Sequence
  Description of Artificial Sequence: Synthetic oligonucleotide
uaaugcuuuccccaagcuc

SEQ ID NO: 2644558 - RNA, 19 nt, Artificial Sequence
  Description of Artificial Sequence: Synthetic oligonucleotide
cacacuaccguuuccucag

SEQ ID NO: 2644559 - RNA, 19 nt, Artificial Sequence
  Description of Artificial Sequence: Synthetic oligonucleotide
agucugaggaguucuucuc

SEQ ID NO: 2644560 - RNA, 19 nt, Artificial Sequence
  Description of Artificial Sequence: Synthetic oligonucleotide
aaaacgucaucagccccac

SEQ ID NO: 2644561 - RNA, 19 nt, Artificial Sequence
  Description of Artificial Sequence: Synthetic oligonucleotide
auuugggaaugggagaauc

SEQ ID NO: 2644562 - RNA, 19 nt, Artificial Sequence
  Description of Artificial Sequence: Synthetic oligonucleotide
ucuuugcaccccaagucug

SEQ ID NO: 2644563 - RNA, 19 nt, Artificial Sequence
  Description of Artificial Sequence: Synthetic oligonucleotide
ugggaaugggagaaucuca

SEQ ID NO: 2644564 - RNA, 19 nt, Artificial Sequence
  Description of Artificial Sequence: Synthetic oligonucleotide
cacuuuuccuucucggacc

SEQ ID NO: 2644565 - RNA, 19 nt, Artificial Sequence
  Description of Artificial Sequence: Synthetic oligonucleotide
ggaaaugucgauucacccc

SEQ ID NO: 2644566 - RNA, 19 nt, Artificial Sequence
  Description of Artificial Sequence: Synthetic oligonucleotide
gcuguuggcagucaggacc

SEQ ID NO: 2644567 - RNA, 19 nt, Artificial Sequence
  Description of Artificial Sequence: Synthetic oligonucleotide
cugaacuugucucgaauac

SEQ ID NO: 2644568 - RNA, 19 nt, Artificial Sequence
  Description of Artificial Sequence: Synthetic oligonucleotide
augucauacauagugcuca

SEQ ID NO: 2644569 - RNA, 19 nt, Artificial Sequence
  Description of Artificial Sequence: Synthetic oligonucleotide
uggauuugggaaugggaga

SEQ ID NO: 2644570 - RNA, 19 nt, Artificial Sequence
  Description of Artificial Sequence: Synthetic oligonucleotide
cauacauagugcucagaug

SEQ ID NO: 2644571 - RNA, 19 nt, Artificial Sequence
  Description of Artificial Sequence: Synthetic oligonucleotide
aaugaccacuuuuccuucu

SEQ ID NO: 2644572 - RNA, 19 nt, Artificial Sequence
  Description of Artificial Sequence: Synthetic oligonucleotide
cucagauggucccagauga

SEQ ID NO: 2644573 - RNA, 19 nt, Artificial Sequence
  Description of Artificial Sequence: Synthetic oligonucleotide
aggugucuauguucggcgc

SEQ ID NO: 2644574 - RNA, 19 nt, Artificial Sequence
  Description of Artificial Sequence: Synthetic oligonucleotide
ucagggcuccacacuaccg

SEQ ID NO: 2644575 - RNA, 19 nt, Artificial Sequence
  Description of Artificial Sequence: Synthetic oligonucleotide
uucuaaugcuuuccccaag

SEQ ID NO: 2644576 - RNA, 19 nt, Artificial Sequence
  Description of Artificial Sequence: Synthetic oligonucleotide
uguggaaaugucgauucac

SEQ ID NO: 2644577 - RNA, 19 nt, Artificial Sequence
  Description of Artificial Sequence: Synthetic oligonucleotide
gccugcaugucauacauag

SEQ ID NO: 2644578 - RNA, 19 nt, Artificial Sequence
  Description of Artificial Sequence: Synthetic oligonucleotide
cacaccuccaccucagggc

SEQ ID NO: 2644579 - RNA, 19 nt, Artificial Sequence
  Description of Artificial Sequence: Synthetic oligonucleotide
guggaagaggcacaccucc

SEQ ID NO: 2644580 - RNA, 19 nt, Artificial Sequence
  Description of Artificial Sequence: Synthetic oligonucleotide
ucucggaccucuugaauga

SEQ ID NO: 2644581 - RNA, 19 nt, Artificial Sequence
  Description of Artificial Sequence: Synthetic oligonucleotide
aggcuuguggcccagcaug

SEQ ID NO: 2644582 - RNA, 19 nt, Artificial Sequence
  Description of Artificial Sequence: Synthetic oligonucleotide
acuaccguuuccucagcag

SEQ ID NO: 2644583 - RNA, 19 nt, Artificial Sequence
  Description of Artificial Sequence: Synthetic oligonucleotide
ugggagaaucucagacucg

SEQ ID NO: 2644584 - RNA, 19 nt, Artificial Sequence
  Description of Artificial Sequence: Synthetic oligonucleotide
uacaaaucauguggaaaug

SEQ ID NO: 2644585 - RNA, 19 nt, Artificial Sequence
  Description of Artificial Sequence: Synthetic oligonucleotide
gaagaggcacaccuccacc

SEQ ID NO: 2644586 - RNA, 19 nt, Artificial Sequence
  Description of Artificial Sequence: Synthetic oligonucleotide
ucucuguggcaccuggggc

SEQ ID NO: 2644587 - RNA, 19 nt, Artificial Sequence
  Description of Artificial Sequence: Synthetic oligonucleotide
uguucggcgccucuuggca

SEQ ID NO: 2644588 - RNA, 19 nt, Artificial Sequence
  Description of Artificial Sequence: Synthetic oligonucleotide
gucucgaauacaaaucaug

SEQ ID NO: 2644589 - RNA, 19 nt, Artificial Sequence
  Description of Artificial Sequence: Synthetic oligonucleotide
gaugaccuuggaugggacc

SEQ ID NO: 2644590 - RNA, 19 nt, Artificial Sequence
  Description of Artificial Sequence: Synthetic oligonucleotide
gaucucaucuggaaggaca

SEQ ID NO: 2644591 - RNA, 19 nt, Artificial Sequence
  Description of Artificial Sequence: Synthetic oligonucleotide
uccuucucggaccucuuga

SEQ ID NO: 2644592 - RNA, 19 nt, Artificial Sequence
  Description of Artificial Sequence: Synthetic oligonucleotide
auguucggcgccucuuggc

SEQ ID NO: 2644593 - RNA, 19 nt, Artificial Sequence
  Description of Artificial Sequence: Synthetic oligonucleotide
acaaaucauguggaaaugu

SEQ ID NO: 2644594 - RNA, 19 nt, Artificial Sequence
  Description of Artificial Sequence: Synthetic oligonucleotide
cucagacucgugcagugcc

SEQ ID NO: 2644595 - RNA, 19 nt, Artificial Sequence
  Description of Artificial Sequence: Synthetic oligonucleotide
cuuguggcccagcauggcg

SEQ ID NO: 2644596 - RNA, 19 nt, Artificial Sequence
  Description of Artificial Sequence: Synthetic oligonucleotide
cuggcgcccaauauucugg

SEQ ID NO: 2644597 - RNA, 19 nt, Artificial Sequence
  Description of Artificial Sequence: Synthetic oligonucleotide
ugcgcuuccgcuugucugc

SEQ ID NO: 2644598 - RNA, 19 nt, Artificial Sequence
  Description of Artificial Sequence: Synthetic oligonucleotide
gaauacaaaucauguggaa

SEQ ID NO: 2644599 - RNA, 19 nt, Artificial Sequence
  Description of Artificial Sequence: Synthetic oligonucleotide
uucuggcugaacuugucuc

SEQ ID NO: 2644600 - RNA, 19 nt, Artificial Sequence
  Description of Artificial Sequence: Synthetic oligonucleotide
acauagugcucagaugguc

SEQ ID NO: 2644601 - RNA, 19 nt, Artificial Sequence
  Description of Artificial Sequence: Synthetic oligonucleotide
ucgauucaccccgacaggc

SEQ ID NO: 2644602 - RNA, 19 nt, Artificial Sequence
  Description of Artificial Sequence: Synthetic oligonucleotide
aaucucagacucgugcagu

SEQ ID NO: 2644603 - RNA, 19 nt, Artificial Sequence
  Description of Artificial Sequence: Synthetic oligonucleotide
ucugccccgucuuugcacc

SEQ ID NO: 2644604 - RNA, 19 nt, Artificial Sequence
  Description of Artificial Sequence: Synthetic oligonucleotide
caugucauacauagugcuc

SEQ ID NO: 2644605 - RNA, 19 nt, Artificial Sequence
  Description of Artificial Sequence: Synthetic oligonucleotide
gaacuugucucgaauacaa

SEQ ID NO: 2644606 - RNA, 19 nt, Artificial Sequence
  Description of Artificial Sequence: Synthetic oligonucleotide
uuggcagucaggaccuugu

SEQ ID NO: 2644607 - RNA, 19 nt, Artificial Sequence
  Description of Artificial Sequence: Synthetic oligonucleotide
uacauagugcucagauggu

SEQ ID NO: 2644608 - RNA, 19 nt, Artificial Sequence
  Description of Artificial Sequence: Synthetic oligonucleotide
augaccacuuuuccuucuc

SEQ ID NO: 2644609 - RNA, 19 nt, Artificial Sequence
  Description of Artificial Sequence: Synthetic oligonucleotide
gaccucuugaaugaucuca

SEQ ID NO: 2644610 - RNA, 19 nt, Artificial Sequence
  Description of Artificial Sequence: Synthetic oligonucleotide
uugcuguuggcagucagga

SEQ ID NO: 2644611 - RNA, 19 nt, Artificial Sequence
  Description of Artificial Sequence: Synthetic oligonucleotide
ugucucgaauacaaaucau

SEQ ID NO: 2644612 - RNA, 19 nt, Artificial Sequence
  Description of Artificial Sequence: Synthetic oligonucleotide
guuuccucagcagggcucg

SEQ ID NO: 2644613 - RNA, 19 nt, Artificial Sequence
  Description of Artificial Sequence: Synthetic oligonucleotide
augaccuuggaugggaccu

SEQ ID NO: 2644614 - RNA, 19 nt, Artificial Sequence
  Description of Artificial Sequence: Synthetic oligonucleotide
accacuuuuccuucucgga

SEQ ID NO: 2644615 - RNA, 19 nt, Artificial Sequence
  Description of Artificial Sequence: Synthetic oligonucleotide
uugggaaugggagaaucuc

SEQ ID NO: 2644616 - RNA, 19 nt, Artificial Sequence
  Description of Artificial Sequence: Synthetic oligonucleotide
uuguggcccagcauggcgu

SEQ ID NO: 2644617 - RNA, 19 nt, Artificial Sequence
  Description of Artificial Sequence: Synthetic oligonucleotide
cuugucagugacccggcug

SEQ ID NO: 2644618 - RNA, 19 nt, Artificial Sequence
  Description of Artificial Sequence: Synthetic oligonucleotide
cauggcguggaagaggcac

SEQ ID NO: 2644619 - RNA, 19 nt, Artificial Sequence
  Description of Artificial Sequence: Synthetic oligonucleotide
aucucagacucgugcagug

SEQ ID NO: 2644620 - RNA, 19 nt, Artificial Sequence
  Description of Artificial Sequence: Synthetic oligonucleotide
agacucgugcagugccugc

SEQ ID NO: 2644621 - RNA, 19 nt, Artificial Sequence
  Description of Artificial Sequence: Synthetic oligonucleotide
ucauguggaaaugucgauu

SEQ ID NO: 2644622 - RNA, 19 nt, Artificial Sequence
  Description of Artificial Sequence: Synthetic oligonucleotide
gucgauucaccccgacagg

SEQ ID NO: 2644623 - RNA, 19 nt, Artificial Sequence
  Description of Artificial Sequence: Synthetic oligonucleotide
uccaccucagggcuccaca

SEQ ID NO: 2644624 - RNA, 19 nt, Artificial Sequence
  Description of Artificial Sequence: Synthetic oligonucleotide
cucgccggggcccuugucg

SEQ ID NO: 2644625 - RNA, 19 nt, Artificial Sequence
  Description of Artificial Sequence: Synthetic oligonucleotide
uggucccagaugaccuugg

SEQ ID NO: 2644626 - RNA, 19 nt, Artificial Sequence
  Description of Artificial Sequence: Synthetic oligonucleotide
accguuuccucagcagggc

SEQ ID NO: 2644627 - RNA, 19 nt, Artificial Sequence
  Description of Artificial Sequence: Synthetic oligonucleotide
ucgugcagugccugcaugu

SEQ ID NO: 2644628 - RNA, 19 nt, Artificial Sequence
  Description of Artificial Sequence: Synthetic oligonucleotide
cuggagggauugcuguugg

SEQ ID NO: 2644629 - RNA, 19 nt, Artificial Sequence
  Description of Artificial Sequence: Synthetic oligonucleotide
aucauguggaaaugucgau

SEQ ID NO: 2644630 - RNA, 19 nt, Artificial Sequence
  Description of Artificial Sequence: Synthetic oligonucleotide
uggaaggacaaaguuccuc

SEQ ID NO: 2644631 - RNA, 19 nt, Artificial Sequence
  Description of Artificial Sequence: Synthetic oligonucleotide
agucaggaccuugucagug

SEQ ID NO: 2644632 - RNA, 19 nt, Artificial Sequence
  Description of Artificial Sequence: Synthetic oligonucleotide
uugucugccccgucuuugc

SEQ ID NO: 2644633 - RNA, 19 nt, Artificial Sequence
  Description of Artificial Sequence: Synthetic oligonucleotide
ugcucagauggucccagau

SEQ ID NO: 2644634 - RNA, 19 nt, Artificial Sequence
  Description of Artificial Sequence: Synthetic oligonucleotide
ucagacucgugcagugccu

SEQ ID NO: 2644635 - RNA, 19 nt, Artificial Sequence
  Description of Artificial Sequence: Synthetic oligonucleotide
cucuugaaugaucucaucu

SEQ ID NO: 2644636 - RNA, 19 nt, Artificial Sequence
  Description of Artificial Sequence: Synthetic oligonucleotide
acacuaccguuuccucagc

SEQ ID NO: 2644637 - RNA, 19 nt, Artificial Sequence
  Description of Artificial Sequence: Synthetic oligonucleotide
cuauguucggcgccucuug

SEQ ID NO: 2644638 - RNA, 19 nt, Artificial Sequence
  Description of Artificial Sequence: Synthetic oligonucleotide
uuugcaccccaagucugag

SEQ ID NO: 2644639 - RNA, 19 nt, Artificial Sequence
  Description of Artificial Sequence: Synthetic oligonucleotide
agauggucccagaugaccu

SEQ ID NO: 2644640 - RNA, 19 nt, Artificial Sequence
  Description of Artificial Sequence: Synthetic oligonucleotide
caaugaccacuuuuccuuc

SEQ ID NO: 2644641 - RNA, 19 nt, Artificial Sequence
  Description of Artificial Sequence: Synthetic oligonucleotide
augucgauucaccccgaca

SEQ ID NO: 2644642 - RNA, 19 nt, Artificial Sequence
  Description of Artificial Sequence: Synthetic oligonucleotide
gggaaugggagaaucucag

SEQ ID NO: 2644643 - RNA, 19 nt, Artificial Sequence
  Description of Artificial Sequence: Synthetic oligonucleotide
agugcucagauggucccag

SEQ ID NO: 2644644 - RNA, 19 nt, Artificial Sequence
  Description of Artificial Sequence: Synthetic oligonucleotide
ucucuggauuugggaaugg

SEQ ID NO: 2644645 - RNA, 19 nt, Artificial Sequence
  Description of Artificial Sequence: Synthetic oligonucleotide
cucuggauuugggaauggg

SEQ ID NO: 2644646 - RNA, 19 nt, Artificial Sequence
  Description of Artificial Sequence: Synthetic oligonucleotide
auguggaaaugucgauuca

SEQ ID NO: 2644647 - RNA, 19 nt, Artificial Sequence
  Description of Artificial Sequence: Synthetic oligonucleotide
caucucuguggcaccuggg

SEQ ID NO: 2644648 - RNA, 19 nt, Artificial Sequence
  Description of Artificial Sequence: Synthetic oligonucleotide
gaccuggcgcccaauauuc

SEQ ID NO: 2644649 - RNA, 19 nt, Artificial Sequence
  Description of Artificial Sequence: Synthetic oligonucleotide
auggccgcgggcgagccac

SEQ ID NO: 2644650 - RNA, 19 nt, Artificial Sequence
  Description of Artificial Sequence: Synthetic oligonucleotide
ggaaggacaaaguuccucu

SEQ ID NO: 2644651 - RNA, 19 nt, Artificial Sequence
  Description of Artificial Sequence: Synthetic oligonucleotide
caagcguccggcgagagaa

SEQ ID NO: 2644652 - RNA, 19 nt, Artificial Sequence
  Description of Artificial Sequence: Synthetic oligonucleotide
ucucagacucgugcagugc

SEQ ID NO: 2644653 - RNA, 19 nt, Artificial Sequence
  Description of Artificial Sequence: Synthetic oligonucleotide
ucggaccucuugaaugauc

SEQ ID NO: 2644654 - RNA, 19 nt, Artificial Sequence
  Description of Artificial Sequence: Synthetic oligonucleotide
gaccuuggaugggaccugg

SEQ ID NO: 2644655 - RNA, 19 nt, Artificial Sequence
  Description of Artificial Sequence: Synthetic oligonucleotide
uggcgcccaauauucuggc

SEQ ID NO: 2644656 - RNA, 19 nt, Artificial Sequence
  Description of Artificial Sequence: Synthetic oligonucleotide
augcuuuccccaagcuccc

SEQ ID NO: 2644657 - RNA, 19 nt, Artificial Sequence
  Description of Artificial Sequence: Synthetic oligonucleotide
uccacacuaccguuuccuc

SEQ ID NO: 2644658 - RNA, 19 nt, Artificial Sequence
  Description of Artificial Sequence: Synthetic oligonucleotide
gucuuugcaccccaagucu

SEQ ID NO: 2644659 - RNA, 19 nt, Artificial Sequence
  Description of Artificial Sequence: Synthetic oligonucleotide
gcccuugucgccuggggcg

SEQ ID NO: 2644660 - RNA, 19 nt, Artificial Sequence
  Description of Artificial Sequence: Synthetic oligonucleotide
ugucugccccgucuuugca

SEQ ID NO: 2644661 - RNA, 19 nt, Artificial Sequence
  Description of Artificial Sequence: Synthetic oligonucleotide
gcgcccaauauucuggcug

SEQ ID NO: 2644662 - RNA, 19 nt, Artificial Sequence
  Description of Artificial Sequence: Synthetic oligonucleotide
ccaagcucccugaagauga

SEQ ID NO: 2644663 - RNA, 19 nt, Artificial Sequence
  Description of Artificial Sequence: Synthetic oligonucleotide
gaguucuucuccuugucuu

SEQ ID NO: 2644664 - RNA, 19 nt, Artificial Sequence
  Description of Artificial Sequence: Synthetic oligonucleotide
gcaucucuguggcaccugg

SEQ ID NO: 2644665 - RNA, 19 nt, Artificial Sequence
  Description of Artificial Sequence: Synthetic oligonucleotide
cucggggcugccucgccgg

SEQ ID NO: 2644666 - RNA, 19 nt, Artificial Sequence
  Description of Artificial Sequence: Synthetic oligonucleotide
cuuugcaccccaagucuga

SEQ ID NO: 2644667 - RNA, 19 nt, Artificial Sequence
  Description of Artificial Sequence: Synthetic oligonucleotide
ccuuggaugggaccuggcg

SEQ ID NO: 2644668 - RNA, 19 nt, Artificial Sequence
  Description of Artificial Sequence: Synthetic oligonucleotide
guucggcgccucuuggcag

SEQ ID NO: 2644669 - RNA, 19 nt, Artificial Sequence
  Description of Artificial Sequence: Synthetic oligonucleotide
caagucugaggaguucuuc

SEQ ID NO: 2644670 - RNA, 19 nt, Artificial Sequence
  Description of Artificial Sequence: Synthetic oligonucleotide
cuuccgcuugucugccccg

SEQ ID NO: 2644671 - RNA, 19 nt, Artificial Sequence
  Description of Artificial Sequence: Synthetic oligonucleotide
gcucagauggucccagaug

SEQ ID NO: 2644672 - RNA, 19 nt, Artificial Sequence
  Description of Artificial Sequence: Synthetic oligonucleotide
ucuauguucggcgccucuu

SEQ ID NO: 2644673 - RNA, 19 nt, Artificial Sequence
  Description of Artificial Sequence: Synthetic oligonucleotide
ggaagaggcacaccuccac

SEQ ID NO: 2644674 - RNA, 19 nt, Artificial Sequence
  Description of Artificial Sequence: Synthetic oligonucleotide
ccucuuggcagcacugggg

SEQ ID NO: 2644675 - RNA, 19 nt, Artificial Sequence
  Description of Artificial Sequence: Synthetic oligonucleotide
accuugucagugacccggc

SEQ ID NO: 2644676 - RNA, 19 nt, Artificial Sequence
  Description of Artificial Sequence: Synthetic oligonucleotide
aucucaucuggaaggacaa

SEQ ID NO: 2644677 - RNA, 19 nt, Artificial Sequence
  Description of Artificial Sequence: Synthetic oligonucleotide
gucaggaccuugucaguga

SEQ ID NO: 2644678 - RNA, 19 nt, Artificial Sequence
  Description of Artificial Sequence: Synthetic oligonucleotide
aacuugucucgaauacaaa

SEQ ID NO: 2644679 - RNA, 19 nt, Artificial Sequence
  Description of Artificial Sequence: Synthetic oligonucleotide
ccacuuuuccuucucggac

SEQ ID NO: 2644680 - RNA, 19 nt, Artificial Sequence
  Description of Artificial Sequence: Synthetic oligonucleotide
uuuccccaagcucccugaa

SEQ ID NO: 2644681 - RNA, 19 nt, Artificial Sequence
  Description of Artificial Sequence: Synthetic oligonucleotide
agccacaagcguccggcga

SEQ ID NO: 2644682 - RNA, 19 nt, Artificial Sequence
  Description of Artificial Sequence: Synthetic oligonucleotide
uggagggauugcuguuggc

SEQ ID NO: 2644683 - RNA, 19 nt, Artificial Sequence
  Description of Artificial Sequence: Synthetic oligonucleotide
ggauuugggaaugggagaa

SEQ ID NO: 2644684 - RNA, 19 nt, Artificial Sequence
  Description of Artificial Sequence: Synthetic oligonucleotide
ucgccggggcccuugucgc

SEQ ID NO: 2644685 - RNA, 19 nt, Artificial Sequence
  Description of Artificial Sequence: Synthetic oligonucleotide
auggucccagaugaccuug

SEQ ID NO: 2644686 - RNA, 19 nt, Artificial Sequence
  Description of Artificial Sequence: Synthetic oligonucleotide
gccacaagcguccggcgag

SEQ ID NO: 2644687 - RNA, 19 nt, Artificial Sequence
  Description of Artificial Sequence: Synthetic oligonucleotide
agggcucggggcugccucg

SEQ ID NO: 2644688 - RNA, 19 nt, Artificial Sequence
  Description of Artificial Sequence: Synthetic oligonucleotide
accucuugaaugaucucau

SEQ ID NO: 2644689 - RNA, 19 nt, Artificial Sequence
  Description of Artificial Sequence: Synthetic oligonucleotide
aaaugucgauucaccccga

SEQ ID NO: 2644690 - RNA, 19 nt, Artificial Sequence
  Description of Artificial Sequence: Synthetic oligonucleotide
gcaugucauacauagugcu

SEQ ID NO: 2644691 - RNA, 19 nt, Artificial Sequence
  Description of Artificial Sequence: Synthetic oligonucleotide
cgaauacaaaucaugugga

SEQ ID NO: 2644692 - RNA, 19 nt, Artificial Sequence
  Description of Artificial Sequence: Synthetic oligonucleotide
ggagggauugcuguuggca

SEQ ID NO: 2644693 - RNA, 19 nt, Artificial Sequence
  Description of Artificial Sequence: Synthetic oligonucleotide
aaacgucaucagccccacu

SEQ ID NO: 2644694 - RNA, 19 nt, Artificial Sequence
  Description of Artificial Sequence: Synthetic oligonucleotide
gucugccccgucuuugcac

SEQ ID NO: 2644695 - RNA, 19 nt, Artificial Sequence
  Description of Artificial Sequence: Synthetic oligonucleotide
ccaauauucuggcugaacu

SEQ ID NO: 2644696 - RNA, 19 nt, Artificial Sequence
  Description of Artificial Sequence: Synthetic oligonucleotide
gcuuccgcuugucugcccc

SEQ ID NO: 2644697 - RNA, 19 nt, Artificial Sequence
  Description of Artificial Sequence: Synthetic oligonucleotide
gcugaacuugucucgaaua

SEQ ID NO: 2644698 - RNA, 19 nt, Artificial Sequence
  Description of Artificial Sequence: Synthetic oligonucleotide
uggcagucaggaccuuguc

SEQ ID NO: 2644699 - RNA, 19 nt, Artificial Sequence
  Description of Artificial Sequence: Synthetic oligonucleotide
cagaugaccuuggauggga

SEQ ID NO: 2644700 - RNA, 19 nt, Artificial Sequence
  Description of Artificial Sequence: Synthetic oligonucleotide
uagugcucagaugguccca

SEQ ID NO: 2644701 - RNA, 19 nt, Artificial Sequence
  Description of Artificial Sequence: Synthetic oligonucleotide
ggaaugggagaaucucaga

SEQ ID NO: 2644702 - RNA, 19 nt, Artificial Sequence
  Description of Artificial Sequence: Synthetic oligonucleotide
cucgugcagugccugcaug

SEQ ID NO: 2644703 - RNA, 19 nt, Artificial Sequence
  Description of Artificial Sequence: Synthetic oligonucleotide
gauucaccccgacaggcuu

SEQ ID NO: 2644704 - RNA, 19 nt, Artificial Sequence
  Description of Artificial Sequence: Synthetic oligonucleotide
uucaccccgacaggcuugu

SEQ ID NO: 2644705 - RNA, 19 nt, Artificial Sequence
  Description of Artificial Sequence: Synthetic oligonucleotide
cucuguggcaccuggggcu

SEQ ID NO: 2644706 - RNA, 19 nt, Artificial Sequence
  Description of Artificial Sequence: Synthetic oligonucleotide
uggcguggaagaggcacac

SEQ ID NO: 2644707 - RNA, 19 nt, Artificial Sequence
  Description of Artificial Sequence: Synthetic oligonucleotide
auucaccccgacaggcuug

SEQ ID NO: 2644708 - RNA, 19 nt, Artificial Sequence
  Description of Artificial Sequence: Synthetic oligonucleotide
gugcagugccugcauguca

SEQ ID NO: 2644709 - RNA, 19 nt, Artificial Sequence
  Description of Artificial Sequence: Synthetic oligonucleotide
ggcuuguggcccagcaugg

SEQ ID NO: 2644710 - RNA, 19 nt, Artificial Sequence
  Description of Artificial Sequence: Synthetic oligonucleotide
accuuggaugggaccuggc

SEQ ID NO: 2644711 - RNA, 19 nt, Artificial Sequence
  Description of Artificial Sequence: Synthetic oligonucleotide
uggcugaacuugucucgaa

SEQ ID NO: 2644712 - RNA, 19 nt, Artificial Sequence
  Description of Artificial Sequence: Synthetic oligonucleotide
gacucgugcagugccugca

SEQ ID NO: 2644713 - RNA, 19 nt, Artificial Sequence
  Description of Artificial Sequence: Synthetic oligonucleotide
ucucaucuggaaggacaaa

SEQ ID NO: 2644714 - RNA, 19 nt, Artificial Sequence
  Description of Artificial Sequence: Synthetic oligonucleotide
cagacucgugcagugccug

SEQ ID NO: 2644715 - RNA, 19 nt, Artificial Sequence
  Description of Artificial Sequence: Synthetic oligonucleotide
cgucuuugcaccccaaguc

SEQ ID NO: 2644716 - RNA, 19 nt, Artificial Sequence
  Description of Artificial Sequence: Synthetic oligonucleotide
aagcucccugaagaugaaa

SEQ ID NO: 2644717 - RNA, 19 nt, Artificial Sequence
  Description of Artificial Sequence: Synthetic oligonucleotide
gugccugcaugucauacau

SEQ ID NO: 2644718 - RNA, 19 nt, Artificial Sequence
  Description of Artificial Sequence: Synthetic oligonucleotide
uggaugggaccuggcgccc

SEQ ID NO: 2644719 - RNA, 19 nt, Artificial Sequence
  Description of Artificial Sequence: Synthetic oligonucleotide
gcuggagggauugcuguug

SEQ ID NO: 2644720 - RNA, 19 nt, Artificial Sequence
  Description of Artificial Sequence: Synthetic oligonucleotide
ugacccggcugcgcuuccg

SEQ ID NO: 2644721 - RNA, 19 nt, Artificial Sequence
  Description of Artificial Sequence: Synthetic oligonucleotide
ccuggcgcccaauauucug

SEQ ID NO: 2644722 - RNA, 19 nt, Artificial Sequence
  Description of Artificial Sequence: Synthetic oligonucleotide
ggaccuugucagugacccg

SEQ ID NO: 2644723 - RNA, 19 nt, Artificial Sequence
  Description of Artificial Sequence: Synthetic oligonucleotide
aggcacaccuccaccucag

SEQ ID NO: 2644724 - RNA, 19 nt, Artificial Sequence
  Description of Artificial Sequence: Synthetic oligonucleotide
ugccugcaugucauacaua

SEQ ID NO: 2644725 - RNA, 19 nt, Artificial Sequence
  Description of Artificial Sequence: Synthetic oligonucleotide
ggcccuugucgccuggggc

SEQ ID NO: 2644726 - RNA, 19 nt, Artificial Sequence
  Description of Artificial Sequence: Synthetic oligonucleotide
cacuaccguuuccucagca

SEQ ID NO: 2644727 - RNA, 19 nt, Artificial Sequence
  Description of Artificial Sequence: Synthetic oligonucleotide
auggcguggaagaggcaca

SEQ ID NO: 2644728 - RNA, 19 nt, Artificial Sequence
  Description of Artificial Sequence: Synthetic oligonucleotide
gucauacauagugcucaga

SEQ ID NO: 2644729 - RNA, 19 nt, Artificial Sequence
  Description of Artificial Sequence: Synthetic oligonucleotide
ccgcgggcgagccacaagc

SEQ ID NO: 2644730 - RNA, 19 nt, Artificial Sequence
  Description of Artificial Sequence: Synthetic oligonucleotide
aagcguccggcgagagaag

SEQ ID NO: 2644731 - RNA, 19 nt, Artificial Sequence
  Description of Artificial Sequence: Synthetic oligonucleotide
gcguggaagaggcacaccu

SEQ ID NO: 2644732 - RNA, 19 nt, Artificial Sequence
  Description of Artificial Sequence: Synthetic oligonucleotide
cagggcucggggcugccuc

SEQ ID NO: 2644733 - RNA, 19 nt, Artificial Sequence
  Description of Artificial Sequence: Synthetic oligonucleotide
cuggcugaacuugucucga

SEQ ID NO: 2644734 - RNA, 19 nt, Artificial Sequence
  Description of Artificial Sequence: Synthetic oligonucleotide
ugccccgucuuugcacccc

SEQ ID NO: 2644735 - RNA, 19 nt, Artificial Sequence
  Description of Artificial Sequence: Synthetic oligonucleotide
ugucuauguucggcgccuc

SEQ ID NO: 2644736 - RNA, 19 nt, Artificial Sequence
  Description of Artificial Sequence: Synthetic oligonucleotide
uccgcuugucugccccguc

SEQ ID NO: 2644737 - RNA, 19 nt, Artificial Sequence
  Description of Artificial Sequence: Synthetic oligonucleotide
gaugggaccuggcgcccaa

SEQ ID NO: 2644738 - RNA, 19 nt, Artificial Sequence
  Description of Artificial Sequence: Synthetic oligonucleotide
uuccgcuugucugccccgu

SEQ ID NO: 2644739 - RNA, 19 nt, Artificial Sequence
  Description of Artificial Sequence: Synthetic oligonucleotide
gauggucccagaugaccuu

SEQ ID NO: 2644740 - RNA, 19 nt, Artificial Sequence
  Description of Artificial Sequence: Synthetic oligonucleotide
gggauugcuguuggcaguc

SEQ ID NO: 2644741 - RNA, 19 nt, Artificial Sequence
  Description of Artificial Sequence: Synthetic oligonucleotide
cgagccacaagcguccggc

SEQ ID NO: 2644742 - RNA, 19 nt, Artificial Sequence
  Description of Artificial Sequence: Synthetic oligonucleotide
ccagaugaccuuggauggg

SEQ ID NO: 2644743 - RNA, 19 nt, Artificial Sequence
  Description of Artificial Sequence: Synthetic oligonucleotide
ggagaaucucagacucgug

SEQ ID NO: 2644744 - RNA, 19 nt, Artificial Sequence
  Description of Artificial Sequence: Synthetic oligonucleotide
cugccccgucuuugcaccc

SEQ ID NO: 2644745 - RNA, 19 nt, Artificial Sequence
  Description of Artificial Sequence: Synthetic oligonucleotide
gggagaaucucagacucgu

SEQ ID NO: 2644746 - RNA, 19 nt, Artificial Sequence
  Description of Artificial Sequence: Synthetic oligonucleotide
cccgacaggcuuguggccc

SEQ ID NO: 2644747 - RNA, 19 nt, Artificial Sequence
  Description of Artificial Sequence: Synthetic oligonucleotide
cuugucgccuggggcgccc

SEQ ID NO: 2644748 - RNA, 19 nt, Artificial Sequence
  Description of Artificial Sequence: Synthetic oligonucleotide
uugucgccuggggcgcccg

SEQ ID NO: 2644749 - RNA, 19 nt, Artificial Sequence
  Description of Artificial Sequence: Synthetic oligonucleotide
gggcgagccacaagcgucc

SEQ ID NO: 2644750 - RNA, 19 nt, Artificial Sequence
  Description of Artificial Sequence: Synthetic oligonucleotide
cuccacacuaccguuuccu

SEQ ID NO: 2644751 - RNA, 19 nt, Artificial Sequence
  Description of Artificial Sequence: Synthetic oligonucleotide
gggcccuugucgccugggg

SEQ ID NO: 2644752 - RNA, 19 nt, Artificial Sequence
  Description of Artificial Sequence: Synthetic oligonucleotide
ugcuuuccccaagcucccu

SEQ ID NO: 2644753 - RNA, 19 nt, Artificial Sequence
  Description of Artificial Sequence: Synthetic oligonucleotide
gacaggcuuguggcccagc

SEQ ID NO: 2644754 - RNA, 19 nt, Artificial Sequence
  Description of Artificial Sequence: Synthetic oligonucleotide
cccaauauucuggcugaac

SEQ ID NO: 2644755 - RNA, 19 nt, Artificial Sequence
  Description of Artificial Sequence: Synthetic oligonucleotide
gugucuauguucggcgccu

SEQ ID NO: 2644756 - RNA, 19 nt, Artificial Sequence
  Description of Artificial Sequence: Synthetic oligonucleotide
ggaccucuugaaugaucuc

SEQ ID NO: 2644757 - RNA, 19 nt, Artificial Sequence
  Description of Artificial Sequence: Synthetic oligonucleotide
gauuugggaaugggagaau

SEQ ID NO: 2644758 - RNA, 19 nt, Artificial Sequence
  Description of Artificial Sequence: Synthetic oligonucleotide
caagcucccugaagaugaa

SEQ ID NO: 2644759 - RNA, 19 nt, Artificial Sequence
  Description of Artificial Sequence: Synthetic oligonucleotide
cccgucuuugcaccccaag

SEQ ID NO: 2644760 - RNA, 19 nt, Artificial Sequence
  Description of Artificial Sequence: Synthetic oligonucleotide
gcuccacacuaccguuucc

SEQ ID NO: 2644761 - RNA, 19 nt, Artificial Sequence
  Description of Artificial Sequence: Synthetic oligonucleotide
ccagcauggcguggaagag

SEQ ID NO: 2644762 - RNA, 19 nt, Artificial Sequence
  Description of Artificial Sequence: Synthetic oligonucleotide
cccaagcucccugaagaug

SEQ ID NO: 2644763 - RNA, 19 nt, Artificial Sequence
  Description of Artificial Sequence: Synthetic oligonucleotide
ugucgccuggggcgcccgu

SEQ ID NO: 2644764 - RNA, 19 nt, Artificial Sequence
  Description of Artificial Sequence: Synthetic oligonucleotide
gugcucagauggucccaga

SEQ ID NO: 2644765 - RNA, 19 nt, Artificial Sequence
  Description of Artificial Sequence: Synthetic oligonucleotide
ggucccagaugaccuugga

SEQ ID NO: 2644766 - RNA, 19 nt, Artificial Sequence
  Description of Artificial Sequence: Synthetic oligonucleotide
cguggaagaggcacaccuc

SEQ ID NO: 2644767 - RNA, 19 nt, Artificial Sequence
  Description of Artificial Sequence: Synthetic oligonucleotide
gucuauguucggcgccucu

SEQ ID NO: 2644768 - RNA, 19 nt, Artificial Sequence
  Description of Artificial Sequence: Synthetic oligonucleotide
gcgagccacaagcguccgg

SEQ ID NO: 2644769 - RNA, 19 nt, Artificial Sequence
  Description of Artificial Sequence: Synthetic oligonucleotide
uggggcgcccgugccgccc

SEQ ID NO: 2644770 - RNA, 19 nt, Artificial Sequence
  Description of Artificial Sequence: Synthetic oligonucleotide
ucggcgccucuuggcagca

SEQ ID NO: 2644771 - RNA, 19 nt, Artificial Sequence
  Description of Artificial Sequence: Synthetic oligonucleotide
accuggcgcccaauauucu

SEQ ID NO: 2644772 - RNA, 19 nt, Artificial Sequence
  Description of Artificial Sequence: Synthetic oligonucleotide
cgggcgagccacaagcguc

SEQ ID NO: 2644773 - RNA, 19 nt, Artificial Sequence
  Description of Artificial Sequence: Synthetic oligonucleotide
gccuggggcgcccgugccg

SEQ ID NO: 2644774 - RNA, 19 nt, Artificial Sequence
  Description of Artificial Sequence: Synthetic oligonucleotide
gcuuguggcccagcauggc

SEQ ID NO: 2644775 - RNA, 19 nt, Artificial Sequence
  Description of Artificial Sequence: Synthetic oligonucleotide
accccaagucugaggaguu

SEQ ID NO: 2644776 - RNA, 19 nt, Artificial Sequence
  Description of Artificial Sequence: Synthetic oligonucleotide
ccuucucggaccucuugaa

SEQ ID NO: 2644777 - RNA, 19 nt, Artificial Sequence
  Description of Artificial Sequence: Synthetic oligonucleotide
ugccucgccggggcccuug

SEQ ID NO: 2644778 - RNA, 19 nt, Artificial Sequence
  Description of Artificial Sequence: Synthetic oligonucleotide
cuccaccucagggcuccac

SEQ ID NO: 2644779 - RNA, 19 nt, Artificial Sequence
  Description of Artificial Sequence: Synthetic oligonucleotide
cggaccucuugaaugaucu

SEQ ID NO: 2644780 - RNA, 19 nt, Artificial Sequence
  Description of Artificial Sequence: Synthetic oligonucleotide
ggcgagccacaagcguccg

SEQ ID NO: 2644781 - RNA, 19 nt, Artificial Sequence
  Description of Artificial Sequence: Synthetic oligonucleotide
cgcccaauauucuggcuga

SEQ ID NO: 2644782 - RNA, 19 nt, Artificial Sequence
  Description of Artificial Sequence: Synthetic oligonucleotide
cagucaggaccuugucagu

SEQ ID NO: 2644783 - RNA, 19 nt, Artificial Sequence
  Description of Artificial Sequence: Synthetic oligonucleotide
ccuggggcgcccgugccgc

SEQ ID NO: 2644784 - RNA, 19 nt, Artificial Sequence
  Description of Artificial Sequence: Synthetic oligonucleotide
ugccgcccaccucggccuc

SEQ ID NO: 2644785 - RNA, 19 nt, Artificial Sequence
  Description of Artificial Sequence: Synthetic oligonucleotide
cagcagggcucggggcugc

SEQ ID NO: 2644786 - RNA, 19 nt, Artificial Sequence
  Description of Artificial Sequence: Synthetic oligonucleotide
ccccgacaggcuuguggcc

SEQ ID NO: 2644787 - RNA, 19 nt, Artificial Sequence
  Description of Artificial Sequence: Synthetic oligonucleotide
cgcgggcgagccacaagcg

SEQ ID NO: 2644788 - RNA, 19 nt, Artificial Sequence
  Description of Artificial Sequence: Synthetic oligonucleotide
cugaggaguucuucuccuu

SEQ ID NO: 2644789 - RNA, 19 nt, Artificial Sequence
  Description of Artificial Sequence: Synthetic oligonucleotide
gcccagcauggcguggaag

SEQ ID NO: 2644790 - RNA, 19 nt, Artificial Sequence
  Description of Artificial Sequence: Synthetic oligonucleotide
uggccgcgggcgagccaca

SEQ ID NO: 2644791 - RNA, 19 nt, Artificial Sequence
  Description of Artificial Sequence: Synthetic oligonucleotide
cuggggcgcccgugccgcc

SEQ ID NO: 2644792 - RNA, 19 nt, Artificial Sequence
  Description of Artificial Sequence: Synthetic oligonucleotide
cccuugucgccuggggcgc

SEQ ID NO: 2644793 - RNA, 19 nt, Artificial Sequence
  Description of Artificial Sequence: Synthetic oligonucleotide
ccgucuuugcaccccaagu

SEQ ID NO: 2644794 - RNA, 19 nt, Artificial Sequence
  Description of Artificial Sequence: Synthetic oligonucleotide
ggggcccuugucgccuggg

SEQ ID NO: 2644795 - RNA, 19 nt, Artificial Sequence
  Description of Artificial Sequence: Synthetic oligonucleotide
gggaccuggcgcccaauau

SEQ ID NO: 2644796 - RNA, 19 nt, Artificial Sequence
  Description of Artificial Sequence: Synthetic oligonucleotide
gccgcgggcgagccacaag

SEQ ID NO: 2644797 - RNA, 19 nt, Artificial Sequence
  Description of Artificial Sequence: Synthetic oligonucleotide
caggcuuguggcccagcau

SEQ ID NO: 2644798 - RNA, 19 nt, Artificial Sequence
  Description of Artificial Sequence: Synthetic oligonucleotide
cgugcagugccugcauguc

SEQ ID NO: 2644799 - RNA, 19 nt, Artificial Sequence
  Description of Artificial Sequence: Synthetic oligonucleotide
cauggccgcgggcgagcca

SEQ ID NO: 2644800 - RNA, 19 nt, Artificial Sequence
  Description of Artificial Sequence: Synthetic oligonucleotide
augggaccuggcgcccaau

SEQ ID NO: 2644801 - RNA, 19 nt, Artificial Sequence
  Description of Artificial Sequence: Synthetic oligonucleotide
gccccgucuuugcacccca

SEQ ID NO: 2644802 - RNA, 19 nt, Artificial Sequence
  Description of Artificial Sequence: Synthetic oligonucleotide
ccugcaugucauacauagu

SEQ ID NO: 2644803 - RNA, 19 nt, Artificial Sequence
  Description of Artificial Sequence: Synthetic oligonucleotide
ggaugggaccuggcgccca

SEQ ID NO: 2644804 - RNA, 19 nt, Artificial Sequence
  Description of Artificial Sequence: Synthetic oligonucleotide
cccgugccgcccaccucgg

SEQ ID NO: 2644805 - RNA, 19 nt, Artificial Sequence
  Description of Artificial Sequence: Synthetic oligonucleotide
ggcgcccaauauucuggcu

SEQ ID NO: 2644806 - RNA, 19 nt, Artificial Sequence
  Description of Artificial Sequence: Synthetic oligonucleotide
ccgacaggcuuguggccca

SEQ ID NO: 2644807 - RNA, 19 nt, Artificial Sequence
  Description of Artificial Sequence: Synthetic oligonucleotide
gcgggcgagccacaagcgu

SEQ ID NO: 2644808 - RNA, 19 nt, Artificial Sequence
  Description of Artificial Sequence: Synthetic oligonucleotide
cucggaccucuugaaugau

SEQ ID NO: 2644809 - RNA, 19 nt, Artificial Sequence
  Description of Artificial Sequence: Synthetic oligonucleotide
ccuugucgccuggggcgcc

SEQ ID NO: 2644810 - RNA, 19 nt, Artificial Sequence
  Description of Artificial Sequence: Synthetic oligonucleotide
cgauucaccccgacaggcu

SEQ ID NO: 2644811 - RNA, 19 nt, Artificial Sequence
  Description of Artificial Sequence: Synthetic oligonucleotide
cgcuuccgcuugucugccc

SEQ ID NO: 2644812 - RNA, 19 nt, Artificial Sequence
  Description of Artificial Sequence: Synthetic oligonucleotide
ggcccagcauggcguggaa

SEQ ID NO: 2644813 - RNA, 19 nt, Artificial Sequence
  Description of Artificial Sequence: Synthetic oligonucleotide
ggggcgcccgugccgccca

SEQ ID NO: 2644814 - RNA, 19 nt, Artificial Sequence
  Description of Artificial Sequence: Synthetic oligonucleotide
ccguuuccucagcagggcu

SEQ ID NO: 2644815 - RNA, 19 nt, Artificial Sequence
  Description of Artificial Sequence: Synthetic oligonucleotide
ccacaagcguccggcgaga

SEQ ID NO: 2644816 - RNA, 19 nt, Artificial Sequence
  Description of Artificial Sequence: Synthetic oligonucleotide
gcauggcguggaagaggca

SEQ ID NO: 2644817 - RNA, 19 nt, Artificial Sequence
  Description of Artificial Sequence: Synthetic oligonucleotide
ccgcuugucugccccgucu

SEQ ID NO: 2644818 - RNA, 19 nt, Artificial Sequence
  Description of Artificial Sequence: Synthetic oligonucleotide
ccggggcccuugucgccug

SEQ ID NO: 2644819 - RNA, 19 nt, Artificial Sequence
  Description of Artificial Sequence: Synthetic oligonucleotide
ccuugucagugacccggcu

SEQ ID NO: 2644820 - RNA, 19 nt, Artificial Sequence
  Description of Artificial Sequence: Synthetic oligonucleotide
ggcgcccgugccgcccacc

SEQ ID NO: 2644821 - RNA, 19 nt, Artificial Sequence
  Description of Artificial Sequence: Synthetic oligonucleotide
ccccaagcucccugaagau

SEQ ID NO: 2644822 - RNA, 19 nt, Artificial Sequence
  Description of Artificial Sequence: Synthetic oligonucleotide
cgccggggcccuugucgcc

SEQ ID NO: 2644823 - RNA, 19 nt, Artificial Sequence
  Description of Artificial Sequence: Synthetic oligonucleotide
gccgcccaccucggccucc

SEQ ID NO: 2644824 - RNA, 19 nt, Artificial Sequence
  Description of Artificial Sequence: Synthetic oligonucleotide
ccgugccgcccaccucggc

SEQ ID NO: 2644825 - RNA, 19 nt, Artificial Sequence
  Description of Artificial Sequence: Synthetic oligonucleotide
gggcuccacacuaccguuu

SEQ ID NO: 2644826 - RNA, 19 nt, Artificial Sequence
  Description of Artificial Sequence: Synthetic oligonucleotide
gcgcccgugccgcccaccu

SEQ ID NO: 2644827 - RNA, 19 nt, Artificial Sequence
  Description of Artificial Sequence: Synthetic oligonucleotide
cgacaggcuuguggcccag

SEQ ID NO: 2644828 - RNA, 19 nt, Artificial Sequence
  Description of Artificial Sequence: Synthetic oligonucleotide
ccucgccggggcccuuguc

SEQ ID NO: 2644829 - RNA, 19 nt, Artificial Sequence
  Description of Artificial Sequence: Synthetic oligonucleotide
gccggggcccuugucgccu

SEQ ID NO: 2644830 - RNA, 19 nt, Artificial Sequence
  Description of Artificial Sequence: Synthetic oligonucleotide
cggggcccuugucgccugg

SEQ ID NO: 2644831 - RNA, 19 nt, Artificial Sequence
  Description of Artificial Sequence: Synthetic oligonucleotide
ggccgcgggcgagccacaa

SEQ ID NO: 2644832 - RNA, 19 nt, Artificial Sequence
  Description of Artificial Sequence: Synthetic oligonucleotide
ccccgucuuugcaccccaa

SEQ ID NO: 2644833 - RNA, 19 nt, Artificial Sequence
  Description of Artificial Sequence: Synthetic oligonucleotide
gggcgcccgugccgcccac

SEQ ID NO: 2644834 - RNA, 19 nt, Artificial Sequence
  Description of Artificial Sequence: Synthetic oligonucleotide
gcagggcucggggcugccu

SEQ ID NO: 2644835 - RNA, 19 nt, Artificial Sequence
  Description of Artificial Sequence: Synthetic oligonucleotide
gccucgccggggcccuugu

SEQ ID NO: 2644836 - RNA, 19 nt, Artificial Sequence
  Description of Artificial Sequence: Synthetic oligonucleotide
cgcccgugccgcccaccuc

SEQ ID NO: 2644837 - RNA, 19 nt, Artificial Sequence
  Description of Artificial Sequence: Synthetic oligonucleotide
ucaauuuugcccaaaaccu

SEQ ID NO: 2644838 - RNA, 19 nt, Artificial Sequence
  Description of Artificial Sequence: Synthetic oligonucleotide
aaugcugcuuguucuggcc

SEQ ID NO: 2644839 - RNA, 19 nt, Artificial Sequence
  Description of Artificial Sequence: Synthetic oligonucleotide
uuccguuugaccaugugag

SEQ ID NO: 2644840 - RNA, 19 nt, Artificial Sequence
  Description of Artificial Sequence: Synthetic oligonucleotide
cucugagcugcuaagaugg

SEQ ID NO: 2644841 - RNA, 19 nt, Artificial Sequence
  Description of Artificial Sequence: Synthetic oligonucleotide
uccacuuucauagucugcg

SEQ ID NO: 2644842 - RNA, 19 nt, Artificial Sequence
  Description of Artificial Sequence: Synthetic oligonucleotide
ugguuauucggaauggccc

SEQ ID NO: 2644843 - RNA, 19 nt, Artificial Sequence
  Description of Artificial Sequence: Synthetic oligonucleotide
guucauuucgccuucggcc

SEQ ID NO: 2644844 - RNA, 19 nt, Artificial Sequence
  Description of Artificial Sequence: Synthetic oligonucleotide
uuugacagcagguaugggu

SEQ ID NO: 2644845 - RNA, 19 nt, Artificial Sequence
  Description of Artificial Sequence: Synthetic oligonucleotide
uuagacuuggccugugcgg

SEQ ID NO: 2644846 - RNA, 19 nt, Artificial Sequence
  Description of Artificial Sequence: Synthetic oligonucleotide
uguuugacagcagguaugg

SEQ ID NO: 2644847 - RNA, 19 nt, Artificial Sequence
  Description of Artificial Sequence: Synthetic oligonucleotide
aaccugguuauucggaaug

SEQ ID NO: 2644848 - RNA, 19 nt, Artificial Sequence
  Description of Artificial Sequence: Synthetic oligonucleotide
agcagguauggguugaggg

SEQ ID NO: 2644849 - RNA, 19 nt, Artificial Sequence
  Description of Artificial Sequence: Synthetic oligonucleotide
uucauuucgccuucggccc

SEQ ID NO: 2644850 - RNA, 19 nt, Artificial Sequence
  Description of Artificial Sequence: Synthetic oligonucleotide
uuuguuugacagcagguau

SEQ ID NO: 2644851 - RNA, 19 nt, Artificial Sequence
  Description of Artificial Sequence: Synthetic oligonucleotide
auagucugcgaugacuugc

SEQ ID NO: 2644852 - RNA, 19 nt, Artificial Sequence
  Description of Artificial Sequence: Synthetic oligonucleotide
ugagcugcuaagauggccu

SEQ ID NO: 2644853 - RNA, 19 nt, Artificial Sequence
  Description of Artificial Sequence: Synthetic oligonucleotide
uucuccucgucucugagcu

SEQ ID NO: 2644854 - RNA, 19 nt, Artificial Sequence
  Description of Artificial Sequence: Synthetic oligonucleotide
ucugcgaugacuugcggcu

SEQ ID NO: 2644855 - RNA, 19 nt, Artificial Sequence
  Description of Artificial Sequence: Synthetic oligonucleotide
uguucauuucgccuucggc

SEQ ID NO: 2644856 - RNA, 19 nt, Artificial Sequence
  Description of Artificial Sequence: Synthetic oligonucleotide
uuguuugacagcagguaug

SEQ ID NO: 2644857 - RNA, 19 nt, Artificial Sequence
  Description of Artificial Sequence: Synthetic oligonucleotide
ucuagcuuggcuguguucu

SEQ ID NO: 2644858 - RNA, 19 nt, Artificial Sequence
  Description of Artificial Sequence: Synthetic oligonucleotide
gaaccacuggcuucgaggc

SEQ ID NO: 2644859 - RNA, 19 nt, Artificial Sequence
  Description of Artificial Sequence: Synthetic oligonucleotide
cuuagacuuggccugugcg

SEQ ID NO: 2644860 - RNA, 19 nt, Artificial Sequence
  Description of Artificial Sequence: Synthetic oligonucleotide
acuuugcccaccuccaggg

SEQ ID NO: 2644861 - RNA, 19 nt, Artificial Sequence
  Description of Artificial Sequence: Synthetic oligonucleotide
caugugaggagacccacgg

SEQ ID NO: 2644862 - RNA, 19 nt, Artificial Sequence
  Description of Artificial Sequence: Synthetic oligonucleotide
uuuguguucauuucgccuu

SEQ ID NO: 2644863 - RNA, 19 nt, Artificial Sequence
  Description of Artificial Sequence: Synthetic oligonucleotide
acuuucauagucugcgaug

SEQ ID NO: 2644864 - RNA, 19 nt, Artificial Sequence
  Description of Artificial Sequence: Synthetic oligonucleotide
cugguuauucggaauggcc

SEQ ID NO: 2644865 - RNA, 19 nt, Artificial Sequence
  Description of Artificial Sequence: Synthetic oligonucleotide
uagucugcgaugacuugcg

SEQ ID NO: 2644866 - RNA, 19 nt, Artificial Sequence
  Description of Artificial Sequence: Synthetic oligonucleotide
uuugcccaaaaccugguua

SEQ ID NO: 2644867 - RNA, 19 nt, Artificial Sequence
  Description of Artificial Sequence: Synthetic oligonucleotide
aggcuuuguguucauuucg

SEQ ID NO: 2644868 - RNA, 19 nt, Artificial Sequence
  Description of Artificial Sequence: Synthetic oligonucleotide
cuuguucuggccagcagcc

SEQ ID NO: 2644869 - RNA, 19 nt, Artificial Sequence
  Description of Artificial Sequence: Synthetic oligonucleotide
uuugcaagguuuugcuuug

SEQ ID NO: 2644870 - RNA, 19 nt, Artificial Sequence
  Description of Artificial Sequence: Synthetic oligonucleotide
aagauggccugcuuagacu

SEQ ID NO: 2644871 - RNA, 19 nt, Artificial Sequence
  Description of Artificial Sequence: Synthetic oligonucleotide
augucuccacaucuucucc

SEQ ID NO: 2644872 - RNA, 19 nt, Artificial Sequence
  Description of Artificial Sequence: Synthetic oligonucleotide
gauggaaugcugcuuguuc

SEQ ID NO: 2644873 - RNA, 19 nt, Artificial Sequence
  Description of Artificial Sequence: Synthetic oligonucleotide
agcaccgucacgguguccc

SEQ ID NO: 2644874 - RNA, 19 nt, Artificial Sequence
  Description of Artificial Sequence: Synthetic oligonucleotide
ucucaauuuugcccaaaac

SEQ ID NO: 2644875 - RNA, 19 nt, Artificial Sequence
  Description of Artificial Sequence: Synthetic oligonucleotide
uuuucuuacuuugcaaggu

SEQ ID NO: 2644876 - RNA, 19 nt, Artificial Sequence
  Description of Artificial Sequence: Synthetic oligonucleotide
ucauagucugcgaugacuu

SEQ ID NO: 2644877 - RNA, 19 nt, Artificial Sequence
  Description of Artificial Sequence: Synthetic oligonucleotide
uuacuuugcaagguuuugc

SEQ ID NO: 2644878 - RNA, 19 nt, Artificial Sequence
  Description of Artificial Sequence: Synthetic oligonucleotide
ucucugagcugcuaagaug

SEQ ID NO: 2644879 - RNA, 19 nt, Artificial Sequence
  Description of Artificial Sequence: Synthetic oligonucleotide
uugacagcagguauggguu

SEQ ID NO: 2644880 - RNA, 19 nt, Artificial Sequence
  Description of Artificial Sequence: Synthetic oligonucleotide
gguuauucggaauggcccg

SEQ ID NO: 2644881 - RNA, 19 nt, Artificial Sequence
  Description of Artificial Sequence: Synthetic oligonucleotide
uugcgcagcaccgucacgg

SEQ ID NO: 2644882 - RNA, 19 nt, Artificial Sequence
  Description of Artificial Sequence: Synthetic oligonucleotide
ucgauaggcuucccgaugu

SEQ ID NO: 2644883 - RNA, 19 nt, Artificial Sequence
  Description of Artificial Sequence: Synthetic oligonucleotide
gaugucuccacaucuucuc

SEQ ID NO: 2644884 - RNA, 19 nt, Artificial Sequence
  Description of Artificial Sequence: Synthetic oligonucleotide
ugaaucacuuugcccaccu

SEQ ID NO: 2644885 - RNA, 19 nt, Artificial Sequence
  Description of Artificial Sequence: Synthetic oligonucleotide
uuucuuggaugucuccaca

SEQ ID NO: 2644886 - RNA, 19 nt, Artificial Sequence
  Description of Artificial Sequence: Synthetic oligonucleotide
ucuggcagcugcucgagac

SEQ ID NO: 2644887 - RNA, 19 nt, Artificial Sequence
  Description of Artificial Sequence: Synthetic oligonucleotide
ucgugaugcagcuccuccg

SEQ ID NO: 2644888 - RNA, 19 nt, Artificial Sequence
  Description of Artificial Sequence: Synthetic oligonucleotide
uuucuuacuuugcaagguu

SEQ ID NO: 2644889 - RNA, 19 nt, Artificial Sequence
  Description of Artificial Sequence: Synthetic oligonucleotide
ucuuacuuugcaagguuuu

SEQ ID NO: 2644890 - RNA, 19 nt, Artificial Sequence
  Description of Artificial Sequence: Synthetic oligonucleotide
uugauuuucguggccaggu

SEQ ID NO: 2644891 - RNA, 19 nt, Artificial Sequence
  Description of Artificial Sequence: Synthetic oligonucleotide
gucgcucucggccauggcg

SEQ ID NO: 2644892 - RNA, 19 nt, Artificial Sequence
  Description of Artificial Sequence: Synthetic oligonucleotide
ggugauggaaugcugcuug

SEQ ID NO: 2644893 - RNA, 19 nt, Artificial Sequence
  Description of Artificial Sequence: Synthetic oligonucleotide
ggcccguccacuuucauag

SEQ ID NO: 2644894 - RNA, 19 nt, Artificial Sequence
  Description of Artificial Sequence: Synthetic oligonucleotide
uccguuugaccaugugagg

SEQ ID NO: 2644895 - RNA, 19 nt, Artificial Sequence
  Description of Artificial Sequence: Synthetic oligonucleotide
gucacggugucccagucgc

SEQ ID NO: 2644896 - RNA, 19 nt, Artificial Sequence
  Description of Artificial Sequence: Synthetic oligonucleotide
gcuaagauggccugcuuag

SEQ ID NO: 2644897 - RNA, 19 nt, Artificial Sequence
  Description of Artificial Sequence: Synthetic oligonucleotide
auggcucucucaauuuugc

SEQ ID NO: 2644898 - RNA, 19 nt, Artificial Sequence
  Description of Artificial Sequence: Synthetic oligonucleotide
uucuuacuuugcaagguuu

SEQ ID NO: 2644899 - RNA, 19 nt, Artificial Sequence
  Description of Artificial Sequence: Synthetic oligonucleotide
uuugaccaugugaggagac

SEQ ID NO: 2644900 - RNA, 19 nt, Artificial Sequence
  Description of Artificial Sequence: Synthetic oligonucleotide
gaugacuugcggcuuuuca

SEQ ID NO: 2644901 - RNA, 19 nt, Artificial Sequence
  Description of Artificial Sequence: Synthetic oligonucleotide
gaaugcugcuuguucuggc

SEQ ID NO: 2644902 - RNA, 19 nt, Artificial Sequence
  Description of Artificial Sequence: Synthetic oligonucleotide
gauggcucucucaauuuug

SEQ ID NO: 2644903 - RNA, 19 nt, Artificial Sequence
  Description of Artificial Sequence: Synthetic oligonucleotide
ggcucucucaauuuugccc

SEQ ID NO: 2644904 - RNA, 19 nt, Artificial Sequence
  Description of Artificial Sequence: Synthetic oligonucleotide
guuccguuugaccauguga

SEQ ID NO: 2644905 - RNA, 19 nt, Artificial Sequence
  Description of Artificial Sequence: Synthetic oligonucleotide
uugcccaaaaccugguuau

SEQ ID NO: 2644906 - RNA, 19 nt, Artificial Sequence
  Description of Artificial Sequence: Synthetic oligonucleotide
ucagccggaaccacuggcu

SEQ ID NO: 2644907 - RNA, 19 nt, Artificial Sequence
  Description of Artificial Sequence: Synthetic oligonucleotide
uuggugauggaaugcugcu

SEQ ID NO: 2644908 - RNA, 19 nt, Artificial Sequence
  Description of Artificial Sequence: Synthetic oligonucleotide
augacuugcggcuuuucau

SEQ ID NO: 2644909 - RNA, 19 nt, Artificial Sequence
  Description of Artificial Sequence: Synthetic oligonucleotide
ugcuaagauggccugcuua

SEQ ID NO: 2644910 - RNA, 19 nt, Artificial Sequence
  Description of Artificial Sequence: Synthetic oligonucleotide
gcagguauggguugagggg

SEQ ID NO: 2644911 - RNA, 19 nt, Artificial Sequence
  Description of Artificial Sequence: Synthetic oligonucleotide
uuugcccaccuccaggguc

SEQ ID NO: 2644912 - RNA, 19 nt, Artificial Sequence
  Description of Artificial Sequence: Synthetic oligonucleotide
gauaggcuucccgaugucc

SEQ ID NO: 2644913 - RNA, 19 nt, Artificial Sequence
  Description of Artificial Sequence: Synthetic oligonucleotide
cauugauuuucguggccag

SEQ ID NO: 2644914 - RNA, 19 nt, Artificial Sequence
  Description of Artificial Sequence: Synthetic oligonucleotide
uucggaauggcccguccac

SEQ ID NO: 2644915 - RNA, 19 nt, Artificial Sequence
  Description of Artificial Sequence: Synthetic oligonucleotide
gacuugcggcuuuucauug

SEQ ID NO: 2644916 - RNA, 19 nt, Artificial Sequence
  Description of Artificial Sequence: Synthetic oligonucleotide
uauucggaauggcccgucc

SEQ ID NO: 2644917 - RNA, 19 nt, Artificial Sequence
  Description of Artificial Sequence: Synthetic oligonucleotide
ucccggucuagcuuggcug

SEQ ID NO: 2644918 - RNA, 19 nt, Artificial Sequence
  Description of Artificial Sequence: Synthetic oligonucleotide
cacccugucgugaugcagc

SEQ ID NO: 2644919 - RNA, 19 nt, Artificial Sequence
  Description of Artificial Sequence: Synthetic oligonucleotide
agguuuugcuuuguuugac

SEQ ID NO: 2644920 - RNA, 19 nt, Artificial Sequence
  Description of Artificial Sequence: Synthetic oligonucleotide
uucggccccuucucgauag

SEQ ID NO: 2644921 - RNA, 19 nt, Artificial Sequence
  Description of Artificial Sequence: Synthetic oligonucleotide
gaggcuuuguguucauuuc

SEQ ID NO: 2644922 - RNA, 19 nt, Artificial Sequence
  Description of Artificial Sequence: Synthetic oligonucleotide
agauggccugcuuagacuu

SEQ ID NO: 2644923 - RNA, 19 nt, Artificial Sequence
  Description of Artificial Sequence: Synthetic oligonucleotide
ucgucucugagcugcuaag

SEQ ID NO: 2644924 - RNA, 19 nt, Artificial Sequence
  Description of Artificial Sequence: Synthetic oligonucleotide
ccugucgugaugcagcucc

SEQ ID NO: 2644925 - RNA, 19 nt, Artificial Sequence
  Description of Artificial Sequence: Synthetic oligonucleotide
cuuggcuguguucuuggug

SEQ ID NO: 2644926 - RNA, 19 nt, Artificial Sequence
  Description of Artificial Sequence: Synthetic oligonucleotide
ugacuugcggcuuuucauu

SEQ ID NO: 2644927 - RNA, 19 nt, Artificial Sequence
  Description of Artificial Sequence: Synthetic oligonucleotide
aagagcucagccggaacca

SEQ ID NO: 2644928 - RNA, 19 nt, Artificial Sequence
  Description of Artificial Sequence: Synthetic oligonucleotide
uguguucuuggugauggaa

SEQ ID NO: 2644929 - RNA, 19 nt, Artificial Sequence
  Description of Artificial Sequence: Synthetic oligonucleotide
agacuuggccugugcggcc

SEQ ID NO: 2644930 - RNA, 19 nt, Artificial Sequence
  Description of Artificial Sequence: Synthetic oligonucleotide
gucugcgaugacuugcggc

SEQ ID NO: 2644931 - RNA, 19 nt, Artificial Sequence
  Description of Artificial Sequence: Synthetic oligonucleotide
uucgccuucggccccuucu

SEQ ID NO: 2644932 - RNA, 19 nt, Artificial Sequence
  Description of Artificial Sequence: Synthetic oligonucleotide
ucgcucucggccauggcgu

SEQ ID NO: 2644933 - RNA, 19 nt, Artificial Sequence
  Description of Artificial Sequence: Synthetic oligonucleotide
cccaaaaccugguuauucg

SEQ ID NO: 2644934 - RNA, 19 nt, Artificial Sequence
  Description of Artificial Sequence: Synthetic oligonucleotide
uguuccguuugaccaugug

SEQ ID NO: 2644935 - RNA, 19 nt, Artificial Sequence
  Description of Artificial Sequence: Synthetic oligonucleotide
cuggcuucgaggcuuugug

SEQ ID NO: 2644936 - RNA, 19 nt, Artificial Sequence
  Description of Artificial Sequence: Synthetic oligonucleotide
ccaaaaccugguuauucgg

SEQ ID NO: 2644937 - RNA, 19 nt, Artificial Sequence
  Description of Artificial Sequence: Synthetic oligonucleotide
accugguuauucggaaugg

SEQ ID NO: 2644938 - RNA, 19 nt, Artificial Sequence
  Description of Artificial Sequence: Synthetic oligonucleotide
uugaccaugugaggagacc

SEQ ID NO: 2644939 - RNA, 19 nt, Artificial Sequence
  Description of Artificial Sequence: Synthetic oligonucleotide
ugacagcagguauggguug

SEQ ID NO: 2644940 - RNA, 19 nt, Artificial Sequence
  Description of Artificial Sequence: Synthetic oligonucleotide
uguguucauuucgccuucg

SEQ ID NO: 2644941 - RNA, 19 nt, Artificial Sequence
  Description of Artificial Sequence: Synthetic oligonucleotide
ugauuuucguggccagguc

SEQ ID NO: 2644942 - RNA, 19 nt, Artificial Sequence
  Description of Artificial Sequence: Synthetic oligonucleotide
ucauuucgccuucggcccc

SEQ ID NO: 2644943 - RNA, 19 nt, Artificial Sequence
  Description of Artificial Sequence: Synthetic oligonucleotide
cuucuccucgucucugagc

SEQ ID NO: 2644944 - RNA, 19 nt, Artificial Sequence
  Description of Artificial Sequence: Synthetic oligonucleotide
ugcucugacggccccgcug

SEQ ID NO: 2644945 - RNA, 19 nt, Artificial Sequence
  Description of Artificial Sequence: Synthetic oligonucleotide
guccuucugcgucaggccc

SEQ ID NO: 2644946 - RNA, 19 nt, Artificial Sequence
  Description of Artificial Sequence: Synthetic oligonucleotide
cuucccgauguccuucccc

SEQ ID NO: 2644947 - RNA, 19 nt, Artificial Sequence
  Description of Artificial Sequence: Synthetic oligonucleotide
uuguguucauuucgccuuc

SEQ ID NO: 2644948 - RNA, 19 nt, Artificial Sequence
  Description of Artificial Sequence: Synthetic oligonucleotide
uuggaugucuccacaucuu

SEQ ID NO: 2644949 - RNA, 19 nt, Artificial Sequence
  Description of Artificial Sequence: Synthetic oligonucleotide
gaauggcccguccacuuuc

SEQ ID NO: 2644950 - RNA, 19 nt, Artificial Sequence
  Description of Artificial Sequence: Synthetic oligonucleotide
auucggaauggcccgucca

SEQ ID NO: 2644951 - RNA, 19 nt, Artificial Sequence
  Description of Artificial Sequence: Synthetic oligonucleotide
guguucauuucgccuucgg

SEQ ID NO: 2644952 - RNA, 19 nt, Artificial Sequence
  Description of Artificial Sequence: Synthetic oligonucleotide
cauagucugcgaugacuug

SEQ ID NO: 2644953 - RNA, 19 nt, Artificial Sequence
  Description of Artificial Sequence: Synthetic oligonucleotide
uggcucucucaauuuugcc

SEQ ID NO: 2644954 - RNA, 19 nt, Artificial Sequence
  Description of Artificial Sequence: Synthetic oligonucleotide
ggcuuuucauugauuuucg

SEQ ID NO: 2644955 - RNA, 19 nt, Artificial Sequence
  Description of Artificial Sequence: Synthetic oligonucleotide
ucucgauaggcuucccgau

SEQ ID NO: 2644956 - RNA, 19 nt, Artificial Sequence
  Description of Artificial Sequence: Synthetic oligonucleotide
uugcuuuguuugacagcag

SEQ ID NO: 2644957 - RNA, 19 nt, Artificial Sequence
  Description of Artificial Sequence: Synthetic oligonucleotide
agccggaaccacuggcuuc

SEQ ID NO: 2644958 - RNA, 19 nt, Artificial Sequence
  Description of Artificial Sequence: Synthetic oligonucleotide
auuuucguggccagguccu

SEQ ID NO: 2644959 - RNA, 19 nt, Artificial Sequence
  Description of Artificial Sequence: Synthetic oligonucleotide
cucgauaggcuucccgaug

SEQ ID NO: 2644960 - RNA, 19 nt, Artificial Sequence
  Description of Artificial Sequence: Synthetic oligonucleotide
cugagcugcuaagauggcc

SEQ ID NO: 2644961 - RNA, 19 nt, Artificial Sequence
  Description of Artificial Sequence: Synthetic oligonucleotide
ccagcagcccauuucuugg

SEQ ID NO: 2644962 - RNA, 19 nt, Artificial Sequence
  Description of Artificial Sequence: Synthetic oligonucleotide
cugacggccccgcugaauc

SEQ ID NO: 2644963 - RNA, 19 nt, Artificial Sequence
  Description of Artificial Sequence: Synthetic oligonucleotide
uuuugcccaaaaccugguu

SEQ ID NO: 2644964 - RNA, 19 nt, Artificial Sequence
  Description of Artificial Sequence: Synthetic oligonucleotide
aggagacccacggcagugc

SEQ ID NO: 2644965 - RNA, 19 nt, Artificial Sequence
  Description of Artificial Sequence: Synthetic oligonucleotide
uccuucugcgucaggcccu

SEQ ID NO: 2644966 - RNA, 19 nt, Artificial Sequence
  Description of Artificial Sequence: Synthetic oligonucleotide
agucugcgaugacuugcgg

SEQ ID NO: 2644967 - RNA, 19 nt, Artificial Sequence
  Description of Artificial Sequence: Synthetic oligonucleotide
cuuggaugucuccacaucu

SEQ ID NO: 2644968 - RNA, 19 nt, Artificial Sequence
  Description of Artificial Sequence: Synthetic oligonucleotide
uggccugugcggccguggg

SEQ ID NO: 2644969 - RNA, 19 nt, Artificial Sequence
  Description of Artificial Sequence: Synthetic oligonucleotide
agcuugaggccgauggcuc

SEQ ID NO: 2644970 - RNA, 19 nt, Artificial Sequence
  Description of Artificial Sequence: Synthetic oligonucleotide
aaccacuggcuucgaggcu

SEQ ID NO: 2644971 - RNA, 19 nt, Artificial Sequence
  Description of Artificial Sequence: Synthetic oligonucleotide
gacuuggccugugcggccg

SEQ ID NO: 2644972 - RNA, 19 nt, Artificial Sequence
  Description of Artificial Sequence: Synthetic oligonucleotide
gagcugcuaagauggccug

SEQ ID NO: 2644973 - RNA, 19 nt, Artificial Sequence
  Description of Artificial Sequence: Synthetic oligonucleotide
acuugcggcuuuucauuga

SEQ ID NO: 2644974 - RNA, 19 nt, Artificial Sequence
  Description of Artificial Sequence: Synthetic oligonucleotide
aucacuuugcccaccucca

SEQ ID NO: 2644975 - RNA, 19 nt, Artificial Sequence
  Description of Artificial Sequence: Synthetic oligonucleotide
ugcaagguuuugcuuuguu

SEQ ID NO: 2644976 - RNA, 19 nt, Artificial Sequence
  Description of Artificial Sequence: Synthetic oligonucleotide
ucaggcccuugcucugacg

SEQ ID NO: 2644977 - RNA, 19 nt, Artificial Sequence
  Description of Artificial Sequence: Synthetic oligonucleotide
aggccgauggcucucucaa

SEQ ID NO: 2644978 - RNA, 19 nt, Artificial Sequence
  Description of Artificial Sequence: Synthetic oligonucleotide
uggcuucgaggcuuugugu

SEQ ID NO: 2644979 - RNA, 19 nt, Artificial Sequence
  Description of Artificial Sequence: Synthetic oligonucleotide
cccauguuccguuugacca

SEQ ID NO: 2644980 - RNA, 19 nt, Artificial Sequence
  Description of Artificial Sequence: Synthetic oligonucleotide
ucacccugucgugaugcag

SEQ ID NO: 2644981 - RNA, 19 nt, Artificial Sequence
  Description of Artificial Sequence: Synthetic oligonucleotide
gaggagacccacggcagug

SEQ ID NO: 2644982 - RNA, 19 nt, Artificial Sequence
  Description of Artificial Sequence: Synthetic oligonucleotide
cuuuguuugacagcaggua

SEQ ID NO: 2644983 - RNA, 19 nt, Artificial Sequence
  Description of Artificial Sequence: Synthetic oligonucleotide
cauguuccguuugaccaug

SEQ ID NO: 2644984 - RNA, 19 nt, Artificial Sequence
  Description of Artificial Sequence: Synthetic oligonucleotide
gguuuugcuuuguuugaca

SEQ ID NO: 2644985 - RNA, 19 nt, Artificial Sequence
  Description of Artificial Sequence: Synthetic oligonucleotide
ggaaugcugcuuguucugg

SEQ ID NO: 2644986 - RNA, 19 nt, Artificial Sequence
  Description of Artificial Sequence: Synthetic oligonucleotide
cuggcagcugcucgagacc

SEQ ID NO: 2644987 - RNA, 19 nt, Artificial Sequence
  Description of Artificial Sequence: Synthetic oligonucleotide
cgcugaaucacuuugccca

SEQ ID NO: 2644988 - RNA, 19 nt, Artificial Sequence
  Description of Artificial Sequence: Synthetic oligonucleotide
guuugaccaugugaggaga

SEQ ID NO: 2644989 - RNA, 19 nt, Artificial Sequence
  Description of Artificial Sequence: Synthetic oligonucleotide
agucgcucucggccauggc

SEQ ID NO: 2644990 - RNA, 19 nt, Artificial Sequence
  Description of Artificial Sequence: Synthetic oligonucleotide
cuugcucugacggccccgc

SEQ ID NO: 2644991 - RNA, 19 nt, Artificial Sequence
  Description of Artificial Sequence: Synthetic oligonucleotide
cucucaauuuugcccaaaa

SEQ ID NO: 2644992 - RNA, 19 nt, Artificial Sequence
  Description of Artificial Sequence: Synthetic oligonucleotide
agcucagccggaaccacug

SEQ ID NO: 2644993 - RNA, 19 nt, Artificial Sequence
  Description of Artificial Sequence: Synthetic oligonucleotide
auuuugcccaaaaccuggu

SEQ ID NO: 2644994 - RNA, 19 nt, Artificial Sequence
  Description of Artificial Sequence: Synthetic oligonucleotide
ugcgaugacuugcggcuuu

SEQ ID NO: 2644995 - RNA, 19 nt, Artificial Sequence
  Description of Artificial Sequence: Synthetic oligonucleotide
cugaaucacuuugcccacc

SEQ ID NO: 2644996 - RNA, 19 nt, Artificial Sequence
  Description of Artificial Sequence: Synthetic oligonucleotide
uuauucggaauggcccguc

SEQ ID NO: 2644997 - RNA, 19 nt, Artificial Sequence
  Description of Artificial Sequence: Synthetic oligonucleotide
gccagcagcccauuucuug

SEQ ID NO: 2644998 - RNA, 19 nt, Artificial Sequence
  Description of Artificial Sequence: Synthetic oligonucleotide
ucggaauggcccguccacu

SEQ ID NO: 2644999 - RNA, 19 nt, Artificial Sequence
  Description of Artificial Sequence: Synthetic oligonucleotide
aauggcccguccacuuuca

SEQ ID NO: 2645000 - RNA, 19 nt, Artificial Sequence
  Description of Artificial Sequence: Synthetic oligonucleotide
gacagcagguauggguuga

SEQ ID NO: 2645001 - RNA, 19 nt, Artificial Sequence
  Description of Artificial Sequence: Synthetic oligonucleotide
acggugucccagucgcucu

SEQ ID NO: 2645002 - RNA, 19 nt, Artificial Sequence
  Description of Artificial Sequence: Synthetic oligonucleotide
acccugucgugaugcagcu

SEQ ID NO: 2645003 - RNA, 19 nt, Artificial Sequence
  Description of Artificial Sequence: Synthetic oligonucleotide
ucgccuucggccccuucuc

SEQ ID NO: 2645004 - RNA, 19 nt, Artificial Sequence
  Description of Artificial Sequence: Synthetic oligonucleotide
gccggaaccacuggcuucg

SEQ ID NO: 2645005 - RNA, 19 nt, Artificial Sequence
  Description of Artificial Sequence: Synthetic oligonucleotide
accgucacggugucccagu

SEQ ID NO: 2645006 - RNA, 19 nt, Artificial Sequence
  Description of Artificial Sequence: Synthetic oligonucleotide
ggucacccugucgugaugc

SEQ ID NO: 2645007 - RNA, 19 nt, Artificial Sequence
  Description of Artificial Sequence: Synthetic oligonucleotide
ugauggaaugcugcuuguu

SEQ ID NO: 2645008 - RNA, 19 nt, Artificial Sequence
  Description of Artificial Sequence: Synthetic oligonucleotide
ugacggccccgcugaauca

SEQ ID NO: 2645009 - RNA, 19 nt, Artificial Sequence
  Description of Artificial Sequence: Synthetic oligonucleotide
cccacggcagugcuggugg

SEQ ID NO: 2645010 - RNA, 19 nt, Artificial Sequence
  Description of Artificial Sequence: Synthetic oligonucleotide
ggagcuugaggccgauggc

SEQ ID NO: 2645011 - RNA, 19 nt, Artificial Sequence
  Description of Artificial Sequence: Synthetic oligonucleotide
cguuugaccaugugaggag

SEQ ID NO: 2645012 - RNA, 19 nt, Artificial Sequence
  Description of Artificial Sequence: Synthetic oligonucleotide
accacuggcuucgaggcuu

SEQ ID NO: 2645013 - RNA, 19 nt, Artificial Sequence
  Description of Artificial Sequence: Synthetic oligonucleotide
cuucgaggcuuuguguuca

SEQ ID NO: 2645014 - RNA, 19 nt, Artificial Sequence
  Description of Artificial Sequence: Synthetic oligonucleotide
agcagcccauuucuuggau

SEQ ID NO: 2645015 - RNA, 19 nt, Artificial Sequence
  Description of Artificial Sequence: Synthetic oligonucleotide
uggccugcuuagacuuggc

SEQ ID NO: 2645016 - RNA, 19 nt, Artificial Sequence
  Description of Artificial Sequence: Synthetic oligonucleotide
gaccaugugaggagaccca

SEQ ID NO: 2645017 - RNA, 19 nt, Artificial Sequence
  Description of Artificial Sequence: Synthetic oligonucleotide
agggucacccugucgugau

SEQ ID NO: 2645018 - RNA, 19 nt, Artificial Sequence
  Description of Artificial Sequence: Synthetic oligonucleotide
ccauuucuuggaugucucc

SEQ ID NO: 2645019 - RNA, 19 nt, Artificial Sequence
  Description of Artificial Sequence: Synthetic oligonucleotide
cagcccauuucuuggaugu

SEQ ID NO: 2645020 - RNA, 19 nt, Artificial Sequence
  Description of Artificial Sequence: Synthetic oligonucleotide
acuggcuucgaggcuuugu

SEQ ID NO: 2645021 - RNA, 19 nt, Artificial Sequence
  Description of Artificial Sequence: Synthetic oligonucleotide
uggcccguccacuuucaua

SEQ ID NO: 2645022 - RNA, 19 nt, Artificial Sequence
  Description of Artificial Sequence: Synthetic oligonucleotide
cucucggccauggcguggc

SEQ ID NO: 2645023 - RNA, 19 nt, Artificial Sequence
  Description of Artificial Sequence: Synthetic oligonucleotide
ccaugugaggagacccacg

SEQ ID NO: 2645024 - RNA, 19 nt, Artificial Sequence
  Description of Artificial Sequence: Synthetic oligonucleotide
cagcagguauggguugagg

SEQ ID NO: 2645025 - RNA, 19 nt, Artificial Sequence
  Description of Artificial Sequence: Synthetic oligonucleotide
ucggccccuucucgauagg

SEQ ID NO: 2645026 - RNA, 19 nt, Artificial Sequence
  Description of Artificial Sequence: Synthetic oligonucleotide
gcuuagacuuggccugugc

SEQ ID NO: 2645027 - RNA, 19 nt, Artificial Sequence
  Description of Artificial Sequence: Synthetic oligonucleotide
ucuccucgucucugagcug

SEQ ID NO: 2645028 - RNA, 19 nt, Artificial Sequence
  Description of Artificial Sequence: Synthetic oligonucleotide
gcagcccauuucuuggaug

SEQ ID NO: 2645029 - RNA, 19 nt, Artificial Sequence
  Description of Artificial Sequence: Synthetic oligonucleotide
uggugauggaaugcugcuu

SEQ ID NO: 2645030 - RNA, 19 nt, Artificial Sequence
  Description of Artificial Sequence: Synthetic oligonucleotide
uuucguggccagguccuuc

SEQ ID NO: 2645031 - RNA, 19 nt, Artificial Sequence
  Description of Artificial Sequence: Synthetic oligonucleotide
cccgcugaaucacuuugcc

SEQ ID NO: 2645032 - RNA, 19 nt, Artificial Sequence
  Description of Artificial Sequence: Synthetic oligonucleotide
ugcgcagcaccgucacggu

SEQ ID NO: 2645033 - RNA, 19 nt, Artificial Sequence
  Description of Artificial Sequence: Synthetic oligonucleotide
cacggugucccagucgcuc

SEQ ID NO: 2645034 - RNA, 19 nt, Artificial Sequence
  Description of Artificial Sequence: Synthetic oligonucleotide
cucgucucugagcugcuaa

SEQ ID NO: 2645035 - RNA, 19 nt, Artificial Sequence
  Description of Artificial Sequence: Synthetic oligonucleotide
gucuagcuuggcuguguuc

SEQ ID NO: 2645036 - RNA, 19 nt, Artificial Sequence
  Description of Artificial Sequence: Synthetic oligonucleotide
ugcuuagacuuggccugug

SEQ ID NO: 2645037 - RNA, 19 nt, Artificial Sequence
  Description of Artificial Sequence: Synthetic oligonucleotide
uaggcuucccgauguccuu

SEQ ID NO: 2645038 - RNA, 19 nt, Artificial Sequence
  Description of Artificial Sequence: Synthetic oligonucleotide
gccccgcugaaucacuuug

SEQ ID NO: 2645039 - RNA, 19 nt, Artificial Sequence
  Description of Artificial Sequence: Synthetic oligonucleotide
ucacggugucccagucgcu

SEQ ID NO: 2645040 - RNA, 19 nt, Artificial Sequence
  Description of Artificial Sequence: Synthetic oligonucleotide
gucucugagcugcuaagau

SEQ ID NO: 2645041 - RNA, 19 nt, Artificial Sequence
  Description of Artificial Sequence: Synthetic oligonucleotide
cccauuucuuggaugucuc

SEQ ID NO: 2645042 - RNA, 19 nt, Artificial Sequence
  Description of Artificial Sequence: Synthetic oligonucleotide
ccgcugaaucacuuugccc

SEQ ID NO: 2645043 - RNA, 19 nt, Artificial Sequence
  Description of Artificial Sequence: Synthetic oligonucleotide
cuugaggccgauggcucuc

SEQ ID NO: 2645044 - RNA, 19 nt, Artificial Sequence
  Description of Artificial Sequence: Synthetic oligonucleotide
cagucgcucucggccaugg

SEQ ID NO: 2645045 - RNA, 19 nt, Artificial Sequence
  Description of Artificial Sequence: Synthetic oligonucleotide
gacggccccgcugaaucac

SEQ ID NO: 2645046 - RNA, 19 nt, Artificial Sequence
  Description of Artificial Sequence: Synthetic oligonucleotide
gcuucgaggcuuuguguuc

SEQ ID NO: 2645047 - RNA, 19 nt, Artificial Sequence
  Description of Artificial Sequence: Synthetic oligonucleotide
ugucgugaugcagcuccuc

SEQ ID NO: 2645048 - RNA, 19 nt, Artificial Sequence
  Description of Artificial Sequence: Synthetic oligonucleotide
uugcggcuuuucauugauu

SEQ ID NO: 2645049 - RNA, 19 nt, Artificial Sequence
  Description of Artificial Sequence: Synthetic oligonucleotide
gagacccacggcagugcug

SEQ ID NO: 2645050 - RNA, 19 nt, Artificial Sequence
  Description of Artificial Sequence: Synthetic oligonucleotide
uugcaagguuuugcuuugu

SEQ ID NO: 2645051 - RNA, 19 nt, Artificial Sequence
  Description of Artificial Sequence: Synthetic oligonucleotide
uccucgucucugagcugcu

SEQ ID NO: 2645052 - RNA, 19 nt, Artificial Sequence
  Description of Artificial Sequence: Synthetic oligonucleotide
gugaugcagcuccuccguc

SEQ ID NO: 2645053 - RNA, 19 nt, Artificial Sequence
  Description of Artificial Sequence: Synthetic oligonucleotide
cggcuuuucauugauuuuc

SEQ ID NO: 2645054 - RNA, 19 nt, Artificial Sequence
  Description of Artificial Sequence: Synthetic oligonucleotide
uugaggccgauggcucucu

SEQ ID NO: 2645055 - RNA, 19 nt, Artificial Sequence
  Description of Artificial Sequence: Synthetic oligonucleotide
caccuccagggucacccug

SEQ ID NO: 2645056 - RNA, 19 nt, Artificial Sequence
  Description of Artificial Sequence: Synthetic oligonucleotide
guggggcccuucuugcgca

SEQ ID NO: 2645057 - RNA, 19 nt, Artificial Sequence
  Description of Artificial Sequence: Synthetic oligonucleotide
uggggcccuucuugcgcag

SEQ ID NO: 2645058 - RNA, 19 nt, Artificial Sequence
  Description of Artificial Sequence: Synthetic oligonucleotide
cacuuucauagucugcgau

SEQ ID NO: 2645059 - RNA, 19 nt, Artificial Sequence
  Description of Artificial Sequence: Synthetic oligonucleotide
uucgaggcuuuguguucau

SEQ ID NO: 2645060 - RNA, 19 nt, Artificial Sequence
  Description of Artificial Sequence: Synthetic oligonucleotide
ucugacggccccgcugaau

SEQ ID NO: 2645061 - RNA, 19 nt, Artificial Sequence
  Description of Artificial Sequence: Synthetic oligonucleotide
gcucugacggccccgcuga

SEQ ID NO: 2645062 - RNA, 19 nt, Artificial Sequence
  Description of Artificial Sequence: Synthetic oligonucleotide
ggccguggggcccuucuug

SEQ ID NO: 2645063 - RNA, 19 nt, Artificial Sequence
  Description of Artificial Sequence: Synthetic oligonucleotide
ugugcggccguggggcccu

SEQ ID NO: 2645064 - RNA, 19 nt, Artificial Sequence
  Description of Artificial Sequence: Synthetic oligonucleotide
gccugugcggccguggggc

SEQ ID NO: 2645065 - RNA, 19 nt, Artificial Sequence
  Description of Artificial Sequence: Synthetic oligonucleotide
gggaccagccagaagagcu

SEQ ID NO: 2645066 - RNA, 19 nt, Artificial Sequence
  Description of Artificial Sequence: Synthetic oligonucleotide
gcccaaaaccugguuauuc

SEQ ID NO: 2645067 - RNA, 19 nt, Artificial Sequence
  Description of Artificial Sequence: Synthetic oligonucleotide
ggugucccagucgcucucg

SEQ ID NO: 2645068 - RNA, 19 nt, Artificial Sequence
  Description of Artificial Sequence: Synthetic oligonucleotide
ugaggccgauggcucucuc

SEQ ID NO: 2645069 - RNA, 19 nt, Artificial Sequence
  Description of Artificial Sequence: Synthetic oligonucleotide
acccacggcagugcuggug

SEQ ID NO: 2645070 - RNA, 19 nt, Artificial Sequence
  Description of Artificial Sequence: Synthetic oligonucleotide
cuugcggcuuuucauugau

SEQ ID NO: 2645071 - RNA, 19 nt, Artificial Sequence
  Description of Artificial Sequence: Synthetic oligonucleotide
gcagugcuggugguccugg

SEQ ID NO: 2645072 - RNA, 19 nt, Artificial Sequence
  Description of Artificial Sequence: Synthetic oligonucleotide
gcucagccggaaccacugg

SEQ ID NO: 2645073 - RNA, 19 nt, Artificial Sequence
  Description of Artificial Sequence: Synthetic oligonucleotide
uccguccggcggcucuggc

SEQ ID NO: 2645074 - RNA, 19 nt, Artificial Sequence
  Description of Artificial Sequence: Synthetic oligonucleotide
ccguuugaccaugugagga

SEQ ID NO: 2645075 - RNA, 19 nt, Artificial Sequence
  Description of Artificial Sequence: Synthetic oligonucleotide
gugauggaaugcugcuugu

SEQ ID NO: 2645076 - RNA, 19 nt, Artificial Sequence
  Description of Artificial Sequence: Synthetic oligonucleotide
uugcucugacggccccgcu

SEQ ID NO: 2645077 - RNA, 19 nt, Artificial Sequence
  Description of Artificial Sequence: Synthetic oligonucleotide
gcggcgguccguccggcgg

SEQ ID NO: 2645078 - RNA, 19 nt, Artificial Sequence
  Description of Artificial Sequence: Synthetic oligonucleotide
ccccgcugaaucacuuugc

SEQ ID NO: 2645079 - RNA, 19 nt, Artificial Sequence
  Description of Artificial Sequence: Synthetic oligonucleotide
ggcucuggcagcugcucga

SEQ ID NO: 2645080 - RNA, 19 nt, Artificial Sequence
  Description of Artificial Sequence: Synthetic oligonucleotide
ugcccaaaaccugguuauu

SEQ ID NO: 2645081 - RNA, 19 nt, Artificial Sequence
  Description of Artificial Sequence: Synthetic oligonucleotide
uuuucguggccagguccuu

SEQ ID NO: 2645082 - RNA, 19 nt, Artificial Sequence
  Description of Artificial Sequence: Synthetic oligonucleotide
caccgucacggugucccag

SEQ ID NO: 2645083 - RNA, 19 nt, Artificial Sequence
  Description of Artificial Sequence: Synthetic oligonucleotide
guuauucggaauggcccgu

SEQ ID NO: 2645084 - RNA, 19 nt, Artificial Sequence
  Description of Artificial Sequence: Synthetic oligonucleotide
gucacccugucgugaugca

SEQ ID NO: 2645085 - RNA, 19 nt, Artificial Sequence
  Description of Artificial Sequence: Synthetic oligonucleotide
gcaagguuuugcuuuguuu

SEQ ID NO: 2645086 - RNA, 19 nt, Artificial Sequence
  Description of Artificial Sequence: Synthetic oligonucleotide
cgucucccggucuagcuug

SEQ ID NO: 2645087 - RNA, 19 nt, Artificial Sequence
  Description of Artificial Sequence: Synthetic oligonucleotide
ucucccggucuagcuuggc

SEQ ID NO: 2645088 - RNA, 19 nt, Artificial Sequence
  Description of Artificial Sequence: Synthetic oligonucleotide
uuucgccuucggccccuuc

SEQ ID NO: 2645089 - RNA, 19 nt, Artificial Sequence
  Description of Artificial Sequence: Synthetic oligonucleotide
cguccggcggcucuggcag

SEQ ID NO: 2645090 - RNA, 19 nt, Artificial Sequence
  Description of Artificial Sequence: Synthetic oligonucleotide
cuccgucucccggucuagc

SEQ ID NO: 2645091 - RNA, 19 nt, Artificial Sequence
  Description of Artificial Sequence: Synthetic oligonucleotide
acuuggccugugcggccgu

SEQ ID NO: 2645092 - RNA, 19 nt, Artificial Sequence
  Description of Artificial Sequence: Synthetic oligonucleotide
ggaccagccagaagagcuc

SEQ ID NO: 2645093 - RNA, 19 nt, Artificial Sequence
  Description of Artificial Sequence: Synthetic oligonucleotide
ggcuucgaggcuuuguguu

SEQ ID NO: 2645094 - RNA, 19 nt, Artificial Sequence
  Description of Artificial Sequence: Synthetic oligonucleotide
cagaagagcucagccggaa

SEQ ID NO: 2645095 - RNA, 19 nt, Artificial Sequence
  Description of Artificial Sequence: Synthetic oligonucleotide
auggcccguccacuuucau

SEQ ID NO: 2645096 - RNA, 19 nt, Artificial Sequence
  Description of Artificial Sequence: Synthetic oligonucleotide
cacggcagugcuggugguc

SEQ ID NO: 2645097 - RNA, 19 nt, Artificial Sequence
  Description of Artificial Sequence: Synthetic oligonucleotide
cagggucacccugucguga

SEQ ID NO: 2645098 - RNA, 19 nt, Artificial Sequence
  Description of Artificial Sequence: Synthetic oligonucleotide
cugcuuguucuggccagca

SEQ ID NO: 2645099 - RNA, 19 nt, Artificial Sequence
  Description of Artificial Sequence: Synthetic oligonucleotide
ggaugucuccacaucuucu

SEQ ID NO: 2645100 - RNA, 19 nt, Artificial Sequence
  Description of Artificial Sequence: Synthetic oligonucleotide
cguggggcccuucuugcgc

SEQ ID NO: 2645101 - RNA, 19 nt, Artificial Sequence
  Description of Artificial Sequence: Synthetic oligonucleotide
ucgaggcuuuguguucauu

SEQ ID NO: 2645102 - RNA, 19 nt, Artificial Sequence
  Description of Artificial Sequence: Synthetic oligonucleotide
cugugcggccguggggccc

SEQ ID NO: 2645103 - RNA, 19 nt, Artificial Sequence
  Description of Artificial Sequence: Synthetic oligonucleotide
auguuccguuugaccaugu

SEQ ID NO: 2645104 - RNA, 19 nt, Artificial Sequence
  Description of Artificial Sequence: Synthetic oligonucleotide
ggggaccagccagaagagc

SEQ ID NO: 2645105 - RNA, 19 nt, Artificial Sequence
  Description of Artificial Sequence: Synthetic oligonucleotide
gcugcuuguucuggccagc

SEQ ID NO: 2645106 - RNA, 19 nt, Artificial Sequence
  Description of Artificial Sequence: Synthetic oligonucleotide
cgucacggugucccagucg

SEQ ID NO: 2645107 - RNA, 19 nt, Artificial Sequence
  Description of Artificial Sequence: Synthetic oligonucleotide
ccacuuucauagucugcga

SEQ ID NO: 2645108 - RNA, 19 nt, Artificial Sequence
  Description of Artificial Sequence: Synthetic oligonucleotide
ccguggggcccuucuugcg

SEQ ID NO: 2645109 - RNA, 19 nt, Artificial Sequence
  Description of Artificial Sequence: Synthetic oligonucleotide
gccgauggcucucucaauu

SEQ ID NO: 2645110 - RNA, 19 nt, Artificial Sequence
  Description of Artificial Sequence: Synthetic oligonucleotide
gccuucggccccuucucga

SEQ ID NO: 2645111 - RNA, 19 nt, Artificial Sequence
  Description of Artificial Sequence: Synthetic oligonucleotide
cuuggccugugcggccgug

SEQ ID NO: 2645112 - RNA, 19 nt, Artificial Sequence
  Description of Artificial Sequence: Synthetic oligonucleotide
gggucacccugucgugaug

SEQ ID NO: 2645113 - RNA, 19 nt, Artificial Sequence
  Description of Artificial Sequence: Synthetic oligonucleotide
gcucucggccauggcgugg

SEQ ID NO: 2645114 - RNA, 19 nt, Artificial Sequence
  Description of Artificial Sequence: Synthetic oligonucleotide
ccuugcucugacggccccg

SEQ ID NO: 2645115 - RNA, 19 nt, Artificial Sequence
  Description of Artificial Sequence: Synthetic oligonucleotide
cuucggccccuucucgaua

SEQ ID NO: 2645116 - RNA, 19 nt, Artificial Sequence
  Description of Artificial Sequence: Synthetic oligonucleotide
ggcggcgguccguccggcg

SEQ ID NO: 2645117 - RNA, 19 nt, Artificial Sequence
  Description of Artificial Sequence: Synthetic oligonucleotide
cucccggucuagcuuggcu

SEQ ID NO: 2645118 - RNA, 19 nt, Artificial Sequence
  Description of Artificial Sequence: Synthetic oligonucleotide
gcgcagcaccgucacggug

SEQ ID NO: 2645119 - RNA, 19 nt, Artificial Sequence
  Description of Artificial Sequence: Synthetic oligonucleotide
guccggcggcucuggcagc

SEQ ID NO: 2645120 - RNA, 19 nt, Artificial Sequence
  Description of Artificial Sequence: Synthetic oligonucleotide
ggagacccacggcagugcu

SEQ ID NO: 2645121 - RNA, 19 nt, Artificial Sequence
  Description of Artificial Sequence: Synthetic oligonucleotide
gcuugaggccgauggcucu

SEQ ID NO: 2645122 - RNA, 19 nt, Artificial Sequence
  Description of Artificial Sequence: Synthetic oligonucleotide
ccguccacuuucauagucu

SEQ ID NO: 2645123 - RNA, 19 nt, Artificial Sequence
  Description of Artificial Sequence: Synthetic oligonucleotide
ccugugcggccguggggcc

SEQ ID NO: 2645124 - RNA, 19 nt, Artificial Sequence
  Description of Artificial Sequence: Synthetic oligonucleotide
cugucgugaugcagcuccu

SEQ ID NO: 2645125 - RNA, 19 nt, Artificial Sequence
  Description of Artificial Sequence: Synthetic oligonucleotide
guucuggccagcagcccau

SEQ ID NO: 2645126 - RNA, 19 nt, Artificial Sequence
  Description of Artificial Sequence: Synthetic oligonucleotide
gguccguccggcggcucug

SEQ ID NO: 2645127 - RNA, 19 nt, Artificial Sequence
  Description of Artificial Sequence: Synthetic oligonucleotide
gcccuugcucugacggccc

SEQ ID NO: 2645128 - RNA, 19 nt, Artificial Sequence
  Description of Artificial Sequence: Synthetic oligonucleotide
cgccuucggccccuucucg

SEQ ID NO: 2645129 - RNA, 19 nt, Artificial Sequence
  Description of Artificial Sequence: Synthetic oligonucleotide
gccccuucucgauaggcuu

SEQ ID NO: 2645130 - RNA, 19 nt, Artificial Sequence
  Description of Artificial Sequence: Synthetic oligonucleotide
ggaauggcccguccacuuu

SEQ ID NO: 2645131 - RNA, 19 nt, Artificial Sequence
  Description of Artificial Sequence: Synthetic oligonucleotide
ccauguuccguuugaccau

SEQ ID NO: 2645132 - RNA, 19 nt, Artificial Sequence
  Description of Artificial Sequence: Synthetic oligonucleotide
cugcuuagacuuggccugu

SEQ ID NO: 2645133 - RNA, 19 nt, Artificial Sequence
  Description of Artificial Sequence: Synthetic oligonucleotide
ggucuagcuuggcuguguu

SEQ ID NO: 2645134 - RNA, 19 nt, Artificial Sequence
  Description of Artificial Sequence: Synthetic oligonucleotide
gcggcuuuucauugauuuu

SEQ ID NO: 2645135 - RNA, 19 nt, Artificial Sequence
  Description of Artificial Sequence: Synthetic oligonucleotide
cgcagcaccgucacggugu

SEQ ID NO: 2645136 - RNA, 19 nt, Artificial Sequence
  Description of Artificial Sequence: Synthetic oligonucleotide
ccacaucuucuccucgucu

SEQ ID NO: 2645137 - RNA, 19 nt, Artificial Sequence
  Description of Artificial Sequence: Synthetic oligonucleotide
cagccggaaccacuggcuu

SEQ ID NO: 2645138 - RNA, 19 nt, Artificial Sequence
  Description of Artificial Sequence: Synthetic oligonucleotide
cggaaccacuggcuucgag

SEQ ID NO: 2645139 - RNA, 19 nt, Artificial Sequence
  Description of Artificial Sequence: Synthetic oligonucleotide
ggccccuucucgauaggcu

SEQ ID NO: 2645140 - RNA, 19 nt, Artificial Sequence
  Description of Artificial Sequence: Synthetic oligonucleotide
cauuucgccuucggccccu

SEQ ID NO: 2645141 - RNA, 19 nt, Artificial Sequence
  Description of Artificial Sequence: Synthetic oligonucleotide
cgucucugagcugcuaaga

SEQ ID NO: 2645142 - RNA, 19 nt, Artificial Sequence
  Description of Artificial Sequence: Synthetic oligonucleotide
cgauaggcuucccgauguc

SEQ ID NO: 2645143 - RNA, 19 nt, Artificial Sequence
  Description of Artificial Sequence: Synthetic oligonucleotide
ccgucacggugucccaguc

SEQ ID NO: 2645144 - RNA, 19 nt, Artificial Sequence
  Description of Artificial Sequence: Synthetic oligonucleotide
auuucgccuucggccccuu

SEQ ID NO: 2645145 - RNA, 19 nt, Artificial Sequence
  Description of Artificial Sequence: Synthetic oligonucleotide
gcaccgucacgguguccca

SEQ ID NO: 2645146 - RNA, 19 nt, Artificial Sequence
  Description of Artificial Sequence: Synthetic oligonucleotide
cccggucuagcuuggcugu

SEQ ID NO: 2645147 - RNA, 19 nt, Artificial Sequence
  Description of Artificial Sequence: Synthetic oligonucleotide
ccuccgucucccggucuag

SEQ ID NO: 2645148 - RNA, 19 nt, Artificial Sequence
  Description of Artificial Sequence: Synthetic oligonucleotide
cggccccuucucgauaggc

SEQ ID NO: 2645149 - RNA, 19 nt, Artificial Sequence
  Description of Artificial Sequence: Synthetic oligonucleotide
cgugaugcagcuccuccgu

SEQ ID NO: 2645150 - RNA, 19 nt, Artificial Sequence
  Description of Artificial Sequence: Synthetic oligonucleotide
cucugacggccccgcugaa

SEQ ID NO: 2645151 - RNA, 19 nt, Artificial Sequence
  Description of Artificial Sequence: Synthetic oligonucleotide
ccggucuagcuuggcugug

SEQ ID NO: 2645152 - RNA, 19 nt, Artificial Sequence
  Description of Artificial Sequence: Synthetic oligonucleotide
gacccacggcagugcuggu

SEQ ID NO: 2645153 - RNA, 19 nt, Artificial Sequence
  Description of Artificial Sequence: Synthetic oligonucleotide
cgcucucggccauggcgug

SEQ ID NO: 2645154 - RNA, 19 nt, Artificial Sequence
  Description of Artificial Sequence: Synthetic oligonucleotide
ccgauggcucucucaauuu

SEQ ID NO: 2645155 - RNA, 19 nt, Artificial Sequence
  Description of Artificial Sequence: Synthetic oligonucleotide
cggcgguccguccggcggc

SEQ ID NO: 2645156 - RNA, 19 nt, Artificial Sequence
  Description of Artificial Sequence: Synthetic oligonucleotide
ccagucgcucucggccaug

SEQ ID NO: 2645157 - RNA, 19 nt, Artificial Sequence
  Description of Artificial Sequence: Synthetic oligonucleotide
cgaugacuugcggcuuuuc

SEQ ID NO: 2645158 - RNA, 19 nt, Artificial Sequence
  Description of Artificial Sequence: Synthetic oligonucleotide
ugcggccguggggcccuuc

SEQ ID NO: 2645159 - RNA, 19 nt, Artificial Sequence
  Description of Artificial Sequence: Synthetic oligonucleotide
ccuucggccccuucucgau

SEQ ID NO: 2645160 - RNA, 19 nt, Artificial Sequence
  Description of Artificial Sequence: Synthetic oligonucleotide
ggccgauggcucucucaau

SEQ ID NO: 2645161 - RNA, 19 nt, Artificial Sequence
  Description of Artificial Sequence: Synthetic oligonucleotide
cugcgaugacuugcggcuu

SEQ ID NO: 2645162 - RNA, 19 nt, Artificial Sequence
  Description of Artificial Sequence: Synthetic oligonucleotide
gcggccguggggcccuucu

SEQ ID NO: 2645163 - RNA, 19 nt, Artificial Sequence
  Description of Artificial Sequence: Synthetic oligonucleotide
ggccccgcugaaucacuuu

SEQ ID NO: 2645164 - RNA, 19 nt, Artificial Sequence
  Description of Artificial Sequence: Synthetic oligonucleotide
cgauggcucucucaauuuu

SEQ ID NO: 2645165 - RNA, 19 nt, Artificial Sequence
  Description of Artificial Sequence: Synthetic oligonucleotide
ccggagcuugaggccgaug

SEQ ID NO: 2645166 - RNA, 19 nt, Artificial Sequence
  Description of Artificial Sequence: Synthetic oligonucleotide
gcccguccacuuucauagu

SEQ ID NO: 2645167 - RNA, 19 nt, Artificial Sequence
  Description of Artificial Sequence: Synthetic oligonucleotide
cggaauggcccguccacuu

SEQ ID NO: 2645168 - RNA, 19 nt, Artificial Sequence
  Description of Artificial Sequence: Synthetic oligonucleotide
ccgucucccggucuagcuu

SEQ ID NO: 2645169 - RNA, 19 nt, Artificial Sequence
  Description of Artificial Sequence: Synthetic oligonucleotide
gcgaugacuugcggcuuuu

SEQ ID NO: 2645170 - RNA, 19 nt, Artificial Sequence
  Description of Artificial Sequence: Synthetic oligonucleotide
ccucgucucugagcugcua

SEQ ID NO: 2645171 - RNA, 19 nt, Artificial Sequence
  Description of Artificial Sequence: Synthetic oligonucleotide
ggcgguccguccggcggcu

SEQ ID NO: 2645172 - RNA, 19 nt, Artificial Sequence
  Description of Artificial Sequence: Synthetic oligonucleotide
ccacggcagugcugguggu

SEQ ID NO: 2645173 - RNA, 19 nt, Artificial Sequence
  Description of Artificial Sequence: Synthetic oligonucleotide
cccagucgcucucggccau

SEQ ID NO: 2645174 - RNA, 19 nt, Artificial Sequence
  Description of Artificial Sequence: Synthetic oligonucleotide
ccggaaccacuggcuucga

SEQ ID NO: 2645175 - RNA, 19 nt, Artificial Sequence
  Description of Artificial Sequence: Synthetic oligonucleotide
gcgguccguccggcggcuc

SEQ ID NO: 2645176 - RNA, 19 nt, Artificial Sequence
  Description of Artificial Sequence: Synthetic oligonucleotide
cgguccguccggcggcucu

SEQ ID NO: 2645177 - RNA, 19 nt, Artificial Sequence
  Description of Artificial Sequence: Synthetic oligonucleotide
cccggagcuugaggccgau

SEQ ID NO: 2645178 - RNA, 19 nt, Artificial Sequence
  Description of Artificial Sequence: Synthetic oligonucleotide
cggccguggggcccuucuu

SEQ ID NO: 2645179 - RNA, 19 nt, Artificial Sequence
  Description of Artificial Sequence: Synthetic oligonucleotide
gugcggccguggggcccuu

SEQ ID NO: 2645180 - RNA, 19 nt, Artificial Sequence
  Description of Artificial Sequence: Synthetic oligonucleotide
aaauaagugauucuaaaga

SEQ ID NO: 2645181 - RNA, 19 nt, Artificial Sequence
  Description of Artificial Sequence: Synthetic oligonucleotide
uuugccuuuagaaacuugg

SEQ ID NO: 2645182 - RNA, 19 nt, Artificial Sequence
  Description of Artificial Sequence: Synthetic oligonucleotide
uguucaggaaaauuggccg

SEQ ID NO: 2645183 - RNA, 19 nt, Artificial Sequence
  Description of Artificial Sequence: Synthetic oligonucleotide
ugaauuucaaauguucugg

SEQ ID NO: 2645184 - RNA, 19 nt, Artificial Sequence
  Description of Artificial Sequence: Synthetic oligonucleotide
uacuuguucaggaaaauug

SEQ ID NO: 2645185 - RNA, 19 nt, Artificial Sequence
  Description of Artificial Sequence: Synthetic oligonucleotide
ugaauugcugaaauaagug

SEQ ID NO: 2645186 - RNA, 19 nt, Artificial Sequence
  Description of Artificial Sequence: Synthetic oligonucleotide
aauuuccccauagaagucc

SEQ ID NO: 2645187 - RNA, 19 nt, Artificial Sequence
  Description of Artificial Sequence: Synthetic oligonucleotide
aagauugucuacuacuugu

SEQ ID NO: 2645188 - RNA, 19 nt, Artificial Sequence
  Description of Artificial Sequence: Synthetic oligonucleotide
aaugccaguggacacauca

SEQ ID NO: 2645189 - RNA, 19 nt, Artificial Sequence
  Description of Artificial Sequence: Synthetic oligonucleotide
gaagguauguaugaugugg

SEQ ID NO: 2645190 - RNA, 19 nt, Artificial Sequence
  Description of Artificial Sequence: Synthetic oligonucleotide
ugaccauucauaauuuugc

SEQ ID NO: 2645191 - RNA, 19 nt, Artificial Sequence
  Description of Artificial Sequence: Synthetic oligonucleotide
uugaauugcugaaauaagu

SEQ ID NO: 2645192 - RNA, 19 nt, Artificial Sequence
  Description of Artificial Sequence: Synthetic oligonucleotide
auuuuauggacaucuccac

SEQ ID NO: 2645193 - RNA, 19 nt, Artificial Sequence
  Description of Artificial Sequence: Synthetic oligonucleotide
ugagaauuuccccauagaa

SEQ ID NO: 2645194 - RNA, 19 nt, Artificial Sequence
  Description of Artificial Sequence: Synthetic oligonucleotide
uuugaagguauguaugaug

SEQ ID NO: 2645195 - RNA, 19 nt, Artificial Sequence
  Description of Artificial Sequence: Synthetic oligonucleotide
uuguucaggaaaauuggcc

SEQ ID NO: 2645196 - RNA, 19 nt, Artificial Sequence
  Description of Artificial Sequence: Synthetic oligonucleotide
aagaaucgaaguucuuuuc

SEQ ID NO: 2645197 - RNA, 19 nt, Artificial Sequence
  Description of Artificial Sequence: Synthetic oligonucleotide
auagaaguccucuuugaag

SEQ ID NO: 2645198 - RNA, 19 nt, Artificial Sequence
  Description of Artificial Sequence: Synthetic oligonucleotide
aaagaaucgaaguucuuuu

SEQ ID NO: 2645199 - RNA, 19 nt, Artificial Sequence
  Description of Artificial Sequence: Synthetic oligonucleotide
auaauuuugccuuuagaaa

SEQ ID NO: 2645200 - RNA, 19 nt, Artificial Sequence
  Description of Artificial Sequence: Synthetic oligonucleotide
gaagaaauugucaucuuug

SEQ ID NO: 2645201 - RNA, 19 nt, Artificial Sequence
  Description of Artificial Sequence: Synthetic oligonucleotide
uaauaaaugccaguggaca

SEQ ID NO: 2645202 - RNA, 19 nt, Artificial Sequence
  Description of Artificial Sequence: Synthetic oligonucleotide
ugaaauaagugauucuaaa

SEQ ID NO: 2645203 - RNA, 19 nt, Artificial Sequence
  Description of Artificial Sequence: Synthetic oligonucleotide
aaauuggccguggggaugc

SEQ ID NO: 2645204 - RNA, 19 nt, Artificial Sequence
  Description of Artificial Sequence: Synthetic oligonucleotide
uauggguuccauccuaugc

SEQ ID NO: 2645205 - RNA, 19 nt, Artificial Sequence
  Description of Artificial Sequence: Synthetic oligonucleotide
augauguggguuuccaugg

SEQ ID NO: 2645206 - RNA, 19 nt, Artificial Sequence
  Description of Artificial Sequence: Synthetic oligonucleotide
gaagccacgcaccaccucg

SEQ ID NO: 2645207 - RNA, 19 nt, Artificial Sequence
  Description of Artificial Sequence: Synthetic oligonucleotide
aagugauucuaaagaaucg

SEQ ID NO: 2645208 - RNA, 19 nt, Artificial Sequence
  Description of Artificial Sequence: Synthetic oligonucleotide
gauucuaaagaaucgaagu

SEQ ID NO: 2645209 - RNA, 19 nt, Artificial Sequence
  Description of Artificial Sequence: Synthetic oligonucleotide
cuugaauugcugaaauaag

SEQ ID NO: 2645210 - RNA, 19 nt, Artificial Sequence
  Description of Artificial Sequence: Synthetic oligonucleotide
uggaagauugucuacuacu

SEQ ID NO: 2645211 - RNA, 19 nt, Artificial Sequence
  Description of Artificial Sequence: Synthetic oligonucleotide
gaauugcugaaauaaguga

SEQ ID NO: 2645212 - RNA, 19 nt, Artificial Sequence
  Description of Artificial Sequence: Synthetic oligonucleotide
aauguucuggcaaauccag

SEQ ID NO: 2645213 - RNA, 19 nt, Artificial Sequence
  Description of Artificial Sequence: Synthetic oligonucleotide
cauaauaaaugccagugga

SEQ ID NO: 2645214 - RNA, 19 nt, Artificial Sequence
  Description of Artificial Sequence: Synthetic oligonucleotide
uugucuacuacuuguucag

SEQ ID NO: 2645215 - RNA, 19 nt, Artificial Sequence
  Description of Artificial Sequence: Synthetic oligonucleotide
aauugcugaaauaagugau

SEQ ID NO: 2645216 - RNA, 19 nt, Artificial Sequence
  Description of Artificial Sequence: Synthetic oligonucleotide
aagguauguaugauguggg

SEQ ID NO: 2645217 - RNA, 19 nt, Artificial Sequence
  Description of Artificial Sequence: Synthetic oligonucleotide
ugagguagccaacaauggc

SEQ ID NO: 2645218 - RNA, 19 nt, Artificial Sequence
  Description of Artificial Sequence: Synthetic oligonucleotide
auaauaaaugccaguggac

SEQ ID NO: 2645219 - RNA, 19 nt, Artificial Sequence
  Description of Artificial Sequence: Synthetic oligonucleotide
gaaucgaaguucuuuucug

SEQ ID NO: 2645220 - RNA, 19 nt, Artificial Sequence
  Description of Artificial Sequence: Synthetic oligonucleotide
acuuggaagaaauugucau

SEQ ID NO: 2645221 - RNA, 19 nt, Artificial Sequence
  Description of Artificial Sequence: Synthetic oligonucleotide
uuuuauggacaucuccacu

SEQ ID NO: 2645222 - RNA, 19 nt, Artificial Sequence
  Description of Artificial Sequence: Synthetic oligonucleotide
cuuguucaggaaaauuggc

SEQ ID NO: 2645223 - RNA, 19 nt, Artificial Sequence
  Description of Artificial Sequence: Synthetic oligonucleotide
aggaaaauuggccgugggg

SEQ ID NO: 2645224 - RNA, 19 nt, Artificial Sequence
  Description of Artificial Sequence: Synthetic oligonucleotide
agaaucgaaguucuuuucu

SEQ ID NO: 2645225 - RNA, 19 nt, Artificial Sequence
  Description of Artificial Sequence: Synthetic oligonucleotide
gagguagccaacaauggcc

SEQ ID NO: 2645226 - RNA, 19 nt, Artificial Sequence
  Description of Artificial Sequence: Synthetic oligonucleotide
gccuuuagaaacuuggaag

SEQ ID NO: 2645227 - RNA, 19 nt, Artificial Sequence
  Description of Artificial Sequence: Synthetic oligonucleotide
auucuaaagaaucgaaguu

SEQ ID NO: 2645228 - RNA, 19 nt, Artificial Sequence
  Description of Artificial Sequence: Synthetic oligonucleotide
aauaucagcuugaauugcu

SEQ ID NO: 2645229 - RNA, 19 nt, Artificial Sequence
  Description of Artificial Sequence: Synthetic oligonucleotide
aauuuugccuuuagaaacu

SEQ ID NO: 2645230 - RNA, 19 nt, Artificial Sequence
  Description of Artificial Sequence: Synthetic oligonucleotide
gaccauucauaauuuugcc

SEQ ID NO: 2645231 - RNA, 19 nt, Artificial Sequence
  Description of Artificial Sequence: Synthetic oligonucleotide
gaagauugucuacuacuug

SEQ ID NO: 2645232 - RNA, 19 nt, Artificial Sequence
  Description of Artificial Sequence: Synthetic oligonucleotide
uccggaacugcgacaaccg

SEQ ID NO: 2645233 - RNA, 19 nt, Artificial Sequence
  Description of Artificial Sequence: Synthetic oligonucleotide
aaauguucuggcaaaucca

SEQ ID NO: 2645234 - RNA, 19 nt, Artificial Sequence
  Description of Artificial Sequence: Synthetic oligonucleotide
aacggcaggcuccucauga

SEQ ID NO: 2645235 - RNA, 19 nt, Artificial Sequence
  Description of Artificial Sequence: Synthetic oligonucleotide
uuucaaauguucuggcaaa

SEQ ID NO: 2645236 - RNA, 19 nt, Artificial Sequence
  Description of Artificial Sequence: Synthetic oligonucleotide
ugccuuuagaaacuuggaa

SEQ ID NO: 2645237 - RNA, 19 nt, Artificial Sequence
  Description of Artificial Sequence: Synthetic oligonucleotide
aagaacggcaggcuccuca

SEQ ID NO: 2645238 - RNA, 19 nt, Artificial Sequence
  Description of Artificial Sequence: Synthetic oligonucleotide
ucuacuacuuguucaggaa

SEQ ID NO: 2645239 - RNA, 19 nt, Artificial Sequence
  Description of Artificial Sequence: Synthetic oligonucleotide
agugauucuaaagaaucga

SEQ ID NO: 2645240 - RNA, 19 nt, Artificial Sequence
  Description of Artificial Sequence: Synthetic oligonucleotide
acauucuuguaguaugggu

SEQ ID NO: 2645241 - RNA, 19 nt, Artificial Sequence
  Description of Artificial Sequence: Synthetic oligonucleotide
uguucuggcaaauccaguu

SEQ ID NO: 2645242 - RNA, 19 nt, Artificial Sequence
  Description of Artificial Sequence: Synthetic oligonucleotide
auggguuccauccuaugcu

SEQ ID NO: 2645243 - RNA, 19 nt, Artificial Sequence
  Description of Artificial Sequence: Synthetic oligonucleotide
ucuuugaauuucaaauguu

SEQ ID NO: 2645244 - RNA, 19 nt, Artificial Sequence
  Description of Artificial Sequence: Synthetic oligonucleotide
cuuggaagaaauugucauc

SEQ ID NO: 2645245 - RNA, 19 nt, Artificial Sequence
  Description of Artificial Sequence: Synthetic oligonucleotide
cacauugagaauuucccca

SEQ ID NO: 2645246 - RNA, 19 nt, Artificial Sequence
  Description of Artificial Sequence: Synthetic oligonucleotide
aacaauggccacauugaga

SEQ ID NO: 2645247 - RNA, 19 nt, Artificial Sequence
  Description of Artificial Sequence: Synthetic oligonucleotide
gauugucuacuacuuguuc

SEQ ID NO: 2645248 - RNA, 19 nt, Artificial Sequence
  Description of Artificial Sequence: Synthetic oligonucleotide
aaaauuggccguggggaug

SEQ ID NO: 2645249 - RNA, 19 nt, Artificial Sequence
  Description of Artificial Sequence: Synthetic oligonucleotide
aacccaccgcuaccggugc

SEQ ID NO: 2645250 - RNA, 19 nt, Artificial Sequence
  Description of Artificial Sequence: Synthetic oligonucleotide
uugccuuuagaaacuugga

SEQ ID NO: 2645251 - RNA, 19 nt, Artificial Sequence
  Description of Artificial Sequence: Synthetic oligonucleotide
gugaccauucauaauuuug

SEQ ID NO: 2645252 - RNA, 19 nt, Artificial Sequence
  Description of Artificial Sequence: Synthetic oligonucleotide
gaaacuuggaagaaauugu

SEQ ID NO: 2645253 - RNA, 19 nt, Artificial Sequence
  Description of Artificial Sequence: Synthetic oligonucleotide
aacugcgacaaccgcggug

SEQ ID NO: 2645254 - RNA, 19 nt, Artificial Sequence
  Description of Artificial Sequence: Synthetic oligonucleotide
ucagcggacgcuccuccgg

SEQ ID NO: 2645255 - RNA, 19 nt, Artificial Sequence
  Description of Artificial Sequence: Synthetic oligonucleotide
uguaugauguggguuucca

SEQ ID NO: 2645256 - RNA, 19 nt, Artificial Sequence
  Description of Artificial Sequence: Synthetic oligonucleotide
ugcugaaauaagugauucu

SEQ ID NO: 2645257 - RNA, 19 nt, Artificial Sequence
  Description of Artificial Sequence: Synthetic oligonucleotide
acucagcggacgcuccucc

SEQ ID NO: 2645258 - RNA, 19 nt, Artificial Sequence
  Description of Artificial Sequence: Synthetic oligonucleotide
uuucacauucuuguaguau

SEQ ID NO: 2645259 - RNA, 19 nt, Artificial Sequence
  Description of Artificial Sequence: Synthetic oligonucleotide
ucgaaguucuuuucugguc

SEQ ID NO: 2645260 - RNA, 19 nt, Artificial Sequence
  Description of Artificial Sequence: Synthetic oligonucleotide
gccauaauaaaugccagug

SEQ ID NO: 2645261 - RNA, 19 nt, Artificial Sequence
  Description of Artificial Sequence: Synthetic oligonucleotide
guucuggcaaauccaguug

SEQ ID NO: 2645262 - RNA, 19 nt, Artificial Sequence
  Description of Artificial Sequence: Synthetic oligonucleotide
cauccuaugcucaccacca

SEQ ID NO: 2645263 - RNA, 19 nt, Artificial Sequence
  Description of Artificial Sequence: Synthetic oligonucleotide
agcgggaacccaccgcuac

SEQ ID NO: 2645264 - RNA, 19 nt, Artificial Sequence
  Description of Artificial Sequence: Synthetic oligonucleotide
uggcccagccauaauaaau

SEQ ID NO: 2645265 - RNA, 19 nt, Artificial Sequence
  Description of Artificial Sequence: Synthetic oligonucleotide
ugucuacuacuuguucagg

SEQ ID NO: 2645266 - RNA, 19 nt, Artificial Sequence
  Description of Artificial Sequence: Synthetic oligonucleotide
acugcgacaaccgcgguga

SEQ ID NO: 2645267 - RNA, 19 nt, Artificial Sequence
  Description of Artificial Sequence: Synthetic oligonucleotide
ggaaaauuggccgugggga

SEQ ID NO: 2645268 - RNA, 19 nt, Artificial Sequence
  Description of Artificial Sequence: Synthetic oligonucleotide
uggacaucuccacucccga

SEQ ID NO: 2645269 - RNA, 19 nt, Artificial Sequence
  Description of Artificial Sequence: Synthetic oligonucleotide
ccauaauaaaugccagugg

SEQ ID NO: 2645270 - RNA, 19 nt, Artificial Sequence
  Description of Artificial Sequence: Synthetic oligonucleotide
gucuacuacuuguucagga

SEQ ID NO: 2645271 - RNA, 19 nt, Artificial Sequence
  Description of Artificial Sequence: Synthetic oligonucleotide
ggaacugcgacaaccgcgg

SEQ ID NO: 2645272 - RNA, 19 nt, Artificial Sequence
  Description of Artificial Sequence: Synthetic oligonucleotide
gucagaacucagcggacgc

SEQ ID NO: 2645273 - RNA, 19 nt, Artificial Sequence
  Description of Artificial Sequence: Synthetic oligonucleotide
cacauucuuguaguauggg

SEQ ID NO: 2645274 - RNA, 19 nt, Artificial Sequence
  Description of Artificial Sequence: Synthetic oligonucleotide
auggacaucuccacucccg

SEQ ID NO: 2645275 - RNA, 19 nt, Artificial Sequence
  Description of Artificial Sequence: Synthetic oligonucleotide
auguaugauguggguuucc

SEQ ID NO: 2645276 - RNA, 19 nt, Artificial Sequence
  Description of Artificial Sequence: Synthetic oligonucleotide
agaaguccucuuugaaggu

SEQ ID NO: 2645277 - RNA, 19 nt, Artificial Sequence
  Description of Artificial Sequence: Synthetic oligonucleotide
uaguauggguuccauccua

SEQ ID NO: 2645278 - RNA, 19 nt, Artificial Sequence
  Description of Artificial Sequence: Synthetic oligonucleotide
ccuuuagaaacuuggaaga

SEQ ID NO: 2645279 - RNA, 19 nt, Artificial Sequence
  Description of Artificial Sequence: Synthetic oligonucleotide
aucuccacucccgacacug

SEQ ID NO: 2645280 - RNA, 19 nt, Artificial Sequence
  Description of Artificial Sequence: Synthetic oligonucleotide
accgcuaccggugccugcc

SEQ ID NO: 2645281 - RNA, 19 nt, Artificial Sequence
  Description of Artificial Sequence: Synthetic oligonucleotide
agguauguaugaugugggu

SEQ ID NO: 2645282 - RNA, 19 nt, Artificial Sequence
  Description of Artificial Sequence: Synthetic oligonucleotide
guauguaugauguggguuu

SEQ ID NO: 2645283 - RNA, 19 nt, Artificial Sequence
  Description of Artificial Sequence: Synthetic oligonucleotide
caggaaaauuggccguggg

SEQ ID NO: 2645284 - RNA, 19 nt, Artificial Sequence
  Description of Artificial Sequence: Synthetic oligonucleotide
aacucagcggacgcuccuc

SEQ ID NO: 2645285 - RNA, 19 nt, Artificial Sequence
  Description of Artificial Sequence: Synthetic oligonucleotide
cuggaagauugucuacuac

SEQ ID NO: 2645286 - RNA, 19 nt, Artificial Sequence
  Description of Artificial Sequence: Synthetic oligonucleotide
uccucuuugaagguaugua

SEQ ID NO: 2645287 - RNA, 19 nt, Artificial Sequence
  Description of Artificial Sequence: Synthetic oligonucleotide
cucaugacgccgaccucgg

SEQ ID NO: 2645288 - RNA, 19 nt, Artificial Sequence
  Description of Artificial Sequence: Synthetic oligonucleotide
gaacccaccgcuaccggug

SEQ ID NO: 2645289 - RNA, 19 nt, Artificial Sequence
  Description of Artificial Sequence: Synthetic oligonucleotide
cuccggaacugcgacaacc

SEQ ID NO: 2645290 - RNA, 19 nt, Artificial Sequence
  Description of Artificial Sequence: Synthetic oligonucleotide
uauguaugauguggguuuc

SEQ ID NO: 2645291 - RNA, 19 nt, Artificial Sequence
  Description of Artificial Sequence: Synthetic oligonucleotide
aagccacgcaccaccucgc

SEQ ID NO: 2645292 - RNA, 19 nt, Artificial Sequence
  Description of Artificial Sequence: Synthetic oligonucleotide
gggccgucagaacucagcg

SEQ ID NO: 2645293 - RNA, 19 nt, Artificial Sequence
  Description of Artificial Sequence: Synthetic oligonucleotide
ccacauugagaauuucccc

SEQ ID NO: 2645294 - RNA, 19 nt, Artificial Sequence
  Description of Artificial Sequence: Synthetic oligonucleotide
uggguuuccauggacuuuu

SEQ ID NO: 2645295 - RNA, 19 nt, Artificial Sequence
  Description of Artificial Sequence: Synthetic oligonucleotide
cauagaaguccucuuugaa

SEQ ID NO: 2645296 - RNA, 19 nt, Artificial Sequence
  Description of Artificial Sequence: Synthetic oligonucleotide
acggcaggcuccucaugac

SEQ ID NO: 2645297 - RNA, 19 nt, Artificial Sequence
  Description of Artificial Sequence: Synthetic oligonucleotide
uccuaugcucaccaccauu

SEQ ID NO: 2645298 - RNA, 19 nt, Artificial Sequence
  Description of Artificial Sequence: Synthetic oligonucleotide
cuacuacuuguucaggaaa

SEQ ID NO: 2645299 - RNA, 19 nt, Artificial Sequence
  Description of Artificial Sequence: Synthetic oligonucleotide
augcucaccaccauuuuau

SEQ ID NO: 2645300 - RNA, 19 nt, Artificial Sequence
  Description of Artificial Sequence: Synthetic oligonucleotide
gugauucuaaagaaucgaa

SEQ ID NO: 2645301 - RNA, 19 nt, Artificial Sequence
  Description of Artificial Sequence: Synthetic oligonucleotide
guauggguuccauccuaug

SEQ ID NO: 2645302 - RNA, 19 nt, Artificial Sequence
  Description of Artificial Sequence: Synthetic oligonucleotide
gcaggagcuggguuggcgg

SEQ ID NO: 2645303 - RNA, 19 nt, Artificial Sequence
  Description of Artificial Sequence: Synthetic oligonucleotide
gaaaauuggccguggggau

SEQ ID NO: 2645304 - RNA, 19 nt, Artificial Sequence
  Description of Artificial Sequence: Synthetic oligonucleotide
ugagugcgguguccgggcc

SEQ ID NO: 2645305 - RNA, 19 nt, Artificial Sequence
  Description of Artificial Sequence: Synthetic oligonucleotide
gugagugcgguguccgggc

SEQ ID NO: 2645306 - RNA, 19 nt, Artificial Sequence
  Description of Artificial Sequence: Synthetic oligonucleotide
ggcccagccauaauaaaug

SEQ ID NO: 2645307 - RNA, 19 nt, Artificial Sequence
  Description of Artificial Sequence: Synthetic oligonucleotide
agccacgcaccaccucgcc

SEQ ID NO: 2645308 - RNA, 19 nt, Artificial Sequence
  Description of Artificial Sequence: Synthetic oligonucleotide
gccgucagaacucagcgga

SEQ ID NO: 2645309 - RNA, 19 nt, Artificial Sequence
  Description of Artificial Sequence: Synthetic oligonucleotide
agguagccaacaauggcca

SEQ ID NO: 2645310 - RNA, 19 nt, Artificial Sequence
  Description of Artificial Sequence: Synthetic oligonucleotide
uagccaacaauggccacau

SEQ ID NO: 2645311 - RNA, 19 nt, Artificial Sequence
  Description of Artificial Sequence: Synthetic oligonucleotide
agaacggcaggcuccucau

SEQ ID NO: 2645312 - RNA, 19 nt, Artificial Sequence
  Description of Artificial Sequence: Synthetic oligonucleotide
acuacuuguucaggaaaau

SEQ ID NO: 2645313 - RNA, 19 nt, Artificial Sequence
  Description of Artificial Sequence: Synthetic oligonucleotide
auuggccguggggaugccc

SEQ ID NO: 2645314 - RNA, 19 nt, Artificial Sequence
  Description of Artificial Sequence: Synthetic oligonucleotide
guagccaacaauggccaca

SEQ ID NO: 2645315 - RNA, 19 nt, Artificial Sequence
  Description of Artificial Sequence: Synthetic oligonucleotide
guucaggaaaauuggccgu

SEQ ID NO: 2645316 - RNA, 19 nt, Artificial Sequence
  Description of Artificial Sequence: Synthetic oligonucleotide
ccucaugacgccgaccucg

SEQ ID NO: 2645317 - RNA, 19 nt, Artificial Sequence
  Description of Artificial Sequence: Synthetic oligonucleotide
aauuggccguggggaugcc

SEQ ID NO: 2645318 - RNA, 19 nt, Artificial Sequence
  Description of Artificial Sequence: Synthetic oligonucleotide
gcuggguuggcggagcggg

SEQ ID NO: 2645319 - RNA, 19 nt, Artificial Sequence
  Description of Artificial Sequence: Synthetic oligonucleotide
cccagccauaauaaaugcc

SEQ ID NO: 2645320 - RNA, 19 nt, Artificial Sequence
  Description of Artificial Sequence: Synthetic oligonucleotide
gagcuggguuggcggagcg

SEQ ID NO: 2645321 - RNA, 19 nt, Artificial Sequence
  Description of Artificial Sequence: Synthetic oligonucleotide
cucagcggacgcuccuccg

SEQ ID NO: 2645322 - RNA, 19 nt, Artificial Sequence
  Description of Artificial Sequence: Synthetic oligonucleotide
uccauccuaugcucaccac

SEQ ID NO: 2645323 - RNA, 19 nt, Artificial Sequence
  Description of Artificial Sequence: Synthetic oligonucleotide
gcugcuuggagccgcggcc

SEQ ID NO: 2645324 - RNA, 19 nt, Artificial Sequence
  Description of Artificial Sequence: Synthetic oligonucleotide
agauugucuacuacuuguu

SEQ ID NO: 2645325 - RNA, 19 nt, Artificial Sequence
  Description of Artificial Sequence: Synthetic oligonucleotide
cggaacugcgacaaccgcg

SEQ ID NO: 2645326 - RNA, 19 nt, Artificial Sequence
  Description of Artificial Sequence: Synthetic oligonucleotide
aguauggguuccauccuau

SEQ ID NO: 2645327 - RNA, 19 nt, Artificial Sequence
  Description of Artificial Sequence: Synthetic oligonucleotide
cugcuuggagccgcggccg

SEQ ID NO: 2645328 - RNA, 19 nt, Artificial Sequence
  Description of Artificial Sequence: Synthetic oligonucleotide
gagugcgguguccgggccc

SEQ ID NO: 2645329 - RNA, 19 nt, Artificial Sequence
  Description of Artificial Sequence: Synthetic oligonucleotide
gcccagccauaauaaaugc

SEQ ID NO: 2645330 - RNA, 19 nt, Artificial Sequence
  Description of Artificial Sequence: Synthetic oligonucleotide
cuccucaugacgccgaccu

SEQ ID NO: 2645331 - RNA, 19 nt, Artificial Sequence
  Description of Artificial Sequence: Synthetic oligonucleotide
uggcggagcgggaacccac

SEQ ID NO: 2645332 - RNA, 19 nt, Artificial Sequence
  Description of Artificial Sequence: Synthetic oligonucleotide
augccaguggacacaucag

SEQ ID NO: 2645333 - RNA, 19 nt, Artificial Sequence
  Description of Artificial Sequence: Synthetic oligonucleotide
cucgcuccgcgccugcggc

SEQ ID NO: 2645334 - RNA, 19 nt, Artificial Sequence
  Description of Artificial Sequence: Synthetic oligonucleotide
cucgccgcggcagaagaac

SEQ ID NO: 2645335 - RNA, 19 nt, Artificial Sequence
  Description of Artificial Sequence: Synthetic oligonucleotide
gaaguccucuuugaaggua

SEQ ID NO: 2645336 - RNA, 19 nt, Artificial Sequence
  Description of Artificial Sequence: Synthetic oligonucleotide
gggaugcccagcugcuugg

SEQ ID NO: 2645337 - RNA, 19 nt, Artificial Sequence
  Description of Artificial Sequence: Synthetic oligonucleotide
cagccggggaucccgcagg

SEQ ID NO: 2645338 - RNA, 19 nt, Artificial Sequence
  Description of Artificial Sequence: Synthetic oligonucleotide
ggcggagccgccgugagug

SEQ ID NO: 2645339 - RNA, 19 nt, Artificial Sequence
  Description of Artificial Sequence: Synthetic oligonucleotide
accucgccgcggcagaaga

SEQ ID NO: 2645340 - RNA, 19 nt, Artificial Sequence
  Description of Artificial Sequence: Synthetic oligonucleotide
ucaugacgccgaccucggc

SEQ ID NO: 2645341 - RNA, 19 nt, Artificial Sequence
  Description of Artificial Sequence: Synthetic oligonucleotide
ggggaugcccagcugcuug

SEQ ID NO: 2645342 - RNA, 19 nt, Artificial Sequence
  Description of Artificial Sequence: Synthetic oligonucleotide
uccccauagaaguccucuu

SEQ ID NO: 2645343 - RNA, 19 nt, Artificial Sequence
  Description of Artificial Sequence: Synthetic oligonucleotide
guaguauggguuccauccu

SEQ ID NO: 2645344 - RNA, 19 nt, Artificial Sequence
  Description of Artificial Sequence: Synthetic oligonucleotide
gaacggcaggcuccucaug

SEQ ID NO: 2645345 - RNA, 19 nt, Artificial Sequence
  Description of Artificial Sequence: Synthetic oligonucleotide
agcagccucgggccgucag

SEQ ID NO: 2645346 - RNA, 19 nt, Artificial Sequence
  Description of Artificial Sequence: Synthetic oligonucleotide
ggccgucagaacucagcgg

SEQ ID NO: 2645347 - RNA, 19 nt, Artificial Sequence
  Description of Artificial Sequence: Synthetic oligonucleotide
uaccggugccugccggcag

SEQ ID NO: 2645348 - RNA, 19 nt, Artificial Sequence
  Description of Artificial Sequence: Synthetic oligonucleotide
acucccgacacuggcccag

SEQ ID NO: 2645349 - RNA, 19 nt, Artificial Sequence
  Description of Artificial Sequence: Synthetic oligonucleotide
ccauucauaauuuugccuu

SEQ ID NO: 2645350 - RNA, 19 nt, Artificial Sequence
  Description of Artificial Sequence: Synthetic oligonucleotide
acccaccgcuaccggugcc

SEQ ID NO: 2645351 - RNA, 19 nt, Artificial Sequence
  Description of Artificial Sequence: Synthetic oligonucleotide
agccucgggccgucagaac

SEQ ID NO: 2645352 - RNA, 19 nt, Artificial Sequence
  Description of Artificial Sequence: Synthetic oligonucleotide
ugccugccggcagagcagc

SEQ ID NO: 2645353 - RNA, 19 nt, Artificial Sequence
  Description of Artificial Sequence: Synthetic oligonucleotide
guuggcggagcgggaaccc

SEQ ID NO: 2645354 - RNA, 19 nt, Artificial Sequence
  Description of Artificial Sequence: Synthetic oligonucleotide
uccucaugacgccgaccuc

SEQ ID NO: 2645355 - RNA, 19 nt, Artificial Sequence
  Description of Artificial Sequence: Synthetic oligonucleotide
cacuggcccagccauaaua

SEQ ID NO: 2645356 - RNA, 19 nt, Artificial Sequence
  Description of Artificial Sequence: Synthetic oligonucleotide
ccacucccgacacuggccc

SEQ ID NO: 2645357 - RNA, 19 nt, Artificial Sequence
  Description of Artificial Sequence: Synthetic oligonucleotide
uggguuggcggagcgggaa

SEQ ID NO: 2645358 - RNA, 19 nt, Artificial Sequence
  Description of Artificial Sequence: Synthetic oligonucleotide
ucgcuccgcgccugcggcg

SEQ ID NO: 2645359 - RNA, 19 nt, Artificial Sequence
  Description of Artificial Sequence: Synthetic oligonucleotide
gacgcgggcugcugcucgc

SEQ ID NO: 2645360 - RNA, 19 nt, Artificial Sequence
  Description of Artificial Sequence: Synthetic oligonucleotide
ugcgguguccgggcccggg

SEQ ID NO: 2645361 - RNA, 19 nt, Artificial Sequence
  Description of Artificial Sequence: Synthetic oligonucleotide
ucgggccgucagaacucag

SEQ ID NO: 2645362 - RNA, 19 nt, Artificial Sequence
  Description of Artificial Sequence: Synthetic oligonucleotide
accggugccugccggcaga

SEQ ID NO: 2645363 - RNA, 19 nt, Artificial Sequence
  Description of Artificial Sequence: Synthetic oligonucleotide
uuggcggagcgggaaccca

SEQ ID NO: 2645364 - RNA, 19 nt, Artificial Sequence
  Description of Artificial Sequence: Synthetic oligonucleotide
accaccucgccgcggcaga

SEQ ID NO: 2645365 - RNA, 19 nt, Artificial Sequence
  Description of Artificial Sequence: Synthetic oligonucleotide
acgccgaccucggcggacg

SEQ ID NO: 2645366 - RNA, 19 nt, Artificial Sequence
  Description of Artificial Sequence: Synthetic oligonucleotide
cacgcaccaccucgccgcg

SEQ ID NO: 2645367 - RNA, 19 nt, Artificial Sequence
  Description of Artificial Sequence: Synthetic oligonucleotide
gaccucggcggacgcgggc

SEQ ID NO: 2645368 - RNA, 19 nt, Artificial Sequence
  Description of Artificial Sequence: Synthetic oligonucleotide
cauugagaauuuccccaua

SEQ ID NO: 2645369 - RNA, 19 nt, Artificial Sequence
  Description of Artificial Sequence: Synthetic oligonucleotide
guaugauguggguuuccau

SEQ ID NO: 2645370 - RNA, 19 nt, Artificial Sequence
  Description of Artificial Sequence: Synthetic oligonucleotide
gccacgcaccaccucgccg

SEQ ID NO: 2645371 - RNA, 19 nt, Artificial Sequence
  Description of Artificial Sequence: Synthetic oligonucleotide
gguagccaacaauggccac

SEQ ID NO: 2645372 - RNA, 19 nt, Artificial Sequence
  Description of Artificial Sequence: Synthetic oligonucleotide
ggagcgggaacccaccgcu

SEQ ID NO: 2645373 - RNA, 19 nt, Artificial Sequence
  Description of Artificial Sequence: Synthetic oligonucleotide
gggaacccaccgcuaccgg

SEQ ID NO: 2645374 - RNA, 19 nt, Artificial Sequence
  Description of Artificial Sequence: Synthetic oligonucleotide
gguuggcggagcgggaacc

SEQ ID NO: 2645375 - RNA, 19 nt, Artificial Sequence
  Description of Artificial Sequence: Synthetic oligonucleotide
ugcucgcuccgcgccugcg

SEQ ID NO: 2645376 - RNA, 19 nt, Artificial Sequence
  Description of Artificial Sequence: Synthetic oligonucleotide
gccgugagugcgguguccg

SEQ ID NO: 2645377 - RNA, 19 nt, Artificial Sequence
  Description of Artificial Sequence: Synthetic oligonucleotide
ggaagauugucuacuacuu

SEQ ID NO: 2645378 - RNA, 19 nt, Artificial Sequence
  Description of Artificial Sequence: Synthetic oligonucleotide
gcuaccggugccugccggc

SEQ ID NO: 2645379 - RNA, 19 nt, Artificial Sequence
  Description of Artificial Sequence: Synthetic oligonucleotide
gcuggaagauugucuacua

SEQ ID NO: 2645380 - RNA, 19 nt, Artificial Sequence
  Description of Artificial Sequence: Synthetic oligonucleotide
gguauguaugauguggguu

SEQ ID NO: 2645381 - RNA, 19 nt, Artificial Sequence
  Description of Artificial Sequence: Synthetic oligonucleotide
gggaucccgcaggagcugg

SEQ ID NO: 2645382 - RNA, 19 nt, Artificial Sequence
  Description of Artificial Sequence: Synthetic oligonucleotide
cgcggcagaagaacggcag

SEQ ID NO: 2645383 - RNA, 19 nt, Artificial Sequence
  Description of Artificial Sequence: Synthetic oligonucleotide
cgucagaacucagcggacg

SEQ ID NO: 2645384 - RNA, 19 nt, Artificial Sequence
  Description of Artificial Sequence: Synthetic oligonucleotide
cuggcccagccauaauaaa

SEQ ID NO: 2645385 - RNA, 19 nt, Artificial Sequence
  Description of Artificial Sequence: Synthetic oligonucleotide
accucggcggacgcgggcu

SEQ ID NO: 2645386 - RNA, 19 nt, Artificial Sequence
  Description of Artificial Sequence: Synthetic oligonucleotide
caccaccucgccgcggcag

SEQ ID NO: 2645387 - RNA, 19 nt, Artificial Sequence
  Description of Artificial Sequence: Synthetic oligonucleotide
gguguccgggcccggggcc

SEQ ID NO: 2645388 - RNA, 19 nt, Artificial Sequence
  Description of Artificial Sequence: Synthetic oligonucleotide
caccgcuaccggugccugc

SEQ ID NO: 2645389 - RNA, 19 nt, Artificial Sequence
  Description of Artificial Sequence: Synthetic oligonucleotide
ccucuuugaagguauguau

SEQ ID NO: 2645390 - RNA, 19 nt, Artificial Sequence
  Description of Artificial Sequence: Synthetic oligonucleotide
ggagccgccgugagugcgg

SEQ ID NO: 2645391 - RNA, 19 nt, Artificial Sequence
  Description of Artificial Sequence: Synthetic oligonucleotide
ccggaacugcgacaaccgc

SEQ ID NO: 2645392 - RNA, 19 nt, Artificial Sequence
  Description of Artificial Sequence: Synthetic oligonucleotide
ggucugagguagccaacaa

SEQ ID NO: 2645393 - RNA, 19 nt, Artificial Sequence
  Description of Artificial Sequence: Synthetic oligonucleotide
ccgaccucggcggacgcgg

SEQ ID NO: 2645394 - RNA, 19 nt, Artificial Sequence
  Description of Artificial Sequence: Synthetic oligonucleotide
cgugagugcgguguccggg

SEQ ID NO: 2645395 - RNA, 19 nt, Artificial Sequence
  Description of Artificial Sequence: Synthetic oligonucleotide
gcgggaacccaccgcuacc

SEQ ID NO: 2645396 - RNA, 19 nt, Artificial Sequence
  Description of Artificial Sequence: Synthetic oligonucleotide
agcggacgcuccuccggaa

SEQ ID NO: 2645397 - RNA, 19 nt, Artificial Sequence
  Description of Artificial Sequence: Synthetic oligonucleotide
acacuggcccagccauaau

SEQ ID NO: 2645398 - RNA, 19 nt, Artificial Sequence
  Description of Artificial Sequence: Synthetic oligonucleotide
gacgccgaccucggcggac

SEQ ID NO: 2645399 - RNA, 19 nt, Artificial Sequence
  Description of Artificial Sequence: Synthetic oligonucleotide
ccuaugcucaccaccauuu

SEQ ID NO: 2645400 - RNA, 19 nt, Artificial Sequence
  Description of Artificial Sequence: Synthetic oligonucleotide
uguccgggcccggggccag

SEQ ID NO: 2645401 - RNA, 19 nt, Artificial Sequence
  Description of Artificial Sequence: Synthetic oligonucleotide
cgggccgucagaacucagc

SEQ ID NO: 2645402 - RNA, 19 nt, Artificial Sequence
  Description of Artificial Sequence: Synthetic oligonucleotide
cagcggacgcuccuccgga

SEQ ID NO: 2645403 - RNA, 19 nt, Artificial Sequence
  Description of Artificial Sequence: Synthetic oligonucleotide
gccgcggcagaagaacggc

SEQ ID NO: 2645404 - RNA, 19 nt, Artificial Sequence
  Description of Artificial Sequence: Synthetic oligonucleotide
gggccagccggggaucccg

SEQ ID NO: 2645405 - RNA, 19 nt, Artificial Sequence
  Description of Artificial Sequence: Synthetic oligonucleotide
gccucgggccgucagaacu

SEQ ID NO: 2645406 - RNA, 19 nt, Artificial Sequence
  Description of Artificial Sequence: Synthetic oligonucleotide
ggacgcuccuccggaacug

SEQ ID NO: 2645407 - RNA, 19 nt, Artificial Sequence
  Description of Artificial Sequence: Synthetic oligonucleotide
gcgguguccgggcccgggg

SEQ ID NO: 2645408 - RNA, 19 nt, Artificial Sequence
  Description of Artificial Sequence: Synthetic oligonucleotide
ggaacccaccgcuaccggu

SEQ ID NO: 2645409 - RNA, 19 nt, Artificial Sequence
  Description of Artificial Sequence: Synthetic oligonucleotide
cuaccggugccugccggca

SEQ ID NO: 2645410 - RNA, 19 nt, Artificial Sequence
  Description of Artificial Sequence: Synthetic oligonucleotide
cgggaacccaccgcuaccg

SEQ ID NO: 2645411 - RNA, 19 nt, Artificial Sequence
  Description of Artificial Sequence: Synthetic oligonucleotide
cccgcaggagcuggguugg

SEQ ID NO: 2645412 - RNA, 19 nt, Artificial Sequence
  Description of Artificial Sequence: Synthetic oligonucleotide
ccucgggccgucagaacuc

SEQ ID NO: 2645413 - RNA, 19 nt, Artificial Sequence
  Description of Artificial Sequence: Synthetic oligonucleotide
ggguuggcggagcgggaac

SEQ ID NO: 2645414 - RNA, 19 nt, Artificial Sequence
  Description of Artificial Sequence: Synthetic oligonucleotide
ggaucccgcaggagcuggg

SEQ ID NO: 2645415 - RNA, 19 nt, Artificial Sequence
  Description of Artificial Sequence: Synthetic oligonucleotide
ccgucagaacucagcggac

SEQ ID NO: 2645416 - RNA, 19 nt, Artificial Sequence
  Description of Artificial Sequence: Synthetic oligonucleotide
ggguuccauccuaugcuca

SEQ ID NO: 2645417 - RNA, 19 nt, Artificial Sequence
  Description of Artificial Sequence: Synthetic oligonucleotide
cucggcggacgcgggcugc

SEQ ID NO: 2645418 - RNA, 19 nt, Artificial Sequence
  Description of Artificial Sequence: Synthetic oligonucleotide
caccucgccgcggcagaag

SEQ ID NO: 2645419 - RNA, 19 nt, Artificial Sequence
  Description of Artificial Sequence: Synthetic oligonucleotide
uggggaugcccagcugcuu

SEQ ID NO: 2645420 - RNA, 19 nt, Artificial Sequence
  Description of Artificial Sequence: Synthetic oligonucleotide
gaacugcgacaaccgcggu

SEQ ID NO: 2645421 - RNA, 19 nt, Artificial Sequence
  Description of Artificial Sequence: Synthetic oligonucleotide
ucggcggacgcgggcugcu

SEQ ID NO: 2645422 - RNA, 19 nt, Artificial Sequence
  Description of Artificial Sequence: Synthetic oligonucleotide
cuaugcucaccaccauuuu

SEQ ID NO: 2645423 - RNA, 19 nt, Artificial Sequence
  Description of Artificial Sequence: Synthetic oligonucleotide
cgccgcggcagaagaacgg

SEQ ID NO: 2645424 - RNA, 19 nt, Artificial Sequence
  Description of Artificial Sequence: Synthetic oligonucleotide
cucgggccgucagaacuca

SEQ ID NO: 2645425 - RNA, 19 nt, Artificial Sequence
  Description of Artificial Sequence: Synthetic oligonucleotide
ccgugagugcgguguccgg

SEQ ID NO: 2645426 - RNA, 19 nt, Artificial Sequence
  Description of Artificial Sequence: Synthetic oligonucleotide
gcagccucgggccgucaga

SEQ ID NO: 2645427 - RNA, 19 nt, Artificial Sequence
  Description of Artificial Sequence: Synthetic oligonucleotide
cgcaccaccucgccgcggc

SEQ ID NO: 2645428 - RNA, 19 nt, Artificial Sequence
  Description of Artificial Sequence: Synthetic oligonucleotide
gcuccucaugacgccgacc

SEQ ID NO: 2645429 - RNA, 19 nt, Artificial Sequence
  Description of Artificial Sequence: Synthetic oligonucleotide
gccgcggccgaagccacgc

SEQ ID NO: 2645430 - RNA, 19 nt, Artificial Sequence
  Description of Artificial Sequence: Synthetic oligonucleotide
guggggaugcccagcugcu

SEQ ID NO: 2645431 - RNA, 19 nt, Artificial Sequence
  Description of Artificial Sequence: Synthetic oligonucleotide
gcggcggagccgccgugag

SEQ ID NO: 2645432 - RNA, 19 nt, Artificial Sequence
  Description of Artificial Sequence: Synthetic oligonucleotide
ggggaucccgcaggagcug

SEQ ID NO: 2645433 - RNA, 19 nt, Artificial Sequence
  Description of Artificial Sequence: Synthetic oligonucleotide
agccgcggccgaagccacg

SEQ ID NO: 2645434 - RNA, 19 nt, Artificial Sequence
  Description of Artificial Sequence: Synthetic oligonucleotide
ccggcagagcagccucggg

SEQ ID NO: 2645435 - RNA, 19 nt, Artificial Sequence
  Description of Artificial Sequence: Synthetic oligonucleotide
agccgccgugagugcggug

SEQ ID NO: 2645436 - RNA, 19 nt, Artificial Sequence
  Description of Artificial Sequence: Synthetic oligonucleotide
cggagcgggaacccaccgc

SEQ ID NO: 2645437 - RNA, 19 nt, Artificial Sequence
  Description of Artificial Sequence: Synthetic oligonucleotide
cuccgcgccugcggcggag

SEQ ID NO: 2645438 - RNA, 19 nt, Artificial Sequence
  Description of Artificial Sequence: Synthetic oligonucleotide
guguccgggcccggggcca

SEQ ID NO: 2645439 - RNA, 19 nt, Artificial Sequence
  Description of Artificial Sequence: Synthetic oligonucleotide
gccgaccucggcggacgcg

SEQ ID NO: 2645440 - RNA, 19 nt, Artificial Sequence
  Description of Artificial Sequence: Synthetic oligonucleotide
acgcgggcugcugcucgcu

SEQ ID NO: 2645441 - RNA, 19 nt, Artificial Sequence
  Description of Artificial Sequence: Synthetic oligonucleotide
cccgacacuggcccagcca

SEQ ID NO: 2645442 - RNA, 19 nt, Artificial Sequence
  Description of Artificial Sequence: Synthetic oligonucleotide
cgcuaccggugccugccgg

SEQ ID NO: 2645443 - RNA, 19 nt, Artificial Sequence
  Description of Artificial Sequence: Synthetic oligonucleotide
ggccguggggaugcccagc

SEQ ID NO: 2645444 - RNA, 19 nt, Artificial Sequence
  Description of Artificial Sequence: Synthetic oligonucleotide
gccgccgugagugcggugu

SEQ ID NO: 2645445 - RNA, 19 nt, Artificial Sequence
  Description of Artificial Sequence: Synthetic oligonucleotide
cgcggccgaagccacgcac

SEQ ID NO: 2645446 - RNA, 19 nt, Artificial Sequence
  Description of Artificial Sequence: Synthetic oligonucleotide
ccgcggcagaagaacggca

SEQ ID NO: 2645447 - RNA, 19 nt, Artificial Sequence
  Description of Artificial Sequence: Synthetic oligonucleotide
ccgcuaccggugccugccg

SEQ ID NO: 2645448 - RNA, 19 nt, Artificial Sequence
  Description of Artificial Sequence: Synthetic oligonucleotide
caucuccacucccgacacu

SEQ ID NO: 2645449 - RNA, 19 nt, Artificial Sequence
  Description of Artificial Sequence: Synthetic oligonucleotide
gggcccggggccagccggg

SEQ ID NO: 2645450 - RNA, 19 nt, Artificial Sequence
  Description of Artificial Sequence: Synthetic oligonucleotide
ggccgaagccacgcaccac

SEQ ID NO: 2645451 - RNA, 19 nt, Artificial Sequence
  Description of Artificial Sequence: Synthetic oligonucleotide
cgguguccgggcccggggc

SEQ ID NO: 2645452 - RNA, 19 nt, Artificial Sequence
  Description of Artificial Sequence: Synthetic oligonucleotide
cgaagccacgcaccaccuc

SEQ ID NO: 2645453 - RNA, 19 nt, Artificial Sequence
  Description of Artificial Sequence: Synthetic oligonucleotide
gugcgguguccgggcccgg

SEQ ID NO: 2645454 - RNA, 19 nt, Artificial Sequence
  Description of Artificial Sequence: Synthetic oligonucleotide
ccuccggaacugcgacaac

SEQ ID NO: 2645455 - RNA, 19 nt, Artificial Sequence
  Description of Artificial Sequence: Synthetic oligonucleotide
ccccauagaaguccucuuu

SEQ ID NO: 2645456 - RNA, 19 nt, Artificial Sequence
  Description of Artificial Sequence: Synthetic oligonucleotide
ggccagccggggaucccgc

SEQ ID NO: 2645457 - RNA, 19 nt, Artificial Sequence
  Description of Artificial Sequence: Synthetic oligonucleotide
cugcgacaaccgcggugaa

SEQ ID NO: 2645458 - RNA, 19 nt, Artificial Sequence
  Description of Artificial Sequence: Synthetic oligonucleotide
gagccgccgugagugcggu

SEQ ID NO: 2645459 - RNA, 19 nt, Artificial Sequence
  Description of Artificial Sequence: Synthetic oligonucleotide
cgcuccuccggaacugcga

SEQ ID NO: 2645460 - RNA, 19 nt, Artificial Sequence
  Description of Artificial Sequence: Synthetic oligonucleotide
ccaccgcuaccggugccug

SEQ ID NO: 2645461 - RNA, 19 nt, Artificial Sequence
  Description of Artificial Sequence: Synthetic oligonucleotide
ccucggcggacgcgggcug

SEQ ID NO: 2645462 - RNA, 19 nt, Artificial Sequence
  Description of Artificial Sequence: Synthetic oligonucleotide
gccagccggggaucccgca

SEQ ID NO: 2645463 - RNA, 19 nt, Artificial Sequence
  Description of Artificial Sequence: Synthetic oligonucleotide
ccguggggaugcccagcug

SEQ ID NO: 2645464 - RNA, 19 nt, Artificial Sequence
  Description of Artificial Sequence: Synthetic oligonucleotide
gcggacgcgggcugcugcu

SEQ ID NO: 2645465 - RNA, 19 nt, Artificial Sequence
  Description of Artificial Sequence: Synthetic oligonucleotide
gcaccaccucgccgcggca

SEQ ID NO: 2645466 - RNA, 19 nt, Artificial Sequence
  Description of Artificial Sequence: Synthetic oligonucleotide
gccugccggcagagcagcc

SEQ ID NO: 2645467 - RNA, 19 nt, Artificial Sequence
  Description of Artificial Sequence: Synthetic oligonucleotide
ccgccgugagugcgguguc

SEQ ID NO: 2645468 - RNA, 19 nt, Artificial Sequence
  Description of Artificial Sequence: Synthetic oligonucleotide
cgccgugagugcggugucc

SEQ ID NO: 2645469 - RNA, 19 nt, Artificial Sequence
  Description of Artificial Sequence: Synthetic oligonucleotide
ccgaagccacgcaccaccu

SEQ ID NO: 2645470 - RNA, 19 nt, Artificial Sequence
  Description of Artificial Sequence: Synthetic oligonucleotide
ccucgccgcggcagaagaa

SEQ ID NO: 2645471 - RNA, 19 nt, Artificial Sequence
  Description of Artificial Sequence: Synthetic oligonucleotide
cggacgcuccuccggaacu

SEQ ID NO: 2645472 - RNA, 19 nt, Artificial Sequence
  Description of Artificial Sequence: Synthetic oligonucleotide
ccgcaggagcuggguuggc

SEQ ID NO: 2645473 - RNA, 19 nt, Artificial Sequence
  Description of Artificial Sequence: Synthetic oligonucleotide
cccaccgcuaccggugccu

SEQ ID NO: 2645474 - RNA, 19 nt, Artificial Sequence
  Description of Artificial Sequence: Synthetic oligonucleotide
gcuccgcgccugcggcgga

SEQ ID NO: 2645475 - RNA, 19 nt, Artificial Sequence
  Description of Artificial Sequence: Synthetic oligonucleotide
ccggggccagccggggauc

SEQ ID NO: 2645476 - RNA, 19 nt, Artificial Sequence
  Description of Artificial Sequence: Synthetic oligonucleotide
cccggggccagccggggau

SEQ ID NO: 2645477 - RNA, 19 nt, Artificial Sequence
  Description of Artificial Sequence: Synthetic oligonucleotide
cggacgcgggcugcugcuc

SEQ ID NO: 2645478 - RNA, 19 nt, Artificial Sequence
  Description of Artificial Sequence: Synthetic oligonucleotide
ccaccucgccgcggcagaa

SEQ ID NO: 2645479 - RNA, 19 nt, Artificial Sequence
  Description of Artificial Sequence: Synthetic oligonucleotide
cggcggacgcgggcugcug

SEQ ID NO: 2645480 - RNA, 19 nt, Artificial Sequence
  Description of Artificial Sequence: Synthetic oligonucleotide
cgccugcggcggagccgcc

SEQ ID NO: 2645481 - RNA, 19 nt, Artificial Sequence
  Description of Artificial Sequence: Synthetic oligonucleotide
cggcggagccgccgugagu

SEQ ID NO: 2645482 - RNA, 19 nt, Artificial Sequence
  Description of Artificial Sequence: Synthetic oligonucleotide
ucauuaauaaguaaagacg

SEQ ID NO: 2645483 - RNA, 19 nt, Artificial Sequence
  Description of Artificial Sequence: Synthetic oligonucleotide
aucauuaauaaguaaagac

SEQ ID NO: 2645484 - RNA, 19 nt, Artificial Sequence
  Description of Artificial Sequence: Synthetic oligonucleotide
aaauauagguuucaggaag

SEQ ID NO: 2645485 - RNA, 19 nt, Artificial Sequence
  Description of Artificial Sequence: Synthetic oligonucleotide
agcuauaaagguuaguugc

SEQ ID NO: 2645486 - RNA, 19 nt, Artificial Sequence
  Description of Artificial Sequence: Synthetic oligonucleotide
aagguuaguugcuauaggc

SEQ ID NO: 2645487 - RNA, 19 nt, Artificial Sequence
  Description of Artificial Sequence: Synthetic oligonucleotide
uaggcagaaacaaagaggg

SEQ ID NO: 2645488 - RNA, 19 nt, Artificial Sequence
  Description of Artificial Sequence: Synthetic oligonucleotide
ugauaugacaaaauauagg

SEQ ID NO: 2645489 - RNA, 19 nt, Artificial Sequence
  Description of Artificial Sequence: Synthetic oligonucleotide
aauaguugcacugcaaugg

SEQ ID NO: 2645490 - RNA, 19 nt, Artificial Sequence
  Description of Artificial Sequence: Synthetic oligonucleotide
uuugauaugacaaaauaua

SEQ ID NO: 2645491 - RNA, 19 nt, Artificial Sequence
  Description of Artificial Sequence: Synthetic oligonucleotide
caauaguugagcuagguag

SEQ ID NO: 2645492 - RNA, 19 nt, Artificial Sequence
  Description of Artificial Sequence: Synthetic oligonucleotide
uugauaugacaaaauauag

SEQ ID NO: 2645493 - RNA, 19 nt, Artificial Sequence
  Description of Artificial Sequence: Synthetic oligonucleotide
auagguuucaggaaggacc

SEQ ID NO: 2645494 - RNA, 19 nt, Artificial Sequence
  Description of Artificial Sequence: Synthetic oligonucleotide
guaaagacgaguuuagaag

SEQ ID NO: 2645495 - RNA, 19 nt, Artificial Sequence
  Description of Artificial Sequence: Synthetic oligonucleotide
auuuuggaaucuuucuucc

SEQ ID NO: 2645496 - RNA, 19 nt, Artificial Sequence
  Description of Artificial Sequence: Synthetic oligonucleotide
ucaauaaauaguugcacug

SEQ ID NO: 2645497 - RNA, 19 nt, Artificial Sequence
  Description of Artificial Sequence: Synthetic oligonucleotide
acaaccagccuuuagcggc

SEQ ID NO: 2645498 - RNA, 19 nt, Artificial Sequence
  Description of Artificial Sequence: Synthetic oligonucleotide
gauaugacaaaauauaggu

SEQ ID NO: 2645499 - RNA, 19 nt, Artificial Sequence
  Description of Artificial Sequence: Synthetic oligonucleotide
uaaagacgaguuuagaagc

SEQ ID NO: 2645500 - RNA, 19 nt, Artificial Sequence
  Description of Artificial Sequence: Synthetic oligonucleotide
aauaguugagcuagguagc

SEQ ID NO: 2645501 - RNA, 19 nt, Artificial Sequence
  Description of Artificial Sequence: Synthetic oligonucleotide
guugcuauaggcuauagga

SEQ ID NO: 2645502 - RNA, 19 nt, Artificial Sequence
  Description of Artificial Sequence: Synthetic oligonucleotide
aauaaauaguugcacugca

SEQ ID NO: 2645503 - RNA, 19 nt, Artificial Sequence
  Description of Artificial Sequence: Synthetic oligonucleotide
agauauauaggauagcaaa

SEQ ID NO: 2645504 - RNA, 19 nt, Artificial Sequence
  Description of Artificial Sequence: Synthetic oligonucleotide
uuucauaugcaaaucauua

SEQ ID NO: 2645505 - RNA, 19 nt, Artificial Sequence
  Description of Artificial Sequence: Synthetic oligonucleotide
uuagaagcuauaaagguua

SEQ ID NO: 2645506 - RNA, 19 nt, Artificial Sequence
  Description of Artificial Sequence: Synthetic oligonucleotide
gucauggcaagauauauag

SEQ ID NO: 2645507 - RNA, 19 nt, Artificial Sequence
  Description of Artificial Sequence: Synthetic oligonucleotide
acugcaauggggcaggagg

SEQ ID NO: 2645508 - RNA, 19 nt, Artificial Sequence
  Description of Artificial Sequence: Synthetic oligonucleotide
cauuaauaaguaaagacga

SEQ ID NO: 2645509 - RNA, 19 nt, Artificial Sequence
  Description of Artificial Sequence: Synthetic oligonucleotide
ugagagugcaugcagcagg

SEQ ID NO: 2645510 - RNA, 19 nt, Artificial Sequence
  Description of Artificial Sequence: Synthetic oligonucleotide
aaauaguugcacugcaaug

SEQ ID NO: 2645511 - RNA, 19 nt, Artificial Sequence
  Description of Artificial Sequence: Synthetic oligonucleotide
uaaguaaagacgaguuuag

SEQ ID NO: 2645512 - RNA, 19 nt, Artificial Sequence
  Description of Artificial Sequence: Synthetic oligonucleotide
aaagguuaguugcuauagg

SEQ ID NO: 2645513 - RNA, 19 nt, Artificial Sequence
  Description of Artificial Sequence: Synthetic oligonucleotide
uauuugauaugacaaaaua

SEQ ID NO: 2645514 - RNA, 19 nt, Artificial Sequence
  Description of Artificial Sequence: Synthetic oligonucleotide
aaaaccacuugcugggguc

SEQ ID NO: 2645515 - RNA, 19 nt, Artificial Sequence
  Description of Artificial Sequence: Synthetic oligonucleotide
ugcuauaggcuauaggacc

SEQ ID NO: 2645516 - RNA, 19 nt, Artificial Sequence
  Description of Artificial Sequence: Synthetic oligonucleotide
uaauaaguaaagacgaguu

SEQ ID NO: 2645517 - RNA, 19 nt, Artificial Sequence
  Description of Artificial Sequence: Synthetic oligonucleotide
aucucccucuuucauaugc

SEQ ID NO: 2645518 - RNA, 19 nt, Artificial Sequence
  Description of Artificial Sequence: Synthetic oligonucleotide
uugagacacaaguuguugg

SEQ ID NO: 2645519 - RNA, 19 nt, Artificial Sequence
  Description of Artificial Sequence: Synthetic oligonucleotide
cucaccuuaacucaggcug

SEQ ID NO: 2645520 - RNA, 19 nt, Artificial Sequence
  Description of Artificial Sequence: Synthetic oligonucleotide
aauauagguuucaggaagg

SEQ ID NO: 2645521 - RNA, 19 nt, Artificial Sequence
  Description of Artificial Sequence: Synthetic oligonucleotide
uuaauaaguaaagacgagu

SEQ ID NO: 2645522 - RNA, 19 nt, Artificial Sequence
  Description of Artificial Sequence: Synthetic oligonucleotide
aguugagcuagguagcagg

SEQ ID NO: 2645523 - RNA, 19 nt, Artificial Sequence
  Description of Artificial Sequence: Synthetic oligonucleotide
uaggcuauaggaccgcgcg

SEQ ID NO: 2645524 - RNA, 19 nt, Artificial Sequence
  Description of Artificial Sequence: Synthetic oligonucleotide
uaaagguuaguugcuauag

SEQ ID NO: 2645525 - RNA, 19 nt, Artificial Sequence
  Description of Artificial Sequence: Synthetic oligonucleotide
cauaccuucugcuugguac

SEQ ID NO: 2645526 - RNA, 19 nt, Artificial Sequence
  Description of Artificial Sequence: Synthetic oligonucleotide
uaaauaguugcacugcaau

SEQ ID NO: 2645527 - RNA, 19 nt, Artificial Sequence
  Description of Artificial Sequence: Synthetic oligonucleotide
uuuagaagcuauaaagguu

SEQ ID NO: 2645528 - RNA, 19 nt, Artificial Sequence
  Description of Artificial Sequence: Synthetic oligonucleotide
cauggcaagauauauagga

SEQ ID NO: 2645529 - RNA, 19 nt, Artificial Sequence
  Description of Artificial Sequence: Synthetic oligonucleotide
ggagucaauaaauaguugc

SEQ ID NO: 2645530 - RNA, 19 nt, Artificial Sequence
  Description of Artificial Sequence: Synthetic oligonucleotide
uuguuggcaauuucuaugc

SEQ ID NO: 2645531 - RNA, 19 nt, Artificial Sequence
  Description of Artificial Sequence: Synthetic oligonucleotide
cuuaggcagaaacaaagag

SEQ ID NO: 2645532 - RNA, 19 nt, Artificial Sequence
  Description of Artificial Sequence: Synthetic oligonucleotide
aguaaagacgaguuuagaa

SEQ ID NO: 2645533 - RNA, 19 nt, Artificial Sequence
  Description of Artificial Sequence: Synthetic oligonucleotide
auaugcaaaucauuaauaa

SEQ ID NO: 2645534 - RNA, 19 nt, Artificial Sequence
  Description of Artificial Sequence: Synthetic oligonucleotide
aauaaguaaagacgaguuu

SEQ ID NO: 2645535 - RNA, 19 nt, Artificial Sequence
  Description of Artificial Sequence: Synthetic oligonucleotide
aucugucucucguugagac

SEQ ID NO: 2645536 - RNA, 19 nt, Artificial Sequence
  Description of Artificial Sequence: Synthetic oligonucleotide
uuugucuuuauuugauaug

SEQ ID NO: 2645537 - RNA, 19 nt, Artificial Sequence
  Description of Artificial Sequence: Synthetic oligonucleotide
guuguuggcaauuucuaug

SEQ ID NO: 2645538 - RNA, 19 nt, Artificial Sequence
  Description of Artificial Sequence: Synthetic oligonucleotide
guacaaccagccuuuagcg

SEQ ID NO: 2645539 - RNA, 19 nt, Artificial Sequence
  Description of Artificial Sequence: Synthetic oligonucleotide
uucaggaaggaccuggagu

SEQ ID NO: 2645540 - RNA, 19 nt, Artificial Sequence
  Description of Artificial Sequence: Synthetic oligonucleotide
ugagcuagguagcaggcug

SEQ ID NO: 2645541 - RNA, 19 nt, Artificial Sequence
  Description of Artificial Sequence: Synthetic oligonucleotide
aguugcacugcaauggggc

SEQ ID NO: 2645542 - RNA, 19 nt, Artificial Sequence
  Description of Artificial Sequence: Synthetic oligonucleotide
agugcaugggacaaccucc

SEQ ID NO: 2645543 - RNA, 19 nt, Artificial Sequence
  Description of Artificial Sequence: Synthetic oligonucleotide
uuauuugauaugacaaaau

SEQ ID NO: 2645544 - RNA, 19 nt, Artificial Sequence
  Description of Artificial Sequence: Synthetic oligonucleotide
ugcaaaucauuaauaagua

SEQ ID NO: 2645545 - RNA, 19 nt, Artificial Sequence
  Description of Artificial Sequence: Synthetic oligonucleotide
aagggguggcagcuggucc

SEQ ID NO: 2645546 - RNA, 19 nt, Artificial Sequence
  Description of Artificial Sequence: Synthetic oligonucleotide
cuagguagcaggcuggggc

SEQ ID NO: 2645547 - RNA, 19 nt, Artificial Sequence
  Description of Artificial Sequence: Synthetic oligonucleotide
uucugcuugguacaaccag

SEQ ID NO: 2645548 - RNA, 19 nt, Artificial Sequence
  Description of Artificial Sequence: Synthetic oligonucleotide
ucuuucauaugcaaaucau

SEQ ID NO: 2645549 - RNA, 19 nt, Artificial Sequence
  Description of Artificial Sequence: Synthetic oligonucleotide
cucguugagacacaaguug

SEQ ID NO: 2645550 - RNA, 19 nt, Artificial Sequence
  Description of Artificial Sequence: Synthetic oligonucleotide
ugggacaaccuccaggucu

SEQ ID NO: 2645551 - RNA, 19 nt, Artificial Sequence
  Description of Artificial Sequence: Synthetic oligonucleotide
ucaccuuaacucaggcugg

SEQ ID NO: 2645552 - RNA, 19 nt, Artificial Sequence
  Description of Artificial Sequence: Synthetic oligonucleotide
auaaguaaagacgaguuua

SEQ ID NO: 2645553 - RNA, 19 nt, Artificial Sequence
  Description of Artificial Sequence: Synthetic oligonucleotide
gguacaaccagccuuuagc

SEQ ID NO: 2645554 - RNA, 19 nt, Artificial Sequence
  Description of Artificial Sequence: Synthetic oligonucleotide
aagagaccccaauaguuga

SEQ ID NO: 2645555 - RNA, 19 nt, Artificial Sequence
  Description of Artificial Sequence: Synthetic oligonucleotide
ucauggcaagauauauagg

SEQ ID NO: 2645556 - RNA, 19 nt, Artificial Sequence
  Description of Artificial Sequence: Synthetic oligonucleotide
ggggcugugaaccugagag

SEQ ID NO: 2645557 - RNA, 19 nt, Artificial Sequence
  Description of Artificial Sequence: Synthetic oligonucleotide
uggucauaccuucugcuug

SEQ ID NO: 2645558 - RNA, 19 nt, Artificial Sequence
  Description of Artificial Sequence: Synthetic oligonucleotide
aguugcuauaggcuauagg

SEQ ID NO: 2645559 - RNA, 19 nt, Artificial Sequence
  Description of Artificial Sequence: Synthetic oligonucleotide
uagguuucaggaaggaccu

SEQ ID NO: 2645560 - RNA, 19 nt, Artificial Sequence
  Description of Artificial Sequence: Synthetic oligonucleotide
uggaggucggggcuaaggg

SEQ ID NO: 2645561 - RNA, 19 nt, Artificial Sequence
  Description of Artificial Sequence: Synthetic oligonucleotide
caauaaauaguugcacugc

SEQ ID NO: 2645562 - RNA, 19 nt, Artificial Sequence
  Description of Artificial Sequence: Synthetic oligonucleotide
auuugauaugacaaaauau

SEQ ID NO: 2645563 - RNA, 19 nt, Artificial Sequence
  Description of Artificial Sequence: Synthetic oligonucleotide
gacaaaauauagguuucag

SEQ ID NO: 2645564 - RNA, 19 nt, Artificial Sequence
  Description of Artificial Sequence: Synthetic oligonucleotide
cuucauuuuggaaucuuuc

SEQ ID NO: 2645565 - RNA, 19 nt, Artificial Sequence
  Description of Artificial Sequence: Synthetic oligonucleotide
caagagaccccaauaguug

SEQ ID NO: 2645566 - RNA, 19 nt, Artificial Sequence
  Description of Artificial Sequence: Synthetic oligonucleotide
ugaaccugagagugcaugc

SEQ ID NO: 2645567 - RNA, 19 nt, Artificial Sequence
  Description of Artificial Sequence: Synthetic oligonucleotide
cucuaaagagccucuuugc

SEQ ID NO: 2645568 - RNA, 19 nt, Artificial Sequence
  Description of Artificial Sequence: Synthetic oligonucleotide
ucuuccacuucauccugcg

SEQ ID NO: 2645569 - RNA, 19 nt, Artificial Sequence
  Description of Artificial Sequence: Synthetic oligonucleotide
auuaauaaguaaagacgag

SEQ ID NO: 2645570 - RNA, 19 nt, Artificial Sequence
  Description of Artificial Sequence: Synthetic oligonucleotide
uacaaccagccuuuagcgg

SEQ ID NO: 2645571 - RNA, 19 nt, Artificial Sequence
  Description of Artificial Sequence: Synthetic oligonucleotide
uauaggaccgcgcgucuag

SEQ ID NO: 2645572 - RNA, 19 nt, Artificial Sequence
  Description of Artificial Sequence: Synthetic oligonucleotide
uauaaagguuaguugcuau

SEQ ID NO: 2645573 - RNA, 19 nt, Artificial Sequence
  Description of Artificial Sequence: Synthetic oligonucleotide
uucuuugucuuuauuugau

SEQ ID NO: 2645574 - RNA, 19 nt, Artificial Sequence
  Description of Artificial Sequence: Synthetic oligonucleotide
ucguugagacacaaguugu

SEQ ID NO: 2645575 - RNA, 19 nt, Artificial Sequence
  Description of Artificial Sequence: Synthetic oligonucleotide
agggugagaaagucauggc

SEQ ID NO: 2645576 - RNA, 19 nt, Artificial Sequence
  Description of Artificial Sequence: Synthetic oligonucleotide
uguuggcaauuucuaugcg

SEQ ID NO: 2645577 - RNA, 19 nt, Artificial Sequence
  Description of Artificial Sequence: Synthetic oligonucleotide
guuuagaagcuauaaaggu

SEQ ID NO: 2645578 - RNA, 19 nt, Artificial Sequence
  Description of Artificial Sequence: Synthetic oligonucleotide
caagauauauaggauagca

SEQ ID NO: 2645579 - RNA, 19 nt, Artificial Sequence
  Description of Artificial Sequence: Synthetic oligonucleotide
ugucucaccuuaacucagg

SEQ ID NO: 2645580 - RNA, 19 nt, Artificial Sequence
  Description of Artificial Sequence: Synthetic oligonucleotide
accccaauaguugagcuag

SEQ ID NO: 2645581 - RNA, 19 nt, Artificial Sequence
  Description of Artificial Sequence: Synthetic oligonucleotide
gauauauaggauagcaaaa

SEQ ID NO: 2645582 - RNA, 19 nt, Artificial Sequence
  Description of Artificial Sequence: Synthetic oligonucleotide
augacaaaauauagguuuc

SEQ ID NO: 2645583 - RNA, 19 nt, Artificial Sequence
  Description of Artificial Sequence: Synthetic oligonucleotide
accuuaggcagaaacaaag

SEQ ID NO: 2645584 - RNA, 19 nt, Artificial Sequence
  Description of Artificial Sequence: Synthetic oligonucleotide
uggcaagauauauaggaua

SEQ ID NO: 2645585 - RNA, 19 nt, Artificial Sequence
  Description of Artificial Sequence: Synthetic oligonucleotide
ucuggucauaccuucugcu

SEQ ID NO: 2645586 - RNA, 19 nt, Artificial Sequence
  Description of Artificial Sequence: Synthetic oligonucleotide
uggagucaauaaauaguug

SEQ ID NO: 2645587 - RNA, 19 nt, Artificial Sequence
  Description of Artificial Sequence: Synthetic oligonucleotide
uaguugcacugcaaugggg

SEQ ID NO: 2645588 - RNA, 19 nt, Artificial Sequence
  Description of Artificial Sequence: Synthetic oligonucleotide
uagaagcuauaaagguuag

SEQ ID NO: 2645589 - RNA, 19 nt, Artificial Sequence
  Description of Artificial Sequence: Synthetic oligonucleotide
uacaggcccacuuucacuc

SEQ ID NO: 2645590 - RNA, 19 nt, Artificial Sequence
  Description of Artificial Sequence: Synthetic oligonucleotide
uuucaggaaggaccuggag

SEQ ID NO: 2645591 - RNA, 19 nt, Artificial Sequence
  Description of Artificial Sequence: Synthetic oligonucleotide
ggcaagauauauaggauag

SEQ ID NO: 2645592 - RNA, 19 nt, Artificial Sequence
  Description of Artificial Sequence: Synthetic oligonucleotide
aaggcaagagaccccaaua

SEQ ID NO: 2645593 - RNA, 19 nt, Artificial Sequence
  Description of Artificial Sequence: Synthetic oligonucleotide
aagauauauaggauagcaa

SEQ ID NO: 2645594 - RNA, 19 nt, Artificial Sequence
  Description of Artificial Sequence: Synthetic oligonucleotide
ggcagaaacaaagagggug

SEQ ID NO: 2645595 - RNA, 19 nt, Artificial Sequence
  Description of Artificial Sequence: Synthetic oligonucleotide
gugagaaagucauggcaag

SEQ ID NO: 2645596 - RNA, 19 nt, Artificial Sequence
  Description of Artificial Sequence: Synthetic oligonucleotide
aagucauggcaagauauau

SEQ ID NO: 2645597 - RNA, 19 nt, Artificial Sequence
  Description of Artificial Sequence: Synthetic oligonucleotide
aaagacgaguuuagaagcu

SEQ ID NO: 2645598 - RNA, 19 nt, Artificial Sequence
  Description of Artificial Sequence: Synthetic oligonucleotide
uuggaaucuuucuuccacu

SEQ ID NO: 2645599 - RNA, 19 nt, Artificial Sequence
  Description of Artificial Sequence: Synthetic oligonucleotide
agaaacaaagagggugagg

SEQ ID NO: 2645600 - RNA, 19 nt, Artificial Sequence
  Description of Artificial Sequence: Synthetic oligonucleotide
cugcaauggggcaggaggg

SEQ ID NO: 2645601 - RNA, 19 nt, Artificial Sequence
  Description of Artificial Sequence: Synthetic oligonucleotide
cugcuugguacaaccagcc

SEQ ID NO: 2645602 - RNA, 19 nt, Artificial Sequence
  Description of Artificial Sequence: Synthetic oligonucleotide
cugucucucguugagacac

SEQ ID NO: 2645603 - RNA, 19 nt, Artificial Sequence
  Description of Artificial Sequence: Synthetic oligonucleotide
auaccuucugcuugguaca

SEQ ID NO: 2645604 - RNA, 19 nt, Artificial Sequence
  Description of Artificial Sequence: Synthetic oligonucleotide
uauaggcuauaggaccgcg

SEQ ID NO: 2645605 - RNA, 19 nt, Artificial Sequence
  Description of Artificial Sequence: Synthetic oligonucleotide
gaagcuauaaagguuaguu

SEQ ID NO: 2645606 - RNA, 19 nt, Artificial Sequence
  Description of Artificial Sequence: Synthetic oligonucleotide
cuagucuggucauaccuuc

SEQ ID NO: 2645607 - RNA, 19 nt, Artificial Sequence
  Description of Artificial Sequence: Synthetic oligonucleotide
auaaagguuaguugcuaua

SEQ ID NO: 2645608 - RNA, 19 nt, Artificial Sequence
  Description of Artificial Sequence: Synthetic oligonucleotide
ucuagucuggucauaccuu

SEQ ID NO: 2645609 - RNA, 19 nt, Artificial Sequence
  Description of Artificial Sequence: Synthetic oligonucleotide
guugagacacaaguuguug

SEQ ID NO: 2645610 - RNA, 19 nt, Artificial Sequence
  Description of Artificial Sequence: Synthetic oligonucleotide
uauagguuucaggaaggac

SEQ ID NO: 2645611 - RNA, 19 nt, Artificial Sequence
  Description of Artificial Sequence: Synthetic oligonucleotide
aaggucuggagugcauggg

SEQ ID NO: 2645612 - RNA, 19 nt, Artificial Sequence
  Description of Artificial Sequence: Synthetic oligonucleotide
aaguaaagacgaguuuaga

SEQ ID NO: 2645613 - RNA, 19 nt, Artificial Sequence
  Description of Artificial Sequence: Synthetic oligonucleotide
uggagugcaugggacaacc

SEQ ID NO: 2645614 - RNA, 19 nt, Artificial Sequence
  Description of Artificial Sequence: Synthetic oligonucleotide
agucuggucauaccuucug

SEQ ID NO: 2645615 - RNA, 19 nt, Artificial Sequence
  Description of Artificial Sequence: Synthetic oligonucleotide
agacacaaguuguuggcaa

SEQ ID NO: 2645616 - RNA, 19 nt, Artificial Sequence
  Description of Artificial Sequence: Synthetic oligonucleotide
ugguacaaccagccuuuag

SEQ ID NO: 2645617 - RNA, 19 nt, Artificial Sequence
  Description of Artificial Sequence: Synthetic oligonucleotide
ucucccucuuucauaugca

SEQ ID NO: 2645618 - RNA, 19 nt, Artificial Sequence
  Description of Artificial Sequence: Synthetic oligonucleotide
gguuucaggaaggaccugg

SEQ ID NO: 2645619 - RNA, 19 nt, Artificial Sequence
  Description of Artificial Sequence: Synthetic oligonucleotide
gagugcaugcagcaggcca

SEQ ID NO: 2645620 - RNA, 19 nt, Artificial Sequence
  Description of Artificial Sequence: Synthetic oligonucleotide
aggaccuggagucaauaaa

SEQ ID NO: 2645621 - RNA, 19 nt, Artificial Sequence
  Description of Artificial Sequence: Synthetic oligonucleotide
ucucguugagacacaaguu

SEQ ID NO: 2645622 - RNA, 19 nt, Artificial Sequence
  Description of Artificial Sequence: Synthetic oligonucleotide
auaggcuauaggaccgcgc

SEQ ID NO: 2645623 - RNA, 19 nt, Artificial Sequence
  Description of Artificial Sequence: Synthetic oligonucleotide
ugagaaagucauggcaaga

SEQ ID NO: 2645624 - RNA, 19 nt, Artificial Sequence
  Description of Artificial Sequence: Synthetic oligonucleotide
gaaagucauggcaagauau

SEQ ID NO: 2645625 - RNA, 19 nt, Artificial Sequence
  Description of Artificial Sequence: Synthetic oligonucleotide
gcuauaggcuauaggaccg

SEQ ID NO: 2645626 - RNA, 19 nt, Artificial Sequence
  Description of Artificial Sequence: Synthetic oligonucleotide
uuagaaggucuggagugca

SEQ ID NO: 2645627 - RNA, 19 nt, Artificial Sequence
  Description of Artificial Sequence: Synthetic oligonucleotide
uccuaaggcaagagacccc

SEQ ID NO: 2645628 - RNA, 19 nt, Artificial Sequence
  Description of Artificial Sequence: Synthetic oligonucleotide
ucucaccuuaacucaggcu

SEQ ID NO: 2645629 - RNA, 19 nt, Artificial Sequence
  Description of Artificial Sequence: Synthetic oligonucleotide
guuagaaggucuggagugc

SEQ ID NO: 2645630 - RNA, 19 nt, Artificial Sequence
  Description of Artificial Sequence: Synthetic oligonucleotide
cugucucaccuuaacucag

SEQ ID NO: 2645631 - RNA, 19 nt, Artificial Sequence
  Description of Artificial Sequence: Synthetic oligonucleotide
aaagucauggcaagauaua

SEQ ID NO: 2645632 - RNA, 19 nt, Artificial Sequence
  Description of Artificial Sequence: Synthetic oligonucleotide
ucccucuuucauaugcaaa

SEQ ID NO: 2645633 - RNA, 19 nt, Artificial Sequence
  Description of Artificial Sequence: Synthetic oligonucleotide
agaccccaauaguugagcu

SEQ ID NO: 2645634 - RNA, 19 nt, Artificial Sequence
  Description of Artificial Sequence: Synthetic oligonucleotide
acgaguuuagaagcuauaa

SEQ ID NO: 2645635 - RNA, 19 nt, Artificial Sequence
  Description of Artificial Sequence: Synthetic oligonucleotide
gcaugggacaaccuccagg

SEQ ID NO: 2645636 - RNA, 19 nt, Artificial Sequence
  Description of Artificial Sequence: Synthetic oligonucleotide
agguuaguugcuauaggcu

SEQ ID NO: 2645637 - RNA, 19 nt, Artificial Sequence
  Description of Artificial Sequence: Synthetic oligonucleotide
agccuuuagcggccuggcc

SEQ ID NO: 2645638 - RNA, 19 nt, Artificial Sequence
  Description of Artificial Sequence: Synthetic oligonucleotide
gagaccccaauaguugagc

SEQ ID NO: 2645639 - RNA, 19 nt, Artificial Sequence
  Description of Artificial Sequence: Synthetic oligonucleotide
cucucguugagacacaagu

SEQ ID NO: 2645640 - RNA, 19 nt, Artificial Sequence
  Description of Artificial Sequence: Synthetic oligonucleotide
uugcugggguccuaaggca

SEQ ID NO: 2645641 - RNA, 19 nt, Artificial Sequence
  Description of Artificial Sequence: Synthetic oligonucleotide
ucuggagugcaugggacaa

SEQ ID NO: 2645642 - RNA, 19 nt, Artificial Sequence
  Description of Artificial Sequence: Synthetic oligonucleotide
caugggacaaccuccaggu

SEQ ID NO: 2645643 - RNA, 19 nt, Artificial Sequence
  Description of Artificial Sequence: Synthetic oligonucleotide
gguuaguugcuauaggcua

SEQ ID NO: 2645644 - RNA, 19 nt, Artificial Sequence
  Description of Artificial Sequence: Synthetic oligonucleotide
guugagcuagguagcaggc

SEQ ID NO: 2645645 - RNA, 19 nt, Artificial Sequence
  Description of Artificial Sequence: Synthetic oligonucleotide
aggucuggagugcauggga

SEQ ID NO: 2645646 - RNA, 19 nt, Artificial Sequence
  Description of Artificial Sequence: Synthetic oligonucleotide
auaguugagcuagguagca

SEQ ID NO: 2645647 - RNA, 19 nt, Artificial Sequence
  Description of Artificial Sequence: Synthetic oligonucleotide
gcuaagggguggcagcugg

SEQ ID NO: 2645648 - RNA, 19 nt, Artificial Sequence
  Description of Artificial Sequence: Synthetic oligonucleotide
gagcuagguagcaggcugg

SEQ ID NO: 2645649 - RNA, 19 nt, Artificial Sequence
  Description of Artificial Sequence: Synthetic oligonucleotide
gucucaccuuaacucaggc

SEQ ID NO: 2645650 - RNA, 19 nt, Artificial Sequence
  Description of Artificial Sequence: Synthetic oligonucleotide
uaguugagcuagguagcag

SEQ ID NO: 2645651 - RNA, 19 nt, Artificial Sequence
  Description of Artificial Sequence: Synthetic oligonucleotide
ggaggucggggcuaagggg

SEQ ID NO: 2645652 - RNA, 19 nt, Artificial Sequence
  Description of Artificial Sequence: Synthetic oligonucleotide
accuccaggucuacaggcc

SEQ ID NO: 2645653 - RNA, 19 nt, Artificial Sequence
  Description of Artificial Sequence: Synthetic oligonucleotide
auaaauaguugcacugcaa

SEQ ID NO: 2645654 - RNA, 19 nt, Artificial Sequence
  Description of Artificial Sequence: Synthetic oligonucleotide
auauagguuucaggaagga

SEQ ID NO: 2645655 - RNA, 19 nt, Artificial Sequence
  Description of Artificial Sequence: Synthetic oligonucleotide
gggguuagaaggucuggag

SEQ ID NO: 2645656 - RNA, 19 nt, Artificial Sequence
  Description of Artificial Sequence: Synthetic oligonucleotide
caaccagccuuuagcggcc

SEQ ID NO: 2645657 - RNA, 19 nt, Artificial Sequence
  Description of Artificial Sequence: Synthetic oligonucleotide
uagucuggucauaccuucu

SEQ ID NO: 2645658 - RNA, 19 nt, Artificial Sequence
  Description of Artificial Sequence: Synthetic oligonucleotide
cuggagucaauaaauaguu

SEQ ID NO: 2645659 - RNA, 19 nt, Artificial Sequence
  Description of Artificial Sequence: Synthetic oligonucleotide
ggcugugaaccugagagug

SEQ ID NO: 2645660 - RNA, 19 nt, Artificial Sequence
  Description of Artificial Sequence: Synthetic oligonucleotide
ggguccuaaggcaagagac

SEQ ID NO: 2645661 - RNA, 19 nt, Artificial Sequence
  Description of Artificial Sequence: Synthetic oligonucleotide
aagacgaguuuagaagcua

SEQ ID NO: 2645662 - RNA, 19 nt, Artificial Sequence
  Description of Artificial Sequence: Synthetic oligonucleotide
gucuagucuggucauaccu

SEQ ID NO: 2645663 - RNA, 19 nt, Artificial Sequence
  Description of Artificial Sequence: Synthetic oligonucleotide
ugcuugguacaaccagccu

SEQ ID NO: 2645664 - RNA, 19 nt, Artificial Sequence
  Description of Artificial Sequence: Synthetic oligonucleotide
aggaccgcgcgucuagucu

SEQ ID NO: 2645665 - RNA, 19 nt, Artificial Sequence
  Description of Artificial Sequence: Synthetic oligonucleotide
ugcaugggacaaccuccag

SEQ ID NO: 2645666 - RNA, 19 nt, Artificial Sequence
  Description of Artificial Sequence: Synthetic oligonucleotide
gggugagaaagucauggca

SEQ ID NO: 2645667 - RNA, 19 nt, Artificial Sequence
  Description of Artificial Sequence: Synthetic oligonucleotide
cccgcuuccucuaaagagc

SEQ ID NO: 2645668 - RNA, 19 nt, Artificial Sequence
  Description of Artificial Sequence: Synthetic oligonucleotide
aacucaggcugggcucccc

SEQ ID NO: 2645669 - RNA, 19 nt, Artificial Sequence
  Description of Artificial Sequence: Synthetic oligonucleotide
ggugagaaagucauggcaa

SEQ ID NO: 2645670 - RNA, 19 nt, Artificial Sequence
  Description of Artificial Sequence: Synthetic oligonucleotide
uccccgcuuccucuaaaga

SEQ ID NO: 2645671 - RNA, 19 nt, Artificial Sequence
  Description of Artificial Sequence: Synthetic oligonucleotide
accuuaacucaggcugggc

SEQ ID NO: 2645672 - RNA, 19 nt, Artificial Sequence
  Description of Artificial Sequence: Synthetic oligonucleotide
aggcucccggguuuugggg

SEQ ID NO: 2645673 - RNA, 19 nt, Artificial Sequence
  Description of Artificial Sequence: Synthetic oligonucleotide
uaguugcuauaggcuauag

SEQ ID NO: 2645674 - RNA, 19 nt, Artificial Sequence
  Description of Artificial Sequence: Synthetic oligonucleotide
auggcaagauauauaggau

SEQ ID NO: 2645675 - RNA, 19 nt, Artificial Sequence
  Description of Artificial Sequence: Synthetic oligonucleotide
cuauaggcuauaggaccgc

SEQ ID NO: 2645676 - RNA, 19 nt, Artificial Sequence
  Description of Artificial Sequence: Synthetic oligonucleotide
agaagcuauaaagguuagu

SEQ ID NO: 2645677 - RNA, 19 nt, Artificial Sequence
  Description of Artificial Sequence: Synthetic oligonucleotide
uuaguugcuauaggcuaua

SEQ ID NO: 2645678 - RNA, 19 nt, Artificial Sequence
  Description of Artificial Sequence: Synthetic oligonucleotide
guugcacugcaauggggca

SEQ ID NO: 2645679 - RNA, 19 nt, Artificial Sequence
  Description of Artificial Sequence: Synthetic oligonucleotide
augggacaaccuccagguc

SEQ ID NO: 2645680 - RNA, 19 nt, Artificial Sequence
  Description of Artificial Sequence: Synthetic oligonucleotide
uugagcuagguagcaggcu

SEQ ID NO: 2645681 - RNA, 19 nt, Artificial Sequence
  Description of Artificial Sequence: Synthetic oligonucleotide
gcaaaucauuaauaaguaa

SEQ ID NO: 2645682 - RNA, 19 nt, Artificial Sequence
  Description of Artificial Sequence: Synthetic oligonucleotide
guggaggucggggcuaagg

SEQ ID NO: 2645683 - RNA, 19 nt, Artificial Sequence
  Description of Artificial Sequence: Synthetic oligonucleotide
cuuucacucaucucccucu

SEQ ID NO: 2645684 - RNA, 19 nt, Artificial Sequence
  Description of Artificial Sequence: Synthetic oligonucleotide
agagaccccaauaguugag

SEQ ID NO: 2645685 - RNA, 19 nt, Artificial Sequence
  Description of Artificial Sequence: Synthetic oligonucleotide
gguccuaaggcaagagacc

SEQ ID NO: 2645686 - RNA, 19 nt, Artificial Sequence
  Description of Artificial Sequence: Synthetic oligonucleotide
uagaaggucuggagugcau

SEQ ID NO: 2645687 - RNA, 19 nt, Artificial Sequence
  Description of Artificial Sequence: Synthetic oligonucleotide
cuccccgcuuccucuaaag

SEQ ID NO: 2645688 - RNA, 19 nt, Artificial Sequence
  Description of Artificial Sequence: Synthetic oligonucleotide
ucauaccuucugcuuggua

SEQ ID NO: 2645689 - RNA, 19 nt, Artificial Sequence
  Description of Artificial Sequence: Synthetic oligonucleotide
ccacuuucacucaucuccc

SEQ ID NO: 2645690 - RNA, 19 nt, Artificial Sequence
  Description of Artificial Sequence: Synthetic oligonucleotide
ugucucucguugagacaca

SEQ ID NO: 2645691 - RNA, 19 nt, Artificial Sequence
  Description of Artificial Sequence: Synthetic oligonucleotide
cugugaaccugagagugca

SEQ ID NO: 2645692 - RNA, 19 nt, Artificial Sequence
  Description of Artificial Sequence: Synthetic oligonucleotide
cugagagugcaugcagcag

SEQ ID NO: 2645693 - RNA, 19 nt, Artificial Sequence
  Description of Artificial Sequence: Synthetic oligonucleotide
ugggguccuaaggcaagag

SEQ ID NO: 2645694 - RNA, 19 nt, Artificial Sequence
  Description of Artificial Sequence: Synthetic oligonucleotide
ccccgcuuccucuaaagag

SEQ ID NO: 2645695 - RNA, 19 nt, Artificial Sequence
  Description of Artificial Sequence: Synthetic oligonucleotide
ggaaucuuucuuccacuuc

SEQ ID NO: 2645696 - RNA, 19 nt, Artificial Sequence
  Description of Artificial Sequence: Synthetic oligonucleotide
agccucuuugcucuucauu

SEQ ID NO: 2645697 - RNA, 19 nt, Artificial Sequence
  Description of Artificial Sequence: Synthetic oligonucleotide
cuugguacaaccagccuuu

SEQ ID NO: 2645698 - RNA, 19 nt, Artificial Sequence
  Description of Artificial Sequence: Synthetic oligonucleotide
caccuuaacucaggcuggg

SEQ ID NO: 2645699 - RNA, 19 nt, Artificial Sequence
  Description of Artificial Sequence: Synthetic oligonucleotide
ggccaccuuaggcagaaac

SEQ ID NO: 2645700 - RNA, 19 nt, Artificial Sequence
  Description of Artificial Sequence: Synthetic oligonucleotide
gccuuuagcggccuggcca

SEQ ID NO: 2645701 - RNA, 19 nt, Artificial Sequence
  Description of Artificial Sequence: Synthetic oligonucleotide
uuuagcggccuggccaccu

SEQ ID NO: 2645702 - RNA, 19 nt, Artificial Sequence
  Description of Artificial Sequence: Synthetic oligonucleotide
uaagggguggcagcugguc

SEQ ID NO: 2645703 - RNA, 19 nt, Artificial Sequence
  Description of Artificial Sequence: Synthetic oligonucleotide
agacgaguuuagaagcuau

SEQ ID NO: 2645704 - RNA, 19 nt, Artificial Sequence
  Description of Artificial Sequence: Synthetic oligonucleotide
cuauaaagguuaguugcua

SEQ ID NO: 2645705 - RNA, 19 nt, Artificial Sequence
  Description of Artificial Sequence: Synthetic oligonucleotide
uggggcugugaaccugaga

SEQ ID NO: 2645706 - RNA, 19 nt, Artificial Sequence
  Description of Artificial Sequence: Synthetic oligonucleotide
ugugaaccugagagugcau

SEQ ID NO: 2645707 - RNA, 19 nt, Artificial Sequence
  Description of Artificial Sequence: Synthetic oligonucleotide
gaccccaauaguugagcua

SEQ ID NO: 2645708 - RNA, 19 nt, Artificial Sequence
  Description of Artificial Sequence: Synthetic oligonucleotide
gcaagauauauaggauagc

SEQ ID NO: 2645709 - RNA, 19 nt, Artificial Sequence
  Description of Artificial Sequence: Synthetic oligonucleotide
cucaucucccucuuucaua

SEQ ID NO: 2645710 - RNA, 19 nt, Artificial Sequence
  Description of Artificial Sequence: Synthetic oligonucleotide
aggcuauaggaccgcgcgu

SEQ ID NO: 2645711 - RNA, 19 nt, Artificial Sequence
  Description of Artificial Sequence: Synthetic oligonucleotide
caauggggcaggaggguga

SEQ ID NO: 2645712 - RNA, 19 nt, Artificial Sequence
  Description of Artificial Sequence: Synthetic oligonucleotide
ccugucucaccuuaacuca

SEQ ID NO: 2645713 - RNA, 19 nt, Artificial Sequence
  Description of Artificial Sequence: Synthetic oligonucleotide
ccuggagucaauaaauagu

SEQ ID NO: 2645714 - RNA, 19 nt, Artificial Sequence
  Description of Artificial Sequence: Synthetic oligonucleotide
ggggcuaagggguggcagc

SEQ ID NO: 2645715 - RNA, 19 nt, Artificial Sequence
  Description of Artificial Sequence: Synthetic oligonucleotide
acacaaguuguuggcaauu

SEQ ID NO: 2645716 - RNA, 19 nt, Artificial Sequence
  Description of Artificial Sequence: Synthetic oligonucleotide
gaggucggggcuaaggggu

SEQ ID NO: 2645717 - RNA, 19 nt, Artificial Sequence
  Description of Artificial Sequence: Synthetic oligonucleotide
ucccggguuuuggggaggg

SEQ ID NO: 2645718 - RNA, 19 nt, Artificial Sequence
  Description of Artificial Sequence: Synthetic oligonucleotide
ggucuacaggcccacuuuc

SEQ ID NO: 2645719 - RNA, 19 nt, Artificial Sequence
  Description of Artificial Sequence: Synthetic oligonucleotide
uaggaccgcgcgucuaguc

SEQ ID NO: 2645720 - RNA, 19 nt, Artificial Sequence
  Description of Artificial Sequence: Synthetic oligonucleotide
gaccuggagucaauaaaua

SEQ ID NO: 2645721 - RNA, 19 nt, Artificial Sequence
  Description of Artificial Sequence: Synthetic oligonucleotide
aaccacuugcugggguccu

SEQ ID NO: 2645722 - RNA, 19 nt, Artificial Sequence
  Description of Artificial Sequence: Synthetic oligonucleotide
acaggcccacuuucacuca

SEQ ID NO: 2645723 - RNA, 19 nt, Artificial Sequence
  Description of Artificial Sequence: Synthetic oligonucleotide
ggccuggccaccuuaggca

SEQ ID NO: 2645724 - RNA, 19 nt, Artificial Sequence
  Description of Artificial Sequence: Synthetic oligonucleotide
ccuuuagcggccuggccac

SEQ ID NO: 2645725 - RNA, 19 nt, Artificial Sequence
  Description of Artificial Sequence: Synthetic oligonucleotide
uccaggucuacaggcccac

SEQ ID NO: 2645726 - RNA, 19 nt, Artificial Sequence
  Description of Artificial Sequence: Synthetic oligonucleotide
gacgaguuuagaagcuaua

SEQ ID NO: 2645727 - RNA, 19 nt, Artificial Sequence
  Description of Artificial Sequence: Synthetic oligonucleotide
ggcuauaggaccgcgcguc

SEQ ID NO: 2645728 - RNA, 19 nt, Artificial Sequence
  Description of Artificial Sequence: Synthetic oligonucleotide
aggaaggaccuggagucaa

SEQ ID NO: 2645729 - RNA, 19 nt, Artificial Sequence
  Description of Artificial Sequence: Synthetic oligonucleotide
gaccgcgcgucuagucugg

SEQ ID NO: 2645730 - RNA, 19 nt, Artificial Sequence
  Description of Artificial Sequence: Synthetic oligonucleotide
caccuuaggcagaaacaaa

SEQ ID NO: 2645731 - RNA, 19 nt, Artificial Sequence
  Description of Artificial Sequence: Synthetic oligonucleotide
cucccucuuucauaugcaa

SEQ ID NO: 2645732 - RNA, 19 nt, Artificial Sequence
  Description of Artificial Sequence: Synthetic oligonucleotide
guuaguugcuauaggcuau

SEQ ID NO: 2645733 - RNA, 19 nt, Artificial Sequence
  Description of Artificial Sequence: Synthetic oligonucleotide
gaaggaccuggagucaaua

SEQ ID NO: 2645734 - RNA, 19 nt, Artificial Sequence
  Description of Artificial Sequence: Synthetic oligonucleotide
ggaccgcgcgucuagucug

SEQ ID NO: 2645735 - RNA, 19 nt, Artificial Sequence
  Description of Artificial Sequence: Synthetic oligonucleotide
uggggaggcucccggguuu

SEQ ID NO: 2645736 - RNA, 19 nt, Artificial Sequence
  Description of Artificial Sequence: Synthetic oligonucleotide
gucuacaggcccacuuuca

SEQ ID NO: 2645737 - RNA, 19 nt, Artificial Sequence
  Description of Artificial Sequence: Synthetic oligonucleotide
ggguuagaaggucuggagu

SEQ ID NO: 2645738 - RNA, 19 nt, Artificial Sequence
  Description of Artificial Sequence: Synthetic oligonucleotide
cagccuuuagcggccuggc

SEQ ID NO: 2645739 - RNA, 19 nt, Artificial Sequence
  Description of Artificial Sequence: Synthetic oligonucleotide
ggucuggagugcaugggac

SEQ ID NO: 2645740 - RNA, 19 nt, Artificial Sequence
  Description of Artificial Sequence: Synthetic oligonucleotide
gccucuuugcucuucauuu

SEQ ID NO: 2645741 - RNA, 19 nt, Artificial Sequence
  Description of Artificial Sequence: Synthetic oligonucleotide
uaacucaggcugggcuccc

SEQ ID NO: 2645742 - RNA, 19 nt, Artificial Sequence
  Description of Artificial Sequence: Synthetic oligonucleotide
cuccaggucuacaggccca

SEQ ID NO: 2645743 - RNA, 19 nt, Artificial Sequence
  Description of Artificial Sequence: Synthetic oligonucleotide
gcuauaaagguuaguugcu

SEQ ID NO: 2645744 - RNA, 19 nt, Artificial Sequence
  Description of Artificial Sequence: Synthetic oligonucleotide
gugcaugggacaaccucca

SEQ ID NO: 2645745 - RNA, 19 nt, Artificial Sequence
  Description of Artificial Sequence: Synthetic oligonucleotide
agggugagguggaggucgg

SEQ ID NO: 2645746 - RNA, 19 nt, Artificial Sequence
  Description of Artificial Sequence: Synthetic oligonucleotide
cuacaggcccacuuucacu

SEQ ID NO: 2645747 - RNA, 19 nt, Artificial Sequence
  Description of Artificial Sequence: Synthetic oligonucleotide
ggaggcucccggguuuugg

SEQ ID NO: 2645748 - RNA, 19 nt, Artificial Sequence
  Description of Artificial Sequence: Synthetic oligonucleotide
gccaccuuaggcagaaaca

SEQ ID NO: 2645749 - RNA, 19 nt, Artificial Sequence
  Description of Artificial Sequence: Synthetic oligonucleotide
gggguccuaaggcaagaga

SEQ ID NO: 2645750 - RNA, 19 nt, Artificial Sequence
  Description of Artificial Sequence: Synthetic oligonucleotide
gcugugaaccugagagugc

SEQ ID NO: 2645751 - RNA, 19 nt, Artificial Sequence
  Description of Artificial Sequence: Synthetic oligonucleotide
gcaauggggcaggagggug

SEQ ID NO: 2645752 - RNA, 19 nt, Artificial Sequence
  Description of Artificial Sequence: Synthetic oligonucleotide
cacugcaauggggcaggag

SEQ ID NO: 2645753 - RNA, 19 nt, Artificial Sequence
  Description of Artificial Sequence: Synthetic oligonucleotide
uuagcggccuggccaccuu

SEQ ID NO: 2645754 - RNA, 19 nt, Artificial Sequence
  Description of Artificial Sequence: Synthetic oligonucleotide
auaggaccgcgcgucuagu

SEQ ID NO: 2645755 - RNA, 19 nt, Artificial Sequence
  Description of Artificial Sequence: Synthetic oligonucleotide
ccagccuuuagcggccugg

SEQ ID NO: 2645756 - RNA, 19 nt, Artificial Sequence
  Description of Artificial Sequence: Synthetic oligonucleotide
aggcccacuuucacucauc

SEQ ID NO: 2645757 - RNA, 19 nt, Artificial Sequence
  Description of Artificial Sequence: Synthetic oligonucleotide
aggcagaaacaaagagggu

SEQ ID NO: 2645758 - RNA, 19 nt, Artificial Sequence
  Description of Artificial Sequence: Synthetic oligonucleotide
cuggagugcaugggacaac

SEQ ID NO: 2645759 - RNA, 19 nt, Artificial Sequence
  Description of Artificial Sequence: Synthetic oligonucleotide
gcucccggguuuuggggag

SEQ ID NO: 2645760 - RNA, 19 nt, Artificial Sequence
  Description of Artificial Sequence: Synthetic oligonucleotide
ccucuuucauaugcaaauc

SEQ ID NO: 2645761 - RNA, 19 nt, Artificial Sequence
  Description of Artificial Sequence: Synthetic oligonucleotide
gcgucuagucuggucauac

SEQ ID NO: 2645762 - RNA, 19 nt, Artificial Sequence
  Description of Artificial Sequence: Synthetic oligonucleotide
aaccagccuuuagcggccu

SEQ ID NO: 2645763 - RNA, 19 nt, Artificial Sequence
  Description of Artificial Sequence: Synthetic oligonucleotide
ggaccuggagucaauaaau

SEQ ID NO: 2645764 - RNA, 19 nt, Artificial Sequence
  Description of Artificial Sequence: Synthetic oligonucleotide
gcaggagggugagaaaguc

SEQ ID NO: 2645765 - RNA, 19 nt, Artificial Sequence
  Description of Artificial Sequence: Synthetic oligonucleotide
gcuagguagcaggcugggg

SEQ ID NO: 2645766 - RNA, 19 nt, Artificial Sequence
  Description of Artificial Sequence: Synthetic oligonucleotide
agcggccuggccaccuuag

SEQ ID NO: 2645767 - RNA, 19 nt, Artificial Sequence
  Description of Artificial Sequence: Synthetic oligonucleotide
ccaccuuaggcagaaacaa

SEQ ID NO: 2645768 - RNA, 19 nt, Artificial Sequence
  Description of Artificial Sequence: Synthetic oligonucleotide
cuuuagcggccuggccacc

SEQ ID NO: 2645769 - RNA, 19 nt, Artificial Sequence
  Description of Artificial Sequence: Synthetic oligonucleotide
uagcggccuggccaccuua

SEQ ID NO: 2645770 - RNA, 19 nt, Artificial Sequence
  Description of Artificial Sequence: Synthetic oligonucleotide
accagccuuuagcggccug

SEQ ID NO: 2645771 - RNA, 19 nt, Artificial Sequence
  Description of Artificial Sequence: Synthetic oligonucleotide
gcaagagaccccaauaguu

SEQ ID NO: 2645772 - RNA, 19 nt, Artificial Sequence
  Description of Artificial Sequence: Synthetic oligonucleotide
agguuucaggaaggaccug

SEQ ID NO: 2645773 - RNA, 19 nt, Artificial Sequence
  Description of Artificial Sequence: Synthetic oligonucleotide
ccaauaguugagcuaggua

SEQ ID NO: 2645774 - RNA, 19 nt, Artificial Sequence
  Description of Artificial Sequence: Synthetic oligonucleotide
cgaguuuagaagcuauaaa

SEQ ID NO: 2645775 - RNA, 19 nt, Artificial Sequence
  Description of Artificial Sequence: Synthetic oligonucleotide
cuaaggcaagagaccccaa

SEQ ID NO: 2645776 - RNA, 19 nt, Artificial Sequence
  Description of Artificial Sequence: Synthetic oligonucleotide
ccuuaacucaggcugggcu

SEQ ID NO: 2645777 - RNA, 19 nt, Artificial Sequence
  Description of Artificial Sequence: Synthetic oligonucleotide
uugguacaaccagccuuua

SEQ ID NO: 2645778 - RNA, 19 nt, Artificial Sequence
  Description of Artificial Sequence: Synthetic oligonucleotide
guggcagcugguccugucu

SEQ ID NO: 2645779 - RNA, 19 nt, Artificial Sequence
  Description of Artificial Sequence: Synthetic oligonucleotide
gucggggcuaagggguggc

SEQ ID NO: 2645780 - RNA, 19 nt, Artificial Sequence
  Description of Artificial Sequence: Synthetic oligonucleotide
cucccggguuuuggggagg

SEQ ID NO: 2645781 - RNA, 19 nt, Artificial Sequence
  Description of Artificial Sequence: Synthetic oligonucleotide
cgucuagucuggucauacc

SEQ ID NO: 2645782 - RNA, 19 nt, Artificial Sequence
  Description of Artificial Sequence: Synthetic oligonucleotide
ccccaauaguugagcuagg

SEQ ID NO: 2645783 - RNA, 19 nt, Artificial Sequence
  Description of Artificial Sequence: Synthetic oligonucleotide
ucggggcuaagggguggca

SEQ ID NO: 2645784 - RNA, 19 nt, Artificial Sequence
  Description of Artificial Sequence: Synthetic oligonucleotide
ggucggggcuaaggggugg

SEQ ID NO: 2645785 - RNA, 19 nt, Artificial Sequence
  Description of Artificial Sequence: Synthetic oligonucleotide
aggucggggcuaaggggug

SEQ ID NO: 2645786 - RNA, 19 nt, Artificial Sequence
  Description of Artificial Sequence: Synthetic oligonucleotide
caggaaggaccuggaguca

SEQ ID NO: 2645787 - RNA, 19 nt, Artificial Sequence
  Description of Artificial Sequence: Synthetic oligonucleotide
cgcgcgucuagucugguca

SEQ ID NO: 2645788 - RNA, 19 nt, Artificial Sequence
  Description of Artificial Sequence: Synthetic oligonucleotide
guagcaggcuggggcugug

SEQ ID NO: 2645789 - RNA, 19 nt, Artificial Sequence
  Description of Artificial Sequence: Synthetic oligonucleotide
cugggguccuaaggcaaga

SEQ ID NO: 2645790 - RNA, 19 nt, Artificial Sequence
  Description of Artificial Sequence: Synthetic oligonucleotide
ggcccacuuucacucaucu

SEQ ID NO: 2645791 - RNA, 19 nt, Artificial Sequence
  Description of Artificial Sequence: Synthetic oligonucleotide
gcggccuggccaccuuagg

SEQ ID NO: 2645792 - RNA, 19 nt, Artificial Sequence
  Description of Artificial Sequence: Synthetic oligonucleotide
gggacaaccuccaggucua

SEQ ID NO: 2645793 - RNA, 19 nt, Artificial Sequence
  Description of Artificial Sequence: Synthetic oligonucleotide
cacuuucacucaucucccu

SEQ ID NO: 2645794 - RNA, 19 nt, Artificial Sequence
  Description of Artificial Sequence: Synthetic oligonucleotide
cuauaggaccgcgcgucua

SEQ ID NO: 2645795 - RNA, 19 nt, Artificial Sequence
  Description of Artificial Sequence: Synthetic oligonucleotide
cuaagggguggcagcuggu

SEQ ID NO: 2645796 - RNA, 19 nt, Artificial Sequence
  Description of Artificial Sequence: Synthetic oligonucleotide
caggucuacaggcccacuu

SEQ ID NO: 2645797 - RNA, 19 nt, Artificial Sequence
  Description of Artificial Sequence: Synthetic oligonucleotide
gcccacuuucacucaucuc

SEQ ID NO: 2645798 - RNA, 19 nt, Artificial Sequence
  Description of Artificial Sequence: Synthetic oligonucleotide
gcaugcagcaggccaggcu

SEQ ID NO: 2645799 - RNA, 19 nt, Artificial Sequence
  Description of Artificial Sequence: Synthetic oligonucleotide
ggcuaagggguggcagcug

SEQ ID NO: 2645800 - RNA, 19 nt, Artificial Sequence
  Description of Artificial Sequence: Synthetic oligonucleotide
agguggaggucggggcuaa

SEQ ID NO: 2645801 - RNA, 19 nt, Artificial Sequence
  Description of Artificial Sequence: Synthetic oligonucleotide
gggcugugaaccugagagu

SEQ ID NO: 2645802 - RNA, 19 nt, Artificial Sequence
  Description of Artificial Sequence: Synthetic oligonucleotide
gcuauaggaccgcgcgucu

SEQ ID NO: 2645803 - RNA, 19 nt, Artificial Sequence
  Description of Artificial Sequence: Synthetic oligonucleotide
gucauaccuucugcuuggu

SEQ ID NO: 2645804 - RNA, 19 nt, Artificial Sequence
  Description of Artificial Sequence: Synthetic oligonucleotide
ggccaggcuggggaggcuc

SEQ ID NO: 2645805 - RNA, 19 nt, Artificial Sequence
  Description of Artificial Sequence: Synthetic oligonucleotide
accgcgcgucuagucuggu

SEQ ID NO: 2645806 - RNA, 19 nt, Artificial Sequence
  Description of Artificial Sequence: Synthetic oligonucleotide
caggcccacuuucacucau

SEQ ID NO: 2645807 - RNA, 19 nt, Artificial Sequence
  Description of Artificial Sequence: Synthetic oligonucleotide
cggggcuaagggguggcag

SEQ ID NO: 2645808 - RNA, 19 nt, Artificial Sequence
  Description of Artificial Sequence: Synthetic oligonucleotide
gguggaggucggggcuaag

SEQ ID NO: 2645809 - RNA, 19 nt, Artificial Sequence
  Description of Artificial Sequence: Synthetic oligonucleotide
gggcuaagggguggcagcu

SEQ ID NO: 2645810 - RNA, 19 nt, Artificial Sequence
  Description of Artificial Sequence: Synthetic oligonucleotide
cccaauaguugagcuaggu

SEQ ID NO: 2645811 - RNA, 19 nt, Artificial Sequence
  Description of Artificial Sequence: Synthetic oligonucleotide
ggacaaccuccaggucuac

SEQ ID NO: 2645812 - RNA, 19 nt, Artificial Sequence
  Description of Artificial Sequence: Synthetic oligonucleotide
gcucuucauuuuggaaucu

SEQ ID NO: 2645813 - RNA, 19 nt, Artificial Sequence
  Description of Artificial Sequence: Synthetic oligonucleotide
ccaggcuggggaggcuccc

SEQ ID NO: 2645814 - RNA, 19 nt, Artificial Sequence
  Description of Artificial Sequence: Synthetic oligonucleotide
ccuggccaccuuaggcaga

SEQ ID NO: 2645815 - RNA, 19 nt, Artificial Sequence
  Description of Artificial Sequence: Synthetic oligonucleotide
ggagugcaugggacaaccu

SEQ ID NO: 2645816 - RNA, 19 nt, Artificial Sequence
  Description of Artificial Sequence: Synthetic oligonucleotide
gcuccccgcuuccucuaaa

SEQ ID NO: 2645817 - RNA, 19 nt, Artificial Sequence
  Description of Artificial Sequence: Synthetic oligonucleotide
ccgcgcgucuagucugguc

SEQ ID NO: 2645818 - RNA, 19 nt, Artificial Sequence
  Description of Artificial Sequence: Synthetic oligonucleotide
cccggguuuuggggagggg

SEQ ID NO: 2645819 - RNA, 19 nt, Artificial Sequence
  Description of Artificial Sequence: Synthetic oligonucleotide
cguugagacacaaguuguu

SEQ ID NO: 2645820 - RNA, 19 nt, Artificial Sequence
  Description of Artificial Sequence: Synthetic oligonucleotide
ggaaggaccuggagucaau

SEQ ID NO: 2645821 - RNA, 19 nt, Artificial Sequence
  Description of Artificial Sequence: Synthetic oligonucleotide
ggcuccccgcuuccucuaa

SEQ ID NO: 2645822 - RNA, 19 nt, Artificial Sequence
  Description of Artificial Sequence: Synthetic oligonucleotide
gcgcgucuagucuggucau

SEQ ID NO: 2645823 - RNA, 19 nt, Artificial Sequence
  Description of Artificial Sequence: Synthetic oligonucleotide
gggcuccccgcuuccucua

SEQ ID NO: 2645824 - RNA, 19 nt, Artificial Sequence
  Description of Artificial Sequence: Synthetic oligonucleotide
ccaggucuacaggcccacu

SEQ ID NO: 2645825 - RNA, 19 nt, Artificial Sequence
  Description of Artificial Sequence: Synthetic oligonucleotide
cgcgucuagucuggucaua

SEQ ID NO: 2645826 - RNA, 19 nt, Artificial Sequence
  Description of Artificial Sequence: Synthetic oligonucleotide
aauaauauguaacuaaagc

SEQ ID NO: 2645827 - RNA, 19 nt, Artificial Sequence
  Description of Artificial Sequence: Synthetic oligonucleotide
  modified_base (17)..(17): a, c, u, g, unknown or other
aauaacucauaauuaanac

SEQ ID NO: 2645828 - RNA, 19 nt, Artificial Sequence
  Description of Artificial Sequence: Synthetic oligonucleotide
  modified_base (16)..(16): a, c, u, g, unknown or other
auaacucauaauuaanacc

SEQ ID NO: 2645829 - RNA, 19 nt, Artificial Sequence
  Description of Artificial Sequence: Synthetic oligonucleotide
  modified_base (15)..(15): a, c, u, g, unknown or other
uaacucauaauuaanaccc

SEQ ID NO: 2645830 - RNA, 19 nt, Artificial Sequence
  Description of Artificial Sequence: Synthetic oligonucleotide
aaagcucuaauguuaaaac

SEQ ID NO: 2645831 - RNA, 19 nt, Artificial Sequence
  Description of Artificial Sequence: Synthetic oligonucleotide
gaugaugucguccucaucg

SEQ ID NO: 2645832 - RNA, 19 nt, Artificial Sequence
  Description of Artificial Sequence: Synthetic oligonucleotide
  modified_base (9)..(9): a, c, u, g, unknown or other
auaauuaanaccccuuugg

SEQ ID NO: 2645833 - RNA, 19 nt, Artificial Sequence
  Description of Artificial Sequence: Synthetic oligonucleotide
uugacaaacacuauugucc

SEQ ID NO: 2645834 - RNA, 19 nt, Artificial Sequence
  Description of Artificial Sequence: Synthetic oligonucleotide
aaagaagagagagagagag

SEQ ID NO: 2645835 - RNA, 19 nt, Artificial Sequence
  Description of Artificial Sequence: Synthetic oligonucleotide
auaauauguaacuaaagcu

SEQ ID NO: 2645836 - RNA, 19 nt, Artificial Sequence
  Description of Artificial Sequence: Synthetic oligonucleotide
aacacuauuguccuuaagu

SEQ ID NO: 2645837 - RNA, 19 nt, Artificial Sequence
  Description of Artificial Sequence: Synthetic oligonucleotide
  modified_base (6)..(6): a, c, u, g, unknown or other
auuaanaccccuuugggug

SEQ ID NO: 2645838 - RNA, 19 nt, Artificial Sequence
  Description of Artificial Sequence: Synthetic oligonucleotide
  modified_base (7)..(7): a, c, u, g, unknown or other
aauuaanaccccuuugggu

SEQ ID NO: 2645839 - RNA, 19 nt, Artificial Sequence
  Description of Artificial Sequence: Synthetic oligonucleotide
uguaacuaaagcuaacuug

SEQ ID NO: 2645840 - RNA, 19 nt, Artificial Sequence
  Description of Artificial Sequence: Synthetic oligonucleotide
uguacaaaagucaagcccu

SEQ ID NO: 2645841 - RNA, 19 nt, Artificial Sequence
  Description of Artificial Sequence: Synthetic oligonucleotide
  modified_base (8)..(8): a, c, u, g, unknown or other
uaauuaanaccccuuuggg

SEQ ID NO: 2645842 - RNA, 19 nt, Artificial Sequence
  Description of Artificial Sequence: Synthetic oligonucleotide
guacuuacaaaguugaacc

SEQ ID NO: 2645843 - RNA, 19 nt, Artificial Sequence
  Description of Artificial Sequence: Synthetic oligonucleotide
uaauauguaacuaaagcua

SEQ ID NO: 2645844 - RNA, 19 nt, Artificial Sequence
  Description of Artificial Sequence: Synthetic oligonucleotide
aaaagucaagcccugaagu

SEQ ID NO: 2645845 - RNA, 19 nt, Artificial Sequence
  Description of Artificial Sequence: Synthetic oligonucleotide
uuuguacuuacaaaguuga

SEQ ID NO: 2645846 - RNA, 19 nt, Artificial Sequence
  Description of Artificial Sequence: Synthetic oligonucleotide
aaaucuguguuuuacaguu

SEQ ID NO: 2645847 - RNA, 19 nt, Artificial Sequence
  Description of Artificial Sequence: Synthetic oligonucleotide
auaaaucuguguuuuacag

SEQ ID NO: 2645848 - RNA, 19 nt, Artificial Sequence
  Description of Artificial Sequence: Synthetic oligonucleotide
aagcuaacuugacaaacac

SEQ ID NO: 2645849 - RNA, 19 nt, Artificial Sequence
  Description of Artificial Sequence: Synthetic oligonucleotide
auaaauaacucauaauuaa

SEQ ID NO: 2645850 - RNA, 19 nt, Artificial Sequence
  Description of Artificial Sequence: Synthetic oligonucleotide
uuacaguuaaaauuuguac

SEQ ID NO: 2645851 - RNA, 19 nt, Artificial Sequence
  Description of Artificial Sequence: Synthetic oligonucleotide
gaagagaauaaauaacuca

SEQ ID NO: 2645852 - RNA, 19 nt, Artificial Sequence
  Description of Artificial Sequence: Synthetic oligonucleotide
auuguccuuaaguuaagac

SEQ ID NO: 2645853 - RNA, 19 nt, Artificial Sequence
  Description of Artificial Sequence: Synthetic oligonucleotide
uaguccuuuauacaagucc

SEQ ID NO: 2645854 - RNA, 19 nt, Artificial Sequence
  Description of Artificial Sequence: Synthetic oligonucleotide
caaaguugaacccaugccc

SEQ ID NO: 2645855 - RNA, 19 nt, Artificial Sequence
  Description of Artificial Sequence: Synthetic oligonucleotide
  modified_base (14)..(14): a, c, u, g, unknown or other
aacucauaauuaanacccc

SEQ ID NO: 2645856 - RNA, 19 nt, Artificial Sequence
  Description of Artificial Sequence: Synthetic oligonucleotide
ucagacggaagauaaaucu

SEQ ID NO: 2645857 - RNA, 19 nt, Artificial Sequence
  Description of Artificial Sequence: Synthetic oligonucleotide
aaaacugagcuucuaucug

SEQ ID NO: 2645858 - RNA, 19 nt, Artificial Sequence
  Description of Artificial Sequence: Synthetic oligonucleotide
uuuuccucaagagaaaagc

SEQ ID NO: 2645859 - RNA, 19 nt, Artificial Sequence
  Description of Artificial Sequence: Synthetic oligonucleotide
ucuaauguuaaaacucugu

SEQ ID NO: 2645860 - RNA, 19 nt, Artificial Sequence
  Description of Artificial Sequence: Synthetic oligonucleotide
uuguccuuaaguuaagaca

SEQ ID NO: 2645861 - RNA, 19 nt, Artificial Sequence
  Description of Artificial Sequence: Synthetic oligonucleotide
ugcagaagagaauaaauaa

SEQ ID NO: 2645862 - RNA, 19 nt, Artificial Sequence
  Description of Artificial Sequence: Synthetic oligonucleotide
aaauaauauguaacuaaag

SEQ ID NO: 2645863 - RNA, 19 nt, Artificial Sequence
  Description of Artificial Sequence: Synthetic oligonucleotide
aguauauggaaguauuugu

SEQ ID NO: 2645864 - RNA, 19 nt, Artificial Sequence
  Description of Artificial Sequence: Synthetic oligonucleotide
uuuuaguccuuuauacaag

SEQ ID NO: 2645865 - RNA, 19 nt, Artificial Sequence
  Description of Artificial Sequence: Synthetic oligonucleotide
aagagagagagagagaaga

SEQ ID NO: 2645866 - RNA, 19 nt, Artificial Sequence
  Description of Artificial Sequence: Synthetic oligonucleotide
uauauggaaguauuuguac

SEQ ID NO: 2645867 - RNA, 19 nt, Artificial Sequence
  Description of Artificial Sequence: Synthetic oligonucleotide
aaaauaauauguaacuaaa

SEQ ID NO: 2645868 - RNA, 19 nt, Artificial Sequence
  Description of Artificial Sequence: Synthetic oligonucleotide
aagagaauaaauaacucau

SEQ ID NO: 2645869 - RNA, 19 nt, Artificial Sequence
  Description of Artificial Sequence: Synthetic oligonucleotide
agagagaagagagagguag

SEQ ID NO: 2645870 - RNA, 19 nt, Artificial Sequence
  Description of Artificial Sequence: Synthetic oligonucleotide
  modified_base (5)..(5): a, c, u, g, unknown or other
uuaanaccccuuugggugg

SEQ ID NO: 2645871 - RNA, 19 nt, Artificial Sequence
  Description of Artificial Sequence: Synthetic oligonucleotide
  modified_base (10)..(10): a, c, u, g, unknown or other
cauaauuaanaccccuuug

SEQ ID NO: 2645872 - RNA, 19 nt, Artificial Sequence
  Description of Artificial Sequence: Synthetic oligonucleotide
guuaaaauuuguacaaaag

SEQ ID NO: 2645873 - RNA, 19 nt, Artificial Sequence
  Description of Artificial Sequence: Synthetic oligonucleotide
aacuugacaaacacuauug

SEQ ID NO: 2645874 - RNA, 19 nt, Artificial Sequence
  Description of Artificial Sequence: Synthetic oligonucleotide
uuuguacaaaagucaagcc

SEQ ID NO: 2645875 - RNA, 19 nt, Artificial Sequence
  Description of Artificial Sequence: Synthetic oligonucleotide
aagcucuaauguuaaaacu

SEQ ID NO: 2645876 - RNA, 19 nt, Artificial Sequence
  Description of Artificial Sequence: Synthetic oligonucleotide
agagagagagaagagagag

SEQ ID NO: 2645877 - RNA, 19 nt, Artificial Sequence
  Description of Artificial Sequence: Synthetic oligonucleotide
aguuaaaauuuguacaaaa

SEQ ID NO: 2645878 - RNA, 19 nt, Artificial Sequence
  Description of Artificial Sequence: Synthetic oligonucleotide
uaagacaggcgucagcagc

SEQ ID NO: 2645879 - RNA, 19 nt, Artificial Sequence
  Description of Artificial Sequence: Synthetic oligonucleotide
agcucuaauguuaaaacuc

SEQ ID NO: 2645880 - RNA, 19 nt, Artificial Sequence
  Description of Artificial Sequence: Synthetic oligonucleotide
aaguauuuguacuuacaaa

SEQ ID NO: 2645881 - RNA, 19 nt, Artificial Sequence
  Description of Artificial Sequence: Synthetic oligonucleotide
uccuagaauccccaggaag

SEQ ID NO: 2645882 - RNA, 19 nt, Artificial Sequence
  Description of Artificial Sequence: Synthetic oligonucleotide
agagguaguauauggaagu

SEQ ID NO: 2645883 - RNA, 19 nt, Artificial Sequence
  Description of Artificial Sequence: Synthetic oligonucleotide
uguguuuuacaguuaaaau

SEQ ID NO: 2645884 - RNA, 19 nt, Artificial Sequence
  Description of Artificial Sequence: Synthetic oligonucleotide
uuuaguccuuuauacaagu

SEQ ID NO: 2645885 - RNA, 19 nt, Artificial Sequence
  Description of Artificial Sequence: Synthetic oligonucleotide
guaacuaaagcuaacuuga

SEQ ID NO: 2645886 - RNA, 19 nt, Artificial Sequence
  Description of Artificial Sequence: Synthetic oligonucleotide
aacuccaucuuuuguauaa

SEQ ID NO: 2645887 - RNA, 19 nt, Artificial Sequence
  Description of Artificial Sequence: Synthetic oligonucleotide
auauggaaguauuuguacu

SEQ ID NO: 2645888 - RNA, 19 nt, Artificial Sequence
  Description of Artificial Sequence: Synthetic oligonucleotide
uauuuguacuuacaaaguu

SEQ ID NO: 2645889 - RNA, 19 nt, Artificial Sequence
  Description of Artificial Sequence: Synthetic oligonucleotide
agagagagaagagagaggu

SEQ ID NO: 2645890 - RNA, 19 nt, Artificial Sequence
  Description of Artificial Sequence: Synthetic oligonucleotide
uaguauauggaaguauuug

SEQ ID NO: 2645891 - RNA, 19 nt, Artificial Sequence
  Description of Artificial Sequence: Synthetic oligonucleotide
gaaguauuuguacuuacaa

SEQ ID NO: 2645892 - RNA, 19 nt, Artificial Sequence
  Description of Artificial Sequence: Synthetic oligonucleotide
uaauguuaaaacucuguua

SEQ ID NO: 2645893 - RNA, 19 nt, Artificial Sequence
  Description of Artificial Sequence: Synthetic oligonucleotide
agagagagagagaagagag

SEQ ID NO: 2645894 - RNA, 19 nt, Artificial Sequence
  Description of Artificial Sequence: Synthetic oligonucleotide
uugcucuccauuuucagac

SEQ ID NO: 2645895 - RNA, 19 nt, Artificial Sequence
  Description of Artificial Sequence: Synthetic oligonucleotide
uuaaguuaagacaggcguc

SEQ ID NO: 2645896 - RNA, 19 nt, Artificial Sequence
  Description of Artificial Sequence: Synthetic oligonucleotide
aguuaagacaggcgucagc

SEQ ID NO: 2645897 - RNA, 19 nt, Artificial Sequence
  Description of Artificial Sequence: Synthetic oligonucleotide
uucaaugaugaugucgucc

SEQ ID NO: 2645898 - RNA, 19 nt, Artificial Sequence
  Description of Artificial Sequence: Synthetic oligonucleotide
uuuccucaagagaaaagcu

SEQ ID NO: 2645899 - RNA, 19 nt, Artificial Sequence
  Description of Artificial Sequence: Synthetic oligonucleotide
  modified_base (11)..(11): a, c, u, g, unknown or other
ucauaauuaanaccccuuu

SEQ ID NO: 2645900 - RNA, 19 nt, Artificial Sequence
  Description of Artificial Sequence: Synthetic oligonucleotide
ugacaaacacuauuguccu

SEQ ID NO: 2645901 - RNA, 19 nt, Artificial Sequence
  Description of Artificial Sequence: Synthetic oligonucleotide
uaaguuaagacaggcguca

SEQ ID NO: 2645902 - RNA, 19 nt, Artificial Sequence
  Description of Artificial Sequence: Synthetic oligonucleotide
uaaagcuaacuugacaaac

SEQ ID NO: 2645903 - RNA, 19 nt, Artificial Sequence
  Description of Artificial Sequence: Synthetic oligonucleotide
uggguggcgaacuugacac

SEQ ID NO: 2645904 - RNA, 19 nt, Artificial Sequence
  Description of Artificial Sequence: Synthetic oligonucleotide
cuugacaaacacuauuguc

SEQ ID NO: 2645905 - RNA, 19 nt, Artificial Sequence
  Description of Artificial Sequence: Synthetic oligonucleotide
agaagagagagagagagaa

SEQ ID NO: 2645906 - RNA, 19 nt, Artificial Sequence
  Description of Artificial Sequence: Synthetic oligonucleotide
ugagcuucuaucugcguca

SEQ ID NO: 2645907 - RNA, 19 nt, Artificial Sequence
  Description of Artificial Sequence: Synthetic oligonucleotide
auuuguacuuacaaaguug

SEQ ID NO: 2645908 - RNA, 19 nt, Artificial Sequence
  Description of Artificial Sequence: Synthetic oligonucleotide
uacuuacaaaguugaaccc

SEQ ID NO: 2645909 - RNA, 19 nt, Artificial Sequence
  Description of Artificial Sequence: Synthetic oligonucleotide
aaagcuaacuugacaaaca

SEQ ID NO: 2645910 - RNA, 19 nt, Artificial Sequence
  Description of Artificial Sequence: Synthetic oligonucleotide
aaaguugaacccaugcccu

SEQ ID NO: 2645911 - RNA, 19 nt, Artificial Sequence
  Description of Artificial Sequence: Synthetic oligonucleotide
uucuaucugcgucagggac

SEQ ID NO: 2645912 - RNA, 19 nt, Artificial Sequence
  Description of Artificial Sequence: Synthetic oligonucleotide
aaagucaagcccugaaguu

SEQ ID NO: 2645913 - RNA, 19 nt, Artificial Sequence
  Description of Artificial Sequence: Synthetic oligonucleotide
agagagguaguauauggaa

SEQ ID NO: 2645914 - RNA, 19 nt, Artificial Sequence
  Description of Artificial Sequence: Synthetic oligonucleotide
uauggaaguauuuguacuu

SEQ ID NO: 2645915 - RNA, 19 nt, Artificial Sequence
  Description of Artificial Sequence: Synthetic oligonucleotide
caaaagucaagcccugaag

SEQ ID NO: 2645916 - RNA, 19 nt, Artificial Sequence
  Description of Artificial Sequence: Synthetic oligonucleotide
cuuaaguuaagacaggcgu

SEQ ID NO: 2645917 - RNA, 19 nt, Artificial Sequence
  Description of Artificial Sequence: Synthetic oligonucleotide
aacccauucuugccccgcc

SEQ ID NO: 2645918 - RNA, 19 nt, Artificial Sequence
  Description of Artificial Sequence: Synthetic oligonucleotide
augaugucguccucaucgc

SEQ ID NO: 2645919 - RNA, 19 nt, Artificial Sequence
  Description of Artificial Sequence: Synthetic oligonucleotide
agaagagagagguaguaua

SEQ ID NO: 2645920 - RNA, 19 nt, Artificial Sequence
  Description of Artificial Sequence: Synthetic oligonucleotide
acuauuguccuuaaguuaa

SEQ ID NO: 2645921 - RNA, 19 nt, Artificial Sequence
  Description of Artificial Sequence: Synthetic oligonucleotide
cuguggguagcccaggagg

SEQ ID NO: 2645922 - RNA, 19 nt, Artificial Sequence
  Description of Artificial Sequence: Synthetic oligonucleotide
aaguugaacccaugcccuc

SEQ ID NO: 2645923 - RNA, 19 nt, Artificial Sequence
  Description of Artificial Sequence: Synthetic oligonucleotide
uguggguagcccaggaggc

SEQ ID NO: 2645924 - RNA, 19 nt, Artificial Sequence
  Description of Artificial Sequence: Synthetic oligonucleotide
uugucgguggacuggcugg

SEQ ID NO: 2645925 - RNA, 19 nt, Artificial Sequence
  Description of Artificial Sequence: Synthetic oligonucleotide
uuucagacggaagauaaau

SEQ ID NO: 2645926 - RNA, 19 nt, Artificial Sequence
  Description of Artificial Sequence: Synthetic oligonucleotide
ucuaucugcgucagggacu

SEQ ID NO: 2645927 - RNA, 19 nt, Artificial Sequence
  Description of Artificial Sequence: Synthetic oligonucleotide
uccuuaaguuaagacaggc

SEQ ID NO: 2645928 - RNA, 19 nt, Artificial Sequence
  Description of Artificial Sequence: Synthetic oligonucleotide
aaacacuauuguccuuaag

SEQ ID NO: 2645929 - RNA, 19 nt, Artificial Sequence
  Description of Artificial Sequence: Synthetic oligonucleotide
acacuauuguccuuaaguu

SEQ ID NO: 2645930 - RNA, 19 nt, Artificial Sequence
  Description of Artificial Sequence: Synthetic oligonucleotide
gaauggaugcagaagagaa

SEQ ID NO: 2645931 - RNA, 19 nt, Artificial Sequence
  Description of Artificial Sequence: Synthetic oligonucleotide
guuaagacaggcgucagca

SEQ ID NO: 2645932 - RNA, 19 nt, Artificial Sequence
  Description of Artificial Sequence: Synthetic oligonucleotide
cucgccacugucuucaaug

SEQ ID NO: 2645933 - RNA, 19 nt, Artificial Sequence
  Description of Artificial Sequence: Synthetic oligonucleotide
cagaagagaauaaauaacu

SEQ ID NO: 2645934 - RNA, 19 nt, Artificial Sequence
  Description of Artificial Sequence: Synthetic oligonucleotide
acuugacaaacacuauugu

SEQ ID NO: 2645935 - RNA, 19 nt, Artificial Sequence
  Description of Artificial Sequence: Synthetic oligonucleotide
acuuacaaaguugaaccca

SEQ ID NO: 2645936 - RNA, 19 nt, Artificial Sequence
  Description of Artificial Sequence: Synthetic oligonucleotide
gcuucuaucugcgucaggg

SEQ ID NO: 2645937 - RNA, 19 nt, Artificial Sequence
  Description of Artificial Sequence: Synthetic oligonucleotide
uaacuaaagcuaacuugac

SEQ ID NO: 2645938 - RNA, 19 nt, Artificial Sequence
  Description of Artificial Sequence: Synthetic oligonucleotide
aguccuuuauacaagucca

SEQ ID NO: 2645939 - RNA, 19 nt, Artificial Sequence
  Description of Artificial Sequence: Synthetic oligonucleotide
ugaauggaugcagaagaga

SEQ ID NO: 2645940 - RNA, 19 nt, Artificial Sequence
  Description of Artificial Sequence: Synthetic oligonucleotide
uuugggaucugcuguggcu

SEQ ID NO: 2645941 - RNA, 19 nt, Artificial Sequence
  Description of Artificial Sequence: Synthetic oligonucleotide
aucuguguuuuacaguuaa

SEQ ID NO: 2645942 - RNA, 19 nt, Artificial Sequence
  Description of Artificial Sequence: Synthetic oligonucleotide
cugaauggaugcagaagag

SEQ ID NO: 2645943 - RNA, 19 nt, Artificial Sequence
  Description of Artificial Sequence: Synthetic oligonucleotide
auuuucagacggaagauaa

SEQ ID NO: 2645944 - RNA, 19 nt, Artificial Sequence
  Description of Artificial Sequence: Synthetic oligonucleotide
ugcgucagggacuccaggc

SEQ ID NO: 2645945 - RNA, 19 nt, Artificial Sequence
  Description of Artificial Sequence: Synthetic oligonucleotide
cagacggaagauaaaucug

SEQ ID NO: 2645946 - RNA, 19 nt, Artificial Sequence
  Description of Artificial Sequence: Synthetic oligonucleotide
uuaagacaggcgucagcag

SEQ ID NO: 2645947 - RNA, 19 nt, Artificial Sequence
  Description of Artificial Sequence: Synthetic oligonucleotide
acaaaagucaagcccugaa

SEQ ID NO: 2645948 - RNA, 19 nt, Artificial Sequence
  Description of Artificial Sequence: Synthetic oligonucleotide
aaaagaagagagagagaga

SEQ ID NO: 2645949 - RNA, 19 nt, Artificial Sequence
  Description of Artificial Sequence: Synthetic oligonucleotide
auugucgguggacuggcug

SEQ ID NO: 2645950 - RNA, 19 nt, Artificial Sequence
  Description of Artificial Sequence: Synthetic oligonucleotide
caugcccucuuccugaaug

SEQ ID NO: 2645951 - RNA, 19 nt, Artificial Sequence
  Description of Artificial Sequence: Synthetic oligonucleotide
gagaaaagcucuaauguua

SEQ ID NO: 2645952 - RNA, 19 nt, Artificial Sequence
  Description of Artificial Sequence: Synthetic oligonucleotide
uccugaauggaugcagaag

SEQ ID NO: 2645953 - RNA, 19 nt, Artificial Sequence
  Description of Artificial Sequence: Synthetic oligonucleotide
gagagagagaagagagagg

SEQ ID NO: 2645954 - RNA, 19 nt, Artificial Sequence
  Description of Artificial Sequence: Synthetic oligonucleotide
cucuaauguuaaaacucug

SEQ ID NO: 2645955 - RNA, 19 nt, Artificial Sequence
  Description of Artificial Sequence: Synthetic oligonucleotide
gaugucguccucaucgcug

SEQ ID NO: 2645956 - RNA, 19 nt, Artificial Sequence
  Description of Artificial Sequence: Synthetic oligonucleotide
acggaagauaaaucugugu

SEQ ID NO: 2645957 - RNA, 19 nt, Artificial Sequence
  Description of Artificial Sequence: Synthetic oligonucleotide
aacccaugcccucuuccug

SEQ ID NO: 2645958 - RNA, 19 nt, Artificial Sequence
  Description of Artificial Sequence: Synthetic oligonucleotide
uuaguccuuuauacaaguc

SEQ ID NO: 2645959 - RNA, 19 nt, Artificial Sequence
  Description of Artificial Sequence: Synthetic oligonucleotide
uccuguggaggggagaacc

SEQ ID NO: 2645960 - RNA, 19 nt, Artificial Sequence
  Description of Artificial Sequence: Synthetic oligonucleotide
ugcucuccauuuucagacg

SEQ ID NO: 2645961 - RNA, 19 nt, Artificial Sequence
  Description of Artificial Sequence: Synthetic oligonucleotide
agacggaagauaaaucugu

SEQ ID NO: 2645962 - RNA, 19 nt, Artificial Sequence
  Description of Artificial Sequence: Synthetic oligonucleotide
aguggaggcagcauccuag

SEQ ID NO: 2645963 - RNA, 19 nt, Artificial Sequence
  Description of Artificial Sequence: Synthetic oligonucleotide
aagauaaaucuguguuuua

SEQ ID NO: 2645964 - RNA, 19 nt, Artificial Sequence
  Description of Artificial Sequence: Synthetic oligonucleotide
augcccucuuccugaaugg

SEQ ID NO: 2645965 - RNA, 19 nt, Artificial Sequence
  Description of Artificial Sequence: Synthetic oligonucleotide
  modified_base (13)..(13): a, c, u, g, unknown or other
acucauaauuaanaccccu

SEQ ID NO: 2645966 - RNA, 19 nt, Artificial Sequence
  Description of Artificial Sequence: Synthetic oligonucleotide
aagucaagcccugaaguuu

SEQ ID NO: 2645967 - RNA, 19 nt, Artificial Sequence
  Description of Artificial Sequence: Synthetic oligonucleotide
gagagagagagagaagaga

SEQ ID NO: 2645968 - RNA, 19 nt, Artificial Sequence
  Description of Artificial Sequence: Synthetic oligonucleotide
cugaaguggaggcagcauc

SEQ ID NO: 2645969 - RNA, 19 nt, Artificial Sequence
  Description of Artificial Sequence: Synthetic oligonucleotide
cugagcuucuaucugcguc

SEQ ID NO: 2645970 - RNA, 19 nt, Artificial Sequence
  Description of Artificial Sequence: Synthetic oligonucleotide
ggagaacccauucuugccc

SEQ ID NO: 2645971 - RNA, 19 nt, Artificial Sequence
  Description of Artificial Sequence: Synthetic oligonucleotide
ccuuaaguuaagacaggcg

SEQ ID NO: 2645972 - RNA, 19 nt, Artificial Sequence
  Description of Artificial Sequence: Synthetic oligonucleotide
gcuaacuugacaaacacua

SEQ ID NO: 2645973 - RNA, 19 nt, Artificial Sequence
  Description of Artificial Sequence: Synthetic oligonucleotide
caaaacugagcuucuaucu

SEQ ID NO: 2645974 - RNA, 19 nt, Artificial Sequence
  Description of Artificial Sequence: Synthetic oligonucleotide
gaagagagagagagagaag

SEQ ID NO: 2645975 - RNA, 19 nt, Artificial Sequence
  Description of Artificial Sequence: Synthetic oligonucleotide
agaauccccaggaagaaaa

SEQ ID NO: 2645976 - RNA, 19 nt, Artificial Sequence
  Description of Artificial Sequence: Synthetic oligonucleotide
cuauuguccuuaaguuaag

SEQ ID NO: 2645977 - RNA, 19 nt, Artificial Sequence
  Description of Artificial Sequence: Synthetic oligonucleotide
aagacaggcgucagcagcu

SEQ ID NO: 2645978 - RNA, 19 nt, Artificial Sequence
  Description of Artificial Sequence: Synthetic oligonucleotide
aaguuaagacaggcgucag

SEQ ID NO: 2645979 - RNA, 19 nt, Artificial Sequence
  Description of Artificial Sequence: Synthetic oligonucleotide
gacggaagauaaaucugug

SEQ ID NO: 2645980 - RNA, 19 nt, Artificial Sequence
  Description of Artificial Sequence: Synthetic oligonucleotide
agagagagagagagaagag

SEQ ID NO: 2645981 - RNA, 19 nt, Artificial Sequence
  Description of Artificial Sequence: Synthetic oligonucleotide
cuccauuuucagacggaag

SEQ ID NO: 2645982 - RNA, 19 nt, Artificial Sequence
  Description of Artificial Sequence: Synthetic oligonucleotide
gaagauaaaucuguguuuu

SEQ ID NO: 2645983 - RNA, 19 nt, Artificial Sequence
  Description of Artificial Sequence: Synthetic oligonucleotide
agaaaagcucuaauguuaa

SEQ ID NO: 2645984 - RNA, 19 nt, Artificial Sequence
  Description of Artificial Sequence: Synthetic oligonucleotide
ucuguguuuuacaguuaaa

SEQ ID NO: 2645985 - RNA, 19 nt, Artificial Sequence
  Description of Artificial Sequence: Synthetic oligonucleotide
aggaggcuauugucggugg

SEQ ID NO: 2645986 - RNA, 19 nt, Artificial Sequence
  Description of Artificial Sequence: Synthetic oligonucleotide
acuugacacaggcuuccug

SEQ ID NO: 2645987 - RNA, 19 nt, Artificial Sequence
  Description of Artificial Sequence: Synthetic oligonucleotide
gcacauguccuguggaggg

SEQ ID NO: 2645988 - RNA, 19 nt, Artificial Sequence
  Description of Artificial Sequence: Synthetic oligonucleotide
ucuugccccgccucaaaac

SEQ ID NO: 2645989 - RNA, 19 nt, Artificial Sequence
  Description of Artificial Sequence: Synthetic oligonucleotide
cuauugucgguggacuggc

SEQ ID NO: 2645990 - RNA, 19 nt, Artificial Sequence
  Description of Artificial Sequence: Synthetic oligonucleotide
ugaugucguccucaucgcu

SEQ ID NO: 2645991 - RNA, 19 nt, Artificial Sequence
  Description of Artificial Sequence: Synthetic oligonucleotide
gaugcagaagagaauaaau

SEQ ID NO: 2645992 - RNA, 19 nt, Artificial Sequence
  Description of Artificial Sequence: Synthetic oligonucleotide
aaacuccaucuuuuguaua

SEQ ID NO: 2645993 - RNA, 19 nt, Artificial Sequence
  Description of Artificial Sequence: Synthetic oligonucleotide
ccugaauggaugcagaaga

SEQ ID NO: 2645994 - RNA, 19 nt, Artificial Sequence
  Description of Artificial Sequence: Synthetic oligonucleotide
uguggaggggagaacccau

SEQ ID NO: 2645995 - RNA, 19 nt, Artificial Sequence
  Description of Artificial Sequence: Synthetic oligonucleotide
augcagaagagaauaaaua

SEQ ID NO: 2645996 - RNA, 19 nt, Artificial Sequence
  Description of Artificial Sequence: Synthetic oligonucleotide
guauauggaaguauuugua

SEQ ID NO: 2645997 - RNA, 19 nt, Artificial Sequence
  Description of Artificial Sequence: Synthetic oligonucleotide
gcauccuagaauccccagg

SEQ ID NO: 2645998 - RNA, 19 nt, Artificial Sequence
  Description of Artificial Sequence: Synthetic oligonucleotide
gagagagguaguauaugga

SEQ ID NO: 2645999 - RNA, 19 nt, Artificial Sequence
  Description of Artificial Sequence: Synthetic oligonucleotide
aagaagagagagagagaga

SEQ ID NO: 2646000 - RNA, 19 nt, Artificial Sequence
  Description of Artificial Sequence: Synthetic oligonucleotide
agcauccuagaauccccag

SEQ ID NO: 2646001 - RNA, 19 nt, Artificial Sequence
  Description of Artificial Sequence: Synthetic oligonucleotide
cuaaagcuaacuugacaaa

SEQ ID NO: 2646002 - RNA, 19 nt, Artificial Sequence
  Description of Artificial Sequence: Synthetic oligonucleotide
uggaggggagaacccauuc

SEQ ID NO: 2646003 - RNA, 19 nt, Artificial Sequence
  Description of Artificial Sequence: Synthetic oligonucleotide
augucguccucaucgcugu

SEQ ID NO: 2646004 - RNA, 19 nt, Artificial Sequence
  Description of Artificial Sequence: Synthetic oligonucleotide
gcucuccauuuucagacgg

SEQ ID NO: 2646005 - RNA, 19 nt, Artificial Sequence
  Description of Artificial Sequence: Synthetic oligonucleotide
ucguccucaucgcuguccu

SEQ ID NO: 2646006 - RNA, 19 nt, Artificial Sequence
  Description of Artificial Sequence: Synthetic oligonucleotide
ggggagaacccauucuugc

SEQ ID NO: 2646007 - RNA, 19 nt, Artificial Sequence
  Description of Artificial Sequence: Synthetic oligonucleotide
ugccccgccucaaaacuga

SEQ ID NO: 2646008 - RNA, 19 nt, Artificial Sequence
  Description of Artificial Sequence: Synthetic oligonucleotide
  modified_base (4)..(4): a, c, u, g, unknown or other
uaanaccccuuuggguggc

SEQ ID NO: 2646009 - RNA, 19 nt, Artificial Sequence
  Description of Artificial Sequence: Synthetic oligonucleotide
uacaaaagucaagcccuga

SEQ ID NO: 2646010 - RNA, 19 nt, Artificial Sequence
  Description of Artificial Sequence: Synthetic oligonucleotide
cuaauguuaaaacucuguu

SEQ ID NO: 2646011 - RNA, 19 nt, Artificial Sequence
  Description of Artificial Sequence: Synthetic oligonucleotide
uugccccgccucaaaacug

SEQ ID NO: 2646012 - RNA, 19 nt, Artificial Sequence
  Description of Artificial Sequence: Synthetic oligonucleotide
ccuagaauccccaggaaga

SEQ ID NO: 2646013 - RNA, 19 nt, Artificial Sequence
  Description of Artificial Sequence: Synthetic oligonucleotide
uccuuuauacaaguccauu

SEQ ID NO: 2646014 - RNA, 19 nt, Artificial Sequence
  Description of Artificial Sequence: Synthetic oligonucleotide
cacuauuguccuuaaguua

SEQ ID NO: 2646015 - RNA, 19 nt, Artificial Sequence
  Description of Artificial Sequence: Synthetic oligonucleotide
uugacacaggcuuccugaa

SEQ ID NO: 2646016 - RNA, 19 nt, Artificial Sequence
  Description of Artificial Sequence: Synthetic oligonucleotide
uuuggguggcgaacuugac

SEQ ID NO: 2646017 - RNA, 19 nt, Artificial Sequence
  Description of Artificial Sequence: Synthetic oligonucleotide
uguccuguggaggggagaa

SEQ ID NO: 2646018 - RNA, 19 nt, Artificial Sequence
  Description of Artificial Sequence: Synthetic oligonucleotide
gcuauugucgguggacugg

SEQ ID NO: 2646019 - RNA, 19 nt, Artificial Sequence
  Description of Artificial Sequence: Synthetic oligonucleotide
gaggcuauugucgguggac

SEQ ID NO: 2646020 - RNA, 19 nt, Artificial Sequence
  Description of Artificial Sequence: Synthetic oligonucleotide
cuuuauacaaguccauuuu

SEQ ID NO: 2646021 - RNA, 19 nt, Artificial Sequence
  Description of Artificial Sequence: Synthetic oligonucleotide
uucuugccccgccucaaaa

SEQ ID NO: 2646022 - RNA, 19 nt, Artificial Sequence
  Description of Artificial Sequence: Synthetic oligonucleotide
guccuuaaguuaagacagg

SEQ ID NO: 2646023 - RNA, 19 nt, Artificial Sequence
  Description of Artificial Sequence: Synthetic oligonucleotide
acccaugcccucuuccuga

SEQ ID NO: 2646024 - RNA, 19 nt, Artificial Sequence
  Description of Artificial Sequence: Synthetic oligonucleotide
  modified_base (3)..(3): a, c, u, g, unknown or other
aanaccccuuuggguggcg

SEQ ID NO: 2646025 - RNA, 19 nt, Artificial Sequence
  Description of Artificial Sequence: Synthetic oligonucleotide
cuuacaaaguugaacccau

SEQ ID NO: 2646026 - RNA, 19 nt, Artificial Sequence
  Description of Artificial Sequence: Synthetic oligonucleotide
guauuuguacuuacaaagu

SEQ ID NO: 2646027 - RNA, 19 nt, Artificial Sequence
  Description of Artificial Sequence: Synthetic oligonucleotide
agagaagagagagguagua

SEQ ID NO: 2646028 - RNA, 19 nt, Artificial Sequence
  Description of Artificial Sequence: Synthetic oligonucleotide
agguaguauauggaaguau

SEQ ID NO: 2646029 - RNA, 19 nt, Artificial Sequence
  Description of Artificial Sequence: Synthetic oligonucleotide
gggagaacccauucuugcc

SEQ ID NO: 2646030 - RNA, 19 nt, Artificial Sequence
  Description of Artificial Sequence: Synthetic oligonucleotide
uccacuugcuguggguagc

SEQ ID NO: 2646031 - RNA, 19 nt, Artificial Sequence
  Description of Artificial Sequence: Synthetic oligonucleotide
gagagagagagaagagaga

SEQ ID NO: 2646032 - RNA, 19 nt, Artificial Sequence
  Description of Artificial Sequence: Synthetic oligonucleotide
uggcucgccacugucuuca

SEQ ID NO: 2646033 - RNA, 19 nt, Artificial Sequence
  Description of Artificial Sequence: Synthetic oligonucleotide
gguggcgaacuugacacag

SEQ ID NO: 2646034 - RNA, 19 nt, Artificial Sequence
  Description of Artificial Sequence: Synthetic oligonucleotide
aguugaacccaugcccucu

SEQ ID NO: 2646035 - RNA, 19 nt, Artificial Sequence
  Description of Artificial Sequence: Synthetic oligonucleotide
gccacugucuucaaugaug

SEQ ID NO: 2646036 - RNA, 19 nt, Artificial Sequence
  Description of Artificial Sequence: Synthetic oligonucleotide
agcuaacuugacaaacacu

SEQ ID NO: 2646037 - RNA, 19 nt, Artificial Sequence
  Description of Artificial Sequence: Synthetic oligonucleotide
guacaaaagucaagcccug

SEQ ID NO: 2646038 - RNA, 19 nt, Artificial Sequence
  Description of Artificial Sequence: Synthetic oligonucleotide
gaagagagagguaguauau

SEQ ID NO: 2646039 - RNA, 19 nt, Artificial Sequence
  Description of Artificial Sequence: Synthetic oligonucleotide
cugguccucuggcucaagc

SEQ ID NO: 2646040 - RNA, 19 nt, Artificial Sequence
  Description of Artificial Sequence: Synthetic oligonucleotide
ggcuuccugaaguggaggc

SEQ ID NO: 2646041 - RNA, 19 nt, Artificial Sequence
  Description of Artificial Sequence: Synthetic oligonucleotide
ugaugaugucguccucauc

SEQ ID NO: 2646042 - RNA, 19 nt, Artificial Sequence
  Description of Artificial Sequence: Synthetic oligonucleotide
ggcgucagcagcuuugcuc

SEQ ID NO: 2646043 - RNA, 19 nt, Artificial Sequence
  Description of Artificial Sequence: Synthetic oligonucleotide
uccugaaguggaggcagca

SEQ ID NO: 2646044 - RNA, 19 nt, Artificial Sequence
  Description of Artificial Sequence: Synthetic oligonucleotide
auggaaguauuuguacuua

SEQ ID NO: 2646045 - RNA, 19 nt, Artificial Sequence
  Description of Artificial Sequence: Synthetic oligonucleotide
caggaggcuauugucggug

SEQ ID NO: 2646046 - RNA, 19 nt, Artificial Sequence
  Description of Artificial Sequence: Synthetic oligonucleotide
accccuuuggguggcgaac

SEQ ID NO: 2646047 - RNA, 19 nt, Artificial Sequence
  Description of Artificial Sequence: Synthetic oligonucleotide
aggcuuccugaaguggagg

SEQ ID NO: 2646048 - RNA, 19 nt, Artificial Sequence
  Description of Artificial Sequence: Synthetic oligonucleotide
  modified_base (12)..(12): a, c, u, g, unknown or other
cucauaauuaanaccccuu

SEQ ID NO: 2646049 - RNA, 19 nt, Artificial Sequence
  Description of Artificial Sequence: Synthetic oligonucleotide
uauugucgguggacuggcu

SEQ ID NO: 2646050 - RNA, 19 nt, Artificial Sequence
  Description of Artificial Sequence: Synthetic oligonucleotide
acaggcgucagcagcuuug

SEQ ID NO: 2646051 - RNA, 19 nt, Artificial Sequence
  Description of Artificial Sequence: Synthetic oligonucleotide
gaacccauucuugccccgc

SEQ ID NO: 2646052 - RNA, 19 nt, Artificial Sequence
  Description of Artificial Sequence: Synthetic oligonucleotide
ggaaguauuuguacuuaca

SEQ ID NO: 2646053 - RNA, 19 nt, Artificial Sequence
  Description of Artificial Sequence: Synthetic oligonucleotide
cuucuaucugcgucaggga

SEQ ID NO: 2646054 - RNA, 19 nt, Artificial Sequence
  Description of Artificial Sequence: Synthetic oligonucleotide
aggcuauugucgguggacu

SEQ ID NO: 2646055 - RNA, 19 nt, Artificial Sequence
  Description of Artificial Sequence: Synthetic oligonucleotide
agcuucuaucugcgucagg

SEQ ID NO: 2646056 - RNA, 19 nt, Artificial Sequence
  Description of Artificial Sequence: Synthetic oligonucleotide
uggaggcagcauccuagaa

SEQ ID NO: 2646057 - RNA, 19 nt, Artificial Sequence
  Description of Artificial Sequence: Synthetic oligonucleotide
gagcuucuaucugcgucag

SEQ ID NO: 2646058 - RNA, 19 nt, Artificial Sequence
  Description of Artificial Sequence: Synthetic oligonucleotide
cccucuuccugaauggaug

SEQ ID NO: 2646059 - RNA, 19 nt, Artificial Sequence
  Description of Artificial Sequence: Synthetic oligonucleotide
aggggagaacccauucuug

SEQ ID NO: 2646060 - RNA, 19 nt, Artificial Sequence
  Description of Artificial Sequence: Synthetic oligonucleotide
gaacccaugcccucuuccu

SEQ ID NO: 2646061 - RNA, 19 nt, Artificial Sequence
  Description of Artificial Sequence: Synthetic oligonucleotide
aggcagcauccuagaaucc

SEQ ID NO: 2646062 - RNA, 19 nt, Artificial Sequence
  Description of Artificial Sequence: Synthetic oligonucleotide
aaucuguguuuuacaguua

SEQ ID NO: 2646063 - RNA, 19 nt, Artificial Sequence
  Description of Artificial Sequence: Synthetic oligonucleotide
  modified_base (2)..(2): a, c, u, g, unknown or other
anaccccuuuggguggcga

SEQ ID NO: 2646064 - RNA, 19 nt, Artificial Sequence
  Description of Artificial Sequence: Synthetic oligonucleotide
acauguccuguggagggga

SEQ ID NO: 2646065 - RNA, 19 nt, Artificial Sequence
  Description of Artificial Sequence: Synthetic oligonucleotide
gaggggagaacccauucuu

SEQ ID NO: 2646066 - RNA, 19 nt, Artificial Sequence
  Description of Artificial Sequence: Synthetic oligonucleotide
agucaagcccugaaguuuu

SEQ ID NO: 2646067 - RNA, 19 nt, Artificial Sequence
  Description of Artificial Sequence: Synthetic oligonucleotide
uccucaucgcuguccuggu

SEQ ID NO: 2646068 - RNA, 19 nt, Artificial Sequence
  Description of Artificial Sequence: Synthetic oligonucleotide
guggcgaacuugacacagg

SEQ ID NO: 2646069 - RNA, 19 nt, Artificial Sequence
  Description of Artificial Sequence: Synthetic oligonucleotide
ggcuauugucgguggacug

SEQ ID NO: 2646070 - RNA, 19 nt, Artificial Sequence
  Description of Artificial Sequence: Synthetic oligonucleotide
ggaagauaaaucuguguuu

SEQ ID NO: 2646071 - RNA, 19 nt, Artificial Sequence
  Description of Artificial Sequence: Synthetic oligonucleotide
uugcuguggguagcccagg

SEQ ID NO: 2646072 - RNA, 19 nt, Artificial Sequence
  Description of Artificial Sequence: Synthetic oligonucleotide
cauuuucagacggaagaua

SEQ ID NO: 2646073 - RNA, 19 nt, Artificial Sequence
  Description of Artificial Sequence: Synthetic oligonucleotide
caguuaaaauuuguacaaa

SEQ ID NO: 2646074 - RNA, 19 nt, Artificial Sequence
  Description of Artificial Sequence: Synthetic oligonucleotide
cucuccauuuucagacgga

SEQ ID NO: 2646075 - RNA, 19 nt, Artificial Sequence
  Description of Artificial Sequence: Synthetic oligonucleotide
cuagaauccccaggaagaa

SEQ ID NO: 2646076 - RNA, 19 nt, Artificial Sequence
  Description of Artificial Sequence: Synthetic oligonucleotide
gcagcauccuagaaucccc

SEQ ID NO: 2646077 - RNA, 19 nt, Artificial Sequence
  Description of Artificial Sequence: Synthetic oligonucleotide
gcgaacuugacacaggcuu

SEQ ID NO: 2646078 - RNA, 19 nt, Artificial Sequence
  Description of Artificial Sequence: Synthetic oligonucleotide
gguaguauauggaaguauu

SEQ ID NO: 2646079 - RNA, 19 nt, Artificial Sequence
  Description of Artificial Sequence: Synthetic oligonucleotide
guggaggcagcauccuaga

SEQ ID NO: 2646080 - RNA, 19 nt, Artificial Sequence
  Description of Artificial Sequence: Synthetic oligonucleotide
gagaagagagagguaguau

SEQ ID NO: 2646081 - RNA, 19 nt, Artificial Sequence
  Description of Artificial Sequence: Synthetic oligonucleotide
caggcgucagcagcuuugc

SEQ ID NO: 2646082 - RNA, 19 nt, Artificial Sequence
  Description of Artificial Sequence: Synthetic oligonucleotide
ggaugcagaagagaauaaa

SEQ ID NO: 2646083 - RNA, 19 nt, Artificial Sequence
  Description of Artificial Sequence: Synthetic oligonucleotide
gccuuugggaucugcugug

SEQ ID NO: 2646084 - RNA, 19 nt, Artificial Sequence
  Description of Artificial Sequence: Synthetic oligonucleotide
cuugccccgccucaaaacu

SEQ ID NO: 2646085 - RNA, 19 nt, Artificial Sequence
  Description of Artificial Sequence: Synthetic oligonucleotide
gcuguggguagcccaggag

SEQ ID NO: 2646086 - RNA, 19 nt, Artificial Sequence
  Description of Artificial Sequence: Synthetic oligonucleotide
guagcccaggaggcuauug

SEQ ID NO: 2646087 - RNA, 19 nt, Artificial Sequence
  Description of Artificial Sequence: Synthetic oligonucleotide
cagcauccuagaaucccca

SEQ ID NO: 2646088 - RNA, 19 nt, Artificial Sequence
  Description of Artificial Sequence: Synthetic oligonucleotide
cugggcauccggggcagcc

SEQ ID NO: 2646089 - RNA, 19 nt, Artificial Sequence
  Description of Artificial Sequence: Synthetic oligonucleotide
ccuguggaggggagaaccc

SEQ ID NO: 2646090 - RNA, 19 nt, Artificial Sequence
  Description of Artificial Sequence: Synthetic oligonucleotide
guaguauauggaaguauuu

SEQ ID NO: 2646091 - RNA, 19 nt, Artificial Sequence
  Description of Artificial Sequence: Synthetic oligonucleotide
ggaggcagcauccuagaau

SEQ ID NO: 2646092 - RNA, 19 nt, Artificial Sequence
  Description of Artificial Sequence: Synthetic oligonucleotide
gcgucagcagcuuugcucu

SEQ ID NO: 2646093 - RNA, 19 nt, Artificial Sequence
  Description of Artificial Sequence: Synthetic oligonucleotide
cgaacuugacacaggcuuc

SEQ ID NO: 2646094 - RNA, 19 nt, Artificial Sequence
  Description of Artificial Sequence: Synthetic oligonucleotide
ucgcuguccugguccucug

SEQ ID NO: 2646095 - RNA, 19 nt, Artificial Sequence
  Description of Artificial Sequence: Synthetic oligonucleotide
ggcucaagcuggcuuccac

SEQ ID NO: 2646096 - RNA, 19 nt, Artificial Sequence
  Description of Artificial Sequence: Synthetic oligonucleotide
gagagagaagagagaggua

SEQ ID NO: 2646097 - RNA, 19 nt, Artificial Sequence
  Description of Artificial Sequence: Synthetic oligonucleotide
cgccucaaaacugagcuuc

SEQ ID NO: 2646098 - RNA, 19 nt, Artificial Sequence
  Description of Artificial Sequence: Synthetic oligonucleotide
cuguggaggggagaaccca

SEQ ID NO: 2646099 - RNA, 19 nt, Artificial Sequence
  Description of Artificial Sequence: Synthetic oligonucleotide
cucaagcuggcuuccacuu

SEQ ID NO: 2646100 - RNA, 19 nt, Artificial Sequence
  Description of Artificial Sequence: Synthetic oligonucleotide
cccgccucaaaacugagcu

SEQ ID NO: 2646101 - RNA, 19 nt, Artificial Sequence
  Description of Artificial Sequence: Synthetic oligonucleotide
gaaguggaggcagcauccu

SEQ ID NO: 2646102 - RNA, 19 nt, Artificial Sequence
  Description of Artificial Sequence: Synthetic oligonucleotide
aggcgucagcagcuuugcu

SEQ ID NO: 2646103 - RNA, 19 nt, Artificial Sequence
  Description of Artificial Sequence: Synthetic oligonucleotide
gacaaacacuauuguccuu

SEQ ID NO: 2646104 - RNA, 19 nt, Artificial Sequence
  Description of Artificial Sequence: Synthetic oligonucleotide
ggaggggagaacccauucu

SEQ ID NO: 2646105 - RNA, 19 nt, Artificial Sequence
  Description of Artificial Sequence: Synthetic oligonucleotide
gcucugggcauccggggca

SEQ ID NO: 2646106 - RNA, 19 nt, Artificial Sequence
  Description of Artificial Sequence: Synthetic oligonucleotide
ggaggcuauugucggugga

SEQ ID NO: 2646107 - RNA, 19 nt, Artificial Sequence
  Description of Artificial Sequence: Synthetic oligonucleotide
uggcucaagcuggcuucca

SEQ ID NO: 2646108 - RNA, 19 nt, Artificial Sequence
  Description of Artificial Sequence: Synthetic oligonucleotide
cggaagauaaaucuguguu

SEQ ID NO: 2646109 - RNA, 19 nt, Artificial Sequence
  Description of Artificial Sequence: Synthetic oligonucleotide
cauucuugccccgccucaa

SEQ ID NO: 2646110 - RNA, 19 nt, Artificial Sequence
  Description of Artificial Sequence: Synthetic oligonucleotide
guggcucgccacugucuuc

SEQ ID NO: 2646111 - RNA, 19 nt, Artificial Sequence
  Description of Artificial Sequence: Synthetic oligonucleotide
gcucaagcuggcuuccacu

SEQ ID NO: 2646112 - RNA, 19 nt, Artificial Sequence
  Description of Artificial Sequence: Synthetic oligonucleotide
ccccgccucaaaacugagc

SEQ ID NO: 2646113 - RNA, 19 nt, Artificial Sequence
  Description of Artificial Sequence: Synthetic oligonucleotide
guugaacccaugcccucuu

SEQ ID NO: 2646114 - RNA, 19 nt, Artificial Sequence
  Description of Artificial Sequence: Synthetic oligonucleotide
guccuuuauacaaguccau

SEQ ID NO: 2646115 - RNA, 19 nt, Artificial Sequence
  Description of Artificial Sequence: Synthetic oligonucleotide
ggcagccuuugggaucugc

SEQ ID NO: 2646116 - RNA, 19 nt, Artificial Sequence
  Description of Artificial Sequence: Synthetic oligonucleotide
ccauucuugccccgccuca

SEQ ID NO: 2646117 - RNA, 19 nt, Artificial Sequence
  Description of Artificial Sequence: Synthetic oligonucleotide
ccucaagagaaaagcucua

SEQ ID NO: 2646118 - RNA, 19 nt, Artificial Sequence
  Description of Artificial Sequence: Synthetic oligonucleotide
agacaggcgucagcagcuu

SEQ ID NO: 2646119 - RNA, 19 nt, Artificial Sequence
  Description of Artificial Sequence: Synthetic oligonucleotide
gcauccggggcagccuuug

SEQ ID NO: 2646120 - RNA, 19 nt, Artificial Sequence
  Description of Artificial Sequence: Synthetic oligonucleotide
gacaggcgucagcagcuuu

SEQ ID NO: 2646121 - RNA, 19 nt, Artificial Sequence
  Description of Artificial Sequence: Synthetic oligonucleotide
gcgucagggacuccaggcu

SEQ ID NO: 2646122 - RNA, 19 nt, Artificial Sequence
  Description of Artificial Sequence: Synthetic oligonucleotide
gggaucugcuguggcucgc

SEQ ID NO: 2646123 - RNA, 19 nt, Artificial Sequence
  Description of Artificial Sequence: Synthetic oligonucleotide
ggggcagccuuugggaucu

SEQ ID NO: 2646124 - RNA, 19 nt, Artificial Sequence
  Description of Artificial Sequence: Synthetic oligonucleotide
guggguagcccaggaggcu

SEQ ID NO: 2646125 - RNA, 19 nt, Artificial Sequence
  Description of Artificial Sequence: Synthetic oligonucleotide
gccccgccucaaaacugag

SEQ ID NO: 2646126 - RNA, 19 nt, Artificial Sequence
  Description of Artificial Sequence: Synthetic oligonucleotide
gccucaaaacugagcuucu

SEQ ID NO: 2646127 - RNA, 19 nt, Artificial Sequence
  Description of Artificial Sequence: Synthetic oligonucleotide
ccucaaaacugagcuucua

SEQ ID NO: 2646128 - RNA, 19 nt, Artificial Sequence
  Description of Artificial Sequence: Synthetic oligonucleotide
ccaggaggcuauugucggu

SEQ ID NO: 2646129 - RNA, 19 nt, Artificial Sequence
  Description of Artificial Sequence: Synthetic oligonucleotide
cguccucaucgcuguccug

SEQ ID NO: 2646130 - RNA, 19 nt, Artificial Sequence
  Description of Artificial Sequence: Synthetic oligonucleotide
cgucagcagcuuugcucuc

SEQ ID NO: 2646131 - RNA, 19 nt, Artificial Sequence
  Description of Artificial Sequence: Synthetic oligonucleotide
ccugguccucuggcucaag

SEQ ID NO: 2646132 - RNA, 19 nt, Artificial Sequence
  Description of Artificial Sequence: Synthetic oligonucleotide
ggcucgccacugucuucaa

SEQ ID NO: 2646133 - RNA, 19 nt, Artificial Sequence
  Description of Artificial Sequence: Synthetic oligonucleotide
gggcauccggggcagccuu

SEQ ID NO: 2646134 - RNA, 19 nt, Artificial Sequence
  Description of Artificial Sequence: Synthetic oligonucleotide
cagcagcuuugcucuccau

SEQ ID NO: 2646135 - RNA, 19 nt, Artificial Sequence
  Description of Artificial Sequence: Synthetic oligonucleotide
ccccuuuggguggcgaacu

SEQ ID NO: 2646136 - RNA, 19 nt, Artificial Sequence
  Description of Artificial Sequence: Synthetic oligonucleotide
ccggggcagccuuugggau

SEQ ID NO: 2646137 - RNA, 19 nt, Artificial Sequence
  Description of Artificial Sequence: Synthetic oligonucleotide
ccgccucaaaacugagcuu

SEQ ID NO: 2646138 - RNA, 19 nt, Artificial Sequence
  Description of Artificial Sequence: Synthetic oligonucleotide
gggcagccuuugggaucug

SEQ ID NO: 2646139 - RNA, 19 nt, Artificial Sequence
  Description of Artificial Sequence: Synthetic oligonucleotide
cgccacugucuucaaugau

SEQ ID NO: 2646140 - RNA, 19 nt, Artificial Sequence
  Description of Artificial Sequence: Synthetic oligonucleotide
ggcauccggggcagccuuu

SEQ ID NO: 2646141 - RNA, 19 nt, Artificial Sequence
  Description of Artificial Sequence: Synthetic oligonucleotide
uuuuccauaagaaagagcu

SEQ ID NO: 2646142 - RNA, 19 nt, Artificial Sequence
  Description of Artificial Sequence: Synthetic oligonucleotide
uagagcuagauaaagaugc

SEQ ID NO: 2646143 - RNA, 19 nt, Artificial Sequence
  Description of Artificial Sequence: Synthetic oligonucleotide
uagauaaagaugcugaggc

SEQ ID NO: 2646144 - RNA, 19 nt, Artificial Sequence
  Description of Artificial Sequence: Synthetic oligonucleotide
aguuccaacacucaucagc

SEQ ID NO: 2646145 - RNA, 19 nt, Artificial Sequence
  Description of Artificial Sequence: Synthetic oligonucleotide
aaaagcacucgguugacac

SEQ ID NO: 2646146 - RNA, 19 nt, Artificial Sequence
  Description of Artificial Sequence: Synthetic oligonucleotide
aauuaggacaccaagacug

SEQ ID NO: 2646147 - RNA, 19 nt, Artificial Sequence
  Description of Artificial Sequence: Synthetic oligonucleotide
uugacacaaaguaagagca

SEQ ID NO: 2646148 - RNA, 19 nt, Artificial Sequence
  Description of Artificial Sequence: Synthetic oligonucleotide
acuuugacaaaguagcauc

SEQ ID NO: 2646149 - RNA, 19 nt, Artificial Sequence
  Description of Artificial Sequence: Synthetic oligonucleotide
aggaaugccaauuaggaca

SEQ ID NO: 2646150 - RNA, 19 nt, Artificial Sequence
  Description of Artificial Sequence: Synthetic oligonucleotide
ucgguugacacaaaguaag

SEQ ID NO: 2646151 - RNA, 19 nt, Artificial Sequence
  Description of Artificial Sequence: Synthetic oligonucleotide
gacaauuacacuuugggaa

SEQ ID NO: 2646152 - RNA, 19 nt, Artificial Sequence
  Description of Artificial Sequence: Synthetic oligonucleotide
ucagaguaaaagcacucgg

SEQ ID NO: 2646153 - RNA, 19 nt, Artificial Sequence
  Description of Artificial Sequence: Synthetic oligonucleotide
aaaaggaggcacuagacua

SEQ ID NO: 2646154 - RNA, 19 nt, Artificial Sequence
  Description of Artificial Sequence: Synthetic oligonucleotide
ugucacgugaacacggugg

SEQ ID NO: 2646155 - RNA, 19 nt, Artificial Sequence
  Description of Artificial Sequence: Synthetic oligonucleotide
ucauguggcauuuugaaaa

SEQ ID NO: 2646156 - RNA, 19 nt, Artificial Sequence
  Description of Artificial Sequence: Synthetic oligonucleotide
cuuaaugucacgugaacac

SEQ ID NO: 2646157 - RNA, 19 nt, Artificial Sequence
  Description of Artificial Sequence: Synthetic oligonucleotide
uugauaauacuuuugggaa

SEQ ID NO: 2646158 - RNA, 19 nt, Artificial Sequence
  Description of Artificial Sequence: Synthetic oligonucleotide
guugacacaaaguaagagc

SEQ ID NO: 2646159 - RNA, 19 nt, Artificial Sequence
  Description of Artificial Sequence: Synthetic oligonucleotide
ucuugauaauacuuuuggg

SEQ ID NO: 2646160 - RNA, 19 nt, Artificial Sequence
  Description of Artificial Sequence: Synthetic oligonucleotide
cucuugauaauacuuuugg

SEQ ID NO: 2646161 - RNA, 19 nt, Artificial Sequence
  Description of Artificial Sequence: Synthetic oligonucleotide
aaaguaagagcacccuguc

SEQ ID NO: 2646162 - RNA, 19 nt, Artificial Sequence
  Description of Artificial Sequence: Synthetic oligonucleotide
ucaagcaggccucugaaug

SEQ ID NO: 2646163 - RNA, 19 nt, Artificial Sequence
  Description of Artificial Sequence: Synthetic oligonucleotide
ucacauauuccucacuuug

SEQ ID NO: 2646164 - RNA, 19 nt, Artificial Sequence
  Description of Artificial Sequence: Synthetic oligonucleotide
cuugauaauacuuuuggga

SEQ ID NO: 2646165 - RNA, 19 nt, Artificial Sequence
  Description of Artificial Sequence: Synthetic oligonucleotide
aguaaaagcacucgguuga

SEQ ID NO: 2646166 - RNA, 19 nt, Artificial Sequence
  Description of Artificial Sequence: Synthetic oligonucleotide
cauaagaaagagcugcugc

SEQ ID NO: 2646167 - RNA, 19 nt, Artificial Sequence
  Description of Artificial Sequence: Synthetic oligonucleotide
auauuccucacuuugacaa

SEQ ID NO: 2646168 - RNA, 19 nt, Artificial Sequence
  Description of Artificial Sequence: Synthetic oligonucleotide
aauacuuuugggaaaugug

SEQ ID NO: 2646169 - RNA, 19 nt, Artificial Sequence
  Description of Artificial Sequence: Synthetic oligonucleotide
agauaaagaugcugaggcc

SEQ ID NO: 2646170 - RNA, 19 nt, Artificial Sequence
  Description of Artificial Sequence: Synthetic oligonucleotide
uuacacuuugggaaaagga

SEQ ID NO: 2646171 - RNA, 19 nt, Artificial Sequence
  Description of Artificial Sequence: Synthetic oligonucleotide
acuagagcuagauaaagau

SEQ ID NO: 2646172 - RNA, 19 nt, Artificial Sequence
  Description of Artificial Sequence: Synthetic oligonucleotide
uguucugucccauucgacc

SEQ ID NO: 2646173 - RNA, 19 nt, Artificial Sequence
  Description of Artificial Sequence: Synthetic oligonucleotide
aaauguggcuuuccccagc

SEQ ID NO: 2646174 - RNA, 19 nt, Artificial Sequence
  Description of Artificial Sequence: Synthetic oligonucleotide
gacaaaguagcauccagac

SEQ ID NO: 2646175 - RNA, 19 nt, Artificial Sequence
  Description of Artificial Sequence: Synthetic oligonucleotide
agagcagugagcauucugc

SEQ ID NO: 2646176 - RNA, 19 nt, Artificial Sequence
  Description of Artificial Sequence: Synthetic oligonucleotide
guguauuucagaguaaaag

SEQ ID NO: 2646177 - RNA, 19 nt, Artificial Sequence
  Description of Artificial Sequence: Synthetic oligonucleotide
uguccaaccacguggagug

SEQ ID NO: 2646178 - RNA, 19 nt, Artificial Sequence
  Description of Artificial Sequence: Synthetic oligonucleotide
ugaugugaagaggaggugg

SEQ ID NO: 2646179 - RNA, 19 nt, Artificial Sequence
  Description of Artificial Sequence: Synthetic oligonucleotide
uuuccguuuccucuuaaug

SEQ ID NO: 2646180 - RNA, 19 nt, Artificial Sequence
  Description of Artificial Sequence: Synthetic oligonucleotide
guagcauccagacuucagg

SEQ ID NO: 2646181 - RNA, 19 nt, Artificial Sequence
  Description of Artificial Sequence: Synthetic oligonucleotide
aguaagagcacccugucaa

SEQ ID NO: 2646182 - RNA, 19 nt, Artificial Sequence
  Description of Artificial Sequence: Synthetic oligonucleotide
uuaaugucacgugaacacg

SEQ ID NO: 2646183 - RNA, 19 nt, Artificial Sequence
  Description of Artificial Sequence: Synthetic oligonucleotide
uuuucauguggcauuuuga

SEQ ID NO: 2646184 - RNA, 19 nt, Artificial Sequence
  Description of Artificial Sequence: Synthetic oligonucleotide
uguacaaugcaguuccaac

SEQ ID NO: 2646185 - RNA, 19 nt, Artificial Sequence
  Description of Artificial Sequence: Synthetic oligonucleotide
gaggcacuagacuacuugg

SEQ ID NO: 2646186 - RNA, 19 nt, Artificial Sequence
  Description of Artificial Sequence: Synthetic oligonucleotide
cuuugacaaaguagcaucc

SEQ ID NO: 2646187 - RNA, 19 nt, Artificial Sequence
  Description of Artificial Sequence: Synthetic oligonucleotide
gauaaagaugcugaggcca

SEQ ID NO: 2646188 - RNA, 19 nt, Artificial Sequence
  Description of Artificial Sequence: Synthetic oligonucleotide
uucagaguaaaagcacucg

SEQ ID NO: 2646189 - RNA, 19 nt, Artificial Sequence
  Description of Artificial Sequence: Synthetic oligonucleotide
gaguaaaagcacucgguug

SEQ ID NO: 2646190 - RNA, 19 nt, Artificial Sequence
  Description of Artificial Sequence: Synthetic oligonucleotide
aacacggugguccccagug

SEQ ID NO: 2646191 - RNA, 19 nt, Artificial Sequence
  Description of Artificial Sequence: Synthetic oligonucleotide
uuccguuuccucuuaaugu

SEQ ID NO: 2646192 - RNA, 19 nt, Artificial Sequence
  Description of Artificial Sequence: Synthetic oligonucleotide
cuguacuagagcuagauaa

SEQ ID NO: 2646193 - RNA, 19 nt, Artificial Sequence
  Description of Artificial Sequence: Synthetic oligonucleotide
ugacaaaguagcauccaga

SEQ ID NO: 2646194 - RNA, 19 nt, Artificial Sequence
  Description of Artificial Sequence: Synthetic oligonucleotide
ugccaauuaggacaccaag

SEQ ID NO: 2646195 - RNA, 19 nt, Artificial Sequence
  Description of Artificial Sequence: Synthetic oligonucleotide
gacacaaaguaagagcacc

SEQ ID NO: 2646196 - RNA, 19 nt, Artificial Sequence
  Description of Artificial Sequence: Synthetic oligonucleotide
aaaggaggcacuagacuac

SEQ ID NO: 2646197 - RNA, 19 nt, Artificial Sequence
  Description of Artificial Sequence: Synthetic oligonucleotide
cuagauaaagaugcugagg

SEQ ID NO: 2646198 - RNA, 19 nt, Artificial Sequence
  Description of Artificial Sequence: Synthetic oligonucleotide
uguggcuuuccccagcagc

SEQ ID NO: 2646199 - RNA, 19 nt, Artificial Sequence
  Description of Artificial Sequence: Synthetic oligonucleotide
ugacaggugcucuugauaa

SEQ ID NO: 2646200 - RNA, 19 nt, Artificial Sequence
  Description of Artificial Sequence: Synthetic oligonucleotide
cacuuugggaaaaggaggc

SEQ ID NO: 2646201 - RNA, 19 nt, Artificial Sequence
  Description of Artificial Sequence: Synthetic oligonucleotide
ugcacuguacuagagcuag

SEQ ID NO: 2646202 - RNA, 19 nt, Artificial Sequence
  Description of Artificial Sequence: Synthetic oligonucleotide
uguacuagagcuagauaaa

SEQ ID NO: 2646203 - RNA, 19 nt, Artificial Sequence
  Description of Artificial Sequence: Synthetic oligonucleotide
ucuuaaugucacgugaaca

SEQ ID NO: 2646204 - RNA, 19 nt, Artificial Sequence
  Description of Artificial Sequence: Synthetic oligonucleotide
uacuagagcuagauaaaga

SEQ ID NO: 2646205 - RNA, 19 nt, Artificial Sequence
  Description of Artificial Sequence: Synthetic oligonucleotide
aagggagagguguucuguc

SEQ ID NO: 2646206 - RNA, 19 nt, Artificial Sequence
  Description of Artificial Sequence: Synthetic oligonucleotide
aaugccaauuaggacacca

SEQ ID NO: 2646207 - RNA, 19 nt, Artificial Sequence
  Description of Artificial Sequence: Synthetic oligonucleotide
cuagagcuagauaaagaug

SEQ ID NO: 2646208 - RNA, 19 nt, Artificial Sequence
  Description of Artificial Sequence: Synthetic oligonucleotide
acaaaguaagagcacccug

SEQ ID NO: 2646209 - RNA, 19 nt, Artificial Sequence
  Description of Artificial Sequence: Synthetic oligonucleotide
acaauuacacuuugggaaa

SEQ ID NO: 2646210 - RNA, 19 nt, Artificial Sequence
  Description of Artificial Sequence: Synthetic oligonucleotide
acaccaagacuguacaaug

SEQ ID NO: 2646211 - RNA, 19 nt, Artificial Sequence
  Description of Artificial Sequence: Synthetic oligonucleotide
uuugggaaaaggaggcacu

SEQ ID NO: 2646212 - RNA, 19 nt, Artificial Sequence
  Description of Artificial Sequence: Synthetic oligonucleotide
cacuagacuacuuggcacc

SEQ ID NO: 2646213 - RNA, 19 nt, Artificial Sequence
  Description of Artificial Sequence: Synthetic oligonucleotide
uaauacuuuugggaaaugu

SEQ ID NO: 2646214 - RNA, 19 nt, Artificial Sequence
  Description of Artificial Sequence: Synthetic oligonucleotide
aagacuguacaaugcaguu

SEQ ID NO: 2646215 - RNA, 19 nt, Artificial Sequence
  Description of Artificial Sequence: Synthetic oligonucleotide
gucccauucgaccagagca

SEQ ID NO: 2646216 - RNA, 19 nt, Artificial Sequence
  Description of Artificial Sequence: Synthetic oligonucleotide
cuuuucauguggcauuuug

SEQ ID NO: 2646217 - RNA, 19 nt, Artificial Sequence
  Description of Artificial Sequence: Synthetic oligonucleotide
acagguuuccguuuccucu

SEQ ID NO: 2646218 - RNA, 19 nt, Artificial Sequence
  Description of Artificial Sequence: Synthetic oligonucleotide
ucagcuacugggcucuagc

SEQ ID NO: 2646219 - RNA, 19 nt, Artificial Sequence
  Description of Artificial Sequence: Synthetic oligonucleotide
acucgguugacacaaagua

SEQ ID NO: 2646220 - RNA, 19 nt, Artificial Sequence
  Description of Artificial Sequence: Synthetic oligonucleotide
agggagagguguucugucc

SEQ ID NO: 2646221 - RNA, 19 nt, Artificial Sequence
  Description of Artificial Sequence: Synthetic oligonucleotide
aagagcacccugucaagca

SEQ ID NO: 2646222 - RNA, 19 nt, Artificial Sequence
  Description of Artificial Sequence: Synthetic oligonucleotide
acacaaaguaagagcaccc

SEQ ID NO: 2646223 - RNA, 19 nt, Artificial Sequence
  Description of Artificial Sequence: Synthetic oligonucleotide
ucgaccagagcagugagca

SEQ ID NO: 2646224 - RNA, 19 nt, Artificial Sequence
  Description of Artificial Sequence: Synthetic oligonucleotide
uagcauccagacuucaggc

SEQ ID NO: 2646225 - RNA, 19 nt, Artificial Sequence
  Description of Artificial Sequence: Synthetic oligonucleotide
uuuccucuuaaugucacgu

SEQ ID NO: 2646226 - RNA, 19 nt, Artificial Sequence
  Description of Artificial Sequence: Synthetic oligonucleotide
agaguaaaagcacucgguu

SEQ ID NO: 2646227 - RNA, 19 nt, Artificial Sequence
  Description of Artificial Sequence: Synthetic oligonucleotide
ucccauucgaccagagcag

SEQ ID NO: 2646228 - RNA, 19 nt, Artificial Sequence
  Description of Artificial Sequence: Synthetic oligonucleotide
ucugggugcacuguacuag

SEQ ID NO: 2646229 - RNA, 19 nt, Artificial Sequence
  Description of Artificial Sequence: Synthetic oligonucleotide
uagacuacuuggcaccugu

SEQ ID NO: 2646230 - RNA, 19 nt, Artificial Sequence
  Description of Artificial Sequence: Synthetic oligonucleotide
agaugcugaggccacaggu

SEQ ID NO: 2646231 - RNA, 19 nt, Artificial Sequence
  Description of Artificial Sequence: Synthetic oligonucleotide
aagaugcugaggccacagg

SEQ ID NO: 2646232 - RNA, 19 nt, Artificial Sequence
  Description of Artificial Sequence: Synthetic oligonucleotide
accaagacuguacaaugca

SEQ ID NO: 2646233 - RNA, 19 nt, Artificial Sequence
  Description of Artificial Sequence: Synthetic oligonucleotide
caaugcaguuccaacacuc

SEQ ID NO: 2646234 - RNA, 19 nt, Artificial Sequence
  Description of Artificial Sequence: Synthetic oligonucleotide
agagcucuuuucauguggc

SEQ ID NO: 2646235 - RNA, 19 nt, Artificial Sequence
  Description of Artificial Sequence: Synthetic oligonucleotide
uaagaaagagcugcugcug

SEQ ID NO: 2646236 - RNA, 19 nt, Artificial Sequence
  Description of Artificial Sequence: Synthetic oligonucleotide
aaguaagagcacccuguca

SEQ ID NO: 2646237 - RNA, 19 nt, Artificial Sequence
  Description of Artificial Sequence: Synthetic oligonucleotide
agucacauauuccucacuu

SEQ ID NO: 2646238 - RNA, 19 nt, Artificial Sequence
  Description of Artificial Sequence: Synthetic oligonucleotide
uccguuuccucuuaauguc

SEQ ID NO: 2646239 - RNA, 19 nt, Artificial Sequence
  Description of Artificial Sequence: Synthetic oligonucleotide
agcuagauaaagaugcuga

SEQ ID NO: 2646240 - RNA, 19 nt, Artificial Sequence
  Description of Artificial Sequence: Synthetic oligonucleotide
ucacuuugacaaaguagca

SEQ ID NO: 2646241 - RNA, 19 nt, Artificial Sequence
  Description of Artificial Sequence: Synthetic oligonucleotide
aaaguagcauccagacuuc

SEQ ID NO: 2646242 - RNA, 19 nt, Artificial Sequence
  Description of Artificial Sequence: Synthetic oligonucleotide
auaaagaugcugaggccac

SEQ ID NO: 2646243 - RNA, 19 nt, Artificial Sequence
  Description of Artificial Sequence: Synthetic oligonucleotide
uccauaagaaagagcugcu

SEQ ID NO: 2646244 - RNA, 19 nt, Artificial Sequence
  Description of Artificial Sequence: Synthetic oligonucleotide
caaaguagcauccagacuu

SEQ ID NO: 2646245 - RNA, 19 nt, Artificial Sequence
  Description of Artificial Sequence: Synthetic oligonucleotide
gaaauguggcuuuccccag

SEQ ID NO: 2646246 - RNA, 19 nt, Artificial Sequence
  Description of Artificial Sequence: Synthetic oligonucleotide
cacgugaacacgguggucc

SEQ ID NO: 2646247 - RNA, 19 nt, Artificial Sequence
  Description of Artificial Sequence: Synthetic oligonucleotide
uguguauuucagaguaaaa

SEQ ID NO: 2646248 - RNA, 19 nt, Artificial Sequence
  Description of Artificial Sequence: Synthetic oligonucleotide
ugcaguuccaacacucauc

SEQ ID NO: 2646249 - RNA, 19 nt, Artificial Sequence
  Description of Artificial Sequence: Synthetic oligonucleotide
aaugacaggugcucuugau

SEQ ID NO: 2646250 - RNA, 19 nt, Artificial Sequence
  Description of Artificial Sequence: Synthetic oligonucleotide
uggcaccugucuaagggag

SEQ ID NO: 2646251 - RNA, 19 nt, Artificial Sequence
  Description of Artificial Sequence: Synthetic oligonucleotide
gcuccuguguauuucagag

SEQ ID NO: 2646252 - RNA, 19 nt, Artificial Sequence
  Description of Artificial Sequence: Synthetic oligonucleotide
uucauguggcauuuugaaa

SEQ ID NO: 2646253 - RNA, 19 nt, Artificial Sequence
  Description of Artificial Sequence: Synthetic oligonucleotide
guacuagagcuagauaaag

SEQ ID NO: 2646254 - RNA, 19 nt, Artificial Sequence
  Description of Artificial Sequence: Synthetic oligonucleotide
uuugacaaaguagcaucca

SEQ ID NO: 2646255 - RNA, 19 nt, Artificial Sequence
  Description of Artificial Sequence: Synthetic oligonucleotide
cacucaucagcuacugggc

SEQ ID NO: 2646256 - RNA, 19 nt, Artificial Sequence
  Description of Artificial Sequence: Synthetic oligonucleotide
ccaauuaggacaccaagac

SEQ ID NO: 2646257 - RNA, 19 nt, Artificial Sequence
  Description of Artificial Sequence: Synthetic oligonucleotide
aagcaggccucugaaugac

SEQ ID NO: 2646258 - RNA, 19 nt, Artificial Sequence
  Description of Artificial Sequence: Synthetic oligonucleotide
uucaggcucaaccguauau

SEQ ID NO: 2646259 - RNA, 19 nt, Artificial Sequence
  Description of Artificial Sequence: Synthetic oligonucleotide
agguguucugucccauucg

SEQ ID NO: 2646260 - RNA, 19 nt, Artificial Sequence
  Description of Artificial Sequence: Synthetic oligonucleotide
caccaagacuguacaaugc

SEQ ID NO: 2646261 - RNA, 19 nt, Artificial Sequence
  Description of Artificial Sequence: Synthetic oligonucleotide
acaaaguagcauccagacu

SEQ ID NO: 2646262 - RNA, 19 nt, Artificial Sequence
  Description of Artificial Sequence: Synthetic oligonucleotide
agacuguacaaugcaguuc

SEQ ID NO: 2646263 - RNA, 19 nt, Artificial Sequence
  Description of Artificial Sequence: Synthetic oligonucleotide
auucgaccagagcagugag

SEQ ID NO: 2646264 - RNA, 19 nt, Artificial Sequence
  Description of Artificial Sequence: Synthetic oligonucleotide
gaaaaggaggcacuagacu

SEQ ID NO: 2646265 - RNA, 19 nt, Artificial Sequence
  Description of Artificial Sequence: Synthetic oligonucleotide
aaaacguggcaggagcgga

SEQ ID NO: 2646266 - RNA, 19 nt, Artificial Sequence
  Description of Artificial Sequence: Synthetic oligonucleotide
gcuacugggcucuagcugc

SEQ ID NO: 2646267 - RNA, 19 nt, Artificial Sequence
  Description of Artificial Sequence: Synthetic oligonucleotide
aaccguauauacaacuuuu

SEQ ID NO: 2646268 - RNA, 19 nt, Artificial Sequence
  Description of Artificial Sequence: Synthetic oligonucleotide
uuccucuuaaugucacgug

SEQ ID NO: 2646269 - RNA, 19 nt, Artificial Sequence
  Description of Artificial Sequence: Synthetic oligonucleotide
uaagagcacccugucaagc

SEQ ID NO: 2646270 - RNA, 19 nt, Artificial Sequence
  Description of Artificial Sequence: Synthetic oligonucleotide
ucuaagggagagguguucu

SEQ ID NO: 2646271 - RNA, 19 nt, Artificial Sequence
  Description of Artificial Sequence: Synthetic oligonucleotide
agagcacccugucaagcag

SEQ ID NO: 2646272 - RNA, 19 nt, Artificial Sequence
  Description of Artificial Sequence: Synthetic oligonucleotide
ccagacuucaggcucaacc

SEQ ID NO: 2646273 - RNA, 19 nt, Artificial Sequence
  Description of Artificial Sequence: Synthetic oligonucleotide
acgugaacacggugguccc

SEQ ID NO: 2646274 - RNA, 19 nt, Artificial Sequence
  Description of Artificial Sequence: Synthetic oligonucleotide
aaugcaguuccaacacuca

SEQ ID NO: 2646275 - RNA, 19 nt, Artificial Sequence
  Description of Artificial Sequence: Synthetic oligonucleotide
uccccaguguaccuuugcc

SEQ ID NO: 2646276 - RNA, 19 nt, Artificial Sequence
  Description of Artificial Sequence: Synthetic oligonucleotide
agcuacugggcucuagcug

SEQ ID NO: 2646277 - RNA, 19 nt, Artificial Sequence
  Description of Artificial Sequence: Synthetic oligonucleotide
cuggcuccagcacaucugg

SEQ ID NO: 2646278 - RNA, 19 nt, Artificial Sequence
  Description of Artificial Sequence: Synthetic oligonucleotide
gcuagauaaagaugcugag

SEQ ID NO: 2646279 - RNA, 19 nt, Artificial Sequence
  Description of Artificial Sequence: Synthetic oligonucleotide
acuacuuggcaccugucua

SEQ ID NO: 2646280 - RNA, 19 nt, Artificial Sequence
  Description of Artificial Sequence: Synthetic oligonucleotide
aagcacucgguugacacaa

SEQ ID NO: 2646281 - RNA, 19 nt, Artificial Sequence
  Description of Artificial Sequence: Synthetic oligonucleotide
ugguccuggugguacgagg

SEQ ID NO: 2646282 - RNA, 19 nt, Artificial Sequence
  Description of Artificial Sequence: Synthetic oligonucleotide
caggcucaaccguauauac

SEQ ID NO: 2646283 - RNA, 19 nt, Artificial Sequence
  Description of Artificial Sequence: Synthetic oligonucleotide
uucugucccauucgaccag

SEQ ID NO: 2646284 - RNA, 19 nt, Artificial Sequence
  Description of Artificial Sequence: Synthetic oligonucleotide
gagcuagauaaagaugcug

SEQ ID NO: 2646285 - RNA, 19 nt, Artificial Sequence
  Description of Artificial Sequence: Synthetic oligonucleotide
ugcucuugauaauacuuuu

SEQ ID NO: 2646286 - RNA, 19 nt, Artificial Sequence
  Description of Artificial Sequence: Synthetic oligonucleotide
cucuuaaugucacgugaac

SEQ ID NO: 2646287 - RNA, 19 nt, Artificial Sequence
  Description of Artificial Sequence: Synthetic oligonucleotide
gagcauucugcaaagagcu

SEQ ID NO: 2646288 - RNA, 19 nt, Artificial Sequence
  Description of Artificial Sequence: Synthetic oligonucleotide
aacguggcaggagcggagg

SEQ ID NO: 2646289 - RNA, 19 nt, Artificial Sequence
  Description of Artificial Sequence: Synthetic oligonucleotide
agagcuccuguguauuuca

SEQ ID NO: 2646290 - RNA, 19 nt, Artificial Sequence
  Description of Artificial Sequence: Synthetic oligonucleotide
ugucccauucgaccagagc

SEQ ID NO: 2646291 - RNA, 19 nt, Artificial Sequence
  Description of Artificial Sequence: Synthetic oligonucleotide
aggcacuagacuacuuggc

SEQ ID NO: 2646292 - RNA, 19 nt, Artificial Sequence
  Description of Artificial Sequence: Synthetic oligonucleotide
ugcugcagcgguccugucc

SEQ ID NO: 2646293 - RNA, 19 nt, Artificial Sequence
  Description of Artificial Sequence: Synthetic oligonucleotide
uccaaccacguggaguggg

SEQ ID NO: 2646294 - RNA, 19 nt, Artificial Sequence
  Description of Artificial Sequence: Synthetic oligonucleotide
ucaucagcuacugggcucu

SEQ ID NO: 2646295 - RNA, 19 nt, Artificial Sequence
  Description of Artificial Sequence: Synthetic oligonucleotide
guucugucccauucgacca

SEQ ID NO: 2646296 - RNA, 19 nt, Artificial Sequence
  Description of Artificial Sequence: Synthetic oligonucleotide
ccucacuuugacaaaguag

SEQ ID NO: 2646297 - RNA, 19 nt, Artificial Sequence
  Description of Artificial Sequence: Synthetic oligonucleotide
ggcucaaccguauauacaa

SEQ ID NO: 2646298 - RNA, 19 nt, Artificial Sequence
  Description of Artificial Sequence: Synthetic oligonucleotide
ggugguacgagggaccagg

SEQ ID NO: 2646299 - RNA, 19 nt, Artificial Sequence
  Description of Artificial Sequence: Synthetic oligonucleotide
ugcugcugaugugaagagg

SEQ ID NO: 2646300 - RNA, 19 nt, Artificial Sequence
  Description of Artificial Sequence: Synthetic oligonucleotide
accugucuaagggagaggu

SEQ ID NO: 2646301 - RNA, 19 nt, Artificial Sequence
  Description of Artificial Sequence: Synthetic oligonucleotide
agacuucaggcucaaccgu

SEQ ID NO: 2646302 - RNA, 19 nt, Artificial Sequence
  Description of Artificial Sequence: Synthetic oligonucleotide
acaaugcaguuccaacacu

SEQ ID NO: 2646303 - RNA, 19 nt, Artificial Sequence
  Description of Artificial Sequence: Synthetic oligonucleotide
uucgaccagagcagugagc

SEQ ID NO: 2646304 - RNA, 19 nt, Artificial Sequence
  Description of Artificial Sequence: Synthetic oligonucleotide
agcauccagacuucaggcu

SEQ ID NO: 2646305 - RNA, 19 nt, Artificial Sequence
  Description of Artificial Sequence: Synthetic oligonucleotide
uccucacuuugacaaagua

SEQ ID NO: 2646306 - RNA, 19 nt, Artificial Sequence
  Description of Artificial Sequence: Synthetic oligonucleotide
aggcaguggcuuucucugc

SEQ ID NO: 2646307 - RNA, 19 nt, Artificial Sequence
  Description of Artificial Sequence: Synthetic oligonucleotide
agcgguccuguccaaccac

SEQ ID NO: 2646308 - RNA, 19 nt, Artificial Sequence
  Description of Artificial Sequence: Synthetic oligonucleotide
guacgagggaccaggaaug

SEQ ID NO: 2646309 - RNA, 19 nt, Artificial Sequence
  Description of Artificial Sequence: Synthetic oligonucleotide
gagggacaauuacacuuug

SEQ ID NO: 2646310 - RNA, 19 nt, Artificial Sequence
  Description of Artificial Sequence: Synthetic oligonucleotide
gcaguuccaacacucauca

SEQ ID NO: 2646311 - RNA, 19 nt, Artificial Sequence
  Description of Artificial Sequence: Synthetic oligonucleotide
aaugucacgugaacacggu

SEQ ID NO: 2646312 - RNA, 19 nt, Artificial Sequence
  Description of Artificial Sequence: Synthetic oligonucleotide
cauauuccucacuuugaca

SEQ ID NO: 2646313 - RNA, 19 nt, Artificial Sequence
  Description of Artificial Sequence: Synthetic oligonucleotide
ggaggcacuagacuacuug

SEQ ID NO: 2646314 - RNA, 19 nt, Artificial Sequence
  Description of Artificial Sequence: Synthetic oligonucleotide
acuuggcaccugucuaagg

SEQ ID NO: 2646315 - RNA, 19 nt, Artificial Sequence
  Description of Artificial Sequence: Synthetic oligonucleotide
ggacaauuacacuuuggga

SEQ ID NO: 2646316 - RNA, 19 nt, Artificial Sequence
  Description of Artificial Sequence: Synthetic oligonucleotide
ugggugcacuguacuagag

SEQ ID NO: 2646317 - RNA, 19 nt, Artificial Sequence
  Description of Artificial Sequence: Synthetic oligonucleotide
ugggaaaaggaggcacuag

SEQ ID NO: 2646318 - RNA, 19 nt, Artificial Sequence
  Description of Artificial Sequence: Synthetic oligonucleotide
aggccucugaaugacaggu

SEQ ID NO: 2646319 - RNA, 19 nt, Artificial Sequence
  Description of Artificial Sequence: Synthetic oligonucleotide
cuccagcacaucugggugc

SEQ ID NO: 2646320 - RNA, 19 nt, Artificial Sequence
  Description of Artificial Sequence: Synthetic oligonucleotide
cuaagggagagguguucug

SEQ ID NO: 2646321 - RNA, 19 nt, Artificial Sequence
  Description of Artificial Sequence: Synthetic oligonucleotide
uuccucacuuugacaaagu

SEQ ID NO: 2646322 - RNA, 19 nt, Artificial Sequence
  Description of Artificial Sequence: Synthetic oligonucleotide
caggugcucuugauaauac

SEQ ID NO: 2646323 - RNA, 19 nt, Artificial Sequence
  Description of Artificial Sequence: Synthetic oligonucleotide
gggaaauguggcuuucccc

SEQ ID NO: 2646324 - RNA, 19 nt, Artificial Sequence
  Description of Artificial Sequence: Synthetic oligonucleotide
uaaaagcacucgguugaca

SEQ ID NO: 2646325 - RNA, 19 nt, Artificial Sequence
  Description of Artificial Sequence: Synthetic oligonucleotide
aaggaggcacuagacuacu

SEQ ID NO: 2646326 - RNA, 19 nt, Artificial Sequence
  Description of Artificial Sequence: Synthetic oligonucleotide
aaacguggcaggagcggag

SEQ ID NO: 2646327 - RNA, 19 nt, Artificial Sequence
  Description of Artificial Sequence: Synthetic oligonucleotide
aguagcauccagacuucag

SEQ ID NO: 2646328 - RNA, 19 nt, Artificial Sequence
  Description of Artificial Sequence: Synthetic oligonucleotide
augacaggugcucuugaua

SEQ ID NO: 2646329 - RNA, 19 nt, Artificial Sequence
  Description of Artificial Sequence: Synthetic oligonucleotide
accacguggaguggggagg

SEQ ID NO: 2646330 - RNA, 19 nt, Artificial Sequence
  Description of Artificial Sequence: Synthetic oligonucleotide
ucaggcucaaccguauaua

SEQ ID NO: 2646331 - RNA, 19 nt, Artificial Sequence
  Description of Artificial Sequence: Synthetic oligonucleotide
augucacgugaacacggug

SEQ ID NO: 2646332 - RNA, 19 nt, Artificial Sequence
  Description of Artificial Sequence: Synthetic oligonucleotide
ucugcugcagcgguccugu

SEQ ID NO: 2646333 - RNA, 19 nt, Artificial Sequence
  Description of Artificial Sequence: Synthetic oligonucleotide
agggacaauuacacuuugg

SEQ ID NO: 2646334 - RNA, 19 nt, Artificial Sequence
  Description of Artificial Sequence: Synthetic oligonucleotide
cuagcugcauccagagcuc

SEQ ID NO: 2646335 - RNA, 19 nt, Artificial Sequence
  Description of Artificial Sequence: Synthetic oligonucleotide
agcacccugucaagcaggc

SEQ ID NO: 2646336 - RNA, 19 nt, Artificial Sequence
  Description of Artificial Sequence: Synthetic oligonucleotide
gagcacccugucaagcagg

SEQ ID NO: 2646337 - RNA, 19 nt, Artificial Sequence
  Description of Artificial Sequence: Synthetic oligonucleotide
aggugcucuugauaauacu

SEQ ID NO: 2646338 - RNA, 19 nt, Artificial Sequence
  Description of Artificial Sequence: Synthetic oligonucleotide
gggaaaaggaggcacuaga

SEQ ID NO: 2646339 - RNA, 19 nt, Artificial Sequence
  Description of Artificial Sequence: Synthetic oligonucleotide
ggugcacuguacuagagcu

SEQ ID NO: 2646340 - RNA, 19 nt, Artificial Sequence
  Description of Artificial Sequence: Synthetic oligonucleotide
uugggaaauguggcuuucc

SEQ ID NO: 2646341 - RNA, 19 nt, Artificial Sequence
  Description of Artificial Sequence: Synthetic oligonucleotide
acgagggaccaggaaugcc

SEQ ID NO: 2646342 - RNA, 19 nt, Artificial Sequence
  Description of Artificial Sequence: Synthetic oligonucleotide
ugcauccagagcucuuuuc

SEQ ID NO: 2646343 - RNA, 19 nt, Artificial Sequence
  Description of Artificial Sequence: Synthetic oligonucleotide
acuguacuagagcuagaua

SEQ ID NO: 2646344 - RNA, 19 nt, Artificial Sequence
  Description of Artificial Sequence: Synthetic oligonucleotide
ugucuaagggagagguguu

SEQ ID NO: 2646345 - RNA, 19 nt, Artificial Sequence
  Description of Artificial Sequence: Synthetic oligonucleotide
augcugaggccacagguuu

SEQ ID NO: 2646346 - RNA, 19 nt, Artificial Sequence
  Description of Artificial Sequence: Synthetic oligonucleotide
auaauacuuuugggaaaug

SEQ ID NO: 2646347 - RNA, 19 nt, Artificial Sequence
  Description of Artificial Sequence: Synthetic oligonucleotide
cucgguugacacaaaguaa

SEQ ID NO: 2646348 - RNA, 19 nt, Artificial Sequence
  Description of Artificial Sequence: Synthetic oligonucleotide
agcucuuuucauguggcau

SEQ ID NO: 2646349 - RNA, 19 nt, Artificial Sequence
  Description of Artificial Sequence: Synthetic oligonucleotide
gacuacuuggcaccugucu

SEQ ID NO: 2646350 - RNA, 19 nt, Artificial Sequence
  Description of Artificial Sequence: Synthetic oligonucleotide
auuaggacaccaagacugu

SEQ ID NO: 2646351 - RNA, 19 nt, Artificial Sequence
  Description of Artificial Sequence: Synthetic oligonucleotide
ggaaaaggaggcacuagac

SEQ ID NO: 2646352 - RNA, 19 nt, Artificial Sequence
  Description of Artificial Sequence: Synthetic oligonucleotide
ugggagggacaauuacacu

SEQ ID NO: 2646353 - RNA, 19 nt, Artificial Sequence
  Description of Artificial Sequence: Synthetic oligonucleotide
cugcugaugugaagaggag

SEQ ID NO: 2646354 - RNA, 19 nt, Artificial Sequence
  Description of Artificial Sequence: Synthetic oligonucleotide
guuccaacacucaucagcu

SEQ ID NO: 2646355 - RNA, 19 nt, Artificial Sequence
  Description of Artificial Sequence: Synthetic oligonucleotide
cagagcagugagcauucug

SEQ ID NO: 2646356 - RNA, 19 nt, Artificial Sequence
  Description of Artificial Sequence: Synthetic oligonucleotide
cugcugcugaugugaagag

SEQ ID NO: 2646357 - RNA, 19 nt, Artificial Sequence
  Description of Artificial Sequence: Synthetic oligonucleotide
gguccuggugguacgaggg

SEQ ID NO: 2646358 - RNA, 19 nt, Artificial Sequence
  Description of Artificial Sequence: Synthetic oligonucleotide
caagcaggccucugaauga

SEQ ID NO: 2646359 - RNA, 19 nt, Artificial Sequence
  Description of Artificial Sequence: Synthetic oligonucleotide
gcacuagacuacuuggcac

SEQ ID NO: 2646360 - RNA, 19 nt, Artificial Sequence
  Description of Artificial Sequence: Synthetic oligonucleotide
gcugcugaugugaagagga

SEQ ID NO: 2646361 - RNA, 19 nt, Artificial Sequence
  Description of Artificial Sequence: Synthetic oligonucleotide
ggcacuagacuacuuggca

SEQ ID NO: 2646362 - RNA, 19 nt, Artificial Sequence
  Description of Artificial Sequence: Synthetic oligonucleotide
caggccucugaaugacagg

SEQ ID NO: 2646363 - RNA, 19 nt, Artificial Sequence
  Description of Artificial Sequence: Synthetic oligonucleotide
uggggaggcuucugggaug

SEQ ID NO: 2646364 - RNA, 19 nt, Artificial Sequence
  Description of Artificial Sequence: Synthetic oligonucleotide
gacaccaagacuguacaau

SEQ ID NO: 2646365 - RNA, 19 nt, Artificial Sequence
  Description of Artificial Sequence: Synthetic oligonucleotide
gggagagguguucuguccc

SEQ ID NO: 2646366 - RNA, 19 nt, Artificial Sequence
  Description of Artificial Sequence: Synthetic oligonucleotide
augugaagaggaggugguc

SEQ ID NO: 2646367 - RNA, 19 nt, Artificial Sequence
  Description of Artificial Sequence: Synthetic oligonucleotide
cuguguauuucagaguaaa

SEQ ID NO: 2646368 - RNA, 19 nt, Artificial Sequence
  Description of Artificial Sequence: Synthetic oligonucleotide
gcauccagagcucuuuuca

SEQ ID NO: 2646369 - RNA, 19 nt, Artificial Sequence
  Description of Artificial Sequence: Synthetic oligonucleotide
acaggugcucuugauaaua

SEQ ID NO: 2646370 - RNA, 19 nt, Artificial Sequence
  Description of Artificial Sequence: Synthetic oligonucleotide
uacgagggaccaggaaugc

SEQ ID NO: 2646371 - RNA, 19 nt, Artificial Sequence
  Description of Artificial Sequence: Synthetic oligonucleotide
cagaguaaaagcacucggu

SEQ ID NO: 2646372 - RNA, 19 nt, Artificial Sequence
  Description of Artificial Sequence: Synthetic oligonucleotide
cauucgaccagagcaguga

SEQ ID NO: 2646373 - RNA, 19 nt, Artificial Sequence
  Description of Artificial Sequence: Synthetic oligonucleotide
agagcuagauaaagaugcu

SEQ ID NO: 2646374 - RNA, 19 nt, Artificial Sequence
  Description of Artificial Sequence: Synthetic oligonucleotide
gaggugguccuggugguac

SEQ ID NO: 2646375 - RNA, 19 nt, Artificial Sequence
  Description of Artificial Sequence: Synthetic oligonucleotide
uugggaaaaggaggcacua

SEQ ID NO: 2646376 - RNA, 19 nt, Artificial Sequence
  Description of Artificial Sequence: Synthetic oligonucleotide
acuagacuacuuggcaccu

SEQ ID NO: 2646377 - RNA, 19 nt, Artificial Sequence
  Description of Artificial Sequence: Synthetic oligonucleotide
cuacuuggcaccugucuaa

SEQ ID NO: 2646378 - RNA, 19 nt, Artificial Sequence
  Description of Artificial Sequence: Synthetic oligonucleotide
uuucucugcugcagcgguc

SEQ ID NO: 2646379 - RNA, 19 nt, Artificial Sequence
  Description of Artificial Sequence: Synthetic oligonucleotide
caggagcggaggcaguggc

SEQ ID NO: 2646380 - RNA, 19 nt, Artificial Sequence
  Description of Artificial Sequence: Synthetic oligonucleotide
ugguacgagggaccaggaa

SEQ ID NO: 2646381 - RNA, 19 nt, Artificial Sequence
  Description of Artificial Sequence: Synthetic oligonucleotide
caacacucaucagcuacug

SEQ ID NO: 2646382 - RNA, 19 nt, Artificial Sequence
  Description of Artificial Sequence: Synthetic oligonucleotide
cugucuaagggagaggugu

SEQ ID NO: 2646383 - RNA, 19 nt, Artificial Sequence
  Description of Artificial Sequence: Synthetic oligonucleotide
ugaacacggugguccccag

SEQ ID NO: 2646384 - RNA, 19 nt, Artificial Sequence
  Description of Artificial Sequence: Synthetic oligonucleotide
gcugcugcugaugugaaga

SEQ ID NO: 2646385 - RNA, 19 nt, Artificial Sequence
  Description of Artificial Sequence: Synthetic oligonucleotide
gggugcacuguacuagagc

SEQ ID NO: 2646386 - RNA, 19 nt, Artificial Sequence
  Description of Artificial Sequence: Synthetic oligonucleotide
gguguucugucccauucga

SEQ ID NO: 2646387 - RNA, 19 nt, Artificial Sequence
  Description of Artificial Sequence: Synthetic oligonucleotide
ugcugaggccacagguuuc

SEQ ID NO: 2646388 - RNA, 19 nt, Artificial Sequence
  Description of Artificial Sequence: Synthetic oligonucleotide
guaaaagcacucgguugac

SEQ ID NO: 2646389 - RNA, 19 nt, Artificial Sequence
  Description of Artificial Sequence: Synthetic oligonucleotide
cucuagcugcauccagagc

SEQ ID NO: 2646390 - RNA, 19 nt, Artificial Sequence
  Description of Artificial Sequence: Synthetic oligonucleotide
agcauucugcaaagagcuc

SEQ ID NO: 2646391 - RNA, 19 nt, Artificial Sequence
  Description of Artificial Sequence: Synthetic oligonucleotide
gguacgagggaccaggaau

SEQ ID NO: 2646392 - RNA, 19 nt, Artificial Sequence
  Description of Artificial Sequence: Synthetic oligonucleotide
aggcagucacauauuccuc

SEQ ID NO: 2646393 - RNA, 19 nt, Artificial Sequence
  Description of Artificial Sequence: Synthetic oligonucleotide
ucugucccauucgaccaga

SEQ ID NO: 2646394 - RNA, 19 nt, Artificial Sequence
  Description of Artificial Sequence: Synthetic oligonucleotide
ggaggcuucugggaugggg

SEQ ID NO: 2646395 - RNA, 19 nt, Artificial Sequence
  Description of Artificial Sequence: Synthetic oligonucleotide
aucugggugcacuguacua

SEQ ID NO: 2646396 - RNA, 19 nt, Artificial Sequence
  Description of Artificial Sequence: Synthetic oligonucleotide
gccaauuaggacaccaaga

SEQ ID NO: 2646397 - RNA, 19 nt, Artificial Sequence
  Description of Artificial Sequence: Synthetic oligonucleotide
ccaggcagucacauauucc

SEQ ID NO: 2646398 - RNA, 19 nt, Artificial Sequence
  Description of Artificial Sequence: Synthetic oligonucleotide
caauuaggacaccaagacu

SEQ ID NO: 2646399 - RNA, 19 nt, Artificial Sequence
  Description of Artificial Sequence: Synthetic oligonucleotide
acggugguccccaguguac

SEQ ID NO: 2646400 - RNA, 19 nt, Artificial Sequence
  Description of Artificial Sequence: Synthetic oligonucleotide
cacccugucaagcaggccu

SEQ ID NO: 2646401 - RNA, 19 nt, Artificial Sequence
  Description of Artificial Sequence: Synthetic oligonucleotide
gcacucgguugacacaaag

SEQ ID NO: 2646402 - RNA, 19 nt, Artificial Sequence
  Description of Artificial Sequence: Synthetic oligonucleotide
agcggaggcaguggcuuuc

SEQ ID NO: 2646403 - RNA, 19 nt, Artificial Sequence
  Description of Artificial Sequence: Synthetic oligonucleotide
acccugucaagcaggccuc

SEQ ID NO: 2646404 - RNA, 19 nt, Artificial Sequence
  Description of Artificial Sequence: Synthetic oligonucleotide
gggagggacaauuacacuu

SEQ ID NO: 2646405 - RNA, 19 nt, Artificial Sequence
  Description of Artificial Sequence: Synthetic oligonucleotide
guccccaguguaccuuugc

SEQ ID NO: 2646406 - RNA, 19 nt, Artificial Sequence
  Description of Artificial Sequence: Synthetic oligonucleotide
cugggugcacuguacuaga

SEQ ID NO: 2646407 - RNA, 19 nt, Artificial Sequence
  Description of Artificial Sequence: Synthetic oligonucleotide
gcaccugucuaagggagag

SEQ ID NO: 2646408 - RNA, 19 nt, Artificial Sequence
  Description of Artificial Sequence: Synthetic oligonucleotide
gcagcgguccuguccaacc

SEQ ID NO: 2646409 - RNA, 19 nt, Artificial Sequence
  Description of Artificial Sequence: Synthetic oligonucleotide
gacuucaggcucaaccgua

SEQ ID NO: 2646410 - RNA, 19 nt, Artificial Sequence
  Description of Artificial Sequence: Synthetic oligonucleotide
agacuacuuggcaccuguc

SEQ ID NO: 2646411 - RNA, 19 nt, Artificial Sequence
  Description of Artificial Sequence: Synthetic oligonucleotide
cugucccauucgaccagag

SEQ ID NO: 2646412 - RNA, 19 nt, Artificial Sequence
  Description of Artificial Sequence: Synthetic oligonucleotide
gcugaugugaagaggaggu

SEQ ID NO: 2646413 - RNA, 19 nt, Artificial Sequence
  Description of Artificial Sequence: Synthetic oligonucleotide
aggcucaaccguauauaca

SEQ ID NO: 2646414 - RNA, 19 nt, Artificial Sequence
  Description of Artificial Sequence: Synthetic oligonucleotide
gucacgugaacacgguggu

SEQ ID NO: 2646415 - RNA, 19 nt, Artificial Sequence
  Description of Artificial Sequence: Synthetic oligonucleotide
aucagcuacugggcucuag

SEQ ID NO: 2646416 - RNA, 19 nt, Artificial Sequence
  Description of Artificial Sequence: Synthetic oligonucleotide
caguuccaacacucaucag

SEQ ID NO: 2646417 - RNA, 19 nt, Artificial Sequence
  Description of Artificial Sequence: Synthetic oligonucleotide
gaugggguggcuggcucca

SEQ ID NO: 2646418 - RNA, 19 nt, Artificial Sequence
  Description of Artificial Sequence: Synthetic oligonucleotide
acacggugguccccagugu

SEQ ID NO: 2646419 - RNA, 19 nt, Artificial Sequence
  Description of Artificial Sequence: Synthetic oligonucleotide
ccaaccacguggagugggg

SEQ ID NO: 2646420 - RNA, 19 nt, Artificial Sequence
  Description of Artificial Sequence: Synthetic oligonucleotide
gguccuguccaaccacgug

SEQ ID NO: 2646421 - RNA, 19 nt, Artificial Sequence
  Description of Artificial Sequence: Synthetic oligonucleotide
ggcuucugggauggggugg

SEQ ID NO: 2646422 - RNA, 19 nt, Artificial Sequence
  Description of Artificial Sequence: Synthetic oligonucleotide
gucuaagggagagguguuc

SEQ ID NO: 2646423 - RNA, 19 nt, Artificial Sequence
  Description of Artificial Sequence: Synthetic oligonucleotide
gcuccaggcagucacauau

SEQ ID NO: 2646424 - RNA, 19 nt, Artificial Sequence
  Description of Artificial Sequence: Synthetic oligonucleotide
cuagacuacuuggcaccug

SEQ ID NO: 2646425 - RNA, 19 nt, Artificial Sequence
  Description of Artificial Sequence: Synthetic oligonucleotide
ugguccccaguguaccuuu

SEQ ID NO: 2646426 - RNA, 19 nt, Artificial Sequence
  Description of Artificial Sequence: Synthetic oligonucleotide
ggaugggguggcuggcucc

SEQ ID NO: 2646427 - RNA, 19 nt, Artificial Sequence
  Description of Artificial Sequence: Synthetic oligonucleotide
gaaugccaauuaggacacc

SEQ ID NO: 2646428 - RNA, 19 nt, Artificial Sequence
  Description of Artificial Sequence: Synthetic oligonucleotide
ccauaagaaagagcugcug

SEQ ID NO: 2646429 - RNA, 19 nt, Artificial Sequence
  Description of Artificial Sequence: Synthetic oligonucleotide
cuguacaaugcaguuccaa

SEQ ID NO: 2646430 - RNA, 19 nt, Artificial Sequence
  Description of Artificial Sequence: Synthetic oligonucleotide
cacucgguugacacaaagu

SEQ ID NO: 2646431 - RNA, 19 nt, Artificial Sequence
  Description of Artificial Sequence: Synthetic oligonucleotide
caccugucuaagggagagg

SEQ ID NO: 2646432 - RNA, 19 nt, Artificial Sequence
  Description of Artificial Sequence: Synthetic oligonucleotide
augccaauuaggacaccaa

SEQ ID NO: 2646433 - RNA, 19 nt, Artificial Sequence
  Description of Artificial Sequence: Synthetic oligonucleotide
ggagagguguucuguccca

SEQ ID NO: 2646434 - RNA, 19 nt, Artificial Sequence
  Description of Artificial Sequence: Synthetic oligonucleotide
ugcagcgguccuguccaac

SEQ ID NO: 2646435 - RNA, 19 nt, Artificial Sequence
  Description of Artificial Sequence: Synthetic oligonucleotide
ugggaugggguggcuggcu

SEQ ID NO: 2646436 - RNA, 19 nt, Artificial Sequence
  Description of Artificial Sequence: Synthetic oligonucleotide
ucacgugaacacggugguc

SEQ ID NO: 2646437 - RNA, 19 nt, Artificial Sequence
  Description of Artificial Sequence: Synthetic oligonucleotide
cacuuugacaaaguagcau

SEQ ID NO: 2646438 - RNA, 19 nt, Artificial Sequence
  Description of Artificial Sequence: Synthetic oligonucleotide
cacaaaguaagagcacccu

SEQ ID NO: 2646439 - RNA, 19 nt, Artificial Sequence
  Description of Artificial Sequence: Synthetic oligonucleotide
cacaucugggugcacugua

SEQ ID NO: 2646440 - RNA, 19 nt, Artificial Sequence
  Description of Artificial Sequence: Synthetic oligonucleotide
gagggaccaggaaugccaa

SEQ ID NO: 2646441 - RNA, 19 nt, Artificial Sequence
  Description of Artificial Sequence: Synthetic oligonucleotide
ggaccaggaaugccaauua

SEQ ID NO: 2646442 - RNA, 19 nt, Artificial Sequence
  Description of Artificial Sequence: Synthetic oligonucleotide
gucacauauuccucacuuu

SEQ ID NO: 2646443 - RNA, 19 nt, Artificial Sequence
  Description of Artificial Sequence: Synthetic oligonucleotide
ggaggcaguggcuuucucu

SEQ ID NO: 2646444 - RNA, 19 nt, Artificial Sequence
  Description of Artificial Sequence: Synthetic oligonucleotide
ucuuuucauguggcauuuu

SEQ ID NO: 2646445 - RNA, 19 nt, Artificial Sequence
  Description of Artificial Sequence: Synthetic oligonucleotide
gugguccuggugguacgag

SEQ ID NO: 2646446 - RNA, 19 nt, Artificial Sequence
  Description of Artificial Sequence: Synthetic oligonucleotide
ggugcucuugauaauacuu

SEQ ID NO: 2646447 - RNA, 19 nt, Artificial Sequence
  Description of Artificial Sequence: Synthetic oligonucleotide
agguuuccguuuccucuua

SEQ ID NO: 2646448 - RNA, 19 nt, Artificial Sequence
  Description of Artificial Sequence: Synthetic oligonucleotide
cugaggccacagguuuccg

SEQ ID NO: 2646449 - RNA, 19 nt, Artificial Sequence
  Description of Artificial Sequence: Synthetic oligonucleotide
gcuggcuccagcacaucug

SEQ ID NO: 2646450 - RNA, 19 nt, Artificial Sequence
  Description of Artificial Sequence: Synthetic oligonucleotide
gggcucuagcugcauccag

SEQ ID NO: 2646451 - RNA, 19 nt, Artificial Sequence
  Description of Artificial Sequence: Synthetic oligonucleotide
cgagggaccaggaaugcca

SEQ ID NO: 2646452 - RNA, 19 nt, Artificial Sequence
  Description of Artificial Sequence: Synthetic oligonucleotide
cuggugguacgagggacca

SEQ ID NO: 2646453 - RNA, 19 nt, Artificial Sequence
  Description of Artificial Sequence: Synthetic oligonucleotide
ccugucuaagggagaggug

SEQ ID NO: 2646454 - RNA, 19 nt, Artificial Sequence
  Description of Artificial Sequence: Synthetic oligonucleotide
ccauucgaccagagcagug

SEQ ID NO: 2646455 - RNA, 19 nt, Artificial Sequence
  Description of Artificial Sequence: Synthetic oligonucleotide
gacaggugcucuugauaau

SEQ ID NO: 2646456 - RNA, 19 nt, Artificial Sequence
  Description of Artificial Sequence: Synthetic oligonucleotide
gcgguccuguccaaccacg

SEQ ID NO: 2646457 - RNA, 19 nt, Artificial Sequence
  Description of Artificial Sequence: Synthetic oligonucleotide
gugcucuugauaauacuuu

SEQ ID NO: 2646458 - RNA, 19 nt, Artificial Sequence
  Description of Artificial Sequence: Synthetic oligonucleotide
caucugggugcacuguacu

SEQ ID NO: 2646459 - RNA, 19 nt, Artificial Sequence
  Description of Artificial Sequence: Synthetic oligonucleotide
cauccagagcucuuuucau

SEQ ID NO: 2646460 - RNA, 19 nt, Artificial Sequence
  Description of Artificial Sequence: Synthetic oligonucleotide
guccaaccacguggagugg

SEQ ID NO: 2646461 - RNA, 19 nt, Artificial Sequence
  Description of Artificial Sequence: Synthetic oligonucleotide
cacuguacuagagcuagau

SEQ ID NO: 2646462 - RNA, 19 nt, Artificial Sequence
  Description of Artificial Sequence: Synthetic oligonucleotide
cuguccaaccacguggagu

SEQ ID NO: 2646463 - RNA, 19 nt, Artificial Sequence
  Description of Artificial Sequence: Synthetic oligonucleotide
gcaggagcggaggcagugg

SEQ ID NO: 2646464 - RNA, 19 nt, Artificial Sequence
  Description of Artificial Sequence: Synthetic oligonucleotide
cacggugguccccagugua

SEQ ID NO: 2646465 - RNA, 19 nt, Artificial Sequence
  Description of Artificial Sequence: Synthetic oligonucleotide
agggaccaggaaugccaau

SEQ ID NO: 2646466 - RNA, 19 nt, Artificial Sequence
  Description of Artificial Sequence: Synthetic oligonucleotide
ggcaggagcggaggcagug

SEQ ID NO: 2646467 - RNA, 19 nt, Artificial Sequence
  Description of Artificial Sequence: Synthetic oligonucleotide
agcuccaggcagucacaua

SEQ ID NO: 2646468 - RNA, 19 nt, Artificial Sequence
  Description of Artificial Sequence: Synthetic oligonucleotide
ggacaccaagacuguacaa

SEQ ID NO: 2646469 - RNA, 19 nt, Artificial Sequence
  Description of Artificial Sequence: Synthetic oligonucleotide
cagcgguccuguccaacca

SEQ ID NO: 2646470 - RNA, 19 nt, Artificial Sequence
  Description of Artificial Sequence: Synthetic oligonucleotide
cagcuacugggcucuagcu

SEQ ID NO: 2646471 - RNA, 19 nt, Artificial Sequence
  Description of Artificial Sequence: Synthetic oligonucleotide
gcucuuuucauguggcauu

SEQ ID NO: 2646472 - RNA, 19 nt, Artificial Sequence
  Description of Artificial Sequence: Synthetic oligonucleotide
acguggaguggggaggcuu

SEQ ID NO: 2646473 - RNA, 19 nt, Artificial Sequence
  Description of Artificial Sequence: Synthetic oligonucleotide
gucaagcaggccucugaau

SEQ ID NO: 2646474 - RNA, 19 nt, Artificial Sequence
  Description of Artificial Sequence: Synthetic oligonucleotide
agcaggccucugaaugaca

SEQ ID NO: 2646475 - RNA, 19 nt, Artificial Sequence
  Description of Artificial Sequence: Synthetic oligonucleotide
gcucaaccguauauacaac

SEQ ID NO: 2646476 - RNA, 19 nt, Artificial Sequence
  Description of Artificial Sequence: Synthetic oligonucleotide
ccguuuccucuuaauguca

SEQ ID NO: 2646477 - RNA, 19 nt, Artificial Sequence
  Description of Artificial Sequence: Synthetic oligonucleotide
gaacacggugguccccagu

SEQ ID NO: 2646478 - RNA, 19 nt, Artificial Sequence
  Description of Artificial Sequence: Synthetic oligonucleotide
gggaugggguggcuggcuc

SEQ ID NO: 2646479 - RNA, 19 nt, Artificial Sequence
  Description of Artificial Sequence: Synthetic oligonucleotide
cuucaggcucaaccguaua

SEQ ID NO: 2646480 - RNA, 19 nt, Artificial Sequence
  Description of Artificial Sequence: Synthetic oligonucleotide
caaccacguggagugggga

SEQ ID NO: 2646481 - RNA, 19 nt, Artificial Sequence
  Description of Artificial Sequence: Synthetic oligonucleotide
gugguacgagggaccagga

SEQ ID NO: 2646482 - RNA, 19 nt, Artificial Sequence
  Description of Artificial Sequence: Synthetic oligonucleotide
cagucacauauuccucacu

SEQ ID NO: 2646483 - RNA, 19 nt, Artificial Sequence
  Description of Artificial Sequence: Synthetic oligonucleotide
gugcacuguacuagagcua

SEQ ID NO: 2646484 - RNA, 19 nt, Artificial Sequence
  Description of Artificial Sequence: Synthetic oligonucleotide
cucuuuucauguggcauuu

SEQ ID NO: 2646485 - RNA, 19 nt, Artificial Sequence
  Description of Artificial Sequence: Synthetic oligonucleotide
ccaacacucaucagcuacu

SEQ ID NO: 2646486 - RNA, 19 nt, Artificial Sequence
  Description of Artificial Sequence: Synthetic oligonucleotide
cguggaguggggaggcuuc

SEQ ID NO: 2646487 - RNA, 19 nt, Artificial Sequence
  Description of Artificial Sequence: Synthetic oligonucleotide
ccacguggaguggggaggc

SEQ ID NO: 2646488 - RNA, 19 nt, Artificial Sequence
  Description of Artificial Sequence: Synthetic oligonucleotide
ggguggcuggcuccagcac

SEQ ID NO: 2646489 - RNA, 19 nt, Artificial Sequence
  Description of Artificial Sequence: Synthetic oligonucleotide
gagagguguucugucccau

SEQ ID NO: 2646490 - RNA, 19 nt, Artificial Sequence
  Description of Artificial Sequence: Synthetic oligonucleotide
ggugguccuggugguacga

SEQ ID NO: 2646491 - RNA, 19 nt, Artificial Sequence
  Description of Artificial Sequence: Synthetic oligonucleotide
gggaccaggaaugccaauu

SEQ ID NO: 2646492 - RNA, 19 nt, Artificial Sequence
  Description of Artificial Sequence: Synthetic oligonucleotide
cgguugacacaaaguaaga

SEQ ID NO: 2646493 - RNA, 19 nt, Artificial Sequence
  Description of Artificial Sequence: Synthetic oligonucleotide
ggcaccugucuaagggaga

SEQ ID NO: 2646494 - RNA, 19 nt, Artificial Sequence
  Description of Artificial Sequence: Synthetic oligonucleotide
agcugcauccagagcucuu

SEQ ID NO: 2646495 - RNA, 19 nt, Artificial Sequence
  Description of Artificial Sequence: Synthetic oligonucleotide
aggaggcacuagacuacuu

SEQ ID NO: 2646496 - RNA, 19 nt, Artificial Sequence
  Description of Artificial Sequence: Synthetic oligonucleotide
ggugguccccaguguaccu

SEQ ID NO: 2646497 - RNA, 19 nt, Artificial Sequence
  Description of Artificial Sequence: Synthetic oligonucleotide
gguccccaguguaccuuug

SEQ ID NO: 2646498 - RNA, 19 nt, Artificial Sequence
  Description of Artificial Sequence: Synthetic oligonucleotide
agcacucgguugacacaaa

SEQ ID NO: 2646499 - RNA, 19 nt, Artificial Sequence
  Description of Artificial Sequence: Synthetic oligonucleotide
cggugguccccaguguacc

SEQ ID NO: 2646500 - RNA, 19 nt, Artificial Sequence
  Description of Artificial Sequence: Synthetic oligonucleotide
ccugucaagcaggccucug

SEQ ID NO: 2646501 - RNA, 19 nt, Artificial Sequence
  Description of Artificial Sequence: Synthetic oligonucleotide
cugcugcagcgguccuguc

SEQ ID NO: 2646502 - RNA, 19 nt, Artificial Sequence
  Description of Artificial Sequence: Synthetic oligonucleotide
ggagcggaggcaguggcuu

SEQ ID NO: 2646503 - RNA, 19 nt, Artificial Sequence
  Description of Artificial Sequence: Synthetic oligonucleotide
gcacccugucaagcaggcc

SEQ ID NO: 2646504 - RNA, 19 nt, Artificial Sequence
  Description of Artificial Sequence: Synthetic oligonucleotide
gagcggaggcaguggcuuu

SEQ ID NO: 2646505 - RNA, 19 nt, Artificial Sequence
  Description of Artificial Sequence: Synthetic oligonucleotide
cgugaacacgguggucccc

SEQ ID NO: 2646506 - RNA, 19 nt, Artificial Sequence
  Description of Artificial Sequence: Synthetic oligonucleotide
gcugcauccagagcucuuu

SEQ ID NO: 2646507 - RNA, 19 nt, Artificial Sequence
  Description of Artificial Sequence: Synthetic oligonucleotide
guggaguggggaggcuucu

SEQ ID NO: 2646508 - RNA, 19 nt, Artificial Sequence
  Description of Artificial Sequence: Synthetic oligonucleotide
gcacuguacuagagcuaga

SEQ ID NO: 2646509 - RNA, 19 nt, Artificial Sequence
  Description of Artificial Sequence: Synthetic oligonucleotide
gugguccccaguguaccuu

SEQ ID NO: 2646510 - RNA, 19 nt, Artificial Sequence
  Description of Artificial Sequence: Synthetic oligonucleotide
cugcagcgguccuguccaa

SEQ ID NO: 2646511 - RNA, 19 nt, Artificial Sequence
  Description of Artificial Sequence: Synthetic oligonucleotide
gcacaucugggugcacugu

SEQ ID NO: 2646512 - RNA, 19 nt, Artificial Sequence
  Description of Artificial Sequence: Synthetic oligonucleotide
ggaggugguccugguggua

SEQ ID NO: 2646513 - RNA, 19 nt, Artificial Sequence
  Description of Artificial Sequence: Synthetic oligonucleotide
cccauucgaccagagcagu

SEQ ID NO: 2646514 - RNA, 19 nt, Artificial Sequence
  Description of Artificial Sequence: Synthetic oligonucleotide
ccacagguuuccguuuccu

SEQ ID NO: 2646515 - RNA, 19 nt, Artificial Sequence
  Description of Artificial Sequence: Synthetic oligonucleotide
caucagcuacugggcucua

SEQ ID NO: 2646516 - RNA, 19 nt, Artificial Sequence
  Description of Artificial Sequence: Synthetic oligonucleotide
ccagcacaucugggugcac

SEQ ID NO: 2646517 - RNA, 19 nt, Artificial Sequence
  Description of Artificial Sequence: Synthetic oligonucleotide
cacguggaguggggaggcu

SEQ ID NO: 2646518 - RNA, 19 nt, Artificial Sequence
  Description of Artificial Sequence: Synthetic oligonucleotide
cgguccuguccaaccacgu

SEQ ID NO: 2646519 - RNA, 19 nt, Artificial Sequence
  Description of Artificial Sequence: Synthetic oligonucleotide
cccugucaagcaggccucu

SEQ ID NO: 2646520 - RNA, 19 nt, Artificial Sequence
  Description of Artificial Sequence: Synthetic oligonucleotide
aauguaaauaaacaguagg

SEQ ID NO: 2646521 - RNA, 19 nt, Artificial Sequence
  Description of Artificial Sequence: Synthetic oligonucleotide
uuugcaauaaccaagaaac

SEQ ID NO: 2646522 - RNA, 19 nt, Artificial Sequence
  Description of Artificial Sequence: Synthetic oligonucleotide
uauaaaacagagcaaauac

SEQ ID NO: 2646523 - RNA, 19 nt, Artificial Sequence
  Description of Artificial Sequence: Synthetic oligonucleotide
aggaugaagacuucaaugc

SEQ ID NO: 2646524 - RNA, 19 nt, Artificial Sequence
  Description of Artificial Sequence: Synthetic oligonucleotide
aaugccuccaaagaagugc

SEQ ID NO: 2646525 - RNA, 19 nt, Artificial Sequence
  Description of Artificial Sequence: Synthetic oligonucleotide
uugauaguauaaaacagag

SEQ ID NO: 2646526 - RNA, 19 nt, Artificial Sequence
  Description of Artificial Sequence: Synthetic oligonucleotide
uguaaauaaacaguagggg

SEQ ID NO: 2646527 - RNA, 19 nt, Artificial Sequence
  Description of Artificial Sequence: Synthetic oligonucleotide
aaacagagcaaauacuuug

SEQ ID NO: 2646528 - RNA, 19 nt, Artificial Sequence
  Description of Artificial Sequence: Synthetic oligonucleotide
uguagaggcuugcagaugg

SEQ ID NO: 2646529 - RNA, 19 nt, Artificial Sequence
  Description of Artificial Sequence: Synthetic oligonucleotide
aaauaaacaguaggggagc

SEQ ID NO: 2646530 - RNA, 19 nt, Artificial Sequence
  Description of Artificial Sequence: Synthetic oligonucleotide
aaaccaaucuuucuggugu

SEQ ID NO: 2646531 - RNA, 19 nt, Artificial Sequence
  Description of Artificial Sequence: Synthetic oligonucleotide
ugaucuauuucauuggggc

SEQ ID NO: 2646532 - RNA, 19 nt, Artificial Sequence
  Description of Artificial Sequence: Synthetic oligonucleotide
aguauauaugaucacagca

SEQ ID NO: 2646533 - RNA, 19 nt, Artificial Sequence
  Description of Artificial Sequence: Synthetic oligonucleotide
acuuguuuccuucauuccc

SEQ ID NO: 2646534 - RNA, 19 nt, Artificial Sequence
  Description of Artificial Sequence: Synthetic oligonucleotide
ugagaguguaaauaagggg

SEQ ID NO: 2646535 - RNA, 19 nt, Artificial Sequence
  Description of Artificial Sequence: Synthetic oligonucleotide
auaugauaucaacaagacc

SEQ ID NO: 2646536 - RNA, 19 nt, Artificial Sequence
  Description of Artificial Sequence: Synthetic oligonucleotide
aaaggaaugcagaaauccc

SEQ ID NO: 2646537 - RNA, 19 nt, Artificial Sequence
  Description of Artificial Sequence: Synthetic oligonucleotide
ugcagauggccacauaucg

SEQ ID NO: 2646538 - RNA, 19 nt, Artificial Sequence
  Description of Artificial Sequence: Synthetic oligonucleotide
ucaacaagaccacaaaagu

SEQ ID NO: 2646539 - RNA, 19 nt, Artificial Sequence
  Description of Artificial Sequence: Synthetic oligonucleotide
aacaagaccacaaaaguca

SEQ ID NO: 2646540 - RNA, 19 nt, Artificial Sequence
  Description of Artificial Sequence: Synthetic oligonucleotide
auaaccaagaaaccaaucu

SEQ ID NO: 2646541 - RNA, 19 nt, Artificial Sequence
  Description of Artificial Sequence: Synthetic oligonucleotide
guagugaucuauuucauug

SEQ ID NO: 2646542 - RNA, 19 nt, Artificial Sequence
  Description of Artificial Sequence: Synthetic oligonucleotide
aagaaaaggacuaccacag

SEQ ID NO: 2646543 - RNA, 19 nt, Artificial Sequence
  Description of Artificial Sequence: Synthetic oligonucleotide
aacuuguuuccuucauucc

SEQ ID NO: 2646544 - RNA, 19 nt, Artificial Sequence
  Description of Artificial Sequence: Synthetic oligonucleotide
uaaaacagagcaaauacuu

SEQ ID NO: 2646545 - RNA, 19 nt, Artificial Sequence
  Description of Artificial Sequence: Synthetic oligonucleotide
guauacaucacagaaguag

SEQ ID NO: 2646546 - RNA, 19 nt, Artificial Sequence
  Description of Artificial Sequence: Synthetic oligonucleotide
uuuucgacgauucucugca

SEQ ID NO: 2646547 - RNA, 19 nt, Artificial Sequence
  Description of Artificial Sequence: Synthetic oligonucleotide
gauacgguaacacagucuc

SEQ ID NO: 2646548 - RNA, 19 nt, Artificial Sequence
  Description of Artificial Sequence: Synthetic oligonucleotide
aguacaggccaauuugagc

SEQ ID NO: 2646549 - RNA, 19 nt, Artificial Sequence
  Description of Artificial Sequence: Synthetic oligonucleotide
auguaaauaaacaguaggg

SEQ ID NO: 2646550 - RNA, 19 nt, Artificial Sequence
  Description of Artificial Sequence: Synthetic oligonucleotide
uggaaagugcuuuucgacg

SEQ ID NO: 2646551 - RNA, 19 nt, Artificial Sequence
  Description of Artificial Sequence: Synthetic oligonucleotide
ugucugcucaugaugauag

SEQ ID NO: 2646552 - RNA, 19 nt, Artificial Sequence
  Description of Artificial Sequence: Synthetic oligonucleotide
aaagucacuaagcccauca

SEQ ID NO: 2646553 - RNA, 19 nt, Artificial Sequence
  Description of Artificial Sequence: Synthetic oligonucleotide
guaaauaaacaguagggga

SEQ ID NO: 2646554 - RNA, 19 nt, Artificial Sequence
  Description of Artificial Sequence: Synthetic oligonucleotide
cuucugguaauguaguugc

SEQ ID NO: 2646555 - RNA, 19 nt, Artificial Sequence
  Description of Artificial Sequence: Synthetic oligonucleotide
uauacaucacagaaguagu

SEQ ID NO: 2646556 - RNA, 19 nt, Artificial Sequence
  Description of Artificial Sequence: Synthetic oligonucleotide
cauaugauaucaacaagac

SEQ ID NO: 2646557 - RNA, 19 nt, Artificial Sequence
  Description of Artificial Sequence: Synthetic oligonucleotide
aauacuuugucuucuggua

SEQ ID NO: 2646558 - RNA, 19 nt, Artificial Sequence
  Description of Artificial Sequence: Synthetic oligonucleotide
aucuccuuguuucugagag

SEQ ID NO: 2646559 - RNA, 19 nt, Artificial Sequence
  Description of Artificial Sequence: Synthetic oligonucleotide
uaagaagacugccaggaga

SEQ ID NO: 2646560 - RNA, 19 nt, Artificial Sequence
  Description of Artificial Sequence: Synthetic oligonucleotide
agugaucuauuucauuggg

SEQ ID NO: 2646561 - RNA, 19 nt, Artificial Sequence
  Description of Artificial Sequence: Synthetic oligonucleotide
ucuggugucaguacaggcc

SEQ ID NO: 2646562 - RNA, 19 nt, Artificial Sequence
  Description of Artificial Sequence: Synthetic oligonucleotide
caagaaaccaaucuuucug

SEQ ID NO: 2646563 - RNA, 19 nt, Artificial Sequence
  Description of Artificial Sequence: Synthetic oligonucleotide
caaaggaaugcagaaaucc

SEQ ID NO: 2646564 - RNA, 19 nt, Artificial Sequence
  Description of Artificial Sequence: Synthetic oligonucleotide
ugcaauaaccaagaaacca

SEQ ID NO: 2646565 - RNA, 19 nt, Artificial Sequence
  Description of Artificial Sequence: Synthetic oligonucleotide
uaggggagcaaagaaaagg

SEQ ID NO: 2646566 - RNA, 19 nt, Artificial Sequence
  Description of Artificial Sequence: Synthetic oligonucleotide
cugguaauguaguugcugg

SEQ ID NO: 2646567 - RNA, 19 nt, Artificial Sequence
  Description of Artificial Sequence: Synthetic oligonucleotide
uauauaugaucacagcaua

SEQ ID NO: 2646568 - RNA, 19 nt, Artificial Sequence
  Description of Artificial Sequence: Synthetic oligonucleotide
ugauaguauaaaacagagc

SEQ ID NO: 2646569 - RNA, 19 nt, Artificial Sequence
  Description of Artificial Sequence: Synthetic oligonucleotide
gaccacaaaagucacuaag

SEQ ID NO: 2646570 - RNA, 19 nt, Artificial Sequence
  Description of Artificial Sequence: Synthetic oligonucleotide
uaagguaagaagacugcca

SEQ ID NO: 2646571 - RNA, 19 nt, Artificial Sequence
  Description of Artificial Sequence: Synthetic oligonucleotide
agcaaagaaaaggacuacc

SEQ ID NO: 2646572 - RNA, 19 nt, Artificial Sequence
  Description of Artificial Sequence: Synthetic oligonucleotide
uugaccaaaggaaugcaga

SEQ ID NO: 2646573 - RNA, 19 nt, Artificial Sequence
  Description of Artificial Sequence: Synthetic oligonucleotide
accacaaaagucacuaagc

SEQ ID NO: 2646574 - RNA, 19 nt, Artificial Sequence
  Description of Artificial Sequence: Synthetic oligonucleotide
uagugaucuauuucauugg

SEQ ID NO: 2646575 - RNA, 19 nt, Artificial Sequence
  Description of Artificial Sequence: Synthetic oligonucleotide
uauaugaucacagcauaug

SEQ ID NO: 2646576 - RNA, 19 nt, Artificial Sequence
  Description of Artificial Sequence: Synthetic oligonucleotide
cugugauacgguaacacag

SEQ ID NO: 2646577 - RNA, 19 nt, Artificial Sequence
  Description of Artificial Sequence: Synthetic oligonucleotide
cugacaguauauaugauca

SEQ ID NO: 2646578 - RNA, 19 nt, Artificial Sequence
  Description of Artificial Sequence: Synthetic oligonucleotide
aaagcagugaugccuuuca

SEQ ID NO: 2646579 - RNA, 19 nt, Artificial Sequence
  Description of Artificial Sequence: Synthetic oligonucleotide
ucucugcagaguaagaccu

SEQ ID NO: 2646580 - RNA, 19 nt, Artificial Sequence
  Description of Artificial Sequence: Synthetic oligonucleotide
agagcaaauacuuugucuu

SEQ ID NO: 2646581 - RNA, 19 nt, Artificial Sequence
  Description of Artificial Sequence: Synthetic oligonucleotide
aauaaccaagaaaccaauc

SEQ ID NO: 2646582 - RNA, 19 nt, Artificial Sequence
  Description of Artificial Sequence: Synthetic oligonucleotide
aguaagguaagaagacugc

SEQ ID NO: 2646583 - RNA, 19 nt, Artificial Sequence
  Description of Artificial Sequence: Synthetic oligonucleotide
aacugcaaguggaaagugc

SEQ ID NO: 2646584 - RNA, 19 nt, Artificial Sequence
  Description of Artificial Sequence: Synthetic oligonucleotide
aagaagugcauggugaaga

SEQ ID NO: 2646585 - RNA, 19 nt, Artificial Sequence
  Description of Artificial Sequence: Synthetic oligonucleotide
uucugucugcucaugauga

SEQ ID NO: 2646586 - RNA, 19 nt, Artificial Sequence
  Description of Artificial Sequence: Synthetic oligonucleotide
cacaaaagucacuaagccc

SEQ ID NO: 2646587 - RNA, 19 nt, Artificial Sequence
  Description of Artificial Sequence: Synthetic oligonucleotide
guaauguaguugcuggccg

SEQ ID NO: 2646588 - RNA, 19 nt, Artificial Sequence
  Description of Artificial Sequence: Synthetic oligonucleotide
ugccaggagaaauugacca

SEQ ID NO: 2646589 - RNA, 19 nt, Artificial Sequence
  Description of Artificial Sequence: Synthetic oligonucleotide
auaugaucacagcauauga

SEQ ID NO: 2646590 - RNA, 19 nt, Artificial Sequence
  Description of Artificial Sequence: Synthetic oligonucleotide
ugugugaugguggaaagca

SEQ ID NO: 2646591 - RNA, 19 nt, Artificial Sequence
  Description of Artificial Sequence: Synthetic oligonucleotide
gacuucaaugccuccaaag

SEQ ID NO: 2646592 - RNA, 19 nt, Artificial Sequence
  Description of Artificial Sequence: Synthetic oligonucleotide
cacauaucggucauaggcc

SEQ ID NO: 2646593 - RNA, 19 nt, Artificial Sequence
  Description of Artificial Sequence: Synthetic oligonucleotide
gaaauugaccaaaggaaug

SEQ ID NO: 2646594 - RNA, 19 nt, Artificial Sequence
  Description of Artificial Sequence: Synthetic oligonucleotide
agcagugaugccuuucaac

SEQ ID NO: 2646595 - RNA, 19 nt, Artificial Sequence
  Description of Artificial Sequence: Synthetic oligonucleotide
agaguuugcaauaaccaag

SEQ ID NO: 2646596 - RNA, 19 nt, Artificial Sequence
  Description of Artificial Sequence: Synthetic oligonucleotide
aagaccugacaguauauau

SEQ ID NO: 2646597 - RNA, 19 nt, Artificial Sequence
  Description of Artificial Sequence: Synthetic oligonucleotide
accaaaggaaugcagaaau

SEQ ID NO: 2646598 - RNA, 19 nt, Artificial Sequence
  Description of Artificial Sequence: Synthetic oligonucleotide
gaccugacaguauauauga

SEQ ID NO: 2646599 - RNA, 19 nt, Artificial Sequence
  Description of Artificial Sequence: Synthetic oligonucleotide
caguaagguaagaagacug

SEQ ID NO: 2646600 - RNA, 19 nt, Artificial Sequence
  Description of Artificial Sequence: Synthetic oligonucleotide
ugauaguguaguguagagg

SEQ ID NO: 2646601 - RNA, 19 nt, Artificial Sequence
  Description of Artificial Sequence: Synthetic oligonucleotide
ugugaugguggaaagcagu

SEQ ID NO: 2646602 - RNA, 19 nt, Artificial Sequence
  Description of Artificial Sequence: Synthetic oligonucleotide
auucucugcagaguaagac

SEQ ID NO: 2646603 - RNA, 19 nt, Artificial Sequence
  Description of Artificial Sequence: Synthetic oligonucleotide
ugcuuuucgacgauucucu

SEQ ID NO: 2646604 - RNA, 19 nt, Artificial Sequence
  Description of Artificial Sequence: Synthetic oligonucleotide
gaucuauuucauuggggcc

SEQ ID NO: 2646605 - RNA, 19 nt, Artificial Sequence
  Description of Artificial Sequence: Synthetic oligonucleotide
gucaguacaggccaauuug

SEQ ID NO: 2646606 - RNA, 19 nt, Artificial Sequence
  Description of Artificial Sequence: Synthetic oligonucleotide
uucauucccugugauacgg

SEQ ID NO: 2646607 - RNA, 19 nt, Artificial Sequence
  Description of Artificial Sequence: Synthetic oligonucleotide
agcauaugauaucaacaag

SEQ ID NO: 2646608 - RNA, 19 nt, Artificial Sequence
  Description of Artificial Sequence: Synthetic oligonucleotide
ugguggaaagcagugaugc

SEQ ID NO: 2646609 - RNA, 19 nt, Artificial Sequence
  Description of Artificial Sequence: Synthetic oligonucleotide
ugugauacgguaacacagu

SEQ ID NO: 2646610 - RNA, 19 nt, Artificial Sequence
  Description of Artificial Sequence: Synthetic oligonucleotide
gaggguauacaucacagaa

SEQ ID NO: 2646611 - RNA, 19 nt, Artificial Sequence
  Description of Artificial Sequence: Synthetic oligonucleotide
ggagaaauugaccaaagga

SEQ ID NO: 2646612 - RNA, 19 nt, Artificial Sequence
  Description of Artificial Sequence: Synthetic oligonucleotide
ugaucacagcauaugauau

SEQ ID NO: 2646613 - RNA, 19 nt, Artificial Sequence
  Description of Artificial Sequence: Synthetic oligonucleotide
acaguauauaugaucacag

SEQ ID NO: 2646614 - RNA, 19 nt, Artificial Sequence
  Description of Artificial Sequence: Synthetic oligonucleotide
gaaaccaaucuuucuggug

SEQ ID NO: 2646615 - RNA, 19 nt, Artificial Sequence
  Description of Artificial Sequence: Synthetic oligonucleotide
ucauaggccauuccuguga

SEQ ID NO: 2646616 - RNA, 19 nt, Artificial Sequence
  Description of Artificial Sequence: Synthetic oligonucleotide
aucacagaaguagugaucu

SEQ ID NO: 2646617 - RNA, 19 nt, Artificial Sequence
  Description of Artificial Sequence: Synthetic oligonucleotide
aggacuaccacagugacau

SEQ ID NO: 2646618 - RNA, 19 nt, Artificial Sequence
  Description of Artificial Sequence: Synthetic oligonucleotide
aggagaaauugaccaaagg

SEQ ID NO: 2646619 - RNA, 19 nt, Artificial Sequence
  Description of Artificial Sequence: Synthetic oligonucleotide
ucaguacaggccaauuuga

SEQ ID NO: 2646620 - RNA, 19 nt, Artificial Sequence
  Description of Artificial Sequence: Synthetic oligonucleotide
uaguguagaggcuugcaga

SEQ ID NO: 2646621 - RNA, 19 nt, Artificial Sequence
  Description of Artificial Sequence: Synthetic oligonucleotide
caacuuguuuccuucauuc

SEQ ID NO: 2646622 - RNA, 19 nt, Artificial Sequence
  Description of Artificial Sequence: Synthetic oligonucleotide
ucacuaagcccaucaaacc

SEQ ID NO: 2646623 - RNA, 19 nt, Artificial Sequence
  Description of Artificial Sequence: Synthetic oligonucleotide
ugaugauaguguaguguag

SEQ ID NO: 2646624 - RNA, 19 nt, Artificial Sequence
  Description of Artificial Sequence: Synthetic oligonucleotide
ucuucugguaauguaguug

SEQ ID NO: 2646625 - RNA, 19 nt, Artificial Sequence
  Description of Artificial Sequence: Synthetic oligonucleotide
aagaccacaaaagucacua

SEQ ID NO: 2646626 - RNA, 19 nt, Artificial Sequence
  Description of Artificial Sequence: Synthetic oligonucleotide
acugccaggagaaauugac

SEQ ID NO: 2646627 - RNA, 19 nt, Artificial Sequence
  Description of Artificial Sequence: Synthetic oligonucleotide
cacaguaagguaagaagac

SEQ ID NO: 2646628 - RNA, 19 nt, Artificial Sequence
  Description of Artificial Sequence: Synthetic oligonucleotide
augaugauaguguagugua

SEQ ID NO: 2646629 - RNA, 19 nt, Artificial Sequence
  Description of Artificial Sequence: Synthetic oligonucleotide
gagcagaggguauacauca

SEQ ID NO: 2646630 - RNA, 19 nt, Artificial Sequence
  Description of Artificial Sequence: Synthetic oligonucleotide
aaccaaucuuucugguguc

SEQ ID NO: 2646631 - RNA, 19 nt, Artificial Sequence
  Description of Artificial Sequence: Synthetic oligonucleotide
ccacauaucggucauaggc

SEQ ID NO: 2646632 - RNA, 19 nt, Artificial Sequence
  Description of Artificial Sequence: Synthetic oligonucleotide
augauaguguaguguagag

SEQ ID NO: 2646633 - RNA, 19 nt, Artificial Sequence
  Description of Artificial Sequence: Synthetic oligonucleotide
caacaagaccacaaaaguc

SEQ ID NO: 2646634 - RNA, 19 nt, Artificial Sequence
  Description of Artificial Sequence: Synthetic oligonucleotide
uggccgaauguaaauaaac

SEQ ID NO: 2646635 - RNA, 19 nt, Artificial Sequence
  Description of Artificial Sequence: Synthetic oligonucleotide
auuccugugaggaugaaga

SEQ ID NO: 2646636 - RNA, 19 nt, Artificial Sequence
  Description of Artificial Sequence: Synthetic oligonucleotide
agaaacugugugauggugg

SEQ ID NO: 2646637 - RNA, 19 nt, Artificial Sequence
  Description of Artificial Sequence: Synthetic oligonucleotide
uugcaauaaccaagaaacc

SEQ ID NO: 2646638 - RNA, 19 nt, Artificial Sequence
  Description of Artificial Sequence: Synthetic oligonucleotide
ugcagaguaagaccugaca

SEQ ID NO: 2646639 - RNA, 19 nt, Artificial Sequence
  Description of Artificial Sequence: Synthetic oligonucleotide
ugccuuucaacuuguuucc

SEQ ID NO: 2646640 - RNA, 19 nt, Artificial Sequence
  Description of Artificial Sequence: Synthetic oligonucleotide
ucaaaccagaguuugcaau

SEQ ID NO: 2646641 - RNA, 19 nt, Artificial Sequence
  Description of Artificial Sequence: Synthetic oligonucleotide
cuuucaacuuguuuccuuc

SEQ ID NO: 2646642 - RNA, 19 nt, Artificial Sequence
  Description of Artificial Sequence: Synthetic oligonucleotide
acagagcaaauacuuuguc

SEQ ID NO: 2646643 - RNA, 19 nt, Artificial Sequence
  Description of Artificial Sequence: Synthetic oligonucleotide
ucgacgauucucugcagag

SEQ ID NO: 2646644 - RNA, 19 nt, Artificial Sequence
  Description of Artificial Sequence: Synthetic oligonucleotide
aguaagaccugacaguaua

SEQ ID NO: 2646645 - RNA, 19 nt, Artificial Sequence
  Description of Artificial Sequence: Synthetic oligonucleotide
agcccaucaaaccagaguu

SEQ ID NO: 2646646 - RNA, 19 nt, Artificial Sequence
  Description of Artificial Sequence: Synthetic oligonucleotide
ugucuucugguaauguagu

SEQ ID NO: 2646647 - RNA, 19 nt, Artificial Sequence
  Description of Artificial Sequence: Synthetic oligonucleotide
ucggucauaggccauuccu

SEQ ID NO: 2646648 - RNA, 19 nt, Artificial Sequence
  Description of Artificial Sequence: Synthetic oligonucleotide
cuuuucgacgauucucugc

SEQ ID NO: 2646649 - RNA, 19 nt, Artificial Sequence
  Description of Artificial Sequence: Synthetic oligonucleotide
gccgaauguaaauaaacag

SEQ ID NO: 2646650 - RNA, 19 nt, Artificial Sequence
  Description of Artificial Sequence: Synthetic oligonucleotide
ggccaauuugagcagaggg

SEQ ID NO: 2646651 - RNA, 19 nt, Artificial Sequence
  Description of Artificial Sequence: Synthetic oligonucleotide
aucacagcauaugauauca

SEQ ID NO: 2646652 - RNA, 19 nt, Artificial Sequence
  Description of Artificial Sequence: Synthetic oligonucleotide
aaagaagugcauggugaag

SEQ ID NO: 2646653 - RNA, 19 nt, Artificial Sequence
  Description of Artificial Sequence: Synthetic oligonucleotide
caguauauaugaucacagc

SEQ ID NO: 2646654 - RNA, 19 nt, Artificial Sequence
  Description of Artificial Sequence: Synthetic oligonucleotide
gcagaguaagaccugacag

SEQ ID NO: 2646655 - RNA, 19 nt, Artificial Sequence
  Description of Artificial Sequence: Synthetic oligonucleotide
gacaguauauaugaucaca

SEQ ID NO: 2646656 - RNA, 19 nt, Artificial Sequence
  Description of Artificial Sequence: Synthetic oligonucleotide
ucugguaauguaguugcug

SEQ ID NO: 2646657 - RNA, 19 nt, Artificial Sequence
  Description of Artificial Sequence: Synthetic oligonucleotide
gauaucaacaagaccacaa

SEQ ID NO: 2646658 - RNA, 19 nt, Artificial Sequence
  Description of Artificial Sequence: Synthetic oligonucleotide
guaguguagaggcuugcag

SEQ ID NO: 2646659 - RNA, 19 nt, Artificial Sequence
  Description of Artificial Sequence: Synthetic oligonucleotide
gucacuaagcccaucaaac

SEQ ID NO: 2646660 - RNA, 19 nt, Artificial Sequence
  Description of Artificial Sequence: Synthetic oligonucleotide
auaaaacagagcaaauacu

SEQ ID NO: 2646661 - RNA, 19 nt, Artificial Sequence
  Description of Artificial Sequence: Synthetic oligonucleotide
ugauacgguaacacagucu

SEQ ID NO: 2646662 - RNA, 19 nt, Artificial Sequence
  Description of Artificial Sequence: Synthetic oligonucleotide
uauuucauuggggccacag

SEQ ID NO: 2646663 - RNA, 19 nt, Artificial Sequence
  Description of Artificial Sequence: Synthetic oligonucleotide
aagugcuuuucgacgauuc

SEQ ID NO: 2646664 - RNA, 19 nt, Artificial Sequence
  Description of Artificial Sequence: Synthetic oligonucleotide
guuugcaauaaccaagaaa

SEQ ID NO: 2646665 - RNA, 19 nt, Artificial Sequence
  Description of Artificial Sequence: Synthetic oligonucleotide
gugacaugggaacugcaag

SEQ ID NO: 2646666 - RNA, 19 nt, Artificial Sequence
  Description of Artificial Sequence: Synthetic oligonucleotide
uaaacaguaggggagcaaa

SEQ ID NO: 2646667 - RNA, 19 nt, Artificial Sequence
  Description of Artificial Sequence: Synthetic oligonucleotide
gaugauaguguaguguaga

SEQ ID NO: 2646668 - RNA, 19 nt, Artificial Sequence
  Description of Artificial Sequence: Synthetic oligonucleotide
ugaccaaaggaaugcagaa

SEQ ID NO: 2646669 - RNA, 19 nt, Artificial Sequence
  Description of Artificial Sequence: Synthetic oligonucleotide
acaugggaacugcaagugg

SEQ ID NO: 2646670 - RNA, 19 nt, Artificial Sequence
  Description of Artificial Sequence: Synthetic oligonucleotide
agaaauugaccaaaggaau

SEQ ID NO: 2646671 - RNA, 19 nt, Artificial Sequence
  Description of Artificial Sequence: Synthetic oligonucleotide
aucuuucuggugucaguac

SEQ ID NO: 2646672 - RNA, 19 nt, Artificial Sequence
  Description of Artificial Sequence: Synthetic oligonucleotide
acauaucggucauaggcca

SEQ ID NO: 2646673 - RNA, 19 nt, Artificial Sequence
  Description of Artificial Sequence: Synthetic oligonucleotide
ugaggaugaagacuucaau

SEQ ID NO: 2646674 - RNA, 19 nt, Artificial Sequence
  Description of Artificial Sequence: Synthetic oligonucleotide
acagcauaugauaucaaca

SEQ ID NO: 2646675 - RNA, 19 nt, Artificial Sequence
  Description of Artificial Sequence: Synthetic oligonucleotide
aacaguaggggagcaaaga

SEQ ID NO: 2646676 - RNA, 19 nt, Artificial Sequence
  Description of Artificial Sequence: Synthetic oligonucleotide
aagaagacugccaggagaa

SEQ ID NO: 2646677 - RNA, 19 nt, Artificial Sequence
  Description of Artificial Sequence: Synthetic oligonucleotide
aaucuuucuggugucagua

SEQ ID NO: 2646678 - RNA, 19 nt, Artificial Sequence
  Description of Artificial Sequence: Synthetic oligonucleotide
acagugacaugggaacugc

SEQ ID NO: 2646679 - RNA, 19 nt, Artificial Sequence
  Description of Artificial Sequence: Synthetic oligonucleotide
ugagcagaggguauacauc

SEQ ID NO: 2646680 - RNA, 19 nt, Artificial Sequence
  Description of Artificial Sequence: Synthetic oligonucleotide
agcaaucauggcaucacac

SEQ ID NO: 2646681 - RNA, 19 nt, Artificial Sequence
  Description of Artificial Sequence: Synthetic oligonucleotide
aauaaacaguaggggagca

SEQ ID NO: 2646682 - RNA, 19 nt, Artificial Sequence
  Description of Artificial Sequence: Synthetic oligonucleotide
aguguagaggcuugcagau

SEQ ID NO: 2646683 - RNA, 19 nt, Artificial Sequence
  Description of Artificial Sequence: Synthetic oligonucleotide
auuugagcagaggguauac

SEQ ID NO: 2646684 - RNA, 19 nt, Artificial Sequence
  Description of Artificial Sequence: Synthetic oligonucleotide
guaagguaagaagacugcc

SEQ ID NO: 2646685 - RNA, 19 nt, Artificial Sequence
  Description of Artificial Sequence: Synthetic oligonucleotide
uucgacgauucucugcaga

SEQ ID NO: 2646686 - RNA, 19 nt, Artificial Sequence
  Description of Artificial Sequence: Synthetic oligonucleotide
uuucaacuuguuuccuuca

SEQ ID NO: 2646687 - RNA, 19 nt, Artificial Sequence
  Description of Artificial Sequence: Synthetic oligonucleotide
acaucacagaaguagugau

SEQ ID NO: 2646688 - RNA, 19 nt, Artificial Sequence
  Description of Artificial Sequence: Synthetic oligonucleotide
uuucuggugucaguacagg

SEQ ID NO: 2646689 - RNA, 19 nt, Artificial Sequence
  Description of Artificial Sequence: Synthetic oligonucleotide
aaccaagaaaccaaucuuu

SEQ ID NO: 2646690 - RNA, 19 nt, Artificial Sequence
  Description of Artificial Sequence: Synthetic oligonucleotide
ucaugaugauaguguagug

SEQ ID NO: 2646691 - RNA, 19 nt, Artificial Sequence
  Description of Artificial Sequence: Synthetic oligonucleotide
uucuggugucaguacaggc

SEQ ID NO: 2646692 - RNA, 19 nt, Artificial Sequence
  Description of Artificial Sequence: Synthetic oligonucleotide
agguaagaagacugccagg

SEQ ID NO: 2646693 - RNA, 19 nt, Artificial Sequence
  Description of Artificial Sequence: Synthetic oligonucleotide
auacuuugucuucugguaa

SEQ ID NO: 2646694 - RNA, 19 nt, Artificial Sequence
  Description of Artificial Sequence: Synthetic oligonucleotide
auuggggccacaguaaggu

SEQ ID NO: 2646695 - RNA, 19 nt, Artificial Sequence
  Description of Artificial Sequence: Synthetic oligonucleotide
guaacacagucucuugaug

SEQ ID NO: 2646696 - RNA, 19 nt, Artificial Sequence
  Description of Artificial Sequence: Synthetic oligonucleotide
guggaaagugcuuuucgac

SEQ ID NO: 2646697 - RNA, 19 nt, Artificial Sequence
  Description of Artificial Sequence: Synthetic oligonucleotide
uaccacagugacaugggaa

SEQ ID NO: 2646698 - RNA, 19 nt, Artificial Sequence
  Description of Artificial Sequence: Synthetic oligonucleotide
cuucugucugcucaugaug

SEQ ID NO: 2646699 - RNA, 19 nt, Artificial Sequence
  Description of Artificial Sequence: Synthetic oligonucleotide
cagcauaugauaucaacaa

SEQ ID NO: 2646700 - RNA, 19 nt, Artificial Sequence
  Description of Artificial Sequence: Synthetic oligonucleotide
cuccuuguuucugagagug

SEQ ID NO: 2646701 - RNA, 19 nt, Artificial Sequence
  Description of Artificial Sequence: Synthetic oligonucleotide
acaagaccacaaaagucac

SEQ ID NO: 2646702 - RNA, 19 nt, Artificial Sequence
  Description of Artificial Sequence: Synthetic oligonucleotide
ugguaauguaguugcuggc

SEQ ID NO: 2646703 - RNA, 19 nt, Artificial Sequence
  Description of Artificial Sequence: Synthetic oligonucleotide
uaauguaguugcuggccga

SEQ ID NO: 2646704 - RNA, 19 nt, Artificial Sequence
  Description of Artificial Sequence: Synthetic oligonucleotide
ugugaggaugaagacuuca

SEQ ID NO: 2646705 - RNA, 19 nt, Artificial Sequence
  Description of Artificial Sequence: Synthetic oligonucleotide
gacaugggaacugcaagug

SEQ ID NO: 2646706 - RNA, 19 nt, Artificial Sequence
  Description of Artificial Sequence: Synthetic oligonucleotide
uggggccacaguaagguaa

SEQ ID NO: 2646707 - RNA, 19 nt, Artificial Sequence
  Description of Artificial Sequence: Synthetic oligonucleotide
ucuucaucuccuuguuucu

SEQ ID NO: 2646708 - RNA, 19 nt, Artificial Sequence
  Description of Artificial Sequence: Synthetic oligonucleotide
aaacaguaggggagcaaag

SEQ ID NO: 2646709 - RNA, 19 nt, Artificial Sequence
  Description of Artificial Sequence: Synthetic oligonucleotide
agucacuaagcccaucaaa

SEQ ID NO: 2646710 - RNA, 19 nt, Artificial Sequence
  Description of Artificial Sequence: Synthetic oligonucleotide
ugucaguacaggccaauuu

SEQ ID NO: 2646711 - RNA, 19 nt, Artificial Sequence
  Description of Artificial Sequence: Synthetic oligonucleotide
ggaugaagacuucaaugcc

SEQ ID NO: 2646712 - RNA, 19 nt, Artificial Sequence
  Description of Artificial Sequence: Synthetic oligonucleotide
auugaccaaaggaaugcag

SEQ ID NO: 2646713 - RNA, 19 nt, Artificial Sequence
  Description of Artificial Sequence: Synthetic oligonucleotide
caugggaacugcaagugga

SEQ ID NO: 2646714 - RNA, 19 nt, Artificial Sequence
  Description of Artificial Sequence: Synthetic oligonucleotide
cuucauucccugugauacg

SEQ ID NO: 2646715 - RNA, 19 nt, Artificial Sequence
  Description of Artificial Sequence: Synthetic oligonucleotide
gcauaugauaucaacaaga

SEQ ID NO: 2646716 - RNA, 19 nt, Artificial Sequence
  Description of Artificial Sequence: Synthetic oligonucleotide
gacgauucucugcagagua

SEQ ID NO: 2646717 - RNA, 19 nt, Artificial Sequence
  Description of Artificial Sequence: Synthetic oligonucleotide
caggagaaauugaccaaag

SEQ ID NO: 2646718 - RNA, 19 nt, Artificial Sequence
  Description of Artificial Sequence: Synthetic oligonucleotide
ucaacuuguuuccuucauu

SEQ ID NO: 2646719 - RNA, 19 nt, Artificial Sequence
  Description of Artificial Sequence: Synthetic oligonucleotide
aaaagucacuaagcccauc

SEQ ID NO: 2646720 - RNA, 19 nt, Artificial Sequence
  Description of Artificial Sequence: Synthetic oligonucleotide
ccacaaaagucacuaagcc

SEQ ID NO: 2646721 - RNA, 19 nt, Artificial Sequence
  Description of Artificial Sequence: Synthetic oligonucleotide
uacaggccaauuugagcag

SEQ ID NO: 2646722 - RNA, 19 nt, Artificial Sequence
  Description of Artificial Sequence: Synthetic oligonucleotide
agaccugacaguauauaug

SEQ ID NO: 2646723 - RNA, 19 nt, Artificial Sequence
  Description of Artificial Sequence: Synthetic oligonucleotide
aucggucauaggccauucc

SEQ ID NO: 2646724 - RNA, 19 nt, Artificial Sequence
  Description of Artificial Sequence: Synthetic oligonucleotide
ucugcagaguaagaccuga

SEQ ID NO: 2646725 - RNA, 19 nt, Artificial Sequence
  Description of Artificial Sequence: Synthetic oligonucleotide
guaagaagacugccaggag

SEQ ID NO: 2646726 - RNA, 19 nt, Artificial Sequence
  Description of Artificial Sequence: Synthetic oligonucleotide
guuucugagaguguaaaua

SEQ ID NO: 2646727 - RNA, 19 nt, Artificial Sequence
  Description of Artificial Sequence: Synthetic oligonucleotide
agaggguauacaucacaga

SEQ ID NO: 2646728 - RNA, 19 nt, Artificial Sequence
  Description of Artificial Sequence: Synthetic oligonucleotide
caucacagaaguagugauc

SEQ ID NO: 2646729 - RNA, 19 nt, Artificial Sequence
  Description of Artificial Sequence: Synthetic oligonucleotide
cauuggggccacaguaagg

SEQ ID NO: 2646730 - RNA, 19 nt, Artificial Sequence
  Description of Artificial Sequence: Synthetic oligonucleotide
gguaauguaguugcuggcc

SEQ ID NO: 2646731 - RNA, 19 nt, Artificial Sequence
  Description of Artificial Sequence: Synthetic oligonucleotide
aggguauacaucacagaag

SEQ ID NO: 2646732 - RNA, 19 nt, Artificial Sequence
  Description of Artificial Sequence: Synthetic oligonucleotide
cacuaagcccaucaaacca

SEQ ID NO: 2646733 - RNA, 19 nt, Artificial Sequence
  Description of Artificial Sequence: Synthetic oligonucleotide
uuguuucugagaguguaaa

SEQ ID NO: 2646734 - RNA, 19 nt, Artificial Sequence
  Description of Artificial Sequence: Synthetic oligonucleotide
uguuucugagaguguaaau

SEQ ID NO: 2646735 - RNA, 19 nt, Artificial Sequence
  Description of Artificial Sequence: Synthetic oligonucleotide
gguaagaagacugccagga

SEQ ID NO: 2646736 - RNA, 19 nt, Artificial Sequence
  Description of Artificial Sequence: Synthetic oligonucleotide
aguagugaucuauuucauu

SEQ ID NO: 2646737 - RNA, 19 nt, Artificial Sequence
  Description of Artificial Sequence: Synthetic oligonucleotide
uccugugaggaugaagacu

SEQ ID NO: 2646738 - RNA, 19 nt, Artificial Sequence
  Description of Artificial Sequence: Synthetic oligonucleotide
uugcagauggccacauauc

SEQ ID NO: 2646739 - RNA, 19 nt, Artificial Sequence
  Description of Artificial Sequence: Synthetic oligonucleotide
aggaagcagcaaucauggc

SEQ ID NO: 2646740 - RNA, 19 nt, Artificial Sequence
  Description of Artificial Sequence: Synthetic oligonucleotide
ugauaucaacaagaccaca

SEQ ID NO: 2646741 - RNA, 19 nt, Artificial Sequence
  Description of Artificial Sequence: Synthetic oligonucleotide
aagucacuaagcccaucaa

SEQ ID NO: 2646742 - RNA, 19 nt, Artificial Sequence
  Description of Artificial Sequence: Synthetic oligonucleotide
auaguauaaaacagagcaa

SEQ ID NO: 2646743 - RNA, 19 nt, Artificial Sequence
  Description of Artificial Sequence: Synthetic oligonucleotide
agugcuuuucgacgauucu

SEQ ID NO: 2646744 - RNA, 19 nt, Artificial Sequence
  Description of Artificial Sequence: Synthetic oligonucleotide
ccugacaguauauaugauc

SEQ ID NO: 2646745 - RNA, 19 nt, Artificial Sequence
  Description of Artificial Sequence: Synthetic oligonucleotide
uacgguaacacagucucuu

SEQ ID NO: 2646746 - RNA, 19 nt, Artificial Sequence
  Description of Artificial Sequence: Synthetic oligonucleotide
cauaggccauuccugugag

SEQ ID NO: 2646747 - RNA, 19 nt, Artificial Sequence
  Description of Artificial Sequence: Synthetic oligonucleotide
ggaaagugcuuuucgacga

SEQ ID NO: 2646748 - RNA, 19 nt, Artificial Sequence
  Description of Artificial Sequence: Synthetic oligonucleotide
ugcaaguggaaagugcuuu

SEQ ID NO: 2646749 - RNA, 19 nt, Artificial Sequence
  Description of Artificial Sequence: Synthetic oligonucleotide
auacaucacagaaguagug

SEQ ID NO: 2646750 - RNA, 19 nt, Artificial Sequence
  Description of Artificial Sequence: Synthetic oligonucleotide
ggguauacaucacagaagu

SEQ ID NO: 2646751 - RNA, 19 nt, Artificial Sequence
  Description of Artificial Sequence: Synthetic oligonucleotide
ggcguugauaguauaaaac

SEQ ID NO: 2646752 - RNA, 19 nt, Artificial Sequence
  Description of Artificial Sequence: Synthetic oligonucleotide
guauauaugaucacagcau

SEQ ID NO: 2646753 - RNA, 19 nt, Artificial Sequence
  Description of Artificial Sequence: Synthetic oligonucleotide
aauguaguugcuggccgaa

SEQ ID NO: 2646754 - RNA, 19 nt, Artificial Sequence
  Description of Artificial Sequence: Synthetic oligonucleotide
cagaguuugcaauaaccaa

SEQ ID NO: 2646755 - RNA, 19 nt, Artificial Sequence
  Description of Artificial Sequence: Synthetic oligonucleotide
ugaugguggaaagcaguga

SEQ ID NO: 2646756 - RNA, 19 nt, Artificial Sequence
  Description of Artificial Sequence: Synthetic oligonucleotide
aagacugccaggagaaauu

SEQ ID NO: 2646757 - RNA, 19 nt, Artificial Sequence
  Description of Artificial Sequence: Synthetic oligonucleotide
caaaccagaguuugcaaua

SEQ ID NO: 2646758 - RNA, 19 nt, Artificial Sequence
  Description of Artificial Sequence: Synthetic oligonucleotide
ucuauuucauuggggccac

SEQ ID NO: 2646759 - RNA, 19 nt, Artificial Sequence
  Description of Artificial Sequence: Synthetic oligonucleotide
uuccugugaggaugaagac

SEQ ID NO: 2646760 - RNA, 19 nt, Artificial Sequence
  Description of Artificial Sequence: Synthetic oligonucleotide
uaagaccugacaguauaua

SEQ ID NO: 2646761 - RNA, 19 nt, Artificial Sequence
  Description of Artificial Sequence: Synthetic oligonucleotide
gaacugcaaguggaaagug

SEQ ID NO: 2646762 - RNA, 19 nt, Artificial Sequence
  Description of Artificial Sequence: Synthetic oligonucleotide
auauaugaucacagcauau

SEQ ID NO: 2646763 - RNA, 19 nt, Artificial Sequence
  Description of Artificial Sequence: Synthetic oligonucleotide
gugauacgguaacacaguc

SEQ ID NO: 2646764 - RNA, 19 nt, Artificial Sequence
  Description of Artificial Sequence: Synthetic oligonucleotide
uucugguaauguaguugcu

SEQ ID NO: 2646765 - RNA, 19 nt, Artificial Sequence
  Description of Artificial Sequence: Synthetic oligonucleotide
acgguaacacagucucuug

SEQ ID NO: 2646766 - RNA, 19 nt, Artificial Sequence
  Description of Artificial Sequence: Synthetic oligonucleotide
auaggccauuccugugagg

SEQ ID NO: 2646767 - RNA, 19 nt, Artificial Sequence
  Description of Artificial Sequence: Synthetic oligonucleotide
uuucgacgauucucugcag

SEQ ID NO: 2646768 - RNA, 19 nt, Artificial Sequence
  Description of Artificial Sequence: Synthetic oligonucleotide
ccacaguaagguaagaaga

SEQ ID NO: 2646769 - RNA, 19 nt, Artificial Sequence
  Description of Artificial Sequence: Synthetic oligonucleotide
gucauaggccauuccugug

SEQ ID NO: 2646770 - RNA, 19 nt, Artificial Sequence
  Description of Artificial Sequence: Synthetic oligonucleotide
gagcaaagaaaaggacuac

SEQ ID NO: 2646771 - RNA, 19 nt, Artificial Sequence
  Description of Artificial Sequence: Synthetic oligonucleotide
cuuguuuccuucauucccu

SEQ ID NO: 2646772 - RNA, 19 nt, Artificial Sequence
  Description of Artificial Sequence: Synthetic oligonucleotide
aagcagugaugccuuucaa

SEQ ID NO: 2646773 - RNA, 19 nt, Artificial Sequence
  Description of Artificial Sequence: Synthetic oligonucleotide
ucuccuuguuucugagagu

SEQ ID NO: 2646774 - RNA, 19 nt, Artificial Sequence
  Description of Artificial Sequence: Synthetic oligonucleotide
ccagaguuugcaauaacca

SEQ ID NO: 2646775 - RNA, 19 nt, Artificial Sequence
  Description of Artificial Sequence: Synthetic oligonucleotide
ucacagcauaugauaucaa

SEQ ID NO: 2646776 - RNA, 19 nt, Artificial Sequence
  Description of Artificial Sequence: Synthetic oligonucleotide
caaugccuccaaagaagug

SEQ ID NO: 2646777 - RNA, 19 nt, Artificial Sequence
  Description of Artificial Sequence: Synthetic oligonucleotide
caggccaauuugagcagag

SEQ ID NO: 2646778 - RNA, 19 nt, Artificial Sequence
  Description of Artificial Sequence: Synthetic oligonucleotide
aguuugcaauaaccaagaa

SEQ ID NO: 2646779 - RNA, 19 nt, Artificial Sequence
  Description of Artificial Sequence: Synthetic oligonucleotide
cuugcagauggccacauau

SEQ ID NO: 2646780 - RNA, 19 nt, Artificial Sequence
  Description of Artificial Sequence: Synthetic oligonucleotide
ggagcaaagaaaaggacua

SEQ ID NO: 2646781 - RNA, 19 nt, Artificial Sequence
  Description of Artificial Sequence: Synthetic oligonucleotide
gcagugaugccuuucaacu

SEQ ID NO: 2646782 - RNA, 19 nt, Artificial Sequence
  Description of Artificial Sequence: Synthetic oligonucleotide
ucauucccugugauacggu

SEQ ID NO: 2646783 - RNA, 19 nt, Artificial Sequence
  Description of Artificial Sequence: Synthetic oligonucleotide
uuccuucauucccugugau

SEQ ID NO: 2646784 - RNA, 19 nt, Artificial Sequence
  Description of Artificial Sequence: Synthetic oligonucleotide
cagagcaaauacuuugucu

SEQ ID NO: 2646785 - RNA, 19 nt, Artificial Sequence
  Description of Artificial Sequence: Synthetic oligonucleotide
aaggacuaccacagugaca

SEQ ID NO: 2646786 - RNA, 19 nt, Artificial Sequence
  Description of Artificial Sequence: Synthetic oligonucleotide
cgaauguaaauaaacagua

SEQ ID NO: 2646787 - RNA, 19 nt, Artificial Sequence
  Description of Artificial Sequence: Synthetic oligonucleotide
uccuuguuucugagagugu

SEQ ID NO: 2646788 - RNA, 19 nt, Artificial Sequence
  Description of Artificial Sequence: Synthetic oligonucleotide
uccuucauucccugugaua

SEQ ID NO: 2646789 - RNA, 19 nt, Artificial Sequence
  Description of Artificial Sequence: Synthetic oligonucleotide
cuuguuucugagaguguaa

SEQ ID NO: 2646790 - RNA, 19 nt, Artificial Sequence
  Description of Artificial Sequence: Synthetic oligonucleotide
gugcuuuucgacgauucuc

SEQ ID NO: 2646791 - RNA, 19 nt, Artificial Sequence
  Description of Artificial Sequence: Synthetic oligonucleotide
caguaggggagcaaagaaa

SEQ ID NO: 2646792 - RNA, 19 nt, Artificial Sequence
  Description of Artificial Sequence: Synthetic oligonucleotide
uugcuggccgaauguaaau

SEQ ID NO: 2646793 - RNA, 19 nt, Artificial Sequence
  Description of Artificial Sequence: Synthetic oligonucleotide
guggaaagcagugaugccu

SEQ ID NO: 2646794 - RNA, 19 nt, Artificial Sequence
  Description of Artificial Sequence: Synthetic oligonucleotide
ucugucugcucaugaugau

SEQ ID NO: 2646795 - RNA, 19 nt, Artificial Sequence
  Description of Artificial Sequence: Synthetic oligonucleotide
ggccacauaucggucauag

SEQ ID NO: 2646796 - RNA, 19 nt, Artificial Sequence
  Description of Artificial Sequence: Synthetic oligonucleotide
cuaagcccaucaaaccaga

SEQ ID NO: 2646797 - RNA, 19 nt, Artificial Sequence
  Description of Artificial Sequence: Synthetic oligonucleotide
agcagcaaucauggcauca

SEQ ID NO: 2646798 - RNA, 19 nt, Artificial Sequence
  Description of Artificial Sequence: Synthetic oligonucleotide
gaugccuuucaacuuguuu

SEQ ID NO: 2646799 - RNA, 19 nt, Artificial Sequence
  Description of Artificial Sequence: Synthetic oligonucleotide
agcagaggguauacaucac

SEQ ID NO: 2646800 - RNA, 19 nt, Artificial Sequence
  Description of Artificial Sequence: Synthetic oligonucleotide
acacagucucuugauggca

SEQ ID NO: 2646801 - RNA, 19 nt, Artificial Sequence
  Description of Artificial Sequence: Synthetic oligonucleotide
gcagauggccacauaucgg

SEQ ID NO: 2646802 - RNA, 19 nt, Artificial Sequence
  Description of Artificial Sequence: Synthetic oligonucleotide
augccuccaaagaagugca

SEQ ID NO: 2646803 - RNA, 19 nt, Artificial Sequence
  Description of Artificial Sequence: Synthetic oligonucleotide
gaccaaaggaaugcagaaa

SEQ ID NO: 2646804 - RNA, 19 nt, Artificial Sequence
  Description of Artificial Sequence: Synthetic oligonucleotide
gguggaaagcagugaugcc

SEQ ID NO: 2646805 - RNA, 19 nt, Artificial Sequence
  Description of Artificial Sequence: Synthetic oligonucleotide
agaccacaaaagucacuaa

SEQ ID NO: 2646806 - RNA, 19 nt, Artificial Sequence
  Description of Artificial Sequence: Synthetic oligonucleotide
auaguguaguguagaggcu

SEQ ID NO: 2646807 - RNA, 19 nt, Artificial Sequence
  Description of Artificial Sequence: Synthetic oligonucleotide
cugcagaguaagaccugac

SEQ ID NO: 2646808 - RNA, 19 nt, Artificial Sequence
  Description of Artificial Sequence: Synthetic oligonucleotide
guaguugcuggccgaaugu

SEQ ID NO: 2646809 - RNA, 19 nt, Artificial Sequence
  Description of Artificial Sequence: Synthetic oligonucleotide
ugggaacugcaaguggaaa

SEQ ID NO: 2646810 - RNA, 19 nt, Artificial Sequence
  Description of Artificial Sequence: Synthetic oligonucleotide
ccgaauguaaauaaacagu

SEQ ID NO: 2646811 - RNA, 19 nt, Artificial Sequence
  Description of Artificial Sequence: Synthetic oligonucleotide
gaagacugccaggagaaau

SEQ ID NO: 2646812 - RNA, 19 nt, Artificial Sequence
  Description of Artificial Sequence: Synthetic oligonucleotide
ggccgaauguaaauaaaca

SEQ ID NO: 2646813 - RNA, 19 nt, Artificial Sequence
  Description of Artificial Sequence: Synthetic oligonucleotide
caauaaccaagaaaccaau

SEQ ID NO: 2646814 - RNA, 19 nt, Artificial Sequence
  Description of Artificial Sequence: Synthetic oligonucleotide
augguggaaagcagugaug

SEQ ID NO: 2646815 - RNA, 19 nt, Artificial Sequence
  Description of Artificial Sequence: Synthetic oligonucleotide
ugcuggccgaauguaaaua

SEQ ID NO: 2646816 - RNA, 19 nt, Artificial Sequence
  Description of Artificial Sequence: Synthetic oligonucleotide
agacuucaaugccuccaaa

SEQ ID NO: 2646817 - RNA, 19 nt, Artificial Sequence
  Description of Artificial Sequence: Synthetic oligonucleotide
ggccauuccugugaggaug

SEQ ID NO: 2646818 - RNA, 19 nt, Artificial Sequence
  Description of Artificial Sequence: Synthetic oligonucleotide
uaucggucauaggccauuc

SEQ ID NO: 2646819 - RNA, 19 nt, Artificial Sequence
  Description of Artificial Sequence: Synthetic oligonucleotide
caaucauggcaucacacuu

SEQ ID NO: 2646820 - RNA, 19 nt, Artificial Sequence
  Description of Artificial Sequence: Synthetic oligonucleotide
ccaaaggaaugcagaaauc

SEQ ID NO: 2646821 - RNA, 19 nt, Artificial Sequence
  Description of Artificial Sequence: Synthetic oligonucleotide
aguugcuggccgaauguaa

SEQ ID NO: 2646822 - RNA, 19 nt, Artificial Sequence
  Description of Artificial Sequence: Synthetic oligonucleotide
acaggccaauuugagcaga

SEQ ID NO: 2646823 - RNA, 19 nt, Artificial Sequence
  Description of Artificial Sequence: Synthetic oligonucleotide
gggagcaaagaaaaggacu

SEQ ID NO: 2646824 - RNA, 19 nt, Artificial Sequence
  Description of Artificial Sequence: Synthetic oligonucleotide
cuggccgaauguaaauaaa

SEQ ID NO: 2646825 - RNA, 19 nt, Artificial Sequence
  Description of Artificial Sequence: Synthetic oligonucleotide
uaguugcuggccgaaugua

SEQ ID NO: 2646826 - RNA, 19 nt, Artificial Sequence
  Description of Artificial Sequence: Synthetic oligonucleotide
cauucccugugauacggua

SEQ ID NO: 2646827 - RNA, 19 nt, Artificial Sequence
  Description of Artificial Sequence: Synthetic oligonucleotide
gcaaucauggcaucacacu

SEQ ID NO: 2646828 - RNA, 19 nt, Artificial Sequence
  Description of Artificial Sequence: Synthetic oligonucleotide
gcuggccgaauguaaauaa

SEQ ID NO: 2646829 - RNA, 19 nt, Artificial Sequence
  Description of Artificial Sequence: Synthetic oligonucleotide
auaucggucauaggccauu

SEQ ID NO: 2646830 - RNA, 19 nt, Artificial Sequence
  Description of Artificial Sequence: Synthetic oligonucleotide
uggugucaguacaggccaa

SEQ ID NO: 2646831 - RNA, 19 nt, Artificial Sequence
  Description of Artificial Sequence: Synthetic oligonucleotide
gguaacacagucucuugau

SEQ ID NO: 2646832 - RNA, 19 nt, Artificial Sequence
  Description of Artificial Sequence: Synthetic oligonucleotide
ccugugauacgguaacaca

SEQ ID NO: 2646833 - RNA, 19 nt, Artificial Sequence
  Description of Artificial Sequence: Synthetic oligonucleotide
gccacauaucggucauagg

SEQ ID NO: 2646834 - RNA, 19 nt, Artificial Sequence
  Description of Artificial Sequence: Synthetic oligonucleotide
caucuccuuguuucugaga

SEQ ID NO: 2646835 - RNA, 19 nt, Artificial Sequence
  Description of Artificial Sequence: Synthetic oligonucleotide
gcuuuucgacgauucucug

SEQ ID NO: 2646836 - RNA, 19 nt, Artificial Sequence
  Description of Artificial Sequence: Synthetic oligonucleotide
guguagaggcuugcagaug

SEQ ID NO: 2646837 - RNA, 19 nt, Artificial Sequence
  Description of Artificial Sequence: Synthetic oligonucleotide
uggcauucuucaucuccuu

SEQ ID NO: 2646838 - RNA, 19 nt, Artificial Sequence
  Description of Artificial Sequence: Synthetic oligonucleotide
gacugccaggagaaauuga

SEQ ID NO: 2646839 - RNA, 19 nt, Artificial Sequence
  Description of Artificial Sequence: Synthetic oligonucleotide
gaaagugcuuuucgacgau

SEQ ID NO: 2646840 - RNA, 19 nt, Artificial Sequence
  Description of Artificial Sequence: Synthetic oligonucleotide
ggaacugcaaguggaaagu

SEQ ID NO: 2646841 - RNA, 19 nt, Artificial Sequence
  Description of Artificial Sequence: Synthetic oligonucleotide
ccaaucuuucuggugucag

SEQ ID NO: 2646842 - RNA, 19 nt, Artificial Sequence
  Description of Artificial Sequence: Synthetic oligonucleotide
cacagaaguagugaucuau

SEQ ID NO: 2646843 - RNA, 19 nt, Artificial Sequence
  Description of Artificial Sequence: Synthetic oligonucleotide
cugugaggaugaagacuuc

SEQ ID NO: 2646844 - RNA, 19 nt, Artificial Sequence
  Description of Artificial Sequence: Synthetic oligonucleotide
gggcguugauaguauaaaa

SEQ ID NO: 2646845 - RNA, 19 nt, Artificial Sequence
  Description of Artificial Sequence: Synthetic oligonucleotide
auacgguaacacagucucu

SEQ ID NO: 2646846 - RNA, 19 nt, Artificial Sequence
  Description of Artificial Sequence: Synthetic oligonucleotide
ugccuccaaagaagugcau

SEQ ID NO: 2646847 - RNA, 19 nt, Artificial Sequence
  Description of Artificial Sequence: Synthetic oligonucleotide
aggccauuccugugaggau

SEQ ID NO: 2646848 - RNA, 19 nt, Artificial Sequence
  Description of Artificial Sequence: Synthetic oligonucleotide
ccugugaggaugaagacuu

SEQ ID NO: 2646849 - RNA, 19 nt, Artificial Sequence
  Description of Artificial Sequence: Synthetic oligonucleotide
ccaauuugagcagagggua

SEQ ID NO: 2646850 - RNA, 19 nt, Artificial Sequence
  Description of Artificial Sequence: Synthetic oligonucleotide
cgauucucugcagaguaag

SEQ ID NO: 2646851 - RNA, 19 nt, Artificial Sequence
  Description of Artificial Sequence: Synthetic oligonucleotide
gcaucacacuucugucugc

SEQ ID NO: 2646852 - RNA, 19 nt, Artificial Sequence
  Description of Artificial Sequence: Synthetic oligonucleotide
caaucuuucuggugucagu

SEQ ID NO: 2646853 - RNA, 19 nt, Artificial Sequence
  Description of Artificial Sequence: Synthetic oligonucleotide
caauuugagcagaggguau

SEQ ID NO: 2646854 - RNA, 19 nt, Artificial Sequence
  Description of Artificial Sequence: Synthetic oligonucleotide
cagugacaugggaacugca

SEQ ID NO: 2646855 - RNA, 19 nt, Artificial Sequence
  Description of Artificial Sequence: Synthetic oligonucleotide
caagaccacaaaagucacu

SEQ ID NO: 2646856 - RNA, 19 nt, Artificial Sequence
  Description of Artificial Sequence: Synthetic oligonucleotide
agaagacugccaggagaaa

SEQ ID NO: 2646857 - RNA, 19 nt, Artificial Sequence
  Description of Artificial Sequence: Synthetic oligonucleotide
acgauucucugcagaguaa

SEQ ID NO: 2646858 - RNA, 19 nt, Artificial Sequence
  Description of Artificial Sequence: Synthetic oligonucleotide
gccaauuugagcagagggu

SEQ ID NO: 2646859 - RNA, 19 nt, Artificial Sequence
  Description of Artificial Sequence: Synthetic oligonucleotide
cacagucucuugauggcau

SEQ ID NO: 2646860 - RNA, 19 nt, Artificial Sequence
  Description of Artificial Sequence: Synthetic oligonucleotide
guaagaccugacaguauau

SEQ ID NO: 2646861 - RNA, 19 nt, Artificial Sequence
  Description of Artificial Sequence: Synthetic oligonucleotide
ggggcguugauaguauaaa

SEQ ID NO: 2646862 - RNA, 19 nt, Artificial Sequence
  Description of Artificial Sequence: Synthetic oligonucleotide
ccaagaaaccaaucuuucu

SEQ ID NO: 2646863 - RNA, 19 nt, Artificial Sequence
  Description of Artificial Sequence: Synthetic oligonucleotide
cugucugcucaugaugaua

SEQ ID NO: 2646864 - RNA, 19 nt, Artificial Sequence
  Description of Artificial Sequence: Synthetic oligonucleotide
caaaagucacuaagcccau

SEQ ID NO: 2646865 - RNA, 19 nt, Artificial Sequence
  Description of Artificial Sequence: Synthetic oligonucleotide
accugacaguauauaugau

SEQ ID NO: 2646866 - RNA, 19 nt, Artificial Sequence
  Description of Artificial Sequence: Synthetic oligonucleotide
aggcuugcagauggccaca

SEQ ID NO: 2646867 - RNA, 19 nt, Artificial Sequence
  Description of Artificial Sequence: Synthetic oligonucleotide
caucacacuucugucugcu

SEQ ID NO: 2646868 - RNA, 19 nt, Artificial Sequence
  Description of Artificial Sequence: Synthetic oligonucleotide
ggccacaguaagguaagaa

SEQ ID NO: 2646869 - RNA, 19 nt, Artificial Sequence
  Description of Artificial Sequence: Synthetic oligonucleotide
ccaggagaaauugaccaaa

SEQ ID NO: 2646870 - RNA, 19 nt, Artificial Sequence
  Description of Artificial Sequence: Synthetic oligonucleotide
cacacuucugucugcucau

SEQ ID NO: 2646871 - RNA, 19 nt, Artificial Sequence
  Description of Artificial Sequence: Synthetic oligonucleotide
ccuuguuucugagagugua

SEQ ID NO: 2646872 - RNA, 19 nt, Artificial Sequence
  Description of Artificial Sequence: Synthetic oligonucleotide
gucuucugguaauguaguu

SEQ ID NO: 2646873 - RNA, 19 nt, Artificial Sequence
  Description of Artificial Sequence: Synthetic oligonucleotide
gaguaagaccugacaguau

SEQ ID NO: 2646874 - RNA, 19 nt, Artificial Sequence
  Description of Artificial Sequence: Synthetic oligonucleotide
cuccaaagaagugcauggu

SEQ ID NO: 2646875 - RNA, 19 nt, Artificial Sequence
  Description of Artificial Sequence: Synthetic oligonucleotide
cauaucggucauaggccau

SEQ ID NO: 2646876 - RNA, 19 nt, Artificial Sequence
  Description of Artificial Sequence: Synthetic oligonucleotide
gguauacaucacagaagua

SEQ ID NO: 2646877 - RNA, 19 nt, Artificial Sequence
  Description of Artificial Sequence: Synthetic oligonucleotide
cagugaugccuuucaacuu

SEQ ID NO: 2646878 - RNA, 19 nt, Artificial Sequence
  Description of Artificial Sequence: Synthetic oligonucleotide
gucugcucaugaugauagu

SEQ ID NO: 2646879 - RNA, 19 nt, Artificial Sequence
  Description of Artificial Sequence: Synthetic oligonucleotide
ggacuaccacagugacaug

SEQ ID NO: 2646880 - RNA, 19 nt, Artificial Sequence
  Description of Artificial Sequence: Synthetic oligonucleotide
cgguaacacagucucuuga

SEQ ID NO: 2646881 - RNA, 19 nt, Artificial Sequence
  Description of Artificial Sequence: Synthetic oligonucleotide
cugcaaguggaaagugcuu

SEQ ID NO: 2646882 - RNA, 19 nt, Artificial Sequence
  Description of Artificial Sequence: Synthetic oligonucleotide
gcaaguggaaagugcuuuu

SEQ ID NO: 2646883 - RNA, 19 nt, Artificial Sequence
  Description of Artificial Sequence: Synthetic oligonucleotide
uggccacauaucggucaua

SEQ ID NO: 2646884 - RNA, 19 nt, Artificial Sequence
  Description of Artificial Sequence: Synthetic oligonucleotide
cuauuucauuggggccaca

SEQ ID NO: 2646885 - RNA, 19 nt, Artificial Sequence
  Description of Artificial Sequence: Synthetic oligonucleotide
gugucaguacaggccaauu

SEQ ID NO: 2646886 - RNA, 19 nt, Artificial Sequence
  Description of Artificial Sequence: Synthetic oligonucleotide
ggugucaguacaggccaau

SEQ ID NO: 2646887 - RNA, 19 nt, Artificial Sequence
  Description of Artificial Sequence: Synthetic oligonucleotide
ggaaagcagugaugccuuu

SEQ ID NO: 2646888 - RNA, 19 nt, Artificial Sequence
  Description of Artificial Sequence: Synthetic oligonucleotide
gccuuucaacuuguuuccu

SEQ ID NO: 2646889 - RNA, 19 nt, Artificial Sequence
  Description of Artificial Sequence: Synthetic oligonucleotide
gggccacaguaagguaaga

SEQ ID NO: 2646890 - RNA, 19 nt, Artificial Sequence
  Description of Artificial Sequence: Synthetic oligonucleotide
ccacagugacaugggaacu

SEQ ID NO: 2646891 - RNA, 19 nt, Artificial Sequence
  Description of Artificial Sequence: Synthetic oligonucleotide
gcccaucaaaccagaguuu

SEQ ID NO: 2646892 - RNA, 19 nt, Artificial Sequence
  Description of Artificial Sequence: Synthetic oligonucleotide
ggcuugcagauggccacau

SEQ ID NO: 2646893 - RNA, 19 nt, Artificial Sequence
  Description of Artificial Sequence: Synthetic oligonucleotide
cgacgauucucugcagagu

SEQ ID NO: 2646894 - RNA, 19 nt, Artificial Sequence
  Description of Artificial Sequence: Synthetic oligonucleotide
ccauuccugugaggaugaa

SEQ ID NO: 2646895 - RNA, 19 nt, Artificial Sequence
  Description of Artificial Sequence: Synthetic oligonucleotide
uuucccaucacauacaucc

SEQ ID NO: 2646896 - RNA, 19 nt, Artificial Sequence
  Description of Artificial Sequence: Synthetic oligonucleotide
aacgacagaaucuugaucu

SEQ ID NO: 2646897 - RNA, 19 nt, Artificial Sequence
  Description of Artificial Sequence: Synthetic oligonucleotide
agaaucuugaucuccaucg

SEQ ID NO: 2646898 - RNA, 19 nt, Artificial Sequence
  Description of Artificial Sequence: Synthetic oligonucleotide
aaacggauguuucagggcg

SEQ ID NO: 2646899 - RNA, 19 nt, Artificial Sequence
  Description of Artificial Sequence: Synthetic oligonucleotide
aagacauugaagcuuguag

SEQ ID NO: 2646900 - RNA, 19 nt, Artificial Sequence
  Description of Artificial Sequence: Synthetic oligonucleotide
aacuauuugccugaaacgg

SEQ ID NO: 2646901 - RNA, 19 nt, Artificial Sequence
  Description of Artificial Sequence: Synthetic oligonucleotide
uguaggaauacugagcugg

SEQ ID NO: 2646902 - RNA, 19 nt, Artificial Sequence
  Description of Artificial Sequence: Synthetic oligonucleotide
uauuuauuguguauguuug

SEQ ID NO: 2646903 - RNA, 19 nt, Artificial Sequence
  Description of Artificial Sequence: Synthetic oligonucleotide
ucucucuggauccaaaacg

SEQ ID NO: 2646904 - RNA, 19 nt, Artificial Sequence
  Description of Artificial Sequence: Synthetic oligonucleotide
uguauguuugaaaugccag

SEQ ID NO: 2646905 - RNA, 19 nt, Artificial Sequence
  Description of Artificial Sequence: Synthetic oligonucleotide
agacauugaagcuuguagg

SEQ ID NO: 2646906 - RNA, 19 nt, Artificial Sequence
  Description of Artificial Sequence: Synthetic oligonucleotide
uuaggcucagauauuuugg

SEQ ID NO: 2646907 - RNA, 19 nt, Artificial Sequence
  Description of Artificial Sequence: Synthetic oligonucleotide
ugaaacggauguuucaggg

SEQ ID NO: 2646908 - RNA, 19 nt, Artificial Sequence
  Description of Artificial Sequence: Synthetic oligonucleotide
ugaaaugccaggcugagau

SEQ ID NO: 2646909 - RNA, 19 nt, Artificial Sequence
  Description of Artificial Sequence: Synthetic oligonucleotide
aaucuugaucuccaucgac

SEQ ID NO: 2646910 - RNA, 19 nt, Artificial Sequence
  Description of Artificial Sequence: Synthetic oligonucleotide
uuguguauguuugaaaugc

SEQ ID NO: 2646911 - RNA, 19 nt, Artificial Sequence
  Description of Artificial Sequence: Synthetic oligonucleotide
uguuugaaaugccaggcug

SEQ ID NO: 2646912 - RNA, 19 nt, Artificial Sequence
  Description of Artificial Sequence: Synthetic oligonucleotide
ucucugaugaucucagggg

SEQ ID NO: 2646913 - RNA, 19 nt, Artificial Sequence
  Description of Artificial Sequence: Synthetic oligonucleotide
aggguuuucaucaucuucc

SEQ ID NO: 2646914 - RNA, 19 nt, Artificial Sequence
  Description of Artificial Sequence: Synthetic oligonucleotide
ucuccauauucucugauga

SEQ ID NO: 2646915 - RNA, 19 nt, Artificial Sequence
  Description of Artificial Sequence: Synthetic oligonucleotide
aaacgacagaaucuugauc

SEQ ID NO: 2646916 - RNA, 19 nt, Artificial Sequence
  Description of Artificial Sequence: Synthetic oligonucleotide
gauccaaaacgacagaauc

SEQ ID NO: 2646917 - RNA, 19 nt, Artificial Sequence
  Description of Artificial Sequence: Synthetic oligonucleotide
uauucucugaugaucucag

SEQ ID NO: 2646918 - RNA, 19 nt, Artificial Sequence
  Description of Artificial Sequence: Synthetic oligonucleotide
gauauuuugguuucaucca

SEQ ID NO: 2646919 - RNA, 19 nt, Artificial Sequence
  Description of Artificial Sequence: Synthetic oligonucleotide
ugcuguuucuucagaaagg

SEQ ID NO: 2646920 - RNA, 19 nt, Artificial Sequence
  Description of Artificial Sequence: Synthetic oligonucleotide
aauccuuccguaccugguc

SEQ ID NO: 2646921 - RNA, 19 nt, Artificial Sequence
  Description of Artificial Sequence: Synthetic oligonucleotide
agaaaggggaccuuucaag

SEQ ID NO: 2646922 - RNA, 19 nt, Artificial Sequence
  Description of Artificial Sequence: Synthetic oligonucleotide
uugacaacaaggucucggg

SEQ ID NO: 2646923 - RNA, 19 nt, Artificial Sequence
  Description of Artificial Sequence: Synthetic oligonucleotide
uuuucuaguuucuuaggcu

SEQ ID NO: 2646924 - RNA, 19 nt, Artificial Sequence
  Description of Artificial Sequence: Synthetic oligonucleotide
gcagaguucauacagaaug

SEQ ID NO: 2646925 - RNA, 19 nt, Artificial Sequence
  Description of Artificial Sequence: Synthetic oligonucleotide
aucacauacauccugccgu

SEQ ID NO: 2646926 - RNA, 19 nt, Artificial Sequence
  Description of Artificial Sequence: Synthetic oligonucleotide
aguucauacagaaugcauc

SEQ ID NO: 2646927 - RNA, 19 nt, Artificial Sequence
  Description of Artificial Sequence: Synthetic oligonucleotide
ugagccacugcuuacgggc

SEQ ID NO: 2646928 - RNA, 19 nt, Artificial Sequence
  Description of Artificial Sequence: Synthetic oligonucleotide
caacuauuugccugaaacg

SEQ ID NO: 2646929 - RNA, 19 nt, Artificial Sequence
  Description of Artificial Sequence: Synthetic oligonucleotide
cucaaaucucucuggaucc

SEQ ID NO: 2646930 - RNA, 19 nt, Artificial Sequence
  Description of Artificial Sequence: Synthetic oligonucleotide
aggaauacugagcuggcag

SEQ ID NO: 2646931 - RNA, 19 nt, Artificial Sequence
  Description of Artificial Sequence: Synthetic oligonucleotide
gaagcuuguaggaauacug

SEQ ID NO: 2646932 - RNA, 19 nt, Artificial Sequence
  Description of Artificial Sequence: Synthetic oligonucleotide
agcauugacaacaaggucu

SEQ ID NO: 2646933 - RNA, 19 nt, Artificial Sequence
  Description of Artificial Sequence: Synthetic oligonucleotide
aaaacgacagaaucuugau

SEQ ID NO: 2646934 - RNA, 19 nt, Artificial Sequence
  Description of Artificial Sequence: Synthetic oligonucleotide
gagaucagcauccuucagc

SEQ ID NO: 2646935 - RNA, 19 nt, Artificial Sequence
  Description of Artificial Sequence: Synthetic oligonucleotide
uuaguucugacacccaguc

SEQ ID NO: 2646936 - RNA, 19 nt, Artificial Sequence
  Description of Artificial Sequence: Synthetic oligonucleotide
acugcuuacgggcauagcu

SEQ ID NO: 2646937 - RNA, 19 nt, Artificial Sequence
  Description of Artificial Sequence: Synthetic oligonucleotide
aaagcaggguaguagugga

SEQ ID NO: 2646938 - RNA, 19 nt, Artificial Sequence
  Description of Artificial Sequence: Synthetic oligonucleotide
auugacaacaaggucucgg

SEQ ID NO: 2646939 - RNA, 19 nt, Artificial Sequence
  Description of Artificial Sequence: Synthetic oligonucleotide
ucugcuugacaagacauug

SEQ ID NO: 2646940 - RNA, 19 nt, Artificial Sequence
  Description of Artificial Sequence: Synthetic oligonucleotide
guuucuuaggcucagauau

SEQ ID NO: 2646941 - RNA, 19 nt, Artificial Sequence
  Description of Artificial Sequence: Synthetic oligonucleotide
ucagcauccuucagcauug

SEQ ID NO: 2646942 - RNA, 19 nt, Artificial Sequence
  Description of Artificial Sequence: Synthetic oligonucleotide
gauguuucagggcgcagag

SEQ ID NO: 2646943 - RNA, 19 nt, Artificial Sequence
  Description of Artificial Sequence: Synthetic oligonucleotide
uguguauguuugaaaugcc

SEQ ID NO: 2646944 - RNA, 19 nt, Artificial Sequence
  Description of Artificial Sequence: Synthetic oligonucleotide
acgaguggcgcuaagcugc

SEQ ID NO: 2646945 - RNA, 19 nt, Artificial Sequence
  Description of Artificial Sequence: Synthetic oligonucleotide
uugacaagacauugaagcu

SEQ ID NO: 2646946 - RNA, 19 nt, Artificial Sequence
  Description of Artificial Sequence: Synthetic oligonucleotide
ugcuugacaagacauugaa

SEQ ID NO: 2646947 - RNA, 19 nt, Artificial Sequence
  Description of Artificial Sequence: Synthetic oligonucleotide
uuuaguucugacacccagu

SEQ ID NO: 2646948 - RNA, 19 nt, Artificial Sequence
  Description of Artificial Sequence: Synthetic oligonucleotide
agcuuguaggaauacugag

SEQ ID NO: 2646949 - RNA, 19 nt, Artificial Sequence
  Description of Artificial Sequence: Synthetic oligonucleotide
gaaacggauguuucagggc

SEQ ID NO: 2646950 - RNA, 19 nt, Artificial Sequence
  Description of Artificial Sequence: Synthetic oligonucleotide
cagaguucauacagaaugc

SEQ ID NO: 2646951 - RNA, 19 nt, Artificial Sequence
  Description of Artificial Sequence: Synthetic oligonucleotide
ugcaaagcaggguaguagu

SEQ ID NO: 2646952 - RNA, 19 nt, Artificial Sequence
  Description of Artificial Sequence: Synthetic oligonucleotide
gaauacugagcuggcaggg

SEQ ID NO: 2646953 - RNA, 19 nt, Artificial Sequence
  Description of Artificial Sequence: Synthetic oligonucleotide
cauauuuucaggauaagau

SEQ ID NO: 2646954 - RNA, 19 nt, Artificial Sequence
  Description of Artificial Sequence: Synthetic oligonucleotide
uauuugcucuccauauucu

SEQ ID NO: 2646955 - RNA, 19 nt, Artificial Sequence
  Description of Artificial Sequence: Synthetic oligonucleotide
gaggcucaaaucucucugg

SEQ ID NO: 2646956 - RNA, 19 nt, Artificial Sequence
  Description of Artificial Sequence: Synthetic oligonucleotide
gaaaggggaccuuucaaga

SEQ ID NO: 2646957 - RNA, 19 nt, Artificial Sequence
  Description of Artificial Sequence: Synthetic oligonucleotide
gaaggacuccuuuucagca

SEQ ID NO: 2646958 - RNA, 19 nt, Artificial Sequence
  Description of Artificial Sequence: Synthetic oligonucleotide
uucaagaauccuuccguac

SEQ ID NO: 2646959 - RNA, 19 nt, Artificial Sequence
  Description of Artificial Sequence: Synthetic oligonucleotide
aauacugagcuggcagggg

SEQ ID NO: 2646960 - RNA, 19 nt, Artificial Sequence
  Description of Artificial Sequence: Synthetic oligonucleotide
agaauccuuccguaccugg

SEQ ID NO: 2646961 - RNA, 19 nt, Artificial Sequence
  Description of Artificial Sequence: Synthetic oligonucleotide
accuuucaagaauccuucc

SEQ ID NO: 2646962 - RNA, 19 nt, Artificial Sequence
  Description of Artificial Sequence: Synthetic oligonucleotide
caaaacgacagaaucuuga

SEQ ID NO: 2646963 - RNA, 19 nt, Artificial Sequence
  Description of Artificial Sequence: Synthetic oligonucleotide
uuugaaaugccaggcugag

SEQ ID NO: 2646964 - RNA, 19 nt, Artificial Sequence
  Description of Artificial Sequence: Synthetic oligonucleotide
ugcuucuuuaguucugaca

SEQ ID NO: 2646965 - RNA, 19 nt, Artificial Sequence
  Description of Artificial Sequence: Synthetic oligonucleotide
aaaggggaccuuucaagaa

SEQ ID NO: 2646966 - RNA, 19 nt, Artificial Sequence
  Description of Artificial Sequence: Synthetic oligonucleotide
ccaacuauuugccugaaac

SEQ ID NO: 2646967 - RNA, 19 nt, Artificial Sequence
  Description of Artificial Sequence: Synthetic oligonucleotide
accuggucuauuuauugug

SEQ ID NO: 2646968 - RNA, 19 nt, Artificial Sequence
  Description of Artificial Sequence: Synthetic oligonucleotide
caucacauacauccugccg

SEQ ID NO: 2646969 - RNA, 19 nt, Artificial Sequence
  Description of Artificial Sequence: Synthetic oligonucleotide
caaagcaggguaguagugg

SEQ ID NO: 2646970 - RNA, 19 nt, Artificial Sequence
  Description of Artificial Sequence: Synthetic oligonucleotide
aaggggaccuuucaagaau

SEQ ID NO: 2646971 - RNA, 19 nt, Artificial Sequence
  Description of Artificial Sequence: Synthetic oligonucleotide
aaucucucuggauccaaaa

SEQ ID NO: 2646972 - RNA, 19 nt, Artificial Sequence
  Description of Artificial Sequence: Synthetic oligonucleotide
uucuaguuucuuaggcuca

SEQ ID NO: 2646973 - RNA, 19 nt, Artificial Sequence
  Description of Artificial Sequence: Synthetic oligonucleotide
acauauuuucaggauaaga

SEQ ID NO: 2646974 - RNA, 19 nt, Artificial Sequence
  Description of Artificial Sequence: Synthetic oligonucleotide
uccauauucucugaugauc

SEQ ID NO: 2646975 - RNA, 19 nt, Artificial Sequence
  Description of Artificial Sequence: Synthetic oligonucleotide
cugaaacggauguuucagg

SEQ ID NO: 2646976 - RNA, 19 nt, Artificial Sequence
  Description of Artificial Sequence: Synthetic oligonucleotide
uucauccaguauuugcucu

SEQ ID NO: 2646977 - RNA, 19 nt, Artificial Sequence
  Description of Artificial Sequence: Synthetic oligonucleotide
guaccuggucuauuuauug

SEQ ID NO: 2646978 - RNA, 19 nt, Artificial Sequence
  Description of Artificial Sequence: Synthetic oligonucleotide
agcaggguaguaguggacg

SEQ ID NO: 2646979 - RNA, 19 nt, Artificial Sequence
  Description of Artificial Sequence: Synthetic oligonucleotide
acauucuccgaggaguuuc

SEQ ID NO: 2646980 - RNA, 19 nt, Artificial Sequence
  Description of Artificial Sequence: Synthetic oligonucleotide
caucgacacugucugaugc

SEQ ID NO: 2646981 - RNA, 19 nt, Artificial Sequence
  Description of Artificial Sequence: Synthetic oligonucleotide
ggaauacugagcuggcagg

SEQ ID NO: 2646982 - RNA, 19 nt, Artificial Sequence
  Description of Artificial Sequence: Synthetic oligonucleotide
aguggcgcuaagcugccuc

SEQ ID NO: 2646983 - RNA, 19 nt, Artificial Sequence
  Description of Artificial Sequence: Synthetic oligonucleotide
aggguaguaguggacgggc

SEQ ID NO: 2646984 - RNA, 19 nt, Artificial Sequence
  Description of Artificial Sequence: Synthetic oligonucleotide
cuuguaggaauacugagcu

SEQ ID NO: 2646985 - RNA, 19 nt, Artificial Sequence
  Description of Artificial Sequence: Synthetic oligonucleotide
uaguuucuuaggcucagau

SEQ ID NO: 2646986 - RNA, 19 nt, Artificial Sequence
  Description of Artificial Sequence: Synthetic oligonucleotide
aggacuccuuuucagcauc

SEQ ID NO: 2646987 - RNA, 19 nt, Artificial Sequence
  Description of Artificial Sequence: Synthetic oligonucleotide
uaagcugccucugcaaagc

SEQ ID NO: 2646988 - RNA, 19 nt, Artificial Sequence
  Description of Artificial Sequence: Synthetic oligonucleotide
ggguaagcacuucaggacg

SEQ ID NO: 2646989 - RNA, 19 nt, Artificial Sequence
  Description of Artificial Sequence: Synthetic oligonucleotide
uuucauccaguauuugcuc

SEQ ID NO: 2646990 - RNA, 19 nt, Artificial Sequence
  Description of Artificial Sequence: Synthetic oligonucleotide
acuucaggacgaguggcgc

SEQ ID NO: 2646991 - RNA, 19 nt, Artificial Sequence
  Description of Artificial Sequence: Synthetic oligonucleotide
cuaagcugccucugcaaag

SEQ ID NO: 2646992 - RNA, 19 nt, Artificial Sequence
  Description of Artificial Sequence: Synthetic oligonucleotide
cuucuuuaguucugacacc

SEQ ID NO: 2646993 - RNA, 19 nt, Artificial Sequence
  Description of Artificial Sequence: Synthetic oligonucleotide
uaggcucagauauuuuggu

SEQ ID NO: 2646994 - RNA, 19 nt, Artificial Sequence
  Description of Artificial Sequence: Synthetic oligonucleotide
uuucagggcgcagaguuca

SEQ ID NO: 2646995 - RNA, 19 nt, Artificial Sequence
  Description of Artificial Sequence: Synthetic oligonucleotide
uuucaagaauccuuccgua

SEQ ID NO: 2646996 - RNA, 19 nt, Artificial Sequence
  Description of Artificial Sequence: Synthetic oligonucleotide
ucuaguuucuuaggcucag

SEQ ID NO: 2646997 - RNA, 19 nt, Artificial Sequence
  Description of Artificial Sequence: Synthetic oligonucleotide
aacggauguuucagggcgc

SEQ ID NO: 2646998 - RNA, 19 nt, Artificial Sequence
  Description of Artificial Sequence: Synthetic oligonucleotide
uauuugccugaaacggaug

SEQ ID NO: 2646999 - RNA, 19 nt, Artificial Sequence
  Description of Artificial Sequence: Synthetic oligonucleotide
ugcuuacgggcauagcucu

SEQ ID NO: 2647000 - RNA, 19 nt, Artificial Sequence
  Description of Artificial Sequence: Synthetic oligonucleotide
auauucucugaugaucuca

SEQ ID NO: 2647001 - RNA, 19 nt, Artificial Sequence
  Description of Artificial Sequence: Synthetic oligonucleotide
aagcuuguaggaauacuga

SEQ ID NO: 2647002 - RNA, 19 nt, Artificial Sequence
  Description of Artificial Sequence: Synthetic oligonucleotide
uccgaggaguuucccauca

SEQ ID NO: 2647003 - RNA, 19 nt, Artificial Sequence
  Description of Artificial Sequence: Synthetic oligonucleotide
acgggcauagcucuccuca

SEQ ID NO: 2647004 - RNA, 19 nt, Artificial Sequence
  Description of Artificial Sequence: Synthetic oligonucleotide
ugcgaaggacuccuuuuca

SEQ ID NO: 2647005 - RNA, 19 nt, Artificial Sequence
  Description of Artificial Sequence: Synthetic oligonucleotide
ucaaaguccgugucuuccu

SEQ ID NO: 2647006 - RNA, 19 nt, Artificial Sequence
  Description of Artificial Sequence: Synthetic oligonucleotide
uggucuauuuauuguguau

SEQ ID NO: 2647007 - RNA, 19 nt, Artificial Sequence
  Description of Artificial Sequence: Synthetic oligonucleotide
uuucuucagaaaggggacc

SEQ ID NO: 2647008 - RNA, 19 nt, Artificial Sequence
  Description of Artificial Sequence: Synthetic oligonucleotide
uucagaaaggggaccuuuc

SEQ ID NO: 2647009 - RNA, 19 nt, Artificial Sequence
  Description of Artificial Sequence: Synthetic oligonucleotide
ugagaucagcauccuucag

SEQ ID NO: 2647010 - RNA, 19 nt, Artificial Sequence
  Description of Artificial Sequence: Synthetic oligonucleotide
cacuucaggacgaguggcg

SEQ ID NO: 2647011 - RNA, 19 nt, Artificial Sequence
  Description of Artificial Sequence: Synthetic oligonucleotide
uucugacacccagucaggg

SEQ ID NO: 2647012 - RNA, 19 nt, Artificial Sequence
  Description of Artificial Sequence: Synthetic oligonucleotide
gaugcuguuucuucagaaa

SEQ ID NO: 2647013 - RNA, 19 nt, Artificial Sequence
  Description of Artificial Sequence: Synthetic oligonucleotide
uggauccaaaacgacagaa

SEQ ID NO: 2647014 - RNA, 19 nt, Artificial Sequence
  Description of Artificial Sequence: Synthetic oligonucleotide
uaccuggucuauuuauugu

SEQ ID NO: 2647015 - RNA, 19 nt, Artificial Sequence
  Description of Artificial Sequence: Synthetic oligonucleotide
gacgaguggcgcuaagcug

SEQ ID NO: 2647016 - RNA, 19 nt, Artificial Sequence
  Description of Artificial Sequence: Synthetic oligonucleotide
ugacaagacauugaagcuu

SEQ ID NO: 2647017 - RNA, 19 nt, Artificial Sequence
  Description of Artificial Sequence: Synthetic oligonucleotide
uggacgggcgcugcgaagg

SEQ ID NO: 2647018 - RNA, 19 nt, Artificial Sequence
  Description of Artificial Sequence: Synthetic oligonucleotide
acgacagaaucuugaucuc

SEQ ID NO: 2647019 - RNA, 19 nt, Artificial Sequence
  Description of Artificial Sequence: Synthetic oligonucleotide
ucuccgaggaguuucccau

SEQ ID NO: 2647020 - RNA, 19 nt, Artificial Sequence
  Description of Artificial Sequence: Synthetic oligonucleotide
ggucuauuuauuguguaug

SEQ ID NO: 2647021 - RNA, 19 nt, Artificial Sequence
  Description of Artificial Sequence: Synthetic oligonucleotide
aaggacuccuuuucagcau

SEQ ID NO: 2647022 - RNA, 19 nt, Artificial Sequence
  Description of Artificial Sequence: Synthetic oligonucleotide
gaccuuucaagaauccuuc

SEQ ID NO: 2647023 - RNA, 19 nt, Artificial Sequence
  Description of Artificial Sequence: Synthetic oligonucleotide
ucauccaguauuugcucuc

SEQ ID NO: 2647024 - RNA, 19 nt, Artificial Sequence
  Description of Artificial Sequence: Synthetic oligonucleotide
ugaagcuuguaggaauacu

SEQ ID NO: 2647025 - RNA, 19 nt, Artificial Sequence
  Description of Artificial Sequence: Synthetic oligonucleotide
auccaaaacgacagaaucu

SEQ ID NO: 2647026 - RNA, 19 nt, Artificial Sequence
  Description of Artificial Sequence: Synthetic oligonucleotide
ucucuggauccaaaacgac

SEQ ID NO: 2647027 - RNA, 19 nt, Artificial Sequence
  Description of Artificial Sequence: Synthetic oligonucleotide
ucuuuaguucugacaccca

SEQ ID NO: 2647028 - RNA, 19 nt, Artificial Sequence
  Description of Artificial Sequence: Synthetic oligonucleotide
gcucaaaucucucuggauc

SEQ ID NO: 2647029 - RNA, 19 nt, Artificial Sequence
  Description of Artificial Sequence: Synthetic oligonucleotide
aucuugaucuccaucgaca

SEQ ID NO: 2647030 - RNA, 19 nt, Artificial Sequence
  Description of Artificial Sequence: Synthetic oligonucleotide
cucuggauccaaaacgaca

SEQ ID NO: 2647031 - RNA, 19 nt, Artificial Sequence
  Description of Artificial Sequence: Synthetic oligonucleotide
ugucuuccucauccagccg

SEQ ID NO: 2647032 - RNA, 19 nt, Artificial Sequence
  Description of Artificial Sequence: Synthetic oligonucleotide
agaguucauacagaaugca

SEQ ID NO: 2647033 - RNA, 19 nt, Artificial Sequence
  Description of Artificial Sequence: Synthetic oligonucleotide
gaaucuugaucuccaucga

SEQ ID NO: 2647034 - RNA, 19 nt, Artificial Sequence
  Description of Artificial Sequence: Synthetic oligonucleotide
ccuuucaagaauccuuccg

SEQ ID NO: 2647035 - RNA, 19 nt, Artificial Sequence
  Description of Artificial Sequence: Synthetic oligonucleotide
cugcuuacgggcauagcuc

SEQ ID NO: 2647036 - RNA, 19 nt, Artificial Sequence
  Description of Artificial Sequence: Synthetic oligonucleotide
gacauauuuucaggauaag

SEQ ID NO: 2647037 - RNA, 19 nt, Artificial Sequence
  Description of Artificial Sequence: Synthetic oligonucleotide
auccugccgucccacuugc

SEQ ID NO: 2647038 - RNA, 19 nt, Artificial Sequence
  Description of Artificial Sequence: Synthetic oligonucleotide
ucuauuuauuguguauguu

SEQ ID NO: 2647039 - RNA, 19 nt, Artificial Sequence
  Description of Artificial Sequence: Synthetic oligonucleotide
cuuacgggcauagcucucc

SEQ ID NO: 2647040 - RNA, 19 nt, Artificial Sequence
  Description of Artificial Sequence: Synthetic oligonucleotide
cauucuccgaggaguuucc

SEQ ID NO: 2647041 - RNA, 19 nt, Artificial Sequence
  Description of Artificial Sequence: Synthetic oligonucleotide
ucagauauuuugguuucau

SEQ ID NO: 2647042 - RNA, 19 nt, Artificial Sequence
  Description of Artificial Sequence: Synthetic oligonucleotide
caggguuuucaucaucuuc

SEQ ID NO: 2647043 - RNA, 19 nt, Artificial Sequence
  Description of Artificial Sequence: Synthetic oligonucleotide
ucacauacauccugccguc

SEQ ID NO: 2647044 - RNA, 19 nt, Artificial Sequence
  Description of Artificial Sequence: Synthetic oligonucleotide
ucugacacccagucagggu

SEQ ID NO: 2647045 - RNA, 19 nt, Artificial Sequence
  Description of Artificial Sequence: Synthetic oligonucleotide
uucuuaggcucagauauuu

SEQ ID NO: 2647046 - RNA, 19 nt, Artificial Sequence
  Description of Artificial Sequence: Synthetic oligonucleotide
uuguaggaauacugagcug

SEQ ID NO: 2647047 - RNA, 19 nt, Artificial Sequence
  Description of Artificial Sequence: Synthetic oligonucleotide
uucuccgaggaguuuccca

SEQ ID NO: 2647048 - RNA, 19 nt, Artificial Sequence
  Description of Artificial Sequence: Synthetic oligonucleotide
aguauuugcucuccauauu

SEQ ID NO: 2647049 - RNA, 19 nt, Artificial Sequence
  Description of Artificial Sequence: Synthetic oligonucleotide
cucaggcacauucuccgag

SEQ ID NO: 2647050 - RNA, 19 nt, Artificial Sequence
  Description of Artificial Sequence: Synthetic oligonucleotide
cagggcgcagaguucauac

SEQ ID NO: 2647051 - RNA, 19 nt, Artificial Sequence
  Description of Artificial Sequence: Synthetic oligonucleotide
aguaguggacgggcgcugc

SEQ ID NO: 2647052 - RNA, 19 nt, Artificial Sequence
  Description of Artificial Sequence: Synthetic oligonucleotide
uaguucugacacccaguca

SEQ ID NO: 2647053 - RNA, 19 nt, Artificial Sequence
  Description of Artificial Sequence: Synthetic oligonucleotide
cuuucaagaauccuuccgu

SEQ ID NO: 2647054 - RNA, 19 nt, Artificial Sequence
  Description of Artificial Sequence: Synthetic oligonucleotide
uccaguauuugcucuccau

SEQ ID NO: 2647055 - RNA, 19 nt, Artificial Sequence
  Description of Artificial Sequence: Synthetic oligonucleotide
acuauuugccugaaacgga

SEQ ID NO: 2647056 - RNA, 19 nt, Artificial Sequence
  Description of Artificial Sequence: Synthetic oligonucleotide
cugcaaagcaggguaguag

SEQ ID NO: 2647057 - RNA, 19 nt, Artificial Sequence
  Description of Artificial Sequence: Synthetic oligonucleotide
ucgacacugucugaugcug

SEQ ID NO: 2647058 - RNA, 19 nt, Artificial Sequence
  Description of Artificial Sequence: Synthetic oligonucleotide
aaguccgugucuuccucau

SEQ ID NO: 2647059 - RNA, 19 nt, Artificial Sequence
  Description of Artificial Sequence: Synthetic oligonucleotide
guuugaaaugccaggcuga

SEQ ID NO: 2647060 - RNA, 19 nt, Artificial Sequence
  Description of Artificial Sequence: Synthetic oligonucleotide
aagcaggguaguaguggac

SEQ ID NO: 2647061 - RNA, 19 nt, Artificial Sequence
  Description of Artificial Sequence: Synthetic oligonucleotide
aucgacacugucugaugcu

SEQ ID NO: 2647062 - RNA, 19 nt, Artificial Sequence
  Description of Artificial Sequence: Synthetic oligonucleotide
uccaucgacacugucugau

SEQ ID NO: 2647063 - RNA, 19 nt, Artificial Sequence
  Description of Artificial Sequence: Synthetic oligonucleotide
ugccugaaacggauguuuc

SEQ ID NO: 2647064 - RNA, 19 nt, Artificial Sequence
  Description of Artificial Sequence: Synthetic oligonucleotide
aggggaccuuucaagaauc

SEQ ID NO: 2647065 - RNA, 19 nt, Artificial Sequence
  Description of Artificial Sequence: Synthetic oligonucleotide
cauauucucugaugaucuc

SEQ ID NO: 2647066 - RNA, 19 nt, Artificial Sequence
  Description of Artificial Sequence: Synthetic oligonucleotide
gcuuguaggaauacugagc

SEQ ID NO: 2647067 - RNA, 19 nt, Artificial Sequence
  Description of Artificial Sequence: Synthetic oligonucleotide
auccuuccguaccuggucu

SEQ ID NO: 2647068 - RNA, 19 nt, Artificial Sequence
  Description of Artificial Sequence: Synthetic oligonucleotide
gggguaagcacuucaggac

SEQ ID NO: 2647069 - RNA, 19 nt, Artificial Sequence
  Description of Artificial Sequence: Synthetic oligonucleotide
gcccuugacauauuuucag

SEQ ID NO: 2647070 - RNA, 19 nt, Artificial Sequence
  Description of Artificial Sequence: Synthetic oligonucleotide
gcugagaucagcauccuuc

SEQ ID NO: 2647071 - RNA, 19 nt, Artificial Sequence
  Description of Artificial Sequence: Synthetic oligonucleotide
gggcgcagaguucauacag

SEQ ID NO: 2647072 - RNA, 19 nt, Artificial Sequence
  Description of Artificial Sequence: Synthetic oligonucleotide
uuucuuaggcucagauauu

SEQ ID NO: 2647073 - RNA, 19 nt, Artificial Sequence
  Description of Artificial Sequence: Synthetic oligonucleotide
cugagaucagcauccuuca

SEQ ID NO: 2647074 - RNA, 19 nt, Artificial Sequence
  Description of Artificial Sequence: Synthetic oligonucleotide
uugaagcuuguaggaauac

SEQ ID NO: 2647075 - RNA, 19 nt, Artificial Sequence
  Description of Artificial Sequence: Synthetic oligonucleotide
ucuuaggcucagauauuuu

SEQ ID NO: 2647076 - RNA, 19 nt, Artificial Sequence
  Description of Artificial Sequence: Synthetic oligonucleotide
ccagucaggguuuucauca

SEQ ID NO: 2647077 - RNA, 19 nt, Artificial Sequence
  Description of Artificial Sequence: Synthetic oligonucleotide
gaaaugccaggcugagauc

SEQ ID NO: 2647078 - RNA, 19 nt, Artificial Sequence
  Description of Artificial Sequence: Synthetic oligonucleotide
cccuugacauauuuucagg

SEQ ID NO: 2647079 - RNA, 19 nt, Artificial Sequence
  Description of Artificial Sequence: Synthetic oligonucleotide
gggcccuugacauauuuuc

SEQ ID NO: 2647080 - RNA, 19 nt, Artificial Sequence
  Description of Artificial Sequence: Synthetic oligonucleotide
ucucugagccacugcuuac

SEQ ID NO: 2647081 - RNA, 19 nt, Artificial Sequence
  Description of Artificial Sequence: Synthetic oligonucleotide
acauugaagcuuguaggaa

SEQ ID NO: 2647082 - RNA, 19 nt, Artificial Sequence
  Description of Artificial Sequence: Synthetic oligonucleotide
cccaucacauacauccugc

SEQ ID NO: 2647083 - RNA, 19 nt, Artificial Sequence
  Description of Artificial Sequence: Synthetic oligonucleotide
cugccucugcaaagcaggg

SEQ ID NO: 2647084 - RNA, 19 nt, Artificial Sequence
  Description of Artificial Sequence: Synthetic oligonucleotide
uuccguaccuggucuauuu

SEQ ID NO: 2647085 - RNA, 19 nt, Artificial Sequence
  Description of Artificial Sequence: Synthetic oligonucleotide
aaaucucucuggauccaaa

SEQ ID NO: 2647086 - RNA, 19 nt, Artificial Sequence
  Description of Artificial Sequence: Synthetic oligonucleotide
guucugacacccagucagg

SEQ ID NO: 2647087 - RNA, 19 nt, Artificial Sequence
  Description of Artificial Sequence: Synthetic oligonucleotide
ugcucuccauauucucuga

SEQ ID NO: 2647088 - RNA, 19 nt, Artificial Sequence
  Description of Artificial Sequence: Synthetic oligonucleotide
uaggaauacugagcuggca

SEQ ID NO: 2647089 - RNA, 19 nt, Artificial Sequence
  Description of Artificial Sequence: Synthetic oligonucleotide
guaggaauacugagcuggc

SEQ ID NO: 2647090 - RNA, 19 nt, Artificial Sequence
  Description of Artificial Sequence: Synthetic oligonucleotide
aggaguuucccaucacaua

SEQ ID NO: 2647091 - RNA, 19 nt, Artificial Sequence
  Description of Artificial Sequence: Synthetic oligonucleotide
cugcgaaggacuccuuuuc

SEQ ID NO: 2647092 - RNA, 19 nt, Artificial Sequence
  Description of Artificial Sequence: Synthetic oligonucleotide
gcaggguaguaguggacgg

SEQ ID NO: 2647093 - RNA, 19 nt, Artificial Sequence
  Description of Artificial Sequence: Synthetic oligonucleotide
uuacgggcauagcucuccu

SEQ ID NO: 2647094 - RNA, 19 nt, Artificial Sequence
  Description of Artificial Sequence: Synthetic oligonucleotide
cauccugccgucccacuug

SEQ ID NO: 2647095 - RNA, 19 nt, Artificial Sequence
  Description of Artificial Sequence: Synthetic oligonucleotide
auugaagcuuguaggaaua

SEQ ID NO: 2647096 - RNA, 19 nt, Artificial Sequence
  Description of Artificial Sequence: Synthetic oligonucleotide
acagaaucuugaucuccau

SEQ ID NO: 2647097 - RNA, 19 nt, Artificial Sequence
  Description of Artificial Sequence: Synthetic oligonucleotide
uccaacuauuugccugaaa

SEQ ID NO: 2647098 - RNA, 19 nt, Artificial Sequence
  Description of Artificial Sequence: Synthetic oligonucleotide
cuugacauauuuucaggau

SEQ ID NO: 2647099 - RNA, 19 nt, Artificial Sequence
  Description of Artificial Sequence: Synthetic oligonucleotide
cauugaagcuuguaggaau

SEQ ID NO: 2647100 - RNA, 19 nt, Artificial Sequence
  Description of Artificial Sequence: Synthetic oligonucleotide
guaguggacgggcgcugcg

SEQ ID NO: 2647101 - RNA, 19 nt, Artificial Sequence
  Description of Artificial Sequence: Synthetic oligonucleotide
gucccacuugcuucuuuag

SEQ ID NO: 2647102 - RNA, 19 nt, Artificial Sequence
  Description of Artificial Sequence: Synthetic oligonucleotide
cugccgucccacuugcuuc

SEQ ID NO: 2647103 - RNA, 19 nt, Artificial Sequence
  Description of Artificial Sequence: Synthetic oligonucleotide
caaaguccgugucuuccuc

SEQ ID NO: 2647104 - RNA, 19 nt, Artificial Sequence
  Description of Artificial Sequence: Synthetic oligonucleotide
gcgaaggacuccuuuucag

SEQ ID NO: 2647105 - RNA, 19 nt, Artificial Sequence
  Description of Artificial Sequence: Synthetic oligonucleotide
gcucagauauuuugguuuc

SEQ ID NO: 2647106 - RNA, 19 nt, Artificial Sequence
  Description of Artificial Sequence: Synthetic oligonucleotide
ucugcaaagcaggguagua

SEQ ID NO: 2647107 - RNA, 19 nt, Artificial Sequence
  Description of Artificial Sequence: Synthetic oligonucleotide
uaagcacuucaggacgagu

SEQ ID NO: 2647108 - RNA, 19 nt, Artificial Sequence
  Description of Artificial Sequence: Synthetic oligonucleotide
uccgugucuuccucaucca

SEQ ID NO: 2647109 - RNA, 19 nt, Artificial Sequence
  Description of Artificial Sequence: Synthetic oligonucleotide
caggguaguaguggacggg

SEQ ID NO: 2647110 - RNA, 19 nt, Artificial Sequence
  Description of Artificial Sequence: Synthetic oligonucleotide
aguccgugucuuccucauc

SEQ ID NO: 2647111 - RNA, 19 nt, Artificial Sequence
  Description of Artificial Sequence: Synthetic oligonucleotide
uugaaaugccaggcugaga

SEQ ID NO: 2647112 - RNA, 19 nt, Artificial Sequence
  Description of Artificial Sequence: Synthetic oligonucleotide
aggcucagauauuuugguu

SEQ ID NO: 2647113 - RNA, 19 nt, Artificial Sequence
  Description of Artificial Sequence: Synthetic oligonucleotide
ccuugacauauuuucagga

SEQ ID NO: 2647114 - RNA, 19 nt, Artificial Sequence
  Description of Artificial Sequence: Synthetic oligonucleotide
gguggaugggcccuugaca

SEQ ID NO: 2647115 - RNA, 19 nt, Artificial Sequence
  Description of Artificial Sequence: Synthetic oligonucleotide
cuauuugccugaaacggau

SEQ ID NO: 2647116 - RNA, 19 nt, Artificial Sequence
  Description of Artificial Sequence: Synthetic oligonucleotide
guaagcacuucaggacgag

SEQ ID NO: 2647117 - RNA, 19 nt, Artificial Sequence
  Description of Artificial Sequence: Synthetic oligonucleotide
ugccgucccacuugcuucu

SEQ ID NO: 2647118 - RNA, 19 nt, Artificial Sequence
  Description of Artificial Sequence: Synthetic oligonucleotide
uccguaccuggucuauuua

SEQ ID NO: 2647119 - RNA, 19 nt, Artificial Sequence
  Description of Artificial Sequence: Synthetic oligonucleotide
caguauuugcucuccauau

SEQ ID NO: 2647120 - RNA, 19 nt, Artificial Sequence
  Description of Artificial Sequence: Synthetic oligonucleotide
gaguuucccaucacauaca

SEQ ID NO: 2647121 - RNA, 19 nt, Artificial Sequence
  Description of Artificial Sequence: Synthetic oligonucleotide
guggaugggcccuugacau

SEQ ID NO: 2647122 - RNA, 19 nt, Artificial Sequence
  Description of Artificial Sequence: Synthetic oligonucleotide
uucaggacgaguggcgcua

SEQ ID NO: 2647123 - RNA, 19 nt, Artificial Sequence
  Description of Artificial Sequence: Synthetic oligonucleotide
cugcuugacaagacauuga

SEQ ID NO: 2647124 - RNA, 19 nt, Artificial Sequence
  Description of Artificial Sequence: Synthetic oligonucleotide
uuugccugaaacggauguu

SEQ ID NO: 2647125 - RNA, 19 nt, Artificial Sequence
  Description of Artificial Sequence: Synthetic oligonucleotide
auccagccgaggcucaaau

SEQ ID NO: 2647126 - RNA, 19 nt, Artificial Sequence
  Description of Artificial Sequence: Synthetic oligonucleotide
cauacauccugccguccca

SEQ ID NO: 2647127 - RNA, 19 nt, Artificial Sequence
  Description of Artificial Sequence: Synthetic oligonucleotide
caucugcuugacaagacau

SEQ ID NO: 2647128 - RNA, 19 nt, Artificial Sequence
  Description of Artificial Sequence: Synthetic oligonucleotide
ugggcccuugacauauuuu

SEQ ID NO: 2647129 - RNA, 19 nt, Artificial Sequence
  Description of Artificial Sequence: Synthetic oligonucleotide
cgaaggacuccuuuucagc

SEQ ID NO: 2647130 - RNA, 19 nt, Artificial Sequence
  Description of Artificial Sequence: Synthetic oligonucleotide
ugacacccagucaggguuu

SEQ ID NO: 2647131 - RNA, 19 nt, Artificial Sequence
  Description of Artificial Sequence: Synthetic oligonucleotide
cauugacaacaaggucucg

SEQ ID NO: 2647132 - RNA, 19 nt, Artificial Sequence
  Description of Artificial Sequence: Synthetic oligonucleotide
gucaggguuuucaucaucu

SEQ ID NO: 2647133 - RNA, 19 nt, Artificial Sequence
  Description of Artificial Sequence: Synthetic oligonucleotide
uaguaguggacgggcgcug

SEQ ID NO: 2647134 - RNA, 19 nt, Artificial Sequence
  Description of Artificial Sequence: Synthetic oligonucleotide
uccagccgaggcucaaauc

SEQ ID NO: 2647135 - RNA, 19 nt, Artificial Sequence
  Description of Artificial Sequence: Synthetic oligonucleotide
caagaauccuuccguaccu

SEQ ID NO: 2647136 - RNA, 19 nt, Artificial Sequence
  Description of Artificial Sequence: Synthetic oligonucleotide
cagaaaggggaccuuucaa

SEQ ID NO: 2647137 - RNA, 19 nt, Artificial Sequence
  Description of Artificial Sequence: Synthetic oligonucleotide
agggcgcagaguucauaca

SEQ ID NO: 2647138 - RNA, 19 nt, Artificial Sequence
  Description of Artificial Sequence: Synthetic oligonucleotide
cagccgaggcucaaaucuc

SEQ ID NO: 2647139 - RNA, 19 nt, Artificial Sequence
  Description of Artificial Sequence: Synthetic oligonucleotide
cuggucuauuuauugugua

SEQ ID NO: 2647140 - RNA, 19 nt, Artificial Sequence
  Description of Artificial Sequence: Synthetic oligonucleotide
gaucuccaucgacacuguc

SEQ ID NO: 2647141 - RNA, 19 nt, Artificial Sequence
  Description of Artificial Sequence: Synthetic oligonucleotide
ccaucacauacauccugcc

SEQ ID NO: 2647142 - RNA, 19 nt, Artificial Sequence
  Description of Artificial Sequence: Synthetic oligonucleotide
acauccugccgucccacuu

SEQ ID NO: 2647143 - RNA, 19 nt, Artificial Sequence
  Description of Artificial Sequence: Synthetic oligonucleotide
gaggaguuucccaucacau

SEQ ID NO: 2647144 - RNA, 19 nt, Artificial Sequence
  Description of Artificial Sequence: Synthetic oligonucleotide
uucugcuggguccccuuuu

SEQ ID NO: 2647145 - RNA, 19 nt, Artificial Sequence
  Description of Artificial Sequence: Synthetic oligonucleotide
uacauccugccgucccacu

SEQ ID NO: 2647146 - RNA, 19 nt, Artificial Sequence
  Description of Artificial Sequence: Synthetic oligonucleotide
ccacuugcuucuuuaguuc

SEQ ID NO: 2647147 - RNA, 19 nt, Artificial Sequence
  Description of Artificial Sequence: Synthetic oligonucleotide
gaguucauacagaaugcau

SEQ ID NO: 2647148 - RNA, 19 nt, Artificial Sequence
  Description of Artificial Sequence: Synthetic oligonucleotide
aguggacgggcgcugcgaa

SEQ ID NO: 2647149 - RNA, 19 nt, Artificial Sequence
  Description of Artificial Sequence: Synthetic oligonucleotide
ggcucagauauuuugguuu

SEQ ID NO: 2647150 - RNA, 19 nt, Artificial Sequence
  Description of Artificial Sequence: Synthetic oligonucleotide
cacauacauccugccgucc

SEQ ID NO: 2647151 - RNA, 19 nt, Artificial Sequence
  Description of Artificial Sequence: Synthetic oligonucleotide
ccauauucucugaugaucu

SEQ ID NO: 2647152 - RNA, 19 nt, Artificial Sequence
  Description of Artificial Sequence: Synthetic oligonucleotide
ccaaaacgacagaaucuug

SEQ ID NO: 2647153 - RNA, 19 nt, Artificial Sequence
  Description of Artificial Sequence: Synthetic oligonucleotide
cugaugcuguuucuucaga

SEQ ID NO: 2647154 - RNA, 19 nt, Artificial Sequence
  Description of Artificial Sequence: Synthetic oligonucleotide
augggcccuugacauauuu

SEQ ID NO: 2647155 - RNA, 19 nt, Artificial Sequence
  Description of Artificial Sequence: Synthetic oligonucleotide
uaguggacgggcgcugcga

SEQ ID NO: 2647156 - RNA, 19 nt, Artificial Sequence
  Description of Artificial Sequence: Synthetic oligonucleotide
cacuugcuucuuuaguucu

SEQ ID NO: 2647157 - RNA, 19 nt, Artificial Sequence
  Description of Artificial Sequence: Synthetic oligonucleotide
ggauguuucagggcgcaga

SEQ ID NO: 2647158 - RNA, 19 nt, Artificial Sequence
  Description of Artificial Sequence: Synthetic oligonucleotide
ugccucugcaaagcagggu

SEQ ID NO: 2647159 - RNA, 19 nt, Artificial Sequence
  Description of Artificial Sequence: Synthetic oligonucleotide
acggauguuucagggcgca

SEQ ID NO: 2647160 - RNA, 19 nt, Artificial Sequence
  Description of Artificial Sequence: Synthetic oligonucleotide
ggcacauucuccgaggagu

SEQ ID NO: 2647161 - RNA, 19 nt, Artificial Sequence
  Description of Artificial Sequence: Synthetic oligonucleotide
aucugcuugacaagacauu

SEQ ID NO: 2647162 - RNA, 19 nt, Artificial Sequence
  Description of Artificial Sequence: Synthetic oligonucleotide
ggcgcuaagcugccucugc

SEQ ID NO: 2647163 - RNA, 19 nt, Artificial Sequence
  Description of Artificial Sequence: Synthetic oligonucleotide
gaauccuuccguaccuggu

SEQ ID NO: 2647164 - RNA, 19 nt, Artificial Sequence
  Description of Artificial Sequence: Synthetic oligonucleotide
cuggauccaaaacgacaga

SEQ ID NO: 2647165 - RNA, 19 nt, Artificial Sequence
  Description of Artificial Sequence: Synthetic oligonucleotide
cuccgaggaguuucccauc

SEQ ID NO: 2647166 - RNA, 19 nt, Artificial Sequence
  Description of Artificial Sequence: Synthetic oligonucleotide
gcacuucaggacgaguggc

SEQ ID NO: 2647167 - RNA, 19 nt, Artificial Sequence
  Description of Artificial Sequence: Synthetic oligonucleotide
cgaggcucaaaucucucug

SEQ ID NO: 2647168 - RNA, 19 nt, Artificial Sequence
  Description of Artificial Sequence: Synthetic oligonucleotide
uacgggcauagcucuccuc

SEQ ID NO: 2647169 - RNA, 19 nt, Artificial Sequence
  Description of Artificial Sequence: Synthetic oligonucleotide
ggguaguaguggacgggcg

SEQ ID NO: 2647170 - RNA, 19 nt, Artificial Sequence
  Description of Artificial Sequence: Synthetic oligonucleotide
agccgaggcucaaaucucu

SEQ ID NO: 2647171 - RNA, 19 nt, Artificial Sequence
  Description of Artificial Sequence: Synthetic oligonucleotide
uggaugggcccuugacaua

SEQ ID NO: 2647172 - RNA, 19 nt, Artificial Sequence
  Description of Artificial Sequence: Synthetic oligonucleotide
cacccagucaggguuuuca

SEQ ID NO: 2647173 - RNA, 19 nt, Artificial Sequence
  Description of Artificial Sequence: Synthetic oligonucleotide
caggcacauucuccgagga

SEQ ID NO: 2647174 - RNA, 19 nt, Artificial Sequence
  Description of Artificial Sequence: Synthetic oligonucleotide
guggacgggcgcugcgaag

SEQ ID NO: 2647175 - RNA, 19 nt, Artificial Sequence
  Description of Artificial Sequence: Synthetic oligonucleotide
gccugaaacggauguuuca

SEQ ID NO: 2647176 - RNA, 19 nt, Artificial Sequence
  Description of Artificial Sequence: Synthetic oligonucleotide
guuucagggcgcagaguuc

SEQ ID NO: 2647177 - RNA, 19 nt, Artificial Sequence
  Description of Artificial Sequence: Synthetic oligonucleotide
ggacgaguggcgcuaagcu

SEQ ID NO: 2647178 - RNA, 19 nt, Artificial Sequence
  Description of Artificial Sequence: Synthetic oligonucleotide
cucagauauuuugguuuca

SEQ ID NO: 2647179 - RNA, 19 nt, Artificial Sequence
  Description of Artificial Sequence: Synthetic oligonucleotide
uucagggcgcagaguucau

SEQ ID NO: 2647180 - RNA, 19 nt, Artificial Sequence
  Description of Artificial Sequence: Synthetic oligonucleotide
caagacauugaagcuugua

SEQ ID NO: 2647181 - RNA, 19 nt, Artificial Sequence
  Description of Artificial Sequence: Synthetic oligonucleotide
gcgcagaguucauacagaa

SEQ ID NO: 2647182 - RNA, 19 nt, Artificial Sequence
  Description of Artificial Sequence: Synthetic oligonucleotide
guaguaguggacgggcgcu

SEQ ID NO: 2647183 - RNA, 19 nt, Artificial Sequence
  Description of Artificial Sequence: Synthetic oligonucleotide
uuccaacuauuugccugaa

SEQ ID NO: 2647184 - RNA, 19 nt, Artificial Sequence
  Description of Artificial Sequence: Synthetic oligonucleotide
uggcgcuaagcugccucug

SEQ ID NO: 2647185 - RNA, 19 nt, Artificial Sequence
  Description of Artificial Sequence: Synthetic oligonucleotide
auguuucagggcgcagagu

SEQ ID NO: 2647186 - RNA, 19 nt, Artificial Sequence
  Description of Artificial Sequence: Synthetic oligonucleotide
ggguggaugggcccuugac

SEQ ID NO: 2647187 - RNA, 19 nt, Artificial Sequence
  Description of Artificial Sequence: Synthetic oligonucleotide
cucauucugcugggucccc

SEQ ID NO: 2647188 - RNA, 19 nt, Artificial Sequence
  Description of Artificial Sequence: Synthetic oligonucleotide
agccacugcuuacgggcau

SEQ ID NO: 2647189 - RNA, 19 nt, Artificial Sequence
  Description of Artificial Sequence: Synthetic oligonucleotide
ccagccgaggcucaaaucu

SEQ ID NO: 2647190 - RNA, 19 nt, Artificial Sequence
  Description of Artificial Sequence: Synthetic oligonucleotide
ccaucgacacugucugaug

SEQ ID NO: 2647191 - RNA, 19 nt, Artificial Sequence
  Description of Artificial Sequence: Synthetic oligonucleotide
caaaucucucuggauccaa

SEQ ID NO: 2647192 - RNA, 19 nt, Artificial Sequence
  Description of Artificial Sequence: Synthetic oligonucleotide
ccucauucugcuggguccc

SEQ ID NO: 2647193 - RNA, 19 nt, Artificial Sequence
  Description of Artificial Sequence: Synthetic oligonucleotide
ucagggcgcagaguucaua

SEQ ID NO: 2647194 - RNA, 19 nt, Artificial Sequence
  Description of Artificial Sequence: Synthetic oligonucleotide
ggggaccuuucaagaaucc

SEQ ID NO: 2647195 - RNA, 19 nt, Artificial Sequence
  Description of Artificial Sequence: Synthetic oligonucleotide
cuaguuucuuaggcucaga

SEQ ID NO: 2647196 - RNA, 19 nt, Artificial Sequence
  Description of Artificial Sequence: Synthetic oligonucleotide
ccaguauuugcucuccaua

SEQ ID NO: 2647197 - RNA, 19 nt, Artificial Sequence
  Description of Artificial Sequence: Synthetic oligonucleotide
ucaggacgaguggcgcuaa

SEQ ID NO: 2647198 - RNA, 19 nt, Artificial Sequence
  Description of Artificial Sequence: Synthetic oligonucleotide
cacugcuuacgggcauagc

SEQ ID NO: 2647199 - RNA, 19 nt, Artificial Sequence
  Description of Artificial Sequence: Synthetic oligonucleotide
ggcccuugacauauuuuca

SEQ ID NO: 2647200 - RNA, 19 nt, Artificial Sequence
  Description of Artificial Sequence: Synthetic oligonucleotide
ggaccuuucaagaauccuu

SEQ ID NO: 2647201 - RNA, 19 nt, Artificial Sequence
  Description of Artificial Sequence: Synthetic oligonucleotide
cuucaggacgaguggcgcu

SEQ ID NO: 2647202 - RNA, 19 nt, Artificial Sequence
  Description of Artificial Sequence: Synthetic oligonucleotide
cuccauauucucugaugau

SEQ ID NO: 2647203 - RNA, 19 nt, Artificial Sequence
  Description of Artificial Sequence: Synthetic oligonucleotide
gacgggcgcugcgaaggac

SEQ ID NO: 2647204 - RNA, 19 nt, Artificial Sequence
  Description of Artificial Sequence: Synthetic oligonucleotide
ggcgcagaguucauacaga

SEQ ID NO: 2647205 - RNA, 19 nt, Artificial Sequence
  Description of Artificial Sequence: Synthetic oligonucleotide
uccugccgucccacuugcu

SEQ ID NO: 2647206 - RNA, 19 nt, Artificial Sequence
  Description of Artificial Sequence: Synthetic oligonucleotide
guggcgcuaagcugccucu

SEQ ID NO: 2647207 - RNA, 19 nt, Artificial Sequence
  Description of Artificial Sequence: Synthetic oligonucleotide
ggauccaaaacgacagaau

SEQ ID NO: 2647208 - RNA, 19 nt, Artificial Sequence
  Description of Artificial Sequence: Synthetic oligonucleotide
ccuggucuauuuauugugu

SEQ ID NO: 2647209 - RNA, 19 nt, Artificial Sequence
  Description of Artificial Sequence: Synthetic oligonucleotide
cuccaucgacacugucuga

SEQ ID NO: 2647210 - RNA, 19 nt, Artificial Sequence
  Description of Artificial Sequence: Synthetic oligonucleotide
cuucagaaaggggaccuuu

SEQ ID NO: 2647211 - RNA, 19 nt, Artificial Sequence
  Description of Artificial Sequence: Synthetic oligonucleotide
gcgcuaagcugccucugca

SEQ ID NO: 2647212 - RNA, 19 nt, Artificial Sequence
  Description of Artificial Sequence: Synthetic oligonucleotide
ggaugggcccuugacauau

SEQ ID NO: 2647213 - RNA, 19 nt, Artificial Sequence
  Description of Artificial Sequence: Synthetic oligonucleotide
cgaggaguuucccaucaca

SEQ ID NO: 2647214 - RNA, 19 nt, Artificial Sequence
  Description of Artificial Sequence: Synthetic oligonucleotide
gcucaggcacauucuccga

SEQ ID NO: 2647215 - RNA, 19 nt, Artificial Sequence
  Description of Artificial Sequence: Synthetic oligonucleotide
ggcucaaaucucucuggau

SEQ ID NO: 2647216 - RNA, 19 nt, Artificial Sequence
  Description of Artificial Sequence: Synthetic oligonucleotide
ggggcucucugagccacug

SEQ ID NO: 2647217 - RNA, 19 nt, Artificial Sequence
  Description of Artificial Sequence: Synthetic oligonucleotide
gcugcgaaggacuccuuuu

SEQ ID NO: 2647218 - RNA, 19 nt, Artificial Sequence
  Description of Artificial Sequence: Synthetic oligonucleotide
gggaccuuucaagaauccu

SEQ ID NO: 2647219 - RNA, 19 nt, Artificial Sequence
  Description of Artificial Sequence: Synthetic oligonucleotide
cgaguggcgcuaagcugcc

SEQ ID NO: 2647220 - RNA, 19 nt, Artificial Sequence
  Description of Artificial Sequence: Synthetic oligonucleotide
ggcgcugcgaaggacuccu

SEQ ID NO: 2647221 - RNA, 19 nt, Artificial Sequence
  Description of Artificial Sequence: Synthetic oligonucleotide
ccgaggaguuucccaucac

SEQ ID NO: 2647222 - RNA, 19 nt, Artificial Sequence
  Description of Artificial Sequence: Synthetic oligonucleotide
cauccagccgaggcucaaa

SEQ ID NO: 2647223 - RNA, 19 nt, Artificial Sequence
  Description of Artificial Sequence: Synthetic oligonucleotide
gcuuacgggcauagcucuc

SEQ ID NO: 2647224 - RNA, 19 nt, Artificial Sequence
  Description of Artificial Sequence: Synthetic oligonucleotide
ggacgggcgcugcgaagga

SEQ ID NO: 2647225 - RNA, 19 nt, Artificial Sequence
  Description of Artificial Sequence: Synthetic oligonucleotide
caucuuccucaaaguccgu

SEQ ID NO: 2647226 - RNA, 19 nt, Artificial Sequence
  Description of Artificial Sequence: Synthetic oligonucleotide
gccgaggcucaaaucucuc

SEQ ID NO: 2647227 - RNA, 19 nt, Artificial Sequence
  Description of Artificial Sequence: Synthetic oligonucleotide
gggguggaugggcccuuga

SEQ ID NO: 2647228 - RNA, 19 nt, Artificial Sequence
  Description of Artificial Sequence: Synthetic oligonucleotide
ccguaccuggucuauuuau

SEQ ID NO: 2647229 - RNA, 19 nt, Artificial Sequence
  Description of Artificial Sequence: Synthetic oligonucleotide
cagcauccuucagcauuga

SEQ ID NO: 2647230 - RNA, 19 nt, Artificial Sequence
  Description of Artificial Sequence: Synthetic oligonucleotide
ggacuccuuuucagcaucu

SEQ ID NO: 2647231 - RNA, 19 nt, Artificial Sequence
  Description of Artificial Sequence: Synthetic oligonucleotide
ccgaggcucaaaucucucu

SEQ ID NO: 2647232 - RNA, 19 nt, Artificial Sequence
  Description of Artificial Sequence: Synthetic oligonucleotide
gggcgcugcgaaggacucc

SEQ ID NO: 2647233 - RNA, 19 nt, Artificial Sequence
  Description of Artificial Sequence: Synthetic oligonucleotide
cgucccacuugcuucuuua

SEQ ID NO: 2647234 - RNA, 19 nt, Artificial Sequence
  Description of Artificial Sequence: Synthetic oligonucleotide
gcacauucuccgaggaguu

SEQ ID NO: 2647235 - RNA, 19 nt, Artificial Sequence
  Description of Artificial Sequence: Synthetic oligonucleotide
cguaccuggucuauuuauu

SEQ ID NO: 2647236 - RNA, 19 nt, Artificial Sequence
  Description of Artificial Sequence: Synthetic oligonucleotide
cuuccguaccuggucuauu

SEQ ID NO: 2647237 - RNA, 19 nt, Artificial Sequence
  Description of Artificial Sequence: Synthetic oligonucleotide
cacauucuccgaggaguuu

SEQ ID NO: 2647238 - RNA, 19 nt, Artificial Sequence
  Description of Artificial Sequence: Synthetic oligonucleotide
gccacugcuuacgggcaua

SEQ ID NO: 2647239 - RNA, 19 nt, Artificial Sequence
  Description of Artificial Sequence: Synthetic oligonucleotide
gaugggcccuugacauauu

SEQ ID NO: 2647240 - RNA, 19 nt, Artificial Sequence
  Description of Artificial Sequence: Synthetic oligonucleotide
ccugccgucccacuugcuu

SEQ ID NO: 2647241 - RNA, 19 nt, Artificial Sequence
  Description of Artificial Sequence: Synthetic oligonucleotide
gaguggcgcuaagcugccu

SEQ ID NO: 2647242 - RNA, 19 nt, Artificial Sequence
  Description of Artificial Sequence: Synthetic oligonucleotide
cgacacugucugaugcugu

SEQ ID NO: 2647243 - RNA, 19 nt, Artificial Sequence
  Description of Artificial Sequence: Synthetic oligonucleotide
ccuuccguaccuggucuau

SEQ ID NO: 2647244 - RNA, 19 nt, Artificial Sequence
  Description of Artificial Sequence: Synthetic oligonucleotide
ccgucccacuugcuucuuu

SEQ ID NO: 2647245 - RNA, 19 nt, Artificial Sequence
  Description of Artificial Sequence: Synthetic oligonucleotide
gccgucccacuugcuucuu

SEQ ID NO: 2647246 - RNA, 19 nt, Artificial Sequence
  Description of Artificial Sequence: Synthetic oligonucleotide
gcgcugcgaaggacuccuu

SEQ ID NO: 2647247 - RNA, 19 nt, Artificial Sequence
  Description of Artificial Sequence: Synthetic oligonucleotide
aaggaaacgcuccugagcc

SEQ ID NO: 2647248 - RNA, 19 nt, Artificial Sequence
  Description of Artificial Sequence: Synthetic oligonucleotide
aauaagaaggcugaguaac

SEQ ID NO: 2647249 - RNA, 19 nt, Artificial Sequence
  Description of Artificial Sequence: Synthetic oligonucleotide
ugugaaaugagcaaucccc

SEQ ID NO: 2647250 - RNA, 19 nt, Artificial Sequence
  Description of Artificial Sequence: Synthetic oligonucleotide
aagguguaaccauagauag

SEQ ID NO: 2647251 - RNA, 19 nt, Artificial Sequence
  Description of Artificial Sequence: Synthetic oligonucleotide
uuuaacauguacaggggcg

SEQ ID NO: 2647252 - RNA, 19 nt, Artificial Sequence
  Description of Artificial Sequence: Synthetic oligonucleotide
aauugcaugugaaaugagc

SEQ ID NO: 2647253 - RNA, 19 nt, Artificial Sequence
  Description of Artificial Sequence: Synthetic oligonucleotide
aacuguacaaauugcaugu

SEQ ID NO: 2647254 - RNA, 19 nt, Artificial Sequence
  Description of Artificial Sequence: Synthetic oligonucleotide
aacuugacccuaucguucc

SEQ ID NO: 2647255 - RNA, 19 nt, Artificial Sequence
  Description of Artificial Sequence: Synthetic oligonucleotide
aacaaggaaauaagaaggc

SEQ ID NO: 2647256 - RNA, 19 nt, Artificial Sequence
  Description of Artificial Sequence: Synthetic oligonucleotide
aaccacaaaaguuugggga

SEQ ID NO: 2647257 - RNA, 19 nt, Artificial Sequence
  Description of Artificial Sequence: Synthetic oligonucleotide
aaccauagauagcuaacac

SEQ ID NO: 2647258 - RNA, 19 nt, Artificial Sequence
  Description of Artificial Sequence: Synthetic oligonucleotide
uagauagcuaacaccaggg

SEQ ID NO: 2647259 - RNA, 19 nt, Artificial Sequence
  Description of Artificial Sequence: Synthetic oligonucleotide
uaaaccacaaaaguuuggg

SEQ ID NO: 2647260 - RNA, 19 nt, Artificial Sequence
  Description of Artificial Sequence: Synthetic oligonucleotide
aaguuuguaagccagugau

SEQ ID NO: 2647261 - RNA, 19 nt, Artificial Sequence
  Description of Artificial Sequence: Synthetic oligonucleotide
ugugagaucaccaggcacc

SEQ ID NO: 2647262 - RNA, 19 nt, Artificial Sequence
  Description of Artificial Sequence: Synthetic oligonucleotide
auagcuaacaccagggccc

SEQ ID NO: 2647263 - RNA, 19 nt, Artificial Sequence
  Description of Artificial Sequence: Synthetic oligonucleotide
ucuuaacuugacccuaucg

SEQ ID NO: 2647264 - RNA, 19 nt, Artificial Sequence
  Description of Artificial Sequence: Synthetic oligonucleotide
aguguuuucugccacuggg

SEQ ID NO: 2647265 - RNA, 19 nt, Artificial Sequence
  Description of Artificial Sequence: Synthetic oligonucleotide
gauagcuaacaccagggcc

SEQ ID NO: 2647266 - RNA, 19 nt, Artificial Sequence
  Description of Artificial Sequence: Synthetic oligonucleotide
uuagguuccaacucugcag

SEQ ID NO: 2647267 - RNA, 19 nt, Artificial Sequence
  Description of Artificial Sequence: Synthetic oligonucleotide
gaaauaagaaggcugagua

SEQ ID NO: 2647268 - RNA, 19 nt, Artificial Sequence
  Description of Artificial Sequence: Synthetic oligonucleotide
uaacuguacaaauugcaug

SEQ ID NO: 2647269 - RNA, 19 nt, Artificial Sequence
  Description of Artificial Sequence: Synthetic oligonucleotide
ucucgaacaaggaaauaag

SEQ ID NO: 2647270 - RNA, 19 nt, Artificial Sequence
  Description of Artificial Sequence: Synthetic oligonucleotide
ucgaacaaggaaauaagaa

SEQ ID NO: 2647271 - RNA, 19 nt, Artificial Sequence
  Description of Artificial Sequence: Synthetic oligonucleotide
uguacaaauugcaugugaa

SEQ ID NO: 2647272 - RNA, 19 nt, Artificial Sequence
  Description of Artificial Sequence: Synthetic oligonucleotide
guuuguaagccagugaugc

SEQ ID NO: 2647273 - RNA, 19 nt, Artificial Sequence
  Description of Artificial Sequence: Synthetic oligonucleotide
gaugcugugagaucaccag

SEQ ID NO: 2647274 - RNA, 19 nt, Artificial Sequence
  Description of Artificial Sequence: Synthetic oligonucleotide
uauuacucuuaacuugacc

SEQ ID NO: 2647275 - RNA, 19 nt, Artificial Sequence
  Description of Artificial Sequence: Synthetic oligonucleotide
aguggccaaaugcagaguc

SEQ ID NO: 2647276 - RNA, 19 nt, Artificial Sequence
  Description of Artificial Sequence: Synthetic oligonucleotide
agauagcuaacaccagggc

SEQ ID NO: 2647277 - RNA, 19 nt, Artificial Sequence
  Description of Artificial Sequence: Synthetic oligonucleotide
ugaauagaagguguaacca

SEQ ID NO: 2647278 - RNA, 19 nt, Artificial Sequence
  Description of Artificial Sequence: Synthetic oligonucleotide
uguaaccauagauagcuaa

SEQ ID NO: 2647279 - RNA, 19 nt, Artificial Sequence
  Description of Artificial Sequence: Synthetic oligonucleotide
aaggcaaggucgcauaccu

SEQ ID NO: 2647280 - RNA, 19 nt, Artificial Sequence
  Description of Artificial Sequence: Synthetic oligonucleotide
aguccgaaguuuguaagcc

SEQ ID NO: 2647281 - RNA, 19 nt, Artificial Sequence
  Description of Artificial Sequence: Synthetic oligonucleotide
aaggaaauaagaaggcuga

SEQ ID NO: 2647282 - RNA, 19 nt, Artificial Sequence
  Description of Artificial Sequence: Synthetic oligonucleotide
aaauaagaaggcugaguaa

SEQ ID NO: 2647283 - RNA, 19 nt, Artificial Sequence
  Description of Artificial Sequence: Synthetic oligonucleotide
gucgguacaguuaaggucc

SEQ ID NO: 2647284 - RNA, 19 nt, Artificial Sequence
  Description of Artificial Sequence: Synthetic oligonucleotide
uacaaauugcaugugaaau

SEQ ID NO: 2647285 - RNA, 19 nt, Artificial Sequence
  Description of Artificial Sequence: Synthetic oligonucleotide
uaucguucccacuuuaggu

SEQ ID NO: 2647286 - RNA, 19 nt, Artificial Sequence
  Description of Artificial Sequence: Synthetic oligonucleotide
uuggcaguggccaaaugca

SEQ ID NO: 2647287 - RNA, 19 nt, Artificial Sequence
  Description of Artificial Sequence: Synthetic oligonucleotide
ggcgccagcaguuugaagg

SEQ ID NO: 2647288 - RNA, 19 nt, Artificial Sequence
  Description of Artificial Sequence: Synthetic oligonucleotide
ccguuuaacauguacaggg

SEQ ID NO: 2647289 - RNA, 19 nt, Artificial Sequence
  Description of Artificial Sequence: Synthetic oligonucleotide
caaaaguuuggggaaaggc

SEQ ID NO: 2647290 - RNA, 19 nt, Artificial Sequence
  Description of Artificial Sequence: Synthetic oligonucleotide
guuuaacauguacaggggc

SEQ ID NO: 2647291 - RNA, 19 nt, Artificial Sequence
  Description of Artificial Sequence: Synthetic oligonucleotide
agggguaaaccacaaaagu

SEQ ID NO: 2647292 - RNA, 19 nt, Artificial Sequence
  Description of Artificial Sequence: Synthetic oligonucleotide
aagggguaaaccacaaaag

SEQ ID NO: 2647293 - RNA, 19 nt, Artificial Sequence
  Description of Artificial Sequence: Synthetic oligonucleotide
aaaugcagagucuguggcu

SEQ ID NO: 2647294 - RNA, 19 nt, Artificial Sequence
  Description of Artificial Sequence: Synthetic oligonucleotide
gaacggggcauuuccaucc

SEQ ID NO: 2647295 - RNA, 19 nt, Artificial Sequence
  Description of Artificial Sequence: Synthetic oligonucleotide
uagguuccaacucugcaga

SEQ ID NO: 2647296 - RNA, 19 nt, Artificial Sequence
  Description of Artificial Sequence: Synthetic oligonucleotide
uuaacuugacccuaucguu

SEQ ID NO: 2647297 - RNA, 19 nt, Artificial Sequence
  Description of Artificial Sequence: Synthetic oligonucleotide
caccguuuaacauguacag

SEQ ID NO: 2647298 - RNA, 19 nt, Artificial Sequence
  Description of Artificial Sequence: Synthetic oligonucleotide
cuaucguucccacuuuagg

SEQ ID NO: 2647299 - RNA, 19 nt, Artificial Sequence
  Description of Artificial Sequence: Synthetic oligonucleotide
ugggcucaaucacaguccg

SEQ ID NO: 2647300 - RNA, 19 nt, Artificial Sequence
  Description of Artificial Sequence: Synthetic oligonucleotide
caaaugcagagucuguggc

SEQ ID NO: 2647301 - RNA, 19 nt, Artificial Sequence
  Description of Artificial Sequence: Synthetic oligonucleotide
uuacucuuaacuugacccu

SEQ ID NO: 2647302 - RNA, 19 nt, Artificial Sequence
  Description of Artificial Sequence: Synthetic oligonucleotide
uuaacauguacaggggcgc

SEQ ID NO: 2647303 - RNA, 19 nt, Artificial Sequence
  Description of Artificial Sequence: Synthetic oligonucleotide
uugggcucaaucacagucc

SEQ ID NO: 2647304 - RNA, 19 nt, Artificial Sequence
  Description of Artificial Sequence: Synthetic oligonucleotide
cuugggcucaaucacaguc

SEQ ID NO: 2647305 - RNA, 19 nt, Artificial Sequence
  Description of Artificial Sequence: Synthetic oligonucleotide
uaacaguugggccccuggg

SEQ ID NO: 2647306 - RNA, 19 nt, Artificial Sequence
  Description of Artificial Sequence: Synthetic oligonucleotide
ugacucauuuuauuacucu

SEQ ID NO: 2647307 - RNA, 19 nt, Artificial Sequence
  Description of Artificial Sequence: Synthetic oligonucleotide
uaaccauagauagcuaaca

SEQ ID NO: 2647308 - RNA, 19 nt, Artificial Sequence
  Description of Artificial Sequence: Synthetic oligonucleotide
uguuuucugccacugggaa

SEQ ID NO: 2647309 - RNA, 19 nt, Artificial Sequence
  Description of Artificial Sequence: Synthetic oligonucleotide
aguaacuguacaaauugca

SEQ ID NO: 2647310 - RNA, 19 nt, Artificial Sequence
  Description of Artificial Sequence: Synthetic oligonucleotide
uccaacucugcagacacgc

SEQ ID NO: 2647311 - RNA, 19 nt, Artificial Sequence
  Description of Artificial Sequence: Synthetic oligonucleotide
acaguccgaaguuuguaag

SEQ ID NO: 2647312 - RNA, 19 nt, Artificial Sequence
  Description of Artificial Sequence: Synthetic oligonucleotide
ggcauuuccauccuuagca

SEQ ID NO: 2647313 - RNA, 19 nt, Artificial Sequence
  Description of Artificial Sequence: Synthetic oligonucleotide
caaggaaacgcuccugagc

SEQ ID NO: 2647314 - RNA, 19 nt, Artificial Sequence
  Description of Artificial Sequence: Synthetic oligonucleotide
agacacgccacaccucccc

SEQ ID NO: 2647315 - RNA, 19 nt, Artificial Sequence
  Description of Artificial Sequence: Synthetic oligonucleotide
ugaugcugugagaucacca

SEQ ID NO: 2647316 - RNA, 19 nt, Artificial Sequence
  Description of Artificial Sequence: Synthetic oligonucleotide
uguaagccagugaugcugu

SEQ ID NO: 2647317 - RNA, 19 nt, Artificial Sequence
  Description of Artificial Sequence: Synthetic oligonucleotide
ucaaggaaacgcuccugag

SEQ ID NO: 2647318 - RNA, 19 nt, Artificial Sequence
  Description of Artificial Sequence: Synthetic oligonucleotide
aucaaggaaacgcuccuga

SEQ ID NO: 2647319 - RNA, 19 nt, Artificial Sequence
  Description of Artificial Sequence: Synthetic oligonucleotide
aagagcucgggcucgggca

SEQ ID NO: 2647320 - RNA, 19 nt, Artificial Sequence
  Description of Artificial Sequence: Synthetic oligonucleotide
uugcgcaggggucaguuug

SEQ ID NO: 2647321 - RNA, 19 nt, Artificial Sequence
  Description of Artificial Sequence: Synthetic oligonucleotide
uaagaaggcugaguaacug

SEQ ID NO: 2647322 - RNA, 19 nt, Artificial Sequence
  Description of Artificial Sequence: Synthetic oligonucleotide
uuugaagguggucgguaca

SEQ ID NO: 2647323 - RNA, 19 nt, Artificial Sequence
  Description of Artificial Sequence: Synthetic oligonucleotide
gaugcgcugagcgaacggg

SEQ ID NO: 2647324 - RNA, 19 nt, Artificial Sequence
  Description of Artificial Sequence: Synthetic oligonucleotide
caaauugcaugugaaauga

SEQ ID NO: 2647325 - RNA, 19 nt, Artificial Sequence
  Description of Artificial Sequence: Synthetic oligonucleotide
gaagguguaaccauagaua

SEQ ID NO: 2647326 - RNA, 19 nt, Artificial Sequence
  Description of Artificial Sequence: Synthetic oligonucleotide
gucaguuugucccgcgacg

SEQ ID NO: 2647327 - RNA, 19 nt, Artificial Sequence
  Description of Artificial Sequence: Synthetic oligonucleotide
augcugugagaucaccagg

SEQ ID NO: 2647328 - RNA, 19 nt, Artificial Sequence
  Description of Artificial Sequence: Synthetic oligonucleotide
gucacgauguuccgggucc

SEQ ID NO: 2647329 - RNA, 19 nt, Artificial Sequence
  Description of Artificial Sequence: Synthetic oligonucleotide
cauagauagcuaacaccag

SEQ ID NO: 2647330 - RNA, 19 nt, Artificial Sequence
  Description of Artificial Sequence: Synthetic oligonucleotide
auagaagguguaaccauag

SEQ ID NO: 2647331 - RNA, 19 nt, Artificial Sequence
  Description of Artificial Sequence: Synthetic oligonucleotide
uugaagguggucgguacag

SEQ ID NO: 2647332 - RNA, 19 nt, Artificial Sequence
  Description of Artificial Sequence: Synthetic oligonucleotide
guaaaccacaaaaguuugg

SEQ ID NO: 2647333 - RNA, 19 nt, Artificial Sequence
  Description of Artificial Sequence: Synthetic oligonucleotide
ugcaugugaaaugagcaau

SEQ ID NO: 2647334 - RNA, 19 nt, Artificial Sequence
  Description of Artificial Sequence: Synthetic oligonucleotide
ggagagaugacucauuuua

SEQ ID NO: 2647335 - RNA, 19 nt, Artificial Sequence
  Description of Artificial Sequence: Synthetic oligonucleotide
uggaaguguuuucugccac

SEQ ID NO: 2647336 - RNA, 19 nt, Artificial Sequence
  Description of Artificial Sequence: Synthetic oligonucleotide
uugcaugugaaaugagcaa

SEQ ID NO: 2647337 - RNA, 19 nt, Artificial Sequence
  Description of Artificial Sequence: Synthetic oligonucleotide
agagaugacucauuuuauu

SEQ ID NO: 2647338 - RNA, 19 nt, Artificial Sequence
  Description of Artificial Sequence: Synthetic oligonucleotide
cuuaacuugacccuaucgu

SEQ ID NO: 2647339 - RNA, 19 nt, Artificial Sequence
  Description of Artificial Sequence: Synthetic oligonucleotide
aaauugcaugugaaaugag

SEQ ID NO: 2647340 - RNA, 19 nt, Artificial Sequence
  Description of Artificial Sequence: Synthetic oligonucleotide
uuugucccgcgacgggucg

SEQ ID NO: 2647341 - RNA, 19 nt, Artificial Sequence
  Description of Artificial Sequence: Synthetic oligonucleotide
acaaaaguuuggggaaagg

SEQ ID NO: 2647342 - RNA, 19 nt, Artificial Sequence
  Description of Artificial Sequence: Synthetic oligonucleotide
aguuaagguccugacgcuc

SEQ ID NO: 2647343 - RNA, 19 nt, Artificial Sequence
  Description of Artificial Sequence: Synthetic oligonucleotide
caguccgaaguuuguaagc

SEQ ID NO: 2647344 - RNA, 19 nt, Artificial Sequence
  Description of Artificial Sequence: Synthetic oligonucleotide
gagcgaacggggcauuucc

SEQ ID NO: 2647345 - RNA, 19 nt, Artificial Sequence
  Description of Artificial Sequence: Synthetic oligonucleotide
uuuguaagccagugaugcu

SEQ ID NO: 2647346 - RNA, 19 nt, Artificial Sequence
  Description of Artificial Sequence: Synthetic oligonucleotide
guaaccauagauagcuaac

SEQ ID NO: 2647347 - RNA, 19 nt, Artificial Sequence
  Description of Artificial Sequence: Synthetic oligonucleotide
gaaaggcaaggucgcauac

SEQ ID NO: 2647348 - RNA, 19 nt, Artificial Sequence
  Description of Artificial Sequence: Synthetic oligonucleotide
auaccucucgaacaaggaa

SEQ ID NO: 2647349 - RNA, 19 nt, Artificial Sequence
  Description of Artificial Sequence: Synthetic oligonucleotide
guggucgguacaguuaagg

SEQ ID NO: 2647350 - RNA, 19 nt, Artificial Sequence
  Description of Artificial Sequence: Synthetic oligonucleotide
cugggaaaguugcaccugc

SEQ ID NO: 2647351 - RNA, 19 nt, Artificial Sequence
  Description of Artificial Sequence: Synthetic oligonucleotide
accguuuaacauguacagg

SEQ ID NO: 2647352 - RNA, 19 nt, Artificial Sequence
  Description of Artificial Sequence: Synthetic oligonucleotide
cucgaacaaggaaauaaga

SEQ ID NO: 2647353 - RNA, 19 nt, Artificial Sequence
  Description of Artificial Sequence: Synthetic oligonucleotide
aucguucccacuuuagguu

SEQ ID NO: 2647354 - RNA, 19 nt, Artificial Sequence
  Description of Artificial Sequence: Synthetic oligonucleotide
ucgcauaccucucgaacaa

SEQ ID NO: 2647355 - RNA, 19 nt, Artificial Sequence
  Description of Artificial Sequence: Synthetic oligonucleotide
aaggucgcauaccucucga

SEQ ID NO: 2647356 - RNA, 19 nt, Artificial Sequence
  Description of Artificial Sequence: Synthetic oligonucleotide
cauccuuagcacccagagg

SEQ ID NO: 2647357 - RNA, 19 nt, Artificial Sequence
  Description of Artificial Sequence: Synthetic oligonucleotide
guuugaagguggucgguac

SEQ ID NO: 2647358 - RNA, 19 nt, Artificial Sequence
  Description of Artificial Sequence: Synthetic oligonucleotide
gucgcauaccucucgaaca

SEQ ID NO: 2647359 - RNA, 19 nt, Artificial Sequence
  Description of Artificial Sequence: Synthetic oligonucleotide
gcaccugccgcauaaacug

SEQ ID NO: 2647360 - RNA, 19 nt, Artificial Sequence
  Description of Artificial Sequence: Synthetic oligonucleotide
acuugacccuaucguuccc

SEQ ID NO: 2647361 - RNA, 19 nt, Artificial Sequence
  Description of Artificial Sequence: Synthetic oligonucleotide
gauguuccggguccgccgc

SEQ ID NO: 2647362 - RNA, 19 nt, Artificial Sequence
  Description of Artificial Sequence: Synthetic oligonucleotide
agguccugacgcucucucc

SEQ ID NO: 2647363 - RNA, 19 nt, Artificial Sequence
  Description of Artificial Sequence: Synthetic oligonucleotide
caaggucgcauaccucucg

SEQ ID NO: 2647364 - RNA, 19 nt, Artificial Sequence
  Description of Artificial Sequence: Synthetic oligonucleotide
ucucaagagcucgggcucg

SEQ ID NO: 2647365 - RNA, 19 nt, Artificial Sequence
  Description of Artificial Sequence: Synthetic oligonucleotide
ugccgcauaaacugcaguu

SEQ ID NO: 2647366 - RNA, 19 nt, Artificial Sequence
  Description of Artificial Sequence: Synthetic oligonucleotide
gguguaaccauagauagcu

SEQ ID NO: 2647367 - RNA, 19 nt, Artificial Sequence
  Description of Artificial Sequence: Synthetic oligonucleotide
ucccacuuuagguuccaac

SEQ ID NO: 2647368 - RNA, 19 nt, Artificial Sequence
  Description of Artificial Sequence: Synthetic oligonucleotide
guacaguuaagguccugac

SEQ ID NO: 2647369 - RNA, 19 nt, Artificial Sequence
  Description of Artificial Sequence: Synthetic oligonucleotide
guacaaauugcaugugaaa

SEQ ID NO: 2647370 - RNA, 19 nt, Artificial Sequence
  Description of Artificial Sequence: Synthetic oligonucleotide
cugugagaucaccaggcac

SEQ ID NO: 2647371 - RNA, 19 nt, Artificial Sequence
  Description of Artificial Sequence: Synthetic oligonucleotide
agguggucgguacaguuaa

SEQ ID NO: 2647372 - RNA, 19 nt, Artificial Sequence
  Description of Artificial Sequence: Synthetic oligonucleotide
cucucgaacaaggaaauaa

SEQ ID NO: 2647373 - RNA, 19 nt, Artificial Sequence
  Description of Artificial Sequence: Synthetic oligonucleotide
aguugcaccugccgcauaa

SEQ ID NO: 2647374 - RNA, 19 nt, Artificial Sequence
  Description of Artificial Sequence: Synthetic oligonucleotide
ggucgguacaguuaagguc

SEQ ID NO: 2647375 - RNA, 19 nt, Artificial Sequence
  Description of Artificial Sequence: Synthetic oligonucleotide
agguuccaacucugcagac

SEQ ID NO: 2647376 - RNA, 19 nt, Artificial Sequence
  Description of Artificial Sequence: Synthetic oligonucleotide
ugcaguugcgcagggguca

SEQ ID NO: 2647377 - RNA, 19 nt, Artificial Sequence
  Description of Artificial Sequence: Synthetic oligonucleotide
aggaaauaagaaggcugag

SEQ ID NO: 2647378 - RNA, 19 nt, Artificial Sequence
  Description of Artificial Sequence: Synthetic oligonucleotide
auaagaaggcugaguaacu

SEQ ID NO: 2647379 - RNA, 19 nt, Artificial Sequence
  Description of Artificial Sequence: Synthetic oligonucleotide
aacauguacaggggcgcca

SEQ ID NO: 2647380 - RNA, 19 nt, Artificial Sequence
  Description of Artificial Sequence: Synthetic oligonucleotide
acgauguuccggguccgcc

SEQ ID NO: 2647381 - RNA, 19 nt, Artificial Sequence
  Description of Artificial Sequence: Synthetic oligonucleotide
gugagaucaccaggcaccg

SEQ ID NO: 2647382 - RNA, 19 nt, Artificial Sequence
  Description of Artificial Sequence: Synthetic oligonucleotide
cuuagcacccagaggguca

SEQ ID NO: 2647383 - RNA, 19 nt, Artificial Sequence
  Description of Artificial Sequence: Synthetic oligonucleotide
cucucaagagcucgggcuc

SEQ ID NO: 2647384 - RNA, 19 nt, Artificial Sequence
  Description of Artificial Sequence: Synthetic oligonucleotide
aguuuguaagccagugaug

SEQ ID NO: 2647385 - RNA, 19 nt, Artificial Sequence
  Description of Artificial Sequence: Synthetic oligonucleotide
gcagacacgccacaccucc

SEQ ID NO: 2647386 - RNA, 19 nt, Artificial Sequence
  Description of Artificial Sequence: Synthetic oligonucleotide
aaugcccaggccggucacg

SEQ ID NO: 2647387 - RNA, 19 nt, Artificial Sequence
  Description of Artificial Sequence: Synthetic oligonucleotide
uaacauguacaggggcgcc

SEQ ID NO: 2647388 - RNA, 19 nt, Artificial Sequence
  Description of Artificial Sequence: Synthetic oligonucleotide
cauaccucucgaacaagga

SEQ ID NO: 2647389 - RNA, 19 nt, Artificial Sequence
  Description of Artificial Sequence: Synthetic oligonucleotide
acucauuuuauuacucuua

SEQ ID NO: 2647390 - RNA, 19 nt, Artificial Sequence
  Description of Artificial Sequence: Synthetic oligonucleotide
uuccauccuuagcacccag

SEQ ID NO: 2647391 - RNA, 19 nt, Artificial Sequence
  Description of Artificial Sequence: Synthetic oligonucleotide
gguccugacgcucucuccc

SEQ ID NO: 2647392 - RNA, 19 nt, Artificial Sequence
  Description of Artificial Sequence: Synthetic oligonucleotide
aaacgcuccugagccacug

SEQ ID NO: 2647393 - RNA, 19 nt, Artificial Sequence
  Description of Artificial Sequence: Synthetic oligonucleotide
cacccagagggucaccagc

SEQ ID NO: 2647394 - RNA, 19 nt, Artificial Sequence
  Description of Artificial Sequence: Synthetic oligonucleotide
ccccuuaacaguugggccc

SEQ ID NO: 2647395 - RNA, 19 nt, Artificial Sequence
  Description of Artificial Sequence: Synthetic oligonucleotide
ucccgcgacgggucgaugc

SEQ ID NO: 2647396 - RNA, 19 nt, Artificial Sequence
  Description of Artificial Sequence: Synthetic oligonucleotide
caggggucaguuugucccg

SEQ ID NO: 2647397 - RNA, 19 nt, Artificial Sequence
  Description of Artificial Sequence: Synthetic oligonucleotide
caagagcucgggcucgggc

SEQ ID NO: 2647398 - RNA, 19 nt, Artificial Sequence
  Description of Artificial Sequence: Synthetic oligonucleotide
gcauaaacugcaguugcgc

SEQ ID NO: 2647399 - RNA, 19 nt, Artificial Sequence
  Description of Artificial Sequence: Synthetic oligonucleotide
aacggggcauuuccauccu

SEQ ID NO: 2647400 - RNA, 19 nt, Artificial Sequence
  Description of Artificial Sequence: Synthetic oligonucleotide
gcauaccucucgaacaagg

SEQ ID NO: 2647401 - RNA, 19 nt, Artificial Sequence
  Description of Artificial Sequence: Synthetic oligonucleotide
acuguacaaauugcaugug

SEQ ID NO: 2647402 - RNA, 19 nt, Artificial Sequence
  Description of Artificial Sequence: Synthetic oligonucleotide
uugacccuaucguucccac

SEQ ID NO: 2647403 - RNA, 19 nt, Artificial Sequence
  Description of Artificial Sequence: Synthetic oligonucleotide
aggcugaguaacuguacaa

SEQ ID NO: 2647404 - RNA, 19 nt, Artificial Sequence
  Description of Artificial Sequence: Synthetic oligonucleotide
ccaggcaccguuuaacaug

SEQ ID NO: 2647405 - RNA, 19 nt, Artificial Sequence
  Description of Artificial Sequence: Synthetic oligonucleotide
ggcaccguuuaacauguac

SEQ ID NO: 2647406 - RNA, 19 nt, Artificial Sequence
  Description of Artificial Sequence: Synthetic oligonucleotide
aguuugucccgcgacgggu

SEQ ID NO: 2647407 - RNA, 19 nt, Artificial Sequence
  Description of Artificial Sequence: Synthetic oligonucleotide
ucgaugcgcugagcgaacg

SEQ ID NO: 2647408 - RNA, 19 nt, Artificial Sequence
  Description of Artificial Sequence: Synthetic oligonucleotide
ggucgcauaccucucgaac

SEQ ID NO: 2647409 - RNA, 19 nt, Artificial Sequence
  Description of Artificial Sequence: Synthetic oligonucleotide
gacgggucgaugcgcugag

SEQ ID NO: 2647410 - RNA, 19 nt, Artificial Sequence
  Description of Artificial Sequence: Synthetic oligonucleotide
ucccucucaagagcucggg

SEQ ID NO: 2647411 - RNA, 19 nt, Artificial Sequence
  Description of Artificial Sequence: Synthetic oligonucleotide
cucccucucaagagcucgg

SEQ ID NO: 2647412 - RNA, 19 nt, Artificial Sequence
  Description of Artificial Sequence: Synthetic oligonucleotide
caguugggccccugggagg

SEQ ID NO: 2647413 - RNA, 19 nt, Artificial Sequence
  Description of Artificial Sequence: Synthetic oligonucleotide
ugcgcaggggucaguuugu

SEQ ID NO: 2647414 - RNA, 19 nt, Artificial Sequence
  Description of Artificial Sequence: Synthetic oligonucleotide
uacaggggcgccagcaguu

SEQ ID NO: 2647415 - RNA, 19 nt, Artificial Sequence
  Description of Artificial Sequence: Synthetic oligonucleotide
cacaguccgaaguuuguaa

SEQ ID NO: 2647416 - RNA, 19 nt, Artificial Sequence
  Description of Artificial Sequence: Synthetic oligonucleotide
gguacaguuaagguccuga

SEQ ID NO: 2647417 - RNA, 19 nt, Artificial Sequence
  Description of Artificial Sequence: Synthetic oligonucleotide
ucacgauguuccggguccg

SEQ ID NO: 2647418 - RNA, 19 nt, Artificial Sequence
  Description of Artificial Sequence: Synthetic oligonucleotide
ccgcauaaacugcaguugc

SEQ ID NO: 2647419 - RNA, 19 nt, Artificial Sequence
  Description of Artificial Sequence: Synthetic oligonucleotide
uagcuaacaccagggcccc

SEQ ID NO: 2647420 - RNA, 19 nt, Artificial Sequence
  Description of Artificial Sequence: Synthetic oligonucleotide
aacgcuccugagccacuga

SEQ ID NO: 2647421 - RNA, 19 nt, Artificial Sequence
  Description of Artificial Sequence: Synthetic oligonucleotide
caguuugucccgcgacggg

SEQ ID NO: 2647422 - RNA, 19 nt, Artificial Sequence
  Description of Artificial Sequence: Synthetic oligonucleotide
ccggucacgauguuccggg

SEQ ID NO: 2647423 - RNA, 19 nt, Artificial Sequence
  Description of Artificial Sequence: Synthetic oligonucleotide
aguuugaagguggucggua

SEQ ID NO: 2647424 - RNA, 19 nt, Artificial Sequence
  Description of Artificial Sequence: Synthetic oligonucleotide
aagguggucgguacaguua

SEQ ID NO: 2647425 - RNA, 19 nt, Artificial Sequence
  Description of Artificial Sequence: Synthetic oligonucleotide
gagaucaccaggcaccguu

SEQ ID NO: 2647426 - RNA, 19 nt, Artificial Sequence
  Description of Artificial Sequence: Synthetic oligonucleotide
ugacgcucucucccucuca

SEQ ID NO: 2647427 - RNA, 19 nt, Artificial Sequence
  Description of Artificial Sequence: Synthetic oligonucleotide
caucaaggaaacgcuccug

SEQ ID NO: 2647428 - RNA, 19 nt, Artificial Sequence
  Description of Artificial Sequence: Synthetic oligonucleotide
caccugccgcauaaacugc

SEQ ID NO: 2647429 - RNA, 19 nt, Artificial Sequence
  Description of Artificial Sequence: Synthetic oligonucleotide
ggggcauuuccauccuuag

SEQ ID NO: 2647430 - RNA, 19 nt, Artificial Sequence
  Description of Artificial Sequence: Synthetic oligonucleotide
ucacaguccgaaguuugua

SEQ ID NO: 2647431 - RNA, 19 nt, Artificial Sequence
  Description of Artificial Sequence: Synthetic oligonucleotide
cucuuaacuugacccuauc

SEQ ID NO: 2647432 - RNA, 19 nt, Artificial Sequence
  Description of Artificial Sequence: Synthetic oligonucleotide
ugacccuaucguucccacu

SEQ ID NO: 2647433 - RNA, 19 nt, Artificial Sequence
  Description of Artificial Sequence: Synthetic oligonucleotide
ucgguacaguuaagguccu

SEQ ID NO: 2647434 - RNA, 19 nt, Artificial Sequence
  Description of Artificial Sequence: Synthetic oligonucleotide
ccuaucguucccacuuuag

SEQ ID NO: 2647435 - RNA, 19 nt, Artificial Sequence
  Description of Artificial Sequence: Synthetic oligonucleotide
cagagucuguggcuucuug

SEQ ID NO: 2647436 - RNA, 19 nt, Artificial Sequence
  Description of Artificial Sequence: Synthetic oligonucleotide
aguugggccccugggaggu

SEQ ID NO: 2647437 - RNA, 19 nt, Artificial Sequence
  Description of Artificial Sequence: Synthetic oligonucleotide
aucacaguccgaaguuugu

SEQ ID NO: 2647438 - RNA, 19 nt, Artificial Sequence
  Description of Artificial Sequence: Synthetic oligonucleotide
aggaaacgcuccugagcca

SEQ ID NO: 2647439 - RNA, 19 nt, Artificial Sequence
  Description of Artificial Sequence: Synthetic oligonucleotide
ggucaguuugucccgcgac

SEQ ID NO: 2647440 - RNA, 19 nt, Artificial Sequence
  Description of Artificial Sequence: Synthetic oligonucleotide
gcaccguuuaacauguaca

SEQ ID NO: 2647441 - RNA, 19 nt, Artificial Sequence
  Description of Artificial Sequence: Synthetic oligonucleotide
cugaguaacuguacaaauu

SEQ ID NO: 2647442 - RNA, 19 nt, Artificial Sequence
  Description of Artificial Sequence: Synthetic oligonucleotide
agcacccagagggucacca

SEQ ID NO: 2647443 - RNA, 19 nt, Artificial Sequence
  Description of Artificial Sequence: Synthetic oligonucleotide
gggcauuuccauccuuagc

SEQ ID NO: 2647444 - RNA, 19 nt, Artificial Sequence
  Description of Artificial Sequence: Synthetic oligonucleotide
ggcucaaucacaguccgaa

SEQ ID NO: 2647445 - RNA, 19 nt, Artificial Sequence
  Description of Artificial Sequence: Synthetic oligonucleotide
gaagguggucgguacaguu

SEQ ID NO: 2647446 - RNA, 19 nt, Artificial Sequence
  Description of Artificial Sequence: Synthetic oligonucleotide
ugagcgaacggggcauuuc

SEQ ID NO: 2647447 - RNA, 19 nt, Artificial Sequence
  Description of Artificial Sequence: Synthetic oligonucleotide
ccacuuuagguuccaacuc

SEQ ID NO: 2647448 - RNA, 19 nt, Artificial Sequence
  Description of Artificial Sequence: Synthetic oligonucleotide
accucucgaacaaggaaau

SEQ ID NO: 2647449 - RNA, 19 nt, Artificial Sequence
  Description of Artificial Sequence: Synthetic oligonucleotide
ggguaaaccacaaaaguuu

SEQ ID NO: 2647450 - RNA, 19 nt, Artificial Sequence
  Description of Artificial Sequence: Synthetic oligonucleotide
ggaaauaagaaggcugagu

SEQ ID NO: 2647451 - RNA, 19 nt, Artificial Sequence
  Description of Artificial Sequence: Synthetic oligonucleotide
gccgcauaaacugcaguug

SEQ ID NO: 2647452 - RNA, 19 nt, Artificial Sequence
  Description of Artificial Sequence: Synthetic oligonucleotide
acgcuccugagccacugaa

SEQ ID NO: 2647453 - RNA, 19 nt, Artificial Sequence
  Description of Artificial Sequence: Synthetic oligonucleotide
cucaagagcucgggcucgg

SEQ ID NO: 2647454 - RNA, 19 nt, Artificial Sequence
  Description of Artificial Sequence: Synthetic oligonucleotide
cagacacgccacaccuccc

SEQ ID NO: 2647455 - RNA, 19 nt, Artificial Sequence
  Description of Artificial Sequence: Synthetic oligonucleotide
caggcaccguuuaacaugu

SEQ ID NO: 2647456 - RNA, 19 nt, Artificial Sequence
  Description of Artificial Sequence: Synthetic oligonucleotide
uccgccgcuguggaagugu

SEQ ID NO: 2647457 - RNA, 19 nt, Artificial Sequence
  Description of Artificial Sequence: Synthetic oligonucleotide
acucuuaacuugacccuau

SEQ ID NO: 2647458 - RNA, 19 nt, Artificial Sequence
  Description of Artificial Sequence: Synthetic oligonucleotide
cucugcagacacgccacac

SEQ ID NO: 2647459 - RNA, 19 nt, Artificial Sequence
  Description of Artificial Sequence: Synthetic oligonucleotide
guuaagguccugacgcucu

SEQ ID NO: 2647460 - RNA, 19 nt, Artificial Sequence
  Description of Artificial Sequence: Synthetic oligonucleotide
uccugacgcucucucccuc

SEQ ID NO: 2647461 - RNA, 19 nt, Artificial Sequence
  Description of Artificial Sequence: Synthetic oligonucleotide
ggaaaggcaaggucgcaua

SEQ ID NO: 2647462 - RNA, 19 nt, Artificial Sequence
  Description of Artificial Sequence: Synthetic oligonucleotide
cuuaacaguugggccccug

SEQ ID NO: 2647463 - RNA, 19 nt, Artificial Sequence
  Description of Artificial Sequence: Synthetic oligonucleotide
cuugacccuaucguuccca

SEQ ID NO: 2647464 - RNA, 19 nt, Artificial Sequence
  Description of Artificial Sequence: Synthetic oligonucleotide
gagagaugacucauuuuau

SEQ ID NO: 2647465 - RNA, 19 nt, Artificial Sequence
  Description of Artificial Sequence: Synthetic oligonucleotide
aguugcgcaggggucaguu

SEQ ID NO: 2647466 - RNA, 19 nt, Artificial Sequence
  Description of Artificial Sequence: Synthetic oligonucleotide
cacugaauagaagguguaa

SEQ ID NO: 2647467 - RNA, 19 nt, Artificial Sequence
  Description of Artificial Sequence: Synthetic oligonucleotide
uguuccggguccgccgcug

SEQ ID NO: 2647468 - RNA, 19 nt, Artificial Sequence
  Description of Artificial Sequence: Synthetic oligonucleotide
ggguccgccgcuguggaag

SEQ ID NO: 2647469 - RNA, 19 nt, Artificial Sequence
  Description of Artificial Sequence: Synthetic oligonucleotide
gcugaguaacuguacaaau

SEQ ID NO: 2647470 - RNA, 19 nt, Artificial Sequence
  Description of Artificial Sequence: Synthetic oligonucleotide
agccagugaugcugugaga

SEQ ID NO: 2647471 - RNA, 19 nt, Artificial Sequence
  Description of Artificial Sequence: Synthetic oligonucleotide
aggucgcauaccucucgaa

SEQ ID NO: 2647472 - RNA, 19 nt, Artificial Sequence
  Description of Artificial Sequence: Synthetic oligonucleotide
guuugucccgcgacggguc

SEQ ID NO: 2647473 - RNA, 19 nt, Artificial Sequence
  Description of Artificial Sequence: Synthetic oligonucleotide
ggcugaguaacuguacaaa

SEQ ID NO: 2647474 - RNA, 19 nt, Artificial Sequence
  Description of Artificial Sequence: Synthetic oligonucleotide
accugccgcauaaacugca

SEQ ID NO: 2647475 - RNA, 19 nt, Artificial Sequence
  Description of Artificial Sequence: Synthetic oligonucleotide
cccacuuuagguuccaacu

SEQ ID NO: 2647476 - RNA, 19 nt, Artificial Sequence
  Description of Artificial Sequence: Synthetic oligonucleotide
uugggccccugggagguga

SEQ ID NO: 2647477 - RNA, 19 nt, Artificial Sequence
  Description of Artificial Sequence: Synthetic oligonucleotide
cgggucgaugcgcugagcg

SEQ ID NO: 2647478 - RNA, 19 nt, Artificial Sequence
  Description of Artificial Sequence: Synthetic oligonucleotide
gguuccaacucugcagaca

SEQ ID NO: 2647479 - RNA, 19 nt, Artificial Sequence
  Description of Artificial Sequence: Synthetic oligonucleotide
aggcaaggucgcauaccuc

SEQ ID NO: 2647480 - RNA, 19 nt, Artificial Sequence
  Description of Artificial Sequence: Synthetic oligonucleotide
aaguugcaccugccgcaua

SEQ ID NO: 2647481 - RNA, 19 nt, Artificial Sequence
  Description of Artificial Sequence: Synthetic oligonucleotide
cucucccucucaagagcuc

SEQ ID NO: 2647482 - RNA, 19 nt, Artificial Sequence
  Description of Artificial Sequence: Synthetic oligonucleotide
cgauguuccggguccgccg

SEQ ID NO: 2647483 - RNA, 19 nt, Artificial Sequence
  Description of Artificial Sequence: Synthetic oligonucleotide
ccaacucugcagacacgcc

SEQ ID NO: 2647484 - RNA, 19 nt, Artificial Sequence
  Description of Artificial Sequence: Synthetic oligonucleotide
cugacgcucucucccucuc

SEQ ID NO: 2647485 - RNA, 19 nt, Artificial Sequence
  Description of Artificial Sequence: Synthetic oligonucleotide
cccuuaacaguugggcccc

SEQ ID NO: 2647486 - RNA, 19 nt, Artificial Sequence
  Description of Artificial Sequence: Synthetic oligonucleotide
acccuaucguucccacuuu

SEQ ID NO: 2647487 - RNA, 19 nt, Artificial Sequence
  Description of Artificial Sequence: Synthetic oligonucleotide
agcgaacggggcauuucca

SEQ ID NO: 2647488 - RNA, 19 nt, Artificial Sequence
  Description of Artificial Sequence: Synthetic oligonucleotide
acgggucgaugcgcugagc

SEQ ID NO: 2647489 - RNA, 19 nt, Artificial Sequence
  Description of Artificial Sequence: Synthetic oligonucleotide
ggucgaugcgcugagcgaa

SEQ ID NO: 2647490 - RNA, 19 nt, Artificial Sequence
  Description of Artificial Sequence: Synthetic oligonucleotide
gggguaaaccacaaaaguu

SEQ ID NO: 2647491 - RNA, 19 nt, Artificial Sequence
  Description of Artificial Sequence: Synthetic oligonucleotide
gcucaucaaggaaacgcuc

SEQ ID NO: 2647492 - RNA, 19 nt, Artificial Sequence
  Description of Artificial Sequence: Synthetic oligonucleotide
uuucugccacugggaaagu

SEQ ID NO: 2647493 - RNA, 19 nt, Artificial Sequence
  Description of Artificial Sequence: Synthetic oligonucleotide
guacaggggcgccagcagu

SEQ ID NO: 2647494 - RNA, 19 nt, Artificial Sequence
  Description of Artificial Sequence: Synthetic oligonucleotide
gccacugaauagaaggugu

SEQ ID NO: 2647495 - RNA, 19 nt, Artificial Sequence
  Description of Artificial Sequence: Synthetic oligonucleotide
agaucaccaggcaccguuu

SEQ ID NO: 2647496 - RNA, 19 nt, Artificial Sequence
  Description of Artificial Sequence: Synthetic oligonucleotide
caggccggucacgauguuc

SEQ ID NO: 2647497 - RNA, 19 nt, Artificial Sequence
  Description of Artificial Sequence: Synthetic oligonucleotide
gucgaugcgcugagcgaac

SEQ ID NO: 2647498 - RNA, 19 nt, Artificial Sequence
  Description of Artificial Sequence: Synthetic oligonucleotide
cccucucaagagcucgggc

SEQ ID NO: 2647499 - RNA, 19 nt, Artificial Sequence
  Description of Artificial Sequence: Synthetic oligonucleotide
cguucccacuuuagguucc

SEQ ID NO: 2647500 - RNA, 19 nt, Artificial Sequence
  Description of Artificial Sequence: Synthetic oligonucleotide
gggucgaugcgcugagcga

SEQ ID NO: 2647501 - RNA, 19 nt, Artificial Sequence
  Description of Artificial Sequence: Synthetic oligonucleotide
auguuccggguccgccgcu

SEQ ID NO: 2647502 - RNA, 19 nt, Artificial Sequence
  Description of Artificial Sequence: Synthetic oligonucleotide
ccucucaagagcucgggcu

SEQ ID NO: 2647503 - RNA, 19 nt, Artificial Sequence
  Description of Artificial Sequence: Synthetic oligonucleotide
gggaggugaagggguaaac

SEQ ID NO: 2647504 - RNA, 19 nt, Artificial Sequence
  Description of Artificial Sequence: Synthetic oligonucleotide
uucccacuuuagguuccaa

SEQ ID NO: 2647505 - RNA, 19 nt, Artificial Sequence
  Description of Artificial Sequence: Synthetic oligonucleotide
uugucccgcgacgggucga

SEQ ID NO: 2647506 - RNA, 19 nt, Artificial Sequence
  Description of Artificial Sequence: Synthetic oligonucleotide
cccgcgacgggucgaugcg

SEQ ID NO: 2647507 - RNA, 19 nt, Artificial Sequence
  Description of Artificial Sequence: Synthetic oligonucleotide
ugucccgcgacgggucgau

SEQ ID NO: 2647508 - RNA, 19 nt, Artificial Sequence
  Description of Artificial Sequence: Synthetic oligonucleotide
ccuuagcacccagaggguc

SEQ ID NO: 2647509 - RNA, 19 nt, Artificial Sequence
  Description of Artificial Sequence: Synthetic oligonucleotide
gggucaguuugucccgcga

SEQ ID NO: 2647510 - RNA, 19 nt, Artificial Sequence
  Description of Artificial Sequence: Synthetic oligonucleotide
gguggucgguacaguuaag

SEQ ID NO: 2647511 - RNA, 19 nt, Artificial Sequence
  Description of Artificial Sequence: Synthetic oligonucleotide
gcuaacaccagggccccaa

SEQ ID NO: 2647512 - RNA, 19 nt, Artificial Sequence
  Description of Artificial Sequence: Synthetic oligonucleotide
guguaaccauagauagcua

SEQ ID NO: 2647513 - RNA, 19 nt, Artificial Sequence
  Description of Artificial Sequence: Synthetic oligonucleotide
ugggccccugggaggugaa

SEQ ID NO: 2647514 - RNA, 19 nt, Artificial Sequence
  Description of Artificial Sequence: Synthetic oligonucleotide
gagcucgggcucgggcagc

SEQ ID NO: 2647515 - RNA, 19 nt, Artificial Sequence
  Description of Artificial Sequence: Synthetic oligonucleotide
gcaguugcgcaggggucag

SEQ ID NO: 2647516 - RNA, 19 nt, Artificial Sequence
  Description of Artificial Sequence: Synthetic oligonucleotide
ccacugaauagaaggugua

SEQ ID NO: 2647517 - RNA, 19 nt, Artificial Sequence
  Description of Artificial Sequence: Synthetic oligonucleotide
cgaugcgcugagcgaacgg

SEQ ID NO: 2647518 - RNA, 19 nt, Artificial Sequence
  Description of Artificial Sequence: Synthetic oligonucleotide
uagcacccagagggucacc

SEQ ID NO: 2647519 - RNA, 19 nt, Artificial Sequence
  Description of Artificial Sequence: Synthetic oligonucleotide
cugccgcauaaacugcagu

SEQ ID NO: 2647520 - RNA, 19 nt, Artificial Sequence
  Description of Artificial Sequence: Synthetic oligonucleotide
gcaaggucgcauaccucuc

SEQ ID NO: 2647521 - RNA, 19 nt, Artificial Sequence
  Description of Artificial Sequence: Synthetic oligonucleotide
gaaacgcuccugagccacu

SEQ ID NO: 2647522 - RNA, 19 nt, Artificial Sequence
  Description of Artificial Sequence: Synthetic oligonucleotide
gggcgccagcaguuugaag

SEQ ID NO: 2647523 - RNA, 19 nt, Artificial Sequence
  Description of Artificial Sequence: Synthetic oligonucleotide
gcgcugagcgaacggggca

SEQ ID NO: 2647524 - RNA, 19 nt, Artificial Sequence
  Description of Artificial Sequence: Synthetic oligonucleotide
gggaaaggcaaggucgcau

SEQ ID NO: 2647525 - RNA, 19 nt, Artificial Sequence
  Description of Artificial Sequence: Synthetic oligonucleotide
gcgaacggggcauuuccau

SEQ ID NO: 2647526 - RNA, 19 nt, Artificial Sequence
  Description of Artificial Sequence: Synthetic oligonucleotide
ccgcuguggaaguguuuuc

SEQ ID NO: 2647527 - RNA, 19 nt, Artificial Sequence
  Description of Artificial Sequence: Synthetic oligonucleotide
guugcgcaggggucaguuu

SEQ ID NO: 2647528 - RNA, 19 nt, Artificial Sequence
  Description of Artificial Sequence: Synthetic oligonucleotide
ggggaaaggcaaggucgca

SEQ ID NO: 2647529 - RNA, 19 nt, Artificial Sequence
  Description of Artificial Sequence: Synthetic oligonucleotide
cuaacaccagggccccaau

SEQ ID NO: 2647530 - RNA, 19 nt, Artificial Sequence
  Description of Artificial Sequence: Synthetic oligonucleotide
guugggccccugggaggug

SEQ ID NO: 2647531 - RNA, 19 nt, Artificial Sequence
  Description of Artificial Sequence: Synthetic oligonucleotide
gccgcuguggaaguguuuu

SEQ ID NO: 2647532 - RNA, 19 nt, Artificial Sequence
  Description of Artificial Sequence: Synthetic oligonucleotide
gcgacgggucgaugcgcug

SEQ ID NO: 2647533 - RNA, 19 nt, Artificial Sequence
  Description of Artificial Sequence: Synthetic oligonucleotide
cgcauaccucucgaacaag

SEQ ID NO: 2647534 - RNA, 19 nt, Artificial Sequence
  Description of Artificial Sequence: Synthetic oligonucleotide
guccgccgcuguggaagug

SEQ ID NO: 2647535 - RNA, 19 nt, Artificial Sequence
  Description of Artificial Sequence: Synthetic oligonucleotide
cccaaugcccaggccgguc

SEQ ID NO: 2647536 - RNA, 19 nt, Artificial Sequence
  Description of Artificial Sequence: Synthetic oligonucleotide
caguggccaaaugcagagu

SEQ ID NO: 2647537 - RNA, 19 nt, Artificial Sequence
  Description of Artificial Sequence: Synthetic oligonucleotide
cccuaucguucccacuuua

SEQ ID NO: 2647538 - RNA, 19 nt, Artificial Sequence
  Description of Artificial Sequence: Synthetic oligonucleotide
gguccgccgcuguggaagu

SEQ ID NO: 2647539 - RNA, 19 nt, Artificial Sequence
  Description of Artificial Sequence: Synthetic oligonucleotide
gucccgcgacgggucgaug

SEQ ID NO: 2647540 - RNA, 19 nt, Artificial Sequence
  Description of Artificial Sequence: Synthetic oligonucleotide
ccgcgacgggucgaugcgc

SEQ ID NO: 2647541 - RNA, 19 nt, Artificial Sequence
  Description of Artificial Sequence: Synthetic oligonucleotide
ccugacgcucucucccucu

SEQ ID NO: 2647542 - RNA, 19 nt, Artificial Sequence
  Description of Artificial Sequence: Synthetic oligonucleotide
ggggcgccagcaguuugaa

SEQ ID NO: 2647543 - RNA, 19 nt, Artificial Sequence
  Description of Artificial Sequence: Synthetic oligonucleotide
gcgcaggggucaguuuguc

SEQ ID NO: 2647544 - RNA, 19 nt, Artificial Sequence
  Description of Artificial Sequence: Synthetic oligonucleotide
cgacgggucgaugcgcuga

SEQ ID NO: 2647545 - RNA, 19 nt, Artificial Sequence
  Description of Artificial Sequence: Synthetic oligonucleotide
cugagcgaacggggcauuu

SEQ ID NO: 2647546 - RNA, 19 nt, Artificial Sequence
  Description of Artificial Sequence: Synthetic oligonucleotide
ccucucgaacaaggaaaua

SEQ ID NO: 2647547 - RNA, 19 nt, Artificial Sequence
  Description of Artificial Sequence: Synthetic oligonucleotide
aggcaccguuuaacaugua

SEQ ID NO: 2647548 - RNA, 19 nt, Artificial Sequence
  Description of Artificial Sequence: Synthetic oligonucleotide
cgguacaguuaagguccug

SEQ ID NO: 2647549 - RNA, 19 nt, Artificial Sequence
  Description of Artificial Sequence: Synthetic oligonucleotide
cgcgacgggucgaugcgcu

SEQ ID NO: 2647550 - RNA, 19 nt, Artificial Sequence
  Description of Artificial Sequence: Synthetic oligonucleotide
caguugcgcaggggucagu

SEQ ID NO: 2647551 - RNA, 19 nt, Artificial Sequence
  Description of Artificial Sequence: Synthetic oligonucleotide
gcugagcgaacggggcauu

SEQ ID NO: 2647552 - RNA, 19 nt, Artificial Sequence
  Description of Artificial Sequence: Synthetic oligonucleotide
ccuuaacaguugggccccu

SEQ ID NO: 2647553 - RNA, 19 nt, Artificial Sequence
  Description of Artificial Sequence: Synthetic oligonucleotide
cggucacgauguuccgggu

SEQ ID NO: 2647554 - RNA, 19 nt, Artificial Sequence
  Description of Artificial Sequence: Synthetic oligonucleotide
ccgccgcuguggaaguguu

SEQ ID NO: 2647555 - RNA, 19 nt, Artificial Sequence
  Description of Artificial Sequence: Synthetic oligonucleotide
cggguccgccgcuguggaa

SEQ ID NO: 2647556 - RNA, 19 nt, Artificial Sequence
  Description of Artificial Sequence: Synthetic oligonucleotide
ccccaaugcccaggccggu

SEQ ID NO: 2647557 - RNA, 19 nt, Artificial Sequence
  Description of Artificial Sequence: Synthetic oligonucleotide
ccaggccggucacgauguu

SEQ ID NO: 2647558 - RNA, 19 nt, Artificial Sequence
  Description of Artificial Sequence: Synthetic oligonucleotide
aauauauauauauauauau

SEQ ID NO: 2647559 - RNA, 19 nt, Artificial Sequence
  Description of Artificial Sequence: Synthetic oligonucleotide
uauauauauauauauaucu

SEQ ID NO: 2647560 - RNA, 19 nt, Artificial Sequence
  Description of Artificial Sequence: Synthetic oligonucleotide
auauauauauaucuguaac

SEQ ID NO: 2647561 - RNA, 19 nt, Artificial Sequence
  Description of Artificial Sequence: Synthetic oligonucleotide
aaauaagacaaacucuggg

SEQ ID NO: 2647562 - RNA, 19 nt, Artificial Sequence
  Description of Artificial Sequence: Synthetic oligonucleotide
uauuuuaauauauauauau

SEQ ID NO: 2647563 - RNA, 19 nt, Artificial Sequence
  Description of Artificial Sequence: Synthetic oligonucleotide
uuaauauauauauauauau

SEQ ID NO: 2647564 - RNA, 19 nt, Artificial Sequence
  Description of Artificial Sequence: Synthetic oligonucleotide
uuuuaauauauauauauau

SEQ ID NO: 2647565 - RNA, 19 nt, Artificial Sequence
  Description of Artificial Sequence: Synthetic oligonucleotide
auaucuguaacuucgguuc

SEQ ID NO: 2647566 - RNA, 19 nt, Artificial Sequence
  Description of Artificial Sequence: Synthetic oligonucleotide
uauauauauauauaucugu

SEQ ID NO: 2647567 - RNA, 19 nt, Artificial Sequence
  Description of Artificial Sequence: Synthetic oligonucleotide
agaaagaccguuucuuucc

SEQ ID NO: 2647568 - RNA, 19 nt, Artificial Sequence
  Description of Artificial Sequence: Synthetic oligonucleotide
uuuaauauauauauauaua

SEQ ID NO: 2647569 - RNA, 19 nt, Artificial Sequence
  Description of Artificial Sequence: Synthetic oligonucleotide
auauauaucuguaacuucg

SEQ ID NO: 2647570 - RNA, 19 nt, Artificial Sequence
  Description of Artificial Sequence: Synthetic oligonucleotide
uauauaucuguaacuucgg

SEQ ID NO: 2647571 - RNA, 19 nt, Artificial Sequence
  Description of Artificial Sequence: Synthetic oligonucleotide
uaauauauauauauauaua

SEQ ID NO: 2647572 - RNA, 19 nt, Artificial Sequence
  Description of Artificial Sequence: Synthetic oligonucleotide
auauauauauauauauauc

SEQ ID NO: 2647573 - RNA, 19 nt, Artificial Sequence
  Description of Artificial Sequence: Synthetic oligonucleotide
uauauauauauaucuguaa

SEQ ID NO: 2647574 - RNA, 19 nt, Artificial Sequence
  Description of Artificial Sequence: Synthetic oligonucleotide
uguaacuucgguuccaagu

SEQ ID NO: 2647575 - RNA, 19 nt, Artificial Sequence
  Description of Artificial Sequence: Synthetic oligonucleotide
uuuaccuucacgucgcccu

SEQ ID NO: 2647576 - RNA, 19 nt, Artificial Sequence
  Description of Artificial Sequence: Synthetic oligonucleotide
uucgguuccaaguaccaag

SEQ ID NO: 2647577 - RNA, 19 nt, Artificial Sequence
  Description of Artificial Sequence: Synthetic oligonucleotide
auauauauauauauaucug

SEQ ID NO: 2647578 - RNA, 19 nt, Artificial Sequence
  Description of Artificial Sequence: Synthetic oligonucleotide
guuccaaguaccaagggag

SEQ ID NO: 2647579 - RNA, 19 nt, Artificial Sequence
  Description of Artificial Sequence: Synthetic oligonucleotide
uuuggcgccauccucuuug

SEQ ID NO: 2647580 - RNA, 19 nt, Artificial Sequence
  Description of Artificial Sequence: Synthetic oligonucleotide
agugacgccggugagcucc

SEQ ID NO: 2647581 - RNA, 19 nt, Artificial Sequence
  Description of Artificial Sequence: Synthetic oligonucleotide
ucaggugucugcuucccgg

SEQ ID NO: 2647582 - RNA, 19 nt, Artificial Sequence
  Description of Artificial Sequence: Synthetic oligonucleotide
aacuucgguuccaaguacc

SEQ ID NO: 2647583 - RNA, 19 nt, Artificial Sequence
  Description of Artificial Sequence: Synthetic oligonucleotide
aguagggcgauggaggucg

SEQ ID NO: 2647584 - RNA, 19 nt, Artificial Sequence
  Description of Artificial Sequence: Synthetic oligonucleotide
ucgguuccaaguaccaagg

SEQ ID NO: 2647585 - RNA, 19 nt, Artificial Sequence
  Description of Artificial Sequence: Synthetic oligonucleotide
ccauaaauaagacaaacuc

SEQ ID NO: 2647586 - RNA, 19 nt, Artificial Sequence
  Description of Artificial Sequence: Synthetic oligonucleotide
aaacucuggggcucaaaug

SEQ ID NO: 2647587 - RNA, 19 nt, Artificial Sequence
  Description of Artificial Sequence: Synthetic oligonucleotide
uauaucuguaacuucgguu

SEQ ID NO: 2647588 - RNA, 19 nt, Artificial Sequence
  Description of Artificial Sequence: Synthetic oligonucleotide
ugcggagccucacagugcg

SEQ ID NO: 2647589 - RNA, 19 nt, Artificial Sequence
  Description of Artificial Sequence: Synthetic oligonucleotide
ucccauacgaagcccgacg

SEQ ID NO: 2647590 - RNA, 19 nt, Artificial Sequence
  Description of Artificial Sequence: Synthetic oligonucleotide
ugcacagugacgccgguga

SEQ ID NO: 2647591 - RNA, 19 nt, Artificial Sequence
  Description of Artificial Sequence: Synthetic oligonucleotide
cuccuuuaccuucacgucg

SEQ ID NO: 2647592 - RNA, 19 nt, Artificial Sequence
  Description of Artificial Sequence: Synthetic oligonucleotide
uucuuuccauaaauaagac

SEQ ID NO: 2647593 - RNA, 19 nt, Artificial Sequence
  Description of Artificial Sequence: Synthetic oligonucleotide
uccuuuaccuucacgucgc

SEQ ID NO: 2647594 - RNA, 19 nt, Artificial Sequence
  Description of Artificial Sequence: Synthetic oligonucleotide
ugagugcggagccucacag

SEQ ID NO: 2647595 - RNA, 19 nt, Artificial Sequence
  Description of Artificial Sequence: Synthetic oligonucleotide
agugcggagccucacagug

SEQ ID NO: 2647596 - RNA, 19 nt, Artificial Sequence
  Description of Artificial Sequence: Synthetic oligonucleotide
  modified_base (12)..(12): a, c, u, g, unknown or other
agcucgaagggncggggcc

SEQ ID NO: 2647597 - RNA, 19 nt, Artificial Sequence
  Description of Artificial Sequence: Synthetic oligonucleotide
cuucacgucgcccuggggc

SEQ ID NO: 2647598 - RNA, 19 nt, Artificial Sequence
  Description of Artificial Sequence: Synthetic oligonucleotide
guagcugucacgcggcggg

SEQ ID NO: 2647599 - RNA, 19 nt, Artificial Sequence
  Description of Artificial Sequence: Synthetic oligonucleotide
cauaaauaagacaaacucu

SEQ ID NO: 2647600 - RNA, 19 nt, Artificial Sequence
  Description of Artificial Sequence: Synthetic oligonucleotide
  modified_base (7)..(7): a, c, u, g, unknown or other
  modified_base (16)..(16): a, c, u, g, unknown or other
gaagggncggggcccncgg

SEQ ID NO: 2647601 - RNA, 19 nt, Artificial Sequence
  Description of Artificial Sequence: Synthetic oligonucleotide
  modified_base (5)..(5): a, c, u, g, unknown or other
  modified_base (14)..(14): a, c, u, g, unknown or other
agggncggggcccncgggc

SEQ ID NO: 2647602 - RNA, 19 nt, Artificial Sequence
  Description of Artificial Sequence: Synthetic oligonucleotide
auggaggucggacagccag

SEQ ID NO: 2647603 - RNA, 19 nt, Artificial Sequence
  Description of Artificial Sequence: Synthetic oligonucleotide
cauacgaagcccgacgugc

SEQ ID NO: 2647604 - RNA, 19 nt, Artificial Sequence
  Description of Artificial Sequence: Synthetic oligonucleotide
uaucuguaacuucgguucc

SEQ ID NO: 2647605 - RNA, 19 nt, Artificial Sequence
  Description of Artificial Sequence: Synthetic oligonucleotide
aaauggcgcgugcuccagc

SEQ ID NO: 2647606 - RNA, 19 nt, Artificial Sequence
  Description of Artificial Sequence: Synthetic oligonucleotide
ugauccgagguucagccuc

SEQ ID NO: 2647607 - RNA, 19 nt, Artificial Sequence
  Description of Artificial Sequence: Synthetic oligonucleotide
aauggcgcgugcuccagcu

SEQ ID NO: 2647608 - RNA, 19 nt, Artificial Sequence
  Description of Artificial Sequence: Synthetic oligonucleotide
guagucgugaggcucccgg

SEQ ID NO: 2647609 - RNA, 19 nt, Artificial Sequence
  Description of Artificial Sequence: Synthetic oligonucleotide
  modified_base (18)..(18): a, c, u, g, unknown or other
uccgacagcucgaagggnc

SEQ ID NO: 2647610 - RNA, 19 nt, Artificial Sequence
  Description of Artificial Sequence: Synthetic oligonucleotide
auauauauauauaucugua

SEQ ID NO: 2647611 - RNA, 19 nt, Artificial Sequence
  Description of Artificial Sequence: Synthetic oligonucleotide
auauaucuguaacuucggu

SEQ ID NO: 2647612 - RNA, 19 nt, Artificial Sequence
  Description of Artificial Sequence: Synthetic oligonucleotide
cugugaggaucccagggcg

SEQ ID NO: 2647613 - RNA, 19 nt, Artificial Sequence
  Description of Artificial Sequence: Synthetic oligonucleotide
guggagugcacagugacgc

SEQ ID NO: 2647614 - RNA, 19 nt, Artificial Sequence
  Description of Artificial Sequence: Synthetic oligonucleotide
auuuuaauauauauauaua

SEQ ID NO: 2647615 - RNA, 19 nt, Artificial Sequence
  Description of Artificial Sequence: Synthetic oligonucleotide
ucucgcucugugaggaucc

SEQ ID NO: 2647616 - RNA, 19 nt, Artificial Sequence
  Description of Artificial Sequence: Synthetic oligonucleotide
agggcugccuugcaguagg

SEQ ID NO: 2647617 - RNA, 19 nt, Artificial Sequence
  Description of Artificial Sequence: Synthetic oligonucleotide
ucugcuucccggacucccg

SEQ ID NO: 2647618 - RNA, 19 nt, Artificial Sequence
  Description of Artificial Sequence: Synthetic oligonucleotide
accguuucuuuccauaaau

SEQ ID NO: 2647619 - RNA, 19 nt, Artificial Sequence
  Description of Artificial Sequence: Synthetic oligonucleotide
aagaccguuucuuuccaua

SEQ ID NO: 2647620 - RNA, 19 nt, Artificial Sequence
  Description of Artificial Sequence: Synthetic oligonucleotide
uaacuucgguuccaaguac

SEQ ID NO: 2647621 - RNA, 19 nt, Artificial Sequence
  Description of Artificial Sequence: Synthetic oligonucleotide
gcugccuugcaguagggcg

SEQ ID NO: 2647622 - RNA, 19 nt, Artificial Sequence
  Description of Artificial Sequence: Synthetic oligonucleotide
guaacuucgguuccaagua

SEQ ID NO: 2647623 - RNA, 19 nt, Artificial Sequence
  Description of Artificial Sequence: Synthetic oligonucleotide
ucuccuugauccgagguuc

SEQ ID NO: 2647624 - RNA, 19 nt, Artificial Sequence
  Description of Artificial Sequence: Synthetic oligonucleotide
ucaaauggcgcgugcucca

SEQ ID NO: 2647625 - RNA, 19 nt, Artificial Sequence
  Description of Artificial Sequence: Synthetic oligonucleotide
uccaaguaccaagggaggc

SEQ ID NO: 2647626 - RNA, 19 nt, Artificial Sequence
  Description of Artificial Sequence: Synthetic oligonucleotide
cucaaauggcgcgugcucc

SEQ ID NO: 2647627 - RNA, 19 nt, Artificial Sequence
  Description of Artificial Sequence: Synthetic oligonucleotide
ucuuugccaggugaguggc

SEQ ID NO: 2647628 - RNA, 19 nt, Artificial Sequence
  Description of Artificial Sequence: Synthetic oligonucleotide
uugcaguagggcgauggag

SEQ ID NO: 2647629 - RNA, 19 nt, Artificial Sequence
  Description of Artificial Sequence: Synthetic oligonucleotide
aguggcucuccuugauccg

SEQ ID NO: 2647630 - RNA, 19 nt, Artificial Sequence
  Description of Artificial Sequence: Synthetic oligonucleotide
caacaggccugccaggcgc

SEQ ID NO: 2647631 - RNA, 19 nt, Artificial Sequence
  Description of Artificial Sequence: Synthetic oligonucleotide
ugugaggaucccagggcga

SEQ ID NO: 2647632 - RNA, 19 nt, Artificial Sequence
  Description of Artificial Sequence: Synthetic oligonucleotide
uggcgcgugcuccagcucc

SEQ ID NO: 2647633 - RNA, 19 nt, Artificial Sequence
  Description of Artificial Sequence: Synthetic oligonucleotide
aguuuuggcgccauccucu

SEQ ID NO: 2647634 - RNA, 19 nt, Artificial Sequence
  Description of Artificial Sequence: Synthetic oligonucleotide
gaaagaccguuucuuucca

SEQ ID NO: 2647635 - RNA, 19 nt, Artificial Sequence
  Description of Artificial Sequence: Synthetic oligonucleotide
agaccguuucuuuccauaa

SEQ ID NO: 2647636 - RNA, 19 nt, Artificial Sequence
  Description of Artificial Sequence: Synthetic oligonucleotide
uguguggccguggagugca

SEQ ID NO: 2647637 - RNA, 19 nt, Artificial Sequence
  Description of Artificial Sequence: Synthetic oligonucleotide
agagccgggccugagugcg

SEQ ID NO: 2647638 - RNA, 19 nt, Artificial Sequence
  Description of Artificial Sequence: Synthetic oligonucleotide
acagugacgccggugagcu

SEQ ID NO: 2647639 - RNA, 19 nt, Artificial Sequence
  Description of Artificial Sequence: Synthetic oligonucleotide
  modified_base (14)..(14): a, c, u, g, unknown or other
acagcucgaagggncgggg

SEQ ID NO: 2647640 - RNA, 19 nt, Artificial Sequence
  Description of Artificial Sequence: Synthetic oligonucleotide
uuaccuucacgucgcccug

SEQ ID NO: 2647641 - RNA, 19 nt, Artificial Sequence
  Description of Artificial Sequence: Synthetic oligonucleotide
cuggggcucaaauggcgcg

SEQ ID NO: 2647642 - RNA, 19 nt, Artificial Sequence
  Description of Artificial Sequence: Synthetic oligonucleotide
ucgugaggcucccggugcg

SEQ ID NO: 2647643 - RNA, 19 nt, Artificial Sequence
  Description of Artificial Sequence: Synthetic oligonucleotide
aaagaccguuucuuuccau

SEQ ID NO: 2647644 - RNA, 19 nt, Artificial Sequence
  Description of Artificial Sequence: Synthetic oligonucleotide
uuugccaggugaguggcuc

SEQ ID NO: 2647645 - RNA, 19 nt, Artificial Sequence
  Description of Artificial Sequence: Synthetic oligonucleotide
agggcgauggaggucggac

SEQ ID NO: 2647646 - RNA, 19 nt, Artificial Sequence
  Description of Artificial Sequence: Synthetic oligonucleotide
uccgagguucagccucucg

SEQ ID NO: 2647647 - RNA, 19 nt, Artificial Sequence
  Description of Artificial Sequence: Synthetic oligonucleotide
gcgcuggacagaaagaccg

SEQ ID NO: 2647648 - RNA, 19 nt, Artificial Sequence
  Description of Artificial Sequence: Synthetic oligonucleotide
agucgugaggcucccggug

SEQ ID NO: 2647649 - RNA, 19 nt, Artificial Sequence
  Description of Artificial Sequence: Synthetic oligonucleotide
agcccgacgugccccagac

SEQ ID NO: 2647650 - RNA, 19 nt, Artificial Sequence
  Description of Artificial Sequence: Synthetic oligonucleotide
  modified_base (6)..(6): a, c, u, g, unknown or other
  modified_base (15)..(15): a, c, u, g, unknown or other
aagggncggggcccncggg

SEQ ID NO: 2647651 - RNA, 19 nt, Artificial Sequence
  Description of Artificial Sequence: Synthetic oligonucleotide
gguuccaaguaccaaggga

SEQ ID NO: 2647652 - RNA, 19 nt, Artificial Sequence
  Description of Artificial Sequence: Synthetic oligonucleotide
cagccucucgcucugugag

SEQ ID NO: 2647653 - RNA, 19 nt, Artificial Sequence
  Description of Artificial Sequence: Synthetic oligonucleotide
gcuccgacagcucgaaggg

SEQ ID NO: 2647654 - RNA, 19 nt, Artificial Sequence
  Description of Artificial Sequence: Synthetic oligonucleotide
gaggaucccagggcgaccc

SEQ ID NO: 2647655 - RNA, 19 nt, Artificial Sequence
  Description of Artificial Sequence: Synthetic oligonucleotide
aaaggcgcggcgcggcagu

SEQ ID NO: 2647656 - RNA, 19 nt, Artificial Sequence
  Description of Artificial Sequence: Synthetic oligonucleotide
  modified_base (15)..(15): a, c, u, g, unknown or other
gacagcucgaagggncggg

SEQ ID NO: 2647657 - RNA, 19 nt, Artificial Sequence
  Description of Artificial Sequence: Synthetic oligonucleotide
cggacagccaguuuuggcg

SEQ ID NO: 2647658 - RNA, 19 nt, Artificial Sequence
  Description of Artificial Sequence: Synthetic oligonucleotide
agggcgacccagcucaccu

SEQ ID NO: 2647659 - RNA, 19 nt, Artificial Sequence
  Description of Artificial Sequence: Synthetic oligonucleotide
cucucaggugucugcuucc

SEQ ID NO: 2647660 - RNA, 19 nt, Artificial Sequence
  Description of Artificial Sequence: Synthetic oligonucleotide
gagccucacagugcgcugg

SEQ ID NO: 2647661 - RNA, 19 nt, Artificial Sequence
  Description of Artificial Sequence: Synthetic oligonucleotide
gacagccaguuuuggcgcc

SEQ ID NO: 2647662 - RNA, 19 nt, Artificial Sequence
  Description of Artificial Sequence: Synthetic oligonucleotide
gacucccgacccaacaggc

SEQ ID NO: 2647663 - RNA, 19 nt, Artificial Sequence
  Description of Artificial Sequence: Synthetic oligonucleotide
gucgugaggcucccggugc

SEQ ID NO: 2647664 - RNA, 19 nt, Artificial Sequence
  Description of Artificial Sequence: Synthetic oligonucleotide
cucccggugcgguaggcgc

SEQ ID NO: 2647665 - RNA, 19 nt, Artificial Sequence
  Description of Artificial Sequence: Synthetic oligonucleotide
ucccggugcgguaggcgcg

SEQ ID NO: 2647666 - RNA, 19 nt, Artificial Sequence
  Description of Artificial Sequence: Synthetic oligonucleotide
cuuuaccuucacgucgccc

SEQ ID NO: 2647667 - RNA, 19 nt, Artificial Sequence
  Description of Artificial Sequence: Synthetic oligonucleotide
ggacucccgacccaacagg

SEQ ID NO: 2647668 - RNA, 19 nt, Artificial Sequence
  Description of Artificial Sequence: Synthetic oligonucleotide
accuucacgucgcccuggg

SEQ ID NO: 2647669 - RNA, 19 nt, Artificial Sequence
  Description of Artificial Sequence: Synthetic oligonucleotide
ggagugcacagugacgccg

SEQ ID NO: 2647670 - RNA, 19 nt, Artificial Sequence
  Description of Artificial Sequence: Synthetic oligonucleotide
cccgacgugccccagaccc

SEQ ID NO: 2647671 - RNA, 19 nt, Artificial Sequence
  Description of Artificial Sequence: Synthetic oligonucleotide
uggagugcacagugacgcc

SEQ ID NO: 2647672 - RNA, 19 nt, Artificial Sequence
  Description of Artificial Sequence: Synthetic oligonucleotide
ggacagccaguuuuggcgc

SEQ ID NO: 2647673 - RNA, 19 nt, Artificial Sequence
  Description of Artificial Sequence: Synthetic oligonucleotide
gugcgcuggacagaaagac

SEQ ID NO: 2647674 - RNA, 19 nt, Artificial Sequence
  Description of Artificial Sequence: Synthetic oligonucleotide
ggcgcggcaguucaggccc

SEQ ID NO: 2647675 - RNA, 19 nt, Artificial Sequence
  Description of Artificial Sequence: Synthetic oligonucleotide
gguaggcgcgcuccgacag

SEQ ID NO: 2647676 - RNA, 19 nt, Artificial Sequence
  Description of Artificial Sequence: Synthetic oligonucleotide
ugggccccgcugcaagagg

SEQ ID NO: 2647677 - RNA, 19 nt, Artificial Sequence
  Description of Artificial Sequence: Synthetic oligonucleotide
uggaggucggacagccagu

SEQ ID NO: 2647678 - RNA, 19 nt, Artificial Sequence
  Description of Artificial Sequence: Synthetic oligonucleotide
cucaggugucugcuucccg

SEQ ID NO: 2647679 - RNA, 19 nt, Artificial Sequence
  Description of Artificial Sequence: Synthetic oligonucleotide
caguuuuggcgccauccuc

SEQ ID NO: 2647680 - RNA, 19 nt, Artificial Sequence
  Description of Artificial Sequence: Synthetic oligonucleotide
ucgcccuggggccucucag

SEQ ID NO: 2647681 - RNA, 19 nt, Artificial Sequence
  Description of Artificial Sequence: Synthetic oligonucleotide
ggcgacccagcucaccugg

SEQ ID NO: 2647682 - RNA, 19 nt, Artificial Sequence
  Description of Artificial Sequence: Synthetic oligonucleotide
gacagaaagaccguuucuu

SEQ ID NO: 2647683 - RNA, 19 nt, Artificial Sequence
  Description of Artificial Sequence: Synthetic oligonucleotide
uccuugauccgagguucag

SEQ ID NO: 2647684 - RNA, 19 nt, Artificial Sequence
  Description of Artificial Sequence: Synthetic oligonucleotide
acgccggugagcuccggug

SEQ ID NO: 2647685 - RNA, 19 nt, Artificial Sequence
  Description of Artificial Sequence: Synthetic oligonucleotide
auccucuuugccaggugag

SEQ ID NO: 2647686 - RNA, 19 nt, Artificial Sequence
  Description of Artificial Sequence: Synthetic oligonucleotide
uguagucgugaggcucccg

SEQ ID NO: 2647687 - RNA, 19 nt, Artificial Sequence
  Description of Artificial Sequence: Synthetic oligonucleotide
caaguaccaagggaggcca

SEQ ID NO: 2647688 - RNA, 19 nt, Artificial Sequence
  Description of Artificial Sequence: Synthetic oligonucleotide
uaccuucacgucgcccugg

SEQ ID NO: 2647689 - RNA, 19 nt, Artificial Sequence
  Description of Artificial Sequence: Synthetic oligonucleotide
ucccgacccaacaggccug

SEQ ID NO: 2647690 - RNA, 19 nt, Artificial Sequence
  Description of Artificial Sequence: Synthetic oligonucleotide
uagucgugaggcucccggu

SEQ ID NO: 2647691 - RNA, 19 nt, Artificial Sequence
  Description of Artificial Sequence: Synthetic oligonucleotide
caguucaggccccgguagc

SEQ ID NO: 2647692 - RNA, 19 nt, Artificial Sequence
  Description of Artificial Sequence: Synthetic oligonucleotide
gaggcucccggugcgguag

SEQ ID NO: 2647693 - RNA, 19 nt, Artificial Sequence
  Description of Artificial Sequence: Synthetic oligonucleotide
gugagcuccggugucuccc

SEQ ID NO: 2647694 - RNA, 19 nt, Artificial Sequence
  Description of Artificial Sequence: Synthetic oligonucleotide
cuccuccuuuaccuucacg

SEQ ID NO: 2647695 - RNA, 19 nt, Artificial Sequence
  Description of Artificial Sequence: Synthetic oligonucleotide
cugccuugcaguagggcga

SEQ ID NO: 2647696 - RNA, 19 nt, Artificial Sequence
  Description of Artificial Sequence: Synthetic oligonucleotide
cacgcggcgggucccauac

SEQ ID NO: 2647697 - RNA, 19 nt, Artificial Sequence
  Description of Artificial Sequence: Synthetic oligonucleotide
acuucgguuccaaguacca

SEQ ID NO: 2647698 - RNA, 19 nt, Artificial Sequence
  Description of Artificial Sequence: Synthetic oligonucleotide
ccgagguucagccucucgc

SEQ ID NO: 2647699 - RNA, 19 nt, Artificial Sequence
  Description of Artificial Sequence: Synthetic oligonucleotide
ggcgccauccucuuugcca

SEQ ID NO: 2647700 - RNA, 19 nt, Artificial Sequence
  Description of Artificial Sequence: Synthetic oligonucleotide
gaccguuucuuuccauaaa

SEQ ID NO: 2647701 - RNA, 19 nt, Artificial Sequence
  Description of Artificial Sequence: Synthetic oligonucleotide
aguucaggccccgguagcu

SEQ ID NO: 2647702 - RNA, 19 nt, Artificial Sequence
  Description of Artificial Sequence: Synthetic oligonucleotide
gccaguuuuggcgccaucc

SEQ ID NO: 2647703 - RNA, 19 nt, Artificial Sequence
  Description of Artificial Sequence: Synthetic oligonucleotide
ugagcuccggugucucccu

SEQ ID NO: 2647704 - RNA, 19 nt, Artificial Sequence
  Description of Artificial Sequence: Synthetic oligonucleotide
ccuugcaguagggcgaugg

SEQ ID NO: 2647705 - RNA, 19 nt, Artificial Sequence
  Description of Artificial Sequence: Synthetic oligonucleotide
  modified_base (13)..(13): a, c, u, g, unknown or other
cagcucgaagggncggggc

SEQ ID NO: 2647706 - RNA, 19 nt, Artificial Sequence
  Description of Artificial Sequence: Synthetic oligonucleotide
ccaaguaccaagggaggcc

SEQ ID NO: 2647707 - RNA, 19 nt, Artificial Sequence
  Description of Artificial Sequence: Synthetic oligonucleotide
ucuucccugcgcuccuccu

SEQ ID NO: 2647708 - RNA, 19 nt, Artificial Sequence
  Description of Artificial Sequence: Synthetic oligonucleotide
agugcgcuggacagaaaga

SEQ ID NO: 2647709 - RNA, 19 nt, Artificial Sequence
  Description of Artificial Sequence: Synthetic oligonucleotide
aaguaccaagggaggccag

SEQ ID NO: 2647710 - RNA, 19 nt, Artificial Sequence
  Description of Artificial Sequence: Synthetic oligonucleotide
cccgguagcugucacgcgg

SEQ ID NO: 2647711 - RNA, 19 nt, Artificial Sequence
  Description of Artificial Sequence: Synthetic oligonucleotide
gaaaggcgcggcgcggcag

SEQ ID NO: 2647712 - RNA, 19 nt, Artificial Sequence
  Description of Artificial Sequence: Synthetic oligonucleotide
uugccaggugaguggcucu

SEQ ID NO: 2647713 - RNA, 19 nt, Artificial Sequence
  Description of Artificial Sequence: Synthetic oligonucleotide
uccgggcuguagucgugag

SEQ ID NO: 2647714 - RNA, 19 nt, Artificial Sequence
  Description of Artificial Sequence: Synthetic oligonucleotide
gcuguagucgugaggcucc

SEQ ID NO: 2647715 - RNA, 19 nt, Artificial Sequence
  Description of Artificial Sequence: Synthetic oligonucleotide
gucugcuucccggacuccc

SEQ ID NO: 2647716 - RNA, 19 nt, Artificial Sequence
  Description of Artificial Sequence: Synthetic oligonucleotide
ggccguggagugcacagug

SEQ ID NO: 2647717 - RNA, 19 nt, Artificial Sequence
  Description of Artificial Sequence: Synthetic oligonucleotide
uaggcgcgcuccgacagcu

SEQ ID NO: 2647718 - RNA, 19 nt, Artificial Sequence
  Description of Artificial Sequence: Synthetic oligonucleotide
cuugcaguagggcgaugga

SEQ ID NO: 2647719 - RNA, 19 nt, Artificial Sequence
  Description of Artificial Sequence: Synthetic oligonucleotide
acgugccccagaccccagg

SEQ ID NO: 2647720 - RNA, 19 nt, Artificial Sequence
  Description of Artificial Sequence: Synthetic oligonucleotide
gggucccauacgaagcccg

SEQ ID NO: 2647721 - RNA, 19 nt, Artificial Sequence
  Description of Artificial Sequence: Synthetic oligonucleotide
cucucgcucugugaggauc

SEQ ID NO: 2647722 - RNA, 19 nt, Artificial Sequence
  Description of Artificial Sequence: Synthetic oligonucleotide
caaacucuggggcucaaau

SEQ ID NO: 2647723 - RNA, 19 nt, Artificial Sequence
  Description of Artificial Sequence: Synthetic oligonucleotide
aagcccgacgugccccaga

SEQ ID NO: 2647724 - RNA, 19 nt, Artificial Sequence
  Description of Artificial Sequence: Synthetic oligonucleotide
uggggcucaaauggcgcgu

SEQ ID NO: 2647725 - RNA, 19 nt, Artificial Sequence
  Description of Artificial Sequence: Synthetic oligonucleotide
cgggcuguagucgugaggc

SEQ ID NO: 2647726 - RNA, 19 nt, Artificial Sequence
  Description of Artificial Sequence: Synthetic oligonucleotide
cagagccgggccugagugc

SEQ ID NO: 2647727 - RNA, 19 nt, Artificial Sequence
  Description of Artificial Sequence: Synthetic oligonucleotide
agacaaacucuggggcuca

SEQ ID NO: 2647728 - RNA, 19 nt, Artificial Sequence
  Description of Artificial Sequence: Synthetic oligonucleotide
caaauggcgcgugcuccag

SEQ ID NO: 2647729 - RNA, 19 nt, Artificial Sequence
  Description of Artificial Sequence: Synthetic oligonucleotide
gugaggaucccagggcgac

SEQ ID NO: 2647730 - RNA, 19 nt, Artificial Sequence
  Description of Artificial Sequence: Synthetic oligonucleotide
  modified_base (2)..(2): a, c, u, g, unknown or other
  modified_base (11)..(11): a, c, u, g, unknown or other
gncggggcccncgggcggg

SEQ ID NO: 2647731 - RNA, 19 nt, Artificial Sequence
  Description of Artificial Sequence: Synthetic oligonucleotide
uggcgccauccucuuugcc

SEQ ID NO: 2647732 - RNA, 19 nt, Artificial Sequence
  Description of Artificial Sequence: Synthetic oligonucleotide
auggcgcgugcuccagcuc

SEQ ID NO: 2647733 - RNA, 19 nt, Artificial Sequence
  Description of Artificial Sequence: Synthetic oligonucleotide
aggcgcuccgggcuguagu

SEQ ID NO: 2647734 - RNA, 19 nt, Artificial Sequence
  Description of Artificial Sequence: Synthetic oligonucleotide
gucacccagggcugccuug

SEQ ID NO: 2647735 - RNA, 19 nt, Artificial Sequence
  Description of Artificial Sequence: Synthetic oligonucleotide
agccaguuuuggcgccauc

SEQ ID NO: 2647736 - RNA, 19 nt, Artificial Sequence
  Description of Artificial Sequence: Synthetic oligonucleotide
gguagcugucacgcggcgg

SEQ ID NO: 2647737 - RNA, 19 nt, Artificial Sequence
  Description of Artificial Sequence: Synthetic oligonucleotide
ggugcgguaggcgcgcucc

SEQ ID NO: 2647738 - RNA, 19 nt, Artificial Sequence
  Description of Artificial Sequence: Synthetic oligonucleotide
ccagagccgggccugagug

SEQ ID NO: 2647739 - RNA, 19 nt, Artificial Sequence
  Description of Artificial Sequence: Synthetic oligonucleotide
gcgggaaaggcgcggcgcg

SEQ ID NO: 2647740 - RNA, 19 nt, Artificial Sequence
  Description of Artificial Sequence: Synthetic oligonucleotide
uuuuggcgccauccucuuu

SEQ ID NO: 2647741 - RNA, 19 nt, Artificial Sequence
  Description of Artificial Sequence: Synthetic oligonucleotide
ccuccuuuaccuucacguc

SEQ ID NO: 2647742 - RNA, 19 nt, Artificial Sequence
  Description of Artificial Sequence: Synthetic oligonucleotide
ggcgggucccauacgaagc

SEQ ID NO: 2647743 - RNA, 19 nt, Artificial Sequence
  Description of Artificial Sequence: Synthetic oligonucleotide
ugcgcuccuccuuuaccuu

SEQ ID NO: 2647744 - RNA, 19 nt, Artificial Sequence
  Description of Artificial Sequence: Synthetic oligonucleotide
agcugucacgcggcggguc

SEQ ID NO: 2647745 - RNA, 19 nt, Artificial Sequence
  Description of Artificial Sequence: Synthetic oligonucleotide
guaggcgcgcuccgacagc

SEQ ID NO: 2647746 - RNA, 19 nt, Artificial Sequence
  Description of Artificial Sequence: Synthetic oligonucleotide
  modified_base (17)..(17): a, c, u, g, unknown or other
ccgacagcucgaagggncg

SEQ ID NO: 2647747 - RNA, 19 nt, Artificial Sequence
  Description of Artificial Sequence: Synthetic oligonucleotide
gcugucacgcggcgggucc

SEQ ID NO: 2647748 - RNA, 19 nt, Artificial Sequence
  Description of Artificial Sequence: Synthetic oligonucleotide
cgcucugugaggaucccag

SEQ ID NO: 2647749 - RNA, 19 nt, Artificial Sequence
  Description of Artificial Sequence: Synthetic oligonucleotide
gcucaaauggcgcgugcuc

SEQ ID NO: 2647750 - RNA, 19 nt, Artificial Sequence
  Description of Artificial Sequence: Synthetic oligonucleotide
agugcacagugacgccggu

SEQ ID NO: 2647751 - RNA, 19 nt, Artificial Sequence
  Description of Artificial Sequence: Synthetic oligonucleotide
cguggagugcacagugacg

SEQ ID NO: 2647752 - RNA, 19 nt, Artificial Sequence
  Description of Artificial Sequence: Synthetic oligonucleotide
gcgggucccauacgaagcc

SEQ ID NO: 2647753 - RNA, 19 nt, Artificial Sequence
  Description of Artificial Sequence: Synthetic oligonucleotide
aggccccgguagcugucac

SEQ ID NO: 2647754 - RNA, 19 nt, Artificial Sequence
  Description of Artificial Sequence: Synthetic oligonucleotide
guucaggccccgguagcug

SEQ ID NO: 2647755 - RNA, 19 nt, Artificial Sequence
  Description of Artificial Sequence: Synthetic oligonucleotide
ggugaguggcucuccuuga

SEQ ID NO: 2647756 - RNA, 19 nt, Artificial Sequence
  Description of Artificial Sequence: Synthetic oligonucleotide
caggugucugcuucccgga

SEQ ID NO: 2647757 - RNA, 19 nt, Artificial Sequence
  Description of Artificial Sequence: Synthetic oligonucleotide
ccucuuugccaggugagug

SEQ ID NO: 2647758 - RNA, 19 nt, Artificial Sequence
  Description of Artificial Sequence: Synthetic oligonucleotide
ucaggccccgguagcuguc

SEQ ID NO: 2647759 - RNA, 19 nt, Artificial Sequence
  Description of Artificial Sequence: Synthetic oligonucleotide
  modified_base (4)..(4): a, c, u, g, unknown or other
  modified_base (13)..(13): a, c, u, g, unknown or other
gggncggggcccncgggcg

SEQ ID NO: 2647760 - RNA, 19 nt, Artificial Sequence
  Description of Artificial Sequence: Synthetic oligonucleotide
ucccagggcgacccagcuc

SEQ ID NO: 2647761 - RNA, 19 nt, Artificial Sequence
  Description of Artificial Sequence: Synthetic oligonucleotide
cugcgcuccuccuuuaccu

SEQ ID NO: 2647762 - RNA, 19 nt, Artificial Sequence
  Description of Artificial Sequence: Synthetic oligonucleotide
ccagaccccaggugugugg

SEQ ID NO: 2647763 - RNA, 19 nt, Artificial Sequence
  Description of Artificial Sequence: Synthetic oligonucleotide
ccguggagugcacagugac

SEQ ID NO: 2647764 - RNA, 19 nt, Artificial Sequence
  Description of Artificial Sequence: Synthetic oligonucleotide
ucccggcgcaccucccuca

SEQ ID NO: 2647765 - RNA, 19 nt, Artificial Sequence
  Description of Artificial Sequence: Synthetic oligonucleotide
ggcucuccuugauccgagg

SEQ ID NO: 2647766 - RNA, 19 nt, Artificial Sequence
  Description of Artificial Sequence: Synthetic oligonucleotide
ucgcucugugaggauccca

SEQ ID NO: 2647767 - RNA, 19 nt, Artificial Sequence
  Description of Artificial Sequence: Synthetic oligonucleotide
gugcgguaggcgcgcuccg

SEQ ID NO: 2647768 - RNA, 19 nt, Artificial Sequence
  Description of Artificial Sequence: Synthetic oligonucleotide
cuccuugauccgagguuca

SEQ ID NO: 2647769 - RNA, 19 nt, Artificial Sequence
  Description of Artificial Sequence: Synthetic oligonucleotide
cugagugcggagccucaca

SEQ ID NO: 2647770 - RNA, 19 nt, Artificial Sequence
  Description of Artificial Sequence: Synthetic oligonucleotide
acagccaguuuuggcgcca

SEQ ID NO: 2647771 - RNA, 19 nt, Artificial Sequence
  Description of Artificial Sequence: Synthetic oligonucleotide
guggcucuccuugauccga

SEQ ID NO: 2647772 - RNA, 19 nt, Artificial Sequence
  Description of Artificial Sequence: Synthetic oligonucleotide
agucacccagggcugccuu

SEQ ID NO: 2647773 - RNA, 19 nt, Artificial Sequence
  Description of Artificial Sequence: Synthetic oligonucleotide
cuguagucgugaggcuccc

SEQ ID NO: 2647774 - RNA, 19 nt, Artificial Sequence
  Description of Artificial Sequence: Synthetic oligonucleotide
ugucugcuucccggacucc

SEQ ID NO: 2647775 - RNA, 19 nt, Artificial Sequence
  Description of Artificial Sequence: Synthetic oligonucleotide
ccaacaggccugccaggcg

SEQ ID NO: 2647776 - RNA, 19 nt, Artificial Sequence
  Description of Artificial Sequence: Synthetic oligonucleotide
ugaggcucccggugcggua

SEQ ID NO: 2647777 - RNA, 19 nt, Artificial Sequence
  Description of Artificial Sequence: Synthetic oligonucleotide
ugccuugcaguagggcgau

SEQ ID NO: 2647778 - RNA, 19 nt, Artificial Sequence
  Description of Artificial Sequence: Synthetic oligonucleotide
cugggccccgcugcaagag

SEQ ID NO: 2647779 - RNA, 19 nt, Artificial Sequence
  Description of Artificial Sequence: Synthetic oligonucleotide
acaaacucuggggcucaaa

SEQ ID NO: 2647780 - RNA, 19 nt, Artificial Sequence
  Description of Artificial Sequence: Synthetic oligonucleotide
ugcgguaggcgcgcuccga

SEQ ID NO: 2647781 - RNA, 19 nt, Artificial Sequence
  Description of Artificial Sequence: Synthetic oligonucleotide
ccugcgcuccuccuuuacc

SEQ ID NO: 2647782 - RNA, 19 nt, Artificial Sequence
  Description of Artificial Sequence: Synthetic oligonucleotide
  modified_base (3)..(3): a, c, u, g, unknown or other
  modified_base (12)..(12): a, c, u, g, unknown or other
ggncggggcccncgggcgg

SEQ ID NO: 2647783 - RNA, 19 nt, Artificial Sequence
  Description of Artificial Sequence: Synthetic oligonucleotide
gcgcaccucccucaggcgc

SEQ ID NO: 2647784 - RNA, 19 nt, Artificial Sequence
  Description of Artificial Sequence: Synthetic oligonucleotide
ggagccucacagugcgcug

SEQ ID NO: 2647785 - RNA, 19 nt, Artificial Sequence
  Description of Artificial Sequence: Synthetic oligonucleotide
gugcggagccucacagugc

SEQ ID NO: 2647786 - RNA, 19 nt, Artificial Sequence
  Description of Artificial Sequence: Synthetic oligonucleotide
ccgguagcugucacgcggc

SEQ ID NO: 2647787 - RNA, 19 nt, Artificial Sequence
  Description of Artificial Sequence: Synthetic oligonucleotide
aggcucccggugcgguagg

SEQ ID NO: 2647788 - RNA, 19 nt, Artificial Sequence
  Description of Artificial Sequence: Synthetic oligonucleotide
ggugagcuccggugucucc

SEQ ID NO: 2647789 - RNA, 19 nt, Artificial Sequence
  Description of Artificial Sequence: Synthetic oligonucleotide
ggcgcaccucccucaggcg

SEQ ID NO: 2647790 - RNA, 19 nt, Artificial Sequence
  Description of Artificial Sequence: Synthetic oligonucleotide
  modified_base (10)..(10): a, c, u, g, unknown or other
  modified_base (19)..(19): a, c, u, g, unknown or other
cucgaagggncggggcccn

SEQ ID NO: 2647791 - RNA, 19 nt, Artificial Sequence
  Description of Artificial Sequence: Synthetic oligonucleotide
cagggcugccuugcaguag

SEQ ID NO: 2647792 - RNA, 19 nt, Artificial Sequence
  Description of Artificial Sequence: Synthetic oligonucleotide
gucccauacgaagcccgac

SEQ ID NO: 2647793 - RNA, 19 nt, Artificial Sequence
  Description of Artificial Sequence: Synthetic oligonucleotide
  modified_base (11)..(11): a, c, u, g, unknown or other
gcucgaagggncggggccc

SEQ ID NO: 2647794 - RNA, 19 nt, Artificial Sequence
  Description of Artificial Sequence: Synthetic oligonucleotide
gauggaggucggacagcca

SEQ ID NO: 2647795 - RNA, 19 nt, Artificial Sequence
  Description of Artificial Sequence: Synthetic oligonucleotide
ggacagaaagaccguuucu

SEQ ID NO: 2647796 - RNA, 19 nt, Artificial Sequence
  Description of Artificial Sequence: Synthetic oligonucleotide
guguguggccguggagugc

SEQ ID NO: 2647797 - RNA, 19 nt, Artificial Sequence
  Description of Artificial Sequence: Synthetic oligonucleotide
cgauggaggucggacagcc

SEQ ID NO: 2647798 - RNA, 19 nt, Artificial Sequence
  Description of Artificial Sequence: Synthetic oligonucleotide
cucgcucugugaggauccc

SEQ ID NO: 2647799 - RNA, 19 nt, Artificial Sequence
  Description of Artificial Sequence: Synthetic oligonucleotide
uggccguggagugcacagu

SEQ ID NO: 2647800 - RNA, 19 nt, Artificial Sequence
  Description of Artificial Sequence: Synthetic oligonucleotide
ggaucccagggcgacccag

SEQ ID NO: 2647801 - RNA, 19 nt, Artificial Sequence
  Description of Artificial Sequence: Synthetic oligonucleotide
cuucgguuccaaguaccaa

SEQ ID NO: 2647802 - RNA, 19 nt, Artificial Sequence
  Description of Artificial Sequence: Synthetic oligonucleotide
ugucacgcggcggguccca

SEQ ID NO: 2647803 - RNA, 19 nt, Artificial Sequence
  Description of Artificial Sequence: Synthetic oligonucleotide
gggccucucaggugucugc

SEQ ID NO: 2647804 - RNA, 19 nt, Artificial Sequence
  Description of Artificial Sequence: Synthetic oligonucleotide
ccauacgaagcccgacgug

SEQ ID NO: 2647805 - RNA, 19 nt, Artificial Sequence
  Description of Artificial Sequence: Synthetic oligonucleotide
gagugcggagccucacagu

SEQ ID NO: 2647806 - RNA, 19 nt, Artificial Sequence
  Description of Artificial Sequence: Synthetic oligonucleotide
gcacagugacgccggugag

SEQ ID NO: 2647807 - RNA, 19 nt, Artificial Sequence
  Description of Artificial Sequence: Synthetic oligonucleotide
accccagguguguggccgu

SEQ ID NO: 2647808 - RNA, 19 nt, Artificial Sequence
  Description of Artificial Sequence: Synthetic oligonucleotide
ggcgggaaaggcgcggcgc

SEQ ID NO: 2647809 - RNA, 19 nt, Artificial Sequence
  Description of Artificial Sequence: Synthetic oligonucleotide
gggcgauggaggucggaca

SEQ ID NO: 2647810 - RNA, 19 nt, Artificial Sequence
  Description of Artificial Sequence: Synthetic oligonucleotide
gauccgagguucagccucu

SEQ ID NO: 2647811 - RNA, 19 nt, Artificial Sequence
  Description of Artificial Sequence: Synthetic oligonucleotide
gugacgccggugagcuccg

SEQ ID NO: 2647812 - RNA, 19 nt, Artificial Sequence
  Description of Artificial Sequence: Synthetic oligonucleotide
gaagcccgacgugccccag

SEQ ID NO: 2647813 - RNA, 19 nt, Artificial Sequence
  Description of Artificial Sequence: Synthetic oligonucleotide
acgcggcgggucccauacg

SEQ ID NO: 2647814 - RNA, 19 nt, Artificial Sequence
  Description of Artificial Sequence: Synthetic oligonucleotide
guagggcgauggaggucgg

SEQ ID NO: 2647815 - RNA, 19 nt, Artificial Sequence
  Description of Artificial Sequence: Synthetic oligonucleotide
cugccaggcgcaggcaguc

SEQ ID NO: 2647816 - RNA, 19 nt, Artificial Sequence
  Description of Artificial Sequence: Synthetic oligonucleotide
ggcgcuccgggcuguaguc

SEQ ID NO: 2647817 - RNA, 19 nt, Artificial Sequence
  Description of Artificial Sequence: Synthetic oligonucleotide
cugucacgcggcggguccc

SEQ ID NO: 2647818 - RNA, 19 nt, Artificial Sequence
  Description of Artificial Sequence: Synthetic oligonucleotide
uagggcgauggaggucgga

SEQ ID NO: 2647819 - RNA, 19 nt, Artificial Sequence
  Description of Artificial Sequence: Synthetic oligonucleotide
cucuccuugauccgagguu

SEQ ID NO: 2647820 - RNA, 19 nt, Artificial Sequence
  Description of Artificial Sequence: Synthetic oligonucleotide
cucccggcgcaccucccuc

SEQ ID NO: 2647821 - RNA, 19 nt, Artificial Sequence
  Description of Artificial Sequence: Synthetic oligonucleotide
gggaaaggcgcggcgcggc

SEQ ID NO: 2647822 - RNA, 19 nt, Artificial Sequence
  Description of Artificial Sequence: Synthetic oligonucleotide
aggcgcaggcagucaccca

SEQ ID NO: 2647823 - RNA, 19 nt, Artificial Sequence
  Description of Artificial Sequence: Synthetic oligonucleotide
gggcucaaauggcgcgugc

SEQ ID NO: 2647824 - RNA, 19 nt, Artificial Sequence
  Description of Artificial Sequence: Synthetic oligonucleotide
cagggcgacccagcucacc

SEQ ID NO: 2647825 - RNA, 19 nt, Artificial Sequence
  Description of Artificial Sequence: Synthetic oligonucleotide
ccgggcuguagucgugagg

SEQ ID NO: 2647826 - RNA, 19 nt, Artificial Sequence
  Description of Artificial Sequence: Synthetic oligonucleotide
gagccgggccugagugcgg

SEQ ID NO: 2647827 - RNA, 19 nt, Artificial Sequence
  Description of Artificial Sequence: Synthetic oligonucleotide
cggcgcaccucccucaggc

SEQ ID NO: 2647828 - RNA, 19 nt, Artificial Sequence
  Description of Artificial Sequence: Synthetic oligonucleotide
cggacucccgacccaacag

SEQ ID NO: 2647829 - RNA, 19 nt, Artificial Sequence
  Description of Artificial Sequence: Synthetic oligonucleotide
ccguuucuuuccauaaaua

SEQ ID NO: 2647830 - RNA, 19 nt, Artificial Sequence
  Description of Artificial Sequence: Synthetic oligonucleotide
gggccccgcugcaagaggc

SEQ ID NO: 2647831 - RNA, 19 nt, Artificial Sequence
  Description of Artificial Sequence: Synthetic oligonucleotide
uagcugucacgcggcgggu

SEQ ID NO: 2647832 - RNA, 19 nt, Artificial Sequence
  Description of Artificial Sequence: Synthetic oligonucleotide
ggcugccuugcaguagggc

SEQ ID NO: 2647833 - RNA, 19 nt, Artificial Sequence
  Description of Artificial Sequence: Synthetic oligonucleotide
gagcuccggugucucccuc

SEQ ID NO: 2647834 - RNA, 19 nt, Artificial Sequence
  Description of Artificial Sequence: Synthetic oligonucleotide
agcucaccugggccccgcu

SEQ ID NO: 2647835 - RNA, 19 nt, Artificial Sequence
  Description of Artificial Sequence: Synthetic oligonucleotide
ccuuuaccuucacgucgcc

SEQ ID NO: 2647836 - RNA, 19 nt, Artificial Sequence
  Description of Artificial Sequence: Synthetic oligonucleotide
gacgugccccagaccccag

SEQ ID NO: 2647837 - RNA, 19 nt, Artificial Sequence
  Description of Artificial Sequence: Synthetic oligonucleotide
guuuuggcgccauccucuu

SEQ ID NO: 2647838 - RNA, 19 nt, Artificial Sequence
  Description of Artificial Sequence: Synthetic oligonucleotide
ccccgcugcaagaggcugc

SEQ ID NO: 2647839 - RNA, 19 nt, Artificial Sequence
  Description of Artificial Sequence: Synthetic oligonucleotide
agccgggccugagugcgga

SEQ ID NO: 2647840 - RNA, 19 nt, Artificial Sequence
  Description of Artificial Sequence: Synthetic oligonucleotide
gacgccggugagcuccggu

SEQ ID NO: 2647841 - RNA, 19 nt, Artificial Sequence
  Description of Artificial Sequence: Synthetic oligonucleotide
gcgguaggcgcgcuccgac

SEQ ID NO: 2647842 - RNA, 19 nt, Artificial Sequence
  Description of Artificial Sequence: Synthetic oligonucleotide
ggggcucaaauggcgcgug

SEQ ID NO: 2647843 - RNA, 19 nt, Artificial Sequence
  Description of Artificial Sequence: Synthetic oligonucleotide
cggcgggucccauacgaag

SEQ ID NO: 2647844 - RNA, 19 nt, Artificial Sequence
  Description of Artificial Sequence: Synthetic oligonucleotide
  modified_base (9)..(9): a, c, u, g, unknown or other
  modified_base (18)..(18): a, c, u, g, unknown or other
ucgaagggncggggcccnc

SEQ ID NO: 2647845 - RNA, 19 nt, Artificial Sequence
  Description of Artificial Sequence: Synthetic oligonucleotide
ggcagucacccagggcugc

SEQ ID NO: 2647846 - RNA, 19 nt, Artificial Sequence
  Description of Artificial Sequence: Synthetic oligonucleotide
gcucuccuugauccgaggu

SEQ ID NO: 2647847 - RNA, 19 nt, Artificial Sequence
  Description of Artificial Sequence: Synthetic oligonucleotide
ggaaaggcgcggcgcggca

SEQ ID NO: 2647848 - RNA, 19 nt, Artificial Sequence
  Description of Artificial Sequence: Synthetic oligonucleotide
gcucaccugggccccgcug

SEQ ID NO: 2647849 - RNA, 19 nt, Artificial Sequence
  Description of Artificial Sequence: Synthetic oligonucleotide
cuccgggcuguagucguga

SEQ ID NO: 2647850 - RNA, 19 nt, Artificial Sequence
  Description of Artificial Sequence: Synthetic oligonucleotide
gggcgacccagcucaccug

SEQ ID NO: 2647851 - RNA, 19 nt, Artificial Sequence
  Description of Artificial Sequence: Synthetic oligonucleotide
ccgacgugccccagacccc

SEQ ID NO: 2647852 - RNA, 19 nt, Artificial Sequence
  Description of Artificial Sequence: Synthetic oligonucleotide
ccuggggccucucaggugu

SEQ ID NO: 2647853 - RNA, 19 nt, Artificial Sequence
  Description of Artificial Sequence: Synthetic oligonucleotide
ucccugcgcuccuccuuua

SEQ ID NO: 2647854 - RNA, 19 nt, Artificial Sequence
  Description of Artificial Sequence: Synthetic oligonucleotide
gcggcgcggcaguucaggc

SEQ ID NO: 2647855 - RNA, 19 nt, Artificial Sequence
  Description of Artificial Sequence: Synthetic oligonucleotide
ggucccauacgaagcccga

SEQ ID NO: 2647856 - RNA, 19 nt, Artificial Sequence
  Description of Artificial Sequence: Synthetic oligonucleotide
ccuucacgucgcccugggg

SEQ ID NO: 2647857 - RNA, 19 nt, Artificial Sequence
  Description of Artificial Sequence: Synthetic oligonucleotide
  modified_base (8)..(8): a, c, u, g, unknown or other
ggggcccncgggcgggcgg

SEQ ID NO: 2647858 - RNA, 19 nt, Artificial Sequence
  Description of Artificial Sequence: Synthetic oligonucleotide
cuuugccaggugaguggcu

SEQ ID NO: 2647859 - RNA, 19 nt, Artificial Sequence
  Description of Artificial Sequence: Synthetic oligonucleotide
gcgcuccgggcuguagucg

SEQ ID NO: 2647860 - RNA, 19 nt, Artificial Sequence
  Description of Artificial Sequence: Synthetic oligonucleotide
cgggccugagugcggagcc

SEQ ID NO: 2647861 - RNA, 19 nt, Artificial Sequence
  Description of Artificial Sequence: Synthetic oligonucleotide
cagcucaccugggccccgc

SEQ ID NO: 2647862 - RNA, 19 nt, Artificial Sequence
  Description of Artificial Sequence: Synthetic oligonucleotide
ggcggcggggcgggaaagg

SEQ ID NO: 2647863 - RNA, 19 nt, Artificial Sequence
  Description of Artificial Sequence: Synthetic oligonucleotide
ggggccucucaggugucug

SEQ ID NO: 2647864 - RNA, 19 nt, Artificial Sequence
  Description of Artificial Sequence: Synthetic oligonucleotide
gcgauggaggucggacagc

SEQ ID NO: 2647865 - RNA, 19 nt, Artificial Sequence
  Description of Artificial Sequence: Synthetic oligonucleotide
cgacccagcucaccugggc

SEQ ID NO: 2647866 - RNA, 19 nt, Artificial Sequence
  Description of Artificial Sequence: Synthetic oligonucleotide
ggccugagugcggagccuc

SEQ ID NO: 2647867 - RNA, 19 nt, Artificial Sequence
  Description of Artificial Sequence: Synthetic oligonucleotide
ggggcgggaaaggcgcggc

SEQ ID NO: 2647868 - RNA, 19 nt, Artificial Sequence
  Description of Artificial Sequence: Synthetic oligonucleotide
ggcucaaauggcgcgugcu

SEQ ID NO: 2647869 - RNA, 19 nt, Artificial Sequence
  Description of Artificial Sequence: Synthetic oligonucleotide
gccaggugaguggcucucc

SEQ ID NO: 2647870 - RNA, 19 nt, Artificial Sequence
  Description of Artificial Sequence: Synthetic oligonucleotide
ccucaggcgcuccgggcug

SEQ ID NO: 2647871 - RNA, 19 nt, Artificial Sequence
  Description of Artificial Sequence: Synthetic oligonucleotide
cagugacgccggugagcuc

SEQ ID NO: 2647872 - RNA, 19 nt, Artificial Sequence
  Description of Artificial Sequence: Synthetic oligonucleotide
  modified_base (4)..(4): a, c, u, g, unknown or other
cccncgggcgggcggcggg

SEQ ID NO: 2647873 - RNA, 19 nt, Artificial Sequence
  Description of Artificial Sequence: Synthetic oligonucleotide
ccaguuuuggcgccauccu

SEQ ID NO: 2647874 - RNA, 19 nt, Artificial Sequence
  Description of Artificial Sequence: Synthetic oligonucleotide
cccauacgaagcccgacgu

SEQ ID NO: 2647875 - RNA, 19 nt, Artificial Sequence
  Description of Artificial Sequence: Synthetic oligonucleotide
gcgacccagcucaccuggg

SEQ ID NO: 2647876 - RNA, 19 nt, Artificial Sequence
  Description of Artificial Sequence: Synthetic oligonucleotide
gggcugccuugcaguaggg

SEQ ID NO: 2647877 - RNA, 19 nt, Artificial Sequence
  Description of Artificial Sequence: Synthetic oligonucleotide
ccugagugcggagccucac

SEQ ID NO: 2647878 - RNA, 19 nt, Artificial Sequence
  Description of Artificial Sequence: Synthetic oligonucleotide
  modified_base (2)..(2): a, c, u, g, unknown or other
cncgggcgggcggcggggc

SEQ ID NO: 2647879 - RNA, 19 nt, Artificial Sequence
  Description of Artificial Sequence: Synthetic oligonucleotide
ccgggccugagugcggagc

SEQ ID NO: 2647880 - RNA, 19 nt, Artificial Sequence
  Description of Artificial Sequence: Synthetic oligonucleotide
  modified_base (8)..(8): a, c, u, g, unknown or other
  modified_base (17)..(17): a, c, u, g, unknown or other
cgaagggncggggcccncg

SEQ ID NO: 2647881 - RNA, 19 nt, Artificial Sequence
  Description of Artificial Sequence: Synthetic oligonucleotide
gcggcggggcgggaaaggc

SEQ ID NO: 2647882 - RNA, 19 nt, Artificial Sequence
  Description of Artificial Sequence: Synthetic oligonucleotide
  modified_base (7)..(7): a, c, u, g, unknown or other
gggcccncgggcgggcggc

SEQ ID NO: 2647883 - RNA, 19 nt, Artificial Sequence
  Description of Artificial Sequence: Synthetic oligonucleotide
cccagguguguggccgugg

SEQ ID NO: 2647884 - RNA, 19 nt, Artificial Sequence
  Description of Artificial Sequence: Synthetic oligonucleotide
cggcgcggcaguucaggcc

SEQ ID NO: 2647885 - RNA, 19 nt, Artificial Sequence
  Description of Artificial Sequence: Synthetic oligonucleotide
ccggacucccgacccaaca

SEQ ID NO: 2647886 - RNA, 19 nt, Artificial Sequence
  Description of Artificial Sequence: Synthetic oligonucleotide
gaggucggacagccaguuu

SEQ ID NO: 2647887 - RNA, 19 nt, Artificial Sequence
  Description of Artificial Sequence: Synthetic oligonucleotide
cuucccugcgcuccuccuu

SEQ ID NO: 2647888 - RNA, 19 nt, Artificial Sequence
  Description of Artificial Sequence: Synthetic oligonucleotide
cccuggggccucucaggug

SEQ ID NO: 2647889 - RNA, 19 nt, Artificial Sequence
  Description of Artificial Sequence: Synthetic oligonucleotide
cgguagcugucacgcggcg

SEQ ID NO: 2647890 - RNA, 19 nt, Artificial Sequence
  Description of Artificial Sequence: Synthetic oligonucleotide
gcggcaguucaggccccgg

SEQ ID NO: 2647891 - RNA, 19 nt, Artificial Sequence
  Description of Artificial Sequence: Synthetic oligonucleotide
cccugcgcuccuccuuuac

SEQ ID NO: 2647892 - RNA, 19 nt, Artificial Sequence
  Description of Artificial Sequence: Synthetic oligonucleotide
cacccagggcugccuugca

SEQ ID NO: 2647893 - RNA, 19 nt, Artificial Sequence
  Description of Artificial Sequence: Synthetic oligonucleotide
cacgucgcccuggggccuc

SEQ ID NO: 2647894 - RNA, 19 nt, Artificial Sequence
  Description of Artificial Sequence: Synthetic oligonucleotide
caggccccgguagcuguca

SEQ ID NO: 2647895 - RNA, 19 nt, Artificial Sequence
  Description of Artificial Sequence: Synthetic oligonucleotide
cccgacccaacaggccugc

SEQ ID NO: 2647896 - RNA, 19 nt, Artificial Sequence
  Description of Artificial Sequence: Synthetic oligonucleotide
cgacccaacaggccugcca

SEQ ID NO: 2647897 - RNA, 19 nt, Artificial Sequence
  Description of Artificial Sequence: Synthetic oligonucleotide
gugaggcucccggugcggu

SEQ ID NO: 2647898 - RNA, 19 nt, Artificial Sequence
  Description of Artificial Sequence: Synthetic oligonucleotide
cgagguucagccucucgcu

SEQ ID NO: 2647899 - RNA, 19 nt, Artificial Sequence
  Description of Artificial Sequence: Synthetic oligonucleotide
cgcggcgcggcaguucagg

SEQ ID NO: 2647900 - RNA, 19 nt, Artificial Sequence
  Description of Artificial Sequence: Synthetic oligonucleotide
cccggcgcaccucccucag

SEQ ID NO: 2647901 - RNA, 19 nt, Artificial Sequence
  Description of Artificial Sequence: Synthetic oligonucleotide
gcgcuccgacagcucgaag

SEQ ID NO: 2647902 - RNA, 19 nt, Artificial Sequence
  Description of Artificial Sequence: Synthetic oligonucleotide
cccagaccccaggugugug

SEQ ID NO: 2647903 - RNA, 19 nt, Artificial Sequence
  Description of Artificial Sequence: Synthetic oligonucleotide
cccggugcgguaggcgcgc

SEQ ID NO: 2647904 - RNA, 19 nt, Artificial Sequence
  Description of Artificial Sequence: Synthetic oligonucleotide
gcccgacgugccccagacc

SEQ ID NO: 2647905 - RNA, 19 nt, Artificial Sequence
  Description of Artificial Sequence: Synthetic oligonucleotide
cgugaggcucccggugcgg

SEQ ID NO: 2647906 - RNA, 19 nt, Artificial Sequence
  Description of Artificial Sequence: Synthetic oligonucleotide
cgcggcgggucccauacga

SEQ ID NO: 2647907 - RNA, 19 nt, Artificial Sequence
  Description of Artificial Sequence: Synthetic oligonucleotide
ggccucucaggugucugcu

SEQ ID NO: 2647908 - RNA, 19 nt, Artificial Sequence
  Description of Artificial Sequence: Synthetic oligonucleotide
ggaggucggacagccaguu

SEQ ID NO: 2647909 - RNA, 19 nt, Artificial Sequence
  Description of Artificial Sequence: Synthetic oligonucleotide
cgggucccauacgaagccc

SEQ ID NO: 2647910 - RNA, 19 nt, Artificial Sequence
  Description of Artificial Sequence: Synthetic oligonucleotide
gccgggccugagugcggag

SEQ ID NO: 2647911 - RNA, 19 nt, Artificial Sequence
  Description of Artificial Sequence: Synthetic oligonucleotide
cccggacucccgacccaac

SEQ ID NO: 2647912 - RNA, 19 nt, Artificial Sequence
  Description of Artificial Sequence: Synthetic oligonucleotide
ccggcgcaccucccucagg

SEQ ID NO: 2647913 - RNA, 19 nt, Artificial Sequence
  Description of Artificial Sequence: Synthetic oligonucleotide
cgggaaaggcgcggcgcgg

SEQ ID NO: 2647914 - RNA, 19 nt, Artificial Sequence
  Description of Artificial Sequence: Synthetic oligonucleotide
ccagcucaccugggccccg

SEQ ID NO: 2647915 - RNA, 19 nt, Artificial Sequence
  Description of Artificial Sequence: Synthetic oligonucleotide
  modified_base (3)..(3): a, c, u, g, unknown or other
ccncgggcgggcggcgggg

SEQ ID NO: 2647916 - RNA, 19 nt, Artificial Sequence
  Description of Artificial Sequence: Synthetic oligonucleotide
guguggccguggagugcac

SEQ ID NO: 2647917 - RNA, 19 nt, Artificial Sequence
  Description of Artificial Sequence: Synthetic oligonucleotide
gggcggcggggcgggaaag

SEQ ID NO: 2647918 - RNA, 19 nt, Artificial Sequence
  Description of Artificial Sequence: Synthetic oligonucleotide
cccucaggcgcuccgggcu

SEQ ID NO: 2647919 - RNA, 19 nt, Artificial Sequence
  Description of Artificial Sequence: Synthetic oligonucleotide
ccaggugaguggcucuccu

SEQ ID NO: 2647920 - RNA, 19 nt, Artificial Sequence
  Description of Artificial Sequence: Synthetic oligonucleotide
gccugagugcggagccuca

SEQ ID NO: 2647921 - RNA, 19 nt, Artificial Sequence
  Description of Artificial Sequence: Synthetic oligonucleotide
ccagggcgacccagcucac

SEQ ID NO: 2647922 - RNA, 19 nt, Artificial Sequence
  Description of Artificial Sequence: Synthetic oligonucleotide
  modified_base (6)..(6): a, c, u, g, unknown or other
ggcccncgggcgggcggcg

SEQ ID NO: 2647923 - RNA, 19 nt, Artificial Sequence
  Description of Artificial Sequence: Synthetic oligonucleotide
  modified_base (5)..(5): a, c, u, g, unknown or other
gcccncgggcgggcggcgg

SEQ ID NO: 2647924 - RNA, 19 nt, Artificial Sequence
  Description of Artificial Sequence: Synthetic oligonucleotide
gcggagccucacagugcgc

SEQ ID NO: 2647925 - RNA, 19 nt, Artificial Sequence
  Description of Artificial Sequence: Synthetic oligonucleotide
acgucgcccuggggccucu

SEQ ID NO: 2647926 - RNA, 19 nt, Artificial Sequence
  Description of Artificial Sequence: Synthetic oligonucleotide
cgacgugccccagacccca

SEQ ID NO: 2647927 - RNA, 19 nt, Artificial Sequence
  Description of Artificial Sequence: Synthetic oligonucleotide
cgguaggcgcgcuccgaca

SEQ ID NO: 2647928 - RNA, 19 nt, Artificial Sequence
  Description of Artificial Sequence: Synthetic oligonucleotide
gcggcgggucccauacgaa

SEQ ID NO: 2647929 - RNA, 19 nt, Artificial Sequence
  Description of Artificial Sequence: Synthetic oligonucleotide
cucaggcgcuccgggcugu

SEQ ID NO: 2647930 - RNA, 19 nt, Artificial Sequence
  Description of Artificial Sequence: Synthetic oligonucleotide
ccgacccaacaggccugcc

SEQ ID NO: 2647931 - RNA, 19 nt, Artificial Sequence
  Description of Artificial Sequence: Synthetic oligonucleotide
gcgcgcuccgacagcucga

SEQ ID NO: 2647932 - RNA, 19 nt, Artificial Sequence
  Description of Artificial Sequence: Synthetic oligonucleotide
gccuugcaguagggcgaug

SEQ ID NO: 2647933 - RNA, 19 nt, Artificial Sequence
  Description of Artificial Sequence: Synthetic oligonucleotide
cgcggcaguucaggccccg

SEQ ID NO: 2647934 - RNA, 19 nt, Artificial Sequence
  Description of Artificial Sequence: Synthetic oligonucleotide
cggagccucacagugcgcu

SEQ ID NO: 2647935 - RNA, 19 nt, Artificial Sequence
  Description of Artificial Sequence: Synthetic oligonucleotide
cggugagcuccggugucuc

SEQ ID NO: 2647936 - RNA, 19 nt, Artificial Sequence
  Description of Artificial Sequence: Synthetic oligonucleotide
gcgcggcaguucaggcccc

SEQ ID NO: 2647937 - RNA, 19 nt, Artificial Sequence
  Description of Artificial Sequence: Synthetic oligonucleotide
gccucucaggugucugcuu

SEQ ID NO: 2647938 - RNA, 19 nt, Artificial Sequence
  Description of Artificial Sequence: Synthetic oligonucleotide
cgcaccucccucaggcgcu

SEQ ID NO: 2647939 - RNA, 19 nt, Artificial Sequence
  Description of Artificial Sequence: Synthetic oligonucleotide
ggccugccaggcgcaggca

SEQ ID NO: 2647940 - RNA, 19 nt, Artificial Sequence
  Description of Artificial Sequence: Synthetic oligonucleotide
cgcuggacagaaagaccgu

SEQ ID NO: 2647941 - RNA, 19 nt, Artificial Sequence
  Description of Artificial Sequence: Synthetic oligonucleotide
ggccccgcugcaagaggcu

SEQ ID NO: 2647942 - RNA, 19 nt, Artificial Sequence
  Description of Artificial Sequence: Synthetic oligonucleotide
cccgcugcaagaggcugcu

SEQ ID NO: 2647943 - RNA, 19 nt, Artificial Sequence
  Description of Artificial Sequence: Synthetic oligonucleotide
cgcuccgggcuguagucgu

SEQ ID NO: 2647944 - RNA, 19 nt, Artificial Sequence
  Description of Artificial Sequence: Synthetic oligonucleotide
gcgcggcgcggcaguucag

SEQ ID NO: 2647945 - RNA, 19 nt, Artificial Sequence
  Description of Artificial Sequence: Synthetic oligonucleotide
cggugcgguaggcgcgcuc

SEQ ID NO: 2647946 - RNA, 19 nt, Artificial Sequence
  Description of Artificial Sequence: Synthetic oligonucleotide
ccucccggcgcaccucccu

SEQ ID NO: 2647947 - RNA, 19 nt, Artificial Sequence
  Description of Artificial Sequence: Synthetic oligonucleotide
gucacgcggcgggucccau

SEQ ID NO: 2647948 - RNA, 19 nt, Artificial Sequence
  Description of Artificial Sequence: Synthetic oligonucleotide
ccgcugcaagaggcugcug

SEQ ID NO: 2647949 - RNA, 19 nt, Artificial Sequence
  Description of Artificial Sequence: Synthetic oligonucleotide
cgcgcuccgacagcucgaa

SEQ ID NO: 2647950 - RNA, 19 nt, Artificial Sequence
  Description of Artificial Sequence: Synthetic oligonucleotide
  modified_base (9)..(9): a, c, u, g, unknown or other
cggggcccncgggcgggcg

SEQ ID NO: 2647951 - RNA, 19 nt, Artificial Sequence
  Description of Artificial Sequence: Synthetic oligonucleotide
ccucucgcucugugaggau

SEQ ID NO: 2647952 - RNA, 19 nt, Artificial Sequence
  Description of Artificial Sequence: Synthetic oligonucleotide
cgggcggcggggcgggaaa

SEQ ID NO: 2647953 - RNA, 19 nt, Artificial Sequence
  Description of Artificial Sequence: Synthetic oligonucleotide
ccggugcgguaggcgcgcu

SEQ ID NO: 2647954 - RNA, 19 nt, Artificial Sequence
  Description of Artificial Sequence: Synthetic oligonucleotide
  modified_base (1)..(1): a, c, u, g, unknown or other
  modified_base (10)..(10): a, c, u, g, unknown or other
ncggggcccncgggcgggc

SEQ ID NO: 2647955 - RNA, 19 nt, Artificial Sequence
  Description of Artificial Sequence: Synthetic oligonucleotide
aucaucauggcucuuauuc

SEQ ID NO: 2647956 - RNA, 19 nt, Artificial Sequence
  Description of Artificial Sequence: Synthetic oligonucleotide
aauccugucuuguacauag

SEQ ID NO: 2647957 - RNA, 19 nt, Artificial Sequence
  Description of Artificial Sequence: Synthetic oligonucleotide
aaucuccagacccagaauc

SEQ ID NO: 2647958 - RNA, 19 nt, Artificial Sequence
  Description of Artificial Sequence: Synthetic oligonucleotide
ucaaaaugggugcacaucc

SEQ ID NO: 2647959 - RNA, 19 nt, Artificial Sequence
  Description of Artificial Sequence: Synthetic oligonucleotide
uuaggaaggugcuucaugg

SEQ ID NO: 2647960 - RNA, 19 nt, Artificial Sequence
  Description of Artificial Sequence: Synthetic oligonucleotide
uuuuggaucaucauggcuc

SEQ ID NO: 2647961 - RNA, 19 nt, Artificial Sequence
  Description of Artificial Sequence: Synthetic oligonucleotide
gauagugccacuaacaaac

SEQ ID NO: 2647962 - RNA, 19 nt, Artificial Sequence
  Description of Artificial Sequence: Synthetic oligonucleotide
ucuuauucugaguaagggg

SEQ ID NO: 2647963 - RNA, 19 nt, Artificial Sequence
  Description of Artificial Sequence: Synthetic oligonucleotide
cuaacaaaccgccauagcc

SEQ ID NO: 2647964 - RNA, 19 nt, Artificial Sequence
  Description of Artificial Sequence: Synthetic oligonucleotide
uagucugacaccuuuaccc

SEQ ID NO: 2647965 - RNA, 19 nt, Artificial Sequence
  Description of Artificial Sequence: Synthetic oligonucleotide
gaugauucgccacuuaugc

SEQ ID NO: 2647966 - RNA, 19 nt, Artificial Sequence
  Description of Artificial Sequence: Synthetic oligonucleotide
uuuugcaucuuuuggauca

SEQ ID NO: 2647967 - RNA, 19 nt, Artificial Sequence
  Description of Artificial Sequence: Synthetic oligonucleotide
aaugggugcacauccauug

SEQ ID NO: 2647968 - RNA, 19 nt, Artificial Sequence
  Description of Artificial Sequence: Synthetic oligonucleotide
ugcggaagaaguuaggaag

SEQ ID NO: 2647969 - RNA, 19 nt, Artificial Sequence
  Description of Artificial Sequence: Synthetic oligonucleotide
aacaaaccgccauagccac

SEQ ID NO: 2647970 - RNA, 19 nt, Artificial Sequence
  Description of Artificial Sequence: Synthetic oligonucleotide
acucaguucuuccaggggc

SEQ ID NO: 2647971 - RNA, 19 nt, Artificial Sequence
  Description of Artificial Sequence: Synthetic oligonucleotide
gaagaaguuaggaaggugc

SEQ ID NO: 2647972 - RNA, 19 nt, Artificial Sequence
  Description of Artificial Sequence: Synthetic oligonucleotide
aaauucuucccuccauuuc

SEQ ID NO: 2647973 - RNA, 19 nt, Artificial Sequence
  Description of Artificial Sequence: Synthetic oligonucleotide
ucuggaauccaccuccagg

SEQ ID NO: 2647974 - RNA, 19 nt, Artificial Sequence
  Description of Artificial Sequence: Synthetic oligonucleotide
uaacaaaccgccauagcca

SEQ ID NO: 2647975 - RNA, 19 nt, Artificial Sequence
  Description of Artificial Sequence: Synthetic oligonucleotide
cuuauucugaguaagggga

SEQ ID NO: 2647976 - RNA, 19 nt, Artificial Sequence
  Description of Artificial Sequence: Synthetic oligonucleotide
aaccgccauagccacagcc

SEQ ID NO: 2647977 - RNA, 19 nt, Artificial Sequence
  Description of Artificial Sequence: Synthetic oligonucleotide
aauagcuucgucagcuggc

SEQ ID NO: 2647978 - RNA, 19 nt, Artificial Sequence
  Description of Artificial Sequence: Synthetic oligonucleotide
ucgcuuaaaaugugggucg

SEQ ID NO: 2647979 - RNA, 19 nt, Artificial Sequence
  Description of Artificial Sequence: Synthetic oligonucleotide
gaugguguacaccagcccc

SEQ ID NO: 2647980 - RNA, 19 nt, Artificial Sequence
  Description of Artificial Sequence: Synthetic oligonucleotide
agugccacuaacaaaccgc

SEQ ID NO: 2647981 - RNA, 19 nt, Artificial Sequence
  Description of Artificial Sequence: Synthetic oligonucleotide
uguacauagucugacaccu

SEQ ID NO: 2647982 - RNA, 19 nt, Artificial Sequence
  Description of Artificial Sequence: Synthetic oligonucleotide
ugcucuucaaaaugggugc

SEQ ID NO: 2647983 - RNA, 19 nt, Artificial Sequence
  Description of Artificial Sequence: Synthetic oligonucleotide
aagaggaagaauagcuucg

SEQ ID NO: 2647984 - RNA, 19 nt, Artificial Sequence
  Description of Artificial Sequence: Synthetic oligonucleotide
uaaaaugugggucggggaa

SEQ ID NO: 2647985 - RNA, 19 nt, Artificial Sequence
  Description of Artificial Sequence: Synthetic oligonucleotide
ugaagugcccagauguucc

SEQ ID NO: 2647986 - RNA, 19 nt, Artificial Sequence
  Description of Artificial Sequence: Synthetic oligonucleotide
aaucaggguaucugggaag

SEQ ID NO: 2647987 - RNA, 19 nt, Artificial Sequence
  Description of Artificial Sequence: Synthetic oligonucleotide
gaagaguggugauagugcc

SEQ ID NO: 2647988 - RNA, 19 nt, Artificial Sequence
  Description of Artificial Sequence: Synthetic oligonucleotide
gaauagcuucgucagcugg

SEQ ID NO: 2647989 - RNA, 19 nt, Artificial Sequence
  Description of Artificial Sequence: Synthetic oligonucleotide
aguaaggggagcaaagaac

SEQ ID NO: 2647990 - RNA, 19 nt, Artificial Sequence
  Description of Artificial Sequence: Synthetic oligonucleotide
cuuguacauagucugacac

SEQ ID NO: 2647991 - RNA, 19 nt, Artificial Sequence
  Description of Artificial Sequence: Synthetic oligonucleotide
uuauucugaguaaggggag

SEQ ID NO: 2647992 - RNA, 19 nt, Artificial Sequence
  Description of Artificial Sequence: Synthetic oligonucleotide
aggauuggauccuggauuc

SEQ ID NO: 2647993 - RNA, 19 nt, Artificial Sequence
  Description of Artificial Sequence: Synthetic oligonucleotide
aggaaggugcuucauggcg

SEQ ID NO: 2647994 - RNA, 19 nt, Artificial Sequence
  Description of Artificial Sequence: Synthetic oligonucleotide
acuaacaaaccgccauagc

SEQ ID NO: 2647995 - RNA, 19 nt, Artificial Sequence
  Description of Artificial Sequence: Synthetic oligonucleotide
ugugggucggggaagagga

SEQ ID NO: 2647996 - RNA, 19 nt, Artificial Sequence
  Description of Artificial Sequence: Synthetic oligonucleotide
uacccgaaucuccagaccc

SEQ ID NO: 2647997 - RNA, 19 nt, Artificial Sequence
  Description of Artificial Sequence: Synthetic oligonucleotide
cuuaaaaugugggucgggg

SEQ ID NO: 2647998 - RNA, 19 nt, Artificial Sequence
  Description of Artificial Sequence: Synthetic oligonucleotide
cugucuuguacauagucug

SEQ ID NO: 2647999 - RNA, 19 nt, Artificial Sequence
  Description of Artificial Sequence: Synthetic oligonucleotide
ugaugauucgccacuuaug

SEQ ID NO: 2648000 - RNA, 19 nt, Artificial Sequence
  Description of Artificial Sequence: Synthetic oligonucleotide
cauccauuggugcagcucc

SEQ ID NO: 2648001 - RNA, 19 nt, Artificial Sequence
  Description of Artificial Sequence: Synthetic oligonucleotide
auuggugcagcuccagcac

SEQ ID NO: 2648002 - RNA, 19 nt, Artificial Sequence
  Description of Artificial Sequence: Synthetic oligonucleotide
gagacaggcaauguucugg

SEQ ID NO: 2648003 - RNA, 19 nt, Artificial Sequence
  Description of Artificial Sequence: Synthetic oligonucleotide
gcuucguucgcuuaaaaug

SEQ ID NO: 2648004 - RNA, 19 nt, Artificial Sequence
  Description of Artificial Sequence: Synthetic oligonucleotide
agaguggugauagugccac

SEQ ID NO: 2648005 - RNA, 19 nt, Artificial Sequence
  Description of Artificial Sequence: Synthetic oligonucleotide
ucguucgcuuaaaaugugg

SEQ ID NO: 2648006 - RNA, 19 nt, Artificial Sequence
  Description of Artificial Sequence: Synthetic oligonucleotide
acagccuaugucugcaaac

SEQ ID NO: 2648007 - RNA, 19 nt, Artificial Sequence
  Description of Artificial Sequence: Synthetic oligonucleotide
uucgcuuaaaauguggguc

SEQ ID NO: 2648008 - RNA, 19 nt, Artificial Sequence
  Description of Artificial Sequence: Synthetic oligonucleotide
ugcuucauggcguuacugc

SEQ ID NO: 2648009 - RNA, 19 nt, Artificial Sequence
  Description of Artificial Sequence: Synthetic oligonucleotide
cacacgcucaaacaguggg

SEQ ID NO: 2648010 - RNA, 19 nt, Artificial Sequence
  Description of Artificial Sequence: Synthetic oligonucleotide
uuaaaaugugggucgggga

SEQ ID NO: 2648011 - RNA, 19 nt, Artificial Sequence
  Description of Artificial Sequence: Synthetic oligonucleotide
auuucguagaacuuucuuu

SEQ ID NO: 2648012 - RNA, 19 nt, Artificial Sequence
  Description of Artificial Sequence: Synthetic oligonucleotide
uuguacauagucugacacc

SEQ ID NO: 2648013 - RNA, 19 nt, Artificial Sequence
  Description of Artificial Sequence: Synthetic oligonucleotide
uagugccacuaacaaaccg

SEQ ID NO: 2648014 - RNA, 19 nt, Artificial Sequence
  Description of Artificial Sequence: Synthetic oligonucleotide
ucggggaagaggaagaaua

SEQ ID NO: 2648015 - RNA, 19 nt, Artificial Sequence
  Description of Artificial Sequence: Synthetic oligonucleotide
acucucagcacguaggcgu

SEQ ID NO: 2648016 - RNA, 19 nt, Artificial Sequence
  Description of Artificial Sequence: Synthetic oligonucleotide
cucuuauucugaguaaggg

SEQ ID NO: 2648017 - RNA, 19 nt, Artificial Sequence
  Description of Artificial Sequence: Synthetic oligonucleotide
uuuacccgaaucuccagac

SEQ ID NO: 2648018 - RNA, 19 nt, Artificial Sequence
  Description of Artificial Sequence: Synthetic oligonucleotide
aaaaugggugcacauccau

SEQ ID NO: 2648019 - RNA, 19 nt, Artificial Sequence
  Description of Artificial Sequence: Synthetic oligonucleotide
ugauucgccacuuaugcuu

SEQ ID NO: 2648020 - RNA, 19 nt, Artificial Sequence
  Description of Artificial Sequence: Synthetic oligonucleotide
ucuucccuccauuucguag

SEQ ID NO: 2648021 - RNA, 19 nt, Artificial Sequence
  Description of Artificial Sequence: Synthetic oligonucleotide
gaaguuaggaaggugcuuc

SEQ ID NO: 2648022 - RNA, 19 nt, Artificial Sequence
  Description of Artificial Sequence: Synthetic oligonucleotide
agaacuuucuuuccuuccu

SEQ ID NO: 2648023 - RNA, 19 nt, Artificial Sequence
  Description of Artificial Sequence: Synthetic oligonucleotide
uuuggaucaucauggcucu

SEQ ID NO: 2648024 - RNA, 19 nt, Artificial Sequence
  Description of Artificial Sequence: Synthetic oligonucleotide
ucaucauggcucuuauucu

SEQ ID NO: 2648025 - RNA, 19 nt, Artificial Sequence
  Description of Artificial Sequence: Synthetic oligonucleotide
uccauuucguagaacuuuc

SEQ ID NO: 2648026 - RNA, 19 nt, Artificial Sequence
  Description of Artificial Sequence: Synthetic oligonucleotide
auccucacucaguucuucc

SEQ ID NO: 2648027 - RNA, 19 nt, Artificial Sequence
  Description of Artificial Sequence: Synthetic oligonucleotide
cagaaucaggguaucuggg

SEQ ID NO: 2648028 - RNA, 19 nt, Artificial Sequence
  Description of Artificial Sequence: Synthetic oligonucleotide
cuucauggcguuacugcgg

SEQ ID NO: 2648029 - RNA, 19 nt, Artificial Sequence
  Description of Artificial Sequence: Synthetic oligonucleotide
auagcuucgucagcuggcc

SEQ ID NO: 2648030 - RNA, 19 nt, Artificial Sequence
  Description of Artificial Sequence: Synthetic oligonucleotide
cugaguaaggggagcaaag

SEQ ID NO: 2648031 - RNA, 19 nt, Artificial Sequence
  Description of Artificial Sequence: Synthetic oligonucleotide
agauguuccacaaugggau

SEQ ID NO: 2648032 - RNA, 19 nt, Artificial Sequence
  Description of Artificial Sequence: Synthetic oligonucleotide
ucguagaacuuucuuuccu

SEQ ID NO: 2648033 - RNA, 19 nt, Artificial Sequence
  Description of Artificial Sequence: Synthetic oligonucleotide
uacauagucugacaccuuu

SEQ ID NO: 2648034 - RNA, 19 nt, Artificial Sequence
  Description of Artificial Sequence: Synthetic oligonucleotide
agaaucaggguaucuggga

SEQ ID NO: 2648035 - RNA, 19 nt, Artificial Sequence
  Description of Artificial Sequence: Synthetic oligonucleotide
uucauggcguuacugcgga

SEQ ID NO: 2648036 - RNA, 19 nt, Artificial Sequence
  Description of Artificial Sequence: Synthetic oligonucleotide
guuaggaaggugcuucaug

SEQ ID NO: 2648037 - RNA, 19 nt, Artificial Sequence
  Description of Artificial Sequence: Synthetic oligonucleotide
caucauggcucuuauucug

SEQ ID NO: 2648038 - RNA, 19 nt, Artificial Sequence
  Description of Artificial Sequence: Synthetic oligonucleotide
auggcguuacugcggagac

SEQ ID NO: 2648039 - RNA, 19 nt, Artificial Sequence
  Description of Artificial Sequence: Synthetic oligonucleotide
caggcaauguucuggaauc

SEQ ID NO: 2648040 - RNA, 19 nt, Artificial Sequence
  Description of Artificial Sequence: Synthetic oligonucleotide
uccugucuuguacauaguc

SEQ ID NO: 2648041 - RNA, 19 nt, Artificial Sequence
  Description of Artificial Sequence: Synthetic oligonucleotide
ugucuuguacauagucuga

SEQ ID NO: 2648042 - RNA, 19 nt, Artificial Sequence
  Description of Artificial Sequence: Synthetic oligonucleotide
uuaugcuucguucgcuuaa

SEQ ID NO: 2648043 - RNA, 19 nt, Artificial Sequence
  Description of Artificial Sequence: Synthetic oligonucleotide
ugauagugccacuaacaaa

SEQ ID NO: 2648044 - RNA, 19 nt, Artificial Sequence
  Description of Artificial Sequence: Synthetic oligonucleotide
aaguuaggaaggugcuuca

SEQ ID NO: 2648045 - RNA, 19 nt, Artificial Sequence
  Description of Artificial Sequence: Synthetic oligonucleotide
acaggcaauguucuggaau

SEQ ID NO: 2648046 - RNA, 19 nt, Artificial Sequence
  Description of Artificial Sequence: Synthetic oligonucleotide
gccacuuaugcuucguucg

SEQ ID NO: 2648047 - RNA, 19 nt, Artificial Sequence
  Description of Artificial Sequence: Synthetic oligonucleotide
agcacguaggcguauucug

SEQ ID NO: 2648048 - RNA, 19 nt, Artificial Sequence
  Description of Artificial Sequence: Synthetic oligonucleotide
aguguggcgcugaugauuc

SEQ ID NO: 2648049 - RNA, 19 nt, Artificial Sequence
  Description of Artificial Sequence: Synthetic oligonucleotide
uaucugggaagagugguga

SEQ ID NO: 2648050 - RNA, 19 nt, Artificial Sequence
  Description of Artificial Sequence: Synthetic oligonucleotide
cuggaauccaccuccagga

SEQ ID NO: 2648051 - RNA, 19 nt, Artificial Sequence
  Description of Artificial Sequence: Synthetic oligonucleotide
ugcacguagggcccgaauc

SEQ ID NO: 2648052 - RNA, 19 nt, Artificial Sequence
  Description of Artificial Sequence: Synthetic oligonucleotide
ugcacauccauuggugcag

SEQ ID NO: 2648053 - RNA, 19 nt, Artificial Sequence
  Description of Artificial Sequence: Synthetic oligonucleotide
gugcucuucaaaaugggug

SEQ ID NO: 2648054 - RNA, 19 nt, Artificial Sequence
  Description of Artificial Sequence: Synthetic oligonucleotide
caccuuuacccgaaucucc

SEQ ID NO: 2648055 - RNA, 19 nt, Artificial Sequence
  Description of Artificial Sequence: Synthetic oligonucleotide
uucguucgcuuaaaaugug

SEQ ID NO: 2648056 - RNA, 19 nt, Artificial Sequence
  Description of Artificial Sequence: Synthetic oligonucleotide
acaccuuuacccgaaucuc

SEQ ID NO: 2648057 - RNA, 19 nt, Artificial Sequence
  Description of Artificial Sequence: Synthetic oligonucleotide
uggauccuggauucuucgg

SEQ ID NO: 2648058 - RNA, 19 nt, Artificial Sequence
  Description of Artificial Sequence: Synthetic oligonucleotide
ugaguaaggggagcaaaga

SEQ ID NO: 2648059 - RNA, 19 nt, Artificial Sequence
  Description of Artificial Sequence: Synthetic oligonucleotide
ugggaaauucuucccucca

SEQ ID NO: 2648060 - RNA, 19 nt, Artificial Sequence
  Description of Artificial Sequence: Synthetic oligonucleotide
acgcucaaacagugggugc

SEQ ID NO: 2648061 - RNA, 19 nt, Artificial Sequence
  Description of Artificial Sequence: Synthetic oligonucleotide
gacaccuuuacccgaaucu

SEQ ID NO: 2648062 - RNA, 19 nt, Artificial Sequence
  Description of Artificial Sequence: Synthetic oligonucleotide
uauucugaguaaggggagc

SEQ ID NO: 2648063 - RNA, 19 nt, Artificial Sequence
  Description of Artificial Sequence: Synthetic oligonucleotide
gaaucaggguaucugggaa

SEQ ID NO: 2648064 - RNA, 19 nt, Artificial Sequence
  Description of Artificial Sequence: Synthetic oligonucleotide
gugggugcucuucaaaaug

SEQ ID NO: 2648065 - RNA, 19 nt, Artificial Sequence
  Description of Artificial Sequence: Synthetic oligonucleotide
uuacccgaaucuccagacc

SEQ ID NO: 2648066 - RNA, 19 nt, Artificial Sequence
  Description of Artificial Sequence: Synthetic oligonucleotide
uggcccuugcggaagaagu

SEQ ID NO: 2648067 - RNA, 19 nt, Artificial Sequence
  Description of Artificial Sequence: Synthetic oligonucleotide
cugggaaauucuucccucc

SEQ ID NO: 2648068 - RNA, 19 nt, Artificial Sequence
  Description of Artificial Sequence: Synthetic oligonucleotide
cacguaggcguauucugcc

SEQ ID NO: 2648069 - RNA, 19 nt, Artificial Sequence
  Description of Artificial Sequence: Synthetic oligonucleotide
uggugauagugccacuaac

SEQ ID NO: 2648070 - RNA, 19 nt, Artificial Sequence
  Description of Artificial Sequence: Synthetic oligonucleotide
caaaccgccauagccacag

SEQ ID NO: 2648071 - RNA, 19 nt, Artificial Sequence
  Description of Artificial Sequence: Synthetic oligonucleotide
uuacugcggagacaggcaa

SEQ ID NO: 2648072 - RNA, 19 nt, Artificial Sequence
  Description of Artificial Sequence: Synthetic oligonucleotide
uugcggaagaaguuaggaa

SEQ ID NO: 2648073 - RNA, 19 nt, Artificial Sequence
  Description of Artificial Sequence: Synthetic oligonucleotide
ccagaaucaggguaucugg

SEQ ID NO: 2648074 - RNA, 19 nt, Artificial Sequence
  Description of Artificial Sequence: Synthetic oligonucleotide
uucuuuccuuccucgguug

SEQ ID NO: 2648075 - RNA, 19 nt, Artificial Sequence
  Description of Artificial Sequence: Synthetic oligonucleotide
augggugcacauccauugg

SEQ ID NO: 2648076 - RNA, 19 nt, Artificial Sequence
  Description of Artificial Sequence: Synthetic oligonucleotide
auagugccacuaacaaacc

SEQ ID NO: 2648077 - RNA, 19 nt, Artificial Sequence
  Description of Artificial Sequence: Synthetic oligonucleotide
aggguaucugggaagagug

SEQ ID NO: 2648078 - RNA, 19 nt, Artificial Sequence
  Description of Artificial Sequence: Synthetic oligonucleotide
gaguaaggggagcaaagaa

SEQ ID NO: 2648079 - RNA, 19 nt, Artificial Sequence
  Description of Artificial Sequence: Synthetic oligonucleotide
gugauagugccacuaacaa

SEQ ID NO: 2648080 - RNA, 19 nt, Artificial Sequence
  Description of Artificial Sequence: Synthetic oligonucleotide
agacaggcaauguucugga

SEQ ID NO: 2648081 - RNA, 19 nt, Artificial Sequence
  Description of Artificial Sequence: Synthetic oligonucleotide
gggagcaaagaacucuggg

SEQ ID NO: 2648082 - RNA, 19 nt, Artificial Sequence
  Description of Artificial Sequence: Synthetic oligonucleotide
caacucucagcacguaggc

SEQ ID NO: 2648083 - RNA, 19 nt, Artificial Sequence
  Description of Artificial Sequence: Synthetic oligonucleotide
agcaaagaacucuggguaa

SEQ ID NO: 2648084 - RNA, 19 nt, Artificial Sequence
  Description of Artificial Sequence: Synthetic oligonucleotide
aaugggauccucacucagu

SEQ ID NO: 2648085 - RNA, 19 nt, Artificial Sequence
  Description of Artificial Sequence: Synthetic oligonucleotide
agaauagcuucgucagcug

SEQ ID NO: 2648086 - RNA, 19 nt, Artificial Sequence
  Description of Artificial Sequence: Synthetic oligonucleotide
ugcuucguucgcuuaaaau

SEQ ID NO: 2648087 - RNA, 19 nt, Artificial Sequence
  Description of Artificial Sequence: Synthetic oligonucleotide
cuuuugcaucuuuuggauc

SEQ ID NO: 2648088 - RNA, 19 nt, Artificial Sequence
  Description of Artificial Sequence: Synthetic oligonucleotide
gguugaagugcccagaugu

SEQ ID NO: 2648089 - RNA, 19 nt, Artificial Sequence
  Description of Artificial Sequence: Synthetic oligonucleotide
ugggugcacauccauuggu

SEQ ID NO: 2648090 - RNA, 19 nt, Artificial Sequence
  Description of Artificial Sequence: Synthetic oligonucleotide
cuucguucgcuuaaaaugu

SEQ ID NO: 2648091 - RNA, 19 nt, Artificial Sequence
  Description of Artificial Sequence: Synthetic oligonucleotide
cauuggugcagcuccagca

SEQ ID NO: 2648092 - RNA, 19 nt, Artificial Sequence
  Description of Artificial Sequence: Synthetic oligonucleotide
cacuaacaaaccgccauag

SEQ ID NO: 2648093 - RNA, 19 nt, Artificial Sequence
  Description of Artificial Sequence: Synthetic oligonucleotide
uggaggauuggauccugga

SEQ ID NO: 2648094 - RNA, 19 nt, Artificial Sequence
  Description of Artificial Sequence: Synthetic oligonucleotide
ccaacucucagcacguagg

SEQ ID NO: 2648095 - RNA, 19 nt, Artificial Sequence
  Description of Artificial Sequence: Synthetic oligonucleotide
gauucuucggaagauggcu

SEQ ID NO: 2648096 - RNA, 19 nt, Artificial Sequence
  Description of Artificial Sequence: Synthetic oligonucleotide
guaggcguauucugccagg

SEQ ID NO: 2648097 - RNA, 19 nt, Artificial Sequence
  Description of Artificial Sequence: Synthetic oligonucleotide
ggcguuacugcggagacag

SEQ ID NO: 2648098 - RNA, 19 nt, Artificial Sequence
  Description of Artificial Sequence: Synthetic oligonucleotide
aagauggcugggaaauucu

SEQ ID NO: 2648099 - RNA, 19 nt, Artificial Sequence
  Description of Artificial Sequence: Synthetic oligonucleotide
cuuccucgguugaagugcc

SEQ ID NO: 2648100 - RNA, 19 nt, Artificial Sequence
  Description of Artificial Sequence: Synthetic oligonucleotide
ucgucagcuggcccuugcg

SEQ ID NO: 2648101 - RNA, 19 nt, Artificial Sequence
  Description of Artificial Sequence: Synthetic oligonucleotide
aaaugugggucggggaaga

SEQ ID NO: 2648102 - RNA, 19 nt, Artificial Sequence
  Description of Artificial Sequence: Synthetic oligonucleotide
aaaccgccauagccacagc

SEQ ID NO: 2648103 - RNA, 19 nt, Artificial Sequence
  Description of Artificial Sequence: Synthetic oligonucleotide
agcuucgucagcuggcccu

SEQ ID NO: 2648104 - RNA, 19 nt, Artificial Sequence
  Description of Artificial Sequence: Synthetic oligonucleotide
uccuuccucgguugaagug

SEQ ID NO: 2648105 - RNA, 19 nt, Artificial Sequence
  Description of Artificial Sequence: Synthetic oligonucleotide
acauccauuggugcagcuc

SEQ ID NO: 2648106 - RNA, 19 nt, Artificial Sequence
  Description of Artificial Sequence: Synthetic oligonucleotide
ucuucggaagauggcuggg

SEQ ID NO: 2648107 - RNA, 19 nt, Artificial Sequence
  Description of Artificial Sequence: Synthetic oligonucleotide
uugaagugcccagauguuc

SEQ ID NO: 2648108 - RNA, 19 nt, Artificial Sequence
  Description of Artificial Sequence: Synthetic oligonucleotide
cuucccuccauuucguaga

SEQ ID NO: 2648109 - RNA, 19 nt, Artificial Sequence
  Description of Artificial Sequence: Synthetic oligonucleotide
guaaggggagcaaagaacu

SEQ ID NO: 2648110 - RNA, 19 nt, Artificial Sequence
  Description of Artificial Sequence: Synthetic oligonucleotide
uugggucccagcuugcuuu

SEQ ID NO: 2648111 - RNA, 19 nt, Artificial Sequence
  Description of Artificial Sequence: Synthetic oligonucleotide
ggugaugguguacaccagc

SEQ ID NO: 2648112 - RNA, 19 nt, Artificial Sequence
  Description of Artificial Sequence: Synthetic oligonucleotide
agugggugcucuucaaaau

SEQ ID NO: 2648113 - RNA, 19 nt, Artificial Sequence
  Description of Artificial Sequence: Synthetic oligonucleotide
augauucgccacuuaugcu

SEQ ID NO: 2648114 - RNA, 19 nt, Artificial Sequence
  Description of Artificial Sequence: Synthetic oligonucleotide
aagugcccagauguuccac

SEQ ID NO: 2648115 - RNA, 19 nt, Artificial Sequence
  Description of Artificial Sequence: Synthetic oligonucleotide
gauccuggauucuucggaa

SEQ ID NO: 2648116 - RNA, 19 nt, Artificial Sequence
  Description of Artificial Sequence: Synthetic oligonucleotide
uguggcgcugaugauucgc

SEQ ID NO: 2648117 - RNA, 19 nt, Artificial Sequence
  Description of Artificial Sequence: Synthetic oligonucleotide
ugggucggggaagaggaag

SEQ ID NO: 2648118 - RNA, 19 nt, Artificial Sequence
  Description of Artificial Sequence: Synthetic oligonucleotide
ccagauguuccacaauggg

SEQ ID NO: 2648119 - RNA, 19 nt, Artificial Sequence
  Description of Artificial Sequence: Synthetic oligonucleotide
agugcccagauguuccaca

SEQ ID NO: 2648120 - RNA, 19 nt, Artificial Sequence
  Description of Artificial Sequence: Synthetic oligonucleotide
gaggauuggauccuggauu

SEQ ID NO: 2648121 - RNA, 19 nt, Artificial Sequence
  Description of Artificial Sequence: Synthetic oligonucleotide
auucuucggaagauggcug

SEQ ID NO: 2648122 - RNA, 19 nt, Artificial Sequence
  Description of Artificial Sequence: Synthetic oligonucleotide
ggugcacauccauuggugc

SEQ ID NO: 2648123 - RNA, 19 nt, Artificial Sequence
  Description of Artificial Sequence: Synthetic oligonucleotide
ggggcacacgcucaaacag

SEQ ID NO: 2648124 - RNA, 19 nt, Artificial Sequence
  Description of Artificial Sequence: Synthetic oligonucleotide
acugcggagacaggcaaug

SEQ ID NO: 2648125 - RNA, 19 nt, Artificial Sequence
  Description of Artificial Sequence: Synthetic oligonucleotide
cacgcucaaacagugggug

SEQ ID NO: 2648126 - RNA, 19 nt, Artificial Sequence
  Description of Artificial Sequence: Synthetic oligonucleotide
gugccacuaacaaaccgcc

SEQ ID NO: 2648127 - RNA, 19 nt, Artificial Sequence
  Description of Artificial Sequence: Synthetic oligonucleotide
gcccagauguuccacaaug

SEQ ID NO: 2648128 - RNA, 19 nt, Artificial Sequence
  Description of Artificial Sequence: Synthetic oligonucleotide
uuccuuccucgguugaagu

SEQ ID NO: 2648129 - RNA, 19 nt, Artificial Sequence
  Description of Artificial Sequence: Synthetic oligonucleotide
augugggucggggaagagg

SEQ ID NO: 2648130 - RNA, 19 nt, Artificial Sequence
  Description of Artificial Sequence: Synthetic oligonucleotide
gggaagaguggugauagug

SEQ ID NO: 2648131 - RNA, 19 nt, Artificial Sequence
  Description of Artificial Sequence: Synthetic oligonucleotide
cuugcggaagaaguuagga

SEQ ID NO: 2648132 - RNA, 19 nt, Artificial Sequence
  Description of Artificial Sequence: Synthetic oligonucleotide
gaggaagaauagcuucguc

SEQ ID NO: 2648133 - RNA, 19 nt, Artificial Sequence
  Description of Artificial Sequence: Synthetic oligonucleotide
gcggaagaaguuaggaagg

SEQ ID NO: 2648134 - RNA, 19 nt, Artificial Sequence
  Description of Artificial Sequence: Synthetic oligonucleotide
aggggcacacgcucaaaca

SEQ ID NO: 2648135 - RNA, 19 nt, Artificial Sequence
  Description of Artificial Sequence: Synthetic oligonucleotide
cuuuacccgaaucuccaga

SEQ ID NO: 2648136 - RNA, 19 nt, Artificial Sequence
  Description of Artificial Sequence: Synthetic oligonucleotide
gaaauucuucccuccauuu

SEQ ID NO: 2648137 - RNA, 19 nt, Artificial Sequence
  Description of Artificial Sequence: Synthetic oligonucleotide
ggugauagugccacuaaca

SEQ ID NO: 2648138 - RNA, 19 nt, Artificial Sequence
  Description of Artificial Sequence: Synthetic oligonucleotide
auucgccacuuaugcuucg

SEQ ID NO: 2648139 - RNA, 19 nt, Artificial Sequence
  Description of Artificial Sequence: Synthetic oligonucleotide
ggcucuuauucugaguaag

SEQ ID NO: 2648140 - RNA, 19 nt, Artificial Sequence
  Description of Artificial Sequence: Synthetic oligonucleotide
aagaguggugauagugcca

SEQ ID NO: 2648141 - RNA, 19 nt, Artificial Sequence
  Description of Artificial Sequence: Synthetic oligonucleotide
ucggaagauggcugggaaa

SEQ ID NO: 2648142 - RNA, 19 nt, Artificial Sequence
  Description of Artificial Sequence: Synthetic oligonucleotide
gauucgccacuuaugcuuc

SEQ ID NO: 2648143 - RNA, 19 nt, Artificial Sequence
  Description of Artificial Sequence: Synthetic oligonucleotide
caaacagugggugcucuuc

SEQ ID NO: 2648144 - RNA, 19 nt, Artificial Sequence
  Description of Artificial Sequence: Synthetic oligonucleotide
uucgucagcuggcccuugc

SEQ ID NO: 2648145 - RNA, 19 nt, Artificial Sequence
  Description of Artificial Sequence: Synthetic oligonucleotide
uggaucaucauggcucuua

SEQ ID NO: 2648146 - RNA, 19 nt, Artificial Sequence
  Description of Artificial Sequence: Synthetic oligonucleotide
ucagcacguaggcguauuc

SEQ ID NO: 2648147 - RNA, 19 nt, Artificial Sequence
  Description of Artificial Sequence: Synthetic oligonucleotide
uccucgguugaagugccca

SEQ ID NO: 2648148 - RNA, 19 nt, Artificial Sequence
  Description of Artificial Sequence: Synthetic oligonucleotide
aaaugggugcacauccauu

SEQ ID NO: 2648149 - RNA, 19 nt, Artificial Sequence
  Description of Artificial Sequence: Synthetic oligonucleotide
guaucugggaagaguggug

SEQ ID NO: 2648150 - RNA, 19 nt, Artificial Sequence
  Description of Artificial Sequence: Synthetic oligonucleotide
ugccacuaacaaaccgcca

SEQ ID NO: 2648151 - RNA, 19 nt, Artificial Sequence
  Description of Artificial Sequence: Synthetic oligonucleotide
agcacgucggugauggugu

SEQ ID NO: 2648152 - RNA, 19 nt, Artificial Sequence
  Description of Artificial Sequence: Synthetic oligonucleotide
uaugcuucguucgcuuaaa

SEQ ID NO: 2648153 - RNA, 19 nt, Artificial Sequence
  Description of Artificial Sequence: Synthetic oligonucleotide
cguucgcuuaaaauguggg

SEQ ID NO: 2648154 - RNA, 19 nt, Artificial Sequence
  Description of Artificial Sequence: Synthetic oligonucleotide
caaaaugggugcacaucca

SEQ ID NO: 2648155 - RNA, 19 nt, Artificial Sequence
  Description of Artificial Sequence: Synthetic oligonucleotide
cucaguucuuccaggggca

SEQ ID NO: 2648156 - RNA, 19 nt, Artificial Sequence
  Description of Artificial Sequence: Synthetic oligonucleotide
aaugugggucggggaagag

SEQ ID NO: 2648157 - RNA, 19 nt, Artificial Sequence
  Description of Artificial Sequence: Synthetic oligonucleotide
gccuaugucugcaaacucc

SEQ ID NO: 2648158 - RNA, 19 nt, Artificial Sequence
  Description of Artificial Sequence: Synthetic oligonucleotide
cccagauguuccacaaugg

SEQ ID NO: 2648159 - RNA, 19 nt, Artificial Sequence
  Description of Artificial Sequence: Synthetic oligonucleotide
gaagugcccagauguucca

SEQ ID NO: 2648160 - RNA, 19 nt, Artificial Sequence
  Description of Artificial Sequence: Synthetic oligonucleotide
gcacguagggcccgaaucc

SEQ ID NO: 2648161 - RNA, 19 nt, Artificial Sequence
  Description of Artificial Sequence: Synthetic oligonucleotide
ggauccuggauucuucgga

SEQ ID NO: 2648162 - RNA, 19 nt, Artificial Sequence
  Description of Artificial Sequence: Synthetic oligonucleotide
uccauuggugcagcuccag

SEQ ID NO: 2648163 - RNA, 19 nt, Artificial Sequence
  Description of Artificial Sequence: Synthetic oligonucleotide
acagugggugcucuucaaa

SEQ ID NO: 2648164 - RNA, 19 nt, Artificial Sequence
  Description of Artificial Sequence: Synthetic oligonucleotide
aguggugauagugccacua

SEQ ID NO: 2648165 - RNA, 19 nt, Artificial Sequence
  Description of Artificial Sequence: Synthetic oligonucleotide
aggcguauucugccaggag

SEQ ID NO: 2648166 - RNA, 19 nt, Artificial Sequence
  Description of Artificial Sequence: Synthetic oligonucleotide
accuuuacccgaaucucca

SEQ ID NO: 2648167 - RNA, 19 nt, Artificial Sequence
  Description of Artificial Sequence: Synthetic oligonucleotide
guuacugcggagacaggca

SEQ ID NO: 2648168 - RNA, 19 nt, Artificial Sequence
  Description of Artificial Sequence: Synthetic oligonucleotide
uaggcguauucugccagga

SEQ ID NO: 2648169 - RNA, 19 nt, Artificial Sequence
  Description of Artificial Sequence: Synthetic oligonucleotide
agacccagaaucaggguau

SEQ ID NO: 2648170 - RNA, 19 nt, Artificial Sequence
  Description of Artificial Sequence: Synthetic oligonucleotide
caggggcacacgcucaaac

SEQ ID NO: 2648171 - RNA, 19 nt, Artificial Sequence
  Description of Artificial Sequence: Synthetic oligonucleotide
guucgcuuaaaaugugggu

SEQ ID NO: 2648172 - RNA, 19 nt, Artificial Sequence
  Description of Artificial Sequence: Synthetic oligonucleotide
acgucggugaugguguaca

SEQ ID NO: 2648173 - RNA, 19 nt, Artificial Sequence
  Description of Artificial Sequence: Synthetic oligonucleotide
cucuucaaaaugggugcac

SEQ ID NO: 2648174 - RNA, 19 nt, Artificial Sequence
  Description of Artificial Sequence: Synthetic oligonucleotide
uucccuccauuucguagaa

SEQ ID NO: 2648175 - RNA, 19 nt, Artificial Sequence
  Description of Artificial Sequence: Synthetic oligonucleotide
uagcuucgucagcuggccc

SEQ ID NO: 2648176 - RNA, 19 nt, Artificial Sequence
  Description of Artificial Sequence: Synthetic oligonucleotide
ggaagaaguuaggaaggug

SEQ ID NO: 2648177 - RNA, 19 nt, Artificial Sequence
  Description of Artificial Sequence: Synthetic oligonucleotide
acguaggcguauucugcca

SEQ ID NO: 2648178 - RNA, 19 nt, Artificial Sequence
  Description of Artificial Sequence: Synthetic oligonucleotide
ccuuccucgguugaagugc

SEQ ID NO: 2648179 - RNA, 19 nt, Artificial Sequence
  Description of Artificial Sequence: Synthetic oligonucleotide
ggggucacugcuuggagga

SEQ ID NO: 2648180 - RNA, 19 nt, Artificial Sequence
  Description of Artificial Sequence: Synthetic oligonucleotide
ucaaacagugggugcucuu

SEQ ID NO: 2648181 - RNA, 19 nt, Artificial Sequence
  Description of Artificial Sequence: Synthetic oligonucleotide
cagugggugcucuucaaaa

SEQ ID NO: 2648182 - RNA, 19 nt, Artificial Sequence
  Description of Artificial Sequence: Synthetic oligonucleotide
cauggcguuacugcggaga

SEQ ID NO: 2648183 - RNA, 19 nt, Artificial Sequence
  Description of Artificial Sequence: Synthetic oligonucleotide
uggcgcugaugauucgcca

SEQ ID NO: 2648184 - RNA, 19 nt, Artificial Sequence
  Description of Artificial Sequence: Synthetic oligonucleotide
cuuuuggaucaucauggcu

SEQ ID NO: 2648185 - RNA, 19 nt, Artificial Sequence
  Description of Artificial Sequence: Synthetic oligonucleotide
cagcacgucggugauggug

SEQ ID NO: 2648186 - RNA, 19 nt, Artificial Sequence
  Description of Artificial Sequence: Synthetic oligonucleotide
gcguauucugccaggagug

SEQ ID NO: 2648187 - RNA, 19 nt, Artificial Sequence
  Description of Artificial Sequence: Synthetic oligonucleotide
uacugcggagacaggcaau

SEQ ID NO: 2648188 - RNA, 19 nt, Artificial Sequence
  Description of Artificial Sequence: Synthetic oligonucleotide
agaaguuaggaaggugcuu

SEQ ID NO: 2648189 - RNA, 19 nt, Artificial Sequence
  Description of Artificial Sequence: Synthetic oligonucleotide
ccuaugucugcaaacucca

SEQ ID NO: 2648190 - RNA, 19 nt, Artificial Sequence
  Description of Artificial Sequence: Synthetic oligonucleotide
cuuggaggauuggauccug

SEQ ID NO: 2648191 - RNA, 19 nt, Artificial Sequence
  Description of Artificial Sequence: Synthetic oligonucleotide
gucugacaccuuuacccga

SEQ ID NO: 2648192 - RNA, 19 nt, Artificial Sequence
  Description of Artificial Sequence: Synthetic oligonucleotide
auucuucccuccauuucgu

SEQ ID NO: 2648193 - RNA, 19 nt, Artificial Sequence
  Description of Artificial Sequence: Synthetic oligonucleotide
ggauucuucggaagauggc

SEQ ID NO: 2648194 - RNA, 19 nt, Artificial Sequence
  Description of Artificial Sequence: Synthetic oligonucleotide
ucccagcuugcuuuucuuu

SEQ ID NO: 2648195 - RNA, 19 nt, Artificial Sequence
  Description of Artificial Sequence: Synthetic oligonucleotide
gcuuaaaaugugggucggg

SEQ ID NO: 2648196 - RNA, 19 nt, Artificial Sequence
  Description of Artificial Sequence: Synthetic oligonucleotide
ggcacacgcucaaacagug

SEQ ID NO: 2648197 - RNA, 19 nt, Artificial Sequence
  Description of Artificial Sequence: Synthetic oligonucleotide
ucauggcguuacugcggag

SEQ ID NO: 2648198 - RNA, 19 nt, Artificial Sequence
  Description of Artificial Sequence: Synthetic oligonucleotide
guggcgcugaugauucgcc

SEQ ID NO: 2648199 - RNA, 19 nt, Artificial Sequence
  Description of Artificial Sequence: Synthetic oligonucleotide
ggagacaggcaauguucug

SEQ ID NO: 2648200 - RNA, 19 nt, Artificial Sequence
  Description of Artificial Sequence: Synthetic oligonucleotide
ugggaagaguggugauagu

SEQ ID NO: 2648201 - RNA, 19 nt, Artificial Sequence
  Description of Artificial Sequence: Synthetic oligonucleotide
ggcguauucugccaggagu

SEQ ID NO: 2648202 - RNA, 19 nt, Artificial Sequence
  Description of Artificial Sequence: Synthetic oligonucleotide
uuccucgguugaagugccc

SEQ ID NO: 2648203 - RNA, 19 nt, Artificial Sequence
  Description of Artificial Sequence: Synthetic oligonucleotide
ggcgcugaugauucgccac

SEQ ID NO: 2648204 - RNA, 19 nt, Artificial Sequence
  Description of Artificial Sequence: Synthetic oligonucleotide
cuuaugcuucguucgcuua

SEQ ID NO: 2648205 - RNA, 19 nt, Artificial Sequence
  Description of Artificial Sequence: Synthetic oligonucleotide
cccgaauccugucuuguac

SEQ ID NO: 2648206 - RNA, 19 nt, Artificial Sequence
  Description of Artificial Sequence: Synthetic oligonucleotide
ccacuuaugcuucguucgc

SEQ ID NO: 2648207 - RNA, 19 nt, Artificial Sequence
  Description of Artificial Sequence: Synthetic oligonucleotide
ugcccagauguuccacaau

SEQ ID NO: 2648208 - RNA, 19 nt, Artificial Sequence
  Description of Artificial Sequence: Synthetic oligonucleotide
cguuacugcggagacaggc

SEQ ID NO: 2648209 - RNA, 19 nt, Artificial Sequence
  Description of Artificial Sequence: Synthetic oligonucleotide
acacgcucaaacagugggu

SEQ ID NO: 2648210 - RNA, 19 nt, Artificial Sequence
  Description of Artificial Sequence: Synthetic oligonucleotide
uucgccacuuaugcuucgu

SEQ ID NO: 2648211 - RNA, 19 nt, Artificial Sequence
  Description of Artificial Sequence: Synthetic oligonucleotide
ccuugcggaagaaguuagg

SEQ ID NO: 2648212 - RNA, 19 nt, Artificial Sequence
  Description of Artificial Sequence: Synthetic oligonucleotide
aguuaggaaggugcuucau

SEQ ID NO: 2648213 - RNA, 19 nt, Artificial Sequence
  Description of Artificial Sequence: Synthetic oligonucleotide
uucuucccuccauuucgua

SEQ ID NO: 2648214 - RNA, 19 nt, Artificial Sequence
  Description of Artificial Sequence: Synthetic oligonucleotide
cugaugauucgccacuuau

SEQ ID NO: 2648215 - RNA, 19 nt, Artificial Sequence
  Description of Artificial Sequence: Synthetic oligonucleotide
cacuugggucccagcuugc

SEQ ID NO: 2648216 - RNA, 19 nt, Artificial Sequence
  Description of Artificial Sequence: Synthetic oligonucleotide
cccuugcggaagaaguuag

SEQ ID NO: 2648217 - RNA, 19 nt, Artificial Sequence
  Description of Artificial Sequence: Synthetic oligonucleotide
cccagaaucaggguaucug

SEQ ID NO: 2648218 - RNA, 19 nt, Artificial Sequence
  Description of Artificial Sequence: Synthetic oligonucleotide
gggugcacauccauuggug

SEQ ID NO: 2648219 - RNA, 19 nt, Artificial Sequence
  Description of Artificial Sequence: Synthetic oligonucleotide
ucgccacuuaugcuucguu

SEQ ID NO: 2648220 - RNA, 19 nt, Artificial Sequence
  Description of Artificial Sequence: Synthetic oligonucleotide
augcuucguucgcuuaaaa

SEQ ID NO: 2648221 - RNA, 19 nt, Artificial Sequence
  Description of Artificial Sequence: Synthetic oligonucleotide
gcggagacaggcaauguuc

SEQ ID NO: 2648222 - RNA, 19 nt, Artificial Sequence
  Description of Artificial Sequence: Synthetic oligonucleotide
agggcccgaauccugucuu

SEQ ID NO: 2648223 - RNA, 19 nt, Artificial Sequence
  Description of Artificial Sequence: Synthetic oligonucleotide
cccaacucucagcacguag

SEQ ID NO: 2648224 - RNA, 19 nt, Artificial Sequence
  Description of Artificial Sequence: Synthetic oligonucleotide
gcacguaggcguauucugc

SEQ ID NO: 2648225 - RNA, 19 nt, Artificial Sequence
  Description of Artificial Sequence: Synthetic oligonucleotide
gacaggcaauguucuggaa

SEQ ID NO: 2648226 - RNA, 19 nt, Artificial Sequence
  Description of Artificial Sequence: Synthetic oligonucleotide
uugcaucuuuuggaucauc

SEQ ID NO: 2648227 - RNA, 19 nt, Artificial Sequence
  Description of Artificial Sequence: Synthetic oligonucleotide
cauuucguagaacuuucuu

SEQ ID NO: 2648228 - RNA, 19 nt, Artificial Sequence
  Description of Artificial Sequence: Synthetic oligonucleotide
cuggcccuugcggaagaag

SEQ ID NO: 2648229 - RNA, 19 nt, Artificial Sequence
  Description of Artificial Sequence: Synthetic oligonucleotide
gugcccagauguuccacaa

SEQ ID NO: 2648230 - RNA, 19 nt, Artificial Sequence
  Description of Artificial Sequence: Synthetic oligonucleotide
guguggcgcugaugauucg

SEQ ID NO: 2648231 - RNA, 19 nt, Artificial Sequence
  Description of Artificial Sequence: Synthetic oligonucleotide
ggggagcaaagaacucugg

SEQ ID NO: 2648232 - RNA, 19 nt, Artificial Sequence
  Description of Artificial Sequence: Synthetic oligonucleotide
gaauccugucuuguacaua

SEQ ID NO: 2648233 - RNA, 19 nt, Artificial Sequence
  Description of Artificial Sequence: Synthetic oligonucleotide
ccuuuacccgaaucuccag

SEQ ID NO: 2648234 - RNA, 19 nt, Artificial Sequence
  Description of Artificial Sequence: Synthetic oligonucleotide
cuucggaagauggcuggga

SEQ ID NO: 2648235 - RNA, 19 nt, Artificial Sequence
  Description of Artificial Sequence: Synthetic oligonucleotide
gccacuaacaaaccgccau

SEQ ID NO: 2648236 - RNA, 19 nt, Artificial Sequence
  Description of Artificial Sequence: Synthetic oligonucleotide
ggcaauguucuggaaucca

SEQ ID NO: 2648237 - RNA, 19 nt, Artificial Sequence
  Description of Artificial Sequence: Synthetic oligonucleotide
cccuccauuucguagaacu

SEQ ID NO: 2648238 - RNA, 19 nt, Artificial Sequence
  Description of Artificial Sequence: Synthetic oligonucleotide
guagggcccgaauccuguc

SEQ ID NO: 2648239 - RNA, 19 nt, Artificial Sequence
  Description of Artificial Sequence: Synthetic oligonucleotide
cuccacuugggucccagcu

SEQ ID NO: 2648240 - RNA, 19 nt, Artificial Sequence
  Description of Artificial Sequence: Synthetic oligonucleotide
uggcguuacugcggagaca

SEQ ID NO: 2648241 - RNA, 19 nt, Artificial Sequence
  Description of Artificial Sequence: Synthetic oligonucleotide
ccugucuuguacauagucu

SEQ ID NO: 2648242 - RNA, 19 nt, Artificial Sequence
  Description of Artificial Sequence: Synthetic oligonucleotide
ccgaauccugucuuguaca

SEQ ID NO: 2648243 - RNA, 19 nt, Artificial Sequence
  Description of Artificial Sequence: Synthetic oligonucleotide
cguaggcguauucugccag

SEQ ID NO: 2648244 - RNA, 19 nt, Artificial Sequence
  Description of Artificial Sequence: Synthetic oligonucleotide
cucgguugaagugcccaga

SEQ ID NO: 2648245 - RNA, 19 nt, Artificial Sequence
  Description of Artificial Sequence: Synthetic oligonucleotide
gacccagaaucaggguauc

SEQ ID NO: 2648246 - RNA, 19 nt, Artificial Sequence
  Description of Artificial Sequence: Synthetic oligonucleotide
agcuggcccuugcggaaga

SEQ ID NO: 2648247 - RNA, 19 nt, Artificial Sequence
  Description of Artificial Sequence: Synthetic oligonucleotide
acguagggcccgaauccug

SEQ ID NO: 2648248 - RNA, 19 nt, Artificial Sequence
  Description of Artificial Sequence: Synthetic oligonucleotide
gcaaagaacucuggguaaa

SEQ ID NO: 2648249 - RNA, 19 nt, Artificial Sequence
  Description of Artificial Sequence: Synthetic oligonucleotide
cagccuaugucugcaaacu

SEQ ID NO: 2648250 - RNA, 19 nt, Artificial Sequence
  Description of Artificial Sequence: Synthetic oligonucleotide
cuccauuucguagaacuuu

SEQ ID NO: 2648251 - RNA, 19 nt, Artificial Sequence
  Description of Artificial Sequence: Synthetic oligonucleotide
gaguguggcgcugaugauu

SEQ ID NO: 2648252 - RNA, 19 nt, Artificial Sequence
  Description of Artificial Sequence: Synthetic oligonucleotide
ggcugggaaauucuucccu

SEQ ID NO: 2648253 - RNA, 19 nt, Artificial Sequence
  Description of Artificial Sequence: Synthetic oligonucleotide
gcacacgcucaaacagugg

SEQ ID NO: 2648254 - RNA, 19 nt, Artificial Sequence
  Description of Artificial Sequence: Synthetic oligonucleotide
gaucaucauggcucuuauu

SEQ ID NO: 2648255 - RNA, 19 nt, Artificial Sequence
  Description of Artificial Sequence: Synthetic oligonucleotide
auccauuggugcagcucca

SEQ ID NO: 2648256 - RNA, 19 nt, Artificial Sequence
  Description of Artificial Sequence: Synthetic oligonucleotide
ucucagcacguaggcguau

SEQ ID NO: 2648257 - RNA, 19 nt, Artificial Sequence
  Description of Artificial Sequence: Synthetic oligonucleotide
cacgucggugaugguguac

SEQ ID NO: 2648258 - RNA, 19 nt, Artificial Sequence
  Description of Artificial Sequence: Synthetic oligonucleotide
ggaaggugcuucauggcgu

SEQ ID NO: 2648259 - RNA, 19 nt, Artificial Sequence
  Description of Artificial Sequence: Synthetic oligonucleotide
cgaaucuccagacccagaa

SEQ ID NO: 2648260 - RNA, 19 nt, Artificial Sequence
  Description of Artificial Sequence: Synthetic oligonucleotide
cucucagcacguaggcgua

SEQ ID NO: 2648261 - RNA, 19 nt, Artificial Sequence
  Description of Artificial Sequence: Synthetic oligonucleotide
cagcuggcccuugcggaag

SEQ ID NO: 2648262 - RNA, 19 nt, Artificial Sequence
  Description of Artificial Sequence: Synthetic oligonucleotide
acaaaccgccauagccaca

SEQ ID NO: 2648263 - RNA, 19 nt, Artificial Sequence
  Description of Artificial Sequence: Synthetic oligonucleotide
aaacuccacuuggguccca

SEQ ID NO: 2648264 - RNA, 19 nt, Artificial Sequence
  Description of Artificial Sequence: Synthetic oligonucleotide
ucccuccauuucguagaac

SEQ ID NO: 2648265 - RNA, 19 nt, Artificial Sequence
  Description of Artificial Sequence: Synthetic oligonucleotide
ugccaggaguguggcgcug

SEQ ID NO: 2648266 - RNA, 19 nt, Artificial Sequence
  Description of Artificial Sequence: Synthetic oligonucleotide
cgccacuuaugcuucguuc

SEQ ID NO: 2648267 - RNA, 19 nt, Artificial Sequence
  Description of Artificial Sequence: Synthetic oligonucleotide
guuccacaaugggauccuc

SEQ ID NO: 2648268 - RNA, 19 nt, Artificial Sequence
  Description of Artificial Sequence: Synthetic oligonucleotide
ggugcucuucaaaaugggu

SEQ ID NO: 2648269 - RNA, 19 nt, Artificial Sequence
  Description of Artificial Sequence: Synthetic oligonucleotide
cgcuuaaaaugugggucgg

SEQ ID NO: 2648270 - RNA, 19 nt, Artificial Sequence
  Description of Artificial Sequence: Synthetic oligonucleotide
auccugucuuguacauagu

SEQ ID NO: 2648271 - RNA, 19 nt, Artificial Sequence
  Description of Artificial Sequence: Synthetic oligonucleotide
ggaucaucauggcucuuau

SEQ ID NO: 2648272 - RNA, 19 nt, Artificial Sequence
  Description of Artificial Sequence: Synthetic oligonucleotide
cccgaaucuccagacccag

SEQ ID NO: 2648273 - RNA, 19 nt, Artificial Sequence
  Description of Artificial Sequence: Synthetic oligonucleotide
gggucggggaagaggaaga

SEQ ID NO: 2648274 - RNA, 19 nt, Artificial Sequence
  Description of Artificial Sequence: Synthetic oligonucleotide
guugaagugcccagauguu

SEQ ID NO: 2648275 - RNA, 19 nt, Artificial Sequence
  Description of Artificial Sequence: Synthetic oligonucleotide
gccacagccuaugucugca

SEQ ID NO: 2648276 - RNA, 19 nt, Artificial Sequence
  Description of Artificial Sequence: Synthetic oligonucleotide
gggcccgaauccugucuug

SEQ ID NO: 2648277 - RNA, 19 nt, Artificial Sequence
  Description of Artificial Sequence: Synthetic oligonucleotide
cacuuaugcuucguucgcu

SEQ ID NO: 2648278 - RNA, 19 nt, Artificial Sequence
  Description of Artificial Sequence: Synthetic oligonucleotide
gaguggugauagugccacu

SEQ ID NO: 2648279 - RNA, 19 nt, Artificial Sequence
  Description of Artificial Sequence: Synthetic oligonucleotide
cuucgucagcuggcccuug

SEQ ID NO: 2648280 - RNA, 19 nt, Artificial Sequence
  Description of Artificial Sequence: Synthetic oligonucleotide
gcugaugauucgccacuua

SEQ ID NO: 2648281 - RNA, 19 nt, Artificial Sequence
  Description of Artificial Sequence: Synthetic oligonucleotide
cagcacguaggcguauucu

SEQ ID NO: 2648282 - RNA, 19 nt, Artificial Sequence
  Description of Artificial Sequence: Synthetic oligonucleotide
ccacuaacaaaccgccaua

SEQ ID NO: 2648283 - RNA, 19 nt, Artificial Sequence
  Description of Artificial Sequence: Synthetic oligonucleotide
gcgcugaugauucgccacu

SEQ ID NO: 2648284 - RNA, 19 nt, Artificial Sequence
  Description of Artificial Sequence: Synthetic oligonucleotide
cacguagggcccgaauccu

SEQ ID NO: 2648285 - RNA, 19 nt, Artificial Sequence
  Description of Artificial Sequence: Synthetic oligonucleotide
gcccuugcggaagaaguua

SEQ ID NO: 2648286 - RNA, 19 nt, Artificial Sequence
  Description of Artificial Sequence: Synthetic oligonucleotide
ggucggggaagaggaagaa

SEQ ID NO: 2648287 - RNA, 19 nt, Artificial Sequence
  Description of Artificial Sequence: Synthetic oligonucleotide
cgguugaagugcccagaug

SEQ ID NO: 2648288 - RNA, 19 nt, Artificial Sequence
  Description of Artificial Sequence: Synthetic oligonucleotide
cggugaugguguacaccag

SEQ ID NO: 2648289 - RNA, 19 nt, Artificial Sequence
  Description of Artificial Sequence: Synthetic oligonucleotide
gcuuggaggauuggauccu

SEQ ID NO: 2648290 - RNA, 19 nt, Artificial Sequence
  Description of Artificial Sequence: Synthetic oligonucleotide
gggcacacgcucaaacagu

SEQ ID NO: 2648291 - RNA, 19 nt, Artificial Sequence
  Description of Artificial Sequence: Synthetic oligonucleotide
ccauuucguagaacuuucu

SEQ ID NO: 2648292 - RNA, 19 nt, Artificial Sequence
  Description of Artificial Sequence: Synthetic oligonucleotide
cguagaacuuucuuuccuu

SEQ ID NO: 2648293 - RNA, 19 nt, Artificial Sequence
  Description of Artificial Sequence: Synthetic oligonucleotide
gcguuacugcggagacagg

SEQ ID NO: 2648294 - RNA, 19 nt, Artificial Sequence
  Description of Artificial Sequence: Synthetic oligonucleotide
cgucggugaugguguacac

SEQ ID NO: 2648295 - RNA, 19 nt, Artificial Sequence
  Description of Artificial Sequence: Synthetic oligonucleotide
guacauagucugacaccuu

SEQ ID NO: 2648296 - RNA, 19 nt, Artificial Sequence
  Description of Artificial Sequence: Synthetic oligonucleotide
gcccgaauccugucuugua

SEQ ID NO: 2648297 - RNA, 19 nt, Artificial Sequence
  Description of Artificial Sequence: Synthetic oligonucleotide
ccgaaucuccagacccaga

SEQ ID NO: 2648298 - RNA, 19 nt, Artificial Sequence
  Description of Artificial Sequence: Synthetic oligonucleotide
gugggucggggaagaggaa

SEQ ID NO: 2648299 - RNA, 19 nt, Artificial Sequence
  Description of Artificial Sequence: Synthetic oligonucleotide
cugacaccuuuacccgaau

SEQ ID NO: 2648300 - RNA, 19 nt, Artificial Sequence
  Description of Artificial Sequence: Synthetic oligonucleotide
ggauuggauccuggauucu

SEQ ID NO: 2648301 - RNA, 19 nt, Artificial Sequence
  Description of Artificial Sequence: Synthetic oligonucleotide
ggaguguggcgcugaugau

SEQ ID NO: 2648302 - RNA, 19 nt, Artificial Sequence
  Description of Artificial Sequence: Synthetic oligonucleotide
ccuggauucuucggaagau

SEQ ID NO: 2648303 - RNA, 19 nt, Artificial Sequence
  Description of Artificial Sequence: Synthetic oligonucleotide
cugcacguagggcccgaau

SEQ ID NO: 2648304 - RNA, 19 nt, Artificial Sequence
  Description of Artificial Sequence: Synthetic oligonucleotide
cugcggagacaggcaaugu

SEQ ID NO: 2648305 - RNA, 19 nt, Artificial Sequence
  Description of Artificial Sequence: Synthetic oligonucleotide
cgaauccugucuuguacau

SEQ ID NO: 2648306 - RNA, 19 nt, Artificial Sequence
  Description of Artificial Sequence: Synthetic oligonucleotide
cucagcacguaggcguauu

SEQ ID NO: 2648307 - RNA, 19 nt, Artificial Sequence
  Description of Artificial Sequence: Synthetic oligonucleotide
cguagggcccgaauccugu

SEQ ID NO: 2648308 - RNA, 19 nt, Artificial Sequence
  Description of Artificial Sequence: Synthetic oligonucleotide
cgcucaaacagugggugcu

SEQ ID NO: 2648309 - RNA, 19 nt, Artificial Sequence
  Description of Artificial Sequence: Synthetic oligonucleotide
ccacagccuaugucugcaa

SEQ ID NO: 2648310 - RNA, 19 nt, Artificial Sequence
  Description of Artificial Sequence: Synthetic oligonucleotide
ggcccuugcggaagaaguu

SEQ ID NO: 2648311 - RNA, 19 nt, Artificial Sequence
  Description of Artificial Sequence: Synthetic oligonucleotide
gcacgucggugauggugua

SEQ ID NO: 2648312 - RNA, 19 nt, Artificial Sequence
  Description of Artificial Sequence: Synthetic oligonucleotide
ggauccucacucaguucuu

SEQ ID NO: 2648313 - RNA, 19 nt, Artificial Sequence
  Description of Artificial Sequence: Synthetic oligonucleotide
gcuucgucagcuggcccuu

SEQ ID NO: 2648314 - RNA, 19 nt, Artificial Sequence
  Description of Artificial Sequence: Synthetic oligonucleotide
gcugcacguagggcccgaa

SEQ ID NO: 2648315 - RNA, 19 nt, Artificial Sequence
  Description of Artificial Sequence: Synthetic oligonucleotide
ccaggggcacacgcucaaa

SEQ ID NO: 2648316 - RNA, 19 nt, Artificial Sequence
  Description of Artificial Sequence: Synthetic oligonucleotide
cgccauagccacagccuau

SEQ ID NO: 2648317 - RNA, 19 nt, Artificial Sequence
  Description of Artificial Sequence: Synthetic oligonucleotide
ccccaacucucagcacgua

SEQ ID NO: 2648318 - RNA, 19 nt, Artificial Sequence
  Description of Artificial Sequence: Synthetic oligonucleotide
cgcugaugauucgccacuu

SEQ ID NO: 2648319 - RNA, 19 nt, Artificial Sequence
  Description of Artificial Sequence: Synthetic oligonucleotide
uuucaauuaauucacaggc

SEQ ID NO: 2648320 - RNA, 19 nt, Artificial Sequence
  Description of Artificial Sequence: Synthetic oligonucleotide
aauuaauucacaggcaucc

SEQ ID NO: 2648321 - RNA, 19 nt, Artificial Sequence
  Description of Artificial Sequence: Synthetic oligonucleotide
aauaccuuucaauuaauuc

SEQ ID NO: 2648322 - RNA, 19 nt, Artificial Sequence
  Description of Artificial Sequence: Synthetic oligonucleotide
uuugucaccaauaagguug

SEQ ID NO: 2648323 - RNA, 19 nt, Artificial Sequence
  Description of Artificial Sequence: Synthetic oligonucleotide
uuuguuuguauccagauga

SEQ ID NO: 2648324 - RNA, 19 nt, Artificial Sequence
  Description of Artificial Sequence: Synthetic oligonucleotide
aaguuugucaccaauaagg

SEQ ID NO: 2648325 - RNA, 19 nt, Artificial Sequence
  Description of Artificial Sequence: Synthetic oligonucleotide
uaaaaugucgggaaucucg

SEQ ID NO: 2648326 - RNA, 19 nt, Artificial Sequence
  Description of Artificial Sequence: Synthetic oligonucleotide
auuucuauauuuaacaugg

SEQ ID NO: 2648327 - RNA, 19 nt, Artificial Sequence
  Description of Artificial Sequence: Synthetic oligonucleotide
ucuauuucuauauuuaaca

SEQ ID NO: 2648328 - RNA, 19 nt, Artificial Sequence
  Description of Artificial Sequence: Synthetic oligonucleotide
aagucugcagauuauuagc

SEQ ID NO: 2648329 - RNA, 19 nt, Artificial Sequence
  Description of Artificial Sequence: Synthetic oligonucleotide
auaaccuucguacugcugc

SEQ ID NO: 2648330 - RNA, 19 nt, Artificial Sequence
  Description of Artificial Sequence: Synthetic oligonucleotide
aagguugagacgcaaggcc

SEQ ID NO: 2648331 - RNA, 19 nt, Artificial Sequence
  Description of Artificial Sequence: Synthetic oligonucleotide
uuagcaucuaaaaugucgg

SEQ ID NO: 2648332 - RNA, 19 nt, Artificial Sequence
  Description of Artificial Sequence: Synthetic oligonucleotide
agaucaaaaucccauugcc

SEQ ID NO: 2648333 - RNA, 19 nt, Artificial Sequence
  Description of Artificial Sequence: Synthetic oligonucleotide
uuuagagucuccaauuucc

SEQ ID NO: 2648334 - RNA, 19 nt, Artificial Sequence
  Description of Artificial Sequence: Synthetic oligonucleotide
aaagucugcagauuauuag

SEQ ID NO: 2648335 - RNA, 19 nt, Artificial Sequence
  Description of Artificial Sequence: Synthetic oligonucleotide
auaccuuucaauuaauuca

SEQ ID NO: 2648336 - RNA, 19 nt, Artificial Sequence
  Description of Artificial Sequence: Synthetic oligonucleotide
gaagccauaaccuucguac

SEQ ID NO: 2648337 - RNA, 19 nt, Artificial Sequence
  Description of Artificial Sequence: Synthetic oligonucleotide
cuuucaauuaauucacagg

SEQ ID NO: 2648338 - RNA, 19 nt, Artificial Sequence
  Description of Artificial Sequence: Synthetic oligonucleotide
aucauuagcacaaaguuuc

SEQ ID NO: 2648339 - RNA, 19 nt, Artificial Sequence
  Description of Artificial Sequence: Synthetic oligonucleotide
aauuuccccaguuaguucu

SEQ ID NO: 2648340 - RNA, 19 nt, Artificial Sequence
  Description of Artificial Sequence: Synthetic oligonucleotide
acaaucuuuccuuucaguc

SEQ ID NO: 2648341 - RNA, 19 nt, Artificial Sequence
  Description of Artificial Sequence: Synthetic oligonucleotide
uauuucuauauuuaacaug

SEQ ID NO: 2648342 - RNA, 19 nt, Artificial Sequence
  Description of Artificial Sequence: Synthetic oligonucleotide
aguucuaauccccuaaauc

SEQ ID NO: 2648343 - RNA, 19 nt, Artificial Sequence
  Description of Artificial Sequence: Synthetic oligonucleotide
aaugucgggaaucucgaag

SEQ ID NO: 2648344 - RNA, 19 nt, Artificial Sequence
  Description of Artificial Sequence: Synthetic oligonucleotide
auuagcaucuaaaaugucg

SEQ ID NO: 2648345 - RNA, 19 nt, Artificial Sequence
  Description of Artificial Sequence: Synthetic oligonucleotide
auccagaugacugugaaac

SEQ ID NO: 2648346 - RNA, 19 nt, Artificial Sequence
  Description of Artificial Sequence: Synthetic oligonucleotide
auaagguugagacgcaagg

SEQ ID NO: 2648347 - RNA, 19 nt, Artificial Sequence
  Description of Artificial Sequence: Synthetic oligonucleotide
aauccccuaaaucuauuuc

SEQ ID NO: 2648348 - RNA, 19 nt, Artificial Sequence
  Description of Artificial Sequence: Synthetic oligonucleotide
ucaauuaauucacaggcau

SEQ ID NO: 2648349 - RNA, 19 nt, Artificial Sequence
  Description of Artificial Sequence: Synthetic oligonucleotide
uuuaacauggcuuucgguu

SEQ ID NO: 2648350 - RNA, 19 nt, Artificial Sequence
  Description of Artificial Sequence: Synthetic oligonucleotide
uauuuaacauggcuuucgg

SEQ ID NO: 2648351 - RNA, 19 nt, Artificial Sequence
  Description of Artificial Sequence: Synthetic oligonucleotide
gaaucucgaagccauaacc

SEQ ID NO: 2648352 - RNA, 19 nt, Artificial Sequence
  Description of Artificial Sequence: Synthetic oligonucleotide
ugaaucgacucaaauaccu

SEQ ID NO: 2648353 - RNA, 19 nt, Artificial Sequence
  Description of Artificial Sequence: Synthetic oligonucleotide
agucacuugcuucacuugc

SEQ ID NO: 2648354 - RNA, 19 nt, Artificial Sequence
  Description of Artificial Sequence: Synthetic oligonucleotide
caauuucccaucuuuagag

SEQ ID NO: 2648355 - RNA, 19 nt, Artificial Sequence
  Description of Artificial Sequence: Synthetic oligonucleotide
uuaggaauugcaucauuag

SEQ ID NO: 2648356 - RNA, 19 nt, Artificial Sequence
  Description of Artificial Sequence: Synthetic oligonucleotide
augucgggaaucucgaagc

SEQ ID NO: 2648357 - RNA, 19 nt, Artificial Sequence
  Description of Artificial Sequence: Synthetic oligonucleotide
uuuccugcuguacggaugg

SEQ ID NO: 2648358 - RNA, 19 nt, Artificial Sequence
  Description of Artificial Sequence: Synthetic oligonucleotide
ucagaucaaaaucccauug

SEQ ID NO: 2648359 - RNA, 19 nt, Artificial Sequence
  Description of Artificial Sequence: Synthetic oligonucleotide
auuucccaucuuuagaguc

SEQ ID NO: 2648360 - RNA, 19 nt, Artificial Sequence
  Description of Artificial Sequence: Synthetic oligonucleotide
aaucuauuucuauauuuaa

SEQ ID NO: 2648361 - RNA, 19 nt, Artificial Sequence
  Description of Artificial Sequence: Synthetic oligonucleotide
guauaucucguuuuguuug

SEQ ID NO: 2648362 - RNA, 19 nt, Artificial Sequence
  Description of Artificial Sequence: Synthetic oligonucleotide
ugcaucauuagcacaaagu

SEQ ID NO: 2648363 - RNA, 19 nt, Artificial Sequence
  Description of Artificial Sequence: Synthetic oligonucleotide
ugaaguuugucaccaauaa

SEQ ID NO: 2648364 - RNA, 19 nt, Artificial Sequence
  Description of Artificial Sequence: Synthetic oligonucleotide
uccaucgucugcuugauga

SEQ ID NO: 2648365 - RNA, 19 nt, Artificial Sequence
  Description of Artificial Sequence: Synthetic oligonucleotide
ucucguuuuguuuguaucc

SEQ ID NO: 2648366 - RNA, 19 nt, Artificial Sequence
  Description of Artificial Sequence: Synthetic oligonucleotide
uaccuuucaauuaauucac

SEQ ID NO: 2648367 - RNA, 19 nt, Artificial Sequence
  Description of Artificial Sequence: Synthetic oligonucleotide
aaucccauugccgaaaagu

SEQ ID NO: 2648368 - RNA, 19 nt, Artificial Sequence
  Description of Artificial Sequence: Synthetic oligonucleotide
uuuuguuuguauccagaug

SEQ ID NO: 2648369 - RNA, 19 nt, Artificial Sequence
  Description of Artificial Sequence: Synthetic oligonucleotide
auauuuaacauggcuuucg

SEQ ID NO: 2648370 - RNA, 19 nt, Artificial Sequence
  Description of Artificial Sequence: Synthetic oligonucleotide
augacuuucuuuucccgac

SEQ ID NO: 2648371 - RNA, 19 nt, Artificial Sequence
  Description of Artificial Sequence: Synthetic oligonucleotide
gaucaaaaucccauugccg

SEQ ID NO: 2648372 - RNA, 19 nt, Artificial Sequence
  Description of Artificial Sequence: Synthetic oligonucleotide
uccaauuucccaucuuuag

SEQ ID NO: 2648373 - RNA, 19 nt, Artificial Sequence
  Description of Artificial Sequence: Synthetic oligonucleotide
caaucuuuccuuucagucc

SEQ ID NO: 2648374 - RNA, 19 nt, Artificial Sequence
  Description of Artificial Sequence: Synthetic oligonucleotide
gcugaaucgacucaaauac

SEQ ID NO: 2648375 - RNA, 19 nt, Artificial Sequence
  Description of Artificial Sequence: Synthetic oligonucleotide
guuuguauccagaugacug

SEQ ID NO: 2648376 - RNA, 19 nt, Artificial Sequence
  Description of Artificial Sequence: Synthetic oligonucleotide
ugugaaaccacugaaguuu

SEQ ID NO: 2648377 - RNA, 19 nt, Artificial Sequence
  Description of Artificial Sequence: Synthetic oligonucleotide
uucaauuaauucacaggca

SEQ ID NO: 2648378 - RNA, 19 nt, Artificial Sequence
  Description of Artificial Sequence: Synthetic oligonucleotide
agauuauuagcaucuaaaa

SEQ ID NO: 2648379 - RNA, 19 nt, Artificial Sequence
  Description of Artificial Sequence: Synthetic oligonucleotide
aauugcaucauuagcacaa

SEQ ID NO: 2648380 - RNA, 19 nt, Artificial Sequence
  Description of Artificial Sequence: Synthetic oligonucleotide
uucuugucuuguuuguggg

SEQ ID NO: 2648381 - RNA, 19 nt, Artificial Sequence
  Description of Artificial Sequence: Synthetic oligonucleotide
aucuauuucuauauuuaac

SEQ ID NO: 2648382 - RNA, 19 nt, Artificial Sequence
  Description of Artificial Sequence: Synthetic oligonucleotide
uugaugacagccucccggg

SEQ ID NO: 2648383 - RNA, 19 nt, Artificial Sequence
  Description of Artificial Sequence: Synthetic oligonucleotide
uaauucacaggcauccuuc

SEQ ID NO: 2648384 - RNA, 19 nt, Artificial Sequence
  Description of Artificial Sequence: Synthetic oligonucleotide
aaucgacucaaauaccuuu

SEQ ID NO: 2648385 - RNA, 19 nt, Artificial Sequence
  Description of Artificial Sequence: Synthetic oligonucleotide
uuuguauccagaugacugu

SEQ ID NO: 2648386 - RNA, 19 nt, Artificial Sequence
  Description of Artificial Sequence: Synthetic oligonucleotide
uucgguuugcgcuucuuag

SEQ ID NO: 2648387 - RNA, 19 nt, Artificial Sequence
  Description of Artificial Sequence: Synthetic oligonucleotide
ucucuuguaaucugagcug

SEQ ID NO: 2648388 - RNA, 19 nt, Artificial Sequence
  Description of Artificial Sequence: Synthetic oligonucleotide
cuuuucccgaccuacaauc

SEQ ID NO: 2648389 - RNA, 19 nt, Artificial Sequence
  Description of Artificial Sequence: Synthetic oligonucleotide
aggaauugcaucauuagca

SEQ ID NO: 2648390 - RNA, 19 nt, Artificial Sequence
  Description of Artificial Sequence: Synthetic oligonucleotide
aucucguuuuguuuguauc

SEQ ID NO: 2648391 - RNA, 19 nt, Artificial Sequence
  Description of Artificial Sequence: Synthetic oligonucleotide
uuagagucuccaauuuccc

SEQ ID NO: 2648392 - RNA, 19 nt, Artificial Sequence
  Description of Artificial Sequence: Synthetic oligonucleotide
aaaucuauuucuauauuua

SEQ ID NO: 2648393 - RNA, 19 nt, Artificial Sequence
  Description of Artificial Sequence: Synthetic oligonucleotide
aaucugagcugcuuuccug

SEQ ID NO: 2648394 - RNA, 19 nt, Artificial Sequence
  Description of Artificial Sequence: Synthetic oligonucleotide
uugccgaaaagucugcaga

SEQ ID NO: 2648395 - RNA, 19 nt, Artificial Sequence
  Description of Artificial Sequence: Synthetic oligonucleotide
cuucuuaggaauugcauca

SEQ ID NO: 2648396 - RNA, 19 nt, Artificial Sequence
  Description of Artificial Sequence: Synthetic oligonucleotide
agagucuccaauuucccca

SEQ ID NO: 2648397 - RNA, 19 nt, Artificial Sequence
  Description of Artificial Sequence: Synthetic oligonucleotide
ucuaaaaugucgggaaucu

SEQ ID NO: 2648398 - RNA, 19 nt, Artificial Sequence
  Description of Artificial Sequence: Synthetic oligonucleotide
acucucuuguaaucugagc

SEQ ID NO: 2648399 - RNA, 19 nt, Artificial Sequence
  Description of Artificial Sequence: Synthetic oligonucleotide
aauaagguugagacgcaag

SEQ ID NO: 2648400 - RNA, 19 nt, Artificial Sequence
  Description of Artificial Sequence: Synthetic oligonucleotide
aaucucgaagccauaaccu

SEQ ID NO: 2648401 - RNA, 19 nt, Artificial Sequence
  Description of Artificial Sequence: Synthetic oligonucleotide
uuugauguucggcaauuuc

SEQ ID NO: 2648402 - RNA, 19 nt, Artificial Sequence
  Description of Artificial Sequence: Synthetic oligonucleotide
cucgaagccauaaccuucg

SEQ ID NO: 2648403 - RNA, 19 nt, Artificial Sequence
  Description of Artificial Sequence: Synthetic oligonucleotide
aucuaaaaugucgggaauc

SEQ ID NO: 2648404 - RNA, 19 nt, Artificial Sequence
  Description of Artificial Sequence: Synthetic oligonucleotide
auccccuaaaucuauuucu

SEQ ID NO: 2648405 - RNA, 19 nt, Artificial Sequence
  Description of Artificial Sequence: Synthetic oligonucleotide
ucugcagauuauuagcauc

SEQ ID NO: 2648406 - RNA, 19 nt, Artificial Sequence
  Description of Artificial Sequence: Synthetic oligonucleotide
uggagucauuucuucaucc

SEQ ID NO: 2648407 - RNA, 19 nt, Artificial Sequence
  Description of Artificial Sequence: Synthetic oligonucleotide
cagaucaaaaucccauugc

SEQ ID NO: 2648408 - RNA, 19 nt, Artificial Sequence
  Description of Artificial Sequence: Synthetic oligonucleotide
aauucacaggcauccuucu

SEQ ID NO: 2648409 - RNA, 19 nt, Artificial Sequence
  Description of Artificial Sequence: Synthetic oligonucleotide
cuucauccgagucacuugc

SEQ ID NO: 2648410 - RNA, 19 nt, Artificial Sequence
  Description of Artificial Sequence: Synthetic oligonucleotide
acuugcugauuccaauuuc

SEQ ID NO: 2648411 - RNA, 19 nt, Artificial Sequence
  Description of Artificial Sequence: Synthetic oligonucleotide
cuuuguauaucucguuuug

SEQ ID NO: 2648412 - RNA, 19 nt, Artificial Sequence
  Description of Artificial Sequence: Synthetic oligonucleotide
uuucccaucuuuagagucu

SEQ ID NO: 2648413 - RNA, 19 nt, Artificial Sequence
  Description of Artificial Sequence: Synthetic oligonucleotide
uuaugcagcucaaucugcu

SEQ ID NO: 2648414 - RNA, 19 nt, Artificial Sequence
  Description of Artificial Sequence: Synthetic oligonucleotide
uguaaucugagcugcuuuc

SEQ ID NO: 2648415 - RNA, 19 nt, Artificial Sequence
  Description of Artificial Sequence: Synthetic oligonucleotide
uguauaucucguuuuguuu

SEQ ID NO: 2648416 - RNA, 19 nt, Artificial Sequence
  Description of Artificial Sequence: Synthetic oligonucleotide
ucuaauccccuaaaucuau

SEQ ID NO: 2648417 - RNA, 19 nt, Artificial Sequence
  Description of Artificial Sequence: Synthetic oligonucleotide
augacugugaaaccacuga

SEQ ID NO: 2648418 - RNA, 19 nt, Artificial Sequence
  Description of Artificial Sequence: Synthetic oligonucleotide
uucuuuguauaucucguuu

SEQ ID NO: 2648419 - RNA, 19 nt, Artificial Sequence
  Description of Artificial Sequence: Synthetic oligonucleotide
uggaugacuuucuuuuccc

SEQ ID NO: 2648420 - RNA, 19 nt, Artificial Sequence
  Description of Artificial Sequence: Synthetic oligonucleotide
gauuauuagcaucuaaaau

SEQ ID NO: 2648421 - RNA, 19 nt, Artificial Sequence
  Description of Artificial Sequence: Synthetic oligonucleotide
auugccgaaaagucugcag

SEQ ID NO: 2648422 - RNA, 19 nt, Artificial Sequence
  Description of Artificial Sequence: Synthetic oligonucleotide
cuccaauuuccccaguuag

SEQ ID NO: 2648423 - RNA, 19 nt, Artificial Sequence
  Description of Artificial Sequence: Synthetic oligonucleotide
ucgguuugcgcuucuuagg

SEQ ID NO: 2648424 - RNA, 19 nt, Artificial Sequence
  Description of Artificial Sequence: Synthetic oligonucleotide
ucugcuugaugacagccuc

SEQ ID NO: 2648425 - RNA, 19 nt, Artificial Sequence
  Description of Artificial Sequence: Synthetic oligonucleotide
ugcugaaucgacucaaaua

SEQ ID NO: 2648426 - RNA, 19 nt, Artificial Sequence
  Description of Artificial Sequence: Synthetic oligonucleotide
uagcaucuaaaaugucggg

SEQ ID NO: 2648427 - RNA, 19 nt, Artificial Sequence
  Description of Artificial Sequence: Synthetic oligonucleotide
uauaucucguuuuguuugu

SEQ ID NO: 2648428 - RNA, 19 nt, Artificial Sequence
  Description of Artificial Sequence: Synthetic oligonucleotide
uuaguucuaauccccuaaa

SEQ ID NO: 2648429 - RNA, 19 nt, Artificial Sequence
  Description of Artificial Sequence: Synthetic oligonucleotide
aaaaugucgggaaucucga

SEQ ID NO: 2648430 - RNA, 19 nt, Artificial Sequence
  Description of Artificial Sequence: Synthetic oligonucleotide
uuaauucacaggcauccuu

SEQ ID NO: 2648431 - RNA, 19 nt, Artificial Sequence
  Description of Artificial Sequence: Synthetic oligonucleotide
gaugacuuucuuuucccga

SEQ ID NO: 2648432 - RNA, 19 nt, Artificial Sequence
  Description of Artificial Sequence: Synthetic oligonucleotide
auguucggcaauuucuuca

SEQ ID NO: 2648433 - RNA, 19 nt, Artificial Sequence
  Description of Artificial Sequence: Synthetic oligonucleotide
ucuuuagagucuccaauuu

SEQ ID NO: 2648434 - RNA, 19 nt, Artificial Sequence
  Description of Artificial Sequence: Synthetic oligonucleotide
uuaacauggcuuucgguuu

SEQ ID NO: 2648435 - RNA, 19 nt, Artificial Sequence
  Description of Artificial Sequence: Synthetic oligonucleotide
ucauuagcacaaaguuucc

SEQ ID NO: 2648436 - RNA, 19 nt, Artificial Sequence
  Description of Artificial Sequence: Synthetic oligonucleotide
uuguauaucucguuuuguu

SEQ ID NO: 2648437 - RNA, 19 nt, Artificial Sequence
  Description of Artificial Sequence: Synthetic oligonucleotide
uugcugauuccaauuuccc

SEQ ID NO: 2648438 - RNA, 19 nt, Artificial Sequence
  Description of Artificial Sequence: Synthetic oligonucleotide
ucuuuguauaucucguuuu

SEQ ID NO: 2648439 - RNA, 19 nt, Artificial Sequence
  Description of Artificial Sequence: Synthetic oligonucleotide
cagauuauuagcaucuaaa

SEQ ID NO: 2648440 - RNA, 19 nt, Artificial Sequence
  Description of Artificial Sequence: Synthetic oligonucleotide
uaagguugagacgcaaggc

SEQ ID NO: 2648441 - RNA, 19 nt, Artificial Sequence
  Description of Artificial Sequence: Synthetic oligonucleotide
aagccauaaccuucguacu

SEQ ID NO: 2648442 - RNA, 19 nt, Artificial Sequence
  Description of Artificial Sequence: Synthetic oligonucleotide
agguugagacgcaaggccc

SEQ ID NO: 2648443 - RNA, 19 nt, Artificial Sequence
  Description of Artificial Sequence: Synthetic oligonucleotide
ucucgaagccauaaccuuc

SEQ ID NO: 2648444 - RNA, 19 nt, Artificial Sequence
  Description of Artificial Sequence: Synthetic oligonucleotide
ucuucauccgagucacuug

SEQ ID NO: 2648445 - RNA, 19 nt, Artificial Sequence
  Description of Artificial Sequence: Synthetic oligonucleotide
uccaauuuccccaguuagu

SEQ ID NO: 2648446 - RNA, 19 nt, Artificial Sequence
  Description of Artificial Sequence: Synthetic oligonucleotide
uaacauggcuuucgguuug

SEQ ID NO: 2648447 - RNA, 19 nt, Artificial Sequence
  Description of Artificial Sequence: Synthetic oligonucleotide
uacaaucuuuccuuucagu

SEQ ID NO: 2648448 - RNA, 19 nt, Artificial Sequence
  Description of Artificial Sequence: Synthetic oligonucleotide
uguauccagaugacuguga

SEQ ID NO: 2648449 - RNA, 19 nt, Artificial Sequence
  Description of Artificial Sequence: Synthetic oligonucleotide
ucauuuugauguucggcaa

SEQ ID NO: 2648450 - RNA, 19 nt, Artificial Sequence
  Description of Artificial Sequence: Synthetic oligonucleotide
uagagucuccaauuucccc

SEQ ID NO: 2648451 - RNA, 19 nt, Artificial Sequence
  Description of Artificial Sequence: Synthetic oligonucleotide
accuucguacugcugccgc

SEQ ID NO: 2648452 - RNA, 19 nt, Artificial Sequence
  Description of Artificial Sequence: Synthetic oligonucleotide
agucauuucuucauccgag

SEQ ID NO: 2648453 - RNA, 19 nt, Artificial Sequence
  Description of Artificial Sequence: Synthetic oligonucleotide
uucggcaauuucuucagau

SEQ ID NO: 2648454 - RNA, 19 nt, Artificial Sequence
  Description of Artificial Sequence: Synthetic oligonucleotide
ugauguucggcaauuucuu

SEQ ID NO: 2648455 - RNA, 19 nt, Artificial Sequence
  Description of Artificial Sequence: Synthetic oligonucleotide
cuugucuuguuugugggac

SEQ ID NO: 2648456 - RNA, 19 nt, Artificial Sequence
  Description of Artificial Sequence: Synthetic oligonucleotide
aucuuuagagucuccaauu

SEQ ID NO: 2648457 - RNA, 19 nt, Artificial Sequence
  Description of Artificial Sequence: Synthetic oligonucleotide
aaaucccauugccgaaaag

SEQ ID NO: 2648458 - RNA, 19 nt, Artificial Sequence
  Description of Artificial Sequence: Synthetic oligonucleotide
cugaaucgacucaaauacc

SEQ ID NO: 2648459 - RNA, 19 nt, Artificial Sequence
  Description of Artificial Sequence: Synthetic oligonucleotide
ucgacucaaauaccuuuca

SEQ ID NO: 2648460 - RNA, 19 nt, Artificial Sequence
  Description of Artificial Sequence: Synthetic oligonucleotide
uaaucugagcugcuuuccu

SEQ ID NO: 2648461 - RNA, 19 nt, Artificial Sequence
  Description of Artificial Sequence: Synthetic oligonucleotide
aaaaucccauugccgaaaa

SEQ ID NO: 2648462 - RNA, 19 nt, Artificial Sequence
  Description of Artificial Sequence: Synthetic oligonucleotide
ugacuuucuuuucccgacc

SEQ ID NO: 2648463 - RNA, 19 nt, Artificial Sequence
  Description of Artificial Sequence: Synthetic oligonucleotide
cucuuguaaucugagcugc

SEQ ID NO: 2648464 - RNA, 19 nt, Artificial Sequence
  Description of Artificial Sequence: Synthetic oligonucleotide
ucccauugccgaaaagucu

SEQ ID NO: 2648465 - RNA, 19 nt, Artificial Sequence
  Description of Artificial Sequence: Synthetic oligonucleotide
ucguuuuguuuguauccag

SEQ ID NO: 2648466 - RNA, 19 nt, Artificial Sequence
  Description of Artificial Sequence: Synthetic oligonucleotide
ucgggaaucucgaagccau

SEQ ID NO: 2648467 - RNA, 19 nt, Artificial Sequence
  Description of Artificial Sequence: Synthetic oligonucleotide
aaaagucugcagauuauua

SEQ ID NO: 2648468 - RNA, 19 nt, Artificial Sequence
  Description of Artificial Sequence: Synthetic oligonucleotide
uugucaccaauaagguuga

SEQ ID NO: 2648469 - RNA, 19 nt, Artificial Sequence
  Description of Artificial Sequence: Synthetic oligonucleotide
uuguuuguauccagaugac

SEQ ID NO: 2648470 - RNA, 19 nt, Artificial Sequence
  Description of Artificial Sequence: Synthetic oligonucleotide
ucaaaaucccauugccgaa

SEQ ID NO: 2648471 - RNA, 19 nt, Artificial Sequence
  Description of Artificial Sequence: Synthetic oligonucleotide
aucccauugccgaaaaguc

SEQ ID NO: 2648472 - RNA, 19 nt, Artificial Sequence
  Description of Artificial Sequence: Synthetic oligonucleotide
uccucauuuugauguucgg

SEQ ID NO: 2648473 - RNA, 19 nt, Artificial Sequence
  Description of Artificial Sequence: Synthetic oligonucleotide
ugauuccaauuucccaucu

SEQ ID NO: 2648474 - RNA, 19 nt, Artificial Sequence
  Description of Artificial Sequence: Synthetic oligonucleotide
cuuaggaauugcaucauua

SEQ ID NO: 2648475 - RNA, 19 nt, Artificial Sequence
  Description of Artificial Sequence: Synthetic oligonucleotide
uuuaggcauggcgaugucc

SEQ ID NO: 2648476 - RNA, 19 nt, Artificial Sequence
  Description of Artificial Sequence: Synthetic oligonucleotide
uuuucccgaccuacaaucu

SEQ ID NO: 2648477 - RNA, 19 nt, Artificial Sequence
  Description of Artificial Sequence: Synthetic oligonucleotide
gaugacugugaaaccacug

SEQ ID NO: 2648478 - RNA, 19 nt, Artificial Sequence
  Description of Artificial Sequence: Synthetic oligonucleotide
uccagcucacugcugaauc

SEQ ID NO: 2648479 - RNA, 19 nt, Artificial Sequence
  Description of Artificial Sequence: Synthetic oligonucleotide
aguccuuuaggcauggcga

SEQ ID NO: 2648480 - RNA, 19 nt, Artificial Sequence
  Description of Artificial Sequence: Synthetic oligonucleotide
gaauugcaucauuagcaca

SEQ ID NO: 2648481 - RNA, 19 nt, Artificial Sequence
  Description of Artificial Sequence: Synthetic oligonucleotide
agccauaaccuucguacug

SEQ ID NO: 2648482 - RNA, 19 nt, Artificial Sequence
  Description of Artificial Sequence: Synthetic oligonucleotide
agcaucuaaaaugucggga

SEQ ID NO: 2648483 - RNA, 19 nt, Artificial Sequence
  Description of Artificial Sequence: Synthetic oligonucleotide
ggaauugcaucauuagcac

SEQ ID NO: 2648484 - RNA, 19 nt, Artificial Sequence
  Description of Artificial Sequence: Synthetic oligonucleotide
ggagucauuucuucauccg

SEQ ID NO: 2648485 - RNA, 19 nt, Artificial Sequence
  Description of Artificial Sequence: Synthetic oligonucleotide
aucgacucaaauaccuuuc

SEQ ID NO: 2648486 - RNA, 19 nt, Artificial Sequence
  Description of Artificial Sequence: Synthetic oligonucleotide
acugaaguuugucaccaau

SEQ ID NO: 2648487 - RNA, 19 nt, Artificial Sequence
  Description of Artificial Sequence: Synthetic oligonucleotide
uuguaaucugagcugcuuu

SEQ ID NO: 2648488 - RNA, 19 nt, Artificial Sequence
  Description of Artificial Sequence: Synthetic oligonucleotide
gcugcuuuccugcuguacg

SEQ ID NO: 2648489 - RNA, 19 nt, Artificial Sequence
  Description of Artificial Sequence: Synthetic oligonucleotide
uauauuuaacauggcuuuc

SEQ ID NO: 2648490 - RNA, 19 nt, Artificial Sequence
  Description of Artificial Sequence: Synthetic oligonucleotide
cuacaaucuuuccuuucag

SEQ ID NO: 2648491 - RNA, 19 nt, Artificial Sequence
  Description of Artificial Sequence: Synthetic oligonucleotide
aguuugucaccaauaaggu

SEQ ID NO: 2648492 - RNA, 19 nt, Artificial Sequence
  Description of Artificial Sequence: Synthetic oligonucleotide
uucagaucaaaaucccauu

SEQ ID NO: 2648493 - RNA, 19 nt, Artificial Sequence
  Description of Artificial Sequence: Synthetic oligonucleotide
ugugggacucucuuguaau

SEQ ID NO: 2648494 - RNA, 19 nt, Artificial Sequence
  Description of Artificial Sequence: Synthetic oligonucleotide
ugucgggaaucucgaagcc

SEQ ID NO: 2648495 - RNA, 19 nt, Artificial Sequence
  Description of Artificial Sequence: Synthetic oligonucleotide
uccccaguuaguucuaauc

SEQ ID NO: 2648496 - RNA, 19 nt, Artificial Sequence
  Description of Artificial Sequence: Synthetic oligonucleotide
uaaccuucguacugcugcc

SEQ ID NO: 2648497 - RNA, 19 nt, Artificial Sequence
  Description of Artificial Sequence: Synthetic oligonucleotide
gagucauuucuucauccga

SEQ ID NO: 2648498 - RNA, 19 nt, Artificial Sequence
  Description of Artificial Sequence: Synthetic oligonucleotide
uuccaauuucccaucuuua

SEQ ID NO: 2648499 - RNA, 19 nt, Artificial Sequence
  Description of Artificial Sequence: Synthetic oligonucleotide
acgcaaggcccucucaguc

SEQ ID NO: 2648500 - RNA, 19 nt, Artificial Sequence
  Description of Artificial Sequence: Synthetic oligonucleotide
cagaugacugugaaaccac

SEQ ID NO: 2648501 - RNA, 19 nt, Artificial Sequence
  Description of Artificial Sequence: Synthetic oligonucleotide
uauuagcaucuaaaauguc

SEQ ID NO: 2648502 - RNA, 19 nt, Artificial Sequence
  Description of Artificial Sequence: Synthetic oligonucleotide
cugcuuuccugcuguacgg

SEQ ID NO: 2648503 - RNA, 19 nt, Artificial Sequence
  Description of Artificial Sequence: Synthetic oligonucleotide
uguuuguauccagaugacu

SEQ ID NO: 2648504 - RNA, 19 nt, Artificial Sequence
  Description of Artificial Sequence: Synthetic oligonucleotide
uaguucuaauccccuaaau

SEQ ID NO: 2648505 - RNA, 19 nt, Artificial Sequence
  Description of Artificial Sequence: Synthetic oligonucleotide
cucucuuguaaucugagcu

SEQ ID NO: 2648506 - RNA, 19 nt, Artificial Sequence
  Description of Artificial Sequence: Synthetic oligonucleotide
ucuccaauuuccccaguua

SEQ ID NO: 2648507 - RNA, 19 nt, Artificial Sequence
  Description of Artificial Sequence: Synthetic oligonucleotide
ucucagucuucaaucuuuc

SEQ ID NO: 2648508 - RNA, 19 nt, Artificial Sequence
  Description of Artificial Sequence: Synthetic oligonucleotide
ucuugucuuguuuguggga

SEQ ID NO: 2648509 - RNA, 19 nt, Artificial Sequence
  Description of Artificial Sequence: Synthetic oligonucleotide
ugcagcucaaucugcucca

SEQ ID NO: 2648510 - RNA, 19 nt, Artificial Sequence
  Description of Artificial Sequence: Synthetic oligonucleotide
uccccuaaaucuauuucua

SEQ ID NO: 2648511 - RNA, 19 nt, Artificial Sequence
  Description of Artificial Sequence: Synthetic oligonucleotide
uuguuugugggacucucuu

SEQ ID NO: 2648512 - RNA, 19 nt, Artificial Sequence
  Description of Artificial Sequence: Synthetic oligonucleotide
uacggauggaugacuuucu

SEQ ID NO: 2648513 - RNA, 19 nt, Artificial Sequence
  Description of Artificial Sequence: Synthetic oligonucleotide
uuguauccagaugacugug

SEQ ID NO: 2648514 - RNA, 19 nt, Artificial Sequence
  Description of Artificial Sequence: Synthetic oligonucleotide
uugugggacucucuuguaa

SEQ ID NO: 2648515 - RNA, 19 nt, Artificial Sequence
  Description of Artificial Sequence: Synthetic oligonucleotide
uaauccccuaaaucuauuu

SEQ ID NO: 2648516 - RNA, 19 nt, Artificial Sequence
  Description of Artificial Sequence: Synthetic oligonucleotide
cuuuccugcuguacggaug

SEQ ID NO: 2648517 - RNA, 19 nt, Artificial Sequence
  Description of Artificial Sequence: Synthetic oligonucleotide
ucggcaauuucuucagauc

SEQ ID NO: 2648518 - RNA, 19 nt, Artificial Sequence
  Description of Artificial Sequence: Synthetic oligonucleotide
gauguucggcaauuucuuc

SEQ ID NO: 2648519 - RNA, 19 nt, Artificial Sequence
  Description of Artificial Sequence: Synthetic oligonucleotide
ccaguuaguucuaaucccc

SEQ ID NO: 2648520 - RNA, 19 nt, Artificial Sequence
  Description of Artificial Sequence: Synthetic oligonucleotide
gacucucuuguaaucugag

SEQ ID NO: 2648521 - RNA, 19 nt, Artificial Sequence
  Description of Artificial Sequence: Synthetic oligonucleotide
uaucucguuuuguuuguau

SEQ ID NO: 2648522 - RNA, 19 nt, Artificial Sequence
  Description of Artificial Sequence: Synthetic oligonucleotide
guaaucugagcugcuuucc

SEQ ID NO: 2648523 - RNA, 19 nt, Artificial Sequence
  Description of Artificial Sequence: Synthetic oligonucleotide
agucugcagauuauuagca

SEQ ID NO: 2648524 - RNA, 19 nt, Artificial Sequence
  Description of Artificial Sequence: Synthetic oligonucleotide
ggaugacuuucuuuucccg

SEQ ID NO: 2648525 - RNA, 19 nt, Artificial Sequence
  Description of Artificial Sequence: Synthetic oligonucleotide
gcuguuaugcagcucaauc

SEQ ID NO: 2648526 - RNA, 19 nt, Artificial Sequence
  Description of Artificial Sequence: Synthetic oligonucleotide
gagucacuugcuucacuug

SEQ ID NO: 2648527 - RNA, 19 nt, Artificial Sequence
  Description of Artificial Sequence: Synthetic oligonucleotide
aucgucugcuugaugacag

SEQ ID NO: 2648528 - RNA, 19 nt, Artificial Sequence
  Description of Artificial Sequence: Synthetic oligonucleotide
uuucgguuugcgcuucuua

SEQ ID NO: 2648529 - RNA, 19 nt, Artificial Sequence
  Description of Artificial Sequence: Synthetic oligonucleotide
cuuucaguccuuuaggcau

SEQ ID NO: 2648530 - RNA, 19 nt, Artificial Sequence
  Description of Artificial Sequence: Synthetic oligonucleotide
ucuuaggaauugcaucauu

SEQ ID NO: 2648531 - RNA, 19 nt, Artificial Sequence
  Description of Artificial Sequence: Synthetic oligonucleotide
cugauuccaauuucccauc

SEQ ID NO: 2648532 - RNA, 19 nt, Artificial Sequence
  Description of Artificial Sequence: Synthetic oligonucleotide
ucccugucuguccuugaug

SEQ ID NO: 2648533 - RNA, 19 nt, Artificial Sequence
  Description of Artificial Sequence: Synthetic oligonucleotide
ugccgaaaagucugcagau

SEQ ID NO: 2648534 - RNA, 19 nt, Artificial Sequence
  Description of Artificial Sequence: Synthetic oligonucleotide
ugggacucucuuguaaucu

SEQ ID NO: 2648535 - RNA, 19 nt, Artificial Sequence
  Description of Artificial Sequence: Synthetic oligonucleotide
uucccgaccuacaaucuuu

SEQ ID NO: 2648536 - RNA, 19 nt, Artificial Sequence
  Description of Artificial Sequence: Synthetic oligonucleotide
aaccuucguacugcugccg

SEQ ID NO: 2648537 - RNA, 19 nt, Artificial Sequence
  Description of Artificial Sequence: Synthetic oligonucleotide
ccccaguuaguucuaaucc

SEQ ID NO: 2648538 - RNA, 19 nt, Artificial Sequence
  Description of Artificial Sequence: Synthetic oligonucleotide
acaggcauccuucuuugua

SEQ ID NO: 2648539 - RNA, 19 nt, Artificial Sequence
  Description of Artificial Sequence: Synthetic oligonucleotide
uuugcgcuucuuaggaauu

SEQ ID NO: 2648540 - RNA, 19 nt, Artificial Sequence
  Description of Artificial Sequence: Synthetic oligonucleotide
uauccagaugacugugaaa

SEQ ID NO: 2648541 - RNA, 19 nt, Artificial Sequence
  Description of Artificial Sequence: Synthetic oligonucleotide
caauuuccccaguuaguuc

SEQ ID NO: 2648542 - RNA, 19 nt, Artificial Sequence
  Description of Artificial Sequence: Synthetic oligonucleotide
cccaguuaguucuaauccc

SEQ ID NO: 2648543 - RNA, 19 nt, Artificial Sequence
  Description of Artificial Sequence: Synthetic oligonucleotide
uaggcauggcgaugucccg

SEQ ID NO: 2648544 - RNA, 19 nt, Artificial Sequence
  Description of Artificial Sequence: Synthetic oligonucleotide
cuauuucuauauuuaacau

SEQ ID NO: 2648545 - RNA, 19 nt, Artificial Sequence
  Description of Artificial Sequence: Synthetic oligonucleotide
guacggauggaugacuuuc

SEQ ID NO: 2648546 - RNA, 19 nt, Artificial Sequence
  Description of Artificial Sequence: Synthetic oligonucleotide
aguuaguucuaauccccua

SEQ ID NO: 2648547 - RNA, 19 nt, Artificial Sequence
  Description of Artificial Sequence: Synthetic oligonucleotide
ugcgcuucuuaggaauugc

SEQ ID NO: 2648548 - RNA, 19 nt, Artificial Sequence
  Description of Artificial Sequence: Synthetic oligonucleotide
cccugucuguccuugaugc

SEQ ID NO: 2648549 - RNA, 19 nt, Artificial Sequence
  Description of Artificial Sequence: Synthetic oligonucleotide
auuaauucacaggcauccu

SEQ ID NO: 2648550 - RNA, 19 nt, Artificial Sequence
  Description of Artificial Sequence: Synthetic oligonucleotide
cccauugccgaaaagucug

SEQ ID NO: 2648551 - RNA, 19 nt, Artificial Sequence
  Description of Artificial Sequence: Synthetic oligonucleotide
gcaucuaaaaugucgggaa

SEQ ID NO: 2648552 - RNA, 19 nt, Artificial Sequence
  Description of Artificial Sequence: Synthetic oligonucleotide
cauccuucuuuguauaucu

SEQ ID NO: 2648553 - RNA, 19 nt, Artificial Sequence
  Description of Artificial Sequence: Synthetic oligonucleotide
cuguuaugcagcucaaucu

SEQ ID NO: 2648554 - RNA, 19 nt, Artificial Sequence
  Description of Artificial Sequence: Synthetic oligonucleotide
uugucuuguuugugggacu

SEQ ID NO: 2648555 - RNA, 19 nt, Artificial Sequence
  Description of Artificial Sequence: Synthetic oligonucleotide
ugucuuguuugugggacuc

SEQ ID NO: 2648556 - RNA, 19 nt, Artificial Sequence
  Description of Artificial Sequence: Synthetic oligonucleotide
guauccagaugacugugaa

SEQ ID NO: 2648557 - RNA, 19 nt, Artificial Sequence
  Description of Artificial Sequence: Synthetic oligonucleotide
cauaaccuucguacugcug

SEQ ID NO: 2648558 - RNA, 19 nt, Artificial Sequence
  Description of Artificial Sequence: Synthetic oligonucleotide
uuucccgaccuacaaucuu

SEQ ID NO: 2648559 - RNA, 19 nt, Artificial Sequence
  Description of Artificial Sequence: Synthetic oligonucleotide
auuuugauguucggcaauu

SEQ ID NO: 2648560 - RNA, 19 nt, Artificial Sequence
  Description of Artificial Sequence: Synthetic oligonucleotide
cugcuugaugacagccucc

SEQ ID NO: 2648561 - RNA, 19 nt, Artificial Sequence
  Description of Artificial Sequence: Synthetic oligonucleotide
cuggagucauuucuucauc

SEQ ID NO: 2648562 - RNA, 19 nt, Artificial Sequence
  Description of Artificial Sequence: Synthetic oligonucleotide
agcacaaaguuuccucauu

SEQ ID NO: 2648563 - RNA, 19 nt, Artificial Sequence
  Description of Artificial Sequence: Synthetic oligonucleotide
ugagacgcaaggcccucuc

SEQ ID NO: 2648564 - RNA, 19 nt, Artificial Sequence
  Description of Artificial Sequence: Synthetic oligonucleotide
uucauccgagucacuugcu

SEQ ID NO: 2648565 - RNA, 19 nt, Artificial Sequence
  Description of Artificial Sequence: Synthetic oligonucleotide
agggcaggcaggcacugga

SEQ ID NO: 2648566 - RNA, 19 nt, Artificial Sequence
  Description of Artificial Sequence: Synthetic oligonucleotide
agcugcuuuccugcuguac

SEQ ID NO: 2648567 - RNA, 19 nt, Artificial Sequence
  Description of Artificial Sequence: Synthetic oligonucleotide
augacagccucccgggaau

SEQ ID NO: 2648568 - RNA, 19 nt, Artificial Sequence
  Description of Artificial Sequence: Synthetic oligonucleotide
cuaaaaugucgggaaucuc

SEQ ID NO: 2648569 - RNA, 19 nt, Artificial Sequence
  Description of Artificial Sequence: Synthetic oligonucleotide
uugcgcuucuuaggaauug

SEQ ID NO: 2648570 - RNA, 19 nt, Artificial Sequence
  Description of Artificial Sequence: Synthetic oligonucleotide
uguacggauggaugacuuu

SEQ ID NO: 2648571 - RNA, 19 nt, Artificial Sequence
  Description of Artificial Sequence: Synthetic oligonucleotide
ucccgaccuacaaucuuuc

SEQ ID NO: 2648572 - RNA, 19 nt, Artificial Sequence
  Description of Artificial Sequence: Synthetic oligonucleotide
ggaaucucgaagccauaac

SEQ ID NO: 2648573 - RNA, 19 nt, Artificial Sequence
  Description of Artificial Sequence: Synthetic oligonucleotide
uucccaucuuuagagucuc

SEQ ID NO: 2648574 - RNA, 19 nt, Artificial Sequence
  Description of Artificial Sequence: Synthetic oligonucleotide
uucuuaggaauugcaucau

SEQ ID NO: 2648575 - RNA, 19 nt, Artificial Sequence
  Description of Artificial Sequence: Synthetic oligonucleotide
uccuuuaggcauggcgaug

SEQ ID NO: 2648576 - RNA, 19 nt, Artificial Sequence
  Description of Artificial Sequence: Synthetic oligonucleotide
aggcauggcgaugucccgg

SEQ ID NO: 2648577 - RNA, 19 nt, Artificial Sequence
  Description of Artificial Sequence: Synthetic oligonucleotide
ugcuguacggauggaugac

SEQ ID NO: 2648578 - RNA, 19 nt, Artificial Sequence
  Description of Artificial Sequence: Synthetic oligonucleotide
cucguuuuguuuguaucca

SEQ ID NO: 2648579 - RNA, 19 nt, Artificial Sequence
  Description of Artificial Sequence: Synthetic oligonucleotide
uuugugggacucucuugua

SEQ ID NO: 2648580 - RNA, 19 nt, Artificial Sequence
  Description of Artificial Sequence: Synthetic oligonucleotide
uucccugucuguccuugau

SEQ ID NO: 2648581 - RNA, 19 nt, Artificial Sequence
  Description of Artificial Sequence: Synthetic oligonucleotide
gacuuucuuuucccgaccu

SEQ ID NO: 2648582 - RNA, 19 nt, Artificial Sequence
  Description of Artificial Sequence: Synthetic oligonucleotide
aaggcccucucagucuuca

SEQ ID NO: 2648583 - RNA, 19 nt, Artificial Sequence
  Description of Artificial Sequence: Synthetic oligonucleotide
caucauuagcacaaaguuu

SEQ ID NO: 2648584 - RNA, 19 nt, Artificial Sequence
  Description of Artificial Sequence: Synthetic oligonucleotide
uuuugauguucggcaauuu

SEQ ID NO: 2648585 - RNA, 19 nt, Artificial Sequence
  Description of Artificial Sequence: Synthetic oligonucleotide
gcugauuccaauuucccau

SEQ ID NO: 2648586 - RNA, 19 nt, Artificial Sequence
  Description of Artificial Sequence: Synthetic oligonucleotide
agaugacugugaaaccacu

SEQ ID NO: 2648587 - RNA, 19 nt, Artificial Sequence
  Description of Artificial Sequence: Synthetic oligonucleotide
gggacucucuuguaaucug

SEQ ID NO: 2648588 - RNA, 19 nt, Artificial Sequence
  Description of Artificial Sequence: Synthetic oligonucleotide
ccucauuuugauguucggc

SEQ ID NO: 2648589 - RNA, 19 nt, Artificial Sequence
  Description of Artificial Sequence: Synthetic oligonucleotide
ccuaaaucuauuucuauau

SEQ ID NO: 2648590 - RNA, 19 nt, Artificial Sequence
  Description of Artificial Sequence: Synthetic oligonucleotide
cacuggagucauuucuuca

SEQ ID NO: 2648591 - RNA, 19 nt, Artificial Sequence
  Description of Artificial Sequence: Synthetic oligonucleotide
ggaaugguggcgccuuccc

SEQ ID NO: 2648592 - RNA, 19 nt, Artificial Sequence
  Description of Artificial Sequence: Synthetic oligonucleotide
gugggacucucuuguaauc

SEQ ID NO: 2648593 - RNA, 19 nt, Artificial Sequence
  Description of Artificial Sequence: Synthetic oligonucleotide
ugcuuuccugcuguacgga

SEQ ID NO: 2648594 - RNA, 19 nt, Artificial Sequence
  Description of Artificial Sequence: Synthetic oligonucleotide
caucuuuagagucuccaau

SEQ ID NO: 2648595 - RNA, 19 nt, Artificial Sequence
  Description of Artificial Sequence: Synthetic oligonucleotide
ucguacugcugccgcuccc

SEQ ID NO: 2648596 - RNA, 19 nt, Artificial Sequence
  Description of Artificial Sequence: Synthetic oligonucleotide
cuucacuugcugauuccaa

SEQ ID NO: 2648597 - RNA, 19 nt, Artificial Sequence
  Description of Artificial Sequence: Synthetic oligonucleotide
cuucguacugcugccgcuc

SEQ ID NO: 2648598 - RNA, 19 nt, Artificial Sequence
  Description of Artificial Sequence: Synthetic oligonucleotide
auucacaggcauccuucuu

SEQ ID NO: 2648599 - RNA, 19 nt, Artificial Sequence
  Description of Artificial Sequence: Synthetic oligonucleotide
ucccgcuccaucgucugcu

SEQ ID NO: 2648600 - RNA, 19 nt, Artificial Sequence
  Description of Artificial Sequence: Synthetic oligonucleotide
auugcaucauuagcacaaa

SEQ ID NO: 2648601 - RNA, 19 nt, Artificial Sequence
  Description of Artificial Sequence: Synthetic oligonucleotide
agccucccgggaauggugg

SEQ ID NO: 2648602 - RNA, 19 nt, Artificial Sequence
  Description of Artificial Sequence: Synthetic oligonucleotide
caaaaucccauugccgaaa

SEQ ID NO: 2648603 - RNA, 19 nt, Artificial Sequence
  Description of Artificial Sequence: Synthetic oligonucleotide
uggcuuucgguuugcgcuu

SEQ ID NO: 2648604 - RNA, 19 nt, Artificial Sequence
  Description of Artificial Sequence: Synthetic oligonucleotide
uuccccaguuaguucuaau

SEQ ID NO: 2648605 - RNA, 19 nt, Artificial Sequence
  Description of Artificial Sequence: Synthetic oligonucleotide
aggcauccuucuuuguaua

SEQ ID NO: 2648606 - RNA, 19 nt, Artificial Sequence
  Description of Artificial Sequence: Synthetic oligonucleotide
gcccucucagucuucaauc

SEQ ID NO: 2648607 - RNA, 19 nt, Artificial Sequence
  Description of Artificial Sequence: Synthetic oligonucleotide
accuuucaauuaauucaca

SEQ ID NO: 2648608 - RNA, 19 nt, Artificial Sequence
  Description of Artificial Sequence: Synthetic oligonucleotide
acggauggaugacuuucuu

SEQ ID NO: 2648609 - RNA, 19 nt, Artificial Sequence
  Description of Artificial Sequence: Synthetic oligonucleotide
gagacgcaaggcccucuca

SEQ ID NO: 2648610 - RNA, 19 nt, Artificial Sequence
  Description of Artificial Sequence: Synthetic oligonucleotide
cauggcgaugucccggcca

SEQ ID NO: 2648611 - RNA, 19 nt, Artificial Sequence
  Description of Artificial Sequence: Synthetic oligonucleotide
guuugucaccaauaagguu

SEQ ID NO: 2648612 - RNA, 19 nt, Artificial Sequence
  Description of Artificial Sequence: Synthetic oligonucleotide
ggcauggcgaugucccggc

SEQ ID NO: 2648613 - RNA, 19 nt, Artificial Sequence
  Description of Artificial Sequence: Synthetic oligonucleotide
uacugcugccgcucccgcu

SEQ ID NO: 2648614 - RNA, 19 nt, Artificial Sequence
  Description of Artificial Sequence: Synthetic oligonucleotide
ccuuucaguccuuuaggca

SEQ ID NO: 2648615 - RNA, 19 nt, Artificial Sequence
  Description of Artificial Sequence: Synthetic oligonucleotide
ugcuguuaugcagcucaau

SEQ ID NO: 2648616 - RNA, 19 nt, Artificial Sequence
  Description of Artificial Sequence: Synthetic oligonucleotide
caggcacuggagucauuuc

SEQ ID NO: 2648617 - RNA, 19 nt, Artificial Sequence
  Description of Artificial Sequence: Synthetic oligonucleotide
cuuuaggcauggcgauguc

SEQ ID NO: 2648618 - RNA, 19 nt, Artificial Sequence
  Description of Artificial Sequence: Synthetic oligonucleotide
ugucaccaauaagguugag

SEQ ID NO: 2648619 - RNA, 19 nt, Artificial Sequence
  Description of Artificial Sequence: Synthetic oligonucleotide
gucgggaaucucgaagcca

SEQ ID NO: 2648620 - RNA, 19 nt, Artificial Sequence
  Description of Artificial Sequence: Synthetic oligonucleotide
uugagacgcaaggcccucu

SEQ ID NO: 2648621 - RNA, 19 nt, Artificial Sequence
  Description of Artificial Sequence: Synthetic oligonucleotide
caucgucugcuugaugaca

SEQ ID NO: 2648622 - RNA, 19 nt, Artificial Sequence
  Description of Artificial Sequence: Synthetic oligonucleotide
gaaugguggcgccuucccu

SEQ ID NO: 2648623 - RNA, 19 nt, Artificial Sequence
  Description of Artificial Sequence: Synthetic oligonucleotide
agucuccaauuuccccagu

SEQ ID NO: 2648624 - RNA, 19 nt, Artificial Sequence
  Description of Artificial Sequence: Synthetic oligonucleotide
guucggcaauuucuucaga

SEQ ID NO: 2648625 - RNA, 19 nt, Artificial Sequence
  Description of Artificial Sequence: Synthetic oligonucleotide
gauuccaauuucccaucuu

SEQ ID NO: 2648626 - RNA, 19 nt, Artificial Sequence
  Description of Artificial Sequence: Synthetic oligonucleotide
ccauugccgaaaagucugc

SEQ ID NO: 2648627 - RNA, 19 nt, Artificial Sequence
  Description of Artificial Sequence: Synthetic oligonucleotide
acagccucccgggaauggu

SEQ ID NO: 2648628 - RNA, 19 nt, Artificial Sequence
  Description of Artificial Sequence: Synthetic oligonucleotide
ccgaaaagucugcagauua

SEQ ID NO: 2648629 - RNA, 19 nt, Artificial Sequence
  Description of Artificial Sequence: Synthetic oligonucleotide
caauaagguugagacgcaa

SEQ ID NO: 2648630 - RNA, 19 nt, Artificial Sequence
  Description of Artificial Sequence: Synthetic oligonucleotide
guggcgccuucccugucug

SEQ ID NO: 2648631 - RNA, 19 nt, Artificial Sequence
  Description of Artificial Sequence: Synthetic oligonucleotide
caucuaaaaugucgggaau

SEQ ID NO: 2648632 - RNA, 19 nt, Artificial Sequence
  Description of Artificial Sequence: Synthetic oligonucleotide
gucugcagauuauuagcau

SEQ ID NO: 2648633 - RNA, 19 nt, Artificial Sequence
  Description of Artificial Sequence: Synthetic oligonucleotide
caguuaguucuaauccccu

SEQ ID NO: 2648634 - RNA, 19 nt, Artificial Sequence
  Description of Artificial Sequence: Synthetic oligonucleotide
gcacuggagucauuucuuc

SEQ ID NO: 2648635 - RNA, 19 nt, Artificial Sequence
  Description of Artificial Sequence: Synthetic oligonucleotide
cauugccgaaaagucugca

SEQ ID NO: 2648636 - RNA, 19 nt, Artificial Sequence
  Description of Artificial Sequence: Synthetic oligonucleotide
gcauccuucuuuguauauc

SEQ ID NO: 2648637 - RNA, 19 nt, Artificial Sequence
  Description of Artificial Sequence: Synthetic oligonucleotide
cuucuuuguauaucucguu

SEQ ID NO: 2648638 - RNA, 19 nt, Artificial Sequence
  Description of Artificial Sequence: Synthetic oligonucleotide
gaaucgacucaaauaccuu

SEQ ID NO: 2648639 - RNA, 19 nt, Artificial Sequence
  Description of Artificial Sequence: Synthetic oligonucleotide
auaucucguuuuguuugua

SEQ ID NO: 2648640 - RNA, 19 nt, Artificial Sequence
  Description of Artificial Sequence: Synthetic oligonucleotide
ccaucgucugcuugaugac

SEQ ID NO: 2648641 - RNA, 19 nt, Artificial Sequence
  Description of Artificial Sequence: Synthetic oligonucleotide
cagcucacugcugaaucga

SEQ ID NO: 2648642 - RNA, 19 nt, Artificial Sequence
  Description of Artificial Sequence: Synthetic oligonucleotide
cauuagcacaaaguuuccu

SEQ ID NO: 2648643 - RNA, 19 nt, Artificial Sequence
  Description of Artificial Sequence: Synthetic oligonucleotide
ggacucucuuguaaucuga

SEQ ID NO: 2648644 - RNA, 19 nt, Artificial Sequence
  Description of Artificial Sequence: Synthetic oligonucleotide
guugagacgcaaggcccuc

SEQ ID NO: 2648645 - RNA, 19 nt, Artificial Sequence
  Description of Artificial Sequence: Synthetic oligonucleotide
gggaaucucgaagccauaa

SEQ ID NO: 2648646 - RNA, 19 nt, Artificial Sequence
  Description of Artificial Sequence: Synthetic oligonucleotide
cacaaaguuuccucauuuu

SEQ ID NO: 2648647 - RNA, 19 nt, Artificial Sequence
  Description of Artificial Sequence: Synthetic oligonucleotide
caggcaggcacuggaguca

SEQ ID NO: 2648648 - RNA, 19 nt, Artificial Sequence
  Description of Artificial Sequence: Synthetic oligonucleotide
cguuuuguuuguauccaga

SEQ ID NO: 2648649 - RNA, 19 nt, Artificial Sequence
  Description of Artificial Sequence: Synthetic oligonucleotide
cuccaucgucugcuugaug

SEQ ID NO: 2648650 - RNA, 19 nt, Artificial Sequence
  Description of Artificial Sequence: Synthetic oligonucleotide
guuuccucauuuugauguu

SEQ ID NO: 2648651 - RNA, 19 nt, Artificial Sequence
  Description of Artificial Sequence: Synthetic oligonucleotide
gguuugcgcuucuuaggaa

SEQ ID NO: 2648652 - RNA, 19 nt, Artificial Sequence
  Description of Artificial Sequence: Synthetic oligonucleotide
cgucugcuugaugacagcc

SEQ ID NO: 2648653 - RNA, 19 nt, Artificial Sequence
  Description of Artificial Sequence: Synthetic oligonucleotide
gucacuugcuucacuugcu

SEQ ID NO: 2648654 - RNA, 19 nt, Artificial Sequence
  Description of Artificial Sequence: Synthetic oligonucleotide
gucuccaauuuccccaguu

SEQ ID NO: 2648655 - RNA, 19 nt, Artificial Sequence
  Description of Artificial Sequence: Synthetic oligonucleotide
ccacugaaguuugucacca

SEQ ID NO: 2648656 - RNA, 19 nt, Artificial Sequence
  Description of Artificial Sequence: Synthetic oligonucleotide
cccgaccuacaaucuuucc

SEQ ID NO: 2648657 - RNA, 19 nt, Artificial Sequence
  Description of Artificial Sequence: Synthetic oligonucleotide
cuguacggauggaugacuu

SEQ ID NO: 2648658 - RNA, 19 nt, Artificial Sequence
  Description of Artificial Sequence: Synthetic oligonucleotide
ccaauaagguugagacgca

SEQ ID NO: 2648659 - RNA, 19 nt, Artificial Sequence
  Description of Artificial Sequence: Synthetic oligonucleotide
cuaauccccuaaaucuauu

SEQ ID NO: 2648660 - RNA, 19 nt, Artificial Sequence
  Description of Artificial Sequence: Synthetic oligonucleotide
cugcugaaucgacucaaau

SEQ ID NO: 2648661 - RNA, 19 nt, Artificial Sequence
  Description of Artificial Sequence: Synthetic oligonucleotide
cacugaaguuugucaccaa

SEQ ID NO: 2648662 - RNA, 19 nt, Artificial Sequence
  Description of Artificial Sequence: Synthetic oligonucleotide
cccaucuuuagagucucca

SEQ ID NO: 2648663 - RNA, 19 nt, Artificial Sequence
  Description of Artificial Sequence: Synthetic oligonucleotide
cguacugcugccgcucccg

SEQ ID NO: 2648664 - RNA, 19 nt, Artificial Sequence
  Description of Artificial Sequence: Synthetic oligonucleotide
auuuccccaguuaguucua

SEQ ID NO: 2648665 - RNA, 19 nt, Artificial Sequence
  Description of Artificial Sequence: Synthetic oligonucleotide
uuccugcuguacggaugga

SEQ ID NO: 2648666 - RNA, 19 nt, Artificial Sequence
  Description of Artificial Sequence: Synthetic oligonucleotide
ccgaccuacaaucuuuccu

SEQ ID NO: 2648667 - RNA, 19 nt, Artificial Sequence
  Description of Artificial Sequence: Synthetic oligonucleotide
aggcaggcacuggagucau

SEQ ID NO: 2648668 - RNA, 19 nt, Artificial Sequence
  Description of Artificial Sequence: Synthetic oligonucleotide
cgguuugcgcuucuuagga

SEQ ID NO: 2648669 - RNA, 19 nt, Artificial Sequence
  Description of Artificial Sequence: Synthetic oligonucleotide
ggcgccuucccugucuguc

SEQ ID NO: 2648670 - RNA, 19 nt, Artificial Sequence
  Description of Artificial Sequence: Synthetic oligonucleotide
uggcgccuucccugucugu

SEQ ID NO: 2648671 - RNA, 19 nt, Artificial Sequence
  Description of Artificial Sequence: Synthetic oligonucleotide
augcuguuaugcagcucaa

SEQ ID NO: 2648672 - RNA, 19 nt, Artificial Sequence
  Description of Artificial Sequence: Synthetic oligonucleotide
ccucccgggaaugguggcg

SEQ ID NO: 2648673 - RNA, 19 nt, Artificial Sequence
  Description of Artificial Sequence: Synthetic oligonucleotide
uggcgaugucccggccacc

SEQ ID NO: 2648674 - RNA, 19 nt, Artificial Sequence
  Description of Artificial Sequence: Synthetic oligonucleotide
gguugagacgcaaggcccu

SEQ ID NO: 2648675 - RNA, 19 nt, Artificial Sequence
  Description of Artificial Sequence: Synthetic oligonucleotide
ugguggcgccuucccuguc

SEQ ID NO: 2648676 - RNA, 19 nt, Artificial Sequence
  Description of Artificial Sequence: Synthetic oligonucleotide
aggcccucucagucuucaa

SEQ ID NO: 2648677 - RNA, 19 nt, Artificial Sequence
  Description of Artificial Sequence: Synthetic oligonucleotide
ccuuuaggcauggcgaugu

SEQ ID NO: 2648678 - RNA, 19 nt, Artificial Sequence
  Description of Artificial Sequence: Synthetic oligonucleotide
ggcauccuucuuuguauau

SEQ ID NO: 2648679 - RNA, 19 nt, Artificial Sequence
  Description of Artificial Sequence: Synthetic oligonucleotide
ccaauuuccccaguuaguu

SEQ ID NO: 2648680 - RNA, 19 nt, Artificial Sequence
  Description of Artificial Sequence: Synthetic oligonucleotide
cgcuccaucgucugcuuga

SEQ ID NO: 2648681 - RNA, 19 nt, Artificial Sequence
  Description of Artificial Sequence: Synthetic oligonucleotide
ggcccucucagucuucaau

SEQ ID NO: 2648682 - RNA, 19 nt, Artificial Sequence
  Description of Artificial Sequence: Synthetic oligonucleotide
gcauggcgaugucccggcc

SEQ ID NO: 2648683 - RNA, 19 nt, Artificial Sequence
  Description of Artificial Sequence: Synthetic oligonucleotide
gccucccgggaaugguggc

SEQ ID NO: 2648684 - RNA, 19 nt, Artificial Sequence
  Description of Artificial Sequence: Synthetic oligonucleotide
cgaccuacaaucuuuccuu

SEQ ID NO: 2648685 - RNA, 19 nt, Artificial Sequence
  Description of Artificial Sequence: Synthetic oligonucleotide
gguggcgccuucccugucu

SEQ ID NO: 2648686 - RNA, 19 nt, Artificial Sequence
  Description of Artificial Sequence: Synthetic oligonucleotide
gcuguacggauggaugacu

SEQ ID NO: 2648687 - RNA, 19 nt, Artificial Sequence
  Description of Artificial Sequence: Synthetic oligonucleotide
gcaggcacuggagucauuu

SEQ ID NO: 2648688 - RNA, 19 nt, Artificial Sequence
  Description of Artificial Sequence: Synthetic oligonucleotide
ggcacuggagucauuucuu

SEQ ID NO: 2648689 - RNA, 19 nt, Artificial Sequence
  Description of Artificial Sequence: Synthetic oligonucleotide
cccucucagucuucaaucu

SEQ ID NO: 2648690 - RNA, 19 nt, Artificial Sequence
  Description of Artificial Sequence: Synthetic oligonucleotide
ggcuuucgguuugcgcuuc

SEQ ID NO: 2648691 - RNA, 19 nt, Artificial Sequence
  Description of Artificial Sequence: Synthetic oligonucleotide
gcucacugcugaaucgacu

SEQ ID NO: 2648692 - RNA, 19 nt, Artificial Sequence
  Description of Artificial Sequence: Synthetic oligonucleotide
ccauaaccuucguacugcu

SEQ ID NO: 2648693 - RNA, 19 nt, Artificial Sequence
  Description of Artificial Sequence: Synthetic oligonucleotide
ccgcuccaucgucugcuug

SEQ ID NO: 2648694 - RNA, 19 nt, Artificial Sequence
  Description of Artificial Sequence: Synthetic oligonucleotide
cgaagccauaaccuucgua

SEQ ID NO: 2648695 - RNA, 19 nt, Artificial Sequence
  Description of Artificial Sequence: Synthetic oligonucleotide
ccuucguacugcugccgcu

SEQ ID NO: 2648696 - RNA, 19 nt, Artificial Sequence
  Description of Artificial Sequence: Synthetic oligonucleotide
cuuucgguuugcgcuucuu

SEQ ID NO: 2648697 - RNA, 19 nt, Artificial Sequence
  Description of Artificial Sequence: Synthetic oligonucleotide
gccgaaaagucugcagauu

SEQ ID NO: 2648698 - RNA, 19 nt, Artificial Sequence
  Description of Artificial Sequence: Synthetic oligonucleotide
gucuguccuugaugcuguu

SEQ ID NO: 2648699 - RNA, 19 nt, Artificial Sequence
  Description of Artificial Sequence: Synthetic oligonucleotide
gcuuucgguuugcgcuucu

SEQ ID NO: 2648700 - RNA, 19 nt, Artificial Sequence
  Description of Artificial Sequence: Synthetic oligonucleotide
ccucucagucuucaaucuu

SEQ ID NO: 2648701 - RNA, 19 nt, Artificial Sequence
  Description of Artificial Sequence: Synthetic oligonucleotide
cgcaaggcccucucagucu

SEQ ID NO: 2648702 - RNA, 19 nt, Artificial Sequence
  Description of Artificial Sequence: Synthetic oligonucleotide
cgggaaucucgaagccaua

SEQ ID NO: 2648703 - RNA, 19 nt, Artificial Sequence
  Description of Artificial Sequence: Synthetic oligonucleotide
ccgggaaugguggcgccuu

SEQ ID NO: 2648704 - RNA, 19 nt, Artificial Sequence
  Description of Artificial Sequence: Synthetic oligonucleotide
ggcaggcacuggagucauu

SEQ ID NO: 2648705 - RNA, 19 nt, Artificial Sequence
  Description of Artificial Sequence: Synthetic oligonucleotide
aaagaaacagcacggaugg

SEQ ID NO: 2648706 - RNA, 19 nt, Artificial Sequence
  Description of Artificial Sequence: Synthetic oligonucleotide
agaauauccagccauacac

SEQ ID NO: 2648707 - RNA, 19 nt, Artificial Sequence
  Description of Artificial Sequence: Synthetic oligonucleotide
uucucaucaguuuagaagg

SEQ ID NO: 2648708 - RNA, 19 nt, Artificial Sequence
  Description of Artificial Sequence: Synthetic oligonucleotide
aauauccagccauacaccg

SEQ ID NO: 2648709 - RNA, 19 nt, Artificial Sequence
  Description of Artificial Sequence: Synthetic oligonucleotide
uugaguaacuguaucaucc

SEQ ID NO: 2648710 - RNA, 19 nt, Artificial Sequence
  Description of Artificial Sequence: Synthetic oligonucleotide
gaaaacaacccuuacauga

SEQ ID NO: 2648711 - RNA, 19 nt, Artificial Sequence
  Description of Artificial Sequence: Synthetic oligonucleotide
aacuguaucauccuagagu

SEQ ID NO: 2648712 - RNA, 19 nt, Artificial Sequence
  Description of Artificial Sequence: Synthetic oligonucleotide
uuuggugcgaccaucauac

SEQ ID NO: 2648713 - RNA, 19 nt, Artificial Sequence
  Description of Artificial Sequence: Synthetic oligonucleotide
aaacuuauucacuucuuug

SEQ ID NO: 2648714 - RNA, 19 nt, Artificial Sequence
  Description of Artificial Sequence: Synthetic oligonucleotide
agucucagaauauccagcc

SEQ ID NO: 2648715 - RNA, 19 nt, Artificial Sequence
  Description of Artificial Sequence: Synthetic oligonucleotide
aaggguugaucauccaacc

SEQ ID NO: 2648716 - RNA, 19 nt, Artificial Sequence
  Description of Artificial Sequence: Synthetic oligonucleotide
gucacugucagaaacaggg

SEQ ID NO: 2648717 - RNA, 19 nt, Artificial Sequence
  Description of Artificial Sequence: Synthetic oligonucleotide
agcaacaccauccugagcu

SEQ ID NO: 2648718 - RNA, 19 nt, Artificial Sequence
  Description of Artificial Sequence: Synthetic oligonucleotide
ucauccuagaguuuaguag

SEQ ID NO: 2648719 - RNA, 19 nt, Artificial Sequence
  Description of Artificial Sequence: Synthetic oligonucleotide
cuucucaucaguuuagaag

SEQ ID NO: 2648720 - RNA, 19 nt, Artificial Sequence
  Description of Artificial Sequence: Synthetic oligonucleotide
cauguuagcucucaguagg

SEQ ID NO: 2648721 - RNA, 19 nt, Artificial Sequence
  Description of Artificial Sequence: Synthetic oligonucleotide
ucuucaaagaugacuagac

SEQ ID NO: 2648722 - RNA, 19 nt, Artificial Sequence
  Description of Artificial Sequence: Synthetic oligonucleotide
aguuuagaaggguugauca

SEQ ID NO: 2648723 - RNA, 19 nt, Artificial Sequence
  Description of Artificial Sequence: Synthetic oligonucleotide
uuagaaggguugaucaucc

SEQ ID NO: 2648724 - RNA, 19 nt, Artificial Sequence
  Description of Artificial Sequence: Synthetic oligonucleotide
aagaugacuagacacugga

SEQ ID NO: 2648725 - RNA, 19 nt, Artificial Sequence
  Description of Artificial Sequence: Synthetic oligonucleotide
uuaguagucacugucagaa

SEQ ID NO: 2648726 - RNA, 19 nt, Artificial Sequence
  Description of Artificial Sequence: Synthetic oligonucleotide
uuauucacuucuuuggaac

SEQ ID NO: 2648727 - RNA, 19 nt, Artificial Sequence
  Description of Artificial Sequence: Synthetic oligonucleotide
caaagaaacagcacggaug

SEQ ID NO: 2648728 - RNA, 19 nt, Artificial Sequence
  Description of Artificial Sequence: Synthetic oligonucleotide
acaggguaagcaaagaaac

SEQ ID NO: 2648729 - RNA, 19 nt, Artificial Sequence
  Description of Artificial Sequence: Synthetic oligonucleotide
agaaacagcacggauggac

SEQ ID NO: 2648730 - RNA, 19 nt, Artificial Sequence
  Description of Artificial Sequence: Synthetic oligonucleotide
uuuggaacucaccacggug

SEQ ID NO: 2648731 - RNA, 19 nt, Artificial Sequence
  Description of Artificial Sequence: Synthetic oligonucleotide
acuguaucauccuagaguu

SEQ ID NO: 2648732 - RNA, 19 nt, Artificial Sequence
  Description of Artificial Sequence: Synthetic oligonucleotide
uuagcucucaguagguuug

SEQ ID NO: 2648733 - RNA, 19 nt, Artificial Sequence
  Description of Artificial Sequence: Synthetic oligonucleotide
gacacuuguuuucugcggg

SEQ ID NO: 2648734 - RNA, 19 nt, Artificial Sequence
  Description of Artificial Sequence: Synthetic oligonucleotide
ugaguaggccaucugaaac

SEQ ID NO: 2648735 - RNA, 19 nt, Artificial Sequence
  Description of Artificial Sequence: Synthetic oligonucleotide
gaugcacaguucuucaaag

SEQ ID NO: 2648736 - RNA, 19 nt, Artificial Sequence
  Description of Artificial Sequence: Synthetic oligonucleotide
ucgagcaacaccauccuga

SEQ ID NO: 2648737 - RNA, 19 nt, Artificial Sequence
  Description of Artificial Sequence: Synthetic oligonucleotide
uuuucugcgggcucaacgc

SEQ ID NO: 2648738 - RNA, 19 nt, Artificial Sequence
  Description of Artificial Sequence: Synthetic oligonucleotide
uagaguuuaguagucacug

SEQ ID NO: 2648739 - RNA, 19 nt, Artificial Sequence
  Description of Artificial Sequence: Synthetic oligonucleotide
uuggaacucaccacggugc

SEQ ID NO: 2648740 - RNA, 19 nt, Artificial Sequence
  Description of Artificial Sequence: Synthetic oligonucleotide
auugaguaacuguaucauc

SEQ ID NO: 2648741 - RNA, 19 nt, Artificial Sequence
  Description of Artificial Sequence: Synthetic oligonucleotide
aguagguuugaguaggcca

SEQ ID NO: 2648742 - RNA, 19 nt, Artificial Sequence
  Description of Artificial Sequence: Synthetic oligonucleotide
cuucccucugaaaacaacc

SEQ ID NO: 2648743 - RNA, 19 nt, Artificial Sequence
  Description of Artificial Sequence: Synthetic oligonucleotide
ucuuuggaacucaccacgg

SEQ ID NO: 2648744 - RNA, 19 nt, Artificial Sequence
  Description of Artificial Sequence: Synthetic oligonucleotide
ugaucauccaacccuuccc

SEQ ID NO: 2648745 - RNA, 19 nt, Artificial Sequence
  Description of Artificial Sequence: Synthetic oligonucleotide
ucucagaauauccagccau

SEQ ID NO: 2648746 - RNA, 19 nt, Artificial Sequence
  Description of Artificial Sequence: Synthetic oligonucleotide
agcaacacaggaaacugcc

SEQ ID NO: 2648747 - RNA, 19 nt, Artificial Sequence
  Description of Artificial Sequence: Synthetic oligonucleotide
uccauguuagcucucagua

SEQ ID NO: 2648748 - RNA, 19 nt, Artificial Sequence
  Description of Artificial Sequence: Synthetic oligonucleotide
cucucgagcaacaccaucc

SEQ ID NO: 2648749 - RNA, 19 nt, Artificial Sequence
  Description of Artificial Sequence: Synthetic oligonucleotide
gugauguacacgcugcccg

SEQ ID NO: 2648750 - RNA, 19 nt, Artificial Sequence
  Description of Artificial Sequence: Synthetic oligonucleotide
aaacaggguaagcaaagaa

SEQ ID NO: 2648751 - RNA, 19 nt, Artificial Sequence
  Description of Artificial Sequence: Synthetic oligonucleotide
ucauacuucuucaggguga

SEQ ID NO: 2648752 - RNA, 19 nt, Artificial Sequence
  Description of Artificial Sequence: Synthetic oligonucleotide
accauugaguaacuguauc

SEQ ID NO: 2648753 - RNA, 19 nt, Artificial Sequence
  Description of Artificial Sequence: Synthetic oligonucleotide
uuugaguaggccaucugaa

SEQ ID NO: 2648754 - RNA, 19 nt, Artificial Sequence
  Description of Artificial Sequence: Synthetic oligonucleotide
guuuaguagucacugucag

SEQ ID NO: 2648755 - RNA, 19 nt, Artificial Sequence
  Description of Artificial Sequence: Synthetic oligonucleotide
guuuucugcgggcucaacg

SEQ ID NO: 2648756 - RNA, 19 nt, Artificial Sequence
  Description of Artificial Sequence: Synthetic oligonucleotide
uugaucauccaacccuucc

SEQ ID NO: 2648757 - RNA, 19 nt, Artificial Sequence
  Description of Artificial Sequence: Synthetic oligonucleotide
cacaguucuucaaagauga

SEQ ID NO: 2648758 - RNA, 19 nt, Artificial Sequence
  Description of Artificial Sequence: Synthetic oligonucleotide
guuacauacagaaggugcc

SEQ ID NO: 2648759 - RNA, 19 nt, Artificial Sequence
  Description of Artificial Sequence: Synthetic oligonucleotide
gaguuuaguagucacuguc

SEQ ID NO: 2648760 - RNA, 19 nt, Artificial Sequence
  Description of Artificial Sequence: Synthetic oligonucleotide
aggguugaucauccaaccc

SEQ ID NO: 2648761 - RNA, 19 nt, Artificial Sequence
  Description of Artificial Sequence: Synthetic oligonucleotide
uguaucauccuagaguuua

SEQ ID NO: 2648762 - RNA, 19 nt, Artificial Sequence
  Description of Artificial Sequence: Synthetic oligonucleotide
uucccucugaaaacaaccc

SEQ ID NO: 2648763 - RNA, 19 nt, Artificial Sequence
  Description of Artificial Sequence: Synthetic oligonucleotide
aguaacuguaucauccuag

SEQ ID NO: 2648764 - RNA, 19 nt, Artificial Sequence
  Description of Artificial Sequence: Synthetic oligonucleotide
ucgcucucgagcaacacca

SEQ ID NO: 2648765 - RNA, 19 nt, Artificial Sequence
  Description of Artificial Sequence: Synthetic oligonucleotide
ugaaaacaacccuuacaug

SEQ ID NO: 2648766 - RNA, 19 nt, Artificial Sequence
  Description of Artificial Sequence: Synthetic oligonucleotide
agaaggugccaaaagcagc

SEQ ID NO: 2648767 - RNA, 19 nt, Artificial Sequence
  Description of Artificial Sequence: Synthetic oligonucleotide
uuuagaaggguugaucauc

SEQ ID NO: 2648768 - RNA, 19 nt, Artificial Sequence
  Description of Artificial Sequence: Synthetic oligonucleotide
acuuauucacuucuuugga

SEQ ID NO: 2648769 - RNA, 19 nt, Artificial Sequence
  Description of Artificial Sequence: Synthetic oligonucleotide
aaagaugacuagacacugg

SEQ ID NO: 2648770 - RNA, 19 nt, Artificial Sequence
  Description of Artificial Sequence: Synthetic oligonucleotide
uaacuguaucauccuagag

SEQ ID NO: 2648771 - RNA, 19 nt, Artificial Sequence
  Description of Artificial Sequence: Synthetic oligonucleotide
auacagaaggugccaaaag

SEQ ID NO: 2648772 - RNA, 19 nt, Artificial Sequence
  Description of Artificial Sequence: Synthetic oligonucleotide
cucaguagguuugaguagg

SEQ ID NO: 2648773 - RNA, 19 nt, Artificial Sequence
  Description of Artificial Sequence: Synthetic oligonucleotide
aaaccauugaguaacugua

SEQ ID NO: 2648774 - RNA, 19 nt, Artificial Sequence
  Description of Artificial Sequence: Synthetic oligonucleotide
uggagucucagaauaucca

SEQ ID NO: 2648775 - RNA, 19 nt, Artificial Sequence
  Description of Artificial Sequence: Synthetic oligonucleotide
aacugcucgcucucgagca

SEQ ID NO: 2648776 - RNA, 19 nt, Artificial Sequence
  Description of Artificial Sequence: Synthetic oligonucleotide
uuacucuuguucuucuugu

SEQ ID NO: 2648777 - RNA, 19 nt, Artificial Sequence
  Description of Artificial Sequence: Synthetic oligonucleotide
cuuacucuuguucuucuug

SEQ ID NO: 2648778 - RNA, 19 nt, Artificial Sequence
  Description of Artificial Sequence: Synthetic oligonucleotide
ucucaguagguuugaguag

SEQ ID NO: 2648779 - RNA, 19 nt, Artificial Sequence
  Description of Artificial Sequence: Synthetic oligonucleotide
agacacuuguuuucugcgg

SEQ ID NO: 2648780 - RNA, 19 nt, Artificial Sequence
  Description of Artificial Sequence: Synthetic oligonucleotide
uauucacuucuuuggaacu

SEQ ID NO: 2648781 - RNA, 19 nt, Artificial Sequence
  Description of Artificial Sequence: Synthetic oligonucleotide
uuccuuuucccauccguag

SEQ ID NO: 2648782 - RNA, 19 nt, Artificial Sequence
  Description of Artificial Sequence: Synthetic oligonucleotide
cuggagucucagaauaucc

SEQ ID NO: 2648783 - RNA, 19 nt, Artificial Sequence
  Description of Artificial Sequence: Synthetic oligonucleotide
aacaggguaagcaaagaaa

SEQ ID NO: 2648784 - RNA, 19 nt, Artificial Sequence
  Description of Artificial Sequence: Synthetic oligonucleotide
caucaguuuagaaggguug

SEQ ID NO: 2648785 - RNA, 19 nt, Artificial Sequence
  Description of Artificial Sequence: Synthetic oligonucleotide
ugaugcacaguucuucaaa

SEQ ID NO: 2648786 - RNA, 19 nt, Artificial Sequence
  Description of Artificial Sequence: Synthetic oligonucleotide
uucagcccauccauguuag

SEQ ID NO: 2648787 - RNA, 19 nt, Artificial Sequence
  Description of Artificial Sequence: Synthetic oligonucleotide
gaaggguugaucauccaac

SEQ ID NO: 2648788 - RNA, 19 nt, Artificial Sequence
  Description of Artificial Sequence: Synthetic oligonucleotide
cagacacuuguuuucugcg

SEQ ID NO: 2648789 - RNA, 19 nt, Artificial Sequence
  Description of Artificial Sequence: Synthetic oligonucleotide
aggaaacugcccuucagcu

SEQ ID NO: 2648790 - RNA, 19 nt, Artificial Sequence
  Description of Artificial Sequence: Synthetic oligonucleotide
uccguagcucucaacagac

SEQ ID NO: 2648791 - RNA, 19 nt, Artificial Sequence
  Description of Artificial Sequence: Synthetic oligonucleotide
uuuaguagucacugucaga

SEQ ID NO: 2648792 - RNA, 19 nt, Artificial Sequence
  Description of Artificial Sequence: Synthetic oligonucleotide
gaauauccagccauacacc

SEQ ID NO: 2648793 - RNA, 19 nt, Artificial Sequence
  Description of Artificial Sequence: Synthetic oligonucleotide
ucugaaacuuauucacuuc

SEQ ID NO: 2648794 - RNA, 19 nt, Artificial Sequence
  Description of Artificial Sequence: Synthetic oligonucleotide
agcccauccauguuagcuc

SEQ ID NO: 2648795 - RNA, 19 nt, Artificial Sequence
  Description of Artificial Sequence: Synthetic oligonucleotide
cuagacacuggaagacugg

SEQ ID NO: 2648796 - RNA, 19 nt, Artificial Sequence
  Description of Artificial Sequence: Synthetic oligonucleotide
ugaguaacuguaucauccu

SEQ ID NO: 2648797 - RNA, 19 nt, Artificial Sequence
  Description of Artificial Sequence: Synthetic oligonucleotide
ucaucaguuuagaaggguu

SEQ ID NO: 2648798 - RNA, 19 nt, Artificial Sequence
  Description of Artificial Sequence: Synthetic oligonucleotide
agaaacaggguaagcaaag

SEQ ID NO: 2648799 - RNA, 19 nt, Artificial Sequence
  Description of Artificial Sequence: Synthetic oligonucleotide
uaggccaucugaaacuuau

SEQ ID NO: 2648800 - RNA, 19 nt, Artificial Sequence
  Description of Artificial Sequence: Synthetic oligonucleotide
cucuccaccgcacucuucc

SEQ ID NO: 2648801 - RNA, 19 nt, Artificial Sequence
  Description of Artificial Sequence: Synthetic oligonucleotide
aaacaacccuuacaugaaa

SEQ ID NO: 2648802 - RNA, 19 nt, Artificial Sequence
  Description of Artificial Sequence: Synthetic oligonucleotide
aaaacaacccuuacaugaa

SEQ ID NO: 2648803 - RNA, 19 nt, Artificial Sequence
  Description of Artificial Sequence: Synthetic oligonucleotide
cugcccuucagcugguugg

SEQ ID NO: 2648804 - RNA, 19 nt, Artificial Sequence
  Description of Artificial Sequence: Synthetic oligonucleotide
ccaucugaaacuuauucac

SEQ ID NO: 2648805 - RNA, 19 nt, Artificial Sequence
  Description of Artificial Sequence: Synthetic oligonucleotide
caggaaacugcccuucagc

SEQ ID NO: 2648806 - RNA, 19 nt, Artificial Sequence
  Description of Artificial Sequence: Synthetic oligonucleotide
acugugccgguuuuggucu

SEQ ID NO: 2648807 - RNA, 19 nt, Artificial Sequence
  Description of Artificial Sequence: Synthetic oligonucleotide
ugcugaucuuccuuuuccc

SEQ ID NO: 2648808 - RNA, 19 nt, Artificial Sequence
  Description of Artificial Sequence: Synthetic oligonucleotide
aggugccaaaagcagcaac

SEQ ID NO: 2648809 - RNA, 19 nt, Artificial Sequence
  Description of Artificial Sequence: Synthetic oligonucleotide
cucucaguagguuugagua

SEQ ID NO: 2648810 - RNA, 19 nt, Artificial Sequence
  Description of Artificial Sequence: Synthetic oligonucleotide
ucauccaacccuucccucu

SEQ ID NO: 2648811 - RNA, 19 nt, Artificial Sequence
  Description of Artificial Sequence: Synthetic oligonucleotide
acuggagucucagaauauc

SEQ ID NO: 2648812 - RNA, 19 nt, Artificial Sequence
  Description of Artificial Sequence: Synthetic oligonucleotide
agggugauguacacgcugc

SEQ ID NO: 2648813 - RNA, 19 nt, Artificial Sequence
  Description of Artificial Sequence: Synthetic oligonucleotide
gaaggugccaaaagcagca

SEQ ID NO: 2648814 - RNA, 19 nt, Artificial Sequence
  Description of Artificial Sequence: Synthetic oligonucleotide
ucucaacagacacuuguuu

SEQ ID NO: 2648815 - RNA, 19 nt, Artificial Sequence
  Description of Artificial Sequence: Synthetic oligonucleotide
acuuguuuucugcgggcuc

SEQ ID NO: 2648816 - RNA, 19 nt, Artificial Sequence
  Description of Artificial Sequence: Synthetic oligonucleotide
auucacuucuuuggaacuc

SEQ ID NO: 2648817 - RNA, 19 nt, Artificial Sequence
  Description of Artificial Sequence: Synthetic oligonucleotide
agaaggguugaucauccaa

SEQ ID NO: 2648818 - RNA, 19 nt, Artificial Sequence
  Description of Artificial Sequence: Synthetic oligonucleotide
uccagccauacaccgaaga

SEQ ID NO: 2648819 - RNA, 19 nt, Artificial Sequence
  Description of Artificial Sequence: Synthetic oligonucleotide
uguacacgcugcccgacga

SEQ ID NO: 2648820 - RNA, 19 nt, Artificial Sequence
  Description of Artificial Sequence: Synthetic oligonucleotide
acgccugucacugugccgg

SEQ ID NO: 2648821 - RNA, 19 nt, Artificial Sequence
  Description of Artificial Sequence: Synthetic oligonucleotide
ugccaaaagcagcaacaca

SEQ ID NO: 2648822 - RNA, 19 nt, Artificial Sequence
  Description of Artificial Sequence: Synthetic oligonucleotide
ugacuagacacuggaagac

SEQ ID NO: 2648823 - RNA, 19 nt, Artificial Sequence
  Description of Artificial Sequence: Synthetic oligonucleotide
agacuggagucucagaaua

SEQ ID NO: 2648824 - RNA, 19 nt, Artificial Sequence
  Description of Artificial Sequence: Synthetic oligonucleotide
accauccugagcuccgccg

SEQ ID NO: 2648825 - RNA, 19 nt, Artificial Sequence
  Description of Artificial Sequence: Synthetic oligonucleotide
uggcuucucaucaguuuag

SEQ ID NO: 2648826 - RNA, 19 nt, Artificial Sequence
  Description of Artificial Sequence: Synthetic oligonucleotide
uuacauacagaaggugcca

SEQ ID NO: 2648827 - RNA, 19 nt, Artificial Sequence
  Description of Artificial Sequence: Synthetic oligonucleotide
ucccucugaaaacaacccu

SEQ ID NO: 2648828 - RNA, 19 nt, Artificial Sequence
  Description of Artificial Sequence: Synthetic oligonucleotide
gagucucagaauauccagc

SEQ ID NO: 2648829 - RNA, 19 nt, Artificial Sequence
  Description of Artificial Sequence: Synthetic oligonucleotide
ucagaauauccagccauac

SEQ ID NO: 2648830 - RNA, 19 nt, Artificial Sequence
  Description of Artificial Sequence: Synthetic oligonucleotide
aacaccauccugagcuccg

SEQ ID NO: 2648831 - RNA, 19 nt, Artificial Sequence
  Description of Artificial Sequence: Synthetic oligonucleotide
gaccaucauacuucuucag

SEQ ID NO: 2648832 - RNA, 19 nt, Artificial Sequence
  Description of Artificial Sequence: Synthetic oligonucleotide
gacacuggaagacuggagu

SEQ ID NO: 2648833 - RNA, 19 nt, Artificial Sequence
  Description of Artificial Sequence: Synthetic oligonucleotide
ucaguagguuugaguaggc

SEQ ID NO: 2648834 - RNA, 19 nt, Artificial Sequence
  Description of Artificial Sequence: Synthetic oligonucleotide
ugaucuuccuuuucccauc

SEQ ID NO: 2648835 - RNA, 19 nt, Artificial Sequence
  Description of Artificial Sequence: Synthetic oligonucleotide
augaaaacaguuacauaca

SEQ ID NO: 2648836 - RNA, 19 nt, Artificial Sequence
  Description of Artificial Sequence: Synthetic oligonucleotide
guggaguggguuuggugcg

SEQ ID NO: 2648837 - RNA, 19 nt, Artificial Sequence
  Description of Artificial Sequence: Synthetic oligonucleotide
agaguuuaguagucacugu

SEQ ID NO: 2648838 - RNA, 19 nt, Artificial Sequence
  Description of Artificial Sequence: Synthetic oligonucleotide
uugaguaggccaucugaaa

SEQ ID NO: 2648839 - RNA, 19 nt, Artificial Sequence
  Description of Artificial Sequence: Synthetic oligonucleotide
cauccguagcucucaacag

SEQ ID NO: 2648840 - RNA, 19 nt, Artificial Sequence
  Description of Artificial Sequence: Synthetic oligonucleotide
ucucgagcaacaccauccu

SEQ ID NO: 2648841 - RNA, 19 nt, Artificial Sequence
  Description of Artificial Sequence: Synthetic oligonucleotide
acaguuacauacagaaggu

SEQ ID NO: 2648842 - RNA, 19 nt, Artificial Sequence
  Description of Artificial Sequence: Synthetic oligonucleotide
gaacucaccacggugcuga

SEQ ID NO: 2648843 - RNA, 19 nt, Artificial Sequence
  Description of Artificial Sequence: Synthetic oligonucleotide
acuagacacuggaagacug

SEQ ID NO: 2648844 - RNA, 19 nt, Artificial Sequence
  Description of Artificial Sequence: Synthetic oligonucleotide
auccauguuagcucucagu

SEQ ID NO: 2648845 - RNA, 19 nt, Artificial Sequence
  Description of Artificial Sequence: Synthetic oligonucleotide
aacaacccuuacaugaaaa

SEQ ID NO: 2648846 - RNA, 19 nt, Artificial Sequence
  Description of Artificial Sequence: Synthetic oligonucleotide
ucuuguucuucuugucccu

SEQ ID NO: 2648847 - RNA, 19 nt, Artificial Sequence
  Description of Artificial Sequence: Synthetic oligonucleotide
cauccuagaguuuaguagu

SEQ ID NO: 2648848 - RNA, 19 nt, Artificial Sequence
  Description of Artificial Sequence: Synthetic oligonucleotide
aucauccuagaguuuagua

SEQ ID NO: 2648849 - RNA, 19 nt, Artificial Sequence
  Description of Artificial Sequence: Synthetic oligonucleotide
aucaguuuagaaggguuga

SEQ ID NO: 2648850 - RNA, 19 nt, Artificial Sequence
  Description of Artificial Sequence: Synthetic oligonucleotide
aacagcacggauggacuug

SEQ ID NO: 2648851 - RNA, 19 nt, Artificial Sequence
  Description of Artificial Sequence: Synthetic oligonucleotide
auccguagcucucaacaga

SEQ ID NO: 2648852 - RNA, 19 nt, Artificial Sequence
  Description of Artificial Sequence: Synthetic oligonucleotide
ggcucaacgcucuccaccg

SEQ ID NO: 2648853 - RNA, 19 nt, Artificial Sequence
  Description of Artificial Sequence: Synthetic oligonucleotide
ugauguacacgcugcccga

SEQ ID NO: 2648854 - RNA, 19 nt, Artificial Sequence
  Description of Artificial Sequence: Synthetic oligonucleotide
gucacugugccgguuuugg

SEQ ID NO: 2648855 - RNA, 19 nt, Artificial Sequence
  Description of Artificial Sequence: Synthetic oligonucleotide
aaacagcacggauggacuu

SEQ ID NO: 2648856 - RNA, 19 nt, Artificial Sequence
  Description of Artificial Sequence: Synthetic oligonucleotide
uucagcugguuggcaaugg

SEQ ID NO: 2648857 - RNA, 19 nt, Artificial Sequence
  Description of Artificial Sequence: Synthetic oligonucleotide
auguacacgcugcccgacg

SEQ ID NO: 2648858 - RNA, 19 nt, Artificial Sequence
  Description of Artificial Sequence: Synthetic oligonucleotide
uuucugcgggcucaacgcu

SEQ ID NO: 2648859 - RNA, 19 nt, Artificial Sequence
  Description of Artificial Sequence: Synthetic oligonucleotide
cacuucuuuggaacucacc

SEQ ID NO: 2648860 - RNA, 19 nt, Artificial Sequence
  Description of Artificial Sequence: Synthetic oligonucleotide
aagcagcaacacaggaaac

SEQ ID NO: 2648861 - RNA, 19 nt, Artificial Sequence
  Description of Artificial Sequence: Synthetic oligonucleotide
ugucccucuucuucagccc

SEQ ID NO: 2648862 - RNA, 19 nt, Artificial Sequence
  Description of Artificial Sequence: Synthetic oligonucleotide
agcacggauggacuuggug

SEQ ID NO: 2648863 - RNA, 19 nt, Artificial Sequence
  Description of Artificial Sequence: Synthetic oligonucleotide
uccaccgcacucuuccgug

SEQ ID NO: 2648864 - RNA, 19 nt, Artificial Sequence
  Description of Artificial Sequence: Synthetic oligonucleotide
cuccgucaggaacugcucg

SEQ ID NO: 2648865 - RNA, 19 nt, Artificial Sequence
  Description of Artificial Sequence: Synthetic oligonucleotide
caacccuucccucugaaaa

SEQ ID NO: 2648866 - RNA, 19 nt, Artificial Sequence
  Description of Artificial Sequence: Synthetic oligonucleotide
cucgcucucgagcaacacc

SEQ ID NO: 2648867 - RNA, 19 nt, Artificial Sequence
  Description of Artificial Sequence: Synthetic oligonucleotide
uggugcgaccaucauacuu

SEQ ID NO: 2648868 - RNA, 19 nt, Artificial Sequence
  Description of Artificial Sequence: Synthetic oligonucleotide
aguggguuuggugcgacca

SEQ ID NO: 2648869 - RNA, 19 nt, Artificial Sequence
  Description of Artificial Sequence: Synthetic oligonucleotide
gaaacuuauucacuucuuu

SEQ ID NO: 2648870 - RNA, 19 nt, Artificial Sequence
  Description of Artificial Sequence: Synthetic oligonucleotide
acagcacggauggacuugg

SEQ ID NO: 2648871 - RNA, 19 nt, Artificial Sequence
  Description of Artificial Sequence: Synthetic oligonucleotide
cguggaguggguuuggugc

SEQ ID NO: 2648872 - RNA, 19 nt, Artificial Sequence
  Description of Artificial Sequence: Synthetic oligonucleotide
acacaggaaacugcccuuc

SEQ ID NO: 2648873 - RNA, 19 nt, Artificial Sequence
  Description of Artificial Sequence: Synthetic oligonucleotide
uccuagaguuuaguaguca

SEQ ID NO: 2648874 - RNA, 19 nt, Artificial Sequence
  Description of Artificial Sequence: Synthetic oligonucleotide
ucaacgcucuccaccgcac

SEQ ID NO: 2648875 - RNA, 19 nt, Artificial Sequence
  Description of Artificial Sequence: Synthetic oligonucleotide
gaguaggccaucugaaacu

SEQ ID NO: 2648876 - RNA, 19 nt, Artificial Sequence
  Description of Artificial Sequence: Synthetic oligonucleotide
gcgaccaucauacuucuuc

SEQ ID NO: 2648877 - RNA, 19 nt, Artificial Sequence
  Description of Artificial Sequence: Synthetic oligonucleotide
gaaacaggguaagcaaaga

SEQ ID NO: 2648878 - RNA, 19 nt, Artificial Sequence
  Description of Artificial Sequence: Synthetic oligonucleotide
ggccaucugaaacuuauuc

SEQ ID NO: 2648879 - RNA, 19 nt, Artificial Sequence
  Description of Artificial Sequence: Synthetic oligonucleotide
uaucauccuagaguuuagu

SEQ ID NO: 2648880 - RNA, 19 nt, Artificial Sequence
  Description of Artificial Sequence: Synthetic oligonucleotide
caacccuuacaugaaaaca

SEQ ID NO: 2648881 - RNA, 19 nt, Artificial Sequence
  Description of Artificial Sequence: Synthetic oligonucleotide
uacauacagaaggugccaa

SEQ ID NO: 2648882 - RNA, 19 nt, Artificial Sequence
  Description of Artificial Sequence: Synthetic oligonucleotide
auacaccgaagaucuaaaa

SEQ ID NO: 2648883 - RNA, 19 nt, Artificial Sequence
  Description of Artificial Sequence: Synthetic oligonucleotide
auggccacgccugucacug

SEQ ID NO: 2648884 - RNA, 19 nt, Artificial Sequence
  Description of Artificial Sequence: Synthetic oligonucleotide
ucuuccguggaguggguuu

SEQ ID NO: 2648885 - RNA, 19 nt, Artificial Sequence
  Description of Artificial Sequence: Synthetic oligonucleotide
ccuagaguuuaguagucac

SEQ ID NO: 2648886 - RNA, 19 nt, Artificial Sequence
  Description of Artificial Sequence: Synthetic oligonucleotide
agcaaagaaacagcacgga

SEQ ID NO: 2648887 - RNA, 19 nt, Artificial Sequence
  Description of Artificial Sequence: Synthetic oligonucleotide
cuucuucagcccauccaug

SEQ ID NO: 2648888 - RNA, 19 nt, Artificial Sequence
  Description of Artificial Sequence: Synthetic oligonucleotide
gacuuggugaugcacaguu

SEQ ID NO: 2648889 - RNA, 19 nt, Artificial Sequence
  Description of Artificial Sequence: Synthetic oligonucleotide
cucaccacggugcugaucu

SEQ ID NO: 2648890 - RNA, 19 nt, Artificial Sequence
  Description of Artificial Sequence: Synthetic oligonucleotide
uacucuuguucuucuuguc

SEQ ID NO: 2648891 - RNA, 19 nt, Artificial Sequence
  Description of Artificial Sequence: Synthetic oligonucleotide
gguuuuggucuucuuacuc

SEQ ID NO: 2648892 - RNA, 19 nt, Artificial Sequence
  Description of Artificial Sequence: Synthetic oligonucleotide
caguuuagaaggguugauc

SEQ ID NO: 2648893 - RNA, 19 nt, Artificial Sequence
  Description of Artificial Sequence: Synthetic oligonucleotide
aaccauugaguaacuguau

SEQ ID NO: 2648894 - RNA, 19 nt, Artificial Sequence
  Description of Artificial Sequence: Synthetic oligonucleotide
cuucagggugauguacacg

SEQ ID NO: 2648895 - RNA, 19 nt, Artificial Sequence
  Description of Artificial Sequence: Synthetic oligonucleotide
acuggcuucucaucaguuu

SEQ ID NO: 2648896 - RNA, 19 nt, Artificial Sequence
  Description of Artificial Sequence: Synthetic oligonucleotide
cagccauacaccgaagauc

SEQ ID NO: 2648897 - RNA, 19 nt, Artificial Sequence
  Description of Artificial Sequence: Synthetic oligonucleotide
cagaaacaggguaagcaaa

SEQ ID NO: 2648898 - RNA, 19 nt, Artificial Sequence
  Description of Artificial Sequence: Synthetic oligonucleotide
ggugcgaccaucauacuuc

SEQ ID NO: 2648899 - RNA, 19 nt, Artificial Sequence
  Description of Artificial Sequence: Synthetic oligonucleotide
uacacgcugcccgacgacc

SEQ ID NO: 2648900 - RNA, 19 nt, Artificial Sequence
  Description of Artificial Sequence: Synthetic oligonucleotide
guaucauccuagaguuuag

SEQ ID NO: 2648901 - RNA, 19 nt, Artificial Sequence
  Description of Artificial Sequence: Synthetic oligonucleotide
ccgguuuuggucuucuuac

SEQ ID NO: 2648902 - RNA, 19 nt, Artificial Sequence
  Description of Artificial Sequence: Synthetic oligonucleotide
cauacaccgaagaucuaaa

SEQ ID NO: 2648903 - RNA, 19 nt, Artificial Sequence
  Description of Artificial Sequence: Synthetic oligonucleotide
ucagggugauguacacgcu

SEQ ID NO: 2648904 - RNA, 19 nt, Artificial Sequence
  Description of Artificial Sequence: Synthetic oligonucleotide
ggguaagcaaagaaacagc

SEQ ID NO: 2648905 - RNA, 19 nt, Artificial Sequence
  Description of Artificial Sequence: Synthetic oligonucleotide
uucugcgggcucaacgcuc

SEQ ID NO: 2648906 - RNA, 19 nt, Artificial Sequence
  Description of Artificial Sequence: Synthetic oligonucleotide
cugguuggcaauggccacg

SEQ ID NO: 2648907 - RNA, 19 nt, Artificial Sequence
  Description of Artificial Sequence: Synthetic oligonucleotide
ugguuggcaauggccacgc

SEQ ID NO: 2648908 - RNA, 19 nt, Artificial Sequence
  Description of Artificial Sequence: Synthetic oligonucleotide
acgaccggcacuucuggaa

SEQ ID NO: 2648909 - RNA, 19 nt, Artificial Sequence
  Description of Artificial Sequence: Synthetic oligonucleotide
ggugccaaaagcagcaaca

SEQ ID NO: 2648910 - RNA, 19 nt, Artificial Sequence
  Description of Artificial Sequence: Synthetic oligonucleotide
cauccaacccuucccucug

SEQ ID NO: 2648911 - RNA, 19 nt, Artificial Sequence
  Description of Artificial Sequence: Synthetic oligonucleotide
ucuucagcccauccauguu

SEQ ID NO: 2648912 - RNA, 19 nt, Artificial Sequence
  Description of Artificial Sequence: Synthetic oligonucleotide
gaaacagcacggauggacu

SEQ ID NO: 2648913 - RNA, 19 nt, Artificial Sequence
  Description of Artificial Sequence: Synthetic oligonucleotide
uagaaggguugaucaucca

SEQ ID NO: 2648914 - RNA, 19 nt, Artificial Sequence
  Description of Artificial Sequence: Synthetic oligonucleotide
gaguaacuguaucauccua

SEQ ID NO: 2648915 - RNA, 19 nt, Artificial Sequence
  Description of Artificial Sequence: Synthetic oligonucleotide
cauccauguuagcucucag

SEQ ID NO: 2648916 - RNA, 19 nt, Artificial Sequence
  Description of Artificial Sequence: Synthetic oligonucleotide
caacaccauccugagcucc

SEQ ID NO: 2648917 - RNA, 19 nt, Artificial Sequence
  Description of Artificial Sequence: Synthetic oligonucleotide
caguagguuugaguaggcc

SEQ ID NO: 2648918 - RNA, 19 nt, Artificial Sequence
  Description of Artificial Sequence: Synthetic oligonucleotide
aggaacugcucgcucucga

SEQ ID NO: 2648919 - RNA, 19 nt, Artificial Sequence
  Description of Artificial Sequence: Synthetic oligonucleotide
cuagaguuuaguagucacu

SEQ ID NO: 2648920 - RNA, 19 nt, Artificial Sequence
  Description of Artificial Sequence: Synthetic oligonucleotide
ccauugaguaacuguauca

SEQ ID NO: 2648921 - RNA, 19 nt, Artificial Sequence
  Description of Artificial Sequence: Synthetic oligonucleotide
ccauguuagcucucaguag

SEQ ID NO: 2648922 - RNA, 19 nt, Artificial Sequence
  Description of Artificial Sequence: Synthetic oligonucleotide
gugccaaaagcagcaacac

SEQ ID NO: 2648923 - RNA, 19 nt, Artificial Sequence
  Description of Artificial Sequence: Synthetic oligonucleotide
acaccauccugagcuccgc

SEQ ID NO: 2648924 - RNA, 19 nt, Artificial Sequence
  Description of Artificial Sequence: Synthetic oligonucleotide
uaguagucacugucagaaa

SEQ ID NO: 2648925 - RNA, 19 nt, Artificial Sequence
  Description of Artificial Sequence: Synthetic oligonucleotide
guuuggugcgaccaucaua

SEQ ID NO: 2648926 - RNA, 19 nt, Artificial Sequence
  Description of Artificial Sequence: Synthetic oligonucleotide
acggugcugaucuuccuuu

SEQ ID NO: 2648927 - RNA, 19 nt, Artificial Sequence
  Description of Artificial Sequence: Synthetic oligonucleotide
cuuccuuuucccauccgua

SEQ ID NO: 2648928 - RNA, 19 nt, Artificial Sequence
  Description of Artificial Sequence: Synthetic oligonucleotide
cacugucagaaacagggua

SEQ ID NO: 2648929 - RNA, 19 nt, Artificial Sequence
  Description of Artificial Sequence: Synthetic oligonucleotide
cguagcucucaacagacac

SEQ ID NO: 2648930 - RNA, 19 nt, Artificial Sequence
  Description of Artificial Sequence: Synthetic oligonucleotide
ugcucgcucucgagcaaca

SEQ ID NO: 2648931 - RNA, 19 nt, Artificial Sequence
  Description of Artificial Sequence: Synthetic oligonucleotide
guuagcucucaguagguuu

SEQ ID NO: 2648932 - RNA, 19 nt, Artificial Sequence
  Description of Artificial Sequence: Synthetic oligonucleotide
cuuccguggaguggguuug

SEQ ID NO: 2648933 - RNA, 19 nt, Artificial Sequence
  Description of Artificial Sequence: Synthetic oligonucleotide
uucccauccguagcucuca

SEQ ID NO: 2648934 - RNA, 19 nt, Artificial Sequence
  Description of Artificial Sequence: Synthetic oligonucleotide
gggcucaacgcucuccacc

SEQ ID NO: 2648935 - RNA, 19 nt, Artificial Sequence
  Description of Artificial Sequence: Synthetic oligonucleotide
gagcaacaccauccugagc

SEQ ID NO: 2648936 - RNA, 19 nt, Artificial Sequence
  Description of Artificial Sequence: Synthetic oligonucleotide
gauguacacgcugcccgac

SEQ ID NO: 2648937 - RNA, 19 nt, Artificial Sequence
  Description of Artificial Sequence: Synthetic oligonucleotide
cuucagcccauccauguua

SEQ ID NO: 2648938 - RNA, 19 nt, Artificial Sequence
  Description of Artificial Sequence: Synthetic oligonucleotide
ccuuacaugaaaacaguua

SEQ ID NO: 2648939 - RNA, 19 nt, Artificial Sequence
  Description of Artificial Sequence: Synthetic oligonucleotide
ccauccguagcucucaaca

SEQ ID NO: 2648940 - RNA, 19 nt, Artificial Sequence
  Description of Artificial Sequence: Synthetic oligonucleotide
caucauacuucuucagggu

SEQ ID NO: 2648941 - RNA, 19 nt, Artificial Sequence
  Description of Artificial Sequence: Synthetic oligonucleotide
ggugauguacacgcugccc

SEQ ID NO: 2648942 - RNA, 19 nt, Artificial Sequence
  Description of Artificial Sequence: Synthetic oligonucleotide
uguuagcucucaguagguu

SEQ ID NO: 2648943 - RNA, 19 nt, Artificial Sequence
  Description of Artificial Sequence: Synthetic oligonucleotide
cucagaauauccagccaua

SEQ ID NO: 2648944 - RNA, 19 nt, Artificial Sequence
  Description of Artificial Sequence: Synthetic oligonucleotide
acccuucccucugaaaaca

SEQ ID NO: 2648945 - RNA, 19 nt, Artificial Sequence
  Description of Artificial Sequence: Synthetic oligonucleotide
cucaacagacacuuguuuu

SEQ ID NO: 2648946 - RNA, 19 nt, Artificial Sequence
  Description of Artificial Sequence: Synthetic oligonucleotide
cacgccugucacugugccg

SEQ ID NO: 2648947 - RNA, 19 nt, Artificial Sequence
  Description of Artificial Sequence: Synthetic oligonucleotide
agguuugaguaggccaucu

SEQ ID NO: 2648948 - RNA, 19 nt, Artificial Sequence
  Description of Artificial Sequence: Synthetic oligonucleotide
guuuagaaggguugaucau

SEQ ID NO: 2648949 - RNA, 19 nt, Artificial Sequence
  Description of Artificial Sequence: Synthetic oligonucleotide
ugucacugugccgguuuug

SEQ ID NO: 2648950 - RNA, 19 nt, Artificial Sequence
  Description of Artificial Sequence: Synthetic oligonucleotide
auauccagccauacaccga

SEQ ID NO: 2648951 - RNA, 19 nt, Artificial Sequence
  Description of Artificial Sequence: Synthetic oligonucleotide
cucgagcaacaccauccug

SEQ ID NO: 2648952 - RNA, 19 nt, Artificial Sequence
  Description of Artificial Sequence: Synthetic oligonucleotide
acacgcugcccgacgaccg

SEQ ID NO: 2648953 - RNA, 19 nt, Artificial Sequence
  Description of Artificial Sequence: Synthetic oligonucleotide
accgcacucuuccguggag

SEQ ID NO: 2648954 - RNA, 19 nt, Artificial Sequence
  Description of Artificial Sequence: Synthetic oligonucleotide
aagaaacagcacggaugga

SEQ ID NO: 2648955 - RNA, 19 nt, Artificial Sequence
  Description of Artificial Sequence: Synthetic oligonucleotide
ggucagcuccgucaggaac

SEQ ID NO: 2648956 - RNA, 19 nt, Artificial Sequence
  Description of Artificial Sequence: Synthetic oligonucleotide
gguuugaguaggccaucug

SEQ ID NO: 2648957 - RNA, 19 nt, Artificial Sequence
  Description of Artificial Sequence: Synthetic oligonucleotide
gaguggguuuggugcgacc

SEQ ID NO: 2648958 - RNA, 19 nt, Artificial Sequence
  Description of Artificial Sequence: Synthetic oligonucleotide
cuucagcugguuggcaaug

SEQ ID NO: 2648959 - RNA, 19 nt, Artificial Sequence
  Description of Artificial Sequence: Synthetic oligonucleotide
aacuggcuucucaucaguu

SEQ ID NO: 2648960 - RNA, 19 nt, Artificial Sequence
  Description of Artificial Sequence: Synthetic oligonucleotide
accggcacuucuggaagag

SEQ ID NO: 2648961 - RNA, 19 nt, Artificial Sequence
  Description of Artificial Sequence: Synthetic oligonucleotide
cucaacgcucuccaccgca

SEQ ID NO: 2648962 - RNA, 19 nt, Artificial Sequence
  Description of Artificial Sequence: Synthetic oligonucleotide
uggguuuggugcgaccauc

SEQ ID NO: 2648963 - RNA, 19 nt, Artificial Sequence
  Description of Artificial Sequence: Synthetic oligonucleotide
cauugaguaacuguaucau

SEQ ID NO: 2648964 - RNA, 19 nt, Artificial Sequence
  Description of Artificial Sequence: Synthetic oligonucleotide
guagguuugaguaggccau

SEQ ID NO: 2648965 - RNA, 19 nt, Artificial Sequence
  Description of Artificial Sequence: Synthetic oligonucleotide
gcugaucuuccuuuuccca

SEQ ID NO: 2648966 - RNA, 19 nt, Artificial Sequence
  Description of Artificial Sequence: Synthetic oligonucleotide
ugcgggcucaacgcucucc

SEQ ID NO: 2648967 - RNA, 19 nt, Artificial Sequence
  Description of Artificial Sequence: Synthetic oligonucleotide
uuccguggaguggguuugg

SEQ ID NO: 2648968 - RNA, 19 nt, Artificial Sequence
  Description of Artificial Sequence: Synthetic oligonucleotide
uggcaauggccacgccugu

SEQ ID NO: 2648969 - RNA, 19 nt, Artificial Sequence
  Description of Artificial Sequence: Synthetic oligonucleotide
gacuagacacuggaagacu

SEQ ID NO: 2648970 - RNA, 19 nt, Artificial Sequence
  Description of Artificial Sequence: Synthetic oligonucleotide
gugaugcacaguucuucaa

SEQ ID NO: 2648971 - RNA, 19 nt, Artificial Sequence
  Description of Artificial Sequence: Synthetic oligonucleotide
cugaucuuccuuuucccau

SEQ ID NO: 2648972 - RNA, 19 nt, Artificial Sequence
  Description of Artificial Sequence: Synthetic oligonucleotide
ccauccugagcuccgccgg

SEQ ID NO: 2648973 - RNA, 19 nt, Artificial Sequence
  Description of Artificial Sequence: Synthetic oligonucleotide
agaugacuagacacuggaa

SEQ ID NO: 2648974 - RNA, 19 nt, Artificial Sequence
  Description of Artificial Sequence: Synthetic oligonucleotide
uagguuugaguaggccauc

SEQ ID NO: 2648975 - RNA, 19 nt, Artificial Sequence
  Description of Artificial Sequence: Synthetic oligonucleotide
caccauccugagcuccgcc

SEQ ID NO: 2648976 - RNA, 19 nt, Artificial Sequence
  Description of Artificial Sequence: Synthetic oligonucleotide
gaccggcacuucuggaaga

SEQ ID NO: 2648977 - RNA, 19 nt, Artificial Sequence
  Description of Artificial Sequence: Synthetic oligonucleotide
uagcucucaguagguuuga

SEQ ID NO: 2648978 - RNA, 19 nt, Artificial Sequence
  Description of Artificial Sequence: Synthetic oligonucleotide
gacgaccggcacuucugga

SEQ ID NO: 2648979 - RNA, 19 nt, Artificial Sequence
  Description of Artificial Sequence: Synthetic oligonucleotide
ggugcugaucuuccuuuuc

SEQ ID NO: 2648980 - RNA, 19 nt, Artificial Sequence
  Description of Artificial Sequence: Synthetic oligonucleotide
gggugauguacacgcugcc

SEQ ID NO: 2648981 - RNA, 19 nt, Artificial Sequence
  Description of Artificial Sequence: Synthetic oligonucleotide
gucagcuccgucaggaacu

SEQ ID NO: 2648982 - RNA, 19 nt, Artificial Sequence
  Description of Artificial Sequence: Synthetic oligonucleotide
acgcugcccgacgaccggc

SEQ ID NO: 2648983 - RNA, 19 nt, Artificial Sequence
  Description of Artificial Sequence: Synthetic oligonucleotide
cacgcugcccgacgaccgg

SEQ ID NO: 2648984 - RNA, 19 nt, Artificial Sequence
  Description of Artificial Sequence: Synthetic oligonucleotide
uggaguggguuuggugcga

SEQ ID NO: 2648985 - RNA, 19 nt, Artificial Sequence
  Description of Artificial Sequence: Synthetic oligonucleotide
acucaccacggugcugauc

SEQ ID NO: 2648986 - RNA, 19 nt, Artificial Sequence
  Description of Artificial Sequence: Synthetic oligonucleotide
agcucucaguagguuugag

SEQ ID NO: 2648987 - RNA, 19 nt, Artificial Sequence
  Description of Artificial Sequence: Synthetic oligonucleotide
uuggugcgaccaucauacu

SEQ ID NO: 2648988 - RNA, 19 nt, Artificial Sequence
  Description of Artificial Sequence: Synthetic oligonucleotide
auccaacccuucccucuga

SEQ ID NO: 2648989 - RNA, 19 nt, Artificial Sequence
  Description of Artificial Sequence: Synthetic oligonucleotide
guacacgcugcccgacgac

SEQ ID NO: 2648990 - RNA, 19 nt, Artificial Sequence
  Description of Artificial Sequence: Synthetic oligonucleotide
uguuuucugcgggcucaac

SEQ ID NO: 2648991 - RNA, 19 nt, Artificial Sequence
  Description of Artificial Sequence: Synthetic oligonucleotide
aacucaccacggugcugau

SEQ ID NO: 2648992 - RNA, 19 nt, Artificial Sequence
  Description of Artificial Sequence: Synthetic oligonucleotide
ccuucccucugaaaacaac

SEQ ID NO: 2648993 - RNA, 19 nt, Artificial Sequence
  Description of Artificial Sequence: Synthetic oligonucleotide
ugcccgacgaccggcacuu

SEQ ID NO: 2648994 - RNA, 19 nt, Artificial Sequence
  Description of Artificial Sequence: Synthetic oligonucleotide
gccuggucagcuccgucag

SEQ ID NO: 2648995 - RNA, 19 nt, Artificial Sequence
  Description of Artificial Sequence: Synthetic oligonucleotide
ucccauccguagcucucaa

SEQ ID NO: 2648996 - RNA, 19 nt, Artificial Sequence
  Description of Artificial Sequence: Synthetic oligonucleotide
cgagcaacaccauccugag

SEQ ID NO: 2648997 - RNA, 19 nt, Artificial Sequence
  Description of Artificial Sequence: Synthetic oligonucleotide
gcaacacaggaaacugccc

SEQ ID NO: 2648998 - RNA, 19 nt, Artificial Sequence
  Description of Artificial Sequence: Synthetic oligonucleotide
guagcucucaacagacacu

SEQ ID NO: 2648999 - RNA, 19 nt, Artificial Sequence
  Description of Artificial Sequence: Synthetic oligonucleotide
cacaggaaacugcccuuca

SEQ ID NO: 2649000 - RNA, 19 nt, Artificial Sequence
  Description of Artificial Sequence: Synthetic oligonucleotide
gcuucucaucaguuuagaa

SEQ ID NO: 2649001 - RNA, 19 nt, Artificial Sequence
  Description of Artificial Sequence: Synthetic oligonucleotide
cuggaagacuggagucuca

SEQ ID NO: 2649002 - RNA, 19 nt, Artificial Sequence
  Description of Artificial Sequence: Synthetic oligonucleotide
gcaaagaaacagcacggau

SEQ ID NO: 2649003 - RNA, 19 nt, Artificial Sequence
  Description of Artificial Sequence: Synthetic oligonucleotide
cuuuggaacucaccacggu

SEQ ID NO: 2649004 - RNA, 19 nt, Artificial Sequence
  Description of Artificial Sequence: Synthetic oligonucleotide
caacagacacuuguuuucu

SEQ ID NO: 2649005 - RNA, 19 nt, Artificial Sequence
  Description of Artificial Sequence: Synthetic oligonucleotide
cucaucaguuuagaagggu

SEQ ID NO: 2649006 - RNA, 19 nt, Artificial Sequence
  Description of Artificial Sequence: Synthetic oligonucleotide
gagccuggucagcuccguc

SEQ ID NO: 2649007 - RNA, 19 nt, Artificial Sequence
  Description of Artificial Sequence: Synthetic oligonucleotide
gccgguuuuggucuucuua

SEQ ID NO: 2649008 - RNA, 19 nt, Artificial Sequence
  Description of Artificial Sequence: Synthetic oligonucleotide
ugugccgguuuuggucuuc

SEQ ID NO: 2649009 - RNA, 19 nt, Artificial Sequence
  Description of Artificial Sequence: Synthetic oligonucleotide
ccauacaccgaagaucuaa

SEQ ID NO: 2649010 - RNA, 19 nt, Artificial Sequence
  Description of Artificial Sequence: Synthetic oligonucleotide
agagccuggucagcuccgu

SEQ ID NO: 2649011 - RNA, 19 nt, Artificial Sequence
  Description of Artificial Sequence: Synthetic oligonucleotide
gcucucgagcaacaccauc

SEQ ID NO: 2649012 - RNA, 19 nt, Artificial Sequence
  Description of Artificial Sequence: Synthetic oligonucleotide
ccgacgaccggcacuucug

SEQ ID NO: 2649013 - RNA, 19 nt, Artificial Sequence
  Description of Artificial Sequence: Synthetic oligonucleotide
gcucucaguagguuugagu

SEQ ID NO: 2649014 - RNA, 19 nt, Artificial Sequence
  Description of Artificial Sequence: Synthetic oligonucleotide
ccucugaaaacaacccuua

SEQ ID NO: 2649015 - RNA, 19 nt, Artificial Sequence
  Description of Artificial Sequence: Synthetic oligonucleotide
gugcgaccaucauacuucu

SEQ ID NO: 2649016 - RNA, 19 nt, Artificial Sequence
  Description of Artificial Sequence: Synthetic oligonucleotide
auccagccauacaccgaag

SEQ ID NO: 2649017 - RNA, 19 nt, Artificial Sequence
  Description of Artificial Sequence: Synthetic oligonucleotide
ggguuuggugcgaccauca

SEQ ID NO: 2649018 - RNA, 19 nt, Artificial Sequence
  Description of Artificial Sequence: Synthetic oligonucleotide
ccaccgcacucuuccgugg

SEQ ID NO: 2649019 - RNA, 19 nt, Artificial Sequence
  Description of Artificial Sequence: Synthetic oligonucleotide
cgaccaucauacuucuuca

SEQ ID NO: 2649020 - RNA, 19 nt, Artificial Sequence
  Description of Artificial Sequence: Synthetic oligonucleotide
gacuggagucucagaauau

SEQ ID NO: 2649021 - RNA, 19 nt, Artificial Sequence
  Description of Artificial Sequence: Synthetic oligonucleotide
cgaccggcacuucuggaag

SEQ ID NO: 2649022 - RNA, 19 nt, Artificial Sequence
  Description of Artificial Sequence: Synthetic oligonucleotide
ggaacucaccacggugcug

SEQ ID NO: 2649023 - RNA, 19 nt, Artificial Sequence
  Description of Artificial Sequence: Synthetic oligonucleotide
gcgggcucaacgcucucca

SEQ ID NO: 2649024 - RNA, 19 nt, Artificial Sequence
  Description of Artificial Sequence: Synthetic oligonucleotide
ggcuucucaucaguuuaga

SEQ ID NO: 2649025 - RNA, 19 nt, Artificial Sequence
  Description of Artificial Sequence: Synthetic oligonucleotide
caccgcacucuuccgugga

SEQ ID NO: 2649026 - RNA, 19 nt, Artificial Sequence
  Description of Artificial Sequence: Synthetic oligonucleotide
cgacgaccggcacuucugg

SEQ ID NO: 2649027 - RNA, 19 nt, Artificial Sequence
  Description of Artificial Sequence: Synthetic oligonucleotide
gguugaucauccaacccuu

SEQ ID NO: 2649028 - RNA, 19 nt, Artificial Sequence
  Description of Artificial Sequence: Synthetic oligonucleotide
gcucaacgcucuccaccgc

SEQ ID NO: 2649029 - RNA, 19 nt, Artificial Sequence
  Description of Artificial Sequence: Synthetic oligonucleotide
ccuggucagcuccgucagg

SEQ ID NO: 2649030 - RNA, 19 nt, Artificial Sequence
  Description of Artificial Sequence: Synthetic oligonucleotide
ggaguggguuuggugcgac

SEQ ID NO: 2649031 - RNA, 19 nt, Artificial Sequence
  Description of Artificial Sequence: Synthetic oligonucleotide
uggccacgccugucacugu

SEQ ID NO: 2649032 - RNA, 19 nt, Artificial Sequence
  Description of Artificial Sequence: Synthetic oligonucleotide
gguuggcaauggccacgcc

SEQ ID NO: 2649033 - RNA, 19 nt, Artificial Sequence
  Description of Artificial Sequence: Synthetic oligonucleotide
cccucugaaaacaacccuu

SEQ ID NO: 2649034 - RNA, 19 nt, Artificial Sequence
  Description of Artificial Sequence: Synthetic oligonucleotide
ccauccauguuagcucuca

SEQ ID NO: 2649035 - RNA, 19 nt, Artificial Sequence
  Description of Artificial Sequence: Synthetic oligonucleotide
guggguuuggugcgaccau

SEQ ID NO: 2649036 - RNA, 19 nt, Artificial Sequence
  Description of Artificial Sequence: Synthetic oligonucleotide
cccauccguagcucucaac

SEQ ID NO: 2649037 - RNA, 19 nt, Artificial Sequence
  Description of Artificial Sequence: Synthetic oligonucleotide
cuccaccgcacucuuccgu

SEQ ID NO: 2649038 - RNA, 19 nt, Artificial Sequence
  Description of Artificial Sequence: Synthetic oligonucleotide
acucuuccguggagugggu

SEQ ID NO: 2649039 - RNA, 19 nt, Artificial Sequence
  Description of Artificial Sequence: Synthetic oligonucleotide
cacggugcugaucuuccuu

SEQ ID NO: 2649040 - RNA, 19 nt, Artificial Sequence
  Description of Artificial Sequence: Synthetic oligonucleotide
cauccugagcuccgccggu

SEQ ID NO: 2649041 - RNA, 19 nt, Artificial Sequence
  Description of Artificial Sequence: Synthetic oligonucleotide
caacgcucuccaccgcacu

SEQ ID NO: 2649042 - RNA, 19 nt, Artificial Sequence
  Description of Artificial Sequence: Synthetic oligonucleotide
ccagccauacaccgaagau

SEQ ID NO: 2649043 - RNA, 19 nt, Artificial Sequence
  Description of Artificial Sequence: Synthetic oligonucleotide
gguuuggugcgaccaucau

SEQ ID NO: 2649044 - RNA, 19 nt, Artificial Sequence
  Description of Artificial Sequence: Synthetic oligonucleotide
ccggcacuucuggaagagc

SEQ ID NO: 2649045 - RNA, 19 nt, Artificial Sequence
  Description of Artificial Sequence: Synthetic oligonucleotide
cccauccauguuagcucuc

SEQ ID NO: 2649046 - RNA, 19 nt, Artificial Sequence
  Description of Artificial Sequence: Synthetic oligonucleotide
gcugcccgacgaccggcac

SEQ ID NO: 2649047 - RNA, 19 nt, Artificial Sequence
  Description of Artificial Sequence: Synthetic oligonucleotide
ccguagcucucaacagaca

SEQ ID NO: 2649048 - RNA, 19 nt, Artificial Sequence
  Description of Artificial Sequence: Synthetic oligonucleotide
cugcccgacgaccggcacu

SEQ ID NO: 2649049 - RNA, 19 nt, Artificial Sequence
  Description of Artificial Sequence: Synthetic oligonucleotide
cugcgggcucaacgcucuc

SEQ ID NO: 2649050 - RNA, 19 nt, Artificial Sequence
  Description of Artificial Sequence: Synthetic oligonucleotide
cccuucccucugaaaacaa

SEQ ID NO: 2649051 - RNA, 19 nt, Artificial Sequence
  Description of Artificial Sequence: Synthetic oligonucleotide
gugccgguuuuggucuucu

SEQ ID NO: 2649052 - RNA, 19 nt, Artificial Sequence
  Description of Artificial Sequence: Synthetic oligonucleotide
cugucacugugccgguuuu

SEQ ID NO: 2649053 - RNA, 19 nt, Artificial Sequence
  Description of Artificial Sequence: Synthetic oligonucleotide
ccugucacugugccgguuu

SEQ ID NO: 2649054 - RNA, 19 nt, Artificial Sequence
  Description of Artificial Sequence: Synthetic oligonucleotide
cgggcucaacgcucuccac

SEQ ID NO: 2649055 - RNA, 19 nt, Artificial Sequence
  Description of Artificial Sequence: Synthetic oligonucleotide
gcccuucagcugguuggca

SEQ ID NO: 2649056 - RNA, 19 nt, Artificial Sequence
  Description of Artificial Sequence: Synthetic oligonucleotide
cucuuccguggaguggguu

SEQ ID NO: 2649057 - RNA, 19 nt, Artificial Sequence
  Description of Artificial Sequence: Synthetic oligonucleotide
cccgacgaccggcacuucu

SEQ ID NO: 2649058 - RNA, 19 nt, Artificial Sequence
  Description of Artificial Sequence: Synthetic oligonucleotide
cugugccgguuuuggucuu

SEQ ID NO: 2649059 - RNA, 19 nt, Artificial Sequence
  Description of Artificial Sequence: Synthetic oligonucleotide
gccauacaccgaagaucua

SEQ ID NO: 2649060 - RNA, 19 nt, Artificial Sequence
  Description of Artificial Sequence: Synthetic oligonucleotide
ccgucaggaacugcucgcu

SEQ ID NO: 2649061 - RNA, 19 nt, Artificial Sequence
  Description of Artificial Sequence: Synthetic oligonucleotide
ccacggugcugaucuuccu

SEQ ID NO: 2649062 - RNA, 19 nt, Artificial Sequence
  Description of Artificial Sequence: Synthetic oligonucleotide
cgcugcccgacgaccggca

SEQ ID NO: 2649063 - RNA, 19 nt, Artificial Sequence
  Description of Artificial Sequence: Synthetic oligonucleotide
cggugcugaucuuccuuuu

SEQ ID NO: 2649064 - RNA, 19 nt, Artificial Sequence
  Description of Artificial Sequence: Synthetic oligonucleotide
gccugucacugugccgguu

SEQ ID NO: 2649065 - RNA, 19 nt, Artificial Sequence
  Description of Artificial Sequence: Synthetic oligonucleotide
gcccgacgaccggcacuuc

SEQ ID NO: 2649066 - RNA, 19 nt, Artificial Sequence
  Description of Artificial Sequence: Synthetic oligonucleotide
cgccugucacugugccggu

SEQ ID NO: 2649067 - RNA, 19 nt, Artificial Sequence
  Description of Artificial Sequence: Synthetic oligonucleotide
ucacccacguuauagaagg

SEQ ID NO: 2649068 - RNA, 19 nt, Artificial Sequence
  Description of Artificial Sequence: Synthetic oligonucleotide
ucuaacgcaguaaauguug

SEQ ID NO: 2649069 - RNA, 19 nt, Artificial Sequence
  Description of Artificial Sequence: Synthetic oligonucleotide
aacaccgugugauagucuc

SEQ ID NO: 2649070 - RNA, 19 nt, Artificial Sequence
  Description of Artificial Sequence: Synthetic oligonucleotide
aacgcaguaaauguuguuc

SEQ ID NO: 2649071 - RNA, 19 nt, Artificial Sequence
  Description of Artificial Sequence: Synthetic oligonucleotide
ugucucacagcccugugcg

SEQ ID NO: 2649072 - RNA, 19 nt, Artificial Sequence
  Description of Artificial Sequence: Synthetic oligonucleotide
ucacaggugaagcagucgg

SEQ ID NO: 2649073 - RNA, 19 nt, Artificial Sequence
  Description of Artificial Sequence: Synthetic oligonucleotide
uuguucuccacauccacgg

SEQ ID NO: 2649074 - RNA, 19 nt, Artificial Sequence
  Description of Artificial Sequence: Synthetic oligonucleotide
uccaaggcgccucaggugg

SEQ ID NO: 2649075 - RNA, 19 nt, Artificial Sequence
  Description of Artificial Sequence: Synthetic oligonucleotide
auaagguguccgcacacgc

SEQ ID NO: 2649076 - RNA, 19 nt, Artificial Sequence
  Description of Artificial Sequence: Synthetic oligonucleotide
guuauagaaggccuucccg

SEQ ID NO: 2649077 - RNA, 19 nt, Artificial Sequence
  Description of Artificial Sequence: Synthetic oligonucleotide
uauagaaggccuucccgcg

SEQ ID NO: 2649078 - RNA, 19 nt, Artificial Sequence
  Description of Artificial Sequence: Synthetic oligonucleotide
cauuugggugcaaacaccg

SEQ ID NO: 2649079 - RNA, 19 nt, Artificial Sequence
  Description of Artificial Sequence: Synthetic oligonucleotide
gauacagaugccgaaguag

SEQ ID NO: 2649080 - RNA, 19 nt, Artificial Sequence
  Description of Artificial Sequence: Synthetic oligonucleotide
aggaagcacauuugggugc

SEQ ID NO: 2649081 - RNA, 19 nt, Artificial Sequence
  Description of Artificial Sequence: Synthetic oligonucleotide
ucucuaacgcaguaaaugu

SEQ ID NO: 2649082 - RNA, 19 nt, Artificial Sequence
  Description of Artificial Sequence: Synthetic oligonucleotide
gaagcagucggugugauac

SEQ ID NO: 2649083 - RNA, 19 nt, Artificial Sequence
  Description of Artificial Sequence: Synthetic oligonucleotide
uuugggugcaaacaccgug

SEQ ID NO: 2649084 - RNA, 19 nt, Artificial Sequence
  Description of Artificial Sequence: Synthetic oligonucleotide
ugugauagucucuaacgca

SEQ ID NO: 2649085 - RNA, 19 nt, Artificial Sequence
  Description of Artificial Sequence: Synthetic oligonucleotide
aagggaacgccguccagac

SEQ ID NO: 2649086 - RNA, 19 nt, Artificial Sequence
  Description of Artificial Sequence: Synthetic oligonucleotide
gaucaucuccaugauaagg

SEQ ID NO: 2649087 - RNA, 19 nt, Artificial Sequence
  Description of Artificial Sequence: Synthetic oligonucleotide
acagaugccgaaguagucc

SEQ ID NO: 2649088 - RNA, 19 nt, Artificial Sequence
  Description of Artificial Sequence: Synthetic oligonucleotide
acaggaagcacauuugggu

SEQ ID NO: 2649089 - RNA, 19 nt, Artificial Sequence
  Description of Artificial Sequence: Synthetic oligonucleotide
aguacacuuucucacccac

SEQ ID NO: 2649090 - RNA, 19 nt, Artificial Sequence
  Description of Artificial Sequence: Synthetic oligonucleotide
agugguaacacuccacaug

SEQ ID NO: 2649091 - RNA, 19 nt, Artificial Sequence
  Description of Artificial Sequence: Synthetic oligonucleotide
uuugcuggaacccggagua

SEQ ID NO: 2649092 - RNA, 19 nt, Artificial Sequence
  Description of Artificial Sequence: Synthetic oligonucleotide
uacacuuucucacccacgu

SEQ ID NO: 2649093 - RNA, 19 nt, Artificial Sequence
  Description of Artificial Sequence: Synthetic oligonucleotide
cuugccaagggccugcagg

SEQ ID NO: 2649094 - RNA, 19 nt, Artificial Sequence
  Description of Artificial Sequence: Synthetic oligonucleotide
agcacauuugggugcaaac

SEQ ID NO: 2649095 - RNA, 19 nt, Artificial Sequence
  Description of Artificial Sequence: Synthetic oligonucleotide
ccacacuugauacagaugc

SEQ ID NO: 2649096 - RNA, 19 nt, Artificial Sequence
  Description of Artificial Sequence: Synthetic oligonucleotide
uaaauguuguucuccacau

SEQ ID NO: 2649097 - RNA, 19 nt, Artificial Sequence
  Description of Artificial Sequence: Synthetic oligonucleotide
acacgcuacacuugucagc

SEQ ID NO: 2649098 - RNA, 19 nt, Artificial Sequence
  Description of Artificial Sequence: Synthetic oligonucleotide
aaggccuucccgcggaguc

SEQ ID NO: 2649099 - RNA, 19 nt, Artificial Sequence
  Description of Artificial Sequence: Synthetic oligonucleotide
ucagucacgugcacagccg

SEQ ID NO: 2649100 - RNA, 19 nt, Artificial Sequence
  Description of Artificial Sequence: Synthetic oligonucleotide
ugcaaacaccgugugauag

SEQ ID NO: 2649101 - RNA, 19 nt, Artificial Sequence
  Description of Artificial Sequence: Synthetic oligonucleotide
uagucucuaacgcaguaaa

SEQ ID NO: 2649102 - RNA, 19 nt, Artificial Sequence
  Description of Artificial Sequence: Synthetic oligonucleotide
gaacccggaguacaggaag

SEQ ID NO: 2649103 - RNA, 19 nt, Artificial Sequence
  Description of Artificial Sequence: Synthetic oligonucleotide
acagugguaacacuccaca

SEQ ID NO: 2649104 - RNA, 19 nt, Artificial Sequence
  Description of Artificial Sequence: Synthetic oligonucleotide
cuucucagagcucagucac

SEQ ID NO: 2649105 - RNA, 19 nt, Artificial Sequence
  Description of Artificial Sequence: Synthetic oligonucleotide
augguugucucacagcccu

SEQ ID NO: 2649106 - RNA, 19 nt, Artificial Sequence
  Description of Artificial Sequence: Synthetic oligonucleotide
gucucuaacgcaguaaaug

SEQ ID NO: 2649107 - RNA, 19 nt, Artificial Sequence
  Description of Artificial Sequence: Synthetic oligonucleotide
ugugcggggaggauggggc

SEQ ID NO: 2649108 - RNA, 19 nt, Artificial Sequence
  Description of Artificial Sequence: Synthetic oligonucleotide
gugugauagucucuaacgc

SEQ ID NO: 2649109 - RNA, 19 nt, Artificial Sequence
  Description of Artificial Sequence: Synthetic oligonucleotide
gugauagucucuaacgcag

SEQ ID NO: 2649110 - RNA, 19 nt, Artificial Sequence
  Description of Artificial Sequence: Synthetic oligonucleotide
cagucggugugauacaggc

SEQ ID NO: 2649111 - RNA, 19 nt, Artificial Sequence
  Description of Artificial Sequence: Synthetic oligonucleotide
caugauaagguguccgcac

SEQ ID NO: 2649112 - RNA, 19 nt, Artificial Sequence
  Description of Artificial Sequence: Synthetic oligonucleotide
ggaugguugucucacagcc

SEQ ID NO: 2649113 - RNA, 19 nt, Artificial Sequence
  Description of Artificial Sequence: Synthetic oligonucleotide
gucggugugauacaggcuc

SEQ ID NO: 2649114 - RNA, 19 nt, Artificial Sequence
  Description of Artificial Sequence: Synthetic oligonucleotide
uccaugauaagguguccgc

SEQ ID NO: 2649115 - RNA, 19 nt, Artificial Sequence
  Description of Artificial Sequence: Synthetic oligonucleotide
ucaucuccaugauaaggug

SEQ ID NO: 2649116 - RNA, 19 nt, Artificial Sequence
  Description of Artificial Sequence: Synthetic oligonucleotide
acccacguuauagaaggcc

SEQ ID NO: 2649117 - RNA, 19 nt, Artificial Sequence
  Description of Artificial Sequence: Synthetic oligonucleotide
agcgggaccuguccaaggc

SEQ ID NO: 2649118 - RNA, 19 nt, Artificial Sequence
  Description of Artificial Sequence: Synthetic oligonucleotide
uguccaaggcgccucaggu

SEQ ID NO: 2649119 - RNA, 19 nt, Artificial Sequence
  Description of Artificial Sequence: Synthetic oligonucleotide
gaagcaacccgggugguag

SEQ ID NO: 2649120 - RNA, 19 nt, Artificial Sequence
  Description of Artificial Sequence: Synthetic oligonucleotide
gauaagguguccgcacacg

SEQ ID NO: 2649121 - RNA, 19 nt, Artificial Sequence
  Description of Artificial Sequence: Synthetic oligonucleotide
aguacaggaaguccuccug

SEQ ID NO: 2649122 - RNA, 19 nt, Artificial Sequence
  Description of Artificial Sequence: Synthetic oligonucleotide
aucuccaugauaagguguc

SEQ ID NO: 2649123 - RNA, 19 nt, Artificial Sequence
  Description of Artificial Sequence: Synthetic oligonucleotide
auagaaggccuucccgcgg

SEQ ID NO: 2649124 - RNA, 19 nt, Artificial Sequence
  Description of Artificial Sequence: Synthetic oligonucleotide
aaguccuccuggcaguaca

SEQ ID NO: 2649125 - RNA, 19 nt, Artificial Sequence
  Description of Artificial Sequence: Synthetic oligonucleotide
uugucucacagcccugugc

SEQ ID NO: 2649126 - RNA, 19 nt, Artificial Sequence
  Description of Artificial Sequence: Synthetic oligonucleotide
acgcaguaaauguuguucu

SEQ ID NO: 2649127 - RNA, 19 nt, Artificial Sequence
  Description of Artificial Sequence: Synthetic oligonucleotide
caggaagcacauuugggug

SEQ ID NO: 2649128 - RNA, 19 nt, Artificial Sequence
  Description of Artificial Sequence: Synthetic oligonucleotide
ugugauacaggcuccccau

SEQ ID NO: 2649129 - RNA, 19 nt, Artificial Sequence
  Description of Artificial Sequence: Synthetic oligonucleotide
cagaugccgaaguaguccc

SEQ ID NO: 2649130 - RNA, 19 nt, Artificial Sequence
  Description of Artificial Sequence: Synthetic oligonucleotide
ugauaagguguccgcacac

SEQ ID NO: 2649131 - RNA, 19 nt, Artificial Sequence
  Description of Artificial Sequence: Synthetic oligonucleotide
uucucagagcucagucacg

SEQ ID NO: 2649132 - RNA, 19 nt, Artificial Sequence
  Description of Artificial Sequence: Synthetic oligonucleotide
acacucguugcacacugag

SEQ ID NO: 2649133 - RNA, 19 nt, Artificial Sequence
  Description of Artificial Sequence: Synthetic oligonucleotide
cacggugaagggaacgccg

SEQ ID NO: 2649134 - RNA, 19 nt, Artificial Sequence
  Description of Artificial Sequence: Synthetic oligonucleotide
uugcacacugagcagcgga

SEQ ID NO: 2649135 - RNA, 19 nt, Artificial Sequence
  Description of Artificial Sequence: Synthetic oligonucleotide
guagaugccgaguccacac

SEQ ID NO: 2649136 - RNA, 19 nt, Artificial Sequence
  Description of Artificial Sequence: Synthetic oligonucleotide
aaguagucccgcgccgugc

SEQ ID NO: 2649137 - RNA, 19 nt, Artificial Sequence
  Description of Artificial Sequence: Synthetic oligonucleotide
acguuauagaaggccuucc

SEQ ID NO: 2649138 - RNA, 19 nt, Artificial Sequence
  Description of Artificial Sequence: Synthetic oligonucleotide
uguuugcuggaacccggag

SEQ ID NO: 2649139 - RNA, 19 nt, Artificial Sequence
  Description of Artificial Sequence: Synthetic oligonucleotide
uggaacccggaguacagga

SEQ ID NO: 2649140 - RNA, 19 nt, Artificial Sequence
  Description of Artificial Sequence: Synthetic oligonucleotide
cugagcagcggaagcaacc

SEQ ID NO: 2649141 - RNA, 19 nt, Artificial Sequence
  Description of Artificial Sequence: Synthetic oligonucleotide
aguagucccgcgccgugcg

SEQ ID NO: 2649142 - RNA, 19 nt, Artificial Sequence
  Description of Artificial Sequence: Synthetic oligonucleotide
cuccuccccacucagcugg

SEQ ID NO: 2649143 - RNA, 19 nt, Artificial Sequence
  Description of Artificial Sequence: Synthetic oligonucleotide
gacaccacacggaugguug

SEQ ID NO: 2649144 - RNA, 19 nt, Artificial Sequence
  Description of Artificial Sequence: Synthetic oligonucleotide
cgugugauagucucuaacg

SEQ ID NO: 2649145 - RNA, 19 nt, Artificial Sequence
  Description of Artificial Sequence: Synthetic oligonucleotide
augauaagguguccgcaca

SEQ ID NO: 2649146 - RNA, 19 nt, Artificial Sequence
  Description of Artificial Sequence: Synthetic oligonucleotide
cucacccacguuauagaag

SEQ ID NO: 2649147 - RNA, 19 nt, Artificial Sequence
  Description of Artificial Sequence: Synthetic oligonucleotide
acacggaugguugucucac

SEQ ID NO: 2649148 - RNA, 19 nt, Artificial Sequence
  Description of Artificial Sequence: Synthetic oligonucleotide
ggugguaggacuugccaag

SEQ ID NO: 2649149 - RNA, 19 nt, Artificial Sequence
  Description of Artificial Sequence: Synthetic oligonucleotide
uacaggcuccccauggccu

SEQ ID NO: 2649150 - RNA, 19 nt, Artificial Sequence
  Description of Artificial Sequence: Synthetic oligonucleotide
ugauagucucuaacgcagu

SEQ ID NO: 2649151 - RNA, 19 nt, Artificial Sequence
  Description of Artificial Sequence: Synthetic oligonucleotide
gagcccgcaguccucacag

SEQ ID NO: 2649152 - RNA, 19 nt, Artificial Sequence
  Description of Artificial Sequence: Synthetic oligonucleotide
ugagcagcggaagcaaccc

SEQ ID NO: 2649153 - RNA, 19 nt, Artificial Sequence
  Description of Artificial Sequence: Synthetic oligonucleotide
cuccaugauaagguguccg

SEQ ID NO: 2649154 - RNA, 19 nt, Artificial Sequence
  Description of Artificial Sequence: Synthetic oligonucleotide
ucucacccacguuauagaa

SEQ ID NO: 2649155 - RNA, 19 nt, Artificial Sequence
  Description of Artificial Sequence: Synthetic oligonucleotide
auacagaugccgaaguagu

SEQ ID NO: 2649156 - RNA, 19 nt, Artificial Sequence
  Description of Artificial Sequence: Synthetic oligonucleotide
gggaacgccguccagacac

SEQ ID NO: 2649157 - RNA, 19 nt, Artificial Sequence
  Description of Artificial Sequence: Synthetic oligonucleotide
cacacgcuacacuugucag

SEQ ID NO: 2649158 - RNA, 19 nt, Artificial Sequence
  Description of Artificial Sequence: Synthetic oligonucleotide
ucguugcacacugagcagc

SEQ ID NO: 2649159 - RNA, 19 nt, Artificial Sequence
  Description of Artificial Sequence: Synthetic oligonucleotide
ucucagagcucagucacgu

SEQ ID NO: 2649160 - RNA, 19 nt, Artificial Sequence
  Description of Artificial Sequence: Synthetic oligonucleotide
uacagaugccgaaguaguc

SEQ ID NO: 2649161 - RNA, 19 nt, Artificial Sequence
  Description of Artificial Sequence: Synthetic oligonucleotide
uccguagaugccgagucca

SEQ ID NO: 2649162 - RNA, 19 nt, Artificial Sequence
  Description of Artificial Sequence: Synthetic oligonucleotide
aagcaacccgggugguagg

SEQ ID NO: 2649163 - RNA, 19 nt, Artificial Sequence
  Description of Artificial Sequence: Synthetic oligonucleotide
uagaaggccuucccgcgga

SEQ ID NO: 2649164 - RNA, 19 nt, Artificial Sequence
  Description of Artificial Sequence: Synthetic oligonucleotide
gaugccgaaguagucccgc

SEQ ID NO: 2649165 - RNA, 19 nt, Artificial Sequence
  Description of Artificial Sequence: Synthetic oligonucleotide
agcuguuugcuggaacccg

SEQ ID NO: 2649166 - RNA, 19 nt, Artificial Sequence
  Description of Artificial Sequence: Synthetic oligonucleotide
agagcucagucacgugcac

SEQ ID NO: 2649167 - RNA, 19 nt, Artificial Sequence
  Description of Artificial Sequence: Synthetic oligonucleotide
ucggugugauacaggcucc

SEQ ID NO: 2649168 - RNA, 19 nt, Artificial Sequence
  Description of Artificial Sequence: Synthetic oligonucleotide
acaggugaagcagucggug

SEQ ID NO: 2649169 - RNA, 19 nt, Artificial Sequence
  Description of Artificial Sequence: Synthetic oligonucleotide
ugccgaaguagucccgcgc

SEQ ID NO: 2649170 - RNA, 19 nt, Artificial Sequence
  Description of Artificial Sequence: Synthetic oligonucleotide
uccacggugaagggaacgc

SEQ ID NO: 2649171 - RNA, 19 nt, Artificial Sequence
  Description of Artificial Sequence: Synthetic oligonucleotide
uccagacacucguugcaca

SEQ ID NO: 2649172 - RNA, 19 nt, Artificial Sequence
  Description of Artificial Sequence: Synthetic oligonucleotide
ugggugcaaacaccgugug

SEQ ID NO: 2649173 - RNA, 19 nt, Artificial Sequence
  Description of Artificial Sequence: Synthetic oligonucleotide
caaacaccgugugauaguc

SEQ ID NO: 2649174 - RNA, 19 nt, Artificial Sequence
  Description of Artificial Sequence: Synthetic oligonucleotide
ugaagggaacgccguccag

SEQ ID NO: 2649175 - RNA, 19 nt, Artificial Sequence
  Description of Artificial Sequence: Synthetic oligonucleotide
ugcacacugagcagcggaa

SEQ ID NO: 2649176 - RNA, 19 nt, Artificial Sequence
  Description of Artificial Sequence: Synthetic oligonucleotide
cacucguugcacacugagc

SEQ ID NO: 2649177 - RNA, 19 nt, Artificial Sequence
  Description of Artificial Sequence: Synthetic oligonucleotide
gaugguugucucacagccc

SEQ ID NO: 2649178 - RNA, 19 nt, Artificial Sequence
  Description of Artificial Sequence: Synthetic oligonucleotide
gauagucucuaacgcagua

SEQ ID NO: 2649179 - RNA, 19 nt, Artificial Sequence
  Description of Artificial Sequence: Synthetic oligonucleotide
cuggcaguacacuuucuca

SEQ ID NO: 2649180 - RNA, 19 nt, Artificial Sequence
  Description of Artificial Sequence: Synthetic oligonucleotide
agucgucucccgcaggagu

SEQ ID NO: 2649181 - RNA, 19 nt, Artificial Sequence
  Description of Artificial Sequence: Synthetic oligonucleotide
uugucagcuguuugcugga

SEQ ID NO: 2649182 - RNA, 19 nt, Artificial Sequence
  Description of Artificial Sequence: Synthetic oligonucleotide
acauccacggugaagggaa

SEQ ID NO: 2649183 - RNA, 19 nt, Artificial Sequence
  Description of Artificial Sequence: Synthetic oligonucleotide
gagcagcggaagcaacccg

SEQ ID NO: 2649184 - RNA, 19 nt, Artificial Sequence
  Description of Artificial Sequence: Synthetic oligonucleotide
aacgccguccagacacucg

SEQ ID NO: 2649185 - RNA, 19 nt, Artificial Sequence
  Description of Artificial Sequence: Synthetic oligonucleotide
uccgcacacgcuacacuug

SEQ ID NO: 2649186 - RNA, 19 nt, Artificial Sequence
  Description of Artificial Sequence: Synthetic oligonucleotide
ggcaguacacuuucucacc

SEQ ID NO: 2649187 - RNA, 19 nt, Artificial Sequence
  Description of Artificial Sequence: Synthetic oligonucleotide
cucguugcacacugagcag

SEQ ID NO: 2649188 - RNA, 19 nt, Artificial Sequence
  Description of Artificial Sequence: Synthetic oligonucleotide
gaagggaacgccguccaga

SEQ ID NO: 2649189 - RNA, 19 nt, Artificial Sequence
  Description of Artificial Sequence: Synthetic oligonucleotide
gaaguagucccgcgccgug

SEQ ID NO: 2649190 - RNA, 19 nt, Artificial Sequence
  Description of Artificial Sequence: Synthetic oligonucleotide
auggggcgggcacaggaag

SEQ ID NO: 2649191 - RNA, 19 nt, Artificial Sequence
  Description of Artificial Sequence: Synthetic oligonucleotide
uggcaucggcggcagagca

SEQ ID NO: 2649192 - RNA, 19 nt, Artificial Sequence
  Description of Artificial Sequence: Synthetic oligonucleotide
cagucacgugcacagccgg

SEQ ID NO: 2649193 - RNA, 19 nt, Artificial Sequence
  Description of Artificial Sequence: Synthetic oligonucleotide
agcagucggugugauacag

SEQ ID NO: 2649194 - RNA, 19 nt, Artificial Sequence
  Description of Artificial Sequence: Synthetic oligonucleotide
uguccgcacacgcuacacu

SEQ ID NO: 2649195 - RNA, 19 nt, Artificial Sequence
  Description of Artificial Sequence: Synthetic oligonucleotide
uagaugccgaguccacacu

SEQ ID NO: 2649196 - RNA, 19 nt, Artificial Sequence
  Description of Artificial Sequence: Synthetic oligonucleotide
aagcagucggugugauaca

SEQ ID NO: 2649197 - RNA, 19 nt, Artificial Sequence
  Description of Artificial Sequence: Synthetic oligonucleotide
uguucuccacauccacggu

SEQ ID NO: 2649198 - RNA, 19 nt, Artificial Sequence
  Description of Artificial Sequence: Synthetic oligonucleotide
ugcuggaacccggaguaca

SEQ ID NO: 2649199 - RNA, 19 nt, Artificial Sequence
  Description of Artificial Sequence: Synthetic oligonucleotide
guacacuuucucacccacg

SEQ ID NO: 2649200 - RNA, 19 nt, Artificial Sequence
  Description of Artificial Sequence: Synthetic oligonucleotide
gucacaggugaagcagucg

SEQ ID NO: 2649201 - RNA, 19 nt, Artificial Sequence
  Description of Artificial Sequence: Synthetic oligonucleotide
augccgaaguagucccgcg

SEQ ID NO: 2649202 - RNA, 19 nt, Artificial Sequence
  Description of Artificial Sequence: Synthetic oligonucleotide
auagucucuaacgcaguaa

SEQ ID NO: 2649203 - RNA, 19 nt, Artificial Sequence
  Description of Artificial Sequence: Synthetic oligonucleotide
cuguccaaggcgccucagg

SEQ ID NO: 2649204 - RNA, 19 nt, Artificial Sequence
  Description of Artificial Sequence: Synthetic oligonucleotide
gugugauacaggcucccca

SEQ ID NO: 2649205 - RNA, 19 nt, Artificial Sequence
  Description of Artificial Sequence: Synthetic oligonucleotide
acugagcagcggaagcaac

SEQ ID NO: 2649206 - RNA, 19 nt, Artificial Sequence
  Description of Artificial Sequence: Synthetic oligonucleotide
agcuggagcccgcaguccu

SEQ ID NO: 2649207 - RNA, 19 nt, Artificial Sequence
  Description of Artificial Sequence: Synthetic oligonucleotide
gugguaggacuugccaagg

SEQ ID NO: 2649208 - RNA, 19 nt, Artificial Sequence
  Description of Artificial Sequence: Synthetic oligonucleotide
uaacgcaguaaauguuguu

SEQ ID NO: 2649209 - RNA, 19 nt, Artificial Sequence
  Description of Artificial Sequence: Synthetic oligonucleotide
acgccguccagacacucgu

SEQ ID NO: 2649210 - RNA, 19 nt, Artificial Sequence
  Description of Artificial Sequence: Synthetic oligonucleotide
cacguuauagaaggccuuc

SEQ ID NO: 2649211 - RNA, 19 nt, Artificial Sequence
  Description of Artificial Sequence: Synthetic oligonucleotide
uccuccuggcaguacacuu

SEQ ID NO: 2649212 - RNA, 19 nt, Artificial Sequence
  Description of Artificial Sequence: Synthetic oligonucleotide
aacccggaguacaggaagu

SEQ ID NO: 2649213 - RNA, 19 nt, Artificial Sequence
  Description of Artificial Sequence: Synthetic oligonucleotide
cuccccacucagcuggagc

SEQ ID NO: 2649214 - RNA, 19 nt, Artificial Sequence
  Description of Artificial Sequence: Synthetic oligonucleotide
aagcacauuugggugcaaa

SEQ ID NO: 2649215 - RNA, 19 nt, Artificial Sequence
  Description of Artificial Sequence: Synthetic oligonucleotide
cuccguagaugccgagucc

SEQ ID NO: 2649216 - RNA, 19 nt, Artificial Sequence
  Description of Artificial Sequence: Synthetic oligonucleotide
ccgaguccacacuugauac

SEQ ID NO: 2649217 - RNA, 19 nt, Artificial Sequence
  Description of Artificial Sequence: Synthetic oligonucleotide
gucagcuguuugcuggaac

SEQ ID NO: 2649218 - RNA, 19 nt, Artificial Sequence
  Description of Artificial Sequence: Synthetic oligonucleotide
aaacaccgugugauagucu

SEQ ID NO: 2649219 - RNA, 19 nt, Artificial Sequence
  Description of Artificial Sequence: Synthetic oligonucleotide
agucccgcgccgugcgcgc

SEQ ID NO: 2649220 - RNA, 19 nt, Artificial Sequence
  Description of Artificial Sequence: Synthetic oligonucleotide
gugauacaggcuccccaug

SEQ ID NO: 2649221 - RNA, 19 nt, Artificial Sequence
  Description of Artificial Sequence: Synthetic oligonucleotide
guccaaggcgccucaggug

SEQ ID NO: 2649222 - RNA, 19 nt, Artificial Sequence
  Description of Artificial Sequence: Synthetic oligonucleotide
cagagcucagucacgugca

SEQ ID NO: 2649223 - RNA, 19 nt, Artificial Sequence
  Description of Artificial Sequence: Synthetic oligonucleotide
agcagcggcgacccuccuc

SEQ ID NO: 2649224 - RNA, 19 nt, Artificial Sequence
  Description of Artificial Sequence: Synthetic oligonucleotide
gucucacagcccugugcgg

SEQ ID NO: 2649225 - RNA, 19 nt, Artificial Sequence
  Description of Artificial Sequence: Synthetic oligonucleotide
gugaagggaacgccgucca

SEQ ID NO: 2649226 - RNA, 19 nt, Artificial Sequence
  Description of Artificial Sequence: Synthetic oligonucleotide
guuugcuggaacccggagu

SEQ ID NO: 2649227 - RNA, 19 nt, Artificial Sequence
  Description of Artificial Sequence: Synthetic oligonucleotide
acaccacacggaugguugu

SEQ ID NO: 2649228 - RNA, 19 nt, Artificial Sequence
  Description of Artificial Sequence: Synthetic oligonucleotide
gguggcaucggcggcagag

SEQ ID NO: 2649229 - RNA, 19 nt, Artificial Sequence
  Description of Artificial Sequence: Synthetic oligonucleotide
guugucucacagcccugug

SEQ ID NO: 2649230 - RNA, 19 nt, Artificial Sequence
  Description of Artificial Sequence: Synthetic oligonucleotide
acccggaguacaggaaguc

SEQ ID NO: 2649231 - RNA, 19 nt, Artificial Sequence
  Description of Artificial Sequence: Synthetic oligonucleotide
gcaucggcggcagagcagg

SEQ ID NO: 2649232 - RNA, 19 nt, Artificial Sequence
  Description of Artificial Sequence: Synthetic oligonucleotide
cuugcuccguagaugccga

SEQ ID NO: 2649233 - RNA, 19 nt, Artificial Sequence
  Description of Artificial Sequence: Synthetic oligonucleotide
cuaacgcaguaaauguugu

SEQ ID NO: 2649234 - RNA, 19 nt, Artificial Sequence
  Description of Artificial Sequence: Synthetic oligonucleotide
ggcacgccugccuugcucc

SEQ ID NO: 2649235 - RNA, 19 nt, Artificial Sequence
  Description of Artificial Sequence: Synthetic oligonucleotide
acuuucucacccacguuau

SEQ ID NO: 2649236 - RNA, 19 nt, Artificial Sequence
  Description of Artificial Sequence: Synthetic oligonucleotide
gccgaaguagucccgcgcc

SEQ ID NO: 2649237 - RNA, 19 nt, Artificial Sequence
  Description of Artificial Sequence: Synthetic oligonucleotide
cuggaacccggaguacagg

SEQ ID NO: 2649238 - RNA, 19 nt, Artificial Sequence
  Description of Artificial Sequence: Synthetic oligonucleotide
ccuugcuccguagaugccg

SEQ ID NO: 2649239 - RNA, 19 nt, Artificial Sequence
  Description of Artificial Sequence: Synthetic oligonucleotide
cguuauagaaggccuuccc

SEQ ID NO: 2649240 - RNA, 19 nt, Artificial Sequence
  Description of Artificial Sequence: Synthetic oligonucleotide
gcuucucagagcucaguca

SEQ ID NO: 2649241 - RNA, 19 nt, Artificial Sequence
  Description of Artificial Sequence: Synthetic oligonucleotide
acagccggugaggccagcg

SEQ ID NO: 2649242 - RNA, 19 nt, Artificial Sequence
  Description of Artificial Sequence: Synthetic oligonucleotide
caucuccaugauaaggugu

SEQ ID NO: 2649243 - RNA, 19 nt, Artificial Sequence
  Description of Artificial Sequence: Synthetic oligonucleotide
ugcuccguagaugccgagu

SEQ ID NO: 2649244 - RNA, 19 nt, Artificial Sequence
  Description of Artificial Sequence: Synthetic oligonucleotide
gcacacgcuacacuuguca

SEQ ID NO: 2649245 - RNA, 19 nt, Artificial Sequence
  Description of Artificial Sequence: Synthetic oligonucleotide
guccacacuugauacagau

SEQ ID NO: 2649246 - RNA, 19 nt, Artificial Sequence
  Description of Artificial Sequence: Synthetic oligonucleotide
agaugccgaaguagucccg

SEQ ID NO: 2649247 - RNA, 19 nt, Artificial Sequence
  Description of Artificial Sequence: Synthetic oligonucleotide
guugcacacugagcagcgg

SEQ ID NO: 2649248 - RNA, 19 nt, Artificial Sequence
  Description of Artificial Sequence: Synthetic oligonucleotide
accacacggaugguugucu

SEQ ID NO: 2649249 - RNA, 19 nt, Artificial Sequence
  Description of Artificial Sequence: Synthetic oligonucleotide
cacgugcacagccggugag

SEQ ID NO: 2649250 - RNA, 19 nt, Artificial Sequence
  Description of Artificial Sequence: Synthetic oligonucleotide
gugcggggaggauggggcg

SEQ ID NO: 2649251 - RNA, 19 nt, Artificial Sequence
  Description of Artificial Sequence: Synthetic oligonucleotide
uucccgcggagucgucucc

SEQ ID NO: 2649252 - RNA, 19 nt, Artificial Sequence
  Description of Artificial Sequence: Synthetic oligonucleotide
cagcgggaccuguccaagg

SEQ ID NO: 2649253 - RNA, 19 nt, Artificial Sequence
  Description of Artificial Sequence: Synthetic oligonucleotide
gccgugcgcgcuucgagcg

SEQ ID NO: 2649254 - RNA, 19 nt, Artificial Sequence
  Description of Artificial Sequence: Synthetic oligonucleotide
gcuccguagaugccgaguc

SEQ ID NO: 2649255 - RNA, 19 nt, Artificial Sequence
  Description of Artificial Sequence: Synthetic oligonucleotide
ugaagcagucggugugaua

SEQ ID NO: 2649256 - RNA, 19 nt, Artificial Sequence
  Description of Artificial Sequence: Synthetic oligonucleotide
cuccacauccacggugaag

SEQ ID NO: 2649257 - RNA, 19 nt, Artificial Sequence
  Description of Artificial Sequence: Synthetic oligonucleotide
cucagagcucagucacgug

SEQ ID NO: 2649258 - RNA, 19 nt, Artificial Sequence
  Description of Artificial Sequence: Synthetic oligonucleotide
cccugugcggggaggaugg

SEQ ID NO: 2649259 - RNA, 19 nt, Artificial Sequence
  Description of Artificial Sequence: Synthetic oligonucleotide
uggcacgccugccuugcuc

SEQ ID NO: 2649260 - RNA, 19 nt, Artificial Sequence
  Description of Artificial Sequence: Synthetic oligonucleotide
cuucccgcggagucgucuc

SEQ ID NO: 2649261 - RNA, 19 nt, Artificial Sequence
  Description of Artificial Sequence: Synthetic oligonucleotide
cagccggugaggccagcgg

SEQ ID NO: 2649262 - RNA, 19 nt, Artificial Sequence
  Description of Artificial Sequence: Synthetic oligonucleotide
ggaguacaggaaguccucc

SEQ ID NO: 2649263 - RNA, 19 nt, Artificial Sequence
  Description of Artificial Sequence: Synthetic oligonucleotide
ugccgaguccacacuugau

SEQ ID NO: 2649264 - RNA, 19 nt, Artificial Sequence
  Description of Artificial Sequence: Synthetic oligonucleotide
gcacauuugggugcaaaca

SEQ ID NO: 2649265 - RNA, 19 nt, Artificial Sequence
  Description of Artificial Sequence: Synthetic oligonucleotide
cacccacguuauagaaggc

SEQ ID NO: 2649266 - RNA, 19 nt, Artificial Sequence
  Description of Artificial Sequence: Synthetic oligonucleotide
caguacacuuucucaccca

SEQ ID NO: 2649267 - RNA, 19 nt, Artificial Sequence
  Description of Artificial Sequence: Synthetic oligonucleotide
auuugggugcaaacaccgu

SEQ ID NO: 2649268 - RNA, 19 nt, Artificial Sequence
  Description of Artificial Sequence: Synthetic oligonucleotide
cacgcuacacuugucagcu

SEQ ID NO: 2649269 - RNA, 19 nt, Artificial Sequence
  Description of Artificial Sequence: Synthetic oligonucleotide
aggcgccucagguggcauc

SEQ ID NO: 2649270 - RNA, 19 nt, Artificial Sequence
  Description of Artificial Sequence: Synthetic oligonucleotide
ggcgccucagguggcaucg

SEQ ID NO: 2649271 - RNA, 19 nt, Artificial Sequence
  Description of Artificial Sequence: Synthetic oligonucleotide
cacacggaugguugucuca

SEQ ID NO: 2649272 - RNA, 19 nt, Artificial Sequence
  Description of Artificial Sequence: Synthetic oligonucleotide
guccagacacucguugcac

SEQ ID NO: 2649273 - RNA, 19 nt, Artificial Sequence
  Description of Artificial Sequence: Synthetic oligonucleotide
cccgcaguccucacagugg

SEQ ID NO: 2649274 - RNA, 19 nt, Artificial Sequence
  Description of Artificial Sequence: Synthetic oligonucleotide
aggacuugccaagggccug

SEQ ID NO: 2649275 - RNA, 19 nt, Artificial Sequence
  Description of Artificial Sequence: Synthetic oligonucleotide
ggagucgucucccgcagga

SEQ ID NO: 2649276 - RNA, 19 nt, Artificial Sequence
  Description of Artificial Sequence: Synthetic oligonucleotide
uugcuccguagaugccgag

SEQ ID NO: 2649277 - RNA, 19 nt, Artificial Sequence
  Description of Artificial Sequence: Synthetic oligonucleotide
gagucgucucccgcaggag

SEQ ID NO: 2649278 - RNA, 19 nt, Artificial Sequence
  Description of Artificial Sequence: Synthetic oligonucleotide
ccuggcaguacacuuucuc

SEQ ID NO: 2649279 - RNA, 19 nt, Artificial Sequence
  Description of Artificial Sequence: Synthetic oligonucleotide
agucucuaacgcaguaaau

SEQ ID NO: 2649280 - RNA, 19 nt, Artificial Sequence
  Description of Artificial Sequence: Synthetic oligonucleotide
cauccacggugaagggaac

SEQ ID NO: 2649281 - RNA, 19 nt, Artificial Sequence
  Description of Artificial Sequence: Synthetic oligonucleotide
gccguccagacacucguug

SEQ ID NO: 2649282 - RNA, 19 nt, Artificial Sequence
  Description of Artificial Sequence: Synthetic oligonucleotide
aggccuucccgcggagucg

SEQ ID NO: 2649283 - RNA, 19 nt, Artificial Sequence
  Description of Artificial Sequence: Synthetic oligonucleotide
cguugcacacugagcagcg

SEQ ID NO: 2649284 - RNA, 19 nt, Artificial Sequence
  Description of Artificial Sequence: Synthetic oligonucleotide
ccgugugauagucucuaac

SEQ ID NO: 2649285 - RNA, 19 nt, Artificial Sequence
  Description of Artificial Sequence: Synthetic oligonucleotide
cuguuugcuggaacccgga

SEQ ID NO: 2649286 - RNA, 19 nt, Artificial Sequence
  Description of Artificial Sequence: Synthetic oligonucleotide
ggauggggcgggcacagga

SEQ ID NO: 2649287 - RNA, 19 nt, Artificial Sequence
  Description of Artificial Sequence: Synthetic oligonucleotide
acacuuucucacccacguu

SEQ ID NO: 2649288 - RNA, 19 nt, Artificial Sequence
  Description of Artificial Sequence: Synthetic oligonucleotide
gcgggaccuguccaaggcg

SEQ ID NO: 2649289 - RNA, 19 nt, Artificial Sequence
  Description of Artificial Sequence: Synthetic oligonucleotide
gucgucucccgcaggaguc

SEQ ID NO: 2649290 - RNA, 19 nt, Artificial Sequence
  Description of Artificial Sequence: Synthetic oligonucleotide
acggugaagggaacgccgu

SEQ ID NO: 2649291 - RNA, 19 nt, Artificial Sequence
  Description of Artificial Sequence: Synthetic oligonucleotide
ucgucucccgcaggaguca

SEQ ID NO: 2649292 - RNA, 19 nt, Artificial Sequence
  Description of Artificial Sequence: Synthetic oligonucleotide
gcuggaacccggaguacag

SEQ ID NO: 2649293 - RNA, 19 nt, Artificial Sequence
  Description of Artificial Sequence: Synthetic oligonucleotide
gaaguccuccuggcaguac

SEQ ID NO: 2649294 - RNA, 19 nt, Artificial Sequence
  Description of Artificial Sequence: Synthetic oligonucleotide
ccguccagacacucguugc

SEQ ID NO: 2649295 - RNA, 19 nt, Artificial Sequence
  Description of Artificial Sequence: Synthetic oligonucleotide
accuguccaaggcgccuca

SEQ ID NO: 2649296 - RNA, 19 nt, Artificial Sequence
  Description of Artificial Sequence: Synthetic oligonucleotide
ggugugauacaggcucccc

SEQ ID NO: 2649297 - RNA, 19 nt, Artificial Sequence
  Description of Artificial Sequence: Synthetic oligonucleotide
agucggugugauacaggcu

SEQ ID NO: 2649298 - RNA, 19 nt, Artificial Sequence
  Description of Artificial Sequence: Synthetic oligonucleotide
accgugugauagucucuaa

SEQ ID NO: 2649299 - RNA, 19 nt, Artificial Sequence
  Description of Artificial Sequence: Synthetic oligonucleotide
cacauccacggugaaggga

SEQ ID NO: 2649300 - RNA, 19 nt, Artificial Sequence
  Description of Artificial Sequence: Synthetic oligonucleotide
ggaagcacauuugggugca

SEQ ID NO: 2649301 - RNA, 19 nt, Artificial Sequence
  Description of Artificial Sequence: Synthetic oligonucleotide
cucuaacgcaguaaauguu

SEQ ID NO: 2649302 - RNA, 19 nt, Artificial Sequence
  Description of Artificial Sequence: Synthetic oligonucleotide
guggcaucggcggcagagc

SEQ ID NO: 2649303 - RNA, 19 nt, Artificial Sequence
  Description of Artificial Sequence: Synthetic oligonucleotide
aucggcggcagagcaggug

SEQ ID NO: 2649304 - RNA, 19 nt, Artificial Sequence
  Description of Artificial Sequence: Synthetic oligonucleotide
agcaacccgggugguagga

SEQ ID NO: 2649305 - RNA, 19 nt, Artificial Sequence
  Description of Artificial Sequence: Synthetic oligonucleotide
gccgaguccacacuugaua

SEQ ID NO: 2649306 - RNA, 19 nt, Artificial Sequence
  Description of Artificial Sequence: Synthetic oligonucleotide
gggaggauggggcgggcac

SEQ ID NO: 2649307 - RNA, 19 nt, Artificial Sequence
  Description of Artificial Sequence: Synthetic oligonucleotide
gcagucggugugauacagg

SEQ ID NO: 2649308 - RNA, 19 nt, Artificial Sequence
  Description of Artificial Sequence: Synthetic oligonucleotide
gaccuguccaaggcgccuc

SEQ ID NO: 2649309 - RNA, 19 nt, Artificial Sequence
  Description of Artificial Sequence: Synthetic oligonucleotide
aacccgggugguaggacuu

SEQ ID NO: 2649310 - RNA, 19 nt, Artificial Sequence
  Description of Artificial Sequence: Synthetic oligonucleotide
agggaacgccguccagaca

SEQ ID NO: 2649311 - RNA, 19 nt, Artificial Sequence
  Description of Artificial Sequence: Synthetic oligonucleotide
ugcgcgcuucgagcgcgcg

SEQ ID NO: 2649312 - RNA, 19 nt, Artificial Sequence
  Description of Artificial Sequence: Synthetic oligonucleotide
cucccgcaggagucacagg

SEQ ID NO: 2649313 - RNA, 19 nt, Artificial Sequence
  Description of Artificial Sequence: Synthetic oligonucleotide
ccgaaguagucccgcgccg

SEQ ID NO: 2649314 - RNA, 19 nt, Artificial Sequence
  Description of Artificial Sequence: Synthetic oligonucleotide
uugcuggaacccggaguac

SEQ ID NO: 2649315 - RNA, 19 nt, Artificial Sequence
  Description of Artificial Sequence: Synthetic oligonucleotide
gaacgccguccagacacuc

SEQ ID NO: 2649316 - RNA, 19 nt, Artificial Sequence
  Description of Artificial Sequence: Synthetic oligonucleotide
acgcuacacuugucagcug

SEQ ID NO: 2649317 - RNA, 19 nt, Artificial Sequence
  Description of Artificial Sequence: Synthetic oligonucleotide
guguccgcacacgcuacac

SEQ ID NO: 2649318 - RNA, 19 nt, Artificial Sequence
  Description of Artificial Sequence: Synthetic oligonucleotide
acaccgugugauagucucu

SEQ ID NO: 2649319 - RNA, 19 nt, Artificial Sequence
  Description of Artificial Sequence: Synthetic oligonucleotide
ccacauccacggugaaggg

SEQ ID NO: 2649320 - RNA, 19 nt, Artificial Sequence
  Description of Artificial Sequence: Synthetic oligonucleotide
ggacuugccaagggccugc

SEQ ID NO: 2649321 - RNA, 19 nt, Artificial Sequence
  Description of Artificial Sequence: Synthetic oligonucleotide
agucacgugcacagccggu

SEQ ID NO: 2649322 - RNA, 19 nt, Artificial Sequence
  Description of Artificial Sequence: Synthetic oligonucleotide
cgggaccuguccaaggcgc

SEQ ID NO: 2649323 - RNA, 19 nt, Artificial Sequence
  Description of Artificial Sequence: Synthetic oligonucleotide
gacacucguugcacacuga

SEQ ID NO: 2649324 - RNA, 19 nt, Artificial Sequence
  Description of Artificial Sequence: Synthetic oligonucleotide
cccggaguacaggaagucc

SEQ ID NO: 2649325 - RNA, 19 nt, Artificial Sequence
  Description of Artificial Sequence: Synthetic oligonucleotide
gggcacaggaagcacauuu

SEQ ID NO: 2649326 - RNA, 19 nt, Artificial Sequence
  Description of Artificial Sequence: Synthetic oligonucleotide
aggcuccccauggccuggc

SEQ ID NO: 2649327 - RNA, 19 nt, Artificial Sequence
  Description of Artificial Sequence: Synthetic oligonucleotide
ugaggccagcgggaccugu

SEQ ID NO: 2649328 - RNA, 19 nt, Artificial Sequence
  Description of Artificial Sequence: Synthetic oligonucleotide
caccacacggaugguuguc

SEQ ID NO: 2649329 - RNA, 19 nt, Artificial Sequence
  Description of Artificial Sequence: Synthetic oligonucleotide
gcggagucgucucccgcag

SEQ ID NO: 2649330 - RNA, 19 nt, Artificial Sequence
  Description of Artificial Sequence: Synthetic oligonucleotide
cacggaugguugucucaca

SEQ ID NO: 2649331 - RNA, 19 nt, Artificial Sequence
  Description of Artificial Sequence: Synthetic oligonucleotide
caccgugugauagucucua

SEQ ID NO: 2649332 - RNA, 19 nt, Artificial Sequence
  Description of Artificial Sequence: Synthetic oligonucleotide
cacuugucagcuguuugcu

SEQ ID NO: 2649333 - RNA, 19 nt, Artificial Sequence
  Description of Artificial Sequence: Synthetic oligonucleotide
caacccgggugguaggacu

SEQ ID NO: 2649334 - RNA, 19 nt, Artificial Sequence
  Description of Artificial Sequence: Synthetic oligonucleotide
cacugagcagcggaagcaa

SEQ ID NO: 2649335 - RNA, 19 nt, Artificial Sequence
  Description of Artificial Sequence: Synthetic oligonucleotide
gaggccagcgggaccuguc

SEQ ID NO: 2649336 - RNA, 19 nt, Artificial Sequence
  Description of Artificial Sequence: Synthetic oligonucleotide
cgcaguaaauguuguucuc

SEQ ID NO: 2649337 - RNA, 19 nt, Artificial Sequence
  Description of Artificial Sequence: Synthetic oligonucleotide
aaggcgccucagguggcau

SEQ ID NO: 2649338 - RNA, 19 nt, Artificial Sequence
  Description of Artificial Sequence: Synthetic oligonucleotide
ggugaggccagcgggaccu

SEQ ID NO: 2649339 - RNA, 19 nt, Artificial Sequence
  Description of Artificial Sequence: Synthetic oligonucleotide
cccacguuauagaaggccu

SEQ ID NO: 2649340 - RNA, 19 nt, Artificial Sequence
  Description of Artificial Sequence: Synthetic oligonucleotide
cuuucucacccacguuaua

SEQ ID NO: 2649341 - RNA, 19 nt, Artificial Sequence
  Description of Artificial Sequence: Synthetic oligonucleotide
ccaugauaagguguccgca

SEQ ID NO: 2649342 - RNA, 19 nt, Artificial Sequence
  Description of Artificial Sequence: Synthetic oligonucleotide
cagugguaacacuccacau

SEQ ID NO: 2649343 - RNA, 19 nt, Artificial Sequence
  Description of Artificial Sequence: Synthetic oligonucleotide
acgccugccuugcuccgua

SEQ ID NO: 2649344 - RNA, 19 nt, Artificial Sequence
  Description of Artificial Sequence: Synthetic oligonucleotide
ggcaucggcggcagagcag

SEQ ID NO: 2649345 - RNA, 19 nt, Artificial Sequence
  Description of Artificial Sequence: Synthetic oligonucleotide
cccacucagcuggagcccg

SEQ ID NO: 2649346 - RNA, 19 nt, Artificial Sequence
  Description of Artificial Sequence: Synthetic oligonucleotide
uggagcccgcaguccucac

SEQ ID NO: 2649347 - RNA, 19 nt, Artificial Sequence
  Description of Artificial Sequence: Synthetic oligonucleotide
ccacggugaagggaacgcc

SEQ ID NO: 2649348 - RNA, 19 nt, Artificial Sequence
  Description of Artificial Sequence: Synthetic oligonucleotide
cccgcaggagucacaggug

SEQ ID NO: 2649349 - RNA, 19 nt, Artificial Sequence
  Description of Artificial Sequence: Synthetic oligonucleotide
ccggaguacaggaaguccu

SEQ ID NO: 2649350 - RNA, 19 nt, Artificial Sequence
  Description of Artificial Sequence: Synthetic oligonucleotide
agcccgcaguccucacagu

SEQ ID NO: 2649351 - RNA, 19 nt, Artificial Sequence
  Description of Artificial Sequence: Synthetic oligonucleotide
gcacgccugccuugcuccg

SEQ ID NO: 2649352 - RNA, 19 nt, Artificial Sequence
  Description of Artificial Sequence: Synthetic oligonucleotide
acccgggugguaggacuug

SEQ ID NO: 2649353 - RNA, 19 nt, Artificial Sequence
  Description of Artificial Sequence: Synthetic oligonucleotide
cgugcacagccggugaggc

SEQ ID NO: 2649354 - RNA, 19 nt, Artificial Sequence
  Description of Artificial Sequence: Synthetic oligonucleotide
ccguagaugccgaguccac

SEQ ID NO: 2649355 - RNA, 19 nt, Artificial Sequence
  Description of Artificial Sequence: Synthetic oligonucleotide
ccuggcacgccugccuugc

SEQ ID NO: 2649356 - RNA, 19 nt, Artificial Sequence
  Description of Artificial Sequence: Synthetic oligonucleotide
ccacacggaugguugucuc

SEQ ID NO: 2649357 - RNA, 19 nt, Artificial Sequence
  Description of Artificial Sequence: Synthetic oligonucleotide
cggaguacaggaaguccuc

SEQ ID NO: 2649358 - RNA, 19 nt, Artificial Sequence
  Description of Artificial Sequence: Synthetic oligonucleotide
ggagcccgcaguccucaca

SEQ ID NO: 2649359 - RNA, 19 nt, Artificial Sequence
  Description of Artificial Sequence: Synthetic oligonucleotide
gcggcagagcagguggccc

SEQ ID NO: 2649360 - RNA, 19 nt, Artificial Sequence
  Description of Artificial Sequence: Synthetic oligonucleotide
ggcggcagagcagguggcc

SEQ ID NO: 2649361 - RNA, 19 nt, Artificial Sequence
  Description of Artificial Sequence: Synthetic oligonucleotide
gguugucucacagcccugu

SEQ ID NO: 2649362 - RNA, 19 nt, Artificial Sequence
  Description of Artificial Sequence: Synthetic oligonucleotide
ggcgggcacaggaagcaca

SEQ ID NO: 2649363 - RNA, 19 nt, Artificial Sequence
  Description of Artificial Sequence: Synthetic oligonucleotide
ccaaggcgccucagguggc

SEQ ID NO: 2649364 - RNA, 19 nt, Artificial Sequence
  Description of Artificial Sequence: Synthetic oligonucleotide
ggaacccggaguacaggaa

SEQ ID NO: 2649365 - RNA, 19 nt, Artificial Sequence
  Description of Artificial Sequence: Synthetic oligonucleotide
gcggcgacccuccucccca

SEQ ID NO: 2649366 - RNA, 19 nt, Artificial Sequence
  Description of Artificial Sequence: Synthetic oligonucleotide
gcgccgugcgcgcuucgag

SEQ ID NO: 2649367 - RNA, 19 nt, Artificial Sequence
  Description of Artificial Sequence: Synthetic oligonucleotide
caaggcgccucagguggca

SEQ ID NO: 2649368 - RNA, 19 nt, Artificial Sequence
  Description of Artificial Sequence: Synthetic oligonucleotide
ggggcgggcacaggaagca

SEQ ID NO: 2649369 - RNA, 19 nt, Artificial Sequence
  Description of Artificial Sequence: Synthetic oligonucleotide
gaagcacauuugggugcaa

SEQ ID NO: 2649370 - RNA, 19 nt, Artificial Sequence
  Description of Artificial Sequence: Synthetic oligonucleotide
cagcggcgacccuccuccc

SEQ ID NO: 2649371 - RNA, 19 nt, Artificial Sequence
  Description of Artificial Sequence: Synthetic oligonucleotide
ccagcgggaccuguccaag

SEQ ID NO: 2649372 - RNA, 19 nt, Artificial Sequence
  Description of Artificial Sequence: Synthetic oligonucleotide
gcgacccuccuccccacuc

SEQ ID NO: 2649373 - RNA, 19 nt, Artificial Sequence
  Description of Artificial Sequence: Synthetic oligonucleotide
gcccugugcggggaggaug

SEQ ID NO: 2649374 - RNA, 19 nt, Artificial Sequence
  Description of Artificial Sequence: Synthetic oligonucleotide
cccgcggagucgucucccg

SEQ ID NO: 2649375 - RNA, 19 nt, Artificial Sequence
  Description of Artificial Sequence: Synthetic oligonucleotide
cguccagacacucguugca

SEQ ID NO: 2649376 - RNA, 19 nt, Artificial Sequence
  Description of Artificial Sequence: Synthetic oligonucleotide
cacucagcuggagcccgca

SEQ ID NO: 2649377 - RNA, 19 nt, Artificial Sequence
  Description of Artificial Sequence: Synthetic oligonucleotide
cgccgugcgcgcuucgagc

SEQ ID NO: 2649378 - RNA, 19 nt, Artificial Sequence
  Description of Artificial Sequence: Synthetic oligonucleotide
gccagcgggaccuguccaa

SEQ ID NO: 2649379 - RNA, 19 nt, Artificial Sequence
  Description of Artificial Sequence: Synthetic oligonucleotide
ccacucagcuggagcccgc

SEQ ID NO: 2649380 - RNA, 19 nt, Artificial Sequence
  Description of Artificial Sequence: Synthetic oligonucleotide
gccuggcacgccugccuug

SEQ ID NO: 2649381 - RNA, 19 nt, Artificial Sequence
  Description of Artificial Sequence: Synthetic oligonucleotide
cgugcgcgcuucgagcgcg

SEQ ID NO: 2649382 - RNA, 19 nt, Artificial Sequence
  Description of Artificial Sequence: Synthetic oligonucleotide
gcaacccgggugguaggac

SEQ ID NO: 2649383 - RNA, 19 nt, Artificial Sequence
  Description of Artificial Sequence: Synthetic oligonucleotide
ucccgcgccgugcgcgcuu

SEQ ID NO: 2649384 - RNA, 19 nt, Artificial Sequence
  Description of Artificial Sequence: Synthetic oligonucleotide
ccccacucagcuggagccc

SEQ ID NO: 2649385 - RNA, 19 nt, Artificial Sequence
  Description of Artificial Sequence: Synthetic oligonucleotide
agguggcaucggcggcaga

SEQ ID NO: 2649386 - RNA, 19 nt, Artificial Sequence
  Description of Artificial Sequence: Synthetic oligonucleotide
cccgggugguaggacuugc

SEQ ID NO: 2649387 - RNA, 19 nt, Artificial Sequence
  Description of Artificial Sequence: Synthetic oligonucleotide
gcgcgcuucgagcgcgcgc

SEQ ID NO: 2649388 - RNA, 19 nt, Artificial Sequence
  Description of Artificial Sequence: Synthetic oligonucleotide
gcagagcagguggcccucc

SEQ ID NO: 2649389 - RNA, 19 nt, Artificial Sequence
  Description of Artificial Sequence: Synthetic oligonucleotide
cggugugauacaggcuccc

SEQ ID NO: 2649390 - RNA, 19 nt, Artificial Sequence
  Description of Artificial Sequence: Synthetic oligonucleotide
cgcuacacuugucagcugu

SEQ ID NO: 2649391 - RNA, 19 nt, Artificial Sequence
  Description of Artificial Sequence: Synthetic oligonucleotide
gucucccgcaggagucaca

SEQ ID NO: 2649392 - RNA, 19 nt, Artificial Sequence
  Description of Artificial Sequence: Synthetic oligonucleotide
ggaagcaacccggguggua

SEQ ID NO: 2649393 - RNA, 19 nt, Artificial Sequence
  Description of Artificial Sequence: Synthetic oligonucleotide
agcccugugcggggaggau

SEQ ID NO: 2649394 - RNA, 19 nt, Artificial Sequence
  Description of Artificial Sequence: Synthetic oligonucleotide
gccuugcuccguagaugcc

SEQ ID NO: 2649395 - RNA, 19 nt, Artificial Sequence
  Description of Artificial Sequence: Synthetic oligonucleotide
cgccucagguggcaucggc

SEQ ID NO: 2649396 - RNA, 19 nt, Artificial Sequence
  Description of Artificial Sequence: Synthetic oligonucleotide
cacagccggugaggccagc

SEQ ID NO: 2649397 - RNA, 19 nt, Artificial Sequence
  Description of Artificial Sequence: Synthetic oligonucleotide
cugcuucucagagcucagu

SEQ ID NO: 2649398 - RNA, 19 nt, Artificial Sequence
  Description of Artificial Sequence: Synthetic oligonucleotide
gccggugaggccagcggga

SEQ ID NO: 2649399 - RNA, 19 nt, Artificial Sequence
  Description of Artificial Sequence: Synthetic oligonucleotide
ccgcggagucgucucccgc

SEQ ID NO: 2649400 - RNA, 19 nt, Artificial Sequence
  Description of Artificial Sequence: Synthetic oligonucleotide
cguagaugccgaguccaca

SEQ ID NO: 2649401 - RNA, 19 nt, Artificial Sequence
  Description of Artificial Sequence: Synthetic oligonucleotide
ccggugaggccagcgggac

SEQ ID NO: 2649402 - RNA, 19 nt, Artificial Sequence
  Description of Artificial Sequence: Synthetic oligonucleotide
cgcggagucgucucccgca

SEQ ID NO: 2649403 - RNA, 19 nt, Artificial Sequence
  Description of Artificial Sequence: Synthetic oligonucleotide
gcacagccggugaggccag

SEQ ID NO: 2649404 - RNA, 19 nt, Artificial Sequence
  Description of Artificial Sequence: Synthetic oligonucleotide
ccgugcgcgcuucgagcgc

SEQ ID NO: 2649405 - RNA, 19 nt, Artificial Sequence
  Description of Artificial Sequence: Synthetic oligonucleotide
gugcgcgcuucgagcgcgc

SEQ ID NO: 2649406 - RNA, 19 nt, Artificial Sequence
  Description of Artificial Sequence: Synthetic oligonucleotide
cggagucgucucccgcagg

SEQ ID NO: 2649407 - RNA, 19 nt, Artificial Sequence
  Description of Artificial Sequence: Synthetic oligonucleotide
cggugaagggaacgccguc

SEQ ID NO: 2649408 - RNA, 19 nt, Artificial Sequence
  Description of Artificial Sequence: Synthetic oligonucleotide
ccacguuauagaaggccuu

SEQ ID NO: 2649409 - RNA, 19 nt, Artificial Sequence
  Description of Artificial Sequence: Synthetic oligonucleotide
gggcgggcacaggaagcac

SEQ ID NO: 2649410 - RNA, 19 nt, Artificial Sequence
  Description of Artificial Sequence: Synthetic oligonucleotide
ccgcacacgcuacacuugu

SEQ ID NO: 2649411 - RNA, 19 nt, Artificial Sequence
  Description of Artificial Sequence: Synthetic oligonucleotide
ggacaccacacggaugguu

SEQ ID NO: 2649412 - RNA, 19 nt, Artificial Sequence
  Description of Artificial Sequence: Synthetic oligonucleotide
ggaccuguccaaggcgccu

SEQ ID NO: 2649413 - RNA, 19 nt, Artificial Sequence
  Description of Artificial Sequence: Synthetic oligonucleotide
cgcacacgcuacacuuguc

SEQ ID NO: 2649414 - RNA, 19 nt, Artificial Sequence
  Description of Artificial Sequence: Synthetic oligonucleotide
cggugaggccagcgggacc

SEQ ID NO: 2649415 - RNA, 19 nt, Artificial Sequence
  Description of Artificial Sequence: Synthetic oligonucleotide
gcgccucagguggcaucgg

SEQ ID NO: 2649416 - RNA, 19 nt, Artificial Sequence
  Description of Artificial Sequence: Synthetic oligonucleotide
caucggcggcagagcaggu

SEQ ID NO: 2649417 - RNA, 19 nt, Artificial Sequence
  Description of Artificial Sequence: Synthetic oligonucleotide
gcuacacuugucagcuguu

SEQ ID NO: 2649418 - RNA, 19 nt, Artificial Sequence
  Description of Artificial Sequence: Synthetic oligonucleotide
ggaacgccguccagacacu

SEQ ID NO: 2649419 - RNA, 19 nt, Artificial Sequence
  Description of Artificial Sequence: Synthetic oligonucleotide
gcgggcacaggaagcacau

SEQ ID NO: 2649420 - RNA, 19 nt, Artificial Sequence
  Description of Artificial Sequence: Synthetic oligonucleotide
cacgccugccuugcuccgu

SEQ ID NO: 2649421 - RNA, 19 nt, Artificial Sequence
  Description of Artificial Sequence: Synthetic oligonucleotide
cgucucccgcaggagucac

SEQ ID NO: 2649422 - RNA, 19 nt, Artificial Sequence
  Description of Artificial Sequence: Synthetic oligonucleotide
ggccuggcacgccugccuu

SEQ ID NO: 2649423 - RNA, 19 nt, Artificial Sequence
  Description of Artificial Sequence: Synthetic oligonucleotide
cuggcacgccugccuugcu

SEQ ID NO: 2649424 - RNA, 19 nt, Artificial Sequence
  Description of Artificial Sequence: Synthetic oligonucleotide
gcgcuucgagcgcgcgcuc

SEQ ID NO: 2649425 - RNA, 19 nt, Artificial Sequence
  Description of Artificial Sequence: Synthetic oligonucleotide
ccuucccgcggagucgucu

SEQ ID NO: 2649426 - RNA, 19 nt, Artificial Sequence
  Description of Artificial Sequence: Synthetic oligonucleotide
cgcgcuucgagcgcgcgcu

SEQ ID NO: 2649427 - RNA, 19 nt, Artificial Sequence
  Description of Artificial Sequence: Synthetic oligonucleotide
caagggccugcaggaucau

SEQ ID NO: 2649428 - RNA, 19 nt, Artificial Sequence
  Description of Artificial Sequence: Synthetic oligonucleotide
ccgcgccgugcgcgcuucg

SEQ ID NO: 2649429 - RNA, 19 nt, Artificial Sequence
  Description of Artificial Sequence: Synthetic oligonucleotide
cccgcgccgugcgcgcuuc

SEQ ID NO: 2649430 - RNA, 19 nt, Artificial Sequence
  Description of Artificial Sequence: Synthetic oligonucleotide
gccuucccgcggagucguc

SEQ ID NO: 2649431 - RNA, 19 nt, Artificial Sequence
  Description of Artificial Sequence: Synthetic oligonucleotide
cgcgccgugcgcgcuucga

SEQ ID NO: 2649432 - RNA, 19 nt, Artificial Sequence
  Description of Artificial Sequence: Synthetic oligonucleotide
cggaagcaacccggguggu

SEQ ID NO: 2649433 - RNA, 19 nt, Artificial Sequence
  Description of Artificial Sequence: Synthetic oligonucleotide
cgggcacaggaagcacauu

SEQ ID NO: 2649434 - RNA, 19 nt, Artificial Sequence
  Description of Artificial Sequence: Synthetic oligonucleotide
aaagaccagaacuggaggg

SEQ ID NO: 2649435 - RNA, 19 nt, Artificial Sequence
  Description of Artificial Sequence: Synthetic oligonucleotide
ugggauucaacgaauagcc

SEQ ID NO: 2649436 - RNA, 19 nt, Artificial Sequence
  Description of Artificial Sequence: Synthetic oligonucleotide
ugucuuuaaaaccagccgc

SEQ ID NO: 2649437 - RNA, 19 nt, Artificial Sequence
  Description of Artificial Sequence: Synthetic oligonucleotide
agaugcaaagcccugauag

SEQ ID NO: 2649438 - RNA, 19 nt, Artificial Sequence
  Description of Artificial Sequence: Synthetic oligonucleotide
uuaaagaccagaacuggag

SEQ ID NO: 2649439 - RNA, 19 nt, Artificial Sequence
  Description of Artificial Sequence: Synthetic oligonucleotide
aagacugcacacuugcgac

SEQ ID NO: 2649440 - RNA, 19 nt, Artificial Sequence
  Description of Artificial Sequence: Synthetic oligonucleotide
uuuaaaaccagccgcagaa

SEQ ID NO: 2649441 - RNA, 19 nt, Artificial Sequence
  Description of Artificial Sequence: Synthetic oligonucleotide
uguaccaucgcccuaagaa

SEQ ID NO: 2649442 - RNA, 19 nt, Artificial Sequence
  Description of Artificial Sequence: Synthetic oligonucleotide
aaaccucgaggucaaggcc

SEQ ID NO: 2649443 - RNA, 19 nt, Artificial Sequence
  Description of Artificial Sequence: Synthetic oligonucleotide
uugucuaugccauuguacc

SEQ ID NO: 2649444 - RNA, 19 nt, Artificial Sequence
  Description of Artificial Sequence: Synthetic oligonucleotide
uuggcgacgacacauagac

SEQ ID NO: 2649445 - RNA, 19 nt, Artificial Sequence
  Description of Artificial Sequence: Synthetic oligonucleotide
aaagacugcacacuugcga

SEQ ID NO: 2649446 - RNA, 19 nt, Artificial Sequence
  Description of Artificial Sequence: Synthetic oligonucleotide
uuaugguucucccaaguug

SEQ ID NO: 2649447 - RNA, 19 nt, Artificial Sequence
  Description of Artificial Sequence: Synthetic oligonucleotide
ucuuucuaugacagcagcg

SEQ ID NO: 2649448 - RNA, 19 nt, Artificial Sequence
  Description of Artificial Sequence: Synthetic oligonucleotide
acacauguugauccgaccg

SEQ ID NO: 2649449 - RNA, 19 nt, Artificial Sequence
  Description of Artificial Sequence: Synthetic oligonucleotide
accggaugucuuuaaaacc

SEQ ID NO: 2649450 - RNA, 19 nt, Artificial Sequence
  Description of Artificial Sequence: Synthetic oligonucleotide
cuugaggggaucuggaucc

SEQ ID NO: 2649451 - RNA, 19 nt, Artificial Sequence
  Description of Artificial Sequence: Synthetic oligonucleotide
accuguuccucccaaagac

SEQ ID NO: 2649452 - RNA, 19 nt, Artificial Sequence
  Description of Artificial Sequence: Synthetic oligonucleotide
aaaacgguugucuuucuau

SEQ ID NO: 2649453 - RNA, 19 nt, Artificial Sequence
  Description of Artificial Sequence: Synthetic oligonucleotide
aggacaaugauggagaacu

SEQ ID NO: 2649454 - RNA, 19 nt, Artificial Sequence
  Description of Artificial Sequence: Synthetic oligonucleotide
gaaaccucgaggucaaggc

SEQ ID NO: 2649455 - RNA, 19 nt, Artificial Sequence
  Description of Artificial Sequence: Synthetic oligonucleotide
acagcagcgaucugcuucc

SEQ ID NO: 2649456 - RNA, 19 nt, Artificial Sequence
  Description of Artificial Sequence: Synthetic oligonucleotide
gauccuucaggaaaccucg

SEQ ID NO: 2649457 - RNA, 19 nt, Artificial Sequence
  Description of Artificial Sequence: Synthetic oligonucleotide
accugcuugggauucaacg

SEQ ID NO: 2649458 - RNA, 19 nt, Artificial Sequence
  Description of Artificial Sequence: Synthetic oligonucleotide
uauucaaccugcuugggau

SEQ ID NO: 2649459 - RNA, 19 nt, Artificial Sequence
  Description of Artificial Sequence: Synthetic oligonucleotide
uugucuuucuaugacagca

SEQ ID NO: 2649460 - RNA, 19 nt, Artificial Sequence
  Description of Artificial Sequence: Synthetic oligonucleotide
augccauuguaccaucgcc

SEQ ID NO: 2649461 - RNA, 19 nt, Artificial Sequence
  Description of Artificial Sequence: Synthetic oligonucleotide
aaacgguugucuuucuaug

SEQ ID NO: 2649462 - RNA, 19 nt, Artificial Sequence
  Description of Artificial Sequence: Synthetic oligonucleotide
gaugcaaagcccugauagg

SEQ ID NO: 2649463 - RNA, 19 nt, Artificial Sequence
  Description of Artificial Sequence: Synthetic oligonucleotide
ggaggcgacauccugaugg

SEQ ID NO: 2649464 - RNA, 19 nt, Artificial Sequence
  Description of Artificial Sequence: Synthetic oligonucleotide
acugacggaggcgacaucc

SEQ ID NO: 2649465 - RNA, 19 nt, Artificial Sequence
  Description of Artificial Sequence: Synthetic oligonucleotide
uucucugcgucccaguacc

SEQ ID NO: 2649466 - RNA, 19 nt, Artificial Sequence
  Description of Artificial Sequence: Synthetic oligonucleotide
ugaccagauauucaaccug

SEQ ID NO: 2649467 - RNA, 19 nt, Artificial Sequence
  Description of Artificial Sequence: Synthetic oligonucleotide
augauggagaacucgggag

SEQ ID NO: 2649468 - RNA, 19 nt, Artificial Sequence
  Description of Artificial Sequence: Synthetic oligonucleotide
ucaacgaauagcccaggca

SEQ ID NO: 2649469 - RNA, 19 nt, Artificial Sequence
  Description of Artificial Sequence: Synthetic oligonucleotide
ggcgacgacacauagacag

SEQ ID NO: 2649470 - RNA, 19 nt, Artificial Sequence
  Description of Artificial Sequence: Synthetic oligonucleotide
ugagcuuaaagaccagaac

SEQ ID NO: 2649471 - RNA, 19 nt, Artificial Sequence
  Description of Artificial Sequence: Synthetic oligonucleotide
uucagauccuucaggaaac

SEQ ID NO: 2649472 - RNA, 19 nt, Artificial Sequence
  Description of Artificial Sequence: Synthetic oligonucleotide
gguuaagccacacauguug

SEQ ID NO: 2649473 - RNA, 19 nt, Artificial Sequence
  Description of Artificial Sequence: Synthetic oligonucleotide
gauucaacgaauagcccag

SEQ ID NO: 2649474 - RNA, 19 nt, Artificial Sequence
  Description of Artificial Sequence: Synthetic oligonucleotide
aaaccagccgcagaaaaca

SEQ ID NO: 2649475 - RNA, 19 nt, Artificial Sequence
  Description of Artificial Sequence: Synthetic oligonucleotide
aagaccagaacuggagggg

SEQ ID NO: 2649476 - RNA, 19 nt, Artificial Sequence
  Description of Artificial Sequence: Synthetic oligonucleotide
uggugguuaagccacacau

SEQ ID NO: 2649477 - RNA, 19 nt, Artificial Sequence
  Description of Artificial Sequence: Synthetic oligonucleotide
ucaggaaaccucgagguca

SEQ ID NO: 2649478 - RNA, 19 nt, Artificial Sequence
  Description of Artificial Sequence: Synthetic oligonucleotide
ugccauuguaccaucgccc

SEQ ID NO: 2649479 - RNA, 19 nt, Artificial Sequence
  Description of Artificial Sequence: Synthetic oligonucleotide
  modified_base (14)..(14): a, c, u, g, unknown or other
aauagcccaggcancuuuc

SEQ ID NO: 2649480 - RNA, 19 nt, Artificial Sequence
  Description of Artificial Sequence: Synthetic oligonucleotide
uaugccauuguaccaucgc

SEQ ID NO: 2649481 - RNA, 19 nt, Artificial Sequence
  Description of Artificial Sequence: Synthetic oligonucleotide
acgguugucuuucuaugac

SEQ ID NO: 2649482 - RNA, 19 nt, Artificial Sequence
  Description of Artificial Sequence: Synthetic oligonucleotide
uuggguugugugcacaggc

SEQ ID NO: 2649483 - RNA, 19 nt, Artificial Sequence
  Description of Artificial Sequence: Synthetic oligonucleotide
gaccggaugucuuuaaaac

SEQ ID NO: 2649484 - RNA, 19 nt, Artificial Sequence
  Description of Artificial Sequence: Synthetic oligonucleotide
uccugauggaaucugccga

SEQ ID NO: 2649485 - RNA, 19 nt, Artificial Sequence
  Description of Artificial Sequence: Synthetic oligonucleotide
aacgguugucuuucuauga

SEQ ID NO: 2649486 - RNA, 19 nt, Artificial Sequence
  Description of Artificial Sequence: Synthetic oligonucleotide
agcccugauaggcugaguc

SEQ ID NO: 2649487 - RNA, 19 nt, Artificial Sequence
  Description of Artificial Sequence: Synthetic oligonucleotide
uguugauccgaccgcuggg

SEQ ID NO: 2649488 - RNA, 19 nt, Artificial Sequence
  Description of Artificial Sequence: Synthetic oligonucleotide
agcauuaugguucucccaa

SEQ ID NO: 2649489 - RNA, 19 nt, Artificial Sequence
  Description of Artificial Sequence: Synthetic oligonucleotide
aucagcuccgauucgaagu

SEQ ID NO: 2649490 - RNA, 19 nt, Artificial Sequence
  Description of Artificial Sequence: Synthetic oligonucleotide
gaaaacacagcauuauggu

SEQ ID NO: 2649491 - RNA, 19 nt, Artificial Sequence
  Description of Artificial Sequence: Synthetic oligonucleotide
gauggaaucugccgagacc

SEQ ID NO: 2649492 - RNA, 19 nt, Artificial Sequence
  Description of Artificial Sequence: Synthetic oligonucleotide
ugugugcacaggcauggag

SEQ ID NO: 2649493 - RNA, 19 nt, Artificial Sequence
  Description of Artificial Sequence: Synthetic oligonucleotide
uugaccagauauucaaccu

SEQ ID NO: 2649494 - RNA, 19 nt, Artificial Sequence
  Description of Artificial Sequence: Synthetic oligonucleotide
  modified_base (18)..(18): a, c, u, g, unknown or other
aacgaauagcccaggcanc

SEQ ID NO: 2649495 - RNA, 19 nt, Artificial Sequence
  Description of Artificial Sequence: Synthetic oligonucleotide
ucuggauccucccggaagu

SEQ ID NO: 2649496 - RNA, 19 nt, Artificial Sequence
  Description of Artificial Sequence: Synthetic oligonucleotide
gauggagaacucgggagcg

SEQ ID NO: 2649497 - RNA, 19 nt, Artificial Sequence
  Description of Artificial Sequence: Synthetic oligonucleotide
agauagauaugcuucucau

SEQ ID NO: 2649498 - RNA, 19 nt, Artificial Sequence
  Description of Artificial Sequence: Synthetic oligonucleotide
cuugggauucaacgaauag

SEQ ID NO: 2649499 - RNA, 19 nt, Artificial Sequence
  Description of Artificial Sequence: Synthetic oligonucleotide
agacugcacacuugcgacc

SEQ ID NO: 2649500 - RNA, 19 nt, Artificial Sequence
  Description of Artificial Sequence: Synthetic oligonucleotide
uucaacgaauagcccaggc

SEQ ID NO: 2649501 - RNA, 19 nt, Artificial Sequence
  Description of Artificial Sequence: Synthetic oligonucleotide
uccgauucgaagugcaccu

SEQ ID NO: 2649502 - RNA, 19 nt, Artificial Sequence
  Description of Artificial Sequence: Synthetic oligonucleotide
gacagcagcgaucugcuuc

SEQ ID NO: 2649503 - RNA, 19 nt, Artificial Sequence
  Description of Artificial Sequence: Synthetic oligonucleotide
gaccagauauucaaccugc

SEQ ID NO: 2649504 - RNA, 19 nt, Artificial Sequence
  Description of Artificial Sequence: Synthetic oligonucleotide
gagauagauaugcuucuca

SEQ ID NO: 2649505 - RNA, 19 nt, Artificial Sequence
  Description of Artificial Sequence: Synthetic oligonucleotide
ucccaguaccgauaggacc

SEQ ID NO: 2649506 - RNA, 19 nt, Artificial Sequence
  Description of Artificial Sequence: Synthetic oligonucleotide
acgacacauagacaggugu

SEQ ID NO: 2649507 - RNA, 19 nt, Artificial Sequence
  Description of Artificial Sequence: Synthetic oligonucleotide
aacuggaggggccugcgga

SEQ ID NO: 2649508 - RNA, 19 nt, Artificial Sequence
  Description of Artificial Sequence: Synthetic oligonucleotide
auauucaaccugcuuggga

SEQ ID NO: 2649509 - RNA, 19 nt, Artificial Sequence
  Description of Artificial Sequence: Synthetic oligonucleotide
ucgcccuaagaaaucagcu

SEQ ID NO: 2649510 - RNA, 19 nt, Artificial Sequence
  Description of Artificial Sequence: Synthetic oligonucleotide
uaccgauaggaccggaugu

SEQ ID NO: 2649511 - RNA, 19 nt, Artificial Sequence
  Description of Artificial Sequence: Synthetic oligonucleotide
aggagauagauaugcuucu

SEQ ID NO: 2649512 - RNA, 19 nt, Artificial Sequence
  Description of Artificial Sequence: Synthetic oligonucleotide
aucgcccuaagaaaucagc

SEQ ID NO: 2649513 - RNA, 19 nt, Artificial Sequence
  Description of Artificial Sequence: Synthetic oligonucleotide
uuucucuaggucuccagau

SEQ ID NO: 2649514 - RNA, 19 nt, Artificial Sequence
  Description of Artificial Sequence: Synthetic oligonucleotide
acaggcauggaggacaaug

SEQ ID NO: 2649515 - RNA, 19 nt, Artificial Sequence
  Description of Artificial Sequence: Synthetic oligonucleotide
cauccugauggaaucugcc

SEQ ID NO: 2649516 - RNA, 19 nt, Artificial Sequence
  Description of Artificial Sequence: Synthetic oligonucleotide
ugauggaaucugccgagac

SEQ ID NO: 2649517 - RNA, 19 nt, Artificial Sequence
  Description of Artificial Sequence: Synthetic oligonucleotide
aucuggauccucccggaag

SEQ ID NO: 2649518 - RNA, 19 nt, Artificial Sequence
  Description of Artificial Sequence: Synthetic oligonucleotide
uccuuguugucuaugccau

SEQ ID NO: 2649519 - RNA, 19 nt, Artificial Sequence
  Description of Artificial Sequence: Synthetic oligonucleotide
gauaugcuucucauugacc

SEQ ID NO: 2649520 - RNA, 19 nt, Artificial Sequence
  Description of Artificial Sequence: Synthetic oligonucleotide
cuccucuggaguugggucg

SEQ ID NO: 2649521 - RNA, 19 nt, Artificial Sequence
  Description of Artificial Sequence: Synthetic oligonucleotide
  modified_base (19)..(19): a, c, u, g, unknown or other
caacgaauagcccaggcan

SEQ ID NO: 2649522 - RNA, 19 nt, Artificial Sequence
  Description of Artificial Sequence: Synthetic oligonucleotide
gggagcguucuucagaucc

SEQ ID NO: 2649523 - RNA, 19 nt, Artificial Sequence
  Description of Artificial Sequence: Synthetic oligonucleotide
cuuaaagaccagaacugga

SEQ ID NO: 2649524 - RNA, 19 nt, Artificial Sequence
  Description of Artificial Sequence: Synthetic oligonucleotide
agaccagaacuggaggggc

SEQ ID NO: 2649525 - RNA, 19 nt, Artificial Sequence
  Description of Artificial Sequence: Synthetic oligonucleotide
uaccaucgcccuaagaaau

SEQ ID NO: 2649526 - RNA, 19 nt, Artificial Sequence
  Description of Artificial Sequence: Synthetic oligonucleotide
gcccuaagaaaucagcucc

SEQ ID NO: 2649527 - RNA, 19 nt, Artificial Sequence
  Description of Artificial Sequence: Synthetic oligonucleotide
cccaguaccgauaggaccg

SEQ ID NO: 2649528 - RNA, 19 nt, Artificial Sequence
  Description of Artificial Sequence: Synthetic oligonucleotide
ugcgucccaguaccgauag

SEQ ID NO: 2649529 - RNA, 19 nt, Artificial Sequence
  Description of Artificial Sequence: Synthetic oligonucleotide
gugugcacaggcauggagg

SEQ ID NO: 2649530 - RNA, 19 nt, Artificial Sequence
  Description of Artificial Sequence: Synthetic oligonucleotide
uggagagcugggcuguugc

SEQ ID NO: 2649531 - RNA, 19 nt, Artificial Sequence
  Description of Artificial Sequence: Synthetic oligonucleotide
cacagcauuaugguucucc

SEQ ID NO: 2649532 - RNA, 19 nt, Artificial Sequence
  Description of Artificial Sequence: Synthetic oligonucleotide
gucuuucuaugacagcagc

SEQ ID NO: 2649533 - RNA, 19 nt, Artificial Sequence
  Description of Artificial Sequence: Synthetic oligonucleotide
aguuggcgacgacacauag

SEQ ID NO: 2649534 - RNA, 19 nt, Artificial Sequence
  Description of Artificial Sequence: Synthetic oligonucleotide
guugucuaugccauuguac

SEQ ID NO: 2649535 - RNA, 19 nt, Artificial Sequence
  Description of Artificial Sequence: Synthetic oligonucleotide
acauagacagguguguccu

SEQ ID NO: 2649536 - RNA, 19 nt, Artificial Sequence
  Description of Artificial Sequence: Synthetic oligonucleotide
cacauguugauccgaccgc

SEQ ID NO: 2649537 - RNA, 19 nt, Artificial Sequence
  Description of Artificial Sequence: Synthetic oligonucleotide
cuaugccauuguaccaucg

SEQ ID NO: 2649538 - RNA, 19 nt, Artificial Sequence
  Description of Artificial Sequence: Synthetic oligonucleotide
aaucugccgagaccucgag

SEQ ID NO: 2649539 - RNA, 19 nt, Artificial Sequence
  Description of Artificial Sequence: Synthetic oligonucleotide
cauugaccagauauucaac

SEQ ID NO: 2649540 - RNA, 19 nt, Artificial Sequence
  Description of Artificial Sequence: Synthetic oligonucleotide
guaccgauaggaccggaug

SEQ ID NO: 2649541 - RNA, 19 nt, Artificial Sequence
  Description of Artificial Sequence: Synthetic oligonucleotide
gaaaucagcuccgauucga

SEQ ID NO: 2649542 - RNA, 19 nt, Artificial Sequence
  Description of Artificial Sequence: Synthetic oligonucleotide
aggggaucuggauccuccc

SEQ ID NO: 2649543 - RNA, 19 nt, Artificial Sequence
  Description of Artificial Sequence: Synthetic oligonucleotide
gugguuaagccacacaugu

SEQ ID NO: 2649544 - RNA, 19 nt, Artificial Sequence
  Description of Artificial Sequence: Synthetic oligonucleotide
gguugucuuucuaugacag

SEQ ID NO: 2649545 - RNA, 19 nt, Artificial Sequence
  Description of Artificial Sequence: Synthetic oligonucleotide
auuaugguucucccaaguu

SEQ ID NO: 2649546 - RNA, 19 nt, Artificial Sequence
  Description of Artificial Sequence: Synthetic oligonucleotide
uguugucuaugccauugua

SEQ ID NO: 2649547 - RNA, 19 nt, Artificial Sequence
  Description of Artificial Sequence: Synthetic oligonucleotide
uuuuccuggagagcugggc

SEQ ID NO: 2649548 - RNA, 19 nt, Artificial Sequence
  Description of Artificial Sequence: Synthetic oligonucleotide
aaagacugacggaggcgac

SEQ ID NO: 2649549 - RNA, 19 nt, Artificial Sequence
  Description of Artificial Sequence: Synthetic oligonucleotide
ugauccgaccgcugggcag

SEQ ID NO: 2649550 - RNA, 19 nt, Artificial Sequence
  Description of Artificial Sequence: Synthetic oligonucleotide
ugguucucccaaguuggcg

SEQ ID NO: 2649551 - RNA, 19 nt, Artificial Sequence
  Description of Artificial Sequence: Synthetic oligonucleotide
gacugcacacuugcgaccc

SEQ ID NO: 2649552 - RNA, 19 nt, Artificial Sequence
  Description of Artificial Sequence: Synthetic oligonucleotide
gauccgaccgcugggcagg

SEQ ID NO: 2649553 - RNA, 19 nt, Artificial Sequence
  Description of Artificial Sequence: Synthetic oligonucleotide
uaagccacacauguugauc

SEQ ID NO: 2649554 - RNA, 19 nt, Artificial Sequence
  Description of Artificial Sequence: Synthetic oligonucleotide
guugggucggucccgguug

SEQ ID NO: 2649555 - RNA, 19 nt, Artificial Sequence
  Description of Artificial Sequence: Synthetic oligonucleotide
  modified_base (6)..(6): a, c, u, g, unknown or other
aggcancuuucucuagguc

SEQ ID NO: 2649556 - RNA, 19 nt, Artificial Sequence
  Description of Artificial Sequence: Synthetic oligonucleotide
auagacagguguguccuug

SEQ ID NO: 2649557 - RNA, 19 nt, Artificial Sequence
  Description of Artificial Sequence: Synthetic oligonucleotide
cuccgauucgaagugcacc

SEQ ID NO: 2649558 - RNA, 19 nt, Artificial Sequence
  Description of Artificial Sequence: Synthetic oligonucleotide
uuaagccacacauguugau

SEQ ID NO: 2649559 - RNA, 19 nt, Artificial Sequence
  Description of Artificial Sequence: Synthetic oligonucleotide
agccacacauguugauccg

SEQ ID NO: 2649560 - RNA, 19 nt, Artificial Sequence
  Description of Artificial Sequence: Synthetic oligonucleotide
cuucaggaaaccucgaggu

SEQ ID NO: 2649561 - RNA, 19 nt, Artificial Sequence
  Description of Artificial Sequence: Synthetic oligonucleotide
cucauugaccagauauuca

SEQ ID NO: 2649562 - RNA, 19 nt, Artificial Sequence
  Description of Artificial Sequence: Synthetic oligonucleotide
cuggaguugggucgguccc

SEQ ID NO: 2649563 - RNA, 19 nt, Artificial Sequence
  Description of Artificial Sequence: Synthetic oligonucleotide
ucccaaagacugcacacuu

SEQ ID NO: 2649564 - RNA, 19 nt, Artificial Sequence
  Description of Artificial Sequence: Synthetic oligonucleotide
cacacauguugauccgacc

SEQ ID NO: 2649565 - RNA, 19 nt, Artificial Sequence
  Description of Artificial Sequence: Synthetic oligonucleotide
ggaaaccucgaggucaagg

SEQ ID NO: 2649566 - RNA, 19 nt, Artificial Sequence
  Description of Artificial Sequence: Synthetic oligonucleotide
accgcugggcaggagauag

SEQ ID NO: 2649567 - RNA, 19 nt, Artificial Sequence
  Description of Artificial Sequence: Synthetic oligonucleotide
cuuuaaaaccagccgcaga

SEQ ID NO: 2649568 - RNA, 19 nt, Artificial Sequence
  Description of Artificial Sequence: Synthetic oligonucleotide
ucuaugccauuguaccauc

SEQ ID NO: 2649569 - RNA, 19 nt, Artificial Sequence
  Description of Artificial Sequence: Synthetic oligonucleotide
guaccaucgcccuaagaaa

SEQ ID NO: 2649570 - RNA, 19 nt, Artificial Sequence
  Description of Artificial Sequence: Synthetic oligonucleotide
ugcuugggauucaacgaau

SEQ ID NO: 2649571 - RNA, 19 nt, Artificial Sequence
  Description of Artificial Sequence: Synthetic oligonucleotide
ucgaggucaaggccucucu

SEQ ID NO: 2649572 - RNA, 19 nt, Artificial Sequence
  Description of Artificial Sequence: Synthetic oligonucleotide
gaggggaucuggauccucc

SEQ ID NO: 2649573 - RNA, 19 nt, Artificial Sequence
  Description of Artificial Sequence: Synthetic oligonucleotide
uuaaaaccagccgcagaaa

SEQ ID NO: 2649574 - RNA, 19 nt, Artificial Sequence
  Description of Artificial Sequence: Synthetic oligonucleotide
uccucuggaguugggucgg

SEQ ID NO: 2649575 - RNA, 19 nt, Artificial Sequence
  Description of Artificial Sequence: Synthetic oligonucleotide
ccugggcaaagacugacgg

SEQ ID NO: 2649576 - RNA, 19 nt, Artificial Sequence
  Description of Artificial Sequence: Synthetic oligonucleotide
ugggcaggagauagauaug

SEQ ID NO: 2649577 - RNA, 19 nt, Artificial Sequence
  Description of Artificial Sequence: Synthetic oligonucleotide
caaagacugacggaggcga

SEQ ID NO: 2649578 - RNA, 19 nt, Artificial Sequence
  Description of Artificial Sequence: Synthetic oligonucleotide
uugauccgaccgcugggca

SEQ ID NO: 2649579 - RNA, 19 nt, Artificial Sequence
  Description of Artificial Sequence: Synthetic oligonucleotide
ucugcgucccaguaccgau

SEQ ID NO: 2649580 - RNA, 19 nt, Artificial Sequence
  Description of Artificial Sequence: Synthetic oligonucleotide
ucucugcgucccaguaccg

SEQ ID NO: 2649581 - RNA, 19 nt, Artificial Sequence
  Description of Artificial Sequence: Synthetic oligonucleotide
gaacuggaggggccugcgg

SEQ ID NO: 2649582 - RNA, 19 nt, Artificial Sequence
  Description of Artificial Sequence: Synthetic oligonucleotide
  modified_base (17)..(17): a, c, u, g, unknown or other
acgaauagcccaggcancu

SEQ ID NO: 2649583 - RNA, 19 nt, Artificial Sequence
  Description of Artificial Sequence: Synthetic oligonucleotide
agcagcgaucugcuuccac

SEQ ID NO: 2649584 - RNA, 19 nt, Artificial Sequence
  Description of Artificial Sequence: Synthetic oligonucleotide
ucccgguuggguugugugc

SEQ ID NO: 2649585 - RNA, 19 nt, Artificial Sequence
  Description of Artificial Sequence: Synthetic oligonucleotide
acauguugauccgaccgcu

SEQ ID NO: 2649586 - RNA, 19 nt, Artificial Sequence
  Description of Artificial Sequence: Synthetic oligonucleotide
  modified_base (2)..(2): a, c, u, g, unknown or other
ancuuucucuaggucucca

SEQ ID NO: 2649587 - RNA, 19 nt, Artificial Sequence
  Description of Artificial Sequence: Synthetic oligonucleotide
  modified_base (5)..(5): a, c, u, g, unknown or other
ggcancuuucucuaggucu

SEQ ID NO: 2649588 - RNA, 19 nt, Artificial Sequence
  Description of Artificial Sequence: Synthetic oligonucleotide
uucaaccugcuugggauuc

SEQ ID NO: 2649589 - RNA, 19 nt, Artificial Sequence
  Description of Artificial Sequence: Synthetic oligonucleotide
guugauccgaccgcugggc

SEQ ID NO: 2649590 - RNA, 19 nt, Artificial Sequence
  Description of Artificial Sequence: Synthetic oligonucleotide
auucaacgaauagcccagg

SEQ ID NO: 2649591 - RNA, 19 nt, Artificial Sequence
  Description of Artificial Sequence: Synthetic oligonucleotide
guuaagccacacauguuga

SEQ ID NO: 2649592 - RNA, 19 nt, Artificial Sequence
  Description of Artificial Sequence: Synthetic oligonucleotide
uggaguugggucggucccg

SEQ ID NO: 2649593 - RNA, 19 nt, Artificial Sequence
  Description of Artificial Sequence: Synthetic oligonucleotide
gggcaggagauagauaugc

SEQ ID NO: 2649594 - RNA, 19 nt, Artificial Sequence
  Description of Artificial Sequence: Synthetic oligonucleotide
ggaaucugccgagaccucg

SEQ ID NO: 2649595 - RNA, 19 nt, Artificial Sequence
  Description of Artificial Sequence: Synthetic oligonucleotide
caucgcccuaagaaaucag

SEQ ID NO: 2649596 - RNA, 19 nt, Artificial Sequence
  Description of Artificial Sequence: Synthetic oligonucleotide
ucucccaaguuggcgacga

SEQ ID NO: 2649597 - RNA, 19 nt, Artificial Sequence
  Description of Artificial Sequence: Synthetic oligonucleotide
auuguaccaucgcccuaag

SEQ ID NO: 2649598 - RNA, 19 nt, Artificial Sequence
  Description of Artificial Sequence: Synthetic oligonucleotide
gauagauaugcuucucauu

SEQ ID NO: 2649599 - RNA, 19 nt, Artificial Sequence
  Description of Artificial Sequence: Synthetic oligonucleotide
aaaucagcuccgauucgaa

SEQ ID NO: 2649600 - RNA, 19 nt, Artificial Sequence
  Description of Artificial Sequence: Synthetic oligonucleotide
  modified_base (8)..(8): a, c, u, g, unknown or other
ccaggcancuuucucuagg

SEQ ID NO: 2649601 - RNA, 19 nt, Artificial Sequence
  Description of Artificial Sequence: Synthetic oligonucleotide
ccggaugucuuuaaaacca

SEQ ID NO: 2649602 - RNA, 19 nt, Artificial Sequence
  Description of Artificial Sequence: Synthetic oligonucleotide
uuguaccaucgcccuaaga

SEQ ID NO: 2649603 - RNA, 19 nt, Artificial Sequence
  Description of Artificial Sequence: Synthetic oligonucleotide
augguucucccaaguuggc

SEQ ID NO: 2649604 - RNA, 19 nt, Artificial Sequence
  Description of Artificial Sequence: Synthetic oligonucleotide
gacgacacauagacaggug

SEQ ID NO: 2649605 - RNA, 19 nt, Artificial Sequence
  Description of Artificial Sequence: Synthetic oligonucleotide
gugagcuuaaagaccagaa

SEQ ID NO: 2649606 - RNA, 19 nt, Artificial Sequence
  Description of Artificial Sequence: Synthetic oligonucleotide
cccuaagaaaucagcuccg

SEQ ID NO: 2649607 - RNA, 19 nt, Artificial Sequence
  Description of Artificial Sequence: Synthetic oligonucleotide
gguuggguugugugcacag

SEQ ID NO: 2649608 - RNA, 19 nt, Artificial Sequence
  Description of Artificial Sequence: Synthetic oligonucleotide
cccaaguuggcgacgacac

SEQ ID NO: 2649609 - RNA, 19 nt, Artificial Sequence
  Description of Artificial Sequence: Synthetic oligonucleotide
accaucgcccuaagaaauc

SEQ ID NO: 2649610 - RNA, 19 nt, Artificial Sequence
  Description of Artificial Sequence: Synthetic oligonucleotide
ggcauggaggacaaugaug

SEQ ID NO: 2649611 - RNA, 19 nt, Artificial Sequence
  Description of Artificial Sequence: Synthetic oligonucleotide
aggcauggaggacaaugau

SEQ ID NO: 2649612 - RNA, 19 nt, Artificial Sequence
  Description of Artificial Sequence: Synthetic oligonucleotide
cucccggaagucugcagug

SEQ ID NO: 2649613 - RNA, 19 nt, Artificial Sequence
  Description of Artificial Sequence: Synthetic oligonucleotide
ugguuaagccacacauguu

SEQ ID NO: 2649614 - RNA, 19 nt, Artificial Sequence
  Description of Artificial Sequence: Synthetic oligonucleotide
guucucccaaguuggcgac

SEQ ID NO: 2649615 - RNA, 19 nt, Artificial Sequence
  Description of Artificial Sequence: Synthetic oligonucleotide
cauuguaccaucgcccuaa

SEQ ID NO: 2649616 - RNA, 19 nt, Artificial Sequence
  Description of Artificial Sequence: Synthetic oligonucleotide
gacacauagacaggugugu

SEQ ID NO: 2649617 - RNA, 19 nt, Artificial Sequence
  Description of Artificial Sequence: Synthetic oligonucleotide
uguugccuugaggggaucu

SEQ ID NO: 2649618 - RNA, 19 nt, Artificial Sequence
  Description of Artificial Sequence: Synthetic oligonucleotide
uucucccaaguuggcgacg

SEQ ID NO: 2649619 - RNA, 19 nt, Artificial Sequence
  Description of Artificial Sequence: Synthetic oligonucleotide
gaacucgggagcguucuuc

SEQ ID NO: 2649620 - RNA, 19 nt, Artificial Sequence
  Description of Artificial Sequence: Synthetic oligonucleotide
gucggucccgguuggguug

SEQ ID NO: 2649621 - RNA, 19 nt, Artificial Sequence
  Description of Artificial Sequence: Synthetic oligonucleotide
acugcacacuugcgacccg

SEQ ID NO: 2649622 - RNA, 19 nt, Artificial Sequence
  Description of Artificial Sequence: Synthetic oligonucleotide
gcauuaugguucucccaag

SEQ ID NO: 2649623 - RNA, 19 nt, Artificial Sequence
  Description of Artificial Sequence: Synthetic oligonucleotide
ggugguuaagccacacaug

SEQ ID NO: 2649624 - RNA, 19 nt, Artificial Sequence
  Description of Artificial Sequence: Synthetic oligonucleotide
cugcuugggauucaacgaa

SEQ ID NO: 2649625 - RNA, 19 nt, Artificial Sequence
  Description of Artificial Sequence: Synthetic oligonucleotide
  modified_base (4)..(4): a, c, u, g, unknown or other
gcancuuucucuaggucuc

SEQ ID NO: 2649626 - RNA, 19 nt, Artificial Sequence
  Description of Artificial Sequence: Synthetic oligonucleotide
cuccagaugcaaagcccug

SEQ ID NO: 2649627 - RNA, 19 nt, Artificial Sequence
  Description of Artificial Sequence: Synthetic oligonucleotide
aguugggucggucccgguu

SEQ ID NO: 2649628 - RNA, 19 nt, Artificial Sequence
  Description of Artificial Sequence: Synthetic oligonucleotide
  modified_base (3)..(3): a, c, u, g, unknown or other
cancuuucucuaggucucc

SEQ ID NO: 2649629 - RNA, 19 nt, Artificial Sequence
  Description of Artificial Sequence: Synthetic oligonucleotide
gauaggaccggaugucuuu

SEQ ID NO: 2649630 - RNA, 19 nt, Artificial Sequence
  Description of Artificial Sequence: Synthetic oligonucleotide
gaaucugccgagaccucga

SEQ ID NO: 2649631 - RNA, 19 nt, Artificial Sequence
  Description of Artificial Sequence: Synthetic oligonucleotide
ggggaucuggauccucccg

SEQ ID NO: 2649632 - RNA, 19 nt, Artificial Sequence
  Description of Artificial Sequence: Synthetic oligonucleotide
ccucccaaagacugcacac

SEQ ID NO: 2649633 - RNA, 19 nt, Artificial Sequence
  Description of Artificial Sequence: Synthetic oligonucleotide
aggaccggaugucuuuaaa

SEQ ID NO: 2649634 - RNA, 19 nt, Artificial Sequence
  Description of Artificial Sequence: Synthetic oligonucleotide
gcgacauccugauggaauc

SEQ ID NO: 2649635 - RNA, 19 nt, Artificial Sequence
  Description of Artificial Sequence: Synthetic oligonucleotide
ucaaccugcuugggauuca

SEQ ID NO: 2649636 - RNA, 19 nt, Artificial Sequence
  Description of Artificial Sequence: Synthetic oligonucleotide
agacugacggaggcgacau

SEQ ID NO: 2649637 - RNA, 19 nt, Artificial Sequence
  Description of Artificial Sequence: Synthetic oligonucleotide
ggaccggaugucuuuaaaa

SEQ ID NO: 2649638 - RNA, 19 nt, Artificial Sequence
  Description of Artificial Sequence: Synthetic oligonucleotide
cauuaugguucucccaagu

SEQ ID NO: 2649639 - RNA, 19 nt, Artificial Sequence
  Description of Artificial Sequence: Synthetic oligonucleotide
  modified_base (15)..(15): a, c, u, g, unknown or other
gaauagcccaggcancuuu

SEQ ID NO: 2649640 - RNA, 19 nt, Artificial Sequence
  Description of Artificial Sequence: Synthetic oligonucleotide
ccugcuugggauucaacga

SEQ ID NO: 2649641 - RNA, 19 nt, Artificial Sequence
  Description of Artificial Sequence: Synthetic oligonucleotide
uaggaccggaugucuuuaa

SEQ ID NO: 2649642 - RNA, 19 nt, Artificial Sequence
  Description of Artificial Sequence: Synthetic oligonucleotide
gguugugugcacaggcaug

SEQ ID NO: 2649643 - RNA, 19 nt, Artificial Sequence
  Description of Artificial Sequence: Synthetic oligonucleotide
  modified_base (7)..(7): a, c, u, g, unknown or other
caggcancuuucucuaggu

SEQ ID NO: 2649644 - RNA, 19 nt, Artificial Sequence
  Description of Artificial Sequence: Synthetic oligonucleotide
cugggcaaagacugacgga

SEQ ID NO: 2649645 - RNA, 19 nt, Artificial Sequence
  Description of Artificial Sequence: Synthetic oligonucleotide
agcuccgauucgaagugca

SEQ ID NO: 2649646 - RNA, 19 nt, Artificial Sequence
  Description of Artificial Sequence: Synthetic oligonucleotide
aguaccgauaggaccggau

SEQ ID NO: 2649647 - RNA, 19 nt, Artificial Sequence
  Description of Artificial Sequence: Synthetic oligonucleotide
ccacacauguugauccgac

SEQ ID NO: 2649648 - RNA, 19 nt, Artificial Sequence
  Description of Artificial Sequence: Synthetic oligonucleotide
gucccaguaccgauaggac

SEQ ID NO: 2649649 - RNA, 19 nt, Artificial Sequence
  Description of Artificial Sequence: Synthetic oligonucleotide
accucgaggucaaggccuc

SEQ ID NO: 2649650 - RNA, 19 nt, Artificial Sequence
  Description of Artificial Sequence: Synthetic oligonucleotide
caccuguuccucccaaaga

SEQ ID NO: 2649651 - RNA, 19 nt, Artificial Sequence
  Description of Artificial Sequence: Synthetic oligonucleotide
gaucuggauccucccggaa

SEQ ID NO: 2649652 - RNA, 19 nt, Artificial Sequence
  Description of Artificial Sequence: Synthetic oligonucleotide
aaguuggcgacgacacaua

SEQ ID NO: 2649653 - RNA, 19 nt, Artificial Sequence
  Description of Artificial Sequence: Synthetic oligonucleotide
caaguuggcgacgacacau

SEQ ID NO: 2649654 - RNA, 19 nt, Artificial Sequence
  Description of Artificial Sequence: Synthetic oligonucleotide
guuggcgacgacacauaga

SEQ ID NO: 2649655 - RNA, 19 nt, Artificial Sequence
  Description of Artificial Sequence: Synthetic oligonucleotide
gagaacucgggagcguucu

SEQ ID NO: 2649656 - RNA, 19 nt, Artificial Sequence
  Description of Artificial Sequence: Synthetic oligonucleotide
caggaaaccucgaggucaa

SEQ ID NO: 2649657 - RNA, 19 nt, Artificial Sequence
  Description of Artificial Sequence: Synthetic oligonucleotide
ugcacacuugcgacccguu

SEQ ID NO: 2649658 - RNA, 19 nt, Artificial Sequence
  Description of Artificial Sequence: Synthetic oligonucleotide
ggagauagauaugcuucuc

SEQ ID NO: 2649659 - RNA, 19 nt, Artificial Sequence
  Description of Artificial Sequence: Synthetic oligonucleotide
gggcaaagacugacggagg

SEQ ID NO: 2649660 - RNA, 19 nt, Artificial Sequence
  Description of Artificial Sequence: Synthetic oligonucleotide
ggaguugggucggucccgg

SEQ ID NO: 2649661 - RNA, 19 nt, Artificial Sequence
  Description of Artificial Sequence: Synthetic oligonucleotide
gaaccugggcaaagacuga

SEQ ID NO: 2649662 - RNA, 19 nt, Artificial Sequence
  Description of Artificial Sequence: Synthetic oligonucleotide
ggaucuggauccucccgga

SEQ ID NO: 2649663 - RNA, 19 nt, Artificial Sequence
  Description of Artificial Sequence: Synthetic oligonucleotide
cucgaggucaaggccucuc

SEQ ID NO: 2649664 - RNA, 19 nt, Artificial Sequence
  Description of Artificial Sequence: Synthetic oligonucleotide
gcgacgacacauagacagg

SEQ ID NO: 2649665 - RNA, 19 nt, Artificial Sequence
  Description of Artificial Sequence: Synthetic oligonucleotide
auggagaacucgggagcgu

SEQ ID NO: 2649666 - RNA, 19 nt, Artificial Sequence
  Description of Artificial Sequence: Synthetic oligonucleotide
cuaugacagcagcgaucug

SEQ ID NO: 2649667 - RNA, 19 nt, Artificial Sequence
  Description of Artificial Sequence: Synthetic oligonucleotide
gcccugauaggcugaguca

SEQ ID NO: 2649668 - RNA, 19 nt, Artificial Sequence
  Description of Artificial Sequence: Synthetic oligonucleotide
cccggaagucugcagugag

SEQ ID NO: 2649669 - RNA, 19 nt, Artificial Sequence
  Description of Artificial Sequence: Synthetic oligonucleotide
cuggagagcugggcuguug

SEQ ID NO: 2649670 - RNA, 19 nt, Artificial Sequence
  Description of Artificial Sequence: Synthetic oligonucleotide
cugcggaaccugggcaaag

SEQ ID NO: 2649671 - RNA, 19 nt, Artificial Sequence
  Description of Artificial Sequence: Synthetic oligonucleotide
gccauuguaccaucgcccu

SEQ ID NO: 2649672 - RNA, 19 nt, Artificial Sequence
  Description of Artificial Sequence: Synthetic oligonucleotide
cuggaggggccugcggaac

SEQ ID NO: 2649673 - RNA, 19 nt, Artificial Sequence
  Description of Artificial Sequence: Synthetic oligonucleotide
gacugacggaggcgacauc

SEQ ID NO: 2649674 - RNA, 19 nt, Artificial Sequence
  Description of Artificial Sequence: Synthetic oligonucleotide
cuuccacuccucuggaguu

SEQ ID NO: 2649675 - RNA, 19 nt, Artificial Sequence
  Description of Artificial Sequence: Synthetic oligonucleotide
cucccaaagacugcacacu

SEQ ID NO: 2649676 - RNA, 19 nt, Artificial Sequence
  Description of Artificial Sequence: Synthetic oligonucleotide
cuggauccucccggaaguc

SEQ ID NO: 2649677 - RNA, 19 nt, Artificial Sequence
  Description of Artificial Sequence: Synthetic oligonucleotide
cucugcgucccaguaccga

SEQ ID NO: 2649678 - RNA, 19 nt, Artificial Sequence
  Description of Artificial Sequence: Synthetic oligonucleotide
cucuggaguugggucgguc

SEQ ID NO: 2649679 - RNA, 19 nt, Artificial Sequence
  Description of Artificial Sequence: Synthetic oligonucleotide
  modified_base (9)..(9): a, c, u, g, unknown or other
cccaggcancuuucucuag

SEQ ID NO: 2649680 - RNA, 19 nt, Artificial Sequence
  Description of Artificial Sequence: Synthetic oligonucleotide
ggguugugugcacaggcau

SEQ ID NO: 2649681 - RNA, 19 nt, Artificial Sequence
  Description of Artificial Sequence: Synthetic oligonucleotide
ccaguaccgauaggaccgg

SEQ ID NO: 2649682 - RNA, 19 nt, Artificial Sequence
  Description of Artificial Sequence: Synthetic oligonucleotide
ggagaacucgggagcguuc

SEQ ID NO: 2649683 - RNA, 19 nt, Artificial Sequence
  Description of Artificial Sequence: Synthetic oligonucleotide
gugcaccuguuccucccaa

SEQ ID NO: 2649684 - RNA, 19 nt, Artificial Sequence
  Description of Artificial Sequence: Synthetic oligonucleotide
cugcgucccaguaccgaua

SEQ ID NO: 2649685 - RNA, 19 nt, Artificial Sequence
  Description of Artificial Sequence: Synthetic oligonucleotide
ccaucgcccuaagaaauca

SEQ ID NO: 2649686 - RNA, 19 nt, Artificial Sequence
  Description of Artificial Sequence: Synthetic oligonucleotide
ggcgacauccugauggaau

SEQ ID NO: 2649687 - RNA, 19 nt, Artificial Sequence
  Description of Artificial Sequence: Synthetic oligonucleotide
gcuugggauucaacgaaua

SEQ ID NO: 2649688 - RNA, 19 nt, Artificial Sequence
  Description of Artificial Sequence: Synthetic oligonucleotide
cgcagaaaacacagcauua

SEQ ID NO: 2649689 - RNA, 19 nt, Artificial Sequence
  Description of Artificial Sequence: Synthetic oligonucleotide
cgguugucuuucuaugaca

SEQ ID NO: 2649690 - RNA, 19 nt, Artificial Sequence
  Description of Artificial Sequence: Synthetic oligonucleotide
cccugauaggcugagucaa

SEQ ID NO: 2649691 - RNA, 19 nt, Artificial Sequence
  Description of Artificial Sequence: Synthetic oligonucleotide
gccugcggaaccugggcaa

SEQ ID NO: 2649692 - RNA, 19 nt, Artificial Sequence
  Description of Artificial Sequence: Synthetic oligonucleotide
cagauccuucaggaaaccu

SEQ ID NO: 2649693 - RNA, 19 nt, Artificial Sequence
  Description of Artificial Sequence: Synthetic oligonucleotide
gccacacauguugauccga

SEQ ID NO: 2649694 - RNA, 19 nt, Artificial Sequence
  Description of Artificial Sequence: Synthetic oligonucleotide
gcuccgauucgaagugcac

SEQ ID NO: 2649695 - RNA, 19 nt, Artificial Sequence
  Description of Artificial Sequence: Synthetic oligonucleotide
uccgaccgcugggcaggag

SEQ ID NO: 2649696 - RNA, 19 nt, Artificial Sequence
  Description of Artificial Sequence: Synthetic oligonucleotide
gcgucccaguaccgauagg

SEQ ID NO: 2649697 - RNA, 19 nt, Artificial Sequence
  Description of Artificial Sequence: Synthetic oligonucleotide
ccgcagaaaacacagcauu

SEQ ID NO: 2649698 - RNA, 19 nt, Artificial Sequence
  Description of Artificial Sequence: Synthetic oligonucleotide
cacuccucuggaguugggu

SEQ ID NO: 2649699 - RNA, 19 nt, Artificial Sequence
  Description of Artificial Sequence: Synthetic oligonucleotide
ccgaccgcugggcaggaga

SEQ ID NO: 2649700 - RNA, 19 nt, Artificial Sequence
  Description of Artificial Sequence: Synthetic oligonucleotide
ccaaguuggcgacgacaca

SEQ ID NO: 2649701 - RNA, 19 nt, Artificial Sequence
  Description of Artificial Sequence: Synthetic oligonucleotide
ggagcguucuucagauccu

SEQ ID NO: 2649702 - RNA, 19 nt, Artificial Sequence
  Description of Artificial Sequence: Synthetic oligonucleotide
ccgauucgaagugcaccug

SEQ ID NO: 2649703 - RNA, 19 nt, Artificial Sequence
  Description of Artificial Sequence: Synthetic oligonucleotide
cauagacagguguguccuu

SEQ ID NO: 2649704 - RNA, 19 nt, Artificial Sequence
  Description of Artificial Sequence: Synthetic oligonucleotide
cuguugccuugaggggauc

SEQ ID NO: 2649705 - RNA, 19 nt, Artificial Sequence
  Description of Artificial Sequence: Synthetic oligonucleotide
ccgguuggguugugugcac

SEQ ID NO: 2649706 - RNA, 19 nt, Artificial Sequence
  Description of Artificial Sequence: Synthetic oligonucleotide
ccagaacuggaggggccug

SEQ ID NO: 2649707 - RNA, 19 nt, Artificial Sequence
  Description of Artificial Sequence: Synthetic oligonucleotide
caguaccgauaggaccgga

SEQ ID NO: 2649708 - RNA, 19 nt, Artificial Sequence
  Description of Artificial Sequence: Synthetic oligonucleotide
cugcacacuugcgacccgu

SEQ ID NO: 2649709 - RNA, 19 nt, Artificial Sequence
  Description of Artificial Sequence: Synthetic oligonucleotide
gaguugggucggucccggu

SEQ ID NO: 2649710 - RNA, 19 nt, Artificial Sequence
  Description of Artificial Sequence: Synthetic oligonucleotide
auccgaccgcugggcagga

SEQ ID NO: 2649711 - RNA, 19 nt, Artificial Sequence
  Description of Artificial Sequence: Synthetic oligonucleotide
gaccgcugggcaggagaua

SEQ ID NO: 2649712 - RNA, 19 nt, Artificial Sequence
  Description of Artificial Sequence: Synthetic oligonucleotide
gccgcagaaaacacagcau

SEQ ID NO: 2649713 - RNA, 19 nt, Artificial Sequence
  Description of Artificial Sequence: Synthetic oligonucleotide
cggaaccugggcaaagacu

SEQ ID NO: 2649714 - RNA, 19 nt, Artificial Sequence
  Description of Artificial Sequence: Synthetic oligonucleotide
ccauuguaccaucgcccua

SEQ ID NO: 2649715 - RNA, 19 nt, Artificial Sequence
  Description of Artificial Sequence: Synthetic oligonucleotide
ccgauaggaccggaugucu

SEQ ID NO: 2649716 - RNA, 19 nt, Artificial Sequence
  Description of Artificial Sequence: Synthetic oligonucleotide
ccugcggaaccugggcaaa

SEQ ID NO: 2649717 - RNA, 19 nt, Artificial Sequence
  Description of Artificial Sequence: Synthetic oligonucleotide
cgggagcguucuucagauc

SEQ ID NO: 2649718 - RNA, 19 nt, Artificial Sequence
  Description of Artificial Sequence: Synthetic oligonucleotide
cggaggcgacauccugaug

SEQ ID NO: 2649719 - RNA, 19 nt, Artificial Sequence
  Description of Artificial Sequence: Synthetic oligonucleotide
ggucccgguuggguugugu

SEQ ID NO: 2649720 - RNA, 19 nt, Artificial Sequence
  Description of Artificial Sequence: Synthetic oligonucleotide
ccgcugggcaggagauaga

SEQ ID NO: 2649721 - RNA, 19 nt, Artificial Sequence
  Description of Artificial Sequence: Synthetic oligonucleotide
cgguuggguugugugcaca

SEQ ID NO: 2649722 - RNA, 19 nt, Artificial Sequence
  Description of Artificial Sequence: Synthetic oligonucleotide
cgaccgcugggcaggagau

SEQ ID NO: 2649723 - RNA, 19 nt, Artificial Sequence
  Description of Artificial Sequence: Synthetic oligonucleotide
  modified_base (16)..(16): a, c, u, g, unknown or other
cgaauagcccaggcancuu

SEQ ID NO: 2649724 - RNA, 19 nt, Artificial Sequence
  Description of Artificial Sequence: Synthetic oligonucleotide
ccucgaggucaaggccucu

SEQ ID NO: 2649725 - RNA, 19 nt, Artificial Sequence
  Description of Artificial Sequence: Synthetic oligonucleotide
ccucuggaguugggucggu

SEQ ID NO: 2649726 - RNA, 19 nt, Artificial Sequence
  Description of Artificial Sequence: Synthetic oligonucleotide
ucuaagauuugauucaugg

SEQ ID NO: 2649727 - RNA, 19 nt, Artificial Sequence
  Description of Artificial Sequence: Synthetic oligonucleotide
uaagauuugauucauggga

SEQ ID NO: 2649728 - RNA, 19 nt, Artificial Sequence
  Description of Artificial Sequence: Synthetic oligonucleotide
aaucauuugucacauucac

SEQ ID NO: 2649729 - RNA, 19 nt, Artificial Sequence
  Description of Artificial Sequence: Synthetic oligonucleotide
aaugauuugucacauucag

SEQ ID NO: 2649730 - RNA, 19 nt, Artificial Sequence
  Description of Artificial Sequence: Synthetic oligonucleotide
cuuguuauaaagcauuugg

SEQ ID NO: 2649731 - RNA, 19 nt, Artificial Sequence
  Description of Artificial Sequence: Synthetic oligonucleotide
uuauaaagcauuuggaaca

SEQ ID NO: 2649732 - RNA, 19 nt, Artificial Sequence
  Description of Artificial Sequence: Synthetic oligonucleotide
ucucugaugacuuugaaga

SEQ ID NO: 2649733 - RNA, 19 nt, Artificial Sequence
  Description of Artificial Sequence: Synthetic oligonucleotide
cuuaugaauuuucugaugc

SEQ ID NO: 2649734 - RNA, 19 nt, Artificial Sequence
  Description of Artificial Sequence: Synthetic oligonucleotide
uaaaucauuugucacauuc

SEQ ID NO: 2649735 - RNA, 19 nt, Artificial Sequence
  Description of Artificial Sequence: Synthetic oligonucleotide
aagcauuuggaacacugac

SEQ ID NO: 2649736 - RNA, 19 nt, Artificial Sequence
  Description of Artificial Sequence: Synthetic oligonucleotide
uaaaugauuugucacauuc

SEQ ID NO: 2649737 - RNA, 19 nt, Artificial Sequence
  Description of Artificial Sequence: Synthetic oligonucleotide
ucuaagauggccuuucuug

SEQ ID NO: 2649738 - RNA, 19 nt, Artificial Sequence
  Description of Artificial Sequence: Synthetic oligonucleotide
cugauguauucuaagaugg

SEQ ID NO: 2649739 - RNA, 19 nt, Artificial Sequence
  Description of Artificial Sequence: Synthetic oligonucleotide
uaugaauacucuaaugucu

SEQ ID NO: 2649740 - RNA, 19 nt, Artificial Sequence
  Description of Artificial Sequence: Synthetic oligonucleotide
cugaugaguucuaagaugg

SEQ ID NO: 2649741 - RNA, 19 nt, Artificial Sequence
  Description of Artificial Sequence: Synthetic oligonucleotide
ucuaaugucuucuaagaga

SEQ ID NO: 2649742 - RNA, 19 nt, Artificial Sequence
  Description of Artificial Sequence: Synthetic oligonucleotide
acugacuacauuugaaagg

SEQ ID NO: 2649743 - RNA, 19 nt, Artificial Sequence
  Description of Artificial Sequence: Synthetic oligonucleotide
auucacuacauuuguaagg

SEQ ID NO: 2649744 - RNA, 19 nt, Artificial Sequence
  Description of Artificial Sequence: Synthetic oligonucleotide
ugauuugucacauucagua

SEQ ID NO: 2649745 - RNA, 19 nt, Artificial Sequence
  Description of Artificial Sequence: Synthetic oligonucleotide
aguuucaguacauuuguag

SEQ ID NO: 2649746 - RNA, 19 nt, Artificial Sequence
  Description of Artificial Sequence: Synthetic oligonucleotide
uguuguaaaggauuuguca

SEQ ID NO: 2649747 - RNA, 19 nt, Artificial Sequence
  Description of Artificial Sequence: Synthetic oligonucleotide
uguuauaaagcauuuggaa

SEQ ID NO: 2649748 - RNA, 19 nt, Artificial Sequence
  Description of Artificial Sequence: Synthetic oligonucleotide
guuauaaagcauuuggaac

SEQ ID NO: 2649749 - RNA, 19 nt, Artificial Sequence
  Description of Artificial Sequence: Synthetic oligonucleotide
uugauaaaggauuugucac

SEQ ID NO: 2649750 - RNA, 19 nt, Artificial Sequence
  Description of Artificial Sequence: Synthetic oligonucleotide
ucugauguauucuaagaug

SEQ ID NO: 2649751 - RNA, 19 nt, Artificial Sequence
  Description of Artificial Sequence: Synthetic oligonucleotide
ucauuugucacauucacua

SEQ ID NO: 2649752 - RNA, 19 nt, Artificial Sequence
  Description of Artificial Sequence: Synthetic oligonucleotide
guuucaguacauuuguagg

SEQ ID NO: 2649753 - RNA, 19 nt, Artificial Sequence
  Description of Artificial Sequence: Synthetic oligonucleotide
cugaugacuuugaagaugg

SEQ ID NO: 2649754 - RNA, 19 nt, Artificial Sequence
  Description of Artificial Sequence: Synthetic oligonucleotide
uuugauucaugggaaaagg

SEQ ID NO: 2649755 - RNA, 19 nt, Artificial Sequence
  Description of Artificial Sequence: Synthetic oligonucleotide
uguucuaagauuugauuca

SEQ ID NO: 2649756 - RNA, 19 nt, Artificial Sequence
  Description of Artificial Sequence: Synthetic oligonucleotide
uucaguuucaguacauuug

SEQ ID NO: 2649757 - RNA, 19 nt, Artificial Sequence
  Description of Artificial Sequence: Synthetic oligonucleotide
ucuucuaagagaugaggag

SEQ ID NO: 2649758 - RNA, 19 nt, Artificial Sequence
  Description of Artificial Sequence: Synthetic oligonucleotide
uuuucugaguaaaugauuu

SEQ ID NO: 2649759 - RNA, 19 nt, Artificial Sequence
  Description of Artificial Sequence: Synthetic oligonucleotide
ugaguaaaugauuugucac

SEQ ID NO: 2649760 - RNA, 19 nt, Artificial Sequence
  Description of Artificial Sequence: Synthetic oligonucleotide
uucuugguaaaucauuugu

SEQ ID NO: 2649761 - RNA, 19 nt, Artificial Sequence
  Description of Artificial Sequence: Synthetic oligonucleotide
aauuuucugaugcuugcga

SEQ ID NO: 2649762 - RNA, 19 nt, Artificial Sequence
  Description of Artificial Sequence: Synthetic oligonucleotide
guugauaaaggauuuguca

SEQ ID NO: 2649763 - RNA, 19 nt, Artificial Sequence
  Description of Artificial Sequence: Synthetic oligonucleotide
ucugaugaguucuaagaug

SEQ ID NO: 2649764 - RNA, 19 nt, Artificial Sequence
  Description of Artificial Sequence: Synthetic oligonucleotide
uuguuauaaagcauuugga

SEQ ID NO: 2649765 - RNA, 19 nt, Artificial Sequence
  Description of Artificial Sequence: Synthetic oligonucleotide
ucaguuucaguacauuugu

SEQ ID NO: 2649766 - RNA, 19 nt, Artificial Sequence
  Description of Artificial Sequence: Synthetic oligonucleotide
cuaagauuugauucauggg

SEQ ID NO: 2649767 - RNA, 19 nt, Artificial Sequence
  Description of Artificial Sequence: Synthetic oligonucleotide
uacucuaaugucuucuaag

SEQ ID NO: 2649768 - RNA, 19 nt, Artificial Sequence
  Description of Artificial Sequence: Synthetic oligonucleotide
uggucuuuuguuguaaagg

SEQ ID NO: 2649769 - RNA, 19 nt, Artificial Sequence
  Description of Artificial Sequence: Synthetic oligonucleotide
cauucaguacauuuguaag

SEQ ID NO: 2649770 - RNA, 19 nt, Artificial Sequence
  Description of Artificial Sequence: Synthetic oligonucleotide
ugaagauggucuuuuguug

SEQ ID NO: 2649771 - RNA, 19 nt, Artificial Sequence
  Description of Artificial Sequence: Synthetic oligonucleotide
acugguaaaggauuuguca

SEQ ID NO: 2649772 - RNA, 19 nt, Artificial Sequence
  Description of Artificial Sequence: Synthetic oligonucleotide
cuaagauggccuuucuugg

SEQ ID NO: 2649773 - RNA, 19 nt, Artificial Sequence
  Description of Artificial Sequence: Synthetic oligonucleotide
aguacauuuguaggguucc

SEQ ID NO: 2649774 - RNA, 19 nt, Artificial Sequence
  Description of Artificial Sequence: Synthetic oligonucleotide
auguguucuaagauggucc

SEQ ID NO: 2649775 - RNA, 19 nt, Artificial Sequence
  Description of Artificial Sequence: Synthetic oligonucleotide
uucuguaugaauacucuaa

SEQ ID NO: 2649776 - RNA, 19 nt, Artificial Sequence
  Description of Artificial Sequence: Synthetic oligonucleotide
aagguuucacuccuguaug

SEQ ID NO: 2649777 - RNA, 19 nt, Artificial Sequence
  Description of Artificial Sequence: Synthetic oligonucleotide
uuuguuguaaaggauuugu

SEQ ID NO: 2649778 - RNA, 19 nt, Artificial Sequence
  Description of Artificial Sequence: Synthetic oligonucleotide
ugauucaugggaaaaggau

SEQ ID NO: 2649779 - RNA, 19 nt, Artificial Sequence
  Description of Artificial Sequence: Synthetic oligonucleotide
ugggaaaaggauuugucac

SEQ ID NO: 2649780 - RNA, 19 nt, Artificial Sequence
  Description of Artificial Sequence: Synthetic oligonucleotide
cugauguuuucucagacug

SEQ ID NO: 2649781 - RNA, 19 nt, Artificial Sequence
  Description of Artificial Sequence: Synthetic oligonucleotide
ugguaaaucauuugucaca

SEQ ID NO: 2649782 - RNA, 19 nt, Artificial Sequence
  Description of Artificial Sequence: Synthetic oligonucleotide
ugaauuuucugaugcuugc

SEQ ID NO: 2649783 - RNA, 19 nt, Artificial Sequence
  Description of Artificial Sequence: Synthetic oligonucleotide
uuugaagauggucuuuugu

SEQ ID NO: 2649784 - RNA, 19 nt, Artificial Sequence
  Description of Artificial Sequence: Synthetic oligonucleotide
uucuaagagaugaggagcu

SEQ ID NO: 2649785 - RNA, 19 nt, Artificial Sequence
  Description of Artificial Sequence: Synthetic oligonucleotide
uaagaugguccuuuguuga

SEQ ID NO: 2649786 - RNA, 19 nt, Artificial Sequence
  Description of Artificial Sequence: Synthetic oligonucleotide
ucuucuguaugaauacucu

SEQ ID NO: 2649787 - RNA, 19 nt, Artificial Sequence
  Description of Artificial Sequence: Synthetic oligonucleotide
ucucuuguuauaaagcauu

SEQ ID NO: 2649788 - RNA, 19 nt, Artificial Sequence
  Description of Artificial Sequence: Synthetic oligonucleotide
ucuaagaugguccuuuguu

SEQ ID NO: 2649789 - RNA, 19 nt, Artificial Sequence
  Description of Artificial Sequence: Synthetic oligonucleotide
uuuucugaugcuugcgaag

SEQ ID NO: 2649790 - RNA, 19 nt, Artificial Sequence
  Description of Artificial Sequence: Synthetic oligonucleotide
uugagcaacugguaaagga

SEQ ID NO: 2649791 - RNA, 19 nt, Artificial Sequence
  Description of Artificial Sequence: Synthetic oligonucleotide
uggaacacugacuacauuu

SEQ ID NO: 2649792 - RNA, 19 nt, Artificial Sequence
  Description of Artificial Sequence: Synthetic oligonucleotide
uggucucuuguuauaaagc

SEQ ID NO: 2649793 - RNA, 19 nt, Artificial Sequence
  Description of Artificial Sequence: Synthetic oligonucleotide
ucuugguaaaucauuuguc

SEQ ID NO: 2649794 - RNA, 19 nt, Artificial Sequence
  Description of Artificial Sequence: Synthetic oligonucleotide
augacuuugaagauggucu

SEQ ID NO: 2649795 - RNA, 19 nt, Artificial Sequence
  Description of Artificial Sequence: Synthetic oligonucleotide
auggucucuuguuauaaag

SEQ ID NO: 2649796 - RNA, 19 nt, Artificial Sequence
  Description of Artificial Sequence: Synthetic oligonucleotide
acucuaaugucuucuaaga

SEQ ID NO: 2649797 - RNA, 19 nt, Artificial Sequence
  Description of Artificial Sequence: Synthetic oligonucleotide
ugagcaacugguaaaggau

SEQ ID NO: 2649798 - RNA, 19 nt, Artificial Sequence
  Description of Artificial Sequence: Synthetic oligonucleotide
gaguaaaugauuugucaca

SEQ ID NO: 2649799 - RNA, 19 nt, Artificial Sequence
  Description of Artificial Sequence: Synthetic oligonucleotide
cuaagaugguccuuuguug

SEQ ID NO: 2649800 - RNA, 19 nt, Artificial Sequence
  Description of Artificial Sequence: Synthetic oligonucleotide
cuucuaagagaugaggagc

SEQ ID NO: 2649801 - RNA, 19 nt, Artificial Sequence
  Description of Artificial Sequence: Synthetic oligonucleotide
guccuuaugaauuuucuga

SEQ ID NO: 2649802 - RNA, 19 nt, Artificial Sequence
  Description of Artificial Sequence: Synthetic oligonucleotide
uugguaaaucauuugucac

SEQ ID NO: 2649803 - RNA, 19 nt, Artificial Sequence
  Description of Artificial Sequence: Synthetic oligonucleotide
guaugaauacucuaauguc

SEQ ID NO: 2649804 - RNA, 19 nt, Artificial Sequence
  Description of Artificial Sequence: Synthetic oligonucleotide
uguugauaaaggauuuguc

SEQ ID NO: 2649805 - RNA, 19 nt, Artificial Sequence
  Description of Artificial Sequence: Synthetic oligonucleotide
uguuuucucagacugcuuu

SEQ ID NO: 2649806 - RNA, 19 nt, Artificial Sequence
  Description of Artificial Sequence: Synthetic oligonucleotide
ucuguaugaauacucuaau

SEQ ID NO: 2649807 - RNA, 19 nt, Artificial Sequence
  Description of Artificial Sequence: Synthetic oligonucleotide
uugauucaugggaaaagga

SEQ ID NO: 2649808 - RNA, 19 nt, Artificial Sequence
  Description of Artificial Sequence: Synthetic oligonucleotide
augggaaaaggauuuguca

SEQ ID NO: 2649809 - RNA, 19 nt, Artificial Sequence
  Description of Artificial Sequence: Synthetic oligonucleotide
uucugaguaaaugauuugu

SEQ ID NO: 2649810 - RNA, 19 nt, Artificial Sequence
  Description of Artificial Sequence: Synthetic oligonucleotide
uaugaauugcucugaugug

SEQ ID NO: 2649811 - RNA, 19 nt, Artificial Sequence
  Description of Artificial Sequence: Synthetic oligonucleotide
cauucacuacauuuguaag

SEQ ID NO: 2649812 - RNA, 19 nt, Artificial Sequence
  Description of Artificial Sequence: Synthetic oligonucleotide
ucucagacugcuuuucuga

SEQ ID NO: 2649813 - RNA, 19 nt, Artificial Sequence
  Description of Artificial Sequence: Synthetic oligonucleotide
auuuggaacacugacuaca

SEQ ID NO: 2649814 - RNA, 19 nt, Artificial Sequence
  Description of Artificial Sequence: Synthetic oligonucleotide
ugguccuuuguugauaaag

SEQ ID NO: 2649815 - RNA, 19 nt, Artificial Sequence
  Description of Artificial Sequence: Synthetic oligonucleotide
auuugauucaugggaaaag

SEQ ID NO: 2649816 - RNA, 19 nt, Artificial Sequence
  Description of Artificial Sequence: Synthetic oligonucleotide
aauugcucugauguguucu

SEQ ID NO: 2649817 - RNA, 19 nt, Artificial Sequence
  Description of Artificial Sequence: Synthetic oligonucleotide
ucugaugacuuugaagaug

SEQ ID NO: 2649818 - RNA, 19 nt, Artificial Sequence
  Description of Artificial Sequence: Synthetic oligonucleotide
uuucuugguaaaucauuug

SEQ ID NO: 2649819 - RNA, 19 nt, Artificial Sequence
  Description of Artificial Sequence: Synthetic oligonucleotide
uugaagauggucuuuuguu

SEQ ID NO: 2649820 - RNA, 19 nt, Artificial Sequence
  Description of Artificial Sequence: Synthetic oligonucleotide
ugauguauucuaagauggc

SEQ ID NO: 2649821 - RNA, 19 nt, Artificial Sequence
  Description of Artificial Sequence: Synthetic oligonucleotide
cacugacuacauuugaaag

SEQ ID NO: 2649822 - RNA, 19 nt, Artificial Sequence
  Description of Artificial Sequence: Synthetic oligonucleotide
aauacucuaaugucuucua

SEQ ID NO: 2649823 - RNA, 19 nt, Artificial Sequence
  Description of Artificial Sequence: Synthetic oligonucleotide
uuguugauaaaggauuugu

SEQ ID NO: 2649824 - RNA, 19 nt, Artificial Sequence
  Description of Artificial Sequence: Synthetic oligonucleotide
cauuugaaagguuucucuc

SEQ ID NO: 2649825 - RNA, 19 nt, Artificial Sequence
  Description of Artificial Sequence: Synthetic oligonucleotide
aaaucauuugucacauuca

SEQ ID NO: 2649826 - RNA, 19 nt, Artificial Sequence
  Description of Artificial Sequence: Synthetic oligonucleotide
gaauuuucugaugcuugcg

SEQ ID NO: 2649827 - RNA, 19 nt, Artificial Sequence
  Description of Artificial Sequence: Synthetic oligonucleotide
uuucugaguaaaugauuug

SEQ ID NO: 2649828 - RNA, 19 nt, Artificial Sequence
  Description of Artificial Sequence: Synthetic oligonucleotide
cuaagagaugaggagcugg

SEQ ID NO: 2649829 - RNA, 19 nt, Artificial Sequence
  Description of Artificial Sequence: Synthetic oligonucleotide
uguguucuaagauuugauu

SEQ ID NO: 2649830 - RNA, 19 nt, Artificial Sequence
  Description of Artificial Sequence: Synthetic oligonucleotide
acauuuguaggguuccugu

SEQ ID NO: 2649831 - RNA, 19 nt, Artificial Sequence
  Description of Artificial Sequence: Synthetic oligonucleotide
uguguucuaagaugguccu

SEQ ID NO: 2649832 - RNA, 19 nt, Artificial Sequence
  Description of Artificial Sequence: Synthetic oligonucleotide
cucuaaugucuucuaagag

SEQ ID NO: 2649833 - RNA, 19 nt, Artificial Sequence
  Description of Artificial Sequence: Synthetic oligonucleotide
ugauguuuucucagacugc

SEQ ID NO: 2649834 - RNA, 19 nt, Artificial Sequence
  Description of Artificial Sequence: Synthetic oligonucleotide
aaaugauuugucacauuca

SEQ ID NO: 2649835 - RNA, 19 nt, Artificial Sequence
  Description of Artificial Sequence: Synthetic oligonucleotide
ucuaagauggucucuuguu

SEQ ID NO: 2649836 - RNA, 19 nt, Artificial Sequence
  Description of Artificial Sequence: Synthetic oligonucleotide
uaagauggucucuuguuau

SEQ ID NO: 2649837 - RNA, 19 nt, Artificial Sequence
  Description of Artificial Sequence: Synthetic oligonucleotide
aacugguaaaggauuuguc

SEQ ID NO: 2649838 - RNA, 19 nt, Artificial Sequence
  Description of Artificial Sequence: Synthetic oligonucleotide
ucugauguuuucucagacu

SEQ ID NO: 2649839 - RNA, 19 nt, Artificial Sequence
  Description of Artificial Sequence: Synthetic oligonucleotide
aagauuugauucaugggaa

SEQ ID NO: 2649840 - RNA, 19 nt, Artificial Sequence
  Description of Artificial Sequence: Synthetic oligonucleotide
uuucugaugcuugcgaaga

SEQ ID NO: 2649841 - RNA, 19 nt, Artificial Sequence
  Description of Artificial Sequence: Synthetic oligonucleotide
agagaugaggagcugguaa

SEQ ID NO: 2649842 - RNA, 19 nt, Artificial Sequence
  Description of Artificial Sequence: Synthetic oligonucleotide
cuguaugaauacucuaaug

SEQ ID NO: 2649843 - RNA, 19 nt, Artificial Sequence
  Description of Artificial Sequence: Synthetic oligonucleotide
uuuguugauaaaggauuug

SEQ ID NO: 2649844 - RNA, 19 nt, Artificial Sequence
  Description of Artificial Sequence: Synthetic oligonucleotide
ucuuguuauaaagcauuug

SEQ ID NO: 2649845 - RNA, 19 nt, Artificial Sequence
  Description of Artificial Sequence: Synthetic oligonucleotide
uuuggaacacugacuacau

SEQ ID NO: 2649846 - RNA, 19 nt, Artificial Sequence
  Description of Artificial Sequence: Synthetic oligonucleotide
cucuucuguaugaauacuc

SEQ ID NO: 2649847 - RNA, 19 nt, Artificial Sequence
  Description of Artificial Sequence: Synthetic oligonucleotide
gaugacuuugaagaugguc

SEQ ID NO: 2649848 - RNA, 19 nt, Artificial Sequence
  Description of Artificial Sequence: Synthetic oligonucleotide
augaguucuaagauggucu

SEQ ID NO: 2649849 - RNA, 19 nt, Artificial Sequence
  Description of Artificial Sequence: Synthetic oligonucleotide
uuguuguaaaggauuuguc

SEQ ID NO: 2649850 - RNA, 19 nt, Artificial Sequence
  Description of Artificial Sequence: Synthetic oligonucleotide
caugggaaaaggauuuguc

SEQ ID NO: 2649851 - RNA, 19 nt, Artificial Sequence
  Description of Artificial Sequence: Synthetic oligonucleotide
aguaaaugauuugucacau

SEQ ID NO: 2649852 - RNA, 19 nt, Artificial Sequence
  Description of Artificial Sequence: Synthetic oligonucleotide
uuugagcaacugguaaagg

SEQ ID NO: 2649853 - RNA, 19 nt, Artificial Sequence
  Description of Artificial Sequence: Synthetic oligonucleotide
augaauugcucugaugugu

SEQ ID NO: 2649854 - RNA, 19 nt, Artificial Sequence
  Description of Artificial Sequence: Synthetic oligonucleotide
uguauucuaagauggccuu

SEQ ID NO: 2649855 - RNA, 19 nt, Artificial Sequence
  Description of Artificial Sequence: Synthetic oligonucleotide
uucuaagauuugauucaug

SEQ ID NO: 2649856 - RNA, 19 nt, Artificial Sequence
  Description of Artificial Sequence: Synthetic oligonucleotide
augaauuuucugaugcuug

SEQ ID NO: 2649857 - RNA, 19 nt, Artificial Sequence
  Description of Artificial Sequence: Synthetic oligonucleotide
aaagcauuuggaacacuga

SEQ ID NO: 2649858 - RNA, 19 nt, Artificial Sequence
  Description of Artificial Sequence: Synthetic oligonucleotide
ugcucugauguguucuaag

SEQ ID NO: 2649859 - RNA, 19 nt, Artificial Sequence
  Description of Artificial Sequence: Synthetic oligonucleotide
uauucuaagauggccuuuc

SEQ ID NO: 2649860 - RNA, 19 nt, Artificial Sequence
  Description of Artificial Sequence: Synthetic oligonucleotide
uuuuguuguaaaggauuug

SEQ ID NO: 2649861 - RNA, 19 nt, Artificial Sequence
  Description of Artificial Sequence: Synthetic oligonucleotide
auuuucugaugcuugcgaa

SEQ ID NO: 2649862 - RNA, 19 nt, Artificial Sequence
  Description of Artificial Sequence: Synthetic oligonucleotide
gaugcuugcgaagauuuga

SEQ ID NO: 2649863 - RNA, 19 nt, Artificial Sequence
  Description of Artificial Sequence: Synthetic oligonucleotide
gauguguucuaagaugguc

SEQ ID NO: 2649864 - RNA, 19 nt, Artificial Sequence
  Description of Artificial Sequence: Synthetic oligonucleotide
uguucuaagaugguccuuu

SEQ ID NO: 2649865 - RNA, 19 nt, Artificial Sequence
  Description of Artificial Sequence: Synthetic oligonucleotide
auucucugauguuuucuca

SEQ ID NO: 2649866 - RNA, 19 nt, Artificial Sequence
  Description of Artificial Sequence: Synthetic oligonucleotide
cuaaugucuucuaagagau

SEQ ID NO: 2649867 - RNA, 19 nt, Artificial Sequence
  Description of Artificial Sequence: Synthetic oligonucleotide
gguccuuuguugauaaagg

SEQ ID NO: 2649868 - RNA, 19 nt, Artificial Sequence
  Description of Artificial Sequence: Synthetic oligonucleotide
aagauggccuuucuuggua

SEQ ID NO: 2649869 - RNA, 19 nt, Artificial Sequence
  Description of Artificial Sequence: Synthetic oligonucleotide
ggucuuuuguuguaaagga

SEQ ID NO: 2649870 - RNA, 19 nt, Artificial Sequence
  Description of Artificial Sequence: Synthetic oligonucleotide
uucuaagaugguccuuugu

SEQ ID NO: 2649871 - RNA, 19 nt, Artificial Sequence
  Description of Artificial Sequence: Synthetic oligonucleotide
uaagauggccuuucuuggu

SEQ ID NO: 2649872 - RNA, 19 nt, Artificial Sequence
  Description of Artificial Sequence: Synthetic oligonucleotide
gaugguccuuuguugauaa

SEQ ID NO: 2649873 - RNA, 19 nt, Artificial Sequence
  Description of Artificial Sequence: Synthetic oligonucleotide
ggucucuuguuauaaagca

SEQ ID NO: 2649874 - RNA, 19 nt, Artificial Sequence
  Description of Artificial Sequence: Synthetic oligonucleotide
aacacugacuacauuugaa

SEQ ID NO: 2649875 - RNA, 19 nt, Artificial Sequence
  Description of Artificial Sequence: Synthetic oligonucleotide
gaagauggucuuuuguugu

SEQ ID NO: 2649876 - RNA, 19 nt, Artificial Sequence
  Description of Artificial Sequence: Synthetic oligonucleotide
ugaugcuugcgaagauuug

SEQ ID NO: 2649877 - RNA, 19 nt, Artificial Sequence
  Description of Artificial Sequence: Synthetic oligonucleotide
aagaugguccuuuguugau

SEQ ID NO: 2649878 - RNA, 19 nt, Artificial Sequence
  Description of Artificial Sequence: Synthetic oligonucleotide
ucaugggaaaaggauuugu

SEQ ID NO: 2649879 - RNA, 19 nt, Artificial Sequence
  Description of Artificial Sequence: Synthetic oligonucleotide
cucagacugcuuuucugag

SEQ ID NO: 2649880 - RNA, 19 nt, Artificial Sequence
  Description of Artificial Sequence: Synthetic oligonucleotide
ugcuugcgaagauuugagc

SEQ ID NO: 2649881 - RNA, 19 nt, Artificial Sequence
  Description of Artificial Sequence: Synthetic oligonucleotide
gcuugcgaagauuugagca

SEQ ID NO: 2649882 - RNA, 19 nt, Artificial Sequence
  Description of Artificial Sequence: Synthetic oligonucleotide
gaacacugacuacauuuga

SEQ ID NO: 2649883 - RNA, 19 nt, Artificial Sequence
  Description of Artificial Sequence: Synthetic oligonucleotide
gauuugauucaugggaaaa

SEQ ID NO: 2649884 - RNA, 19 nt, Artificial Sequence
  Description of Artificial Sequence: Synthetic oligonucleotide
uaaugucuucuaagagaug

SEQ ID NO: 2649885 - RNA, 19 nt, Artificial Sequence
  Description of Artificial Sequence: Synthetic oligonucleotide
ucagacugcuuuucugagu

SEQ ID NO: 2649886 - RNA, 19 nt, Artificial Sequence
  Description of Artificial Sequence: Synthetic oligonucleotide
ugaauacucuaaugucuuc

SEQ ID NO: 2649887 - RNA, 19 nt, Artificial Sequence
  Description of Artificial Sequence: Synthetic oligonucleotide
aggguuccuguccuuauga

SEQ ID NO: 2649888 - RNA, 19 nt, Artificial Sequence
  Description of Artificial Sequence: Synthetic oligonucleotide
aagauggucuuuuguugua

SEQ ID NO: 2649889 - RNA, 19 nt, Artificial Sequence
  Description of Artificial Sequence: Synthetic oligonucleotide
gauguuuucucagacugcu

SEQ ID NO: 2649890 - RNA, 19 nt, Artificial Sequence
  Description of Artificial Sequence: Synthetic oligonucleotide
caguacauuuguaggguuc

SEQ ID NO: 2649891 - RNA, 19 nt, Artificial Sequence
  Description of Artificial Sequence: Synthetic oligonucleotide
auucaugggaaaaggauuu

SEQ ID NO: 2649892 - RNA, 19 nt, Artificial Sequence
  Description of Artificial Sequence: Synthetic oligonucleotide
cuugcgaagauuugagcaa

SEQ ID NO: 2649893 - RNA, 19 nt, Artificial Sequence
  Description of Artificial Sequence: Synthetic oligonucleotide
guccuuuguugauaaagga

SEQ ID NO: 2649894 - RNA, 19 nt, Artificial Sequence
  Description of Artificial Sequence: Synthetic oligonucleotide
auacucuaaugucuucuaa

SEQ ID NO: 2649895 - RNA, 19 nt, Artificial Sequence
  Description of Artificial Sequence: Synthetic oligonucleotide
ugacuuugaagauggucuu

SEQ ID NO: 2649896 - RNA, 19 nt, Artificial Sequence
  Description of Artificial Sequence: Synthetic oligonucleotide
cugcuuuucugaguaaaug

SEQ ID NO: 2649897 - RNA, 19 nt, Artificial Sequence
  Description of Artificial Sequence: Synthetic oligonucleotide
uucuaagauggccuuucuu

SEQ ID NO: 2649898 - RNA, 19 nt, Artificial Sequence
  Description of Artificial Sequence: Synthetic oligonucleotide
gaauacucuaaugucuucu

SEQ ID NO: 2649899 - RNA, 19 nt, Artificial Sequence
  Description of Artificial Sequence: Synthetic oligonucleotide
agcauuuggaacacugacu

SEQ ID NO: 2649900 - RNA, 19 nt, Artificial Sequence
  Description of Artificial Sequence: Synthetic oligonucleotide
uaggguuccuguccuuaug

SEQ ID NO: 2649901 - RNA, 19 nt, Artificial Sequence
  Description of Artificial Sequence: Synthetic oligonucleotide
aguucuaagauggucucuu

SEQ ID NO: 2649902 - RNA, 19 nt, Artificial Sequence
  Description of Artificial Sequence: Synthetic oligonucleotide
uugcgaagauuugagcaac

SEQ ID NO: 2649903 - RNA, 19 nt, Artificial Sequence
  Description of Artificial Sequence: Synthetic oligonucleotide
ucuaagagaugaggagcug

SEQ ID NO: 2649904 - RNA, 19 nt, Artificial Sequence
  Description of Artificial Sequence: Synthetic oligonucleotide
cauuuggaacacugacuac

SEQ ID NO: 2649905 - RNA, 19 nt, Artificial Sequence
  Description of Artificial Sequence: Synthetic oligonucleotide
gauucucugaugacuuuga

SEQ ID NO: 2649906 - RNA, 19 nt, Artificial Sequence
  Description of Artificial Sequence: Synthetic oligonucleotide
ucucuucuguaugaauacu

SEQ ID NO: 2649907 - RNA, 19 nt, Artificial Sequence
  Description of Artificial Sequence: Synthetic oligonucleotide
ugcgaagauuugagcaacu

SEQ ID NO: 2649908 - RNA, 19 nt, Artificial Sequence
  Description of Artificial Sequence: Synthetic oligonucleotide
gauggucuuuuguuguaaa

SEQ ID NO: 2649909 - RNA, 19 nt, Artificial Sequence
  Description of Artificial Sequence: Synthetic oligonucleotide
gauaaaggauuugucacau

SEQ ID NO: 2649910 - RNA, 19 nt, Artificial Sequence
  Description of Artificial Sequence: Synthetic oligonucleotide
auucuaagauggccuuucu

SEQ ID NO: 2649911 - RNA, 19 nt, Artificial Sequence
  Description of Artificial Sequence: Synthetic oligonucleotide
ucaguacauuuguaggguu

SEQ ID NO: 2649912 - RNA, 19 nt, Artificial Sequence
  Description of Artificial Sequence: Synthetic oligonucleotide
augaauacucuaaugucuu

SEQ ID NO: 2649913 - RNA, 19 nt, Artificial Sequence
  Description of Artificial Sequence: Synthetic oligonucleotide
guucuaagauggucucuug

SEQ ID NO: 2649914 - RNA, 19 nt, Artificial Sequence
  Description of Artificial Sequence: Synthetic oligonucleotide
guucuaagaugguccuuug

SEQ ID NO: 2649915 - RNA, 19 nt, Artificial Sequence
  Description of Artificial Sequence: Synthetic oligonucleotide
augcuugcgaagauuugag

SEQ ID NO: 2649916 - RNA, 19 nt, Artificial Sequence
  Description of Artificial Sequence: Synthetic oligonucleotide
uuuucaguuucaguacauu

SEQ ID NO: 2649917 - RNA, 19 nt, Artificial Sequence
  Description of Artificial Sequence: Synthetic oligonucleotide
cuaagauggucucuuguua

SEQ ID NO: 2649918 - RNA, 19 nt, Artificial Sequence
  Description of Artificial Sequence: Synthetic oligonucleotide
cgaagauuugagcaacugg

SEQ ID NO: 2649919 - RNA, 19 nt, Artificial Sequence
  Description of Artificial Sequence: Synthetic oligonucleotide
gauucaugggaaaaggauu

SEQ ID NO: 2649920 - RNA, 19 nt, Artificial Sequence
  Description of Artificial Sequence: Synthetic oligonucleotide
cacuccuguaugaauucuc

SEQ ID NO: 2649921 - RNA, 19 nt, Artificial Sequence
  Description of Artificial Sequence: Synthetic oligonucleotide
gauggucucuuguuauaaa

SEQ ID NO: 2649922 - RNA, 19 nt, Artificial Sequence
  Description of Artificial Sequence: Synthetic oligonucleotide
gggaaaaggauuugucaca

SEQ ID NO: 2649923 - RNA, 19 nt, Artificial Sequence
  Description of Artificial Sequence: Synthetic oligonucleotide
aucauuugucacauucacu

SEQ ID NO: 2649924 - RNA, 19 nt, Artificial Sequence
  Description of Artificial Sequence: Synthetic oligonucleotide
cuuucuugguaaaucauuu

SEQ ID NO: 2649925 - RNA, 19 nt, Artificial Sequence
  Description of Artificial Sequence: Synthetic oligonucleotide
gaauugcucugauguguuc

SEQ ID NO: 2649926 - RNA, 19 nt, Artificial Sequence
  Description of Artificial Sequence: Synthetic oligonucleotide
agauggucucuuguuauaa

SEQ ID NO: 2649927 - RNA, 19 nt, Artificial Sequence
  Description of Artificial Sequence: Synthetic oligonucleotide
ucugaugcuugcgaagauu

SEQ ID NO: 2649928 - RNA, 19 nt, Artificial Sequence
  Description of Artificial Sequence: Synthetic oligonucleotide
agauggccuuucuugguaa

SEQ ID NO: 2649929 - RNA, 19 nt, Artificial Sequence
  Description of Artificial Sequence: Synthetic oligonucleotide
auucucugaugacuuugaa

SEQ ID NO: 2649930 - RNA, 19 nt, Artificial Sequence
  Description of Artificial Sequence: Synthetic oligonucleotide
augauuugucacauucagu

SEQ ID NO: 2649931 - RNA, 19 nt, Artificial Sequence
  Description of Artificial Sequence: Synthetic oligonucleotide
auugcucugauguguucua

SEQ ID NO: 2649932 - RNA, 19 nt, Artificial Sequence
  Description of Artificial Sequence: Synthetic oligonucleotide
ucaguacauuuguaagguu

SEQ ID NO: 2649933 - RNA, 19 nt, Artificial Sequence
  Description of Artificial Sequence: Synthetic oligonucleotide
uucugaugcuugcgaagau

SEQ ID NO: 2649934 - RNA, 19 nt, Artificial Sequence
  Description of Artificial Sequence: Synthetic oligonucleotide
uguaggguuccuguccuua

SEQ ID NO: 2649935 - RNA, 19 nt, Artificial Sequence
  Description of Artificial Sequence: Synthetic oligonucleotide
cuuuuguuguaaaggauuu

SEQ ID NO: 2649936 - RNA, 19 nt, Artificial Sequence
  Description of Artificial Sequence: Synthetic oligonucleotide
gacugcuuuucugaguaaa

SEQ ID NO: 2649937 - RNA, 19 nt, Artificial Sequence
  Description of Artificial Sequence: Synthetic oligonucleotide
uuccuguccuuaugaauuu

SEQ ID NO: 2649938 - RNA, 19 nt, Artificial Sequence
  Description of Artificial Sequence: Synthetic oligonucleotide
cuucuguaugaauacucua

SEQ ID NO: 2649939 - RNA, 19 nt, Artificial Sequence
  Description of Artificial Sequence: Synthetic oligonucleotide
ugaugacuuugaagauggu

SEQ ID NO: 2649940 - RNA, 19 nt, Artificial Sequence
  Description of Artificial Sequence: Synthetic oligonucleotide
ggccuuucuugguaaauca

SEQ ID NO: 2649941 - RNA, 19 nt, Artificial Sequence
  Description of Artificial Sequence: Synthetic oligonucleotide
cuuuguugauaaaggauuu

SEQ ID NO: 2649942 - RNA, 19 nt, Artificial Sequence
  Description of Artificial Sequence: Synthetic oligonucleotide
guuccuguccuuaugaauu

SEQ ID NO: 2649943 - RNA, 19 nt, Artificial Sequence
  Description of Artificial Sequence: Synthetic oligonucleotide
cuuuucugaguaaaugauu

SEQ ID NO: 2649944 - RNA, 19 nt, Artificial Sequence
  Description of Artificial Sequence: Synthetic oligonucleotide
uuggaacacugacuacauu

SEQ ID NO: 2649945 - RNA, 19 nt, Artificial Sequence
  Description of Artificial Sequence: Synthetic oligonucleotide
agauggucuuuuguuguaa

SEQ ID NO: 2649946 - RNA, 19 nt, Artificial Sequence
  Description of Artificial Sequence: Synthetic oligonucleotide
aagagaugaggagcuggua

SEQ ID NO: 2649947 - RNA, 19 nt, Artificial Sequence
  Description of Artificial Sequence: Synthetic oligonucleotide
acugcuuuucugaguaaau

SEQ ID NO: 2649948 - RNA, 19 nt, Artificial Sequence
  Description of Artificial Sequence: Synthetic oligonucleotide
agcaacugguaaaggauuu

SEQ ID NO: 2649949 - RNA, 19 nt, Artificial Sequence
  Description of Artificial Sequence: Synthetic oligonucleotide
gauggccuuucuugguaaa

SEQ ID NO: 2649950 - RNA, 19 nt, Artificial Sequence
  Description of Artificial Sequence: Synthetic oligonucleotide
cucugaugaguucuaagau

SEQ ID NO: 2649951 - RNA, 19 nt, Artificial Sequence
  Description of Artificial Sequence: Synthetic oligonucleotide
gguaaaucauuugucacau

SEQ ID NO: 2649952 - RNA, 19 nt, Artificial Sequence
  Description of Artificial Sequence: Synthetic oligonucleotide
cuguccuuaugaauuuucu

SEQ ID NO: 2649953 - RNA, 19 nt, Artificial Sequence
  Description of Artificial Sequence: Synthetic oligonucleotide
ccuguccuuaugaauuuuc

SEQ ID NO: 2649954 - RNA, 19 nt, Artificial Sequence
  Description of Artificial Sequence: Synthetic oligonucleotide
cugaugcuugcgaagauuu

SEQ ID NO: 2649955 - RNA, 19 nt, Artificial Sequence
  Description of Artificial Sequence: Synthetic oligonucleotide
ccuuuguugauaaaggauu

SEQ ID NO: 2649956 - RNA, 19 nt, Artificial Sequence
  Description of Artificial Sequence: Synthetic oligonucleotide
agaugguccuuuguugaua

SEQ ID NO: 2649957 - RNA, 19 nt, Artificial Sequence
  Description of Artificial Sequence: Synthetic oligonucleotide
cacauucacuacauuugua

SEQ ID NO: 2649958 - RNA, 19 nt, Artificial Sequence
  Description of Artificial Sequence: Synthetic oligonucleotide
guuucucuucuguaugaau

SEQ ID NO: 2649959 - RNA, 19 nt, Artificial Sequence
  Description of Artificial Sequence: Synthetic oligonucleotide
uugcucugauguguucuaa

SEQ ID NO: 2649960 - RNA, 19 nt, Artificial Sequence
  Description of Artificial Sequence: Synthetic oligonucleotide
gcaacugguaaaggauuug

SEQ ID NO: 2649961 - RNA, 19 nt, Artificial Sequence
  Description of Artificial Sequence: Synthetic oligonucleotide
cacauucacugcauuugua

SEQ ID NO: 2649962 - RNA, 19 nt, Artificial Sequence
  Description of Artificial Sequence: Synthetic oligonucleotide
gcgaagauuugagcaacug

SEQ ID NO: 2649963 - RNA, 19 nt, Artificial Sequence
  Description of Artificial Sequence: Synthetic oligonucleotide
agacugcuuuucugaguaa

SEQ ID NO: 2649964 - RNA, 19 nt, Artificial Sequence
  Description of Artificial Sequence: Synthetic oligonucleotide
auggccuuucuugguaaau

SEQ ID NO: 2649965 - RNA, 19 nt, Artificial Sequence
  Description of Artificial Sequence: Synthetic oligonucleotide
guucuaagauuugauucau

SEQ ID NO: 2649966 - RNA, 19 nt, Artificial Sequence
  Description of Artificial Sequence: Synthetic oligonucleotide
caacugguaaaggauuugu

SEQ ID NO: 2649967 - RNA, 19 nt, Artificial Sequence
  Description of Artificial Sequence: Synthetic oligonucleotide
aggagcugguaaaggauuu

SEQ ID NO: 2649968 - RNA, 19 nt, Artificial Sequence
  Description of Artificial Sequence: Synthetic oligonucleotide
cucuuguuauaaagcauuu

SEQ ID NO: 2649969 - RNA, 19 nt, Artificial Sequence
  Description of Artificial Sequence: Synthetic oligonucleotide
gagcaacugguaaaggauu

SEQ ID NO: 2649970 - RNA, 19 nt, Artificial Sequence
  Description of Artificial Sequence: Synthetic oligonucleotide
guaaaugauuugucacauu

SEQ ID NO: 2649971 - RNA, 19 nt, Artificial Sequence
  Description of Artificial Sequence: Synthetic oligonucleotide
uccuguccuuaugaauuuu

SEQ ID NO: 2649972 - RNA, 19 nt, Artificial Sequence
  Description of Artificial Sequence: Synthetic oligonucleotide
ggaaaaggauuugucacau

SEQ ID NO: 2649973 - RNA, 19 nt, Artificial Sequence
  Description of Artificial Sequence: Synthetic oligonucleotide
caguuucaguacauuugua

SEQ ID NO: 2649974 - RNA, 19 nt, Artificial Sequence
  Description of Artificial Sequence: Synthetic oligonucleotide
gaaaaggauuugucacauu

SEQ ID NO: 2649975 - RNA, 19 nt, Artificial Sequence
  Description of Artificial Sequence: Synthetic oligonucleotide
gucucuuguuauaaagcau

SEQ ID NO: 2649976 - RNA, 19 nt, Artificial Sequence
  Description of Artificial Sequence: Synthetic oligonucleotide
gaguucuaagauggucucu

SEQ ID NO: 2649977 - RNA, 19 nt, Artificial Sequence
  Description of Artificial Sequence: Synthetic oligonucleotide
uuguaggguuccuguccuu

SEQ ID NO: 2649978 - RNA, 19 nt, Artificial Sequence
  Description of Artificial Sequence: Synthetic oligonucleotide
gguuccuguccuuaugaau

SEQ ID NO: 2649979 - RNA, 19 nt, Artificial Sequence
  Description of Artificial Sequence: Synthetic oligonucleotide
cucugaugacuuugaagau

SEQ ID NO: 2649980 - RNA, 19 nt, Artificial Sequence
  Description of Artificial Sequence: Synthetic oligonucleotide
augguccuuuguugauaaa

SEQ ID NO: 2649981 - RNA, 19 nt, Artificial Sequence
  Description of Artificial Sequence: Synthetic oligonucleotide
guaggguuccuguccuuau

SEQ ID NO: 2649982 - RNA, 19 nt, Artificial Sequence
  Description of Artificial Sequence: Synthetic oligonucleotide
cuguaugaauugcucugau

SEQ ID NO: 2649983 - RNA, 19 nt, Artificial Sequence
  Description of Artificial Sequence: Synthetic oligonucleotide
gacuuugaagauggucuuu

SEQ ID NO: 2649984 - RNA, 19 nt, Artificial Sequence
  Description of Artificial Sequence: Synthetic oligonucleotide
auguuuucucagacugcuu

SEQ ID NO: 2649985 - RNA, 19 nt, Artificial Sequence
  Description of Artificial Sequence: Synthetic oligonucleotide
guaaaucauuugucacauu

SEQ ID NO: 2649986 - RNA, 19 nt, Artificial Sequence
  Description of Artificial Sequence: Synthetic oligonucleotide
ccuuucuugguaaaucauu

SEQ ID NO: 2649987 - RNA, 19 nt, Artificial Sequence
  Description of Artificial Sequence: Synthetic oligonucleotide
ggguuccuguccuuaugaa

SEQ ID NO: 2649988 - RNA, 19 nt, Artificial Sequence
  Description of Artificial Sequence: Synthetic oligonucleotide
guauucuaagauggccuuu

SEQ ID NO: 2649989 - RNA, 19 nt, Artificial Sequence
  Description of Artificial Sequence: Synthetic oligonucleotide
gccuuucuugguaaaucau

SEQ ID NO: 2649990 - RNA, 19 nt, Artificial Sequence
  Description of Artificial Sequence: Synthetic oligonucleotide
guguucuaagaugguccuu

SEQ ID NO: 2649991 - RNA, 19 nt, Artificial Sequence
  Description of Artificial Sequence: Synthetic oligonucleotide
ggagcugguaaaggauuuu

SEQ ID NO: 2649992 - RNA, 19 nt, Artificial Sequence
  Description of Artificial Sequence: Synthetic oligonucleotide
aaugaaaugacuuuggaaa

SEQ ID NO: 2649993 - RNA, 19 nt, Artificial Sequence
  Description of Artificial Sequence: Synthetic oligonucleotide
uccguuauuacuaugaaug

SEQ ID NO: 2649994 - RNA, 19 nt, Artificial Sequence
  Description of Artificial Sequence: Synthetic oligonucleotide
acacauaccauucugggcc

SEQ ID NO: 2649995 - RNA, 19 nt, Artificial Sequence
  Description of Artificial Sequence: Synthetic oligonucleotide
aauuauauccguuauuacu

SEQ ID NO: 2649996 - RNA, 19 nt, Artificial Sequence
  Description of Artificial Sequence: Synthetic oligonucleotide
cauuaaauacuguagagcc

SEQ ID NO: 2649997 - RNA, 19 nt, Artificial Sequence
  Description of Artificial Sequence: Synthetic oligonucleotide
aaaagagacccauagcuuc

SEQ ID NO: 2649998 - RNA, 19 nt, Artificial Sequence
  Description of Artificial Sequence: Synthetic oligonucleotide
uuggaaauaacguacaucu

SEQ ID NO: 2649999 - RNA, 19 nt, Artificial Sequence
  Description of Artificial Sequence: Synthetic oligonucleotide
uacauggcaaacaagauca

SEQ ID NO: 2650000 - RNA, 19 nt, Artificial Sequence
  Description of Artificial Sequence: Synthetic oligonucleotide
uguuacauggcaaacaaga

SEQ ID NO: 2650001 - RNA, 19 nt, Artificial Sequence
  Description of Artificial Sequence: Synthetic oligonucleotide
aagaaagcaaccaucaaac

SEQ ID NO: 2650002 - RNA, 19 nt, Artificial Sequence
  Description of Artificial Sequence: Synthetic oligonucleotide
aaugacuuuggaaauaacg

SEQ ID NO: 2650003 - RNA, 19 nt, Artificial Sequence
  Description of Artificial Sequence: Synthetic oligonucleotide
uuuaaugaaaugacuuugg

SEQ ID NO: 2650004 - RNA, 19 nt, Artificial Sequence
  Description of Artificial Sequence: Synthetic oligonucleotide
uccagcucggaucagagcg

SEQ ID NO: 2650005 - RNA, 19 nt, Artificial Sequence
  Description of Artificial Sequence: Synthetic oligonucleotide
agcauaugagaacagcugc

SEQ ID NO: 2650006 - RNA, 19 nt, Artificial Sequence
  Description of Artificial Sequence: Synthetic oligonucleotide
gucacaguaagauacacag

SEQ ID NO: 2650007 - RNA, 19 nt, Artificial Sequence
  Description of Artificial Sequence: Synthetic oligonucleotide
aaugauaaggcugccaaag

SEQ ID NO: 2650008 - RNA, 19 nt, Artificial Sequence
  Description of Artificial Sequence: Synthetic oligonucleotide
aacaucuuuccucuuggcg

SEQ ID NO: 2650009 - RNA, 19 nt, Artificial Sequence
  Description of Artificial Sequence: Synthetic oligonucleotide
acaucuuuccucuuggcgg

SEQ ID NO: 2650010 - RNA, 19 nt, Artificial Sequence
  Description of Artificial Sequence: Synthetic oligonucleotide
aauaacguacaucuccaug

SEQ ID NO: 2650011 - RNA, 19 nt, Artificial Sequence
  Description of Artificial Sequence: Synthetic oligonucleotide
aauacuguagagcccuguc

SEQ ID NO: 2650012 - RNA, 19 nt, Artificial Sequence
  Description of Artificial Sequence: Synthetic oligonucleotide
cuucagacaaggcaaaucc

SEQ ID NO: 2650013 - RNA, 19 nt, Artificial Sequence
  Description of Artificial Sequence: Synthetic oligonucleotide
auuacuaugaaugccaaca

SEQ ID NO: 2650014 - RNA, 19 nt, Artificial Sequence
  Description of Artificial Sequence: Synthetic oligonucleotide
auaacguacaucuccauga

SEQ ID NO: 2650015 - RNA, 19 nt, Artificial Sequence
  Description of Artificial Sequence: Synthetic oligonucleotide
caauucuggauccagcucg

SEQ ID NO: 2650016 - RNA, 19 nt, Artificial Sequence
  Description of Artificial Sequence: Synthetic oligonucleotide
acaagaucaagaaagcaac

SEQ ID NO: 2650017 - RNA, 19 nt, Artificial Sequence
  Description of Artificial Sequence: Synthetic oligonucleotide
agauacacagaauuauauc

SEQ ID NO: 2650018 - RNA, 19 nt, Artificial Sequence
  Description of Artificial Sequence: Synthetic oligonucleotide
gcaaacaagaucaagaaag

SEQ ID NO: 2650019 - RNA, 19 nt, Artificial Sequence
  Description of Artificial Sequence: Synthetic oligonucleotide
auaacacugaugcagaaau

SEQ ID NO: 2650020 - RNA, 19 nt, Artificial Sequence
  Description of Artificial Sequence: Synthetic oligonucleotide
ggaaauaacguacaucucc

SEQ ID NO: 2650021 - RNA, 19 nt, Artificial Sequence
  Description of Artificial Sequence: Synthetic oligonucleotide
cuauaugcaauucuggauc

SEQ ID NO: 2650022 - RNA, 19 nt, Artificial Sequence
  Description of Artificial Sequence: Synthetic oligonucleotide
ugaaugccaacauuucagg

SEQ ID NO: 2650023 - RNA, 19 nt, Artificial Sequence
  Description of Artificial Sequence: Synthetic oligonucleotide
auaugagaacagcugcugc

SEQ ID NO: 2650024 - RNA, 19 nt, Artificial Sequence
  Description of Artificial Sequence: Synthetic oligonucleotide
gauugcacuggucugaaac

SEQ ID NO: 2650025 - RNA, 19 nt, Artificial Sequence
  Description of Artificial Sequence: Synthetic oligonucleotide
ugacacauaccauucuggg

SEQ ID NO: 2650026 - RNA, 19 nt, Artificial Sequence
  Description of Artificial Sequence: Synthetic oligonucleotide
uaugaaugccaacauuuca

SEQ ID NO: 2650027 - RNA, 19 nt, Artificial Sequence
  Description of Artificial Sequence: Synthetic oligonucleotide
uuaaugaaaugacuuugga

SEQ ID NO: 2650028 - RNA, 19 nt, Artificial Sequence
  Description of Artificial Sequence: Synthetic oligonucleotide
ucagacaaggcaaauccca

SEQ ID NO: 2650029 - RNA, 19 nt, Artificial Sequence
  Description of Artificial Sequence: Synthetic oligonucleotide
ugaaacucccuucggauca

SEQ ID NO: 2650030 - RNA, 19 nt, Artificial Sequence
  Description of Artificial Sequence: Synthetic oligonucleotide
auacuguagagcccugucc

SEQ ID NO: 2650031 - RNA, 19 nt, Artificial Sequence
  Description of Artificial Sequence: Synthetic oligonucleotide
aaagcaaccaucaaacaaa

SEQ ID NO: 2650032 - RNA, 19 nt, Artificial Sequence
  Description of Artificial Sequence: Synthetic oligonucleotide
uggucugaaacucccuucg

SEQ ID NO: 2650033 - RNA, 19 nt, Artificial Sequence
  Description of Artificial Sequence: Synthetic oligonucleotide
ucuguuacauggcaaacaa

SEQ ID NO: 2650034 - RNA, 19 nt, Artificial Sequence
  Description of Artificial Sequence: Synthetic oligonucleotide
aaugaauuuggcugcagua

SEQ ID NO: 2650035 - RNA, 19 nt, Artificial Sequence
  Description of Artificial Sequence: Synthetic oligonucleotide
acugaugcagaaauuggcc

SEQ ID NO: 2650036 - RNA, 19 nt, Artificial Sequence
  Description of Artificial Sequence: Synthetic oligonucleotide
uauaugcaauucuggaucc

SEQ ID NO: 2650037 - RNA, 19 nt, Artificial Sequence
  Description of Artificial Sequence: Synthetic oligonucleotide
aacaagaucaagaaagcaa

SEQ ID NO: 2650038 - RNA, 19 nt, Artificial Sequence
  Description of Artificial Sequence: Synthetic oligonucleotide
caaacaagaucaagaaagc

SEQ ID NO: 2650039 - RNA, 19 nt, Artificial Sequence
  Description of Artificial Sequence: Synthetic oligonucleotide
uaaugaaaugacuuuggaa

SEQ ID NO: 2650040 - RNA, 19 nt, Artificial Sequence
  Description of Artificial Sequence: Synthetic oligonucleotide
ugauaaggcugccaaagac

SEQ ID NO: 2650041 - RNA, 19 nt, Artificial Sequence
  Description of Artificial Sequence: Synthetic oligonucleotide
acguacaucuccaugacac

SEQ ID NO: 2650042 - RNA, 19 nt, Artificial Sequence
  Description of Artificial Sequence: Synthetic oligonucleotide
ugcaguaucaaugucucug

SEQ ID NO: 2650043 - RNA, 19 nt, Artificial Sequence
  Description of Artificial Sequence: Synthetic oligonucleotide
uaauuucuguuacauggca

SEQ ID NO: 2650044 - RNA, 19 nt, Artificial Sequence
  Description of Artificial Sequence: Synthetic oligonucleotide
gaaagcaaccaucaaacaa

SEQ ID NO: 2650045 - RNA, 19 nt, Artificial Sequence
  Description of Artificial Sequence: Synthetic oligonucleotide
agaauuauauccguuauua

SEQ ID NO: 2650046 - RNA, 19 nt, Artificial Sequence
  Description of Artificial Sequence: Synthetic oligonucleotide
uacuguagagcccugucca

SEQ ID NO: 2650047 - RNA, 19 nt, Artificial Sequence
  Description of Artificial Sequence: Synthetic oligonucleotide
guaucaaugucucugcuga

SEQ ID NO: 2650048 - RNA, 19 nt, Artificial Sequence
  Description of Artificial Sequence: Synthetic oligonucleotide
guuauuacuaugaaugcca

SEQ ID NO: 2650049 - RNA, 19 nt, Artificial Sequence
  Description of Artificial Sequence: Synthetic oligonucleotide
ggagauaacacugaugcag

SEQ ID NO: 2650050 - RNA, 19 nt, Artificial Sequence
  Description of Artificial Sequence: Synthetic oligonucleotide
gacuuuggaaauaacguac

SEQ ID NO: 2650051 - RNA, 19 nt, Artificial Sequence
  Description of Artificial Sequence: Synthetic oligonucleotide
gaucagcugacacauacca

SEQ ID NO: 2650052 - RNA, 19 nt, Artificial Sequence
  Description of Artificial Sequence: Synthetic oligonucleotide
gaaccagcaacuccuacug

SEQ ID NO: 2650053 - RNA, 19 nt, Artificial Sequence
  Description of Artificial Sequence: Synthetic oligonucleotide
uaugagaacagcugcugcu

SEQ ID NO: 2650054 - RNA, 19 nt, Artificial Sequence
  Description of Artificial Sequence: Synthetic oligonucleotide
gauagcauaugagaacagc

SEQ ID NO: 2650055 - RNA, 19 nt, Artificial Sequence
  Description of Artificial Sequence: Synthetic oligonucleotide
aaggcaaaucccaggauag

SEQ ID NO: 2650056 - RNA, 19 nt, Artificial Sequence
  Description of Artificial Sequence: Synthetic oligonucleotide
aguaucaaugucucugcug

SEQ ID NO: 2650057 - RNA, 19 nt, Artificial Sequence
  Description of Artificial Sequence: Synthetic oligonucleotide
aaacaagaucaagaaagca

SEQ ID NO: 2650058 - RNA, 19 nt, Artificial Sequence
  Description of Artificial Sequence: Synthetic oligonucleotide
cugacacauaccauucugg

SEQ ID NO: 2650059 - RNA, 19 nt, Artificial Sequence
  Description of Artificial Sequence: Synthetic oligonucleotide
auuucuguuacauggcaaa

SEQ ID NO: 2650060 - RNA, 19 nt, Artificial Sequence
  Description of Artificial Sequence: Synthetic oligonucleotide
uggccuauaugcaauucug

SEQ ID NO: 2650061 - RNA, 19 nt, Artificial Sequence
  Description of Artificial Sequence: Synthetic oligonucleotide
ucagcugacacauaccauu

SEQ ID NO: 2650062 - RNA, 19 nt, Artificial Sequence
  Description of Artificial Sequence: Synthetic oligonucleotide
cauagcuucagacaaggca

SEQ ID NO: 2650063 - RNA, 19 nt, Artificial Sequence
  Description of Artificial Sequence: Synthetic oligonucleotide
acuguugcagcaccugcac

SEQ ID NO: 2650064 - RNA, 19 nt, Artificial Sequence
  Description of Artificial Sequence: Synthetic oligonucleotide
cacugaugcagaaauuggc

SEQ ID NO: 2650065 - RNA, 19 nt, Artificial Sequence
  Description of Artificial Sequence: Synthetic oligonucleotide
uggauuugggugacaggcg

SEQ ID NO: 2650066 - RNA, 19 nt, Artificial Sequence
  Description of Artificial Sequence: Synthetic oligonucleotide
uucagacaaggcaaauccc

SEQ ID NO: 2650067 - RNA, 19 nt, Artificial Sequence
  Description of Artificial Sequence: Synthetic oligonucleotide
auuauauccguuauuacua

SEQ ID NO: 2650068 - RNA, 19 nt, Artificial Sequence
  Description of Artificial Sequence: Synthetic oligonucleotide
uuucaggcaguaauuucug

SEQ ID NO: 2650069 - RNA, 19 nt, Artificial Sequence
  Description of Artificial Sequence: Synthetic oligonucleotide
aaugucucugcugauugca

SEQ ID NO: 2650070 - RNA, 19 nt, Artificial Sequence
  Description of Artificial Sequence: Synthetic oligonucleotide
gacacauaccauucugggc

SEQ ID NO: 2650071 - RNA, 19 nt, Artificial Sequence
  Description of Artificial Sequence: Synthetic oligonucleotide
uacacagaauuauauccgu

SEQ ID NO: 2650072 - RNA, 19 nt, Artificial Sequence
  Description of Artificial Sequence: Synthetic oligonucleotide
ugacuuuggaaauaacgua

SEQ ID NO: 2650073 - RNA, 19 nt, Artificial Sequence
  Description of Artificial Sequence: Synthetic oligonucleotide
uuuggaaauaacguacauc

SEQ ID NO: 2650074 - RNA, 19 nt, Artificial Sequence
  Description of Artificial Sequence: Synthetic oligonucleotide
caagaucaagaaagcaacc

SEQ ID NO: 2650075 - RNA, 19 nt, Artificial Sequence
  Description of Artificial Sequence: Synthetic oligonucleotide
gaaauaacguacaucucca

SEQ ID NO: 2650076 - RNA, 19 nt, Artificial Sequence
  Description of Artificial Sequence: Synthetic oligonucleotide
uaugcaauucuggauccag

SEQ ID NO: 2650077 - RNA, 19 nt, Artificial Sequence
  Description of Artificial Sequence: Synthetic oligonucleotide
ucucugguggagauaacac

SEQ ID NO: 2650078 - RNA, 19 nt, Artificial Sequence
  Description of Artificial Sequence: Synthetic oligonucleotide
uuauuacuaugaaugccaa

SEQ ID NO: 2650079 - RNA, 19 nt, Artificial Sequence
  Description of Artificial Sequence: Synthetic oligonucleotide
ucugaaacucccuucggau

SEQ ID NO: 2650080 - RNA, 19 nt, Artificial Sequence
  Description of Artificial Sequence: Synthetic oligonucleotide
gaaauuggccuauaugcaa

SEQ ID NO: 2650081 - RNA, 19 nt, Artificial Sequence
  Description of Artificial Sequence: Synthetic oligonucleotide
uggcaaacaagaucaagaa

SEQ ID NO: 2650082 - RNA, 19 nt, Artificial Sequence
  Description of Artificial Sequence: Synthetic oligonucleotide
uacaucuccaugacaccag

SEQ ID NO: 2650083 - RNA, 19 nt, Artificial Sequence
  Description of Artificial Sequence: Synthetic oligonucleotide
aacuccuacuguugcagca

SEQ ID NO: 2650084 - RNA, 19 nt, Artificial Sequence
  Description of Artificial Sequence: Synthetic oligonucleotide
uuggccuauaugcaauucu

SEQ ID NO: 2650085 - RNA, 19 nt, Artificial Sequence
  Description of Artificial Sequence: Synthetic oligonucleotide
uuggcugcaguaucaaugu

SEQ ID NO: 2650086 - RNA, 19 nt, Artificial Sequence
  Description of Artificial Sequence: Synthetic oligonucleotide
gacaaggcaaaucccagga

SEQ ID NO: 2650087 - RNA, 19 nt, Artificial Sequence
  Description of Artificial Sequence: Synthetic oligonucleotide
uguuccaaucccagcacca

SEQ ID NO: 2650088 - RNA, 19 nt, Artificial Sequence
  Description of Artificial Sequence: Synthetic oligonucleotide
aggauagcauaugagaaca

SEQ ID NO: 2650089 - RNA, 19 nt, Artificial Sequence
  Description of Artificial Sequence: Synthetic oligonucleotide
uuucaucuuuaaugaaaug

SEQ ID NO: 2650090 - RNA, 19 nt, Artificial Sequence
  Description of Artificial Sequence: Synthetic oligonucleotide
caguccuagucucuggugg

SEQ ID NO: 2650091 - RNA, 19 nt, Artificial Sequence
  Description of Artificial Sequence: Synthetic oligonucleotide
auagcauaugagaacagcu

SEQ ID NO: 2650092 - RNA, 19 nt, Artificial Sequence
  Description of Artificial Sequence: Synthetic oligonucleotide
augaaaugacuuuggaaau

SEQ ID NO: 2650093 - RNA, 19 nt, Artificial Sequence
  Description of Artificial Sequence: Synthetic oligonucleotide
uuuuggagucacaguaaga

SEQ ID NO: 2650094 - RNA, 19 nt, Artificial Sequence
  Description of Artificial Sequence: Synthetic oligonucleotide
acagaauuauauccguuau

SEQ ID NO: 2650095 - RNA, 19 nt, Artificial Sequence
  Description of Artificial Sequence: Synthetic oligonucleotide
gaucaagaaagcaaccauc

SEQ ID NO: 2650096 - RNA, 19 nt, Artificial Sequence
  Description of Artificial Sequence: Synthetic oligonucleotide
gagacccauagcuucagac

SEQ ID NO: 2650097 - RNA, 19 nt, Artificial Sequence
  Description of Artificial Sequence: Synthetic oligonucleotide
ucuccaugacaccagcacu

SEQ ID NO: 2650098 - RNA, 19 nt, Artificial Sequence
  Description of Artificial Sequence: Synthetic oligonucleotide
aaaugacuuuggaaauaac

SEQ ID NO: 2650099 - RNA, 19 nt, Artificial Sequence
  Description of Artificial Sequence: Synthetic oligonucleotide
uuacuaugaaugccaacau

SEQ ID NO: 2650100 - RNA, 19 nt, Artificial Sequence
  Description of Artificial Sequence: Synthetic oligonucleotide
auauccguuauuacuauga

SEQ ID NO: 2650101 - RNA, 19 nt, Artificial Sequence
  Description of Artificial Sequence: Synthetic oligonucleotide
uauauccguuauuacuaug

SEQ ID NO: 2650102 - RNA, 19 nt, Artificial Sequence
  Description of Artificial Sequence: Synthetic oligonucleotide
ucugggccccauuaaauac

SEQ ID NO: 2650103 - RNA, 19 nt, Artificial Sequence
  Description of Artificial Sequence: Synthetic oligonucleotide
auagcuucagacaaggcaa

SEQ ID NO: 2650104 - RNA, 19 nt, Artificial Sequence
  Description of Artificial Sequence: Synthetic oligonucleotide
auugcacuggucugaaacu

SEQ ID NO: 2650105 - RNA, 19 nt, Artificial Sequence
  Description of Artificial Sequence: Synthetic oligonucleotide
caaagacuguuccaauccc

SEQ ID NO: 2650106 - RNA, 19 nt, Artificial Sequence
  Description of Artificial Sequence: Synthetic oligonucleotide
caggauagcauaugagaac

SEQ ID NO: 2650107 - RNA, 19 nt, Artificial Sequence
  Description of Artificial Sequence: Synthetic oligonucleotide
auaaggcugccaaagacug

SEQ ID NO: 2650108 - RNA, 19 nt, Artificial Sequence
  Description of Artificial Sequence: Synthetic oligonucleotide
caagaaagcaaccaucaaa

SEQ ID NO: 2650109 - RNA, 19 nt, Artificial Sequence
  Description of Artificial Sequence: Synthetic oligonucleotide
agacccauagcuucagaca

SEQ ID NO: 2650110 - RNA, 19 nt, Artificial Sequence
  Description of Artificial Sequence: Synthetic oligonucleotide
ugcagcaccugcaccaaug

SEQ ID NO: 2650111 - RNA, 19 nt, Artificial Sequence
  Description of Artificial Sequence: Synthetic oligonucleotide
ucccaggauagcauaugag

SEQ ID NO: 2650112 - RNA, 19 nt, Artificial Sequence
  Description of Artificial Sequence: Synthetic oligonucleotide
uucuguuacauggcaaaca

SEQ ID NO: 2650113 - RNA, 19 nt, Artificial Sequence
  Description of Artificial Sequence: Synthetic oligonucleotide
aaauaacguacaucuccau

SEQ ID NO: 2650114 - RNA, 19 nt, Artificial Sequence
  Description of Artificial Sequence: Synthetic oligonucleotide
guaauuucuguuacauggc

SEQ ID NO: 2650115 - RNA, 19 nt, Artificial Sequence
  Description of Artificial Sequence: Synthetic oligonucleotide
aauucuggauccagcucgg

SEQ ID NO: 2650116 - RNA, 19 nt, Artificial Sequence
  Description of Artificial Sequence: Synthetic oligonucleotide
uaacguacaucuccaugac

SEQ ID NO: 2650117 - RNA, 19 nt, Artificial Sequence
  Description of Artificial Sequence: Synthetic oligonucleotide
uauccguuauuacuaugaa

SEQ ID NO: 2650118 - RNA, 19 nt, Artificial Sequence
  Description of Artificial Sequence: Synthetic oligonucleotide
uacuguugcagcaccugca

SEQ ID NO: 2650119 - RNA, 19 nt, Artificial Sequence
  Description of Artificial Sequence: Synthetic oligonucleotide
uauuacuaugaaugccaac

SEQ ID NO: 2650120 - RNA, 19 nt, Artificial Sequence
  Description of Artificial Sequence: Synthetic oligonucleotide
uuauauccguuauuacuau

SEQ ID NO: 2650121 - RNA, 19 nt, Artificial Sequence
  Description of Artificial Sequence: Synthetic oligonucleotide
aacguacaucuccaugaca

SEQ ID NO: 2650122 - RNA, 19 nt, Artificial Sequence
  Description of Artificial Sequence: Synthetic oligonucleotide
gacccauagcuucagacaa

SEQ ID NO: 2650123 - RNA, 19 nt, Artificial Sequence
  Description of Artificial Sequence: Synthetic oligonucleotide
auuugggugacaggcgacg

SEQ ID NO: 2650124 - RNA, 19 nt, Artificial Sequence
  Description of Artificial Sequence: Synthetic oligonucleotide
cauuucaggcaguaauuuc

SEQ ID NO: 2650125 - RNA, 19 nt, Artificial Sequence
  Description of Artificial Sequence: Synthetic oligonucleotide
agaaagcaaccaucaaaca

SEQ ID NO: 2650126 - RNA, 19 nt, Artificial Sequence
  Description of Artificial Sequence: Synthetic oligonucleotide
aauuucuguuacauggcaa

SEQ ID NO: 2650127 - RNA, 19 nt, Artificial Sequence
  Description of Artificial Sequence: Synthetic oligonucleotide
cagacaaggcaaaucccag

SEQ ID NO: 2650128 - RNA, 19 nt, Artificial Sequence
  Description of Artificial Sequence: Synthetic oligonucleotide
ucaggcaguaauuucuguu

SEQ ID NO: 2650129 - RNA, 19 nt, Artificial Sequence
  Description of Artificial Sequence: Synthetic oligonucleotide
agugaaggguuucuggcau

SEQ ID NO: 2650130 - RNA, 19 nt, Artificial Sequence
  Description of Artificial Sequence: Synthetic oligonucleotide
ugaugcagaaauuggccua

SEQ ID NO: 2650131 - RNA, 19 nt, Artificial Sequence
  Description of Artificial Sequence: Synthetic oligonucleotide
caggcgaacaucuuuccuc

SEQ ID NO: 2650132 - RNA, 19 nt, Artificial Sequence
  Description of Artificial Sequence: Synthetic oligonucleotide
aaauuggccuauaugcaau

SEQ ID NO: 2650133 - RNA, 19 nt, Artificial Sequence
  Description of Artificial Sequence: Synthetic oligonucleotide
accugcaccaaugaauuug

SEQ ID NO: 2650134 - RNA, 19 nt, Artificial Sequence
  Description of Artificial Sequence: Synthetic oligonucleotide
aaagagacccauagcuuca

SEQ ID NO: 2650135 - RNA, 19 nt, Artificial Sequence
  Description of Artificial Sequence: Synthetic oligonucleotide
uuggcgcaggcgaacaucu

SEQ ID NO: 2650136 - RNA, 19 nt, Artificial Sequence
  Description of Artificial Sequence: Synthetic oligonucleotide
ccaaagacuguuccaaucc

SEQ ID NO: 2650137 - RNA, 19 nt, Artificial Sequence
  Description of Artificial Sequence: Synthetic oligonucleotide
cauaugagaacagcugcug

SEQ ID NO: 2650138 - RNA, 19 nt, Artificial Sequence
  Description of Artificial Sequence: Synthetic oligonucleotide
aauuggccuauaugcaauu

SEQ ID NO: 2650139 - RNA, 19 nt, Artificial Sequence
  Description of Artificial Sequence: Synthetic oligonucleotide
aaucccaggauagcauaug

SEQ ID NO: 2650140 - RNA, 19 nt, Artificial Sequence
  Description of Artificial Sequence: Synthetic oligonucleotide
uacuaugaaugccaacauu

SEQ ID NO: 2650141 - RNA, 19 nt, Artificial Sequence
  Description of Artificial Sequence: Synthetic oligonucleotide
aguaagauacacagaauua

SEQ ID NO: 2650142 - RNA, 19 nt, Artificial Sequence
  Description of Artificial Sequence: Synthetic oligonucleotide
augauaaggcugccaaaga

SEQ ID NO: 2650143 - RNA, 19 nt, Artificial Sequence
  Description of Artificial Sequence: Synthetic oligonucleotide
ugggccccauuaaauacug

SEQ ID NO: 2650144 - RNA, 19 nt, Artificial Sequence
  Description of Artificial Sequence: Synthetic oligonucleotide
aguuuucaucuuuaaugaa

SEQ ID NO: 2650145 - RNA, 19 nt, Artificial Sequence
  Description of Artificial Sequence: Synthetic oligonucleotide
ugcagaaauuggccuauau

SEQ ID NO: 2650146 - RNA, 19 nt, Artificial Sequence
  Description of Artificial Sequence: Synthetic oligonucleotide
uggaaauaacguacaucuc

SEQ ID NO: 2650147 - RNA, 19 nt, Artificial Sequence
  Description of Artificial Sequence: Synthetic oligonucleotide
gagauaacacugaugcaga

SEQ ID NO: 2650148 - RNA, 19 nt, Artificial Sequence
  Description of Artificial Sequence: Synthetic oligonucleotide
augaauuuggcugcaguau

SEQ ID NO: 2650149 - RNA, 19 nt, Artificial Sequence
  Description of Artificial Sequence: Synthetic oligonucleotide
uaaauacuguagagcccug

SEQ ID NO: 2650150 - RNA, 19 nt, Artificial Sequence
  Description of Artificial Sequence: Synthetic oligonucleotide
augcaauucuggauccagc

SEQ ID NO: 2650151 - RNA, 19 nt, Artificial Sequence
  Description of Artificial Sequence: Synthetic oligonucleotide
aggcgaacaucuuuccucu

SEQ ID NO: 2650152 - RNA, 19 nt, Artificial Sequence
  Description of Artificial Sequence: Synthetic oligonucleotide
uccaguccuagucucuggu

SEQ ID NO: 2650153 - RNA, 19 nt, Artificial Sequence
  Description of Artificial Sequence: Synthetic oligonucleotide
cauggcaaacaagaucaag

SEQ ID NO: 2650154 - RNA, 19 nt, Artificial Sequence
  Description of Artificial Sequence: Synthetic oligonucleotide
uuccaaucccagcaccaga

SEQ ID NO: 2650155 - RNA, 19 nt, Artificial Sequence
  Description of Artificial Sequence: Synthetic oligonucleotide
aaggcugccaaagacuguu

SEQ ID NO: 2650156 - RNA, 19 nt, Artificial Sequence
  Description of Artificial Sequence: Synthetic oligonucleotide
acuccuacuguugcagcac

SEQ ID NO: 2650157 - RNA, 19 nt, Artificial Sequence
  Description of Artificial Sequence: Synthetic oligonucleotide
uuccucucucccgaggcgg

SEQ ID NO: 2650158 - RNA, 19 nt, Artificial Sequence
  Description of Artificial Sequence: Synthetic oligonucleotide
auuggccuauaugcaauuc

SEQ ID NO: 2650159 - RNA, 19 nt, Artificial Sequence
  Description of Artificial Sequence: Synthetic oligonucleotide
cacagaauuauauccguua

SEQ ID NO: 2650160 - RNA, 19 nt, Artificial Sequence
  Description of Artificial Sequence: Synthetic oligonucleotide
gaauuuggcugcaguauca

SEQ ID NO: 2650161 - RNA, 19 nt, Artificial Sequence
  Description of Artificial Sequence: Synthetic oligonucleotide
uggagauaacacugaugca

SEQ ID NO: 2650162 - RNA, 19 nt, Artificial Sequence
  Description of Artificial Sequence: Synthetic oligonucleotide
gauaaggcugccaaagacu

SEQ ID NO: 2650163 - RNA, 19 nt, Artificial Sequence
  Description of Artificial Sequence: Synthetic oligonucleotide
uuggcggcguggauuuggg

SEQ ID NO: 2650164 - RNA, 19 nt, Artificial Sequence
  Description of Artificial Sequence: Synthetic oligonucleotide
auccguuauuacuaugaau

SEQ ID NO: 2650165 - RNA, 19 nt, Artificial Sequence
  Description of Artificial Sequence: Synthetic oligonucleotide
cugaaacucccuucggauc

SEQ ID NO: 2650166 - RNA, 19 nt, Artificial Sequence
  Description of Artificial Sequence: Synthetic oligonucleotide
acuuuggaaauaacguaca

SEQ ID NO: 2650167 - RNA, 19 nt, Artificial Sequence
  Description of Artificial Sequence: Synthetic oligonucleotide
aaacucccuucggaucagc

SEQ ID NO: 2650168 - RNA, 19 nt, Artificial Sequence
  Description of Artificial Sequence: Synthetic oligonucleotide
uucuggauccagcucggau

SEQ ID NO: 2650169 - RNA, 19 nt, Artificial Sequence
  Description of Artificial Sequence: Synthetic oligonucleotide
ugagaacagcugcugcuuc

SEQ ID NO: 2650170 - RNA, 19 nt, Artificial Sequence
  Description of Artificial Sequence: Synthetic oligonucleotide
accagcaacuccuacuguu

SEQ ID NO: 2650171 - RNA, 19 nt, Artificial Sequence
  Description of Artificial Sequence: Synthetic oligonucleotide
uagagcccuguccaguccu

SEQ ID NO: 2650172 - RNA, 19 nt, Artificial Sequence
  Description of Artificial Sequence: Synthetic oligonucleotide
caaugucucugcugauugc

SEQ ID NO: 2650173 - RNA, 19 nt, Artificial Sequence
  Description of Artificial Sequence: Synthetic oligonucleotide
guaagauacacagaauuau

SEQ ID NO: 2650174 - RNA, 19 nt, Artificial Sequence
  Description of Artificial Sequence: Synthetic oligonucleotide
ucugcugauugcacugguc

SEQ ID NO: 2650175 - RNA, 19 nt, Artificial Sequence
  Description of Artificial Sequence: Synthetic oligonucleotide
cacauaccauucugggccc

SEQ ID NO: 2650176 - RNA, 19 nt, Artificial Sequence
  Description of Artificial Sequence: Synthetic oligonucleotide
gcugacacauaccauucug

SEQ ID NO: 2650177 - RNA, 19 nt, Artificial Sequence
  Description of Artificial Sequence: Synthetic oligonucleotide
gugcgggcgaguuuggcgc

SEQ ID NO: 2650178 - RNA, 19 nt, Artificial Sequence
  Description of Artificial Sequence: Synthetic oligonucleotide
cucccuucggaucagcuga

SEQ ID NO: 2650179 - RNA, 19 nt, Artificial Sequence
  Description of Artificial Sequence: Synthetic oligonucleotide
aggcaaaucccaggauagc

SEQ ID NO: 2650180 - RNA, 19 nt, Artificial Sequence
  Description of Artificial Sequence: Synthetic oligonucleotide
uucaggcaguaauuucugu

SEQ ID NO: 2650181 - RNA, 19 nt, Artificial Sequence
  Description of Artificial Sequence: Synthetic oligonucleotide
augacaccagcacuacagu

SEQ ID NO: 2650182 - RNA, 19 nt, Artificial Sequence
  Description of Artificial Sequence: Synthetic oligonucleotide
aaaucccaggauagcauau

SEQ ID NO: 2650183 - RNA, 19 nt, Artificial Sequence
  Description of Artificial Sequence: Synthetic oligonucleotide
gucugaaacucccuucgga

SEQ ID NO: 2650184 - RNA, 19 nt, Artificial Sequence
  Description of Artificial Sequence: Synthetic oligonucleotide
agcaccugcaccaaugaau

SEQ ID NO: 2650185 - RNA, 19 nt, Artificial Sequence
  Description of Artificial Sequence: Synthetic oligonucleotide
aguccuagucucuggugga

SEQ ID NO: 2650186 - RNA, 19 nt, Artificial Sequence
  Description of Artificial Sequence: Synthetic oligonucleotide
cuucggaucagcugacaca

SEQ ID NO: 2650187 - RNA, 19 nt, Artificial Sequence
  Description of Artificial Sequence: Synthetic oligonucleotide
ugguggagauaacacugau

SEQ ID NO: 2650188 - RNA, 19 nt, Artificial Sequence
  Description of Artificial Sequence: Synthetic oligonucleotide
guacaucuccaugacacca

SEQ ID NO: 2650189 - RNA, 19 nt, Artificial Sequence
  Description of Artificial Sequence: Synthetic oligonucleotide
agauaacacugaugcagaa

SEQ ID NO: 2650190 - RNA, 19 nt, Artificial Sequence
  Description of Artificial Sequence: Synthetic oligonucleotide
agcaacuccuacuguugca

SEQ ID NO: 2650191 - RNA, 19 nt, Artificial Sequence
  Description of Artificial Sequence: Synthetic oligonucleotide
gagucacaguaagauacac

SEQ ID NO: 2650192 - RNA, 19 nt, Artificial Sequence
  Description of Artificial Sequence: Synthetic oligonucleotide
caaggcaaaucccaggaua

SEQ ID NO: 2650193 - RNA, 19 nt, Artificial Sequence
  Description of Artificial Sequence: Synthetic oligonucleotide
cuggucugaaacucccuuc

SEQ ID NO: 2650194 - RNA, 19 nt, Artificial Sequence
  Description of Artificial Sequence: Synthetic oligonucleotide
uuuccucuuggcggcgugg

SEQ ID NO: 2650195 - RNA, 19 nt, Artificial Sequence
  Description of Artificial Sequence: Synthetic oligonucleotide
gacgugggcuccucucccg

SEQ ID NO: 2650196 - RNA, 19 nt, Artificial Sequence
  Description of Artificial Sequence: Synthetic oligonucleotide
ugacaccagcacuacaguu

SEQ ID NO: 2650197 - RNA, 19 nt, Artificial Sequence
  Description of Artificial Sequence: Synthetic oligonucleotide
caacuccuacuguugcagc

SEQ ID NO: 2650198 - RNA, 19 nt, Artificial Sequence
  Description of Artificial Sequence: Synthetic oligonucleotide
caucuuuaaugaaaugacu

SEQ ID NO: 2650199 - RNA, 19 nt, Artificial Sequence
  Description of Artificial Sequence: Synthetic oligonucleotide
ccguuauuacuaugaaugc

SEQ ID NO: 2650200 - RNA, 19 nt, Artificial Sequence
  Description of Artificial Sequence: Synthetic oligonucleotide
caguaagauacacagaauu

SEQ ID NO: 2650201 - RNA, 19 nt, Artificial Sequence
  Description of Artificial Sequence: Synthetic oligonucleotide
cuuccucucucccgaggcg

SEQ ID NO: 2650202 - RNA, 19 nt, Artificial Sequence
  Description of Artificial Sequence: Synthetic oligonucleotide
ggugcgggcgaguuuggcg

SEQ ID NO: 2650203 - RNA, 19 nt, Artificial Sequence
  Description of Artificial Sequence: Synthetic oligonucleotide
acgugggcuccucucccgc

SEQ ID NO: 2650204 - RNA, 19 nt, Artificial Sequence
  Description of Artificial Sequence: Synthetic oligonucleotide
uaaggcugccaaagacugu

SEQ ID NO: 2650205 - RNA, 19 nt, Artificial Sequence
  Description of Artificial Sequence: Synthetic oligonucleotide
uugcacuggucugaaacuc

SEQ ID NO: 2650206 - RNA, 19 nt, Artificial Sequence
  Description of Artificial Sequence: Synthetic oligonucleotide
uagcuucagacaaggcaaa

SEQ ID NO: 2650207 - RNA, 19 nt, Artificial Sequence
  Description of Artificial Sequence: Synthetic oligonucleotide
agucacaguaagauacaca

SEQ ID NO: 2650208 - RNA, 19 nt, Artificial Sequence
  Description of Artificial Sequence: Synthetic oligonucleotide
ggcggcguggauuugggug

SEQ ID NO: 2650209 - RNA, 19 nt, Artificial Sequence
  Description of Artificial Sequence: Synthetic oligonucleotide
uccuacuguugcagcaccu

SEQ ID NO: 2650210 - RNA, 19 nt, Artificial Sequence
  Description of Artificial Sequence: Synthetic oligonucleotide
cuccuacuguugcagcacc

SEQ ID NO: 2650211 - RNA, 19 nt, Artificial Sequence
  Description of Artificial Sequence: Synthetic oligonucleotide
accauucugggccccauua

SEQ ID NO: 2650212 - RNA, 19 nt, Artificial Sequence
  Description of Artificial Sequence: Synthetic oligonucleotide
ugacaggcgacgugggcuc

SEQ ID NO: 2650213 - RNA, 19 nt, Artificial Sequence
  Description of Artificial Sequence: Synthetic oligonucleotide
gccuauaugcaauucugga

SEQ ID NO: 2650214 - RNA, 19 nt, Artificial Sequence
  Description of Artificial Sequence: Synthetic oligonucleotide
caggcaguaauuucuguua

SEQ ID NO: 2650215 - RNA, 19 nt, Artificial Sequence
  Description of Artificial Sequence: Synthetic oligonucleotide
uuuggcgcaggcgaacauc

SEQ ID NO: 2650216 - RNA, 19 nt, Artificial Sequence
  Description of Artificial Sequence: Synthetic oligonucleotide
cuggauccagcucggauca

SEQ ID NO: 2650217 - RNA, 19 nt, Artificial Sequence
  Description of Artificial Sequence: Synthetic oligonucleotide
augucucugcugauugcac

SEQ ID NO: 2650218 - RNA, 19 nt, Artificial Sequence
  Description of Artificial Sequence: Synthetic oligonucleotide
acaaggcaaaucccaggau

SEQ ID NO: 2650219 - RNA, 19 nt, Artificial Sequence
  Description of Artificial Sequence: Synthetic oligonucleotide
ggccuauaugcaauucugg

SEQ ID NO: 2650220 - RNA, 19 nt, Artificial Sequence
  Description of Artificial Sequence: Synthetic oligonucleotide
ggauuugggugacaggcga

SEQ ID NO: 2650221 - RNA, 19 nt, Artificial Sequence
  Description of Artificial Sequence: Synthetic oligonucleotide
uuugggugacaggcgacgu

SEQ ID NO: 2650222 - RNA, 19 nt, Artificial Sequence
  Description of Artificial Sequence: Synthetic oligonucleotide
gucucugguggagauaaca

SEQ ID NO: 2650223 - RNA, 19 nt, Artificial Sequence
  Description of Artificial Sequence: Synthetic oligonucleotide
guccaguccuagucucugg

SEQ ID NO: 2650224 - RNA, 19 nt, Artificial Sequence
  Description of Artificial Sequence: Synthetic oligonucleotide
gauuugggugacaggcgac

SEQ ID NO: 2650225 - RNA, 19 nt, Artificial Sequence
  Description of Artificial Sequence: Synthetic oligonucleotide
ggucugaaacucccuucgg

SEQ ID NO: 2650226 - RNA, 19 nt, Artificial Sequence
  Description of Artificial Sequence: Synthetic oligonucleotide
cguuauuacuaugaaugcc

SEQ ID NO: 2650227 - RNA, 19 nt, Artificial Sequence
  Description of Artificial Sequence: Synthetic oligonucleotide
cuguugcagcaccugcacc

SEQ ID NO: 2650228 - RNA, 19 nt, Artificial Sequence
  Description of Artificial Sequence: Synthetic oligonucleotide
cuucagugaaggguuucug

SEQ ID NO: 2650229 - RNA, 19 nt, Artificial Sequence
  Description of Artificial Sequence: Synthetic oligonucleotide
gcaacuccuacuguugcag

SEQ ID NO: 2650230 - RNA, 19 nt, Artificial Sequence
  Description of Artificial Sequence: Synthetic oligonucleotide
cugaugcagaaauuggccu

SEQ ID NO: 2650231 - RNA, 19 nt, Artificial Sequence
  Description of Artificial Sequence: Synthetic oligonucleotide
gcgaacaucuuuccucuug

SEQ ID NO: 2650232 - RNA, 19 nt, Artificial Sequence
  Description of Artificial Sequence: Synthetic oligonucleotide
gcgaguuuggcgcaggcga

SEQ ID NO: 2650233 - RNA, 19 nt, Artificial Sequence
  Description of Artificial Sequence: Synthetic oligonucleotide
uccaugacaccagcacuac

SEQ ID NO: 2650234 - RNA, 19 nt, Artificial Sequence
  Description of Artificial Sequence: Synthetic oligonucleotide
cccaggauagcauaugaga

SEQ ID NO: 2650235 - RNA, 19 nt, Artificial Sequence
  Description of Artificial Sequence: Synthetic oligonucleotide
cgaacaucuuuccucuugg

SEQ ID NO: 2650236 - RNA, 19 nt, Artificial Sequence
  Description of Artificial Sequence: Synthetic oligonucleotide
guagagcccuguccagucc

SEQ ID NO: 2650237 - RNA, 19 nt, Artificial Sequence
  Description of Artificial Sequence: Synthetic oligonucleotide
ggcugccaaagacuguucc

SEQ ID NO: 2650238 - RNA, 19 nt, Artificial Sequence
  Description of Artificial Sequence: Synthetic oligonucleotide
cuccaugacaccagcacua

SEQ ID NO: 2650239 - RNA, 19 nt, Artificial Sequence
  Description of Artificial Sequence: Synthetic oligonucleotide
uccucucucccgaggcggc

SEQ ID NO: 2650240 - RNA, 19 nt, Artificial Sequence
  Description of Artificial Sequence: Synthetic oligonucleotide
cauucugggccccauuaaa

SEQ ID NO: 2650241 - RNA, 19 nt, Artificial Sequence
  Description of Artificial Sequence: Synthetic oligonucleotide
gguggagauaacacugaug

SEQ ID NO: 2650242 - RNA, 19 nt, Artificial Sequence
  Description of Artificial Sequence: Synthetic oligonucleotide
ccaggauagcauaugagaa

SEQ ID NO: 2650243 - RNA, 19 nt, Artificial Sequence
  Description of Artificial Sequence: Synthetic oligonucleotide
uccuagucucugguggaga

SEQ ID NO: 2650244 - RNA, 19 nt, Artificial Sequence
  Description of Artificial Sequence: Synthetic oligonucleotide
auucugggccccauuaaau

SEQ ID NO: 2650245 - RNA, 19 nt, Artificial Sequence
  Description of Artificial Sequence: Synthetic oligonucleotide
ggcaaacaagaucaagaaa

SEQ ID NO: 2650246 - RNA, 19 nt, Artificial Sequence
  Description of Artificial Sequence: Synthetic oligonucleotide
cagaaccagcaacuccuac

SEQ ID NO: 2650247 - RNA, 19 nt, Artificial Sequence
  Description of Artificial Sequence: Synthetic oligonucleotide
ggcaaaucccaggauagca

SEQ ID NO: 2650248 - RNA, 19 nt, Artificial Sequence
  Description of Artificial Sequence: Synthetic oligonucleotide
gccaaagacuguuccaauc

SEQ ID NO: 2650249 - RNA, 19 nt, Artificial Sequence
  Description of Artificial Sequence: Synthetic oligonucleotide
ccaaugauaaggcugccaa

SEQ ID NO: 2650250 - RNA, 19 nt, Artificial Sequence
  Description of Artificial Sequence: Synthetic oligonucleotide
cugcugauugcacuggucu

SEQ ID NO: 2650251 - RNA, 19 nt, Artificial Sequence
  Description of Artificial Sequence: Synthetic oligonucleotide
aguuuggcgcaggcgaaca

SEQ ID NO: 2650252 - RNA, 19 nt, Artificial Sequence
  Description of Artificial Sequence: Synthetic oligonucleotide
agcaaccaucaaacaaaag

SEQ ID NO: 2650253 - RNA, 19 nt, Artificial Sequence
  Description of Artificial Sequence: Synthetic oligonucleotide
augagaacagcugcugcuu

SEQ ID NO: 2650254 - RNA, 19 nt, Artificial Sequence
  Description of Artificial Sequence: Synthetic oligonucleotide
agagacccauagcuucaga

SEQ ID NO: 2650255 - RNA, 19 nt, Artificial Sequence
  Description of Artificial Sequence: Synthetic oligonucleotide
caaugauaaggcugccaaa

SEQ ID NO: 2650256 - RNA, 19 nt, Artificial Sequence
  Description of Artificial Sequence: Synthetic oligonucleotide
caaaagagacccauagcuu

SEQ ID NO: 2650257 - RNA, 19 nt, Artificial Sequence
  Description of Artificial Sequence: Synthetic oligonucleotide
caaugaauuuggcugcagu

SEQ ID NO: 2650258 - RNA, 19 nt, Artificial Sequence
  Description of Artificial Sequence: Synthetic oligonucleotide
ucucucccgaggcggcggc

SEQ ID NO: 2650259 - RNA, 19 nt, Artificial Sequence
  Description of Artificial Sequence: Synthetic oligonucleotide
aucaaacaaaagagaccca

SEQ ID NO: 2650260 - RNA, 19 nt, Artificial Sequence
  Description of Artificial Sequence: Synthetic oligonucleotide
ucccagcaccagaaccagc

SEQ ID NO: 2650261 - RNA, 19 nt, Artificial Sequence
  Description of Artificial Sequence: Synthetic oligonucleotide
ggccccauuaaauacugua

SEQ ID NO: 2650262 - RNA, 19 nt, Artificial Sequence
  Description of Artificial Sequence: Synthetic oligonucleotide
ucccuucggaucagcugac

SEQ ID NO: 2650263 - RNA, 19 nt, Artificial Sequence
  Description of Artificial Sequence: Synthetic oligonucleotide
cucugguggagauaacacu

SEQ ID NO: 2650264 - RNA, 19 nt, Artificial Sequence
  Description of Artificial Sequence: Synthetic oligonucleotide
cagcucggaucagagcggg

SEQ ID NO: 2650265 - RNA, 19 nt, Artificial Sequence
  Description of Artificial Sequence: Synthetic oligonucleotide
gacaccagcacuacaguuu

SEQ ID NO: 2650266 - RNA, 19 nt, Artificial Sequence
  Description of Artificial Sequence: Synthetic oligonucleotide
uuccucuuggcggcgugga

SEQ ID NO: 2650267 - RNA, 19 nt, Artificial Sequence
  Description of Artificial Sequence: Synthetic oligonucleotide
ggcaguaauuucuguuaca

SEQ ID NO: 2650268 - RNA, 19 nt, Artificial Sequence
  Description of Artificial Sequence: Synthetic oligonucleotide
uggcugcaguaucaauguc

SEQ ID NO: 2650269 - RNA, 19 nt, Artificial Sequence
  Description of Artificial Sequence: Synthetic oligonucleotide
ugcuucagugaaggguuuc

SEQ ID NO: 2650270 - RNA, 19 nt, Artificial Sequence
  Description of Artificial Sequence: Synthetic oligonucleotide
ggauagcauaugagaacag

SEQ ID NO: 2650271 - RNA, 19 nt, Artificial Sequence
  Description of Artificial Sequence: Synthetic oligonucleotide
gaugcagaaauuggccuau

SEQ ID NO: 2650272 - RNA, 19 nt, Artificial Sequence
  Description of Artificial Sequence: Synthetic oligonucleotide
cugcugcuucagugaaggg

SEQ ID NO: 2650273 - RNA, 19 nt, Artificial Sequence
  Description of Artificial Sequence: Synthetic oligonucleotide
guuacauggcaaacaagau

SEQ ID NO: 2650274 - RNA, 19 nt, Artificial Sequence
  Description of Artificial Sequence: Synthetic oligonucleotide
gaguuuggcgcaggcgaac

SEQ ID NO: 2650275 - RNA, 19 nt, Artificial Sequence
  Description of Artificial Sequence: Synthetic oligonucleotide
guccuagucucugguggag

SEQ ID NO: 2650276 - RNA, 19 nt, Artificial Sequence
  Description of Artificial Sequence: Synthetic oligonucleotide
acccauagcuucagacaag

SEQ ID NO: 2650277 - RNA, 19 nt, Artificial Sequence
  Description of Artificial Sequence: Synthetic oligonucleotide
acacagaauuauauccguu

SEQ ID NO: 2650278 - RNA, 19 nt, Artificial Sequence
  Description of Artificial Sequence: Synthetic oligonucleotide
ugauugcacuggucugaaa

SEQ ID NO: 2650279 - RNA, 19 nt, Artificial Sequence
  Description of Artificial Sequence: Synthetic oligonucleotide
aucuuuccucuuggcggcg

SEQ ID NO: 2650280 - RNA, 19 nt, Artificial Sequence
  Description of Artificial Sequence: Synthetic oligonucleotide
ugccaacauuucaggcagu

SEQ ID NO: 2650281 - RNA, 19 nt, Artificial Sequence
  Description of Artificial Sequence: Synthetic oligonucleotide
ccuucggaucagcugacac

SEQ ID NO: 2650282 - RNA, 19 nt, Artificial Sequence
  Description of Artificial Sequence: Synthetic oligonucleotide
cuuuggaaauaacguacau

SEQ ID NO: 2650283 - RNA, 19 nt, Artificial Sequence
  Description of Artificial Sequence: Synthetic oligonucleotide
gcuucagacaaggcaaauc

SEQ ID NO: 2650284 - RNA, 19 nt, Artificial Sequence
  Description of Artificial Sequence: Synthetic oligonucleotide
gcguggauuugggugacag

SEQ ID NO: 2650285 - RNA, 19 nt, Artificial Sequence
  Description of Artificial Sequence: Synthetic oligonucleotide
ccagcucggaucagagcgg

SEQ ID NO: 2650286 - RNA, 19 nt, Artificial Sequence
  Description of Artificial Sequence: Synthetic oligonucleotide
gcugauugcacuggucuga

SEQ ID NO: 2650287 - RNA, 19 nt, Artificial Sequence
  Description of Artificial Sequence: Synthetic oligonucleotide
gagcccuguccaguccuag

SEQ ID NO: 2650288 - RNA, 19 nt, Artificial Sequence
  Description of Artificial Sequence: Synthetic oligonucleotide
ugcgggcgaguuuggcgca

SEQ ID NO: 2650289 - RNA, 19 nt, Artificial Sequence
  Description of Artificial Sequence: Synthetic oligonucleotide
aucagcugacacauaccau

SEQ ID NO: 2650290 - RNA, 19 nt, Artificial Sequence
  Description of Artificial Sequence: Synthetic oligonucleotide
cucucucccgaggcggcgg

SEQ ID NO: 2650291 - RNA, 19 nt, Artificial Sequence
  Description of Artificial Sequence: Synthetic oligonucleotide
cguacaucuccaugacacc

SEQ ID NO: 2650292 - RNA, 19 nt, Artificial Sequence
  Description of Artificial Sequence: Synthetic oligonucleotide
uaccauucugggccccauu

SEQ ID NO: 2650293 - RNA, 19 nt, Artificial Sequence
  Description of Artificial Sequence: Synthetic oligonucleotide
gcaguaauuucuguuacau

SEQ ID NO: 2650294 - RNA, 19 nt, Artificial Sequence
  Description of Artificial Sequence: Synthetic oligonucleotide
gugacaggcgacgugggcu

SEQ ID NO: 2650295 - RNA, 19 nt, Artificial Sequence
  Description of Artificial Sequence: Synthetic oligonucleotide
agucucugguggagauaac

SEQ ID NO: 2650296 - RNA, 19 nt, Artificial Sequence
  Description of Artificial Sequence: Synthetic oligonucleotide
ucucccgaggcggcggcga

SEQ ID NO: 2650297 - RNA, 19 nt, Artificial Sequence
  Description of Artificial Sequence: Synthetic oligonucleotide
gcggcagaggucgaagcag

SEQ ID NO: 2650298 - RNA, 19 nt, Artificial Sequence
  Description of Artificial Sequence: Synthetic oligonucleotide
ccauagcuucagacaaggc

SEQ ID NO: 2650299 - RNA, 19 nt, Artificial Sequence
  Description of Artificial Sequence: Synthetic oligonucleotide
cugggccccauuaaauacu

SEQ ID NO: 2650300 - RNA, 19 nt, Artificial Sequence
  Description of Artificial Sequence: Synthetic oligonucleotide
uccucuuggcggcguggau

SEQ ID NO: 2650301 - RNA, 19 nt, Artificial Sequence
  Description of Artificial Sequence: Synthetic oligonucleotide
gcggcguggauuuggguga

SEQ ID NO: 2650302 - RNA, 19 nt, Artificial Sequence
  Description of Artificial Sequence: Synthetic oligonucleotide
ggcugcaguaucaaugucu

SEQ ID NO: 2650303 - RNA, 19 nt, Artificial Sequence
  Description of Artificial Sequence: Synthetic oligonucleotide
gcgacgugggcuccucucc

SEQ ID NO: 2650304 - RNA, 19 nt, Artificial Sequence
  Description of Artificial Sequence: Synthetic oligonucleotide
ccuauaugcaauucuggau

SEQ ID NO: 2650305 - RNA, 19 nt, Artificial Sequence
  Description of Artificial Sequence: Synthetic oligonucleotide
cagaauuauauccguuauu

SEQ ID NO: 2650306 - RNA, 19 nt, Artificial Sequence
  Description of Artificial Sequence: Synthetic oligonucleotide
aggcugccaaagacuguuc

SEQ ID NO: 2650307 - RNA, 19 nt, Artificial Sequence
  Description of Artificial Sequence: Synthetic oligonucleotide
gcccuguccaguccuaguc

SEQ ID NO: 2650308 - RNA, 19 nt, Artificial Sequence
  Description of Artificial Sequence: Synthetic oligonucleotide
ccaguccuagucucuggug

SEQ ID NO: 2650309 - RNA, 19 nt, Artificial Sequence
  Description of Artificial Sequence: Synthetic oligonucleotide
gcagcaccugcaccaauga

SEQ ID NO: 2650310 - RNA, 19 nt, Artificial Sequence
  Description of Artificial Sequence: Synthetic oligonucleotide
ucggaucagcugacacaua

SEQ ID NO: 2650311 - RNA, 19 nt, Artificial Sequence
  Description of Artificial Sequence: Synthetic oligonucleotide
uggauccagcucggaucag

SEQ ID NO: 2650312 - RNA, 19 nt, Artificial Sequence
  Description of Artificial Sequence: Synthetic oligonucleotide
cauaccauucugggcccca

SEQ ID NO: 2650313 - RNA, 19 nt, Artificial Sequence
  Description of Artificial Sequence: Synthetic oligonucleotide
gacaggcgacgugggcucc

SEQ ID NO: 2650314 - RNA, 19 nt, Artificial Sequence
  Description of Artificial Sequence: Synthetic oligonucleotide
auaccauucugggccccau

SEQ ID NO: 2650315 - RNA, 19 nt, Artificial Sequence
  Description of Artificial Sequence: Synthetic oligonucleotide
cugauugcacuggucugaa

SEQ ID NO: 2650316 - RNA, 19 nt, Artificial Sequence
  Description of Artificial Sequence: Synthetic oligonucleotide
ggauccagcucggaucaga

SEQ ID NO: 2650317 - RNA, 19 nt, Artificial Sequence
  Description of Artificial Sequence: Synthetic oligonucleotide
caguaucaaugucucugcu

SEQ ID NO: 2650318 - RNA, 19 nt, Artificial Sequence
  Description of Artificial Sequence: Synthetic oligonucleotide
agcucggaucagagcgggg

SEQ ID NO: 2650319 - RNA, 19 nt, Artificial Sequence
  Description of Artificial Sequence: Synthetic oligonucleotide
guugcagcaccugcaccaa

SEQ ID NO: 2650320 - RNA, 19 nt, Artificial Sequence
  Description of Artificial Sequence: Synthetic oligonucleotide
gcauaugagaacagcugcu

SEQ ID NO: 2650321 - RNA, 19 nt, Artificial Sequence
  Description of Artificial Sequence: Synthetic oligonucleotide
ccaaugaauuuggcugcag

SEQ ID NO: 2650322 - RNA, 19 nt, Artificial Sequence
  Description of Artificial Sequence: Synthetic oligonucleotide
ggcgacgugggcuccucuc

SEQ ID NO: 2650323 - RNA, 19 nt, Artificial Sequence
  Description of Artificial Sequence: Synthetic oligonucleotide
gcgacagcggcggcagagg

SEQ ID NO: 2650324 - RNA, 19 nt, Artificial Sequence
  Description of Artificial Sequence: Synthetic oligonucleotide
gcgcaggcgaacaucuuuc

SEQ ID NO: 2650325 - RNA, 19 nt, Artificial Sequence
  Description of Artificial Sequence: Synthetic oligonucleotide
cgcaggcgaacaucuuucc

SEQ ID NO: 2650326 - RNA, 19 nt, Artificial Sequence
  Description of Artificial Sequence: Synthetic oligonucleotide
uggcgcaggcgaacaucuu

SEQ ID NO: 2650327 - RNA, 19 nt, Artificial Sequence
  Description of Artificial Sequence: Synthetic oligonucleotide
aggcgacgugggcuccucu

SEQ ID NO: 2650328 - RNA, 19 nt, Artificial Sequence
  Description of Artificial Sequence: Synthetic oligonucleotide
cucucccgaggcggcggcg

SEQ ID NO: 2650329 - RNA, 19 nt, Artificial Sequence
  Description of Artificial Sequence: Synthetic oligonucleotide
cuagucucugguggagaua

SEQ ID NO: 2650330 - RNA, 19 nt, Artificial Sequence
  Description of Artificial Sequence: Synthetic oligonucleotide
acaggcgacgugggcuccu

SEQ ID NO: 2650331 - RNA, 19 nt, Artificial Sequence
  Description of Artificial Sequence: Synthetic oligonucleotide
gccaacauuucaggcagua

SEQ ID NO: 2650332 - RNA, 19 nt, Artificial Sequence
  Description of Artificial Sequence: Synthetic oligonucleotide
cuguagagcccuguccagu

SEQ ID NO: 2650333 - RNA, 19 nt, Artificial Sequence
  Description of Artificial Sequence: Synthetic oligonucleotide
ucccgaggcggcggcgaca

SEQ ID NO: 2650334 - RNA, 19 nt, Artificial Sequence
  Description of Artificial Sequence: Synthetic oligonucleotide
cucccgaggcggcggcgac

SEQ ID NO: 2650335 - RNA, 19 nt, Artificial Sequence
  Description of Artificial Sequence: Synthetic oligonucleotide
gcaccugcaccaaugaauu

SEQ ID NO: 2650336 - RNA, 19 nt, Artificial Sequence
  Description of Artificial Sequence: Synthetic oligonucleotide
augcagaaauuggccuaua

SEQ ID NO: 2650337 - RNA, 19 nt, Artificial Sequence
  Description of Artificial Sequence: Synthetic oligonucleotide
cccgcuuccucucucccga

SEQ ID NO: 2650338 - RNA, 19 nt, Artificial Sequence
  Description of Artificial Sequence: Synthetic oligonucleotide
gcaggcgaacaucuuuccu

SEQ ID NO: 2650339 - RNA, 19 nt, Artificial Sequence
  Description of Artificial Sequence: Synthetic oligonucleotide
gcuucagugaaggguuucu

SEQ ID NO: 2650340 - RNA, 19 nt, Artificial Sequence
  Description of Artificial Sequence: Synthetic oligonucleotide
guuuggcgcaggcgaacau

SEQ ID NO: 2650341 - RNA, 19 nt, Artificial Sequence
  Description of Artificial Sequence: Synthetic oligonucleotide
cgacgugggcuccucuccc

SEQ ID NO: 2650342 - RNA, 19 nt, Artificial Sequence
  Description of Artificial Sequence: Synthetic oligonucleotide
ggcgcaggcgaacaucuuu

SEQ ID NO: 2650343 - RNA, 19 nt, Artificial Sequence
  Description of Artificial Sequence: Synthetic oligonucleotide
cccgaggcggcggcgacag

SEQ ID NO: 2650344 - RNA, 19 nt, Artificial Sequence
  Description of Artificial Sequence: Synthetic oligonucleotide
ccauucugggccccauuaa

SEQ ID NO: 2650345 - RNA, 19 nt, Artificial Sequence
  Description of Artificial Sequence: Synthetic oligonucleotide
agcggcggcagaggucgaa

SEQ ID NO: 2650346 - RNA, 19 nt, Artificial Sequence
  Description of Artificial Sequence: Synthetic oligonucleotide
ccaugacaccagcacuaca

SEQ ID NO: 2650347 - RNA, 19 nt, Artificial Sequence
  Description of Artificial Sequence: Synthetic oligonucleotide
agagcccuguccaguccua

SEQ ID NO: 2650348 - RNA, 19 nt, Artificial Sequence
  Description of Artificial Sequence: Synthetic oligonucleotide
ccaacauuucaggcaguaa

SEQ ID NO: 2650349 - RNA, 19 nt, Artificial Sequence
  Description of Artificial Sequence: Synthetic oligonucleotide
ccuagucucugguggagau

SEQ ID NO: 2650350 - RNA, 19 nt, Artificial Sequence
  Description of Artificial Sequence: Synthetic oligonucleotide
cggcggcagaggucgaagc

SEQ ID NO: 2650351 - RNA, 19 nt, Artificial Sequence
  Description of Artificial Sequence: Synthetic oligonucleotide
caggcgacgugggcuccuc

SEQ ID NO: 2650352 - RNA, 19 nt, Artificial Sequence
  Description of Artificial Sequence: Synthetic oligonucleotide
gggugcgggcgaguuuggc

SEQ ID NO: 2650353 - RNA, 19 nt, Artificial Sequence
  Description of Artificial Sequence: Synthetic oligonucleotide
cgaguuuggcgcaggcgaa

SEQ ID NO: 2650354 - RNA, 19 nt, Artificial Sequence
  Description of Artificial Sequence: Synthetic oligonucleotide
caccugcaccaaugaauuu

SEQ ID NO: 2650355 - RNA, 19 nt, Artificial Sequence
  Description of Artificial Sequence: Synthetic oligonucleotide
cccuguccaguccuagucu

SEQ ID NO: 2650356 - RNA, 19 nt, Artificial Sequence
  Description of Artificial Sequence: Synthetic oligonucleotide
ccgcuuccucucucccgag

SEQ ID NO: 2650357 - RNA, 19 nt, Artificial Sequence
  Description of Artificial Sequence: Synthetic oligonucleotide
gcgggcgaguuuggcgcag

SEQ ID NO: 2650358 - RNA, 19 nt, Artificial Sequence
  Description of Artificial Sequence: Synthetic oligonucleotide
ggcguggauuugggugaca

SEQ ID NO: 2650359 - RNA, 19 nt, Artificial Sequence
  Description of Artificial Sequence: Synthetic oligonucleotide
cgggcgaguuuggcgcagg

SEQ ID NO: 2650360 - RNA, 19 nt, Artificial Sequence
  Description of Artificial Sequence: Synthetic oligonucleotide
ggcgaacaucuuuccucuu

SEQ ID NO: 2650361 - RNA, 19 nt, Artificial Sequence
  Description of Artificial Sequence: Synthetic oligonucleotide
cggcagaggucgaagcagu

SEQ ID NO: 2650362 - RNA, 19 nt, Artificial Sequence
  Description of Artificial Sequence: Synthetic oligonucleotide
cccuucggaucagcugaca

SEQ ID NO: 2650363 - RNA, 19 nt, Artificial Sequence
  Description of Artificial Sequence: Synthetic oligonucleotide
gggccccauuaaauacugu

SEQ ID NO: 2650364 - RNA, 19 nt, Artificial Sequence
  Description of Artificial Sequence: Synthetic oligonucleotide
cggcguggauuugggugac

SEQ ID NO: 2650365 - RNA, 19 nt, Artificial Sequence
  Description of Artificial Sequence: Synthetic oligonucleotide
ccgaggcggcggcgacagc

SEQ ID NO: 2650366 - RNA, 19 nt, Artificial Sequence
  Description of Artificial Sequence: Synthetic oligonucleotide
cgugggcuccucucccgcu

SEQ ID NO: 2650367 - RNA, 19 nt, Artificial Sequence
  Description of Artificial Sequence: Synthetic oligonucleotide
aguacuuacacuuauaggg

SEQ ID NO: 2650368 - RNA, 19 nt, Artificial Sequence
  Description of Artificial Sequence: Synthetic oligonucleotide
aguuugauccauuauaacc

SEQ ID NO: 2650369 - RNA, 19 nt, Artificial Sequence
  Description of Artificial Sequence: Synthetic oligonucleotide
ucugaagucauuuugauca

SEQ ID NO: 2650370 - RNA, 19 nt, Artificial Sequence
  Description of Artificial Sequence: Synthetic oligonucleotide
acuuauaggguuuuguucc

SEQ ID NO: 2650371 - RNA, 19 nt, Artificial Sequence
  Description of Artificial Sequence: Synthetic oligonucleotide
aaaacugucauaauugggg

SEQ ID NO: 2650372 - RNA, 19 nt, Artificial Sequence
  Description of Artificial Sequence: Synthetic oligonucleotide
uuuuacauggugaaugagg

SEQ ID NO: 2650373 - RNA, 19 nt, Artificial Sequence
  Description of Artificial Sequence: Synthetic oligonucleotide
uuacuauucgguuaguagg

SEQ ID NO: 2650374 - RNA, 19 nt, Artificial Sequence
  Description of Artificial Sequence: Synthetic oligonucleotide
aaguagugaaaucuuuccc

SEQ ID NO: 2650375 - RNA, 19 nt, Artificial Sequence
  Description of Artificial Sequence: Synthetic oligonucleotide
aaaucucucaggcaguggg

SEQ ID NO: 2650376 - RNA, 19 nt, Artificial Sequence
  Description of Artificial Sequence: Synthetic oligonucleotide
aaauccucuucuuccaacc

SEQ ID NO: 2650377 - RNA, 19 nt, Artificial Sequence
  Description of Artificial Sequence: Synthetic oligonucleotide
auuuugaucaucuugaguu

SEQ ID NO: 2650378 - RNA, 19 nt, Artificial Sequence
  Description of Artificial Sequence: Synthetic oligonucleotide
ucuucuuccaaccaggaga

SEQ ID NO: 2650379 - RNA, 19 nt, Artificial Sequence
  Description of Artificial Sequence: Synthetic oligonucleotide
aguaugauguaaucaagac

SEQ ID NO: 2650380 - RNA, 19 nt, Artificial Sequence
  Description of Artificial Sequence: Synthetic oligonucleotide
guaaucaagacauggagag

SEQ ID NO: 2650381 - RNA, 19 nt, Artificial Sequence
  Description of Artificial Sequence: Synthetic oligonucleotide
aauaguguaaacuccagua

SEQ ID NO: 2650382 - RNA, 19 nt, Artificial Sequence
  Description of Artificial Sequence: Synthetic oligonucleotide
uccggugugaauacgaacg

SEQ ID NO: 2650383 - RNA, 19 nt, Artificial Sequence
  Description of Artificial Sequence: Synthetic oligonucleotide
uacauucucaacaaaaggu

SEQ ID NO: 2650384 - RNA, 19 nt, Artificial Sequence
  Description of Artificial Sequence: Synthetic oligonucleotide
uucggauaugcucaguucg

SEQ ID NO: 2650385 - RNA, 19 nt, Artificial Sequence
  Description of Artificial Sequence: Synthetic oligonucleotide
ugaguuacuuacuauucgg

SEQ ID NO: 2650386 - RNA, 19 nt, Artificial Sequence
  Description of Artificial Sequence: Synthetic oligonucleotide
uuuacauggugaaugaggu

SEQ ID NO: 2650387 - RNA, 19 nt, Artificial Sequence
  Description of Artificial Sequence: Synthetic oligonucleotide
ucuuaauaguguaaacucc

SEQ ID NO: 2650388 - RNA, 19 nt, Artificial Sequence
  Description of Artificial Sequence: Synthetic oligonucleotide
uguuuaguaagguauagaa

SEQ ID NO: 2650389 - RNA, 19 nt, Artificial Sequence
  Description of Artificial Sequence: Synthetic oligonucleotide
aauacgaacguguuuagua

SEQ ID NO: 2650390 - RNA, 19 nt, Artificial Sequence
  Description of Artificial Sequence: Synthetic oligonucleotide
aaaauccucuucuuccaac

SEQ ID NO: 2650391 - RNA, 19 nt, Artificial Sequence
  Description of Artificial Sequence: Synthetic oligonucleotide
uuacuuacuauucgguuag

SEQ ID NO: 2650392 - RNA, 19 nt, Artificial Sequence
  Description of Artificial Sequence: Synthetic oligonucleotide
ugauguaaucaagacaugg

SEQ ID NO: 2650393 - RNA, 19 nt, Artificial Sequence
  Description of Artificial Sequence: Synthetic oligonucleotide
uugaguuacuuacuauucg

SEQ ID NO: 2650394 - RNA, 19 nt, Artificial Sequence
  Description of Artificial Sequence: Synthetic oligonucleotide
ugagguuagaggaugaagu

SEQ ID NO: 2650395 - RNA, 19 nt, Artificial Sequence
  Description of Artificial Sequence: Synthetic oligonucleotide
uucuuaauaguguaaacuc

SEQ ID NO: 2650396 - RNA, 19 nt, Artificial Sequence
  Description of Artificial Sequence: Synthetic oligonucleotide
uuuucucacauucuguaca

SEQ ID NO: 2650397 - RNA, 19 nt, Artificial Sequence
  Description of Artificial Sequence: Synthetic oligonucleotide
uuuucaaaggaaaacuguc

SEQ ID NO: 2650398 - RNA, 19 nt, Artificial Sequence
  Description of Artificial Sequence: Synthetic oligonucleotide
agugaaaucuuucccacag

SEQ ID NO: 2650399 - RNA, 19 nt, Artificial Sequence
  Description of Artificial Sequence: Synthetic oligonucleotide
uguaaucaagacauggaga

SEQ ID NO: 2650400 - RNA, 19 nt, Artificial Sequence
  Description of Artificial Sequence: Synthetic oligonucleotide
gaaguagugaaaucuuucc

SEQ ID NO: 2650401 - RNA, 19 nt, Artificial Sequence
  Description of Artificial Sequence: Synthetic oligonucleotide
gucucucugaguuugaucc

SEQ ID NO: 2650402 - RNA, 19 nt, Artificial Sequence
  Description of Artificial Sequence: Synthetic oligonucleotide
uggugaaugagguuagagg

SEQ ID NO: 2650403 - RNA, 19 nt, Artificial Sequence
  Description of Artificial Sequence: Synthetic oligonucleotide
acaguacuuacacuuauag

SEQ ID NO: 2650404 - RNA, 19 nt, Artificial Sequence
  Description of Artificial Sequence: Synthetic oligonucleotide
auguaaucaagacauggag

SEQ ID NO: 2650405 - RNA, 19 nt, Artificial Sequence
  Description of Artificial Sequence: Synthetic oligonucleotide
aguagguaaaaucugcugu

SEQ ID NO: 2650406 - RNA, 19 nt, Artificial Sequence
  Description of Artificial Sequence: Synthetic oligonucleotide
cuuacuauucgguuaguag

SEQ ID NO: 2650407 - RNA, 19 nt, Artificial Sequence
  Description of Artificial Sequence: Synthetic oligonucleotide
uuucuuaauaguguaaacu

SEQ ID NO: 2650408 - RNA, 19 nt, Artificial Sequence
  Description of Artificial Sequence: Synthetic oligonucleotide
guuugauccauuauaaccc

SEQ ID NO: 2650409 - RNA, 19 nt, Artificial Sequence
  Description of Artificial Sequence: Synthetic oligonucleotide
uuagaggaugaagugaagg

SEQ ID NO: 2650410 - RNA, 19 nt, Artificial Sequence
  Description of Artificial Sequence: Synthetic oligonucleotide
aaggaaaacugucauaauu

SEQ ID NO: 2650411 - RNA, 19 nt, Artificial Sequence
  Description of Artificial Sequence: Synthetic oligonucleotide
uugggugaaguccacagcc

SEQ ID NO: 2650412 - RNA, 19 nt, Artificial Sequence
  Description of Artificial Sequence: Synthetic oligonucleotide
aguagugaaaucuuuccca

SEQ ID NO: 2650413 - RNA, 19 nt, Artificial Sequence
  Description of Artificial Sequence: Synthetic oligonucleotide
ugaguuugauccauuauaa

SEQ ID NO: 2650414 - RNA, 19 nt, Artificial Sequence
  Description of Artificial Sequence: Synthetic oligonucleotide
agucauuuugaucaucuug

SEQ ID NO: 2650415 - RNA, 19 nt, Artificial Sequence
  Description of Artificial Sequence: Synthetic oligonucleotide
aaucaagacauggagagau

SEQ ID NO: 2650416 - RNA, 19 nt, Artificial Sequence
  Description of Artificial Sequence: Synthetic oligonucleotide
cuacauucucaacaaaagg

SEQ ID NO: 2650417 - RNA, 19 nt, Artificial Sequence
  Description of Artificial Sequence: Synthetic oligonucleotide
uaguguaaacuccaguaug

SEQ ID NO: 2650418 - RNA, 19 nt, Artificial Sequence
  Description of Artificial Sequence: Synthetic oligonucleotide
aacagguucugguaguucu

SEQ ID NO: 2650419 - RNA, 19 nt, Artificial Sequence
  Description of Artificial Sequence: Synthetic oligonucleotide
uuaauaguguaaacuccag

SEQ ID NO: 2650420 - RNA, 19 nt, Artificial Sequence
  Description of Artificial Sequence: Synthetic oligonucleotide
uaggcuuuccccuacauuc

SEQ ID NO: 2650421 - RNA, 19 nt, Artificial Sequence
  Description of Artificial Sequence: Synthetic oligonucleotide
ugaggaaguagugaaaucu

SEQ ID NO: 2650422 - RNA, 19 nt, Artificial Sequence
  Description of Artificial Sequence: Synthetic oligonucleotide
caucaaaggucaaugauuc

SEQ ID NO: 2650423 - RNA, 19 nt, Artificial Sequence
  Description of Artificial Sequence: Synthetic oligonucleotide
uccaguaugauguaaucaa

SEQ ID NO: 2650424 - RNA, 19 nt, Artificial Sequence
  Description of Artificial Sequence: Synthetic oligonucleotide
aaggucaaugauuccuagg

SEQ ID NO: 2650425 - RNA, 19 nt, Artificial Sequence
  Description of Artificial Sequence: Synthetic oligonucleotide
ucaacaaaagguuucucuc

SEQ ID NO: 2650426 - RNA, 19 nt, Artificial Sequence
  Description of Artificial Sequence: Synthetic oligonucleotide
uuccccuacauucucaaca

SEQ ID NO: 2650427 - RNA, 19 nt, Artificial Sequence
  Description of Artificial Sequence: Synthetic oligonucleotide
ucugcuguaggcuuucccc

SEQ ID NO: 2650428 - RNA, 19 nt, Artificial Sequence
  Description of Artificial Sequence: Synthetic oligonucleotide
cauugcuuucuuaauagug

SEQ ID NO: 2650429 - RNA, 19 nt, Artificial Sequence
  Description of Artificial Sequence: Synthetic oligonucleotide
aagacauggagagauuaag

SEQ ID NO: 2650430 - RNA, 19 nt, Artificial Sequence
  Description of Artificial Sequence: Synthetic oligonucleotide
aaaggucaaugauuccuag

SEQ ID NO: 2650431 - RNA, 19 nt, Artificial Sequence
  Description of Artificial Sequence: Synthetic oligonucleotide
gaaaacugucauaauuggg

SEQ ID NO: 2650432 - RNA, 19 nt, Artificial Sequence
  Description of Artificial Sequence: Synthetic oligonucleotide
uuaguagguaaaaucugcu

SEQ ID NO: 2650433 - RNA, 19 nt, Artificial Sequence
  Description of Artificial Sequence: Synthetic oligonucleotide
uauaacccacuccucuugg

SEQ ID NO: 2650434 - RNA, 19 nt, Artificial Sequence
  Description of Artificial Sequence: Synthetic oligonucleotide
ucaaaggucaaugauuccu

SEQ ID NO: 2650435 - RNA, 19 nt, Artificial Sequence
  Description of Artificial Sequence: Synthetic oligonucleotide
aggucaaugauuccuaggu

SEQ ID NO: 2650436 - RNA, 19 nt, Artificial Sequence
  Description of Artificial Sequence: Synthetic oligonucleotide
uucaaaggaaaacugucau

SEQ ID NO: 2650437 - RNA, 19 nt, Artificial Sequence
  Description of Artificial Sequence: Synthetic oligonucleotide
gacauggagagauuaagga

SEQ ID NO: 2650438 - RNA, 19 nt, Artificial Sequence
  Description of Artificial Sequence: Synthetic oligonucleotide
ucaucaaaggucaaugauu

SEQ ID NO: 2650439 - RNA, 19 nt, Artificial Sequence
  Description of Artificial Sequence: Synthetic oligonucleotide
cuuaauaguguaaacucca

SEQ ID NO: 2650440 - RNA, 19 nt, Artificial Sequence
  Description of Artificial Sequence: Synthetic oligonucleotide
aacguguuuaguaagguau

SEQ ID NO: 2650441 - RNA, 19 nt, Artificial Sequence
  Description of Artificial Sequence: Synthetic oligonucleotide
uguaaacuccaguaugaug

SEQ ID NO: 2650442 - RNA, 19 nt, Artificial Sequence
  Description of Artificial Sequence: Synthetic oligonucleotide
uccucuucuuccaaccagg

SEQ ID NO: 2650443 - RNA, 19 nt, Artificial Sequence
  Description of Artificial Sequence: Synthetic oligonucleotide
ugugaguucggauaugcuc

SEQ ID NO: 2650444 - RNA, 19 nt, Artificial Sequence
  Description of Artificial Sequence: Synthetic oligonucleotide
guuugcugaccucacaucc

SEQ ID NO: 2650445 - RNA, 19 nt, Artificial Sequence
  Description of Artificial Sequence: Synthetic oligonucleotide
gguaaaaucugcuguaggc

SEQ ID NO: 2650446 - RNA, 19 nt, Artificial Sequence
  Description of Artificial Sequence: Synthetic oligonucleotide
ucuuccaaccaggagauca

SEQ ID NO: 2650447 - RNA, 19 nt, Artificial Sequence
  Description of Artificial Sequence: Synthetic oligonucleotide
uacuauucgguuaguaggu

SEQ ID NO: 2650448 - RNA, 19 nt, Artificial Sequence
  Description of Artificial Sequence: Synthetic oligonucleotide
ucgguuaguagguaaaauc

SEQ ID NO: 2650449 - RNA, 19 nt, Artificial Sequence
  Description of Artificial Sequence: Synthetic oligonucleotide
uuauaacccacuccucuug

SEQ ID NO: 2650450 - RNA, 19 nt, Artificial Sequence
  Description of Artificial Sequence: Synthetic oligonucleotide
aggaaaacugucauaauug

SEQ ID NO: 2650451 - RNA, 19 nt, Artificial Sequence
  Description of Artificial Sequence: Synthetic oligonucleotide
ucuugaguuacuuacuauu

SEQ ID NO: 2650452 - RNA, 19 nt, Artificial Sequence
  Description of Artificial Sequence: Synthetic oligonucleotide
ggaaaacugucauaauugg

SEQ ID NO: 2650453 - RNA, 19 nt, Artificial Sequence
  Description of Artificial Sequence: Synthetic oligonucleotide
guuaguagguaaaaucugc

SEQ ID NO: 2650454 - RNA, 19 nt, Artificial Sequence
  Description of Artificial Sequence: Synthetic oligonucleotide
augaagugaagguuuucuc

SEQ ID NO: 2650455 - RNA, 19 nt, Artificial Sequence
  Description of Artificial Sequence: Synthetic oligonucleotide
uaauaguguaaacuccagu

SEQ ID NO: 2650456 - RNA, 19 nt, Artificial Sequence
  Description of Artificial Sequence: Synthetic oligonucleotide
cuugaguuacuuacuauuc

SEQ ID NO: 2650457 - RNA, 19 nt, Artificial Sequence
  Description of Artificial Sequence: Synthetic oligonucleotide
ugauccauuauaacccacu

SEQ ID NO: 2650458 - RNA, 19 nt, Artificial Sequence
  Description of Artificial Sequence: Synthetic oligonucleotide
uuuuguuccggugugaaua

SEQ ID NO: 2650459 - RNA, 19 nt, Artificial Sequence
  Description of Artificial Sequence: Synthetic oligonucleotide
uuugauccauuauaaccca

SEQ ID NO: 2650460 - RNA, 19 nt, Artificial Sequence
  Description of Artificial Sequence: Synthetic oligonucleotide
uucggcuugaggaaguagu

SEQ ID NO: 2650461 - RNA, 19 nt, Artificial Sequence
  Description of Artificial Sequence: Synthetic oligonucleotide
ggugaaugagguuagagga

SEQ ID NO: 2650462 - RNA, 19 nt, Artificial Sequence
  Description of Artificial Sequence: Synthetic oligonucleotide
ugaaugagguuagaggaug

SEQ ID NO: 2650463 - RNA, 19 nt, Artificial Sequence
  Description of Artificial Sequence: Synthetic oligonucleotide
ucggauaugcucaguucgg

SEQ ID NO: 2650464 - RNA, 19 nt, Artificial Sequence
  Description of Artificial Sequence: Synthetic oligonucleotide
aucugaagucauuuugauc

SEQ ID NO: 2650465 - RNA, 19 nt, Artificial Sequence
  Description of Artificial Sequence: Synthetic oligonucleotide
agguaaaaucugcuguagg

SEQ ID NO: 2650466 - RNA, 19 nt, Artificial Sequence
  Description of Artificial Sequence: Synthetic oligonucleotide
guaaacuccaguaugaugu

SEQ ID NO: 2650467 - RNA, 19 nt, Artificial Sequence
  Description of Artificial Sequence: Synthetic oligonucleotide
uaguagguaaaaucugcug

SEQ ID NO: 2650468 - RNA, 19 nt, Artificial Sequence
  Description of Artificial Sequence: Synthetic oligonucleotide
uuggucauuccuccuaucu

SEQ ID NO: 2650469 - RNA, 19 nt, Artificial Sequence
  Description of Artificial Sequence: Synthetic oligonucleotide
ucauuuugaucaucuugag

SEQ ID NO: 2650470 - RNA, 19 nt, Artificial Sequence
  Description of Artificial Sequence: Synthetic oligonucleotide
gagguuagaggaugaagug

SEQ ID NO: 2650471 - RNA, 19 nt, Artificial Sequence
  Description of Artificial Sequence: Synthetic oligonucleotide
aacaaaagguuucucucua

SEQ ID NO: 2650472 - RNA, 19 nt, Artificial Sequence
  Description of Artificial Sequence: Synthetic oligonucleotide
ugaccucacauccugcuga

SEQ ID NO: 2650473 - RNA, 19 nt, Artificial Sequence
  Description of Artificial Sequence: Synthetic oligonucleotide
caguacuuacacuuauagg

SEQ ID NO: 2650474 - RNA, 19 nt, Artificial Sequence
  Description of Artificial Sequence: Synthetic oligonucleotide
caaccaggagaucagacug

SEQ ID NO: 2650475 - RNA, 19 nt, Artificial Sequence
  Description of Artificial Sequence: Synthetic oligonucleotide
uacgaacguguuuaguaag

SEQ ID NO: 2650476 - RNA, 19 nt, Artificial Sequence
  Description of Artificial Sequence: Synthetic oligonucleotide
guaugauguaaucaagaca

SEQ ID NO: 2650477 - RNA, 19 nt, Artificial Sequence
  Description of Artificial Sequence: Synthetic oligonucleotide
auuccuccuaucugaaguc

SEQ ID NO: 2650478 - RNA, 19 nt, Artificial Sequence
  Description of Artificial Sequence: Synthetic oligonucleotide
ucucacauucuguacacuc

SEQ ID NO: 2650479 - RNA, 19 nt, Artificial Sequence
  Description of Artificial Sequence: Synthetic oligonucleotide
cuuucuuaauaguguaaac

SEQ ID NO: 2650480 - RNA, 19 nt, Artificial Sequence
  Description of Artificial Sequence: Synthetic oligonucleotide
auucucaacaaaagguuuc

SEQ ID NO: 2650481 - RNA, 19 nt, Artificial Sequence
  Description of Artificial Sequence: Synthetic oligonucleotide
gucauuuugaucaucuuga

SEQ ID NO: 2650482 - RNA, 19 nt, Artificial Sequence
  Description of Artificial Sequence: Synthetic oligonucleotide
aucaucaaaggucaaugau

SEQ ID NO: 2650483 - RNA, 19 nt, Artificial Sequence
  Description of Artificial Sequence: Synthetic oligonucleotide
acaucaucaaaggucaaug

SEQ ID NO: 2650484 - RNA, 19 nt, Artificial Sequence
  Description of Artificial Sequence: Synthetic oligonucleotide
cuuauaggguuuuguuccg

SEQ ID NO: 2650485 - RNA, 19 nt, Artificial Sequence
  Description of Artificial Sequence: Synthetic oligonucleotide
ugguaguucuccagcauca

SEQ ID NO: 2650486 - RNA, 19 nt, Artificial Sequence
  Description of Artificial Sequence: Synthetic oligonucleotide
auaguguaaacuccaguau

SEQ ID NO: 2650487 - RNA, 19 nt, Artificial Sequence
  Description of Artificial Sequence: Synthetic oligonucleotide
uguuccggugugaauacga

SEQ ID NO: 2650488 - RNA, 19 nt, Artificial Sequence
  Description of Artificial Sequence: Synthetic oligonucleotide
uaaaaucugcuguaggcuu

SEQ ID NO: 2650489 - RNA, 19 nt, Artificial Sequence
  Description of Artificial Sequence: Synthetic oligonucleotide
auugcuuucuuaauagugu

SEQ ID NO: 2650490 - RNA, 19 nt, Artificial Sequence
  Description of Artificial Sequence: Synthetic oligonucleotide
uauucgguuaguagguaaa

SEQ ID NO: 2650491 - RNA, 19 nt, Artificial Sequence
  Description of Artificial Sequence: Synthetic oligonucleotide
uuccacauugcuuucuuaa

SEQ ID NO: 2650492 - RNA, 19 nt, Artificial Sequence
  Description of Artificial Sequence: Synthetic oligonucleotide
aaucucucaggcagugggc

SEQ ID NO: 2650493 - RNA, 19 nt, Artificial Sequence
  Description of Artificial Sequence: Synthetic oligonucleotide
acuccaguaugauguaauc

SEQ ID NO: 2650494 - RNA, 19 nt, Artificial Sequence
  Description of Artificial Sequence: Synthetic oligonucleotide
ucaucuugaguuacuuacu

SEQ ID NO: 2650495 - RNA, 19 nt, Artificial Sequence
  Description of Artificial Sequence: Synthetic oligonucleotide
gucaaugauuccuagguaa

SEQ ID NO: 2650496 - RNA, 19 nt, Artificial Sequence
  Description of Artificial Sequence: Synthetic oligonucleotide
uuucucacauucuguacac

SEQ ID NO: 2650497 - RNA, 19 nt, Artificial Sequence
  Description of Artificial Sequence: Synthetic oligonucleotide
uccucuugggugaagucca

SEQ ID NO: 2650498 - RNA, 19 nt, Artificial Sequence
  Description of Artificial Sequence: Synthetic oligonucleotide
cacuuauaggguuuuguuc

SEQ ID NO: 2650499 - RNA, 19 nt, Artificial Sequence
  Description of Artificial Sequence: Synthetic oligonucleotide
acauggagagauuaaggau

SEQ ID NO: 2650500 - RNA, 19 nt, Artificial Sequence
  Description of Artificial Sequence: Synthetic oligonucleotide
ugaauacgaacguguuuag

SEQ ID NO: 2650501 - RNA, 19 nt, Artificial Sequence
  Description of Artificial Sequence: Synthetic oligonucleotide
aacccacuccucuugggug

SEQ ID NO: 2650502 - RNA, 19 nt, Artificial Sequence
  Description of Artificial Sequence: Synthetic oligonucleotide
agcaucaccucucuguaga

SEQ ID NO: 2650503 - RNA, 19 nt, Artificial Sequence
  Description of Artificial Sequence: Synthetic oligonucleotide
aucagacuggguuugcuga

SEQ ID NO: 2650504 - RNA, 19 nt, Artificial Sequence
  Description of Artificial Sequence: Synthetic oligonucleotide
agacauggagagauuaagg

SEQ ID NO: 2650505 - RNA, 19 nt, Artificial Sequence
  Description of Artificial Sequence: Synthetic oligonucleotide
aucugcuguaggcuuuccc

SEQ ID NO: 2650506 - RNA, 19 nt, Artificial Sequence
  Description of Artificial Sequence: Synthetic oligonucleotide
aauccucuucuuccaacca

SEQ ID NO: 2650507 - RNA, 19 nt, Artificial Sequence
  Description of Artificial Sequence: Synthetic oligonucleotide
uggucauuccuccuaucug

SEQ ID NO: 2650508 - RNA, 19 nt, Artificial Sequence
  Description of Artificial Sequence: Synthetic oligonucleotide
ucacauccugcugagaaca

SEQ ID NO: 2650509 - RNA, 19 nt, Artificial Sequence
  Description of Artificial Sequence: Synthetic oligonucleotide
cuaucugaagucauuuuga

SEQ ID NO: 2650510 - RNA, 19 nt, Artificial Sequence
  Description of Artificial Sequence: Synthetic oligonucleotide
aaaaucucucaggcagugg

SEQ ID NO: 2650511 - RNA, 19 nt, Artificial Sequence
  Description of Artificial Sequence: Synthetic oligonucleotide
gaucagacuggguuugcug

SEQ ID NO: 2650512 - RNA, 19 nt, Artificial Sequence
  Description of Artificial Sequence: Synthetic oligonucleotide
guuacuuacuauucgguua

SEQ ID NO: 2650513 - RNA, 19 nt, Artificial Sequence
  Description of Artificial Sequence: Synthetic oligonucleotide
aucucucaggcagugggcc

SEQ ID NO: 2650514 - RNA, 19 nt, Artificial Sequence
  Description of Artificial Sequence: Synthetic oligonucleotide
uuugaucaucuugaguuac

SEQ ID NO: 2650515 - RNA, 19 nt, Artificial Sequence
  Description of Artificial Sequence: Synthetic oligonucleotide
gauccauuauaacccacuc

SEQ ID NO: 2650516 - RNA, 19 nt, Artificial Sequence
  Description of Artificial Sequence: Synthetic oligonucleotide
aaaggaaaacugucauaau

SEQ ID NO: 2650517 - RNA, 19 nt, Artificial Sequence
  Description of Artificial Sequence: Synthetic oligonucleotide
auacgaacguguuuaguaa

SEQ ID NO: 2650518 - RNA, 19 nt, Artificial Sequence
  Description of Artificial Sequence: Synthetic oligonucleotide
uagguaaaaucugcuguag

SEQ ID NO: 2650519 - RNA, 19 nt, Artificial Sequence
  Description of Artificial Sequence: Synthetic oligonucleotide
aaaucugcuguaggcuuuc

SEQ ID NO: 2650520 - RNA, 19 nt, Artificial Sequence
  Description of Artificial Sequence: Synthetic oligonucleotide
aguuacuuacuauucgguu

SEQ ID NO: 2650521 - RNA, 19 nt, Artificial Sequence
  Description of Artificial Sequence: Synthetic oligonucleotide
uaucugaagucauuuugau

SEQ ID NO: 2650522 - RNA, 19 nt, Artificial Sequence
  Description of Artificial Sequence: Synthetic oligonucleotide
auaugcucaguucggcuug

SEQ ID NO: 2650523 - RNA, 19 nt, Artificial Sequence
  Description of Artificial Sequence: Synthetic oligonucleotide
ucugaguuugauccauuau

SEQ ID NO: 2650524 - RNA, 19 nt, Artificial Sequence
  Description of Artificial Sequence: Synthetic oligonucleotide
ugcucaguucggcuugagg

SEQ ID NO: 2650525 - RNA, 19 nt, Artificial Sequence
  Description of Artificial Sequence: Synthetic oligonucleotide
aguguaaacuccaguauga

SEQ ID NO: 2650526 - RNA, 19 nt, Artificial Sequence
  Description of Artificial Sequence: Synthetic oligonucleotide
uuuuggucauuccuccuau

SEQ ID NO: 2650527 - RNA, 19 nt, Artificial Sequence
  Description of Artificial Sequence: Synthetic oligonucleotide
uuugcugaccucacauccu

SEQ ID NO: 2650528 - RNA, 19 nt, Artificial Sequence
  Description of Artificial Sequence: Synthetic oligonucleotide
uuuugaucaucuugaguua

SEQ ID NO: 2650529 - RNA, 19 nt, Artificial Sequence
  Description of Artificial Sequence: Synthetic oligonucleotide
ugugaauacgaacguguuu

SEQ ID NO: 2650530 - RNA, 19 nt, Artificial Sequence
  Description of Artificial Sequence: Synthetic oligonucleotide
ccuacauucucaacaaaag

SEQ ID NO: 2650531 - RNA, 19 nt, Artificial Sequence
  Description of Artificial Sequence: Synthetic oligonucleotide
ucaaaggaaaacugucaua

SEQ ID NO: 2650532 - RNA, 19 nt, Artificial Sequence
  Description of Artificial Sequence: Synthetic oligonucleotide
ucggcuugaggaaguagug

SEQ ID NO: 2650533 - RNA, 19 nt, Artificial Sequence
  Description of Artificial Sequence: Synthetic oligonucleotide
auaacccacuccucuuggg

SEQ ID NO: 2650534 - RNA, 19 nt, Artificial Sequence
  Description of Artificial Sequence: Synthetic oligonucleotide
gaguuugauccauuauaac

SEQ ID NO: 2650535 - RNA, 19 nt, Artificial Sequence
  Description of Artificial Sequence: Synthetic oligonucleotide
uugcugaccucacauccug

SEQ ID NO: 2650536 - RNA, 19 nt, Artificial Sequence
  Description of Artificial Sequence: Synthetic oligonucleotide
auuauaacccacuccucuu

SEQ ID NO: 2650537 - RNA, 19 nt, Artificial Sequence
  Description of Artificial Sequence: Synthetic oligonucleotide
uaacccacuccucuugggu

SEQ ID NO: 2650538 - RNA, 19 nt, Artificial Sequence
  Description of Artificial Sequence: Synthetic oligonucleotide
uuauaggguuuuguuccgg

SEQ ID NO: 2650539 - RNA, 19 nt, Artificial Sequence
  Description of Artificial Sequence: Synthetic oligonucleotide
caguaugauguaaucaaga

SEQ ID NO: 2650540 - RNA, 19 nt, Artificial Sequence
  Description of Artificial Sequence: Synthetic oligonucleotide
guuuucucacauucuguac

SEQ ID NO: 2650541 - RNA, 19 nt, Artificial Sequence
  Description of Artificial Sequence: Synthetic oligonucleotide
uccaaccaggagaucagac

SEQ ID NO: 2650542 - RNA, 19 nt, Artificial Sequence
  Description of Artificial Sequence: Synthetic oligonucleotide
ucaagacauggagagauua

SEQ ID NO: 2650543 - RNA, 19 nt, Artificial Sequence
  Description of Artificial Sequence: Synthetic oligonucleotide
accagugugaguucggaua

SEQ ID NO: 2650544 - RNA, 19 nt, Artificial Sequence
  Description of Artificial Sequence: Synthetic oligonucleotide
uucucaacaaaagguuucu

SEQ ID NO: 2650545 - RNA, 19 nt, Artificial Sequence
  Description of Artificial Sequence: Synthetic oligonucleotide
gugaauacgaacguguuua

SEQ ID NO: 2650546 - RNA, 19 nt, Artificial Sequence
  Description of Artificial Sequence: Synthetic oligonucleotide
uugaucaucuugaguuacu

SEQ ID NO: 2650547 - RNA, 19 nt, Artificial Sequence
  Description of Artificial Sequence: Synthetic oligonucleotide
ugcuuucuuaauaguguaa

SEQ ID NO: 2650548 - RNA, 19 nt, Artificial Sequence
  Description of Artificial Sequence: Synthetic oligonucleotide
augagguuagaggaugaag

SEQ ID NO: 2650549 - RNA, 19 nt, Artificial Sequence
  Description of Artificial Sequence: Synthetic oligonucleotide
ugaguucggauaugcucag

SEQ ID NO: 2650550 - RNA, 19 nt, Artificial Sequence
  Description of Artificial Sequence: Synthetic oligonucleotide
acacuuauaggguuuuguu

SEQ ID NO: 2650551 - RNA, 19 nt, Artificial Sequence
  Description of Artificial Sequence: Synthetic oligonucleotide
uugcuuucuuaauagugua

SEQ ID NO: 2650552 - RNA, 19 nt, Artificial Sequence
  Description of Artificial Sequence: Synthetic oligonucleotide
cuuccaaccaggagaucag

SEQ ID NO: 2650553 - RNA, 19 nt, Artificial Sequence
  Description of Artificial Sequence: Synthetic oligonucleotide
auggugaaugagguuagag

SEQ ID NO: 2650554 - RNA, 19 nt, Artificial Sequence
  Description of Artificial Sequence: Synthetic oligonucleotide
ucaguucggcuugaggaag

SEQ ID NO: 2650555 - RNA, 19 nt, Artificial Sequence
  Description of Artificial Sequence: Synthetic oligonucleotide
cugaguuugauccauuaua

SEQ ID NO: 2650556 - RNA, 19 nt, Artificial Sequence
  Description of Artificial Sequence: Synthetic oligonucleotide
aguucggauaugcucaguu

SEQ ID NO: 2650557 - RNA, 19 nt, Artificial Sequence
  Description of Artificial Sequence: Synthetic oligonucleotide
agaggucucucugaguuug

SEQ ID NO: 2650558 - RNA, 19 nt, Artificial Sequence
  Description of Artificial Sequence: Synthetic oligonucleotide
gugaguucggauaugcuca

SEQ ID NO: 2650559 - RNA, 19 nt, Artificial Sequence
  Description of Artificial Sequence: Synthetic oligonucleotide
acauugcuuucuuaauagu

SEQ ID NO: 2650560 - RNA, 19 nt, Artificial Sequence
  Description of Artificial Sequence: Synthetic oligonucleotide
acgaacguguuuaguaagg

SEQ ID NO: 2650561 - RNA, 19 nt, Artificial Sequence
  Description of Artificial Sequence: Synthetic oligonucleotide
gaagucauuuugaucaucu

SEQ ID NO: 2650562 - RNA, 19 nt, Artificial Sequence
  Description of Artificial Sequence: Synthetic oligonucleotide
ucauuccuccuaucugaag

SEQ ID NO: 2650563 - RNA, 19 nt, Artificial Sequence
  Description of Artificial Sequence: Synthetic oligonucleotide
uugauccauuauaacccac

SEQ ID NO: 2650564 - RNA, 19 nt, Artificial Sequence
  Description of Artificial Sequence: Synthetic oligonucleotide
uacuuacacuuauaggguu

SEQ ID NO: 2650565 - RNA, 19 nt, Artificial Sequence
  Description of Artificial Sequence: Synthetic oligonucleotide
aacuccaguaugauguaau

SEQ ID NO: 2650566 - RNA, 19 nt, Artificial Sequence
  Description of Artificial Sequence: Synthetic oligonucleotide
cuguagaggucucucugag

SEQ ID NO: 2650567 - RNA, 19 nt, Artificial Sequence
  Description of Artificial Sequence: Synthetic oligonucleotide
uugaggaaguagugaaauc

SEQ ID NO: 2650568 - RNA, 19 nt, Artificial Sequence
  Description of Artificial Sequence: Synthetic oligonucleotide
uccccuacauucucaacaa

SEQ ID NO: 2650569 - RNA, 19 nt, Artificial Sequence
  Description of Artificial Sequence: Synthetic oligonucleotide
gaugaagugaagguuuucu

SEQ ID NO: 2650570 - RNA, 19 nt, Artificial Sequence
  Description of Artificial Sequence: Synthetic oligonucleotide
aggguuuuguuccggugug

SEQ ID NO: 2650571 - RNA, 19 nt, Artificial Sequence
  Description of Artificial Sequence: Synthetic oligonucleotide
acauucucaacaaaagguu

SEQ ID NO: 2650572 - RNA, 19 nt, Artificial Sequence
  Description of Artificial Sequence: Synthetic oligonucleotide
ucucuguagaggucucucu

SEQ ID NO: 2650573 - RNA, 19 nt, Artificial Sequence
  Description of Artificial Sequence: Synthetic oligonucleotide
cuccucuugggugaagucc

SEQ ID NO: 2650574 - RNA, 19 nt, Artificial Sequence
  Description of Artificial Sequence: Synthetic oligonucleotide
gcucaguucggcuugagga

SEQ ID NO: 2650575 - RNA, 19 nt, Artificial Sequence
  Description of Artificial Sequence: Synthetic oligonucleotide
guagguaaaaucugcugua

SEQ ID NO: 2650576 - RNA, 19 nt, Artificial Sequence
  Description of Artificial Sequence: Synthetic oligonucleotide
uccacauugcuuucuuaau

SEQ ID NO: 2650577 - RNA, 19 nt, Artificial Sequence
  Description of Artificial Sequence: Synthetic oligonucleotide
uucucucuaguguggauuu

SEQ ID NO: 2650578 - RNA, 19 nt, Artificial Sequence
  Description of Artificial Sequence: Synthetic oligonucleotide
cucaacaaaagguuucucu

SEQ ID NO: 2650579 - RNA, 19 nt, Artificial Sequence
  Description of Artificial Sequence: Synthetic oligonucleotide
agguuagaggaugaaguga

SEQ ID NO: 2650580 - RNA, 19 nt, Artificial Sequence
  Description of Artificial Sequence: Synthetic oligonucleotide
aucuugaguuacuuacuau

SEQ ID NO: 2650581 - RNA, 19 nt, Artificial Sequence
  Description of Artificial Sequence: Synthetic oligonucleotide
aagucauuuugaucaucuu

SEQ ID NO: 2650582 - RNA, 19 nt, Artificial Sequence
  Description of Artificial Sequence: Synthetic oligonucleotide
accaggagaucagacuggg

SEQ ID NO: 2650583 - RNA, 19 nt, Artificial Sequence
  Description of Artificial Sequence: Synthetic oligonucleotide
ggucauuccuccuaucuga

SEQ ID NO: 2650584 - RNA, 19 nt, Artificial Sequence
  Description of Artificial Sequence: Synthetic oligonucleotide
acuccucuugggugaaguc

SEQ ID NO: 2650585 - RNA, 19 nt, Artificial Sequence
  Description of Artificial Sequence: Synthetic oligonucleotide
aaugagguuagaggaugaa

SEQ ID NO: 2650586 - RNA, 19 nt, Artificial Sequence
  Description of Artificial Sequence: Synthetic oligonucleotide
guuuaguaagguauagaaa

SEQ ID NO: 2650587 - RNA, 19 nt, Artificial Sequence
  Description of Artificial Sequence: Synthetic oligonucleotide
ucagacuggguuugcugac

SEQ ID NO: 2650588 - RNA, 19 nt, Artificial Sequence
  Description of Artificial Sequence: Synthetic oligonucleotide
caucaucaaaggucaauga

SEQ ID NO: 2650589 - RNA, 19 nt, Artificial Sequence
  Description of Artificial Sequence: Synthetic oligonucleotide
uguagaggucucucugagu

SEQ ID NO: 2650590 - RNA, 19 nt, Artificial Sequence
  Description of Artificial Sequence: Synthetic oligonucleotide
cauuauaacccacuccucu

SEQ ID NO: 2650591 - RNA, 19 nt, Artificial Sequence
  Description of Artificial Sequence: Synthetic oligonucleotide
gguuaguagguaaaaucug

SEQ ID NO: 2650592 - RNA, 19 nt, Artificial Sequence
  Description of Artificial Sequence: Synthetic oligonucleotide
cucacauucuguacacuca

SEQ ID NO: 2650593 - RNA, 19 nt, Artificial Sequence
  Description of Artificial Sequence: Synthetic oligonucleotide
cauggagagauuaaggauu

SEQ ID NO: 2650594 - RNA, 19 nt, Artificial Sequence
  Description of Artificial Sequence: Synthetic oligonucleotide
uuccggugugaauacgaac

SEQ ID NO: 2650595 - RNA, 19 nt, Artificial Sequence
  Description of Artificial Sequence: Synthetic oligonucleotide
cucacauccugcugagaac

SEQ ID NO: 2650596 - RNA, 19 nt, Artificial Sequence
  Description of Artificial Sequence: Synthetic oligonucleotide
ucucucugaguuugaucca

SEQ ID NO: 2650597 - RNA, 19 nt, Artificial Sequence
  Description of Artificial Sequence: Synthetic oligonucleotide
acauccugcugagaacagg

SEQ ID NO: 2650598 - RNA, 19 nt, Artificial Sequence
  Description of Artificial Sequence: Synthetic oligonucleotide
gguucugguaguucuccag

SEQ ID NO: 2650599 - RNA, 19 nt, Artificial Sequence
  Description of Artificial Sequence: Synthetic oligonucleotide
agaggaugaagugaagguu

SEQ ID NO: 2650600 - RNA, 19 nt, Artificial Sequence
  Description of Artificial Sequence: Synthetic oligonucleotide
uaaacuccaguaugaugua

SEQ ID NO: 2650601 - RNA, 19 nt, Artificial Sequence
  Description of Artificial Sequence: Synthetic oligonucleotide
gaccucacauccugcugag

SEQ ID NO: 2650602 - RNA, 19 nt, Artificial Sequence
  Description of Artificial Sequence: Synthetic oligonucleotide
uguaggcuuuccccuacau

SEQ ID NO: 2650603 - RNA, 19 nt, Artificial Sequence
  Description of Artificial Sequence: Synthetic oligonucleotide
cucuucuuccaaccaggag

SEQ ID NO: 2650604 - RNA, 19 nt, Artificial Sequence
  Description of Artificial Sequence: Synthetic oligonucleotide
ugcugagaacagguucugg

SEQ ID NO: 2650605 - RNA, 19 nt, Artificial Sequence
  Description of Artificial Sequence: Synthetic oligonucleotide
cauuccuccuaucugaagu

SEQ ID NO: 2650606 - RNA, 19 nt, Artificial Sequence
  Description of Artificial Sequence: Synthetic oligonucleotide
guucggauaugcucaguuc

SEQ ID NO: 2650607 - RNA, 19 nt, Artificial Sequence
  Description of Artificial Sequence: Synthetic oligonucleotide
guagaggucucucugaguu

SEQ ID NO: 2650608 - RNA, 19 nt, Artificial Sequence
  Description of Artificial Sequence: Synthetic oligonucleotide
gaacguguuuaguaaggua

SEQ ID NO: 2650609 - RNA, 19 nt, Artificial Sequence
  Description of Artificial Sequence: Synthetic oligonucleotide
cagugggccaccaugaucu

SEQ ID NO: 2650610 - RNA, 19 nt, Artificial Sequence
  Description of Artificial Sequence: Synthetic oligonucleotide
aaaaucugcuguaggcuuu

SEQ ID NO: 2650611 - RNA, 19 nt, Artificial Sequence
  Description of Artificial Sequence: Synthetic oligonucleotide
uucgguuaguagguaaaau

SEQ ID NO: 2650612 - RNA, 19 nt, Artificial Sequence
  Description of Artificial Sequence: Synthetic oligonucleotide
ugaucaucuugaguuacuu

SEQ ID NO: 2650613 - RNA, 19 nt, Artificial Sequence
  Description of Artificial Sequence: Synthetic oligonucleotide
caggcagugggccaccaug

SEQ ID NO: 2650614 - RNA, 19 nt, Artificial Sequence
  Description of Artificial Sequence: Synthetic oligonucleotide
agacuggguuugcugaccu

SEQ ID NO: 2650615 - RNA, 19 nt, Artificial Sequence
  Description of Artificial Sequence: Synthetic oligonucleotide
gauaugcucaguucggcuu

SEQ ID NO: 2650616 - RNA, 19 nt, Artificial Sequence
  Description of Artificial Sequence: Synthetic oligonucleotide
ccaguaugauguaaucaag

SEQ ID NO: 2650617 - RNA, 19 nt, Artificial Sequence
  Description of Artificial Sequence: Synthetic oligonucleotide
uccuccuaucugaagucau

SEQ ID NO: 2650618 - RNA, 19 nt, Artificial Sequence
  Description of Artificial Sequence: Synthetic oligonucleotide
gaucaucuugaguuacuua

SEQ ID NO: 2650619 - RNA, 19 nt, Artificial Sequence
  Description of Artificial Sequence: Synthetic oligonucleotide
aaacuccaguaugauguaa

SEQ ID NO: 2650620 - RNA, 19 nt, Artificial Sequence
  Description of Artificial Sequence: Synthetic oligonucleotide
acauggugaaugagguuag

SEQ ID NO: 2650621 - RNA, 19 nt, Artificial Sequence
  Description of Artificial Sequence: Synthetic oligonucleotide
ugaagucauuuugaucauc

SEQ ID NO: 2650622 - RNA, 19 nt, Artificial Sequence
  Description of Artificial Sequence: Synthetic oligonucleotide
ggaaguagugaaaucuuuc

SEQ ID NO: 2650623 - RNA, 19 nt, Artificial Sequence
  Description of Artificial Sequence: Synthetic oligonucleotide
cuauucgguuaguagguaa

SEQ ID NO: 2650624 - RNA, 19 nt, Artificial Sequence
  Description of Artificial Sequence: Synthetic oligonucleotide
gguuuucucacauucugua

SEQ ID NO: 2650625 - RNA, 19 nt, Artificial Sequence
  Description of Artificial Sequence: Synthetic oligonucleotide
uccuaucugaagucauuuu

SEQ ID NO: 2650626 - RNA, 19 nt, Artificial Sequence
  Description of Artificial Sequence: Synthetic oligonucleotide
guuagaggaugaagugaag

SEQ ID NO: 2650627 - RNA, 19 nt, Artificial Sequence
  Description of Artificial Sequence: Synthetic oligonucleotide
ugcugaccucacauccugc

SEQ ID NO: 2650628 - RNA, 19 nt, Artificial Sequence
  Description of Artificial Sequence: Synthetic oligonucleotide
uuccuccuaucugaaguca

SEQ ID NO: 2650629 - RNA, 19 nt, Artificial Sequence
  Description of Artificial Sequence: Synthetic oligonucleotide
caaaggucaaugauuccua

SEQ ID NO: 2650630 - RNA, 19 nt, Artificial Sequence
  Description of Artificial Sequence: Synthetic oligonucleotide
uggguuugcugaccucaca

SEQ ID NO: 2650631 - RNA, 19 nt, Artificial Sequence
  Description of Artificial Sequence: Synthetic oligonucleotide
ucucucaggcagugggcca

SEQ ID NO: 2650632 - RNA, 19 nt, Artificial Sequence
  Description of Artificial Sequence: Synthetic oligonucleotide
gguuagaggaugaagugaa

SEQ ID NO: 2650633 - RNA, 19 nt, Artificial Sequence
  Description of Artificial Sequence: Synthetic oligonucleotide
gaaugagguuagaggauga

SEQ ID NO: 2650634 - RNA, 19 nt, Artificial Sequence
  Description of Artificial Sequence: Synthetic oligonucleotide
uuacauggugaaugagguu

SEQ ID NO: 2650635 - RNA, 19 nt, Artificial Sequence
  Description of Artificial Sequence: Synthetic oligonucleotide
caacaaaagguuucucucu

SEQ ID NO: 2650636 - RNA, 19 nt, Artificial Sequence
  Description of Artificial Sequence: Synthetic oligonucleotide
uuuggucauuccuccuauc

SEQ ID NO: 2650637 - RNA, 19 nt, Artificial Sequence
  Description of Artificial Sequence: Synthetic oligonucleotide
caagacauggagagauuaa

SEQ ID NO: 2650638 - RNA, 19 nt, Artificial Sequence
  Description of Artificial Sequence: Synthetic oligonucleotide
caucuugaguuacuuacua

SEQ ID NO: 2650639 - RNA, 19 nt, Artificial Sequence
  Description of Artificial Sequence: Synthetic oligonucleotide
uuuccccuacauucucaac

SEQ ID NO: 2650640 - RNA, 19 nt, Artificial Sequence
  Description of Artificial Sequence: Synthetic oligonucleotide
ggcuugaggaaguagugaa

SEQ ID NO: 2650641 - RNA, 19 nt, Artificial Sequence
  Description of Artificial Sequence: Synthetic oligonucleotide
cuccaguaugauguaauca

SEQ ID NO: 2650642 - RNA, 19 nt, Artificial Sequence
  Description of Artificial Sequence: Synthetic oligonucleotide
guguuuaguaagguauaga

SEQ ID NO: 2650643 - RNA, 19 nt, Artificial Sequence
  Description of Artificial Sequence: Synthetic oligonucleotide
ucucaacaaaagguuucuc

SEQ ID NO: 2650644 - RNA, 19 nt, Artificial Sequence
  Description of Artificial Sequence: Synthetic oligonucleotide
cucaguucggcuugaggaa

SEQ ID NO: 2650645 - RNA, 19 nt, Artificial Sequence
  Description of Artificial Sequence: Synthetic oligonucleotide
agguuuucucacauucugu

SEQ ID NO: 2650646 - RNA, 19 nt, Artificial Sequence
  Description of Artificial Sequence: Synthetic oligonucleotide
cugaccucacauccugcug

SEQ ID NO: 2650647 - RNA, 19 nt, Artificial Sequence
  Description of Artificial Sequence: Synthetic oligonucleotide
acuuacuauucgguuagua

SEQ ID NO: 2650648 - RNA, 19 nt, Artificial Sequence
  Description of Artificial Sequence: Synthetic oligonucleotide
cacauccugcugagaacag

SEQ ID NO: 2650649 - RNA, 19 nt, Artificial Sequence
  Description of Artificial Sequence: Synthetic oligonucleotide
guacuuacacuuauagggu

SEQ ID NO: 2650650 - RNA, 19 nt, Artificial Sequence
  Description of Artificial Sequence: Synthetic oligonucleotide
auucgguuaguagguaaaa

SEQ ID NO: 2650651 - RNA, 19 nt, Artificial Sequence
  Description of Artificial Sequence: Synthetic oligonucleotide
gcuuucuuaauaguguaaa

SEQ ID NO: 2650652 - RNA, 19 nt, Artificial Sequence
  Description of Artificial Sequence: Synthetic oligonucleotide
agguucugguaguucucca

SEQ ID NO: 2650653 - RNA, 19 nt, Artificial Sequence
  Description of Artificial Sequence: Synthetic oligonucleotide
cauccugcugagaacaggu

SEQ ID NO: 2650654 - RNA, 19 nt, Artificial Sequence
  Description of Artificial Sequence: Synthetic oligonucleotide
ucaccucucuguagagguc

SEQ ID NO: 2650655 - RNA, 19 nt, Artificial Sequence
  Description of Artificial Sequence: Synthetic oligonucleotide
gaggaugaagugaagguuu

SEQ ID NO: 2650656 - RNA, 19 nt, Artificial Sequence
  Description of Artificial Sequence: Synthetic oligonucleotide
cuuuccccuacauucucaa

SEQ ID NO: 2650657 - RNA, 19 nt, Artificial Sequence
  Description of Artificial Sequence: Synthetic oligonucleotide
gaguuacuuacuauucggu

SEQ ID NO: 2650658 - RNA, 19 nt, Artificial Sequence
  Description of Artificial Sequence: Synthetic oligonucleotide
cauuuugaucaucuugagu

SEQ ID NO: 2650659 - RNA, 19 nt, Artificial Sequence
  Description of Artificial Sequence: Synthetic oligonucleotide
ggagaucagacuggguuug

SEQ ID NO: 2650660 - RNA, 19 nt, Artificial Sequence
  Description of Artificial Sequence: Synthetic oligonucleotide
auggagagauuaaggauuu

SEQ ID NO: 2650661 - RNA, 19 nt, Artificial Sequence
  Description of Artificial Sequence: Synthetic oligonucleotide
augauguaaucaagacaug

SEQ ID NO: 2650662 - RNA, 19 nt, Artificial Sequence
  Description of Artificial Sequence: Synthetic oligonucleotide
caaaagguuucucucuagu

SEQ ID NO: 2650663 - RNA, 19 nt, Artificial Sequence
  Description of Artificial Sequence: Synthetic oligonucleotide
cuggguuugcugaccucac

SEQ ID NO: 2650664 - RNA, 19 nt, Artificial Sequence
  Description of Artificial Sequence: Synthetic oligonucleotide
cuugaggaaguagugaaau

SEQ ID NO: 2650665 - RNA, 19 nt, Artificial Sequence
  Description of Artificial Sequence: Synthetic oligonucleotide
ucucugaguuugauccauu

SEQ ID NO: 2650666 - RNA, 19 nt, Artificial Sequence
  Description of Artificial Sequence: Synthetic oligonucleotide
uuccaaccaggagaucaga

SEQ ID NO: 2650667 - RNA, 19 nt, Artificial Sequence
  Description of Artificial Sequence: Synthetic oligonucleotide
caggagaucagacuggguu

SEQ ID NO: 2650668 - RNA, 19 nt, Artificial Sequence
  Description of Artificial Sequence: Synthetic oligonucleotide
aggaaguagugaaaucuuu

SEQ ID NO: 2650669 - RNA, 19 nt, Artificial Sequence
  Description of Artificial Sequence: Synthetic oligonucleotide
cucucuguagaggucucuc

SEQ ID NO: 2650670 - RNA, 19 nt, Artificial Sequence
  Description of Artificial Sequence: Synthetic oligonucleotide
ugcuguaggcuuuccccua

SEQ ID NO: 2650671 - RNA, 19 nt, Artificial Sequence
  Description of Artificial Sequence: Synthetic oligonucleotide
cuucuuccaaccaggagau

SEQ ID NO: 2650672 - RNA, 19 nt, Artificial Sequence
  Description of Artificial Sequence: Synthetic oligonucleotide
agaucagacuggguuugcu

SEQ ID NO: 2650673 - RNA, 19 nt, Artificial Sequence
  Description of Artificial Sequence: Synthetic oligonucleotide
cauucucaacaaaagguuu

SEQ ID NO: 2650674 - RNA, 19 nt, Artificial Sequence
  Description of Artificial Sequence: Synthetic oligonucleotide
cagacuggguuugcugacc

SEQ ID NO: 2650675 - RNA, 19 nt, Artificial Sequence
  Description of Artificial Sequence: Synthetic oligonucleotide
uucucacauucuguacacu

SEQ ID NO: 2650676 - RNA, 19 nt, Artificial Sequence
  Description of Artificial Sequence: Synthetic oligonucleotide
agugggccaccaugaucuc

SEQ ID NO: 2650677 - RNA, 19 nt, Artificial Sequence
  Description of Artificial Sequence: Synthetic oligonucleotide
ggugugaauacgaacgugu

SEQ ID NO: 2650678 - RNA, 19 nt, Artificial Sequence
  Description of Artificial Sequence: Synthetic oligonucleotide
gagaucagacuggguuugc

SEQ ID NO: 2650679 - RNA, 19 nt, Artificial Sequence
  Description of Artificial Sequence: Synthetic oligonucleotide
guucggcuugaggaaguag

SEQ ID NO: 2650680 - RNA, 19 nt, Artificial Sequence
  Description of Artificial Sequence: Synthetic oligonucleotide
cucugaguuugauccauua

SEQ ID NO: 2650681 - RNA, 19 nt, Artificial Sequence
  Description of Artificial Sequence: Synthetic oligonucleotide
uagaggucucucugaguuu

SEQ ID NO: 2650682 - RNA, 19 nt, Artificial Sequence
  Description of Artificial Sequence: Synthetic oligonucleotide
cccuacauucucaacaaaa

SEQ ID NO: 2650683 - RNA, 19 nt, Artificial Sequence
  Description of Artificial Sequence: Synthetic oligonucleotide
caaugauuccuagguaaaa

SEQ ID NO: 2650684 - RNA, 19 nt, Artificial Sequence
  Description of Artificial Sequence: Synthetic oligonucleotide
gaauacgaacguguuuagu

SEQ ID NO: 2650685 - RNA, 19 nt, Artificial Sequence
  Description of Artificial Sequence: Synthetic oligonucleotide
accaugaucucugccuuuu

SEQ ID NO: 2650686 - RNA, 19 nt, Artificial Sequence
  Description of Artificial Sequence: Synthetic oligonucleotide
cucucaggcagugggccac

SEQ ID NO: 2650687 - RNA, 19 nt, Artificial Sequence
  Description of Artificial Sequence: Synthetic oligonucleotide
ggucucucugaguuugauc

SEQ ID NO: 2650688 - RNA, 19 nt, Artificial Sequence
  Description of Artificial Sequence: Synthetic oligonucleotide
gcaucaccucucuguagag

SEQ ID NO: 2650689 - RNA, 19 nt, Artificial Sequence
  Description of Artificial Sequence: Synthetic oligonucleotide
acuauucgguuaguaggua

SEQ ID NO: 2650690 - RNA, 19 nt, Artificial Sequence
  Description of Artificial Sequence: Synthetic oligonucleotide
acguguuuaguaagguaua

SEQ ID NO: 2650691 - RNA, 19 nt, Artificial Sequence
  Description of Artificial Sequence: Synthetic oligonucleotide
gccaccaugaucucugccu

SEQ ID NO: 2650692 - RNA, 19 nt, Artificial Sequence
  Description of Artificial Sequence: Synthetic oligonucleotide
uacuuacuauucgguuagu

SEQ ID NO: 2650693 - RNA, 19 nt, Artificial Sequence
  Description of Artificial Sequence: Synthetic oligonucleotide
gaggaaguagugaaaucuu

SEQ ID NO: 2650694 - RNA, 19 nt, Artificial Sequence
  Description of Artificial Sequence: Synthetic oligonucleotide
aggcuuuccccuacauucu

SEQ ID NO: 2650695 - RNA, 19 nt, Artificial Sequence
  Description of Artificial Sequence: Synthetic oligonucleotide
gacuggguuugcugaccuc

SEQ ID NO: 2650696 - RNA, 19 nt, Artificial Sequence
  Description of Artificial Sequence: Synthetic oligonucleotide
cguguuuaguaagguauag

SEQ ID NO: 2650697 - RNA, 19 nt, Artificial Sequence
  Description of Artificial Sequence: Synthetic oligonucleotide
aggaugaagugaagguuuu

SEQ ID NO: 2650698 - RNA, 19 nt, Artificial Sequence
  Description of Artificial Sequence: Synthetic oligonucleotide
ggucaaugauuccuaggua

SEQ ID NO: 2650699 - RNA, 19 nt, Artificial Sequence
  Description of Artificial Sequence: Synthetic oligonucleotide
ccucacauccugcugagaa

SEQ ID NO: 2650700 - RNA, 19 nt, Artificial Sequence
  Description of Artificial Sequence: Synthetic oligonucleotide
cugcugagaacagguucug

SEQ ID NO: 2650701 - RNA, 19 nt, Artificial Sequence
  Description of Artificial Sequence: Synthetic oligonucleotide
ucucaggcagugggccacc

SEQ ID NO: 2650702 - RNA, 19 nt, Artificial Sequence
  Description of Artificial Sequence: Synthetic oligonucleotide
guuccacauugcuuucuua

SEQ ID NO: 2650703 - RNA, 19 nt, Artificial Sequence
  Description of Artificial Sequence: Synthetic oligonucleotide
cgguuaguagguaaaaucu

SEQ ID NO: 2650704 - RNA, 19 nt, Artificial Sequence
  Description of Artificial Sequence: Synthetic oligonucleotide
gcuguaggcuuuccccuac

SEQ ID NO: 2650705 - RNA, 19 nt, Artificial Sequence
  Description of Artificial Sequence: Synthetic oligonucleotide
guuccggugugaauacgaa

SEQ ID NO: 2650706 - RNA, 19 nt, Artificial Sequence
  Description of Artificial Sequence: Synthetic oligonucleotide
gguuuuguuccggugugaa

SEQ ID NO: 2650707 - RNA, 19 nt, Artificial Sequence
  Description of Artificial Sequence: Synthetic oligonucleotide
gucauuccuccuaucugaa

SEQ ID NO: 2650708 - RNA, 19 nt, Artificial Sequence
  Description of Artificial Sequence: Synthetic oligonucleotide
cugcuguaggcuuuccccu

SEQ ID NO: 2650709 - RNA, 19 nt, Artificial Sequence
  Description of Artificial Sequence: Synthetic oligonucleotide
gcagugggccaccaugauc

SEQ ID NO: 2650710 - RNA, 19 nt, Artificial Sequence
  Description of Artificial Sequence: Synthetic oligonucleotide
gugaaugagguuagaggau

SEQ ID NO: 2650711 - RNA, 19 nt, Artificial Sequence
  Description of Artificial Sequence: Synthetic oligonucleotide
aucaagacauggagagauu

SEQ ID NO: 2650712 - RNA, 19 nt, Artificial Sequence
  Description of Artificial Sequence: Synthetic oligonucleotide
guuuuguuccggugugaau

SEQ ID NO: 2650713 - RNA, 19 nt, Artificial Sequence
  Description of Artificial Sequence: Synthetic oligonucleotide
ccugcugagaacagguucu

SEQ ID NO: 2650714 - RNA, 19 nt, Artificial Sequence
  Description of Artificial Sequence: Synthetic oligonucleotide
ccacauugcuuucuuaaua

SEQ ID NO: 2650715 - RNA, 19 nt, Artificial Sequence
  Description of Artificial Sequence: Synthetic oligonucleotide
aggucucucugaguuugau

SEQ ID NO: 2650716 - RNA, 19 nt, Artificial Sequence
  Description of Artificial Sequence: Synthetic oligonucleotide
ucucucuaguguggauuuu

SEQ ID NO: 2650717 - RNA, 19 nt, Artificial Sequence
  Description of Artificial Sequence: Synthetic oligonucleotide
ggcuuuccccuacauucuc

SEQ ID NO: 2650718 - RNA, 19 nt, Artificial Sequence
  Description of Artificial Sequence: Synthetic oligonucleotide
ggguuugcugaccucacau

SEQ ID NO: 2650719 - RNA, 19 nt, Artificial Sequence
  Description of Artificial Sequence: Synthetic oligonucleotide
guaggcuuuccccuacauu

SEQ ID NO: 2650720 - RNA, 19 nt, Artificial Sequence
  Description of Artificial Sequence: Synthetic oligonucleotide
cagugugaguucggauaug

SEQ ID NO: 2650721 - RNA, 19 nt, Artificial Sequence
  Description of Artificial Sequence: Synthetic oligonucleotide
ggccaccaugaucucugcc

SEQ ID NO: 2650722 - RNA, 19 nt, Artificial Sequence
  Description of Artificial Sequence: Synthetic oligonucleotide
uggagagauuaaggauuuu

SEQ ID NO: 2650723 - RNA, 19 nt, Artificial Sequence
  Description of Artificial Sequence: Synthetic oligonucleotide
cauggugaaugagguuaga

SEQ ID NO: 2650724 - RNA, 19 nt, Artificial Sequence
  Description of Artificial Sequence: Synthetic oligonucleotide
aguucggcuugaggaagua

SEQ ID NO: 2650725 - RNA, 19 nt, Artificial Sequence
  Description of Artificial Sequence: Synthetic oligonucleotide
cugaagucauuuugaucau

SEQ ID NO: 2650726 - RNA, 19 nt, Artificial Sequence
  Description of Artificial Sequence: Synthetic oligonucleotide
ggggcuguuccacauugcu

SEQ ID NO: 2650727 - RNA, 19 nt, Artificial Sequence
  Description of Artificial Sequence: Synthetic oligonucleotide
guguaaacuccaguaugau

SEQ ID NO: 2650728 - RNA, 19 nt, Artificial Sequence
  Description of Artificial Sequence: Synthetic oligonucleotide
ccaaccaggagaucagacu

SEQ ID NO: 2650729 - RNA, 19 nt, Artificial Sequence
  Description of Artificial Sequence: Synthetic oligonucleotide
cuguaggcuuuccccuaca

SEQ ID NO: 2650730 - RNA, 19 nt, Artificial Sequence
  Description of Artificial Sequence: Synthetic oligonucleotide
caccucucuguagaggucu

SEQ ID NO: 2650731 - RNA, 19 nt, Artificial Sequence
  Description of Artificial Sequence: Synthetic oligonucleotide
gcugaccucacauccugcu

SEQ ID NO: 2650732 - RNA, 19 nt, Artificial Sequence
  Description of Artificial Sequence: Synthetic oligonucleotide
cucuugggugaaguccaca

SEQ ID NO: 2650733 - RNA, 19 nt, Artificial Sequence
  Description of Artificial Sequence: Synthetic oligonucleotide
gaggucucucugaguuuga

SEQ ID NO: 2650734 - RNA, 19 nt, Artificial Sequence
  Description of Artificial Sequence: Synthetic oligonucleotide
uucuuccaaccaggagauc

SEQ ID NO: 2650735 - RNA, 19 nt, Artificial Sequence
  Description of Artificial Sequence: Synthetic oligonucleotide
gcuugaggaaguagugaaa

SEQ ID NO: 2650736 - RNA, 19 nt, Artificial Sequence
  Description of Artificial Sequence: Synthetic oligonucleotide
cuccuaucugaagucauuu

SEQ ID NO: 2650737 - RNA, 19 nt, Artificial Sequence
  Description of Artificial Sequence: Synthetic oligonucleotide
gugugaauacgaacguguu

SEQ ID NO: 2650738 - RNA, 19 nt, Artificial Sequence
  Description of Artificial Sequence: Synthetic oligonucleotide
cucucugaguuugauccau

SEQ ID NO: 2650739 - RNA, 19 nt, Artificial Sequence
  Description of Artificial Sequence: Synthetic oligonucleotide
cggauaugcucaguucggc

SEQ ID NO: 2650740 - RNA, 19 nt, Artificial Sequence
  Description of Artificial Sequence: Synthetic oligonucleotide
ccucuucuuccaaccagga

SEQ ID NO: 2650741 - RNA, 19 nt, Artificial Sequence
  Description of Artificial Sequence: Synthetic oligonucleotide
caguucggcuugaggaagu

SEQ ID NO: 2650742 - RNA, 19 nt, Artificial Sequence
  Description of Artificial Sequence: Synthetic oligonucleotide
auccugcugagaacagguu

SEQ ID NO: 2650743 - RNA, 19 nt, Artificial Sequence
  Description of Artificial Sequence: Synthetic oligonucleotide
accucacauccugcugaga

SEQ ID NO: 2650744 - RNA, 19 nt, Artificial Sequence
  Description of Artificial Sequence: Synthetic oligonucleotide
cacuccucuugggugaagu

SEQ ID NO: 2650745 - RNA, 19 nt, Artificial Sequence
  Description of Artificial Sequence: Synthetic oligonucleotide
gugugaguucggauaugcu

SEQ ID NO: 2650746 - RNA, 19 nt, Artificial Sequence
  Description of Artificial Sequence: Synthetic oligonucleotide
ccucucaccagugugaguu

SEQ ID NO: 2650747 - RNA, 19 nt, Artificial Sequence
  Description of Artificial Sequence: Synthetic oligonucleotide
gggccaccaugaucucugc

SEQ ID NO: 2650748 - RNA, 19 nt, Artificial Sequence
  Description of Artificial Sequence: Synthetic oligonucleotide
ccagugugaguucggauau

SEQ ID NO: 2650749 - RNA, 19 nt, Artificial Sequence
  Description of Artificial Sequence: Synthetic oligonucleotide
ggguuuuguuccgguguga

SEQ ID NO: 2650750 - RNA, 19 nt, Artificial Sequence
  Description of Artificial Sequence: Synthetic oligonucleotide
gaguucggauaugcucagu

SEQ ID NO: 2650751 - RNA, 19 nt, Artificial Sequence
  Description of Artificial Sequence: Synthetic oligonucleotide
cggugugaauacgaacgug

SEQ ID NO: 2650752 - RNA, 19 nt, Artificial Sequence
  Description of Artificial Sequence: Synthetic oligonucleotide
gugggccaccaugaucucu

SEQ ID NO: 2650753 - RNA, 19 nt, Artificial Sequence
  Description of Artificial Sequence: Synthetic oligonucleotide
ccacaguacuuacacuuau

SEQ ID NO: 2650754 - RNA, 19 nt, Artificial Sequence
  Description of Artificial Sequence: Synthetic oligonucleotide
cucaggcagugggccacca

SEQ ID NO: 2650755 - RNA, 19 nt, Artificial Sequence
  Description of Artificial Sequence: Synthetic oligonucleotide
caccaugaucucugccuuu

SEQ ID NO: 2650756 - RNA, 19 nt, Artificial Sequence
  Description of Artificial Sequence: Synthetic oligonucleotide
ccggugugaauacgaacgu

SEQ ID NO: 2650757 - RNA, 19 nt, Artificial Sequence
  Description of Artificial Sequence: Synthetic oligonucleotide
cggcuugaggaaguaguga

SEQ ID NO: 2650758 - RNA, 19 nt, Artificial Sequence
  Description of Artificial Sequence: Synthetic oligonucleotide
ccuccuaucugaagucauu

SEQ ID NO: 2650759 - RNA, 19 nt, Artificial Sequence
  Description of Artificial Sequence: Synthetic oligonucleotide
ggcagugggccaccaugau

SEQ ID NO: 2650760 - RNA, 19 nt, Artificial Sequence
  Description of Artificial Sequence: Synthetic oligonucleotide
cgaacguguuuaguaaggu

SEQ ID NO: 2650761 - RNA, 19 nt, Artificial Sequence
  Description of Artificial Sequence: Synthetic oligonucleotide
ccaccaugaucucugccuu

SEQ ID NO: 2650762 - RNA, 19 nt, Artificial Sequence
  Description of Artificial Sequence: Synthetic oligonucleotide
gggcuguuccacauugcuu

SEQ ID NO: 2650763 - RNA, 19 nt, Artificial Sequence
  Description of Artificial Sequence: Synthetic oligonucleotide
ccccuacauucucaacaaa

SEQ ID NO: 2650764 - RNA, 19 nt, Artificial Sequence
  Description of Artificial Sequence: Synthetic oligonucleotide
ccaggagaucagacugggu

SEQ ID NO: 2650765 - RNA, 19 nt, Artificial Sequence
  Description of Artificial Sequence: Synthetic oligonucleotide
aaagcaaguguacucgucc

SEQ ID NO: 2650766 - RNA, 19 nt, Artificial Sequence
  Description of Artificial Sequence: Synthetic oligonucleotide
ucuauuagcccacugagug

SEQ ID NO: 2650767 - RNA, 19 nt, Artificial Sequence
  Description of Artificial Sequence: Synthetic oligonucleotide
agaacuuuauccaugaugg

SEQ ID NO: 2650768 - RNA, 19 nt, Artificial Sequence
  Description of Artificial Sequence: Synthetic oligonucleotide
aaaagagcuuauuaaagca

SEQ ID NO: 2650769 - RNA, 19 nt, Artificial Sequence
  Description of Artificial Sequence: Synthetic oligonucleotide
guaguuguggaucaaaggg

SEQ ID NO: 2650770 - RNA, 19 nt, Artificial Sequence
  Description of Artificial Sequence: Synthetic oligonucleotide
ugaaaagagcuuauuaaag

SEQ ID NO: 2650771 - RNA, 19 nt, Artificial Sequence
  Description of Artificial Sequence: Synthetic oligonucleotide
uuuacaggcaacaaguagu

SEQ ID NO: 2650772 - RNA, 19 nt, Artificial Sequence
  Description of Artificial Sequence: Synthetic oligonucleotide
gaaaagagcuuauuaaagc

SEQ ID NO: 2650773 - RNA, 19 nt, Artificial Sequence
  Description of Artificial Sequence: Synthetic oligonucleotide
aaucuuuucggucaauaug

SEQ ID NO: 2650774 - RNA, 19 nt, Artificial Sequence
  Description of Artificial Sequence: Synthetic oligonucleotide
uagucauuggaacaguagg

SEQ ID NO: 2650775 - RNA, 19 nt, Artificial Sequence
  Description of Artificial Sequence: Synthetic oligonucleotide
uaagaaaucuuuucgguca

SEQ ID NO: 2650776 - RNA, 19 nt, Artificial Sequence
  Description of Artificial Sequence: Synthetic oligonucleotide
aaucccaagaucuugcagu

SEQ ID NO: 2650777 - RNA, 19 nt, Artificial Sequence
  Description of Artificial Sequence: Synthetic oligonucleotide
uuuuacaggcaacaaguag

SEQ ID NO: 2650778 - RNA, 19 nt, Artificial Sequence
  Description of Artificial Sequence: Synthetic oligonucleotide
ugugaaaagagcuuauuaa

SEQ ID NO: 2650779 - RNA, 19 nt, Artificial Sequence
  Description of Artificial Sequence: Synthetic oligonucleotide
uggcuaagaaaucuuuucg

SEQ ID NO: 2650780 - RNA, 19 nt, Artificial Sequence
  Description of Artificial Sequence: Synthetic oligonucleotide
cuuggucucaguuuuacag

SEQ ID NO: 2650781 - RNA, 19 nt, Artificial Sequence
  Description of Artificial Sequence: Synthetic oligonucleotide
aucuuuucggucaauaugg

SEQ ID NO: 2650782 - RNA, 19 nt, Artificial Sequence
  Description of Artificial Sequence: Synthetic oligonucleotide
aagcaaguguacucguccc

SEQ ID NO: 2650783 - RNA, 19 nt, Artificial Sequence
  Description of Artificial Sequence: Synthetic oligonucleotide
ucucaugaaagccuucugc

SEQ ID NO: 2650784 - RNA, 19 nt, Artificial Sequence
  Description of Artificial Sequence: Synthetic oligonucleotide
aguaguuguggaucaaagg

SEQ ID NO: 2650785 - RNA, 19 nt, Artificial Sequence
  Description of Artificial Sequence: Synthetic oligonucleotide
agcacaguggcccuugggc

SEQ ID NO: 2650786 - RNA, 19 nt, Artificial Sequence
  Description of Artificial Sequence: Synthetic oligonucleotide
ucuggcaggaagcacagug

SEQ ID NO: 2650787 - RNA, 19 nt, Artificial Sequence
  Description of Artificial Sequence: Synthetic oligonucleotide
auggcuaagaaaucuuuuc

SEQ ID NO: 2650788 - RNA, 19 nt, Artificial Sequence
  Description of Artificial Sequence: Synthetic oligonucleotide
uuuucggucaauauggcuu

SEQ ID NO: 2650789 - RNA, 19 nt, Artificial Sequence
  Description of Artificial Sequence: Synthetic oligonucleotide
ugcugucagaacuuuaucc

SEQ ID NO: 2650790 - RNA, 19 nt, Artificial Sequence
  Description of Artificial Sequence: Synthetic oligonucleotide
aucaaagggaacuacugug

SEQ ID NO: 2650791 - RNA, 19 nt, Artificial Sequence
  Description of Artificial Sequence: Synthetic oligonucleotide
ugacaguugugucaggcag

SEQ ID NO: 2650792 - RNA, 19 nt, Artificial Sequence
  Description of Artificial Sequence: Synthetic oligonucleotide
aaagagcuuauuaaagcag

SEQ ID NO: 2650793 - RNA, 19 nt, Artificial Sequence
  Description of Artificial Sequence: Synthetic oligonucleotide
uauuaaagcagaguugaca

SEQ ID NO: 2650794 - RNA, 19 nt, Artificial Sequence
  Description of Artificial Sequence: Synthetic oligonucleotide
aacaccucuccacagugag

SEQ ID NO: 2650795 - RNA, 19 nt, Artificial Sequence
  Description of Artificial Sequence: Synthetic oligonucleotide
aagcacacaccacuggcgg

SEQ ID NO: 2650796 - RNA, 19 nt, Artificial Sequence
  Description of Artificial Sequence: Synthetic oligonucleotide
uuaggugagaacauggcua

SEQ ID NO: 2650797 - RNA, 19 nt, Artificial Sequence
  Description of Artificial Sequence: Synthetic oligonucleotide
agcuuauuaaagcagaguu

SEQ ID NO: 2650798 - RNA, 19 nt, Artificial Sequence
  Description of Artificial Sequence: Synthetic oligonucleotide
acucuauuagcccacugag

SEQ ID NO: 2650799 - RNA, 19 nt, Artificial Sequence
  Description of Artificial Sequence: Synthetic oligonucleotide
ucaaagggaacuacuguga

SEQ ID NO: 2650800 - RNA, 19 nt, Artificial Sequence
  Description of Artificial Sequence: Synthetic oligonucleotide
aagggaacuacugugaaaa

SEQ ID NO: 2650801 - RNA, 19 nt, Artificial Sequence
  Description of Artificial Sequence: Synthetic oligonucleotide
aguuuuacaggcaacaagu

SEQ ID NO: 2650802 - RNA, 19 nt, Artificial Sequence
  Description of Artificial Sequence: Synthetic oligonucleotide
uucugcaccaaacaccucu

SEQ ID NO: 2650803 - RNA, 19 nt, Artificial Sequence
  Description of Artificial Sequence: Synthetic oligonucleotide
aaagccuucugcaccaaac

SEQ ID NO: 2650804 - RNA, 19 nt, Artificial Sequence
  Description of Artificial Sequence: Synthetic oligonucleotide
cuuauuaaagcagaguuga

SEQ ID NO: 2650805 - RNA, 19 nt, Artificial Sequence
  Description of Artificial Sequence: Synthetic oligonucleotide
uaguaguuguggaucaaag

SEQ ID NO: 2650806 - RNA, 19 nt, Artificial Sequence
  Description of Artificial Sequence: Synthetic oligonucleotide
aaguguacucgucccugcc

SEQ ID NO: 2650807 - RNA, 19 nt, Artificial Sequence
  Description of Artificial Sequence: Synthetic oligonucleotide
aaaucuuuucggucaauau

SEQ ID NO: 2650808 - RNA, 19 nt, Artificial Sequence
  Description of Artificial Sequence: Synthetic oligonucleotide
aagcagaguugacaguagg

SEQ ID NO: 2650809 - RNA, 19 nt, Artificial Sequence
  Description of Artificial Sequence: Synthetic oligonucleotide
acaggcaacaaguaguagu

SEQ ID NO: 2650810 - RNA, 19 nt, Artificial Sequence
  Description of Artificial Sequence: Synthetic oligonucleotide
aacuacugugaaaagagcu

SEQ ID NO: 2650811 - RNA, 19 nt, Artificial Sequence
  Description of Artificial Sequence: Synthetic oligonucleotide
auugacguccacugaugcc

SEQ ID NO: 2650812 - RNA, 19 nt, Artificial Sequence
  Description of Artificial Sequence: Synthetic oligonucleotide
agaugaagugcucugggug

SEQ ID NO: 2650813 - RNA, 19 nt, Artificial Sequence
  Description of Artificial Sequence: Synthetic oligonucleotide
uaguuguggaucaaaggga

SEQ ID NO: 2650814 - RNA, 19 nt, Artificial Sequence
  Description of Artificial Sequence: Synthetic oligonucleotide
cagaacuuuauccaugaug

SEQ ID NO: 2650815 - RNA, 19 nt, Artificial Sequence
  Description of Artificial Sequence: Synthetic oligonucleotide
agcaauuggcuucuggcag

SEQ ID NO: 2650816 - RNA, 19 nt, Artificial Sequence
  Description of Artificial Sequence: Synthetic oligonucleotide
caagcauugacguccacug

SEQ ID NO: 2650817 - RNA, 19 nt, Artificial Sequence
  Description of Artificial Sequence: Synthetic oligonucleotide
ucugguucauugcugucag

SEQ ID NO: 2650818 - RNA, 19 nt, Artificial Sequence
  Description of Artificial Sequence: Synthetic oligonucleotide
acuuuauccaugaugggag

SEQ ID NO: 2650819 - RNA, 19 nt, Artificial Sequence
  Description of Artificial Sequence: Synthetic oligonucleotide
aaguaguaguuguggauca

SEQ ID NO: 2650820 - RNA, 19 nt, Artificial Sequence
  Description of Artificial Sequence: Synthetic oligonucleotide
agggaaagcaaguguacuc

SEQ ID NO: 2650821 - RNA, 19 nt, Artificial Sequence
  Description of Artificial Sequence: Synthetic oligonucleotide
cuaagaaaucuuuucgguc

SEQ ID NO: 2650822 - RNA, 19 nt, Artificial Sequence
  Description of Artificial Sequence: Synthetic oligonucleotide
auuggcuucuggcaggaag

SEQ ID NO: 2650823 - RNA, 19 nt, Artificial Sequence
  Description of Artificial Sequence: Synthetic oligonucleotide
ugucagaacuuuauccaug

SEQ ID NO: 2650824 - RNA, 19 nt, Artificial Sequence
  Description of Artificial Sequence: Synthetic oligonucleotide
cacuuaggugagaacaugg

SEQ ID NO: 2650825 - RNA, 19 nt, Artificial Sequence
  Description of Artificial Sequence: Synthetic oligonucleotide
uugcagugagugcagauga

SEQ ID NO: 2650826 - RNA, 19 nt, Artificial Sequence
  Description of Artificial Sequence: Synthetic oligonucleotide
agugagugcagaugaagug

SEQ ID NO: 2650827 - RNA, 19 nt, Artificial Sequence
  Description of Artificial Sequence: Synthetic oligonucleotide
augggagccgcacaguagg

SEQ ID NO: 2650828 - RNA, 19 nt, Artificial Sequence
  Description of Artificial Sequence: Synthetic oligonucleotide
uuauccaugaugggagccg

SEQ ID NO: 2650829 - RNA, 19 nt, Artificial Sequence
  Description of Artificial Sequence: Synthetic oligonucleotide
uuggcuucuggcaggaagc

SEQ ID NO: 2650830 - RNA, 19 nt, Artificial Sequence
  Description of Artificial Sequence: Synthetic oligonucleotide
aguaggccaagccacuccg

SEQ ID NO: 2650831 - RNA, 19 nt, Artificial Sequence
  Description of Artificial Sequence: Synthetic oligonucleotide
uuugacaguugugucaggc

SEQ ID NO: 2650832 - RNA, 19 nt, Artificial Sequence
  Description of Artificial Sequence: Synthetic oligonucleotide
ggaacuacugugaaaagag

SEQ ID NO: 2650833 - RNA, 19 nt, Artificial Sequence
  Description of Artificial Sequence: Synthetic oligonucleotide
ucaauauggcuuguugucc

SEQ ID NO: 2650834 - RNA, 19 nt, Artificial Sequence
  Description of Artificial Sequence: Synthetic oligonucleotide
cuuguuguccuucucauga

SEQ ID NO: 2650835 - RNA, 19 nt, Artificial Sequence
  Description of Artificial Sequence: Synthetic oligonucleotide
uggaacaguaggccaagcc

SEQ ID NO: 2650836 - RNA, 19 nt, Artificial Sequence
  Description of Artificial Sequence: Synthetic oligonucleotide
uaaagcagaguugacagua

SEQ ID NO: 2650837 - RNA, 19 nt, Artificial Sequence
  Description of Artificial Sequence: Synthetic oligonucleotide
gagaacauggcuaagaaau

SEQ ID NO: 2650838 - RNA, 19 nt, Artificial Sequence
  Description of Artificial Sequence: Synthetic oligonucleotide
uuucggucaauauggcuug

SEQ ID NO: 2650839 - RNA, 19 nt, Artificial Sequence
  Description of Artificial Sequence: Synthetic oligonucleotide
ggcuaagaaaucuuuucgg

SEQ ID NO: 2650840 - RNA, 19 nt, Artificial Sequence
  Description of Artificial Sequence: Synthetic oligonucleotide
cuuuugacaguugugucag

SEQ ID NO: 2650841 - RNA, 19 nt, Artificial Sequence
  Description of Artificial Sequence: Synthetic oligonucleotide
agagcauggaucaccuucc

SEQ ID NO: 2650842 - RNA, 19 nt, Artificial Sequence
  Description of Artificial Sequence: Synthetic oligonucleotide
ucauuggaacaguaggcca

SEQ ID NO: 2650843 - RNA, 19 nt, Artificial Sequence
  Description of Artificial Sequence: Synthetic oligonucleotide
uggaucaaagggaacuacu

SEQ ID NO: 2650844 - RNA, 19 nt, Artificial Sequence
  Description of Artificial Sequence: Synthetic oligonucleotide
acuuaggugagaacauggc

SEQ ID NO: 2650845 - RNA, 19 nt, Artificial Sequence
  Description of Artificial Sequence: Synthetic oligonucleotide
ugccaugucugguucauug

SEQ ID NO: 2650846 - RNA, 19 nt, Artificial Sequence
  Description of Artificial Sequence: Synthetic oligonucleotide
uuguggaucaaagggaacu

SEQ ID NO: 2650847 - RNA, 19 nt, Artificial Sequence
  Description of Artificial Sequence: Synthetic oligonucleotide
aggcagaaagcacacacca

SEQ ID NO: 2650848 - RNA, 19 nt, Artificial Sequence
  Description of Artificial Sequence: Synthetic oligonucleotide
agccuucugcaccaaacac

SEQ ID NO: 2650849 - RNA, 19 nt, Artificial Sequence
  Description of Artificial Sequence: Synthetic oligonucleotide
gaacuuuauccaugauggg

SEQ ID NO: 2650850 - RNA, 19 nt, Artificial Sequence
  Description of Artificial Sequence: Synthetic oligonucleotide
ugagugcagaugaagugcu

SEQ ID NO: 2650851 - RNA, 19 nt, Artificial Sequence
  Description of Artificial Sequence: Synthetic oligonucleotide
gugaaaagagcuuauuaaa

SEQ ID NO: 2650852 - RNA, 19 nt, Artificial Sequence
  Description of Artificial Sequence: Synthetic oligonucleotide
caguuuuacaggcaacaag

SEQ ID NO: 2650853 - RNA, 19 nt, Artificial Sequence
  Description of Artificial Sequence: Synthetic oligonucleotide
uugacguccacugaugccu

SEQ ID NO: 2650854 - RNA, 19 nt, Artificial Sequence
  Description of Artificial Sequence: Synthetic oligonucleotide
gucaauauggcuuguuguc

SEQ ID NO: 2650855 - RNA, 19 nt, Artificial Sequence
  Description of Artificial Sequence: Synthetic oligonucleotide
agggacuggagccaaucuc

SEQ ID NO: 2650856 - RNA, 19 nt, Artificial Sequence
  Description of Artificial Sequence: Synthetic oligonucleotide
ugagugaaggucagggaaa

SEQ ID NO: 2650857 - RNA, 19 nt, Artificial Sequence
  Description of Artificial Sequence: Synthetic oligonucleotide
gacucuauuagcccacuga

SEQ ID NO: 2650858 - RNA, 19 nt, Artificial Sequence
  Description of Artificial Sequence: Synthetic oligonucleotide
cugaagaugccuuuugaca

SEQ ID NO: 2650859 - RNA, 19 nt, Artificial Sequence
  Description of Artificial Sequence: Synthetic oligonucleotide
ugcaguuccuguuccaaac

SEQ ID NO: 2650860 - RNA, 19 nt, Artificial Sequence
  Description of Artificial Sequence: Synthetic oligonucleotide
uuauuaaagcagaguugac

SEQ ID NO: 2650861 - RNA, 19 nt, Artificial Sequence
  Description of Artificial Sequence: Synthetic oligonucleotide
ucuuuucggucaauauggc

SEQ ID NO: 2650862 - RNA, 19 nt, Artificial Sequence
  Description of Artificial Sequence: Synthetic oligonucleotide
aaagggaacuacugugaaa

SEQ ID NO: 2650863 - RNA, 19 nt, Artificial Sequence
  Description of Artificial Sequence: Synthetic oligonucleotide
uuuauccaugaugggagcc

SEQ ID NO: 2650864 - RNA, 19 nt, Artificial Sequence
  Description of Artificial Sequence: Synthetic oligonucleotide
uuacaggcaacaaguagua

SEQ ID NO: 2650865 - RNA, 19 nt, Artificial Sequence
  Description of Artificial Sequence: Synthetic oligonucleotide
cacugagugaaggucaggg

SEQ ID NO: 2650866 - RNA, 19 nt, Artificial Sequence
  Description of Artificial Sequence: Synthetic oligonucleotide
acaaguaguaguuguggau

SEQ ID NO: 2650867 - RNA, 19 nt, Artificial Sequence
  Description of Artificial Sequence: Synthetic oligonucleotide
uguucucugaagaugccuu

SEQ ID NO: 2650868 - RNA, 19 nt, Artificial Sequence
  Description of Artificial Sequence: Synthetic oligonucleotide
ugccuuuugacaguugugu

SEQ ID NO: 2650869 - RNA, 19 nt, Artificial Sequence
  Description of Artificial Sequence: Synthetic oligonucleotide
gaacaguaggccaagccac

SEQ ID NO: 2650870 - RNA, 19 nt, Artificial Sequence
  Description of Artificial Sequence: Synthetic oligonucleotide
agccaccacacuuagguga

SEQ ID NO: 2650871 - RNA, 19 nt, Artificial Sequence
  Description of Artificial Sequence: Synthetic oligonucleotide
uauuagcccacugagugaa

SEQ ID NO: 2650872 - RNA, 19 nt, Artificial Sequence
  Description of Artificial Sequence: Synthetic oligonucleotide
aagaaaucuuuucggucaa

SEQ ID NO: 2650873 - RNA, 19 nt, Artificial Sequence
  Description of Artificial Sequence: Synthetic oligonucleotide
cagagcauggaucaccuuc

SEQ ID NO: 2650874 - RNA, 19 nt, Artificial Sequence
  Description of Artificial Sequence: Synthetic oligonucleotide
aguuccuguuccaaacccc

SEQ ID NO: 2650875 - RNA, 19 nt, Artificial Sequence
  Description of Artificial Sequence: Synthetic oligonucleotide
ugcagaugaagugcucugg

SEQ ID NO: 2650876 - RNA, 19 nt, Artificial Sequence
  Description of Artificial Sequence: Synthetic oligonucleotide
caaguaguaguuguggauc

SEQ ID NO: 2650877 - RNA, 19 nt, Artificial Sequence
  Description of Artificial Sequence: Synthetic oligonucleotide
cauugacguccacugaugc

SEQ ID NO: 2650878 - RNA, 19 nt, Artificial Sequence
  Description of Artificial Sequence: Synthetic oligonucleotide
cucaugaaagccuucugca

SEQ ID NO: 2650879 - RNA, 19 nt, Artificial Sequence
  Description of Artificial Sequence: Synthetic oligonucleotide
augaaagccuucugcacca

SEQ ID NO: 2650880 - RNA, 19 nt, Artificial Sequence
  Description of Artificial Sequence: Synthetic oligonucleotide
uaggugagaacauggcuaa

SEQ ID NO: 2650881 - RNA, 19 nt, Artificial Sequence
  Description of Artificial Sequence: Synthetic oligonucleotide
uuaaagcagaguugacagu

SEQ ID NO: 2650882 - RNA, 19 nt, Artificial Sequence
  Description of Artificial Sequence: Synthetic oligonucleotide
ugagaacauggcuaagaaa

SEQ ID NO: 2650883 - RNA, 19 nt, Artificial Sequence
  Description of Artificial Sequence: Synthetic oligonucleotide
cuuuauccaugaugggagc

SEQ ID NO: 2650884 - RNA, 19 nt, Artificial Sequence
  Description of Artificial Sequence: Synthetic oligonucleotide
uucucaugaaagccuucug

SEQ ID NO: 2650885 - RNA, 19 nt, Artificial Sequence
  Description of Artificial Sequence: Synthetic oligonucleotide
guagucauuggaacaguag

SEQ ID NO: 2650886 - RNA, 19 nt, Artificial Sequence
  Description of Artificial Sequence: Synthetic oligonucleotide
gugagugcagaugaagugc

SEQ ID NO: 2650887 - RNA, 19 nt, Artificial Sequence
  Description of Artificial Sequence: Synthetic oligonucleotide
cacaguaggcacagcgugg

SEQ ID NO: 2650888 - RNA, 19 nt, Artificial Sequence
  Description of Artificial Sequence: Synthetic oligonucleotide
caccucuccacagugagag

SEQ ID NO: 2650889 - RNA, 19 nt, Artificial Sequence
  Description of Artificial Sequence: Synthetic oligonucleotide
caaacaccucuccacagug

SEQ ID NO: 2650890 - RNA, 19 nt, Artificial Sequence
  Description of Artificial Sequence: Synthetic oligonucleotide
aagcacaguggcccuuggg

SEQ ID NO: 2650891 - RNA, 19 nt, Artificial Sequence
  Description of Artificial Sequence: Synthetic oligonucleotide
uggugguagucauuggaac

SEQ ID NO: 2650892 - RNA, 19 nt, Artificial Sequence
  Description of Artificial Sequence: Synthetic oligonucleotide
aacagguggugguagucau

SEQ ID NO: 2650893 - RNA, 19 nt, Artificial Sequence
  Description of Artificial Sequence: Synthetic oligonucleotide
cuccgcucaaagaagggac

SEQ ID NO: 2650894 - RNA, 19 nt, Artificial Sequence
  Description of Artificial Sequence: Synthetic oligonucleotide
uuguuguucuguucucuga

SEQ ID NO: 2650895 - RNA, 19 nt, Artificial Sequence
  Description of Artificial Sequence: Synthetic oligonucleotide
agaacauggcuaagaaauc

SEQ ID NO: 2650896 - RNA, 19 nt, Artificial Sequence
  Description of Artificial Sequence: Synthetic oligonucleotide
gaucuugcaguuccuguuc

SEQ ID NO: 2650897 - RNA, 19 nt, Artificial Sequence
  Description of Artificial Sequence: Synthetic oligonucleotide
acagcguggagagaacagg

SEQ ID NO: 2650898 - RNA, 19 nt, Artificial Sequence
  Description of Artificial Sequence: Synthetic oligonucleotide
gucagaacuuuauccauga

SEQ ID NO: 2650899 - RNA, 19 nt, Artificial Sequence
  Description of Artificial Sequence: Synthetic oligonucleotide
ugcucugggugccaugucu

SEQ ID NO: 2650900 - RNA, 19 nt, Artificial Sequence
  Description of Artificial Sequence: Synthetic oligonucleotide
uguuguccuucucaugaaa

SEQ ID NO: 2650901 - RNA, 19 nt, Artificial Sequence
  Description of Artificial Sequence: Synthetic oligonucleotide
ugucaggcagaaagcacac

SEQ ID NO: 2650902 - RNA, 19 nt, Artificial Sequence
  Description of Artificial Sequence: Synthetic oligonucleotide
accaaacaccucuccacag

SEQ ID NO: 2650903 - RNA, 19 nt, Artificial Sequence
  Description of Artificial Sequence: Synthetic oligonucleotide
gggaaagcaaguguacucg

SEQ ID NO: 2650904 - RNA, 19 nt, Artificial Sequence
  Description of Artificial Sequence: Synthetic oligonucleotide
agccacuccgcucaaagaa

SEQ ID NO: 2650905 - RNA, 19 nt, Artificial Sequence
  Description of Artificial Sequence: Synthetic oligonucleotide
cauggaucaccuucccagc

SEQ ID NO: 2650906 - RNA, 19 nt, Artificial Sequence
  Description of Artificial Sequence: Synthetic oligonucleotide
accacacuuaggugagaac

SEQ ID NO: 2650907 - RNA, 19 nt, Artificial Sequence
  Description of Artificial Sequence: Synthetic oligonucleotide
gaugccuuuugacaguugu

SEQ ID NO: 2650908 - RNA, 19 nt, Artificial Sequence
  Description of Artificial Sequence: Synthetic oligonucleotide
gaacuacugugaaaagagc

SEQ ID NO: 2650909 - RNA, 19 nt, Artificial Sequence
  Description of Artificial Sequence: Synthetic oligonucleotide
ucucaguuuuacaggcaac

SEQ ID NO: 2650910 - RNA, 19 nt, Artificial Sequence
  Description of Artificial Sequence: Synthetic oligonucleotide
ggaacaguaggccaagcca

SEQ ID NO: 2650911 - RNA, 19 nt, Artificial Sequence
  Description of Artificial Sequence: Synthetic oligonucleotide
gaucaaagggaacuacugu

SEQ ID NO: 2650912 - RNA, 19 nt, Artificial Sequence
  Description of Artificial Sequence: Synthetic oligonucleotide
agaucuugcaguuccuguu

SEQ ID NO: 2650913 - RNA, 19 nt, Artificial Sequence
  Description of Artificial Sequence: Synthetic oligonucleotide
caaucccaagaucuugcag

SEQ ID NO: 2650914 - RNA, 19 nt, Artificial Sequence
  Description of Artificial Sequence: Synthetic oligonucleotide
uuuugacaguugugucagg

SEQ ID NO: 2650915 - RNA, 19 nt, Artificial Sequence
  Description of Artificial Sequence: Synthetic oligonucleotide
aucaccuucccagcaauug

SEQ ID NO: 2650916 - RNA, 19 nt, Artificial Sequence
  Description of Artificial Sequence: Synthetic oligonucleotide
gcguggagagaacaggugg

SEQ ID NO: 2650917 - RNA, 19 nt, Artificial Sequence
  Description of Artificial Sequence: Synthetic oligonucleotide
acugagugaaggucaggga

SEQ ID NO: 2650918 - RNA, 19 nt, Artificial Sequence
  Description of Artificial Sequence: Synthetic oligonucleotide
uccgcucaaagaagggacu

SEQ ID NO: 2650919 - RNA, 19 nt, Artificial Sequence
  Description of Artificial Sequence: Synthetic oligonucleotide
ccagcaauuggcuucuggc

SEQ ID NO: 2650920 - RNA, 19 nt, Artificial Sequence
  Description of Artificial Sequence: Synthetic oligonucleotide
aagcauugacguccacuga

SEQ ID NO: 2650921 - RNA, 19 nt, Artificial Sequence
  Description of Artificial Sequence: Synthetic oligonucleotide
cccaagaucuugcaguucc

SEQ ID NO: 2650922 - RNA, 19 nt, Artificial Sequence
  Description of Artificial Sequence: Synthetic oligonucleotide
gcugucagaacuuuaucca

SEQ ID NO: 2650923 - RNA, 19 nt, Artificial Sequence
  Description of Artificial Sequence: Synthetic oligonucleotide
cugagugaaggucagggaa

SEQ ID NO: 2650924 - RNA, 19 nt, Artificial Sequence
  Description of Artificial Sequence: Synthetic oligonucleotide
ucaguuuuacaggcaacaa

SEQ ID NO: 2650925 - RNA, 19 nt, Artificial Sequence
  Description of Artificial Sequence: Synthetic oligonucleotide
gcagaugaagugcucuggg

SEQ ID NO: 2650926 - RNA, 19 nt, Artificial Sequence
  Description of Artificial Sequence: Synthetic oligonucleotide
ugacucuauuagcccacug

SEQ ID NO: 2650927 - RNA, 19 nt, Artificial Sequence
  Description of Artificial Sequence: Synthetic oligonucleotide
aauauggcuuguuguccuu

SEQ ID NO: 2650928 - RNA, 19 nt, Artificial Sequence
  Description of Artificial Sequence: Synthetic oligonucleotide
caaguguacucgucccugc

SEQ ID NO: 2650929 - RNA, 19 nt, Artificial Sequence
  Description of Artificial Sequence: Synthetic oligonucleotide
aagccacuccgcucaaaga

SEQ ID NO: 2650930 - RNA, 19 nt, Artificial Sequence
  Description of Artificial Sequence: Synthetic oligonucleotide
gcuuauuaaagcagaguug

SEQ ID NO: 2650931 - RNA, 19 nt, Artificial Sequence
  Description of Artificial Sequence: Synthetic oligonucleotide
cacagcguggagagaacag

SEQ ID NO: 2650932 - RNA, 19 nt, Artificial Sequence
  Description of Artificial Sequence: Synthetic oligonucleotide
uauccaugaugggagccgc

SEQ ID NO: 2650933 - RNA, 19 nt, Artificial Sequence
  Description of Artificial Sequence: Synthetic oligonucleotide
aguuguggaucaaagggaa

SEQ ID NO: 2650934 - RNA, 19 nt, Artificial Sequence
  Description of Artificial Sequence: Synthetic oligonucleotide
cucaguuuuacaggcaaca

SEQ ID NO: 2650935 - RNA, 19 nt, Artificial Sequence
  Description of Artificial Sequence: Synthetic oligonucleotide
aguguacucgucccugccu

SEQ ID NO: 2650936 - RNA, 19 nt, Artificial Sequence
  Description of Artificial Sequence: Synthetic oligonucleotide
gaaaucuuuucggucaaua

SEQ ID NO: 2650937 - RNA, 19 nt, Artificial Sequence
  Description of Artificial Sequence: Synthetic oligonucleotide
gaugggagccgcacaguag

SEQ ID NO: 2650938 - RNA, 19 nt, Artificial Sequence
  Description of Artificial Sequence: Synthetic oligonucleotide
agggaacuacugugaaaag

SEQ ID NO: 2650939 - RNA, 19 nt, Artificial Sequence
  Description of Artificial Sequence: Synthetic oligonucleotide
gugagaacauggcuaagaa

SEQ ID NO: 2650940 - RNA, 19 nt, Artificial Sequence
  Description of Artificial Sequence: Synthetic oligonucleotide
gcaauuggcuucuggcagg

SEQ ID NO: 2650941 - RNA, 19 nt, Artificial Sequence
  Description of Artificial Sequence: Synthetic oligonucleotide
gaacauggcuaagaaaucu

SEQ ID NO: 2650942 - RNA, 19 nt, Artificial Sequence
  Description of Artificial Sequence: Synthetic oligonucleotide
uugggcaccguggcaaucc

SEQ ID NO: 2650943 - RNA, 19 nt, Artificial Sequence
  Description of Artificial Sequence: Synthetic oligonucleotide
cauuggaacaguaggccaa

SEQ ID NO: 2650944 - RNA, 19 nt, Artificial Sequence
  Description of Artificial Sequence: Synthetic oligonucleotide
cugugaaaagagcuuauua

SEQ ID NO: 2650945 - RNA, 19 nt, Artificial Sequence
  Description of Artificial Sequence: Synthetic oligonucleotide
aguaggcacagcguggaga

SEQ ID NO: 2650946 - RNA, 19 nt, Artificial Sequence
  Description of Artificial Sequence: Synthetic oligonucleotide
agcaaguguacucgucccu

SEQ ID NO: 2650947 - RNA, 19 nt, Artificial Sequence
  Description of Artificial Sequence: Synthetic oligonucleotide
agcccacugagugaagguc

SEQ ID NO: 2650948 - RNA, 19 nt, Artificial Sequence
  Description of Artificial Sequence: Synthetic oligonucleotide
aggauuggcccagagcaug

SEQ ID NO: 2650949 - RNA, 19 nt, Artificial Sequence
  Description of Artificial Sequence: Synthetic oligonucleotide
acuacugugaaaagagcuu

SEQ ID NO: 2650950 - RNA, 19 nt, Artificial Sequence
  Description of Artificial Sequence: Synthetic oligonucleotide
gaaagcaaguguacucguc

SEQ ID NO: 2650951 - RNA, 19 nt, Artificial Sequence
  Description of Artificial Sequence: Synthetic oligonucleotide
uggcaaucccaagaucuug

SEQ ID NO: 2650952 - RNA, 19 nt, Artificial Sequence
  Description of Artificial Sequence: Synthetic oligonucleotide
uguggaucaaagggaacua

SEQ ID NO: 2650953 - RNA, 19 nt, Artificial Sequence
  Description of Artificial Sequence: Synthetic oligonucleotide
acacuuaggugagaacaug

SEQ ID NO: 2650954 - RNA, 19 nt, Artificial Sequence
  Description of Artificial Sequence: Synthetic oligonucleotide
accguggcaaucccaagau

SEQ ID NO: 2650955 - RNA, 19 nt, Artificial Sequence
  Description of Artificial Sequence: Synthetic oligonucleotide
uccuccuugcagugagugc

SEQ ID NO: 2650956 - RNA, 19 nt, Artificial Sequence
  Description of Artificial Sequence: Synthetic oligonucleotide
gaagcacaguggcccuugg

SEQ ID NO: 2650957 - RNA, 19 nt, Artificial Sequence
  Description of Artificial Sequence: Synthetic oligonucleotide
aacaguaggccaagccacu

SEQ ID NO: 2650958 - RNA, 19 nt, Artificial Sequence
  Description of Artificial Sequence: Synthetic oligonucleotide
gugcagaugaagugcucug

SEQ ID NO: 2650959 - RNA, 19 nt, Artificial Sequence
  Description of Artificial Sequence: Synthetic oligonucleotide
cacuccgcucaaagaaggg

SEQ ID NO: 2650960 - RNA, 19 nt, Artificial Sequence
  Description of Artificial Sequence: Synthetic oligonucleotide
acucgucccugccuugguc

SEQ ID NO: 2650961 - RNA, 19 nt, Artificial Sequence
  Description of Artificial Sequence: Synthetic oligonucleotide
uacaggcaacaaguaguag

SEQ ID NO: 2650962 - RNA, 19 nt, Artificial Sequence
  Description of Artificial Sequence: Synthetic oligonucleotide
uguacucgucccugccuug

SEQ ID NO: 2650963 - RNA, 19 nt, Artificial Sequence
  Description of Artificial Sequence: Synthetic oligonucleotide
ucagaacuuuauccaugau

SEQ ID NO: 2650964 - RNA, 19 nt, Artificial Sequence
  Description of Artificial Sequence: Synthetic oligonucleotide
cuauuagcccacugaguga

SEQ ID NO: 2650965 - RNA, 19 nt, Artificial Sequence
  Description of Artificial Sequence: Synthetic oligonucleotide
gggacuggagccaaucucc

SEQ ID NO: 2650966 - RNA, 19 nt, Artificial Sequence
  Description of Artificial Sequence: Synthetic oligonucleotide
cagcaauuggcuucuggca

SEQ ID NO: 2650967 - RNA, 19 nt, Artificial Sequence
  Description of Artificial Sequence: Synthetic oligonucleotide
cacaguggcccuugggcac

SEQ ID NO: 2650968 - RNA, 19 nt, Artificial Sequence
  Description of Artificial Sequence: Synthetic oligonucleotide
gcacaguaggcacagcgug

SEQ ID NO: 2650969 - RNA, 19 nt, Artificial Sequence
  Description of Artificial Sequence: Synthetic oligonucleotide
caguaggccaagccacucc

SEQ ID NO: 2650970 - RNA, 19 nt, Artificial Sequence
  Description of Artificial Sequence: Synthetic oligonucleotide
caagaucuugcaguuccug

SEQ ID NO: 2650971 - RNA, 19 nt, Artificial Sequence
  Description of Artificial Sequence: Synthetic oligonucleotide
cuuaggugagaacauggcu

SEQ ID NO: 2650972 - RNA, 19 nt, Artificial Sequence
  Description of Artificial Sequence: Synthetic oligonucleotide
uccaugaugggagccgcac

SEQ ID NO: 2650973 - RNA, 19 nt, Artificial Sequence
  Description of Artificial Sequence: Synthetic oligonucleotide
gaacagguggugguaguca

SEQ ID NO: 2650974 - RNA, 19 nt, Artificial Sequence
  Description of Artificial Sequence: Synthetic oligonucleotide
agcagaguugacaguaggu

SEQ ID NO: 2650975 - RNA, 19 nt, Artificial Sequence
  Description of Artificial Sequence: Synthetic oligonucleotide
aucccaagaucuugcaguu

SEQ ID NO: 2650976 - RNA, 19 nt, Artificial Sequence
  Description of Artificial Sequence: Synthetic oligonucleotide
acaguaggcacagcgugga

SEQ ID NO: 2650977 - RNA, 19 nt, Artificial Sequence
  Description of Artificial Sequence: Synthetic oligonucleotide
aaacaccucuccacaguga

SEQ ID NO: 2650978 - RNA, 19 nt, Artificial Sequence
  Description of Artificial Sequence: Synthetic oligonucleotide
uagcccacugagugaaggu

SEQ ID NO: 2650979 - RNA, 19 nt, Artificial Sequence
  Description of Artificial Sequence: Synthetic oligonucleotide
gagcauggaucaccuuccc

SEQ ID NO: 2650980 - RNA, 19 nt, Artificial Sequence
  Description of Artificial Sequence: Synthetic oligonucleotide
gaagaugccuuuugacagu

SEQ ID NO: 2650981 - RNA, 19 nt, Artificial Sequence
  Description of Artificial Sequence: Synthetic oligonucleotide
aaaagugcucugggugcca

SEQ ID NO: 2650982 - RNA, 19 nt, Artificial Sequence
  Description of Artificial Sequence: Synthetic oligonucleotide
gcuaagaaaucuuuucggu

SEQ ID NO: 2650983 - RNA, 19 nt, Artificial Sequence
  Description of Artificial Sequence: Synthetic oligonucleotide
acuccgcucaaagaaggga

SEQ ID NO: 2650984 - RNA, 19 nt, Artificial Sequence
  Description of Artificial Sequence: Synthetic oligonucleotide
acacaccacuggcgguugc

SEQ ID NO: 2650985 - RNA, 19 nt, Artificial Sequence
  Description of Artificial Sequence: Synthetic oligonucleotide
gucagggaaagcaagugua

SEQ ID NO: 2650986 - RNA, 19 nt, Artificial Sequence
  Description of Artificial Sequence: Synthetic oligonucleotide
cagaguugacaguaggucu

SEQ ID NO: 2650987 - RNA, 19 nt, Artificial Sequence
  Description of Artificial Sequence: Synthetic oligonucleotide
gucugguucauugcuguca

SEQ ID NO: 2650988 - RNA, 19 nt, Artificial Sequence
  Description of Artificial Sequence: Synthetic oligonucleotide
ggcaaucccaagaucuugc

SEQ ID NO: 2650989 - RNA, 19 nt, Artificial Sequence
  Description of Artificial Sequence: Synthetic oligonucleotide
caaagggaacuacugugaa

SEQ ID NO: 2650990 - RNA, 19 nt, Artificial Sequence
  Description of Artificial Sequence: Synthetic oligonucleotide
aaucuccuccuugcaguga

SEQ ID NO: 2650991 - RNA, 19 nt, Artificial Sequence
  Description of Artificial Sequence: Synthetic oligonucleotide
ggugagaacauggcuaaga

SEQ ID NO: 2650992 - RNA, 19 nt, Artificial Sequence
  Description of Artificial Sequence: Synthetic oligonucleotide
ggucuuguuguucuguucu

SEQ ID NO: 2650993 - RNA, 19 nt, Artificial Sequence
  Description of Artificial Sequence: Synthetic oligonucleotide
guacucgucccugccuugg

SEQ ID NO: 2650994 - RNA, 19 nt, Artificial Sequence
  Description of Artificial Sequence: Synthetic oligonucleotide
guggaucaaagggaacuac

SEQ ID NO: 2650995 - RNA, 19 nt, Artificial Sequence
  Description of Artificial Sequence: Synthetic oligonucleotide
ugccaggauuggcccagag

SEQ ID NO: 2650996 - RNA, 19 nt, Artificial Sequence
  Description of Artificial Sequence: Synthetic oligonucleotide
ugggagccgcacaguaggc

SEQ ID NO: 2650997 - RNA, 19 nt, Artificial Sequence
  Description of Artificial Sequence: Synthetic oligonucleotide
ggcaacaaguaguaguugu

SEQ ID NO: 2650998 - RNA, 19 nt, Artificial Sequence
  Description of Artificial Sequence: Synthetic oligonucleotide
ccuuuugacaguuguguca

SEQ ID NO: 2650999 - RNA, 19 nt, Artificial Sequence
  Description of Artificial Sequence: Synthetic oligonucleotide
ggucaauauggcuuguugu

SEQ ID NO: 2651000 - RNA, 19 nt, Artificial Sequence
  Description of Artificial Sequence: Synthetic oligonucleotide
gcaacaaguaguaguugug

SEQ ID NO: 2651001 - RNA, 19 nt, Artificial Sequence
  Description of Artificial Sequence: Synthetic oligonucleotide
guggagagaacagguggug

SEQ ID NO: 2651002 - RNA, 19 nt, Artificial Sequence
  Description of Artificial Sequence: Synthetic oligonucleotide
aggcacagcguggagagaa

SEQ ID NO: 2651003 - RNA, 19 nt, Artificial Sequence
  Description of Artificial Sequence: Synthetic oligonucleotide
gggaacuacugugaaaaga

SEQ ID NO: 2651004 - RNA, 19 nt, Artificial Sequence
  Description of Artificial Sequence: Synthetic oligonucleotide
caauauggcuuguuguccu

SEQ ID NO: 2651005 - RNA, 19 nt, Artificial Sequence
  Description of Artificial Sequence: Synthetic oligonucleotide
gcaguuccuguuccaaacc

SEQ ID NO: 2651006 - RNA, 19 nt, Artificial Sequence
  Description of Artificial Sequence: Synthetic oligonucleotide
acugugaaaagagcuuauu

SEQ ID NO: 2651007 - RNA, 19 nt, Artificial Sequence
  Description of Artificial Sequence: Synthetic oligonucleotide
gccuucugcaccaaacacc

SEQ ID NO: 2651008 - RNA, 19 nt, Artificial Sequence
  Description of Artificial Sequence: Synthetic oligonucleotide
ugggcaccguggcaauccc

SEQ ID NO: 2651009 - RNA, 19 nt, Artificial Sequence
  Description of Artificial Sequence: Synthetic oligonucleotide
ggagccgcacaguaggcac

SEQ ID NO: 2651010 - RNA, 19 nt, Artificial Sequence
  Description of Artificial Sequence: Synthetic oligonucleotide
caccacuggcgguugcagc

SEQ ID NO: 2651011 - RNA, 19 nt, Artificial Sequence
  Description of Artificial Sequence: Synthetic oligonucleotide
uucucugaagaugccuuuu

SEQ ID NO: 2651012 - RNA, 19 nt, Artificial Sequence
  Description of Artificial Sequence: Synthetic oligonucleotide
gucuuguuguucuguucuc

SEQ ID NO: 2651013 - RNA, 19 nt, Artificial Sequence
  Description of Artificial Sequence: Synthetic oligonucleotide
uuggaacaguaggccaagc

SEQ ID NO: 2651014 - RNA, 19 nt, Artificial Sequence
  Description of Artificial Sequence: Synthetic oligonucleotide
guaguaguuguggaucaaa

SEQ ID NO: 2651015 - RNA, 19 nt, Artificial Sequence
  Description of Artificial Sequence: Synthetic oligonucleotide
agcacacaccacuggcggu

SEQ ID NO: 2651016 - RNA, 19 nt, Artificial Sequence
  Description of Artificial Sequence: Synthetic oligonucleotide
cagugagugcagaugaagu

SEQ ID NO: 2651017 - RNA, 19 nt, Artificial Sequence
  Description of Artificial Sequence: Synthetic oligonucleotide
uugacucuauuagcccacu

SEQ ID NO: 2651018 - RNA, 19 nt, Artificial Sequence
  Description of Artificial Sequence: Synthetic oligonucleotide
ucauugcugucagaacuuu

SEQ ID NO: 2651019 - RNA, 19 nt, Artificial Sequence
  Description of Artificial Sequence: Synthetic oligonucleotide
cuuuucggucaauauggcu

SEQ ID NO: 2651020 - RNA, 19 nt, Artificial Sequence
  Description of Artificial Sequence: Synthetic oligonucleotide
ccacacuuaggugagaaca

SEQ ID NO: 2651021 - RNA, 19 nt, Artificial Sequence
  Description of Artificial Sequence: Synthetic oligonucleotide
caccguggcaaucccaaga

SEQ ID NO: 2651022 - RNA, 19 nt, Artificial Sequence
  Description of Artificial Sequence: Synthetic oligonucleotide
guuuuacaggcaacaagua

SEQ ID NO: 2651023 - RNA, 19 nt, Artificial Sequence
  Description of Artificial Sequence: Synthetic oligonucleotide
agcguggagagaacaggug

SEQ ID NO: 2651024 - RNA, 19 nt, Artificial Sequence
  Description of Artificial Sequence: Synthetic oligonucleotide
gccaugucugguucauugc

SEQ ID NO: 2651025 - RNA, 19 nt, Artificial Sequence
  Description of Artificial Sequence: Synthetic oligonucleotide
ggauuggcccagagcaugg

SEQ ID NO: 2651026 - RNA, 19 nt, Artificial Sequence
  Description of Artificial Sequence: Synthetic oligonucleotide
uacucgucccugccuuggu

SEQ ID NO: 2651027 - RNA, 19 nt, Artificial Sequence
  Description of Artificial Sequence: Synthetic oligonucleotide
guggugguagucauuggaa

SEQ ID NO: 2651028 - RNA, 19 nt, Artificial Sequence
  Description of Artificial Sequence: Synthetic oligonucleotide
caggcaacaaguaguaguu

SEQ ID NO: 2651029 - RNA, 19 nt, Artificial Sequence
  Description of Artificial Sequence: Synthetic oligonucleotide
caguaggucuuguuguucu

SEQ ID NO: 2651030 - RNA, 19 nt, Artificial Sequence
  Description of Artificial Sequence: Synthetic oligonucleotide
gcaaguguacucgucccug

SEQ ID NO: 2651031 - RNA, 19 nt, Artificial Sequence
  Description of Artificial Sequence: Synthetic oligonucleotide
aguaguaguuguggaucaa

SEQ ID NO: 2651032 - RNA, 19 nt, Artificial Sequence
  Description of Artificial Sequence: Synthetic oligonucleotide
gcuuguuguccuucucaug

SEQ ID NO: 2651033 - RNA, 19 nt, Artificial Sequence
  Description of Artificial Sequence: Synthetic oligonucleotide
ucuccuccuugcagugagu

SEQ ID NO: 2651034 - RNA, 19 nt, Artificial Sequence
  Description of Artificial Sequence: Synthetic oligonucleotide
gacguccacugaugccuug

SEQ ID NO: 2651035 - RNA, 19 nt, Artificial Sequence
  Description of Artificial Sequence: Synthetic oligonucleotide
cucuauuagcccacugagu

SEQ ID NO: 2651036 - RNA, 19 nt, Artificial Sequence
  Description of Artificial Sequence: Synthetic oligonucleotide
ugacguccacugaugccuu

SEQ ID NO: 2651037 - RNA, 19 nt, Artificial Sequence
  Description of Artificial Sequence: Synthetic oligonucleotide
cauggcuaagaaaucuuuu

SEQ ID NO: 2651038 - RNA, 19 nt, Artificial Sequence
  Description of Artificial Sequence: Synthetic oligonucleotide
gagagaacaggugguggua

SEQ ID NO: 2651039 - RNA, 19 nt, Artificial Sequence
  Description of Artificial Sequence: Synthetic oligonucleotide
gccuuuugacaguuguguc

SEQ ID NO: 2651040 - RNA, 19 nt, Artificial Sequence
  Description of Artificial Sequence: Synthetic oligonucleotide
ggagagaacaggugguggu

SEQ ID NO: 2651041 - RNA, 19 nt, Artificial Sequence
  Description of Artificial Sequence: Synthetic oligonucleotide
cucugggugccaggauugg

SEQ ID NO: 2651042 - RNA, 19 nt, Artificial Sequence
  Description of Artificial Sequence: Synthetic oligonucleotide
aguugacaguaggucuugu

SEQ ID NO: 2651043 - RNA, 19 nt, Artificial Sequence
  Description of Artificial Sequence: Synthetic oligonucleotide
gcacaguggcccuugggca

SEQ ID NO: 2651044 - RNA, 19 nt, Artificial Sequence
  Description of Artificial Sequence: Synthetic oligonucleotide
cacacuuaggugagaacau

SEQ ID NO: 2651045 - RNA, 19 nt, Artificial Sequence
  Description of Artificial Sequence: Synthetic oligonucleotide
gcucaaagaagggacugga

SEQ ID NO: 2651046 - RNA, 19 nt, Artificial Sequence
  Description of Artificial Sequence: Synthetic oligonucleotide
cauugcugucagaacuuua

SEQ ID NO: 2651047 - RNA, 19 nt, Artificial Sequence
  Description of Artificial Sequence: Synthetic oligonucleotide
gcauugacguccacugaug

SEQ ID NO: 2651048 - RNA, 19 nt, Artificial Sequence
  Description of Artificial Sequence: Synthetic oligonucleotide
acuggcgguugcagccacc

SEQ ID NO: 2651049 - RNA, 19 nt, Artificial Sequence
  Description of Artificial Sequence: Synthetic oligonucleotide
cccagcaauuggcuucugg

SEQ ID NO: 2651050 - RNA, 19 nt, Artificial Sequence
  Description of Artificial Sequence: Synthetic oligonucleotide
aggugagaacauggcuaag

SEQ ID NO: 2651051 - RNA, 19 nt, Artificial Sequence
  Description of Artificial Sequence: Synthetic oligonucleotide
gcaaucccaagaucuugca

SEQ ID NO: 2651052 - RNA, 19 nt, Artificial Sequence
  Description of Artificial Sequence: Synthetic oligonucleotide
gccaccacacuuaggugag

SEQ ID NO: 2651053 - RNA, 19 nt, Artificial Sequence
  Description of Artificial Sequence: Synthetic oligonucleotide
ggucagggaaagcaagugu

SEQ ID NO: 2651054 - RNA, 19 nt, Artificial Sequence
  Description of Artificial Sequence: Synthetic oligonucleotide
auuagcccacugagugaag

SEQ ID NO: 2651055 - RNA, 19 nt, Artificial Sequence
  Description of Artificial Sequence: Synthetic oligonucleotide
gccacuccgcucaaagaag

SEQ ID NO: 2651056 - RNA, 19 nt, Artificial Sequence
  Description of Artificial Sequence: Synthetic oligonucleotide
ucgucccugccuuggucuc

SEQ ID NO: 2651057 - RNA, 19 nt, Artificial Sequence
  Description of Artificial Sequence: Synthetic oligonucleotide
acguccacugaugccuugu

SEQ ID NO: 2651058 - RNA, 19 nt, Artificial Sequence
  Description of Artificial Sequence: Synthetic oligonucleotide
uucggucaauauggcuugu

SEQ ID NO: 2651059 - RNA, 19 nt, Artificial Sequence
  Description of Artificial Sequence: Synthetic oligonucleotide
cagaugaagugcucugggu

SEQ ID NO: 2651060 - RNA, 19 nt, Artificial Sequence
  Description of Artificial Sequence: Synthetic oligonucleotide
augaugggagccgcacagu

SEQ ID NO: 2651061 - RNA, 19 nt, Artificial Sequence
  Description of Artificial Sequence: Synthetic oligonucleotide
guaggccaagccacuccgc

SEQ ID NO: 2651062 - RNA, 19 nt, Artificial Sequence
  Description of Artificial Sequence: Synthetic oligonucleotide
cguggcaaucccaagaucu

SEQ ID NO: 2651063 - RNA, 19 nt, Artificial Sequence
  Description of Artificial Sequence: Synthetic oligonucleotide
guugacaguaggucuuguu

SEQ ID NO: 2651064 - RNA, 19 nt, Artificial Sequence
  Description of Artificial Sequence: Synthetic oligonucleotide
ucggucaauauggcuuguu

SEQ ID NO: 2651065 - RNA, 19 nt, Artificial Sequence
  Description of Artificial Sequence: Synthetic oligonucleotide
cagcguggagagaacaggu

SEQ ID NO: 2651066 - RNA, 19 nt, Artificial Sequence
  Description of Artificial Sequence: Synthetic oligonucleotide
ugccuuggucucaguuuua

SEQ ID NO: 2651067 - RNA, 19 nt, Artificial Sequence
  Description of Artificial Sequence: Synthetic oligonucleotide
cuucugcaccaaacaccuc

SEQ ID NO: 2651068 - RNA, 19 nt, Artificial Sequence
  Description of Artificial Sequence: Synthetic oligonucleotide
cucgucccugccuuggucu

SEQ ID NO: 2651069 - RNA, 19 nt, Artificial Sequence
  Description of Artificial Sequence: Synthetic oligonucleotide
cggucaauauggcuuguug

SEQ ID NO: 2651070 - RNA, 19 nt, Artificial Sequence
  Description of Artificial Sequence: Synthetic oligonucleotide
caauuggcuucuggcagga

SEQ ID NO: 2651071 - RNA, 19 nt, Artificial Sequence
  Description of Artificial Sequence: Synthetic oligonucleotide
ggaaagcaaguguacucgu

SEQ ID NO: 2651072 - RNA, 19 nt, Artificial Sequence
  Description of Artificial Sequence: Synthetic oligonucleotide
ccacagugagagcagaaaa

SEQ ID NO: 2651073 - RNA, 19 nt, Artificial Sequence
  Description of Artificial Sequence: Synthetic oligonucleotide
gcucugggugccaggauug

SEQ ID NO: 2651074 - RNA, 19 nt, Artificial Sequence
  Description of Artificial Sequence: Synthetic oligonucleotide
cuccacagugagagcagaa

SEQ ID NO: 2651075 - RNA, 19 nt, Artificial Sequence
  Description of Artificial Sequence: Synthetic oligonucleotide
ccucuccacagugagagca

SEQ ID NO: 2651076 - RNA, 19 nt, Artificial Sequence
  Description of Artificial Sequence: Synthetic oligonucleotide
cacacaccacuggcgguug

SEQ ID NO: 2651077 - RNA, 19 nt, Artificial Sequence
  Description of Artificial Sequence: Synthetic oligonucleotide
uggagccaaucuccuccuu

SEQ ID NO: 2651078 - RNA, 19 nt, Artificial Sequence
  Description of Artificial Sequence: Synthetic oligonucleotide
cuggcgguugcagccacca

SEQ ID NO: 2651079 - RNA, 19 nt, Artificial Sequence
  Description of Artificial Sequence: Synthetic oligonucleotide
cacuggcgguugcagccac

SEQ ID NO: 2651080 - RNA, 19 nt, Artificial Sequence
  Description of Artificial Sequence: Synthetic oligonucleotide
acaccucuccacagugaga

SEQ ID NO: 2651081 - RNA, 19 nt, Artificial Sequence
  Description of Artificial Sequence: Synthetic oligonucleotide
guguacucgucccugccuu

SEQ ID NO: 2651082 - RNA, 19 nt, Artificial Sequence
  Description of Artificial Sequence: Synthetic oligonucleotide
gagccgcacaguaggcaca

SEQ ID NO: 2651083 - RNA, 19 nt, Artificial Sequence
  Description of Artificial Sequence: Synthetic oligonucleotide
cugccuuggucucaguuuu

SEQ ID NO: 2651084 - RNA, 19 nt, Artificial Sequence
  Description of Artificial Sequence: Synthetic oligonucleotide
uucuggcaggaagcacagu

SEQ ID NO: 2651085 - RNA, 19 nt, Artificial Sequence
  Description of Artificial Sequence: Synthetic oligonucleotide
cuugggcaccguggcaauc

SEQ ID NO: 2651086 - RNA, 19 nt, Artificial Sequence
  Description of Artificial Sequence: Synthetic oligonucleotide
ggcaccguggcaaucccaa

SEQ ID NO: 2651087 - RNA, 19 nt, Artificial Sequence
  Description of Artificial Sequence: Synthetic oligonucleotide
cgcucaaagaagggacugg

SEQ ID NO: 2651088 - RNA, 19 nt, Artificial Sequence
  Description of Artificial Sequence: Synthetic oligonucleotide
ggucucaguuuuacaggca

SEQ ID NO: 2651089 - RNA, 19 nt, Artificial Sequence
  Description of Artificial Sequence: Synthetic oligonucleotide
gcaccguggcaaucccaag

SEQ ID NO: 2651090 - RNA, 19 nt, Artificial Sequence
  Description of Artificial Sequence: Synthetic oligonucleotide
auccaugaugggagccgca

SEQ ID NO: 2651091 - RNA, 19 nt, Artificial Sequence
  Description of Artificial Sequence: Synthetic oligonucleotide
ccgcucaaagaagggacug

SEQ ID NO: 2651092 - RNA, 19 nt, Artificial Sequence
  Description of Artificial Sequence: Synthetic oligonucleotide
ggaucaccuucccagcaau

SEQ ID NO: 2651093 - RNA, 19 nt, Artificial Sequence
  Description of Artificial Sequence: Synthetic oligonucleotide
agaagggacuggagccaau

SEQ ID NO: 2651094 - RNA, 19 nt, Artificial Sequence
  Description of Artificial Sequence: Synthetic oligonucleotide
gugcucugggugccauguc

SEQ ID NO: 2651095 - RNA, 19 nt, Artificial Sequence
  Description of Artificial Sequence: Synthetic oligonucleotide
caguggcccuugggcaccg

SEQ ID NO: 2651096 - RNA, 19 nt, Artificial Sequence
  Description of Artificial Sequence: Synthetic oligonucleotide
aggaagcacaguggcccuu

SEQ ID NO: 2651097 - RNA, 19 nt, Artificial Sequence
  Description of Artificial Sequence: Synthetic oligonucleotide
gggagccgcacaguaggca

SEQ ID NO: 2651098 - RNA, 19 nt, Artificial Sequence
  Description of Artificial Sequence: Synthetic oligonucleotide
gggugccaugucugguuca

SEQ ID NO: 2651099 - RNA, 19 nt, Artificial Sequence
  Description of Artificial Sequence: Synthetic oligonucleotide
ccacugagugaaggucagg

SEQ ID NO: 2651100 - RNA, 19 nt, Artificial Sequence
  Description of Artificial Sequence: Synthetic oligonucleotide
ccaaacaccucuccacagu

SEQ ID NO: 2651101 - RNA, 19 nt, Artificial Sequence
  Description of Artificial Sequence: Synthetic oligonucleotide
ccaugaugggagccgcaca

SEQ ID NO: 2651102 - RNA, 19 nt, Artificial Sequence
  Description of Artificial Sequence: Synthetic oligonucleotide
guggcaaucccaagaucuu

SEQ ID NO: 2651103 - RNA, 19 nt, Artificial Sequence
  Description of Artificial Sequence: Synthetic oligonucleotide
ggcacagcguggagagaac

SEQ ID NO: 2651104 - RNA, 19 nt, Artificial Sequence
  Description of Artificial Sequence: Synthetic oligonucleotide
ccaagcauugacguccacu

SEQ ID NO: 2651105 - RNA, 19 nt, Artificial Sequence
  Description of Artificial Sequence: Synthetic oligonucleotide
ucccagcaauuggcuucug

SEQ ID NO: 2651106 - RNA, 19 nt, Artificial Sequence
  Description of Artificial Sequence: Synthetic oligonucleotide
ccguggcaaucccaagauc

SEQ ID NO: 2651107 - RNA, 19 nt, Artificial Sequence
  Description of Artificial Sequence: Synthetic oligonucleotide
cccagagcauggaucaccu

SEQ ID NO: 2651108 - RNA, 19 nt, Artificial Sequence
  Description of Artificial Sequence: Synthetic oligonucleotide
ccugccuuggucucaguuu

SEQ ID NO: 2651109 - RNA, 19 nt, Artificial Sequence
  Description of Artificial Sequence: Synthetic oligonucleotide
ggacuggagccaaucuccu

SEQ ID NO: 2651110 - RNA, 19 nt, Artificial Sequence
  Description of Artificial Sequence: Synthetic oligonucleotide
ggugccaugucugguucau

SEQ ID NO: 2651111 - RNA, 19 nt, Artificial Sequence
  Description of Artificial Sequence: Synthetic oligonucleotide
ccaagaucuugcaguuccu

SEQ ID NO: 2651112 - RNA, 19 nt, Artificial Sequence
  Description of Artificial Sequence: Synthetic oligonucleotide
ccccaagcauugacgucca

SEQ ID NO: 2651113 - RNA, 19 nt, Artificial Sequence
  Description of Artificial Sequence: Synthetic oligonucleotide
cgcacaguaggcacagcgu

SEQ ID NO: 2651114 - RNA, 19 nt, Artificial Sequence
  Description of Artificial Sequence: Synthetic oligonucleotide
gugcucugggugccaggau

SEQ ID NO: 2651115 - RNA, 19 nt, Artificial Sequence
  Description of Artificial Sequence: Synthetic oligonucleotide
gcacacaccacuggcgguu

SEQ ID NO: 2651116 - RNA, 19 nt, Artificial Sequence
  Description of Artificial Sequence: Synthetic oligonucleotide
cccaagcauugacguccac

SEQ ID NO: 2651117 - RNA, 19 nt, Artificial Sequence
  Description of Artificial Sequence: Synthetic oligonucleotide
gggcaccguggcaauccca

SEQ ID NO: 2651118 - RNA, 19 nt, Artificial Sequence
  Description of Artificial Sequence: Synthetic oligonucleotide
ccacuggcgguugcagcca

SEQ ID NO: 2651119 - RNA, 19 nt, Artificial Sequence
  Description of Artificial Sequence: Synthetic oligonucleotide
gccaagccacuccgcucaa

SEQ ID NO: 2651120 - RNA, 19 nt, Artificial Sequence
  Description of Artificial Sequence: Synthetic oligonucleotide
gugccaugucugguucauu

SEQ ID NO: 2651121 - RNA, 19 nt, Artificial Sequence
  Description of Artificial Sequence: Synthetic oligonucleotide
cccugccuuggucucaguu

SEQ ID NO: 2651122 - RNA, 19 nt, Artificial Sequence
  Description of Artificial Sequence: Synthetic oligonucleotide
ccuugggcaccguggcaau

SEQ ID NO: 2651123 - RNA, 19 nt, Artificial Sequence
  Description of Artificial Sequence: Synthetic oligonucleotide
cgucccugccuuggucuca

SEQ ID NO: 2651124 - RNA, 19 nt, Artificial Sequence
  Description of Artificial Sequence: Synthetic oligonucleotide
ccagagcauggaucaccuu

SEQ ID NO: 2651125 - RNA, 19 nt, Artificial Sequence
  Description of Artificial Sequence: Synthetic oligonucleotide
aauuucaaguuacaguucc

SEQ ID NO: 2651126 - RNA, 19 nt, Artificial Sequence
  Description of Artificial Sequence: Synthetic oligonucleotide
aauauaacguuucuuggac

SEQ ID NO: 2651127 - RNA, 19 nt, Artificial Sequence
  Description of Artificial Sequence: Synthetic oligonucleotide
uuauucaucaggcaaaagc

SEQ ID NO: 2651128 - RNA, 19 nt, Artificial Sequence
  Description of Artificial Sequence: Synthetic oligonucleotide
uauaaugaauagaacagag

SEQ ID NO: 2651129 - RNA, 19 nt, Artificial Sequence
  Description of Artificial Sequence: Synthetic oligonucleotide
gacuaauuaacuuaacucc

SEQ ID NO: 2651130 - RNA, 19 nt, Artificial Sequence
  Description of Artificial Sequence: Synthetic oligonucleotide
acauauaaugaauagaaca

SEQ ID NO: 2651131 - RNA, 19 nt, Artificial Sequence
  Description of Artificial Sequence: Synthetic oligonucleotide
ugagagauucaccagaucc

SEQ ID NO: 2651132 - RNA, 19 nt, Artificial Sequence
  Description of Artificial Sequence: Synthetic oligonucleotide
aagcuuaagcaguaguucc

SEQ ID NO: 2651133 - RNA, 19 nt, Artificial Sequence
  Description of Artificial Sequence: Synthetic oligonucleotide
augaauagaacagaggagc

SEQ ID NO: 2651134 - RNA, 19 nt, Artificial Sequence
  Description of Artificial Sequence: Synthetic oligonucleotide
ugacauauaaugaauagaa

SEQ ID NO: 2651135 - RNA, 19 nt, Artificial Sequence
  Description of Artificial Sequence: Synthetic oligonucleotide
aaugaugugacugacauau

SEQ ID NO: 2651136 - RNA, 19 nt, Artificial Sequence
  Description of Artificial Sequence: Synthetic oligonucleotide
uaaaugaguaccaaguccu

SEQ ID NO: 2651137 - RNA, 19 nt, Artificial Sequence
  Description of Artificial Sequence: Synthetic oligonucleotide
cauuaaaugaugcugaauc

SEQ ID NO: 2651138 - RNA, 19 nt, Artificial Sequence
  Description of Artificial Sequence: Synthetic oligonucleotide
cuugacucugaauauaacg

SEQ ID NO: 2651139 - RNA, 19 nt, Artificial Sequence
  Description of Artificial Sequence: Synthetic oligonucleotide
ugaauauaacguuucuugg

SEQ ID NO: 2651140 - RNA, 19 nt, Artificial Sequence
  Description of Artificial Sequence: Synthetic oligonucleotide
agaguuguuauccauguag

SEQ ID NO: 2651141 - RNA, 19 nt, Artificial Sequence
  Description of Artificial Sequence: Synthetic oligonucleotide
auaaguggcaaacacaugu

SEQ ID NO: 2651142 - RNA, 19 nt, Artificial Sequence
  Description of Artificial Sequence: Synthetic oligonucleotide
aacuugcuggacucgagcc

SEQ ID NO: 2651143 - RNA, 19 nt, Artificial Sequence
  Description of Artificial Sequence: Synthetic oligonucleotide
aaguccuugaugaugaggg

SEQ ID NO: 2651144 - RNA, 19 nt, Artificial Sequence
  Description of Artificial Sequence: Synthetic oligonucleotide
cugaauauaacguuucuug

SEQ ID NO: 2651145 - RNA, 19 nt, Artificial Sequence
  Description of Artificial Sequence: Synthetic oligonucleotide
auuucuacccuguguaacc

SEQ ID NO: 2651146 - RNA, 19 nt, Artificial Sequence
  Description of Artificial Sequence: Synthetic oligonucleotide
uccuaaacaucuaagggug

SEQ ID NO: 2651147 - RNA, 19 nt, Artificial Sequence
  Description of Artificial Sequence: Synthetic oligonucleotide
auuaacuuaacuccuccag

SEQ ID NO: 2651148 - RNA, 19 nt, Artificial Sequence
  Description of Artificial Sequence: Synthetic oligonucleotide
uagaguugccacaugagag

SEQ ID NO: 2651149 - RNA, 19 nt, Artificial Sequence
  Description of Artificial Sequence: Synthetic oligonucleotide
cuaaaugaguaccaagucc

SEQ ID NO: 2651150 - RNA, 19 nt, Artificial Sequence
  Description of Artificial Sequence: Synthetic oligonucleotide
uguugaugcugacagaagc

SEQ ID NO: 2651151 - RNA, 19 nt, Artificial Sequence
  Description of Artificial Sequence: Synthetic oligonucleotide
uugacucugaauauaacgu

SEQ ID NO: 2651152 - RNA, 19 nt, Artificial Sequence
  Description of Artificial Sequence: Synthetic oligonucleotide
cuuccuaaacaucuaaggg

SEQ ID NO: 2651153 - RNA, 19 nt, Artificial Sequence
  Description of Artificial Sequence: Synthetic oligonucleotide
uaguugggaaguaaguagg

SEQ ID NO: 2651154 - RNA, 19 nt, Artificial Sequence
  Description of Artificial Sequence: Synthetic oligonucleotide
ucuguagugucacuggaag

SEQ ID NO: 2651155 - RNA, 19 nt, Artificial Sequence
  Description of Artificial Sequence: Synthetic oligonucleotide
aaguaaguaggugacuugg

SEQ ID NO: 2651156 - RNA, 19 nt, Artificial Sequence
  Description of Artificial Sequence: Synthetic oligonucleotide
uaauuaacuuaacuccucc

SEQ ID NO: 2651157 - RNA, 19 nt, Artificial Sequence
  Description of Artificial Sequence: Synthetic oligonucleotide
aaauaaguggcaaacacau

SEQ ID NO: 2651158 - RNA, 19 nt, Artificial Sequence
  Description of Artificial Sequence: Synthetic oligonucleotide
uauggcaauuuccaaagga

SEQ ID NO: 2651159 - RNA, 19 nt, Artificial Sequence
  Description of Artificial Sequence: Synthetic oligonucleotide
ugacuaaaugcuuuuguug

SEQ ID NO: 2651160 - RNA, 19 nt, Artificial Sequence
  Description of Artificial Sequence: Synthetic oligonucleotide
uuccuaaacaucuaagggu

SEQ ID NO: 2651161 - RNA, 19 nt, Artificial Sequence
  Description of Artificial Sequence: Synthetic oligonucleotide
aaugaauagaacagaggag

SEQ ID NO: 2651162 - RNA, 19 nt, Artificial Sequence
  Description of Artificial Sequence: Synthetic oligonucleotide
ugugacugacauauaauga

SEQ ID NO: 2651163 - RNA, 19 nt, Artificial Sequence
  Description of Artificial Sequence: Synthetic oligonucleotide
ucuuccuagaauuccagca

SEQ ID NO: 2651164 - RNA, 19 nt, Artificial Sequence
  Description of Artificial Sequence: Synthetic oligonucleotide
acuaaaugcuuuuguuggc

SEQ ID NO: 2651165 - RNA, 19 nt, Artificial Sequence
  Description of Artificial Sequence: Synthetic oligonucleotide
uggacuaauuaacuuaacu

SEQ ID NO: 2651166 - RNA, 19 nt, Artificial Sequence
  Description of Artificial Sequence: Synthetic oligonucleotide
cacauguugaugcugacag

SEQ ID NO: 2651167 - RNA, 19 nt, Artificial Sequence
  Description of Artificial Sequence: Synthetic oligonucleotide
aggagcauuaucuuccuag

SEQ ID NO: 2651168 - RNA, 19 nt, Artificial Sequence
  Description of Artificial Sequence: Synthetic oligonucleotide
cugaugaaguccauuaaag

SEQ ID NO: 2651169 - RNA, 19 nt, Artificial Sequence
  Description of Artificial Sequence: Synthetic oligonucleotide
uacaguuccugacuaaaug

SEQ ID NO: 2651170 - RNA, 19 nt, Artificial Sequence
  Description of Artificial Sequence: Synthetic oligonucleotide
aaaugaugcugaaucugcc

SEQ ID NO: 2651171 - RNA, 19 nt, Artificial Sequence
  Description of Artificial Sequence: Synthetic oligonucleotide
auuaaaugaugcugaaucu

SEQ ID NO: 2651172 - RNA, 19 nt, Artificial Sequence
  Description of Artificial Sequence: Synthetic oligonucleotide
agaguugccacaugagagg

SEQ ID NO: 2651173 - RNA, 19 nt, Artificial Sequence
  Description of Artificial Sequence: Synthetic oligonucleotide
ugaaucugccacaaucgag

SEQ ID NO: 2651174 - RNA, 19 nt, Artificial Sequence
  Description of Artificial Sequence: Synthetic oligonucleotide
ugaugugacugacauauaa

SEQ ID NO: 2651175 - RNA, 19 nt, Artificial Sequence
  Description of Artificial Sequence: Synthetic oligonucleotide
acuuaacuccuccagaaca

SEQ ID NO: 2651176 - RNA, 19 nt, Artificial Sequence
  Description of Artificial Sequence: Synthetic oligonucleotide
ucuaaaugaguaccaaguc

SEQ ID NO: 2651177 - RNA, 19 nt, Artificial Sequence
  Description of Artificial Sequence: Synthetic oligonucleotide
ugacccuuccuaaacaucu

SEQ ID NO: 2651178 - RNA, 19 nt, Artificial Sequence
  Description of Artificial Sequence: Synthetic oligonucleotide
ggugacuuggcuuaguugc

SEQ ID NO: 2651179 - RNA, 19 nt, Artificial Sequence
  Description of Artificial Sequence: Synthetic oligonucleotide
gaauauaacguuucuugga

SEQ ID NO: 2651180 - RNA, 19 nt, Artificial Sequence
  Description of Artificial Sequence: Synthetic oligonucleotide
ucucuaaaugaguaccaag

SEQ ID NO: 2651181 - RNA, 19 nt, Artificial Sequence
  Description of Artificial Sequence: Synthetic oligonucleotide
agggcaucuguucuguagc

SEQ ID NO: 2651182 - RNA, 19 nt, Artificial Sequence
  Description of Artificial Sequence: Synthetic oligonucleotide
agauucaccagaucccagg

SEQ ID NO: 2651183 - RNA, 19 nt, Artificial Sequence
  Description of Artificial Sequence: Synthetic oligonucleotide
uuucuuggacuaauuaacu

SEQ ID NO: 2651184 - RNA, 19 nt, Artificial Sequence
  Description of Artificial Sequence: Synthetic oligonucleotide
uucucucuaaaugaguacc

SEQ ID NO: 2651185 - RNA, 19 nt, Artificial Sequence
  Description of Artificial Sequence: Synthetic oligonucleotide
ugaauagaacagaggagca

SEQ ID NO: 2651186 - RNA, 19 nt, Artificial Sequence
  Description of Artificial Sequence: Synthetic oligonucleotide
ucuuggacuaauuaacuua

SEQ ID NO: 2651187 - RNA, 19 nt, Artificial Sequence
  Description of Artificial Sequence: Synthetic oligonucleotide
ugcugaaucugccacaauc

SEQ ID NO: 2651188 - RNA, 19 nt, Artificial Sequence
  Description of Artificial Sequence: Synthetic oligonucleotide
auaaugaauagaacagagg

SEQ ID NO: 2651189 - RNA, 19 nt, Artificial Sequence
  Description of Artificial Sequence: Synthetic oligonucleotide
aaguggcaaacacauguug

SEQ ID NO: 2651190 - RNA, 19 nt, Artificial Sequence
  Description of Artificial Sequence: Synthetic oligonucleotide
ucuucucucuaaaugagua

SEQ ID NO: 2651191 - RNA, 19 nt, Artificial Sequence
  Description of Artificial Sequence: Synthetic oligonucleotide
acagaggagcauuaucuuc

SEQ ID NO: 2651192 - RNA, 19 nt, Artificial Sequence
  Description of Artificial Sequence: Synthetic oligonucleotide
ucugccacaaucgagaguu

SEQ ID NO: 2651193 - RNA, 19 nt, Artificial Sequence
  Description of Artificial Sequence: Synthetic oligonucleotide
cuuaacuccuccagaacag

SEQ ID NO: 2651194 - RNA, 19 nt, Artificial Sequence
  Description of Artificial Sequence: Synthetic oligonucleotide
aagguucuauggcaauuuc

SEQ ID NO: 2651195 - RNA, 19 nt, Artificial Sequence
  Description of Artificial Sequence: Synthetic oligonucleotide
caaucgagaguuguuaucc

SEQ ID NO: 2651196 - RNA, 19 nt, Artificial Sequence
  Description of Artificial Sequence: Synthetic oligonucleotide
uauaacguuucuuggacua

SEQ ID NO: 2651197 - RNA, 19 nt, Artificial Sequence
  Description of Artificial Sequence: Synthetic oligonucleotide
aucuuccuagaauuccagc

SEQ ID NO: 2651198 - RNA, 19 nt, Artificial Sequence
  Description of Artificial Sequence: Synthetic oligonucleotide
ggacuaauuaacuuaacuc

SEQ ID NO: 2651199 - RNA, 19 nt, Artificial Sequence
  Description of Artificial Sequence: Synthetic oligonucleotide
guuucuuggacuaauuaac

SEQ ID NO: 2651200 - RNA, 19 nt, Artificial Sequence
  Description of Artificial Sequence: Synthetic oligonucleotide
aauagaacagaggagcauu

SEQ ID NO: 2651201 - RNA, 19 nt, Artificial Sequence
  Description of Artificial Sequence: Synthetic oligonucleotide
aauuccagcaccauuguua

SEQ ID NO: 2651202 - RNA, 19 nt, Artificial Sequence
  Description of Artificial Sequence: Synthetic oligonucleotide
uuuaggaaacuugacucug

SEQ ID NO: 2651203 - RNA, 19 nt, Artificial Sequence
  Description of Artificial Sequence: Synthetic oligonucleotide
acaaucgagaguuguuauc

SEQ ID NO: 2651204 - RNA, 19 nt, Artificial Sequence
  Description of Artificial Sequence: Synthetic oligonucleotide
aaucugccacaaucgagag

SEQ ID NO: 2651205 - RNA, 19 nt, Artificial Sequence
  Description of Artificial Sequence: Synthetic oligonucleotide
uuccuagaauuccagcacc

SEQ ID NO: 2651206 - RNA, 19 nt, Artificial Sequence
  Description of Artificial Sequence: Synthetic oligonucleotide
aacacauguugaugcugac

SEQ ID NO: 2651207 - RNA, 19 nt, Artificial Sequence
  Description of Artificial Sequence: Synthetic oligonucleotide
guuguuauccauguagcgc

SEQ ID NO: 2651208 - RNA, 19 nt, Artificial Sequence
  Description of Artificial Sequence: Synthetic oligonucleotide
ggcaaacacauguugaugc

SEQ ID NO: 2651209 - RNA, 19 nt, Artificial Sequence
  Description of Artificial Sequence: Synthetic oligonucleotide
agcauuaucuuccuagaau

SEQ ID NO: 2651210 - RNA, 19 nt, Artificial Sequence
  Description of Artificial Sequence: Synthetic oligonucleotide
uccagcaccauuguuauuc

SEQ ID NO: 2651211 - RNA, 19 nt, Artificial Sequence
  Description of Artificial Sequence: Synthetic oligonucleotide
cauuaaagguucuauggca

SEQ ID NO: 2651212 - RNA, 19 nt, Artificial Sequence
  Description of Artificial Sequence: Synthetic oligonucleotide
auauaaugaauagaacaga

SEQ ID NO: 2651213 - RNA, 19 nt, Artificial Sequence
  Description of Artificial Sequence: Synthetic oligonucleotide
aaaagcuuaagcaguaguu

SEQ ID NO: 2651214 - RNA, 19 nt, Artificial Sequence
  Description of Artificial Sequence: Synthetic oligonucleotide
ucgagaguuguuauccaug

SEQ ID NO: 2651215 - RNA, 19 nt, Artificial Sequence
  Description of Artificial Sequence: Synthetic oligonucleotide
ugggaaguaaguaggugac

SEQ ID NO: 2651216 - RNA, 19 nt, Artificial Sequence
  Description of Artificial Sequence: Synthetic oligonucleotide
agcaguaguuccuguacuc

SEQ ID NO: 2651217 - RNA, 19 nt, Artificial Sequence
  Description of Artificial Sequence: Synthetic oligonucleotide
acuaauuaacuuaacuccu

SEQ ID NO: 2651218 - RNA, 19 nt, Artificial Sequence
  Description of Artificial Sequence: Synthetic oligonucleotide
cuaauuaacuuaacuccuc

SEQ ID NO: 2651219 - RNA, 19 nt, Artificial Sequence
  Description of Artificial Sequence: Synthetic oligonucleotide
aaugaguaccaaguccuug

SEQ ID NO: 2651220 - RNA, 19 nt, Artificial Sequence
  Description of Artificial Sequence: Synthetic oligonucleotide
aaacacauguugaugcuga

SEQ ID NO: 2651221 - RNA, 19 nt, Artificial Sequence
  Description of Artificial Sequence: Synthetic oligonucleotide
uuggcuuaguugcaucacc

SEQ ID NO: 2651222 - RNA, 19 nt, Artificial Sequence
  Description of Artificial Sequence: Synthetic oligonucleotide
gaaguaaguaggugacuug

SEQ ID NO: 2651223 - RNA, 19 nt, Artificial Sequence
  Description of Artificial Sequence: Synthetic oligonucleotide
aacagcuaggcuaaaacuu

SEQ ID NO: 2651224 - RNA, 19 nt, Artificial Sequence
  Description of Artificial Sequence: Synthetic oligonucleotide
uggacucgagccuuuagga

SEQ ID NO: 2651225 - RNA, 19 nt, Artificial Sequence
  Description of Artificial Sequence: Synthetic oligonucleotide
gaguuguuauccauguagc

SEQ ID NO: 2651226 - RNA, 19 nt, Artificial Sequence
  Description of Artificial Sequence: Synthetic oligonucleotide
agguucuauggcaauuucc

SEQ ID NO: 2651227 - RNA, 19 nt, Artificial Sequence
  Description of Artificial Sequence: Synthetic oligonucleotide
gagagauucaccagauccc

SEQ ID NO: 2651228 - RNA, 19 nt, Artificial Sequence
  Description of Artificial Sequence: Synthetic oligonucleotide
aagcaguaguuccuguacu

SEQ ID NO: 2651229 - RNA, 19 nt, Artificial Sequence
  Description of Artificial Sequence: Synthetic oligonucleotide
aaugcuuuuguuggcuuga

SEQ ID NO: 2651230 - RNA, 19 nt, Artificial Sequence
  Description of Artificial Sequence: Synthetic oligonucleotide
aguaguuccuguacucccc

SEQ ID NO: 2651231 - RNA, 19 nt, Artificial Sequence
  Description of Artificial Sequence: Synthetic oligonucleotide
cuuccuagaauuccagcac

SEQ ID NO: 2651232 - RNA, 19 nt, Artificial Sequence
  Description of Artificial Sequence: Synthetic oligonucleotide
gugacugacauauaaugaa

SEQ ID NO: 2651233 - RNA, 19 nt, Artificial Sequence
  Description of Artificial Sequence: Synthetic oligonucleotide
ccuuccuaaacaucuaagg

SEQ ID NO: 2651234 - RNA, 19 nt, Artificial Sequence
  Description of Artificial Sequence: Synthetic oligonucleotide
aaucgagaguuguuaucca

SEQ ID NO: 2651235 - RNA, 19 nt, Artificial Sequence
  Description of Artificial Sequence: Synthetic oligonucleotide
uguguaacccucucucugu

SEQ ID NO: 2651236 - RNA, 19 nt, Artificial Sequence
  Description of Artificial Sequence: Synthetic oligonucleotide
acagcuaggcuaaaacuuc

SEQ ID NO: 2651237 - RNA, 19 nt, Artificial Sequence
  Description of Artificial Sequence: Synthetic oligonucleotide
aguaaguaggugacuuggc

SEQ ID NO: 2651238 - RNA, 19 nt, Artificial Sequence
  Description of Artificial Sequence: Synthetic oligonucleotide
uaguggugaaugaugugac

SEQ ID NO: 2651239 - RNA, 19 nt, Artificial Sequence
  Description of Artificial Sequence: Synthetic oligonucleotide
aaguuacaguuccugacua

SEQ ID NO: 2651240 - RNA, 19 nt, Artificial Sequence
  Description of Artificial Sequence: Synthetic oligonucleotide
ucuucaugacccuuccuaa

SEQ ID NO: 2651241 - RNA, 19 nt, Artificial Sequence
  Description of Artificial Sequence: Synthetic oligonucleotide
cuggaaguguucuucauga

SEQ ID NO: 2651242 - RNA, 19 nt, Artificial Sequence
  Description of Artificial Sequence: Synthetic oligonucleotide
uguuggcuugauuucuacc

SEQ ID NO: 2651243 - RNA, 19 nt, Artificial Sequence
  Description of Artificial Sequence: Synthetic oligonucleotide
ccuuuaggaaacuugacuc

SEQ ID NO: 2651244 - RNA, 19 nt, Artificial Sequence
  Description of Artificial Sequence: Synthetic oligonucleotide
auauaacguuucuuggacu

SEQ ID NO: 2651245 - RNA, 19 nt, Artificial Sequence
  Description of Artificial Sequence: Synthetic oligonucleotide
uggugaaugaugugacuga

SEQ ID NO: 2651246 - RNA, 19 nt, Artificial Sequence
  Description of Artificial Sequence: Synthetic oligonucleotide
aacagaggagcauuaucuu

SEQ ID NO: 2651247 - RNA, 19 nt, Artificial Sequence
  Description of Artificial Sequence: Synthetic oligonucleotide
cucucuguagugucacugg

SEQ ID NO: 2651248 - RNA, 19 nt, Artificial Sequence
  Description of Artificial Sequence: Synthetic oligonucleotide
acaucuaagggugggagca

SEQ ID NO: 2651249 - RNA, 19 nt, Artificial Sequence
  Description of Artificial Sequence: Synthetic oligonucleotide
gaccauuaaaugaugcuga

SEQ ID NO: 2651250 - RNA, 19 nt, Artificial Sequence
  Description of Artificial Sequence: Synthetic oligonucleotide
cuuggacuaauuaacuuaa

SEQ ID NO: 2651251 - RNA, 19 nt, Artificial Sequence
  Description of Artificial Sequence: Synthetic oligonucleotide
uaaguaggugacuuggcuu

SEQ ID NO: 2651252 - RNA, 19 nt, Artificial Sequence
  Description of Artificial Sequence: Synthetic oligonucleotide
ccacaugagagguaguugg

SEQ ID NO: 2651253 - RNA, 19 nt, Artificial Sequence
  Description of Artificial Sequence: Synthetic oligonucleotide
ucucuguagugucacugga

SEQ ID NO: 2651254 - RNA, 19 nt, Artificial Sequence
  Description of Artificial Sequence: Synthetic oligonucleotide
ugagagguaguugggaagu

SEQ ID NO: 2651255 - RNA, 19 nt, Artificial Sequence
  Description of Artificial Sequence: Synthetic oligonucleotide
ugcaucaccuaagggaacc

SEQ ID NO: 2651256 - RNA, 19 nt, Artificial Sequence
  Description of Artificial Sequence: Synthetic oligonucleotide
ccauuguuauucaucaggc

SEQ ID NO: 2651257 - RNA, 19 nt, Artificial Sequence
  Description of Artificial Sequence: Synthetic oligonucleotide
aacuugacucugaauauaa

SEQ ID NO: 2651258 - RNA, 19 nt, Artificial Sequence
  Description of Artificial Sequence: Synthetic oligonucleotide
cucuaaaugaguaccaagu

SEQ ID NO: 2651259 - RNA, 19 nt, Artificial Sequence
  Description of Artificial Sequence: Synthetic oligonucleotide
guggugaaugaugugacug

SEQ ID NO: 2651260 - RNA, 19 nt, Artificial Sequence
  Description of Artificial Sequence: Synthetic oligonucleotide
gaacagaggagcauuaucu

SEQ ID NO: 2651261 - RNA, 19 nt, Artificial Sequence
  Description of Artificial Sequence: Synthetic oligonucleotide
cuucucucuaaaugaguac

SEQ ID NO: 2651262 - RNA, 19 nt, Artificial Sequence
  Description of Artificial Sequence: Synthetic oligonucleotide
acuuggcuuaguugcauca

SEQ ID NO: 2651263 - RNA, 19 nt, Artificial Sequence
  Description of Artificial Sequence: Synthetic oligonucleotide
cacaugagagguaguuggg

SEQ ID NO: 2651264 - RNA, 19 nt, Artificial Sequence
  Description of Artificial Sequence: Synthetic oligonucleotide
acuguaguggugaaugaug

SEQ ID NO: 2651265 - RNA, 19 nt, Artificial Sequence
  Description of Artificial Sequence: Synthetic oligonucleotide
gacucgagccuuuaggaaa

SEQ ID NO: 2651266 - RNA, 19 nt, Artificial Sequence
  Description of Artificial Sequence: Synthetic oligonucleotide
agaucccagguucagcuga

SEQ ID NO: 2651267 - RNA, 19 nt, Artificial Sequence
  Description of Artificial Sequence: Synthetic oligonucleotide
ucccagguucagcugauga

SEQ ID NO: 2651268 - RNA, 19 nt, Artificial Sequence
  Description of Artificial Sequence: Synthetic oligonucleotide
aauaaguggcaaacacaug

SEQ ID NO: 2651269 - RNA, 19 nt, Artificial Sequence
  Description of Artificial Sequence: Synthetic oligonucleotide
uuaaagguucuauggcaau

SEQ ID NO: 2651270 - RNA, 19 nt, Artificial Sequence
  Description of Artificial Sequence: Synthetic oligonucleotide
ggugggagcacuguagugg

SEQ ID NO: 2651271 - RNA, 19 nt, Artificial Sequence
  Description of Artificial Sequence: Synthetic oligonucleotide
uguaacccucucucuguag

SEQ ID NO: 2651272 - RNA, 19 nt, Artificial Sequence
  Description of Artificial Sequence: Synthetic oligonucleotide
uucuuggacuaauuaacuu

SEQ ID NO: 2651273 - RNA, 19 nt, Artificial Sequence
  Description of Artificial Sequence: Synthetic oligonucleotide
gcugaaucugccacaaucg

SEQ ID NO: 2651274 - RNA, 19 nt, Artificial Sequence
  Description of Artificial Sequence: Synthetic oligonucleotide
uaggaaacuugacucugaa

SEQ ID NO: 2651275 - RNA, 19 nt, Artificial Sequence
  Description of Artificial Sequence: Synthetic oligonucleotide
uguuauucaucaggcaaaa

SEQ ID NO: 2651276 - RNA, 19 nt, Artificial Sequence
  Description of Artificial Sequence: Synthetic oligonucleotide
ucuaagggugggagcacug

SEQ ID NO: 2651277 - RNA, 19 nt, Artificial Sequence
  Description of Artificial Sequence: Synthetic oligonucleotide
uaaacaucuaaggguggga

SEQ ID NO: 2651278 - RNA, 19 nt, Artificial Sequence
  Description of Artificial Sequence: Synthetic oligonucleotide
uuucuacccuguguaaccc

SEQ ID NO: 2651279 - RNA, 19 nt, Artificial Sequence
  Description of Artificial Sequence: Synthetic oligonucleotide
ucuacccuguguaacccuc

SEQ ID NO: 2651280 - RNA, 19 nt, Artificial Sequence
  Description of Artificial Sequence: Synthetic oligonucleotide
ccauuaaagguucuauggc

SEQ ID NO: 2651281 - RNA, 19 nt, Artificial Sequence
  Description of Artificial Sequence: Synthetic oligonucleotide
gaacagcuaggcuaaaacu

SEQ ID NO: 2651282 - RNA, 19 nt, Artificial Sequence
  Description of Artificial Sequence: Synthetic oligonucleotide
aggaggagucaauuucaag

SEQ ID NO: 2651283 - RNA, 19 nt, Artificial Sequence
  Description of Artificial Sequence: Synthetic oligonucleotide
ggaggagucaauuucaagu

SEQ ID NO: 2651284 - RNA, 19 nt, Artificial Sequence
  Description of Artificial Sequence: Synthetic oligonucleotide
uuauccauguagcgcuccu

SEQ ID NO: 2651285 - RNA, 19 nt, Artificial Sequence
  Description of Artificial Sequence: Synthetic oligonucleotide
uaaguggcaaacacauguu

SEQ ID NO: 2651286 - RNA, 19 nt, Artificial Sequence
  Description of Artificial Sequence: Synthetic oligonucleotide
aaacuugacucugaauaua

SEQ ID NO: 2651287 - RNA, 19 nt, Artificial Sequence
  Description of Artificial Sequence: Synthetic oligonucleotide
aguggcaaacacauguuga

SEQ ID NO: 2651288 - RNA, 19 nt, Artificial Sequence
  Description of Artificial Sequence: Synthetic oligonucleotide
ucaccuaagggaaccugaa

SEQ ID NO: 2651289 - RNA, 19 nt, Artificial Sequence
  Description of Artificial Sequence: Synthetic oligonucleotide
agaauuccagcaccauugu

SEQ ID NO: 2651290 - RNA, 19 nt, Artificial Sequence
  Description of Artificial Sequence: Synthetic oligonucleotide
guugcaucaccuaagggaa

SEQ ID NO: 2651291 - RNA, 19 nt, Artificial Sequence
  Description of Artificial Sequence: Synthetic oligonucleotide
agagauucaccagauccca

SEQ ID NO: 2651292 - RNA, 19 nt, Artificial Sequence
  Description of Artificial Sequence: Synthetic oligonucleotide
aguuccuguacuccccuga

SEQ ID NO: 2651293 - RNA, 19 nt, Artificial Sequence
  Description of Artificial Sequence: Synthetic oligonucleotide
uaacccucucucuguagug

SEQ ID NO: 2651294 - RNA, 19 nt, Artificial Sequence
  Description of Artificial Sequence: Synthetic oligonucleotide
uuggacuaauuaacuuaac

SEQ ID NO: 2651295 - RNA, 19 nt, Artificial Sequence
  Description of Artificial Sequence: Synthetic oligonucleotide
acucgagccuuuaggaaac

SEQ ID NO: 2651296 - RNA, 19 nt, Artificial Sequence
  Description of Artificial Sequence: Synthetic oligonucleotide
gagccuuuaggaaacuuga

SEQ ID NO: 2651297 - RNA, 19 nt, Artificial Sequence
  Description of Artificial Sequence: Synthetic oligonucleotide
uguagcaugugcugauuuu

SEQ ID NO: 2651298 - RNA, 19 nt, Artificial Sequence
  Description of Artificial Sequence: Synthetic oligonucleotide
uggcuugauuucuacccug

SEQ ID NO: 2651299 - RNA, 19 nt, Artificial Sequence
  Description of Artificial Sequence: Synthetic oligonucleotide
cugacauauaaugaauaga

SEQ ID NO: 2651300 - RNA, 19 nt, Artificial Sequence
  Description of Artificial Sequence: Synthetic oligonucleotide
gguucuauggcaauuucca

SEQ ID NO: 2651301 - RNA, 19 nt, Artificial Sequence
  Description of Artificial Sequence: Synthetic oligonucleotide
cuaagggaaccugaacuug

SEQ ID NO: 2651302 - RNA, 19 nt, Artificial Sequence
  Description of Artificial Sequence: Synthetic oligonucleotide
aggugacuuggcuuaguug

SEQ ID NO: 2651303 - RNA, 19 nt, Artificial Sequence
  Description of Artificial Sequence: Synthetic oligonucleotide
acuugacucugaauauaac

SEQ ID NO: 2651304 - RNA, 19 nt, Artificial Sequence
  Description of Artificial Sequence: Synthetic oligonucleotide
uaaaugcuuuuguuggcuu

SEQ ID NO: 2651305 - RNA, 19 nt, Artificial Sequence
  Description of Artificial Sequence: Synthetic oligonucleotide
ucaccagaucccagguuca

SEQ ID NO: 2651306 - RNA, 19 nt, Artificial Sequence
  Description of Artificial Sequence: Synthetic oligonucleotide
uuccuguacuccccugacc

SEQ ID NO: 2651307 - RNA, 19 nt, Artificial Sequence
  Description of Artificial Sequence: Synthetic oligonucleotide
caaacacauguugaugcug

SEQ ID NO: 2651308 - RNA, 19 nt, Artificial Sequence
  Description of Artificial Sequence: Synthetic oligonucleotide
cuccccugaccauuaaaug

SEQ ID NO: 2651309 - RNA, 19 nt, Artificial Sequence
  Description of Artificial Sequence: Synthetic oligonucleotide
ggagucaauuucaaguuac

SEQ ID NO: 2651310 - RNA, 19 nt, Artificial Sequence
  Description of Artificial Sequence: Synthetic oligonucleotide
aucgagaguuguuauccau

SEQ ID NO: 2651311 - RNA, 19 nt, Artificial Sequence
  Description of Artificial Sequence: Synthetic oligonucleotide
guugggaaguaaguaggug

SEQ ID NO: 2651312 - RNA, 19 nt, Artificial Sequence
  Description of Artificial Sequence: Synthetic oligonucleotide
gguucagcugaugaagucc

SEQ ID NO: 2651313 - RNA, 19 nt, Artificial Sequence
  Description of Artificial Sequence: Synthetic oligonucleotide
ugaguaccaaguccuugau

SEQ ID NO: 2651314 - RNA, 19 nt, Artificial Sequence
  Description of Artificial Sequence: Synthetic oligonucleotide
accagaucccagguucagc

SEQ ID NO: 2651315 - RNA, 19 nt, Artificial Sequence
  Description of Artificial Sequence: Synthetic oligonucleotide
guagcgcuccucuggguag

SEQ ID NO: 2651316 - RNA, 19 nt, Artificial Sequence
  Description of Artificial Sequence: Synthetic oligonucleotide
acguuucuuggacuaauua

SEQ ID NO: 2651317 - RNA, 19 nt, Artificial Sequence
  Description of Artificial Sequence: Synthetic oligonucleotide
gacugacauauaaugaaua

SEQ ID NO: 2651318 - RNA, 19 nt, Artificial Sequence
  Description of Artificial Sequence: Synthetic oligonucleotide
caugagagguaguugggaa

SEQ ID NO: 2651319 - RNA, 19 nt, Artificial Sequence
  Description of Artificial Sequence: Synthetic oligonucleotide
aacccucucucuguagugu

SEQ ID NO: 2651320 - RNA, 19 nt, Artificial Sequence
  Description of Artificial Sequence: Synthetic oligonucleotide
uugagagauucaccagauc

SEQ ID NO: 2651321 - RNA, 19 nt, Artificial Sequence
  Description of Artificial Sequence: Synthetic oligonucleotide
aguuacaguuccugacuaa

SEQ ID NO: 2651322 - RNA, 19 nt, Artificial Sequence
  Description of Artificial Sequence: Synthetic oligonucleotide
uggaaguguucuucaugac

SEQ ID NO: 2651323 - RNA, 19 nt, Artificial Sequence
  Description of Artificial Sequence: Synthetic oligonucleotide
agaggagcauuaucuuccu

SEQ ID NO: 2651324 - RNA, 19 nt, Artificial Sequence
  Description of Artificial Sequence: Synthetic oligonucleotide
agccuuuaggaaacuugac

SEQ ID NO: 2651325 - RNA, 19 nt, Artificial Sequence
  Description of Artificial Sequence: Synthetic oligonucleotide
uccugacuaaaugcuuuug

SEQ ID NO: 2651326 - RNA, 19 nt, Artificial Sequence
  Description of Artificial Sequence: Synthetic oligonucleotide
agcugaugaaguccauuaa

SEQ ID NO: 2651327 - RNA, 19 nt, Artificial Sequence
  Description of Artificial Sequence: Synthetic oligonucleotide
acaugagagguaguuggga

SEQ ID NO: 2651328 - RNA, 19 nt, Artificial Sequence
  Description of Artificial Sequence: Synthetic oligonucleotide
aucaccuaagggaaccuga

SEQ ID NO: 2651329 - RNA, 19 nt, Artificial Sequence
  Description of Artificial Sequence: Synthetic oligonucleotide
uaacguuucuuggacuaau

SEQ ID NO: 2651330 - RNA, 19 nt, Artificial Sequence
  Description of Artificial Sequence: Synthetic oligonucleotide
gagcauuaucuuccuagaa

SEQ ID NO: 2651331 - RNA, 19 nt, Artificial Sequence
  Description of Artificial Sequence: Synthetic oligonucleotide
guuauucaucaggcaaaag

SEQ ID NO: 2651332 - RNA, 19 nt, Artificial Sequence
  Description of Artificial Sequence: Synthetic oligonucleotide
augacccuuccuaaacauc

SEQ ID NO: 2651333 - RNA, 19 nt, Artificial Sequence
  Description of Artificial Sequence: Synthetic oligonucleotide
ggcaauuuccaaaggagga

SEQ ID NO: 2651334 - RNA, 19 nt, Artificial Sequence
  Description of Artificial Sequence: Synthetic oligonucleotide
uuccaaaggaggagucaau

SEQ ID NO: 2651335 - RNA, 19 nt, Artificial Sequence
  Description of Artificial Sequence: Synthetic oligonucleotide
guucagcugaugaagucca

SEQ ID NO: 2651336 - RNA, 19 nt, Artificial Sequence
  Description of Artificial Sequence: Synthetic oligonucleotide
agggaaccugaacuugcug

SEQ ID NO: 2651337 - RNA, 19 nt, Artificial Sequence
  Description of Artificial Sequence: Synthetic oligonucleotide
ugccacaaucgagaguugu

SEQ ID NO: 2651338 - RNA, 19 nt, Artificial Sequence
  Description of Artificial Sequence: Synthetic oligonucleotide
gagauucaccagaucccag

SEQ ID NO: 2651339 - RNA, 19 nt, Artificial Sequence
  Description of Artificial Sequence: Synthetic oligonucleotide
uucuacccuguguaacccu

SEQ ID NO: 2651340 - RNA, 19 nt, Artificial Sequence
  Description of Artificial Sequence: Synthetic oligonucleotide
caccauuguuauucaucag

SEQ ID NO: 2651341 - RNA, 19 nt, Artificial Sequence
  Description of Artificial Sequence: Synthetic oligonucleotide
gguagaguugccacaugag

SEQ ID NO: 2651342 - RNA, 19 nt, Artificial Sequence
  Description of Artificial Sequence: Synthetic oligonucleotide
cugaaucugccacaaucga

SEQ ID NO: 2651343 - RNA, 19 nt, Artificial Sequence
  Description of Artificial Sequence: Synthetic oligonucleotide
ugcucucuucucucuaaau

SEQ ID NO: 2651344 - RNA, 19 nt, Artificial Sequence
  Description of Artificial Sequence: Synthetic oligonucleotide
acuccccugaccauuaaau

SEQ ID NO: 2651345 - RNA, 19 nt, Artificial Sequence
  Description of Artificial Sequence: Synthetic oligonucleotide
uugcaucaccuaagggaac

SEQ ID NO: 2651346 - RNA, 19 nt, Artificial Sequence
  Description of Artificial Sequence: Synthetic oligonucleotide
aguugggaaguaaguaggu

SEQ ID NO: 2651347 - RNA, 19 nt, Artificial Sequence
  Description of Artificial Sequence: Synthetic oligonucleotide
gagucaauuucaaguuaca

SEQ ID NO: 2651348 - RNA, 19 nt, Artificial Sequence
  Description of Artificial Sequence: Synthetic oligonucleotide
agcuuaagcaguaguuccu

SEQ ID NO: 2651349 - RNA, 19 nt, Artificial Sequence
  Description of Artificial Sequence: Synthetic oligonucleotide
caaaagcuuaagcaguagu

SEQ ID NO: 2651350 - RNA, 19 nt, Artificial Sequence
  Description of Artificial Sequence: Synthetic oligonucleotide
guuccuguacuccccugac

SEQ ID NO: 2651351 - RNA, 19 nt, Artificial Sequence
  Description of Artificial Sequence: Synthetic oligonucleotide
acccuuccuaaacaucuaa

SEQ ID NO: 2651352 - RNA, 19 nt, Artificial Sequence
  Description of Artificial Sequence: Synthetic oligonucleotide
ggagcauuaucuuccuaga

SEQ ID NO: 2651353 - RNA, 19 nt, Artificial Sequence
  Description of Artificial Sequence: Synthetic oligonucleotide
ggaaccugaacuugcugga

SEQ ID NO: 2651354 - RNA, 19 nt, Artificial Sequence
  Description of Artificial Sequence: Synthetic oligonucleotide
cugaccauuaaaugaugcu

SEQ ID NO: 2651355 - RNA, 19 nt, Artificial Sequence
  Description of Artificial Sequence: Synthetic oligonucleotide
ugccacaugagagguaguu

SEQ ID NO: 2651356 - RNA, 19 nt, Artificial Sequence
  Description of Artificial Sequence: Synthetic oligonucleotide
ggguagaguugccacauga

SEQ ID NO: 2651357 - RNA, 19 nt, Artificial Sequence
  Description of Artificial Sequence: Synthetic oligonucleotide
aaaugaguaccaaguccuu

SEQ ID NO: 2651358 - RNA, 19 nt, Artificial Sequence
  Description of Artificial Sequence: Synthetic oligonucleotide
uccucuggguagaguugcc

SEQ ID NO: 2651359 - RNA, 19 nt, Artificial Sequence
  Description of Artificial Sequence: Synthetic oligonucleotide
gaaugaugugacugacaua

SEQ ID NO: 2651360 - RNA, 19 nt, Artificial Sequence
  Description of Artificial Sequence: Synthetic oligonucleotide
aacguuucuuggacuaauu

SEQ ID NO: 2651361 - RNA, 19 nt, Artificial Sequence
  Description of Artificial Sequence: Synthetic oligonucleotide
uacccuguguaacccucuc

SEQ ID NO: 2651362 - RNA, 19 nt, Artificial Sequence
  Description of Artificial Sequence: Synthetic oligonucleotide
uaguuccuguacuccccug

SEQ ID NO: 2651363 - RNA, 19 nt, Artificial Sequence
  Description of Artificial Sequence: Synthetic oligonucleotide
ggugaaugaugugacugac

SEQ ID NO: 2651364 - RNA, 19 nt, Artificial Sequence
  Description of Artificial Sequence: Synthetic oligonucleotide
caucaccuaagggaaccug

SEQ ID NO: 2651365 - RNA, 19 nt, Artificial Sequence
  Description of Artificial Sequence: Synthetic oligonucleotide
auaacguuucuuggacuaa

SEQ ID NO: 2651366 - RNA, 19 nt, Artificial Sequence
  Description of Artificial Sequence: Synthetic oligonucleotide
gguaguugggaaguaagua

SEQ ID NO: 2651367 - RNA, 19 nt, Artificial Sequence
  Description of Artificial Sequence: Synthetic oligonucleotide
aucuaagggugggagcacu

SEQ ID NO: 2651368 - RNA, 19 nt, Artificial Sequence
  Description of Artificial Sequence: Synthetic oligonucleotide
auagaacagaggagcauua

SEQ ID NO: 2651369 - RNA, 19 nt, Artificial Sequence
  Description of Artificial Sequence: Synthetic oligonucleotide
cuaaaugcuuuuguuggcu

SEQ ID NO: 2651370 - RNA, 19 nt, Artificial Sequence
  Description of Artificial Sequence: Synthetic oligonucleotide
cccuuccuaaacaucuaag

SEQ ID NO: 2651371 - RNA, 19 nt, Artificial Sequence
  Description of Artificial Sequence: Synthetic oligonucleotide
cugacuaaaugcuuuuguu

SEQ ID NO: 2651372 - RNA, 19 nt, Artificial Sequence
  Description of Artificial Sequence: Synthetic oligonucleotide
cagaucccagguucagcug

SEQ ID NO: 2651373 - RNA, 19 nt, Artificial Sequence
  Description of Artificial Sequence: Synthetic oligonucleotide
acccuguguaacccucucu

SEQ ID NO: 2651374 - RNA, 19 nt, Artificial Sequence
  Description of Artificial Sequence: Synthetic oligonucleotide
gaauagaacagaggagcau

SEQ ID NO: 2651375 - RNA, 19 nt, Artificial Sequence
  Description of Artificial Sequence: Synthetic oligonucleotide
uucagcugaugaaguccau

SEQ ID NO: 2651376 - RNA, 19 nt, Artificial Sequence
  Description of Artificial Sequence: Synthetic oligonucleotide
gcuuaagcaguaguuccug

SEQ ID NO: 2651377 - RNA, 19 nt, Artificial Sequence
  Description of Artificial Sequence: Synthetic oligonucleotide
cucuguagugucacuggaa

SEQ ID NO: 2651378 - RNA, 19 nt, Artificial Sequence
  Description of Artificial Sequence: Synthetic oligonucleotide
ugggagcacuguaguggug

SEQ ID NO: 2651379 - RNA, 19 nt, Artificial Sequence
  Description of Artificial Sequence: Synthetic oligonucleotide
gagaguuguuauccaugua

SEQ ID NO: 2651380 - RNA, 19 nt, Artificial Sequence
  Description of Artificial Sequence: Synthetic oligonucleotide
cccuguguaacccucucuc

SEQ ID NO: 2651381 - RNA, 19 nt, Artificial Sequence
  Description of Artificial Sequence: Synthetic oligonucleotide
ucuguagcaugugcugauu

SEQ ID NO: 2651382 - RNA, 19 nt, Artificial Sequence
  Description of Artificial Sequence: Synthetic oligonucleotide
gaguugccacaugagaggu

SEQ ID NO: 2651383 - RNA, 19 nt, Artificial Sequence
  Description of Artificial Sequence: Synthetic oligonucleotide
caugacccuuccuaaacau

SEQ ID NO: 2651384 - RNA, 19 nt, Artificial Sequence
  Description of Artificial Sequence: Synthetic oligonucleotide
cuuaagcaguaguuccugu

SEQ ID NO: 2651385 - RNA, 19 nt, Artificial Sequence
  Description of Artificial Sequence: Synthetic oligonucleotide
cuagaauuccagcaccauu

SEQ ID NO: 2651386 - RNA, 19 nt, Artificial Sequence
  Description of Artificial Sequence: Synthetic oligonucleotide
caucuaagggugggagcac

SEQ ID NO: 2651387 - RNA, 19 nt, Artificial Sequence
  Description of Artificial Sequence: Synthetic oligonucleotide
uugccacaugagagguagu

SEQ ID NO: 2651388 - RNA, 19 nt, Artificial Sequence
  Description of Artificial Sequence: Synthetic oligonucleotide
guaguuccuguacuccccu

SEQ ID NO: 2651389 - RNA, 19 nt, Artificial Sequence
  Description of Artificial Sequence: Synthetic oligonucleotide
cacaaucgagaguuguuau

SEQ ID NO: 2651390 - RNA, 19 nt, Artificial Sequence
  Description of Artificial Sequence: Synthetic oligonucleotide
ggaaguaaguaggugacuu

SEQ ID NO: 2651391 - RNA, 19 nt, Artificial Sequence
  Description of Artificial Sequence: Synthetic oligonucleotide
gugggagcacuguaguggu

SEQ ID NO: 2651392 - RNA, 19 nt, Artificial Sequence
  Description of Artificial Sequence: Synthetic oligonucleotide
caccagaucccagguucag

SEQ ID NO: 2651393 - RNA, 19 nt, Artificial Sequence
  Description of Artificial Sequence: Synthetic oligonucleotide
ggacucgagccuuuaggaa

SEQ ID NO: 2651394 - RNA, 19 nt, Artificial Sequence
  Description of Artificial Sequence: Synthetic oligonucleotide
ucgagccuuuaggaaacuu

SEQ ID NO: 2651395 - RNA, 19 nt, Artificial Sequence
  Description of Artificial Sequence: Synthetic oligonucleotide
gaauuccagcaccauuguu

SEQ ID NO: 2651396 - RNA, 19 nt, Artificial Sequence
  Description of Artificial Sequence: Synthetic oligonucleotide
guguaacccucucucugua

SEQ ID NO: 2651397 - RNA, 19 nt, Artificial Sequence
  Description of Artificial Sequence: Synthetic oligonucleotide
ggcaaaagcuuaagcagua

SEQ ID NO: 2651398 - RNA, 19 nt, Artificial Sequence
  Description of Artificial Sequence: Synthetic oligonucleotide
cugccacaaucgagaguug

SEQ ID NO: 2651399 - RNA, 19 nt, Artificial Sequence
  Description of Artificial Sequence: Synthetic oligonucleotide
cccugaccauuaaaugaug

SEQ ID NO: 2651400 - RNA, 19 nt, Artificial Sequence
  Description of Artificial Sequence: Synthetic oligonucleotide
cagaacagcuaggcuaaaa

SEQ ID NO: 2651401 - RNA, 19 nt, Artificial Sequence
  Description of Artificial Sequence: Synthetic oligonucleotide
augcugaaucugccacaau

SEQ ID NO: 2651402 - RNA, 19 nt, Artificial Sequence
  Description of Artificial Sequence: Synthetic oligonucleotide
ccugacuaaaugcuuuugu

SEQ ID NO: 2651403 - RNA, 19 nt, Artificial Sequence
  Description of Artificial Sequence: Synthetic oligonucleotide
cugcucucuucucucuaaa

SEQ ID NO: 2651404 - RNA, 19 nt, Artificial Sequence
  Description of Artificial Sequence: Synthetic oligonucleotide
gacccuuccuaaacaucua

SEQ ID NO: 2651405 - RNA, 19 nt, Artificial Sequence
  Description of Artificial Sequence: Synthetic oligonucleotide
guaccaaguccuugaugau

SEQ ID NO: 2651406 - RNA, 19 nt, Artificial Sequence
  Description of Artificial Sequence: Synthetic oligonucleotide
ggcuuaguugcaucaccua

SEQ ID NO: 2651407 - RNA, 19 nt, Artificial Sequence
  Description of Artificial Sequence: Synthetic oligonucleotide
cuacccuguguaacccucu

SEQ ID NO: 2651408 - RNA, 19 nt, Artificial Sequence
  Description of Artificial Sequence: Synthetic oligonucleotide
cacuguaguggugaaugau

SEQ ID NO: 2651409 - RNA, 19 nt, Artificial Sequence
  Description of Artificial Sequence: Synthetic oligonucleotide
aguugccacaugagaggua

SEQ ID NO: 2651410 - RNA, 19 nt, Artificial Sequence
  Description of Artificial Sequence: Synthetic oligonucleotide
ggagcacuguaguggugaa

SEQ ID NO: 2651411 - RNA, 19 nt, Artificial Sequence
  Description of Artificial Sequence: Synthetic oligonucleotide
ccuaagggaaccugaacuu

SEQ ID NO: 2651412 - RNA, 19 nt, Artificial Sequence
  Description of Artificial Sequence: Synthetic oligonucleotide
ccacaaucgagaguuguua

SEQ ID NO: 2651413 - RNA, 19 nt, Artificial Sequence
  Description of Artificial Sequence: Synthetic oligonucleotide
cgagaguuguuauccaugu

SEQ ID NO: 2651414 - RNA, 19 nt, Artificial Sequence
  Description of Artificial Sequence: Synthetic oligonucleotide
ccagcaccauuguuauuca

SEQ ID NO: 2651415 - RNA, 19 nt, Artificial Sequence
  Description of Artificial Sequence: Synthetic oligonucleotide
augaugugacugacauaua

SEQ ID NO: 2651416 - RNA, 19 nt, Artificial Sequence
  Description of Artificial Sequence: Synthetic oligonucleotide
ccccugaccauuaaaugau

SEQ ID NO: 2651417 - RNA, 19 nt, Artificial Sequence
  Description of Artificial Sequence: Synthetic oligonucleotide
cucucucuguagugucacu

SEQ ID NO: 2651418 - RNA, 19 nt, Artificial Sequence
  Description of Artificial Sequence: Synthetic oligonucleotide
gggaaguaaguaggugacu

SEQ ID NO: 2651419 - RNA, 19 nt, Artificial Sequence
  Description of Artificial Sequence: Synthetic oligonucleotide
gagcacuguaguggugaau

SEQ ID NO: 2651420 - RNA, 19 nt, Artificial Sequence
  Description of Artificial Sequence: Synthetic oligonucleotide
cuguacuccccugaccauu

SEQ ID NO: 2651421 - RNA, 19 nt, Artificial Sequence
  Description of Artificial Sequence: Synthetic oligonucleotide
ccucuggguagaguugcca

SEQ ID NO: 2651422 - RNA, 19 nt, Artificial Sequence
  Description of Artificial Sequence: Synthetic oligonucleotide
ggcaucuguucuguagcau

SEQ ID NO: 2651423 - RNA, 19 nt, Artificial Sequence
  Description of Artificial Sequence: Synthetic oligonucleotide
gccacaaucgagaguuguu

SEQ ID NO: 2651424 - RNA, 19 nt, Artificial Sequence
  Description of Artificial Sequence: Synthetic oligonucleotide
gcaucaccuaagggaaccu

SEQ ID NO: 2651425 - RNA, 19 nt, Artificial Sequence
  Description of Artificial Sequence: Synthetic oligonucleotide
cucgagccuuuaggaaacu

SEQ ID NO: 2651426 - RNA, 19 nt, Artificial Sequence
  Description of Artificial Sequence: Synthetic oligonucleotide
ccuguacuccccugaccau

SEQ ID NO: 2651427 - RNA, 19 nt, Artificial Sequence
  Description of Artificial Sequence: Synthetic oligonucleotide
ccagaacagcuaggcuaaa

SEQ ID NO: 2651428 - RNA, 19 nt, Artificial Sequence
  Description of Artificial Sequence: Synthetic oligonucleotide
gcgcuccucuggguagagu

SEQ ID NO: 2651429 - RNA, 19 nt, Artificial Sequence
  Description of Artificial Sequence: Synthetic oligonucleotide
ucgaaaauuaaacagauac

SEQ ID NO: 2651430 - RNA, 19 nt, Artificial Sequence
  Description of Artificial Sequence: Synthetic oligonucleotide
aacagauacuuguauuugc

SEQ ID NO: 2651431 - RNA, 19 nt, Artificial Sequence
  Description of Artificial Sequence: Synthetic oligonucleotide
uuuugguguacucucaacg

SEQ ID NO: 2651432 - RNA, 19 nt, Artificial Sequence
  Description of Artificial Sequence: Synthetic oligonucleotide
gauguagugaaccccaugg

SEQ ID NO: 2651433 - RNA, 19 nt, Artificial Sequence
  Description of Artificial Sequence: Synthetic oligonucleotide
aaugagaggaucucuuuuc

SEQ ID NO: 2651434 - RNA, 19 nt, Artificial Sequence
  Description of Artificial Sequence: Synthetic oligonucleotide
ucuuucauagauuuccagg

SEQ ID NO: 2651435 - RNA, 19 nt, Artificial Sequence
  Description of Artificial Sequence: Synthetic oligonucleotide
uuauaggacaggaauuugg

SEQ ID NO: 2651436 - RNA, 19 nt, Artificial Sequence
  Description of Artificial Sequence: Synthetic oligonucleotide
gaucuauugaugaacaucc

SEQ ID NO: 2651437 - RNA, 19 nt, Artificial Sequence
  Description of Artificial Sequence: Synthetic oligonucleotide
aacggaaacuugcagcuac

SEQ ID NO: 2651438 - RNA, 19 nt, Artificial Sequence
  Description of Artificial Sequence: Synthetic oligonucleotide
cuuucauagauuuccaggc

SEQ ID NO: 2651439 - RNA, 19 nt, Artificial Sequence
  Description of Artificial Sequence: Synthetic oligonucleotide
ucuuguuacauuauaggac

SEQ ID NO: 2651440 - RNA, 19 nt, Artificial Sequence
  Description of Artificial Sequence: Synthetic oligonucleotide
aaugguuaugaugaacugg

SEQ ID NO: 2651441 - RNA, 19 nt, Artificial Sequence
  Description of Artificial Sequence: Synthetic oligonucleotide
aggaagagaugcuugaaac

SEQ ID NO: 2651442 - RNA, 19 nt, Artificial Sequence
  Description of Artificial Sequence: Synthetic oligonucleotide
gauacuuguauuugcagug

SEQ ID NO: 2651443 - RNA, 19 nt, Artificial Sequence
  Description of Artificial Sequence: Synthetic oligonucleotide
uuuucuuuucccauggcca

SEQ ID NO: 2651444 - RNA, 19 nt, Artificial Sequence
  Description of Artificial Sequence: Synthetic oligonucleotide
agaugcuugaaacggaaac

SEQ ID NO: 2651445 - RNA, 19 nt, Artificial Sequence
  Description of Artificial Sequence: Synthetic oligonucleotide
gaguauucagucaagaggc

SEQ ID NO: 2651446 - RNA, 19 nt, Artificial Sequence
  Description of Artificial Sequence: Synthetic oligonucleotide
aagaauuccacccacucau

SEQ ID NO: 2651447 - RNA, 19 nt, Artificial Sequence
  Description of Artificial Sequence: Synthetic oligonucleotide
uugaugaacauccuuggca

SEQ ID NO: 2651448 - RNA, 19 nt, Artificial Sequence
  Description of Artificial Sequence: Synthetic oligonucleotide
ugaugaacauccuuggcag

SEQ ID NO: 2651449 - RNA, 19 nt, Artificial Sequence
  Description of Artificial Sequence: Synthetic oligonucleotide
aaaauguccacgcaggaua

SEQ ID NO: 2651450 - RNA, 19 nt, Artificial Sequence
  Description of Artificial Sequence: Synthetic oligonucleotide
ugaaacggaaacuugcagc

SEQ ID NO: 2651451 - RNA, 19 nt, Artificial Sequence
  Description of Artificial Sequence: Synthetic oligonucleotide
cuucuuguuacauuauagg

SEQ ID NO: 2651452 - RNA, 19 nt, Artificial Sequence
  Description of Artificial Sequence: Synthetic oligonucleotide
uuucccauggccauugugc

SEQ ID NO: 2651453 - RNA, 19 nt, Artificial Sequence
  Description of Artificial Sequence: Synthetic oligonucleotide
uacaccucgaaaauuaaac

SEQ ID NO: 2651454 - RNA, 19 nt, Artificial Sequence
  Description of Artificial Sequence: Synthetic oligonucleotide
uucuuguuacauuauagga

SEQ ID NO: 2651455 - RNA, 19 nt, Artificial Sequence
  Description of Artificial Sequence: Synthetic oligonucleotide
augguuaugaugaacuggc

SEQ ID NO: 2651456 - RNA, 19 nt, Artificial Sequence
  Description of Artificial Sequence: Synthetic oligonucleotide
aauuccacccacucaucac

SEQ ID NO: 2651457 - RNA, 19 nt, Artificial Sequence
  Description of Artificial Sequence: Synthetic oligonucleotide
ggaguauucagucaagagg

SEQ ID NO: 2651458 - RNA, 19 nt, Artificial Sequence
  Description of Artificial Sequence: Synthetic oligonucleotide
uuugcagugaucuauugau

SEQ ID NO: 2651459 - RNA, 19 nt, Artificial Sequence
  Description of Artificial Sequence: Synthetic oligonucleotide
uugauccucggaaauaugc

SEQ ID NO: 2651460 - RNA, 19 nt, Artificial Sequence
  Description of Artificial Sequence: Synthetic oligonucleotide
ucuguuuugacugggaugu

SEQ ID NO: 2651461 - RNA, 19 nt, Artificial Sequence
  Description of Artificial Sequence: Synthetic oligonucleotide
auuccacccacucaucacc

SEQ ID NO: 2651462 - RNA, 19 nt, Artificial Sequence
  Description of Artificial Sequence: Synthetic oligonucleotide
gaaacuugcagcuacaccu

SEQ ID NO: 2651463 - RNA, 19 nt, Artificial Sequence
  Description of Artificial Sequence: Synthetic oligonucleotide
guaucuuucauagauuucc

SEQ ID NO: 2651464 - RNA, 19 nt, Artificial Sequence
  Description of Artificial Sequence: Synthetic oligonucleotide
aaaguggccacacggcagg

SEQ ID NO: 2651465 - RNA, 19 nt, Artificial Sequence
  Description of Artificial Sequence: Synthetic oligonucleotide
gacagaagaaaugagagga

SEQ ID NO: 2651466 - RNA, 19 nt, Artificial Sequence
  Description of Artificial Sequence: Synthetic oligonucleotide
uguacucucaacgagcuug

SEQ ID NO: 2651467 - RNA, 19 nt, Artificial Sequence
  Description of Artificial Sequence: Synthetic oligonucleotide
uuaacuguggguagaagaa

SEQ ID NO: 2651468 - RNA, 19 nt, Artificial Sequence
  Description of Artificial Sequence: Synthetic oligonucleotide
aagaggcucucccaguaac

SEQ ID NO: 2651469 - RNA, 19 nt, Artificial Sequence
  Description of Artificial Sequence: Synthetic oligonucleotide
aaaugguuaugaugaacug

SEQ ID NO: 2651470 - RNA, 19 nt, Artificial Sequence
  Description of Artificial Sequence: Synthetic oligonucleotide
uauaggacaggaauuugga

SEQ ID NO: 2651471 - RNA, 19 nt, Artificial Sequence
  Description of Artificial Sequence: Synthetic oligonucleotide
ucaccaacauggaagacca

SEQ ID NO: 2651472 - RNA, 19 nt, Artificial Sequence
  Description of Artificial Sequence: Synthetic oligonucleotide
agaccagcgaaccacacag

SEQ ID NO: 2651473 - RNA, 19 nt, Artificial Sequence
  Description of Artificial Sequence: Synthetic oligonucleotide
gagaggucuguuuugacug

SEQ ID NO: 2651474 - RNA, 19 nt, Artificial Sequence
  Description of Artificial Sequence: Synthetic oligonucleotide
ccacucaucaccaacaugg

SEQ ID NO: 2651475 - RNA, 19 nt, Artificial Sequence
  Description of Artificial Sequence: Synthetic oligonucleotide
ugcagugaucuauugauga

SEQ ID NO: 2651476 - RNA, 19 nt, Artificial Sequence
  Description of Artificial Sequence: Synthetic oligonucleotide
cugggcuuguccuugaucc

SEQ ID NO: 2651477 - RNA, 19 nt, Artificial Sequence
  Description of Artificial Sequence: Synthetic oligonucleotide
uguagugaaccccauggcu

SEQ ID NO: 2651478 - RNA, 19 nt, Artificial Sequence
  Description of Artificial Sequence: Synthetic oligonucleotide
acugggauguagugaaccc

SEQ ID NO: 2651479 - RNA, 19 nt, Artificial Sequence
  Description of Artificial Sequence: Synthetic oligonucleotide
agacagaagaaaugagagg

SEQ ID NO: 2651480 - RNA, 19 nt, Artificial Sequence
  Description of Artificial Sequence: Synthetic oligonucleotide
agcaauaucaucauuugcu

SEQ ID NO: 2651481 - RNA, 19 nt, Artificial Sequence
  Description of Artificial Sequence: Synthetic oligonucleotide
ucauucaugugcaaauggu

SEQ ID NO: 2651482 - RNA, 19 nt, Artificial Sequence
  Description of Artificial Sequence: Synthetic oligonucleotide
ugagcaauaucaucauuug

SEQ ID NO: 2651483 - RNA, 19 nt, Artificial Sequence
  Description of Artificial Sequence: Synthetic oligonucleotide
uucauagauuuccaggccu

SEQ ID NO: 2651484 - RNA, 19 nt, Artificial Sequence
  Description of Artificial Sequence: Synthetic oligonucleotide
uuucauagauuuccaggcc

SEQ ID NO: 2651485 - RNA, 19 nt, Artificial Sequence
  Description of Artificial Sequence: Synthetic oligonucleotide
caccucgaaaauuaaacag

SEQ ID NO: 2651486 - RNA, 19 nt, Artificial Sequence
  Description of Artificial Sequence: Synthetic oligonucleotide
accaacauggaagaccagc

SEQ ID NO: 2651487 - RNA, 19 nt, Artificial Sequence
  Description of Artificial Sequence: Synthetic oligonucleotide
aauuuggaguauucaguca

SEQ ID NO: 2651488 - RNA, 19 nt, Artificial Sequence
  Description of Artificial Sequence: Synthetic oligonucleotide
auuaaacagauacuuguau

SEQ ID NO: 2651489 - RNA, 19 nt, Artificial Sequence
  Description of Artificial Sequence: Synthetic oligonucleotide
agauacuuguauuugcagu

SEQ ID NO: 2651490 - RNA, 19 nt, Artificial Sequence
  Description of Artificial Sequence: Synthetic oligonucleotide
aguuccuggacauuggaga

SEQ ID NO: 2651491 - RNA, 19 nt, Artificial Sequence
  Description of Artificial Sequence: Synthetic oligonucleotide
ggauaaaguggccacacgg

SEQ ID NO: 2651492 - RNA, 19 nt, Artificial Sequence
  Description of Artificial Sequence: Synthetic oligonucleotide
uugaaacggaaacuugcag

SEQ ID NO: 2651493 - RNA, 19 nt, Artificial Sequence
  Description of Artificial Sequence: Synthetic oligonucleotide
ucauaaucuuuccuucuug

SEQ ID NO: 2651494 - RNA, 19 nt, Artificial Sequence
  Description of Artificial Sequence: Synthetic oligonucleotide
aacauggaagaccagcgaa

SEQ ID NO: 2651495 - RNA, 19 nt, Artificial Sequence
  Description of Artificial Sequence: Synthetic oligonucleotide
uuugguguacucucaacga

SEQ ID NO: 2651496 - RNA, 19 nt, Artificial Sequence
  Description of Artificial Sequence: Synthetic oligonucleotide
gucauucaugugcaaaugg

SEQ ID NO: 2651497 - RNA, 19 nt, Artificial Sequence
  Description of Artificial Sequence: Synthetic oligonucleotide
ucccaaaauguccacgcag

SEQ ID NO: 2651498 - RNA, 19 nt, Artificial Sequence
  Description of Artificial Sequence: Synthetic oligonucleotide
uuaaacagauacuuguauu

SEQ ID NO: 2651499 - RNA, 19 nt, Artificial Sequence
  Description of Artificial Sequence: Synthetic oligonucleotide
agacccguaggauaaagug

SEQ ID NO: 2651500 - RNA, 19 nt, Artificial Sequence
  Description of Artificial Sequence: Synthetic oligonucleotide
uguuacauuauaggacagg

SEQ ID NO: 2651501 - RNA, 19 nt, Artificial Sequence
  Description of Artificial Sequence: Synthetic oligonucleotide
uguauuugcagugaucuau

SEQ ID NO: 2651502 - RNA, 19 nt, Artificial Sequence
  Description of Artificial Sequence: Synthetic oligonucleotide
uggaguauucagucaagag

SEQ ID NO: 2651503 - RNA, 19 nt, Artificial Sequence
  Description of Artificial Sequence: Synthetic oligonucleotide
auuuggaguauucagucaa

SEQ ID NO: 2651504 - RNA, 19 nt, Artificial Sequence
  Description of Artificial Sequence: Synthetic oligonucleotide
auguagugaaccccauggc

SEQ ID NO: 2651505 - RNA, 19 nt, Artificial Sequence
  Description of Artificial Sequence: Synthetic oligonucleotide
ugcagcuacaccucgaaaa

SEQ ID NO: 2651506 - RNA, 19 nt, Artificial Sequence
  Description of Artificial Sequence: Synthetic oligonucleotide
uugguguacucucaacgag

SEQ ID NO: 2651507 - RNA, 19 nt, Artificial Sequence
  Description of Artificial Sequence: Synthetic oligonucleotide
uugacugggauguagugaa

SEQ ID NO: 2651508 - RNA, 19 nt, Artificial Sequence
  Description of Artificial Sequence: Synthetic oligonucleotide
ugaucauaaucuuuccuuc

SEQ ID NO: 2651509 - RNA, 19 nt, Artificial Sequence
  Description of Artificial Sequence: Synthetic oligonucleotide
acccguaggauaaaguggc

SEQ ID NO: 2651510 - RNA, 19 nt, Artificial Sequence
  Description of Artificial Sequence: Synthetic oligonucleotide
aaaugagaggaucucuuuu

SEQ ID NO: 2651511 - RNA, 19 nt, Artificial Sequence
  Description of Artificial Sequence: Synthetic oligonucleotide
gauaaaguggccacacggc

SEQ ID NO: 2651512 - RNA, 19 nt, Artificial Sequence
  Description of Artificial Sequence: Synthetic oligonucleotide
uuuccgagacagaagaaau

SEQ ID NO: 2651513 - RNA, 19 nt, Artificial Sequence
  Description of Artificial Sequence: Synthetic oligonucleotide
aaauguccacgcaggauac

SEQ ID NO: 2651514 - RNA, 19 nt, Artificial Sequence
  Description of Artificial Sequence: Synthetic oligonucleotide
uccgagacagaagaaauga

SEQ ID NO: 2651515 - RNA, 19 nt, Artificial Sequence
  Description of Artificial Sequence: Synthetic oligonucleotide
ugaucuauugaugaacauc

SEQ ID NO: 2651516 - RNA, 19 nt, Artificial Sequence
  Description of Artificial Sequence: Synthetic oligonucleotide
ucauagauuuccaggccug

SEQ ID NO: 2651517 - RNA, 19 nt, Artificial Sequence
  Description of Artificial Sequence: Synthetic oligonucleotide
aacuugcagcuacaccucg

SEQ ID NO: 2651518 - RNA, 19 nt, Artificial Sequence
  Description of Artificial Sequence: Synthetic oligonucleotide
ugguguacucucaacgagc

SEQ ID NO: 2651519 - RNA, 19 nt, Artificial Sequence
  Description of Artificial Sequence: Synthetic oligonucleotide
gauccucggaaauaugcug

SEQ ID NO: 2651520 - RNA, 19 nt, Artificial Sequence
  Description of Artificial Sequence: Synthetic oligonucleotide
uuuggaguauucagucaag

SEQ ID NO: 2651521 - RNA, 19 nt, Artificial Sequence
  Description of Artificial Sequence: Synthetic oligonucleotide
ucuauugaugaacauccuu

SEQ ID NO: 2651522 - RNA, 19 nt, Artificial Sequence
  Description of Artificial Sequence: Synthetic oligonucleotide
uuacaaacugcaacaguuc

SEQ ID NO: 2651523 - RNA, 19 nt, Artificial Sequence
  Description of Artificial Sequence: Synthetic oligonucleotide
uaucuuucauagauuucca

SEQ ID NO: 2651524 - RNA, 19 nt, Artificial Sequence
  Description of Artificial Sequence: Synthetic oligonucleotide
uccaagacccguaggauaa

SEQ ID NO: 2651525 - RNA, 19 nt, Artificial Sequence
  Description of Artificial Sequence: Synthetic oligonucleotide
ggaagagaugcuugaaacg

SEQ ID NO: 2651526 - RNA, 19 nt, Artificial Sequence
  Description of Artificial Sequence: Synthetic oligonucleotide
ugggauguagugaacccca

SEQ ID NO: 2651527 - RNA, 19 nt, Artificial Sequence
  Description of Artificial Sequence: Synthetic oligonucleotide
ugauccucggaaauaugcu

SEQ ID NO: 2651528 - RNA, 19 nt, Artificial Sequence
  Description of Artificial Sequence: Synthetic oligonucleotide
uguuuugacugggauguag

SEQ ID NO: 2651529 - RNA, 19 nt, Artificial Sequence
  Description of Artificial Sequence: Synthetic oligonucleotide
gacccguaggauaaagugg

SEQ ID NO: 2651530 - RNA, 19 nt, Artificial Sequence
  Description of Artificial Sequence: Synthetic oligonucleotide
acaccucgaaaauuaaaca

SEQ ID NO: 2651531 - RNA, 19 nt, Artificial Sequence
  Description of Artificial Sequence: Synthetic oligonucleotide
caggauacaugauaucaug

SEQ ID NO: 2651532 - RNA, 19 nt, Artificial Sequence
  Description of Artificial Sequence: Synthetic oligonucleotide
gagcaauaucaucauuugc

SEQ ID NO: 2651533 - RNA, 19 nt, Artificial Sequence
  Description of Artificial Sequence: Synthetic oligonucleotide
aggauacaugauaucaugg

SEQ ID NO: 2651534 - RNA, 19 nt, Artificial Sequence
  Description of Artificial Sequence: Synthetic oligonucleotide
aaacugcaacaguuccugg

SEQ ID NO: 2651535 - RNA, 19 nt, Artificial Sequence
  Description of Artificial Sequence: Synthetic oligonucleotide
aucuuucauagauuuccag

SEQ ID NO: 2651536 - RNA, 19 nt, Artificial Sequence
  Description of Artificial Sequence: Synthetic oligonucleotide
agucaagaggcucucccag

SEQ ID NO: 2651537 - RNA, 19 nt, Artificial Sequence
  Description of Artificial Sequence: Synthetic oligonucleotide
uuguuacauuauaggacag

SEQ ID NO: 2651538 - RNA, 19 nt, Artificial Sequence
  Description of Artificial Sequence: Synthetic oligonucleotide
guuacauuauaggacagga

SEQ ID NO: 2651539 - RNA, 19 nt, Artificial Sequence
  Description of Artificial Sequence: Synthetic oligonucleotide
uuuuccgagacagaagaaa

SEQ ID NO: 2651540 - RNA, 19 nt, Artificial Sequence
  Description of Artificial Sequence: Synthetic oligonucleotide
agguaucuuucauagauuu

SEQ ID NO: 2651541 - RNA, 19 nt, Artificial Sequence
  Description of Artificial Sequence: Synthetic oligonucleotide
gaaacggaaacuugcagcu

SEQ ID NO: 2651542 - RNA, 19 nt, Artificial Sequence
  Description of Artificial Sequence: Synthetic oligonucleotide
aauuaaacagauacuugua

SEQ ID NO: 2651543 - RNA, 19 nt, Artificial Sequence
  Description of Artificial Sequence: Synthetic oligonucleotide
ucggaaauaugcuguagaa

SEQ ID NO: 2651544 - RNA, 19 nt, Artificial Sequence
  Description of Artificial Sequence: Synthetic oligonucleotide
aaauaugcuguagaauuuu

SEQ ID NO: 2651545 - RNA, 19 nt, Artificial Sequence
  Description of Artificial Sequence: Synthetic oligonucleotide
ugcuugaaacggaaacuug

SEQ ID NO: 2651546 - RNA, 19 nt, Artificial Sequence
  Description of Artificial Sequence: Synthetic oligonucleotide
uuccgagacagaagaaaug

SEQ ID NO: 2651547 - RNA, 19 nt, Artificial Sequence
  Description of Artificial Sequence: Synthetic oligonucleotide
uuacauuauaggacaggaa

SEQ ID NO: 2651548 - RNA, 19 nt, Artificial Sequence
  Description of Artificial Sequence: Synthetic oligonucleotide
ggguagaagaauuccaccc

SEQ ID NO: 2651549 - RNA, 19 nt, Artificial Sequence
  Description of Artificial Sequence: Synthetic oligonucleotide
caaaugguuaugaugaacu

SEQ ID NO: 2651550 - RNA, 19 nt, Artificial Sequence
  Description of Artificial Sequence: Synthetic oligonucleotide
uaacaggugaugucauuca

SEQ ID NO: 2651551 - RNA, 19 nt, Artificial Sequence
  Description of Artificial Sequence: Synthetic oligonucleotide
aaacuugcagcuacaccuc

SEQ ID NO: 2651552 - RNA, 19 nt, Artificial Sequence
  Description of Artificial Sequence: Synthetic oligonucleotide
guuccuggacauuggagag

SEQ ID NO: 2651553 - RNA, 19 nt, Artificial Sequence
  Description of Artificial Sequence: Synthetic oligonucleotide
agaagaaaugagaggaucu

SEQ ID NO: 2651554 - RNA, 19 nt, Artificial Sequence
  Description of Artificial Sequence: Synthetic oligonucleotide
gcuuuuacaaacugcaaca

SEQ ID NO: 2651555 - RNA, 19 nt, Artificial Sequence
  Description of Artificial Sequence: Synthetic oligonucleotide
uagcagaucuucucugaag

SEQ ID NO: 2651556 - RNA, 19 nt, Artificial Sequence
  Description of Artificial Sequence: Synthetic oligonucleotide
gaagaauuccacccacuca

SEQ ID NO: 2651557 - RNA, 19 nt, Artificial Sequence
  Description of Artificial Sequence: Synthetic oligonucleotide
gaacauccuuggcagcugg

SEQ ID NO: 2651558 - RNA, 19 nt, Artificial Sequence
  Description of Artificial Sequence: Synthetic oligonucleotide
cagauacuuguauuugcag

SEQ ID NO: 2651559 - RNA, 19 nt, Artificial Sequence
  Description of Artificial Sequence: Synthetic oligonucleotide
uuuucccauggccauugug

SEQ ID NO: 2651560 - RNA, 19 nt, Artificial Sequence
  Description of Artificial Sequence: Synthetic oligonucleotide
auuggagaggucuguuuug

SEQ ID NO: 2651561 - RNA, 19 nt, Artificial Sequence
  Description of Artificial Sequence: Synthetic oligonucleotide
aagaccagcgaaccacaca

SEQ ID NO: 2651562 - RNA, 19 nt, Artificial Sequence
  Description of Artificial Sequence: Synthetic oligonucleotide
guagaagaauuccacccac

SEQ ID NO: 2651563 - RNA, 19 nt, Artificial Sequence
  Description of Artificial Sequence: Synthetic oligonucleotide
aggacaggaauuuggagua

SEQ ID NO: 2651564 - RNA, 19 nt, Artificial Sequence
  Description of Artificial Sequence: Synthetic oligonucleotide
uugcagugaucuauugaug

SEQ ID NO: 2651565 - RNA, 19 nt, Artificial Sequence
  Description of Artificial Sequence: Synthetic oligonucleotide
agugaucuauugaugaaca

SEQ ID NO: 2651566 - RNA, 19 nt, Artificial Sequence
  Description of Artificial Sequence: Synthetic oligonucleotide
uuaugaugaacuggcuccc

SEQ ID NO: 2651567 - RNA, 19 nt, Artificial Sequence
  Description of Artificial Sequence: Synthetic oligonucleotide
acauggaagaccagcgaac

SEQ ID NO: 2651568 - RNA, 19 nt, Artificial Sequence
  Description of Artificial Sequence: Synthetic oligonucleotide
auggcuuuaacugugggua

SEQ ID NO: 2651569 - RNA, 19 nt, Artificial Sequence
  Description of Artificial Sequence: Synthetic oligonucleotide
uuagcagaucuucucugaa

SEQ ID NO: 2651570 - RNA, 19 nt, Artificial Sequence
  Description of Artificial Sequence: Synthetic oligonucleotide
ugaagaggucccaccgucc

SEQ ID NO: 2651571 - RNA, 19 nt, Artificial Sequence
  Description of Artificial Sequence: Synthetic oligonucleotide
ugagaggaucucuuuucug

SEQ ID NO: 2651572 - RNA, 19 nt, Artificial Sequence
  Description of Artificial Sequence: Synthetic oligonucleotide
cauggaagaccagcgaacc

SEQ ID NO: 2651573 - RNA, 19 nt, Artificial Sequence
  Description of Artificial Sequence: Synthetic oligonucleotide
gaagaaaugagaggaucuc

SEQ ID NO: 2651574 - RNA, 19 nt, Artificial Sequence
  Description of Artificial Sequence: Synthetic oligonucleotide
agaggucuguuuugacugg

SEQ ID NO: 2651575 - RNA, 19 nt, Artificial Sequence
  Description of Artificial Sequence: Synthetic oligonucleotide
gaauuccacccacucauca

SEQ ID NO: 2651576 - RNA, 19 nt, Artificial Sequence
  Description of Artificial Sequence: Synthetic oligonucleotide
ugucauucaugugcaaaug

SEQ ID NO: 2651577 - RNA, 19 nt, Artificial Sequence
  Description of Artificial Sequence: Synthetic oligonucleotide
aggauaaaguggccacacg

SEQ ID NO: 2651578 - RNA, 19 nt, Artificial Sequence
  Description of Artificial Sequence: Synthetic oligonucleotide
uagaagaauuccacccacu

SEQ ID NO: 2651579 - RNA, 19 nt, Artificial Sequence
  Description of Artificial Sequence: Synthetic oligonucleotide
gacugggauguagugaacc

SEQ ID NO: 2651580 - RNA, 19 nt, Artificial Sequence
  Description of Artificial Sequence: Synthetic oligonucleotide
ggaaauaugcuguagaauu

SEQ ID NO: 2651581 - RNA, 19 nt, Artificial Sequence
  Description of Artificial Sequence: Synthetic oligonucleotide
ccaacauggaagaccagcg

SEQ ID NO: 2651582 - RNA, 19 nt, Artificial Sequence
  Description of Artificial Sequence: Synthetic oligonucleotide
gaugaacauccuuggcagc

SEQ ID NO: 2651583 - RNA, 19 nt, Artificial Sequence
  Description of Artificial Sequence: Synthetic oligonucleotide
ucuuuucccauggccauug

SEQ ID NO: 2651584 - RNA, 19 nt, Artificial Sequence
  Description of Artificial Sequence: Synthetic oligonucleotide
gaggaucucuuuucugggc

SEQ ID NO: 2651585 - RNA, 19 nt, Artificial Sequence
  Description of Artificial Sequence: Synthetic oligonucleotide
guaacaggugaugucauuc

SEQ ID NO: 2651586 - RNA, 19 nt, Artificial Sequence
  Description of Artificial Sequence: Synthetic oligonucleotide
accucgaaaauuaaacaga

SEQ ID NO: 2651587 - RNA, 19 nt, Artificial Sequence
  Description of Artificial Sequence: Synthetic oligonucleotide
ucugaagaggucccaccgu

SEQ ID NO: 2651588 - RNA, 19 nt, Artificial Sequence
  Description of Artificial Sequence: Synthetic oligonucleotide
ugcaacaguuccuggacau

SEQ ID NO: 2651589 - RNA, 19 nt, Artificial Sequence
  Description of Artificial Sequence: Synthetic oligonucleotide
accagcgaaccacacagga

SEQ ID NO: 2651590 - RNA, 19 nt, Artificial Sequence
  Description of Artificial Sequence: Synthetic oligonucleotide
caagguaucuuucauagau

SEQ ID NO: 2651591 - RNA, 19 nt, Artificial Sequence
  Description of Artificial Sequence: Synthetic oligonucleotide
uuggaguauucagucaaga

SEQ ID NO: 2651592 - RNA, 19 nt, Artificial Sequence
  Description of Artificial Sequence: Synthetic oligonucleotide
aucauaaucuuuccuucuu

SEQ ID NO: 2651593 - RNA, 19 nt, Artificial Sequence
  Description of Artificial Sequence: Synthetic oligonucleotide
ucaugugcaaaugguuaug

SEQ ID NO: 2651594 - RNA, 19 nt, Artificial Sequence
  Description of Artificial Sequence: Synthetic oligonucleotide
acucucaacgagcuuggga

SEQ ID NO: 2651595 - RNA, 19 nt, Artificial Sequence
  Description of Artificial Sequence: Synthetic oligonucleotide
uggcuuuaacuguggguag

SEQ ID NO: 2651596 - RNA, 19 nt, Artificial Sequence
  Description of Artificial Sequence: Synthetic oligonucleotide
acagauacuuguauuugca

SEQ ID NO: 2651597 - RNA, 19 nt, Artificial Sequence
  Description of Artificial Sequence: Synthetic oligonucleotide
uccuucuuguuacauuaua

SEQ ID NO: 2651598 - RNA, 19 nt, Artificial Sequence
  Description of Artificial Sequence: Synthetic oligonucleotide
acuuguauuugcagugauc

SEQ ID NO: 2651599 - RNA, 19 nt, Artificial Sequence
  Description of Artificial Sequence: Synthetic oligonucleotide
auaaucuuuccuucuuguu

SEQ ID NO: 2651600 - RNA, 19 nt, Artificial Sequence
  Description of Artificial Sequence: Synthetic oligonucleotide
cagaagaaaugagaggauc

SEQ ID NO: 2651601 - RNA, 19 nt, Artificial Sequence
  Description of Artificial Sequence: Synthetic oligonucleotide
gguuaugaugaacuggcuc

SEQ ID NO: 2651602 - RNA, 19 nt, Artificial Sequence
  Description of Artificial Sequence: Synthetic oligonucleotide
uucccauggccauugugcu

SEQ ID NO: 2651603 - RNA, 19 nt, Artificial Sequence
  Description of Artificial Sequence: Synthetic oligonucleotide
cccaaaauguccacgcagg

SEQ ID NO: 2651604 - RNA, 19 nt, Artificial Sequence
  Description of Artificial Sequence: Synthetic oligonucleotide
cagugaucuauugaugaac

SEQ ID NO: 2651605 - RNA, 19 nt, Artificial Sequence
  Description of Artificial Sequence: Synthetic oligonucleotide
uacuuguauuugcagugau

SEQ ID NO: 2651606 - RNA, 19 nt, Artificial Sequence
  Description of Artificial Sequence: Synthetic oligonucleotide
agauuuccaggccugguuu

SEQ ID NO: 2651607 - RNA, 19 nt, Artificial Sequence
  Description of Artificial Sequence: Synthetic oligonucleotide
uucccaaaauguccacgca

SEQ ID NO: 2651608 - RNA, 19 nt, Artificial Sequence
  Description of Artificial Sequence: Synthetic oligonucleotide
uccuggacauuggagaggu

SEQ ID NO: 2651609 - RNA, 19 nt, Artificial Sequence
  Description of Artificial Sequence: Synthetic oligonucleotide
acuguggguagaagaauuc

SEQ ID NO: 2651610 - RNA, 19 nt, Artificial Sequence
  Description of Artificial Sequence: Synthetic oligonucleotide
gaugucauucaugugcaaa

SEQ ID NO: 2651611 - RNA, 19 nt, Artificial Sequence
  Description of Artificial Sequence: Synthetic oligonucleotide
caucauuugcuuuuacaaa

SEQ ID NO: 2651612 - RNA, 19 nt, Artificial Sequence
  Description of Artificial Sequence: Synthetic oligonucleotide
uaucaucauuugcuuuuac

SEQ ID NO: 2651613 - RNA, 19 nt, Artificial Sequence
  Description of Artificial Sequence: Synthetic oligonucleotide
uuggcagcuggcuuuccca

SEQ ID NO: 2651614 - RNA, 19 nt, Artificial Sequence
  Description of Artificial Sequence: Synthetic oligonucleotide
guccacgcaggauacauga

SEQ ID NO: 2651615 - RNA, 19 nt, Artificial Sequence
  Description of Artificial Sequence: Synthetic oligonucleotide
gcuugaaacggaaacuugc

SEQ ID NO: 2651616 - RNA, 19 nt, Artificial Sequence
  Description of Artificial Sequence: Synthetic oligonucleotide
aacuguggguagaagaauu

SEQ ID NO: 2651617 - RNA, 19 nt, Artificial Sequence
  Description of Artificial Sequence: Synthetic oligonucleotide
cuguggguagaagaauucc

SEQ ID NO: 2651618 - RNA, 19 nt, Artificial Sequence
  Description of Artificial Sequence: Synthetic oligonucleotide
cauagauuuccaggccugg

SEQ ID NO: 2651619 - RNA, 19 nt, Artificial Sequence
  Description of Artificial Sequence: Synthetic oligonucleotide
gaucauaaucuuuccuucu

SEQ ID NO: 2651620 - RNA, 19 nt, Artificial Sequence
  Description of Artificial Sequence: Synthetic oligonucleotide
aagagaugcuugaaacgga

SEQ ID NO: 2651621 - RNA, 19 nt, Artificial Sequence
  Description of Artificial Sequence: Synthetic oligonucleotide
ucucccaguaacaggugau

SEQ ID NO: 2651622 - RNA, 19 nt, Artificial Sequence
  Description of Artificial Sequence: Synthetic oligonucleotide
ggaaacuugcagcuacacc

SEQ ID NO: 2651623 - RNA, 19 nt, Artificial Sequence
  Description of Artificial Sequence: Synthetic oligonucleotide
cuuagcagaucuucucuga

SEQ ID NO: 2651624 - RNA, 19 nt, Artificial Sequence
  Description of Artificial Sequence: Synthetic oligonucleotide
cucggaaauaugcuguaga

SEQ ID NO: 2651625 - RNA, 19 nt, Artificial Sequence
  Description of Artificial Sequence: Synthetic oligonucleotide
ggucccaccguccaagacc

SEQ ID NO: 2651626 - RNA, 19 nt, Artificial Sequence
  Description of Artificial Sequence: Synthetic oligonucleotide
gaagaggucccaccgucca

SEQ ID NO: 2651627 - RNA, 19 nt, Artificial Sequence
  Description of Artificial Sequence: Synthetic oligonucleotide
uuccacccacucaucacca

SEQ ID NO: 2651628 - RNA, 19 nt, Artificial Sequence
  Description of Artificial Sequence: Synthetic oligonucleotide
uuccuggacauuggagagg

SEQ ID NO: 2651629 - RNA, 19 nt, Artificial Sequence
  Description of Artificial Sequence: Synthetic oligonucleotide
uguccacgcaggauacaug

SEQ ID NO: 2651630 - RNA, 19 nt, Artificial Sequence
  Description of Artificial Sequence: Synthetic oligonucleotide
gguagaagaauuccaccca

SEQ ID NO: 2651631 - RNA, 19 nt, Artificial Sequence
  Description of Artificial Sequence: Synthetic oligonucleotide
ugccuuagcagaucuucuc

SEQ ID NO: 2651632 - RNA, 19 nt, Artificial Sequence
  Description of Artificial Sequence: Synthetic oligonucleotide
guggguagaagaauuccac

SEQ ID NO: 2651633 - RNA, 19 nt, Artificial Sequence
  Description of Artificial Sequence: Synthetic oligonucleotide
ugguuaugaugaacuggcu

SEQ ID NO: 2651634 - RNA, 19 nt, Artificial Sequence
  Description of Artificial Sequence: Synthetic oligonucleotide
acaguuccuggacauugga

SEQ ID NO: 2651635 - RNA, 19 nt, Artificial Sequence
  Description of Artificial Sequence: Synthetic oligonucleotide
cugggauguagugaacccc

SEQ ID NO: 2651636 - RNA, 19 nt, Artificial Sequence
  Description of Artificial Sequence: Synthetic oligonucleotide
guacucucaacgagcuugg

SEQ ID NO: 2651637 - RNA, 19 nt, Artificial Sequence
  Description of Artificial Sequence: Synthetic oligonucleotide
cuugauccucggaaauaug

SEQ ID NO: 2651638 - RNA, 19 nt, Artificial Sequence
  Description of Artificial Sequence: Synthetic oligonucleotide
uagcaauuuccugagcaau

SEQ ID NO: 2651639 - RNA, 19 nt, Artificial Sequence
  Description of Artificial Sequence: Synthetic oligonucleotide
agaaaugagaggaucucuu

SEQ ID NO: 2651640 - RNA, 19 nt, Artificial Sequence
  Description of Artificial Sequence: Synthetic oligonucleotide
cuuggcagcuggcuuuccc

SEQ ID NO: 2651641 - RNA, 19 nt, Artificial Sequence
  Description of Artificial Sequence: Synthetic oligonucleotide
cucucaacgagcuugggau

SEQ ID NO: 2651642 - RNA, 19 nt, Artificial Sequence
  Description of Artificial Sequence: Synthetic oligonucleotide
cuggcuuucccaagguauc

SEQ ID NO: 2651643 - RNA, 19 nt, Artificial Sequence
  Description of Artificial Sequence: Synthetic oligonucleotide
aagacccguaggauaaagu

SEQ ID NO: 2651644 - RNA, 19 nt, Artificial Sequence
  Description of Artificial Sequence: Synthetic oligonucleotide
ugcaaaugguuaugaugaa

SEQ ID NO: 2651645 - RNA, 19 nt, Artificial Sequence
  Description of Artificial Sequence: Synthetic oligonucleotide
auacuuguauuugcaguga

SEQ ID NO: 2651646 - RNA, 19 nt, Artificial Sequence
  Description of Artificial Sequence: Synthetic oligonucleotide
accccauggcuuuaacugu

SEQ ID NO: 2651647 - RNA, 19 nt, Artificial Sequence
  Description of Artificial Sequence: Synthetic oligonucleotide
ucccaguaacaggugaugu

SEQ ID NO: 2651648 - RNA, 19 nt, Artificial Sequence
  Description of Artificial Sequence: Synthetic oligonucleotide
acgcaggauacaugauauc

SEQ ID NO: 2651649 - RNA, 19 nt, Artificial Sequence
  Description of Artificial Sequence: Synthetic oligonucleotide
acaaacugcaacaguuccu

SEQ ID NO: 2651650 - RNA, 19 nt, Artificial Sequence
  Description of Artificial Sequence: Synthetic oligonucleotide
ugaacauccuuggcagcug

SEQ ID NO: 2651651 - RNA, 19 nt, Artificial Sequence
  Description of Artificial Sequence: Synthetic oligonucleotide
aaccacacaggaagagaug

SEQ ID NO: 2651652 - RNA, 19 nt, Artificial Sequence
  Description of Artificial Sequence: Synthetic oligonucleotide
cauaaucuuuccuucuugu

SEQ ID NO: 2651653 - RNA, 19 nt, Artificial Sequence
  Description of Artificial Sequence: Synthetic oligonucleotide
augcuugaaacggaaacuu

SEQ ID NO: 2651654 - RNA, 19 nt, Artificial Sequence
  Description of Artificial Sequence: Synthetic oligonucleotide
ucccaagguaucuuucaua

SEQ ID NO: 2651655 - RNA, 19 nt, Artificial Sequence
  Description of Artificial Sequence: Synthetic oligonucleotide
agcuacaccucgaaaauua

SEQ ID NO: 2651656 - RNA, 19 nt, Artificial Sequence
  Description of Artificial Sequence: Synthetic oligonucleotide
auccucggaaauaugcugu

SEQ ID NO: 2651657 - RNA, 19 nt, Artificial Sequence
  Description of Artificial Sequence: Synthetic oligonucleotide
aagguaucuuucauagauu

SEQ ID NO: 2651658 - RNA, 19 nt, Artificial Sequence
  Description of Artificial Sequence: Synthetic oligonucleotide
uagugaaccccauggcuuu

SEQ ID NO: 2651659 - RNA, 19 nt, Artificial Sequence
  Description of Artificial Sequence: Synthetic oligonucleotide
auggaagaccagcgaacca

SEQ ID NO: 2651660 - RNA, 19 nt, Artificial Sequence
  Description of Artificial Sequence: Synthetic oligonucleotide
uuguauuugcagugaucua

SEQ ID NO: 2651661 - RNA, 19 nt, Artificial Sequence
  Description of Artificial Sequence: Synthetic oligonucleotide
acacaggaagagaugcuug

SEQ ID NO: 2651662 - RNA, 19 nt, Artificial Sequence
  Description of Artificial Sequence: Synthetic oligonucleotide
uaacuguggguagaagaau

SEQ ID NO: 2651663 - RNA, 19 nt, Artificial Sequence
  Description of Artificial Sequence: Synthetic oligonucleotide
acauuggagaggucuguuu

SEQ ID NO: 2651664 - RNA, 19 nt, Artificial Sequence
  Description of Artificial Sequence: Synthetic oligonucleotide
accguccaagacccguagg

SEQ ID NO: 2651665 - RNA, 19 nt, Artificial Sequence
  Description of Artificial Sequence: Synthetic oligonucleotide
aggucccaccguccaagac

SEQ ID NO: 2651666 - RNA, 19 nt, Artificial Sequence
  Description of Artificial Sequence: Synthetic oligonucleotide
augugcaaaugguuaugau

SEQ ID NO: 2651667 - RNA, 19 nt, Artificial Sequence
  Description of Artificial Sequence: Synthetic oligonucleotide
ugaaccccauggcuuuaac

SEQ ID NO: 2651668 - RNA, 19 nt, Artificial Sequence
  Description of Artificial Sequence: Synthetic oligonucleotide
agaauuccacccacucauc

SEQ ID NO: 2651669 - RNA, 19 nt, Artificial Sequence
  Description of Artificial Sequence: Synthetic oligonucleotide
caagacccguaggauaaag

SEQ ID NO: 2651670 - RNA, 19 nt, Artificial Sequence
  Description of Artificial Sequence: Synthetic oligonucleotide
agagaugcuugaaacggaa

SEQ ID NO: 2651671 - RNA, 19 nt, Artificial Sequence
  Description of Artificial Sequence: Synthetic oligonucleotide
uugugcugccuuagcagau

SEQ ID NO: 2651672 - RNA, 19 nt, Artificial Sequence
  Description of Artificial Sequence: Synthetic oligonucleotide
caugugcaaaugguuauga

SEQ ID NO: 2651673 - RNA, 19 nt, Artificial Sequence
  Description of Artificial Sequence: Synthetic oligonucleotide
auagauuuccaggccuggu

SEQ ID NO: 2651674 - RNA, 19 nt, Artificial Sequence
  Description of Artificial Sequence: Synthetic oligonucleotide
gaaaugagaggaucucuuu

SEQ ID NO: 2651675 - RNA, 19 nt, Artificial Sequence
  Description of Artificial Sequence: Synthetic oligonucleotide
gaaccacacaggaagagau

SEQ ID NO: 2651676 - RNA, 19 nt, Artificial Sequence
  Description of Artificial Sequence: Synthetic oligonucleotide
cuacaccucgaaaauuaaa

SEQ ID NO: 2651677 - RNA, 19 nt, Artificial Sequence
  Description of Artificial Sequence: Synthetic oligonucleotide
uuucugggcuuguccuuga

SEQ ID NO: 2651678 - RNA, 19 nt, Artificial Sequence
  Description of Artificial Sequence: Synthetic oligonucleotide
cacccacucaucaccaaca

SEQ ID NO: 2651679 - RNA, 19 nt, Artificial Sequence
  Description of Artificial Sequence: Synthetic oligonucleotide
aagaggucccaccguccaa

SEQ ID NO: 2651680 - RNA, 19 nt, Artificial Sequence
  Description of Artificial Sequence: Synthetic oligonucleotide
aauguccacgcaggauaca

SEQ ID NO: 2651681 - RNA, 19 nt, Artificial Sequence
  Description of Artificial Sequence: Synthetic oligonucleotide
cguaggauaaaguggccac

SEQ ID NO: 2651682 - RNA, 19 nt, Artificial Sequence
  Description of Artificial Sequence: Synthetic oligonucleotide
caggaagagaugcuugaaa

SEQ ID NO: 2651683 - RNA, 19 nt, Artificial Sequence
  Description of Artificial Sequence: Synthetic oligonucleotide
ugacugggauguagugaac

SEQ ID NO: 2651684 - RNA, 19 nt, Artificial Sequence
  Description of Artificial Sequence: Synthetic oligonucleotide
guaggauaaaguggccaca

SEQ ID NO: 2651685 - RNA, 19 nt, Artificial Sequence
  Description of Artificial Sequence: Synthetic oligonucleotide
aguauucagucaagaggcu

SEQ ID NO: 2651686 - RNA, 19 nt, Artificial Sequence
  Description of Artificial Sequence: Synthetic oligonucleotide
caggaauuuggaguauuca

SEQ ID NO: 2651687 - RNA, 19 nt, Artificial Sequence
  Description of Artificial Sequence: Synthetic oligonucleotide
ucucaacgagcuugggauu

SEQ ID NO: 2651688 - RNA, 19 nt, Artificial Sequence
  Description of Artificial Sequence: Synthetic oligonucleotide
uccuugauccucggaaaua

SEQ ID NO: 2651689 - RNA, 19 nt, Artificial Sequence
  Description of Artificial Sequence: Synthetic oligonucleotide
gcaaaugguuaugaugaac

SEQ ID NO: 2651690 - RNA, 19 nt, Artificial Sequence
  Description of Artificial Sequence: Synthetic oligonucleotide
caacauggaagaccagcga

SEQ ID NO: 2651691 - RNA, 19 nt, Artificial Sequence
  Description of Artificial Sequence: Synthetic oligonucleotide
gaaccccauggcuuuaacu

SEQ ID NO: 2651692 - RNA, 19 nt, Artificial Sequence
  Description of Artificial Sequence: Synthetic oligonucleotide
auguccacgcaggauacau

SEQ ID NO: 2651693 - RNA, 19 nt, Artificial Sequence
  Description of Artificial Sequence: Synthetic oligonucleotide
gaagaccagcgaaccacac

SEQ ID NO: 2651694 - RNA, 19 nt, Artificial Sequence
  Description of Artificial Sequence: Synthetic oligonucleotide
uacucucaacgagcuuggg

SEQ ID NO: 2651695 - RNA, 19 nt, Artificial Sequence
  Description of Artificial Sequence: Synthetic oligonucleotide
agcaauuuccugagcaaua

SEQ ID NO: 2651696 - RNA, 19 nt, Artificial Sequence
  Description of Artificial Sequence: Synthetic oligonucleotide
auaucaucauuugcuuuua

SEQ ID NO: 2651697 - RNA, 19 nt, Artificial Sequence
  Description of Artificial Sequence: Synthetic oligonucleotide
ugugcugccuuagcagauc

SEQ ID NO: 2651698 - RNA, 19 nt, Artificial Sequence
  Description of Artificial Sequence: Synthetic oligonucleotide
gaccagcgaaccacacagg

SEQ ID NO: 2651699 - RNA, 19 nt, Artificial Sequence
  Description of Artificial Sequence: Synthetic oligonucleotide
cucccaguaacaggugaug

SEQ ID NO: 2651700 - RNA, 19 nt, Artificial Sequence
  Description of Artificial Sequence: Synthetic oligonucleotide
cauucaugugcaaaugguu

SEQ ID NO: 2651701 - RNA, 19 nt, Artificial Sequence
  Description of Artificial Sequence: Synthetic oligonucleotide
cuugcagcuacaccucgaa

SEQ ID NO: 2651702 - RNA, 19 nt, Artificial Sequence
  Description of Artificial Sequence: Synthetic oligonucleotide
aaacggaaacuugcagcua

SEQ ID NO: 2651703 - RNA, 19 nt, Artificial Sequence
  Description of Artificial Sequence: Synthetic oligonucleotide
cacgcaggauacaugauau

SEQ ID NO: 2651704 - RNA, 19 nt, Artificial Sequence
  Description of Artificial Sequence: Synthetic oligonucleotide
guccaagacccguaggaua

SEQ ID NO: 2651705 - RNA, 19 nt, Artificial Sequence
  Description of Artificial Sequence: Synthetic oligonucleotide
cucgaaaauuaaacagaua

SEQ ID NO: 2651706 - RNA, 19 nt, Artificial Sequence
  Description of Artificial Sequence: Synthetic oligonucleotide
aucuauugaugaacauccu

SEQ ID NO: 2651707 - RNA, 19 nt, Artificial Sequence
  Description of Artificial Sequence: Synthetic oligonucleotide
ccgagacagaagaaaugag

SEQ ID NO: 2651708 - RNA, 19 nt, Artificial Sequence
  Description of Artificial Sequence: Synthetic oligonucleotide
gcugccuuagcagaucuuc

SEQ ID NO: 2651709 - RNA, 19 nt, Artificial Sequence
  Description of Artificial Sequence: Synthetic oligonucleotide
caccguccaagacccguag

SEQ ID NO: 2651710 - RNA, 19 nt, Artificial Sequence
  Description of Artificial Sequence: Synthetic oligonucleotide
ggagaggucuguuuugacu

SEQ ID NO: 2651711 - RNA, 19 nt, Artificial Sequence
  Description of Artificial Sequence: Synthetic oligonucleotide
ucucuuuucugggcuuguc

SEQ ID NO: 2651712 - RNA, 19 nt, Artificial Sequence
  Description of Artificial Sequence: Synthetic oligonucleotide
cacucaucaccaacaugga

SEQ ID NO: 2651713 - RNA, 19 nt, Artificial Sequence
  Description of Artificial Sequence: Synthetic oligonucleotide
gagaugcuugaaacggaaa

SEQ ID NO: 2651714 - RNA, 19 nt, Artificial Sequence
  Description of Artificial Sequence: Synthetic oligonucleotide
cauuggagaggucuguuuu

SEQ ID NO: 2651715 - RNA, 19 nt, Artificial Sequence
  Description of Artificial Sequence: Synthetic oligonucleotide
uggccauugugcugccuua

SEQ ID NO: 2651716 - RNA, 19 nt, Artificial Sequence
  Description of Artificial Sequence: Synthetic oligonucleotide
guagugaaccccauggcuu

SEQ ID NO: 2651717 - RNA, 19 nt, Artificial Sequence
  Description of Artificial Sequence: Synthetic oligonucleotide
agcgaaccacacaggaaga

SEQ ID NO: 2651718 - RNA, 19 nt, Artificial Sequence
  Description of Artificial Sequence: Synthetic oligonucleotide
cccaguaacaggugauguc

SEQ ID NO: 2651719 - RNA, 19 nt, Artificial Sequence
  Description of Artificial Sequence: Synthetic oligonucleotide
gcagugaucuauugaugaa

SEQ ID NO: 2651720 - RNA, 19 nt, Artificial Sequence
  Description of Artificial Sequence: Synthetic oligonucleotide
acuugcagcuacaccucga

SEQ ID NO: 2651721 - RNA, 19 nt, Artificial Sequence
  Description of Artificial Sequence: Synthetic oligonucleotide
gauuuccaggccugguuuu

SEQ ID NO: 2651722 - RNA, 19 nt, Artificial Sequence
  Description of Artificial Sequence: Synthetic oligonucleotide
agcuggcuuucccaaggua

SEQ ID NO: 2651723 - RNA, 19 nt, Artificial Sequence
  Description of Artificial Sequence: Synthetic oligonucleotide
gcaauaucaucauuugcuu

SEQ ID NO: 2651724 - RNA, 19 nt, Artificial Sequence
  Description of Artificial Sequence: Synthetic oligonucleotide
gaggucccaccguccaaga

SEQ ID NO: 2651725 - RNA, 19 nt, Artificial Sequence
  Description of Artificial Sequence: Synthetic oligonucleotide
gccauugugcugccuuagc

SEQ ID NO: 2651726 - RNA, 19 nt, Artificial Sequence
  Description of Artificial Sequence: Synthetic oligonucleotide
gcgaaccacacaggaagag

SEQ ID NO: 2651727 - RNA, 19 nt, Artificial Sequence
  Description of Artificial Sequence: Synthetic oligonucleotide
caccaacauggaagaccag

SEQ ID NO: 2651728 - RNA, 19 nt, Artificial Sequence
  Description of Artificial Sequence: Synthetic oligonucleotide
ucaacgagcuugggauuuu

SEQ ID NO: 2651729 - RNA, 19 nt, Artificial Sequence
  Description of Artificial Sequence: Synthetic oligonucleotide
gugaucuauugaugaacau

SEQ ID NO: 2651730 - RNA, 19 nt, Artificial Sequence
  Description of Artificial Sequence: Synthetic oligonucleotide
cgcaggauacaugauauca

SEQ ID NO: 2651731 - RNA, 19 nt, Artificial Sequence
  Description of Artificial Sequence: Synthetic oligonucleotide
acggaaacuugcagcuaca

SEQ ID NO: 2651732 - RNA, 19 nt, Artificial Sequence
  Description of Artificial Sequence: Synthetic oligonucleotide
ggcucucccaguaacaggu

SEQ ID NO: 2651733 - RNA, 19 nt, Artificial Sequence
  Description of Artificial Sequence: Synthetic oligonucleotide
gucaagaggcucucccagu

SEQ ID NO: 2651734 - RNA, 19 nt, Artificial Sequence
  Description of Artificial Sequence: Synthetic oligonucleotide
ugcugccuuagcagaucuu

SEQ ID NO: 2651735 - RNA, 19 nt, Artificial Sequence
  Description of Artificial Sequence: Synthetic oligonucleotide
aggucuguuuugacuggga

SEQ ID NO: 2651736 - RNA, 19 nt, Artificial Sequence
  Description of Artificial Sequence: Synthetic oligonucleotide
ucccaccguccaagacccg

SEQ ID NO: 2651737 - RNA, 19 nt, Artificial Sequence
  Description of Artificial Sequence: Synthetic oligonucleotide
ccucgaaaauuaaacagau

SEQ ID NO: 2651738 - RNA, 19 nt, Artificial Sequence
  Description of Artificial Sequence: Synthetic oligonucleotide
ggaagaccagcgaaccaca

SEQ ID NO: 2651739 - RNA, 19 nt, Artificial Sequence
  Description of Artificial Sequence: Synthetic oligonucleotide
gguguacucucaacgagcu

SEQ ID NO: 2651740 - RNA, 19 nt, Artificial Sequence
  Description of Artificial Sequence: Synthetic oligonucleotide
ccacccacucaucaccaac

SEQ ID NO: 2651741 - RNA, 19 nt, Artificial Sequence
  Description of Artificial Sequence: Synthetic oligonucleotide
gacaggaauuuggaguauu

SEQ ID NO: 2651742 - RNA, 19 nt, Artificial Sequence
  Description of Artificial Sequence: Synthetic oligonucleotide
ccaaaauguccacgcagga

SEQ ID NO: 2651743 - RNA, 19 nt, Artificial Sequence
  Description of Artificial Sequence: Synthetic oligonucleotide
ccguccaagacccguagga

SEQ ID NO: 2651744 - RNA, 19 nt, Artificial Sequence
  Description of Artificial Sequence: Synthetic oligonucleotide
cugccuuagcagaucuucu

SEQ ID NO: 2651745 - RNA, 19 nt, Artificial Sequence
  Description of Artificial Sequence: Synthetic oligonucleotide
gcagcuacaccucgaaaau

SEQ ID NO: 2651746 - RNA, 19 nt, Artificial Sequence
  Description of Artificial Sequence: Synthetic oligonucleotide
guccuugauccucggaaau

SEQ ID NO: 2651747 - RNA, 19 nt, Artificial Sequence
  Description of Artificial Sequence: Synthetic oligonucleotide
ggccauugugcugccuuag

SEQ ID NO: 2651748 - RNA, 19 nt, Artificial Sequence
  Description of Artificial Sequence: Synthetic oligonucleotide
cccguaggauaaaguggcc

SEQ ID NO: 2651749 - RNA, 19 nt, Artificial Sequence
  Description of Artificial Sequence: Synthetic oligonucleotide
gugcugccuuagcagaucu

SEQ ID NO: 2651750 - RNA, 19 nt, Artificial Sequence
  Description of Artificial Sequence: Synthetic oligonucleotide
gcuuuaacuguggguagaa

SEQ ID NO: 2651751 - RNA, 19 nt, Artificial Sequence
  Description of Artificial Sequence: Synthetic oligonucleotide
ggucuguuuugacugggau

SEQ ID NO: 2651752 - RNA, 19 nt, Artificial Sequence
  Description of Artificial Sequence: Synthetic oligonucleotide
ccucggaaauaugcuguag

SEQ ID NO: 2651753 - RNA, 19 nt, Artificial Sequence
  Description of Artificial Sequence: Synthetic oligonucleotide
ccccuucccaaaaugucca

SEQ ID NO: 2651754 - RNA, 19 nt, Artificial Sequence
  Description of Artificial Sequence: Synthetic oligonucleotide
gggcuuguccuugauccuc

SEQ ID NO: 2651755 - RNA, 19 nt, Artificial Sequence
  Description of Artificial Sequence: Synthetic oligonucleotide
gcaauuuccugagcaauau

SEQ ID NO: 2651756 - RNA, 19 nt, Artificial Sequence
  Description of Artificial Sequence: Synthetic oligonucleotide
ccaagguaucuuucauaga

SEQ ID NO: 2651757 - RNA, 19 nt, Artificial Sequence
  Description of Artificial Sequence: Synthetic oligonucleotide
ccacgcaggauacaugaua

SEQ ID NO: 2651758 - RNA, 19 nt, Artificial Sequence
  Description of Artificial Sequence: Synthetic oligonucleotide
gcuacaccucgaaaauuaa

SEQ ID NO: 2651759 - RNA, 19 nt, Artificial Sequence
  Description of Artificial Sequence: Synthetic oligonucleotide
ccguaggauaaaguggcca

SEQ ID NO: 2651760 - RNA, 19 nt, Artificial Sequence
  Description of Artificial Sequence: Synthetic oligonucleotide
ccccuuuuagcaauuuccu

SEQ ID NO: 2651761 - RNA, 19 nt, Artificial Sequence
  Description of Artificial Sequence: Synthetic oligonucleotide
gcaggauacaugauaucau

SEQ ID NO: 2651762 - RNA, 19 nt, Artificial Sequence
  Description of Artificial Sequence: Synthetic oligonucleotide
cucaacgagcuugggauuu

SEQ ID NO: 2651763 - RNA, 19 nt, Artificial Sequence
  Description of Artificial Sequence: Synthetic oligonucleotide
cauccuuggcagcuggcuu

SEQ ID NO: 2651764 - RNA, 19 nt, Artificial Sequence
  Description of Artificial Sequence: Synthetic oligonucleotide
ccagcgaaccacacaggaa

SEQ ID NO: 2651765 - RNA, 19 nt, Artificial Sequence
  Description of Artificial Sequence: Synthetic oligonucleotide
gcuuucccaagguaucuuu

SEQ ID NO: 2651766 - RNA, 19 nt, Artificial Sequence
  Description of Artificial Sequence: Synthetic oligonucleotide
cggaaacuugcagcuacac

SEQ ID NO: 2651767 - RNA, 19 nt, Artificial Sequence
  Description of Artificial Sequence: Synthetic oligonucleotide
ggacauuggagaggucugu

SEQ ID NO: 2651768 - RNA, 19 nt, Artificial Sequence
  Description of Artificial Sequence: Synthetic oligonucleotide
ggaucucuuuucugggcuu

SEQ ID NO: 2651769 - RNA, 19 nt, Artificial Sequence
  Description of Artificial Sequence: Synthetic oligonucleotide
gcucucccaguaacaggug

SEQ ID NO: 2651770 - RNA, 19 nt, Artificial Sequence
  Description of Artificial Sequence: Synthetic oligonucleotide
guguacucucaacgagcuu

SEQ ID NO: 2651771 - RNA, 19 nt, Artificial Sequence
  Description of Artificial Sequence: Synthetic oligonucleotide
cuguuuugacugggaugua

SEQ ID NO: 2651772 - RNA, 19 nt, Artificial Sequence
  Description of Artificial Sequence: Synthetic oligonucleotide
cagcuacaccucgaaaauu

SEQ ID NO: 2651773 - RNA, 19 nt, Artificial Sequence
  Description of Artificial Sequence: Synthetic oligonucleotide
ccuggacauuggagagguc

SEQ ID NO: 2651774 - RNA, 19 nt, Artificial Sequence
  Description of Artificial Sequence: Synthetic oligonucleotide
ccaccguccaagacccgua

SEQ ID NO: 2651775 - RNA, 19 nt, Artificial Sequence
  Description of Artificial Sequence: Synthetic oligonucleotide
cggaaauaugcuguagaau

SEQ ID NO: 2651776 - RNA, 19 nt, Artificial Sequence
  Description of Artificial Sequence: Synthetic oligonucleotide
ggacaggaauuuggaguau

SEQ ID NO: 2651777 - RNA, 19 nt, Artificial Sequence
  Description of Artificial Sequence: Synthetic oligonucleotide
gggauguagugaaccccau

SEQ ID NO: 2651778 - RNA, 19 nt, Artificial Sequence
  Description of Artificial Sequence: Synthetic oligonucleotide
gcaacaguuccuggacauu

SEQ ID NO: 2651779 - RNA, 19 nt, Artificial Sequence
  Description of Artificial Sequence: Synthetic oligonucleotide
cccaccguccaagacccgu

SEQ ID NO: 2651780 - RNA, 19 nt, Artificial Sequence
  Description of Artificial Sequence: Synthetic oligonucleotide
ccaagacccguaggauaaa

SEQ ID NO: 2651781 - RNA, 19 nt, Artificial Sequence
  Description of Artificial Sequence: Synthetic oligonucleotide
aaagaugguaaucuuagac

SEQ ID NO: 2651782 - RNA, 19 nt, Artificial Sequence
  Description of Artificial Sequence: Synthetic oligonucleotide
acugauaaccacgauaucc

SEQ ID NO: 2651783 - RNA, 19 nt, Artificial Sequence
  Description of Artificial Sequence: Synthetic oligonucleotide
auaugguaagcauugcucc

SEQ ID NO: 2651784 - RNA, 19 nt, Artificial Sequence
  Description of Artificial Sequence: Synthetic oligonucleotide
aaucuuagacucuuuauga

SEQ ID NO: 2651785 - RNA, 19 nt, Artificial Sequence
  Description of Artificial Sequence: Synthetic oligonucleotide
aauaaaguucucuuucuca

SEQ ID NO: 2651786 - RNA, 19 nt, Artificial Sequence
  Description of Artificial Sequence: Synthetic oligonucleotide
uaaucuuagacucuuuaug

SEQ ID NO: 2651787 - RNA, 19 nt, Artificial Sequence
  Description of Artificial Sequence: Synthetic oligonucleotide
uucuccugaucauagaugg

SEQ ID NO: 2651788 - RNA, 19 nt, Artificial Sequence
  Description of Artificial Sequence: Synthetic oligonucleotide
acugguagcaaacccaggc

SEQ ID NO: 2651789 - RNA, 19 nt, Artificial Sequence
  Description of Artificial Sequence: Synthetic oligonucleotide
aaguuugggcgugagaucc

SEQ ID NO: 2651790 - RNA, 19 nt, Artificial Sequence
  Description of Artificial Sequence: Synthetic oligonucleotide
aagaugguaaucuuagacu

SEQ ID NO: 2651791 - RNA, 19 nt, Artificial Sequence
  Description of Artificial Sequence: Synthetic oligonucleotide
uuuaugauuggcugaacag

SEQ ID NO: 2651792 - RNA, 19 nt, Artificial Sequence
  Description of Artificial Sequence: Synthetic oligonucleotide
gacauuaucaaaacuacgc

SEQ ID NO: 2651793 - RNA, 19 nt, Artificial Sequence
  Description of Artificial Sequence: Synthetic oligonucleotide
auauccaggauacugguag

SEQ ID NO: 2651794 - RNA, 19 nt, Artificial Sequence
  Description of Artificial Sequence: Synthetic oligonucleotide
aguguuuguagucuccgcc

SEQ ID NO: 2651795 - RNA, 19 nt, Artificial Sequence
  Description of Artificial Sequence: Synthetic oligonucleotide
uaucugggaaguuugggcg

SEQ ID NO: 2651796 - RNA, 19 nt, Artificial Sequence
  Description of Artificial Sequence: Synthetic oligonucleotide
aagaguuuccagcucccgc

SEQ ID NO: 2651797 - RNA, 19 nt, Artificial Sequence
  Description of Artificial Sequence: Synthetic oligonucleotide
uuuaguccacuauuguugg

SEQ ID NO: 2651798 - RNA, 19 nt, Artificial Sequence
  Description of Artificial Sequence: Synthetic oligonucleotide
ucauaaccaauccaggcgc

SEQ ID NO: 2651799 - RNA, 19 nt, Artificial Sequence
  Description of Artificial Sequence: Synthetic oligonucleotide
ucauuguugaaccaaccca

SEQ ID NO: 2651800 - RNA, 19 nt, Artificial Sequence
  Description of Artificial Sequence: Synthetic oligonucleotide
cauuguaucuucauggaac

SEQ ID NO: 2651801 - RNA, 19 nt, Artificial Sequence
  Description of Artificial Sequence: Synthetic oligonucleotide
auugauuguaucugggaag

SEQ ID NO: 2651802 - RNA, 19 nt, Artificial Sequence
  Description of Artificial Sequence: Synthetic oligonucleotide
cucaauaugguaagcauug

SEQ ID NO: 2651803 - RNA, 19 nt, Artificial Sequence
  Description of Artificial Sequence: Synthetic oligonucleotide
agaugguuaucuuccaugg

SEQ ID NO: 2651804 - RNA, 19 nt, Artificial Sequence
  Description of Artificial Sequence: Synthetic oligonucleotide
uucauuguugaaccaaccc

SEQ ID NO: 2651805 - RNA, 19 nt, Artificial Sequence
  Description of Artificial Sequence: Synthetic oligonucleotide
uacgcucagaaacauuugg

SEQ ID NO: 2651806 - RNA, 19 nt, Artificial Sequence
  Description of Artificial Sequence: Synthetic oligonucleotide
guagucuccgccaugaugg

SEQ ID NO: 2651807 - RNA, 19 nt, Artificial Sequence
  Description of Artificial Sequence: Synthetic oligonucleotide
cucauaaccaauccaggcg

SEQ ID NO: 2651808 - RNA, 19 nt, Artificial Sequence
  Description of Artificial Sequence: Synthetic oligonucleotide
ucuuucucaaagaugguaa

SEQ ID NO: 2651809 - RNA, 19 nt, Artificial Sequence
  Description of Artificial Sequence: Synthetic oligonucleotide
uguacugauaaccacgaua

SEQ ID NO: 2651810 - RNA, 19 nt, Artificial Sequence
  Description of Artificial Sequence: Synthetic oligonucleotide
uuguugaaccaacccaugg

SEQ ID NO: 2651811 - RNA, 19 nt, Artificial Sequence
  Description of Artificial Sequence: Synthetic oligonucleotide
uguugaaccaacccauggc

SEQ ID NO: 2651812 - RNA, 19 nt, Artificial Sequence
  Description of Artificial Sequence: Synthetic oligonucleotide
guagucaucacagaucucc

SEQ ID NO: 2651813 - RNA, 19 nt, Artificial Sequence
  Description of Artificial Sequence: Synthetic oligonucleotide
acuauuguuggaugcggcg

SEQ ID NO: 2651814 - RNA, 19 nt, Artificial Sequence
  Description of Artificial Sequence: Synthetic oligonucleotide
auuaucaaaacuacgcuca

SEQ ID NO: 2651815 - RNA, 19 nt, Artificial Sequence
  Description of Artificial Sequence: Synthetic oligonucleotide
ucacagaucucccauuggc

SEQ ID NO: 2651816 - RNA, 19 nt, Artificial Sequence
  Description of Artificial Sequence: Synthetic oligonucleotide
uaugcucauaaccaaucca

SEQ ID NO: 2651817 - RNA, 19 nt, Artificial Sequence
  Description of Artificial Sequence: Synthetic oligonucleotide
uauaaacuguuguccacag

SEQ ID NO: 2651818 - RNA, 19 nt, Artificial Sequence
  Description of Artificial Sequence: Synthetic oligonucleotide
cauuaucaaaacuacgcuc

SEQ ID NO: 2651819 - RNA, 19 nt, Artificial Sequence
  Description of Artificial Sequence: Synthetic oligonucleotide
aaacauuugggcaggagcu

SEQ ID NO: 2651820 - RNA, 19 nt, Artificial Sequence
  Description of Artificial Sequence: Synthetic oligonucleotide
aaaacuacgcucagaaaca

SEQ ID NO: 2651821 - RNA, 19 nt, Artificial Sequence
  Description of Artificial Sequence: Synthetic oligonucleotide
uuggcguccaauaaaguuc

SEQ ID NO: 2651822 - RNA, 19 nt, Artificial Sequence
  Description of Artificial Sequence: Synthetic oligonucleotide
uagaugguuaucuuccaug

SEQ ID NO: 2651823 - RNA, 19 nt, Artificial Sequence
  Description of Artificial Sequence: Synthetic oligonucleotide
agauguacugauaaccacg

SEQ ID NO: 2651824 - RNA, 19 nt, Artificial Sequence
  Description of Artificial Sequence: Synthetic oligonucleotide
ugcucauaaccaauccagg

SEQ ID NO: 2651825 - RNA, 19 nt, Artificial Sequence
  Description of Artificial Sequence: Synthetic oligonucleotide
auaaaguucucuuucucaa

SEQ ID NO: 2651826 - RNA, 19 nt, Artificial Sequence
  Description of Artificial Sequence: Synthetic oligonucleotide
caacccauggcuugcaagg

SEQ ID NO: 2651827 - RNA, 19 nt, Artificial Sequence
  Description of Artificial Sequence: Synthetic oligonucleotide
ugguagcaaacccaggccc

SEQ ID NO: 2651828 - RNA, 19 nt, Artificial Sequence
  Description of Artificial Sequence: Synthetic oligonucleotide
aacuuuuaguccacuauug

SEQ ID NO: 2651829 - RNA, 19 nt, Artificial Sequence
  Description of Artificial Sequence: Synthetic oligonucleotide
uuaucaaaacuacgcucag

SEQ ID NO: 2651830 - RNA, 19 nt, Artificial Sequence
  Description of Artificial Sequence: Synthetic oligonucleotide
uguagucuccgccaugaug

SEQ ID NO: 2651831 - RNA, 19 nt, Artificial Sequence
  Description of Artificial Sequence: Synthetic oligonucleotide
gauaaccacgauauccagg

SEQ ID NO: 2651832 - RNA, 19 nt, Artificial Sequence
  Description of Artificial Sequence: Synthetic oligonucleotide
accacgauauccaggauac

SEQ ID NO: 2651833 - RNA, 19 nt, Artificial Sequence
  Description of Artificial Sequence: Synthetic oligonucleotide
uuagacucuuuaugauugg

SEQ ID NO: 2651834 - RNA, 19 nt, Artificial Sequence
  Description of Artificial Sequence: Synthetic oligonucleotide
uggcugaacagauggggcg

SEQ ID NO: 2651835 - RNA, 19 nt, Artificial Sequence
  Description of Artificial Sequence: Synthetic oligonucleotide
ccacauuguaucuucaugg

SEQ ID NO: 2651836 - RNA, 19 nt, Artificial Sequence
  Description of Artificial Sequence: Synthetic oligonucleotide
ucagaaacauuugggcagg

SEQ ID NO: 2651837 - RNA, 19 nt, Artificial Sequence
  Description of Artificial Sequence: Synthetic oligonucleotide
aauccaggcgccacacucc

SEQ ID NO: 2651838 - RNA, 19 nt, Artificial Sequence
  Description of Artificial Sequence: Synthetic oligonucleotide
gaauugauuguaucuggga

SEQ ID NO: 2651839 - RNA, 19 nt, Artificial Sequence
  Description of Artificial Sequence: Synthetic oligonucleotide
aguucucuuucucaaagau

SEQ ID NO: 2651840 - RNA, 19 nt, Artificial Sequence
  Description of Artificial Sequence: Synthetic oligonucleotide
aaccacgauauccaggaua

SEQ ID NO: 2651841 - RNA, 19 nt, Artificial Sequence
  Description of Artificial Sequence: Synthetic oligonucleotide
gauacugguagcaaaccca

SEQ ID NO: 2651842 - RNA, 19 nt, Artificial Sequence
  Description of Artificial Sequence: Synthetic oligonucleotide
aaguucucuuucucaaaga

SEQ ID NO: 2651843 - RNA, 19 nt, Artificial Sequence
  Description of Artificial Sequence: Synthetic oligonucleotide
auuggcguccaauaaaguu

SEQ ID NO: 2651844 - RNA, 19 nt, Artificial Sequence
  Description of Artificial Sequence: Synthetic oligonucleotide
ugauaaccacgauauccag

SEQ ID NO: 2651845 - RNA, 19 nt, Artificial Sequence
  Description of Artificial Sequence: Synthetic oligonucleotide
uugauuguaucugggaagu

SEQ ID NO: 2651846 - RNA, 19 nt, Artificial Sequence
  Description of Artificial Sequence: Synthetic oligonucleotide
acuuuuaguccacuauugu

SEQ ID NO: 2651847 - RNA, 19 nt, Artificial Sequence
  Description of Artificial Sequence: Synthetic oligonucleotide
acuucauuguugaaccaac

SEQ ID NO: 2651848 - RNA, 19 nt, Artificial Sequence
  Description of Artificial Sequence: Synthetic oligonucleotide
ucuuagacucuuuaugauu

SEQ ID NO: 2651849 - RNA, 19 nt, Artificial Sequence
  Description of Artificial Sequence: Synthetic oligonucleotide
gaagcugguaugcucauaa

SEQ ID NO: 2651850 - RNA, 19 nt, Artificial Sequence
  Description of Artificial Sequence: Synthetic oligonucleotide
cuucauuguugaaccaacc

SEQ ID NO: 2651851 - RNA, 19 nt, Artificial Sequence
  Description of Artificial Sequence: Synthetic oligonucleotide
uguuggaugcggcgaauug

SEQ ID NO: 2651852 - RNA, 19 nt, Artificial Sequence
  Description of Artificial Sequence: Synthetic oligonucleotide
guaagcauugcucccacuc

SEQ ID NO: 2651853 - RNA, 19 nt, Artificial Sequence
  Description of Artificial Sequence: Synthetic oligonucleotide
acagaucucccauuggcgu

SEQ ID NO: 2651854 - RNA, 19 nt, Artificial Sequence
  Description of Artificial Sequence: Synthetic oligonucleotide
aguucuccugaucauagau

SEQ ID NO: 2651855 - RNA, 19 nt, Artificial Sequence
  Description of Artificial Sequence: Synthetic oligonucleotide
aagcugguaugcucauaac

SEQ ID NO: 2651856 - RNA, 19 nt, Artificial Sequence
  Description of Artificial Sequence: Synthetic oligonucleotide
auuguaucugggaaguuug

SEQ ID NO: 2651857 - RNA, 19 nt, Artificial Sequence
  Description of Artificial Sequence: Synthetic oligonucleotide
gguuggaagaguuuccagc

SEQ ID NO: 2651858 - RNA, 19 nt, Artificial Sequence
  Description of Artificial Sequence: Synthetic oligonucleotide
acgauauccaggauacugg

SEQ ID NO: 2651859 - RNA, 19 nt, Artificial Sequence
  Description of Artificial Sequence: Synthetic oligonucleotide
guaugcucauaaccaaucc

SEQ ID NO: 2651860 - RNA, 19 nt, Artificial Sequence
  Description of Artificial Sequence: Synthetic oligonucleotide
uggcguccaauaaaguucu

SEQ ID NO: 2651861 - RNA, 19 nt, Artificial Sequence
  Description of Artificial Sequence: Synthetic oligonucleotide
gaaccgacuucauuguuga

SEQ ID NO: 2651862 - RNA, 19 nt, Artificial Sequence
  Description of Artificial Sequence: Synthetic oligonucleotide
cuuuaugauuggcugaaca

SEQ ID NO: 2651863 - RNA, 19 nt, Artificial Sequence
  Description of Artificial Sequence: Synthetic oligonucleotide
aaggacaugagacgcucaa

SEQ ID NO: 2651864 - RNA, 19 nt, Artificial Sequence
  Description of Artificial Sequence: Synthetic oligonucleotide
ugagggaccggacauuauc

SEQ ID NO: 2651865 - RNA, 19 nt, Artificial Sequence
  Description of Artificial Sequence: Synthetic oligonucleotide
agacgcucaauaugguaag

SEQ ID NO: 2651866 - RNA, 19 nt, Artificial Sequence
  Description of Artificial Sequence: Synthetic oligonucleotide
cacgauauccaggauacug

SEQ ID NO: 2651867 - RNA, 19 nt, Artificial Sequence
  Description of Artificial Sequence: Synthetic oligonucleotide
agaucucccauuggcgucc

SEQ ID NO: 2651868 - RNA, 19 nt, Artificial Sequence
  Description of Artificial Sequence: Synthetic oligonucleotide
gaugguuaucuuccauggc

SEQ ID NO: 2651869 - RNA, 19 nt, Artificial Sequence
  Description of Artificial Sequence: Synthetic oligonucleotide
acucuuuaugauuggcuga

SEQ ID NO: 2651870 - RNA, 19 nt, Artificial Sequence
  Description of Artificial Sequence: Synthetic oligonucleotide
uauuguuggaugcggcgaa

SEQ ID NO: 2651871 - RNA, 19 nt, Artificial Sequence
  Description of Artificial Sequence: Synthetic oligonucleotide
cauugcucccacuccaggc

SEQ ID NO: 2651872 - RNA, 19 nt, Artificial Sequence
  Description of Artificial Sequence: Synthetic oligonucleotide
ggaugcggcgaauugauug

SEQ ID NO: 2651873 - RNA, 19 nt, Artificial Sequence
  Description of Artificial Sequence: Synthetic oligonucleotide
aucacagaucucccauugg

SEQ ID NO: 2651874 - RNA, 19 nt, Artificial Sequence
  Description of Artificial Sequence: Synthetic oligonucleotide
uccaagauguacugauaac

SEQ ID NO: 2651875 - RNA, 19 nt, Artificial Sequence
  Description of Artificial Sequence: Synthetic oligonucleotide
cuggaaguucuccugauca

SEQ ID NO: 2651876 - RNA, 19 nt, Artificial Sequence
  Description of Artificial Sequence: Synthetic oligonucleotide
uccaguguuuguagucucc

SEQ ID NO: 2651877 - RNA, 19 nt, Artificial Sequence
  Description of Artificial Sequence: Synthetic oligonucleotide
acagauggggcggaaggac

SEQ ID NO: 2651878 - RNA, 19 nt, Artificial Sequence
  Description of Artificial Sequence: Synthetic oligonucleotide
auugcucccacuccaggca

SEQ ID NO: 2651879 - RNA, 19 nt, Artificial Sequence
  Description of Artificial Sequence: Synthetic oligonucleotide
uuggaugcggcgaauugau

SEQ ID NO: 2651880 - RNA, 19 nt, Artificial Sequence
  Description of Artificial Sequence: Synthetic oligonucleotide
aggaaggguagucaucaca

SEQ ID NO: 2651881 - RNA, 19 nt, Artificial Sequence
  Description of Artificial Sequence: Synthetic oligonucleotide
caucacagaucucccauug

SEQ ID NO: 2651882 - RNA, 19 nt, Artificial Sequence
  Description of Artificial Sequence: Synthetic oligonucleotide
gucacauuccaagauguac

SEQ ID NO: 2651883 - RNA, 19 nt, Artificial Sequence
  Description of Artificial Sequence: Synthetic oligonucleotide
aucuuagacucuuuaugau

SEQ ID NO: 2651884 - RNA, 19 nt, Artificial Sequence
  Description of Artificial Sequence: Synthetic oligonucleotide
cugguagcaaacccaggcc

SEQ ID NO: 2651885 - RNA, 19 nt, Artificial Sequence
  Description of Artificial Sequence: Synthetic oligonucleotide
uggcuugcaaggaagggua

SEQ ID NO: 2651886 - RNA, 19 nt, Artificial Sequence
  Description of Artificial Sequence: Synthetic oligonucleotide
gcgaauugauuguaucugg

SEQ ID NO: 2651887 - RNA, 19 nt, Artificial Sequence
  Description of Artificial Sequence: Synthetic oligonucleotide
uuguaucuucauggaaccg

SEQ ID NO: 2651888 - RNA, 19 nt, Artificial Sequence
  Description of Artificial Sequence: Synthetic oligonucleotide
gauuggcugaacagauggg

SEQ ID NO: 2651889 - RNA, 19 nt, Artificial Sequence
  Description of Artificial Sequence: Synthetic oligonucleotide
acuacgcucagaaacauuu

SEQ ID NO: 2651890 - RNA, 19 nt, Artificial Sequence
  Description of Artificial Sequence: Synthetic oligonucleotide
cauggacccuggcauaggg

SEQ ID NO: 2651891 - RNA, 19 nt, Artificial Sequence
  Description of Artificial Sequence: Synthetic oligonucleotide
ccgacuucauuguugaacc

SEQ ID NO: 2651892 - RNA, 19 nt, Artificial Sequence
  Description of Artificial Sequence: Synthetic oligonucleotide
aucgaggguauucuccucu

SEQ ID NO: 2651893 - RNA, 19 nt, Artificial Sequence
  Description of Artificial Sequence: Synthetic oligonucleotide
ccaguauaaacuguugucc

SEQ ID NO: 2651894 - RNA, 19 nt, Artificial Sequence
  Description of Artificial Sequence: Synthetic oligonucleotide
acauuguaucuucauggaa

SEQ ID NO: 2651895 - RNA, 19 nt, Artificial Sequence
  Description of Artificial Sequence: Synthetic oligonucleotide
caguauaaacuguugucca

SEQ ID NO: 2651896 - RNA, 19 nt, Artificial Sequence
  Description of Artificial Sequence: Synthetic oligonucleotide
cauaaccaauccaggcgcc

SEQ ID NO: 2651897 - RNA, 19 nt, Artificial Sequence
  Description of Artificial Sequence: Synthetic oligonucleotide
ucaauaugguaagcauugc

SEQ ID NO: 2651898 - RNA, 19 nt, Artificial Sequence
  Description of Artificial Sequence: Synthetic oligonucleotide
cacuauuguuggaugcggc

SEQ ID NO: 2651899 - RNA, 19 nt, Artificial Sequence
  Description of Artificial Sequence: Synthetic oligonucleotide
uagacucuuuaugauuggc

SEQ ID NO: 2651900 - RNA, 19 nt, Artificial Sequence
  Description of Artificial Sequence: Synthetic oligonucleotide
gagacgcucaauaugguaa

SEQ ID NO: 2651901 - RNA, 19 nt, Artificial Sequence
  Description of Artificial Sequence: Synthetic oligonucleotide
caauccaggcgccacacuc

SEQ ID NO: 2651902 - RNA, 19 nt, Artificial Sequence
  Description of Artificial Sequence: Synthetic oligonucleotide
aggguagucaucacagauc

SEQ ID NO: 2651903 - RNA, 19 nt, Artificial Sequence
  Description of Artificial Sequence: Synthetic oligonucleotide
uccugaucauagaugguua

SEQ ID NO: 2651904 - RNA, 19 nt, Artificial Sequence
  Description of Artificial Sequence: Synthetic oligonucleotide
ugagauccccacucucucc

SEQ ID NO: 2651905 - RNA, 19 nt, Artificial Sequence
  Description of Artificial Sequence: Synthetic oligonucleotide
ucuccaguguuuguagucu

SEQ ID NO: 2651906 - RNA, 19 nt, Artificial Sequence
  Description of Artificial Sequence: Synthetic oligonucleotide
ugguaugcucauaaccaau

SEQ ID NO: 2651907 - RNA, 19 nt, Artificial Sequence
  Description of Artificial Sequence: Synthetic oligonucleotide
guauaaacuguuguccaca

SEQ ID NO: 2651908 - RNA, 19 nt, Artificial Sequence
  Description of Artificial Sequence: Synthetic oligonucleotide
guuggaagaguuuccagcu

SEQ ID NO: 2651909 - RNA, 19 nt, Artificial Sequence
  Description of Artificial Sequence: Synthetic oligonucleotide
ugagacgcucaauauggua

SEQ ID NO: 2651910 - RNA, 19 nt, Artificial Sequence
  Description of Artificial Sequence: Synthetic oligonucleotide
acgcucagaaacauuuggg

SEQ ID NO: 2651911 - RNA, 19 nt, Artificial Sequence
  Description of Artificial Sequence: Synthetic oligonucleotide
ugaacagauggggcggaag

SEQ ID NO: 2651912 - RNA, 19 nt, Artificial Sequence
  Description of Artificial Sequence: Synthetic oligonucleotide
gaaguuugggcgugagauc

SEQ ID NO: 2651913 - RNA, 19 nt, Artificial Sequence
  Description of Artificial Sequence: Synthetic oligonucleotide
cacagaagcugguaugcuc

SEQ ID NO: 2651914 - RNA, 19 nt, Artificial Sequence
  Description of Artificial Sequence: Synthetic oligonucleotide
gaccggacauuaucaaaac

SEQ ID NO: 2651915 - RNA, 19 nt, Artificial Sequence
  Description of Artificial Sequence: Synthetic oligonucleotide
guugaaccaacccauggcu

SEQ ID NO: 2651916 - RNA, 19 nt, Artificial Sequence
  Description of Artificial Sequence: Synthetic oligonucleotide
uaguccacuauuguuggau

SEQ ID NO: 2651917 - RNA, 19 nt, Artificial Sequence
  Description of Artificial Sequence: Synthetic oligonucleotide
ggcggaaggacaugagacg

SEQ ID NO: 2651918 - RNA, 19 nt, Artificial Sequence
  Description of Artificial Sequence: Synthetic oligonucleotide
guacugauaaccacgauau

SEQ ID NO: 2651919 - RNA, 19 nt, Artificial Sequence
  Description of Artificial Sequence: Synthetic oligonucleotide
uggugguuggaagaguuuc

SEQ ID NO: 2651920 - RNA, 19 nt, Artificial Sequence
  Description of Artificial Sequence: Synthetic oligonucleotide
uggacccuggcauaggguu

SEQ ID NO: 2651921 - RNA, 19 nt, Artificial Sequence
  Description of Artificial Sequence: Synthetic oligonucleotide
agucaucacagaucuccca

SEQ ID NO: 2651922 - RNA, 19 nt, Artificial Sequence
  Description of Artificial Sequence: Synthetic oligonucleotide
aucuuggugguuggaagag

SEQ ID NO: 2651923 - RNA, 19 nt, Artificial Sequence
  Description of Artificial Sequence: Synthetic oligonucleotide
ccauuggcguccaauaaag

SEQ ID NO: 2651924 - RNA, 19 nt, Artificial Sequence
  Description of Artificial Sequence: Synthetic oligonucleotide
cuugcaaggaaggguaguc

SEQ ID NO: 2651925 - RNA, 19 nt, Artificial Sequence
  Description of Artificial Sequence: Synthetic oligonucleotide
guucuccugaucauagaug

SEQ ID NO: 2651926 - RNA, 19 nt, Artificial Sequence
  Description of Artificial Sequence: Synthetic oligonucleotide
accggacauuaucaaaacu

SEQ ID NO: 2651927 - RNA, 19 nt, Artificial Sequence
  Description of Artificial Sequence: Synthetic oligonucleotide
auaaacuguuguccacaga

SEQ ID NO: 2651928 - RNA, 19 nt, Artificial Sequence
  Description of Artificial Sequence: Synthetic oligonucleotide
aaacuacgcucagaaacau

SEQ ID NO: 2651929 - RNA, 19 nt, Artificial Sequence
  Description of Artificial Sequence: Synthetic oligonucleotide
uugaaccaacccauggcuu

SEQ ID NO: 2651930 - RNA, 19 nt, Artificial Sequence
  Description of Artificial Sequence: Synthetic oligonucleotide
cacauuguaucuucaugga

SEQ ID NO: 2651931 - RNA, 19 nt, Artificial Sequence
  Description of Artificial Sequence: Synthetic oligonucleotide
guguuuguagucuccgcca

SEQ ID NO: 2651932 - RNA, 19 nt, Artificial Sequence
  Description of Artificial Sequence: Synthetic oligonucleotide
agacucuuuaugauuggcu

SEQ ID NO: 2651933 - RNA, 19 nt, Artificial Sequence
  Description of Artificial Sequence: Synthetic oligonucleotide
uggaacuuuuaguccacua

SEQ ID NO: 2651934 - RNA, 19 nt, Artificial Sequence
  Description of Artificial Sequence: Synthetic oligonucleotide
auggcuugcaaggaagggu

SEQ ID NO: 2651935 - RNA, 19 nt, Artificial Sequence
  Description of Artificial Sequence: Synthetic oligonucleotide
guaucuucauggaaccgac

SEQ ID NO: 2651936 - RNA, 19 nt, Artificial Sequence
  Description of Artificial Sequence: Synthetic oligonucleotide
ggcgaauugauuguaucug

SEQ ID NO: 2651937 - RNA, 19 nt, Artificial Sequence
  Description of Artificial Sequence: Synthetic oligonucleotide
cauccgcuugcccuggaag

SEQ ID NO: 2651938 - RNA, 19 nt, Artificial Sequence
  Description of Artificial Sequence: Synthetic oligonucleotide
gagccaucuuggugguugg

SEQ ID NO: 2651939 - RNA, 19 nt, Artificial Sequence
  Description of Artificial Sequence: Synthetic oligonucleotide
cuacgcucagaaacauuug

SEQ ID NO: 2651940 - RNA, 19 nt, Artificial Sequence
  Description of Artificial Sequence: Synthetic oligonucleotide
ugguaagcauugcucccac

SEQ ID NO: 2651941 - RNA, 19 nt, Artificial Sequence
  Description of Artificial Sequence: Synthetic oligonucleotide
gcugguaugcucauaacca

SEQ ID NO: 2651942 - RNA, 19 nt, Artificial Sequence
  Description of Artificial Sequence: Synthetic oligonucleotide
gauggucacauuccaagau

SEQ ID NO: 2651943 - RNA, 19 nt, Artificial Sequence
  Description of Artificial Sequence: Synthetic oligonucleotide
caguguuuguagucuccgc

SEQ ID NO: 2651944 - RNA, 19 nt, Artificial Sequence
  Description of Artificial Sequence: Synthetic oligonucleotide
acacuccaccuugagggac

SEQ ID NO: 2651945 - RNA, 19 nt, Artificial Sequence
  Description of Artificial Sequence: Synthetic oligonucleotide
uugggcgugagauccccac

SEQ ID NO: 2651946 - RNA, 19 nt, Artificial Sequence
  Description of Artificial Sequence: Synthetic oligonucleotide
uuaguccacuauuguugga

SEQ ID NO: 2651947 - RNA, 19 nt, Artificial Sequence
  Description of Artificial Sequence: Synthetic oligonucleotide
auuguugaaccaacccaug

SEQ ID NO: 2651948 - RNA, 19 nt, Artificial Sequence
  Description of Artificial Sequence: Synthetic oligonucleotide
accuugagggaccggacau

SEQ ID NO: 2651949 - RNA, 19 nt, Artificial Sequence
  Description of Artificial Sequence: Synthetic oligonucleotide
gaugcggcgaauugauugu

SEQ ID NO: 2651950 - RNA, 19 nt, Artificial Sequence
  Description of Artificial Sequence: Synthetic oligonucleotide
uuaucuuccauggccccau

SEQ ID NO: 2651951 - RNA, 19 nt, Artificial Sequence
  Description of Artificial Sequence: Synthetic oligonucleotide
cauuccaagauguacugau

SEQ ID NO: 2651952 - RNA, 19 nt, Artificial Sequence
  Description of Artificial Sequence: Synthetic oligonucleotide
ucugggaaguuugggcgug

SEQ ID NO: 2651953 - RNA, 19 nt, Artificial Sequence
  Description of Artificial Sequence: Synthetic oligonucleotide
gaaccaacccauggcuugc

SEQ ID NO: 2651954 - RNA, 19 nt, Artificial Sequence
  Description of Artificial Sequence: Synthetic oligonucleotide
gagggaccggacauuauca

SEQ ID NO: 2651955 - RNA, 19 nt, Artificial Sequence
  Description of Artificial Sequence: Synthetic oligonucleotide
augguaagcauugcuccca

SEQ ID NO: 2651956 - RNA, 19 nt, Artificial Sequence
  Description of Artificial Sequence: Synthetic oligonucleotide
acgcucaauaugguaagca

SEQ ID NO: 2651957 - RNA, 19 nt, Artificial Sequence
  Description of Artificial Sequence: Synthetic oligonucleotide
cgaauugauuguaucuggg

SEQ ID NO: 2651958 - RNA, 19 nt, Artificial Sequence
  Description of Artificial Sequence: Synthetic oligonucleotide
cauagaugguuaucuucca

SEQ ID NO: 2651959 - RNA, 19 nt, Artificial Sequence
  Description of Artificial Sequence: Synthetic oligonucleotide
gguaaucuuagacucuuua

SEQ ID NO: 2651960 - RNA, 19 nt, Artificial Sequence
  Description of Artificial Sequence: Synthetic oligonucleotide
uacugauaaccacgauauc

SEQ ID NO: 2651961 - RNA, 19 nt, Artificial Sequence
  Description of Artificial Sequence: Synthetic oligonucleotide
guuuguagucuccgccaug

SEQ ID NO: 2651962 - RNA, 19 nt, Artificial Sequence
  Description of Artificial Sequence: Synthetic oligonucleotide
ggaaccgacuucauuguug

SEQ ID NO: 2651963 - RNA, 19 nt, Artificial Sequence
  Description of Artificial Sequence: Synthetic oligonucleotide
guuggaugcggcgaauuga

SEQ ID NO: 2651964 - RNA, 19 nt, Artificial Sequence
  Description of Artificial Sequence: Synthetic oligonucleotide
gacaugagacgcucaauau

SEQ ID NO: 2651965 - RNA, 19 nt, Artificial Sequence
  Description of Artificial Sequence: Synthetic oligonucleotide
acuccaggcaucccaucga

SEQ ID NO: 2651966 - RNA, 19 nt, Artificial Sequence
  Description of Artificial Sequence: Synthetic oligonucleotide
gucuccgccaugaugguca

SEQ ID NO: 2651967 - RNA, 19 nt, Artificial Sequence
  Description of Artificial Sequence: Synthetic oligonucleotide
cuauuguuggaugcggcga

SEQ ID NO: 2651968 - RNA, 19 nt, Artificial Sequence
  Description of Artificial Sequence: Synthetic oligonucleotide
aacccauggcuugcaagga

SEQ ID NO: 2651969 - RNA, 19 nt, Artificial Sequence
  Description of Artificial Sequence: Synthetic oligonucleotide
aguuugggcgugagauccc

SEQ ID NO: 2651970 - RNA, 19 nt, Artificial Sequence
  Description of Artificial Sequence: Synthetic oligonucleotide
cagaucucccauuggcguc

SEQ ID NO: 2651971 - RNA, 19 nt, Artificial Sequence
  Description of Artificial Sequence: Synthetic oligonucleotide
gguaugcucauaaccaauc

SEQ ID NO: 2651972 - RNA, 19 nt, Artificial Sequence
  Description of Artificial Sequence: Synthetic oligonucleotide
gacgcucaauaugguaagc

SEQ ID NO: 2651973 - RNA, 19 nt, Artificial Sequence
  Description of Artificial Sequence: Synthetic oligonucleotide
cggacauuaucaaaacuac

SEQ ID NO: 2651974 - RNA, 19 nt, Artificial Sequence
  Description of Artificial Sequence: Synthetic oligonucleotide
ggacaugagacgcucaaua

SEQ ID NO: 2651975 - RNA, 19 nt, Artificial Sequence
  Description of Artificial Sequence: Synthetic oligonucleotide
ucuuuaugauuggcugaac

SEQ ID NO: 2651976 - RNA, 19 nt, Artificial Sequence
  Description of Artificial Sequence: Synthetic oligonucleotide
ggugaacuccauccgcuug

SEQ ID NO: 2651977 - RNA, 19 nt, Artificial Sequence
  Description of Artificial Sequence: Synthetic oligonucleotide
ugcggcgaauugauuguau

SEQ ID NO: 2651978 - RNA, 19 nt, Artificial Sequence
  Description of Artificial Sequence: Synthetic oligonucleotide
caucccaucgaggguauuc

SEQ ID NO: 2651979 - RNA, 19 nt, Artificial Sequence
  Description of Artificial Sequence: Synthetic oligonucleotide
uggggcggaaggacaugag

SEQ ID NO: 2651980 - RNA, 19 nt, Artificial Sequence
  Description of Artificial Sequence: Synthetic oligonucleotide
auaaccaauccaggcgcca

SEQ ID NO: 2651981 - RNA, 19 nt, Artificial Sequence
  Description of Artificial Sequence: Synthetic oligonucleotide
cugguaugcucauaaccaa

SEQ ID NO: 2651982 - RNA, 19 nt, Artificial Sequence
  Description of Artificial Sequence: Synthetic oligonucleotide
ccggacauuaucaaaacua

SEQ ID NO: 2651983 - RNA, 19 nt, Artificial Sequence
  Description of Artificial Sequence: Synthetic oligonucleotide
uucauggaaccgacuucau

SEQ ID NO: 2651984 - RNA, 19 nt, Artificial Sequence
  Description of Artificial Sequence: Synthetic oligonucleotide
ucgaggguauucuccucuc

SEQ ID NO: 2651985 - RNA, 19 nt, Artificial Sequence
  Description of Artificial Sequence: Synthetic oligonucleotide
ggaaguuugggcgugagau

SEQ ID NO: 2651986 - RNA, 19 nt, Artificial Sequence
  Description of Artificial Sequence: Synthetic oligonucleotide
ugggcgugagauccccacu

SEQ ID NO: 2651987 - RNA, 19 nt, Artificial Sequence
  Description of Artificial Sequence: Synthetic oligonucleotide
guuugggcgugagaucccc

SEQ ID NO: 2651988 - RNA, 19 nt, Artificial Sequence
  Description of Artificial Sequence: Synthetic oligonucleotide
ggcugaacagauggggcgg

SEQ ID NO: 2651989 - RNA, 19 nt, Artificial Sequence
  Description of Artificial Sequence: Synthetic oligonucleotide
gguagcaaacccaggcccc

SEQ ID NO: 2651990 - RNA, 19 nt, Artificial Sequence
  Description of Artificial Sequence: Synthetic oligonucleotide
agauccccacucucuccag

SEQ ID NO: 2651991 - RNA, 19 nt, Artificial Sequence
  Description of Artificial Sequence: Synthetic oligonucleotide
uaucuuccauggccccaug

SEQ ID NO: 2651992 - RNA, 19 nt, Artificial Sequence
  Description of Artificial Sequence: Synthetic oligonucleotide
uggaaccgacuucauuguu

SEQ ID NO: 2651993 - RNA, 19 nt, Artificial Sequence
  Description of Artificial Sequence: Synthetic oligonucleotide
gcggaaggacaugagacgc

SEQ ID NO: 2651994 - RNA, 19 nt, Artificial Sequence
  Description of Artificial Sequence: Synthetic oligonucleotide
ggcgccacacuccaccuug

SEQ ID NO: 2651995 - RNA, 19 nt, Artificial Sequence
  Description of Artificial Sequence: Synthetic oligonucleotide
cuccaguauaaacuguugu

SEQ ID NO: 2651996 - RNA, 19 nt, Artificial Sequence
  Description of Artificial Sequence: Synthetic oligonucleotide
gggcggaaggacaugagac

SEQ ID NO: 2651997 - RNA, 19 nt, Artificial Sequence
  Description of Artificial Sequence: Synthetic oligonucleotide
gcauugcucccacuccagg

SEQ ID NO: 2651998 - RNA, 19 nt, Artificial Sequence
  Description of Artificial Sequence: Synthetic oligonucleotide
agucuccgccaugaugguc

SEQ ID NO: 2651999 - RNA, 19 nt, Artificial Sequence
  Description of Artificial Sequence: Synthetic oligonucleotide
agcauugcucccacuccag

SEQ ID NO: 2652000 - RNA, 19 nt, Artificial Sequence
  Description of Artificial Sequence: Synthetic oligonucleotide
uaaccacgauauccaggau

SEQ ID NO: 2652001 - RNA, 19 nt, Artificial Sequence
  Description of Artificial Sequence: Synthetic oligonucleotide
uggugaacuccauccgcuu

SEQ ID NO: 2652002 - RNA, 19 nt, Artificial Sequence
  Description of Artificial Sequence: Synthetic oligonucleotide
auguacugauaaccacgau

SEQ ID NO: 2652003 - RNA, 19 nt, Artificial Sequence
  Description of Artificial Sequence: Synthetic oligonucleotide
aaccgacuucauuguugaa

SEQ ID NO: 2652004 - RNA, 19 nt, Artificial Sequence
  Description of Artificial Sequence: Synthetic oligonucleotide
auggggcggaaggacauga

SEQ ID NO: 2652005 - RNA, 19 nt, Artificial Sequence
  Description of Artificial Sequence: Synthetic oligonucleotide
uugagggaccggacauuau

SEQ ID NO: 2652006 - RNA, 19 nt, Artificial Sequence
  Description of Artificial Sequence: Synthetic oligonucleotide
ucccaucgaggguauucuc

SEQ ID NO: 2652007 - RNA, 19 nt, Artificial Sequence
  Description of Artificial Sequence: Synthetic oligonucleotide
ccaggcgccacacuccacc

SEQ ID NO: 2652008 - RNA, 19 nt, Artificial Sequence
  Description of Artificial Sequence: Synthetic oligonucleotide
aggcaucccaucgagggua

SEQ ID NO: 2652009 - RNA, 19 nt, Artificial Sequence
  Description of Artificial Sequence: Synthetic oligonucleotide
gaaggacaugagacgcuca

SEQ ID NO: 2652010 - RNA, 19 nt, Artificial Sequence
  Description of Artificial Sequence: Synthetic oligonucleotide
ccacuauuguuggaugcgg

SEQ ID NO: 2652011 - RNA, 19 nt, Artificial Sequence
  Description of Artificial Sequence: Synthetic oligonucleotide
aaccaacccauggcuugca

SEQ ID NO: 2652012 - RNA, 19 nt, Artificial Sequence
  Description of Artificial Sequence: Synthetic oligonucleotide
aacuacgcucagaaacauu

SEQ ID NO: 2652013 - RNA, 19 nt, Artificial Sequence
  Description of Artificial Sequence: Synthetic oligonucleotide
cuuggugguuggaagaguu

SEQ ID NO: 2652014 - RNA, 19 nt, Artificial Sequence
  Description of Artificial Sequence: Synthetic oligonucleotide
uagucuccgccaugauggu

SEQ ID NO: 2652015 - RNA, 19 nt, Artificial Sequence
  Description of Artificial Sequence: Synthetic oligonucleotide
gauggggcggaaggacaug

SEQ ID NO: 2652016 - RNA, 19 nt, Artificial Sequence
  Description of Artificial Sequence: Synthetic oligonucleotide
cucccauuggcguccaaua

SEQ ID NO: 2652017 - RNA, 19 nt, Artificial Sequence
  Description of Artificial Sequence: Synthetic oligonucleotide
uuguuggaugcggcgaauu

SEQ ID NO: 2652018 - RNA, 19 nt, Artificial Sequence
  Description of Artificial Sequence: Synthetic oligonucleotide
cuugagggaccggacauua

SEQ ID NO: 2652019 - RNA, 19 nt, Artificial Sequence
  Description of Artificial Sequence: Synthetic oligonucleotide
guagcaaacccaggcccca

SEQ ID NO: 2652020 - RNA, 19 nt, Artificial Sequence
  Description of Artificial Sequence: Synthetic oligonucleotide
cauggccccauggacccug

SEQ ID NO: 2652021 - RNA, 19 nt, Artificial Sequence
  Description of Artificial Sequence: Synthetic oligonucleotide
ugauuguaucugggaaguu

SEQ ID NO: 2652022 - RNA, 19 nt, Artificial Sequence
  Description of Artificial Sequence: Synthetic oligonucleotide
augagacgcucaauauggu

SEQ ID NO: 2652023 - RNA, 19 nt, Artificial Sequence
  Description of Artificial Sequence: Synthetic oligonucleotide
ucuccgccaugauggucac

SEQ ID NO: 2652024 - RNA, 19 nt, Artificial Sequence
  Description of Artificial Sequence: Synthetic oligonucleotide
auuguuggaugcggcgaau

SEQ ID NO: 2652025 - RNA, 19 nt, Artificial Sequence
  Description of Artificial Sequence: Synthetic oligonucleotide
uccgcuugcccuggaaguu

SEQ ID NO: 2652026 - RNA, 19 nt, Artificial Sequence
  Description of Artificial Sequence: Synthetic oligonucleotide
gcggcgaauugauuguauc

SEQ ID NO: 2652027 - RNA, 19 nt, Artificial Sequence
  Description of Artificial Sequence: Synthetic oligonucleotide
gggcgugagauccccacuc

SEQ ID NO: 2652028 - RNA, 19 nt, Artificial Sequence
  Description of Artificial Sequence: Synthetic oligonucleotide
aggacaugagacgcucaau

SEQ ID NO: 2652029 - RNA, 19 nt, Artificial Sequence
  Description of Artificial Sequence: Synthetic oligonucleotide
ggccccacauuguaucuuc

SEQ ID NO: 2652030 - RNA, 19 nt, Artificial Sequence
  Description of Artificial Sequence: Synthetic oligonucleotide
accaacccauggcuugcaa

SEQ ID NO: 2652031 - RNA, 19 nt, Artificial Sequence
  Description of Artificial Sequence: Synthetic oligonucleotide
ggggcggaaggacaugaga

SEQ ID NO: 2652032 - RNA, 19 nt, Artificial Sequence
  Description of Artificial Sequence: Synthetic oligonucleotide
acccaggccccacauugua

SEQ ID NO: 2652033 - RNA, 19 nt, Artificial Sequence
  Description of Artificial Sequence: Synthetic oligonucleotide
gggaccggacauuaucaaa

SEQ ID NO: 2652034 - RNA, 19 nt, Artificial Sequence
  Description of Artificial Sequence: Synthetic oligonucleotide
auggacccuggcauagggu

SEQ ID NO: 2652035 - RNA, 19 nt, Artificial Sequence
  Description of Artificial Sequence: Synthetic oligonucleotide
cauuggcguccaauaaagu

SEQ ID NO: 2652036 - RNA, 19 nt, Artificial Sequence
  Description of Artificial Sequence: Synthetic oligonucleotide
gcaaggaaggguagucauc

SEQ ID NO: 2652037 - RNA, 19 nt, Artificial Sequence
  Description of Artificial Sequence: Synthetic oligonucleotide
cagcucccgcugcacaguc

SEQ ID NO: 2652038 - RNA, 19 nt, Artificial Sequence
  Description of Artificial Sequence: Synthetic oligonucleotide
ggacccuggcauaggguug

SEQ ID NO: 2652039 - RNA, 19 nt, Artificial Sequence
  Description of Artificial Sequence: Synthetic oligonucleotide
gggaaguuugggcgugaga

SEQ ID NO: 2652040 - RNA, 19 nt, Artificial Sequence
  Description of Artificial Sequence: Synthetic oligonucleotide
cccauuggcguccaauaaa

SEQ ID NO: 2652041 - RNA, 19 nt, Artificial Sequence
  Description of Artificial Sequence: Synthetic oligonucleotide
cccauggacccuggcauag

SEQ ID NO: 2652042 - RNA, 19 nt, Artificial Sequence
  Description of Artificial Sequence: Synthetic oligonucleotide
aggguuggucugagccauc

SEQ ID NO: 2652043 - RNA, 19 nt, Artificial Sequence
  Description of Artificial Sequence: Synthetic oligonucleotide
gcgugagauccccacucuc

SEQ ID NO: 2652044 - RNA, 19 nt, Artificial Sequence
  Description of Artificial Sequence: Synthetic oligonucleotide
gcucaauaugguaagcauu

SEQ ID NO: 2652045 - RNA, 19 nt, Artificial Sequence
  Description of Artificial Sequence: Synthetic oligonucleotide
augcggcgaauugauugua

SEQ ID NO: 2652046 - RNA, 19 nt, Artificial Sequence
  Description of Artificial Sequence: Synthetic oligonucleotide
gcguccaauaaaguucucu

SEQ ID NO: 2652047 - RNA, 19 nt, Artificial Sequence
  Description of Artificial Sequence: Synthetic oligonucleotide
ccgcugcacagucuggguc

SEQ ID NO: 2652048 - RNA, 19 nt, Artificial Sequence
  Description of Artificial Sequence: Synthetic oligonucleotide
cucccacuccaggcauccc

SEQ ID NO: 2652049 - RNA, 19 nt, Artificial Sequence
  Description of Artificial Sequence: Synthetic oligonucleotide
ccauggacccuggcauagg

SEQ ID NO: 2652050 - RNA, 19 nt, Artificial Sequence
  Description of Artificial Sequence: Synthetic oligonucleotide
gcugaacagauggggcgga

SEQ ID NO: 2652051 - RNA, 19 nt, Artificial Sequence
  Description of Artificial Sequence: Synthetic oligonucleotide
ggucacauuccaagaugua

SEQ ID NO: 2652052 - RNA, 19 nt, Artificial Sequence
  Description of Artificial Sequence: Synthetic oligonucleotide
gguaagcauugcucccacu

SEQ ID NO: 2652053 - RNA, 19 nt, Artificial Sequence
  Description of Artificial Sequence: Synthetic oligonucleotide
cguccaauaaaguucucuu

SEQ ID NO: 2652054 - RNA, 19 nt, Artificial Sequence
  Description of Artificial Sequence: Synthetic oligonucleotide
cacucucuccaguguuugu

SEQ ID NO: 2652055 - RNA, 19 nt, Artificial Sequence
  Description of Artificial Sequence: Synthetic oligonucleotide
cugaacagauggggcggaa

SEQ ID NO: 2652056 - RNA, 19 nt, Artificial Sequence
  Description of Artificial Sequence: Synthetic oligonucleotide
ggcgugagauccccacucu

SEQ ID NO: 2652057 - RNA, 19 nt, Artificial Sequence
  Description of Artificial Sequence: Synthetic oligonucleotide
cgugagauccccacucucu

SEQ ID NO: 2652058 - RNA, 19 nt, Artificial Sequence
  Description of Artificial Sequence: Synthetic oligonucleotide
cgauauccaggauacuggu

SEQ ID NO: 2652059 - RNA, 19 nt, Artificial Sequence
  Description of Artificial Sequence: Synthetic oligonucleotide
gcuugcaaggaaggguagu

SEQ ID NO: 2652060 - RNA, 19 nt, Artificial Sequence
  Description of Artificial Sequence: Synthetic oligonucleotide
cggcgaauugauuguaucu

SEQ ID NO: 2652061 - RNA, 19 nt, Artificial Sequence
  Description of Artificial Sequence: Synthetic oligonucleotide
caaacccaggccccacauu

SEQ ID NO: 2652062 - RNA, 19 nt, Artificial Sequence
  Description of Artificial Sequence: Synthetic oligonucleotide
ccacuccaggcaucccauc

SEQ ID NO: 2652063 - RNA, 19 nt, Artificial Sequence
  Description of Artificial Sequence: Synthetic oligonucleotide
cgacuucauuguugaacca

SEQ ID NO: 2652064 - RNA, 19 nt, Artificial Sequence
  Description of Artificial Sequence: Synthetic oligonucleotide
ccgcuugcccuggaaguuc

SEQ ID NO: 2652065 - RNA, 19 nt, Artificial Sequence
  Description of Artificial Sequence: Synthetic oligonucleotide
acccuggcauaggguuggu

SEQ ID NO: 2652066 - RNA, 19 nt, Artificial Sequence
  Description of Artificial Sequence: Synthetic oligonucleotide
ggcguccaauaaaguucuc

SEQ ID NO: 2652067 - RNA, 19 nt, Artificial Sequence
  Description of Artificial Sequence: Synthetic oligonucleotide
ccccacauuguaucuucau

SEQ ID NO: 2652068 - RNA, 19 nt, Artificial Sequence
  Description of Artificial Sequence: Synthetic oligonucleotide
gcgccacacuccaccuuga

SEQ ID NO: 2652069 - RNA, 19 nt, Artificial Sequence
  Description of Artificial Sequence: Synthetic oligonucleotide
cccaggccccacauuguau

SEQ ID NO: 2652070 - RNA, 19 nt, Artificial Sequence
  Description of Artificial Sequence: Synthetic oligonucleotide
cccgcugcacagucugggu

SEQ ID NO: 2652071 - RNA, 19 nt, Artificial Sequence
  Description of Artificial Sequence: Synthetic oligonucleotide
ggcaucccaucgaggguau

SEQ ID NO: 2652072 - RNA, 19 nt, Artificial Sequence
  Description of Artificial Sequence: Synthetic oligonucleotide
ccaauccaggcgccacacu

SEQ ID NO: 2652073 - RNA, 19 nt, Artificial Sequence
  Description of Artificial Sequence: Synthetic oligonucleotide
cgcuugcccuggaaguucu

SEQ ID NO: 2652074 - RNA, 19 nt, Artificial Sequence
  Description of Artificial Sequence: Synthetic oligonucleotide
ccuugagggaccggacauu

SEQ ID NO: 2652075 - RNA, 19 nt, Artificial Sequence
  Description of Artificial Sequence: Synthetic oligonucleotide
ccacgauauccaggauacu

SEQ ID NO: 2652076 - RNA, 19 nt, Artificial Sequence
  Description of Artificial Sequence: Synthetic oligonucleotide
aauucaaagagguaggcag

SEQ ID NO: 2652077 - RNA, 19 nt, Artificial Sequence
  Description of Artificial Sequence: Synthetic oligonucleotide
uguucagaaauucaaagag

SEQ ID NO: 2652078 - RNA, 19 nt, Artificial Sequence
  Description of Artificial Sequence: Synthetic oligonucleotide
uucagaaauucaaagaggu

SEQ ID NO: 2652079 - RNA, 19 nt, Artificial Sequence
  Description of Artificial Sequence: Synthetic oligonucleotide
cagaaauucaaagagguag

SEQ ID NO: 2652080 - RNA, 19 nt, Artificial Sequence
  Description of Artificial Sequence: Synthetic oligonucleotide
aucccgaagaugcugaugg

SEQ ID NO: 2652081 - RNA, 19 nt, Artificial Sequence
  Description of Artificial Sequence: Synthetic oligonucleotide
uuguacaggacccagggac

SEQ ID NO: 2652082 - RNA, 19 nt, Artificial Sequence
  Description of Artificial Sequence: Synthetic oligonucleotide
ugguggaucccgaagaugc

SEQ ID NO: 2652083 - RNA, 19 nt, Artificial Sequence
  Description of Artificial Sequence: Synthetic oligonucleotide
uuguucagaaauucaaaga

SEQ ID NO: 2652084 - RNA, 19 nt, Artificial Sequence
  Description of Artificial Sequence: Synthetic oligonucleotide
caaagagguaggcaggugg

SEQ ID NO: 2652085 - RNA, 19 nt, Artificial Sequence
  Description of Artificial Sequence: Synthetic oligonucleotide
uguacaggacccagggacg

SEQ ID NO: 2652086 - RNA, 19 nt, Artificial Sequence
  Description of Artificial Sequence: Synthetic oligonucleotide
uacuuguucagaaauucaa

SEQ ID NO: 2652087 - RNA, 19 nt, Artificial Sequence
  Description of Artificial Sequence: Synthetic oligonucleotide
gacaacucuacuuguucag

SEQ ID NO: 2652088 - RNA, 19 nt, Artificial Sequence
  Description of Artificial Sequence: Synthetic oligonucleotide
aaagagguaggcagguggg

SEQ ID NO: 2652089 - RNA, 19 nt, Artificial Sequence
  Description of Artificial Sequence: Synthetic oligonucleotide
aaauucaaagagguaggca

SEQ ID NO: 2652090 - RNA, 19 nt, Artificial Sequence
  Description of Artificial Sequence: Synthetic oligonucleotide
gaaauucaaagagguaggc

SEQ ID NO: 2652091 - RNA, 19 nt, Artificial Sequence
  Description of Artificial Sequence: Synthetic oligonucleotide
augcugauggugcagacgu

SEQ ID NO: 2652092 - RNA, 19 nt, Artificial Sequence
  Description of Artificial Sequence: Synthetic oligonucleotide
uugugguggaucccgaaga

SEQ ID NO: 2652093 - RNA, 19 nt, Artificial Sequence
  Description of Artificial Sequence: Synthetic oligonucleotide
caggagacaacucuacuug

SEQ ID NO: 2652094 - RNA, 19 nt, Artificial Sequence
  Description of Artificial Sequence: Synthetic oligonucleotide
uaagauggucuguggaccc

SEQ ID NO: 2652095 - RNA, 19 nt, Artificial Sequence
  Description of Artificial Sequence: Synthetic oligonucleotide
agacaacucuacuuguuca

SEQ ID NO: 2652096 - RNA, 19 nt, Artificial Sequence
  Description of Artificial Sequence: Synthetic oligonucleotide
aacucuacuuguucagaaa

SEQ ID NO: 2652097 - RNA, 19 nt, Artificial Sequence
  Description of Artificial Sequence: Synthetic oligonucleotide
gagacaacucuacuuguuc

SEQ ID NO: 2652098 - RNA, 19 nt, Artificial Sequence
  Description of Artificial Sequence: Synthetic oligonucleotide
guaagauggucuguggacc

SEQ ID NO: 2652099 - RNA, 19 nt, Artificial Sequence
  Description of Artificial Sequence: Synthetic oligonucleotide
ucagcuccggcuuccugcg

SEQ ID NO: 2652100 - RNA, 19 nt, Artificial Sequence
  Description of Artificial Sequence: Synthetic oligonucleotide
ucagaaauucaaagaggua

SEQ ID NO: 2652101 - RNA, 19 nt, Artificial Sequence
  Description of Artificial Sequence: Synthetic oligonucleotide
acaggagacaacucuacuu

SEQ ID NO: 2652102 - RNA, 19 nt, Artificial Sequence
  Description of Artificial Sequence: Synthetic oligonucleotide
uggaucccgaagaugcuga

SEQ ID NO: 2652103 - RNA, 19 nt, Artificial Sequence
  Description of Artificial Sequence: Synthetic oligonucleotide
agcguaagauggucugugg

SEQ ID NO: 2652104 - RNA, 19 nt, Artificial Sequence
  Description of Artificial Sequence: Synthetic oligonucleotide
agcagcguaagauggucug

SEQ ID NO: 2652105 - RNA, 19 nt, Artificial Sequence
  Description of Artificial Sequence: Synthetic oligonucleotide
ugauggugcagacguuccc

SEQ ID NO: 2652106 - RNA, 19 nt, Artificial Sequence
  Description of Artificial Sequence: Synthetic oligonucleotide
uucaaagagguaggcaggu

SEQ ID NO: 2652107 - RNA, 19 nt, Artificial Sequence
  Description of Artificial Sequence: Synthetic oligonucleotide
cagacguucccuuugggga

SEQ ID NO: 2652108 - RNA, 19 nt, Artificial Sequence
  Description of Artificial Sequence: Synthetic oligonucleotide
aagauggucuguggacccg

SEQ ID NO: 2652109 - RNA, 19 nt, Artificial Sequence
  Description of Artificial Sequence: Synthetic oligonucleotide
gacgacggcccacuggcag

SEQ ID NO: 2652110 - RNA, 19 nt, Artificial Sequence
  Description of Artificial Sequence: Synthetic oligonucleotide
cugauggugcagacguucc

SEQ ID NO: 2652111 - RNA, 19 nt, Artificial Sequence
  Description of Artificial Sequence: Synthetic oligonucleotide
ugcagacguucccuuuggg

SEQ ID NO: 2652112 - RNA, 19 nt, Artificial Sequence
  Description of Artificial Sequence: Synthetic oligonucleotide
ggugcagcagcguaagaug

SEQ ID NO: 2652113 - RNA, 19 nt, Artificial Sequence
  Description of Artificial Sequence: Synthetic oligonucleotide
gugcagcagcguaagaugg

SEQ ID NO: 2652114 - RNA, 19 nt, Artificial Sequence
  Description of Artificial Sequence: Synthetic oligonucleotide
ugugguggaucccgaagau

SEQ ID NO: 2652115 - RNA, 19 nt, Artificial Sequence
  Description of Artificial Sequence: Synthetic oligonucleotide
cuacuuguucagaaauuca

SEQ ID NO: 2652116 - RNA, 19 nt, Artificial Sequence
  Description of Artificial Sequence: Synthetic oligonucleotide
gcagacguucccuuugggg

SEQ ID NO: 2652117 - RNA, 19 nt, Artificial Sequence
  Description of Artificial Sequence: Synthetic oligonucleotide
aggagacaacucuacuugu

SEQ ID NO: 2652118 - RNA, 19 nt, Artificial Sequence
  Description of Artificial Sequence: Synthetic oligonucleotide
agcuccggcuuccugcggg

SEQ ID NO: 2652119 - RNA, 19 nt, Artificial Sequence
  Description of Artificial Sequence: Synthetic oligonucleotide
acaggacccagggacgacg

SEQ ID NO: 2652120 - RNA, 19 nt, Artificial Sequence
  Description of Artificial Sequence: Synthetic oligonucleotide
acuuguucagaaauucaaa

SEQ ID NO: 2652121 - RNA, 19 nt, Artificial Sequence
  Description of Artificial Sequence: Synthetic oligonucleotide
uggggugguccccaagcca

SEQ ID NO: 2652122 - RNA, 19 nt, Artificial Sequence
  Description of Artificial Sequence: Synthetic oligonucleotide
ugcagcagcguaagauggu

SEQ ID NO: 2652123 - RNA, 19 nt, Artificial Sequence
  Description of Artificial Sequence: Synthetic oligonucleotide
agagguaggcaggugggug

SEQ ID NO: 2652124 - RNA, 19 nt, Artificial Sequence
  Description of Artificial Sequence: Synthetic oligonucleotide
agggacgacggcccacugg

SEQ ID NO: 2652125 - RNA, 19 nt, Artificial Sequence
  Description of Artificial Sequence: Synthetic oligonucleotide
gugcagacguucccuuugg

SEQ ID NO: 2652126 - RNA, 19 nt, Artificial Sequence
  Description of Artificial Sequence: Synthetic oligonucleotide
agauggucuguggacccgg

SEQ ID NO: 2652127 - RNA, 19 nt, Artificial Sequence
  Description of Artificial Sequence: Synthetic oligonucleotide
gggacgacggcccacuggc

SEQ ID NO: 2652128 - RNA, 19 nt, Artificial Sequence
  Description of Artificial Sequence: Synthetic oligonucleotide
acaacucuacuuguucaga

SEQ ID NO: 2652129 - RNA, 19 nt, Artificial Sequence
  Description of Artificial Sequence: Synthetic oligonucleotide
agacguucccuuuggggau

SEQ ID NO: 2652130 - RNA, 19 nt, Artificial Sequence
  Description of Artificial Sequence: Synthetic oligonucleotide
aggcuugguggucacugug

SEQ ID NO: 2652131 - RNA, 19 nt, Artificial Sequence
  Description of Artificial Sequence: Synthetic oligonucleotide
ugguccccaagccaggcuu

SEQ ID NO: 2652132 - RNA, 19 nt, Artificial Sequence
  Description of Artificial Sequence: Synthetic oligonucleotide
aagagguaggcaggugggu

SEQ ID NO: 2652133 - RNA, 19 nt, Artificial Sequence
  Description of Artificial Sequence: Synthetic oligonucleotide
caacucuacuuguucagaa

SEQ ID NO: 2652134 - RNA, 19 nt, Artificial Sequence
  Description of Artificial Sequence: Synthetic oligonucleotide
caggacccagggacgacgg

SEQ ID NO: 2652135 - RNA, 19 nt, Artificial Sequence
  Description of Artificial Sequence: Synthetic oligonucleotide
gguggggugguccccaagc

SEQ ID NO: 2652136 - RNA, 19 nt, Artificial Sequence
  Description of Artificial Sequence: Synthetic oligonucleotide
ggugcagacguucccuuug

SEQ ID NO: 2652137 - RNA, 19 nt, Artificial Sequence
  Description of Artificial Sequence: Synthetic oligonucleotide
cuugguggucacugugcac

SEQ ID NO: 2652138 - RNA, 19 nt, Artificial Sequence
  Description of Artificial Sequence: Synthetic oligonucleotide
gaucccgaagaugcugaug

SEQ ID NO: 2652139 - RNA, 19 nt, Artificial Sequence
  Description of Artificial Sequence: Synthetic oligonucleotide
aagccaggcuuggugguca

SEQ ID NO: 2652140 - RNA, 19 nt, Artificial Sequence
  Description of Artificial Sequence: Synthetic oligonucleotide
cguaagauggucuguggac

SEQ ID NO: 2652141 - RNA, 19 nt, Artificial Sequence
  Description of Artificial Sequence: Synthetic oligonucleotide
cccaagccaggcuuggugg

SEQ ID NO: 2652142 - RNA, 19 nt, Artificial Sequence
  Description of Artificial Sequence: Synthetic oligonucleotide
gauggucuguggacccggg

SEQ ID NO: 2652143 - RNA, 19 nt, Artificial Sequence
  Description of Artificial Sequence: Synthetic oligonucleotide
cagcguaagauggucugug

SEQ ID NO: 2652144 - RNA, 19 nt, Artificial Sequence
  Description of Artificial Sequence: Synthetic oligonucleotide
guggaucccgaagaugcug

SEQ ID NO: 2652145 - RNA, 19 nt, Artificial Sequence
  Description of Artificial Sequence: Synthetic oligonucleotide
gacccagggacgacggccc

SEQ ID NO: 2652146 - RNA, 19 nt, Artificial Sequence
  Description of Artificial Sequence: Synthetic oligonucleotide
guggggugguccccaagcc

SEQ ID NO: 2652147 - RNA, 19 nt, Artificial Sequence
  Description of Artificial Sequence: Synthetic oligonucleotide
aggcagguggguggggugg

SEQ ID NO: 2652148 - RNA, 19 nt, Artificial Sequence
  Description of Artificial Sequence: Synthetic oligonucleotide
gauggugcagacguucccu

SEQ ID NO: 2652149 - RNA, 19 nt, Artificial Sequence
  Description of Artificial Sequence: Synthetic oligonucleotide
guggucacugugcacccga

SEQ ID NO: 2652150 - RNA, 19 nt, Artificial Sequence
  Description of Artificial Sequence: Synthetic oligonucleotide
ggggugguccccaagccag

SEQ ID NO: 2652151 - RNA, 19 nt, Artificial Sequence
  Description of Artificial Sequence: Synthetic oligonucleotide
acgacggcccacuggcagu

SEQ ID NO: 2652152 - RNA, 19 nt, Artificial Sequence
  Description of Artificial Sequence: Synthetic oligonucleotide
gacguucccuuuggggaug

SEQ ID NO: 2652153 - RNA, 19 nt, Artificial Sequence
  Description of Artificial Sequence: Synthetic oligonucleotide
agccaggcuugguggucac

SEQ ID NO: 2652154 - RNA, 19 nt, Artificial Sequence
  Description of Artificial Sequence: Synthetic oligonucleotide
gugguggaucccgaagaug

SEQ ID NO: 2652155 - RNA, 19 nt, Artificial Sequence
  Description of Artificial Sequence: Synthetic oligonucleotide
auggugcagacguucccuu

SEQ ID NO: 2652156 - RNA, 19 nt, Artificial Sequence
  Description of Artificial Sequence: Synthetic oligonucleotide
ggacccagggacgacggcc

SEQ ID NO: 2652157 - RNA, 19 nt, Artificial Sequence
  Description of Artificial Sequence: Synthetic oligonucleotide
gcguaagauggucugugga

SEQ ID NO: 2652158 - RNA, 19 nt, Artificial Sequence
  Description of Artificial Sequence: Synthetic oligonucleotide
gcugauggugcagacguuc

SEQ ID NO: 2652159 - RNA, 19 nt, Artificial Sequence
  Description of Artificial Sequence: Synthetic oligonucleotide
caggugggugggguggucc

SEQ ID NO: 2652160 - RNA, 19 nt, Artificial Sequence
  Description of Artificial Sequence: Synthetic oligonucleotide
ggcuugguggucacugugc

SEQ ID NO: 2652161 - RNA, 19 nt, Artificial Sequence
  Description of Artificial Sequence: Synthetic oligonucleotide
gcuugguggucacugugca

SEQ ID NO: 2652162 - RNA, 19 nt, Artificial Sequence
  Description of Artificial Sequence: Synthetic oligonucleotide
uggugcagacguucccuuu

SEQ ID NO: 2652163 - RNA, 19 nt, Artificial Sequence
  Description of Artificial Sequence: Synthetic oligonucleotide
guacaggacccagggacga

SEQ ID NO: 2652164 - RNA, 19 nt, Artificial Sequence
  Description of Artificial Sequence: Synthetic oligonucleotide
guccccaagccaggcuugg

SEQ ID NO: 2652165 - RNA, 19 nt, Artificial Sequence
  Description of Artificial Sequence: Synthetic oligonucleotide
acggcccacuggcaguggu

SEQ ID NO: 2652166 - RNA, 19 nt, Artificial Sequence
  Description of Artificial Sequence: Synthetic oligonucleotide
ccaggcuugguggucacug

SEQ ID NO: 2652167 - RNA, 19 nt, Artificial Sequence
  Description of Artificial Sequence: Synthetic oligonucleotide
caagccaggcuuggugguc

SEQ ID NO: 2652168 - RNA, 19 nt, Artificial Sequence
  Description of Artificial Sequence: Synthetic oligonucleotide
gcagcagcguaagaugguc

SEQ ID NO: 2652169 - RNA, 19 nt, Artificial Sequence
  Description of Artificial Sequence: Synthetic oligonucleotide
gguggucacugugcacccg

SEQ ID NO: 2652170 - RNA, 19 nt, Artificial Sequence
  Description of Artificial Sequence: Synthetic oligonucleotide
ccccaagccaggcuuggug

SEQ ID NO: 2652171 - RNA, 19 nt, Artificial Sequence
  Description of Artificial Sequence: Synthetic oligonucleotide
ggugguccccaagccaggc

SEQ ID NO: 2652172 - RNA, 19 nt, Artificial Sequence
  Description of Artificial Sequence: Synthetic oligonucleotide
gacggcccacuggcagugg

SEQ ID NO: 2652173 - RNA, 19 nt, Artificial Sequence
  Description of Artificial Sequence: Synthetic oligonucleotide
cagcagcguaagauggucu

SEQ ID NO: 2652174 - RNA, 19 nt, Artificial Sequence
  Description of Artificial Sequence: Synthetic oligonucleotide
uccccaagccaggcuuggu

SEQ ID NO: 2652175 - RNA, 19 nt, Artificial Sequence
  Description of Artificial Sequence: Synthetic oligonucleotide
guaggcagguggguggggu

SEQ ID NO: 2652176 - RNA, 19 nt, Artificial Sequence
  Description of Artificial Sequence: Synthetic oligonucleotide
gguaggcaggugggugggg

SEQ ID NO: 2652177 - RNA, 19 nt, Artificial Sequence
  Description of Artificial Sequence: Synthetic oligonucleotide
cagcuccggcuuccugcgg

SEQ ID NO: 2652178 - RNA, 19 nt, Artificial Sequence
  Description of Artificial Sequence: Synthetic oligonucleotide
gguccccaagccaggcuug

SEQ ID NO: 2652179 - RNA, 19 nt, Artificial Sequence
  Description of Artificial Sequence: Synthetic oligonucleotide
acguucccuuuggggauga

SEQ ID NO: 2652180 - RNA, 19 nt, Artificial Sequence
  Description of Artificial Sequence: Synthetic oligonucleotide
gggugguccccaagccagg

SEQ ID NO: 2652181 - RNA, 19 nt, Artificial Sequence
  Description of Artificial Sequence: Synthetic oligonucleotide
cagggacgacggcccacug

SEQ ID NO: 2652182 - RNA, 19 nt, Artificial Sequence
  Description of Artificial Sequence: Synthetic oligonucleotide
ggugggugggguggucccc

SEQ ID NO: 2652183 - RNA, 19 nt, Artificial Sequence
  Description of Artificial Sequence: Synthetic oligonucleotide
caggcuugguggucacugu

SEQ ID NO: 2652184 - RNA, 19 nt, Artificial Sequence
  Description of Artificial Sequence: Synthetic oligonucleotide
ggagacaacucuacuuguu

SEQ ID NO: 2652185 - RNA, 19 nt, Artificial Sequence
  Description of Artificial Sequence: Synthetic oligonucleotide
gugguccccaagccaggcu

SEQ ID NO: 2652186 - RNA, 19 nt, Artificial Sequence
  Description of Artificial Sequence: Synthetic oligonucleotide
gguggaucccgaagaugcu

SEQ ID NO: 2652187 - RNA, 19 nt, Artificial Sequence
  Description of Artificial Sequence: Synthetic oligonucleotide
gcagcguaagauggucugu

SEQ ID NO: 2652188 - RNA, 19 nt, Artificial Sequence
  Description of Artificial Sequence: Synthetic oligonucleotide
ggaucccgaagaugcugau

SEQ ID NO: 2652189 - RNA, 19 nt, Artificial Sequence
  Description of Artificial Sequence: Synthetic oligonucleotide
ccaagccaggcuugguggu

SEQ ID NO: 2652190 - RNA, 19 nt, Artificial Sequence
  Description of Artificial Sequence: Synthetic oligonucleotide
cggcccacuggcaguggug

SEQ ID NO: 2652191 - RNA, 19 nt, Artificial Sequence
  Description of Artificial Sequence: Synthetic oligonucleotide
ggacgacggcccacuggca

SEQ ID NO: 2652192 - RNA, 19 nt, Artificial Sequence
  Description of Artificial Sequence: Synthetic oligonucleotide
cgacggcccacuggcagug

SEQ ID NO: 2652193 - RNA, 19 nt, Artificial Sequence
  Description of Artificial Sequence: Synthetic oligonucleotide
cccagggacgacggcccac

SEQ ID NO: 2652194 - RNA, 19 nt, Artificial Sequence
  Description of Artificial Sequence: Synthetic oligonucleotide
gcagguggguggggugguc

SEQ ID NO: 2652195 - RNA, 19 nt, Artificial Sequence
  Description of Artificial Sequence: Synthetic oligonucleotide
ggcaggugggugggguggu

SEQ ID NO: 2652196 - RNA, 19 nt, Artificial Sequence
  Description of Artificial Sequence: Synthetic oligonucleotide
ccagggacgacggcccacu

SEQ ID NO: 2652197 - RNA, 19 nt, Artificial Sequence
  Description of Artificial Sequence: Synthetic oligonucleotide
gccaggcuugguggucacu

SEQ ID NO: 2652198 - RNA, 19 nt, Artificial Sequence
  Description of Artificial Sequence: Synthetic oligonucleotide
acugguaucauauaaaugg

SEQ ID NO: 2652199 - RNA, 19 nt, Artificial Sequence
  Description of Artificial Sequence: Synthetic oligonucleotide
aauguagaugccuagacac

SEQ ID NO: 2652200 - RNA, 19 nt, Artificial Sequence
  Description of Artificial Sequence: Synthetic oligonucleotide
gacaauuugagccagacug

SEQ ID NO: 2652201 - RNA, 19 nt, Artificial Sequence
  Description of Artificial Sequence: Synthetic oligonucleotide
aaguuaauccaacuggugg

SEQ ID NO: 2652202 - RNA, 19 nt, Artificial Sequence
  Description of Artificial Sequence: Synthetic oligonucleotide
auuaauuccagccugauau

SEQ ID NO: 2652203 - RNA, 19 nt, Artificial Sequence
  Description of Artificial Sequence: Synthetic oligonucleotide
cauucuauuacuugaaagg

SEQ ID NO: 2652204 - RNA, 19 nt, Artificial Sequence
  Description of Artificial Sequence: Synthetic oligonucleotide
uugauuuggaucuagaagu

SEQ ID NO: 2652205 - RNA, 19 nt, Artificial Sequence
  Description of Artificial Sequence: Synthetic oligonucleotide
uagacacucauccuuaucg

SEQ ID NO: 2652206 - RNA, 19 nt, Artificial Sequence
  Description of Artificial Sequence: Synthetic oligonucleotide
gagaaguuaauccaacugg

SEQ ID NO: 2652207 - RNA, 19 nt, Artificial Sequence
  Description of Artificial Sequence: Synthetic oligonucleotide
aguuaauccaacugguggc

SEQ ID NO: 2652208 - RNA, 19 nt, Artificial Sequence
  Description of Artificial Sequence: Synthetic oligonucleotide
gaugccuagacacucaucc

SEQ ID NO: 2652209 - RNA, 19 nt, Artificial Sequence
  Description of Artificial Sequence: Synthetic oligonucleotide
aaaugagugagucucaaaa

SEQ ID NO: 2652210 - RNA, 19 nt, Artificial Sequence
  Description of Artificial Sequence: Synthetic oligonucleotide
ugaggggacaauuugagcc

SEQ ID NO: 2652211 - RNA, 19 nt, Artificial Sequence
  Description of Artificial Sequence: Synthetic oligonucleotide
acagcuagagaucuuggcc

SEQ ID NO: 2652212 - RNA, 19 nt, Artificial Sequence
  Description of Artificial Sequence: Synthetic oligonucleotide
auccuuugcaaauuaauuc

SEQ ID NO: 2652213 - RNA, 19 nt, Artificial Sequence
  Description of Artificial Sequence: Synthetic oligonucleotide
ggcaccauaauuuucaagg

SEQ ID NO: 2652214 - RNA, 19 nt, Artificial Sequence
  Description of Artificial Sequence: Synthetic oligonucleotide
uugcaaauuaauuccagcc

SEQ ID NO: 2652215 - RNA, 19 nt, Artificial Sequence
  Description of Artificial Sequence: Synthetic oligonucleotide
caagucagcaaaaugagug

SEQ ID NO: 2652216 - RNA, 19 nt, Artificial Sequence
  Description of Artificial Sequence: Synthetic oligonucleotide
aagcaucuguuucaguggc

SEQ ID NO: 2652217 - RNA, 19 nt, Artificial Sequence
  Description of Artificial Sequence: Synthetic oligonucleotide
uccuuaucgaaauugaagu

SEQ ID NO: 2652218 - RNA, 19 nt, Artificial Sequence
  Description of Artificial Sequence: Synthetic oligonucleotide
agcaaaaugagugagucuc

SEQ ID NO: 2652219 - RNA, 19 nt, Artificial Sequence
  Description of Artificial Sequence: Synthetic oligonucleotide
ucuauuacuugaaagggaa

SEQ ID NO: 2652220 - RNA, 19 nt, Artificial Sequence
  Description of Artificial Sequence: Synthetic oligonucleotide
uuaucgaaauugaagucag

SEQ ID NO: 2652221 - RNA, 19 nt, Artificial Sequence
  Description of Artificial Sequence: Synthetic oligonucleotide
uucaagucagcaaaaugag

SEQ ID NO: 2652222 - RNA, 19 nt, Artificial Sequence
  Description of Artificial Sequence: Synthetic oligonucleotide
aacuugaguuuccaguccg

SEQ ID NO: 2652223 - RNA, 19 nt, Artificial Sequence
  Description of Artificial Sequence: Synthetic oligonucleotide
auuuucaaggcugucauuc

SEQ ID NO: 2652224 - RNA, 19 nt, Artificial Sequence
  Description of Artificial Sequence: Synthetic oligonucleotide
auucuauuacuugaaaggg

SEQ ID NO: 2652225 - RNA, 19 nt, Artificial Sequence
  Description of Artificial Sequence: Synthetic oligonucleotide
cuucaagucagcaaaauga

SEQ ID NO: 2652226 - RNA, 19 nt, Artificial Sequence
  Description of Artificial Sequence: Synthetic oligonucleotide
aauaauggaugucucugga

SEQ ID NO: 2652227 - RNA, 19 nt, Artificial Sequence
  Description of Artificial Sequence: Synthetic oligonucleotide
uccauuacugguaucauau

SEQ ID NO: 2652228 - RNA, 19 nt, Artificial Sequence
  Description of Artificial Sequence: Synthetic oligonucleotide
aaauguagaugccuagaca

SEQ ID NO: 2652229 - RNA, 19 nt, Artificial Sequence
  Description of Artificial Sequence: Synthetic oligonucleotide
ugcaaauuaauuccagccu

SEQ ID NO: 2652230 - RNA, 19 nt, Artificial Sequence
  Description of Artificial Sequence: Synthetic oligonucleotide
ucauaagcagaaauguaga

SEQ ID NO: 2652231 - RNA, 19 nt, Artificial Sequence
  Description of Artificial Sequence: Synthetic oligonucleotide
uuugcaaauuaauuccagc

SEQ ID NO: 2652232 - RNA, 19 nt, Artificial Sequence
  Description of Artificial Sequence: Synthetic oligonucleotide
uguucauaagcagaaaugu

SEQ ID NO: 2652233 - RNA, 19 nt, Artificial Sequence
  Description of Artificial Sequence: Synthetic oligonucleotide
uguuucaguggccaugucc

SEQ ID NO: 2652234 - RNA, 19 nt, Artificial Sequence
  Description of Artificial Sequence: Synthetic oligonucleotide
ugaguuuccaguccggaca

SEQ ID NO: 2652235 - RNA, 19 nt, Artificial Sequence
  Description of Artificial Sequence: Synthetic oligonucleotide
aaugucucauaccugcaca

SEQ ID NO: 2652236 - RNA, 19 nt, Artificial Sequence
  Description of Artificial Sequence: Synthetic oligonucleotide
gaaauugaagucaggacug

SEQ ID NO: 2652237 - RNA, 19 nt, Artificial Sequence
  Description of Artificial Sequence: Synthetic oligonucleotide
cugggaacuucaauaaugg

SEQ ID NO: 2652238 - RNA, 19 nt, Artificial Sequence
  Description of Artificial Sequence: Synthetic oligonucleotide
guagucacuccugagaacg

SEQ ID NO: 2652239 - RNA, 19 nt, Artificial Sequence
  Description of Artificial Sequence: Synthetic oligonucleotide
ucauucaaagguuacuccu

SEQ ID NO: 2652240 - RNA, 19 nt, Artificial Sequence
  Description of Artificial Sequence: Synthetic oligonucleotide
acugcauucuauuacuuga

SEQ ID NO: 2652241 - RNA, 19 nt, Artificial Sequence
  Description of Artificial Sequence: Synthetic oligonucleotide
aacacauuugggacagucc

SEQ ID NO: 2652242 - RNA, 19 nt, Artificial Sequence
  Description of Artificial Sequence: Synthetic oligonucleotide
gugaaugucucauaccugc

SEQ ID NO: 2652243 - RNA, 19 nt, Artificial Sequence
  Description of Artificial Sequence: Synthetic oligonucleotide
ucauaguucugguucaucu

SEQ ID NO: 2652244 - RNA, 19 nt, Artificial Sequence
  Description of Artificial Sequence: Synthetic oligonucleotide
agacuauuuucauaguucu

SEQ ID NO: 2652245 - RNA, 19 nt, Artificial Sequence
  Description of Artificial Sequence: Synthetic oligonucleotide
gaaauguagaugccuagac

SEQ ID NO: 2652246 - RNA, 19 nt, Artificial Sequence
  Description of Artificial Sequence: Synthetic oligonucleotide
uucaagcagacuauuuuca

SEQ ID NO: 2652247 - RNA, 19 nt, Artificial Sequence
  Description of Artificial Sequence: Synthetic oligonucleotide
uucuauuacuugaaaggga

SEQ ID NO: 2652248 - RNA, 19 nt, Artificial Sequence
  Description of Artificial Sequence: Synthetic oligonucleotide
auaauggaugucucuggac

SEQ ID NO: 2652249 - RNA, 19 nt, Artificial Sequence
  Description of Artificial Sequence: Synthetic oligonucleotide
ucaaagguuacuccucucu

SEQ ID NO: 2652250 - RNA, 19 nt, Artificial Sequence
  Description of Artificial Sequence: Synthetic oligonucleotide
ucaaggcugucauucaaag

SEQ ID NO: 2652251 - RNA, 19 nt, Artificial Sequence
  Description of Artificial Sequence: Synthetic oligonucleotide
gagaucuuggccaucaaug

SEQ ID NO: 2652252 - RNA, 19 nt, Artificial Sequence
  Description of Artificial Sequence: Synthetic oligonucleotide
uuuucauaguucugguuca

SEQ ID NO: 2652253 - RNA, 19 nt, Artificial Sequence
  Description of Artificial Sequence: Synthetic oligonucleotide
auuuggaucuagaaguggg

SEQ ID NO: 2652254 - RNA, 19 nt, Artificial Sequence
  Description of Artificial Sequence: Synthetic oligonucleotide
gaacuucuaccgcauaucc

SEQ ID NO: 2652255 - RNA, 19 nt, Artificial Sequence
  Description of Artificial Sequence: Synthetic oligonucleotide
caauaauggaugucucugg

SEQ ID NO: 2652256 - RNA, 19 nt, Artificial Sequence
  Description of Artificial Sequence: Synthetic oligonucleotide
ucauccuuaucgaaauuga

SEQ ID NO: 2652257 - RNA, 19 nt, Artificial Sequence
  Description of Artificial Sequence: Synthetic oligonucleotide
uauccuuugcaaauuaauu

SEQ ID NO: 2652258 - RNA, 19 nt, Artificial Sequence
  Description of Artificial Sequence: Synthetic oligonucleotide
uuacugguaucauauaaau

SEQ ID NO: 2652259 - RNA, 19 nt, Artificial Sequence
  Description of Artificial Sequence: Synthetic oligonucleotide
aagucagcaaaaugaguga

SEQ ID NO: 2652260 - RNA, 19 nt, Artificial Sequence
  Description of Artificial Sequence: Synthetic oligonucleotide
ugauuuggaucuagaagug

SEQ ID NO: 2652261 - RNA, 19 nt, Artificial Sequence
  Description of Artificial Sequence: Synthetic oligonucleotide
auaguucugguucaucuca

SEQ ID NO: 2652262 - RNA, 19 nt, Artificial Sequence
  Description of Artificial Sequence: Synthetic oligonucleotide
uggaucuagaaguggguag

SEQ ID NO: 2652263 - RNA, 19 nt, Artificial Sequence
  Description of Artificial Sequence: Synthetic oligonucleotide
cuacuguucaccugagggg

SEQ ID NO: 2652264 - RNA, 19 nt, Artificial Sequence
  Description of Artificial Sequence: Synthetic oligonucleotide
uucaggaacuucuaccgca

SEQ ID NO: 2652265 - RNA, 19 nt, Artificial Sequence
  Description of Artificial Sequence: Synthetic oligonucleotide
auaagcagaaauguagaug

SEQ ID NO: 2652266 - RNA, 19 nt, Artificial Sequence
  Description of Artificial Sequence: Synthetic oligonucleotide
ucgaaauugaagucaggac

SEQ ID NO: 2652267 - RNA, 19 nt, Artificial Sequence
  Description of Artificial Sequence: Synthetic oligonucleotide
cagacuauuuucauaguuc

SEQ ID NO: 2652268 - RNA, 19 nt, Artificial Sequence
  Description of Artificial Sequence: Synthetic oligonucleotide
uucaauaauggaugucucu

SEQ ID NO: 2652269 - RNA, 19 nt, Artificial Sequence
  Description of Artificial Sequence: Synthetic oligonucleotide
aauugaagucaggacuggg

SEQ ID NO: 2652270 - RNA, 19 nt, Artificial Sequence
  Description of Artificial Sequence: Synthetic oligonucleotide
uacugguaucauauaaaug

SEQ ID NO: 2652271 - RNA, 19 nt, Artificial Sequence
  Description of Artificial Sequence: Synthetic oligonucleotide
cacagucaagucuucaagc

SEQ ID NO: 2652272 - RNA, 19 nt, Artificial Sequence
  Description of Artificial Sequence: Synthetic oligonucleotide
aaauugaagucaggacugg

SEQ ID NO: 2652273 - RNA, 19 nt, Artificial Sequence
  Description of Artificial Sequence: Synthetic oligonucleotide
ucauugaguaugcuggcaa

SEQ ID NO: 2652274 - RNA, 19 nt, Artificial Sequence
  Description of Artificial Sequence: Synthetic oligonucleotide
ucagcaaaaugagugaguc

SEQ ID NO: 2652275 - RNA, 19 nt, Artificial Sequence
  Description of Artificial Sequence: Synthetic oligonucleotide
acaauuugagccagacugc

SEQ ID NO: 2652276 - RNA, 19 nt, Artificial Sequence
  Description of Artificial Sequence: Synthetic oligonucleotide
ucucauaccugcacaguca

SEQ ID NO: 2652277 - RNA, 19 nt, Artificial Sequence
  Description of Artificial Sequence: Synthetic oligonucleotide
gauuuggaucuagaagugg

SEQ ID NO: 2652278 - RNA, 19 nt, Artificial Sequence
  Description of Artificial Sequence: Synthetic oligonucleotide
aacgcugaguucuuucagu

SEQ ID NO: 2652279 - RNA, 19 nt, Artificial Sequence
  Description of Artificial Sequence: Synthetic oligonucleotide
ugucucuggacuguucugg

SEQ ID NO: 2652280 - RNA, 19 nt, Artificial Sequence
  Description of Artificial Sequence: Synthetic oligonucleotide
uagaucuuccucuuccuac

SEQ ID NO: 2652281 - RNA, 19 nt, Artificial Sequence
  Description of Artificial Sequence: Synthetic oligonucleotide
aacuucaauaauggauguc

SEQ ID NO: 2652282 - RNA, 19 nt, Artificial Sequence
  Description of Artificial Sequence: Synthetic oligonucleotide
aucgaaauugaagucagga

SEQ ID NO: 2652283 - RNA, 19 nt, Artificial Sequence
  Description of Artificial Sequence: Synthetic oligonucleotide
acucaucuagaucuuccuc

SEQ ID NO: 2652284 - RNA, 19 nt, Artificial Sequence
  Description of Artificial Sequence: Synthetic oligonucleotide
uuccaguccggacacagcu

SEQ ID NO: 2652285 - RNA, 19 nt, Artificial Sequence
  Description of Artificial Sequence: Synthetic oligonucleotide
uuuggaucuagaagugggu

SEQ ID NO: 2652286 - RNA, 19 nt, Artificial Sequence
  Description of Artificial Sequence: Synthetic oligonucleotide
ucagugaaugucucauacc

SEQ ID NO: 2652287 - RNA, 19 nt, Artificial Sequence
  Description of Artificial Sequence: Synthetic oligonucleotide
cuuaucgaaauugaaguca

SEQ ID NO: 2652288 - RNA, 19 nt, Artificial Sequence
  Description of Artificial Sequence: Synthetic oligonucleotide
auccuuaucgaaauugaag

SEQ ID NO: 2652289 - RNA, 19 nt, Artificial Sequence
  Description of Artificial Sequence: Synthetic oligonucleotide
uaucgaaauugaagucagg

SEQ ID NO: 2652290 - RNA, 19 nt, Artificial Sequence
  Description of Artificial Sequence: Synthetic oligonucleotide
ccuacuguucaccugaggg

SEQ ID NO: 2652291 - RNA, 19 nt, Artificial Sequence
  Description of Artificial Sequence: Synthetic oligonucleotide
auuccagccugauaucgag

SEQ ID NO: 2652292 - RNA, 19 nt, Artificial Sequence
  Description of Artificial Sequence: Synthetic oligonucleotide
caagagaagcaucuguuuc

SEQ ID NO: 2652293 - RNA, 19 nt, Artificial Sequence
  Description of Artificial Sequence: Synthetic oligonucleotide
gacugcauucuauuacuug

SEQ ID NO: 2652294 - RNA, 19 nt, Artificial Sequence
  Description of Artificial Sequence: Synthetic oligonucleotide
gcaaauuaauuccagccug

SEQ ID NO: 2652295 - RNA, 19 nt, Artificial Sequence
  Description of Artificial Sequence: Synthetic oligonucleotide
aggacugggaacuucaaua

SEQ ID NO: 2652296 - RNA, 19 nt, Artificial Sequence
  Description of Artificial Sequence: Synthetic oligonucleotide
uccggacacagcuagagau

SEQ ID NO: 2652297 - RNA, 19 nt, Artificial Sequence
  Description of Artificial Sequence: Synthetic oligonucleotide
uguucugggcaccauaauu

SEQ ID NO: 2652298 - RNA, 19 nt, Artificial Sequence
  Description of Artificial Sequence: Synthetic oligonucleotide
gcauucuauuacuugaaag

SEQ ID NO: 2652299 - RNA, 19 nt, Artificial Sequence
  Description of Artificial Sequence: Synthetic oligonucleotide
ugauaucgaguuucuuucc

SEQ ID NO: 2652300 - RNA, 19 nt, Artificial Sequence
  Description of Artificial Sequence: Synthetic oligonucleotide
uccaacugguggcuguggg

SEQ ID NO: 2652301 - RNA, 19 nt, Artificial Sequence
  Description of Artificial Sequence: Synthetic oligonucleotide
gugggagacauugauuugg

SEQ ID NO: 2652302 - RNA, 19 nt, Artificial Sequence
  Description of Artificial Sequence: Synthetic oligonucleotide
uugaguaugcuggcaagag

SEQ ID NO: 2652303 - RNA, 19 nt, Artificial Sequence
  Description of Artificial Sequence: Synthetic oligonucleotide
ggagacauugauuuggauc

SEQ ID NO: 2652304 - RNA, 19 nt, Artificial Sequence
  Description of Artificial Sequence: Synthetic oligonucleotide
ucuaccgcauauccuuugc

SEQ ID NO: 2652305 - RNA, 19 nt, Artificial Sequence
  Description of Artificial Sequence: Synthetic oligonucleotide
aucaauggcuucaagucag

SEQ ID NO: 2652306 - RNA, 19 nt, Artificial Sequence
  Description of Artificial Sequence: Synthetic oligonucleotide
aaggcucagguagucacuc

SEQ ID NO: 2652307 - RNA, 19 nt, Artificial Sequence
  Description of Artificial Sequence: Synthetic oligonucleotide
gauaucgaguuucuuucca

SEQ ID NO: 2652308 - RNA, 19 nt, Artificial Sequence
  Description of Artificial Sequence: Synthetic oligonucleotide
ugguaucauauaaauggau

SEQ ID NO: 2652309 - RNA, 19 nt, Artificial Sequence
  Description of Artificial Sequence: Synthetic oligonucleotide
cucucugaaggagugagag

SEQ ID NO: 2652310 - RNA, 19 nt, Artificial Sequence
  Description of Artificial Sequence: Synthetic oligonucleotide
ugaguaugcuggcaagaga

SEQ ID NO: 2652311 - RNA, 19 nt, Artificial Sequence
  Description of Artificial Sequence: Synthetic oligonucleotide
aaaaugagugagucucaaa

SEQ ID NO: 2652312 - RNA, 19 nt, Artificial Sequence
  Description of Artificial Sequence: Synthetic oligonucleotide
ucgaguuucuuuccauuac

SEQ ID NO: 2652313 - RNA, 19 nt, Artificial Sequence
  Description of Artificial Sequence: Synthetic oligonucleotide
uuuucaaggcugucauuca

SEQ ID NO: 2652314 - RNA, 19 nt, Artificial Sequence
  Description of Artificial Sequence: Synthetic oligonucleotide
auaccugcacagucaaguc

SEQ ID NO: 2652315 - RNA, 19 nt, Artificial Sequence
  Description of Artificial Sequence: Synthetic oligonucleotide
augucucauaccugcacag

SEQ ID NO: 2652316 - RNA, 19 nt, Artificial Sequence
  Description of Artificial Sequence: Synthetic oligonucleotide
cucauccuuaucgaaauug

SEQ ID NO: 2652317 - RNA, 19 nt, Artificial Sequence
  Description of Artificial Sequence: Synthetic oligonucleotide
auuugagccagacugcauu

SEQ ID NO: 2652318 - RNA, 19 nt, Artificial Sequence
  Description of Artificial Sequence: Synthetic oligonucleotide
augagaaguuaauccaacu

SEQ ID NO: 2652319 - RNA, 19 nt, Artificial Sequence
  Description of Artificial Sequence: Synthetic oligonucleotide
gaaugucucauaccugcac

SEQ ID NO: 2652320 - RNA, 19 nt, Artificial Sequence
  Description of Artificial Sequence: Synthetic oligonucleotide
gacacagcuagagaucuug

SEQ ID NO: 2652321 - RNA, 19 nt, Artificial Sequence
  Description of Artificial Sequence: Synthetic oligonucleotide
gaaguuaauccaacuggug

SEQ ID NO: 2652322 - RNA, 19 nt, Artificial Sequence
  Description of Artificial Sequence: Synthetic oligonucleotide
cuauuacuugaaagggaag

SEQ ID NO: 2652323 - RNA, 19 nt, Artificial Sequence
  Description of Artificial Sequence: Synthetic oligonucleotide
gaaguggguagguuguuca

SEQ ID NO: 2652324 - RNA, 19 nt, Artificial Sequence
  Description of Artificial Sequence: Synthetic oligonucleotide
cauucaaagguuacuccuc

SEQ ID NO: 2652325 - RNA, 19 nt, Artificial Sequence
  Description of Artificial Sequence: Synthetic oligonucleotide
uguagaugccuagacacuc

SEQ ID NO: 2652326 - RNA, 19 nt, Artificial Sequence
  Description of Artificial Sequence: Synthetic oligonucleotide
uacuguucaccugagggga

SEQ ID NO: 2652327 - RNA, 19 nt, Artificial Sequence
  Description of Artificial Sequence: Synthetic oligonucleotide
agaaguuaauccaacuggu

SEQ ID NO: 2652328 - RNA, 19 nt, Artificial Sequence
  Description of Artificial Sequence: Synthetic oligonucleotide
uggcaagagaagcaucugu

SEQ ID NO: 2652329 - RNA, 19 nt, Artificial Sequence
  Description of Artificial Sequence: Synthetic oligonucleotide
agaacgcugaguucuuuca

SEQ ID NO: 2652330 - RNA, 19 nt, Artificial Sequence
  Description of Artificial Sequence: Synthetic oligonucleotide
uuucaaggcugucauucaa

SEQ ID NO: 2652331 - RNA, 19 nt, Artificial Sequence
  Description of Artificial Sequence: Synthetic oligonucleotide
ucucaaugagaaguuaauc

SEQ ID NO: 2652332 - RNA, 19 nt, Artificial Sequence
  Description of Artificial Sequence: Synthetic oligonucleotide
gaguaugcuggcaagagaa

SEQ ID NO: 2652333 - RNA, 19 nt, Artificial Sequence
  Description of Artificial Sequence: Synthetic oligonucleotide
caaggcugucauucaaagg

SEQ ID NO: 2652334 - RNA, 19 nt, Artificial Sequence
  Description of Artificial Sequence: Synthetic oligonucleotide
gaacgcugaguucuuucag

SEQ ID NO: 2652335 - RNA, 19 nt, Artificial Sequence
  Description of Artificial Sequence: Synthetic oligonucleotide
cauugaguaugcuggcaag

SEQ ID NO: 2652336 - RNA, 19 nt, Artificial Sequence
  Description of Artificial Sequence: Synthetic oligonucleotide
ugaaugucucauaccugca

SEQ ID NO: 2652337 - RNA, 19 nt, Artificial Sequence
  Description of Artificial Sequence: Synthetic oligonucleotide
ugcauucuauuacuugaaa

SEQ ID NO: 2652338 - RNA, 19 nt, Artificial Sequence
  Description of Artificial Sequence: Synthetic oligonucleotide
uucaaggcugucauucaaa

SEQ ID NO: 2652339 - RNA, 19 nt, Artificial Sequence
  Description of Artificial Sequence: Synthetic oligonucleotide
cauuacugguaucauauaa

SEQ ID NO: 2652340 - RNA, 19 nt, Artificial Sequence
  Description of Artificial Sequence: Synthetic oligonucleotide
gacauugauuuggaucuag

SEQ ID NO: 2652341 - RNA, 19 nt, Artificial Sequence
  Description of Artificial Sequence: Synthetic oligonucleotide
guaugcuggcaagagaagc

SEQ ID NO: 2652342 - RNA, 19 nt, Artificial Sequence
  Description of Artificial Sequence: Synthetic oligonucleotide
ggguagguuguucauaagc

SEQ ID NO: 2652343 - RNA, 19 nt, Artificial Sequence
  Description of Artificial Sequence: Synthetic oligonucleotide
cacagcuagagaucuuggc

SEQ ID NO: 2652344 - RNA, 19 nt, Artificial Sequence
  Description of Artificial Sequence: Synthetic oligonucleotide
guggcugugggagacauug

SEQ ID NO: 2652345 - RNA, 19 nt, Artificial Sequence
  Description of Artificial Sequence: Synthetic oligonucleotide
caaagguuacuccucucug

SEQ ID NO: 2652346 - RNA, 19 nt, Artificial Sequence
  Description of Artificial Sequence: Synthetic oligonucleotide
agguagucacuccugagaa

SEQ ID NO: 2652347 - RNA, 19 nt, Artificial Sequence
  Description of Artificial Sequence: Synthetic oligonucleotide
ucaagcagacuauuuucau

SEQ ID NO: 2652348 - RNA, 19 nt, Artificial Sequence
  Description of Artificial Sequence: Synthetic oligonucleotide
uuugagccagacugcauuc

SEQ ID NO: 2652349 - RNA, 19 nt, Artificial Sequence
  Description of Artificial Sequence: Synthetic oligonucleotide
cuuccuacuguucaccuga

SEQ ID NO: 2652350 - RNA, 19 nt, Artificial Sequence
  Description of Artificial Sequence: Synthetic oligonucleotide
auuacugguaucauauaaa

SEQ ID NO: 2652351 - RNA, 19 nt, Artificial Sequence
  Description of Artificial Sequence: Synthetic oligonucleotide
ucuugcacaucuucaggaa

SEQ ID NO: 2652352 - RNA, 19 nt, Artificial Sequence
  Description of Artificial Sequence: Synthetic oligonucleotide
uuaauuccagccugauauc

SEQ ID NO: 2652353 - RNA, 19 nt, Artificial Sequence
  Description of Artificial Sequence: Synthetic oligonucleotide
ccuucaacacauuugggac

SEQ ID NO: 2652354 - RNA, 19 nt, Artificial Sequence
  Description of Artificial Sequence: Synthetic oligonucleotide
agaaauguagaugccuaga

SEQ ID NO: 2652355 - RNA, 19 nt, Artificial Sequence
  Description of Artificial Sequence: Synthetic oligonucleotide
cauaguucugguucaucuc

SEQ ID NO: 2652356 - RNA, 19 nt, Artificial Sequence
  Description of Artificial Sequence: Synthetic oligonucleotide
aaauuaauuccagccugau

SEQ ID NO: 2652357 - RNA, 19 nt, Artificial Sequence
  Description of Artificial Sequence: Synthetic oligonucleotide
uugaaagggaaggcucagg

SEQ ID NO: 2652358 - RNA, 19 nt, Artificial Sequence
  Description of Artificial Sequence: Synthetic oligonucleotide
cagucaagucuucaagcag

SEQ ID NO: 2652359 - RNA, 19 nt, Artificial Sequence
  Description of Artificial Sequence: Synthetic oligonucleotide
uaauccaacugguggcugu

SEQ ID NO: 2652360 - RNA, 19 nt, Artificial Sequence
  Description of Artificial Sequence: Synthetic oligonucleotide
ugcacagucaagucuucaa

SEQ ID NO: 2652361 - RNA, 19 nt, Artificial Sequence
  Description of Artificial Sequence: Synthetic oligonucleotide
uacuccucucugaaggagu

SEQ ID NO: 2652362 - RNA, 19 nt, Artificial Sequence
  Description of Artificial Sequence: Synthetic oligonucleotide
uauuuucauaguucugguu

SEQ ID NO: 2652363 - RNA, 19 nt, Artificial Sequence
  Description of Artificial Sequence: Synthetic oligonucleotide
uuggccaucaauggcuuca

SEQ ID NO: 2652364 - RNA, 19 nt, Artificial Sequence
  Description of Artificial Sequence: Synthetic oligonucleotide
agucaagucuucaagcaga

SEQ ID NO: 2652365 - RNA, 19 nt, Artificial Sequence
  Description of Artificial Sequence: Synthetic oligonucleotide
ugugggagacauugauuug

SEQ ID NO: 2652366 - RNA, 19 nt, Artificial Sequence
  Description of Artificial Sequence: Synthetic oligonucleotide
caaauuaauuccagccuga

SEQ ID NO: 2652367 - RNA, 19 nt, Artificial Sequence
  Description of Artificial Sequence: Synthetic oligonucleotide
ugggagacauugauuugga

SEQ ID NO: 2652368 - RNA, 19 nt, Artificial Sequence
  Description of Artificial Sequence: Synthetic oligonucleotide
agcagaaauguagaugccu

SEQ ID NO: 2652369 - RNA, 19 nt, Artificial Sequence
  Description of Artificial Sequence: Synthetic oligonucleotide
acgcugaguucuuucagug

SEQ ID NO: 2652370 - RNA, 19 nt, Artificial Sequence
  Description of Artificial Sequence: Synthetic oligonucleotide
cugggcaccauaauuuuca

SEQ ID NO: 2652371 - RNA, 19 nt, Artificial Sequence
  Description of Artificial Sequence: Synthetic oligonucleotide
uuacuccucucugaaggag

SEQ ID NO: 2652372 - RNA, 19 nt, Artificial Sequence
  Description of Artificial Sequence: Synthetic oligonucleotide
aggaacuucuaccgcauau

SEQ ID NO: 2652373 - RNA, 19 nt, Artificial Sequence
  Description of Artificial Sequence: Synthetic oligonucleotide
uaccgcauauccuuugcaa

SEQ ID NO: 2652374 - RNA, 19 nt, Artificial Sequence
  Description of Artificial Sequence: Synthetic oligonucleotide
uccuacuguucaccugagg

SEQ ID NO: 2652375 - RNA, 19 nt, Artificial Sequence
  Description of Artificial Sequence: Synthetic oligonucleotide
ugccuagacacucauccuu

SEQ ID NO: 2652376 - RNA, 19 nt, Artificial Sequence
  Description of Artificial Sequence: Synthetic oligonucleotide
agacacucauccuuaucga

SEQ ID NO: 2652377 - RNA, 19 nt, Artificial Sequence
  Description of Artificial Sequence: Synthetic oligonucleotide
cugaaggagugagaguugc

SEQ ID NO: 2652378 - RNA, 19 nt, Artificial Sequence
  Description of Artificial Sequence: Synthetic oligonucleotide
ggaucuagaaguggguagg

SEQ ID NO: 2652379 - RNA, 19 nt, Artificial Sequence
  Description of Artificial Sequence: Synthetic oligonucleotide
cauugauuuggaucuagaa

SEQ ID NO: 2652380 - RNA, 19 nt, Artificial Sequence
  Description of Artificial Sequence: Synthetic oligonucleotide
ucaauggcuucaagucagc

SEQ ID NO: 2652381 - RNA, 19 nt, Artificial Sequence
  Description of Artificial Sequence: Synthetic oligonucleotide
gaggggacaauuugagcca

SEQ ID NO: 2652382 - RNA, 19 nt, Artificial Sequence
  Description of Artificial Sequence: Synthetic oligonucleotide
ugggaacuucaauaaugga

SEQ ID NO: 2652383 - RNA, 19 nt, Artificial Sequence
  Description of Artificial Sequence: Synthetic oligonucleotide
auugaagucaggacuggga

SEQ ID NO: 2652384 - RNA, 19 nt, Artificial Sequence
  Description of Artificial Sequence: Synthetic oligonucleotide
cuucaggaacuucuaccgc

SEQ ID NO: 2652385 - RNA, 19 nt, Artificial Sequence
  Description of Artificial Sequence: Synthetic oligonucleotide
agaaguggguagguuguuc

SEQ ID NO: 2652386 - RNA, 19 nt, Artificial Sequence
  Description of Artificial Sequence: Synthetic oligonucleotide
auaucgaguuucuuuccau

SEQ ID NO: 2652387 - RNA, 19 nt, Artificial Sequence
  Description of Artificial Sequence: Synthetic oligonucleotide
cugguaucauauaaaugga

SEQ ID NO: 2652388 - RNA, 19 nt, Artificial Sequence
  Description of Artificial Sequence: Synthetic oligonucleotide
cagcuagagaucuuggcca

SEQ ID NO: 2652389 - RNA, 19 nt, Artificial Sequence
  Description of Artificial Sequence: Synthetic oligonucleotide
uccagccugauaucgaguu

SEQ ID NO: 2652390 - RNA, 19 nt, Artificial Sequence
  Description of Artificial Sequence: Synthetic oligonucleotide
gucucauaccugcacaguc

SEQ ID NO: 2652391 - RNA, 19 nt, Artificial Sequence
  Description of Artificial Sequence: Synthetic oligonucleotide
aauuccagccugauaucga

SEQ ID NO: 2652392 - RNA, 19 nt, Artificial Sequence
  Description of Artificial Sequence: Synthetic oligonucleotide
gaguuuccaguccggacac

SEQ ID NO: 2652393 - RNA, 19 nt, Artificial Sequence
  Description of Artificial Sequence: Synthetic oligonucleotide
ucaggaacuucuaccgcau

SEQ ID NO: 2652394 - RNA, 19 nt, Artificial Sequence
  Description of Artificial Sequence: Synthetic oligonucleotide
aucgaguuucuuuccauua

SEQ ID NO: 2652395 - RNA, 19 nt, Artificial Sequence
  Description of Artificial Sequence: Synthetic oligonucleotide
gaugucucuggacuguucu

SEQ ID NO: 2652396 - RNA, 19 nt, Artificial Sequence
  Description of Artificial Sequence: Synthetic oligonucleotide
cugaggggacaauuugagc

SEQ ID NO: 2652397 - RNA, 19 nt, Artificial Sequence
  Description of Artificial Sequence: Synthetic oligonucleotide
caucaauggcuucaaguca

SEQ ID NO: 2652398 - RNA, 19 nt, Artificial Sequence
  Description of Artificial Sequence: Synthetic oligonucleotide
cuucaacacauuugggaca

SEQ ID NO: 2652399 - RNA, 19 nt, Artificial Sequence
  Description of Artificial Sequence: Synthetic oligonucleotide
gagaacgcugaguucuuuc

SEQ ID NO: 2652400 - RNA, 19 nt, Artificial Sequence
  Description of Artificial Sequence: Synthetic oligonucleotide
aguccggacacagcuagag

SEQ ID NO: 2652401 - RNA, 19 nt, Artificial Sequence
  Description of Artificial Sequence: Synthetic oligonucleotide
uucuaccgcauauccuuug

SEQ ID NO: 2652402 - RNA, 19 nt, Artificial Sequence
  Description of Artificial Sequence: Synthetic oligonucleotide
gucucuggacuguucuggg

SEQ ID NO: 2652403 - RNA, 19 nt, Artificial Sequence
  Description of Artificial Sequence: Synthetic oligonucleotide
caucucaaugagaaguuaa

SEQ ID NO: 2652404 - RNA, 19 nt, Artificial Sequence
  Description of Artificial Sequence: Synthetic oligonucleotide
aagucuucaagcagacuau

SEQ ID NO: 2652405 - RNA, 19 nt, Artificial Sequence
  Description of Artificial Sequence: Synthetic oligonucleotide
auugaguaugcuggcaaga

SEQ ID NO: 2652406 - RNA, 19 nt, Artificial Sequence
  Description of Artificial Sequence: Synthetic oligonucleotide
gaagucaggacugggaacu

SEQ ID NO: 2652407 - RNA, 19 nt, Artificial Sequence
  Description of Artificial Sequence: Synthetic oligonucleotide
uuuccaguccggacacagc

SEQ ID NO: 2652408 - RNA, 19 nt, Artificial Sequence
  Description of Artificial Sequence: Synthetic oligonucleotide
ucauaccugcacagucaag

SEQ ID NO: 2652409 - RNA, 19 nt, Artificial Sequence
  Description of Artificial Sequence: Synthetic oligonucleotide
uaucgaguuucuuuccauu

SEQ ID NO: 2652410 - RNA, 19 nt, Artificial Sequence
  Description of Artificial Sequence: Synthetic oligonucleotide
gcuucaagucagcaaaaug

SEQ ID NO: 2652411 - RNA, 19 nt, Artificial Sequence
  Description of Artificial Sequence: Synthetic oligonucleotide
uuaauccaacugguggcug

SEQ ID NO: 2652412 - RNA, 19 nt, Artificial Sequence
  Description of Artificial Sequence: Synthetic oligonucleotide
cagugaaugucucauaccu

SEQ ID NO: 2652413 - RNA, 19 nt, Artificial Sequence
  Description of Artificial Sequence: Synthetic oligonucleotide
aacuucuaccgcauauccu

SEQ ID NO: 2652414 - RNA, 19 nt, Artificial Sequence
  Description of Artificial Sequence: Synthetic oligonucleotide
accgcauauccuuugcaaa

SEQ ID NO: 2652415 - RNA, 19 nt, Artificial Sequence
  Description of Artificial Sequence: Synthetic oligonucleotide
aggcucagguagucacucc

SEQ ID NO: 2652416 - RNA, 19 nt, Artificial Sequence
  Description of Artificial Sequence: Synthetic oligonucleotide
acuugaaagggaaggcuca

SEQ ID NO: 2652417 - RNA, 19 nt, Artificial Sequence
  Description of Artificial Sequence: Synthetic oligonucleotide
ucucugaaggagugagagu

SEQ ID NO: 2652418 - RNA, 19 nt, Artificial Sequence
  Description of Artificial Sequence: Synthetic oligonucleotide
uuuuggccaacuugaguuu

SEQ ID NO: 2652419 - RNA, 19 nt, Artificial Sequence
  Description of Artificial Sequence: Synthetic oligonucleotide
aaguggguagguuguucau

SEQ ID NO: 2652420 - RNA, 19 nt, Artificial Sequence
  Description of Artificial Sequence: Synthetic oligonucleotide
uuggaucuagaagugggua

SEQ ID NO: 2652421 - RNA, 19 nt, Artificial Sequence
  Description of Artificial Sequence: Synthetic oligonucleotide
ggaaggcucagguagucac

SEQ ID NO: 2652422 - RNA, 19 nt, Artificial Sequence
  Description of Artificial Sequence: Synthetic oligonucleotide
gcaccauaauuuucaaggc

SEQ ID NO: 2652423 - RNA, 19 nt, Artificial Sequence
  Description of Artificial Sequence: Synthetic oligonucleotide
ucuggacuguucugggcac

SEQ ID NO: 2652424 - RNA, 19 nt, Artificial Sequence
  Description of Artificial Sequence: Synthetic oligonucleotide
ccaacuugaguuuccaguc

SEQ ID NO: 2652425 - RNA, 19 nt, Artificial Sequence
  Description of Artificial Sequence: Synthetic oligonucleotide
guggguagguuguucauaa

SEQ ID NO: 2652426 - RNA, 19 nt, Artificial Sequence
  Description of Artificial Sequence: Synthetic oligonucleotide
cuugaaagggaaggcucag

SEQ ID NO: 2652427 - RNA, 19 nt, Artificial Sequence
  Description of Artificial Sequence: Synthetic oligonucleotide
gcacagucaagucuucaag

SEQ ID NO: 2652428 - RNA, 19 nt, Artificial Sequence
  Description of Artificial Sequence: Synthetic oligonucleotide
ucaccugaggggacaauuu

SEQ ID NO: 2652429 - RNA, 19 nt, Artificial Sequence
  Description of Artificial Sequence: Synthetic oligonucleotide
caacacauuugggacaguc

SEQ ID NO: 2652430 - RNA, 19 nt, Artificial Sequence
  Description of Artificial Sequence: Synthetic oligonucleotide
ugagccagacugcauucua

SEQ ID NO: 2652431 - RNA, 19 nt, Artificial Sequence
  Description of Artificial Sequence: Synthetic oligonucleotide
uuccuacuguucaccugag

SEQ ID NO: 2652432 - RNA, 19 nt, Artificial Sequence
  Description of Artificial Sequence: Synthetic oligonucleotide
agugaaugucucauaccug

SEQ ID NO: 2652433 - RNA, 19 nt, Artificial Sequence
  Description of Artificial Sequence: Synthetic oligonucleotide
uugggacagucccaucuuc

SEQ ID NO: 2652434 - RNA, 19 nt, Artificial Sequence
  Description of Artificial Sequence: Synthetic oligonucleotide
guuucaguggccauguccu

SEQ ID NO: 2652435 - RNA, 19 nt, Artificial Sequence
  Description of Artificial Sequence: Synthetic oligonucleotide
uucaaagguuacuccucuc

SEQ ID NO: 2652436 - RNA, 19 nt, Artificial Sequence
  Description of Artificial Sequence: Synthetic oligonucleotide
cagccugauaucgaguuuc

SEQ ID NO: 2652437 - RNA, 19 nt, Artificial Sequence
  Description of Artificial Sequence: Synthetic oligonucleotide
augucucuggacuguucug

SEQ ID NO: 2652438 - RNA, 19 nt, Artificial Sequence
  Description of Artificial Sequence: Synthetic oligonucleotide
agcaucuguuucaguggcc

SEQ ID NO: 2652439 - RNA, 19 nt, Artificial Sequence
  Description of Artificial Sequence: Synthetic oligonucleotide
ccagacugcauucuauuac

SEQ ID NO: 2652440 - RNA, 19 nt, Artificial Sequence
  Description of Artificial Sequence: Synthetic oligonucleotide
cagguagucacuccugaga

SEQ ID NO: 2652441 - RNA, 19 nt, Artificial Sequence
  Description of Artificial Sequence: Synthetic oligonucleotide
cuagacacucauccuuauc

SEQ ID NO: 2652442 - RNA, 19 nt, Artificial Sequence
  Description of Artificial Sequence: Synthetic oligonucleotide
ccugaggggacaauuugag

SEQ ID NO: 2652443 - RNA, 19 nt, Artificial Sequence
  Description of Artificial Sequence: Synthetic oligonucleotide
caccugaggggacaauuug

SEQ ID NO: 2652444 - RNA, 19 nt, Artificial Sequence
  Description of Artificial Sequence: Synthetic oligonucleotide
aucucaaugagaaguuaau

SEQ ID NO: 2652445 - RNA, 19 nt, Artificial Sequence
  Description of Artificial Sequence: Synthetic oligonucleotide
uggguagguuguucauaag

SEQ ID NO: 2652446 - RNA, 19 nt, Artificial Sequence
  Description of Artificial Sequence: Synthetic oligonucleotide
aguaugcuggcaagagaag

SEQ ID NO: 2652447 - RNA, 19 nt, Artificial Sequence
  Description of Artificial Sequence: Synthetic oligonucleotide
cuagagaucuuggccauca

SEQ ID NO: 2652448 - RNA, 19 nt, Artificial Sequence
  Description of Artificial Sequence: Synthetic oligonucleotide
agguuguucauaagcagaa

SEQ ID NO: 2652449 - RNA, 19 nt, Artificial Sequence
  Description of Artificial Sequence: Synthetic oligonucleotide
cauauccuuugcaaauuaa

SEQ ID NO: 2652450 - RNA, 19 nt, Artificial Sequence
  Description of Artificial Sequence: Synthetic oligonucleotide
aacugguggcugugggaga

SEQ ID NO: 2652451 - RNA, 19 nt, Artificial Sequence
  Description of Artificial Sequence: Synthetic oligonucleotide
acauuugggacagucccau

SEQ ID NO: 2652452 - RNA, 19 nt, Artificial Sequence
  Description of Artificial Sequence: Synthetic oligonucleotide
agcagacuauuuucauagu

SEQ ID NO: 2652453 - RNA, 19 nt, Artificial Sequence
  Description of Artificial Sequence: Synthetic oligonucleotide
acuugaguuuccaguccgg

SEQ ID NO: 2652454 - RNA, 19 nt, Artificial Sequence
  Description of Artificial Sequence: Synthetic oligonucleotide
acacagcuagagaucuugg

SEQ ID NO: 2652455 - RNA, 19 nt, Artificial Sequence
  Description of Artificial Sequence: Synthetic oligonucleotide
uuccagccugauaucgagu

SEQ ID NO: 2652456 - RNA, 19 nt, Artificial Sequence
  Description of Artificial Sequence: Synthetic oligonucleotide
uucaccugaggggacaauu

SEQ ID NO: 2652457 - RNA, 19 nt, Artificial Sequence
  Description of Artificial Sequence: Synthetic oligonucleotide
cauaccugcacagucaagu

SEQ ID NO: 2652458 - RNA, 19 nt, Artificial Sequence
  Description of Artificial Sequence: Synthetic oligonucleotide
uggccauguccuucaacac

SEQ ID NO: 2652459 - RNA, 19 nt, Artificial Sequence
  Description of Artificial Sequence: Synthetic oligonucleotide
agucaggacugggaacuuc

SEQ ID NO: 2652460 - RNA, 19 nt, Artificial Sequence
  Description of Artificial Sequence: Synthetic oligonucleotide
guucuuucagugaaugucu

SEQ ID NO: 2652461 - RNA, 19 nt, Artificial Sequence
  Description of Artificial Sequence: Synthetic oligonucleotide
ugucucauaccugcacagu

SEQ ID NO: 2652462 - RNA, 19 nt, Artificial Sequence
  Description of Artificial Sequence: Synthetic oligonucleotide
agcuagagaucuuggccau

SEQ ID NO: 2652463 - RNA, 19 nt, Artificial Sequence
  Description of Artificial Sequence: Synthetic oligonucleotide
augccuagacacucauccu

SEQ ID NO: 2652464 - RNA, 19 nt, Artificial Sequence
  Description of Artificial Sequence: Synthetic oligonucleotide
cugugggagacauugauuu

SEQ ID NO: 2652465 - RNA, 19 nt, Artificial Sequence
  Description of Artificial Sequence: Synthetic oligonucleotide
aauuugagccagacugcau

SEQ ID NO: 2652466 - RNA, 19 nt, Artificial Sequence
  Description of Artificial Sequence: Synthetic oligonucleotide
ccuuaucgaaauugaaguc

SEQ ID NO: 2652467 - RNA, 19 nt, Artificial Sequence
  Description of Artificial Sequence: Synthetic oligonucleotide
cuauuuucauaguucuggu

SEQ ID NO: 2652468 - RNA, 19 nt, Artificial Sequence
  Description of Artificial Sequence: Synthetic oligonucleotide
acacucauccuuaucgaaa

SEQ ID NO: 2652469 - RNA, 19 nt, Artificial Sequence
  Description of Artificial Sequence: Synthetic oligonucleotide
uggcuucaagucagcaaaa

SEQ ID NO: 2652470 - RNA, 19 nt, Artificial Sequence
  Description of Artificial Sequence: Synthetic oligonucleotide
acauugauuuggaucuaga

SEQ ID NO: 2652471 - RNA, 19 nt, Artificial Sequence
  Description of Artificial Sequence: Synthetic oligonucleotide
caauuugagccagacugca

SEQ ID NO: 2652472 - RNA, 19 nt, Artificial Sequence
  Description of Artificial Sequence: Synthetic oligonucleotide
acuguucugggcaccauaa

SEQ ID NO: 2652473 - RNA, 19 nt, Artificial Sequence
  Description of Artificial Sequence: Synthetic oligonucleotide
aagggaaggcucagguagu

SEQ ID NO: 2652474 - RNA, 19 nt, Artificial Sequence
  Description of Artificial Sequence: Synthetic oligonucleotide
gucaagucuucaagcagac

SEQ ID NO: 2652475 - RNA, 19 nt, Artificial Sequence
  Description of Artificial Sequence: Synthetic oligonucleotide
acuccugagaacgcugagu

SEQ ID NO: 2652476 - RNA, 19 nt, Artificial Sequence
  Description of Artificial Sequence: Synthetic oligonucleotide
guucauaagcagaaaugua

SEQ ID NO: 2652477 - RNA, 19 nt, Artificial Sequence
  Description of Artificial Sequence: Synthetic oligonucleotide
agccagacugcauucuauu

SEQ ID NO: 2652478 - RNA, 19 nt, Artificial Sequence
  Description of Artificial Sequence: Synthetic oligonucleotide
acuguucaccugaggggac

SEQ ID NO: 2652479 - RNA, 19 nt, Artificial Sequence
  Description of Artificial Sequence: Synthetic oligonucleotide
cagacugcauucuauuacu

SEQ ID NO: 2652480 - RNA, 19 nt, Artificial Sequence
  Description of Artificial Sequence: Synthetic oligonucleotide
agggaaggcucagguaguc

SEQ ID NO: 2652481 - RNA, 19 nt, Artificial Sequence
  Description of Artificial Sequence: Synthetic oligonucleotide
uugagccagacugcauucu

SEQ ID NO: 2652482 - RNA, 19 nt, Artificial Sequence
  Description of Artificial Sequence: Synthetic oligonucleotide
ggacugggaacuucaauaa

SEQ ID NO: 2652483 - RNA, 19 nt, Artificial Sequence
  Description of Artificial Sequence: Synthetic oligonucleotide
cucagguagucacuccuga

SEQ ID NO: 2652484 - RNA, 19 nt, Artificial Sequence
  Description of Artificial Sequence: Synthetic oligonucleotide
cugcauucuauuacuugaa

SEQ ID NO: 2652485 - RNA, 19 nt, Artificial Sequence
  Description of Artificial Sequence: Synthetic oligonucleotide
cauaagcagaaauguagau

SEQ ID NO: 2652486 - RNA, 19 nt, Artificial Sequence
  Description of Artificial Sequence: Synthetic oligonucleotide
aggggacaauuugagccag

SEQ ID NO: 2652487 - RNA, 19 nt, Artificial Sequence
  Description of Artificial Sequence: Synthetic oligonucleotide
ucaagucuucaagcagacu

SEQ ID NO: 2652488 - RNA, 19 nt, Artificial Sequence
  Description of Artificial Sequence: Synthetic oligonucleotide
auguagaugccuagacacu

SEQ ID NO: 2652489 - RNA, 19 nt, Artificial Sequence
  Description of Artificial Sequence: Synthetic oligonucleotide
gucaggacugggaacuuca

SEQ ID NO: 2652490 - RNA, 19 nt, Artificial Sequence
  Description of Artificial Sequence: Synthetic oligonucleotide
ugggcaccauaauuuucaa

SEQ ID NO: 2652491 - RNA, 19 nt, Artificial Sequence
  Description of Artificial Sequence: Synthetic oligonucleotide
cucauaccugcacagucaa

SEQ ID NO: 2652492 - RNA, 19 nt, Artificial Sequence
  Description of Artificial Sequence: Synthetic oligonucleotide
acagucccaucuucuugca

SEQ ID NO: 2652493 - RNA, 19 nt, Artificial Sequence
  Description of Artificial Sequence: Synthetic oligonucleotide
cucugaaggagugagaguu

SEQ ID NO: 2652494 - RNA, 19 nt, Artificial Sequence
  Description of Artificial Sequence: Synthetic oligonucleotide
agaugccuagacacucauc

SEQ ID NO: 2652495 - RNA, 19 nt, Artificial Sequence
  Description of Artificial Sequence: Synthetic oligonucleotide
gggaacuucaauaauggau

SEQ ID NO: 2652496 - RNA, 19 nt, Artificial Sequence
  Description of Artificial Sequence: Synthetic oligonucleotide
caucuagaucuuccucuuc

SEQ ID NO: 2652497 - RNA, 19 nt, Artificial Sequence
  Description of Artificial Sequence: Synthetic oligonucleotide
ccaguccggacacagcuag

SEQ ID NO: 2652498 - RNA, 19 nt, Artificial Sequence
  Description of Artificial Sequence: Synthetic oligonucleotide
cgaaauugaagucaggacu

SEQ ID NO: 2652499 - RNA, 19 nt, Artificial Sequence
  Description of Artificial Sequence: Synthetic oligonucleotide
uagagaucuuggccaucaa

SEQ ID NO: 2652500 - RNA, 19 nt, Artificial Sequence
  Description of Artificial Sequence: Synthetic oligonucleotide
caaaaugagugagucucaa

SEQ ID NO: 2652501 - RNA, 19 nt, Artificial Sequence
  Description of Artificial Sequence: Synthetic oligonucleotide
gggcaccauaauuuucaag

SEQ ID NO: 2652502 - RNA, 19 nt, Artificial Sequence
  Description of Artificial Sequence: Synthetic oligonucleotide
ggaacuucuaccgcauauc

SEQ ID NO: 2652503 - RNA, 19 nt, Artificial Sequence
  Description of Artificial Sequence: Synthetic oligonucleotide
gacuguucugggcaccaua

SEQ ID NO: 2652504 - RNA, 19 nt, Artificial Sequence
  Description of Artificial Sequence: Synthetic oligonucleotide
gccaacuugaguuuccagu

SEQ ID NO: 2652505 - RNA, 19 nt, Artificial Sequence
  Description of Artificial Sequence: Synthetic oligonucleotide
guuaauccaacugguggcu

SEQ ID NO: 2652506 - RNA, 19 nt, Artificial Sequence
  Description of Artificial Sequence: Synthetic oligonucleotide
uccaguccggacacagcua

SEQ ID NO: 2652507 - RNA, 19 nt, Artificial Sequence
  Description of Artificial Sequence: Synthetic oligonucleotide
ccuuugcaaauuaauucca

SEQ ID NO: 2652508 - RNA, 19 nt, Artificial Sequence
  Description of Artificial Sequence: Synthetic oligonucleotide
ggccauguccuucaacaca

SEQ ID NO: 2652509 - RNA, 19 nt, Artificial Sequence
  Description of Artificial Sequence: Synthetic oligonucleotide
aguggguagguuguucaua

SEQ ID NO: 2652510 - RNA, 19 nt, Artificial Sequence
  Description of Artificial Sequence: Synthetic oligonucleotide
cacuccugagaacgcugag

SEQ ID NO: 2652511 - RNA, 19 nt, Artificial Sequence
  Description of Artificial Sequence: Synthetic oligonucleotide
uggcugugggagacauuga

SEQ ID NO: 2652512 - RNA, 19 nt, Artificial Sequence
  Description of Artificial Sequence: Synthetic oligonucleotide
gggacaauuugagccagac

SEQ ID NO: 2652513 - RNA, 19 nt, Artificial Sequence
  Description of Artificial Sequence: Synthetic oligonucleotide
guucugggcaccauaauuu

SEQ ID NO: 2652514 - RNA, 19 nt, Artificial Sequence
  Description of Artificial Sequence: Synthetic oligonucleotide
cuggcaagagaagcaucug

SEQ ID NO: 2652515 - RNA, 19 nt, Artificial Sequence
  Description of Artificial Sequence: Synthetic oligonucleotide
cuaccgcauauccuuugca

SEQ ID NO: 2652516 - RNA, 19 nt, Artificial Sequence
  Description of Artificial Sequence: Synthetic oligonucleotide
augcuggcaagagaagcau

SEQ ID NO: 2652517 - RNA, 19 nt, Artificial Sequence
  Description of Artificial Sequence: Synthetic oligonucleotide
acucauccuuaucgaaauu

SEQ ID NO: 2652518 - RNA, 19 nt, Artificial Sequence
  Description of Artificial Sequence: Synthetic oligonucleotide
cacucauccuuaucgaaau

SEQ ID NO: 2652519 - RNA, 19 nt, Artificial Sequence
  Description of Artificial Sequence: Synthetic oligonucleotide
cuagaucuuccucuuccua

SEQ ID NO: 2652520 - RNA, 19 nt, Artificial Sequence
  Description of Artificial Sequence: Synthetic oligonucleotide
agucuucaagcagacuauu

SEQ ID NO: 2652521 - RNA, 19 nt, Artificial Sequence
  Description of Artificial Sequence: Synthetic oligonucleotide
cuuggccaucaauggcuuc

SEQ ID NO: 2652522 - RNA, 19 nt, Artificial Sequence
  Description of Artificial Sequence: Synthetic oligonucleotide
cauuugggacagucccauc

SEQ ID NO: 2652523 - RNA, 19 nt, Artificial Sequence
  Description of Artificial Sequence: Synthetic oligonucleotide
gacugggaacuucaauaau

SEQ ID NO: 2652524 - RNA, 19 nt, Artificial Sequence
  Description of Artificial Sequence: Synthetic oligonucleotide
aucuagaaguggguagguu

SEQ ID NO: 2652525 - RNA, 19 nt, Artificial Sequence
  Description of Artificial Sequence: Synthetic oligonucleotide
cuccugagaacgcugaguu

SEQ ID NO: 2652526 - RNA, 19 nt, Artificial Sequence
  Description of Artificial Sequence: Synthetic oligonucleotide
ggccaacuugaguuuccag

SEQ ID NO: 2652527 - RNA, 19 nt, Artificial Sequence
  Description of Artificial Sequence: Synthetic oligonucleotide
cuggacuguucugggcacc

SEQ ID NO: 2652528 - RNA, 19 nt, Artificial Sequence
  Description of Artificial Sequence: Synthetic oligonucleotide
gaucuagaaguggguaggu

SEQ ID NO: 2652529 - RNA, 19 nt, Artificial Sequence
  Description of Artificial Sequence: Synthetic oligonucleotide
cagucccaucuucuugcac

SEQ ID NO: 2652530 - RNA, 19 nt, Artificial Sequence
  Description of Artificial Sequence: Synthetic oligonucleotide
ugagaacgcugaguucuuu

SEQ ID NO: 2652531 - RNA, 19 nt, Artificial Sequence
  Description of Artificial Sequence: Synthetic oligonucleotide
gcauauccuuugcaaauua

SEQ ID NO: 2652532 - RNA, 19 nt, Artificial Sequence
  Description of Artificial Sequence: Synthetic oligonucleotide
gcagacuauuuucauaguu

SEQ ID NO: 2652533 - RNA, 19 nt, Artificial Sequence
  Description of Artificial Sequence: Synthetic oligonucleotide
gucagcaaaaugagugagu

SEQ ID NO: 2652534 - RNA, 19 nt, Artificial Sequence
  Description of Artificial Sequence: Synthetic oligonucleotide
guccggacacagcuagaga

SEQ ID NO: 2652535 - RNA, 19 nt, Artificial Sequence
  Description of Artificial Sequence: Synthetic oligonucleotide
uggccaucaauggcuucaa

SEQ ID NO: 2652536 - RNA, 19 nt, Artificial Sequence
  Description of Artificial Sequence: Synthetic oligonucleotide
aagucaggacugggaacuu

SEQ ID NO: 2652537 - RNA, 19 nt, Artificial Sequence
  Description of Artificial Sequence: Synthetic oligonucleotide
cucuuccuacuguucaccu

SEQ ID NO: 2652538 - RNA, 19 nt, Artificial Sequence
  Description of Artificial Sequence: Synthetic oligonucleotide
agccugauaucgaguuucu

SEQ ID NO: 2652539 - RNA, 19 nt, Artificial Sequence
  Description of Artificial Sequence: Synthetic oligonucleotide
agacugcauucuauuacuu

SEQ ID NO: 2652540 - RNA, 19 nt, Artificial Sequence
  Description of Artificial Sequence: Synthetic oligonucleotide
uggaugucucuggacuguu

SEQ ID NO: 2652541 - RNA, 19 nt, Artificial Sequence
  Description of Artificial Sequence: Synthetic oligonucleotide
ccugagaacgcugaguucu

SEQ ID NO: 2652542 - RNA, 19 nt, Artificial Sequence
  Description of Artificial Sequence: Synthetic oligonucleotide
gcaaaaugagugagucuca

SEQ ID NO: 2652543 - RNA, 19 nt, Artificial Sequence
  Description of Artificial Sequence: Synthetic oligonucleotide
gaaggcucagguagucacu

SEQ ID NO: 2652544 - RNA, 19 nt, Artificial Sequence
  Description of Artificial Sequence: Synthetic oligonucleotide
aggcugucauucaaagguu

SEQ ID NO: 2652545 - RNA, 19 nt, Artificial Sequence
  Description of Artificial Sequence: Synthetic oligonucleotide
cugucauucaaagguuacu

SEQ ID NO: 2652546 - RNA, 19 nt, Artificial Sequence
  Description of Artificial Sequence: Synthetic oligonucleotide
cagcaaaaugagugagucu

SEQ ID NO: 2652547 - RNA, 19 nt, Artificial Sequence
  Description of Artificial Sequence: Synthetic oligonucleotide
ccggacacagcuagagauc

SEQ ID NO: 2652548 - RNA, 19 nt, Artificial Sequence
  Description of Artificial Sequence: Synthetic oligonucleotide
ucaacacauuugggacagu

SEQ ID NO: 2652549 - RNA, 19 nt, Artificial Sequence
  Description of Artificial Sequence: Synthetic oligonucleotide
agacauugauuuggaucua

SEQ ID NO: 2652550 - RNA, 19 nt, Artificial Sequence
  Description of Artificial Sequence: Synthetic oligonucleotide
ggacaauuugagccagacu

SEQ ID NO: 2652551 - RNA, 19 nt, Artificial Sequence
  Description of Artificial Sequence: Synthetic oligonucleotide
gcaagagaagcaucuguuu

SEQ ID NO: 2652552 - RNA, 19 nt, Artificial Sequence
  Description of Artificial Sequence: Synthetic oligonucleotide
cuguuucaguggccauguc

SEQ ID NO: 2652553 - RNA, 19 nt, Artificial Sequence
  Description of Artificial Sequence: Synthetic oligonucleotide
ggcaagagaagcaucuguu

SEQ ID NO: 2652554 - RNA, 19 nt, Artificial Sequence
  Description of Artificial Sequence: Synthetic oligonucleotide
gagccagacugcauucuau

SEQ ID NO: 2652555 - RNA, 19 nt, Artificial Sequence
  Description of Artificial Sequence: Synthetic oligonucleotide
gccauguccuucaacacau

SEQ ID NO: 2652556 - RNA, 19 nt, Artificial Sequence
  Description of Artificial Sequence: Synthetic oligonucleotide
gucuucaagcagacuauuu

SEQ ID NO: 2652557 - RNA, 19 nt, Artificial Sequence
  Description of Artificial Sequence: Synthetic oligonucleotide
cuucuaccgcauauccuuu

SEQ ID NO: 2652558 - RNA, 19 nt, Artificial Sequence
  Description of Artificial Sequence: Synthetic oligonucleotide
caggacugggaacuucaau

SEQ ID NO: 2652559 - RNA, 19 nt, Artificial Sequence
  Description of Artificial Sequence: Synthetic oligonucleotide
ggaugucucuggacuguuc

SEQ ID NO: 2652560 - RNA, 19 nt, Artificial Sequence
  Description of Artificial Sequence: Synthetic oligonucleotide
caguccggacacagcuaga

SEQ ID NO: 2652561 - RNA, 19 nt, Artificial Sequence
  Description of Artificial Sequence: Synthetic oligonucleotide
ccugcacagucaagucuuc

SEQ ID NO: 2652562 - RNA, 19 nt, Artificial Sequence
  Description of Artificial Sequence: Synthetic oligonucleotide
gccuagacacucauccuua

SEQ ID NO: 2652563 - RNA, 19 nt, Artificial Sequence
  Description of Artificial Sequence: Synthetic oligonucleotide
gggaaggcucagguaguca

SEQ ID NO: 2652564 - RNA, 19 nt, Artificial Sequence
  Description of Artificial Sequence: Synthetic oligonucleotide
caggaacuucuaccgcaua

SEQ ID NO: 2652565 - RNA, 19 nt, Artificial Sequence
  Description of Artificial Sequence: Synthetic oligonucleotide
caucuguuucaguggccau

SEQ ID NO: 2652566 - RNA, 19 nt, Artificial Sequence
  Description of Artificial Sequence: Synthetic oligonucleotide
ccgcauauccuuugcaaau

SEQ ID NO: 2652567 - RNA, 19 nt, Artificial Sequence
  Description of Artificial Sequence: Synthetic oligonucleotide
gcuagagaucuuggccauc

SEQ ID NO: 2652568 - RNA, 19 nt, Artificial Sequence
  Description of Artificial Sequence: Synthetic oligonucleotide
cuguucugggcaccauaau

SEQ ID NO: 2652569 - RNA, 19 nt, Artificial Sequence
  Description of Artificial Sequence: Synthetic oligonucleotide
ggcuucaagucagcaaaau

SEQ ID NO: 2652570 - RNA, 19 nt, Artificial Sequence
  Description of Artificial Sequence: Synthetic oligonucleotide
gggacagucccaucuucuu

SEQ ID NO: 2652571 - RNA, 19 nt, Artificial Sequence
  Description of Artificial Sequence: Synthetic oligonucleotide
gggagacauugauuuggau

SEQ ID NO: 2652572 - RNA, 19 nt, Artificial Sequence
  Description of Artificial Sequence: Synthetic oligonucleotide
ggggacaauuugagccaga

SEQ ID NO: 2652573 - RNA, 19 nt, Artificial Sequence
  Description of Artificial Sequence: Synthetic oligonucleotide
gcugugggagacauugauu

SEQ ID NO: 2652574 - RNA, 19 nt, Artificial Sequence
  Description of Artificial Sequence: Synthetic oligonucleotide
ccuagacacucauccuuau

SEQ ID NO: 2652575 - RNA, 19 nt, Artificial Sequence
  Description of Artificial Sequence: Synthetic oligonucleotide
guucaccugaggggacaau

SEQ ID NO: 2652576 - RNA, 19 nt, Artificial Sequence
  Description of Artificial Sequence: Synthetic oligonucleotide
ccagccugauaucgaguuu

SEQ ID NO: 2652577 - RNA, 19 nt, Artificial Sequence
  Description of Artificial Sequence: Synthetic oligonucleotide
cgcauauccuuugcaaauu

SEQ ID NO: 2652578 - RNA, 19 nt, Artificial Sequence
  Description of Artificial Sequence: Synthetic oligonucleotide
gccugauaucgaguuucuu

SEQ ID NO: 2652579 - RNA, 19 nt, Artificial Sequence
  Description of Artificial Sequence: Synthetic oligonucleotide
ggacacagcuagagaucuu

SEQ ID NO: 2652580 - RNA, 19 nt, Artificial Sequence
  Description of Artificial Sequence: Synthetic oligonucleotide
ggacuguucugggcaccau

SEQ ID NO: 2652581 - RNA, 19 nt, Artificial Sequence
  Description of Artificial Sequence: Synthetic oligonucleotide
gguggcugugggagacauu

SEQ ID NO: 2652582 - RNA, 19 nt, Artificial Sequence
  Description of Artificial Sequence: Synthetic oligonucleotide
ucaaguaauauauauaucg

SEQ ID NO: 2652583 - RNA, 19 nt, Artificial Sequence
  Description of Artificial Sequence: Synthetic oligonucleotide
gauacaaugggcuagagag

SEQ ID NO: 2652584 - RNA, 19 nt, Artificial Sequence
  Description of Artificial Sequence: Synthetic oligonucleotide
aaugaucacagacacauuc

SEQ ID NO: 2652585 - RNA, 19 nt, Artificial Sequence
  Description of Artificial Sequence: Synthetic oligonucleotide
aauacagaagccuacaacu

SEQ ID NO: 2652586 - RNA, 19 nt, Artificial Sequence
  Description of Artificial Sequence: Synthetic oligonucleotide
aguaauauauauaucgucc

SEQ ID NO: 2652587 - RNA, 19 nt, Artificial Sequence
  Description of Artificial Sequence: Synthetic oligonucleotide
aaguaauauauauaucguc

SEQ ID NO: 2652588 - RNA, 19 nt, Artificial Sequence
  Description of Artificial Sequence: Synthetic oligonucleotide
aaacaaugggacuucauag

SEQ ID NO: 2652589 - RNA, 19 nt, Artificial Sequence
  Description of Artificial Sequence: Synthetic oligonucleotide
gaaaagauccccuuucacg

SEQ ID NO: 2652590 - RNA, 19 nt, Artificial Sequence
  Description of Artificial Sequence: Synthetic oligonucleotide
ucuuuuguugauuuaacag

SEQ ID NO: 2652591 - RNA, 19 nt, Artificial Sequence
  Description of Artificial Sequence: Synthetic oligonucleotide
uacacgguaauuuugaugu

SEQ ID NO: 2652592 - RNA, 19 nt, Artificial Sequence
  Description of Artificial Sequence: Synthetic oligonucleotide
cuucuugaaaagaacagcg

SEQ ID NO: 2652593 - RNA, 19 nt, Artificial Sequence
  Description of Artificial Sequence: Synthetic oligonucleotide
aaaagauccccuuucacgu

SEQ ID NO: 2652594 - RNA, 19 nt, Artificial Sequence
  Description of Artificial Sequence: Synthetic oligonucleotide
auauauaucguccaucucu

SEQ ID NO: 2652595 - RNA, 19 nt, Artificial Sequence
  Description of Artificial Sequence: Synthetic oligonucleotide
uuuaagguccuacaguugc

SEQ ID NO: 2652596 - RNA, 19 nt, Artificial Sequence
  Description of Artificial Sequence: Synthetic oligonucleotide
aucacagacacauucuccc

SEQ ID NO: 2652597 - RNA, 19 nt, Artificial Sequence
  Description of Artificial Sequence: Synthetic oligonucleotide
aauauauauaucguccauc

SEQ ID NO: 2652598 - RNA, 19 nt, Artificial Sequence
  Description of Artificial Sequence: Synthetic oligonucleotide
aaugggacuucauagccuc

SEQ ID NO: 2652599 - RNA, 19 nt, Artificial Sequence
  Description of Artificial Sequence: Synthetic oligonucleotide
acaaugggacuucauagcc

SEQ ID NO: 2652600 - RNA, 19 nt, Artificial Sequence
  Description of Artificial Sequence: Synthetic oligonucleotide
uugaaaagaacagcgaucc

SEQ ID NO: 2652601 - RNA, 19 nt, Artificial Sequence
  Description of Artificial Sequence: Synthetic oligonucleotide
uuuguaaucaaguaauaua

SEQ ID NO: 2652602 - RNA, 19 nt, Artificial Sequence
  Description of Artificial Sequence: Synthetic oligonucleotide
ucuguuuuggaacaugcga

SEQ ID NO: 2652603 - RNA, 19 nt, Artificial Sequence
  Description of Artificial Sequence: Synthetic oligonucleotide
uucuuuguaaucaaguaau

SEQ ID NO: 2652604 - RNA, 19 nt, Artificial Sequence
  Description of Artificial Sequence: Synthetic oligonucleotide
agagagucuguuuuggaac

SEQ ID NO: 2652605 - RNA, 19 nt, Artificial Sequence
  Description of Artificial Sequence: Synthetic oligonucleotide
aagguucucauauguuggc

SEQ ID NO: 2652606 - RNA, 19 nt, Artificial Sequence
  Description of Artificial Sequence: Synthetic oligonucleotide
uuguugauuuaacaguucc

SEQ ID NO: 2652607 - RNA, 19 nt, Artificial Sequence
  Description of Artificial Sequence: Synthetic oligonucleotide
ucaaugaucacagacacau

SEQ ID NO: 2652608 - RNA, 19 nt, Artificial Sequence
  Description of Artificial Sequence: Synthetic oligonucleotide
aguugcuuaguccuacagc

SEQ ID NO: 2652609 - RNA, 19 nt, Artificial Sequence
  Description of Artificial Sequence: Synthetic oligonucleotide
auuuaacaguuccugcacc

SEQ ID NO: 2652610 - RNA, 19 nt, Artificial Sequence
  Description of Artificial Sequence: Synthetic oligonucleotide
guaauuuugaugucuguug

SEQ ID NO: 2652611 - RNA, 19 nt, Artificial Sequence
  Description of Artificial Sequence: Synthetic oligonucleotide
uaguccuacagccaaguag

SEQ ID NO: 2652612 - RNA, 19 nt, Artificial Sequence
  Description of Artificial Sequence: Synthetic oligonucleotide
ucauauguuggcuugugug

SEQ ID NO: 2652613 - RNA, 19 nt, Artificial Sequence
  Description of Artificial Sequence: Synthetic oligonucleotide
guucagaguguauacacgg

SEQ ID NO: 2652614 - RNA, 19 nt, Artificial Sequence
  Description of Artificial Sequence: Synthetic oligonucleotide
auagccucuaagcucuucc

SEQ ID NO: 2652615 - RNA, 19 nt, Artificial Sequence
  Description of Artificial Sequence: Synthetic oligonucleotide
uucauagccucuaagcucu

SEQ ID NO: 2652616 - RNA, 19 nt, Artificial Sequence
  Description of Artificial Sequence: Synthetic oligonucleotide
ucuguugccucaaacaccu

SEQ ID NO: 2652617 - RNA, 19 nt, Artificial Sequence
  Description of Artificial Sequence: Synthetic oligonucleotide
uguauacacgguaauuuug

SEQ ID NO: 2652618 - RNA, 19 nt, Artificial Sequence
  Description of Artificial Sequence: Synthetic oligonucleotide
uguucagaguguauacacg

SEQ ID NO: 2652619 - RNA, 19 nt, Artificial Sequence
  Description of Artificial Sequence: Synthetic oligonucleotide
ugugauucgacuucuuucu

SEQ ID NO: 2652620 - RNA, 19 nt, Artificial Sequence
  Description of Artificial Sequence: Synthetic oligonucleotide
uccucugcccauuuuaagg

SEQ ID NO: 2652621 - RNA, 19 nt, Artificial Sequence
  Description of Artificial Sequence: Synthetic oligonucleotide
accacauccaauccugggc

SEQ ID NO: 2652622 - RNA, 19 nt, Artificial Sequence
  Description of Artificial Sequence: Synthetic oligonucleotide
augugauucgacuucuuuc

SEQ ID NO: 2652623 - RNA, 19 nt, Artificial Sequence
  Description of Artificial Sequence: Synthetic oligonucleotide
uuuaacaguuccugcaccc

SEQ ID NO: 2652624 - RNA, 19 nt, Artificial Sequence
  Description of Artificial Sequence: Synthetic oligonucleotide
uuuuguugauuuaacaguu

SEQ ID NO: 2652625 - RNA, 19 nt, Artificial Sequence
  Description of Artificial Sequence: Synthetic oligonucleotide
uccucacugauacaauggg

SEQ ID NO: 2652626 - RNA, 19 nt, Artificial Sequence
  Description of Artificial Sequence: Synthetic oligonucleotide
aaaagaacagcgaucccag

SEQ ID NO: 2652627 - RNA, 19 nt, Artificial Sequence
  Description of Artificial Sequence: Synthetic oligonucleotide
ugauucgacuucuuucugg

SEQ ID NO: 2652628 - RNA, 19 nt, Artificial Sequence
  Description of Artificial Sequence: Synthetic oligonucleotide
agaacagcgaucccagcac

SEQ ID NO: 2652629 - RNA, 19 nt, Artificial Sequence
  Description of Artificial Sequence: Synthetic oligonucleotide
auaucguccaucucucuuc

SEQ ID NO: 2652630 - RNA, 19 nt, Artificial Sequence
  Description of Artificial Sequence: Synthetic oligonucleotide
auccagaccacauccaauc

SEQ ID NO: 2652631 - RNA, 19 nt, Artificial Sequence
  Description of Artificial Sequence: Synthetic oligonucleotide
cuucaaugaucacagacac

SEQ ID NO: 2652632 - RNA, 19 nt, Artificial Sequence
  Description of Artificial Sequence: Synthetic oligonucleotide
uuggcuugugugaagcccg

SEQ ID NO: 2652633 - RNA, 19 nt, Artificial Sequence
  Description of Artificial Sequence: Synthetic oligonucleotide
ggaacaugcgaaaagaucc

SEQ ID NO: 2652634 - RNA, 19 nt, Artificial Sequence
  Description of Artificial Sequence: Synthetic oligonucleotide
uccauucuucaaacaaugg

SEQ ID NO: 2652635 - RNA, 19 nt, Artificial Sequence
  Description of Artificial Sequence: Synthetic oligonucleotide
ucuucuugaaaagaacagc

SEQ ID NO: 2652636 - RNA, 19 nt, Artificial Sequence
  Description of Artificial Sequence: Synthetic oligonucleotide
aucuguucagaguguauac

SEQ ID NO: 2652637 - RNA, 19 nt, Artificial Sequence
  Description of Artificial Sequence: Synthetic oligonucleotide
ucuggaucuucauuuagga

SEQ ID NO: 2652638 - RNA, 19 nt, Artificial Sequence
  Description of Artificial Sequence: Synthetic oligonucleotide
uauauaucguccaucucuc

SEQ ID NO: 2652639 - RNA, 19 nt, Artificial Sequence
  Description of Artificial Sequence: Synthetic oligonucleotide
acugcagacgauccagacc

SEQ ID NO: 2652640 - RNA, 19 nt, Artificial Sequence
  Description of Artificial Sequence: Synthetic oligonucleotide
aacaugcgaaaagaucccc

SEQ ID NO: 2652641 - RNA, 19 nt, Artificial Sequence
  Description of Artificial Sequence: Synthetic oligonucleotide
acuucauagccucuaagcu

SEQ ID NO: 2652642 - RNA, 19 nt, Artificial Sequence
  Description of Artificial Sequence: Synthetic oligonucleotide
auuuccucacacauugucc

SEQ ID NO: 2652643 - RNA, 19 nt, Artificial Sequence
  Description of Artificial Sequence: Synthetic oligonucleotide
uugauuuaacaguuccugc

SEQ ID NO: 2652644 - RNA, 19 nt, Artificial Sequence
  Description of Artificial Sequence: Synthetic oligonucleotide
aagccuacaacuggccugc

SEQ ID NO: 2652645 - RNA, 19 nt, Artificial Sequence
  Description of Artificial Sequence: Synthetic oligonucleotide
aacaccucuucaaugauca

SEQ ID NO: 2652646 - RNA, 19 nt, Artificial Sequence
  Description of Artificial Sequence: Synthetic oligonucleotide
ucacacauuguccucugcc

SEQ ID NO: 2652647 - RNA, 19 nt, Artificial Sequence
  Description of Artificial Sequence: Synthetic oligonucleotide
gaaaagaacagcgauccca

SEQ ID NO: 2652648 - RNA, 19 nt, Artificial Sequence
  Description of Artificial Sequence: Synthetic oligonucleotide
uauugagucgcuacuucca

SEQ ID NO: 2652649 - RNA, 19 nt, Artificial Sequence
  Description of Artificial Sequence: Synthetic oligonucleotide
cauucgacaguccucacug

SEQ ID NO: 2652650 - RNA, 19 nt, Artificial Sequence
  Description of Artificial Sequence: Synthetic oligonucleotide
uaauauauauaucguccau

SEQ ID NO: 2652651 - RNA, 19 nt, Artificial Sequence
  Description of Artificial Sequence: Synthetic oligonucleotide
ugcgacacagauuuccuca

SEQ ID NO: 2652652 - RNA, 19 nt, Artificial Sequence
  Description of Artificial Sequence: Synthetic oligonucleotide
ugugaagcccguuucuuug

SEQ ID NO: 2652653 - RNA, 19 nt, Artificial Sequence
  Description of Artificial Sequence: Synthetic oligonucleotide
uucgacuucuuucuggauc

SEQ ID NO: 2652654 - RNA, 19 nt, Artificial Sequence
  Description of Artificial Sequence: Synthetic oligonucleotide
uggaacaugcgaaaagauc

SEQ ID NO: 2652655 - RNA, 19 nt, Artificial Sequence
  Description of Artificial Sequence: Synthetic oligonucleotide
uguugccucaaacaccucu

SEQ ID NO: 2652656 - RNA, 19 nt, Artificial Sequence
  Description of Artificial Sequence: Synthetic oligonucleotide
gaagccuacaacuggccug

SEQ ID NO: 2652657 - RNA, 19 nt, Artificial Sequence
  Description of Artificial Sequence: Synthetic oligonucleotide
acguaugugauucgacuuc

SEQ ID NO: 2652658 - RNA, 19 nt, Artificial Sequence
  Description of Artificial Sequence: Synthetic oligonucleotide
uuuuaagguccuacaguug

SEQ ID NO: 2652659 - RNA, 19 nt, Artificial Sequence
  Description of Artificial Sequence: Synthetic oligonucleotide
uccaaauuucuucuugaaa

SEQ ID NO: 2652660 - RNA, 19 nt, Artificial Sequence
  Description of Artificial Sequence: Synthetic oligonucleotide
uccgaagguucucauaugu

SEQ ID NO: 2652661 - RNA, 19 nt, Artificial Sequence
  Description of Artificial Sequence: Synthetic oligonucleotide
uggccugcgacacagauuu

SEQ ID NO: 2652662 - RNA, 19 nt, Artificial Sequence
  Description of Artificial Sequence: Synthetic oligonucleotide
gauuuccucacacauuguc

SEQ ID NO: 2652663 - RNA, 19 nt, Artificial Sequence
  Description of Artificial Sequence: Synthetic oligonucleotide
auacacgguaauuuugaug

SEQ ID NO: 2652664 - RNA, 19 nt, Artificial Sequence
  Description of Artificial Sequence: Synthetic oligonucleotide
ugauacaaugggcuagaga

SEQ ID NO: 2652665 - RNA, 19 nt, Artificial Sequence
  Description of Artificial Sequence: Synthetic oligonucleotide
ucacguaugugauucgacu

SEQ ID NO: 2652666 - RNA, 19 nt, Artificial Sequence
  Description of Artificial Sequence: Synthetic oligonucleotide
ucgacuucuuucuggaucu

SEQ ID NO: 2652667 - RNA, 19 nt, Artificial Sequence
  Description of Artificial Sequence: Synthetic oligonucleotide
acagaagccuacaacuggc

SEQ ID NO: 2652668 - RNA, 19 nt, Artificial Sequence
  Description of Artificial Sequence: Synthetic oligonucleotide
uccagaauuaagaguuucu

SEQ ID NO: 2652669 - RNA, 19 nt, Artificial Sequence
  Description of Artificial Sequence: Synthetic oligonucleotide
gacacauucucccacugca

SEQ ID NO: 2652670 - RNA, 19 nt, Artificial Sequence
  Description of Artificial Sequence: Synthetic oligonucleotide
cuguucagaguguauacac

SEQ ID NO: 2652671 - RNA, 19 nt, Artificial Sequence
  Description of Artificial Sequence: Synthetic oligonucleotide
caugguauugagucgcuac

SEQ ID NO: 2652672 - RNA, 19 nt, Artificial Sequence
  Description of Artificial Sequence: Synthetic oligonucleotide
cuucauagccucuaagcuc

SEQ ID NO: 2652673 - RNA, 19 nt, Artificial Sequence
  Description of Artificial Sequence: Synthetic oligonucleotide
ucucucuucagaacagcca

SEQ ID NO: 2652674 - RNA, 19 nt, Artificial Sequence
  Description of Artificial Sequence: Synthetic oligonucleotide
ucagugacuccauucuuca

SEQ ID NO: 2652675 - RNA, 19 nt, Artificial Sequence
  Description of Artificial Sequence: Synthetic oligonucleotide
uuggaauacagaagccuac

SEQ ID NO: 2652676 - RNA, 19 nt, Artificial Sequence
  Description of Artificial Sequence: Synthetic oligonucleotide
guauugagucgcuacuucc

SEQ ID NO: 2652677 - RNA, 19 nt, Artificial Sequence
  Description of Artificial Sequence: Synthetic oligonucleotide
ugcgaaaagauccccuuuc

SEQ ID NO: 2652678 - RNA, 19 nt, Artificial Sequence
  Description of Artificial Sequence: Synthetic oligonucleotide
augucuguugccucaaaca

SEQ ID NO: 2652679 - RNA, 19 nt, Artificial Sequence
  Description of Artificial Sequence: Synthetic oligonucleotide
agugacuccauucuucaaa

SEQ ID NO: 2652680 - RNA, 19 nt, Artificial Sequence
  Description of Artificial Sequence: Synthetic oligonucleotide
ucagaguguauacacggua

SEQ ID NO: 2652681 - RNA, 19 nt, Artificial Sequence
  Description of Artificial Sequence: Synthetic oligonucleotide
aaacaccucuucaaugauc

SEQ ID NO: 2652682 - RNA, 19 nt, Artificial Sequence
  Description of Artificial Sequence: Synthetic oligonucleotide
auugagucgcuacuuccag

SEQ ID NO: 2652683 - RNA, 19 nt, Artificial Sequence
  Description of Artificial Sequence: Synthetic oligonucleotide
ugagucgcuacuuccagaa

SEQ ID NO: 2652684 - RNA, 19 nt, Artificial Sequence
  Description of Artificial Sequence: Synthetic oligonucleotide
uccuacaguugcuuagucc

SEQ ID NO: 2652685 - RNA, 19 nt, Artificial Sequence
  Description of Artificial Sequence: Synthetic oligonucleotide
uuuguugauuuaacaguuc

SEQ ID NO: 2652686 - RNA, 19 nt, Artificial Sequence
  Description of Artificial Sequence: Synthetic oligonucleotide
gauucgacuucuuucugga

SEQ ID NO: 2652687 - RNA, 19 nt, Artificial Sequence
  Description of Artificial Sequence: Synthetic oligonucleotide
accucuucaaugaucacag

SEQ ID NO: 2652688 - RNA, 19 nt, Artificial Sequence
  Description of Artificial Sequence: Synthetic oligonucleotide
uuuaggaggcuggccaugg

SEQ ID NO: 2652689 - RNA, 19 nt, Artificial Sequence
  Description of Artificial Sequence: Synthetic oligonucleotide
uccaaauucuucaucuguu

SEQ ID NO: 2652690 - RNA, 19 nt, Artificial Sequence
  Description of Artificial Sequence: Synthetic oligonucleotide
cacacauuguccucugccc

SEQ ID NO: 2652691 - RNA, 19 nt, Artificial Sequence
  Description of Artificial Sequence: Synthetic oligonucleotide
gaucccagcacccauucga

SEQ ID NO: 2652692 - RNA, 19 nt, Artificial Sequence
  Description of Artificial Sequence: Synthetic oligonucleotide
cugcagacgauccagacca

SEQ ID NO: 2652693 - RNA, 19 nt, Artificial Sequence
  Description of Artificial Sequence: Synthetic oligonucleotide
uagagagucuguuuuggaa

SEQ ID NO: 2652694 - RNA, 19 nt, Artificial Sequence
  Description of Artificial Sequence: Synthetic oligonucleotide
ucagaacagccacuucucc

SEQ ID NO: 2652695 - RNA, 19 nt, Artificial Sequence
  Description of Artificial Sequence: Synthetic oligonucleotide
aagaccacgggcucaucca

SEQ ID NO: 2652696 - RNA, 19 nt, Artificial Sequence
  Description of Artificial Sequence: Synthetic oligonucleotide
gacuccauucuucaaacaa

SEQ ID NO: 2652697 - RNA, 19 nt, Artificial Sequence
  Description of Artificial Sequence: Synthetic oligonucleotide
ucguccaucucucuucaga

SEQ ID NO: 2652698 - RNA, 19 nt, Artificial Sequence
  Description of Artificial Sequence: Synthetic oligonucleotide
aucaaguaauauauauauc

SEQ ID NO: 2652699 - RNA, 19 nt, Artificial Sequence
  Description of Artificial Sequence: Synthetic oligonucleotide
aucucucuucagaacagcc

SEQ ID NO: 2652700 - RNA, 19 nt, Artificial Sequence
  Description of Artificial Sequence: Synthetic oligonucleotide
cuuuuguugauuuaacagu

SEQ ID NO: 2652701 - RNA, 19 nt, Artificial Sequence
  Description of Artificial Sequence: Synthetic oligonucleotide
aguccuacagccaaguaga

SEQ ID NO: 2652702 - RNA, 19 nt, Artificial Sequence
  Description of Artificial Sequence: Synthetic oligonucleotide
ugcuuaguccuacagccaa

SEQ ID NO: 2652703 - RNA, 19 nt, Artificial Sequence
  Description of Artificial Sequence: Synthetic oligonucleotide
uauaucguccaucucucuu

SEQ ID NO: 2652704 - RNA, 19 nt, Artificial Sequence
  Description of Artificial Sequence: Synthetic oligonucleotide
aacagcgaucccagcaccc

SEQ ID NO: 2652705 - RNA, 19 nt, Artificial Sequence
  Description of Artificial Sequence: Synthetic oligonucleotide
aguguauacacgguaauuu

SEQ ID NO: 2652706 - RNA, 19 nt, Artificial Sequence
  Description of Artificial Sequence: Synthetic oligonucleotide
gaccacauccaauccuggg

SEQ ID NO: 2652707 - RNA, 19 nt, Artificial Sequence
  Description of Artificial Sequence: Synthetic oligonucleotide
uauauauaucguccaucuc

SEQ ID NO: 2652708 - RNA, 19 nt, Artificial Sequence
  Description of Artificial Sequence: Synthetic oligonucleotide
gaucacagacacauucucc

SEQ ID NO: 2652709 - RNA, 19 nt, Artificial Sequence
  Description of Artificial Sequence: Synthetic oligonucleotide
guucucauauguuggcuug

SEQ ID NO: 2652710 - RNA, 19 nt, Artificial Sequence
  Description of Artificial Sequence: Synthetic oligonucleotide
uaugugauucgacuucuuu

SEQ ID NO: 2652711 - RNA, 19 nt, Artificial Sequence
  Description of Artificial Sequence: Synthetic oligonucleotide
cauauguuggcuuguguga

SEQ ID NO: 2652712 - RNA, 19 nt, Artificial Sequence
  Description of Artificial Sequence: Synthetic oligonucleotide
ucuaagcucuuccgaaggu

SEQ ID NO: 2652713 - RNA, 19 nt, Artificial Sequence
  Description of Artificial Sequence: Synthetic oligonucleotide
ucuuuguaaucaaguaaua

SEQ ID NO: 2652714 - RNA, 19 nt, Artificial Sequence
  Description of Artificial Sequence: Synthetic oligonucleotide
uagccucuaagcucuuccg

SEQ ID NO: 2652715 - RNA, 19 nt, Artificial Sequence
  Description of Artificial Sequence: Synthetic oligonucleotide
uucacguaugugauucgac

SEQ ID NO: 2652716 - RNA, 19 nt, Artificial Sequence
  Description of Artificial Sequence: Synthetic oligonucleotide
gagagucuguuuuggaaca

SEQ ID NO: 2652717 - RNA, 19 nt, Artificial Sequence
  Description of Artificial Sequence: Synthetic oligonucleotide
uuggaacaugcgaaaagau

SEQ ID NO: 2652718 - RNA, 19 nt, Artificial Sequence
  Description of Artificial Sequence: Synthetic oligonucleotide
uacagccaaguagagaaga

SEQ ID NO: 2652719 - RNA, 19 nt, Artificial Sequence
  Description of Artificial Sequence: Synthetic oligonucleotide
uauguuggcuugugugaag

SEQ ID NO: 2652720 - RNA, 19 nt, Artificial Sequence
  Description of Artificial Sequence: Synthetic oligonucleotide
uucagaguguauacacggu

SEQ ID NO: 2652721 - RNA, 19 nt, Artificial Sequence
  Description of Artificial Sequence: Synthetic oligonucleotide
uucaaugaucacagacaca

SEQ ID NO: 2652722 - RNA, 19 nt, Artificial Sequence
  Description of Artificial Sequence: Synthetic oligonucleotide
aagauccccuuucacguau

SEQ ID NO: 2652723 - RNA, 19 nt, Artificial Sequence
  Description of Artificial Sequence: Synthetic oligonucleotide
uaacaguuccugcaccccu

SEQ ID NO: 2652724 - RNA, 19 nt, Artificial Sequence
  Description of Artificial Sequence: Synthetic oligonucleotide
agguccuacaguugcuuag

SEQ ID NO: 2652725 - RNA, 19 nt, Artificial Sequence
  Description of Artificial Sequence: Synthetic oligonucleotide
uccagaccacauccaaucc

SEQ ID NO: 2652726 - RNA, 19 nt, Artificial Sequence
  Description of Artificial Sequence: Synthetic oligonucleotide
uuaagguccuacaguugcu

SEQ ID NO: 2652727 - RNA, 19 nt, Artificial Sequence
  Description of Artificial Sequence: Synthetic oligonucleotide
augguauugagucgcuacu

SEQ ID NO: 2652728 - RNA, 19 nt, Artificial Sequence
  Description of Artificial Sequence: Synthetic oligonucleotide
ucuguucagaguguauaca

SEQ ID NO: 2652729 - RNA, 19 nt, Artificial Sequence
  Description of Artificial Sequence: Synthetic oligonucleotide
agacgauccagaccacauc

SEQ ID NO: 2652730 - RNA, 19 nt, Artificial Sequence
  Description of Artificial Sequence: Synthetic oligonucleotide
gaacaugcgaaaagauccc

SEQ ID NO: 2652731 - RNA, 19 nt, Artificial Sequence
  Description of Artificial Sequence: Synthetic oligonucleotide
agucgcuacuuccagaauu

SEQ ID NO: 2652732 - RNA, 19 nt, Artificial Sequence
  Description of Artificial Sequence: Synthetic oligonucleotide
uaucguccaucucucuuca

SEQ ID NO: 2652733 - RNA, 19 nt, Artificial Sequence
  Description of Artificial Sequence: Synthetic oligonucleotide
gugacuccauucuucaaac

SEQ ID NO: 2652734 - RNA, 19 nt, Artificial Sequence
  Description of Artificial Sequence: Synthetic oligonucleotide
cuccagacuucuuuuguug

SEQ ID NO: 2652735 - RNA, 19 nt, Artificial Sequence
  Description of Artificial Sequence: Synthetic oligonucleotide
uuaacaguuccugcacccc

SEQ ID NO: 2652736 - RNA, 19 nt, Artificial Sequence
  Description of Artificial Sequence: Synthetic oligonucleotide
ugccucaaacaccucuuca

SEQ ID NO: 2652737 - RNA, 19 nt, Artificial Sequence
  Description of Artificial Sequence: Synthetic oligonucleotide
guauacacgguaauuuuga

SEQ ID NO: 2652738 - RNA, 19 nt, Artificial Sequence
  Description of Artificial Sequence: Synthetic oligonucleotide
cacgggcucauccaaauuc

SEQ ID NO: 2652739 - RNA, 19 nt, Artificial Sequence
  Description of Artificial Sequence: Synthetic oligonucleotide
cuugugugaagcccguuuc

SEQ ID NO: 2652740 - RNA, 19 nt, Artificial Sequence
  Description of Artificial Sequence: Synthetic oligonucleotide
uggaauacagaagccuaca

SEQ ID NO: 2652741 - RNA, 19 nt, Artificial Sequence
  Description of Artificial Sequence: Synthetic oligonucleotide
cuguuuuggaacaugcgaa

SEQ ID NO: 2652742 - RNA, 19 nt, Artificial Sequence
  Description of Artificial Sequence: Synthetic oligonucleotide
uuucacguaugugauucga

SEQ ID NO: 2652743 - RNA, 19 nt, Artificial Sequence
  Description of Artificial Sequence: Synthetic oligonucleotide
agaagccuacaacuggccu

SEQ ID NO: 2652744 - RNA, 19 nt, Artificial Sequence
  Description of Artificial Sequence: Synthetic oligonucleotide
cuuucacguaugugauucg

SEQ ID NO: 2652745 - RNA, 19 nt, Artificial Sequence
  Description of Artificial Sequence: Synthetic oligonucleotide
uuguccucugcccauuuua

SEQ ID NO: 2652746 - RNA, 19 nt, Artificial Sequence
  Description of Artificial Sequence: Synthetic oligonucleotide
uugugugaagcccguuucu

SEQ ID NO: 2652747 - RNA, 19 nt, Artificial Sequence
  Description of Artificial Sequence: Synthetic oligonucleotide
gucgcaaugcccuccaguc

SEQ ID NO: 2652748 - RNA, 19 nt, Artificial Sequence
  Description of Artificial Sequence: Synthetic oligonucleotide
uggccaugguauugagucg

SEQ ID NO: 2652749 - RNA, 19 nt, Artificial Sequence
  Description of Artificial Sequence: Synthetic oligonucleotide
aucuucauuuaggaggcug

SEQ ID NO: 2652750 - RNA, 19 nt, Artificial Sequence
  Description of Artificial Sequence: Synthetic oligonucleotide
uauacacgguaauuuugau

SEQ ID NO: 2652751 - RNA, 19 nt, Artificial Sequence
  Description of Artificial Sequence: Synthetic oligonucleotide
uucgacaguccucacugau

SEQ ID NO: 2652752 - RNA, 19 nt, Artificial Sequence
  Description of Artificial Sequence: Synthetic oligonucleotide
ucaaacaaugggacuucau

SEQ ID NO: 2652753 - RNA, 19 nt, Artificial Sequence
  Description of Artificial Sequence: Synthetic oligonucleotide
cauccaaauucuucaucug

SEQ ID NO: 2652754 - RNA, 19 nt, Artificial Sequence
  Description of Artificial Sequence: Synthetic oligonucleotide
guuggcuugugugaagccc

SEQ ID NO: 2652755 - RNA, 19 nt, Artificial Sequence
  Description of Artificial Sequence: Synthetic oligonucleotide
gaacagcgaucccagcacc

SEQ ID NO: 2652756 - RNA, 19 nt, Artificial Sequence
  Description of Artificial Sequence: Synthetic oligonucleotide
acagacacauucucccacu

SEQ ID NO: 2652757 - RNA, 19 nt, Artificial Sequence
  Description of Artificial Sequence: Synthetic oligonucleotide
auacagaagccuacaacug

SEQ ID NO: 2652758 - RNA, 19 nt, Artificial Sequence
  Description of Artificial Sequence: Synthetic oligonucleotide
cauccaauccugggcaugg

SEQ ID NO: 2652759 - RNA, 19 nt, Artificial Sequence
  Description of Artificial Sequence: Synthetic oligonucleotide
uguccucugcccauuuuaa

SEQ ID NO: 2652760 - RNA, 19 nt, Artificial Sequence
  Description of Artificial Sequence: Synthetic oligonucleotide
agcccguuucuuuguaauc

SEQ ID NO: 2652761 - RNA, 19 nt, Artificial Sequence
  Description of Artificial Sequence: Synthetic oligonucleotide
ccuacagccaaguagagaa

SEQ ID NO: 2652762 - RNA, 19 nt, Artificial Sequence
  Description of Artificial Sequence: Synthetic oligonucleotide
uugcuuaguccuacagcca

SEQ ID NO: 2652763 - RNA, 19 nt, Artificial Sequence
  Description of Artificial Sequence: Synthetic oligonucleotide
aauccugggcauggagagg

SEQ ID NO: 2652764 - RNA, 19 nt, Artificial Sequence
  Description of Artificial Sequence: Synthetic oligonucleotide
acagccaaguagagaagac

SEQ ID NO: 2652765 - RNA, 19 nt, Artificial Sequence
  Description of Artificial Sequence: Synthetic oligonucleotide
uguuggcuugugugaagcc

SEQ ID NO: 2652766 - RNA, 19 nt, Artificial Sequence
  Description of Artificial Sequence: Synthetic oligonucleotide
gucuguuuuggaacaugcg

SEQ ID NO: 2652767 - RNA, 19 nt, Artificial Sequence
  Description of Artificial Sequence: Synthetic oligonucleotide
accccuccaaauuucuucu

SEQ ID NO: 2652768 - RNA, 19 nt, Artificial Sequence
  Description of Artificial Sequence: Synthetic oligonucleotide
uacaacuggccugcgacac

SEQ ID NO: 2652769 - RNA, 19 nt, Artificial Sequence
  Description of Artificial Sequence: Synthetic oligonucleotide
uuccagaauuaagaguuuc

SEQ ID NO: 2652770 - RNA, 19 nt, Artificial Sequence
  Description of Artificial Sequence: Synthetic oligonucleotide
aaagauccccuuucacgua

SEQ ID NO: 2652771 - RNA, 19 nt, Artificial Sequence
  Description of Artificial Sequence: Synthetic oligonucleotide
cuucuccagacuucuuuug

SEQ ID NO: 2652772 - RNA, 19 nt, Artificial Sequence
  Description of Artificial Sequence: Synthetic oligonucleotide
cucauccaaauucuucauc

SEQ ID NO: 2652773 - RNA, 19 nt, Artificial Sequence
  Description of Artificial Sequence: Synthetic oligonucleotide
ccauuuuaagguccuacag

SEQ ID NO: 2652774 - RNA, 19 nt, Artificial Sequence
  Description of Artificial Sequence: Synthetic oligonucleotide
auucucccacugcagacga

SEQ ID NO: 2652775 - RNA, 19 nt, Artificial Sequence
  Description of Artificial Sequence: Synthetic oligonucleotide
caccccuccaaauuucuuc

SEQ ID NO: 2652776 - RNA, 19 nt, Artificial Sequence
  Description of Artificial Sequence: Synthetic oligonucleotide
ucacugauacaaugggcua

SEQ ID NO: 2652777 - RNA, 19 nt, Artificial Sequence
  Description of Artificial Sequence: Synthetic oligonucleotide
uacaguugcuuaguccuac

SEQ ID NO: 2652778 - RNA, 19 nt, Artificial Sequence
  Description of Artificial Sequence: Synthetic oligonucleotide
ucucauauguuggcuugug

SEQ ID NO: 2652779 - RNA, 19 nt, Artificial Sequence
  Description of Artificial Sequence: Synthetic oligonucleotide
cagaagccuacaacuggcc

SEQ ID NO: 2652780 - RNA, 19 nt, Artificial Sequence
  Description of Artificial Sequence: Synthetic oligonucleotide
cuucauuuaggaggcuggc

SEQ ID NO: 2652781 - RNA, 19 nt, Artificial Sequence
  Description of Artificial Sequence: Synthetic oligonucleotide
cauuuuaagguccuacagu

SEQ ID NO: 2652782 - RNA, 19 nt, Artificial Sequence
  Description of Artificial Sequence: Synthetic oligonucleotide
uugagucgcuacuuccaga

SEQ ID NO: 2652783 - RNA, 19 nt, Artificial Sequence
  Description of Artificial Sequence: Synthetic oligonucleotide
caguugcuuaguccuacag

SEQ ID NO: 2652784 - RNA, 19 nt, Artificial Sequence
  Description of Artificial Sequence: Synthetic oligonucleotide
ucaucuguucagaguguau

SEQ ID NO: 2652785 - RNA, 19 nt, Artificial Sequence
  Description of Artificial Sequence: Synthetic oligonucleotide
uucaaacaaugggacuuca

SEQ ID NO: 2652786 - RNA, 19 nt, Artificial Sequence
  Description of Artificial Sequence: Synthetic oligonucleotide
aagguccuacaguugcuua

SEQ ID NO: 2652787 - RNA, 19 nt, Artificial Sequence
  Description of Artificial Sequence: Synthetic oligonucleotide
gcuagagagucuguuuugg

SEQ ID NO: 2652788 - RNA, 19 nt, Artificial Sequence
  Description of Artificial Sequence: Synthetic oligonucleotide
cuacagccaaguagagaag

SEQ ID NO: 2652789 - RNA, 19 nt, Artificial Sequence
  Description of Artificial Sequence: Synthetic oligonucleotide
ugcaccccuccaaauuucu

SEQ ID NO: 2652790 - RNA, 19 nt, Artificial Sequence
  Description of Artificial Sequence: Synthetic oligonucleotide
uuccgaagguucucauaug

SEQ ID NO: 2652791 - RNA, 19 nt, Artificial Sequence
  Description of Artificial Sequence: Synthetic oligonucleotide
gucuguugccucaaacacc

SEQ ID NO: 2652792 - RNA, 19 nt, Artificial Sequence
  Description of Artificial Sequence: Synthetic oligonucleotide
acgguaauuuugaugucug

SEQ ID NO: 2652793 - RNA, 19 nt, Artificial Sequence
  Description of Artificial Sequence: Synthetic oligonucleotide
auauaucguccaucucucu

SEQ ID NO: 2652794 - RNA, 19 nt, Artificial Sequence
  Description of Artificial Sequence: Synthetic oligonucleotide
uccucacacauuguccucu

SEQ ID NO: 2652795 - RNA, 19 nt, Artificial Sequence
  Description of Artificial Sequence: Synthetic oligonucleotide
ccuacaacuggccugcgac

SEQ ID NO: 2652796 - RNA, 19 nt, Artificial Sequence
  Description of Artificial Sequence: Synthetic oligonucleotide
auauguuggcuugugugaa

SEQ ID NO: 2652797 - RNA, 19 nt, Artificial Sequence
  Description of Artificial Sequence: Synthetic oligonucleotide
agccucuaagcucuuccga

SEQ ID NO: 2652798 - RNA, 19 nt, Artificial Sequence
  Description of Artificial Sequence: Synthetic oligonucleotide
cagaguguauacacgguaa

SEQ ID NO: 2652799 - RNA, 19 nt, Artificial Sequence
  Description of Artificial Sequence: Synthetic oligonucleotide
acaccucuucaaugaucac

SEQ ID NO: 2652800 - RNA, 19 nt, Artificial Sequence
  Description of Artificial Sequence: Synthetic oligonucleotide
gagucuguuuuggaacaug

SEQ ID NO: 2652801 - RNA, 19 nt, Artificial Sequence
  Description of Artificial Sequence: Synthetic oligonucleotide
ucucccacugcagacgauc

SEQ ID NO: 2652802 - RNA, 19 nt, Artificial Sequence
  Description of Artificial Sequence: Synthetic oligonucleotide
uccuacagccaaguagaga

SEQ ID NO: 2652803 - RNA, 19 nt, Artificial Sequence
  Description of Artificial Sequence: Synthetic oligonucleotide
ucuuccgaagguucucaua

SEQ ID NO: 2652804 - RNA, 19 nt, Artificial Sequence
  Description of Artificial Sequence: Synthetic oligonucleotide
cacugcagacgauccagac

SEQ ID NO: 2652805 - RNA, 19 nt, Artificial Sequence
  Description of Artificial Sequence: Synthetic oligonucleotide
uuaguccuacagccaagua

SEQ ID NO: 2652806 - RNA, 19 nt, Artificial Sequence
  Description of Artificial Sequence: Synthetic oligonucleotide
ucgcaaugcccuccagucu

SEQ ID NO: 2652807 - RNA, 19 nt, Artificial Sequence
  Description of Artificial Sequence: Synthetic oligonucleotide
guccucugcccauuuuaag

SEQ ID NO: 2652808 - RNA, 19 nt, Artificial Sequence
  Description of Artificial Sequence: Synthetic oligonucleotide
acuggccugcgacacagau

SEQ ID NO: 2652809 - RNA, 19 nt, Artificial Sequence
  Description of Artificial Sequence: Synthetic oligonucleotide
ccuuucacguaugugauuc

SEQ ID NO: 2652810 - RNA, 19 nt, Artificial Sequence
  Description of Artificial Sequence: Synthetic oligonucleotide
uccugcaccccuccaaauu

SEQ ID NO: 2652811 - RNA, 19 nt, Artificial Sequence
  Description of Artificial Sequence: Synthetic oligonucleotide
cuuggucgcaaugcccucc

SEQ ID NO: 2652812 - RNA, 19 nt, Artificial Sequence
  Description of Artificial Sequence: Synthetic oligonucleotide
cuuccgaagguucucauau

SEQ ID NO: 2652813 - RNA, 19 nt, Artificial Sequence
  Description of Artificial Sequence: Synthetic oligonucleotide
aucccagcacccauucgac

SEQ ID NO: 2652814 - RNA, 19 nt, Artificial Sequence
  Description of Artificial Sequence: Synthetic oligonucleotide
cuagagagucuguuuugga

SEQ ID NO: 2652815 - RNA, 19 nt, Artificial Sequence
  Description of Artificial Sequence: Synthetic oligonucleotide
uucucauauguuggcuugu

SEQ ID NO: 2652816 - RNA, 19 nt, Artificial Sequence
  Description of Artificial Sequence: Synthetic oligonucleotide
ggacuucauagccucuaag

SEQ ID NO: 2652817 - RNA, 19 nt, Artificial Sequence
  Description of Artificial Sequence: Synthetic oligonucleotide
ugaagcccguuucuuugua

SEQ ID NO: 2652818 - RNA, 19 nt, Artificial Sequence
  Description of Artificial Sequence: Synthetic oligonucleotide
acaguugcuuaguccuaca

SEQ ID NO: 2652819 - RNA, 19 nt, Artificial Sequence
  Description of Artificial Sequence: Synthetic oligonucleotide
aaaagaccacgggcucauc

SEQ ID NO: 2652820 - RNA, 19 nt, Artificial Sequence
  Description of Artificial Sequence: Synthetic oligonucleotide
cacauucucccacugcaga

SEQ ID NO: 2652821 - RNA, 19 nt, Artificial Sequence
  Description of Artificial Sequence: Synthetic oligonucleotide
auuuaggaggcuggccaug

SEQ ID NO: 2652822 - RNA, 19 nt, Artificial Sequence
  Description of Artificial Sequence: Synthetic oligonucleotide
cccagcacccauucgacag

SEQ ID NO: 2652823 - RNA, 19 nt, Artificial Sequence
  Description of Artificial Sequence: Synthetic oligonucleotide
ccucacugauacaaugggc

SEQ ID NO: 2652824 - RNA, 19 nt, Artificial Sequence
  Description of Artificial Sequence: Synthetic oligonucleotide
ugugugaagcccguuucuu

SEQ ID NO: 2652825 - RNA, 19 nt, Artificial Sequence
  Description of Artificial Sequence: Synthetic oligonucleotide
acaugcgaaaagauccccu

SEQ ID NO: 2652826 - RNA, 19 nt, Artificial Sequence
  Description of Artificial Sequence: Synthetic oligonucleotide
caccucuucaaugaucaca

SEQ ID NO: 2652827 - RNA, 19 nt, Artificial Sequence
  Description of Artificial Sequence: Synthetic oligonucleotide
auacaaugggcuagagagu

SEQ ID NO: 2652828 - RNA, 19 nt, Artificial Sequence
  Description of Artificial Sequence: Synthetic oligonucleotide
ugguauugagucgcuacuu

SEQ ID NO: 2652829 - RNA, 19 nt, Artificial Sequence
  Description of Artificial Sequence: Synthetic oligonucleotide
uaagguccuacaguugcuu

SEQ ID NO: 2652830 - RNA, 19 nt, Artificial Sequence
  Description of Artificial Sequence: Synthetic oligonucleotide
cuuuguaaucaaguaauau

SEQ ID NO: 2652831 - RNA, 19 nt, Artificial Sequence
  Description of Artificial Sequence: Synthetic oligonucleotide
agcucuuccgaagguucuc

SEQ ID NO: 2652832 - RNA, 19 nt, Artificial Sequence
  Description of Artificial Sequence: Synthetic oligonucleotide
ggagaggucagugacucca

SEQ ID NO: 2652833 - RNA, 19 nt, Artificial Sequence
  Description of Artificial Sequence: Synthetic oligonucleotide
cagacacauucucccacug

SEQ ID NO: 2652834 - RNA, 19 nt, Artificial Sequence
  Description of Artificial Sequence: Synthetic oligonucleotide
guccaucucucuucagaac

SEQ ID NO: 2652835 - RNA, 19 nt, Artificial Sequence
  Description of Artificial Sequence: Synthetic oligonucleotide
auucgacaguccucacuga

SEQ ID NO: 2652836 - RNA, 19 nt, Artificial Sequence
  Description of Artificial Sequence: Synthetic oligonucleotide
augcgaaaagauccccuuu

SEQ ID NO: 2652837 - RNA, 19 nt, Artificial Sequence
  Description of Artificial Sequence: Synthetic oligonucleotide
agaccacauccaauccugg

SEQ ID NO: 2652838 - RNA, 19 nt, Artificial Sequence
  Description of Artificial Sequence: Synthetic oligonucleotide
accacgggcucauccaaau

SEQ ID NO: 2652839 - RNA, 19 nt, Artificial Sequence
  Description of Artificial Sequence: Synthetic oligonucleotide
cucacacauuguccucugc

SEQ ID NO: 2652840 - RNA, 19 nt, Artificial Sequence
  Description of Artificial Sequence: Synthetic oligonucleotide
ggcuagagagucuguuuug

SEQ ID NO: 2652841 - RNA, 19 nt, Artificial Sequence
  Description of Artificial Sequence: Synthetic oligonucleotide
ggccaugguauugagucgc

SEQ ID NO: 2652842 - RNA, 19 nt, Artificial Sequence
  Description of Artificial Sequence: Synthetic oligonucleotide
uuccucacacauuguccuc

SEQ ID NO: 2652843 - RNA, 19 nt, Artificial Sequence
  Description of Artificial Sequence: Synthetic oligonucleotide
gaagcccguuucuuuguaa

SEQ ID NO: 2652844 - RNA, 19 nt, Artificial Sequence
  Description of Artificial Sequence: Synthetic oligonucleotide
caucuguucagaguguaua

SEQ ID NO: 2652845 - RNA, 19 nt, Artificial Sequence
  Description of Artificial Sequence: Synthetic oligonucleotide
uggagaggucagugacucc

SEQ ID NO: 2652846 - RNA, 19 nt, Artificial Sequence
  Description of Artificial Sequence: Synthetic oligonucleotide
gacuucuuuuguugauuua

SEQ ID NO: 2652847 - RNA, 19 nt, Artificial Sequence
  Description of Artificial Sequence: Synthetic oligonucleotide
cacccauucgacaguccuc

SEQ ID NO: 2652848 - RNA, 19 nt, Artificial Sequence
  Description of Artificial Sequence: Synthetic oligonucleotide
cuacaacuggccugcgaca

SEQ ID NO: 2652849 - RNA, 19 nt, Artificial Sequence
  Description of Artificial Sequence: Synthetic oligonucleotide
auucgacuucuuucuggau

SEQ ID NO: 2652850 - RNA, 19 nt, Artificial Sequence
  Description of Artificial Sequence: Synthetic oligonucleotide
acaacuggccugcgacaca

SEQ ID NO: 2652851 - RNA, 19 nt, Artificial Sequence
  Description of Artificial Sequence: Synthetic oligonucleotide
ccucuaagcucuuccgaag

SEQ ID NO: 2652852 - RNA, 19 nt, Artificial Sequence
  Description of Artificial Sequence: Synthetic oligonucleotide
ugggacuucauagccucua

SEQ ID NO: 2652853 - RNA, 19 nt, Artificial Sequence
  Description of Artificial Sequence: Synthetic oligonucleotide
acgggcucauccaaauucu

SEQ ID NO: 2652854 - RNA, 19 nt, Artificial Sequence
  Description of Artificial Sequence: Synthetic oligonucleotide
agaccacgggcucauccaa

SEQ ID NO: 2652855 - RNA, 19 nt, Artificial Sequence
  Description of Artificial Sequence: Synthetic oligonucleotide
acagauuuccucacacauu

SEQ ID NO: 2652856 - RNA, 19 nt, Artificial Sequence
  Description of Artificial Sequence: Synthetic oligonucleotide
guguauacacgguaauuuu

SEQ ID NO: 2652857 - RNA, 19 nt, Artificial Sequence
  Description of Artificial Sequence: Synthetic oligonucleotide
ccaaguagagaagacaaaa

SEQ ID NO: 2652858 - RNA, 19 nt, Artificial Sequence
  Description of Artificial Sequence: Synthetic oligonucleotide
guuccugcaccccuccaaa

SEQ ID NO: 2652859 - RNA, 19 nt, Artificial Sequence
  Description of Artificial Sequence: Synthetic oligonucleotide
cugcaccccuccaaauuuc

SEQ ID NO: 2652860 - RNA, 19 nt, Artificial Sequence
  Description of Artificial Sequence: Synthetic oligonucleotide
cagccaaguagagaagaca

SEQ ID NO: 2652861 - RNA, 19 nt, Artificial Sequence
  Description of Artificial Sequence: Synthetic oligonucleotide
agcacccauucgacagucc

SEQ ID NO: 2652862 - RNA, 19 nt, Artificial Sequence
  Description of Artificial Sequence: Synthetic oligonucleotide
cugauacaaugggcuagag

SEQ ID NO: 2652863 - RNA, 19 nt, Artificial Sequence
  Description of Artificial Sequence: Synthetic oligonucleotide
aucguccaucucucuucag

SEQ ID NO: 2652864 - RNA, 19 nt, Artificial Sequence
  Description of Artificial Sequence: Synthetic oligonucleotide
acagcgaucccagcaccca

SEQ ID NO: 2652865 - RNA, 19 nt, Artificial Sequence
  Description of Artificial Sequence: Synthetic oligonucleotide
gccugcgacacagauuucc

SEQ ID NO: 2652866 - RNA, 19 nt, Artificial Sequence
  Description of Artificial Sequence: Synthetic oligonucleotide
gucgcuacuuccagaauua

SEQ ID NO: 2652867 - RNA, 19 nt, Artificial Sequence
  Description of Artificial Sequence: Synthetic oligonucleotide
cccauuuuaagguccuaca

SEQ ID NO: 2652868 - RNA, 19 nt, Artificial Sequence
  Description of Artificial Sequence: Synthetic oligonucleotide
ugcagacgauccagaccac

SEQ ID NO: 2652869 - RNA, 19 nt, Artificial Sequence
  Description of Artificial Sequence: Synthetic oligonucleotide
gcgaaaagauccccuuuca

SEQ ID NO: 2652870 - RNA, 19 nt, Artificial Sequence
  Description of Artificial Sequence: Synthetic oligonucleotide
uggucgcaaugcccuccag

SEQ ID NO: 2652871 - RNA, 19 nt, Artificial Sequence
  Description of Artificial Sequence: Synthetic oligonucleotide
uuccugcaccccuccaaau

SEQ ID NO: 2652872 - RNA, 19 nt, Artificial Sequence
  Description of Artificial Sequence: Synthetic oligonucleotide
gcccguuucuuuguaauca

SEQ ID NO: 2652873 - RNA, 19 nt, Artificial Sequence
  Description of Artificial Sequence: Synthetic oligonucleotide
gguaauuuugaugucuguu

SEQ ID NO: 2652874 - RNA, 19 nt, Artificial Sequence
  Description of Artificial Sequence: Synthetic oligonucleotide
augggcuagagagucuguu

SEQ ID NO: 2652875 - RNA, 19 nt, Artificial Sequence
  Description of Artificial Sequence: Synthetic oligonucleotide
agagucuguuuuggaacau

SEQ ID NO: 2652876 - RNA, 19 nt, Artificial Sequence
  Description of Artificial Sequence: Synthetic oligonucleotide
cgaaaagauccccuuucac

SEQ ID NO: 2652877 - RNA, 19 nt, Artificial Sequence
  Description of Artificial Sequence: Synthetic oligonucleotide
ccacauccaauccugggca

SEQ ID NO: 2652878 - RNA, 19 nt, Artificial Sequence
  Description of Artificial Sequence: Synthetic oligonucleotide
cgcuacuuccagaauuaag

SEQ ID NO: 2652879 - RNA, 19 nt, Artificial Sequence
  Description of Artificial Sequence: Synthetic oligonucleotide
gccucuaagcucuuccgaa

SEQ ID NO: 2652880 - RNA, 19 nt, Artificial Sequence
  Description of Artificial Sequence: Synthetic oligonucleotide
cuuaguccuacagccaagu

SEQ ID NO: 2652881 - RNA, 19 nt, Artificial Sequence
  Description of Artificial Sequence: Synthetic oligonucleotide
acaaugggcuagagagucu

SEQ ID NO: 2652882 - RNA, 19 nt, Artificial Sequence
  Description of Artificial Sequence: Synthetic oligonucleotide
caugcgaaaagauccccuu

SEQ ID NO: 2652883 - RNA, 19 nt, Artificial Sequence
  Description of Artificial Sequence: Synthetic oligonucleotide
ucgcuacuuccagaauuaa

SEQ ID NO: 2652884 - RNA, 19 nt, Artificial Sequence
  Description of Artificial Sequence: Synthetic oligonucleotide
cacguaugugauucgacuu

SEQ ID NO: 2652885 - RNA, 19 nt, Artificial Sequence
  Description of Artificial Sequence: Synthetic oligonucleotide
gcgacacagauuuccucac

SEQ ID NO: 2652886 - RNA, 19 nt, Artificial Sequence
  Description of Artificial Sequence: Synthetic oligonucleotide
gcccauuuuaagguccuac

SEQ ID NO: 2652887 - RNA, 19 nt, Artificial Sequence
  Description of Artificial Sequence: Synthetic oligonucleotide
gauccccuuucacguaugu

SEQ ID NO: 2652888 - RNA, 19 nt, Artificial Sequence
  Description of Artificial Sequence: Synthetic oligonucleotide
gaguguauacacgguaauu

SEQ ID NO: 2652889 - RNA, 19 nt, Artificial Sequence
  Description of Artificial Sequence: Synthetic oligonucleotide
acgauccagaccacaucca

SEQ ID NO: 2652890 - RNA, 19 nt, Artificial Sequence
  Description of Artificial Sequence: Synthetic oligonucleotide
aggcuggccaugguauuga

SEQ ID NO: 2652891 - RNA, 19 nt, Artificial Sequence
  Description of Artificial Sequence: Synthetic oligonucleotide
cauagccucuaagcucuuc

SEQ ID NO: 2652892 - RNA, 19 nt, Artificial Sequence
  Description of Artificial Sequence: Synthetic oligonucleotide
cuacaguugcuuaguccua

SEQ ID NO: 2652893 - RNA, 19 nt, Artificial Sequence
  Description of Artificial Sequence: Synthetic oligonucleotide
cucauauguuggcuugugu

SEQ ID NO: 2652894 - RNA, 19 nt, Artificial Sequence
  Description of Artificial Sequence: Synthetic oligonucleotide
gcuuaguccuacagccaag

SEQ ID NO: 2652895 - RNA, 19 nt, Artificial Sequence
  Description of Artificial Sequence: Synthetic oligonucleotide
gauccagaccacauccaau

SEQ ID NO: 2652896 - RNA, 19 nt, Artificial Sequence
  Description of Artificial Sequence: Synthetic oligonucleotide
cagacgauccagaccacau

SEQ ID NO: 2652897 - RNA, 19 nt, Artificial Sequence
  Description of Artificial Sequence: Synthetic oligonucleotide
cagcacccauucgacaguc

SEQ ID NO: 2652898 - RNA, 19 nt, Artificial Sequence
  Description of Artificial Sequence: Synthetic oligonucleotide
gugaagcccguuucuuugu

SEQ ID NO: 2652899 - RNA, 19 nt, Artificial Sequence
  Description of Artificial Sequence: Synthetic oligonucleotide
cauuuaggaggcuggccau

SEQ ID NO: 2652900 - RNA, 19 nt, Artificial Sequence
  Description of Artificial Sequence: Synthetic oligonucleotide
uccugggcauggagagguc

SEQ ID NO: 2652901 - RNA, 19 nt, Artificial Sequence
  Description of Artificial Sequence: Synthetic oligonucleotide
gcacccauucgacaguccu

SEQ ID NO: 2652902 - RNA, 19 nt, Artificial Sequence
  Description of Artificial Sequence: Synthetic oligonucleotide
ccucacacauuguccucug

SEQ ID NO: 2652903 - RNA, 19 nt, Artificial Sequence
  Description of Artificial Sequence: Synthetic oligonucleotide
cacauuguccucugcccau

SEQ ID NO: 2652904 - RNA, 19 nt, Artificial Sequence
  Description of Artificial Sequence: Synthetic oligonucleotide
gggacuucauagccucuaa

SEQ ID NO: 2652905 - RNA, 19 nt, Artificial Sequence
  Description of Artificial Sequence: Synthetic oligonucleotide
gggcuagagagucuguuuu

SEQ ID NO: 2652906 - RNA, 19 nt, Artificial Sequence
  Description of Artificial Sequence: Synthetic oligonucleotide
auccaauccugggcaugga

SEQ ID NO: 2652907 - RNA, 19 nt, Artificial Sequence
  Description of Artificial Sequence: Synthetic oligonucleotide
cagugacuccauucuucaa

SEQ ID NO: 2652908 - RNA, 19 nt, Artificial Sequence
  Description of Artificial Sequence: Synthetic oligonucleotide
augggacuucauagccucu

SEQ ID NO: 2652909 - RNA, 19 nt, Artificial Sequence
  Description of Artificial Sequence: Synthetic oligonucleotide
ggucgcaaugcccuccagu

SEQ ID NO: 2652910 - RNA, 19 nt, Artificial Sequence
  Description of Artificial Sequence: Synthetic oligonucleotide
ccucugcccauuuuaaggu

SEQ ID NO: 2652911 - RNA, 19 nt, Artificial Sequence
  Description of Artificial Sequence: Synthetic oligonucleotide
cuuccagaauuaagaguuu

SEQ ID NO: 2652912 - RNA, 19 nt, Artificial Sequence
  Description of Artificial Sequence: Synthetic oligonucleotide
cugcccauuuuaagguccu

SEQ ID NO: 2652913 - RNA, 19 nt, Artificial Sequence
  Description of Artificial Sequence: Synthetic oligonucleotide
cuaagcucuuccgaagguu

SEQ ID NO: 2652914 - RNA, 19 nt, Artificial Sequence
  Description of Artificial Sequence: Synthetic oligonucleotide
aacuggccugcgacacaga

SEQ ID NO: 2652915 - RNA, 19 nt, Artificial Sequence
  Description of Artificial Sequence: Synthetic oligonucleotide
gaccacgggcucauccaaa

SEQ ID NO: 2652916 - RNA, 19 nt, Artificial Sequence
  Description of Artificial Sequence: Synthetic oligonucleotide
cuguugccucaaacaccuc

SEQ ID NO: 2652917 - RNA, 19 nt, Artificial Sequence
  Description of Artificial Sequence: Synthetic oligonucleotide
agcgaucccagcacccauu

SEQ ID NO: 2652918 - RNA, 19 nt, Artificial Sequence
  Description of Artificial Sequence: Synthetic oligonucleotide
agccuacaacuggccugcg

SEQ ID NO: 2652919 - RNA, 19 nt, Artificial Sequence
  Description of Artificial Sequence: Synthetic oligonucleotide
cguccaucucucuucagaa

SEQ ID NO: 2652920 - RNA, 19 nt, Artificial Sequence
  Description of Artificial Sequence: Synthetic oligonucleotide
gcagacgauccagaccaca

SEQ ID NO: 2652921 - RNA, 19 nt, Artificial Sequence
  Description of Artificial Sequence: Synthetic oligonucleotide
gcuugugugaagcccguuu

SEQ ID NO: 2652922 - RNA, 19 nt, Artificial Sequence
  Description of Artificial Sequence: Synthetic oligonucleotide
gcucuuccgaagguucuca

SEQ ID NO: 2652923 - RNA, 19 nt, Artificial Sequence
  Description of Artificial Sequence: Synthetic oligonucleotide
gguccuacaguugcuuagu

SEQ ID NO: 2652924 - RNA, 19 nt, Artificial Sequence
  Description of Artificial Sequence: Synthetic oligonucleotide
gagucgcuacuuccagaau

SEQ ID NO: 2652925 - RNA, 19 nt, Artificial Sequence
  Description of Artificial Sequence: Synthetic oligonucleotide
gcuuggucgcaaugcccuc

SEQ ID NO: 2652926 - RNA, 19 nt, Artificial Sequence
  Description of Artificial Sequence: Synthetic oligonucleotide
cagccacuucuccagacuu

SEQ ID NO: 2652927 - RNA, 19 nt, Artificial Sequence
  Description of Artificial Sequence: Synthetic oligonucleotide
gccuacaacuggccugcga

SEQ ID NO: 2652928 - RNA, 19 nt, Artificial Sequence
  Description of Artificial Sequence: Synthetic oligonucleotide
cacauccaauccugggcau

SEQ ID NO: 2652929 - RNA, 19 nt, Artificial Sequence
  Description of Artificial Sequence: Synthetic oligonucleotide
caguccucacugauacaau

SEQ ID NO: 2652930 - RNA, 19 nt, Artificial Sequence
  Description of Artificial Sequence: Synthetic oligonucleotide
ccagaauuaagaguuucuu

SEQ ID NO: 2652931 - RNA, 19 nt, Artificial Sequence
  Description of Artificial Sequence: Synthetic oligonucleotide
cgauccagaccacauccaa

SEQ ID NO: 2652932 - RNA, 19 nt, Artificial Sequence
  Description of Artificial Sequence: Synthetic oligonucleotide
ccauucgacaguccucacu

SEQ ID NO: 2652933 - RNA, 19 nt, Artificial Sequence
  Description of Artificial Sequence: Synthetic oligonucleotide
cuggccugcgacacagauu

SEQ ID NO: 2652934 - RNA, 19 nt, Artificial Sequence
  Description of Artificial Sequence: Synthetic oligonucleotide
ccugggcauggagagguca

SEQ ID NO: 2652935 - RNA, 19 nt, Artificial Sequence
  Description of Artificial Sequence: Synthetic oligonucleotide
cccauucgacaguccucac

SEQ ID NO: 2652936 - RNA, 19 nt, Artificial Sequence
  Description of Artificial Sequence: Synthetic oligonucleotide
ccucuucaaugaucacaga

SEQ ID NO: 2652937 - RNA, 19 nt, Artificial Sequence
  Description of Artificial Sequence: Synthetic oligonucleotide
cauuguccucugcccauuu

SEQ ID NO: 2652938 - RNA, 19 nt, Artificial Sequence
  Description of Artificial Sequence: Synthetic oligonucleotide
ccugcaccccuccaaauuu

SEQ ID NO: 2652939 - RNA, 19 nt, Artificial Sequence
  Description of Artificial Sequence: Synthetic oligonucleotide
ccccuuucacguaugugau

SEQ ID NO: 2652940 - RNA, 19 nt, Artificial Sequence
  Description of Artificial Sequence: Synthetic oligonucleotide
cguaugugauucgacuucu

SEQ ID NO: 2652941 - RNA, 19 nt, Artificial Sequence
  Description of Artificial Sequence: Synthetic oligonucleotide
ccgaagguucucauauguu

SEQ ID NO: 2652942 - RNA, 19 nt, Artificial Sequence
  Description of Artificial Sequence: Synthetic oligonucleotide
cgcaaugcccuccagucuu

SEQ ID NO: 2652943 - RNA, 19 nt, Artificial Sequence
  Description of Artificial Sequence: Synthetic oligonucleotide
ccagcacccauucgacagu

SEQ ID NO: 2652944 - RNA, 19 nt, Artificial Sequence
  Description of Artificial Sequence: Synthetic oligonucleotide
ccaugguauugagucgcua

SEQ ID NO: 2652945 - RNA, 19 nt, Artificial Sequence
  Description of Artificial Sequence: Synthetic oligonucleotide
gccaugguauugagucgcu

SEQ ID NO: 2652946 - RNA, 19 nt, Artificial Sequence
  Description of Artificial Sequence: Synthetic oligonucleotide
caaugcccuccagucuuuu

SEQ ID NO: 2652947 - RNA, 19 nt, Artificial Sequence
  Description of Artificial Sequence: Synthetic oligonucleotide
ggccugcgacacagauuuc

SEQ ID NO: 2652948 - RNA, 19 nt, Artificial Sequence
  Description of Artificial Sequence: Synthetic oligonucleotide
gcaaugcccuccagucuuu

SEQ ID NO: 2652949 - RNA, 19 nt, Artificial Sequence
  Description of Artificial Sequence: Synthetic oligonucleotide
gcaccccuccaaauuucuu

SEQ ID NO: 2652950 - RNA, 19 nt, Artificial Sequence
  Description of Artificial Sequence: Synthetic oligonucleotide
ggcuugugugaagcccguu

SEQ ID NO: 2652951 - RNA, 19 nt, Artificial Sequence
  Description of Artificial Sequence: Synthetic oligonucleotide
ccacgggcucauccaaauu

SEQ ID NO: 2652952 - RNA, 19 nt, Artificial Sequence
  Description of Artificial Sequence: Synthetic oligonucleotide
cgggcucauccaaauucuu

SEQ ID NO: 2652953 - RNA, 19 nt, Artificial Sequence
  Description of Artificial Sequence: Synthetic oligonucleotide
aaaccaaucaggcagaagc

SEQ ID NO: 2652954 - RNA, 19 nt, Artificial Sequence
  Description of Artificial Sequence: Synthetic oligonucleotide
uuuaaaucaaagaacaggg

SEQ ID NO: 2652955 - RNA, 19 nt, Artificial Sequence
  Description of Artificial Sequence: Synthetic oligonucleotide
aaagaaagaaaacaguuuc

SEQ ID NO: 2652956 - RNA, 19 nt, Artificial Sequence
  Description of Artificial Sequence: Synthetic oligonucleotide
uuuaacaucaccuugauuu

SEQ ID NO: 2652957 - RNA, 19 nt, Artificial Sequence
  Description of Artificial Sequence: Synthetic oligonucleotide
uaaacaaugacccuugugc

SEQ ID NO: 2652958 - RNA, 19 nt, Artificial Sequence
  Description of Artificial Sequence: Synthetic oligonucleotide
ugauuuaaaucaaagaaca

SEQ ID NO: 2652959 - RNA, 19 nt, Artificial Sequence
  Description of Artificial Sequence: Synthetic oligonucleotide
aaugacucgggauacacag

SEQ ID NO: 2652960 - RNA, 19 nt, Artificial Sequence
  Description of Artificial Sequence: Synthetic oligonucleotide
uguaauguacuuuagaaaa

SEQ ID NO: 2652961 - RNA, 19 nt, Artificial Sequence
  Description of Artificial Sequence: Synthetic oligonucleotide
aauucuaaagucgacuugg

SEQ ID NO: 2652962 - RNA, 19 nt, Artificial Sequence
  Description of Artificial Sequence: Synthetic oligonucleotide
guuuacaacacagauaugg

SEQ ID NO: 2652963 - RNA, 19 nt, Artificial Sequence
  Description of Artificial Sequence: Synthetic oligonucleotide
aucaccuugauuuaaauca

SEQ ID NO: 2652964 - RNA, 19 nt, Artificial Sequence
  Description of Artificial Sequence: Synthetic oligonucleotide
auuuaaaucaaagaacagg

SEQ ID NO: 2652965 - RNA, 19 nt, Artificial Sequence
  Description of Artificial Sequence: Synthetic oligonucleotide
auuuuaaugucccugacca

SEQ ID NO: 2652966 - RNA, 19 nt, Artificial Sequence
  Description of Artificial Sequence: Synthetic oligonucleotide
gaggaaaccaaucaggcag

SEQ ID NO: 2652967 - RNA, 19 nt, Artificial Sequence
  Description of Artificial Sequence: Synthetic oligonucleotide
aaagaaaacaguuucuuua

SEQ ID NO: 2652968 - RNA, 19 nt, Artificial Sequence
  Description of Artificial Sequence: Synthetic oligonucleotide
aaguauugaccacaguuuc

SEQ ID NO: 2652969 - RNA, 19 nt, Artificial Sequence
  Description of Artificial Sequence: Synthetic oligonucleotide
uuuguaauguacuuuagaa

SEQ ID NO: 2652970 - RNA, 19 nt, Artificial Sequence
  Description of Artificial Sequence: Synthetic oligonucleotide
aaaaggaggaaaccaauca

SEQ ID NO: 2652971 - RNA, 19 nt, Artificial Sequence
  Description of Artificial Sequence: Synthetic oligonucleotide
uguacuuuagaaaaugaaa

SEQ ID NO: 2652972 - RNA, 19 nt, Artificial Sequence
  Description of Artificial Sequence: Synthetic oligonucleotide
ucuaaagucgacuuggcga

SEQ ID NO: 2652973 - RNA, 19 nt, Artificial Sequence
  Description of Artificial Sequence: Synthetic oligonucleotide
acagcaguucucuaguucc

SEQ ID NO: 2652974 - RNA, 19 nt, Artificial Sequence
  Description of Artificial Sequence: Synthetic oligonucleotide
uacgucagaacccacaccc

SEQ ID NO: 2652975 - RNA, 19 nt, Artificial Sequence
  Description of Artificial Sequence: Synthetic oligonucleotide
uuuaaugucccugaccagg

SEQ ID NO: 2652976 - RNA, 19 nt, Artificial Sequence
  Description of Artificial Sequence: Synthetic oligonucleotide
aaacaguuucuuuaacauc

SEQ ID NO: 2652977 - RNA, 19 nt, Artificial Sequence
  Description of Artificial Sequence: Synthetic oligonucleotide
ucaaguauugaccacaguu

SEQ ID NO: 2652978 - RNA, 19 nt, Artificial Sequence
  Description of Artificial Sequence: Synthetic oligonucleotide
ugauaacugucuaugagca

SEQ ID NO: 2652979 - RNA, 19 nt, Artificial Sequence
  Description of Artificial Sequence: Synthetic oligonucleotide
acagauauggaauuuauuu

SEQ ID NO: 2652980 - RNA, 19 nt, Artificial Sequence
  Description of Artificial Sequence: Synthetic oligonucleotide
uaugagcacauuuuaaugu

SEQ ID NO: 2652981 - RNA, 19 nt, Artificial Sequence
  Description of Artificial Sequence: Synthetic oligonucleotide
acaguuucaaagacgagcc

SEQ ID NO: 2652982 - RNA, 19 nt, Artificial Sequence
  Description of Artificial Sequence: Synthetic oligonucleotide
auugaccacaguuucaaag

SEQ ID NO: 2652983 - RNA, 19 nt, Artificial Sequence
  Description of Artificial Sequence: Synthetic oligonucleotide
uuuagugguuccuuggaag

SEQ ID NO: 2652984 - RNA, 19 nt, Artificial Sequence
  Description of Artificial Sequence: Synthetic oligonucleotide
aacagggcaaacaccaugc

SEQ ID NO: 2652985 - RNA, 19 nt, Artificial Sequence
  Description of Artificial Sequence: Synthetic oligonucleotide
aaugaaauucuaaagucga

SEQ ID NO: 2652986 - RNA, 19 nt, Artificial Sequence
  Description of Artificial Sequence: Synthetic oligonucleotide
cuuccgaaugcccauaugg

SEQ ID NO: 2652987 - RNA, 19 nt, Artificial Sequence
  Description of Artificial Sequence: Synthetic oligonucleotide
uuaaaucaaagaacagggc

SEQ ID NO: 2652988 - RNA, 19 nt, Artificial Sequence
  Description of Artificial Sequence: Synthetic oligonucleotide
aguuccuugauucacacau

SEQ ID NO: 2652989 - RNA, 19 nt, Artificial Sequence
  Description of Artificial Sequence: Synthetic oligonucleotide
cuugcuuuccccuaauggc

SEQ ID NO: 2652990 - RNA, 19 nt, Artificial Sequence
  Description of Artificial Sequence: Synthetic oligonucleotide
cugauaacugucuaugagc

SEQ ID NO: 2652991 - RNA, 19 nt, Artificial Sequence
  Description of Artificial Sequence: Synthetic oligonucleotide
aaauucuaaagucgacuug

SEQ ID NO: 2652992 - RNA, 19 nt, Artificial Sequence
  Description of Artificial Sequence: Synthetic oligonucleotide
ucgggauacacagaaaagg

SEQ ID NO: 2652993 - RNA, 19 nt, Artificial Sequence
  Description of Artificial Sequence: Synthetic oligonucleotide
aaagaacagggcaaacacc

SEQ ID NO: 2652994 - RNA, 19 nt, Artificial Sequence
  Description of Artificial Sequence: Synthetic oligonucleotide
acaccaugcaccuuccagc

SEQ ID NO: 2652995 - RNA, 19 nt, Artificial Sequence
  Description of Artificial Sequence: Synthetic oligonucleotide
agggcaaacaccaugcacc

SEQ ID NO: 2652996 - RNA, 19 nt, Artificial Sequence
  Description of Artificial Sequence: Synthetic oligonucleotide
uucucuaguuccuugauuc

SEQ ID NO: 2652997 - RNA, 19 nt, Artificial Sequence
  Description of Artificial Sequence: Synthetic oligonucleotide
acaguuaguguuuaguggu

SEQ ID NO: 2652998 - RNA, 19 nt, Artificial Sequence
  Description of Artificial Sequence: Synthetic oligonucleotide
aaggaggaaaccaaucagg

SEQ ID NO: 2652999 - RNA, 19 nt, Artificial Sequence
  Description of Artificial Sequence: Synthetic oligonucleotide
aggaacuguaaacaaugac

SEQ ID NO: 2653000 - RNA, 19 nt, Artificial Sequence
  Description of Artificial Sequence: Synthetic oligonucleotide
accagcaggacuaaagugc

SEQ ID NO: 2653001 - RNA, 19 nt, Artificial Sequence
  Description of Artificial Sequence: Synthetic oligonucleotide
uauggcugcagucucauaa

SEQ ID NO: 2653002 - RNA, 19 nt, Artificial Sequence
  Description of Artificial Sequence: Synthetic oligonucleotide
ugauuuguaauguacuuua

SEQ ID NO: 2653003 - RNA, 19 nt, Artificial Sequence
  Description of Artificial Sequence: Synthetic oligonucleotide
uucuaaagucgacuuggcg

SEQ ID NO: 2653004 - RNA, 19 nt, Artificial Sequence
  Description of Artificial Sequence: Synthetic oligonucleotide
uuccuugauucacacaucc

SEQ ID NO: 2653005 - RNA, 19 nt, Artificial Sequence
  Description of Artificial Sequence: Synthetic oligonucleotide
acaaguacuuccgaaugcc

SEQ ID NO: 2653006 - RNA, 19 nt, Artificial Sequence
  Description of Artificial Sequence: Synthetic oligonucleotide
uagugucuacgucagaacc

SEQ ID NO: 2653007 - RNA, 19 nt, Artificial Sequence
  Description of Artificial Sequence: Synthetic oligonucleotide
ucuaugagcacauuuuaau

SEQ ID NO: 2653008 - RNA, 19 nt, Artificial Sequence
  Description of Artificial Sequence: Synthetic oligonucleotide
aagaacagggcaaacacca

SEQ ID NO: 2653009 - RNA, 19 nt, Artificial Sequence
  Description of Artificial Sequence: Synthetic oligonucleotide
cacaguuaguguuuagugg

SEQ ID NO: 2653010 - RNA, 19 nt, Artificial Sequence
  Description of Artificial Sequence: Synthetic oligonucleotide
caaagaacagggcaaacac

SEQ ID NO: 2653011 - RNA, 19 nt, Artificial Sequence
  Description of Artificial Sequence: Synthetic oligonucleotide
ugaaauucuaaagucgacu

SEQ ID NO: 2653012 - RNA, 19 nt, Artificial Sequence
  Description of Artificial Sequence: Synthetic oligonucleotide
ugacaaguacuuccgaaug

SEQ ID NO: 2653013 - RNA, 19 nt, Artificial Sequence
  Description of Artificial Sequence: Synthetic oligonucleotide
uugaccagcaggacuaaag

SEQ ID NO: 2653014 - RNA, 19 nt, Artificial Sequence
  Description of Artificial Sequence: Synthetic oligonucleotide
gacacacacacacacacac

SEQ ID NO: 2653015 - RNA, 19 nt, Artificial Sequence
  Description of Artificial Sequence: Synthetic oligonucleotide
uugauucacacauccacug

SEQ ID NO: 2653016 - RNA, 19 nt, Artificial Sequence
  Description of Artificial Sequence: Synthetic oligonucleotide
agaacccacaccccagucc

SEQ ID NO: 2653017 - RNA, 19 nt, Artificial Sequence
  Description of Artificial Sequence: Synthetic oligonucleotide
ggaacuguaaacaaugacc

SEQ ID NO: 2653018 - RNA, 19 nt, Artificial Sequence
  Description of Artificial Sequence: Synthetic oligonucleotide
uucacacauccacugacag

SEQ ID NO: 2653019 - RNA, 19 nt, Artificial Sequence
  Description of Artificial Sequence: Synthetic oligonucleotide
uuagugguuccuuggaagc

SEQ ID NO: 2653020 - RNA, 19 nt, Artificial Sequence
  Description of Artificial Sequence: Synthetic oligonucleotide
cuaaagucgacuuggcgac

SEQ ID NO: 2653021 - RNA, 19 nt, Artificial Sequence
  Description of Artificial Sequence: Synthetic oligonucleotide
auuuguaauguacuuuaga

SEQ ID NO: 2653022 - RNA, 19 nt, Artificial Sequence
  Description of Artificial Sequence: Synthetic oligonucleotide
cuuggcgacacacacacac

SEQ ID NO: 2653023 - RNA, 19 nt, Artificial Sequence
  Description of Artificial Sequence: Synthetic oligonucleotide
uguacagcaguucucuagu

SEQ ID NO: 2653024 - RNA, 19 nt, Artificial Sequence
  Description of Artificial Sequence: Synthetic oligonucleotide
cacaguuucaaagacgagc

SEQ ID NO: 2653025 - RNA, 19 nt, Artificial Sequence
  Description of Artificial Sequence: Synthetic oligonucleotide
cuaugagcacauuuuaaug

SEQ ID NO: 2653026 - RNA, 19 nt, Artificial Sequence
  Description of Artificial Sequence: Synthetic oligonucleotide
uuguaauguacuuuagaaa

SEQ ID NO: 2653027 - RNA, 19 nt, Artificial Sequence
  Description of Artificial Sequence: Synthetic oligonucleotide
acacaguuaguguuuagug

SEQ ID NO: 2653028 - RNA, 19 nt, Artificial Sequence
  Description of Artificial Sequence: Synthetic oligonucleotide
gauuuaaaucaaagaacag

SEQ ID NO: 2653029 - RNA, 19 nt, Artificial Sequence
  Description of Artificial Sequence: Synthetic oligonucleotide
aguuucuuuaacaucaccu

SEQ ID NO: 2653030 - RNA, 19 nt, Artificial Sequence
  Description of Artificial Sequence: Synthetic oligonucleotide
aaaucaaagaacagggcaa

SEQ ID NO: 2653031 - RNA, 19 nt, Artificial Sequence
  Description of Artificial Sequence: Synthetic oligonucleotide
ucucaagacucucuguaca

SEQ ID NO: 2653032 - RNA, 19 nt, Artificial Sequence
  Description of Artificial Sequence: Synthetic oligonucleotide
aguuucaaagacgagccag

SEQ ID NO: 2653033 - RNA, 19 nt, Artificial Sequence
  Description of Artificial Sequence: Synthetic oligonucleotide
ugcagucucauaaauggaa

SEQ ID NO: 2653034 - RNA, 19 nt, Artificial Sequence
  Description of Artificial Sequence: Synthetic oligonucleotide
agucucauaaauggaaguc

SEQ ID NO: 2653035 - RNA, 19 nt, Artificial Sequence
  Description of Artificial Sequence: Synthetic oligonucleotide
cacacacacacacacacag

SEQ ID NO: 2653036 - RNA, 19 nt, Artificial Sequence
  Description of Artificial Sequence: Synthetic oligonucleotide
auaacugucuaugagcaca

SEQ ID NO: 2653037 - RNA, 19 nt, Artificial Sequence
  Description of Artificial Sequence: Synthetic oligonucleotide
uaaagugccuucaaguauu

SEQ ID NO: 2653038 - RNA, 19 nt, Artificial Sequence
  Description of Artificial Sequence: Synthetic oligonucleotide
aggaggaaaccaaucaggc

SEQ ID NO: 2653039 - RNA, 19 nt, Artificial Sequence
  Description of Artificial Sequence: Synthetic oligonucleotide
ggauacacagaaaaggagg

SEQ ID NO: 2653040 - RNA, 19 nt, Artificial Sequence
  Description of Artificial Sequence: Synthetic oligonucleotide
cacacacacacacaguuag

SEQ ID NO: 2653041 - RNA, 19 nt, Artificial Sequence
  Description of Artificial Sequence: Synthetic oligonucleotide
acauuuuaaugucccugac

SEQ ID NO: 2653042 - RNA, 19 nt, Artificial Sequence
  Description of Artificial Sequence: Synthetic oligonucleotide
ucaaagaacagggcaaaca

SEQ ID NO: 2653043 - RNA, 19 nt, Artificial Sequence
  Description of Artificial Sequence: Synthetic oligonucleotide
uacugucuggcucucaaga

SEQ ID NO: 2653044 - RNA, 19 nt, Artificial Sequence
  Description of Artificial Sequence: Synthetic oligonucleotide
gacaaguacuuccgaaugc

SEQ ID NO: 2653045 - RNA, 19 nt, Artificial Sequence
  Description of Artificial Sequence: Synthetic oligonucleotide
uuacaacacagauauggaa

SEQ ID NO: 2653046 - RNA, 19 nt, Artificial Sequence
  Description of Artificial Sequence: Synthetic oligonucleotide
agugucuacgucagaaccc

SEQ ID NO: 2653047 - RNA, 19 nt, Artificial Sequence
  Description of Artificial Sequence: Synthetic oligonucleotide
uguuuagugguuccuugga

SEQ ID NO: 2653048 - RNA, 19 nt, Artificial Sequence
  Description of Artificial Sequence: Synthetic oligonucleotide
aaagucgacuuggcgacac

SEQ ID NO: 2653049 - RNA, 19 nt, Artificial Sequence
  Description of Artificial Sequence: Synthetic oligonucleotide
uuuucccugauaacugucu

SEQ ID NO: 2653050 - RNA, 19 nt, Artificial Sequence
  Description of Artificial Sequence: Synthetic oligonucleotide
uuaaugucccugaccagga

SEQ ID NO: 2653051 - RNA, 19 nt, Artificial Sequence
  Description of Artificial Sequence: Synthetic oligonucleotide
acugucuggcucucaagac

SEQ ID NO: 2653052 - RNA, 19 nt, Artificial Sequence
  Description of Artificial Sequence: Synthetic oligonucleotide
uuccgaaugcccauauggc

SEQ ID NO: 2653053 - RNA, 19 nt, Artificial Sequence
  Description of Artificial Sequence: Synthetic oligonucleotide
cacacacacacacacacac

SEQ ID NO: 2653054 - RNA, 19 nt, Artificial Sequence
  Description of Artificial Sequence: Synthetic oligonucleotide
ugacucgggauacacagaa

SEQ ID NO: 2653055 - RNA, 19 nt, Artificial Sequence
  Description of Artificial Sequence: Synthetic oligonucleotide
ucgacuuggcgacacacac

SEQ ID NO: 2653056 - RNA, 19 nt, Artificial Sequence
  Description of Artificial Sequence: Synthetic oligonucleotide
acacagaaaaggaggaaac

SEQ ID NO: 2653057 - RNA, 19 nt, Artificial Sequence
  Description of Artificial Sequence: Synthetic oligonucleotide
aguguuuagugguuccuug

SEQ ID NO: 2653058 - RNA, 19 nt, Artificial Sequence
  Description of Artificial Sequence: Synthetic oligonucleotide
acacaguacugucuggcuc

SEQ ID NO: 2653059 - RNA, 19 nt, Artificial Sequence
  Description of Artificial Sequence: Synthetic oligonucleotide
ucugauuuguaauguacuu

SEQ ID NO: 2653060 - RNA, 19 nt, Artificial Sequence
  Description of Artificial Sequence: Synthetic oligonucleotide
ugaccagcaggacuaaagu

SEQ ID NO: 2653061 - RNA, 19 nt, Artificial Sequence
  Description of Artificial Sequence: Synthetic oligonucleotide
agugguuccuuggaagccc

SEQ ID NO: 2653062 - RNA, 19 nt, Artificial Sequence
  Description of Artificial Sequence: Synthetic oligonucleotide
aaugucccugaccaggaau

SEQ ID NO: 2653063 - RNA, 19 nt, Artificial Sequence
  Description of Artificial Sequence: Synthetic oligonucleotide
aacuguaaacaaugacccu

SEQ ID NO: 2653064 - RNA, 19 nt, Artificial Sequence
  Description of Artificial Sequence: Synthetic oligonucleotide
gauacacagaaaaggagga

SEQ ID NO: 2653065 - RNA, 19 nt, Artificial Sequence
  Description of Artificial Sequence: Synthetic oligonucleotide
acucgggauacacagaaaa

SEQ ID NO: 2653066 - RNA, 19 nt, Artificial Sequence
  Description of Artificial Sequence: Synthetic oligonucleotide
ugacaguuuacaacacaga

SEQ ID NO: 2653067 - RNA, 19 nt, Artificial Sequence
  Description of Artificial Sequence: Synthetic oligonucleotide
ugcguagugucuacgucag

SEQ ID NO: 2653068 - RNA, 19 nt, Artificial Sequence
  Description of Artificial Sequence: Synthetic oligonucleotide
gaacagggcaaacaccaug

SEQ ID NO: 2653069 - RNA, 19 nt, Artificial Sequence
  Description of Artificial Sequence: Synthetic oligonucleotide
guuaguguuuagugguucc

SEQ ID NO: 2653070 - RNA, 19 nt, Artificial Sequence
  Description of Artificial Sequence: Synthetic oligonucleotide
uuuuaaugucccugaccag

SEQ ID NO: 2653071 - RNA, 19 nt, Artificial Sequence
  Description of Artificial Sequence: Synthetic oligonucleotide
uucuguucucucccgagga

SEQ ID NO: 2653072 - RNA, 19 nt, Artificial Sequence
  Description of Artificial Sequence: Synthetic oligonucleotide
cugaccaggaaugacucgg

SEQ ID NO: 2653073 - RNA, 19 nt, Artificial Sequence
  Description of Artificial Sequence: Synthetic oligonucleotide
guguuuagugguuccuugg

SEQ ID NO: 2653074 - RNA, 19 nt, Artificial Sequence
  Description of Artificial Sequence: Synthetic oligonucleotide
ugucuaugagcacauuuua

SEQ ID NO: 2653075 - RNA, 19 nt, Artificial Sequence
  Description of Artificial Sequence: Synthetic oligonucleotide
guaaacaaugacccuugug

SEQ ID NO: 2653076 - RNA, 19 nt, Artificial Sequence
  Description of Artificial Sequence: Synthetic oligonucleotide
gucucauaaauggaagucc

SEQ ID NO: 2653077 - RNA, 19 nt, Artificial Sequence
  Description of Artificial Sequence: Synthetic oligonucleotide
ugauucacacauccacuga

SEQ ID NO: 2653078 - RNA, 19 nt, Artificial Sequence
  Description of Artificial Sequence: Synthetic oligonucleotide
gacuaaagugccuucaagu

SEQ ID NO: 2653079 - RNA, 19 nt, Artificial Sequence
  Description of Artificial Sequence: Synthetic oligonucleotide
gauacagaggcagccuggg

SEQ ID NO: 2653080 - RNA, 19 nt, Artificial Sequence
  Description of Artificial Sequence: Synthetic oligonucleotide
uccgaaugcccauauggcu

SEQ ID NO: 2653081 - RNA, 19 nt, Artificial Sequence
  Description of Artificial Sequence: Synthetic oligonucleotide
aaucaaagaacagggcaaa

SEQ ID NO: 2653082 - RNA, 19 nt, Artificial Sequence
  Description of Artificial Sequence: Synthetic oligonucleotide
aaagacgagccagauggcu

SEQ ID NO: 2653083 - RNA, 19 nt, Artificial Sequence
  Description of Artificial Sequence: Synthetic oligonucleotide
gauuuguaauguacuuuag

SEQ ID NO: 2653084 - RNA, 19 nt, Artificial Sequence
  Description of Artificial Sequence: Synthetic oligonucleotide
aguuaguguuuagugguuc

SEQ ID NO: 2653085 - RNA, 19 nt, Artificial Sequence
  Description of Artificial Sequence: Synthetic oligonucleotide
accacaguuucaaagacga

SEQ ID NO: 2653086 - RNA, 19 nt, Artificial Sequence
  Description of Artificial Sequence: Synthetic oligonucleotide
gaccagcaggacuaaagug

SEQ ID NO: 2653087 - RNA, 19 nt, Artificial Sequence
  Description of Artificial Sequence: Synthetic oligonucleotide
accuugauuuaaaucaaag

SEQ ID NO: 2653088 - RNA, 19 nt, Artificial Sequence
  Description of Artificial Sequence: Synthetic oligonucleotide
ugaccaggaaugacucggg

SEQ ID NO: 2653089 - RNA, 19 nt, Artificial Sequence
  Description of Artificial Sequence: Synthetic oligonucleotide
agccagauggcuugcuuuc

SEQ ID NO: 2653090 - RNA, 19 nt, Artificial Sequence
  Description of Artificial Sequence: Synthetic oligonucleotide
gacaguuuacaacacagau

SEQ ID NO: 2653091 - RNA, 19 nt, Artificial Sequence
  Description of Artificial Sequence: Synthetic oligonucleotide
augaaauucuaaagucgac

SEQ ID NO: 2653092 - RNA, 19 nt, Artificial Sequence
  Description of Artificial Sequence: Synthetic oligonucleotide
ucccugauaacugucuaug

SEQ ID NO: 2653093 - RNA, 19 nt, Artificial Sequence
  Description of Artificial Sequence: Synthetic oligonucleotide
gaccacaguuucaaagacg

SEQ ID NO: 2653094 - RNA, 19 nt, Artificial Sequence
  Description of Artificial Sequence: Synthetic oligonucleotide
acugucuaugagcacauuu

SEQ ID NO: 2653095 - RNA, 19 nt, Artificial Sequence
  Description of Artificial Sequence: Synthetic oligonucleotide
cucgggauacacagaaaag

SEQ ID NO: 2653096 - RNA, 19 nt, Artificial Sequence
  Description of Artificial Sequence: Synthetic oligonucleotide
cuaguuccuugauucacac

SEQ ID NO: 2653097 - RNA, 19 nt, Artificial Sequence
  Description of Artificial Sequence: Synthetic oligonucleotide
auucuaaagucgacuuggc

SEQ ID NO: 2653098 - RNA, 19 nt, Artificial Sequence
  Description of Artificial Sequence: Synthetic oligonucleotide
uggcgacacacacacacac

SEQ ID NO: 2653099 - RNA, 19 nt, Artificial Sequence
  Description of Artificial Sequence: Synthetic oligonucleotide
aaguacuuccgaaugccca

SEQ ID NO: 2653100 - RNA, 19 nt, Artificial Sequence
  Description of Artificial Sequence: Synthetic oligonucleotide
uggccucugauuuguaaug

SEQ ID NO: 2653101 - RNA, 19 nt, Artificial Sequence
  Description of Artificial Sequence: Synthetic oligonucleotide
cacauuuuaaugucccuga

SEQ ID NO: 2653102 - RNA, 19 nt, Artificial Sequence
  Description of Artificial Sequence: Synthetic oligonucleotide
aggauacagaggcagccug

SEQ ID NO: 2653103 - RNA, 19 nt, Artificial Sequence
  Description of Artificial Sequence: Synthetic oligonucleotide
aacacagauauggaauuua

SEQ ID NO: 2653104 - RNA, 19 nt, Artificial Sequence
  Description of Artificial Sequence: Synthetic oligonucleotide
agacucucuguacagcagu

SEQ ID NO: 2653105 - RNA, 19 nt, Artificial Sequence
  Description of Artificial Sequence: Synthetic oligonucleotide
gauaacugucuaugagcac

SEQ ID NO: 2653106 - RNA, 19 nt, Artificial Sequence
  Description of Artificial Sequence: Synthetic oligonucleotide
caccaugcaccuuccagcc

SEQ ID NO: 2653107 - RNA, 19 nt, Artificial Sequence
  Description of Artificial Sequence: Synthetic oligonucleotide
agcuggcuugaccagcagg

SEQ ID NO: 2653108 - RNA, 19 nt, Artificial Sequence
  Description of Artificial Sequence: Synthetic oligonucleotide
cacacacacacaguuagug

SEQ ID NO: 2653109 - RNA, 19 nt, Artificial Sequence
  Description of Artificial Sequence: Synthetic oligonucleotide
agacgagccagauggcuug

SEQ ID NO: 2653110 - RNA, 19 nt, Artificial Sequence
  Description of Artificial Sequence: Synthetic oligonucleotide
aguacuuccgaaugcccau

SEQ ID NO: 2653111 - RNA, 19 nt, Artificial Sequence
  Description of Artificial Sequence: Synthetic oligonucleotide
ucucuaguuccuugauuca

SEQ ID NO: 2653112 - RNA, 19 nt, Artificial Sequence
  Description of Artificial Sequence: Synthetic oligonucleotide
agucgacuuggcgacacac

SEQ ID NO: 2653113 - RNA, 19 nt, Artificial Sequence
  Description of Artificial Sequence: Synthetic oligonucleotide
ucaagacucucuguacagc

SEQ ID NO: 2653114 - RNA, 19 nt, Artificial Sequence
  Description of Artificial Sequence: Synthetic oligonucleotide
ccuugauucacacauccac

SEQ ID NO: 2653115 - RNA, 19 nt, Artificial Sequence
  Description of Artificial Sequence: Synthetic oligonucleotide
ugugcguagugucuacguc

SEQ ID NO: 2653116 - RNA, 19 nt, Artificial Sequence
  Description of Artificial Sequence: Synthetic oligonucleotide
aucaaagaacagggcaaac

SEQ ID NO: 2653117 - RNA, 19 nt, Artificial Sequence
  Description of Artificial Sequence: Synthetic oligonucleotide
ucucccgaggaacuguaaa

SEQ ID NO: 2653118 - RNA, 19 nt, Artificial Sequence
  Description of Artificial Sequence: Synthetic oligonucleotide
caagacucucuguacagca

SEQ ID NO: 2653119 - RNA, 19 nt, Artificial Sequence
  Description of Artificial Sequence: Synthetic oligonucleotide
ugcuuuccccuaauggccu

SEQ ID NO: 2653120 - RNA, 19 nt, Artificial Sequence
  Description of Artificial Sequence: Synthetic oligonucleotide
aaccaaucaggcagaagcu

SEQ ID NO: 2653121 - RNA, 19 nt, Artificial Sequence
  Description of Artificial Sequence: Synthetic oligonucleotide
cucucaagacucucuguac

SEQ ID NO: 2653122 - RNA, 19 nt, Artificial Sequence
  Description of Artificial Sequence: Synthetic oligonucleotide
cucccgaggaacuguaaac

SEQ ID NO: 2653123 - RNA, 19 nt, Artificial Sequence
  Description of Artificial Sequence: Synthetic oligonucleotide
uccuugauucacacaucca

SEQ ID NO: 2653124 - RNA, 19 nt, Artificial Sequence
  Description of Artificial Sequence: Synthetic oligonucleotide
uuaguguuuagugguuccu

SEQ ID NO: 2653125 - RNA, 19 nt, Artificial Sequence
  Description of Artificial Sequence: Synthetic oligonucleotide
uggcuugaccagcaggacu

SEQ ID NO: 2653126 - RNA, 19 nt, Artificial Sequence
  Description of Artificial Sequence: Synthetic oligonucleotide
uaacugucuaugagcacau

SEQ ID NO: 2653127 - RNA, 19 nt, Artificial Sequence
  Description of Artificial Sequence: Synthetic oligonucleotide
caguccucagccagcaccc

SEQ ID NO: 2653128 - RNA, 19 nt, Artificial Sequence
  Description of Artificial Sequence: Synthetic oligonucleotide
uugugcguagugucuacgu

SEQ ID NO: 2653129 - RNA, 19 nt, Artificial Sequence
  Description of Artificial Sequence: Synthetic oligonucleotide
auggccucugauuuguaau

SEQ ID NO: 2653130 - RNA, 19 nt, Artificial Sequence
  Description of Artificial Sequence: Synthetic oligonucleotide
guagugucuacgucagaac

SEQ ID NO: 2653131 - RNA, 19 nt, Artificial Sequence
  Description of Artificial Sequence: Synthetic oligonucleotide
uuucccugauaacugucua

SEQ ID NO: 2653132 - RNA, 19 nt, Artificial Sequence
  Description of Artificial Sequence: Synthetic oligonucleotide
ccugauaacugucuaugag

SEQ ID NO: 2653133 - RNA, 19 nt, Artificial Sequence
  Description of Artificial Sequence: Synthetic oligonucleotide
caaacaccaugcaccuucc

SEQ ID NO: 2653134 - RNA, 19 nt, Artificial Sequence
  Description of Artificial Sequence: Synthetic oligonucleotide
ucacacauccacugacagu

SEQ ID NO: 2653135 - RNA, 19 nt, Artificial Sequence
  Description of Artificial Sequence: Synthetic oligonucleotide
gacccuugugcguaguguc

SEQ ID NO: 2653136 - RNA, 19 nt, Artificial Sequence
  Description of Artificial Sequence: Synthetic oligonucleotide
ucucuguacagcaguucuc

SEQ ID NO: 2653137 - RNA, 19 nt, Artificial Sequence
  Description of Artificial Sequence: Synthetic oligonucleotide
gugcguagugucuacguca

SEQ ID NO: 2653138 - RNA, 19 nt, Artificial Sequence
  Description of Artificial Sequence: Synthetic oligonucleotide
aacaucaccuugauuuaaa

SEQ ID NO: 2653139 - RNA, 19 nt, Artificial Sequence
  Description of Artificial Sequence: Synthetic oligonucleotide
gcagaagcuggcuugacca

SEQ ID NO: 2653140 - RNA, 19 nt, Artificial Sequence
  Description of Artificial Sequence: Synthetic oligonucleotide
uucaaguauugaccacagu

SEQ ID NO: 2653141 - RNA, 19 nt, Artificial Sequence
  Description of Artificial Sequence: Synthetic oligonucleotide
uuggcgacacacacacaca

SEQ ID NO: 2653142 - RNA, 19 nt, Artificial Sequence
  Description of Artificial Sequence: Synthetic oligonucleotide
gaaaccaaucaggcagaag

SEQ ID NO: 2653143 - RNA, 19 nt, Artificial Sequence
  Description of Artificial Sequence: Synthetic oligonucleotide
gaagcccaggauacagagg

SEQ ID NO: 2653144 - RNA, 19 nt, Artificial Sequence
  Description of Artificial Sequence: Synthetic oligonucleotide
ggacuaaagugccuucaag

SEQ ID NO: 2653145 - RNA, 19 nt, Artificial Sequence
  Description of Artificial Sequence: Synthetic oligonucleotide
guuccuuggaagcccagga

SEQ ID NO: 2653146 - RNA, 19 nt, Artificial Sequence
  Description of Artificial Sequence: Synthetic oligonucleotide
acaucaccuugauuuaaau

SEQ ID NO: 2653147 - RNA, 19 nt, Artificial Sequence
  Description of Artificial Sequence: Synthetic oligonucleotide
cucuaguuccuugauucac

SEQ ID NO: 2653148 - RNA, 19 nt, Artificial Sequence
  Description of Artificial Sequence: Synthetic oligonucleotide
aaagugccuucaaguauug

SEQ ID NO: 2653149 - RNA, 19 nt, Artificial Sequence
  Description of Artificial Sequence: Synthetic oligonucleotide
guauugaccacaguuucaa

SEQ ID NO: 2653150 - RNA, 19 nt, Artificial Sequence
  Description of Artificial Sequence: Synthetic oligonucleotide
cgaggaacuguaaacaaug

SEQ ID NO: 2653151 - RNA, 19 nt, Artificial Sequence
  Description of Artificial Sequence: Synthetic oligonucleotide
uccccuaauggccucugau

SEQ ID NO: 2653152 - RNA, 19 nt, Artificial Sequence
  Description of Artificial Sequence: Synthetic oligonucleotide
accaaucaggcagaagcug

SEQ ID NO: 2653153 - RNA, 19 nt, Artificial Sequence
  Description of Artificial Sequence: Synthetic oligonucleotide
aguauugaccacaguuuca

SEQ ID NO: 2653154 - RNA, 19 nt, Artificial Sequence
  Description of Artificial Sequence: Synthetic oligonucleotide
accuuccagccucauuguc

SEQ ID NO: 2653155 - RNA, 19 nt, Artificial Sequence
  Description of Artificial Sequence: Synthetic oligonucleotide
uucccugauaacugucuau

SEQ ID NO: 2653156 - RNA, 19 nt, Artificial Sequence
  Description of Artificial Sequence: Synthetic oligonucleotide
acaguuuacaacacagaua

SEQ ID NO: 2653157 - RNA, 19 nt, Artificial Sequence
  Description of Artificial Sequence: Synthetic oligonucleotide
gcgacacacacacacacac

SEQ ID NO: 2653158 - RNA, 19 nt, Artificial Sequence
  Description of Artificial Sequence: Synthetic oligonucleotide
ccuugauuuaaaucaaaga

SEQ ID NO: 2653159 - RNA, 19 nt, Artificial Sequence
  Description of Artificial Sequence: Synthetic oligonucleotide
uaacaucaccuugauuuaa

SEQ ID NO: 2653160 - RNA, 19 nt, Artificial Sequence
  Description of Artificial Sequence: Synthetic oligonucleotide
agccucauuguccacuuuu

SEQ ID NO: 2653161 - RNA, 19 nt, Artificial Sequence
  Description of Artificial Sequence: Synthetic oligonucleotide
caaagacgagccagauggc

SEQ ID NO: 2653162 - RNA, 19 nt, Artificial Sequence
  Description of Artificial Sequence: Synthetic oligonucleotide
cuugauucacacauccacu

SEQ ID NO: 2653163 - RNA, 19 nt, Artificial Sequence
  Description of Artificial Sequence: Synthetic oligonucleotide
cuacgucagaacccacacc

SEQ ID NO: 2653164 - RNA, 19 nt, Artificial Sequence
  Description of Artificial Sequence: Synthetic oligonucleotide
aaacaccaugcaccuucca

SEQ ID NO: 2653165 - RNA, 19 nt, Artificial Sequence
  Description of Artificial Sequence: Synthetic oligonucleotide
aggacuaaagugccuucaa

SEQ ID NO: 2653166 - RNA, 19 nt, Artificial Sequence
  Description of Artificial Sequence: Synthetic oligonucleotide
gaacccacaccccaguccu

SEQ ID NO: 2653167 - RNA, 19 nt, Artificial Sequence
  Description of Artificial Sequence: Synthetic oligonucleotide
ccuuccagccucauugucc

SEQ ID NO: 2653168 - RNA, 19 nt, Artificial Sequence
  Description of Artificial Sequence: Synthetic oligonucleotide
augucccugaccaggaaug

SEQ ID NO: 2653169 - RNA, 19 nt, Artificial Sequence
  Description of Artificial Sequence: Synthetic oligonucleotide
cuugugcguagugucuacg

SEQ ID NO: 2653170 - RNA, 19 nt, Artificial Sequence
  Description of Artificial Sequence: Synthetic oligonucleotide
guuuagugguuccuuggaa

SEQ ID NO: 2653171 - RNA, 19 nt, Artificial Sequence
  Description of Artificial Sequence: Synthetic oligonucleotide
augcccauauggcugcagu

SEQ ID NO: 2653172 - RNA, 19 nt, Artificial Sequence
  Description of Artificial Sequence: Synthetic oligonucleotide
ugacccuugugcguagugu

SEQ ID NO: 2653173 - RNA, 19 nt, Artificial Sequence
  Description of Artificial Sequence: Synthetic oligonucleotide
acaaugacccuugugcgua

SEQ ID NO: 2653174 - RNA, 19 nt, Artificial Sequence
  Description of Artificial Sequence: Synthetic oligonucleotide
ccagcaggacuaaagugcc

SEQ ID NO: 2653175 - RNA, 19 nt, Artificial Sequence
  Description of Artificial Sequence: Synthetic oligonucleotide
uaguuccuugauucacaca

SEQ ID NO: 2653176 - RNA, 19 nt, Artificial Sequence
  Description of Artificial Sequence: Synthetic oligonucleotide
cucugauuuguaauguacu

SEQ ID NO: 2653177 - RNA, 19 nt, Artificial Sequence
  Description of Artificial Sequence: Synthetic oligonucleotide
gcacauuuuaaugucccug

SEQ ID NO: 2653178 - RNA, 19 nt, Artificial Sequence
  Description of Artificial Sequence: Synthetic oligonucleotide
caaguauugaccacaguuu

SEQ ID NO: 2653179 - RNA, 19 nt, Artificial Sequence
  Description of Artificial Sequence: Synthetic oligonucleotide
gaggaacuguaaacaauga

SEQ ID NO: 2653180 - RNA, 19 nt, Artificial Sequence
  Description of Artificial Sequence: Synthetic oligonucleotide
ccuuggaagcccaggauac

SEQ ID NO: 2653181 - RNA, 19 nt, Artificial Sequence
  Description of Artificial Sequence: Synthetic oligonucleotide
uacuuccgaaugcccauau

SEQ ID NO: 2653182 - RNA, 19 nt, Artificial Sequence
  Description of Artificial Sequence: Synthetic oligonucleotide
cagaagcuggcuugaccag

SEQ ID NO: 2653183 - RNA, 19 nt, Artificial Sequence
  Description of Artificial Sequence: Synthetic oligonucleotide
acuuccgaaugcccauaug

SEQ ID NO: 2653184 - RNA, 19 nt, Artificial Sequence
  Description of Artificial Sequence: Synthetic oligonucleotide
uggcugcagucucauaaau

SEQ ID NO: 2653185 - RNA, 19 nt, Artificial Sequence
  Description of Artificial Sequence: Synthetic oligonucleotide
aagacgagccagauggcuu

SEQ ID NO: 2653186 - RNA, 19 nt, Artificial Sequence
  Description of Artificial Sequence: Synthetic oligonucleotide
ugcccauauggcugcaguc

SEQ ID NO: 2653187 - RNA, 19 nt, Artificial Sequence
  Description of Artificial Sequence: Synthetic oligonucleotide
auggcugcagucucauaaa

SEQ ID NO: 2653188 - RNA, 19 nt, Artificial Sequence
  Description of Artificial Sequence: Synthetic oligonucleotide
caggaaugacucgggauac

SEQ ID NO: 2653189 - RNA, 19 nt, Artificial Sequence
  Description of Artificial Sequence: Synthetic oligonucleotide
ccgaaugcccauauggcug

SEQ ID NO: 2653190 - RNA, 19 nt, Artificial Sequence
  Description of Artificial Sequence: Synthetic oligonucleotide
aagcuggcuugaccagcag

SEQ ID NO: 2653191 - RNA, 19 nt, Artificial Sequence
  Description of Artificial Sequence: Synthetic oligonucleotide
caccccaguccucagccag

SEQ ID NO: 2653192 - RNA, 19 nt, Artificial Sequence
  Description of Artificial Sequence: Synthetic oligonucleotide
acacagauauggaauuuau

SEQ ID NO: 2653193 - RNA, 19 nt, Artificial Sequence
  Description of Artificial Sequence: Synthetic oligonucleotide
uaaugucccugaccaggaa

SEQ ID NO: 2653194 - RNA, 19 nt, Artificial Sequence
  Description of Artificial Sequence: Synthetic oligonucleotide
acgucagaacccacacccc

SEQ ID NO: 2653195 - RNA, 19 nt, Artificial Sequence
  Description of Artificial Sequence: Synthetic oligonucleotide
gaagcuggcuugaccagca

SEQ ID NO: 2653196 - RNA, 19 nt, Artificial Sequence
  Description of Artificial Sequence: Synthetic oligonucleotide
augacccuugugcguagug

SEQ ID NO: 2653197 - RNA, 19 nt, Artificial Sequence
  Description of Artificial Sequence: Synthetic oligonucleotide
cuaaagugccuucaaguau

SEQ ID NO: 2653198 - RNA, 19 nt, Artificial Sequence
  Description of Artificial Sequence: Synthetic oligonucleotide
gaaugacucgggauacaca

SEQ ID NO: 2653199 - RNA, 19 nt, Artificial Sequence
  Description of Artificial Sequence: Synthetic oligonucleotide
agcaggacuaaagugccuu

SEQ ID NO: 2653200 - RNA, 19 nt, Artificial Sequence
  Description of Artificial Sequence: Synthetic oligonucleotide
gugucuacgucagaaccca

SEQ ID NO: 2653201 - RNA, 19 nt, Artificial Sequence
  Description of Artificial Sequence: Synthetic oligonucleotide
ggauacagaggcagccugg

SEQ ID NO: 2653202 - RNA, 19 nt, Artificial Sequence
  Description of Artificial Sequence: Synthetic oligonucleotide
acagggcaaacaccaugca

SEQ ID NO: 2653203 - RNA, 19 nt, Artificial Sequence
  Description of Artificial Sequence: Synthetic oligonucleotide
aagucgacuuggcgacaca

SEQ ID NO: 2653204 - RNA, 19 nt, Artificial Sequence
  Description of Artificial Sequence: Synthetic oligonucleotide
auacacagaaaaggaggaa

SEQ ID NO: 2653205 - RNA, 19 nt, Artificial Sequence
  Description of Artificial Sequence: Synthetic oligonucleotide
caguucucuaguuccuuga

SEQ ID NO: 2653206 - RNA, 19 nt, Artificial Sequence
  Description of Artificial Sequence: Synthetic oligonucleotide
ucucucccgaggaacugua

SEQ ID NO: 2653207 - RNA, 19 nt, Artificial Sequence
  Description of Artificial Sequence: Synthetic oligonucleotide
ggaaugacucgggauacac

SEQ ID NO: 2653208 - RNA, 19 nt, Artificial Sequence
  Description of Artificial Sequence: Synthetic oligonucleotide
ggcagaagcuggcuugacc

SEQ ID NO: 2653209 - RNA, 19 nt, Artificial Sequence
  Description of Artificial Sequence: Synthetic oligonucleotide
gauggcuugcuuuccccua

SEQ ID NO: 2653210 - RNA, 19 nt, Artificial Sequence
  Description of Artificial Sequence: Synthetic oligonucleotide
gcuucuguucucucccgag

SEQ ID NO: 2653211 - RNA, 19 nt, Artificial Sequence
  Description of Artificial Sequence: Synthetic oligonucleotide
uaguguuuagugguuccuu

SEQ ID NO: 2653212 - RNA, 19 nt, Artificial Sequence
  Description of Artificial Sequence: Synthetic oligonucleotide
aaugacccuugugcguagu

SEQ ID NO: 2653213 - RNA, 19 nt, Artificial Sequence
  Description of Artificial Sequence: Synthetic oligonucleotide
auggcuugcuuuccccuaa

SEQ ID NO: 2653214 - RNA, 19 nt, Artificial Sequence
  Description of Artificial Sequence: Synthetic oligonucleotide
gucuaugagcacauuuuaa

SEQ ID NO: 2653215 - RNA, 19 nt, Artificial Sequence
  Description of Artificial Sequence: Synthetic oligonucleotide
gaccaggaaugacucggga

SEQ ID NO: 2653216 - RNA, 19 nt, Artificial Sequence
  Description of Artificial Sequence: Synthetic oligonucleotide
aggaaaccaaucaggcaga

SEQ ID NO: 2653217 - RNA, 19 nt, Artificial Sequence
  Description of Artificial Sequence: Synthetic oligonucleotide
ugucuacgucagaacccac

SEQ ID NO: 2653218 - RNA, 19 nt, Artificial Sequence
  Description of Artificial Sequence: Synthetic oligonucleotide
gcaguucucuaguuccuug

SEQ ID NO: 2653219 - RNA, 19 nt, Artificial Sequence
  Description of Artificial Sequence: Synthetic oligonucleotide
cacaguacugucuggcucu

SEQ ID NO: 2653220 - RNA, 19 nt, Artificial Sequence
  Description of Artificial Sequence: Synthetic oligonucleotide
uaaagucgacuuggcgaca

SEQ ID NO: 2653221 - RNA, 19 nt, Artificial Sequence
  Description of Artificial Sequence: Synthetic oligonucleotide
cugacaaguacuuccgaau

SEQ ID NO: 2653222 - RNA, 19 nt, Artificial Sequence
  Description of Artificial Sequence: Synthetic oligonucleotide
cugucuaugagcacauuuu

SEQ ID NO: 2653223 - RNA, 19 nt, Artificial Sequence
  Description of Artificial Sequence: Synthetic oligonucleotide
cugcagucucauaaaugga

SEQ ID NO: 2653224 - RNA, 19 nt, Artificial Sequence
  Description of Artificial Sequence: Synthetic oligonucleotide
aagugccuucaaguauuga

SEQ ID NO: 2653225 - RNA, 19 nt, Artificial Sequence
  Description of Artificial Sequence: Synthetic oligonucleotide
cauccacugacaguuuaca

SEQ ID NO: 2653226 - RNA, 19 nt, Artificial Sequence
  Description of Artificial Sequence: Synthetic oligonucleotide
cacacacacacacacaguu

SEQ ID NO: 2653227 - RNA, 19 nt, Artificial Sequence
  Description of Artificial Sequence: Synthetic oligonucleotide
agcaccccugacaaguacu

SEQ ID NO: 2653228 - RNA, 19 nt, Artificial Sequence
  Description of Artificial Sequence: Synthetic oligonucleotide
uuccccuaauggccucuga

SEQ ID NO: 2653229 - RNA, 19 nt, Artificial Sequence
  Description of Artificial Sequence: Synthetic oligonucleotide
ccuaauggccucugauuug

SEQ ID NO: 2653230 - RNA, 19 nt, Artificial Sequence
  Description of Artificial Sequence: Synthetic oligonucleotide
uuuccccuaauggccucug

SEQ ID NO: 2653231 - RNA, 19 nt, Artificial Sequence
  Description of Artificial Sequence: Synthetic oligonucleotide
cagucucauaaauggaagu

SEQ ID NO: 2653232 - RNA, 19 nt, Artificial Sequence
  Description of Artificial Sequence: Synthetic oligonucleotide
gcucucaagacucucugua

SEQ ID NO: 2653233 - RNA, 19 nt, Artificial Sequence
  Description of Artificial Sequence: Synthetic oligonucleotide
caccuugauuuaaaucaaa

SEQ ID NO: 2653234 - RNA, 19 nt, Artificial Sequence
  Description of Artificial Sequence: Synthetic oligonucleotide
ugcaccuuccagccucauu

SEQ ID NO: 2653235 - RNA, 19 nt, Artificial Sequence
  Description of Artificial Sequence: Synthetic oligonucleotide
cuaauggccucugauuugu

SEQ ID NO: 2653236 - RNA, 19 nt, Artificial Sequence
  Description of Artificial Sequence: Synthetic oligonucleotide
aguuuacaacacagauaug

SEQ ID NO: 2653237 - RNA, 19 nt, Artificial Sequence
  Description of Artificial Sequence: Synthetic oligonucleotide
ccaugcaccuuccagccuc

SEQ ID NO: 2653238 - RNA, 19 nt, Artificial Sequence
  Description of Artificial Sequence: Synthetic oligonucleotide
gcccaggauacagaggcag

SEQ ID NO: 2653239 - RNA, 19 nt, Artificial Sequence
  Description of Artificial Sequence: Synthetic oligonucleotide
ccuucaaguauugaccaca

SEQ ID NO: 2653240 - RNA, 19 nt, Artificial Sequence
  Description of Artificial Sequence: Synthetic oligonucleotide
cagccagcaccccugacaa

SEQ ID NO: 2653241 - RNA, 19 nt, Artificial Sequence
  Description of Artificial Sequence: Synthetic oligonucleotide
acacacacacacacacaca

SEQ ID NO: 2653242 - RNA, 19 nt, Artificial Sequence
  Description of Artificial Sequence: Synthetic oligonucleotide
caggacuaaagugccuuca

SEQ ID NO: 2653243 - RNA, 19 nt, Artificial Sequence
  Description of Artificial Sequence: Synthetic oligonucleotide
cagaacccacaccccaguc

SEQ ID NO: 2653244 - RNA, 19 nt, Artificial Sequence
  Description of Artificial Sequence: Synthetic oligonucleotide
cgaaugcccauauggcugc

SEQ ID NO: 2653245 - RNA, 19 nt, Artificial Sequence
  Description of Artificial Sequence: Synthetic oligonucleotide
cacacaguuaguguuuagu

SEQ ID NO: 2653246 - RNA, 19 nt, Artificial Sequence
  Description of Artificial Sequence: Synthetic oligonucleotide
accaugcaccuuccagccu

SEQ ID NO: 2653247 - RNA, 19 nt, Artificial Sequence
  Description of Artificial Sequence: Synthetic oligonucleotide
uggggcaaggcagggcuuc

SEQ ID NO: 2653248 - RNA, 19 nt, Artificial Sequence
  Description of Artificial Sequence: Synthetic oligonucleotide
ccugaccaggaaugacucg

SEQ ID NO: 2653249 - RNA, 19 nt, Artificial Sequence
  Description of Artificial Sequence: Synthetic oligonucleotide
caguuucaaagacgagcca

SEQ ID NO: 2653250 - RNA, 19 nt, Artificial Sequence
  Description of Artificial Sequence: Synthetic oligonucleotide
acacacacacacacacagu

SEQ ID NO: 2653251 - RNA, 19 nt, Artificial Sequence
  Description of Artificial Sequence: Synthetic oligonucleotide
cagcaccccugacaaguac

SEQ ID NO: 2653252 - RNA, 19 nt, Artificial Sequence
  Description of Artificial Sequence: Synthetic oligonucleotide
cgggauacacagaaaagga

SEQ ID NO: 2653253 - RNA, 19 nt, Artificial Sequence
  Description of Artificial Sequence: Synthetic oligonucleotide
aacccacaccccaguccuc

SEQ ID NO: 2653254 - RNA, 19 nt, Artificial Sequence
  Description of Artificial Sequence: Synthetic oligonucleotide
aggaaugacucgggauaca

SEQ ID NO: 2653255 - RNA, 19 nt, Artificial Sequence
  Description of Artificial Sequence: Synthetic oligonucleotide
acacacacacacaguuagu

SEQ ID NO: 2653256 - RNA, 19 nt, Artificial Sequence
  Description of Artificial Sequence: Synthetic oligonucleotide
aggcagaagcuggcuugac

SEQ ID NO: 2653257 - RNA, 19 nt, Artificial Sequence
  Description of Artificial Sequence: Synthetic oligonucleotide
cacauccacugacaguuua

SEQ ID NO: 2653258 - RNA, 19 nt, Artificial Sequence
  Description of Artificial Sequence: Synthetic oligonucleotide
cuggcuugaccagcaggac

SEQ ID NO: 2653259 - RNA, 19 nt, Artificial Sequence
  Description of Artificial Sequence: Synthetic oligonucleotide
uggcuugcuuuccccuaau

SEQ ID NO: 2653260 - RNA, 19 nt, Artificial Sequence
  Description of Artificial Sequence: Synthetic oligonucleotide
ccugacaaguacuuccgaa

SEQ ID NO: 2653261 - RNA, 19 nt, Artificial Sequence
  Description of Artificial Sequence: Synthetic oligonucleotide
gucgacuuggcgacacaca

SEQ ID NO: 2653262 - RNA, 19 nt, Artificial Sequence
  Description of Artificial Sequence: Synthetic oligonucleotide
acacacacacacacaguua

SEQ ID NO: 2653263 - RNA, 19 nt, Artificial Sequence
  Description of Artificial Sequence: Synthetic oligonucleotide
agaggcagccuggggcaag

SEQ ID NO: 2653264 - RNA, 19 nt, Artificial Sequence
  Description of Artificial Sequence: Synthetic oligonucleotide
augacucgggauacacaga

SEQ ID NO: 2653265 - RNA, 19 nt, Artificial Sequence
  Description of Artificial Sequence: Synthetic oligonucleotide
ggcuugaccagcaggacua

SEQ ID NO: 2653266 - RNA, 19 nt, Artificial Sequence
  Description of Artificial Sequence: Synthetic oligonucleotide
agaacagggcaaacaccau

SEQ ID NO: 2653267 - RNA, 19 nt, Artificial Sequence
  Description of Artificial Sequence: Synthetic oligonucleotide
acccuugugcguagugucu

SEQ ID NO: 2653268 - RNA, 19 nt, Artificial Sequence
  Description of Artificial Sequence: Synthetic oligonucleotide
cacagauauggaauuuauu

SEQ ID NO: 2653269 - RNA, 19 nt, Artificial Sequence
  Description of Artificial Sequence: Synthetic oligonucleotide
agccagcaccccugacaag

SEQ ID NO: 2653270 - RNA, 19 nt, Artificial Sequence
  Description of Artificial Sequence: Synthetic oligonucleotide
cacacaguacugucuggcu

SEQ ID NO: 2653271 - RNA, 19 nt, Artificial Sequence
  Description of Artificial Sequence: Synthetic oligonucleotide
aacugucuaugagcacauu

SEQ ID NO: 2653272 - RNA, 19 nt, Artificial Sequence
  Description of Artificial Sequence: Synthetic oligonucleotide
caugcaccuuccagccuca

SEQ ID NO: 2653273 - RNA, 19 nt, Artificial Sequence
  Description of Artificial Sequence: Synthetic oligonucleotide
cccauauggcugcagucuc

SEQ ID NO: 2653274 - RNA, 19 nt, Artificial Sequence
  Description of Artificial Sequence: Synthetic oligonucleotide
cuggcucucaagacucucu

SEQ ID NO: 2653275 - RNA, 19 nt, Artificial Sequence
  Description of Artificial Sequence: Synthetic oligonucleotide
auauggcugcagucucaua

SEQ ID NO: 2653276 - RNA, 19 nt, Artificial Sequence
  Description of Artificial Sequence: Synthetic oligonucleotide
ccacaguuucaaagacgag

SEQ ID NO: 2653277 - RNA, 19 nt, Artificial Sequence
  Description of Artificial Sequence: Synthetic oligonucleotide
agccuggggcaaggcaggg

SEQ ID NO: 2653278 - RNA, 19 nt, Artificial Sequence
  Description of Artificial Sequence: Synthetic oligonucleotide
aggcagccuggggcaaggc

SEQ ID NO: 2653279 - RNA, 19 nt, Artificial Sequence
  Description of Artificial Sequence: Synthetic oligonucleotide
ccuugugcguagugucuac

SEQ ID NO: 2653280 - RNA, 19 nt, Artificial Sequence
  Description of Artificial Sequence: Synthetic oligonucleotide
gacucgggauacacagaaa

SEQ ID NO: 2653281 - RNA, 19 nt, Artificial Sequence
  Description of Artificial Sequence: Synthetic oligonucleotide
cuuuaacaucaccuugauu

SEQ ID NO: 2653282 - RNA, 19 nt, Artificial Sequence
  Description of Artificial Sequence: Synthetic oligonucleotide
gggcaaacaccaugcaccu

SEQ ID NO: 2653283 - RNA, 19 nt, Artificial Sequence
  Description of Artificial Sequence: Synthetic oligonucleotide
cacacacaguuaguguuua

SEQ ID NO: 2653284 - RNA, 19 nt, Artificial Sequence
  Description of Artificial Sequence: Synthetic oligonucleotide
cccugauaacugucuauga

SEQ ID NO: 2653285 - RNA, 19 nt, Artificial Sequence
  Description of Artificial Sequence: Synthetic oligonucleotide
cguagugucuacgucagaa

SEQ ID NO: 2653286 - RNA, 19 nt, Artificial Sequence
  Description of Artificial Sequence: Synthetic oligonucleotide
ggcagccuggggcaaggca

SEQ ID NO: 2653287 - RNA, 19 nt, Artificial Sequence
  Description of Artificial Sequence: Synthetic oligonucleotide
caccccugacaaguacuuc

SEQ ID NO: 2653288 - RNA, 19 nt, Artificial Sequence
  Description of Artificial Sequence: Synthetic oligonucleotide
gaaugcccauauggcugca

SEQ ID NO: 2653289 - RNA, 19 nt, Artificial Sequence
  Description of Artificial Sequence: Synthetic oligonucleotide
gccagauggcuugcuuucc

SEQ ID NO: 2653290 - RNA, 19 nt, Artificial Sequence
  Description of Artificial Sequence: Synthetic oligonucleotide
gccagcaccccugacaagu

SEQ ID NO: 2653291 - RNA, 19 nt, Artificial Sequence
  Description of Artificial Sequence: Synthetic oligonucleotide
ccauauggcugcagucuca

SEQ ID NO: 2653292 - RNA, 19 nt, Artificial Sequence
  Description of Artificial Sequence: Synthetic oligonucleotide
cauauggcugcagucucau

SEQ ID NO: 2653293 - RNA, 19 nt, Artificial Sequence
  Description of Artificial Sequence: Synthetic oligonucleotide
guacuuccgaaugcccaua

SEQ ID NO: 2653294 - RNA, 19 nt, Artificial Sequence
  Description of Artificial Sequence: Synthetic oligonucleotide
caguuaguguuuagugguu

SEQ ID NO: 2653295 - RNA, 19 nt, Artificial Sequence
  Description of Artificial Sequence: Synthetic oligonucleotide
guacagcaguucucuaguu

SEQ ID NO: 2653296 - RNA, 19 nt, Artificial Sequence
  Description of Artificial Sequence: Synthetic oligonucleotide
agcccaggauacagaggca

SEQ ID NO: 2653297 - RNA, 19 nt, Artificial Sequence
  Description of Artificial Sequence: Synthetic oligonucleotide
ggcgacacacacacacaca

SEQ ID NO: 2653298 - RNA, 19 nt, Artificial Sequence
  Description of Artificial Sequence: Synthetic oligonucleotide
cuugaccagcaggacuaaa

SEQ ID NO: 2653299 - RNA, 19 nt, Artificial Sequence
  Description of Artificial Sequence: Synthetic oligonucleotide
cucucccgaggaacuguaa

SEQ ID NO: 2653300 - RNA, 19 nt, Artificial Sequence
  Description of Artificial Sequence: Synthetic oligonucleotide
ggaaaccaaucaggcagaa

SEQ ID NO: 2653301 - RNA, 19 nt, Artificial Sequence
  Description of Artificial Sequence: Synthetic oligonucleotide
caggauacagaggcagccu

SEQ ID NO: 2653302 - RNA, 19 nt, Artificial Sequence
  Description of Artificial Sequence: Synthetic oligonucleotide
cgucagaacccacacccca

SEQ ID NO: 2653303 - RNA, 19 nt, Artificial Sequence
  Description of Artificial Sequence: Synthetic oligonucleotide
gcuuuccccuaauggccuc

SEQ ID NO: 2653304 - RNA, 19 nt, Artificial Sequence
  Description of Artificial Sequence: Synthetic oligonucleotide
gcccauauggcugcagucu

SEQ ID NO: 2653305 - RNA, 19 nt, Artificial Sequence
  Description of Artificial Sequence: Synthetic oligonucleotide
caacacagauauggaauuu

SEQ ID NO: 2653306 - RNA, 19 nt, Artificial Sequence
  Description of Artificial Sequence: Synthetic oligonucleotide
caccuuccagccucauugu

SEQ ID NO: 2653307 - RNA, 19 nt, Artificial Sequence
  Description of Artificial Sequence: Synthetic oligonucleotide
ggccucugauuuguaaugu

SEQ ID NO: 2653308 - RNA, 19 nt, Artificial Sequence
  Description of Artificial Sequence: Synthetic oligonucleotide
cuuuccccuaauggccucu

SEQ ID NO: 2653309 - RNA, 19 nt, Artificial Sequence
  Description of Artificial Sequence: Synthetic oligonucleotide
cagcaggacuaaagugccu

SEQ ID NO: 2653310 - RNA, 19 nt, Artificial Sequence
  Description of Artificial Sequence: Synthetic oligonucleotide
cgacacacacacacacaca

SEQ ID NO: 2653311 - RNA, 19 nt, Artificial Sequence
  Description of Artificial Sequence: Synthetic oligonucleotide
gggcaaggcagggcuucug

SEQ ID NO: 2653312 - RNA, 19 nt, Artificial Sequence
  Description of Artificial Sequence: Synthetic oligonucleotide
cccugacaaguacuuccga

SEQ ID NO: 2653313 - RNA, 19 nt, Artificial Sequence
  Description of Artificial Sequence: Synthetic oligonucleotide
cgacuuggcgacacacaca

SEQ ID NO: 2653314 - RNA, 19 nt, Artificial Sequence
  Description of Artificial Sequence: Synthetic oligonucleotide
gccuggggcaaggcagggc

SEQ ID NO: 2653315 - RNA, 19 nt, Artificial Sequence
  Description of Artificial Sequence: Synthetic oligonucleotide
gcguagugucuacgucaga

SEQ ID NO: 2653316 - RNA, 19 nt, Artificial Sequence
  Description of Artificial Sequence: Synthetic oligonucleotide
ccccuaauggccucugauu

SEQ ID NO: 2653317 - RNA, 19 nt, Artificial Sequence
  Description of Artificial Sequence: Synthetic oligonucleotide
gcuugaccagcaggacuaa

SEQ ID NO: 2653318 - RNA, 19 nt, Artificial Sequence
  Description of Artificial Sequence: Synthetic oligonucleotide
cagaggcagccuggggcaa

SEQ ID NO: 2653319 - RNA, 19 nt, Artificial Sequence
  Description of Artificial Sequence: Synthetic oligonucleotide
cccaguccucagccagcac

SEQ ID NO: 2653320 - RNA, 19 nt, Artificial Sequence
  Description of Artificial Sequence: Synthetic oligonucleotide
cccuugugcguagugucua

SEQ ID NO: 2653321 - RNA, 19 nt, Artificial Sequence
  Description of Artificial Sequence: Synthetic oligonucleotide
ccucagccagcaccccuga

SEQ ID NO: 2653322 - RNA, 19 nt, Artificial Sequence
  Description of Artificial Sequence: Synthetic oligonucleotide
gcaccccugacaaguacuu

SEQ ID NO: 2653323 - RNA, 19 nt, Artificial Sequence
  Description of Artificial Sequence: Synthetic oligonucleotide
ccagccucauuguccacuu

SEQ ID NO: 2653324 - RNA, 19 nt, Artificial Sequence
  Description of Artificial Sequence: Synthetic oligonucleotide
ggggcaaggcagggcuucu

SEQ ID NO: 2653325 - RNA, 19 nt, Artificial Sequence
  Description of Artificial Sequence: Synthetic oligonucleotide
cagccucauuguccacuuu

SEQ ID NO: 2653326 - RNA, 19 nt, Artificial Sequence
  Description of Artificial Sequence: Synthetic oligonucleotide
ggcaaacaccaugcaccuu

SEQ ID NO: 2653327 - RNA, 19 nt, Artificial Sequence
  Description of Artificial Sequence: Synthetic oligonucleotide
cgagccagauggcuugcuu

SEQ ID NO: 2653328 - RNA, 19 nt, Artificial Sequence
  Description of Artificial Sequence: Synthetic oligonucleotide
aaucaaaccauucagacag

SEQ ID NO: 2653329 - RNA, 19 nt, Artificial Sequence
  Description of Artificial Sequence: Synthetic oligonucleotide
aguagauucuuccaaaugc

SEQ ID NO: 2653330 - RNA, 19 nt, Artificial Sequence
  Description of Artificial Sequence: Synthetic oligonucleotide
aagauaaacuaucagauca

SEQ ID NO: 2653331 - RNA, 19 nt, Artificial Sequence
  Description of Artificial Sequence: Synthetic oligonucleotide
auugugguacauuagaccc

SEQ ID NO: 2653332 - RNA, 19 nt, Artificial Sequence
  Description of Artificial Sequence: Synthetic oligonucleotide
guacauuagacccagaggg

SEQ ID NO: 2653333 - RNA, 19 nt, Artificial Sequence
  Description of Artificial Sequence: Synthetic oligonucleotide
aaugacuuucuccucuucc

SEQ ID NO: 2653334 - RNA, 19 nt, Artificial Sequence
  Description of Artificial Sequence: Synthetic oligonucleotide
uaacauuuucuccaagucg

SEQ ID NO: 2653335 - RNA, 19 nt, Artificial Sequence
  Description of Artificial Sequence: Synthetic oligonucleotide
uguucaaagaguucuaaca

SEQ ID NO: 2653336 - RNA, 19 nt, Artificial Sequence
  Description of Artificial Sequence: Synthetic oligonucleotide
acauuaauguuccugauga

SEQ ID NO: 2653337 - RNA, 19 nt, Artificial Sequence
  Description of Artificial Sequence: Synthetic oligonucleotide
ucuggaguuaauauccggg

SEQ ID NO: 2653338 - RNA, 19 nt, Artificial Sequence
  Description of Artificial Sequence: Synthetic oligonucleotide
ucgaagauaaacuaucaga

SEQ ID NO: 2653339 - RNA, 19 nt, Artificial Sequence
  Description of Artificial Sequence: Synthetic oligonucleotide
uguaaauugaccuuuccau

SEQ ID NO: 2653340 - RNA, 19 nt, Artificial Sequence
  Description of Artificial Sequence: Synthetic oligonucleotide
aauggggacauuaauguuc

SEQ ID NO: 2653341 - RNA, 19 nt, Artificial Sequence
  Description of Artificial Sequence: Synthetic oligonucleotide
uccaaaugcuccuaaacag

SEQ ID NO: 2653342 - RNA, 19 nt, Artificial Sequence
  Description of Artificial Sequence: Synthetic oligonucleotide
uggugaauagcacugaggu

SEQ ID NO: 2653343 - RNA, 19 nt, Artificial Sequence
  Description of Artificial Sequence: Synthetic oligonucleotide
aacauagugagcugcacgu

SEQ ID NO: 2653344 - RNA, 19 nt, Artificial Sequence
  Description of Artificial Sequence: Synthetic oligonucleotide
uucagacagaaucacauac

SEQ ID NO: 2653345 - RNA, 19 nt, Artificial Sequence
  Description of Artificial Sequence: Synthetic oligonucleotide
uaaauugaccuuuccauca

SEQ ID NO: 2653346 - RNA, 19 nt, Artificial Sequence
  Description of Artificial Sequence: Synthetic oligonucleotide
aacuaucagaucaaugggg

SEQ ID NO: 2653347 - RNA, 19 nt, Artificial Sequence
  Description of Artificial Sequence: Synthetic oligonucleotide
augacuuucuccucuuccc

SEQ ID NO: 2653348 - RNA, 19 nt, Artificial Sequence
  Description of Artificial Sequence: Synthetic oligonucleotide
uauuccauuggaaugacuu

SEQ ID NO: 2653349 - RNA, 19 nt, Artificial Sequence
  Description of Artificial Sequence: Synthetic oligonucleotide
uuccaaaugcuccuaaaca

SEQ ID NO: 2653350 - RNA, 19 nt, Artificial Sequence
  Description of Artificial Sequence: Synthetic oligonucleotide
aacauuuucuccaagucgu

SEQ ID NO: 2653351 - RNA, 19 nt, Artificial Sequence
  Description of Artificial Sequence: Synthetic oligonucleotide
auuaauguuccugaugauc

SEQ ID NO: 2653352 - RNA, 19 nt, Artificial Sequence
  Description of Artificial Sequence: Synthetic oligonucleotide
cuuuccaucaaccguacag

SEQ ID NO: 2653353 - RNA, 19 nt, Artificial Sequence
  Description of Artificial Sequence: Synthetic oligonucleotide
ugguacauuagacccagag

SEQ ID NO: 2653354 - RNA, 19 nt, Artificial Sequence
  Description of Artificial Sequence: Synthetic oligonucleotide
ucaaagaguucuaacauuu

SEQ ID NO: 2653355 - RNA, 19 nt, Artificial Sequence
  Description of Artificial Sequence: Synthetic oligonucleotide
aaugcuccuaaacagcuaa

SEQ ID NO: 2653356 - RNA, 19 nt, Artificial Sequence
  Description of Artificial Sequence: Synthetic oligonucleotide
uucgaagauaaacuaucag

SEQ ID NO: 2653357 - RNA, 19 nt, Artificial Sequence
  Description of Artificial Sequence: Synthetic oligonucleotide
ucacauacucaacuuuggg

SEQ ID NO: 2653358 - RNA, 19 nt, Artificial Sequence
  Description of Artificial Sequence: Synthetic oligonucleotide
agauucuuccaaaugcucc

SEQ ID NO: 2653359 - RNA, 19 nt, Artificial Sequence
  Description of Artificial Sequence: Synthetic oligonucleotide
uaucuugcgcuguaaauug

SEQ ID NO: 2653360 - RNA, 19 nt, Artificial Sequence
  Description of Artificial Sequence: Synthetic oligonucleotide
uugaccuuuccaucaaccg

SEQ ID NO: 2653361 - RNA, 19 nt, Artificial Sequence
  Description of Artificial Sequence: Synthetic oligonucleotide
cauugugguacauuagacc

SEQ ID NO: 2653362 - RNA, 19 nt, Artificial Sequence
  Description of Artificial Sequence: Synthetic oligonucleotide
aaacacuccuaacaguaga

SEQ ID NO: 2653363 - RNA, 19 nt, Artificial Sequence
  Description of Artificial Sequence: Synthetic oligonucleotide
auccaaucaaaccauucag

SEQ ID NO: 2653364 - RNA, 19 nt, Artificial Sequence
  Description of Artificial Sequence: Synthetic oligonucleotide
cugaugauccaaucaaacc

SEQ ID NO: 2653365 - RNA, 19 nt, Artificial Sequence
  Description of Artificial Sequence: Synthetic oligonucleotide
aggacgagugugcuggucc

SEQ ID NO: 2653366 - RNA, 19 nt, Artificial Sequence
  Description of Artificial Sequence: Synthetic oligonucleotide
acuuugggcaucuucccac

SEQ ID NO: 2653367 - RNA, 19 nt, Artificial Sequence
  Description of Artificial Sequence: Synthetic oligonucleotide
gagguauuccauuggaaug

SEQ ID NO: 2653368 - RNA, 19 nt, Artificial Sequence
  Description of Artificial Sequence: Synthetic oligonucleotide
acaggugacaucugaggac

SEQ ID NO: 2653369 - RNA, 19 nt, Artificial Sequence
  Description of Artificial Sequence: Synthetic oligonucleotide
ugagguauuccauuggaau

SEQ ID NO: 2653370 - RNA, 19 nt, Artificial Sequence
  Description of Artificial Sequence: Synthetic oligonucleotide
uccaaucaaaccauucaga

SEQ ID NO: 2653371 - RNA, 19 nt, Artificial Sequence
  Description of Artificial Sequence: Synthetic oligonucleotide
uacaggugacaucugagga

SEQ ID NO: 2653372 - RNA, 19 nt, Artificial Sequence
  Description of Artificial Sequence: Synthetic oligonucleotide
aaccguacaggugacaucu

SEQ ID NO: 2653373 - RNA, 19 nt, Artificial Sequence
  Description of Artificial Sequence: Synthetic oligonucleotide
gauccaaucaaaccauuca

SEQ ID NO: 2653374 - RNA, 19 nt, Artificial Sequence
  Description of Artificial Sequence: Synthetic oligonucleotide
auugaccuuuccaucaacc

SEQ ID NO: 2653375 - RNA, 19 nt, Artificial Sequence
  Description of Artificial Sequence: Synthetic oligonucleotide
ucuuuaaucucugguagca

SEQ ID NO: 2653376 - RNA, 19 nt, Artificial Sequence
  Description of Artificial Sequence: Synthetic oligonucleotide
ugacaucugaggacgagug

SEQ ID NO: 2653377 - RNA, 19 nt, Artificial Sequence
  Description of Artificial Sequence: Synthetic oligonucleotide
uggaguuaauauccgggcc

SEQ ID NO: 2653378 - RNA, 19 nt, Artificial Sequence
  Description of Artificial Sequence: Synthetic oligonucleotide
cuaaccuggcccuacuggg

SEQ ID NO: 2653379 - RNA, 19 nt, Artificial Sequence
  Description of Artificial Sequence: Synthetic oligonucleotide
agacccagaggguuguggc

SEQ ID NO: 2653380 - RNA, 19 nt, Artificial Sequence
  Description of Artificial Sequence: Synthetic oligonucleotide
gaagauaaacuaucagauc

SEQ ID NO: 2653381 - RNA, 19 nt, Artificial Sequence
  Description of Artificial Sequence: Synthetic oligonucleotide
acgucugcagugcaaggcc

SEQ ID NO: 2653382 - RNA, 19 nt, Artificial Sequence
  Description of Artificial Sequence: Synthetic oligonucleotide
guacaggugacaucugagg

SEQ ID NO: 2653383 - RNA, 19 nt, Artificial Sequence
  Description of Artificial Sequence: Synthetic oligonucleotide
aaucucugguagcagauuu

SEQ ID NO: 2653384 - RNA, 19 nt, Artificial Sequence
  Description of Artificial Sequence: Synthetic oligonucleotide
gaguucuaacauuuucucc

SEQ ID NO: 2653385 - RNA, 19 nt, Artificial Sequence
  Description of Artificial Sequence: Synthetic oligonucleotide
uccuguuccugucuuguag

SEQ ID NO: 2653386 - RNA, 19 nt, Artificial Sequence
  Description of Artificial Sequence: Synthetic oligonucleotide
cauuucuccacuugaguac

SEQ ID NO: 2653387 - RNA, 19 nt, Artificial Sequence
  Description of Artificial Sequence: Synthetic oligonucleotide
acugggcuguuccuguucc

SEQ ID NO: 2653388 - RNA, 19 nt, Artificial Sequence
  Description of Artificial Sequence: Synthetic oligonucleotide
uguagcugggaaaaggcua

SEQ ID NO: 2653389 - RNA, 19 nt, Artificial Sequence
  Description of Artificial Sequence: Synthetic oligonucleotide
ucagccucaaucaccagaa

SEQ ID NO: 2653390 - RNA, 19 nt, Artificial Sequence
  Description of Artificial Sequence: Synthetic oligonucleotide
ugaccuuuccaucaaccgu

SEQ ID NO: 2653391 - RNA, 19 nt, Artificial Sequence
  Description of Artificial Sequence: Synthetic oligonucleotide
gguacauuagacccagagg

SEQ ID NO: 2653392 - RNA, 19 nt, Artificial Sequence
  Description of Artificial Sequence: Synthetic oligonucleotide
cuggaguuaauauccgggc

SEQ ID NO: 2653393 - RNA, 19 nt, Artificial Sequence
  Description of Artificial Sequence: Synthetic oligonucleotide
ugggaaaaggcuaccggug

SEQ ID NO: 2653394 - RNA, 19 nt, Artificial Sequence
  Description of Artificial Sequence: Synthetic oligonucleotide
caucuucccacuucuauac

SEQ ID NO: 2653395 - RNA, 19 nt, Artificial Sequence
  Description of Artificial Sequence: Synthetic oligonucleotide
guaaauugaccuuuccauc

SEQ ID NO: 2653396 - RNA, 19 nt, Artificial Sequence
  Description of Artificial Sequence: Synthetic oligonucleotide
guagucuucgucgacugcg

SEQ ID NO: 2653397 - RNA, 19 nt, Artificial Sequence
  Description of Artificial Sequence: Synthetic oligonucleotide
ugugguacauuagacccag

SEQ ID NO: 2653398 - RNA, 19 nt, Artificial Sequence
  Description of Artificial Sequence: Synthetic oligonucleotide
ucauagagguggugaauag

SEQ ID NO: 2653399 - RNA, 19 nt, Artificial Sequence
  Description of Artificial Sequence: Synthetic oligonucleotide
uugcgcuguaaauugaccu

SEQ ID NO: 2653400 - RNA, 19 nt, Artificial Sequence
  Description of Artificial Sequence: Synthetic oligonucleotide
ucgacugcggcguugucag

SEQ ID NO: 2653401 - RNA, 19 nt, Artificial Sequence
  Description of Artificial Sequence: Synthetic oligonucleotide
cugaggacgagugugcugg

SEQ ID NO: 2653402 - RNA, 19 nt, Artificial Sequence
  Description of Artificial Sequence: Synthetic oligonucleotide
agugguucgaagauaaacu

SEQ ID NO: 2653403 - RNA, 19 nt, Artificial Sequence
  Description of Artificial Sequence: Synthetic oligonucleotide
cuuccaaaugcuccuaaac

SEQ ID NO: 2653404 - RNA, 19 nt, Artificial Sequence
  Description of Artificial Sequence: Synthetic oligonucleotide
caaucaccagaacaggggc

SEQ ID NO: 2653405 - RNA, 19 nt, Artificial Sequence
  Description of Artificial Sequence: Synthetic oligonucleotide
ucgacuggcauugugguac

SEQ ID NO: 2653406 - RNA, 19 nt, Artificial Sequence
  Description of Artificial Sequence: Synthetic oligonucleotide
auagcacugagguauucca

SEQ ID NO: 2653407 - RNA, 19 nt, Artificial Sequence
  Description of Artificial Sequence: Synthetic oligonucleotide
ugauccaaucaaaccauuc

SEQ ID NO: 2653408 - RNA, 19 nt, Artificial Sequence
  Description of Artificial Sequence: Synthetic oligonucleotide
acauuucuccacuugagua

SEQ ID NO: 2653409 - RNA, 19 nt, Artificial Sequence
  Description of Artificial Sequence: Synthetic oligonucleotide
uguaucuugcgcuguaaau

SEQ ID NO: 2653410 - RNA, 19 nt, Artificial Sequence
  Description of Artificial Sequence: Synthetic oligonucleotide
aaauugaccuuuccaucaa

SEQ ID NO: 2653411 - RNA, 19 nt, Artificial Sequence
  Description of Artificial Sequence: Synthetic oligonucleotide
accauucagacagaaucac

SEQ ID NO: 2653412 - RNA, 19 nt, Artificial Sequence
  Description of Artificial Sequence: Synthetic oligonucleotide
ugcacguacgucugcagug

SEQ ID NO: 2653413 - RNA, 19 nt, Artificial Sequence
  Description of Artificial Sequence: Synthetic oligonucleotide
aacuuugggcaucuuccca

SEQ ID NO: 2653414 - RNA, 19 nt, Artificial Sequence
  Description of Artificial Sequence: Synthetic oligonucleotide
ggaguuaauauccgggccc

SEQ ID NO: 2653415 - RNA, 19 nt, Artificial Sequence
  Description of Artificial Sequence: Synthetic oligonucleotide
agccucaaucaccagaaca

SEQ ID NO: 2653416 - RNA, 19 nt, Artificial Sequence
  Description of Artificial Sequence: Synthetic oligonucleotide
gaguuaauauccgggcccg

SEQ ID NO: 2653417 - RNA, 19 nt, Artificial Sequence
  Description of Artificial Sequence: Synthetic oligonucleotide
aaccauucagacagaauca

SEQ ID NO: 2653418 - RNA, 19 nt, Artificial Sequence
  Description of Artificial Sequence: Synthetic oligonucleotide
acugagguauuccauugga

SEQ ID NO: 2653419 - RNA, 19 nt, Artificial Sequence
  Description of Artificial Sequence: Synthetic oligonucleotide
uacauuagacccagagggu

SEQ ID NO: 2653420 - RNA, 19 nt, Artificial Sequence
  Description of Artificial Sequence: Synthetic oligonucleotide
ggcguugucaguccuacgg

SEQ ID NO: 2653421 - RNA, 19 nt, Artificial Sequence
  Description of Artificial Sequence: Synthetic oligonucleotide
gagugguucgaagauaaac

SEQ ID NO: 2653422 - RNA, 19 nt, Artificial Sequence
  Description of Artificial Sequence: Synthetic oligonucleotide
ucuugcgcuguaaauugac

SEQ ID NO: 2653423 - RNA, 19 nt, Artificial Sequence
  Description of Artificial Sequence: Synthetic oligonucleotide
cauagugagcugcacguac

SEQ ID NO: 2653424 - RNA, 19 nt, Artificial Sequence
  Description of Artificial Sequence: Synthetic oligonucleotide
aaaauguaucuugcgcugu

SEQ ID NO: 2653425 - RNA, 19 nt, Artificial Sequence
  Description of Artificial Sequence: Synthetic oligonucleotide
caggugacaucugaggacg

SEQ ID NO: 2653426 - RNA, 19 nt, Artificial Sequence
  Description of Artificial Sequence: Synthetic oligonucleotide
uagucuucgucgacugcgg

SEQ ID NO: 2653427 - RNA, 19 nt, Artificial Sequence
  Description of Artificial Sequence: Synthetic oligonucleotide
ugcuccuaaacagcuaacc

SEQ ID NO: 2653428 - RNA, 19 nt, Artificial Sequence
  Description of Artificial Sequence: Synthetic oligonucleotide
uccaucaaccguacaggug

SEQ ID NO: 2653429 - RNA, 19 nt, Artificial Sequence
  Description of Artificial Sequence: Synthetic oligonucleotide
ucaggagugguucgaagau

SEQ ID NO: 2653430 - RNA, 19 nt, Artificial Sequence
  Description of Artificial Sequence: Synthetic oligonucleotide
uuucaggagugguucgaag

SEQ ID NO: 2653431 - RNA, 19 nt, Artificial Sequence
  Description of Artificial Sequence: Synthetic oligonucleotide
uuuuguucaaagaguucua

SEQ ID NO: 2653432 - RNA, 19 nt, Artificial Sequence
  Description of Artificial Sequence: Synthetic oligonucleotide
acuaucagaucaaugggga

SEQ ID NO: 2653433 - RNA, 19 nt, Artificial Sequence
  Description of Artificial Sequence: Synthetic oligonucleotide
ucguggucagccucaauca

SEQ ID NO: 2653434 - RNA, 19 nt, Artificial Sequence
  Description of Artificial Sequence: Synthetic oligonucleotide
cucuggaguuaauauccgg

SEQ ID NO: 2653435 - RNA, 19 nt, Artificial Sequence
  Description of Artificial Sequence: Synthetic oligonucleotide
caaacacuccuaacaguag

SEQ ID NO: 2653436 - RNA, 19 nt, Artificial Sequence
  Description of Artificial Sequence: Synthetic oligonucleotide
uugugguacauuagaccca

SEQ ID NO: 2653437 - RNA, 19 nt, Artificial Sequence
  Description of Artificial Sequence: Synthetic oligonucleotide
acugcggcguugucagucc

SEQ ID NO: 2653438 - RNA, 19 nt, Artificial Sequence
  Description of Artificial Sequence: Synthetic oligonucleotide
ugacuuucuccucuucccu

SEQ ID NO: 2653439 - RNA, 19 nt, Artificial Sequence
  Description of Artificial Sequence: Synthetic oligonucleotide
cugguagcagauuucagga

SEQ ID NO: 2653440 - RNA, 19 nt, Artificial Sequence
  Description of Artificial Sequence: Synthetic oligonucleotide
agguauuccauuggaauga

SEQ ID NO: 2653441 - RNA, 19 nt, Artificial Sequence
  Description of Artificial Sequence: Synthetic oligonucleotide
ucucugguagcagauuuca

SEQ ID NO: 2653442 - RNA, 19 nt, Artificial Sequence
  Description of Artificial Sequence: Synthetic oligonucleotide
aucacauacucaacuuugg

SEQ ID NO: 2653443 - RNA, 19 nt, Artificial Sequence
  Description of Artificial Sequence: Synthetic oligonucleotide
aaauguaucuugcgcugua

SEQ ID NO: 2653444 - RNA, 19 nt, Artificial Sequence
  Description of Artificial Sequence: Synthetic oligonucleotide
gucguggucagccucaauc

SEQ ID NO: 2653445 - RNA, 19 nt, Artificial Sequence
  Description of Artificial Sequence: Synthetic oligonucleotide
cugcaccucaucuuuaauc

SEQ ID NO: 2653446 - RNA, 19 nt, Artificial Sequence
  Description of Artificial Sequence: Synthetic oligonucleotide
uaauguuccugaugaucca

SEQ ID NO: 2653447 - RNA, 19 nt, Artificial Sequence
  Description of Artificial Sequence: Synthetic oligonucleotide
acaaacacuccuaacagua

SEQ ID NO: 2653448 - RNA, 19 nt, Artificial Sequence
  Description of Artificial Sequence: Synthetic oligonucleotide
ugguagcagauuucaggag

SEQ ID NO: 2653449 - RNA, 19 nt, Artificial Sequence
  Description of Artificial Sequence: Synthetic oligonucleotide
caucugaggacgagugugc

SEQ ID NO: 2653450 - RNA, 19 nt, Artificial Sequence
  Description of Artificial Sequence: Synthetic oligonucleotide
caacuuugggcaucuuccc

SEQ ID NO: 2653451 - RNA, 19 nt, Artificial Sequence
  Description of Artificial Sequence: Synthetic oligonucleotide
uuccaucaaccguacaggu

SEQ ID NO: 2653452 - RNA, 19 nt, Artificial Sequence
  Description of Artificial Sequence: Synthetic oligonucleotide
gucuucgucgacugcggcg

SEQ ID NO: 2653453 - RNA, 19 nt, Artificial Sequence
  Description of Artificial Sequence: Synthetic oligonucleotide
caaucaaaccauucagaca

SEQ ID NO: 2653454 - RNA, 19 nt, Artificial Sequence
  Description of Artificial Sequence: Synthetic oligonucleotide
uucccacuucuauacaggu

SEQ ID NO: 2653455 - RNA, 19 nt, Artificial Sequence
  Description of Artificial Sequence: Synthetic oligonucleotide
caguagauucuuccaaaug

SEQ ID NO: 2653456 - RNA, 19 nt, Artificial Sequence
  Description of Artificial Sequence: Synthetic oligonucleotide
acaguagauucuuccaaau

SEQ ID NO: 2653457 - RNA, 19 nt, Artificial Sequence
  Description of Artificial Sequence: Synthetic oligonucleotide
uggcauugugguacauuag

SEQ ID NO: 2653458 - RNA, 19 nt, Artificial Sequence
  Description of Artificial Sequence: Synthetic oligonucleotide
acagaaucacauacucaac

SEQ ID NO: 2653459 - RNA, 19 nt, Artificial Sequence
  Description of Artificial Sequence: Synthetic oligonucleotide
guuccugaugauccaauca

SEQ ID NO: 2653460 - RNA, 19 nt, Artificial Sequence
  Description of Artificial Sequence: Synthetic oligonucleotide
uacgucugcagugcaaggc

SEQ ID NO: 2653461 - RNA, 19 nt, Artificial Sequence
  Description of Artificial Sequence: Synthetic oligonucleotide
uaaccuggcccuacugggc

SEQ ID NO: 2653462 - RNA, 19 nt, Artificial Sequence
  Description of Artificial Sequence: Synthetic oligonucleotide
ucaaccguacaggugacau

SEQ ID NO: 2653463 - RNA, 19 nt, Artificial Sequence
  Description of Artificial Sequence: Synthetic oligonucleotide
auagugagcugcacguacg

SEQ ID NO: 2653464 - RNA, 19 nt, Artificial Sequence
  Description of Artificial Sequence: Synthetic oligonucleotide
cauagagguggugaauagc

SEQ ID NO: 2653465 - RNA, 19 nt, Artificial Sequence
  Description of Artificial Sequence: Synthetic oligonucleotide
aguccuacgggccaugcuu

SEQ ID NO: 2653466 - RNA, 19 nt, Artificial Sequence
  Description of Artificial Sequence: Synthetic oligonucleotide
ucuucgucgacugcggcgu

SEQ ID NO: 2653467 - RNA, 19 nt, Artificial Sequence
  Description of Artificial Sequence: Synthetic oligonucleotide
uuaauauccgggcccgguu

SEQ ID NO: 2653468 - RNA, 19 nt, Artificial Sequence
  Description of Artificial Sequence: Synthetic oligonucleotide
uguuccugaugauccaauc

SEQ ID NO: 2653469 - RNA, 19 nt, Artificial Sequence
  Description of Artificial Sequence: Synthetic oligonucleotide
aauguuccugaugauccaa

SEQ ID NO: 2653470 - RNA, 19 nt, Artificial Sequence
  Description of Artificial Sequence: Synthetic oligonucleotide
gggacauuaauguuccuga

SEQ ID NO: 2653471 - RNA, 19 nt, Artificial Sequence
  Description of Artificial Sequence: Synthetic oligonucleotide
uucuccacuugaguacagg

SEQ ID NO: 2653472 - RNA, 19 nt, Artificial Sequence
  Description of Artificial Sequence: Synthetic oligonucleotide
uccugucuuguagucuucg

SEQ ID NO: 2653473 - RNA, 19 nt, Artificial Sequence
  Description of Artificial Sequence: Synthetic oligonucleotide
ucuuguagucuucgucgac

SEQ ID NO: 2653474 - RNA, 19 nt, Artificial Sequence
  Description of Artificial Sequence: Synthetic oligonucleotide
cacugagguauuccauugg

SEQ ID NO: 2653475 - RNA, 19 nt, Artificial Sequence
  Description of Artificial Sequence: Synthetic oligonucleotide
uccaauucucuggaguuaa

SEQ ID NO: 2653476 - RNA, 19 nt, Artificial Sequence
  Description of Artificial Sequence: Synthetic oligonucleotide
cccgguuuuguucaaagag

SEQ ID NO: 2653477 - RNA, 19 nt, Artificial Sequence
  Description of Artificial Sequence: Synthetic oligonucleotide
acuccuaacaguagauucu

SEQ ID NO: 2653478 - RNA, 19 nt, Artificial Sequence
  Description of Artificial Sequence: Synthetic oligonucleotide
uaauauccgggcccgguuu

SEQ ID NO: 2653479 - RNA, 19 nt, Artificial Sequence
  Description of Artificial Sequence: Synthetic oligonucleotide
cauucagacagaaucacau

SEQ ID NO: 2653480 - RNA, 19 nt, Artificial Sequence
  Description of Artificial Sequence: Synthetic oligonucleotide
ucgcacauuucuccacuug

SEQ ID NO: 2653481 - RNA, 19 nt, Artificial Sequence
  Description of Artificial Sequence: Synthetic oligonucleotide
aacacuccuaacaguagau

SEQ ID NO: 2653482 - RNA, 19 nt, Artificial Sequence
  Description of Artificial Sequence: Synthetic oligonucleotide
auuucuccacuugaguaca

SEQ ID NO: 2653483 - RNA, 19 nt, Artificial Sequence
  Description of Artificial Sequence: Synthetic oligonucleotide
aaucaccagaacaggggcu

SEQ ID NO: 2653484 - RNA, 19 nt, Artificial Sequence
  Description of Artificial Sequence: Synthetic oligonucleotide
cuuuaaucucugguagcag

SEQ ID NO: 2653485 - RNA, 19 nt, Artificial Sequence
  Description of Artificial Sequence: Synthetic oligonucleotide
auuccauuggaaugacuuu

SEQ ID NO: 2653486 - RNA, 19 nt, Artificial Sequence
  Description of Artificial Sequence: Synthetic oligonucleotide
ccaucgacuggcauugugg

SEQ ID NO: 2653487 - RNA, 19 nt, Artificial Sequence
  Description of Artificial Sequence: Synthetic oligonucleotide
aauauccgggcccgguuuu

SEQ ID NO: 2653488 - RNA, 19 nt, Artificial Sequence
  Description of Artificial Sequence: Synthetic oligonucleotide
uagcagauuucaggagugg

SEQ ID NO: 2653489 - RNA, 19 nt, Artificial Sequence
  Description of Artificial Sequence: Synthetic oligonucleotide
uccucauagagguggugaa

SEQ ID NO: 2653490 - RNA, 19 nt, Artificial Sequence
  Description of Artificial Sequence: Synthetic oligonucleotide
ccugaugauccaaucaaac

SEQ ID NO: 2653491 - RNA, 19 nt, Artificial Sequence
  Description of Artificial Sequence: Synthetic oligonucleotide
uguuccuguuccugucuug

SEQ ID NO: 2653492 - RNA, 19 nt, Artificial Sequence
  Description of Artificial Sequence: Synthetic oligonucleotide
guagcugggaaaaggcuac

SEQ ID NO: 2653493 - RNA, 19 nt, Artificial Sequence
  Description of Artificial Sequence: Synthetic oligonucleotide
auacucaacuuugggcauc

SEQ ID NO: 2653494 - RNA, 19 nt, Artificial Sequence
  Description of Artificial Sequence: Synthetic oligonucleotide
ggcauugugguacauuaga

SEQ ID NO: 2653495 - RNA, 19 nt, Artificial Sequence
  Description of Artificial Sequence: Synthetic oligonucleotide
acagcuaaccuggcccuac

SEQ ID NO: 2653496 - RNA, 19 nt, Artificial Sequence
  Description of Artificial Sequence: Synthetic oligonucleotide
auguaucuugcgcuguaaa

SEQ ID NO: 2653497 - RNA, 19 nt, Artificial Sequence
  Description of Artificial Sequence: Synthetic oligonucleotide
cagaaucacauacucaacu

SEQ ID NO: 2653498 - RNA, 19 nt, Artificial Sequence
  Description of Artificial Sequence: Synthetic oligonucleotide
guucgaagauaaacuauca

SEQ ID NO: 2653499 - RNA, 19 nt, Artificial Sequence
  Description of Artificial Sequence: Synthetic oligonucleotide
gacccagaggguuguggcc

SEQ ID NO: 2653500 - RNA, 19 nt, Artificial Sequence
  Description of Artificial Sequence: Synthetic oligonucleotide
caaaugcuccuaaacagcu

SEQ ID NO: 2653501 - RNA, 19 nt, Artificial Sequence
  Description of Artificial Sequence: Synthetic oligonucleotide
ugaauagcacugagguauu

SEQ ID NO: 2653502 - RNA, 19 nt, Artificial Sequence
  Description of Artificial Sequence: Synthetic oligonucleotide
gaggguuguggccucgcac

SEQ ID NO: 2653503 - RNA, 19 nt, Artificial Sequence
  Description of Artificial Sequence: Synthetic oligonucleotide
cuucuauacagguuuucua

SEQ ID NO: 2653504 - RNA, 19 nt, Artificial Sequence
  Description of Artificial Sequence: Synthetic oligonucleotide
ccaucaaccguacagguga

SEQ ID NO: 2653505 - RNA, 19 nt, Artificial Sequence
  Description of Artificial Sequence: Synthetic oligonucleotide
gaccuuuccaucaaccgua

SEQ ID NO: 2653506 - RNA, 19 nt, Artificial Sequence
  Description of Artificial Sequence: Synthetic oligonucleotide
gauuucaggagugguucga

SEQ ID NO: 2653507 - RNA, 19 nt, Artificial Sequence
  Description of Artificial Sequence: Synthetic oligonucleotide
acauuagacccagaggguu

SEQ ID NO: 2653508 - RNA, 19 nt, Artificial Sequence
  Description of Artificial Sequence: Synthetic oligonucleotide
gaugauccaaucaaaccau

SEQ ID NO: 2653509 - RNA, 19 nt, Artificial Sequence
  Description of Artificial Sequence: Synthetic oligonucleotide
guucuaacauuuucuccaa

SEQ ID NO: 2653510 - RNA, 19 nt, Artificial Sequence
  Description of Artificial Sequence: Synthetic oligonucleotide
uccuaacaguagauucuuc

SEQ ID NO: 2653511 - RNA, 19 nt, Artificial Sequence
  Description of Artificial Sequence: Synthetic oligonucleotide
agugugcugguccaacaua

SEQ ID NO: 2653512 - RNA, 19 nt, Artificial Sequence
  Description of Artificial Sequence: Synthetic oligonucleotide
ugcagugcaaggccccauc

SEQ ID NO: 2653513 - RNA, 19 nt, Artificial Sequence
  Description of Artificial Sequence: Synthetic oligonucleotide
guagauucuuccaaaugcu

SEQ ID NO: 2653514 - RNA, 19 nt, Artificial Sequence
  Description of Artificial Sequence: Synthetic oligonucleotide
gaucaauggggacauuaau

SEQ ID NO: 2653515 - RNA, 19 nt, Artificial Sequence
  Description of Artificial Sequence: Synthetic oligonucleotide
ggggacauuaauguuccug

SEQ ID NO: 2653516 - RNA, 19 nt, Artificial Sequence
  Description of Artificial Sequence: Synthetic oligonucleotide
gguagcagauuucaggagu

SEQ ID NO: 2653517 - RNA, 19 nt, Artificial Sequence
  Description of Artificial Sequence: Synthetic oligonucleotide
agaucaauggggacauuaa

SEQ ID NO: 2653518 - RNA, 19 nt, Artificial Sequence
  Description of Artificial Sequence: Synthetic oligonucleotide
aguuaauauccgggcccgg

SEQ ID NO: 2653519 - RNA, 19 nt, Artificial Sequence
  Description of Artificial Sequence: Synthetic oligonucleotide
cuguuccugucuuguaguc

SEQ ID NO: 2653520 - RNA, 19 nt, Artificial Sequence
  Description of Artificial Sequence: Synthetic oligonucleotide
uccuacgggccaugcuucc

SEQ ID NO: 2653521 - RNA, 19 nt, Artificial Sequence
  Description of Artificial Sequence: Synthetic oligonucleotide
gcguugucaguccuacggg

SEQ ID NO: 2653522 - RNA, 19 nt, Artificial Sequence
  Description of Artificial Sequence: Synthetic oligonucleotide
caagucguggucagccuca

SEQ ID NO: 2653523 - RNA, 19 nt, Artificial Sequence
  Description of Artificial Sequence: Synthetic oligonucleotide
gacugcggcguugucaguc

SEQ ID NO: 2653524 - RNA, 19 nt, Artificial Sequence
  Description of Artificial Sequence: Synthetic oligonucleotide
gcagugcaaggccccaucg

SEQ ID NO: 2653525 - RNA, 19 nt, Artificial Sequence
  Description of Artificial Sequence: Synthetic oligonucleotide
aaaugcuccuaaacagcua

SEQ ID NO: 2653526 - RNA, 19 nt, Artificial Sequence
  Description of Artificial Sequence: Synthetic oligonucleotide
accuuuccaucaaccguac

SEQ ID NO: 2653527 - RNA, 19 nt, Artificial Sequence
  Description of Artificial Sequence: Synthetic oligonucleotide
caucaaccguacaggugac

SEQ ID NO: 2653528 - RNA, 19 nt, Artificial Sequence
  Description of Artificial Sequence: Synthetic oligonucleotide
cugggaaaaggcuaccggu

SEQ ID NO: 2653529 - RNA, 19 nt, Artificial Sequence
  Description of Artificial Sequence: Synthetic oligonucleotide
ggcccuacugggcuguucc

SEQ ID NO: 2653530 - RNA, 19 nt, Artificial Sequence
  Description of Artificial Sequence: Synthetic oligonucleotide
uuccaauucucuggaguua

SEQ ID NO: 2653531 - RNA, 19 nt, Artificial Sequence
  Description of Artificial Sequence: Synthetic oligonucleotide
gcuaccggugaccagccac

SEQ ID NO: 2653532 - RNA, 19 nt, Artificial Sequence
  Description of Artificial Sequence: Synthetic oligonucleotide
gcauugugguacauuagac

SEQ ID NO: 2653533 - RNA, 19 nt, Artificial Sequence
  Description of Artificial Sequence: Synthetic oligonucleotide
guaucuugcgcuguaaauu

SEQ ID NO: 2653534 - RNA, 19 nt, Artificial Sequence
  Description of Artificial Sequence: Synthetic oligonucleotide
caaccguacaggugacauc

SEQ ID NO: 2653535 - RNA, 19 nt, Artificial Sequence
  Description of Artificial Sequence: Synthetic oligonucleotide
augcuccuaaacagcuaac

SEQ ID NO: 2653536 - RNA, 19 nt, Artificial Sequence
  Description of Artificial Sequence: Synthetic oligonucleotide
ucaguccuacgggccaugc

SEQ ID NO: 2653537 - RNA, 19 nt, Artificial Sequence
  Description of Artificial Sequence: Synthetic oligonucleotide
ucugcagugcaaggcccca

SEQ ID NO: 2653538 - RNA, 19 nt, Artificial Sequence
  Description of Artificial Sequence: Synthetic oligonucleotide
uuugggcaucuucccacuu

SEQ ID NO: 2653539 - RNA, 19 nt, Artificial Sequence
  Description of Artificial Sequence: Synthetic oligonucleotide
ggcccgguuuuguucaaag

SEQ ID NO: 2653540 - RNA, 19 nt, Artificial Sequence
  Description of Artificial Sequence: Synthetic oligonucleotide
cagaucaauggggacauua

SEQ ID NO: 2653541 - RNA, 19 nt, Artificial Sequence
  Description of Artificial Sequence: Synthetic oligonucleotide
cguacaggugacaucugag

SEQ ID NO: 2653542 - RNA, 19 nt, Artificial Sequence
  Description of Artificial Sequence: Synthetic oligonucleotide
agaggguuguggccucgca

SEQ ID NO: 2653543 - RNA, 19 nt, Artificial Sequence
  Description of Artificial Sequence: Synthetic oligonucleotide
aggcuaccggugaccagcc

SEQ ID NO: 2653544 - RNA, 19 nt, Artificial Sequence
  Description of Artificial Sequence: Synthetic oligonucleotide
cagaacaggggcuguagcu

SEQ ID NO: 2653545 - RNA, 19 nt, Artificial Sequence
  Description of Artificial Sequence: Synthetic oligonucleotide
ccucaaucaccagaacagg

SEQ ID NO: 2653546 - RNA, 19 nt, Artificial Sequence
  Description of Artificial Sequence: Synthetic oligonucleotide
caauucucuggaguuaaua

SEQ ID NO: 2653547 - RNA, 19 nt, Artificial Sequence
  Description of Artificial Sequence: Synthetic oligonucleotide
guuguggccucgcacauuu

SEQ ID NO: 2653548 - RNA, 19 nt, Artificial Sequence
  Description of Artificial Sequence: Synthetic oligonucleotide
ggugacaucugaggacgag

SEQ ID NO: 2653549 - RNA, 19 nt, Artificial Sequence
  Description of Artificial Sequence: Synthetic oligonucleotide
cuuguagucuucgucgacu

SEQ ID NO: 2653550 - RNA, 19 nt, Artificial Sequence
  Description of Artificial Sequence: Synthetic oligonucleotide
agcugcacguacgucugca

SEQ ID NO: 2653551 - RNA, 19 nt, Artificial Sequence
  Description of Artificial Sequence: Synthetic oligonucleotide
caucgacuggcauuguggu

SEQ ID NO: 2653552 - RNA, 19 nt, Artificial Sequence
  Description of Artificial Sequence: Synthetic oligonucleotide
gucugcagugcaaggcccc

SEQ ID NO: 2653553 - RNA, 19 nt, Artificial Sequence
  Description of Artificial Sequence: Synthetic oligonucleotide
gucgacugcggcguuguca

SEQ ID NO: 2653554 - RNA, 19 nt, Artificial Sequence
  Description of Artificial Sequence: Synthetic oligonucleotide
uucgucgacugcggcguug

SEQ ID NO: 2653555 - RNA, 19 nt, Artificial Sequence
  Description of Artificial Sequence: Synthetic oligonucleotide
acacuccuaacaguagauu

SEQ ID NO: 2653556 - RNA, 19 nt, Artificial Sequence
  Description of Artificial Sequence: Synthetic oligonucleotide
ccuaaacagcuaaccuggc

SEQ ID NO: 2653557 - RNA, 19 nt, Artificial Sequence
  Description of Artificial Sequence: Synthetic oligonucleotide
ucgucgacugcggcguugu

SEQ ID NO: 2653558 - RNA, 19 nt, Artificial Sequence
  Description of Artificial Sequence: Synthetic oligonucleotide
guuaauauccgggcccggu

SEQ ID NO: 2653559 - RNA, 19 nt, Artificial Sequence
  Description of Artificial Sequence: Synthetic oligonucleotide
gguauuccauuggaaugac

SEQ ID NO: 2653560 - RNA, 19 nt, Artificial Sequence
  Description of Artificial Sequence: Synthetic oligonucleotide
gcuccuaaacagcuaaccu

SEQ ID NO: 2653561 - RNA, 19 nt, Artificial Sequence
  Description of Artificial Sequence: Synthetic oligonucleotide
uuagacccagaggguugug

SEQ ID NO: 2653562 - RNA, 19 nt, Artificial Sequence
  Description of Artificial Sequence: Synthetic oligonucleotide
ugaggacgagugugcuggu

SEQ ID NO: 2653563 - RNA, 19 nt, Artificial Sequence
  Description of Artificial Sequence: Synthetic oligonucleotide
aucuugcgcuguaaauuga

SEQ ID NO: 2653564 - RNA, 19 nt, Artificial Sequence
  Description of Artificial Sequence: Synthetic oligonucleotide
gcaucuucccacuucuaua

SEQ ID NO: 2653565 - RNA, 19 nt, Artificial Sequence
  Description of Artificial Sequence: Synthetic oligonucleotide
aacagcuaaccuggcccua

SEQ ID NO: 2653566 - RNA, 19 nt, Artificial Sequence
  Description of Artificial Sequence: Synthetic oligonucleotide
uauccgggcccgguuuugu

SEQ ID NO: 2653567 - RNA, 19 nt, Artificial Sequence
  Description of Artificial Sequence: Synthetic oligonucleotide
auguuccugaugauccaau

SEQ ID NO: 2653568 - RNA, 19 nt, Artificial Sequence
  Description of Artificial Sequence: Synthetic oligonucleotide
ucaccagaacaggggcugu

SEQ ID NO: 2653569 - RNA, 19 nt, Artificial Sequence
  Description of Artificial Sequence: Synthetic oligonucleotide
aucaaccguacaggugaca

SEQ ID NO: 2653570 - RNA, 19 nt, Artificial Sequence
  Description of Artificial Sequence: Synthetic oligonucleotide
cauacucaacuuugggcau

SEQ ID NO: 2653571 - RNA, 19 nt, Artificial Sequence
  Description of Artificial Sequence: Synthetic oligonucleotide
ugcggcguugucaguccua

SEQ ID NO: 2653572 - RNA, 19 nt, Artificial Sequence
  Description of Artificial Sequence: Synthetic oligonucleotide
uacgggccaugcuuccaau

SEQ ID NO: 2653573 - RNA, 19 nt, Artificial Sequence
  Description of Artificial Sequence: Synthetic oligonucleotide
acauagugagcugcacgua

SEQ ID NO: 2653574 - RNA, 19 nt, Artificial Sequence
  Description of Artificial Sequence: Synthetic oligonucleotide
cagugcaaggccccaucga

SEQ ID NO: 2653575 - RNA, 19 nt, Artificial Sequence
  Description of Artificial Sequence: Synthetic oligonucleotide
augauccaaucaaaccauu

SEQ ID NO: 2653576 - RNA, 19 nt, Artificial Sequence
  Description of Artificial Sequence: Synthetic oligonucleotide
uggggacauuaauguuccu

SEQ ID NO: 2653577 - RNA, 19 nt, Artificial Sequence
  Description of Artificial Sequence: Synthetic oligonucleotide
gccccaucgacuggcauug

SEQ ID NO: 2653578 - RNA, 19 nt, Artificial Sequence
  Description of Artificial Sequence: Synthetic oligonucleotide
gcacguacgucugcagugc

SEQ ID NO: 2653579 - RNA, 19 nt, Artificial Sequence
  Description of Artificial Sequence: Synthetic oligonucleotide
cguacgucugcagugcaag

SEQ ID NO: 2653580 - RNA, 19 nt, Artificial Sequence
  Description of Artificial Sequence: Synthetic oligonucleotide
cuaccggugaccagccacu

SEQ ID NO: 2653581 - RNA, 19 nt, Artificial Sequence
  Description of Artificial Sequence: Synthetic oligonucleotide
cuacgggccaugcuuccaa

SEQ ID NO: 2653582 - RNA, 19 nt, Artificial Sequence
  Description of Artificial Sequence: Synthetic oligonucleotide
gugacaucugaggacgagu

SEQ ID NO: 2653583 - RNA, 19 nt, Artificial Sequence
  Description of Artificial Sequence: Synthetic oligonucleotide
aagucguggucagccucaa

SEQ ID NO: 2653584 - RNA, 19 nt, Artificial Sequence
  Description of Artificial Sequence: Synthetic oligonucleotide
guggccucgcacauuucuc

SEQ ID NO: 2653585 - RNA, 19 nt, Artificial Sequence
  Description of Artificial Sequence: Synthetic oligonucleotide
ggggcuguagcugggaaaa

SEQ ID NO: 2653586 - RNA, 19 nt, Artificial Sequence
  Description of Artificial Sequence: Synthetic oligonucleotide
guccuacgggccaugcuuc

SEQ ID NO: 2653587 - RNA, 19 nt, Artificial Sequence
  Description of Artificial Sequence: Synthetic oligonucleotide
ccaagucguggucagccuc

SEQ ID NO: 2653588 - RNA, 19 nt, Artificial Sequence
  Description of Artificial Sequence: Synthetic oligonucleotide
cagccucaaucaccagaac

SEQ ID NO: 2653589 - RNA, 19 nt, Artificial Sequence
  Description of Artificial Sequence: Synthetic oligonucleotide
cauuaauguuccugaugau

SEQ ID NO: 2653590 - RNA, 19 nt, Artificial Sequence
  Description of Artificial Sequence: Synthetic oligonucleotide
caaagaguucuaacauuuu

SEQ ID NO: 2653591 - RNA, 19 nt, Artificial Sequence
  Description of Artificial Sequence: Synthetic oligonucleotide
gaggacgagugugcugguc

SEQ ID NO: 2653592 - RNA, 19 nt, Artificial Sequence
  Description of Artificial Sequence: Synthetic oligonucleotide
cuuugggcaucuucccacu

SEQ ID NO: 2653593 - RNA, 19 nt, Artificial Sequence
  Description of Artificial Sequence: Synthetic oligonucleotide
ggacgagugugcuggucca

SEQ ID NO: 2653594 - RNA, 19 nt, Artificial Sequence
  Description of Artificial Sequence: Synthetic oligonucleotide
cccacuucuauacagguuu

SEQ ID NO: 2653595 - RNA, 19 nt, Artificial Sequence
  Description of Artificial Sequence: Synthetic oligonucleotide
caauggggacauuaauguu

SEQ ID NO: 2653596 - RNA, 19 nt, Artificial Sequence
  Description of Artificial Sequence: Synthetic oligonucleotide
ccgguuuuguucaaagagu

SEQ ID NO: 2653597 - RNA, 19 nt, Artificial Sequence
  Description of Artificial Sequence: Synthetic oligonucleotide
uaccggugaccagccacuc

SEQ ID NO: 2653598 - RNA, 19 nt, Artificial Sequence
  Description of Artificial Sequence: Synthetic oligonucleotide
cacguacgucugcagugca

SEQ ID NO: 2653599 - RNA, 19 nt, Artificial Sequence
  Description of Artificial Sequence: Synthetic oligonucleotide
ggccaugcuuccaauucuc

SEQ ID NO: 2653600 - RNA, 19 nt, Artificial Sequence
  Description of Artificial Sequence: Synthetic oligonucleotide
cgcacauuucuccacuuga

SEQ ID NO: 2653601 - RNA, 19 nt, Artificial Sequence
  Description of Artificial Sequence: Synthetic oligonucleotide
cugcacguacgucugcagu

SEQ ID NO: 2653602 - RNA, 19 nt, Artificial Sequence
  Description of Artificial Sequence: Synthetic oligonucleotide
cccaucgacuggcauugug

SEQ ID NO: 2653603 - RNA, 19 nt, Artificial Sequence
  Description of Artificial Sequence: Synthetic oligonucleotide
gucaguccuacgggccaug

SEQ ID NO: 2653604 - RNA, 19 nt, Artificial Sequence
  Description of Artificial Sequence: Synthetic oligonucleotide
ggccucgcacauuucucca

SEQ ID NO: 2653605 - RNA, 19 nt, Artificial Sequence
  Description of Artificial Sequence: Synthetic oligonucleotide
agucguggucagccucaau

SEQ ID NO: 2653606 - RNA, 19 nt, Artificial Sequence
  Description of Artificial Sequence: Synthetic oligonucleotide
cuucccugcaccucaucuu

SEQ ID NO: 2653607 - RNA, 19 nt, Artificial Sequence
  Description of Artificial Sequence: Synthetic oligonucleotide
gcccgguuuuguucaaaga

SEQ ID NO: 2653608 - RNA, 19 nt, Artificial Sequence
  Description of Artificial Sequence: Synthetic oligonucleotide
cguggucagccucaaucac

SEQ ID NO: 2653609 - RNA, 19 nt, Artificial Sequence
  Description of Artificial Sequence: Synthetic oligonucleotide
acguacgucugcagugcaa

SEQ ID NO: 2653610 - RNA, 19 nt, Artificial Sequence
  Description of Artificial Sequence: Synthetic oligonucleotide
auccgggcccgguuuuguu

SEQ ID NO: 2653611 - RNA, 19 nt, Artificial Sequence
  Description of Artificial Sequence: Synthetic oligonucleotide
caggagugguucgaagaua

SEQ ID NO: 2653612 - RNA, 19 nt, Artificial Sequence
  Description of Artificial Sequence: Synthetic oligonucleotide
gcggcguugucaguccuac

SEQ ID NO: 2653613 - RNA, 19 nt, Artificial Sequence
  Description of Artificial Sequence: Synthetic oligonucleotide
ccuguuccugucuuguagu

SEQ ID NO: 2653614 - RNA, 19 nt, Artificial Sequence
  Description of Artificial Sequence: Synthetic oligonucleotide
caggggcuguagcugggaa

SEQ ID NO: 2653615 - RNA, 19 nt, Artificial Sequence
  Description of Artificial Sequence: Synthetic oligonucleotide
cccuacugggcuguuccug

SEQ ID NO: 2653616 - RNA, 19 nt, Artificial Sequence
  Description of Artificial Sequence: Synthetic oligonucleotide
gcagauuucaggagugguu

SEQ ID NO: 2653617 - RNA, 19 nt, Artificial Sequence
  Description of Artificial Sequence: Synthetic oligonucleotide
ccggugaccagccacuccu

SEQ ID NO: 2653618 - RNA, 19 nt, Artificial Sequence
  Description of Artificial Sequence: Synthetic oligonucleotide
ccgggcccgguuuuguuca

SEQ ID NO: 2653619 - RNA, 19 nt, Artificial Sequence
  Description of Artificial Sequence: Synthetic oligonucleotide
cgguuuuguucaaagaguu

SEQ ID NO: 2653620 - RNA, 19 nt, Artificial Sequence
  Description of Artificial Sequence: Synthetic oligonucleotide
gccacuccucauagaggug

SEQ ID NO: 2653621 - RNA, 19 nt, Artificial Sequence
  Description of Artificial Sequence: Synthetic oligonucleotide
cucgcacauuucuccacuu

SEQ ID NO: 2653622 - RNA, 19 nt, Artificial Sequence
  Description of Artificial Sequence: Synthetic oligonucleotide
ccagaggguuguggccucg

SEQ ID NO: 2653623 - RNA, 19 nt, Artificial Sequence
  Description of Artificial Sequence: Synthetic oligonucleotide
cccugcaccucaucuuuaa

SEQ ID NO: 2653624 - RNA, 19 nt, Artificial Sequence
  Description of Artificial Sequence: Synthetic oligonucleotide
gugguacauuagacccaga

SEQ ID NO: 2653625 - RNA, 19 nt, Artificial Sequence
  Description of Artificial Sequence: Synthetic oligonucleotide
caguccuacgggccaugcu

SEQ ID NO: 2653626 - RNA, 19 nt, Artificial Sequence
  Description of Artificial Sequence: Synthetic oligonucleotide
ggagugguucgaagauaaa

SEQ ID NO: 2653627 - RNA, 19 nt, Artificial Sequence
  Description of Artificial Sequence: Synthetic oligonucleotide
ggccccaucgacuggcauu

SEQ ID NO: 2653628 - RNA, 19 nt, Artificial Sequence
  Description of Artificial Sequence: Synthetic oligonucleotide
caccagaacaggggcugua

SEQ ID NO: 2653629 - RNA, 19 nt, Artificial Sequence
  Description of Artificial Sequence: Synthetic oligonucleotide
cagcuaaccuggcccuacu

SEQ ID NO: 2653630 - RNA, 19 nt, Artificial Sequence
  Description of Artificial Sequence: Synthetic oligonucleotide
ccucgcacauuucuccacu

SEQ ID NO: 2653631 - RNA, 19 nt, Artificial Sequence
  Description of Artificial Sequence: Synthetic oligonucleotide
ccuuuccaucaaccguaca

SEQ ID NO: 2653632 - RNA, 19 nt, Artificial Sequence
  Description of Artificial Sequence: Synthetic oligonucleotide
gcgcuguaaauugaccuuu

SEQ ID NO: 2653633 - RNA, 19 nt, Artificial Sequence
  Description of Artificial Sequence: Synthetic oligonucleotide
cuacugggcuguuccuguu

SEQ ID NO: 2653634 - RNA, 19 nt, Artificial Sequence
  Description of Artificial Sequence: Synthetic oligonucleotide
cggcguugucaguccuacg

SEQ ID NO: 2653635 - RNA, 19 nt, Artificial Sequence
  Description of Artificial Sequence: Synthetic oligonucleotide
ggcuaccggugaccagcca

SEQ ID NO: 2653636 - RNA, 19 nt, Artificial Sequence
  Description of Artificial Sequence: Synthetic oligonucleotide
cugcggcguugucaguccu

SEQ ID NO: 2653637 - RNA, 19 nt, Artificial Sequence
  Description of Artificial Sequence: Synthetic oligonucleotide
ccuacgggccaugcuucca

SEQ ID NO: 2653638 - RNA, 19 nt, Artificial Sequence
  Description of Artificial Sequence: Synthetic oligonucleotide
gcccuacugggcuguuccu

SEQ ID NO: 2653639 - RNA, 19 nt, Artificial Sequence
  Description of Artificial Sequence: Synthetic oligonucleotide
ccugcaccucaucuuuaau

SEQ ID NO: 2653640 - RNA, 19 nt, Artificial Sequence
  Description of Artificial Sequence: Synthetic oligonucleotide
gggcccgguuuuguucaaa

SEQ ID NO: 2653641 - RNA, 19 nt, Artificial Sequence
  Description of Artificial Sequence: Synthetic oligonucleotide
gguuguggccucgcacauu

SEQ ID NO: 2653642 - RNA, 19 nt, Artificial Sequence
  Description of Artificial Sequence: Synthetic oligonucleotide
cuucgucgacugcggcguu

SEQ ID NO: 2653643 - RNA, 19 nt, Artificial Sequence
  Description of Artificial Sequence: Synthetic oligonucleotide
cgucgacugcggcguuguc

SEQ ID NO: 2653644 - RNA, 19 nt, Artificial Sequence
  Description of Artificial Sequence: Synthetic oligonucleotide
cuggcccuacugggcuguu

SEQ ID NO: 2653645 - RNA, 19 nt, Artificial Sequence
  Description of Artificial Sequence: Synthetic oligonucleotide
cgggcccgguuuuguucaa

SEQ ID NO: 2653646 - RNA, 19 nt, Artificial Sequence
  Description of Artificial Sequence: Synthetic oligonucleotide
cgacugcggcguugucagu

SEQ ID NO: 2653647 - RNA, 19 nt, Artificial Sequence
  Description of Artificial Sequence: Synthetic oligonucleotide
ccccaucgacuggcauugu

SEQ ID NO: 2653648 - RNA, 19 nt, Artificial Sequence
  Description of Artificial Sequence: Synthetic oligonucleotide
uaaauauacauacagagag

SEQ ID NO: 2653649 - RNA, 19 nt, Artificial Sequence
  Description of Artificial Sequence: Synthetic oligonucleotide
aaguauauaacucgaagac

SEQ ID NO: 2653650 - RNA, 19 nt, Artificial Sequence
  Description of Artificial Sequence: Synthetic oligonucleotide
aaauucuaaaaucaaauga

SEQ ID NO: 2653651 - RNA, 19 nt, Artificial Sequence
  Description of Artificial Sequence: Synthetic oligonucleotide
ucaaacagcaaacacaaag

SEQ ID NO: 2653652 - RNA, 19 nt, Artificial Sequence
  Description of Artificial Sequence: Synthetic oligonucleotide
aaacacaaaguacaggcac

SEQ ID NO: 2653653 - RNA, 19 nt, Artificial Sequence
  Description of Artificial Sequence: Synthetic oligonucleotide
aaagcaagcagcuuuuagg

SEQ ID NO: 2653654 - RNA, 19 nt, Artificial Sequence
  Description of Artificial Sequence: Synthetic oligonucleotide
aauucuaaaaucaaaugag

SEQ ID NO: 2653655 - RNA, 19 nt, Artificial Sequence
  Description of Artificial Sequence: Synthetic oligonucleotide
aaaugagaaguauauaacu

SEQ ID NO: 2653656 - RNA, 19 nt, Artificial Sequence
  Description of Artificial Sequence: Synthetic oligonucleotide
aagcaagcagcuuuuaggg

SEQ ID NO: 2653657 - RNA, 19 nt, Artificial Sequence
  Description of Artificial Sequence: Synthetic oligonucleotide
auuaacauuccacaaacug

SEQ ID NO: 2653658 - RNA, 19 nt, Artificial Sequence
  Description of Artificial Sequence: Synthetic oligonucleotide
uuauuugagaacaucucag

SEQ ID NO: 2653659 - RNA, 19 nt, Artificial Sequence
  Description of Artificial Sequence: Synthetic oligonucleotide
augagaaguauauaacucg

SEQ ID NO: 2653660 - RNA, 19 nt, Artificial Sequence
  Description of Artificial Sequence: Synthetic oligonucleotide
uguaacaugugguauauac

SEQ ID NO: 2653661 - RNA, 19 nt, Artificial Sequence
  Description of Artificial Sequence: Synthetic oligonucleotide
auuacauucauguaaaguu

SEQ ID NO: 2653662 - RNA, 19 nt, Artificial Sequence
  Description of Artificial Sequence: Synthetic oligonucleotide
aggauuguaucuuagcaac

SEQ ID NO: 2653663 - RNA, 19 nt, Artificial Sequence
  Description of Artificial Sequence: Synthetic oligonucleotide
ucuuuauuugagaacaucu

SEQ ID NO: 2653664 - RNA, 19 nt, Artificial Sequence
  Description of Artificial Sequence: Synthetic oligonucleotide
ucuacaugugacaacaucu

SEQ ID NO: 2653665 - RNA, 19 nt, Artificial Sequence
  Description of Artificial Sequence: Synthetic oligonucleotide
uuugagaacaucucagucc

SEQ ID NO: 2653666 - RNA, 19 nt, Artificial Sequence
  Description of Artificial Sequence: Synthetic oligonucleotide
agaauggcccaucaguucc

SEQ ID NO: 2653667 - RNA, 19 nt, Artificial Sequence
  Description of Artificial Sequence: Synthetic oligonucleotide
uaacauuccacaaacugug

SEQ ID NO: 2653668 - RNA, 19 nt, Artificial Sequence
  Description of Artificial Sequence: Synthetic oligonucleotide
uuaacauuccacaaacugu

SEQ ID NO: 2653669 - RNA, 19 nt, Artificial Sequence
  Description of Artificial Sequence: Synthetic oligonucleotide
ugugagaggaagcucaugc

SEQ ID NO: 2653670 - RNA, 19 nt, Artificial Sequence
  Description of Artificial Sequence: Synthetic oligonucleotide
uaucuuagcaacauguuuc

SEQ ID NO: 2653671 - RNA, 19 nt, Artificial Sequence
  Description of Artificial Sequence: Synthetic oligonucleotide
agagacaugaaaauuuccc

SEQ ID NO: 2653672 - RNA, 19 nt, Artificial Sequence
  Description of Artificial Sequence: Synthetic oligonucleotide
agaaguauauaacucgaag

SEQ ID NO: 2653673 - RNA, 19 nt, Artificial Sequence
  Description of Artificial Sequence: Synthetic oligonucleotide
uuaguuaaacgucuuaguc

SEQ ID NO: 2653674 - RNA, 19 nt, Artificial Sequence
  Description of Artificial Sequence: Synthetic oligonucleotide
uuuuaguuaaacgucuuag

SEQ ID NO: 2653675 - RNA, 19 nt, Artificial Sequence
  Description of Artificial Sequence: Synthetic oligonucleotide
uguggcuacaauuuagugc

SEQ ID NO: 2653676 - RNA, 19 nt, Artificial Sequence
  Description of Artificial Sequence: Synthetic oligonucleotide
acaucucaugcucaguucc

SEQ ID NO: 2653677 - RNA, 19 nt, Artificial Sequence
  Description of Artificial Sequence: Synthetic oligonucleotide
aguauauaacucgaagacc

SEQ ID NO: 2653678 - RNA, 19 nt, Artificial Sequence
  Description of Artificial Sequence: Synthetic oligonucleotide
ugaauuacauucauguaaa

SEQ ID NO: 2653679 - RNA, 19 nt, Artificial Sequence
  Description of Artificial Sequence: Synthetic oligonucleotide
uuguaucuuagcaacaugu

SEQ ID NO: 2653680 - RNA, 19 nt, Artificial Sequence
  Description of Artificial Sequence: Synthetic oligonucleotide
aacacugaggauuguaucu

SEQ ID NO: 2653681 - RNA, 19 nt, Artificial Sequence
  Description of Artificial Sequence: Synthetic oligonucleotide
ugaggauuguaucuuagca

SEQ ID NO: 2653682 - RNA, 19 nt, Artificial Sequence
  Description of Artificial Sequence: Synthetic oligonucleotide
gaaguauauaacucgaaga

SEQ ID NO: 2653683 - RNA, 19 nt, Artificial Sequence
  Description of Artificial Sequence: Synthetic oligonucleotide
ugugguauauacauaaaua

SEQ ID NO: 2653684 - RNA, 19 nt, Artificial Sequence
  Description of Artificial Sequence: Synthetic oligonucleotide
uugucauucaaacagcaaa

SEQ ID NO: 2653685 - RNA, 19 nt, Artificial Sequence
  Description of Artificial Sequence: Synthetic oligonucleotide
auuugagaacaucucaguc

SEQ ID NO: 2653686 - RNA, 19 nt, Artificial Sequence
  Description of Artificial Sequence: Synthetic oligonucleotide
aaaagcaagcagcuuuuag

SEQ ID NO: 2653687 - RNA, 19 nt, Artificial Sequence
  Description of Artificial Sequence: Synthetic oligonucleotide
aauuacauucauguaaagu

SEQ ID NO: 2653688 - RNA, 19 nt, Artificial Sequence
  Description of Artificial Sequence: Synthetic oligonucleotide
cuaugugacuaauuggucc

SEQ ID NO: 2653689 - RNA, 19 nt, Artificial Sequence
  Description of Artificial Sequence: Synthetic oligonucleotide
aguccuuuguucuacaugu

SEQ ID NO: 2653690 - RNA, 19 nt, Artificial Sequence
  Description of Artificial Sequence: Synthetic oligonucleotide
uaacaugugguauauacau

SEQ ID NO: 2653691 - RNA, 19 nt, Artificial Sequence
  Description of Artificial Sequence: Synthetic oligonucleotide
aaaguacaggcacuaccac

SEQ ID NO: 2653692 - RNA, 19 nt, Artificial Sequence
  Description of Artificial Sequence: Synthetic oligonucleotide
aacucgaagaccuggaaaa

SEQ ID NO: 2653693 - RNA, 19 nt, Artificial Sequence
  Description of Artificial Sequence: Synthetic oligonucleotide
aacgucuuagucuuuauuu

SEQ ID NO: 2653694 - RNA, 19 nt, Artificial Sequence
  Description of Artificial Sequence: Synthetic oligonucleotide
uacaauuuagugcuucuga

SEQ ID NO: 2653695 - RNA, 19 nt, Artificial Sequence
  Description of Artificial Sequence: Synthetic oligonucleotide
ucuucgcugaauuacauuc

SEQ ID NO: 2653696 - RNA, 19 nt, Artificial Sequence
  Description of Artificial Sequence: Synthetic oligonucleotide
uacagagagaacacugagg

SEQ ID NO: 2653697 - RNA, 19 nt, Artificial Sequence
  Description of Artificial Sequence: Synthetic oligonucleotide
uagucuuuauuugagaaca

SEQ ID NO: 2653698 - RNA, 19 nt, Artificial Sequence
  Description of Artificial Sequence: Synthetic oligonucleotide
uugagaacaucucaguccu

SEQ ID NO: 2653699 - RNA, 19 nt, Artificial Sequence
  Description of Artificial Sequence: Synthetic oligonucleotide
gagacaugaaaauuucccc

SEQ ID NO: 2653700 - RNA, 19 nt, Artificial Sequence
  Description of Artificial Sequence: Synthetic oligonucleotide
uaugugacuaauugguccc

SEQ ID NO: 2653701 - RNA, 19 nt, Artificial Sequence
  Description of Artificial Sequence: Synthetic oligonucleotide
agaagaauggcccaucagu

SEQ ID NO: 2653702 - RNA, 19 nt, Artificial Sequence
  Description of Artificial Sequence: Synthetic oligonucleotide
ugagaaguauauaacucga

SEQ ID NO: 2653703 - RNA, 19 nt, Artificial Sequence
  Description of Artificial Sequence: Synthetic oligonucleotide
agaccuaugugacuaauug

SEQ ID NO: 2653704 - RNA, 19 nt, Artificial Sequence
  Description of Artificial Sequence: Synthetic oligonucleotide
ugucauucaaacagcaaac

SEQ ID NO: 2653705 - RNA, 19 nt, Artificial Sequence
  Description of Artificial Sequence: Synthetic oligonucleotide
caaaugagaaguauauaac

SEQ ID NO: 2653706 - RNA, 19 nt, Artificial Sequence
  Description of Artificial Sequence: Synthetic oligonucleotide
aagaccuggaaaagcaagc

SEQ ID NO: 2653707 - RNA, 19 nt, Artificial Sequence
  Description of Artificial Sequence: Synthetic oligonucleotide
aagaauggcccaucaguuc

SEQ ID NO: 2653708 - RNA, 19 nt, Artificial Sequence
  Description of Artificial Sequence: Synthetic oligonucleotide
acaauuuagugcuucugag

SEQ ID NO: 2653709 - RNA, 19 nt, Artificial Sequence
  Description of Artificial Sequence: Synthetic oligonucleotide
aaucaaaugagaaguauau

SEQ ID NO: 2653710 - RNA, 19 nt, Artificial Sequence
  Description of Artificial Sequence: Synthetic oligonucleotide
ucauucaaacagcaaacac

SEQ ID NO: 2653711 - RNA, 19 nt, Artificial Sequence
  Description of Artificial Sequence: Synthetic oligonucleotide
guuuccaaauucuaaaauc

SEQ ID NO: 2653712 - RNA, 19 nt, Artificial Sequence
  Description of Artificial Sequence: Synthetic oligonucleotide
uuccuuauguaccaucagc

SEQ ID NO: 2653713 - RNA, 19 nt, Artificial Sequence
  Description of Artificial Sequence: Synthetic oligonucleotide
uuuagugcuucugagguug

SEQ ID NO: 2653714 - RNA, 19 nt, Artificial Sequence
  Description of Artificial Sequence: Synthetic oligonucleotide
aacaucucaugcucaguuc

SEQ ID NO: 2653715 - RNA, 19 nt, Artificial Sequence
  Description of Artificial Sequence: Synthetic oligonucleotide
aacucuagagagcugccug

SEQ ID NO: 2653716 - RNA, 19 nt, Artificial Sequence
  Description of Artificial Sequence: Synthetic oligonucleotide
caauuuagugcuucugagg

SEQ ID NO: 2653717 - RNA, 19 nt, Artificial Sequence
  Description of Artificial Sequence: Synthetic oligonucleotide
uuuuaaccuacuguguucc

SEQ ID NO: 2653718 - RNA, 19 nt, Artificial Sequence
  Description of Artificial Sequence: Synthetic oligonucleotide
ugacuaauugguccccugg

SEQ ID NO: 2653719 - RNA, 19 nt, Artificial Sequence
  Description of Artificial Sequence: Synthetic oligonucleotide
acaugugguauauacauaa

SEQ ID NO: 2653720 - RNA, 19 nt, Artificial Sequence
  Description of Artificial Sequence: Synthetic oligonucleotide
uuauguaccaucagcuccu

SEQ ID NO: 2653721 - RNA, 19 nt, Artificial Sequence
  Description of Artificial Sequence: Synthetic oligonucleotide
aguuaaacgucuuagucuu

SEQ ID NO: 2653722 - RNA, 19 nt, Artificial Sequence
  Description of Artificial Sequence: Synthetic oligonucleotide
ucgaagaccuggaaaagca

SEQ ID NO: 2653723 - RNA, 19 nt, Artificial Sequence
  Description of Artificial Sequence: Synthetic oligonucleotide
ucagaggcuucccaaaccc

SEQ ID NO: 2653724 - RNA, 19 nt, Artificial Sequence
  Description of Artificial Sequence: Synthetic oligonucleotide
ugugacaacaucucaugcu

SEQ ID NO: 2653725 - RNA, 19 nt, Artificial Sequence
  Description of Artificial Sequence: Synthetic oligonucleotide
gaccuaugugacuaauugg

SEQ ID NO: 2653726 - RNA, 19 nt, Artificial Sequence
  Description of Artificial Sequence: Synthetic oligonucleotide
uggaaaagcaagcagcuuu

SEQ ID NO: 2653727 - RNA, 19 nt, Artificial Sequence
  Description of Artificial Sequence: Synthetic oligonucleotide
agacaugaaaauuucccca

SEQ ID NO: 2653728 - RNA, 19 nt, Artificial Sequence
  Description of Artificial Sequence: Synthetic oligonucleotide
ugaucggucagaccuaugu

SEQ ID NO: 2653729 - RNA, 19 nt, Artificial Sequence
  Description of Artificial Sequence: Synthetic oligonucleotide
cuguguuccauucagaaga

SEQ ID NO: 2653730 - RNA, 19 nt, Artificial Sequence
  Description of Artificial Sequence: Synthetic oligonucleotide
gcacuugucauucaaacag

SEQ ID NO: 2653731 - RNA, 19 nt, Artificial Sequence
  Description of Artificial Sequence: Synthetic oligonucleotide
aaaauuuccccaggaacug

SEQ ID NO: 2653732 - RNA, 19 nt, Artificial Sequence
  Description of Artificial Sequence: Synthetic oligonucleotide
uucauguaaaguuuccaaa

SEQ ID NO: 2653733 - RNA, 19 nt, Artificial Sequence
  Description of Artificial Sequence: Synthetic oligonucleotide
aaguuuccaaauucuaaaa

SEQ ID NO: 2653734 - RNA, 19 nt, Artificial Sequence
  Description of Artificial Sequence: Synthetic oligonucleotide
uauaacucgaagaccugga

SEQ ID NO: 2653735 - RNA, 19 nt, Artificial Sequence
  Description of Artificial Sequence: Synthetic oligonucleotide
ugagguugggcacuuguca

SEQ ID NO: 2653736 - RNA, 19 nt, Artificial Sequence
  Description of Artificial Sequence: Synthetic oligonucleotide
uaccacagagacaugaaaa

SEQ ID NO: 2653737 - RNA, 19 nt, Artificial Sequence
  Description of Artificial Sequence: Synthetic oligonucleotide
auacagagagaacacugag

SEQ ID NO: 2653738 - RNA, 19 nt, Artificial Sequence
  Description of Artificial Sequence: Synthetic oligonucleotide
cuaaaaucaaaugagaagu

SEQ ID NO: 2653739 - RNA, 19 nt, Artificial Sequence
  Description of Artificial Sequence: Synthetic oligonucleotide
uauuugagaacaucucagu

SEQ ID NO: 2653740 - RNA, 19 nt, Artificial Sequence
  Description of Artificial Sequence: Synthetic oligonucleotide
cugaauuacauucauguaa

SEQ ID NO: 2653741 - RNA, 19 nt, Artificial Sequence
  Description of Artificial Sequence: Synthetic oligonucleotide
uuacauucauguaaaguuu

SEQ ID NO: 2653742 - RNA, 19 nt, Artificial Sequence
  Description of Artificial Sequence: Synthetic oligonucleotide
acucuagagagcugccugc

SEQ ID NO: 2653743 - RNA, 19 nt, Artificial Sequence
  Description of Artificial Sequence: Synthetic oligonucleotide
uguuucuucgcugaauuac

SEQ ID NO: 2653744 - RNA, 19 nt, Artificial Sequence
  Description of Artificial Sequence: Synthetic oligonucleotide
uaauugguccccuggcagg

SEQ ID NO: 2653745 - RNA, 19 nt, Artificial Sequence
  Description of Artificial Sequence: Synthetic oligonucleotide
auauaacucgaagaccugg

SEQ ID NO: 2653746 - RNA, 19 nt, Artificial Sequence
  Description of Artificial Sequence: Synthetic oligonucleotide
agcucaugcaggcuguaac

SEQ ID NO: 2653747 - RNA, 19 nt, Artificial Sequence
  Description of Artificial Sequence: Synthetic oligonucleotide
aucccauuaacauuccaca

SEQ ID NO: 2653748 - RNA, 19 nt, Artificial Sequence
  Description of Artificial Sequence: Synthetic oligonucleotide
auaaauauacauacagaga

SEQ ID NO: 2653749 - RNA, 19 nt, Artificial Sequence
  Description of Artificial Sequence: Synthetic oligonucleotide
acaucucaguccuuuguuc

SEQ ID NO: 2653750 - RNA, 19 nt, Artificial Sequence
  Description of Artificial Sequence: Synthetic oligonucleotide
gacaacaucucaugcucag

SEQ ID NO: 2653751 - RNA, 19 nt, Artificial Sequence
  Description of Artificial Sequence: Synthetic oligonucleotide
aguacaggcacuaccacag

SEQ ID NO: 2653752 - RNA, 19 nt, Artificial Sequence
  Description of Artificial Sequence: Synthetic oligonucleotide
ugcaggcuguaacaugugg

SEQ ID NO: 2653753 - RNA, 19 nt, Artificial Sequence
  Description of Artificial Sequence: Synthetic oligonucleotide
uacaggcacuaccacagag

SEQ ID NO: 2653754 - RNA, 19 nt, Artificial Sequence
  Description of Artificial Sequence: Synthetic oligonucleotide
uauauaacucgaagaccug

SEQ ID NO: 2653755 - RNA, 19 nt, Artificial Sequence
  Description of Artificial Sequence: Synthetic oligonucleotide
uggaacucuagagagcugc

SEQ ID NO: 2653756 - RNA, 19 nt, Artificial Sequence
  Description of Artificial Sequence: Synthetic oligonucleotide
aaauauacauacagagaga

SEQ ID NO: 2653757 - RNA, 19 nt, Artificial Sequence
  Description of Artificial Sequence: Synthetic oligonucleotide
ugcuguggcuacaauuuag

SEQ ID NO: 2653758 - RNA, 19 nt, Artificial Sequence
  Description of Artificial Sequence: Synthetic oligonucleotide
uacaugugacaacaucuca

SEQ ID NO: 2653759 - RNA, 19 nt, Artificial Sequence
  Description of Artificial Sequence: Synthetic oligonucleotide
ucuuagucuuuauuugaga

SEQ ID NO: 2653760 - RNA, 19 nt, Artificial Sequence
  Description of Artificial Sequence: Synthetic oligonucleotide
gucaugaucggucagaccu

SEQ ID NO: 2653761 - RNA, 19 nt, Artificial Sequence
  Description of Artificial Sequence: Synthetic oligonucleotide
auacauacagagagaacac

SEQ ID NO: 2653762 - RNA, 19 nt, Artificial Sequence
  Description of Artificial Sequence: Synthetic oligonucleotide
aaaucaaaugagaaguaua

SEQ ID NO: 2653763 - RNA, 19 nt, Artificial Sequence
  Description of Artificial Sequence: Synthetic oligonucleotide
uuuguucuacaugugacaa

SEQ ID NO: 2653764 - RNA, 19 nt, Artificial Sequence
  Description of Artificial Sequence: Synthetic oligonucleotide
caugugacaacaucucaug

SEQ ID NO: 2653765 - RNA, 19 nt, Artificial Sequence
  Description of Artificial Sequence: Synthetic oligonucleotide
aguuuccaaauucuaaaau

SEQ ID NO: 2653766 - RNA, 19 nt, Artificial Sequence
  Description of Artificial Sequence: Synthetic oligonucleotide
cuaauugguccccuggcag

SEQ ID NO: 2653767 - RNA, 19 nt, Artificial Sequence
  Description of Artificial Sequence: Synthetic oligonucleotide
agcaacauguuucuucgcu

SEQ ID NO: 2653768 - RNA, 19 nt, Artificial Sequence
  Description of Artificial Sequence: Synthetic oligonucleotide
augugguauauacauaaau

SEQ ID NO: 2653769 - RNA, 19 nt, Artificial Sequence
  Description of Artificial Sequence: Synthetic oligonucleotide
caaaguacaggcacuacca

SEQ ID NO: 2653770 - RNA, 19 nt, Artificial Sequence
  Description of Artificial Sequence: Synthetic oligonucleotide
aucggucagaccuauguga

SEQ ID NO: 2653771 - RNA, 19 nt, Artificial Sequence
  Description of Artificial Sequence: Synthetic oligonucleotide
aggggcuuaucccauuaac

SEQ ID NO: 2653772 - RNA, 19 nt, Artificial Sequence
  Description of Artificial Sequence: Synthetic oligonucleotide
agagagaacacugaggauu

SEQ ID NO: 2653773 - RNA, 19 nt, Artificial Sequence
  Description of Artificial Sequence: Synthetic oligonucleotide
acgucuuagucuuuauuug

SEQ ID NO: 2653774 - RNA, 19 nt, Artificial Sequence
  Description of Artificial Sequence: Synthetic oligonucleotide
cuuagucuuuauuugagaa

SEQ ID NO: 2653775 - RNA, 19 nt, Artificial Sequence
  Description of Artificial Sequence: Synthetic oligonucleotide
guccuggaacucuagagag

SEQ ID NO: 2653776 - RNA, 19 nt, Artificial Sequence
  Description of Artificial Sequence: Synthetic oligonucleotide
auuguaucuuagcaacaug

SEQ ID NO: 2653777 - RNA, 19 nt, Artificial Sequence
  Description of Artificial Sequence: Synthetic oligonucleotide
gaaaauuuccccaggaacu

SEQ ID NO: 2653778 - RNA, 19 nt, Artificial Sequence
  Description of Artificial Sequence: Synthetic oligonucleotide
uuuccccaggaacuggaag

SEQ ID NO: 2653779 - RNA, 19 nt, Artificial Sequence
  Description of Artificial Sequence: Synthetic oligonucleotide
ucagaagaauggcccauca

SEQ ID NO: 2653780 - RNA, 19 nt, Artificial Sequence
  Description of Artificial Sequence: Synthetic oligonucleotide
uaacucgaagaccuggaaa

SEQ ID NO: 2653781 - RNA, 19 nt, Artificial Sequence
  Description of Artificial Sequence: Synthetic oligonucleotide
acagagacaugaaaauuuc

SEQ ID NO: 2653782 - RNA, 19 nt, Artificial Sequence
  Description of Artificial Sequence: Synthetic oligonucleotide
aacaucucaguccuuuguu

SEQ ID NO: 2653783 - RNA, 19 nt, Artificial Sequence
  Description of Artificial Sequence: Synthetic oligonucleotide
aggaagcucaugcaggcug

SEQ ID NO: 2653784 - RNA, 19 nt, Artificial Sequence
  Description of Artificial Sequence: Synthetic oligonucleotide
gacuaauugguccccuggc

SEQ ID NO: 2653785 - RNA, 19 nt, Artificial Sequence
  Description of Artificial Sequence: Synthetic oligonucleotide
accuaugugacuaauuggu

SEQ ID NO: 2653786 - RNA, 19 nt, Artificial Sequence
  Description of Artificial Sequence: Synthetic oligonucleotide
auucuaaaaucaaaugaga

SEQ ID NO: 2653787 - RNA, 19 nt, Artificial Sequence
  Description of Artificial Sequence: Synthetic oligonucleotide
uguaucuuagcaacauguu

SEQ ID NO: 2653788 - RNA, 19 nt, Artificial Sequence
  Description of Artificial Sequence: Synthetic oligonucleotide
gugacaacaucucaugcuc

SEQ ID NO: 2653789 - RNA, 19 nt, Artificial Sequence
  Description of Artificial Sequence: Synthetic oligonucleotide
gaggauuguaucuuagcaa

SEQ ID NO: 2653790 - RNA, 19 nt, Artificial Sequence
  Description of Artificial Sequence: Synthetic oligonucleotide
cuacaugugacaacaucuc

SEQ ID NO: 2653791 - RNA, 19 nt, Artificial Sequence
  Description of Artificial Sequence: Synthetic oligonucleotide
gaccuggaaaagcaagcag

SEQ ID NO: 2653792 - RNA, 19 nt, Artificial Sequence
  Description of Artificial Sequence: Synthetic oligonucleotide
ucugagguugggcacuugu

SEQ ID NO: 2653793 - RNA, 19 nt, Artificial Sequence
  Description of Artificial Sequence: Synthetic oligonucleotide
agucaugaucggucagacc

SEQ ID NO: 2653794 - RNA, 19 nt, Artificial Sequence
  Description of Artificial Sequence: Synthetic oligonucleotide
acauuccacaaacugugcu

SEQ ID NO: 2653795 - RNA, 19 nt, Artificial Sequence
  Description of Artificial Sequence: Synthetic oligonucleotide
gugguauauacauaaauau

SEQ ID NO: 2653796 - RNA, 19 nt, Artificial Sequence
  Description of Artificial Sequence: Synthetic oligonucleotide
acuaauugguccccuggca

SEQ ID NO: 2653797 - RNA, 19 nt, Artificial Sequence
  Description of Artificial Sequence: Synthetic oligonucleotide
agcaaacacaaaguacagg

SEQ ID NO: 2653798 - RNA, 19 nt, Artificial Sequence
  Description of Artificial Sequence: Synthetic oligonucleotide
cuuuuaggggcuuauccca

SEQ ID NO: 2653799 - RNA, 19 nt, Artificial Sequence
  Description of Artificial Sequence: Synthetic oligonucleotide
aacacaaaguacaggcacu

SEQ ID NO: 2653800 - RNA, 19 nt, Artificial Sequence
  Description of Artificial Sequence: Synthetic oligonucleotide
cacuugucauucaaacagc

SEQ ID NO: 2653801 - RNA, 19 nt, Artificial Sequence
  Description of Artificial Sequence: Synthetic oligonucleotide
ucggucagaccuaugugac

SEQ ID NO: 2653802 - RNA, 19 nt, Artificial Sequence
  Description of Artificial Sequence: Synthetic oligonucleotide
aaacgucuuagucuuuauu

SEQ ID NO: 2653803 - RNA, 19 nt, Artificial Sequence
  Description of Artificial Sequence: Synthetic oligonucleotide
ucaugcucaguuccagcug

SEQ ID NO: 2653804 - RNA, 19 nt, Artificial Sequence
  Description of Artificial Sequence: Synthetic oligonucleotide
ugacaacaucucaugcuca

SEQ ID NO: 2653805 - RNA, 19 nt, Artificial Sequence
  Description of Artificial Sequence: Synthetic oligonucleotide
gaucggucagaccuaugug

SEQ ID NO: 2653806 - RNA, 19 nt, Artificial Sequence
  Description of Artificial Sequence: Synthetic oligonucleotide
uucgcugaauuacauucau

SEQ ID NO: 2653807 - RNA, 19 nt, Artificial Sequence
  Description of Artificial Sequence: Synthetic oligonucleotide
ccauuaacauuccacaaac

SEQ ID NO: 2653808 - RNA, 19 nt, Artificial Sequence
  Description of Artificial Sequence: Synthetic oligonucleotide
ucaugcaggcuguaacaug

SEQ ID NO: 2653809 - RNA, 19 nt, Artificial Sequence
  Description of Artificial Sequence: Synthetic oligonucleotide
cuuuguucuacaugugaca

SEQ ID NO: 2653810 - RNA, 19 nt, Artificial Sequence
  Description of Artificial Sequence: Synthetic oligonucleotide
cauacagagagaacacuga

SEQ ID NO: 2653811 - RNA, 19 nt, Artificial Sequence
  Description of Artificial Sequence: Synthetic oligonucleotide
caggcacuaccacagagac

SEQ ID NO: 2653812 - RNA, 19 nt, Artificial Sequence
  Description of Artificial Sequence: Synthetic oligonucleotide
gucuuagucuuuauuugag

SEQ ID NO: 2653813 - RNA, 19 nt, Artificial Sequence
  Description of Artificial Sequence: Synthetic oligonucleotide
gcuuuuaggggcuuauccc

SEQ ID NO: 2653814 - RNA, 19 nt, Artificial Sequence
  Description of Artificial Sequence: Synthetic oligonucleotide
uuaaacgucuuagucuuua

SEQ ID NO: 2653815 - RNA, 19 nt, Artificial Sequence
  Description of Artificial Sequence: Synthetic oligonucleotide
aagggcacugaggagccag

SEQ ID NO: 2653816 - RNA, 19 nt, Artificial Sequence
  Description of Artificial Sequence: Synthetic oligonucleotide
uuucuucgcugaauuacau

SEQ ID NO: 2653817 - RNA, 19 nt, Artificial Sequence
  Description of Artificial Sequence: Synthetic oligonucleotide
ucccauuaacauuccacaa

SEQ ID NO: 2653818 - RNA, 19 nt, Artificial Sequence
  Description of Artificial Sequence: Synthetic oligonucleotide
uacauacagagagaacacu

SEQ ID NO: 2653819 - RNA, 19 nt, Artificial Sequence
  Description of Artificial Sequence: Synthetic oligonucleotide
aguuccuuauguaccauca

SEQ ID NO: 2653820 - RNA, 19 nt, Artificial Sequence
  Description of Artificial Sequence: Synthetic oligonucleotide
agaacaucucaguccuuug

SEQ ID NO: 2653821 - RNA, 19 nt, Artificial Sequence
  Description of Artificial Sequence: Synthetic oligonucleotide
caaacagcaaacacaaagu

SEQ ID NO: 2653822 - RNA, 19 nt, Artificial Sequence
  Description of Artificial Sequence: Synthetic oligonucleotide
uuuuaggggcuuaucccau

SEQ ID NO: 2653823 - RNA, 19 nt, Artificial Sequence
  Description of Artificial Sequence: Synthetic oligonucleotide
uguguuccauucagaagaa

SEQ ID NO: 2653824 - RNA, 19 nt, Artificial Sequence
  Description of Artificial Sequence: Synthetic oligonucleotide
gcuuaucccauuaacauuc

SEQ ID NO: 2653825 - RNA, 19 nt, Artificial Sequence
  Description of Artificial Sequence: Synthetic oligonucleotide
aauuuccccaggaacugga

SEQ ID NO: 2653826 - RNA, 19 nt, Artificial Sequence
  Description of Artificial Sequence: Synthetic oligonucleotide
cucgaagaccuggaaaagc

SEQ ID NO: 2653827 - RNA, 19 nt, Artificial Sequence
  Description of Artificial Sequence: Synthetic oligonucleotide
ucgcugaauuacauucaug

SEQ ID NO: 2653828 - RNA, 19 nt, Artificial Sequence
  Description of Artificial Sequence: Synthetic oligonucleotide
guuccuuauguaccaucag

SEQ ID NO: 2653829 - RNA, 19 nt, Artificial Sequence
  Description of Artificial Sequence: Synthetic oligonucleotide
aauugguccccuggcaggu

SEQ ID NO: 2653830 - RNA, 19 nt, Artificial Sequence
  Description of Artificial Sequence: Synthetic oligonucleotide
uuguucuacaugugacaac

SEQ ID NO: 2653831 - RNA, 19 nt, Artificial Sequence
  Description of Artificial Sequence: Synthetic oligonucleotide
cuagagagcugccugccuc

SEQ ID NO: 2653832 - RNA, 19 nt, Artificial Sequence
  Description of Artificial Sequence: Synthetic oligonucleotide
augugacuaauuggucccc

SEQ ID NO: 2653833 - RNA, 19 nt, Artificial Sequence
  Description of Artificial Sequence: Synthetic oligonucleotide
uaaccuacuguguuccauu

SEQ ID NO: 2653834 - RNA, 19 nt, Artificial Sequence
  Description of Artificial Sequence: Synthetic oligonucleotide
auaacucgaagaccuggaa

SEQ ID NO: 2653835 - RNA, 19 nt, Artificial Sequence
  Description of Artificial Sequence: Synthetic oligonucleotide
uuuaaccuacuguguucca

SEQ ID NO: 2653836 - RNA, 19 nt, Artificial Sequence
  Description of Artificial Sequence: Synthetic oligonucleotide
guaacaugugguauauaca

SEQ ID NO: 2653837 - RNA, 19 nt, Artificial Sequence
  Description of Artificial Sequence: Synthetic oligonucleotide
ccuacuguguuccauucag

SEQ ID NO: 2653838 - RNA, 19 nt, Artificial Sequence
  Description of Artificial Sequence: Synthetic oligonucleotide
gucagaggcuucccaaacc

SEQ ID NO: 2653839 - RNA, 19 nt, Artificial Sequence
  Description of Artificial Sequence: Synthetic oligonucleotide
cuguggcuacaauuuagug

SEQ ID NO: 2653840 - RNA, 19 nt, Artificial Sequence
  Description of Artificial Sequence: Synthetic oligonucleotide
uugggcacuugucauucaa

SEQ ID NO: 2653841 - RNA, 19 nt, Artificial Sequence
  Description of Artificial Sequence: Synthetic oligonucleotide
uuaggggcuuaucccauua

SEQ ID NO: 2653842 - RNA, 19 nt, Artificial Sequence
  Description of Artificial Sequence: Synthetic oligonucleotide
cuacaauuuagugcuucug

SEQ ID NO: 2653843 - RNA, 19 nt, Artificial Sequence
  Description of Artificial Sequence: Synthetic oligonucleotide
caacauguuucuucgcuga

SEQ ID NO: 2653844 - RNA, 19 nt, Artificial Sequence
  Description of Artificial Sequence: Synthetic oligonucleotide
acuugucauucaaacagca

SEQ ID NO: 2653845 - RNA, 19 nt, Artificial Sequence
  Description of Artificial Sequence: Synthetic oligonucleotide
uuaaccuacuguguuccau

SEQ ID NO: 2653846 - RNA, 19 nt, Artificial Sequence
  Description of Artificial Sequence: Synthetic oligonucleotide
uggcccaucaguuccuuau

SEQ ID NO: 2653847 - RNA, 19 nt, Artificial Sequence
  Description of Artificial Sequence: Synthetic oligonucleotide
ucuagagagcugccugccu

SEQ ID NO: 2653848 - RNA, 19 nt, Artificial Sequence
  Description of Artificial Sequence: Synthetic oligonucleotide
uccccuggcaggucagagg

SEQ ID NO: 2653849 - RNA, 19 nt, Artificial Sequence
  Description of Artificial Sequence: Synthetic oligonucleotide
caguccuuuguucuacaug

SEQ ID NO: 2653850 - RNA, 19 nt, Artificial Sequence
  Description of Artificial Sequence: Synthetic oligonucleotide
cauucagaagaauggccca

SEQ ID NO: 2653851 - RNA, 19 nt, Artificial Sequence
  Description of Artificial Sequence: Synthetic oligonucleotide
acaugugacaacaucucau

SEQ ID NO: 2653852 - RNA, 19 nt, Artificial Sequence
  Description of Artificial Sequence: Synthetic oligonucleotide
cagaagaauggcccaucag

SEQ ID NO: 2653853 - RNA, 19 nt, Artificial Sequence
  Description of Artificial Sequence: Synthetic oligonucleotide
ugcuucugagguugggcac

SEQ ID NO: 2653854 - RNA, 19 nt, Artificial Sequence
  Description of Artificial Sequence: Synthetic oligonucleotide
uaaacgucuuagucuuuau

SEQ ID NO: 2653855 - RNA, 19 nt, Artificial Sequence
  Description of Artificial Sequence: Synthetic oligonucleotide
ucucaguccuuuguucuac

SEQ ID NO: 2653856 - RNA, 19 nt, Artificial Sequence
  Description of Artificial Sequence: Synthetic oligonucleotide
caugcaggcuguaacaugu

SEQ ID NO: 2653857 - RNA, 19 nt, Artificial Sequence
  Description of Artificial Sequence: Synthetic oligonucleotide
uugguccccuggcagguca

SEQ ID NO: 2653858 - RNA, 19 nt, Artificial Sequence
  Description of Artificial Sequence: Synthetic oligonucleotide
guuucuucgcugaauuaca

SEQ ID NO: 2653859 - RNA, 19 nt, Artificial Sequence
  Description of Artificial Sequence: Synthetic oligonucleotide
gucauucaaacagcaaaca

SEQ ID NO: 2653860 - RNA, 19 nt, Artificial Sequence
  Description of Artificial Sequence: Synthetic oligonucleotide
gcaacauguuucuucgcug

SEQ ID NO: 2653861 - RNA, 19 nt, Artificial Sequence
  Description of Artificial Sequence: Synthetic oligonucleotide
cacagagacaugaaaauuu

SEQ ID NO: 2653862 - RNA, 19 nt, Artificial Sequence
  Description of Artificial Sequence: Synthetic oligonucleotide
cuucgcugaauuacauuca

SEQ ID NO: 2653863 - RNA, 19 nt, Artificial Sequence
  Description of Artificial Sequence: Synthetic oligonucleotide
acucgaagaccuggaaaag

SEQ ID NO: 2653864 - RNA, 19 nt, Artificial Sequence
  Description of Artificial Sequence: Synthetic oligonucleotide
guaaaguuuccaaauucua

SEQ ID NO: 2653865 - RNA, 19 nt, Artificial Sequence
  Description of Artificial Sequence: Synthetic oligonucleotide
ucaugaucggucagaccua

SEQ ID NO: 2653866 - RNA, 19 nt, Artificial Sequence
  Description of Artificial Sequence: Synthetic oligonucleotide
gugcuucugagguugggca

SEQ ID NO: 2653867 - RNA, 19 nt, Artificial Sequence
  Description of Artificial Sequence: Synthetic oligonucleotide
gauuguaucuuagcaacau

SEQ ID NO: 2653868 - RNA, 19 nt, Artificial Sequence
  Description of Artificial Sequence: Synthetic oligonucleotide
cauucauguaaaguuucca

SEQ ID NO: 2653869 - RNA, 19 nt, Artificial Sequence
  Description of Artificial Sequence: Synthetic oligonucleotide
gggcacuugucauucaaac

SEQ ID NO: 2653870 - RNA, 19 nt, Artificial Sequence
  Description of Artificial Sequence: Synthetic oligonucleotide
cagaggcuucccaaacccc

SEQ ID NO: 2653871 - RNA, 19 nt, Artificial Sequence
  Description of Artificial Sequence: Synthetic oligonucleotide
ugggcacuugucauucaaa

SEQ ID NO: 2653872 - RNA, 19 nt, Artificial Sequence
  Description of Artificial Sequence: Synthetic oligonucleotide
ugugacuaauugguccccu

SEQ ID NO: 2653873 - RNA, 19 nt, Artificial Sequence
  Description of Artificial Sequence: Synthetic oligonucleotide
ggcacuaccacagagacau

SEQ ID NO: 2653874 - RNA, 19 nt, Artificial Sequence
  Description of Artificial Sequence: Synthetic oligonucleotide
gugacuaauugguccccug

SEQ ID NO: 2653875 - RNA, 19 nt, Artificial Sequence
  Description of Artificial Sequence: Synthetic oligonucleotide
gagccagucaugaucgguc

SEQ ID NO: 2653876 - RNA, 19 nt, Artificial Sequence
  Description of Artificial Sequence: Synthetic oligonucleotide
gaacaucucaguccuuugu

SEQ ID NO: 2653877 - RNA, 19 nt, Artificial Sequence
  Description of Artificial Sequence: Synthetic oligonucleotide
uucuucgcugaauuacauu

SEQ ID NO: 2653878 - RNA, 19 nt, Artificial Sequence
  Description of Artificial Sequence: Synthetic oligonucleotide
ucaguccuuuguucuacau

SEQ ID NO: 2653879 - RNA, 19 nt, Artificial Sequence
  Description of Artificial Sequence: Synthetic oligonucleotide
agccagucaugaucgguca

SEQ ID NO: 2653880 - RNA, 19 nt, Artificial Sequence
  Description of Artificial Sequence: Synthetic oligonucleotide
ugggcucggugugagagga

SEQ ID NO: 2653881 - RNA, 19 nt, Artificial Sequence
  Description of Artificial Sequence: Synthetic oligonucleotide
gugagaggaagcucaugca

SEQ ID NO: 2653882 - RNA, 19 nt, Artificial Sequence
  Description of Artificial Sequence: Synthetic oligonucleotide
guaucuuagcaacauguuu

SEQ ID NO: 2653883 - RNA, 19 nt, Artificial Sequence
  Description of Artificial Sequence: Synthetic oligonucleotide
aucaaaugagaaguauaua

SEQ ID NO: 2653884 - RNA, 19 nt, Artificial Sequence
  Description of Artificial Sequence: Synthetic oligonucleotide
caguuccuuauguaccauc

SEQ ID NO: 2653885 - RNA, 19 nt, Artificial Sequence
  Description of Artificial Sequence: Synthetic oligonucleotide
uucagaagaauggcccauc

SEQ ID NO: 2653886 - RNA, 19 nt, Artificial Sequence
  Description of Artificial Sequence: Synthetic oligonucleotide
gagaaguauauaacucgaa

SEQ ID NO: 2653887 - RNA, 19 nt, Artificial Sequence
  Description of Artificial Sequence: Synthetic oligonucleotide
cugagguugggcacuuguc

SEQ ID NO: 2653888 - RNA, 19 nt, Artificial Sequence
  Description of Artificial Sequence: Synthetic oligonucleotide
cuugucauucaaacagcaa

SEQ ID NO: 2653889 - RNA, 19 nt, Artificial Sequence
  Description of Artificial Sequence: Synthetic oligonucleotide
uagcaacauguuucuucgc

SEQ ID NO: 2653890 - RNA, 19 nt, Artificial Sequence
  Description of Artificial Sequence: Synthetic oligonucleotide
cucuagagagcugccugcc

SEQ ID NO: 2653891 - RNA, 19 nt, Artificial Sequence
  Description of Artificial Sequence: Synthetic oligonucleotide
acaggcacuaccacagaga

SEQ ID NO: 2653892 - RNA, 19 nt, Artificial Sequence
  Description of Artificial Sequence: Synthetic oligonucleotide
ccaggaacuggaagaaaag

SEQ ID NO: 2653893 - RNA, 19 nt, Artificial Sequence
  Description of Artificial Sequence: Synthetic oligonucleotide
accuacuguguuccauuca

SEQ ID NO: 2653894 - RNA, 19 nt, Artificial Sequence
  Description of Artificial Sequence: Synthetic oligonucleotide
auucagaagaauggcccau

SEQ ID NO: 2653895 - RNA, 19 nt, Artificial Sequence
  Description of Artificial Sequence: Synthetic oligonucleotide
gaagaauggcccaucaguu

SEQ ID NO: 2653896 - RNA, 19 nt, Artificial Sequence
  Description of Artificial Sequence: Synthetic oligonucleotide
auguuucuucgcugaauua

SEQ ID NO: 2653897 - RNA, 19 nt, Artificial Sequence
  Description of Artificial Sequence: Synthetic oligonucleotide
uaggggcuuaucccauuaa

SEQ ID NO: 2653898 - RNA, 19 nt, Artificial Sequence
  Description of Artificial Sequence: Synthetic oligonucleotide
uuuaggggcuuaucccauu

SEQ ID NO: 2653899 - RNA, 19 nt, Artificial Sequence
  Description of Artificial Sequence: Synthetic oligonucleotide
cugggcucggugugagagg

SEQ ID NO: 2653900 - RNA, 19 nt, Artificial Sequence
  Description of Artificial Sequence: Synthetic oligonucleotide
cuaccacagagacaugaaa

SEQ ID NO: 2653901 - RNA, 19 nt, Artificial Sequence
  Description of Artificial Sequence: Synthetic oligonucleotide
aggucagaggcuucccaaa

SEQ ID NO: 2653902 - RNA, 19 nt, Artificial Sequence
  Description of Artificial Sequence: Synthetic oligonucleotide
caucucaguccuuuguucu

SEQ ID NO: 2653903 - RNA, 19 nt, Artificial Sequence
  Description of Artificial Sequence: Synthetic oligonucleotide
ucagaccuaugugacuaau

SEQ ID NO: 2653904 - RNA, 19 nt, Artificial Sequence
  Description of Artificial Sequence: Synthetic oligonucleotide
caugugguauauacauaaa

SEQ ID NO: 2653905 - RNA, 19 nt, Artificial Sequence
  Description of Artificial Sequence: Synthetic oligonucleotide
ccuuauguaccaucagcuc

SEQ ID NO: 2653906 - RNA, 19 nt, Artificial Sequence
  Description of Artificial Sequence: Synthetic oligonucleotide
uauguaccaucagcuccug

SEQ ID NO: 2653907 - RNA, 19 nt, Artificial Sequence
  Description of Artificial Sequence: Synthetic oligonucleotide
aggagccagucaugaucgg

SEQ ID NO: 2653908 - RNA, 19 nt, Artificial Sequence
  Description of Artificial Sequence: Synthetic oligonucleotide
uggcaggucagaggcuucc

SEQ ID NO: 2653909 - RNA, 19 nt, Artificial Sequence
  Description of Artificial Sequence: Synthetic oligonucleotide
ccuaugugacuaauugguc

SEQ ID NO: 2653910 - RNA, 19 nt, Artificial Sequence
  Description of Artificial Sequence: Synthetic oligonucleotide
ugcucaguuccagcugggc

SEQ ID NO: 2653911 - RNA, 19 nt, Artificial Sequence
  Description of Artificial Sequence: Synthetic oligonucleotide
gagaacacugaggauugua

SEQ ID NO: 2653912 - RNA, 19 nt, Artificial Sequence
  Description of Artificial Sequence: Synthetic oligonucleotide
acaacaucucaugcucagu

SEQ ID NO: 2653913 - RNA, 19 nt, Artificial Sequence
  Description of Artificial Sequence: Synthetic oligonucleotide
cauguuucuucgcugaauu

SEQ ID NO: 2653914 - RNA, 19 nt, Artificial Sequence
  Description of Artificial Sequence: Synthetic oligonucleotide
acacugaggauuguaucuu

SEQ ID NO: 2653915 - RNA, 19 nt, Artificial Sequence
  Description of Artificial Sequence: Synthetic oligonucleotide
ggucagaggcuucccaaac

SEQ ID NO: 2653916 - RNA, 19 nt, Artificial Sequence
  Description of Artificial Sequence: Synthetic oligonucleotide
cuacuguguuccauucaga

SEQ ID NO: 2653917 - RNA, 19 nt, Artificial Sequence
  Description of Artificial Sequence: Synthetic oligonucleotide
gcucaugcaggcuguaaca

SEQ ID NO: 2653918 - RNA, 19 nt, Artificial Sequence
  Description of Artificial Sequence: Synthetic oligonucleotide
cacugaggagccagucaug

SEQ ID NO: 2653919 - RNA, 19 nt, Artificial Sequence
  Description of Artificial Sequence: Synthetic oligonucleotide
ggggcuuaucccauuaaca

SEQ ID NO: 2653920 - RNA, 19 nt, Artificial Sequence
  Description of Artificial Sequence: Synthetic oligonucleotide
gggcuuaucccauuaacau

SEQ ID NO: 2653921 - RNA, 19 nt, Artificial Sequence
  Description of Artificial Sequence: Synthetic oligonucleotide
ggcucggugugagaggaag

SEQ ID NO: 2653922 - RNA, 19 nt, Artificial Sequence
  Description of Artificial Sequence: Synthetic oligonucleotide
ugguccccuggcaggucag

SEQ ID NO: 2653923 - RNA, 19 nt, Artificial Sequence
  Description of Artificial Sequence: Synthetic oligonucleotide
aggcuguaacaugugguau

SEQ ID NO: 2653924 - RNA, 19 nt, Artificial Sequence
  Description of Artificial Sequence: Synthetic oligonucleotide
cauuccacaaacugugcuu

SEQ ID NO: 2653925 - RNA, 19 nt, Artificial Sequence
  Description of Artificial Sequence: Synthetic oligonucleotide
cuggaacucuagagagcug

SEQ ID NO: 2653926 - RNA, 19 nt, Artificial Sequence
  Description of Artificial Sequence: Synthetic oligonucleotide
ucaguuccuuauguaccau

SEQ ID NO: 2653927 - RNA, 19 nt, Artificial Sequence
  Description of Artificial Sequence: Synthetic oligonucleotide
ucggugugagaggaagcuc

SEQ ID NO: 2653928 - RNA, 19 nt, Artificial Sequence
  Description of Artificial Sequence: Synthetic oligonucleotide
ggucagaccuaugugacua

SEQ ID NO: 2653929 - RNA, 19 nt, Artificial Sequence
  Description of Artificial Sequence: Synthetic oligonucleotide
agucuuuauuugagaacau

SEQ ID NO: 2653930 - RNA, 19 nt, Artificial Sequence
  Description of Artificial Sequence: Synthetic oligonucleotide
gcugaauuacauucaugua

SEQ ID NO: 2653931 - RNA, 19 nt, Artificial Sequence
  Description of Artificial Sequence: Synthetic oligonucleotide
cgcugaauuacauucaugu

SEQ ID NO: 2653932 - RNA, 19 nt, Artificial Sequence
  Description of Artificial Sequence: Synthetic oligonucleotide
caacaucucaugcucaguu

SEQ ID NO: 2653933 - RNA, 19 nt, Artificial Sequence
  Description of Artificial Sequence: Synthetic oligonucleotide
ggcuguaacaugugguaua

SEQ ID NO: 2653934 - RNA, 19 nt, Artificial Sequence
  Description of Artificial Sequence: Synthetic oligonucleotide
ucuuagcaacauguuucuu

SEQ ID NO: 2653935 - RNA, 19 nt, Artificial Sequence
  Description of Artificial Sequence: Synthetic oligonucleotide
gaaaagcaagcagcuuuua

SEQ ID NO: 2653936 - RNA, 19 nt, Artificial Sequence
  Description of Artificial Sequence: Synthetic oligonucleotide
ugagaacaucucaguccuu

SEQ ID NO: 2653937 - RNA, 19 nt, Artificial Sequence
  Description of Artificial Sequence: Synthetic oligonucleotide
ggcuacaauuuagugcuuc

SEQ ID NO: 2653938 - RNA, 19 nt, Artificial Sequence
  Description of Artificial Sequence: Synthetic oligonucleotide
aauggcccaucaguuccuu

SEQ ID NO: 2653939 - RNA, 19 nt, Artificial Sequence
  Description of Artificial Sequence: Synthetic oligonucleotide
cccauuaacauuccacaaa

SEQ ID NO: 2653940 - RNA, 19 nt, Artificial Sequence
  Description of Artificial Sequence: Synthetic oligonucleotide
ggcuucccaaaccccauuc

SEQ ID NO: 2653941 - RNA, 19 nt, Artificial Sequence
  Description of Artificial Sequence: Synthetic oligonucleotide
auugguccccuggcagguc

SEQ ID NO: 2653942 - RNA, 19 nt, Artificial Sequence
  Description of Artificial Sequence: Synthetic oligonucleotide
guccuuuguucuacaugug

SEQ ID NO: 2653943 - RNA, 19 nt, Artificial Sequence
  Description of Artificial Sequence: Synthetic oligonucleotide
cucaguccuuuguucuaca

SEQ ID NO: 2653944 - RNA, 19 nt, Artificial Sequence
  Description of Artificial Sequence: Synthetic oligonucleotide
ggauuguaucuuagcaaca

SEQ ID NO: 2653945 - RNA, 19 nt, Artificial Sequence
  Description of Artificial Sequence: Synthetic oligonucleotide
gaacucuagagagcugccu

SEQ ID NO: 2653946 - RNA, 19 nt, Artificial Sequence
  Description of Artificial Sequence: Synthetic oligonucleotide
ggcacugaggagccaguca

SEQ ID NO: 2653947 - RNA, 19 nt, Artificial Sequence
  Description of Artificial Sequence: Synthetic oligonucleotide
aaagggcacugaggagcca

SEQ ID NO: 2653948 - RNA, 19 nt, Artificial Sequence
  Description of Artificial Sequence: Synthetic oligonucleotide
gcuacaauuuagugcuucu

SEQ ID NO: 2653949 - RNA, 19 nt, Artificial Sequence
  Description of Artificial Sequence: Synthetic oligonucleotide
gugugagaggaagcucaug

SEQ ID NO: 2653950 - RNA, 19 nt, Artificial Sequence
  Description of Artificial Sequence: Synthetic oligonucleotide
cgucuuagucuuuauuuga

SEQ ID NO: 2653951 - RNA, 19 nt, Artificial Sequence
  Description of Artificial Sequence: Synthetic oligonucleotide
guacaggcacuaccacaga

SEQ ID NO: 2653952 - RNA, 19 nt, Artificial Sequence
  Description of Artificial Sequence: Synthetic oligonucleotide
agagaacacugaggauugu

SEQ ID NO: 2653953 - RNA, 19 nt, Artificial Sequence
  Description of Artificial Sequence: Synthetic oligonucleotide
guugggcacuugucauuca

SEQ ID NO: 2653954 - RNA, 19 nt, Artificial Sequence
  Description of Artificial Sequence: Synthetic oligonucleotide
gucagaccuaugugacuaa

SEQ ID NO: 2653955 - RNA, 19 nt, Artificial Sequence
  Description of Artificial Sequence: Synthetic oligonucleotide
cucggugugagaggaagcu

SEQ ID NO: 2653956 - RNA, 19 nt, Artificial Sequence
  Description of Artificial Sequence: Synthetic oligonucleotide
uucugagguugggcacuug

SEQ ID NO: 2653957 - RNA, 19 nt, Artificial Sequence
  Description of Artificial Sequence: Synthetic oligonucleotide
cagcuuuuaggggcuuauc

SEQ ID NO: 2653958 - RNA, 19 nt, Artificial Sequence
  Description of Artificial Sequence: Synthetic oligonucleotide
gcacugaggagccagucau

SEQ ID NO: 2653959 - RNA, 19 nt, Artificial Sequence
  Description of Artificial Sequence: Synthetic oligonucleotide
ggcuuaucccauuaacauu

SEQ ID NO: 2653960 - RNA, 19 nt, Artificial Sequence
  Description of Artificial Sequence: Synthetic oligonucleotide
gaauggcccaucaguuccu

SEQ ID NO: 2653961 - RNA, 19 nt, Artificial Sequence
  Description of Artificial Sequence: Synthetic oligonucleotide
aggcacuaccacagagaca

SEQ ID NO: 2653962 - RNA, 19 nt, Artificial Sequence
  Description of Artificial Sequence: Synthetic oligonucleotide
ccuggaacucuagagagcu

SEQ ID NO: 2653963 - RNA, 19 nt, Artificial Sequence
  Description of Artificial Sequence: Synthetic oligonucleotide
cagcuccugcuguggcuac

SEQ ID NO: 2653964 - RNA, 19 nt, Artificial Sequence
  Description of Artificial Sequence: Synthetic oligonucleotide
augaucggucagaccuaug

SEQ ID NO: 2653965 - RNA, 19 nt, Artificial Sequence
  Description of Artificial Sequence: Synthetic oligonucleotide
cagaccuaugugacuaauu

SEQ ID NO: 2653966 - RNA, 19 nt, Artificial Sequence
  Description of Artificial Sequence: Synthetic oligonucleotide
gcuguggcuacaauuuagu

SEQ ID NO: 2653967 - RNA, 19 nt, Artificial Sequence
  Description of Artificial Sequence: Synthetic oligonucleotide
gcaggcuguaacauguggu

SEQ ID NO: 2653968 - RNA, 19 nt, Artificial Sequence
  Description of Artificial Sequence: Synthetic oligonucleotide
agcagcuuuuaggggcuua

SEQ ID NO: 2653969 - RNA, 19 nt, Artificial Sequence
  Description of Artificial Sequence: Synthetic oligonucleotide
agcugggcucggugugaga

SEQ ID NO: 2653970 - RNA, 19 nt, Artificial Sequence
  Description of Artificial Sequence: Synthetic oligonucleotide
gaagcucaugcaggcugua

SEQ ID NO: 2653971 - RNA, 19 nt, Artificial Sequence
  Description of Artificial Sequence: Synthetic oligonucleotide
ccagucaugaucggucaga

SEQ ID NO: 2653972 - RNA, 19 nt, Artificial Sequence
  Description of Artificial Sequence: Synthetic oligonucleotide
aagcagcuuuuaggggcuu

SEQ ID NO: 2653973 - RNA, 19 nt, Artificial Sequence
  Description of Artificial Sequence: Synthetic oligonucleotide
gcuguaacaugugguauau

SEQ ID NO: 2653974 - RNA, 19 nt, Artificial Sequence
  Description of Artificial Sequence: Synthetic oligonucleotide
cagagagaacacugaggau

SEQ ID NO: 2653975 - RNA, 19 nt, Artificial Sequence
  Description of Artificial Sequence: Synthetic oligonucleotide
ggcaggucagaggcuuccc

SEQ ID NO: 2653976 - RNA, 19 nt, Artificial Sequence
  Description of Artificial Sequence: Synthetic oligonucleotide
caugaucggucagaccuau

SEQ ID NO: 2653977 - RNA, 19 nt, Artificial Sequence
  Description of Artificial Sequence: Synthetic oligonucleotide
cccaucaguuccuuaugua

SEQ ID NO: 2653978 - RNA, 19 nt, Artificial Sequence
  Description of Artificial Sequence: Synthetic oligonucleotide
gaggcuucccaaaccccau

SEQ ID NO: 2653979 - RNA, 19 nt, Artificial Sequence
  Description of Artificial Sequence: Synthetic oligonucleotide
ggaagcucaugcaggcugu

SEQ ID NO: 2653980 - RNA, 19 nt, Artificial Sequence
  Description of Artificial Sequence: Synthetic oligonucleotide
ggagccagucaugaucggu

SEQ ID NO: 2653981 - RNA, 19 nt, Artificial Sequence
  Description of Artificial Sequence: Synthetic oligonucleotide
cgaagaccuggaaaagcaa

SEQ ID NO: 2653982 - RNA, 19 nt, Artificial Sequence
  Description of Artificial Sequence: Synthetic oligonucleotide
cuguaacaugugguauaua

SEQ ID NO: 2653983 - RNA, 19 nt, Artificial Sequence
  Description of Artificial Sequence: Synthetic oligonucleotide
guuaaacgucuuagucuuu

SEQ ID NO: 2653984 - RNA, 19 nt, Artificial Sequence
  Description of Artificial Sequence: Synthetic oligonucleotide
caguuccagcugggcucgg

SEQ ID NO: 2653985 - RNA, 19 nt, Artificial Sequence
  Description of Artificial Sequence: Synthetic oligonucleotide
cuggaaaagcaagcagcuu

SEQ ID NO: 2653986 - RNA, 19 nt, Artificial Sequence
  Description of Artificial Sequence: Synthetic oligonucleotide
gcagcuuuuaggggcuuau

SEQ ID NO: 2653987 - RNA, 19 nt, Artificial Sequence
  Description of Artificial Sequence: Synthetic oligonucleotide
ccacagagacaugaaaauu

SEQ ID NO: 2653988 - RNA, 19 nt, Artificial Sequence
  Description of Artificial Sequence: Synthetic oligonucleotide
gguccccuggcaggucaga

SEQ ID NO: 2653989 - RNA, 19 nt, Artificial Sequence
  Description of Artificial Sequence: Synthetic oligonucleotide
ccuggcaggucagaggcuu

SEQ ID NO: 2653990 - RNA, 19 nt, Artificial Sequence
  Description of Artificial Sequence: Synthetic oligonucleotide
cuccugcuguggcuacaau

SEQ ID NO: 2653991 - RNA, 19 nt, Artificial Sequence
  Description of Artificial Sequence: Synthetic oligonucleotide
cggucagaccuaugugacu

SEQ ID NO: 2653992 - RNA, 19 nt, Artificial Sequence
  Description of Artificial Sequence: Synthetic oligonucleotide
gggcucggugugagaggaa

SEQ ID NO: 2653993 - RNA, 19 nt, Artificial Sequence
  Description of Artificial Sequence: Synthetic oligonucleotide
aacacgaacacguaguugc

SEQ ID NO: 2653994 - RNA, 19 nt, Artificial Sequence
  Description of Artificial Sequence: Synthetic oligonucleotide
aaggaugaggcccagaaac

SEQ ID NO: 2653995 - RNA, 19 nt, Artificial Sequence
  Description of Artificial Sequence: Synthetic oligonucleotide
aagaaggggaaagagacac

SEQ ID NO: 2653996 - RNA, 19 nt, Artificial Sequence
  Description of Artificial Sequence: Synthetic oligonucleotide
uagagaauguaacaggcgc

SEQ ID NO: 2653997 - RNA, 19 nt, Artificial Sequence
  Description of Artificial Sequence: Synthetic oligonucleotide
agaagaaggggaaagagac

SEQ ID NO: 2653998 - RNA, 19 nt, Artificial Sequence
  Description of Artificial Sequence: Synthetic oligonucleotide
agauagagaauguaacagg

SEQ ID NO: 2653999 - RNA, 19 nt, Artificial Sequence
  Description of Artificial Sequence: Synthetic oligonucleotide
aaagagcacaagcuuggac

SEQ ID NO: 2654000 - RNA, 19 nt, Artificial Sequence
  Description of Artificial Sequence: Synthetic oligonucleotide
uugguaauacuccacguug

SEQ ID NO: 2654001 - RNA, 19 nt, Artificial Sequence
  Description of Artificial Sequence: Synthetic oligonucleotide
aggggaaagagacaccgcc

SEQ ID NO: 2654002 - RNA, 19 nt, Artificial Sequence
  Description of Artificial Sequence: Synthetic oligonucleotide
gauagagaauguaacaggc

SEQ ID NO: 2654003 - RNA, 19 nt, Artificial Sequence
  Description of Artificial Sequence: Synthetic oligonucleotide
gacaccgccagccagggcg

SEQ ID NO: 2654004 - RNA, 19 nt, Artificial Sequence
  Description of Artificial Sequence: Synthetic oligonucleotide
aauacuccacguugcguac

SEQ ID NO: 2654005 - RNA, 19 nt, Artificial Sequence
  Description of Artificial Sequence: Synthetic oligonucleotide
aauguaacaggcgccaaag

SEQ ID NO: 2654006 - RNA, 19 nt, Artificial Sequence
  Description of Artificial Sequence: Synthetic oligonucleotide
acgaaagcgccccagggcc

SEQ ID NO: 2654007 - RNA, 19 nt, Artificial Sequence
  Description of Artificial Sequence: Synthetic oligonucleotide
uguaacaggcgccaaagaa

SEQ ID NO: 2654008 - RNA, 19 nt, Artificial Sequence
  Description of Artificial Sequence: Synthetic oligonucleotide
gaaggggaaagagacaccg

SEQ ID NO: 2654009 - RNA, 19 nt, Artificial Sequence
  Description of Artificial Sequence: Synthetic oligonucleotide
uaacaggcgccaaagaaga

SEQ ID NO: 2654010 - RNA, 19 nt, Artificial Sequence
  Description of Artificial Sequence: Synthetic oligonucleotide
aguugcuuugguaauacuc

SEQ ID NO: 2654011 - RNA, 19 nt, Artificial Sequence
  Description of Artificial Sequence: Synthetic oligonucleotide
ugaaggcucuaucuggugc

SEQ ID NO: 2654012 - RNA, 19 nt, Artificial Sequence
  Description of Artificial Sequence: Synthetic oligonucleotide
gaaagagacaccgccagcc

SEQ ID NO: 2654013 - RNA, 19 nt, Artificial Sequence
  Description of Artificial Sequence: Synthetic oligonucleotide
aacgugcgcagauagagaa

SEQ ID NO: 2654014 - RNA, 19 nt, Artificial Sequence
  Description of Artificial Sequence: Synthetic oligonucleotide
guugcuuugguaauacucc

SEQ ID NO: 2654015 - RNA, 19 nt, Artificial Sequence
  Description of Artificial Sequence: Synthetic oligonucleotide
guuccucuccgucugaagg

SEQ ID NO: 2654016 - RNA, 19 nt, Artificial Sequence
  Description of Artificial Sequence: Synthetic oligonucleotide
gaugucaccacgcaguaaa

SEQ ID NO: 2654017 - RNA, 19 nt, Artificial Sequence
  Description of Artificial Sequence: Synthetic oligonucleotide
agggucguggcgcucagcc

SEQ ID NO: 2654018 - RNA, 19 nt, Artificial Sequence
  Description of Artificial Sequence: Synthetic oligonucleotide
uaauacuccacguugcgua

SEQ ID NO: 2654019 - RNA, 19 nt, Artificial Sequence
  Description of Artificial Sequence: Synthetic oligonucleotide
agagaauguaacaggcgcc

SEQ ID NO: 2654020 - RNA, 19 nt, Artificial Sequence
  Description of Artificial Sequence: Synthetic oligonucleotide
cuccguauccuucugcugg

SEQ ID NO: 2654021 - RNA, 19 nt, Artificial Sequence
  Description of Artificial Sequence: Synthetic oligonucleotide
ucaccucccggccaaagag

SEQ ID NO: 2654022 - RNA, 19 nt, Artificial Sequence
  Description of Artificial Sequence: Synthetic oligonucleotide
aagacggccgaaccagcac

SEQ ID NO: 2654023 - RNA, 19 nt, Artificial Sequence
  Description of Artificial Sequence: Synthetic oligonucleotide
uuugguaauacuccacguu

SEQ ID NO: 2654024 - RNA, 19 nt, Artificial Sequence
  Description of Artificial Sequence: Synthetic oligonucleotide
agacggccgaaccagcacc

SEQ ID NO: 2654025 - RNA, 19 nt, Artificial Sequence
  Description of Artificial Sequence: Synthetic oligonucleotide
guaacaggcgccaaagaag

SEQ ID NO: 2654026 - RNA, 19 nt, Artificial Sequence
  Description of Artificial Sequence: Synthetic oligonucleotide
aagagacaccgccagccag

SEQ ID NO: 2654027 - RNA, 19 nt, Artificial Sequence
  Description of Artificial Sequence: Synthetic oligonucleotide
ucugaaggcucuaucuggu

SEQ ID NO: 2654028 - RNA, 19 nt, Artificial Sequence
  Description of Artificial Sequence: Synthetic oligonucleotide
augaucaccaggguggcuc

SEQ ID NO: 2654029 - RNA, 19 nt, Artificial Sequence
  Description of Artificial Sequence: Synthetic oligonucleotide
auagagaauguaacaggcg

SEQ ID NO: 2654030 - RNA, 19 nt, Artificial Sequence
  Description of Artificial Sequence: Synthetic oligonucleotide
augcgcugggcucaccucc

SEQ ID NO: 2654031 - RNA, 19 nt, Artificial Sequence
  Description of Artificial Sequence: Synthetic oligonucleotide
acgcucaggacauggcgcc

SEQ ID NO: 2654032 - RNA, 19 nt, Artificial Sequence
  Description of Artificial Sequence: Synthetic oligonucleotide
agaaacacgaacacguagu

SEQ ID NO: 2654033 - RNA, 19 nt, Artificial Sequence
  Description of Artificial Sequence: Synthetic oligonucleotide
aaagagacaccgccagcca

SEQ ID NO: 2654034 - RNA, 19 nt, Artificial Sequence
  Description of Artificial Sequence: Synthetic oligonucleotide
aagacagccagagccacca

SEQ ID NO: 2654035 - RNA, 19 nt, Artificial Sequence
  Description of Artificial Sequence: Synthetic oligonucleotide
aacacguaguugcuuuggu

SEQ ID NO: 2654036 - RNA, 19 nt, Artificial Sequence
  Description of Artificial Sequence: Synthetic oligonucleotide
augggagccgaugaucacc

SEQ ID NO: 2654037 - RNA, 19 nt, Artificial Sequence
  Description of Artificial Sequence: Synthetic oligonucleotide
ugucaccacgcaguaaagg

SEQ ID NO: 2654038 - RNA, 19 nt, Artificial Sequence
  Description of Artificial Sequence: Synthetic oligonucleotide
uccacgaaagcgccccagg

SEQ ID NO: 2654039 - RNA, 19 nt, Artificial Sequence
  Description of Artificial Sequence: Synthetic oligonucleotide
uggacugcaacgugcgcag

SEQ ID NO: 2654040 - RNA, 19 nt, Artificial Sequence
  Description of Artificial Sequence: Synthetic oligonucleotide
ugauccacgaaagcgcccc

SEQ ID NO: 2654041 - RNA, 19 nt, Artificial Sequence
  Description of Artificial Sequence: Synthetic oligonucleotide
caggcgccaaagaagacag

SEQ ID NO: 2654042 - RNA, 19 nt, Artificial Sequence
  Description of Artificial Sequence: Synthetic oligonucleotide
aaacacgaacacguaguug

SEQ ID NO: 2654043 - RNA, 19 nt, Artificial Sequence
  Description of Artificial Sequence: Synthetic oligonucleotide
ccgaugaucaccagggugg

SEQ ID NO: 2654044 - RNA, 19 nt, Artificial Sequence
  Description of Artificial Sequence: Synthetic oligonucleotide
ugcggggucgcgagaaacg

SEQ ID NO: 2654045 - RNA, 19 nt, Artificial Sequence
  Description of Artificial Sequence: Synthetic oligonucleotide
cacguugcguaccaggcgc

SEQ ID NO: 2654046 - RNA, 19 nt, Artificial Sequence
  Description of Artificial Sequence: Synthetic oligonucleotide
uugcuuugguaauacucca

SEQ ID NO: 2654047 - RNA, 19 nt, Artificial Sequence
  Description of Artificial Sequence: Synthetic oligonucleotide
gaacacguaguugcuuugg

SEQ ID NO: 2654048 - RNA, 19 nt, Artificial Sequence
  Description of Artificial Sequence: Synthetic oligonucleotide
aaaggaugaggcccagaaa

SEQ ID NO: 2654049 - RNA, 19 nt, Artificial Sequence
  Description of Artificial Sequence: Synthetic oligonucleotide
gucaccacgcaguaaagga

SEQ ID NO: 2654050 - RNA, 19 nt, Artificial Sequence
  Description of Artificial Sequence: Synthetic oligonucleotide
aaggggaaagagacaccgc

SEQ ID NO: 2654051 - RNA, 19 nt, Artificial Sequence
  Description of Artificial Sequence: Synthetic oligonucleotide
ucgcgagaaacgcugcuga

SEQ ID NO: 2654052 - RNA, 19 nt, Artificial Sequence
  Description of Artificial Sequence: Synthetic oligonucleotide
uuccucuccgucugaaggc

SEQ ID NO: 2654053 - RNA, 19 nt, Artificial Sequence
  Description of Artificial Sequence: Synthetic oligonucleotide
gcaguaaaggaugaggccc

SEQ ID NO: 2654054 - RNA, 19 nt, Artificial Sequence
  Description of Artificial Sequence: Synthetic oligonucleotide
cuaucuggugcaaggcagc

SEQ ID NO: 2654055 - RNA, 19 nt, Artificial Sequence
  Description of Artificial Sequence: Synthetic oligonucleotide
caaagcucgcccagguugc

SEQ ID NO: 2654056 - RNA, 19 nt, Artificial Sequence
  Description of Artificial Sequence: Synthetic oligonucleotide
aaacgcugcugauccacga

SEQ ID NO: 2654057 - RNA, 19 nt, Artificial Sequence
  Description of Artificial Sequence: Synthetic oligonucleotide
agaagacagccagagccac

SEQ ID NO: 2654058 - RNA, 19 nt, Artificial Sequence
  Description of Artificial Sequence: Synthetic oligonucleotide
ugugggaucgccgcggaca

SEQ ID NO: 2654059 - RNA, 19 nt, Artificial Sequence
  Description of Artificial Sequence: Synthetic oligonucleotide
cacguaguugcuuugguaa

SEQ ID NO: 2654060 - RNA, 19 nt, Artificial Sequence
  Description of Artificial Sequence: Synthetic oligonucleotide
gcaaagcucgcccagguug

SEQ ID NO: 2654061 - RNA, 19 nt, Artificial Sequence
  Description of Artificial Sequence: Synthetic oligonucleotide
caccacgcaguaaaggaug

SEQ ID NO: 2654062 - RNA, 19 nt, Artificial Sequence
  Description of Artificial Sequence: Synthetic oligonucleotide
aagcuuggacugcaacgug

SEQ ID NO: 2654063 - RNA, 19 nt, Artificial Sequence
  Description of Artificial Sequence: Synthetic oligonucleotide
gagaauguaacaggcgcca

SEQ ID NO: 2654064 - RNA, 19 nt, Artificial Sequence
  Description of Artificial Sequence: Synthetic oligonucleotide
ggcucuaucuggugcaagg

SEQ ID NO: 2654065 - RNA, 19 nt, Artificial Sequence
  Description of Artificial Sequence: Synthetic oligonucleotide
caaagaagacagccagagc

SEQ ID NO: 2654066 - RNA, 19 nt, Artificial Sequence
  Description of Artificial Sequence: Synthetic oligonucleotide
cagaagacggccgaaccag

SEQ ID NO: 2654067 - RNA, 19 nt, Artificial Sequence
  Description of Artificial Sequence: Synthetic oligonucleotide
gaaacgcugcugauccacg

SEQ ID NO: 2654068 - RNA, 19 nt, Artificial Sequence
  Description of Artificial Sequence: Synthetic oligonucleotide
ucuacgcugcggugugugg

SEQ ID NO: 2654069 - RNA, 19 nt, Artificial Sequence
  Description of Artificial Sequence: Synthetic oligonucleotide
gggaaagagacaccgccag

SEQ ID NO: 2654070 - RNA, 19 nt, Artificial Sequence
  Description of Artificial Sequence: Synthetic oligonucleotide
agcaugggagccgaugauc

SEQ ID NO: 2654071 - RNA, 19 nt, Artificial Sequence
  Description of Artificial Sequence: Synthetic oligonucleotide
gacgcucaggacauggcgc

SEQ ID NO: 2654072 - RNA, 19 nt, Artificial Sequence
  Description of Artificial Sequence: Synthetic oligonucleotide
cacgaaagcgccccagggc

SEQ ID NO: 2654073 - RNA, 19 nt, Artificial Sequence
  Description of Artificial Sequence: Synthetic oligonucleotide
agaaggggaaagagacacc

SEQ ID NO: 2654074 - RNA, 19 nt, Artificial Sequence
  Description of Artificial Sequence: Synthetic oligonucleotide
uacuccacguugcguacca

SEQ ID NO: 2654075 - RNA, 19 nt, Artificial Sequence
  Description of Artificial Sequence: Synthetic oligonucleotide
gaggcccagaaacacgaac

SEQ ID NO: 2654076 - RNA, 19 nt, Artificial Sequence
  Description of Artificial Sequence: Synthetic oligonucleotide
ggagccgaugaucaccagg

SEQ ID NO: 2654077 - RNA, 19 nt, Artificial Sequence
  Description of Artificial Sequence: Synthetic oligonucleotide
cugcaacgugcgcagauag

SEQ ID NO: 2654078 - RNA, 19 nt, Artificial Sequence
  Description of Artificial Sequence: Synthetic oligonucleotide
acaggcuccaucugcaguu

SEQ ID NO: 2654079 - RNA, 19 nt, Artificial Sequence
  Description of Artificial Sequence: Synthetic oligonucleotide
acgaacacguaguugcuuu

SEQ ID NO: 2654080 - RNA, 19 nt, Artificial Sequence
  Description of Artificial Sequence: Synthetic oligonucleotide
agccagaagaaggggaaag

SEQ ID NO: 2654081 - RNA, 19 nt, Artificial Sequence
  Description of Artificial Sequence: Synthetic oligonucleotide
guaguugcuuugguaauac

SEQ ID NO: 2654082 - RNA, 19 nt, Artificial Sequence
  Description of Artificial Sequence: Synthetic oligonucleotide
agcccggacgcucaggaca

SEQ ID NO: 2654083 - RNA, 19 nt, Artificial Sequence
  Description of Artificial Sequence: Synthetic oligonucleotide
cgagaaacgcugcugaucc

SEQ ID NO: 2654084 - RNA, 19 nt, Artificial Sequence
  Description of Artificial Sequence: Synthetic oligonucleotide
agagacaccgccagccagg

SEQ ID NO: 2654085 - RNA, 19 nt, Artificial Sequence
  Description of Artificial Sequence: Synthetic oligonucleotide
gcaacgugcgcagauagag

SEQ ID NO: 2654086 - RNA, 19 nt, Artificial Sequence
  Description of Artificial Sequence: Synthetic oligonucleotide
accuccguauccuucugcu

SEQ ID NO: 2654087 - RNA, 19 nt, Artificial Sequence
  Description of Artificial Sequence: Synthetic oligonucleotide
aacgcugcugauccacgaa

SEQ ID NO: 2654088 - RNA, 19 nt, Artificial Sequence
  Description of Artificial Sequence: Synthetic oligonucleotide
ugaucaccaggguggcucc

SEQ ID NO: 2654089 - RNA, 19 nt, Artificial Sequence
  Description of Artificial Sequence: Synthetic oligonucleotide
acaggcgccaaagaagaca

SEQ ID NO: 2654090 - RNA, 19 nt, Artificial Sequence
  Description of Artificial Sequence: Synthetic oligonucleotide
aguuccucuccgucugaag

SEQ ID NO: 2654091 - RNA, 19 nt, Artificial Sequence
  Description of Artificial Sequence: Synthetic oligonucleotide
ggacgcucaggacauggcg

SEQ ID NO: 2654092 - RNA, 19 nt, Artificial Sequence
  Description of Artificial Sequence: Synthetic oligonucleotide
auacuccacguugcguacc

SEQ ID NO: 2654093 - RNA, 19 nt, Artificial Sequence
  Description of Artificial Sequence: Synthetic oligonucleotide
ggcgccaaagaagacagcc

SEQ ID NO: 2654094 - RNA, 19 nt, Artificial Sequence
  Description of Artificial Sequence: Synthetic oligonucleotide
ugcaacgugcgcagauaga

SEQ ID NO: 2654095 - RNA, 19 nt, Artificial Sequence
  Description of Artificial Sequence: Synthetic oligonucleotide
aacaggcgccaaagaagac

SEQ ID NO: 2654096 - RNA, 19 nt, Artificial Sequence
  Description of Artificial Sequence: Synthetic oligonucleotide
aggacauggcgccgcuugg

SEQ ID NO: 2654097 - RNA, 19 nt, Artificial Sequence
  Description of Artificial Sequence: Synthetic oligonucleotide
agaagacggccgaaccagc

SEQ ID NO: 2654098 - RNA, 19 nt, Artificial Sequence
  Description of Artificial Sequence: Synthetic oligonucleotide
augucuacgcugcggugug

SEQ ID NO: 2654099 - RNA, 19 nt, Artificial Sequence
  Description of Artificial Sequence: Synthetic oligonucleotide
uggugcaaggcagcauggg

SEQ ID NO: 2654100 - RNA, 19 nt, Artificial Sequence
  Description of Artificial Sequence: Synthetic oligonucleotide
augaggcccagaaacacga

SEQ ID NO: 2654101 - RNA, 19 nt, Artificial Sequence
  Description of Artificial Sequence: Synthetic oligonucleotide
uccgucugaaggcucuauc

SEQ ID NO: 2654102 - RNA, 19 nt, Artificial Sequence
  Description of Artificial Sequence: Synthetic oligonucleotide
ggucguggcgcucagcccc

SEQ ID NO: 2654103 - RNA, 19 nt, Artificial Sequence
  Description of Artificial Sequence: Synthetic oligonucleotide
cuacgcugcgguguguggg

SEQ ID NO: 2654104 - RNA, 19 nt, Artificial Sequence
  Description of Artificial Sequence: Synthetic oligonucleotide
aaagcucgcccagguugcg

SEQ ID NO: 2654105 - RNA, 19 nt, Artificial Sequence
  Description of Artificial Sequence: Synthetic oligonucleotide
aggcccagaaacacgaaca

SEQ ID NO: 2654106 - RNA, 19 nt, Artificial Sequence
  Description of Artificial Sequence: Synthetic oligonucleotide
auguaacaggcgccaaaga

SEQ ID NO: 2654107 - RNA, 19 nt, Artificial Sequence
  Description of Artificial Sequence: Synthetic oligonucleotide
uccagccacucucggccgg

SEQ ID NO: 2654108 - RNA, 19 nt, Artificial Sequence
  Description of Artificial Sequence: Synthetic oligonucleotide
uacugaugcgcugggcuca

SEQ ID NO: 2654109 - RNA, 19 nt, Artificial Sequence
  Description of Artificial Sequence: Synthetic oligonucleotide
uaucuggugcaaggcagca

SEQ ID NO: 2654110 - RNA, 19 nt, Artificial Sequence
  Description of Artificial Sequence: Synthetic oligonucleotide
gccggagggaaucagcuug

SEQ ID NO: 2654111 - RNA, 19 nt, Artificial Sequence
  Description of Artificial Sequence: Synthetic oligonucleotide
caguaaaggaugaggccca

SEQ ID NO: 2654112 - RNA, 19 nt, Artificial Sequence
  Description of Artificial Sequence: Synthetic oligonucleotide
gaaagcgccccagggccgg

SEQ ID NO: 2654113 - RNA, 19 nt, Artificial Sequence
  Description of Artificial Sequence: Synthetic oligonucleotide
guacugaugcgcugggcuc

SEQ ID NO: 2654114 - RNA, 19 nt, Artificial Sequence
  Description of Artificial Sequence: Synthetic oligonucleotide
cucuaucuggugcaaggca

SEQ ID NO: 2654115 - RNA, 19 nt, Artificial Sequence
  Description of Artificial Sequence: Synthetic oligonucleotide
acacguaguugcuuuggua

SEQ ID NO: 2654116 - RNA, 19 nt, Artificial Sequence
  Description of Artificial Sequence: Synthetic oligonucleotide
uacgcugcgguguguggga

SEQ ID NO: 2654117 - RNA, 19 nt, Artificial Sequence
  Description of Artificial Sequence: Synthetic oligonucleotide
gccaaagagcacaagcuug

SEQ ID NO: 2654118 - RNA, 19 nt, Artificial Sequence
  Description of Artificial Sequence: Synthetic oligonucleotide
uccguauccuucugcuggu

SEQ ID NO: 2654119 - RNA, 19 nt, Artificial Sequence
  Description of Artificial Sequence: Synthetic oligonucleotide
gagacaccgccagccaggg

SEQ ID NO: 2654120 - RNA, 19 nt, Artificial Sequence
  Description of Artificial Sequence: Synthetic oligonucleotide
acguaguugcuuugguaau

SEQ ID NO: 2654121 - RNA, 19 nt, Artificial Sequence
  Description of Artificial Sequence: Synthetic oligonucleotide
caucugcaguuccucuccg

SEQ ID NO: 2654122 - RNA, 19 nt, Artificial Sequence
  Description of Artificial Sequence: Synthetic oligonucleotide
ugugugggaucgccgcgga

SEQ ID NO: 2654123 - RNA, 19 nt, Artificial Sequence
  Description of Artificial Sequence: Synthetic oligonucleotide
uaguugcuuugguaauacu

SEQ ID NO: 2654124 - RNA, 19 nt, Artificial Sequence
  Description of Artificial Sequence: Synthetic oligonucleotide
acccagaagacggccgaac

SEQ ID NO: 2654125 - RNA, 19 nt, Artificial Sequence
  Description of Artificial Sequence: Synthetic oligonucleotide
cgcagauagagaauguaac

SEQ ID NO: 2654126 - RNA, 19 nt, Artificial Sequence
  Description of Artificial Sequence: Synthetic oligonucleotide
cugauccacgaaagcgccc

SEQ ID NO: 2654127 - RNA, 19 nt, Artificial Sequence
  Description of Artificial Sequence: Synthetic oligonucleotide
guugcguaccaggcgcugg

SEQ ID NO: 2654128 - RNA, 19 nt, Artificial Sequence
  Description of Artificial Sequence: Synthetic oligonucleotide
agcacaagcuuggacugca

SEQ ID NO: 2654129 - RNA, 19 nt, Artificial Sequence
  Description of Artificial Sequence: Synthetic oligonucleotide
ugcgcagauagagaaugua

SEQ ID NO: 2654130 - RNA, 19 nt, Artificial Sequence
  Description of Artificial Sequence: Synthetic oligonucleotide
gugggaucgccgcggacag

SEQ ID NO: 2654131 - RNA, 19 nt, Artificial Sequence
  Description of Artificial Sequence: Synthetic oligonucleotide
ugcggugugugggaucgcc

SEQ ID NO: 2654132 - RNA, 19 nt, Artificial Sequence
  Description of Artificial Sequence: Synthetic oligonucleotide
cagguugcggggucgcgag

SEQ ID NO: 2654133 - RNA, 19 nt, Artificial Sequence
  Description of Artificial Sequence: Synthetic oligonucleotide
gacauggcgccgcuuggca

SEQ ID NO: 2654134 - RNA, 19 nt, Artificial Sequence
  Description of Artificial Sequence: Synthetic oligonucleotide
ccggccaaagagcacaagc

SEQ ID NO: 2654135 - RNA, 19 nt, Artificial Sequence
  Description of Artificial Sequence: Synthetic oligonucleotide
guaccaggcgcuggcaaag

SEQ ID NO: 2654136 - RNA, 19 nt, Artificial Sequence
  Description of Artificial Sequence: Synthetic oligonucleotide
ugcgcugggcucaccuccc

SEQ ID NO: 2654137 - RNA, 19 nt, Artificial Sequence
  Description of Artificial Sequence: Synthetic oligonucleotide
cuuggacugcaacgugcgc

SEQ ID NO: 2654138 - RNA, 19 nt, Artificial Sequence
  Description of Artificial Sequence: Synthetic oligonucleotide
gaaacacgaacacguaguu

SEQ ID NO: 2654139 - RNA, 19 nt, Artificial Sequence
  Description of Artificial Sequence: Synthetic oligonucleotide
gcuuggacugcaacgugcg

SEQ ID NO: 2654140 - RNA, 19 nt, Artificial Sequence
  Description of Artificial Sequence: Synthetic oligonucleotide
agccccuccaccuccguau

SEQ ID NO: 2654141 - RNA, 19 nt, Artificial Sequence
  Description of Artificial Sequence: Synthetic oligonucleotide
gcugcggugugugggaucg

SEQ ID NO: 2654142 - RNA, 19 nt, Artificial Sequence
  Description of Artificial Sequence: Synthetic oligonucleotide
aggacccagaagacggccg

SEQ ID NO: 2654143 - RNA, 19 nt, Artificial Sequence
  Description of Artificial Sequence: Synthetic oligonucleotide
agccacucucggccggcgc

SEQ ID NO: 2654144 - RNA, 19 nt, Artificial Sequence
  Description of Artificial Sequence: Synthetic oligonucleotide
gugugugggaucgccgcgg

SEQ ID NO: 2654145 - RNA, 19 nt, Artificial Sequence
  Description of Artificial Sequence: Synthetic oligonucleotide
ucucggccggcgccggagg

SEQ ID NO: 2654146 - RNA, 19 nt, Artificial Sequence
  Description of Artificial Sequence: Synthetic oligonucleotide
gaagacggccgaaccagca

SEQ ID NO: 2654147 - RNA, 19 nt, Artificial Sequence
  Description of Artificial Sequence: Synthetic oligonucleotide
ggugugugggaucgccgcg

SEQ ID NO: 2654148 - RNA, 19 nt, Artificial Sequence
  Description of Artificial Sequence: Synthetic oligonucleotide
ggaaagagacaccgccagc

SEQ ID NO: 2654149 - RNA, 19 nt, Artificial Sequence
  Description of Artificial Sequence: Synthetic oligonucleotide
acgcugcugauccacgaaa

SEQ ID NO: 2654150 - RNA, 19 nt, Artificial Sequence
  Description of Artificial Sequence: Synthetic oligonucleotide
caugggagccgaugaucac

SEQ ID NO: 2654151 - RNA, 19 nt, Artificial Sequence
  Description of Artificial Sequence: Synthetic oligonucleotide
aggaugaggcccagaaaca

SEQ ID NO: 2654152 - RNA, 19 nt, Artificial Sequence
  Description of Artificial Sequence: Synthetic oligonucleotide
gaugcgcugggcucaccuc

SEQ ID NO: 2654153 - RNA, 19 nt, Artificial Sequence
  Description of Artificial Sequence: Synthetic oligonucleotide
gcugcugauccacgaaagc

SEQ ID NO: 2654154 - RNA, 19 nt, Artificial Sequence
  Description of Artificial Sequence: Synthetic oligonucleotide
aucugcaguuccucuccgu

SEQ ID NO: 2654155 - RNA, 19 nt, Artificial Sequence
  Description of Artificial Sequence: Synthetic oligonucleotide
gucgcgagaaacgcugcug

SEQ ID NO: 2654156 - RNA, 19 nt, Artificial Sequence
  Description of Artificial Sequence: Synthetic oligonucleotide
cccagaaacacgaacacgu

SEQ ID NO: 2654157 - RNA, 19 nt, Artificial Sequence
  Description of Artificial Sequence: Synthetic oligonucleotide
acugaugcgcugggcucac

SEQ ID NO: 2654158 - RNA, 19 nt, Artificial Sequence
  Description of Artificial Sequence: Synthetic oligonucleotide
gcugauccacgaaagcgcc

SEQ ID NO: 2654159 - RNA, 19 nt, Artificial Sequence
  Description of Artificial Sequence: Synthetic oligonucleotide
ggcccagaaacacgaacac

SEQ ID NO: 2654160 - RNA, 19 nt, Artificial Sequence
  Description of Artificial Sequence: Synthetic oligonucleotide
caggacccagaagacggcc

SEQ ID NO: 2654161 - RNA, 19 nt, Artificial Sequence
  Description of Artificial Sequence: Synthetic oligonucleotide
caccuccguauccuucugc

SEQ ID NO: 2654162 - RNA, 19 nt, Artificial Sequence
  Description of Artificial Sequence: Synthetic oligonucleotide
cucagccccuccaccuccg

SEQ ID NO: 2654163 - RNA, 19 nt, Artificial Sequence
  Description of Artificial Sequence: Synthetic oligonucleotide
agggcguacugaugcgcug

SEQ ID NO: 2654164 - RNA, 19 nt, Artificial Sequence
  Description of Artificial Sequence: Synthetic oligonucleotide
agggccggauggucgcgcg

SEQ ID NO: 2654165 - RNA, 19 nt, Artificial Sequence
  Description of Artificial Sequence: Synthetic oligonucleotide
agacaccgccagccagggc

SEQ ID NO: 2654166 - RNA, 19 nt, Artificial Sequence
  Description of Artificial Sequence: Synthetic oligonucleotide
gggaucgccgcggacagcc

SEQ ID NO: 2654167 - RNA, 19 nt, Artificial Sequence
  Description of Artificial Sequence: Synthetic oligonucleotide
ugaggcccagaaacacgaa

SEQ ID NO: 2654168 - RNA, 19 nt, Artificial Sequence
  Description of Artificial Sequence: Synthetic oligonucleotide
gacagccucgagccccgcc

SEQ ID NO: 2654169 - RNA, 19 nt, Artificial Sequence
  Description of Artificial Sequence: Synthetic oligonucleotide
caagcuuggacugcaacgu

SEQ ID NO: 2654170 - RNA, 19 nt, Artificial Sequence
  Description of Artificial Sequence: Synthetic oligonucleotide
cgcaguaaaggaugaggcc

SEQ ID NO: 2654171 - RNA, 19 nt, Artificial Sequence
  Description of Artificial Sequence: Synthetic oligonucleotide
gcagcaugggagccgauga

SEQ ID NO: 2654172 - RNA, 19 nt, Artificial Sequence
  Description of Artificial Sequence: Synthetic oligonucleotide
gaucgccgcggacagccuc

SEQ ID NO: 2654173 - RNA, 19 nt, Artificial Sequence
  Description of Artificial Sequence: Synthetic oligonucleotide
uugcggggucgcgagaaac

SEQ ID NO: 2654174 - RNA, 19 nt, Artificial Sequence
  Description of Artificial Sequence: Synthetic oligonucleotide
caacgugcgcagauagaga

SEQ ID NO: 2654175 - RNA, 19 nt, Artificial Sequence
  Description of Artificial Sequence: Synthetic oligonucleotide
ccgcggacagccucgagcc

SEQ ID NO: 2654176 - RNA, 19 nt, Artificial Sequence
  Description of Artificial Sequence: Synthetic oligonucleotide
gucuacgcugcggugugug

SEQ ID NO: 2654177 - RNA, 19 nt, Artificial Sequence
  Description of Artificial Sequence: Synthetic oligonucleotide
ggcagcagggucguggcgc

SEQ ID NO: 2654178 - RNA, 19 nt, Artificial Sequence
  Description of Artificial Sequence: Synthetic oligonucleotide
ccacgaaagcgccccaggg

SEQ ID NO: 2654179 - RNA, 19 nt, Artificial Sequence
  Description of Artificial Sequence: Synthetic oligonucleotide
gagaaacgcugcugaucca

SEQ ID NO: 2654180 - RNA, 19 nt, Artificial Sequence
  Description of Artificial Sequence: Synthetic oligonucleotide
cuccaccuccguauccuuc

SEQ ID NO: 2654181 - RNA, 19 nt, Artificial Sequence
  Description of Artificial Sequence: Synthetic oligonucleotide
aaggcucuaucuggugcaa

SEQ ID NO: 2654182 - RNA, 19 nt, Artificial Sequence
  Description of Artificial Sequence: Synthetic oligonucleotide
accucccggccaaagagca

SEQ ID NO: 2654183 - RNA, 19 nt, Artificial Sequence
  Description of Artificial Sequence: Synthetic oligonucleotide
gcccagaaacacgaacacg

SEQ ID NO: 2654184 - RNA, 19 nt, Artificial Sequence
  Description of Artificial Sequence: Synthetic oligonucleotide
augucaccacgcaguaaag

SEQ ID NO: 2654185 - RNA, 19 nt, Artificial Sequence
  Description of Artificial Sequence: Synthetic oligonucleotide
cccagaagacggccgaacc

SEQ ID NO: 2654186 - RNA, 19 nt, Artificial Sequence
  Description of Artificial Sequence: Synthetic oligonucleotide
ggggucgcgagaaacgcug

SEQ ID NO: 2654187 - RNA, 19 nt, Artificial Sequence
  Description of Artificial Sequence: Synthetic oligonucleotide
agaauguaacaggcgccaa

SEQ ID NO: 2654188 - RNA, 19 nt, Artificial Sequence
  Description of Artificial Sequence: Synthetic oligonucleotide
gccgcggacagccucgagc

SEQ ID NO: 2654189 - RNA, 19 nt, Artificial Sequence
  Description of Artificial Sequence: Synthetic oligonucleotide
accacgcaguaaaggauga

SEQ ID NO: 2654190 - RNA, 19 nt, Artificial Sequence
  Description of Artificial Sequence: Synthetic oligonucleotide
gggcguacugaugcgcugg

SEQ ID NO: 2654191 - RNA, 19 nt, Artificial Sequence
  Description of Artificial Sequence: Synthetic oligonucleotide
agccgaugaucaccagggu

SEQ ID NO: 2654192 - RNA, 19 nt, Artificial Sequence
  Description of Artificial Sequence: Synthetic oligonucleotide
ggcguacugaugcgcuggg

SEQ ID NO: 2654193 - RNA, 19 nt, Artificial Sequence
  Description of Artificial Sequence: Synthetic oligonucleotide
gcucuaucuggugcaaggc

SEQ ID NO: 2654194 - RNA, 19 nt, Artificial Sequence
  Description of Artificial Sequence: Synthetic oligonucleotide
guaauacuccacguugcgu

SEQ ID NO: 2654195 - RNA, 19 nt, Artificial Sequence
  Description of Artificial Sequence: Synthetic oligonucleotide
uggcgcucagccccuccac

SEQ ID NO: 2654196 - RNA, 19 nt, Artificial Sequence
  Description of Artificial Sequence: Synthetic oligonucleotide
agcagggucguggcgcuca

SEQ ID NO: 2654197 - RNA, 19 nt, Artificial Sequence
  Description of Artificial Sequence: Synthetic oligonucleotide
gcaugggagccgaugauca

SEQ ID NO: 2654198 - RNA, 19 nt, Artificial Sequence
  Description of Artificial Sequence: Synthetic oligonucleotide
cgugcgcagauagagaaug

SEQ ID NO: 2654199 - RNA, 19 nt, Artificial Sequence
  Description of Artificial Sequence: Synthetic oligonucleotide
gccgccaugucuacgcugc

SEQ ID NO: 2654200 - RNA, 19 nt, Artificial Sequence
  Description of Artificial Sequence: Synthetic oligonucleotide
acacgaacacguaguugcu

SEQ ID NO: 2654201 - RNA, 19 nt, Artificial Sequence
  Description of Artificial Sequence: Synthetic oligonucleotide
gauccacgaaagcgcccca

SEQ ID NO: 2654202 - RNA, 19 nt, Artificial Sequence
  Description of Artificial Sequence: Synthetic oligonucleotide
ccggagggaaucagcuugg

SEQ ID NO: 2654203 - RNA, 19 nt, Artificial Sequence
  Description of Artificial Sequence: Synthetic oligonucleotide
ccacguugcguaccaggcg

SEQ ID NO: 2654204 - RNA, 19 nt, Artificial Sequence
  Description of Artificial Sequence: Synthetic oligonucleotide
gauggucgcgcggcgccgc

SEQ ID NO: 2654205 - RNA, 19 nt, Artificial Sequence
  Description of Artificial Sequence: Synthetic oligonucleotide
acugcaacgugcgcagaua

SEQ ID NO: 2654206 - RNA, 19 nt, Artificial Sequence
  Description of Artificial Sequence: Synthetic oligonucleotide
cucaccucccggccaaaga

SEQ ID NO: 2654207 - RNA, 19 nt, Artificial Sequence
  Description of Artificial Sequence: Synthetic oligonucleotide
gacugcaacgugcgcagau

SEQ ID NO: 2654208 - RNA, 19 nt, Artificial Sequence
  Description of Artificial Sequence: Synthetic oligonucleotide
aggcucuaucuggugcaag

SEQ ID NO: 2654209 - RNA, 19 nt, Artificial Sequence
  Description of Artificial Sequence: Synthetic oligonucleotide
accugccagccagaagaag

SEQ ID NO: 2654210 - RNA, 19 nt, Artificial Sequence
  Description of Artificial Sequence: Synthetic oligonucleotide
cguauccuucugcuggucc

SEQ ID NO: 2654211 - RNA, 19 nt, Artificial Sequence
  Description of Artificial Sequence: Synthetic oligonucleotide
ucccggccaaagagcacaa

SEQ ID NO: 2654212 - RNA, 19 nt, Artificial Sequence
  Description of Artificial Sequence: Synthetic oligonucleotide
cucgagccccgccgcaccc

SEQ ID NO: 2654213 - RNA, 19 nt, Artificial Sequence
  Description of Artificial Sequence: Synthetic oligonucleotide
ggccgaaccagcaccugcc

SEQ ID NO: 2654214 - RNA, 19 nt, Artificial Sequence
  Description of Artificial Sequence: Synthetic oligonucleotide
guaaaggaugaggcccaga

SEQ ID NO: 2654215 - RNA, 19 nt, Artificial Sequence
  Description of Artificial Sequence: Synthetic oligonucleotide
gccagggcguacugaugcg

SEQ ID NO: 2654216 - RNA, 19 nt, Artificial Sequence
  Description of Artificial Sequence: Synthetic oligonucleotide
ugcguaccaggcgcuggca

SEQ ID NO: 2654217 - RNA, 19 nt, Artificial Sequence
  Description of Artificial Sequence: Synthetic oligonucleotide
caaagagcacaagcuugga

SEQ ID NO: 2654218 - RNA, 19 nt, Artificial Sequence
  Description of Artificial Sequence: Synthetic oligonucleotide
ggacccagaagacggccga

SEQ ID NO: 2654219 - RNA, 19 nt, Artificial Sequence
  Description of Artificial Sequence: Synthetic oligonucleotide
ggcagcaugggagccgaug

SEQ ID NO: 2654220 - RNA, 19 nt, Artificial Sequence
  Description of Artificial Sequence: Synthetic oligonucleotide
accgccagccagggcguac

SEQ ID NO: 2654221 - RNA, 19 nt, Artificial Sequence
  Description of Artificial Sequence: Synthetic oligonucleotide
cucggccggcgccggaggg

SEQ ID NO: 2654222 - RNA, 19 nt, Artificial Sequence
  Description of Artificial Sequence: Synthetic oligonucleotide
gccacucucggccggcgcc

SEQ ID NO: 2654223 - RNA, 19 nt, Artificial Sequence
  Description of Artificial Sequence: Synthetic oligonucleotide
ggggaaagagacaccgcca

SEQ ID NO: 2654224 - RNA, 19 nt, Artificial Sequence
  Description of Artificial Sequence: Synthetic oligonucleotide
gcggacagccucgagcccc

SEQ ID NO: 2654225 - RNA, 19 nt, Artificial Sequence
  Description of Artificial Sequence: Synthetic oligonucleotide
ucgcccagguugcgggguc

SEQ ID NO: 2654226 - RNA, 19 nt, Artificial Sequence
  Description of Artificial Sequence: Synthetic oligonucleotide
ccagaagacggccgaacca

SEQ ID NO: 2654227 - RNA, 19 nt, Artificial Sequence
  Description of Artificial Sequence: Synthetic oligonucleotide
cagccucgagccccgccgc

SEQ ID NO: 2654228 - RNA, 19 nt, Artificial Sequence
  Description of Artificial Sequence: Synthetic oligonucleotide
ggggaugucaccacgcagu

SEQ ID NO: 2654229 - RNA, 19 nt, Artificial Sequence
  Description of Artificial Sequence: Synthetic oligonucleotide
cgcugcugauccacgaaag

SEQ ID NO: 2654230 - RNA, 19 nt, Artificial Sequence
  Description of Artificial Sequence: Synthetic oligonucleotide
ggcgcucagccccuccacc

SEQ ID NO: 2654231 - RNA, 19 nt, Artificial Sequence
  Description of Artificial Sequence: Synthetic oligonucleotide
gcgagaaacgcugcugauc

SEQ ID NO: 2654232 - RNA, 19 nt, Artificial Sequence
  Description of Artificial Sequence: Synthetic oligonucleotide
agcgccccagggccggaug

SEQ ID NO: 2654233 - RNA, 19 nt, Artificial Sequence
  Description of Artificial Sequence: Synthetic oligonucleotide
guggcgcucagccccucca

SEQ ID NO: 2654234 - RNA, 19 nt, Artificial Sequence
  Description of Artificial Sequence: Synthetic oligonucleotide
auggcgccgcuuggcacuc

SEQ ID NO: 2654235 - RNA, 19 nt, Artificial Sequence
  Description of Artificial Sequence: Synthetic oligonucleotide
aucuggugcaaggcagcau

SEQ ID NO: 2654236 - RNA, 19 nt, Artificial Sequence
  Description of Artificial Sequence: Synthetic oligonucleotide
gccagaagaaggggaaaga

SEQ ID NO: 2654237 - RNA, 19 nt, Artificial Sequence
  Description of Artificial Sequence: Synthetic oligonucleotide
ggacauggcgccgcuuggc

SEQ ID NO: 2654238 - RNA, 19 nt, Artificial Sequence
  Description of Artificial Sequence: Synthetic oligonucleotide
cugggccgccaugucuacg

SEQ ID NO: 2654239 - RNA, 19 nt, Artificial Sequence
  Description of Artificial Sequence: Synthetic oligonucleotide
gccaugucuacgcugcggu

SEQ ID NO: 2654240 - RNA, 19 nt, Artificial Sequence
  Description of Artificial Sequence: Synthetic oligonucleotide
ccggacgcucaggacaugg

SEQ ID NO: 2654241 - RNA, 19 nt, Artificial Sequence
  Description of Artificial Sequence: Synthetic oligonucleotide
ugucuacgcugcggugugu

SEQ ID NO: 2654242 - RNA, 19 nt, Artificial Sequence
  Description of Artificial Sequence: Synthetic oligonucleotide
cggugugugggaucgccgc

SEQ ID NO: 2654243 - RNA, 19 nt, Artificial Sequence
  Description of Artificial Sequence: Synthetic oligonucleotide
ccccagggccggauggucg

SEQ ID NO: 2654244 - RNA, 19 nt, Artificial Sequence
  Description of Artificial Sequence: Synthetic oligonucleotide
ggucgcgcggcgccgcucc

SEQ ID NO: 2654245 - RNA, 19 nt, Artificial Sequence
  Description of Artificial Sequence: Synthetic oligonucleotide
cgaacacguaguugcuuug

SEQ ID NO: 2654246 - RNA, 19 nt, Artificial Sequence
  Description of Artificial Sequence: Synthetic oligonucleotide
ccgaaccagcaccugccag

SEQ ID NO: 2654247 - RNA, 19 nt, Artificial Sequence
  Description of Artificial Sequence: Synthetic oligonucleotide
ccuccguauccuucugcug

SEQ ID NO: 2654248 - RNA, 19 nt, Artificial Sequence
  Description of Artificial Sequence: Synthetic oligonucleotide
ggccgccaugucuacgcug

SEQ ID NO: 2654249 - RNA, 19 nt, Artificial Sequence
  Description of Artificial Sequence: Synthetic oligonucleotide
gggucguggcgcucagccc

SEQ ID NO: 2654250 - RNA, 19 nt, Artificial Sequence
  Description of Artificial Sequence: Synthetic oligonucleotide
gcggggucgcgagaaacgc

SEQ ID NO: 2654251 - RNA, 19 nt, Artificial Sequence
  Description of Artificial Sequence: Synthetic oligonucleotide
gcucaggacauggcgccgc

SEQ ID NO: 2654252 - RNA, 19 nt, Artificial Sequence
  Description of Artificial Sequence: Synthetic oligonucleotide
cagggcguacugaugcgcu

SEQ ID NO: 2654253 - RNA, 19 nt, Artificial Sequence
  Description of Artificial Sequence: Synthetic oligonucleotide
cccagggccggauggucgc

SEQ ID NO: 2654254 - RNA, 19 nt, Artificial Sequence
  Description of Artificial Sequence: Synthetic oligonucleotide
ccagggcguacugaugcgc

SEQ ID NO: 2654255 - RNA, 19 nt, Artificial Sequence
  Description of Artificial Sequence: Synthetic oligonucleotide
gcggugugugggaucgccg

SEQ ID NO: 2654256 - RNA, 19 nt, Artificial Sequence
  Description of Artificial Sequence: Synthetic oligonucleotide
agguugcggggucgcgaga

SEQ ID NO: 2654257 - RNA, 19 nt, Artificial Sequence
  Description of Artificial Sequence: Synthetic oligonucleotide
gcgccccagggccggaugg

SEQ ID NO: 2654258 - RNA, 19 nt, Artificial Sequence
  Description of Artificial Sequence: Synthetic oligonucleotide
cgaaagcgccccagggccg

SEQ ID NO: 2654259 - RNA, 19 nt, Artificial Sequence
  Description of Artificial Sequence: Synthetic oligonucleotide
agccucgagccccgccgca

SEQ ID NO: 2654260 - RNA, 19 nt, Artificial Sequence
  Description of Artificial Sequence: Synthetic oligonucleotide
ggauggucgcgcggcgccg

SEQ ID NO: 2654261 - RNA, 19 nt, Artificial Sequence
  Description of Artificial Sequence: Synthetic oligonucleotide
acguugcguaccaggcgcu

SEQ ID NO: 2654262 - RNA, 19 nt, Artificial Sequence
  Description of Artificial Sequence: Synthetic oligonucleotide
ucggccggcgccggaggga

SEQ ID NO: 2654263 - RNA, 19 nt, Artificial Sequence
  Description of Artificial Sequence: Synthetic oligonucleotide
ggccggauggucgcgcggc

SEQ ID NO: 2654264 - RNA, 19 nt, Artificial Sequence
  Description of Artificial Sequence: Synthetic oligonucleotide
ucgagccccgccgcaccca

SEQ ID NO: 2654265 - RNA, 19 nt, Artificial Sequence
  Description of Artificial Sequence: Synthetic oligonucleotide
gguugcggggucgcgagaa

SEQ ID NO: 2654266 - RNA, 19 nt, Artificial Sequence
  Description of Artificial Sequence: Synthetic oligonucleotide
gacggccgaaccagcaccu

SEQ ID NO: 2654267 - RNA, 19 nt, Artificial Sequence
  Description of Artificial Sequence: Synthetic oligonucleotide
gaugaucaccaggguggcu

SEQ ID NO: 2654268 - RNA, 19 nt, Artificial Sequence
  Description of Artificial Sequence: Synthetic oligonucleotide
aaagcgccccagggccgga

SEQ ID NO: 2654269 - RNA, 19 nt, Artificial Sequence
  Description of Artificial Sequence: Synthetic oligonucleotide
ggcgccggagggaaucagc

SEQ ID NO: 2654270 - RNA, 19 nt, Artificial Sequence
  Description of Artificial Sequence: Synthetic oligonucleotide
gugugggaucgccgcggac

SEQ ID NO: 2654271 - RNA, 19 nt, Artificial Sequence
  Description of Artificial Sequence: Synthetic oligonucleotide
acgugcgcagauagagaau

SEQ ID NO: 2654272 - RNA, 19 nt, Artificial Sequence
  Description of Artificial Sequence: Synthetic oligonucleotide
ccgucugaaggcucuaucu

SEQ ID NO: 2654273 - RNA, 19 nt, Artificial Sequence
  Description of Artificial Sequence: Synthetic oligonucleotide
guugcggggucgcgagaaa

SEQ ID NO: 2654274 - RNA, 19 nt, Artificial Sequence
  Description of Artificial Sequence: Synthetic oligonucleotide
cagccacucucggccggcg

SEQ ID NO: 2654275 - RNA, 19 nt, Artificial Sequence
  Description of Artificial Sequence: Synthetic oligonucleotide
gcgccaaagaagacagcca

SEQ ID NO: 2654276 - RNA, 19 nt, Artificial Sequence
  Description of Artificial Sequence: Synthetic oligonucleotide
gccggauggucgcgcggcg

SEQ ID NO: 2654277 - RNA, 19 nt, Artificial Sequence
  Description of Artificial Sequence: Synthetic oligonucleotide
gacccagaagacggccgaa

SEQ ID NO: 2654278 - RNA, 19 nt, Artificial Sequence
  Description of Artificial Sequence: Synthetic oligonucleotide
auggucgcgcggcgccgcu

SEQ ID NO: 2654279 - RNA, 19 nt, Artificial Sequence
  Description of Artificial Sequence: Synthetic oligonucleotide
gccgcacccagccggcccc

SEQ ID NO: 2654280 - RNA, 19 nt, Artificial Sequence
  Description of Artificial Sequence: Synthetic oligonucleotide
ccccgccgcacccagccgg

SEQ ID NO: 2654281 - RNA, 19 nt, Artificial Sequence
  Description of Artificial Sequence: Synthetic oligonucleotide
acaccgccagccagggcgu

SEQ ID NO: 2654282 - RNA, 19 nt, Artificial Sequence
  Description of Artificial Sequence: Synthetic oligonucleotide
acggccgaaccagcaccug

SEQ ID NO: 2654283 - RNA, 19 nt, Artificial Sequence
  Description of Artificial Sequence: Synthetic oligonucleotide
ccagaaacacgaacacgua

SEQ ID NO: 2654284 - RNA, 19 nt, Artificial Sequence
  Description of Artificial Sequence: Synthetic oligonucleotide
gggccggauggucgcgcgg

SEQ ID NO: 2654285 - RNA, 19 nt, Artificial Sequence
  Description of Artificial Sequence: Synthetic oligonucleotide
cacucucggccggcgccgg

SEQ ID NO: 2654286 - RNA, 19 nt, Artificial Sequence
  Description of Artificial Sequence: Synthetic oligonucleotide
ucgcgcggcgccgcuccag

SEQ ID NO: 2654287 - RNA, 19 nt, Artificial Sequence
  Description of Artificial Sequence: Synthetic oligonucleotide
cguacugaugcgcugggcu

SEQ ID NO: 2654288 - RNA, 19 nt, Artificial Sequence
  Description of Artificial Sequence: Synthetic oligonucleotide
gggagccgaugaucaccag

SEQ ID NO: 2654289 - RNA, 19 nt, Artificial Sequence
  Description of Artificial Sequence: Synthetic oligonucleotide
cgaugaucaccaggguggc

SEQ ID NO: 2654290 - RNA, 19 nt, Artificial Sequence
  Description of Artificial Sequence: Synthetic oligonucleotide
gggucgcgagaaacgcugc

SEQ ID NO: 2654291 - RNA, 19 nt, Artificial Sequence
  Description of Artificial Sequence: Synthetic oligonucleotide
cagccagaagaaggggaaa

SEQ ID NO: 2654292 - RNA, 19 nt, Artificial Sequence
  Description of Artificial Sequence: Synthetic oligonucleotide
ccacgcaguaaaggaugag

SEQ ID NO: 2654293 - RNA, 19 nt, Artificial Sequence
  Description of Artificial Sequence: Synthetic oligonucleotide
cggauggucgcgcggcgcc

SEQ ID NO: 2654294 - RNA, 19 nt, Artificial Sequence
  Description of Artificial Sequence: Synthetic oligonucleotide
gccgaaccagcaccugcca

SEQ ID NO: 2654295 - RNA, 19 nt, Artificial Sequence
  Description of Artificial Sequence: Synthetic oligonucleotide
cggacgcucaggacauggc

SEQ ID NO: 2654296 - RNA, 19 nt, Artificial Sequence
  Description of Artificial Sequence: Synthetic oligonucleotide
ccucgagccccgccgcacc

SEQ ID NO: 2654297 - RNA, 19 nt, Artificial Sequence
  Description of Artificial Sequence: Synthetic oligonucleotide
ccacucucggccggcgccg

SEQ ID NO: 2654298 - RNA, 19 nt, Artificial Sequence
  Description of Artificial Sequence: Synthetic oligonucleotide
gcagggucguggcgcucag

SEQ ID NO: 2654299 - RNA, 19 nt, Artificial Sequence
  Description of Artificial Sequence: Synthetic oligonucleotide
cagggucguggcgcucagc

SEQ ID NO: 2654300 - RNA, 19 nt, Artificial Sequence
  Description of Artificial Sequence: Synthetic oligonucleotide
cggccgaaccagcaccugc

SEQ ID NO: 2654301 - RNA, 19 nt, Artificial Sequence
  Description of Artificial Sequence: Synthetic oligonucleotide
ggucgcgagaaacgcugcu

SEQ ID NO: 2654302 - RNA, 19 nt, Artificial Sequence
  Description of Artificial Sequence: Synthetic oligonucleotide
aagcgccccagggccggau

SEQ ID NO: 2654303 - RNA, 19 nt, Artificial Sequence
  Description of Artificial Sequence: Synthetic oligonucleotide
ucgccgcggacagccucga

SEQ ID NO: 2654304 - RNA, 19 nt, Artificial Sequence
  Description of Artificial Sequence: Synthetic oligonucleotide
cggacagccucgagccccg

SEQ ID NO: 2654305 - RNA, 19 nt, Artificial Sequence
  Description of Artificial Sequence: Synthetic oligonucleotide
gcaguuccucuccgucuga

SEQ ID NO: 2654306 - RNA, 19 nt, Artificial Sequence
  Description of Artificial Sequence: Synthetic oligonucleotide
gugcgcagauagagaaugu

SEQ ID NO: 2654307 - RNA, 19 nt, Artificial Sequence
  Description of Artificial Sequence: Synthetic oligonucleotide
gcguacugaugcgcugggc

SEQ ID NO: 2654308 - RNA, 19 nt, Artificial Sequence
  Description of Artificial Sequence: Synthetic oligonucleotide
cccgcccgagcccggacgc

SEQ ID NO: 2654309 - RNA, 19 nt, Artificial Sequence
  Description of Artificial Sequence: Synthetic oligonucleotide
gcguaccaggcgcuggcaa

SEQ ID NO: 2654310 - RNA, 19 nt, Artificial Sequence
  Description of Artificial Sequence: Synthetic oligonucleotide
cgccaugucuacgcugcgg

SEQ ID NO: 2654311 - RNA, 19 nt, Artificial Sequence
  Description of Artificial Sequence: Synthetic oligonucleotide
ccccuccaccuccguaucc

SEQ ID NO: 2654312 - RNA, 19 nt, Artificial Sequence
  Description of Artificial Sequence: Synthetic oligonucleotide
ccucuccgucugaaggcuc

SEQ ID NO: 2654313 - RNA, 19 nt, Artificial Sequence
  Description of Artificial Sequence: Synthetic oligonucleotide
ggaugucaccacgcaguaa

SEQ ID NO: 2654314 - RNA, 19 nt, Artificial Sequence
  Description of Artificial Sequence: Synthetic oligonucleotide
gcggcgccgcuccagccac

SEQ ID NO: 2654315 - RNA, 19 nt, Artificial Sequence
  Description of Artificial Sequence: Synthetic oligonucleotide
cuugggcagcagggucgug

SEQ ID NO: 2654316 - RNA, 19 nt, Artificial Sequence
  Description of Artificial Sequence: Synthetic oligonucleotide
cucaggacauggcgccgcu

SEQ ID NO: 2654317 - RNA, 19 nt, Artificial Sequence
  Description of Artificial Sequence: Synthetic oligonucleotide
cugguccuucugggccgcc

SEQ ID NO: 2654318 - RNA, 19 nt, Artificial Sequence
  Description of Artificial Sequence: Synthetic oligonucleotide
ccccgcccgagcccggacg

SEQ ID NO: 2654319 - RNA, 19 nt, Artificial Sequence
  Description of Artificial Sequence: Synthetic oligonucleotide
ccucccggccaaagagcac

SEQ ID NO: 2654320 - RNA, 19 nt, Artificial Sequence
  Description of Artificial Sequence: Synthetic oligonucleotide
ccaccuccguauccuucug

SEQ ID NO: 2654321 - RNA, 19 nt, Artificial Sequence
  Description of Artificial Sequence: Synthetic oligonucleotide
cugcggugugugggaucgc

SEQ ID NO: 2654322 - RNA, 19 nt, Artificial Sequence
  Description of Artificial Sequence: Synthetic oligonucleotide
gggcucaccucccggccaa

SEQ ID NO: 2654323 - RNA, 19 nt, Artificial Sequence
  Description of Artificial Sequence: Synthetic oligonucleotide
ccagccagggcguacugau

SEQ ID NO: 2654324 - RNA, 19 nt, Artificial Sequence
  Description of Artificial Sequence: Synthetic oligonucleotide
acgcugcggugugugggau

SEQ ID NO: 2654325 - RNA, 19 nt, Artificial Sequence
  Description of Artificial Sequence: Synthetic oligonucleotide
cagcaugggagccgaugau

SEQ ID NO: 2654326 - RNA, 19 nt, Artificial Sequence
  Description of Artificial Sequence: Synthetic oligonucleotide
ccgccaugucuacgcugcg

SEQ ID NO: 2654327 - RNA, 19 nt, Artificial Sequence
  Description of Artificial Sequence: Synthetic oligonucleotide
cguaccaggcgcuggcaaa

SEQ ID NO: 2654328 - RNA, 19 nt, Artificial Sequence
  Description of Artificial Sequence: Synthetic oligonucleotide
ccagccacucucggccggc

SEQ ID NO: 2654329 - RNA, 19 nt, Artificial Sequence
  Description of Artificial Sequence: Synthetic oligonucleotide
gcgcucagccccuccaccu

SEQ ID NO: 2654330 - RNA, 19 nt, Artificial Sequence
  Description of Artificial Sequence: Synthetic oligonucleotide
cgcugggcucaccucccgg

SEQ ID NO: 2654331 - RNA, 19 nt, Artificial Sequence
  Description of Artificial Sequence: Synthetic oligonucleotide
cacgaacacguaguugcuu

SEQ ID NO: 2654332 - RNA, 19 nt, Artificial Sequence
  Description of Artificial Sequence: Synthetic oligonucleotide
cccgccgcacccagccggc

SEQ ID NO: 2654333 - RNA, 19 nt, Artificial Sequence
  Description of Artificial Sequence: Synthetic oligonucleotide
gagccccgccgcacccagc

SEQ ID NO: 2654334 - RNA, 19 nt, Artificial Sequence
  Description of Artificial Sequence: Synthetic oligonucleotide
cguaguugcuuugguaaua

SEQ ID NO: 2654335 - RNA, 19 nt, Artificial Sequence
  Description of Artificial Sequence: Synthetic oligonucleotide
ccagguugcggggucgcga

SEQ ID NO: 2654336 - RNA, 19 nt, Artificial Sequence
  Description of Artificial Sequence: Synthetic oligonucleotide
uggucgcgcggcgccgcuc

SEQ ID NO: 2654337 - RNA, 19 nt, Artificial Sequence
  Description of Artificial Sequence: Synthetic oligonucleotide
gcagcagggucguggcgcu

SEQ ID NO: 2654338 - RNA, 19 nt, Artificial Sequence
  Description of Artificial Sequence: Synthetic oligonucleotide
gccccuccaccuccguauc

SEQ ID NO: 2654339 - RNA, 19 nt, Artificial Sequence
  Description of Artificial Sequence: Synthetic oligonucleotide
ccggauggucgcgcggcgc

SEQ ID NO: 2654340 - RNA, 19 nt, Artificial Sequence
  Description of Artificial Sequence: Synthetic oligonucleotide
cagcaccugccagccagaa

SEQ ID NO: 2654341 - RNA, 19 nt, Artificial Sequence
  Description of Artificial Sequence: Synthetic oligonucleotide
cccagguugcggggucgcg

SEQ ID NO: 2654342 - RNA, 19 nt, Artificial Sequence
  Description of Artificial Sequence: Synthetic oligonucleotide
gccagccagggcguacuga

SEQ ID NO: 2654343 - RNA, 19 nt, Artificial Sequence
  Description of Artificial Sequence: Synthetic oligonucleotide
ccagggccggauggucgcg

SEQ ID NO: 2654344 - RNA, 19 nt, Artificial Sequence
  Description of Artificial Sequence: Synthetic oligonucleotide
gcgccggagggaaucagcu

SEQ ID NO: 2654345 - RNA, 19 nt, Artificial Sequence
  Description of Artificial Sequence: Synthetic oligonucleotide
gcccagguugcggggucgc

SEQ ID NO: 2654346 - RNA, 19 nt, Artificial Sequence
  Description of Artificial Sequence: Synthetic oligonucleotide
gccucgagccccgccgcac

SEQ ID NO: 2654347 - RNA, 19 nt, Artificial Sequence
  Description of Artificial Sequence: Synthetic oligonucleotide
cucgcccagguugcggggu

SEQ ID NO: 2654348 - RNA, 19 nt, Artificial Sequence
  Description of Artificial Sequence: Synthetic oligonucleotide
gcgccgcuuggcacucuag

SEQ ID NO: 2654349 - RNA, 19 nt, Artificial Sequence
  Description of Artificial Sequence: Synthetic oligonucleotide
cguggcgcucagccccucc

SEQ ID NO: 2654350 - RNA, 19 nt, Artificial Sequence
  Description of Artificial Sequence: Synthetic oligonucleotide
ggacugcaacgugcgcaga

SEQ ID NO: 2654351 - RNA, 19 nt, Artificial Sequence
  Description of Artificial Sequence: Synthetic oligonucleotide
cguugcguaccaggcgcug

SEQ ID NO: 2654352 - RNA, 19 nt, Artificial Sequence
  Description of Artificial Sequence: Synthetic oligonucleotide
ggcgccgcuuggcacucua

SEQ ID NO: 2654353 - RNA, 19 nt, Artificial Sequence
  Description of Artificial Sequence: Synthetic oligonucleotide
cccggccaaagagcacaag

SEQ ID NO: 2654354 - RNA, 19 nt, Artificial Sequence
  Description of Artificial Sequence: Synthetic oligonucleotide
ccgagcccggacgcucagg

SEQ ID NO: 2654355 - RNA, 19 nt, Artificial Sequence
  Description of Artificial Sequence: Synthetic oligonucleotide
gucguggcgcucagccccu

SEQ ID NO: 2654356 - RNA, 19 nt, Artificial Sequence
  Description of Artificial Sequence: Synthetic oligonucleotide
cagcagggucguggcgcuc

SEQ ID NO: 2654357 - RNA, 19 nt, Artificial Sequence
  Description of Artificial Sequence: Synthetic oligonucleotide
ccguauccuucugcugguc

SEQ ID NO: 2654358 - RNA, 19 nt, Artificial Sequence
  Description of Artificial Sequence: Synthetic oligonucleotide
cgccgcacccagccggccc

SEQ ID NO: 2654359 - RNA, 19 nt, Artificial Sequence
  Description of Artificial Sequence: Synthetic oligonucleotide
cccgagcccggacgcucag

SEQ ID NO: 2654360 - RNA, 19 nt, Artificial Sequence
  Description of Artificial Sequence: Synthetic oligonucleotide
gcuugggcagcagggucgu

SEQ ID NO: 2654361 - RNA, 19 nt, Artificial Sequence
  Description of Artificial Sequence: Synthetic oligonucleotide
cgcggacagccucgagccc

SEQ ID NO: 2654362 - RNA, 19 nt, Artificial Sequence
  Description of Artificial Sequence: Synthetic oligonucleotide
cuccgucugaaggcucuau

SEQ ID NO: 2654363 - RNA, 19 nt, Artificial Sequence
  Description of Artificial Sequence: Synthetic oligonucleotide
uggcgccgcuuggcacucu

SEQ ID NO: 2654364 - RNA, 19 nt, Artificial Sequence
  Description of Artificial Sequence: Synthetic oligonucleotide
cgcgcggcgccgcuccagc

SEQ ID NO: 2654365 - RNA, 19 nt, Artificial Sequence
  Description of Artificial Sequence: Synthetic oligonucleotide
cgcugcggugugugggauc

SEQ ID NO: 2654366 - RNA, 19 nt, Artificial Sequence
  Description of Artificial Sequence: Synthetic oligonucleotide
cgcccagguugcggggucg

SEQ ID NO: 2654367 - RNA, 19 nt, Artificial Sequence
  Description of Artificial Sequence: Synthetic oligonucleotide
gcccgagcccggacgcuca

SEQ ID NO: 2654368 - RNA, 19 nt, Artificial Sequence
  Description of Artificial Sequence: Synthetic oligonucleotide
gcccggacgcucaggacau

SEQ ID NO: 2654369 - RNA, 19 nt, Artificial Sequence
  Description of Artificial Sequence: Synthetic oligonucleotide
aggcagcaugggagccgau

SEQ ID NO: 2654370 - RNA, 19 nt, Artificial Sequence
  Description of Artificial Sequence: Synthetic oligonucleotide
cgcggcgccgcuccagcca

SEQ ID NO: 2654371 - RNA, 19 nt, Artificial Sequence
  Description of Artificial Sequence: Synthetic oligonucleotide
cgcccgagcccggacgcuc

SEQ ID NO: 2654372 - RNA, 19 nt, Artificial Sequence
  Description of Artificial Sequence: Synthetic oligonucleotide
cgcgagaaacgcugcugau

SEQ ID NO: 2654373 - RNA, 19 nt, Artificial Sequence
  Description of Artificial Sequence: Synthetic oligonucleotide
ggaucgccgcggacagccu

SEQ ID NO: 2654374 - RNA, 19 nt, Artificial Sequence
  Description of Artificial Sequence: Synthetic oligonucleotide
cggggucgcgagaaacgcu

SEQ ID NO: 2654375 - RNA, 19 nt, Artificial Sequence
  Description of Artificial Sequence: Synthetic oligonucleotide
cccggacgcucaggacaug

SEQ ID NO: 2654376 - RNA, 19 nt, Artificial Sequence
  Description of Artificial Sequence: Synthetic oligonucleotide
ggcucaccucccggccaaa

SEQ ID NO: 2654377 - RNA, 19 nt, Artificial Sequence
  Description of Artificial Sequence: Synthetic oligonucleotide
cggcgccggagggaaucag

SEQ ID NO: 2654378 - RNA, 19 nt, Artificial Sequence
  Description of Artificial Sequence: Synthetic oligonucleotide
ccgccgcacccagccggcc

SEQ ID NO: 2654379 - RNA, 19 nt, Artificial Sequence
  Description of Artificial Sequence: Synthetic oligonucleotide
ccggcgccggagggaauca

SEQ ID NO: 2654380 - RNA, 19 nt, Artificial Sequence
  Description of Artificial Sequence: Synthetic oligonucleotide
cgccgcggacagccucgag

SEQ ID NO: 2654381 - RNA, 19 nt, Artificial Sequence
  Description of Artificial Sequence: Synthetic oligonucleotide
ccgccagccagggcguacu

SEQ ID NO: 2654382 - RNA, 19 nt, Artificial Sequence
  Description of Artificial Sequence: Synthetic oligonucleotide
cgccggagggaaucagcuu

SEQ ID NO: 2654383 - RNA, 19 nt, Artificial Sequence
  Description of Artificial Sequence: Synthetic oligonucleotide
cggccggcgccggagggaa

SEQ ID NO: 2654384 - RNA, 19 nt, Artificial Sequence
  Description of Artificial Sequence: Synthetic oligonucleotide
ccgcccgagcccggacgcu

SEQ ID NO: 2654385 - RNA, 19 nt, Artificial Sequence
  Description of Artificial Sequence: Synthetic oligonucleotide
cggcgccgcuccagccacu

SEQ ID NO: 2654386 - RNA, 19 nt, Artificial Sequence
  Description of Artificial Sequence: Synthetic oligonucleotide
aaaauaaccaucugaaugc

SEQ ID NO: 2654387 - RNA, 19 nt, Artificial Sequence
  Description of Artificial Sequence: Synthetic oligonucleotide
aaggauauauugcacaugc

SEQ ID NO: 2654388 - RNA, 19 nt, Artificial Sequence
  Description of Artificial Sequence: Synthetic oligonucleotide
aagauauuugcauugaauc

SEQ ID NO: 2654389 - RNA, 19 nt, Artificial Sequence
  Description of Artificial Sequence: Synthetic oligonucleotide
uccaauaacacucaaauga

SEQ ID NO: 2654390 - RNA, 19 nt, Artificial Sequence
  Description of Artificial Sequence: Synthetic oligonucleotide
acuaggauuauauugcucc

SEQ ID NO: 2654391 - RNA, 19 nt, Artificial Sequence
  Description of Artificial Sequence: Synthetic oligonucleotide
aacuuaagcaguuuuaucu

SEQ ID NO: 2654392 - RNA, 19 nt, Artificial Sequence
  Description of Artificial Sequence: Synthetic oligonucleotide
acaucauuccuauagaaac

SEQ ID NO: 2654393 - RNA, 19 nt, Artificial Sequence
  Description of Artificial Sequence: Synthetic oligonucleotide
uauauuacagguaaguacu

SEQ ID NO: 2654394 - RNA, 19 nt, Artificial Sequence
  Description of Artificial Sequence: Synthetic oligonucleotide
uuuaucucaaagcagagaa

SEQ ID NO: 2654395 - RNA, 19 nt, Artificial Sequence
  Description of Artificial Sequence: Synthetic oligonucleotide
uauugcacaugcuaaagcg

SEQ ID NO: 2654396 - RNA, 19 nt, Artificial Sequence
  Description of Artificial Sequence: Synthetic oligonucleotide
agcaguuuuaucucaaagc

SEQ ID NO: 2654397 - RNA, 19 nt, Artificial Sequence
  Description of Artificial Sequence: Synthetic oligonucleotide
cauuauacaaaauauaaca

SEQ ID NO: 2654398 - RNA, 19 nt, Artificial Sequence
  Description of Artificial Sequence: Synthetic oligonucleotide
uuauauugcuccaauaaca

SEQ ID NO: 2654399 - RNA, 19 nt, Artificial Sequence
  Description of Artificial Sequence: Synthetic oligonucleotide
auuauauugcuccaauaac

SEQ ID NO: 2654400 - RNA, 19 nt, Artificial Sequence
  Description of Artificial Sequence: Synthetic oligonucleotide
auacucaugacacugauca

SEQ ID NO: 2654401 - RNA, 19 nt, Artificial Sequence
  Description of Artificial Sequence: Synthetic oligonucleotide
uaagaagaaagcauuuuag

SEQ ID NO: 2654402 - RNA, 19 nt, Artificial Sequence
  Description of Artificial Sequence: Synthetic oligonucleotide
uuauacaaaauauaacacu

SEQ ID NO: 2654403 - RNA, 19 nt, Artificial Sequence
  Description of Artificial Sequence: Synthetic oligonucleotide
uccuauagaaacuuaagca

SEQ ID NO: 2654404 - RNA, 19 nt, Artificial Sequence
  Description of Artificial Sequence: Synthetic oligonucleotide
auuuuagcacugcaaagcc

SEQ ID NO: 2654405 - RNA, 19 nt, Artificial Sequence
  Description of Artificial Sequence: Synthetic oligonucleotide
ugcaacaauauuuguaccg

SEQ ID NO: 2654406 - RNA, 19 nt, Artificial Sequence
  Description of Artificial Sequence: Synthetic oligonucleotide
acaagauguguauucaucg

SEQ ID NO: 2654407 - RNA, 19 nt, Artificial Sequence
  Description of Artificial Sequence: Synthetic oligonucleotide
uguuacaaauacauuauac

SEQ ID NO: 2654408 - RNA, 19 nt, Artificial Sequence
  Description of Artificial Sequence: Synthetic oligonucleotide
ugaacaaaagauauuugca

SEQ ID NO: 2654409 - RNA, 19 nt, Artificial Sequence
  Description of Artificial Sequence: Synthetic oligonucleotide
ucacauaauaguuauggug

SEQ ID NO: 2654410 - RNA, 19 nt, Artificial Sequence
  Description of Artificial Sequence: Synthetic oligonucleotide
uuugcauugaaucuucaga

SEQ ID NO: 2654411 - RNA, 19 nt, Artificial Sequence
  Description of Artificial Sequence: Synthetic oligonucleotide
uaugguguuacaaauacau

SEQ ID NO: 2654412 - RNA, 19 nt, Artificial Sequence
  Description of Artificial Sequence: Synthetic oligonucleotide
gaagaaagcauuuuagcac

SEQ ID NO: 2654413 - RNA, 19 nt, Artificial Sequence
  Description of Artificial Sequence: Synthetic oligonucleotide
cugaacaaaagauauuugc

SEQ ID NO: 2654414 - RNA, 19 nt, Artificial Sequence
  Description of Artificial Sequence: Synthetic oligonucleotide
ucucaaagcagagaaaggg

SEQ ID NO: 2654415 - RNA, 19 nt, Artificial Sequence
  Description of Artificial Sequence: Synthetic oligonucleotide
uaugaaacugugcuugggg

SEQ ID NO: 2654416 - RNA, 19 nt, Artificial Sequence
  Description of Artificial Sequence: Synthetic oligonucleotide
aacacggagaauuacauuu

SEQ ID NO: 2654417 - RNA, 19 nt, Artificial Sequence
  Description of Artificial Sequence: Synthetic oligonucleotide
uuuugcaaggauauauugc

SEQ ID NO: 2654418 - RNA, 19 nt, Artificial Sequence
  Description of Artificial Sequence: Synthetic oligonucleotide
caucacauaauaguuaugg

SEQ ID NO: 2654419 - RNA, 19 nt, Artificial Sequence
  Description of Artificial Sequence: Synthetic oligonucleotide
auuaucagggcauucagca

SEQ ID NO: 2654420 - RNA, 19 nt, Artificial Sequence
  Description of Artificial Sequence: Synthetic oligonucleotide
cucacuaggauuauauugc

SEQ ID NO: 2654421 - RNA, 19 nt, Artificial Sequence
  Description of Artificial Sequence: Synthetic oligonucleotide
uuccuauagaaacuuaagc

SEQ ID NO: 2654422 - RNA, 19 nt, Artificial Sequence
  Description of Artificial Sequence: Synthetic oligonucleotide
aaacuuaagcaguuuuauc

SEQ ID NO: 2654423 - RNA, 19 nt, Artificial Sequence
  Description of Artificial Sequence: Synthetic oligonucleotide
aacugagcugaacugaaag

SEQ ID NO: 2654424 - RNA, 19 nt, Artificial Sequence
  Description of Artificial Sequence: Synthetic oligonucleotide
auauugcacaugcuaaagc

SEQ ID NO: 2654425 - RNA, 19 nt, Artificial Sequence
  Description of Artificial Sequence: Synthetic oligonucleotide
acaaaagauauuugcauug

SEQ ID NO: 2654426 - RNA, 19 nt, Artificial Sequence
  Description of Artificial Sequence: Synthetic oligonucleotide
uuuuauacucaugacacug

SEQ ID NO: 2654427 - RNA, 19 nt, Artificial Sequence
  Description of Artificial Sequence: Synthetic oligonucleotide
uucaaagaaaggaacacuc

SEQ ID NO: 2654428 - RNA, 19 nt, Artificial Sequence
  Description of Artificial Sequence: Synthetic oligonucleotide
uauauugcuccaauaacac

SEQ ID NO: 2654429 - RNA, 19 nt, Artificial Sequence
  Description of Artificial Sequence: Synthetic oligonucleotide
ucugaaugcauguccauag

SEQ ID NO: 2654430 - RNA, 19 nt, Artificial Sequence
  Description of Artificial Sequence: Synthetic oligonucleotide
ucuguagacaaaacuacug

SEQ ID NO: 2654431 - RNA, 19 nt, Artificial Sequence
  Description of Artificial Sequence: Synthetic oligonucleotide
acucacuaggauuauauug

SEQ ID NO: 2654432 - RNA, 19 nt, Artificial Sequence
  Description of Artificial Sequence: Synthetic oligonucleotide
uccauaguauauuacaggu

SEQ ID NO: 2654433 - RNA, 19 nt, Artificial Sequence
  Description of Artificial Sequence: Synthetic oligonucleotide
uacaaauacauuauacaaa

SEQ ID NO: 2654434 - RNA, 19 nt, Artificial Sequence
  Description of Artificial Sequence: Synthetic oligonucleotide
aaguaugaaacugugcuug

SEQ ID NO: 2654435 - RNA, 19 nt, Artificial Sequence
  Description of Artificial Sequence: Synthetic oligonucleotide
uacauucaaagaaaggaac

SEQ ID NO: 2654436 - RNA, 19 nt, Artificial Sequence
  Description of Artificial Sequence: Synthetic oligonucleotide
gauuauauugcuccaauaa

SEQ ID NO: 2654437 - RNA, 19 nt, Artificial Sequence
  Description of Artificial Sequence: Synthetic oligonucleotide
aguucuguaagaagaaagc

SEQ ID NO: 2654438 - RNA, 19 nt, Artificial Sequence
  Description of Artificial Sequence: Synthetic oligonucleotide
aagauguguauucaucgug

SEQ ID NO: 2654439 - RNA, 19 nt, Artificial Sequence
  Description of Artificial Sequence: Synthetic oligonucleotide
aaauauaacacuggcacaa

SEQ ID NO: 2654440 - RNA, 19 nt, Artificial Sequence
  Description of Artificial Sequence: Synthetic oligonucleotide
acugagcugaacugaaagc

SEQ ID NO: 2654441 - RNA, 19 nt, Artificial Sequence
  Description of Artificial Sequence: Synthetic oligonucleotide
ugaaucuucagaucacugc

SEQ ID NO: 2654442 - RNA, 19 nt, Artificial Sequence
  Description of Artificial Sequence: Synthetic oligonucleotide
cacugcauaggaaacacgg

SEQ ID NO: 2654443 - RNA, 19 nt, Artificial Sequence
  Description of Artificial Sequence: Synthetic oligonucleotide
aauaacacucaaaugaaaa

SEQ ID NO: 2654444 - RNA, 19 nt, Artificial Sequence
  Description of Artificial Sequence: Synthetic oligonucleotide
agucauucaacuccaauca

SEQ ID NO: 2654445 - RNA, 19 nt, Artificial Sequence
  Description of Artificial Sequence: Synthetic oligonucleotide
ugaccuaugguuuacaguu

SEQ ID NO: 2654446 - RNA, 19 nt, Artificial Sequence
  Description of Artificial Sequence: Synthetic oligonucleotide
aagaaaggaacacucacua

SEQ ID NO: 2654447 - RNA, 19 nt, Artificial Sequence
  Description of Artificial Sequence: Synthetic oligonucleotide
acuuaagcaguuuuaucuc

SEQ ID NO: 2654448 - RNA, 19 nt, Artificial Sequence
  Description of Artificial Sequence: Synthetic oligonucleotide
guuaugguguuacaaauac

SEQ ID NO: 2654449 - RNA, 19 nt, Artificial Sequence
  Description of Artificial Sequence: Synthetic oligonucleotide
cuuggggagauucagacug

SEQ ID NO: 2654450 - RNA, 19 nt, Artificial Sequence
  Description of Artificial Sequence: Synthetic oligonucleotide
agauauuugcauugaaucu

SEQ ID NO: 2654451 - RNA, 19 nt, Artificial Sequence
  Description of Artificial Sequence: Synthetic oligonucleotide
caugcuaaagcguagucug

SEQ ID NO: 2654452 - RNA, 19 nt, Artificial Sequence
  Description of Artificial Sequence: Synthetic oligonucleotide
ucuguaagaagaaagcauu

SEQ ID NO: 2654453 - RNA, 19 nt, Artificial Sequence
  Description of Artificial Sequence: Synthetic oligonucleotide
uaacacuggcacaagaugu

SEQ ID NO: 2654454 - RNA, 19 nt, Artificial Sequence
  Description of Artificial Sequence: Synthetic oligonucleotide
cuauaauacugaccuaugg

SEQ ID NO: 2654455 - RNA, 19 nt, Artificial Sequence
  Description of Artificial Sequence: Synthetic oligonucleotide
acacuugguacauucaaag

SEQ ID NO: 2654456 - RNA, 19 nt, Artificial Sequence
  Description of Artificial Sequence: Synthetic oligonucleotide
acauuauacaaaauauaac

SEQ ID NO: 2654457 - RNA, 19 nt, Artificial Sequence
  Description of Artificial Sequence: Synthetic oligonucleotide
uugguacauucaaagaaag

SEQ ID NO: 2654458 - RNA, 19 nt, Artificial Sequence
  Description of Artificial Sequence: Synthetic oligonucleotide
aacuccaaucaucacauaa

SEQ ID NO: 2654459 - RNA, 19 nt, Artificial Sequence
  Description of Artificial Sequence: Synthetic oligonucleotide
uccaaucaucacauaauag

SEQ ID NO: 2654460 - RNA, 19 nt, Artificial Sequence
  Description of Artificial Sequence: Synthetic oligonucleotide
acuugguacauucaaagaa

SEQ ID NO: 2654461 - RNA, 19 nt, Artificial Sequence
  Description of Artificial Sequence: Synthetic oligonucleotide
auuacagguaaguacuucu

SEQ ID NO: 2654462 - RNA, 19 nt, Artificial Sequence
  Description of Artificial Sequence: Synthetic oligonucleotide
aauaguuaugguguuacaa

SEQ ID NO: 2654463 - RNA, 19 nt, Artificial Sequence
  Description of Artificial Sequence: Synthetic oligonucleotide
ucaacuccaaucaucacau

SEQ ID NO: 2654464 - RNA, 19 nt, Artificial Sequence
  Description of Artificial Sequence: Synthetic oligonucleotide
uucaucgugcuuuugcaag

SEQ ID NO: 2654465 - RNA, 19 nt, Artificial Sequence
  Description of Artificial Sequence: Synthetic oligonucleotide
auaauacugaccuaugguu

SEQ ID NO: 2654466 - RNA, 19 nt, Artificial Sequence
  Description of Artificial Sequence: Synthetic oligonucleotide
ugcaaaguaugaaacugug

SEQ ID NO: 2654467 - RNA, 19 nt, Artificial Sequence
  Description of Artificial Sequence: Synthetic oligonucleotide
acacugaucagagucauuc

SEQ ID NO: 2654468 - RNA, 19 nt, Artificial Sequence
  Description of Artificial Sequence: Synthetic oligonucleotide
ucaaagaaaggaacacuca

SEQ ID NO: 2654469 - RNA, 19 nt, Artificial Sequence
  Description of Artificial Sequence: Synthetic oligonucleotide
uucuguaagaagaaagcau

SEQ ID NO: 2654470 - RNA, 19 nt, Artificial Sequence
  Description of Artificial Sequence: Synthetic oligonucleotide
ugguacauucaaagaaagg

SEQ ID NO: 2654471 - RNA, 19 nt, Artificial Sequence
  Description of Artificial Sequence: Synthetic oligonucleotide
gauaugggaaaggagacac

SEQ ID NO: 2654472 - RNA, 19 nt, Artificial Sequence
  Description of Artificial Sequence: Synthetic oligonucleotide
auaacacuggcacaagaug

SEQ ID NO: 2654473 - RNA, 19 nt, Artificial Sequence
  Description of Artificial Sequence: Synthetic oligonucleotide
uauaacacuggcacaagau

SEQ ID NO: 2654474 - RNA, 19 nt, Artificial Sequence
  Description of Artificial Sequence: Synthetic oligonucleotide
cauaguauauuacagguaa

SEQ ID NO: 2654475 - RNA, 19 nt, Artificial Sequence
  Description of Artificial Sequence: Synthetic oligonucleotide
gaaucuucagaucacugca

SEQ ID NO: 2654476 - RNA, 19 nt, Artificial Sequence
  Description of Artificial Sequence: Synthetic oligonucleotide
gagucauucaacuccaauc

SEQ ID NO: 2654477 - RNA, 19 nt, Artificial Sequence
  Description of Artificial Sequence: Synthetic oligonucleotide
uucagaucacugcauagga

SEQ ID NO: 2654478 - RNA, 19 nt, Artificial Sequence
  Description of Artificial Sequence: Synthetic oligonucleotide
guccauaguauauuacagg

SEQ ID NO: 2654479 - RNA, 19 nt, Artificial Sequence
  Description of Artificial Sequence: Synthetic oligonucleotide
uuuauacucaugacacuga

SEQ ID NO: 2654480 - RNA, 19 nt, Artificial Sequence
  Description of Artificial Sequence: Synthetic oligonucleotide
aguuuuaucucaaagcaga

SEQ ID NO: 2654481 - RNA, 19 nt, Artificial Sequence
  Description of Artificial Sequence: Synthetic oligonucleotide
caguucuguaagaagaaag

SEQ ID NO: 2654482 - RNA, 19 nt, Artificial Sequence
  Description of Artificial Sequence: Synthetic oligonucleotide
caaagaaaggaacacucac

SEQ ID NO: 2654483 - RNA, 19 nt, Artificial Sequence
  Description of Artificial Sequence: Synthetic oligonucleotide
uugcauugaaucuucagau

SEQ ID NO: 2654484 - RNA, 19 nt, Artificial Sequence
  Description of Artificial Sequence: Synthetic oligonucleotide
cuuuugcaaggauauauug

SEQ ID NO: 2654485 - RNA, 19 nt, Artificial Sequence
  Description of Artificial Sequence: Synthetic oligonucleotide
ccuauagaaacuuaagcag

SEQ ID NO: 2654486 - RNA, 19 nt, Artificial Sequence
  Description of Artificial Sequence: Synthetic oligonucleotide
ugaaacugugcuuggggag

SEQ ID NO: 2654487 - RNA, 19 nt, Artificial Sequence
  Description of Artificial Sequence: Synthetic oligonucleotide
uguagacaaaacuacugaa

SEQ ID NO: 2654488 - RNA, 19 nt, Artificial Sequence
  Description of Artificial Sequence: Synthetic oligonucleotide
uaaagcguagucuguagac

SEQ ID NO: 2654489 - RNA, 19 nt, Artificial Sequence
  Description of Artificial Sequence: Synthetic oligonucleotide
agucuguagacaaaacuac

SEQ ID NO: 2654490 - RNA, 19 nt, Artificial Sequence
  Description of Artificial Sequence: Synthetic oligonucleotide
aaagauauuugcauugaau

SEQ ID NO: 2654491 - RNA, 19 nt, Artificial Sequence
  Description of Artificial Sequence: Synthetic oligonucleotide
auaguuaugguguuacaaa

SEQ ID NO: 2654492 - RNA, 19 nt, Artificial Sequence
  Description of Artificial Sequence: Synthetic oligonucleotide
ucagacugguucaacugag

SEQ ID NO: 2654493 - RNA, 19 nt, Artificial Sequence
  Description of Artificial Sequence: Synthetic oligonucleotide
ucauucaacuccaaucauc

SEQ ID NO: 2654494 - RNA, 19 nt, Artificial Sequence
  Description of Artificial Sequence: Synthetic oligonucleotide
aaagaaaggaacacucacu

SEQ ID NO: 2654495 - RNA, 19 nt, Artificial Sequence
  Description of Artificial Sequence: Synthetic oligonucleotide
aauacugaccuaugguuua

SEQ ID NO: 2654496 - RNA, 19 nt, Artificial Sequence
  Description of Artificial Sequence: Synthetic oligonucleotide
ugcauaggaaacacggaga

SEQ ID NO: 2654497 - RNA, 19 nt, Artificial Sequence
  Description of Artificial Sequence: Synthetic oligonucleotide
auuugcauugaaucuucag

SEQ ID NO: 2654498 - RNA, 19 nt, Artificial Sequence
  Description of Artificial Sequence: Synthetic oligonucleotide
uaguauauuacagguaagu

SEQ ID NO: 2654499 - RNA, 19 nt, Artificial Sequence
  Description of Artificial Sequence: Synthetic oligonucleotide
agcauuuuagcacugcaaa

SEQ ID NO: 2654500 - RNA, 19 nt, Artificial Sequence
  Description of Artificial Sequence: Synthetic oligonucleotide
auacaaaauauaacacugg

SEQ ID NO: 2654501 - RNA, 19 nt, Artificial Sequence
  Description of Artificial Sequence: Synthetic oligonucleotide
aaaguaugaaacugugcuu

SEQ ID NO: 2654502 - RNA, 19 nt, Artificial Sequence
  Description of Artificial Sequence: Synthetic oligonucleotide
ucuucagaucacugcauag

SEQ ID NO: 2654503 - RNA, 19 nt, Artificial Sequence
  Description of Artificial Sequence: Synthetic oligonucleotide
cugagcugaacugaaagcc

SEQ ID NO: 2654504 - RNA, 19 nt, Artificial Sequence
  Description of Artificial Sequence: Synthetic oligonucleotide
auaggaaacacggagaauu

SEQ ID NO: 2654505 - RNA, 19 nt, Artificial Sequence
  Description of Artificial Sequence: Synthetic oligonucleotide
acugguucaacugagcuga

SEQ ID NO: 2654506 - RNA, 19 nt, Artificial Sequence
  Description of Artificial Sequence: Synthetic oligonucleotide
uucagacugguucaacuga

SEQ ID NO: 2654507 - RNA, 19 nt, Artificial Sequence
  Description of Artificial Sequence: Synthetic oligonucleotide
aguaugaaacugugcuugg

SEQ ID NO: 2654508 - RNA, 19 nt, Artificial Sequence
  Description of Artificial Sequence: Synthetic oligonucleotide
uugaaucuucagaucacug

SEQ ID NO: 2654509 - RNA, 19 nt, Artificial Sequence
  Description of Artificial Sequence: Synthetic oligonucleotide
uguguauucaucgugcuuu

SEQ ID NO: 2654510 - RNA, 19 nt, Artificial Sequence
  Description of Artificial Sequence: Synthetic oligonucleotide
gguacauucaaagaaagga

SEQ ID NO: 2654511 - RNA, 19 nt, Artificial Sequence
  Description of Artificial Sequence: Synthetic oligonucleotide
cauucaacuccaaucauca

SEQ ID NO: 2654512 - RNA, 19 nt, Artificial Sequence
  Description of Artificial Sequence: Synthetic oligonucleotide
uugcaaaguaugaaacugu

SEQ ID NO: 2654513 - RNA, 19 nt, Artificial Sequence
  Description of Artificial Sequence: Synthetic oligonucleotide
uaauacugaccuaugguuu

SEQ ID NO: 2654514 - RNA, 19 nt, Artificial Sequence
  Description of Artificial Sequence: Synthetic oligonucleotide
aaagcagagaaagggagau

SEQ ID NO: 2654515 - RNA, 19 nt, Artificial Sequence
  Description of Artificial Sequence: Synthetic oligonucleotide
aucacugcauaggaaacac

SEQ ID NO: 2654516 - RNA, 19 nt, Artificial Sequence
  Description of Artificial Sequence: Synthetic oligonucleotide
caaaguaugaaacugugcu

SEQ ID NO: 2654517 - RNA, 19 nt, Artificial Sequence
  Description of Artificial Sequence: Synthetic oligonucleotide
cagguaaguacuucuuucc

SEQ ID NO: 2654518 - RNA, 19 nt, Artificial Sequence
  Description of Artificial Sequence: Synthetic oligonucleotide
auaaccaucugaaugcaug

SEQ ID NO: 2654519 - RNA, 19 nt, Artificial Sequence
  Description of Artificial Sequence: Synthetic oligonucleotide
aauauaacacuggcacaag

SEQ ID NO: 2654520 - RNA, 19 nt, Artificial Sequence
  Description of Artificial Sequence: Synthetic oligonucleotide
ugagcugaacugaaagcca

SEQ ID NO: 2654521 - RNA, 19 nt, Artificial Sequence
  Description of Artificial Sequence: Synthetic oligonucleotide
cacauaauaguuauggugu

SEQ ID NO: 2654522 - RNA, 19 nt, Artificial Sequence
  Description of Artificial Sequence: Synthetic oligonucleotide
uaguuaugguguuacaaau

SEQ ID NO: 2654523 - RNA, 19 nt, Artificial Sequence
  Description of Artificial Sequence: Synthetic oligonucleotide
uagaaacuuaagcaguuuu

SEQ ID NO: 2654524 - RNA, 19 nt, Artificial Sequence
  Description of Artificial Sequence: Synthetic oligonucleotide
aagcguagucuguagacaa

SEQ ID NO: 2654525 - RNA, 19 nt, Artificial Sequence
  Description of Artificial Sequence: Synthetic oligonucleotide
uuaugguguuacaaauaca

SEQ ID NO: 2654526 - RNA, 19 nt, Artificial Sequence
  Description of Artificial Sequence: Synthetic oligonucleotide
aaaggaacacucacuagga

SEQ ID NO: 2654527 - RNA, 19 nt, Artificial Sequence
  Description of Artificial Sequence: Synthetic oligonucleotide
cauucaaagaaaggaacac

SEQ ID NO: 2654528 - RNA, 19 nt, Artificial Sequence
  Description of Artificial Sequence: Synthetic oligonucleotide
ucuuuccauuaucagggca

SEQ ID NO: 2654529 - RNA, 19 nt, Artificial Sequence
  Description of Artificial Sequence: Synthetic oligonucleotide
caguuuuaucucaaagcag

SEQ ID NO: 2654530 - RNA, 19 nt, Artificial Sequence
  Description of Artificial Sequence: Synthetic oligonucleotide
agaaaggaacacucacuag

SEQ ID NO: 2654531 - RNA, 19 nt, Artificial Sequence
  Description of Artificial Sequence: Synthetic oligonucleotide
uuauacucaugacacugau

SEQ ID NO: 2654532 - RNA, 19 nt, Artificial Sequence
  Description of Artificial Sequence: Synthetic oligonucleotide
cauuaucagggcauucagc

SEQ ID NO: 2654533 - RNA, 19 nt, Artificial Sequence
  Description of Artificial Sequence: Synthetic oligonucleotide
cagauugucacuaucuuaa

SEQ ID NO: 2654534 - RNA, 19 nt, Artificial Sequence
  Description of Artificial Sequence: Synthetic oligonucleotide
gacaaaacuacugaacaaa

SEQ ID NO: 2654535 - RNA, 19 nt, Artificial Sequence
  Description of Artificial Sequence: Synthetic oligonucleotide
ugaaugcauguccauagua

SEQ ID NO: 2654536 - RNA, 19 nt, Artificial Sequence
  Description of Artificial Sequence: Synthetic oligonucleotide
uuuuaucucaaagcagaga

SEQ ID NO: 2654537 - RNA, 19 nt, Artificial Sequence
  Description of Artificial Sequence: Synthetic oligonucleotide
ugcuuggggagauucagac

SEQ ID NO: 2654538 - RNA, 19 nt, Artificial Sequence
  Description of Artificial Sequence: Synthetic oligonucleotide
gcaguuuuaucucaaagca

SEQ ID NO: 2654539 - RNA, 19 nt, Artificial Sequence
  Description of Artificial Sequence: Synthetic oligonucleotide
uaaccaucugaaugcaugu

SEQ ID NO: 2654540 - RNA, 19 nt, Artificial Sequence
  Description of Artificial Sequence: Synthetic oligonucleotide
guagacaaaacuacugaac

SEQ ID NO: 2654541 - RNA, 19 nt, Artificial Sequence
  Description of Artificial Sequence: Synthetic oligonucleotide
ugcuuuugcaaggauauau

SEQ ID NO: 2654542 - RNA, 19 nt, Artificial Sequence
  Description of Artificial Sequence: Synthetic oligonucleotide
uucaacugagcugaacuga

SEQ ID NO: 2654543 - RNA, 19 nt, Artificial Sequence
  Description of Artificial Sequence: Synthetic oligonucleotide
ucaacugagcugaacugaa

SEQ ID NO: 2654544 - RNA, 19 nt, Artificial Sequence
  Description of Artificial Sequence: Synthetic oligonucleotide
acugaccuaugguuuacag

SEQ ID NO: 2654545 - RNA, 19 nt, Artificial Sequence
  Description of Artificial Sequence: Synthetic oligonucleotide
uuaucagggcauucagcag

SEQ ID NO: 2654546 - RNA, 19 nt, Artificial Sequence
  Description of Artificial Sequence: Synthetic oligonucleotide
augaaacugugcuugggga

SEQ ID NO: 2654547 - RNA, 19 nt, Artificial Sequence
  Description of Artificial Sequence: Synthetic oligonucleotide
aaauaaccaucugaaugca

SEQ ID NO: 2654548 - RNA, 19 nt, Artificial Sequence
  Description of Artificial Sequence: Synthetic oligonucleotide
caaagccaaacaucauucc

SEQ ID NO: 2654549 - RNA, 19 nt, Artificial Sequence
  Description of Artificial Sequence: Synthetic oligonucleotide
aacaucauuccuauagaaa

SEQ ID NO: 2654550 - RNA, 19 nt, Artificial Sequence
  Description of Artificial Sequence: Synthetic oligonucleotide
uccauuaucagggcauuca

SEQ ID NO: 2654551 - RNA, 19 nt, Artificial Sequence
  Description of Artificial Sequence: Synthetic oligonucleotide
auauaacacuggcacaaga

SEQ ID NO: 2654552 - RNA, 19 nt, Artificial Sequence
  Description of Artificial Sequence: Synthetic oligonucleotide
agcacugcaaagccaaaca

SEQ ID NO: 2654553 - RNA, 19 nt, Artificial Sequence
  Description of Artificial Sequence: Synthetic oligonucleotide
auuccuauagaaacuuaag

SEQ ID NO: 2654554 - RNA, 19 nt, Artificial Sequence
  Description of Artificial Sequence: Synthetic oligonucleotide
gacugguucaacugagcug

SEQ ID NO: 2654555 - RNA, 19 nt, Artificial Sequence
  Description of Artificial Sequence: Synthetic oligonucleotide
aaagcguagucuguagaca

SEQ ID NO: 2654556 - RNA, 19 nt, Artificial Sequence
  Description of Artificial Sequence: Synthetic oligonucleotide
ucacugcauaggaaacacg

SEQ ID NO: 2654557 - RNA, 19 nt, Artificial Sequence
  Description of Artificial Sequence: Synthetic oligonucleotide
acaaaauauaacacuggca

SEQ ID NO: 2654558 - RNA, 19 nt, Artificial Sequence
  Description of Artificial Sequence: Synthetic oligonucleotide
cugaucagagucauucaac

SEQ ID NO: 2654559 - RNA, 19 nt, Artificial Sequence
  Description of Artificial Sequence: Synthetic oligonucleotide
cacaagauguguauucauc

SEQ ID NO: 2654560 - RNA, 19 nt, Artificial Sequence
  Description of Artificial Sequence: Synthetic oligonucleotide
agacugguucaacugagcu

SEQ ID NO: 2654561 - RNA, 19 nt, Artificial Sequence
  Description of Artificial Sequence: Synthetic oligonucleotide
aucacauaauaguuauggu

SEQ ID NO: 2654562 - RNA, 19 nt, Artificial Sequence
  Description of Artificial Sequence: Synthetic oligonucleotide
acaauauuuguaccguuuu

SEQ ID NO: 2654563 - RNA, 19 nt, Artificial Sequence
  Description of Artificial Sequence: Synthetic oligonucleotide
ugcacaugcuaaagcguag

SEQ ID NO: 2654564 - RNA, 19 nt, Artificial Sequence
  Description of Artificial Sequence: Synthetic oligonucleotide
guucaacugagcugaacug

SEQ ID NO: 2654565 - RNA, 19 nt, Artificial Sequence
  Description of Artificial Sequence: Synthetic oligonucleotide
cuugguacauucaaagaaa

SEQ ID NO: 2654566 - RNA, 19 nt, Artificial Sequence
  Description of Artificial Sequence: Synthetic oligonucleotide
aagggagauaugggaaagg

SEQ ID NO: 2654567 - RNA, 19 nt, Artificial Sequence
  Description of Artificial Sequence: Synthetic oligonucleotide
gagauaugggaaaggagac

SEQ ID NO: 2654568 - RNA, 19 nt, Artificial Sequence
  Description of Artificial Sequence: Synthetic oligonucleotide
uaugguuuacaguucugua

SEQ ID NO: 2654569 - RNA, 19 nt, Artificial Sequence
  Description of Artificial Sequence: Synthetic oligonucleotide
uugcacaugcuaaagcgua

SEQ ID NO: 2654570 - RNA, 19 nt, Artificial Sequence
  Description of Artificial Sequence: Synthetic oligonucleotide
aaguacuucuuuccauuau

SEQ ID NO: 2654571 - RNA, 19 nt, Artificial Sequence
  Description of Artificial Sequence: Synthetic oligonucleotide
cauugaaucuucagaucac

SEQ ID NO: 2654572 - RNA, 19 nt, Artificial Sequence
  Description of Artificial Sequence: Synthetic oligonucleotide
agacaaaacuacugaacaa

SEQ ID NO: 2654573 - RNA, 19 nt, Artificial Sequence
  Description of Artificial Sequence: Synthetic oligonucleotide
agcagagaaagggagauau

SEQ ID NO: 2654574 - RNA, 19 nt, Artificial Sequence
  Description of Artificial Sequence: Synthetic oligonucleotide
gaaagggagauaugggaaa

SEQ ID NO: 2654575 - RNA, 19 nt, Artificial Sequence
  Description of Artificial Sequence: Synthetic oligonucleotide
aacaauauuuguaccguuu

SEQ ID NO: 2654576 - RNA, 19 nt, Artificial Sequence
  Description of Artificial Sequence: Synthetic oligonucleotide
ucaucacauaauaguuaug

SEQ ID NO: 2654577 - RNA, 19 nt, Artificial Sequence
  Description of Artificial Sequence: Synthetic oligonucleotide
gcauugaaucuucagauca

SEQ ID NO: 2654578 - RNA, 19 nt, Artificial Sequence
  Description of Artificial Sequence: Synthetic oligonucleotide
gauugucacuaucuuaaaa

SEQ ID NO: 2654579 - RNA, 19 nt, Artificial Sequence
  Description of Artificial Sequence: Synthetic oligonucleotide
acucaugacacugaucaga

SEQ ID NO: 2654580 - RNA, 19 nt, Artificial Sequence
  Description of Artificial Sequence: Synthetic oligonucleotide
auauugcuccaauaacacu

SEQ ID NO: 2654581 - RNA, 19 nt, Artificial Sequence
  Description of Artificial Sequence: Synthetic oligonucleotide
uauacucaugacacugauc

SEQ ID NO: 2654582 - RNA, 19 nt, Artificial Sequence
  Description of Artificial Sequence: Synthetic oligonucleotide
ucacuaggauuauauugcu

SEQ ID NO: 2654583 - RNA, 19 nt, Artificial Sequence
  Description of Artificial Sequence: Synthetic oligonucleotide
agaucacugcauaggaaac

SEQ ID NO: 2654584 - RNA, 19 nt, Artificial Sequence
  Description of Artificial Sequence: Synthetic oligonucleotide
uaugggaaaggagacacuu

SEQ ID NO: 2654585 - RNA, 19 nt, Artificial Sequence
  Description of Artificial Sequence: Synthetic oligonucleotide
aggaacacucacuaggauu

SEQ ID NO: 2654586 - RNA, 19 nt, Artificial Sequence
  Description of Artificial Sequence: Synthetic oligonucleotide
aaccaucugaaugcauguc

SEQ ID NO: 2654587 - RNA, 19 nt, Artificial Sequence
  Description of Artificial Sequence: Synthetic oligonucleotide
gggagauucagacugguuc

SEQ ID NO: 2654588 - RNA, 19 nt, Artificial Sequence
  Description of Artificial Sequence: Synthetic oligonucleotide
aacacuggcacaagaugug

SEQ ID NO: 2654589 - RNA, 19 nt, Artificial Sequence
  Description of Artificial Sequence: Synthetic oligonucleotide
aggauuauauugcuccaau

SEQ ID NO: 2654590 - RNA, 19 nt, Artificial Sequence
  Description of Artificial Sequence: Synthetic oligonucleotide
uaauaguuaugguguuaca

SEQ ID NO: 2654591 - RNA, 19 nt, Artificial Sequence
  Description of Artificial Sequence: Synthetic oligonucleotide
cuuaagcaguuuuaucuca

SEQ ID NO: 2654592 - RNA, 19 nt, Artificial Sequence
  Description of Artificial Sequence: Synthetic oligonucleotide
gcauucagcaguugcaaag

SEQ ID NO: 2654593 - RNA, 19 nt, Artificial Sequence
  Description of Artificial Sequence: Synthetic oligonucleotide
aggaaacacggagaauuac

SEQ ID NO: 2654594 - RNA, 19 nt, Artificial Sequence
  Description of Artificial Sequence: Synthetic oligonucleotide
ugcauugaaucuucagauc

SEQ ID NO: 2654595 - RNA, 19 nt, Artificial Sequence
  Description of Artificial Sequence: Synthetic oligonucleotide
uauuugcauugaaucuuca

SEQ ID NO: 2654596 - RNA, 19 nt, Artificial Sequence
  Description of Artificial Sequence: Synthetic oligonucleotide
aaacacggagaauuacauu

SEQ ID NO: 2654597 - RNA, 19 nt, Artificial Sequence
  Description of Artificial Sequence: Synthetic oligonucleotide
cauuccuauagaaacuuaa

SEQ ID NO: 2654598 - RNA, 19 nt, Artificial Sequence
  Description of Artificial Sequence: Synthetic oligonucleotide
ucagaucacugcauaggaa

SEQ ID NO: 2654599 - RNA, 19 nt, Artificial Sequence
  Description of Artificial Sequence: Synthetic oligonucleotide
aguauauuacagguaagua

SEQ ID NO: 2654600 - RNA, 19 nt, Artificial Sequence
  Description of Artificial Sequence: Synthetic oligonucleotide
cuccaauaacacucaaaug

SEQ ID NO: 2654601 - RNA, 19 nt, Artificial Sequence
  Description of Artificial Sequence: Synthetic oligonucleotide
cacugcaaagccaaacauc

SEQ ID NO: 2654602 - RNA, 19 nt, Artificial Sequence
  Description of Artificial Sequence: Synthetic oligonucleotide
cuguagacaaaacuacuga

SEQ ID NO: 2654603 - RNA, 19 nt, Artificial Sequence
  Description of Artificial Sequence: Synthetic oligonucleotide
guuuuaucucaaagcagag

SEQ ID NO: 2654604 - RNA, 19 nt, Artificial Sequence
  Description of Artificial Sequence: Synthetic oligonucleotide
agacacuugguacauucaa

SEQ ID NO: 2654605 - RNA, 19 nt, Artificial Sequence
  Description of Artificial Sequence: Synthetic oligonucleotide
cuauagaaacuuaagcagu

SEQ ID NO: 2654606 - RNA, 19 nt, Artificial Sequence
  Description of Artificial Sequence: Synthetic oligonucleotide
uggcacaagauguguauuc

SEQ ID NO: 2654607 - RNA, 19 nt, Artificial Sequence
  Description of Artificial Sequence: Synthetic oligonucleotide
gauucagacugguucaacu

SEQ ID NO: 2654608 - RNA, 19 nt, Artificial Sequence
  Description of Artificial Sequence: Synthetic oligonucleotide
acaugcuaaagcguagucu

SEQ ID NO: 2654609 - RNA, 19 nt, Artificial Sequence
  Description of Artificial Sequence: Synthetic oligonucleotide
acuggcacaagauguguau

SEQ ID NO: 2654610 - RNA, 19 nt, Artificial Sequence
  Description of Artificial Sequence: Synthetic oligonucleotide
acucagauugucacuaucu

SEQ ID NO: 2654611 - RNA, 19 nt, Artificial Sequence
  Description of Artificial Sequence: Synthetic oligonucleotide
guucuguaagaagaaagca

SEQ ID NO: 2654612 - RNA, 19 nt, Artificial Sequence
  Description of Artificial Sequence: Synthetic oligonucleotide
guagucuguagacaaaacu

SEQ ID NO: 2654613 - RNA, 19 nt, Artificial Sequence
  Description of Artificial Sequence: Synthetic oligonucleotide
uauuacagguaaguacuuc

SEQ ID NO: 2654614 - RNA, 19 nt, Artificial Sequence
  Description of Artificial Sequence: Synthetic oligonucleotide
ugcuccaauaacacucaaa

SEQ ID NO: 2654615 - RNA, 19 nt, Artificial Sequence
  Description of Artificial Sequence: Synthetic oligonucleotide
ggauauauugcacaugcua

SEQ ID NO: 2654616 - RNA, 19 nt, Artificial Sequence
  Description of Artificial Sequence: Synthetic oligonucleotide
aaggaacacucacuaggau

SEQ ID NO: 2654617 - RNA, 19 nt, Artificial Sequence
  Description of Artificial Sequence: Synthetic oligonucleotide
guaugaaacugugcuuggg

SEQ ID NO: 2654618 - RNA, 19 nt, Artificial Sequence
  Description of Artificial Sequence: Synthetic oligonucleotide
auaguauauuacagguaag

SEQ ID NO: 2654619 - RNA, 19 nt, Artificial Sequence
  Description of Artificial Sequence: Synthetic oligonucleotide
agagucauucaacuccaau

SEQ ID NO: 2654620 - RNA, 19 nt, Artificial Sequence
  Description of Artificial Sequence: Synthetic oligonucleotide
ucgugcuuuugcaaggaua

SEQ ID NO: 2654621 - RNA, 19 nt, Artificial Sequence
  Description of Artificial Sequence: Synthetic oligonucleotide
uaggaaacacggagaauua

SEQ ID NO: 2654622 - RNA, 19 nt, Artificial Sequence
  Description of Artificial Sequence: Synthetic oligonucleotide
agccaaacaucauuccuau

SEQ ID NO: 2654623 - RNA, 19 nt, Artificial Sequence
  Description of Artificial Sequence: Synthetic oligonucleotide
uacucaugacacugaucag

SEQ ID NO: 2654624 - RNA, 19 nt, Artificial Sequence
  Description of Artificial Sequence: Synthetic oligonucleotide
uucuuuccauuaucagggc

SEQ ID NO: 2654625 - RNA, 19 nt, Artificial Sequence
  Description of Artificial Sequence: Synthetic oligonucleotide
aagcauuuuagcacugcaa

SEQ ID NO: 2654626 - RNA, 19 nt, Artificial Sequence
  Description of Artificial Sequence: Synthetic oligonucleotide
ggagacacuugguacauuc

SEQ ID NO: 2654627 - RNA, 19 nt, Artificial Sequence
  Description of Artificial Sequence: Synthetic oligonucleotide
acauaauaguuaugguguu

SEQ ID NO: 2654628 - RNA, 19 nt, Artificial Sequence
  Description of Artificial Sequence: Synthetic oligonucleotide
agauucagacugguucaac

SEQ ID NO: 2654629 - RNA, 19 nt, Artificial Sequence
  Description of Artificial Sequence: Synthetic oligonucleotide
acaaaacuacugaacaaaa

SEQ ID NO: 2654630 - RNA, 19 nt, Artificial Sequence
  Description of Artificial Sequence: Synthetic oligonucleotide
ggagauucagacugguuca

SEQ ID NO: 2654631 - RNA, 19 nt, Artificial Sequence
  Description of Artificial Sequence: Synthetic oligonucleotide
auacugaccuaugguuuac

SEQ ID NO: 2654632 - RNA, 19 nt, Artificial Sequence
  Description of Artificial Sequence: Synthetic oligonucleotide
agggagauaugggaaagga

SEQ ID NO: 2654633 - RNA, 19 nt, Artificial Sequence
  Description of Artificial Sequence: Synthetic oligonucleotide
caaagcagagaaagggaga

SEQ ID NO: 2654634 - RNA, 19 nt, Artificial Sequence
  Description of Artificial Sequence: Synthetic oligonucleotide
aucauuccuauagaaacuu

SEQ ID NO: 2654635 - RNA, 19 nt, Artificial Sequence
  Description of Artificial Sequence: Synthetic oligonucleotide
ucauuccuauagaaacuua

SEQ ID NO: 2654636 - RNA, 19 nt, Artificial Sequence
  Description of Artificial Sequence: Synthetic oligonucleotide
auucaucgugcuuuugcaa

SEQ ID NO: 2654637 - RNA, 19 nt, Artificial Sequence
  Description of Artificial Sequence: Synthetic oligonucleotide
guacuucuuuccauuauca

SEQ ID NO: 2654638 - RNA, 19 nt, Artificial Sequence
  Description of Artificial Sequence: Synthetic oligonucleotide
agaaacuuaagcaguuuua

SEQ ID NO: 2654639 - RNA, 19 nt, Artificial Sequence
  Description of Artificial Sequence: Synthetic oligonucleotide
auugcacaugcuaaagcgu

SEQ ID NO: 2654640 - RNA, 19 nt, Artificial Sequence
  Description of Artificial Sequence: Synthetic oligonucleotide
guuuacaguucuguaagaa

SEQ ID NO: 2654641 - RNA, 19 nt, Artificial Sequence
  Description of Artificial Sequence: Synthetic oligonucleotide
cuaaagcguagucuguaga

SEQ ID NO: 2654642 - RNA, 19 nt, Artificial Sequence
  Description of Artificial Sequence: Synthetic oligonucleotide
acacucacuaggauuauau

SEQ ID NO: 2654643 - RNA, 19 nt, Artificial Sequence
  Description of Artificial Sequence: Synthetic oligonucleotide
cuaggauuauauugcucca

SEQ ID NO: 2654644 - RNA, 19 nt, Artificial Sequence
  Description of Artificial Sequence: Synthetic oligonucleotide
aucuucagaucacugcaua

SEQ ID NO: 2654645 - RNA, 19 nt, Artificial Sequence
  Description of Artificial Sequence: Synthetic oligonucleotide
uaggauuauauugcuccaa

SEQ ID NO: 2654646 - RNA, 19 nt, Artificial Sequence
  Description of Artificial Sequence: Synthetic oligonucleotide
aaucuucagaucacugcau

SEQ ID NO: 2654647 - RNA, 19 nt, Artificial Sequence
  Description of Artificial Sequence: Synthetic oligonucleotide
caauaacacucaaaugaaa

SEQ ID NO: 2654648 - RNA, 19 nt, Artificial Sequence
  Description of Artificial Sequence: Synthetic oligonucleotide
agauaugggaaaggagaca

SEQ ID NO: 2654649 - RNA, 19 nt, Artificial Sequence
  Description of Artificial Sequence: Synthetic oligonucleotide
aauaaccaucugaaugcau

SEQ ID NO: 2654650 - RNA, 19 nt, Artificial Sequence
  Description of Artificial Sequence: Synthetic oligonucleotide
acacacucagauugucacu

SEQ ID NO: 2654651 - RNA, 19 nt, Artificial Sequence
  Description of Artificial Sequence: Synthetic oligonucleotide
cacuaggauuauauugcuc

SEQ ID NO: 2654652 - RNA, 19 nt, Artificial Sequence
  Description of Artificial Sequence: Synthetic oligonucleotide
aaggagacacuugguacau

SEQ ID NO: 2654653 - RNA, 19 nt, Artificial Sequence
  Description of Artificial Sequence: Synthetic oligonucleotide
gguucaacugagcugaacu

SEQ ID NO: 2654654 - RNA, 19 nt, Artificial Sequence
  Description of Artificial Sequence: Synthetic oligonucleotide
caaggauauauugcacaug

SEQ ID NO: 2654655 - RNA, 19 nt, Artificial Sequence
  Description of Artificial Sequence: Synthetic oligonucleotide
gcuaaagcguagucuguag

SEQ ID NO: 2654656 - RNA, 19 nt, Artificial Sequence
  Description of Artificial Sequence: Synthetic oligonucleotide
auugcuccaauaacacuca

SEQ ID NO: 2654657 - RNA, 19 nt, Artificial Sequence
  Description of Artificial Sequence: Synthetic oligonucleotide
agcaguugcaaaguaugaa

SEQ ID NO: 2654658 - RNA, 19 nt, Artificial Sequence
  Description of Artificial Sequence: Synthetic oligonucleotide
gauguguauucaucgugcu

SEQ ID NO: 2654659 - RNA, 19 nt, Artificial Sequence
  Description of Artificial Sequence: Synthetic oligonucleotide
gcaguugcaaaguaugaaa

SEQ ID NO: 2654660 - RNA, 19 nt, Artificial Sequence
  Description of Artificial Sequence: Synthetic oligonucleotide
cacuugguacauucaaaga

SEQ ID NO: 2654661 - RNA, 19 nt, Artificial Sequence
  Description of Artificial Sequence: Synthetic oligonucleotide
gcuccaauaacacucaaau

SEQ ID NO: 2654662 - RNA, 19 nt, Artificial Sequence
  Description of Artificial Sequence: Synthetic oligonucleotide
cuuuccauuaucagggcau

SEQ ID NO: 2654663 - RNA, 19 nt, Artificial Sequence
  Description of Artificial Sequence: Synthetic oligonucleotide
gaaacacggagaauuacau

SEQ ID NO: 2654664 - RNA, 19 nt, Artificial Sequence
  Description of Artificial Sequence: Synthetic oligonucleotide
augacacugaucagaguca

SEQ ID NO: 2654665 - RNA, 19 nt, Artificial Sequence
  Description of Artificial Sequence: Synthetic oligonucleotide
uguauucaucgugcuuuug

SEQ ID NO: 2654666 - RNA, 19 nt, Artificial Sequence
  Description of Artificial Sequence: Synthetic oligonucleotide
agauugucacuaucuuaaa

SEQ ID NO: 2654667 - RNA, 19 nt, Artificial Sequence
  Description of Artificial Sequence: Synthetic oligonucleotide
ugcuaaagcguagucugua

SEQ ID NO: 2654668 - RNA, 19 nt, Artificial Sequence
  Description of Artificial Sequence: Synthetic oligonucleotide
guaaguacuucuuuccauu

SEQ ID NO: 2654669 - RNA, 19 nt, Artificial Sequence
  Description of Artificial Sequence: Synthetic oligonucleotide
cuccaaucaucacauaaua

SEQ ID NO: 2654670 - RNA, 19 nt, Artificial Sequence
  Description of Artificial Sequence: Synthetic oligonucleotide
cacaugcuaaagcguaguc

SEQ ID NO: 2654671 - RNA, 19 nt, Artificial Sequence
  Description of Artificial Sequence: Synthetic oligonucleotide
aguuaugguguuacaaaua

SEQ ID NO: 2654672 - RNA, 19 nt, Artificial Sequence
  Description of Artificial Sequence: Synthetic oligonucleotide
gacacuugguacauucaaa

SEQ ID NO: 2654673 - RNA, 19 nt, Artificial Sequence
  Description of Artificial Sequence: Synthetic oligonucleotide
uuagcacugcaaagccaaa

SEQ ID NO: 2654674 - RNA, 19 nt, Artificial Sequence
  Description of Artificial Sequence: Synthetic oligonucleotide
ggaacacucacuaggauua

SEQ ID NO: 2654675 - RNA, 19 nt, Artificial Sequence
  Description of Artificial Sequence: Synthetic oligonucleotide
ugacacugaucagagucau

SEQ ID NO: 2654676 - RNA, 19 nt, Artificial Sequence
  Description of Artificial Sequence: Synthetic oligonucleotide
cacucagauugucacuauc

SEQ ID NO: 2654677 - RNA, 19 nt, Artificial Sequence
  Description of Artificial Sequence: Synthetic oligonucleotide
caucauuccuauagaaacu

SEQ ID NO: 2654678 - RNA, 19 nt, Artificial Sequence
  Description of Artificial Sequence: Synthetic oligonucleotide
gcauaggaaacacggagaa

SEQ ID NO: 2654679 - RNA, 19 nt, Artificial Sequence
  Description of Artificial Sequence: Synthetic oligonucleotide
ugaaagccauuuuccucau

SEQ ID NO: 2654680 - RNA, 19 nt, Artificial Sequence
  Description of Artificial Sequence: Synthetic oligonucleotide
gcaaaguaugaaacugugc

SEQ ID NO: 2654681 - RNA, 19 nt, Artificial Sequence
  Description of Artificial Sequence: Synthetic oligonucleotide
auguguauucaucgugcuu

SEQ ID NO: 2654682 - RNA, 19 nt, Artificial Sequence
  Description of Artificial Sequence: Synthetic oligonucleotide
guguuacaaauacauuaua

SEQ ID NO: 2654683 - RNA, 19 nt, Artificial Sequence
  Description of Artificial Sequence: Synthetic oligonucleotide
acugcauaggaaacacgga

SEQ ID NO: 2654684 - RNA, 19 nt, Artificial Sequence
  Description of Artificial Sequence: Synthetic oligonucleotide
acaguucuguaagaagaaa

SEQ ID NO: 2654685 - RNA, 19 nt, Artificial Sequence
  Description of Artificial Sequence: Synthetic oligonucleotide
ccauuaucagggcauucag

SEQ ID NO: 2654686 - RNA, 19 nt, Artificial Sequence
  Description of Artificial Sequence: Synthetic oligonucleotide
ccaauaacacucaaaugaa

SEQ ID NO: 2654687 - RNA, 19 nt, Artificial Sequence
  Description of Artificial Sequence: Synthetic oligonucleotide
augcauguccauaguauau

SEQ ID NO: 2654688 - RNA, 19 nt, Artificial Sequence
  Description of Artificial Sequence: Synthetic oligonucleotide
acacacacucagauuguca

SEQ ID NO: 2654689 - RNA, 19 nt, Artificial Sequence
  Description of Artificial Sequence: Synthetic oligonucleotide
cagcaguugcaaaguauga

SEQ ID NO: 2654690 - RNA, 19 nt, Artificial Sequence
  Description of Artificial Sequence: Synthetic oligonucleotide
gagacacuugguacauuca

SEQ ID NO: 2654691 - RNA, 19 nt, Artificial Sequence
  Description of Artificial Sequence: Synthetic oligonucleotide
uacugaccuaugguuuaca

SEQ ID NO: 2654692 - RNA, 19 nt, Artificial Sequence
  Description of Artificial Sequence: Synthetic oligonucleotide
uugcuccaauaacacucaa

SEQ ID NO: 2654693 - RNA, 19 nt, Artificial Sequence
  Description of Artificial Sequence: Synthetic oligonucleotide
acacuggcacaagaugugu

SEQ ID NO: 2654694 - RNA, 19 nt, Artificial Sequence
  Description of Artificial Sequence: Synthetic oligonucleotide
cuaugguuuacaguucugu

SEQ ID NO: 2654695 - RNA, 19 nt, Artificial Sequence
  Description of Artificial Sequence: Synthetic oligonucleotide
ugguucaacugagcugaac

SEQ ID NO: 2654696 - RNA, 19 nt, Artificial Sequence
  Description of Artificial Sequence: Synthetic oligonucleotide
gguuuacaguucuguaaga

SEQ ID NO: 2654697 - RNA, 19 nt, Artificial Sequence
  Description of Artificial Sequence: Synthetic oligonucleotide
ggauuauauugcuccaaua

SEQ ID NO: 2654698 - RNA, 19 nt, Artificial Sequence
  Description of Artificial Sequence: Synthetic oligonucleotide
cauaauaguuaugguguua

SEQ ID NO: 2654699 - RNA, 19 nt, Artificial Sequence
  Description of Artificial Sequence: Synthetic oligonucleotide
gaccuaugguuuacaguuc

SEQ ID NO: 2654700 - RNA, 19 nt, Artificial Sequence
  Description of Artificial Sequence: Synthetic oligonucleotide
aggauauauugcacaugcu

SEQ ID NO: 2654701 - RNA, 19 nt, Artificial Sequence
  Description of Artificial Sequence: Synthetic oligonucleotide
auauuacagguaaguacuu

SEQ ID NO: 2654702 - RNA, 19 nt, Artificial Sequence
  Description of Artificial Sequence: Synthetic oligonucleotide
acacucagauugucacuau

SEQ ID NO: 2654703 - RNA, 19 nt, Artificial Sequence
  Description of Artificial Sequence: Synthetic oligonucleotide
auaugggaaaggagacacu

SEQ ID NO: 2654704 - RNA, 19 nt, Artificial Sequence
  Description of Artificial Sequence: Synthetic oligonucleotide
cugaccuaugguuuacagu

SEQ ID NO: 2654705 - RNA, 19 nt, Artificial Sequence
  Description of Artificial Sequence: Synthetic oligonucleotide
cacacacacucagauuguc

SEQ ID NO: 2654706 - RNA, 19 nt, Artificial Sequence
  Description of Artificial Sequence: Synthetic oligonucleotide
ccaucugaaugcaugucca

SEQ ID NO: 2654707 - RNA, 19 nt, Artificial Sequence
  Description of Artificial Sequence: Synthetic oligonucleotide
gguaaguacuucuuuccau

SEQ ID NO: 2654708 - RNA, 19 nt, Artificial Sequence
  Description of Artificial Sequence: Synthetic oligonucleotide
gucuguagacaaaacuacu

SEQ ID NO: 2654709 - RNA, 19 nt, Artificial Sequence
  Description of Artificial Sequence: Synthetic oligonucleotide
augguguuacaaauacauu

SEQ ID NO: 2654710 - RNA, 19 nt, Artificial Sequence
  Description of Artificial Sequence: Synthetic oligonucleotide
cuguaagaagaaagcauuu

SEQ ID NO: 2654711 - RNA, 19 nt, Artificial Sequence
  Description of Artificial Sequence: Synthetic oligonucleotide
acacggagaauuacauuuu

SEQ ID NO: 2654712 - RNA, 19 nt, Artificial Sequence
  Description of Artificial Sequence: Synthetic oligonucleotide
gcauguccauaguauauua

SEQ ID NO: 2654713 - RNA, 19 nt, Artificial Sequence
  Description of Artificial Sequence: Synthetic oligonucleotide
augcuaaagcguagucugu

SEQ ID NO: 2654714 - RNA, 19 nt, Artificial Sequence
  Description of Artificial Sequence: Synthetic oligonucleotide
gcaacaauauuuguaccgu

SEQ ID NO: 2654715 - RNA, 19 nt, Artificial Sequence
  Description of Artificial Sequence: Synthetic oligonucleotide
ccuaugguuuacaguucug

SEQ ID NO: 2654716 - RNA, 19 nt, Artificial Sequence
  Description of Artificial Sequence: Synthetic oligonucleotide
gucauucaacuccaaucau

SEQ ID NO: 2654717 - RNA, 19 nt, Artificial Sequence
  Description of Artificial Sequence: Synthetic oligonucleotide
cuacugaacaaaagauauu

SEQ ID NO: 2654718 - RNA, 19 nt, Artificial Sequence
  Description of Artificial Sequence: Synthetic oligonucleotide
cguagucuguagacaaaac

SEQ ID NO: 2654719 - RNA, 19 nt, Artificial Sequence
  Description of Artificial Sequence: Synthetic oligonucleotide
caucgugcuuuugcaagga

SEQ ID NO: 2654720 - RNA, 19 nt, Artificial Sequence
  Description of Artificial Sequence: Synthetic oligonucleotide
cacuggcacaagaugugua

SEQ ID NO: 2654721 - RNA, 19 nt, Artificial Sequence
  Description of Artificial Sequence: Synthetic oligonucleotide
ccauaguauauuacaggua

SEQ ID NO: 2654722 - RNA, 19 nt, Artificial Sequence
  Description of Artificial Sequence: Synthetic oligonucleotide
cugaaugcauguccauagu

SEQ ID NO: 2654723 - RNA, 19 nt, Artificial Sequence
  Description of Artificial Sequence: Synthetic oligonucleotide
ggcauucagcaguugcaaa

SEQ ID NO: 2654724 - RNA, 19 nt, Artificial Sequence
  Description of Artificial Sequence: Synthetic oligonucleotide
caacaauauuuguaccguu

SEQ ID NO: 2654725 - RNA, 19 nt, Artificial Sequence
  Description of Artificial Sequence: Synthetic oligonucleotide
gcagagaaagggagauaug

SEQ ID NO: 2654726 - RNA, 19 nt, Artificial Sequence
  Description of Artificial Sequence: Synthetic oligonucleotide
agcguagucuguagacaaa

SEQ ID NO: 2654727 - RNA, 19 nt, Artificial Sequence
  Description of Artificial Sequence: Synthetic oligonucleotide
gcguagucuguagacaaaa

SEQ ID NO: 2654728 - RNA, 19 nt, Artificial Sequence
  Description of Artificial Sequence: Synthetic oligonucleotide
agcugaacugaaagccauu

SEQ ID NO: 2654729 - RNA, 19 nt, Artificial Sequence
  Description of Artificial Sequence: Synthetic oligonucleotide
cgugcuuuugcaaggauau

SEQ ID NO: 2654730 - RNA, 19 nt, Artificial Sequence
  Description of Artificial Sequence: Synthetic oligonucleotide
guguauucaucgugcuuuu

SEQ ID NO: 2654731 - RNA, 19 nt, Artificial Sequence
  Description of Artificial Sequence: Synthetic oligonucleotide
aacugugcuuggggagauu

SEQ ID NO: 2654732 - RNA, 19 nt, Artificial Sequence
  Description of Artificial Sequence: Synthetic oligonucleotide
gggcauucagcaguugcaa

SEQ ID NO: 2654733 - RNA, 19 nt, Artificial Sequence
  Description of Artificial Sequence: Synthetic oligonucleotide
cugaacugaaagccauuuu

SEQ ID NO: 2654734 - RNA, 19 nt, Artificial Sequence
  Description of Artificial Sequence: Synthetic oligonucleotide
cacucacuaggauuauauu

SEQ ID NO: 2654735 - RNA, 19 nt, Artificial Sequence
  Description of Artificial Sequence: Synthetic oligonucleotide
cagagucauucaacuccaa

SEQ ID NO: 2654736 - RNA, 19 nt, Artificial Sequence
  Description of Artificial Sequence: Synthetic oligonucleotide
cauaggaaacacggagaau

SEQ ID NO: 2654737 - RNA, 19 nt, Artificial Sequence
  Description of Artificial Sequence: Synthetic oligonucleotide
gaaagccauuuuccucauu

SEQ ID NO: 2654738 - RNA, 19 nt, Artificial Sequence
  Description of Artificial Sequence: Synthetic oligonucleotide
gcuuggggagauucagacu

SEQ ID NO: 2654739 - RNA, 19 nt, Artificial Sequence
  Description of Artificial Sequence: Synthetic oligonucleotide
gcuuuugcaaggauauauu

SEQ ID NO: 2654740 - RNA, 19 nt, Artificial Sequence
  Description of Artificial Sequence: Synthetic oligonucleotide
gcugaacugaaagccauuu

SEQ ID NO: 2654741 - RNA, 19 nt, Artificial Sequence
  Description of Artificial Sequence: Synthetic oligonucleotide
gaacacucacuaggauuau

SEQ ID NO: 2654742 - RNA, 19 nt, Artificial Sequence
  Description of Artificial Sequence: Synthetic oligonucleotide
caacuccaaucaucacaua

SEQ ID NO: 2654743 - RNA, 19 nt, Artificial Sequence
  Description of Artificial Sequence: Synthetic oligonucleotide
gugcuuuugcaaggauaua

SEQ ID NO: 2654744 - RNA, 19 nt, Artificial Sequence
  Description of Artificial Sequence: Synthetic oligonucleotide
cugguucaacugagcugaa

SEQ ID NO: 2654745 - RNA, 19 nt, Artificial Sequence
  Description of Artificial Sequence: Synthetic oligonucleotide
gcacaugcuaaagcguagu

SEQ ID NO: 2654746 - RNA, 19 nt, Artificial Sequence
  Description of Artificial Sequence: Synthetic oligonucleotide
gccaaacaucauuccuaua

SEQ ID NO: 2654747 - RNA, 19 nt, Artificial Sequence
  Description of Artificial Sequence: Synthetic oligonucleotide
gacacugaucagagucauu

SEQ ID NO: 2654748 - RNA, 19 nt, Artificial Sequence
  Description of Artificial Sequence: Synthetic oligonucleotide
ccccuauaauacugaccua

SEQ ID NO: 2654749 - RNA, 19 nt, Artificial Sequence
  Description of Artificial Sequence: Synthetic oligonucleotide
ggggagauucagacugguu

SEQ ID NO: 2654750 - RNA, 19 nt, Artificial Sequence
  Description of Artificial Sequence: Synthetic oligonucleotide
uuagggauaaauuaucugg

SEQ ID NO: 2654751 - RNA, 19 nt, Artificial Sequence
  Description of Artificial Sequence: Synthetic oligonucleotide
aauguauggacauccuucc

SEQ ID NO: 2654752 - RNA, 19 nt, Artificial Sequence
  Description of Artificial Sequence: Synthetic oligonucleotide
ucaaugagagauaagaccc

SEQ ID NO: 2654753 - RNA, 19 nt, Artificial Sequence
  Description of Artificial Sequence: Synthetic oligonucleotide
uucaaagugucaaugagag

SEQ ID NO: 2654754 - RNA, 19 nt, Artificial Sequence
  Description of Artificial Sequence: Synthetic oligonucleotide
uuaguugugacucuucuag

SEQ ID NO: 2654755 - RNA, 19 nt, Artificial Sequence
  Description of Artificial Sequence: Synthetic oligonucleotide
agacguuugaucuucaggg

SEQ ID NO: 2654756 - RNA, 19 nt, Artificial Sequence
  Description of Artificial Sequence: Synthetic oligonucleotide
uugucuacaggcaacaugc

SEQ ID NO: 2654757 - RNA, 19 nt, Artificial Sequence
  Description of Artificial Sequence: Synthetic oligonucleotide
agugacagaauccuugagc

SEQ ID NO: 2654758 - RNA, 19 nt, Artificial Sequence
  Description of Artificial Sequence: Synthetic oligonucleotide
auuaucuggagacagagca

SEQ ID NO: 2654759 - RNA, 19 nt, Artificial Sequence
  Description of Artificial Sequence: Synthetic oligonucleotide
aacagaauggaggaaggcc

SEQ ID NO: 2654760 - RNA, 19 nt, Artificial Sequence
  Description of Artificial Sequence: Synthetic oligonucleotide
auuucuauggcacuguuca

SEQ ID NO: 2654761 - RNA, 19 nt, Artificial Sequence
  Description of Artificial Sequence: Synthetic oligonucleotide
uguauggacauccuucccg

SEQ ID NO: 2654762 - RNA, 19 nt, Artificial Sequence
  Description of Artificial Sequence: Synthetic oligonucleotide
ugagagauaagaccccucg

SEQ ID NO: 2654763 - RNA, 19 nt, Artificial Sequence
  Description of Artificial Sequence: Synthetic oligonucleotide
uuuacauuaguugugacuc

SEQ ID NO: 2654764 - RNA, 19 nt, Artificial Sequence
  Description of Artificial Sequence: Synthetic oligonucleotide
aacauguucgguuagggau

SEQ ID NO: 2654765 - RNA, 19 nt, Artificial Sequence
  Description of Artificial Sequence: Synthetic oligonucleotide
ugauaucgcaacaugcagg

SEQ ID NO: 2654766 - RNA, 19 nt, Artificial Sequence
  Description of Artificial Sequence: Synthetic oligonucleotide
ugcuugucuaacauguucg

SEQ ID NO: 2654767 - RNA, 19 nt, Artificial Sequence
  Description of Artificial Sequence: Synthetic oligonucleotide
agucauggaauccacuggc

SEQ ID NO: 2654768 - RNA, 19 nt, Artificial Sequence
  Description of Artificial Sequence: Synthetic oligonucleotide
ggucauaagauuucuaugg

SEQ ID NO: 2654769 - RNA, 19 nt, Artificial Sequence
  Description of Artificial Sequence: Synthetic oligonucleotide
aaauuaucuggagacagag

SEQ ID NO: 2654770 - RNA, 19 nt, Artificial Sequence
  Description of Artificial Sequence: Synthetic oligonucleotide
uaucgcaacaugcaggcag

SEQ ID NO: 2654771 - RNA, 19 nt, Artificial Sequence
  Description of Artificial Sequence: Synthetic oligonucleotide
gacagguuugucuacaggc

SEQ ID NO: 2654772 - RNA, 19 nt, Artificial Sequence
  Description of Artificial Sequence: Synthetic oligonucleotide
gauaucgcaacaugcaggc

SEQ ID NO: 2654773 - RNA, 19 nt, Artificial Sequence
  Description of Artificial Sequence: Synthetic oligonucleotide
ucugauaucgcaacaugca

SEQ ID NO: 2654774 - RNA, 19 nt, Artificial Sequence
  Description of Artificial Sequence: Synthetic oligonucleotide
uucccgacacccaugaagg

SEQ ID NO: 2654775 - RNA, 19 nt, Artificial Sequence
  Description of Artificial Sequence: Synthetic oligonucleotide
agggguaagugacagaauc

SEQ ID NO: 2654776 - RNA, 19 nt, Artificial Sequence
  Description of Artificial Sequence: Synthetic oligonucleotide
uuucaaagugucaaugaga

SEQ ID NO: 2654777 - RNA, 19 nt, Artificial Sequence
  Description of Artificial Sequence: Synthetic oligonucleotide
ucaugucacaugauggcgg

SEQ ID NO: 2654778 - RNA, 19 nt, Artificial Sequence
  Description of Artificial Sequence: Synthetic oligonucleotide
uuuuacauuaguugugacu

SEQ ID NO: 2654779 - RNA, 19 nt, Artificial Sequence
  Description of Artificial Sequence: Synthetic oligonucleotide
uucauguucacagaaggcc

SEQ ID NO: 2654780 - RNA, 19 nt, Artificial Sequence
  Description of Artificial Sequence: Synthetic oligonucleotide
ucuauggcacuguucaggg

SEQ ID NO: 2654781 - RNA, 19 nt, Artificial Sequence
  Description of Artificial Sequence: Synthetic oligonucleotide
uaguguagacguuugaucu

SEQ ID NO: 2654782 - RNA, 19 nt, Artificial Sequence
  Description of Artificial Sequence: Synthetic oligonucleotide
uagacguuugaucuucagg

SEQ ID NO: 2654783 - RNA, 19 nt, Artificial Sequence
  Description of Artificial Sequence: Synthetic oligonucleotide
uucugauaucgcaacaugc

SEQ ID NO: 2654784 - RNA, 19 nt, Artificial Sequence
  Description of Artificial Sequence: Synthetic oligonucleotide
uucaugaaggcaaauguau

SEQ ID NO: 2654785 - RNA, 19 nt, Artificial Sequence
  Description of Artificial Sequence: Synthetic oligonucleotide
aagacuuccucuucguucu

SEQ ID NO: 2654786 - RNA, 19 nt, Artificial Sequence
  Description of Artificial Sequence: Synthetic oligonucleotide
gugacagaauccuugagcc

SEQ ID NO: 2654787 - RNA, 19 nt, Artificial Sequence
  Description of Artificial Sequence: Synthetic oligonucleotide
uuugucuacaggcaacaug

SEQ ID NO: 2654788 - RNA, 19 nt, Artificial Sequence
  Description of Artificial Sequence: Synthetic oligonucleotide
ucauggaauccacuggcgg

SEQ ID NO: 2654789 - RNA, 19 nt, Artificial Sequence
  Description of Artificial Sequence: Synthetic oligonucleotide
uuucaugucacaugauggc

SEQ ID NO: 2654790 - RNA, 19 nt, Artificial Sequence
  Description of Artificial Sequence: Synthetic oligonucleotide
ggauaaauuaucuggagac

SEQ ID NO: 2654791 - RNA, 19 nt, Artificial Sequence
  Description of Artificial Sequence: Synthetic oligonucleotide
aguugugacucuucuaguc

SEQ ID NO: 2654792 - RNA, 19 nt, Artificial Sequence
  Description of Artificial Sequence: Synthetic oligonucleotide
guuucaaagugucaaugag

SEQ ID NO: 2654793 - RNA, 19 nt, Artificial Sequence
  Description of Artificial Sequence: Synthetic oligonucleotide
uguuucaaagugucaauga

SEQ ID NO: 2654794 - RNA, 19 nt, Artificial Sequence
  Description of Artificial Sequence: Synthetic oligonucleotide
ucguucuuuucacugauga

SEQ ID NO: 2654795 - RNA, 19 nt, Artificial Sequence
  Description of Artificial Sequence: Synthetic oligonucleotide
ucauaagauuucuauggca

SEQ ID NO: 2654796 - RNA, 19 nt, Artificial Sequence
  Description of Artificial Sequence: Synthetic oligonucleotide
uagggauaaauuaucugga

SEQ ID NO: 2654797 - RNA, 19 nt, Artificial Sequence
  Description of Artificial Sequence: Synthetic oligonucleotide
aauuaucuggagacagagc

SEQ ID NO: 2654798 - RNA, 19 nt, Artificial Sequence
  Description of Artificial Sequence: Synthetic oligonucleotide
uagucauggaauccacugg

SEQ ID NO: 2654799 - RNA, 19 nt, Artificial Sequence
  Description of Artificial Sequence: Synthetic oligonucleotide
cuuuucaugucacaugaug

SEQ ID NO: 2654800 - RNA, 19 nt, Artificial Sequence
  Description of Artificial Sequence: Synthetic oligonucleotide
aguggcauccgccacguuc

SEQ ID NO: 2654801 - RNA, 19 nt, Artificial Sequence
  Description of Artificial Sequence: Synthetic oligonucleotide
uucgguuagggauaaauua

SEQ ID NO: 2654802 - RNA, 19 nt, Artificial Sequence
  Description of Artificial Sequence: Synthetic oligonucleotide
cuagucauggaauccacug

SEQ ID NO: 2654803 - RNA, 19 nt, Artificial Sequence
  Description of Artificial Sequence: Synthetic oligonucleotide
aaggcaaauguauggacau

SEQ ID NO: 2654804 - RNA, 19 nt, Artificial Sequence
  Description of Artificial Sequence: Synthetic oligonucleotide
uucaugucacaugauggcg

SEQ ID NO: 2654805 - RNA, 19 nt, Artificial Sequence
  Description of Artificial Sequence: Synthetic oligonucleotide
augcuugucuaacauguuc

SEQ ID NO: 2654806 - RNA, 19 nt, Artificial Sequence
  Description of Artificial Sequence: Synthetic oligonucleotide
uuaguguagacguuugauc

SEQ ID NO: 2654807 - RNA, 19 nt, Artificial Sequence
  Description of Artificial Sequence: Synthetic oligonucleotide
acagaaaccgcacucgaca

SEQ ID NO: 2654808 - RNA, 19 nt, Artificial Sequence
  Description of Artificial Sequence: Synthetic oligonucleotide
cuugguguuggaaaucuac

SEQ ID NO: 2654809 - RNA, 19 nt, Artificial Sequence
  Description of Artificial Sequence: Synthetic oligonucleotide
gaacuuucugugaaggugc

SEQ ID NO: 2654810 - RNA, 19 nt, Artificial Sequence
  Description of Artificial Sequence: Synthetic oligonucleotide
uuuucacugaugacuguca

SEQ ID NO: 2654811 - RNA, 19 nt, Artificial Sequence
  Description of Artificial Sequence: Synthetic oligonucleotide
cauggaauccacuggcggg

SEQ ID NO: 2654812 - RNA, 19 nt, Artificial Sequence
  Description of Artificial Sequence: Synthetic oligonucleotide
ucguuuuacauuaguugug

SEQ ID NO: 2654813 - RNA, 19 nt, Artificial Sequence
  Description of Artificial Sequence: Synthetic oligonucleotide
guuagggauaaauuaucug

SEQ ID NO: 2654814 - RNA, 19 nt, Artificial Sequence
  Description of Artificial Sequence: Synthetic oligonucleotide
caugauggcggcaagacga

SEQ ID NO: 2654815 - RNA, 19 nt, Artificial Sequence
  Description of Artificial Sequence: Synthetic oligonucleotide
gacguuugaucuucagggg

SEQ ID NO: 2654816 - RNA, 19 nt, Artificial Sequence
  Description of Artificial Sequence: Synthetic oligonucleotide
agaaggccaauccuccugg

SEQ ID NO: 2654817 - RNA, 19 nt, Artificial Sequence
  Description of Artificial Sequence: Synthetic oligonucleotide
ucgguuagggauaaauuau

SEQ ID NO: 2654818 - RNA, 19 nt, Artificial Sequence
  Description of Artificial Sequence: Synthetic oligonucleotide
agcaacagaauggaggaag

SEQ ID NO: 2654819 - RNA, 19 nt, Artificial Sequence
  Description of Artificial Sequence: Synthetic oligonucleotide
uaagugacagaauccuuga

SEQ ID NO: 2654820 - RNA, 19 nt, Artificial Sequence
  Description of Artificial Sequence: Synthetic oligonucleotide
guaagugacagaauccuug

SEQ ID NO: 2654821 - RNA, 19 nt, Artificial Sequence
  Description of Artificial Sequence: Synthetic oligonucleotide
uaggguguuucugugacag

SEQ ID NO: 2654822 - RNA, 19 nt, Artificial Sequence
  Description of Artificial Sequence: Synthetic oligonucleotide
ucuaacauguucgguuagg

SEQ ID NO: 2654823 - RNA, 19 nt, Artificial Sequence
  Description of Artificial Sequence: Synthetic oligonucleotide
agggauaaauuaucuggag

SEQ ID NO: 2654824 - RNA, 19 nt, Artificial Sequence
  Description of Artificial Sequence: Synthetic oligonucleotide
gucauaagauuucuauggc

SEQ ID NO: 2654825 - RNA, 19 nt, Artificial Sequence
  Description of Artificial Sequence: Synthetic oligonucleotide
uucuguuucaaagugucaa

SEQ ID NO: 2654826 - RNA, 19 nt, Artificial Sequence
  Description of Artificial Sequence: Synthetic oligonucleotide
cuucccgacacccaugaag

SEQ ID NO: 2654827 - RNA, 19 nt, Artificial Sequence
  Description of Artificial Sequence: Synthetic oligonucleotide
gugucaaugagagauaaga

SEQ ID NO: 2654828 - RNA, 19 nt, Artificial Sequence
  Description of Artificial Sequence: Synthetic oligonucleotide
uugguguuggaaaucuacu

SEQ ID NO: 2654829 - RNA, 19 nt, Artificial Sequence
  Description of Artificial Sequence: Synthetic oligonucleotide
ugaaggcaaauguauggac

SEQ ID NO: 2654830 - RNA, 19 nt, Artificial Sequence
  Description of Artificial Sequence: Synthetic oligonucleotide
aaugagagauaagaccccu

SEQ ID NO: 2654831 - RNA, 19 nt, Artificial Sequence
  Description of Artificial Sequence: Synthetic oligonucleotide
gagacagagcaucagcaac

SEQ ID NO: 2654832 - RNA, 19 nt, Artificial Sequence
  Description of Artificial Sequence: Synthetic oligonucleotide
ucagggguaagugacagaa

SEQ ID NO: 2654833 - RNA, 19 nt, Artificial Sequence
  Description of Artificial Sequence: Synthetic oligonucleotide
guguuucugugacagggcg

SEQ ID NO: 2654834 - RNA, 19 nt, Artificial Sequence
  Description of Artificial Sequence: Synthetic oligonucleotide
guucacagaaggccaaucc

SEQ ID NO: 2654835 - RNA, 19 nt, Artificial Sequence
  Description of Artificial Sequence: Synthetic oligonucleotide
uggaggucgaacuuucugu

SEQ ID NO: 2654836 - RNA, 19 nt, Artificial Sequence
  Description of Artificial Sequence: Synthetic oligonucleotide
auaagauuucuauggcacu

SEQ ID NO: 2654837 - RNA, 19 nt, Artificial Sequence
  Description of Artificial Sequence: Synthetic oligonucleotide
aacaugcccagguacugca

SEQ ID NO: 2654838 - RNA, 19 nt, Artificial Sequence
  Description of Artificial Sequence: Synthetic oligonucleotide
caagacuuccucuucguuc

SEQ ID NO: 2654839 - RNA, 19 nt, Artificial Sequence
  Description of Artificial Sequence: Synthetic oligonucleotide
uuuaguguagacguuugau

SEQ ID NO: 2654840 - RNA, 19 nt, Artificial Sequence
  Description of Artificial Sequence: Synthetic oligonucleotide
uucaggguguccaugccga

SEQ ID NO: 2654841 - RNA, 19 nt, Artificial Sequence
  Description of Artificial Sequence: Synthetic oligonucleotide
aagugacagaauccuugag

SEQ ID NO: 2654842 - RNA, 19 nt, Artificial Sequence
  Description of Artificial Sequence: Synthetic oligonucleotide
cugauaucgcaacaugcag

SEQ ID NO: 2654843 - RNA, 19 nt, Artificial Sequence
  Description of Artificial Sequence: Synthetic oligonucleotide
cuaacauguucgguuaggg

SEQ ID NO: 2654844 - RNA, 19 nt, Artificial Sequence
  Description of Artificial Sequence: Synthetic oligonucleotide
auguauggacauccuuccc

SEQ ID NO: 2654845 - RNA, 19 nt, Artificial Sequence
  Description of Artificial Sequence: Synthetic oligonucleotide
aggcaacaugcccagguac

SEQ ID NO: 2654846 - RNA, 19 nt, Artificial Sequence
  Description of Artificial Sequence: Synthetic oligonucleotide
ucuucguucuuuucacuga

SEQ ID NO: 2654847 - RNA, 19 nt, Artificial Sequence
  Description of Artificial Sequence: Synthetic oligonucleotide
acaugcuugucuaacaugu

SEQ ID NO: 2654848 - RNA, 19 nt, Artificial Sequence
  Description of Artificial Sequence: Synthetic oligonucleotide
aagacgagaucacaugcuu

SEQ ID NO: 2654849 - RNA, 19 nt, Artificial Sequence
  Description of Artificial Sequence: Synthetic oligonucleotide
aacuuucugugaaggugcc

SEQ ID NO: 2654850 - RNA, 19 nt, Artificial Sequence
  Description of Artificial Sequence: Synthetic oligonucleotide
ugucacaguggcauccgcc

SEQ ID NO: 2654851 - RNA, 19 nt, Artificial Sequence
  Description of Artificial Sequence: Synthetic oligonucleotide
agagauaagaccccucguu

SEQ ID NO: 2654852 - RNA, 19 nt, Artificial Sequence
  Description of Artificial Sequence: Synthetic oligonucleotide
caaugagagauaagacccc

SEQ ID NO: 2654853 - RNA, 19 nt, Artificial Sequence
  Description of Artificial Sequence: Synthetic oligonucleotide
augacugucacaguggcau

SEQ ID NO: 2654854 - RNA, 19 nt, Artificial Sequence
  Description of Artificial Sequence: Synthetic oligonucleotide
cucuucguucuuuucacug

SEQ ID NO: 2654855 - RNA, 19 nt, Artificial Sequence
  Description of Artificial Sequence: Synthetic oligonucleotide
gccacguucauguucacag

SEQ ID NO: 2654856 - RNA, 19 nt, Artificial Sequence
  Description of Artificial Sequence: Synthetic oligonucleotide
gaaggcaaauguauggaca

SEQ ID NO: 2654857 - RNA, 19 nt, Artificial Sequence
  Description of Artificial Sequence: Synthetic oligonucleotide
uaacauguucgguuaggga

SEQ ID NO: 2654858 - RNA, 19 nt, Artificial Sequence
  Description of Artificial Sequence: Synthetic oligonucleotide
gucgaacuuucugugaagg

SEQ ID NO: 2654859 - RNA, 19 nt, Artificial Sequence
  Description of Artificial Sequence: Synthetic oligonucleotide
caaagugucaaugagagau

SEQ ID NO: 2654860 - RNA, 19 nt, Artificial Sequence
  Description of Artificial Sequence: Synthetic oligonucleotide
uuucuguuucaaaguguca

SEQ ID NO: 2654861 - RNA, 19 nt, Artificial Sequence
  Description of Artificial Sequence: Synthetic oligonucleotide
guucaggguguccaugccg

SEQ ID NO: 2654862 - RNA, 19 nt, Artificial Sequence
  Description of Artificial Sequence: Synthetic oligonucleotide
ucuagucauggaauccacu

SEQ ID NO: 2654863 - RNA, 19 nt, Artificial Sequence
  Description of Artificial Sequence: Synthetic oligonucleotide
agagcugcuaggguguuuc

SEQ ID NO: 2654864 - RNA, 19 nt, Artificial Sequence
  Description of Artificial Sequence: Synthetic oligonucleotide
guuucuguuucaaaguguc

SEQ ID NO: 2654865 - RNA, 19 nt, Artificial Sequence
  Description of Artificial Sequence: Synthetic oligonucleotide
acaggcaacaugcccaggu

SEQ ID NO: 2654866 - RNA, 19 nt, Artificial Sequence
  Description of Artificial Sequence: Synthetic oligonucleotide
uguucgguuagggauaaau

SEQ ID NO: 2654867 - RNA, 19 nt, Artificial Sequence
  Description of Artificial Sequence: Synthetic oligonucleotide
cuucugauaucgcaacaug

SEQ ID NO: 2654868 - RNA, 19 nt, Artificial Sequence
  Description of Artificial Sequence: Synthetic oligonucleotide
aggccaauccuccuggcug

SEQ ID NO: 2654869 - RNA, 19 nt, Artificial Sequence
  Description of Artificial Sequence: Synthetic oligonucleotide
acguuugaucuucaggggu

SEQ ID NO: 2654870 - RNA, 19 nt, Artificial Sequence
  Description of Artificial Sequence: Synthetic oligonucleotide
aggacagaaaccgcacucg

SEQ ID NO: 2654871 - RNA, 19 nt, Artificial Sequence
  Description of Artificial Sequence: Synthetic oligonucleotide
ugugaaggugccuggcuac

SEQ ID NO: 2654872 - RNA, 19 nt, Artificial Sequence
  Description of Artificial Sequence: Synthetic oligonucleotide
ucgacacuccaccaagacu

SEQ ID NO: 2654873 - RNA, 19 nt, Artificial Sequence
  Description of Artificial Sequence: Synthetic oligonucleotide
uccgucuugguguuggaaa

SEQ ID NO: 2654874 - RNA, 19 nt, Artificial Sequence
  Description of Artificial Sequence: Synthetic oligonucleotide
ggcaaauguauggacaucc

SEQ ID NO: 2654875 - RNA, 19 nt, Artificial Sequence
  Description of Artificial Sequence: Synthetic oligonucleotide
aagauuucuauggcacugu

SEQ ID NO: 2654876 - RNA, 19 nt, Artificial Sequence
  Description of Artificial Sequence: Synthetic oligonucleotide
auggaauccacuggcgggg

SEQ ID NO: 2654877 - RNA, 19 nt, Artificial Sequence
  Description of Artificial Sequence: Synthetic oligonucleotide
guugugacucuucuaguca

SEQ ID NO: 2654878 - RNA, 19 nt, Artificial Sequence
  Description of Artificial Sequence: Synthetic oligonucleotide
gucuacaggcaacaugccc

SEQ ID NO: 2654879 - RNA, 19 nt, Artificial Sequence
  Description of Artificial Sequence: Synthetic oligonucleotide
ucugugaaggugccuggcu

SEQ ID NO: 2654880 - RNA, 19 nt, Artificial Sequence
  Description of Artificial Sequence: Synthetic oligonucleotide
gugacucuucuagucaugg

SEQ ID NO: 2654881 - RNA, 19 nt, Artificial Sequence
  Description of Artificial Sequence: Synthetic oligonucleotide
gaggaaggccagcugucgg

SEQ ID NO: 2654882 - RNA, 19 nt, Artificial Sequence
  Description of Artificial Sequence: Synthetic oligonucleotide
uucuagucauggaauccac

SEQ ID NO: 2654883 - RNA, 19 nt, Artificial Sequence
  Description of Artificial Sequence: Synthetic oligonucleotide
ugacagaauccuugagccc

SEQ ID NO: 2654884 - RNA, 19 nt, Artificial Sequence
  Description of Artificial Sequence: Synthetic oligonucleotide
cucguuuuacauuaguugu

SEQ ID NO: 2654885 - RNA, 19 nt, Artificial Sequence
  Description of Artificial Sequence: Synthetic oligonucleotide
uguuucugugacagggcgu

SEQ ID NO: 2654886 - RNA, 19 nt, Artificial Sequence
  Description of Artificial Sequence: Synthetic oligonucleotide
uuacauuaguugugacucu

SEQ ID NO: 2654887 - RNA, 19 nt, Artificial Sequence
  Description of Artificial Sequence: Synthetic oligonucleotide
auaagaccccucguuuuac

SEQ ID NO: 2654888 - RNA, 19 nt, Artificial Sequence
  Description of Artificial Sequence: Synthetic oligonucleotide
ccucguuuuacauuaguug

SEQ ID NO: 2654889 - RNA, 19 nt, Artificial Sequence
  Description of Artificial Sequence: Synthetic oligonucleotide
gaaaccgcacucgacacuc

SEQ ID NO: 2654890 - RNA, 19 nt, Artificial Sequence
  Description of Artificial Sequence: Synthetic oligonucleotide
caacaugcaggcagccugg

SEQ ID NO: 2654891 - RNA, 19 nt, Artificial Sequence
  Description of Artificial Sequence: Synthetic oligonucleotide
uuaucuggagacagagcau

SEQ ID NO: 2654892 - RNA, 19 nt, Artificial Sequence
  Description of Artificial Sequence: Synthetic oligonucleotide
uugaucuucagggguaagu

SEQ ID NO: 2654893 - RNA, 19 nt, Artificial Sequence
  Description of Artificial Sequence: Synthetic oligonucleotide
aaggccaauccuccuggcu

SEQ ID NO: 2654894 - RNA, 19 nt, Artificial Sequence
  Description of Artificial Sequence: Synthetic oligonucleotide
gaucacaugcuugucuaac

SEQ ID NO: 2654895 - RNA, 19 nt, Artificial Sequence
  Description of Artificial Sequence: Synthetic oligonucleotide
uguccaugccgacagguuu

SEQ ID NO: 2654896 - RNA, 19 nt, Artificial Sequence
  Description of Artificial Sequence: Synthetic oligonucleotide
augaaggacagaaaccgca

SEQ ID NO: 2654897 - RNA, 19 nt, Artificial Sequence
  Description of Artificial Sequence: Synthetic oligonucleotide
cucuucuagucauggaauc

SEQ ID NO: 2654898 - RNA, 19 nt, Artificial Sequence
  Description of Artificial Sequence: Synthetic oligonucleotide
gcaagacgagaucacaugc

SEQ ID NO: 2654899 - RNA, 19 nt, Artificial Sequence
  Description of Artificial Sequence: Synthetic oligonucleotide
ccaagcacuucugauaucg

SEQ ID NO: 2654900 - RNA, 19 nt, Artificial Sequence
  Description of Artificial Sequence: Synthetic oligonucleotide
ugguguuggaaaucuacuu

SEQ ID NO: 2654901 - RNA, 19 nt, Artificial Sequence
  Description of Artificial Sequence: Synthetic oligonucleotide
cuuuucacugaugacuguc

SEQ ID NO: 2654902 - RNA, 19 nt, Artificial Sequence
  Description of Artificial Sequence: Synthetic oligonucleotide
aucgcaacaugcaggcagc

SEQ ID NO: 2654903 - RNA, 19 nt, Artificial Sequence
  Description of Artificial Sequence: Synthetic oligonucleotide
aagaccccucguuuuacau

SEQ ID NO: 2654904 - RNA, 19 nt, Artificial Sequence
  Description of Artificial Sequence: Synthetic oligonucleotide
uguucaggguguccaugcc

SEQ ID NO: 2654905 - RNA, 19 nt, Artificial Sequence
  Description of Artificial Sequence: Synthetic oligonucleotide
gggcguuucuguuucaaag

SEQ ID NO: 2654906 - RNA, 19 nt, Artificial Sequence
  Description of Artificial Sequence: Synthetic oligonucleotide
augaaggcaaauguaugga

SEQ ID NO: 2654907 - RNA, 19 nt, Artificial Sequence
  Description of Artificial Sequence: Synthetic oligonucleotide
uugugacucuucuagucau

SEQ ID NO: 2654908 - RNA, 19 nt, Artificial Sequence
  Description of Artificial Sequence: Synthetic oligonucleotide
gagaucacaugcuugucua

SEQ ID NO: 2654909 - RNA, 19 nt, Artificial Sequence
  Description of Artificial Sequence: Synthetic oligonucleotide
ucaaagugucaaugagaga

SEQ ID NO: 2654910 - RNA, 19 nt, Artificial Sequence
  Description of Artificial Sequence: Synthetic oligonucleotide
uccuucccgacacccauga

SEQ ID NO: 2654911 - RNA, 19 nt, Artificial Sequence
  Description of Artificial Sequence: Synthetic oligonucleotide
uucuuuaguguagacguuu

SEQ ID NO: 2654912 - RNA, 19 nt, Artificial Sequence
  Description of Artificial Sequence: Synthetic oligonucleotide
agccuggacggcuucauga

SEQ ID NO: 2654913 - RNA, 19 nt, Artificial Sequence
  Description of Artificial Sequence: Synthetic oligonucleotide
agauaagaccccucguuuu

SEQ ID NO: 2654914 - RNA, 19 nt, Artificial Sequence
  Description of Artificial Sequence: Synthetic oligonucleotide
ucuggagacagagcaucag

SEQ ID NO: 2654915 - RNA, 19 nt, Artificial Sequence
  Description of Artificial Sequence: Synthetic oligonucleotide
ucaugcuucuuuucauguc

SEQ ID NO: 2654916 - RNA, 19 nt, Artificial Sequence
  Description of Artificial Sequence: Synthetic oligonucleotide
agaauggaggaaggccagc

SEQ ID NO: 2654917 - RNA, 19 nt, Artificial Sequence
  Description of Artificial Sequence: Synthetic oligonucleotide
gacgagaucacaugcuugu

SEQ ID NO: 2654918 - RNA, 19 nt, Artificial Sequence
  Description of Artificial Sequence: Synthetic oligonucleotide
uucguucuuuucacugaug

SEQ ID NO: 2654919 - RNA, 19 nt, Artificial Sequence
  Description of Artificial Sequence: Synthetic oligonucleotide
gacagggcguuucuguuuc

SEQ ID NO: 2654920 - RNA, 19 nt, Artificial Sequence
  Description of Artificial Sequence: Synthetic oligonucleotide
ucgaacuuucugugaaggu

SEQ ID NO: 2654921 - RNA, 19 nt, Artificial Sequence
  Description of Artificial Sequence: Synthetic oligonucleotide
guucauguucacagaaggc

SEQ ID NO: 2654922 - RNA, 19 nt, Artificial Sequence
  Description of Artificial Sequence: Synthetic oligonucleotide
gcaacaugcaggcagccug

SEQ ID NO: 2654923 - RNA, 19 nt, Artificial Sequence
  Description of Artificial Sequence: Synthetic oligonucleotide
ugucuacaggcaacaugcc

SEQ ID NO: 2654924 - RNA, 19 nt, Artificial Sequence
  Description of Artificial Sequence: Synthetic oligonucleotide
gacagagcaucagcaacag

SEQ ID NO: 2654925 - RNA, 19 nt, Artificial Sequence
  Description of Artificial Sequence: Synthetic oligonucleotide
ucugugacagggcguuucu

SEQ ID NO: 2654926 - RNA, 19 nt, Artificial Sequence
  Description of Artificial Sequence: Synthetic oligonucleotide
auuaguugugacucuucua

SEQ ID NO: 2654927 - RNA, 19 nt, Artificial Sequence
  Description of Artificial Sequence: Synthetic oligonucleotide
guuuuacauuaguugugac

SEQ ID NO: 2654928 - RNA, 19 nt, Artificial Sequence
  Description of Artificial Sequence: Synthetic oligonucleotide
uguagacguuugaucuuca

SEQ ID NO: 2654929 - RNA, 19 nt, Artificial Sequence
  Description of Artificial Sequence: Synthetic oligonucleotide
auccgccacguucauguuc

SEQ ID NO: 2654930 - RNA, 19 nt, Artificial Sequence
  Description of Artificial Sequence: Synthetic oligonucleotide
gauaagaccccucguuuua

SEQ ID NO: 2654931 - RNA, 19 nt, Artificial Sequence
  Description of Artificial Sequence: Synthetic oligonucleotide
cagaaaccgcacucgacac

SEQ ID NO: 2654932 - RNA, 19 nt, Artificial Sequence
  Description of Artificial Sequence: Synthetic oligonucleotide
gggauaaauuaucuggaga

SEQ ID NO: 2654933 - RNA, 19 nt, Artificial Sequence
  Description of Artificial Sequence: Synthetic oligonucleotide
cuucagggguaagugacag

SEQ ID NO: 2654934 - RNA, 19 nt, Artificial Sequence
  Description of Artificial Sequence: Synthetic oligonucleotide
ggcuucuuuaguguagacg

SEQ ID NO: 2654935 - RNA, 19 nt, Artificial Sequence
  Description of Artificial Sequence: Synthetic oligonucleotide
gacggcuucaugaaggcaa

SEQ ID NO: 2654936 - RNA, 19 nt, Artificial Sequence
  Description of Artificial Sequence: Synthetic oligonucleotide
guauggacauccuucccga

SEQ ID NO: 2654937 - RNA, 19 nt, Artificial Sequence
  Description of Artificial Sequence: Synthetic oligonucleotide
cacguggaacuucugcacc

SEQ ID NO: 2654938 - RNA, 19 nt, Artificial Sequence
  Description of Artificial Sequence: Synthetic oligonucleotide
ugucacaugauggcggcaa

SEQ ID NO: 2654939 - RNA, 19 nt, Artificial Sequence
  Description of Artificial Sequence: Synthetic oligonucleotide
cacaguggcauccgccacg

SEQ ID NO: 2654940 - RNA, 19 nt, Artificial Sequence
  Description of Artificial Sequence: Synthetic oligonucleotide
cacucgacacuccaccaag

SEQ ID NO: 2654941 - RNA, 19 nt, Artificial Sequence
  Description of Artificial Sequence: Synthetic oligonucleotide
guggaggucgaacuuucug

SEQ ID NO: 2654942 - RNA, 19 nt, Artificial Sequence
  Description of Artificial Sequence: Synthetic oligonucleotide
agguuugucuacaggcaac

SEQ ID NO: 2654943 - RNA, 19 nt, Artificial Sequence
  Description of Artificial Sequence: Synthetic oligonucleotide
gaccccucguuuuacauua

SEQ ID NO: 2654944 - RNA, 19 nt, Artificial Sequence
  Description of Artificial Sequence: Synthetic oligonucleotide
uaagaccccucguuuuaca

SEQ ID NO: 2654945 - RNA, 19 nt, Artificial Sequence
  Description of Artificial Sequence: Synthetic oligonucleotide
gcuugucuaacauguucgg

SEQ ID NO: 2654946 - RNA, 19 nt, Artificial Sequence
  Description of Artificial Sequence: Synthetic oligonucleotide
aaccgcacucgacacucca

SEQ ID NO: 2654947 - RNA, 19 nt, Artificial Sequence
  Description of Artificial Sequence: Synthetic oligonucleotide
acuucugauaucgcaacau

SEQ ID NO: 2654948 - RNA, 19 nt, Artificial Sequence
  Description of Artificial Sequence: Synthetic oligonucleotide
auggcggcaagacgagauc

SEQ ID NO: 2654949 - RNA, 19 nt, Artificial Sequence
  Description of Artificial Sequence: Synthetic oligonucleotide
caauccuccuggcuggaug

SEQ ID NO: 2654950 - RNA, 19 nt, Artificial Sequence
  Description of Artificial Sequence: Synthetic oligonucleotide
cacaugauggcggcaagac

SEQ ID NO: 2654951 - RNA, 19 nt, Artificial Sequence
  Description of Artificial Sequence: Synthetic oligonucleotide
gucacaguggcauccgcca

SEQ ID NO: 2654952 - RNA, 19 nt, Artificial Sequence
  Description of Artificial Sequence: Synthetic oligonucleotide
ggcaagacgagaucacaug

SEQ ID NO: 2654953 - RNA, 19 nt, Artificial Sequence
  Description of Artificial Sequence: Synthetic oligonucleotide
gucuaacauguucgguuag

SEQ ID NO: 2654954 - RNA, 19 nt, Artificial Sequence
  Description of Artificial Sequence: Synthetic oligonucleotide
ugcuaggguguuucuguga

SEQ ID NO: 2654955 - RNA, 19 nt, Artificial Sequence
  Description of Artificial Sequence: Synthetic oligonucleotide
cucgacacuccaccaagac

SEQ ID NO: 2654956 - RNA, 19 nt, Artificial Sequence
  Description of Artificial Sequence: Synthetic oligonucleotide
ucuuuucaugucacaugau

SEQ ID NO: 2654957 - RNA, 19 nt, Artificial Sequence
  Description of Artificial Sequence: Synthetic oligonucleotide
acguggaacuucugcacca

SEQ ID NO: 2654958 - RNA, 19 nt, Artificial Sequence
  Description of Artificial Sequence: Synthetic oligonucleotide
ggaggucgaacuuucugug

SEQ ID NO: 2654959 - RNA, 19 nt, Artificial Sequence
  Description of Artificial Sequence: Synthetic oligonucleotide
agaaaccgcacucgacacu

SEQ ID NO: 2654960 - RNA, 19 nt, Artificial Sequence
  Description of Artificial Sequence: Synthetic oligonucleotide
ugcuucuuuucaugucaca

SEQ ID NO: 2654961 - RNA, 19 nt, Artificial Sequence
  Description of Artificial Sequence: Synthetic oligonucleotide
caagcacuucugauaucgc

SEQ ID NO: 2654962 - RNA, 19 nt, Artificial Sequence
  Description of Artificial Sequence: Synthetic oligonucleotide
ugacucuucuagucaugga

SEQ ID NO: 2654963 - RNA, 19 nt, Artificial Sequence
  Description of Artificial Sequence: Synthetic oligonucleotide
cagaaggccaauccuccug

SEQ ID NO: 2654964 - RNA, 19 nt, Artificial Sequence
  Description of Artificial Sequence: Synthetic oligonucleotide
agcuccgucuugguguugg

SEQ ID NO: 2654965 - RNA, 19 nt, Artificial Sequence
  Description of Artificial Sequence: Synthetic oligonucleotide
acacuccaccaagacuucc

SEQ ID NO: 2654966 - RNA, 19 nt, Artificial Sequence
  Description of Artificial Sequence: Synthetic oligonucleotide
cuucuagucauggaaucca

SEQ ID NO: 2654967 - RNA, 19 nt, Artificial Sequence
  Description of Artificial Sequence: Synthetic oligonucleotide
aguguagacguuugaucuu

SEQ ID NO: 2654968 - RNA, 19 nt, Artificial Sequence
  Description of Artificial Sequence: Synthetic oligonucleotide
cuaccaagcacuucugaua

SEQ ID NO: 2654969 - RNA, 19 nt, Artificial Sequence
  Description of Artificial Sequence: Synthetic oligonucleotide
aaagugucaaugagagaua

SEQ ID NO: 2654970 - RNA, 19 nt, Artificial Sequence
  Description of Artificial Sequence: Synthetic oligonucleotide
aggugccuggcuaccaagc

SEQ ID NO: 2654971 - RNA, 19 nt, Artificial Sequence
  Description of Artificial Sequence: Synthetic oligonucleotide
uuugaucuucagggguaag

SEQ ID NO: 2654972 - RNA, 19 nt, Artificial Sequence
  Description of Artificial Sequence: Synthetic oligonucleotide
gcguuucuguuucaaagug

SEQ ID NO: 2654973 - RNA, 19 nt, Artificial Sequence
  Description of Artificial Sequence: Synthetic oligonucleotide
augccgacagguuugucua

SEQ ID NO: 2654974 - RNA, 19 nt, Artificial Sequence
  Description of Artificial Sequence: Synthetic oligonucleotide
gcugucggcuucuuuagug

SEQ ID NO: 2654975 - RNA, 19 nt, Artificial Sequence
  Description of Artificial Sequence: Synthetic oligonucleotide
ucacaugauggcggcaaga

SEQ ID NO: 2654976 - RNA, 19 nt, Artificial Sequence
  Description of Artificial Sequence: Synthetic oligonucleotide
gacagaaaccgcacucgac

SEQ ID NO: 2654977 - RNA, 19 nt, Artificial Sequence
  Description of Artificial Sequence: Synthetic oligonucleotide
agcacuucugauaucgcaa

SEQ ID NO: 2654978 - RNA, 19 nt, Artificial Sequence
  Description of Artificial Sequence: Synthetic oligonucleotide
gcuaggguguuucugugac

SEQ ID NO: 2654979 - RNA, 19 nt, Artificial Sequence
  Description of Artificial Sequence: Synthetic oligonucleotide
cagcugucggcuucuuuag

SEQ ID NO: 2654980 - RNA, 19 nt, Artificial Sequence
  Description of Artificial Sequence: Synthetic oligonucleotide
uucugugaaggugccuggc

SEQ ID NO: 2654981 - RNA, 19 nt, Artificial Sequence
  Description of Artificial Sequence: Synthetic oligonucleotide
acucuucuagucauggaau

SEQ ID NO: 2654982 - RNA, 19 nt, Artificial Sequence
  Description of Artificial Sequence: Synthetic oligonucleotide
ucacaguggcauccgccac

SEQ ID NO: 2654983 - RNA, 19 nt, Artificial Sequence
  Description of Artificial Sequence: Synthetic oligonucleotide
augagagauaagaccccuc

SEQ ID NO: 2654984 - RNA, 19 nt, Artificial Sequence
  Description of Artificial Sequence: Synthetic oligonucleotide
gaaggccaauccuccuggc

SEQ ID NO: 2654985 - RNA, 19 nt, Artificial Sequence
  Description of Artificial Sequence: Synthetic oligonucleotide
uccuccuggcuggaugagg

SEQ ID NO: 2654986 - RNA, 19 nt, Artificial Sequence
  Description of Artificial Sequence: Synthetic oligonucleotide
agauuucuauggcacuguu

SEQ ID NO: 2654987 - RNA, 19 nt, Artificial Sequence
  Description of Artificial Sequence: Synthetic oligonucleotide
accaagcacuucugauauc

SEQ ID NO: 2654988 - RNA, 19 nt, Artificial Sequence
  Description of Artificial Sequence: Synthetic oligonucleotide
aggguguuucugugacagg

SEQ ID NO: 2654989 - RNA, 19 nt, Artificial Sequence
  Description of Artificial Sequence: Synthetic oligonucleotide
cuuuaguguagacguuuga

SEQ ID NO: 2654990 - RNA, 19 nt, Artificial Sequence
  Description of Artificial Sequence: Synthetic oligonucleotide
agugucaaugagagauaag

SEQ ID NO: 2654991 - RNA, 19 nt, Artificial Sequence
  Description of Artificial Sequence: Synthetic oligonucleotide
agacgagaucacaugcuug

SEQ ID NO: 2654992 - RNA, 19 nt, Artificial Sequence
  Description of Artificial Sequence: Synthetic oligonucleotide
uucugugacagggcguuuc

SEQ ID NO: 2654993 - RNA, 19 nt, Artificial Sequence
  Description of Artificial Sequence: Synthetic oligonucleotide
ugucggcuucuuuagugua

SEQ ID NO: 2654994 - RNA, 19 nt, Artificial Sequence
  Description of Artificial Sequence: Synthetic oligonucleotide
guguagacguuugaucuuc

SEQ ID NO: 2654995 - RNA, 19 nt, Artificial Sequence
  Description of Artificial Sequence: Synthetic oligonucleotide
gagauaagaccccucguuu

SEQ ID NO: 2654996 - RNA, 19 nt, Artificial Sequence
  Description of Artificial Sequence: Synthetic oligonucleotide
uucagggguaagugacaga

SEQ ID NO: 2654997 - RNA, 19 nt, Artificial Sequence
  Description of Artificial Sequence: Synthetic oligonucleotide
aggcaaauguauggacauc

SEQ ID NO: 2654998 - RNA, 19 nt, Artificial Sequence
  Description of Artificial Sequence: Synthetic oligonucleotide
ggccaauccuccuggcugg

SEQ ID NO: 2654999 - RNA, 19 nt, Artificial Sequence
  Description of Artificial Sequence: Synthetic oligonucleotide
ggcuucaugaaggcaaaug

SEQ ID NO: 2655000 - RNA, 19 nt, Artificial Sequence
  Description of Artificial Sequence: Synthetic oligonucleotide
cacguucauguucacagaa

SEQ ID NO: 2655001 - RNA, 19 nt, Artificial Sequence
  Description of Artificial Sequence: Synthetic oligonucleotide
gucacaugauggcggcaag

SEQ ID NO: 2655002 - RNA, 19 nt, Artificial Sequence
  Description of Artificial Sequence: Synthetic oligonucleotide
gucggcuucuuuaguguag

SEQ ID NO: 2655003 - RNA, 19 nt, Artificial Sequence
  Description of Artificial Sequence: Synthetic oligonucleotide
caugccgacagguuugucu

SEQ ID NO: 2655004 - RNA, 19 nt, Artificial Sequence
  Description of Artificial Sequence: Synthetic oligonucleotide
agaucacaugcuugucuaa

SEQ ID NO: 2655005 - RNA, 19 nt, Artificial Sequence
  Description of Artificial Sequence: Synthetic oligonucleotide
caacaugcccagguacugc

SEQ ID NO: 2655006 - RNA, 19 nt, Artificial Sequence
  Description of Artificial Sequence: Synthetic oligonucleotide
gggguaagugacagaaucc

SEQ ID NO: 2655007 - RNA, 19 nt, Artificial Sequence
  Description of Artificial Sequence: Synthetic oligonucleotide
cauuaguugugacucuucu

SEQ ID NO: 2655008 - RNA, 19 nt, Artificial Sequence
  Description of Artificial Sequence: Synthetic oligonucleotide
ugaaggugccuggcuacca

SEQ ID NO: 2655009 - RNA, 19 nt, Artificial Sequence
  Description of Artificial Sequence: Synthetic oligonucleotide
ugacagggcguuucuguuu

SEQ ID NO: 2655010 - RNA, 19 nt, Artificial Sequence
  Description of Artificial Sequence: Synthetic oligonucleotide
acgagaucacaugcuuguc

SEQ ID NO: 2655011 - RNA, 19 nt, Artificial Sequence
  Description of Artificial Sequence: Synthetic oligonucleotide
ggucgaacuuucugugaag

SEQ ID NO: 2655012 - RNA, 19 nt, Artificial Sequence
  Description of Artificial Sequence: Synthetic oligonucleotide
cugcuaggguguuucugug

SEQ ID NO: 2655013 - RNA, 19 nt, Artificial Sequence
  Description of Artificial Sequence: Synthetic oligonucleotide
augcccagguacugcacgu

SEQ ID NO: 2655014 - RNA, 19 nt, Artificial Sequence
  Description of Artificial Sequence: Synthetic oligonucleotide
guccaugccgacagguuug

SEQ ID NO: 2655015 - RNA, 19 nt, Artificial Sequence
  Description of Artificial Sequence: Synthetic oligonucleotide
gugccuggcuaccaagcac

SEQ ID NO: 2655016 - RNA, 19 nt, Artificial Sequence
  Description of Artificial Sequence: Synthetic oligonucleotide
gcacuucugauaucgcaac

SEQ ID NO: 2655017 - RNA, 19 nt, Artificial Sequence
  Description of Artificial Sequence: Synthetic oligonucleotide
gaaggugccuggcuaccaa

SEQ ID NO: 2655018 - RNA, 19 nt, Artificial Sequence
  Description of Artificial Sequence: Synthetic oligonucleotide
agaccccucguuuuacauu

SEQ ID NO: 2655019 - RNA, 19 nt, Artificial Sequence
  Description of Artificial Sequence: Synthetic oligonucleotide
acauguucgguuagggaua

SEQ ID NO: 2655020 - RNA, 19 nt, Artificial Sequence
  Description of Artificial Sequence: Synthetic oligonucleotide
guggcauccgccacguuca

SEQ ID NO: 2655021 - RNA, 19 nt, Artificial Sequence
  Description of Artificial Sequence: Synthetic oligonucleotide
cagguuugucuacaggcaa

SEQ ID NO: 2655022 - RNA, 19 nt, Artificial Sequence
  Description of Artificial Sequence: Synthetic oligonucleotide
agcugcuaggguguuucug

SEQ ID NO: 2655023 - RNA, 19 nt, Artificial Sequence
  Description of Artificial Sequence: Synthetic oligonucleotide
caagacgagaucacaugcu

SEQ ID NO: 2655024 - RNA, 19 nt, Artificial Sequence
  Description of Artificial Sequence: Synthetic oligonucleotide
acagagcaucagcaacaga

SEQ ID NO: 2655025 - RNA, 19 nt, Artificial Sequence
  Description of Artificial Sequence: Synthetic oligonucleotide
augauggcggcaagacgag

SEQ ID NO: 2655026 - RNA, 19 nt, Artificial Sequence
  Description of Artificial Sequence: Synthetic oligonucleotide
ugacugucacaguggcauc

SEQ ID NO: 2655027 - RNA, 19 nt, Artificial Sequence
  Description of Artificial Sequence: Synthetic oligonucleotide
aacaugcaggcagccugga

SEQ ID NO: 2655028 - RNA, 19 nt, Artificial Sequence
  Description of Artificial Sequence: Synthetic oligonucleotide
cugucacaguggcauccgc

SEQ ID NO: 2655029 - RNA, 19 nt, Artificial Sequence
  Description of Artificial Sequence: Synthetic oligonucleotide
gguguuucugugacagggc

SEQ ID NO: 2655030 - RNA, 19 nt, Artificial Sequence
  Description of Artificial Sequence: Synthetic oligonucleotide
agggcguuucuguuucaaa

SEQ ID NO: 2655031 - RNA, 19 nt, Artificial Sequence
  Description of Artificial Sequence: Synthetic oligonucleotide
uacaggcaacaugcccagg

SEQ ID NO: 2655032 - RNA, 19 nt, Artificial Sequence
  Description of Artificial Sequence: Synthetic oligonucleotide
gguuugucuacaggcaaca

SEQ ID NO: 2655033 - RNA, 19 nt, Artificial Sequence
  Description of Artificial Sequence: Synthetic oligonucleotide
gcacguggaacuucugcac

SEQ ID NO: 2655034 - RNA, 19 nt, Artificial Sequence
  Description of Artificial Sequence: Synthetic oligonucleotide
accgcacucgacacuccac

SEQ ID NO: 2655035 - RNA, 19 nt, Artificial Sequence
  Description of Artificial Sequence: Synthetic oligonucleotide
agcugucggcuucuuuagu

SEQ ID NO: 2655036 - RNA, 19 nt, Artificial Sequence
  Description of Artificial Sequence: Synthetic oligonucleotide
acaguggcauccgccacgu

SEQ ID NO: 2655037 - RNA, 19 nt, Artificial Sequence
  Description of Artificial Sequence: Synthetic oligonucleotide
gauggcggcaagacgagau

SEQ ID NO: 2655038 - RNA, 19 nt, Artificial Sequence
  Description of Artificial Sequence: Synthetic oligonucleotide
gugaaggugccuggcuacc

SEQ ID NO: 2655039 - RNA, 19 nt, Artificial Sequence
  Description of Artificial Sequence: Synthetic oligonucleotide
gguuagggauaaauuaucu

SEQ ID NO: 2655040 - RNA, 19 nt, Artificial Sequence
  Description of Artificial Sequence: Synthetic oligonucleotide
ggacagaaaccgcacucga

SEQ ID NO: 2655041 - RNA, 19 nt, Artificial Sequence
  Description of Artificial Sequence: Synthetic oligonucleotide
ggcguuucuguuucaaagu

SEQ ID NO: 2655042 - RNA, 19 nt, Artificial Sequence
  Description of Artificial Sequence: Synthetic oligonucleotide
uccaugccgacagguuugu

SEQ ID NO: 2655043 - RNA, 19 nt, Artificial Sequence
  Description of Artificial Sequence: Synthetic oligonucleotide
ugauggcggcaagacgaga

SEQ ID NO: 2655044 - RNA, 19 nt, Artificial Sequence
  Description of Artificial Sequence: Synthetic oligonucleotide
ugccgacagguuugucuac

SEQ ID NO: 2655045 - RNA, 19 nt, Artificial Sequence
  Description of Artificial Sequence: Synthetic oligonucleotide
cugugaaggugccuggcua

SEQ ID NO: 2655046 - RNA, 19 nt, Artificial Sequence
  Description of Artificial Sequence: Synthetic oligonucleotide
acuuucugugaaggugccu

SEQ ID NO: 2655047 - RNA, 19 nt, Artificial Sequence
  Description of Artificial Sequence: Synthetic oligonucleotide
ugcccagguacugcacgug

SEQ ID NO: 2655048 - RNA, 19 nt, Artificial Sequence
  Description of Artificial Sequence: Synthetic oligonucleotide
cuaggguguuucugugaca

SEQ ID NO: 2655049 - RNA, 19 nt, Artificial Sequence
  Description of Artificial Sequence: Synthetic oligonucleotide
caccagcuccgucuuggug

SEQ ID NO: 2655050 - RNA, 19 nt, Artificial Sequence
  Description of Artificial Sequence: Synthetic oligonucleotide
caaauguauggacauccuu

SEQ ID NO: 2655051 - RNA, 19 nt, Artificial Sequence
  Description of Artificial Sequence: Synthetic oligonucleotide
auggcacuguucagggugu

SEQ ID NO: 2655052 - RNA, 19 nt, Artificial Sequence
  Description of Artificial Sequence: Synthetic oligonucleotide
gacacuccaccaagacuuc

SEQ ID NO: 2655053 - RNA, 19 nt, Artificial Sequence
  Description of Artificial Sequence: Synthetic oligonucleotide
auaucgcaacaugcaggca

SEQ ID NO: 2655054 - RNA, 19 nt, Artificial Sequence
  Description of Artificial Sequence: Synthetic oligonucleotide
cgguuagggauaaauuauc

SEQ ID NO: 2655055 - RNA, 19 nt, Artificial Sequence
  Description of Artificial Sequence: Synthetic oligonucleotide
ccgcacucgacacuccacc

SEQ ID NO: 2655056 - RNA, 19 nt, Artificial Sequence
  Description of Artificial Sequence: Synthetic oligonucleotide
ccgacacccaugaaggaca

SEQ ID NO: 2655057 - RNA, 19 nt, Artificial Sequence
  Description of Artificial Sequence: Synthetic oligonucleotide
guuucugugacagggcguu

SEQ ID NO: 2655058 - RNA, 19 nt, Artificial Sequence
  Description of Artificial Sequence: Synthetic oligonucleotide
cuucguucuuuucacugau

SEQ ID NO: 2655059 - RNA, 19 nt, Artificial Sequence
  Description of Artificial Sequence: Synthetic oligonucleotide
cguucuuuucacugaugac

SEQ ID NO: 2655060 - RNA, 19 nt, Artificial Sequence
  Description of Artificial Sequence: Synthetic oligonucleotide
acucgacacuccaccaaga

SEQ ID NO: 2655061 - RNA, 19 nt, Artificial Sequence
  Description of Artificial Sequence: Synthetic oligonucleotide
cugucggcuucuuuagugu

SEQ ID NO: 2655062 - RNA, 19 nt, Artificial Sequence
  Description of Artificial Sequence: Synthetic oligonucleotide
auguucacagaaggccaau

SEQ ID NO: 2655063 - RNA, 19 nt, Artificial Sequence
  Description of Artificial Sequence: Synthetic oligonucleotide
gcuaccaagcacuucugau

SEQ ID NO: 2655064 - RNA, 19 nt, Artificial Sequence
  Description of Artificial Sequence: Synthetic oligonucleotide
cuugucuaacauguucggu

SEQ ID NO: 2655065 - RNA, 19 nt, Artificial Sequence
  Description of Artificial Sequence: Synthetic oligonucleotide
ccagcugucggcuucuuua

SEQ ID NO: 2655066 - RNA, 19 nt, Artificial Sequence
  Description of Artificial Sequence: Synthetic oligonucleotide
cacuccaccaagacuuccu

SEQ ID NO: 2655067 - RNA, 19 nt, Artificial Sequence
  Description of Artificial Sequence: Synthetic oligonucleotide
cauguucgguuagggauaa

SEQ ID NO: 2655068 - RNA, 19 nt, Artificial Sequence
  Description of Artificial Sequence: Synthetic oligonucleotide
cugugacagggcguuucug

SEQ ID NO: 2655069 - RNA, 19 nt, Artificial Sequence
  Description of Artificial Sequence: Synthetic oligonucleotide
ggcuaccaagcacuucuga

SEQ ID NO: 2655070 - RNA, 19 nt, Artificial Sequence
  Description of Artificial Sequence: Synthetic oligonucleotide
gcacuguucagggugucca

SEQ ID NO: 2655071 - RNA, 19 nt, Artificial Sequence
  Description of Artificial Sequence: Synthetic oligonucleotide
ccuggacggcuucaugaag

SEQ ID NO: 2655072 - RNA, 19 nt, Artificial Sequence
  Description of Artificial Sequence: Synthetic oligonucleotide
guucgguuagggauaaauu

SEQ ID NO: 2655073 - RNA, 19 nt, Artificial Sequence
  Description of Artificial Sequence: Synthetic oligonucleotide
acagggcguuucuguuuca

SEQ ID NO: 2655074 - RNA, 19 nt, Artificial Sequence
  Description of Artificial Sequence: Synthetic oligonucleotide
ccgacagguuugucuacag

SEQ ID NO: 2655075 - RNA, 19 nt, Artificial Sequence
  Description of Artificial Sequence: Synthetic oligonucleotide
cuccuggcuggaugagguc

SEQ ID NO: 2655076 - RNA, 19 nt, Artificial Sequence
  Description of Artificial Sequence: Synthetic oligonucleotide
cccgacacccaugaaggac

SEQ ID NO: 2655077 - RNA, 19 nt, Artificial Sequence
  Description of Artificial Sequence: Synthetic oligonucleotide
cagccuggacggcuucaug

SEQ ID NO: 2655078 - RNA, 19 nt, Artificial Sequence
  Description of Artificial Sequence: Synthetic oligonucleotide
acggcuucaugaaggcaaa

SEQ ID NO: 2655079 - RNA, 19 nt, Artificial Sequence
  Description of Artificial Sequence: Synthetic oligonucleotide
auccuucccgacacccaug

SEQ ID NO: 2655080 - RNA, 19 nt, Artificial Sequence
  Description of Artificial Sequence: Synthetic oligonucleotide
acugcacguggaacuucug

SEQ ID NO: 2655081 - RNA, 19 nt, Artificial Sequence
  Description of Artificial Sequence: Synthetic oligonucleotide
caggcaacaugcccaggua

SEQ ID NO: 2655082 - RNA, 19 nt, Artificial Sequence
  Description of Artificial Sequence: Synthetic oligonucleotide
cauccuucccgacacccau

SEQ ID NO: 2655083 - RNA, 19 nt, Artificial Sequence
  Description of Artificial Sequence: Synthetic oligonucleotide
cgacacuccaccaagacuu

SEQ ID NO: 2655084 - RNA, 19 nt, Artificial Sequence
  Description of Artificial Sequence: Synthetic oligonucleotide
gugacagggcguuucuguu

SEQ ID NO: 2655085 - RNA, 19 nt, Artificial Sequence
  Description of Artificial Sequence: Synthetic oligonucleotide
uuucugugacagggcguuu

SEQ ID NO: 2655086 - RNA, 19 nt, Artificial Sequence
  Description of Artificial Sequence: Synthetic oligonucleotide
ggcaacaugcccagguacu

SEQ ID NO: 2655087 - RNA, 19 nt, Artificial Sequence
  Description of Artificial Sequence: Synthetic oligonucleotide
uggcauccgccacguucau

SEQ ID NO: 2655088 - RNA, 19 nt, Artificial Sequence
  Description of Artificial Sequence: Synthetic oligonucleotide
ggcggcaagacgagaucac

SEQ ID NO: 2655089 - RNA, 19 nt, Artificial Sequence
  Description of Artificial Sequence: Synthetic oligonucleotide
agacuuccucuucguucuu

SEQ ID NO: 2655090 - RNA, 19 nt, Artificial Sequence
  Description of Artificial Sequence: Synthetic oligonucleotide
ggguguccaugccgacagg

SEQ ID NO: 2655091 - RNA, 19 nt, Artificial Sequence
  Description of Artificial Sequence: Synthetic oligonucleotide
ggguggaggucgaacuuuc

SEQ ID NO: 2655092 - RNA, 19 nt, Artificial Sequence
  Description of Artificial Sequence: Synthetic oligonucleotide
gcacucgacacuccaccaa

SEQ ID NO: 2655093 - RNA, 19 nt, Artificial Sequence
  Description of Artificial Sequence: Synthetic oligonucleotide
accccucguuuuacauuag

SEQ ID NO: 2655094 - RNA, 19 nt, Artificial Sequence
  Description of Artificial Sequence: Synthetic oligonucleotide
gacacccaugaaggacaga

SEQ ID NO: 2655095 - RNA, 19 nt, Artificial Sequence
  Description of Artificial Sequence: Synthetic oligonucleotide
gguguccaugccgacaggu

SEQ ID NO: 2655096 - RNA, 19 nt, Artificial Sequence
  Description of Artificial Sequence: Synthetic oligonucleotide
cguuugaucuucaggggua

SEQ ID NO: 2655097 - RNA, 19 nt, Artificial Sequence
  Description of Artificial Sequence: Synthetic oligonucleotide
caugcuugucuaacauguu

SEQ ID NO: 2655098 - RNA, 19 nt, Artificial Sequence
  Description of Artificial Sequence: Synthetic oligonucleotide
gcaaauguauggacauccu

SEQ ID NO: 2655099 - RNA, 19 nt, Artificial Sequence
  Description of Artificial Sequence: Synthetic oligonucleotide
gccgacagguuugucuaca

SEQ ID NO: 2655100 - RNA, 19 nt, Artificial Sequence
  Description of Artificial Sequence: Synthetic oligonucleotide
gcggcaagacgagaucaca

SEQ ID NO: 2655101 - RNA, 19 nt, Artificial Sequence
  Description of Artificial Sequence: Synthetic oligonucleotide
guuugucuacaggcaacau

SEQ ID NO: 2655102 - RNA, 19 nt, Artificial Sequence
  Description of Artificial Sequence: Synthetic oligonucleotide
ccacguucauguucacaga

SEQ ID NO: 2655103 - RNA, 19 nt, Artificial Sequence
  Description of Artificial Sequence: Synthetic oligonucleotide
cuccgucuugguguuggaa

SEQ ID NO: 2655104 - RNA, 19 nt, Artificial Sequence
  Description of Artificial Sequence: Synthetic oligonucleotide
cagggcguuucuguuucaa

SEQ ID NO: 2655105 - RNA, 19 nt, Artificial Sequence
  Description of Artificial Sequence: Synthetic oligonucleotide
gagcugcuaggguguuucu

SEQ ID NO: 2655106 - RNA, 19 nt, Artificial Sequence
  Description of Artificial Sequence: Synthetic oligonucleotide
cguuucuguuucaaagugu

SEQ ID NO: 2655107 - RNA, 19 nt, Artificial Sequence
  Description of Artificial Sequence: Synthetic oligonucleotide
cagcaacagaauggaggaa

SEQ ID NO: 2655108 - RNA, 19 nt, Artificial Sequence
  Description of Artificial Sequence: Synthetic oligonucleotide
ggacggcuucaugaaggca

SEQ ID NO: 2655109 - RNA, 19 nt, Artificial Sequence
  Description of Artificial Sequence: Synthetic oligonucleotide
cgagaucacaugcuugucu

SEQ ID NO: 2655110 - RNA, 19 nt, Artificial Sequence
  Description of Artificial Sequence: Synthetic oligonucleotide
ggcauccgccacguucaug

SEQ ID NO: 2655111 - RNA, 19 nt, Artificial Sequence
  Description of Artificial Sequence: Synthetic oligonucleotide
cacuguucaggguguccau

SEQ ID NO: 2655112 - RNA, 19 nt, Artificial Sequence
  Description of Artificial Sequence: Synthetic oligonucleotide
cagggguaagugacagaau

SEQ ID NO: 2655113 - RNA, 19 nt, Artificial Sequence
  Description of Artificial Sequence: Synthetic oligonucleotide
gguacugcacguggaacuu

SEQ ID NO: 2655114 - RNA, 19 nt, Artificial Sequence
  Description of Artificial Sequence: Synthetic oligonucleotide
cccucguuuuacauuaguu

SEQ ID NO: 2655115 - RNA, 19 nt, Artificial Sequence
  Description of Artificial Sequence: Synthetic oligonucleotide
ccuggcuaccaagcacuuc

SEQ ID NO: 2655116 - RNA, 19 nt, Artificial Sequence
  Description of Artificial Sequence: Synthetic oligonucleotide
guguccaugccgacagguu

SEQ ID NO: 2655117 - RNA, 19 nt, Artificial Sequence
  Description of Artificial Sequence: Synthetic oligonucleotide
ccgucuugguguuggaaau

SEQ ID NO: 2655118 - RNA, 19 nt, Artificial Sequence
  Description of Artificial Sequence: Synthetic oligonucleotide
auguucgguuagggauaaa

SEQ ID NO: 2655119 - RNA, 19 nt, Artificial Sequence
  Description of Artificial Sequence: Synthetic oligonucleotide
cgcacucgacacuccacca

SEQ ID NO: 2655120 - RNA, 19 nt, Artificial Sequence
  Description of Artificial Sequence: Synthetic oligonucleotide
gcuccgucuugguguugga

SEQ ID NO: 2655121 - RNA, 19 nt, Artificial Sequence
  Description of Artificial Sequence: Synthetic oligonucleotide
gguggaggucgaacuuucu

SEQ ID NO: 2655122 - RNA, 19 nt, Artificial Sequence
  Description of Artificial Sequence: Synthetic oligonucleotide
cagcuccgucuugguguug

SEQ ID NO: 2655123 - RNA, 19 nt, Artificial Sequence
  Description of Artificial Sequence: Synthetic oligonucleotide
gccaauccuccuggcugga

SEQ ID NO: 2655124 - RNA, 19 nt, Artificial Sequence
  Description of Artificial Sequence: Synthetic oligonucleotide
ccaagacuuccucuucguu

SEQ ID NO: 2655125 - RNA, 19 nt, Artificial Sequence
  Description of Artificial Sequence: Synthetic oligonucleotide
cggcaagacgagaucacau

SEQ ID NO: 2655126 - RNA, 19 nt, Artificial Sequence
  Description of Artificial Sequence: Synthetic oligonucleotide
ccccucguuuuacauuagu

SEQ ID NO: 2655127 - RNA, 19 nt, Artificial Sequence
  Description of Artificial Sequence: Synthetic oligonucleotide
ccgccacguucauguucac

SEQ ID NO: 2655128 - RNA, 19 nt, Artificial Sequence
  Description of Artificial Sequence: Synthetic oligonucleotide
ccaugccgacagguuuguc

SEQ ID NO: 2655129 - RNA, 19 nt, Artificial Sequence
  Description of Artificial Sequence: Synthetic oligonucleotide
ccagcuccgucuugguguu

SEQ ID NO: 2655130 - RNA, 19 nt, Artificial Sequence
  Description of Artificial Sequence: Synthetic oligonucleotide
cgccacguucauguucaca

SEQ ID NO: 2655131 - RNA, 19 nt, Artificial Sequence
  Description of Artificial Sequence: Synthetic oligonucleotide
ccuucccgacacccaugaa

SEQ ID NO: 2655132 - RNA, 19 nt, Artificial Sequence
  Description of Artificial Sequence: Synthetic oligonucleotide
gccagcugucggcuucuuu

SEQ ID NO: 2655133 - RNA, 19 nt, Artificial Sequence
  Description of Artificial Sequence: Synthetic oligonucleotide
cagagcugcuaggguguuu

SEQ ID NO: 2655134 - RNA, 19 nt, Artificial Sequence
  Description of Artificial Sequence: Synthetic oligonucleotide
cgcaacaugcaggcagccu

SEQ ID NO: 2655135 - RNA, 19 nt, Artificial Sequence
  Description of Artificial Sequence: Synthetic oligonucleotide
gccuggcuaccaagcacuu

SEQ ID NO: 2655136 - RNA, 19 nt, Artificial Sequence
  Description of Artificial Sequence: Synthetic oligonucleotide
ccaauccuccuggcuggau

SEQ ID NO: 2655137 - RNA, 19 nt, Artificial Sequence
  Description of Artificial Sequence: Synthetic oligonucleotide
caguggcauccgccacguu

SEQ ID NO: 2655138 - RNA, 19 nt, Artificial Sequence
  Description of Artificial Sequence: Synthetic oligonucleotide
ggccagcugucggcuucuu

SEQ ID NO: 2655139 - RNA, 19 nt, Artificial Sequence
  Description of Artificial Sequence: Synthetic oligonucleotide
cggcuucaugaaggcaaau

SEQ ID NO: 2655140 - RNA, 19 nt, Artificial Sequence
  Description of Artificial Sequence: Synthetic oligonucleotide
auauuauucacuaaaaucg

SEQ ID NO: 2655141 - RNA, 19 nt, Artificial Sequence
  Description of Artificial Sequence: Synthetic oligonucleotide
gauauuauucacuaaaauc

SEQ ID NO: 2655142 - RNA, 19 nt, Artificial Sequence
  Description of Artificial Sequence: Synthetic oligonucleotide
agaacaaugacacaggcca

SEQ ID NO: 2655143 - RNA, 19 nt, Artificial Sequence
  Description of Artificial Sequence: Synthetic oligonucleotide
ucauaggugaacuucaucu

SEQ ID NO: 2655144 - RNA, 19 nt, Artificial Sequence
  Description of Artificial Sequence: Synthetic oligonucleotide
auaggugaacuucaucucc

SEQ ID NO: 2655145 - RNA, 19 nt, Artificial Sequence
  Description of Artificial Sequence: Synthetic oligonucleotide
uauuauucacuaaaaucgc

SEQ ID NO: 2655146 - RNA, 19 nt, Artificial Sequence
  Description of Artificial Sequence: Synthetic oligonucleotide
auuucuuucacccgcaucu

SEQ ID NO: 2655147 - RNA, 19 nt, Artificial Sequence
  Description of Artificial Sequence: Synthetic oligonucleotide
acuaaaaucgccuucucgu

SEQ ID NO: 2655148 - RNA, 19 nt, Artificial Sequence
  Description of Artificial Sequence: Synthetic oligonucleotide
auauggcuagacuggaucc

SEQ ID NO: 2655149 - RNA, 19 nt, Artificial Sequence
  Description of Artificial Sequence: Synthetic oligonucleotide
uuauucacuaaaaucgccu

SEQ ID NO: 2655150 - RNA, 19 nt, Artificial Sequence
  Description of Artificial Sequence: Synthetic oligonucleotide
gaagauauggcuagacugg

SEQ ID NO: 2655151 - RNA, 19 nt, Artificial Sequence
  Description of Artificial Sequence: Synthetic oligonucleotide
uucuggaacugaaagaugu

SEQ ID NO: 2655152 - RNA, 19 nt, Artificial Sequence
  Description of Artificial Sequence: Synthetic oligonucleotide
gaugccauaacuccucugc

SEQ ID NO: 2655153 - RNA, 19 nt, Artificial Sequence
  Description of Artificial Sequence: Synthetic oligonucleotide
aacaaugacacaggccacc

SEQ ID NO: 2655154 - RNA, 19 nt, Artificial Sequence
  Description of Artificial Sequence: Synthetic oligonucleotide
uggaguuccacgcuucugg

SEQ ID NO: 2655155 - RNA, 19 nt, Artificial Sequence
  Description of Artificial Sequence: Synthetic oligonucleotide
uccuucaccucuuucaucc

SEQ ID NO: 2655156 - RNA, 19 nt, Artificial Sequence
  Description of Artificial Sequence: Synthetic oligonucleotide
aguaguugaagcccagaac

SEQ ID NO: 2655157 - RNA, 19 nt, Artificial Sequence
  Description of Artificial Sequence: Synthetic oligonucleotide
guaguugaagcccagaaca

SEQ ID NO: 2655158 - RNA, 19 nt, Artificial Sequence
  Description of Artificial Sequence: Synthetic oligonucleotide
uccucgugcaaccuguugg

SEQ ID NO: 2655159 - RNA, 19 nt, Artificial Sequence
  Description of Artificial Sequence: Synthetic oligonucleotide
aacacaccggcucagguca

SEQ ID NO: 2655160 - RNA, 19 nt, Artificial Sequence
  Description of Artificial Sequence: Synthetic oligonucleotide
auccgguuaacacaccggc

SEQ ID NO: 2655161 - RNA, 19 nt, Artificial Sequence
  Description of Artificial Sequence: Synthetic oligonucleotide
ugauauuauucacuaaaau

SEQ ID NO: 2655162 - RNA, 19 nt, Artificial Sequence
  Description of Artificial Sequence: Synthetic oligonucleotide
auuauucacuaaaaucgcc

SEQ ID NO: 2655163 - RNA, 19 nt, Artificial Sequence
  Description of Artificial Sequence: Synthetic oligonucleotide
uuucauccgguuaacacac

SEQ ID NO: 2655164 - RNA, 19 nt, Artificial Sequence
  Description of Artificial Sequence: Synthetic oligonucleotide
cuuguuugugggcacaucc

SEQ ID NO: 2655165 - RNA, 19 nt, Artificial Sequence
  Description of Artificial Sequence: Synthetic oligonucleotide
uguuccuucaccucuuuca

SEQ ID NO: 2655166 - RNA, 19 nt, Artificial Sequence
  Description of Artificial Sequence: Synthetic oligonucleotide
ucauccgguuaacacaccg

SEQ ID NO: 2655167 - RNA, 19 nt, Artificial Sequence
  Description of Artificial Sequence: Synthetic oligonucleotide
uguggugauauuauucacu

SEQ ID NO: 2655168 - RNA, 19 nt, Artificial Sequence
  Description of Artificial Sequence: Synthetic oligonucleotide
uucaucuccaugcuggacu

SEQ ID NO: 2655169 - RNA, 19 nt, Artificial Sequence
  Description of Artificial Sequence: Synthetic oligonucleotide
gauccuguugaguugcucc

SEQ ID NO: 2655170 - RNA, 19 nt, Artificial Sequence
  Description of Artificial Sequence: Synthetic oligonucleotide
uaaaaucgccuucucgucc

SEQ ID NO: 2655171 - RNA, 19 nt, Artificial Sequence
  Description of Artificial Sequence: Synthetic oligonucleotide
ugcaggaugccauaacucc

SEQ ID NO: 2655172 - RNA, 19 nt, Artificial Sequence
  Description of Artificial Sequence: Synthetic oligonucleotide
ggaagauauggcuagacug

SEQ ID NO: 2655173 - RNA, 19 nt, Artificial Sequence
  Description of Artificial Sequence: Synthetic oligonucleotide
uuugcugaagcuugggcug

SEQ ID NO: 2655174 - RNA, 19 nt, Artificial Sequence
  Description of Artificial Sequence: Synthetic oligonucleotide
ucuuucauccgguuaacac

SEQ ID NO: 2655175 - RNA, 19 nt, Artificial Sequence
  Description of Artificial Sequence: Synthetic oligonucleotide
aaugcgugucuggaguucc

SEQ ID NO: 2655176 - RNA, 19 nt, Artificial Sequence
  Description of Artificial Sequence: Synthetic oligonucleotide
guuggcauucuccaucugg

SEQ ID NO: 2655177 - RNA, 19 nt, Artificial Sequence
  Description of Artificial Sequence: Synthetic oligonucleotide
gauauggcuagacuggauc

SEQ ID NO: 2655178 - RNA, 19 nt, Artificial Sequence
  Description of Artificial Sequence: Synthetic oligonucleotide
auucacuaaaaucgccuuc

SEQ ID NO: 2655179 - RNA, 19 nt, Artificial Sequence
  Description of Artificial Sequence: Synthetic oligonucleotide
aaaaucgccuucucguccu

SEQ ID NO: 2655180 - RNA, 19 nt, Artificial Sequence
  Description of Artificial Sequence: Synthetic oligonucleotide
uguuugugggcacaucccc

SEQ ID NO: 2655181 - RNA, 19 nt, Artificial Sequence
  Description of Artificial Sequence: Synthetic oligonucleotide
aacugaaagauguccugcu

SEQ ID NO: 2655182 - RNA, 19 nt, Artificial Sequence
  Description of Artificial Sequence: Synthetic oligonucleotide
aucuggaagauauggcuag

SEQ ID NO: 2655183 - RNA, 19 nt, Artificial Sequence
  Description of Artificial Sequence: Synthetic oligonucleotide
cuugcaauccaguaguuga

SEQ ID NO: 2655184 - RNA, 19 nt, Artificial Sequence
  Description of Artificial Sequence: Synthetic oligonucleotide
cugaaagauguccugcugc

SEQ ID NO: 2655185 - RNA, 19 nt, Artificial Sequence
  Description of Artificial Sequence: Synthetic oligonucleotide
uggaacugaaagauguccu

SEQ ID NO: 2655186 - RNA, 19 nt, Artificial Sequence
  Description of Artificial Sequence: Synthetic oligonucleotide
ugaaagauguccugcugca

SEQ ID NO: 2655187 - RNA, 19 nt, Artificial Sequence
  Description of Artificial Sequence: Synthetic oligonucleotide
auccuguugaguugcuccc

SEQ ID NO: 2655188 - RNA, 19 nt, Artificial Sequence
  Description of Artificial Sequence: Synthetic oligonucleotide
ucugaugagccucucgccu

SEQ ID NO: 2655189 - RNA, 19 nt, Artificial Sequence
  Description of Artificial Sequence: Synthetic oligonucleotide
aaaccacugcuucauuucu

SEQ ID NO: 2655190 - RNA, 19 nt, Artificial Sequence
  Description of Artificial Sequence: Synthetic oligonucleotide
uucacuaaaaucgccuucu

SEQ ID NO: 2655191 - RNA, 19 nt, Artificial Sequence
  Description of Artificial Sequence: Synthetic oligonucleotide
ugaacuucaucuccaugcu

SEQ ID NO: 2655192 - RNA, 19 nt, Artificial Sequence
  Description of Artificial Sequence: Synthetic oligonucleotide
uuuggcgggaccauuugcu

SEQ ID NO: 2655193 - RNA, 19 nt, Artificial Sequence
  Description of Artificial Sequence: Synthetic oligonucleotide
aaccuguuggcauucucca

SEQ ID NO: 2655194 - RNA, 19 nt, Artificial Sequence
  Description of Artificial Sequence: Synthetic oligonucleotide
ucuuucacccgcaucucug

SEQ ID NO: 2655195 - RNA, 19 nt, Artificial Sequence
  Description of Artificial Sequence: Synthetic oligonucleotide
gaaaccacugcuucauuuc

SEQ ID NO: 2655196 - RNA, 19 nt, Artificial Sequence
  Description of Artificial Sequence: Synthetic oligonucleotide
cacuaaaaucgccuucucg

SEQ ID NO: 2655197 - RNA, 19 nt, Artificial Sequence
  Description of Artificial Sequence: Synthetic oligonucleotide
ggugauauuauucacuaaa

SEQ ID NO: 2655198 - RNA, 19 nt, Artificial Sequence
  Description of Artificial Sequence: Synthetic oligonucleotide
caaccuguuggcauucucc

SEQ ID NO: 2655199 - RNA, 19 nt, Artificial Sequence
  Description of Artificial Sequence: Synthetic oligonucleotide
aagauguccugcugcagga

SEQ ID NO: 2655200 - RNA, 19 nt, Artificial Sequence
  Description of Artificial Sequence: Synthetic oligonucleotide
uggaagauauggcuagacu

SEQ ID NO: 2655201 - RNA, 19 nt, Artificial Sequence
  Description of Artificial Sequence: Synthetic oligonucleotide
ucuggagcuugcaauccag

SEQ ID NO: 2655202 - RNA, 19 nt, Artificial Sequence
  Description of Artificial Sequence: Synthetic oligonucleotide
cuuucauccgguuaacaca

SEQ ID NO: 2655203 - RNA, 19 nt, Artificial Sequence
  Description of Artificial Sequence: Synthetic oligonucleotide
uuguuugugggcacauccc

SEQ ID NO: 2655204 - RNA, 19 nt, Artificial Sequence
  Description of Artificial Sequence: Synthetic oligonucleotide
uucacacuguuccuucacc

SEQ ID NO: 2655205 - RNA, 19 nt, Artificial Sequence
  Description of Artificial Sequence: Synthetic oligonucleotide
uguugaguugcucccgcug

SEQ ID NO: 2655206 - RNA, 19 nt, Artificial Sequence
  Description of Artificial Sequence: Synthetic oligonucleotide
cagaacaaugacacaggcc

SEQ ID NO: 2655207 - RNA, 19 nt, Artificial Sequence
  Description of Artificial Sequence: Synthetic oligonucleotide
uaggugaacuucaucucca

SEQ ID NO: 2655208 - RNA, 19 nt, Artificial Sequence
  Description of Artificial Sequence: Synthetic oligonucleotide
uggucauuucuuucacccg

SEQ ID NO: 2655209 - RNA, 19 nt, Artificial Sequence
  Description of Artificial Sequence: Synthetic oligonucleotide
gaacugaaagauguccugc

SEQ ID NO: 2655210 - RNA, 19 nt, Artificial Sequence
  Description of Artificial Sequence: Synthetic oligonucleotide
ugccauaacuccucugcag

SEQ ID NO: 2655211 - RNA, 19 nt, Artificial Sequence
  Description of Artificial Sequence: Synthetic oligonucleotide
uuaacacaccggcucaggu

SEQ ID NO: 2655212 - RNA, 19 nt, Artificial Sequence
  Description of Artificial Sequence: Synthetic oligonucleotide
cuggaacugaaagaugucc

SEQ ID NO: 2655213 - RNA, 19 nt, Artificial Sequence
  Description of Artificial Sequence: Synthetic oligonucleotide
guugaagcccagaacaaug

SEQ ID NO: 2655214 - RNA, 19 nt, Artificial Sequence
  Description of Artificial Sequence: Synthetic oligonucleotide
cuaaaaucgccuucucguc

SEQ ID NO: 2655215 - RNA, 19 nt, Artificial Sequence
  Description of Artificial Sequence: Synthetic oligonucleotide
cuagacuggauccuguuga

SEQ ID NO: 2655216 - RNA, 19 nt, Artificial Sequence
  Description of Artificial Sequence: Synthetic oligonucleotide
uauucacuaaaaucgccuu

SEQ ID NO: 2655217 - RNA, 19 nt, Artificial Sequence
  Description of Artificial Sequence: Synthetic oligonucleotide
ucacacuguuccuucaccu

SEQ ID NO: 2655218 - RNA, 19 nt, Artificial Sequence
  Description of Artificial Sequence: Synthetic oligonucleotide
guugaguugcucccgcugc

SEQ ID NO: 2655219 - RNA, 19 nt, Artificial Sequence
  Description of Artificial Sequence: Synthetic oligonucleotide
cauaggugaacuucaucuc

SEQ ID NO: 2655220 - RNA, 19 nt, Artificial Sequence
  Description of Artificial Sequence: Synthetic oligonucleotide
acugaaagauguccugcug

SEQ ID NO: 2655221 - RNA, 19 nt, Artificial Sequence
  Description of Artificial Sequence: Synthetic oligonucleotide
cuuucuggucgucucuucc

SEQ ID NO: 2655222 - RNA, 19 nt, Artificial Sequence
  Description of Artificial Sequence: Synthetic oligonucleotide
ggucauuucuuucacccgc

SEQ ID NO: 2655223 - RNA, 19 nt, Artificial Sequence
  Description of Artificial Sequence: Synthetic oligonucleotide
cuggucgucucuuccaccc

SEQ ID NO: 2655224 - RNA, 19 nt, Artificial Sequence
  Description of Artificial Sequence: Synthetic oligonucleotide
ggagcuugcaauccaguag

SEQ ID NO: 2655225 - RNA, 19 nt, Artificial Sequence
  Description of Artificial Sequence: Synthetic oligonucleotide
uucauuucucuuucugguc

SEQ ID NO: 2655226 - RNA, 19 nt, Artificial Sequence
  Description of Artificial Sequence: Synthetic oligonucleotide
uuucccuuguggcaccugu

SEQ ID NO: 2655227 - RNA, 19 nt, Artificial Sequence
  Description of Artificial Sequence: Synthetic oligonucleotide
uuucuggucgucucuucca

SEQ ID NO: 2655228 - RNA, 19 nt, Artificial Sequence
  Description of Artificial Sequence: Synthetic oligonucleotide
gacacaggccaccagggca

SEQ ID NO: 2655229 - RNA, 19 nt, Artificial Sequence
  Description of Artificial Sequence: Synthetic oligonucleotide
uguggcaccuguuccuuug

SEQ ID NO: 2655230 - RNA, 19 nt, Artificial Sequence
  Description of Artificial Sequence: Synthetic oligonucleotide
cugaagcuugggcugaggc

SEQ ID NO: 2655231 - RNA, 19 nt, Artificial Sequence
  Description of Artificial Sequence: Synthetic oligonucleotide
cauccgguuaacacaccgg

SEQ ID NO: 2655232 - RNA, 19 nt, Artificial Sequence
  Description of Artificial Sequence: Synthetic oligonucleotide
accggcucaggucauaggu

SEQ ID NO: 2655233 - RNA, 19 nt, Artificial Sequence
  Description of Artificial Sequence: Synthetic oligonucleotide
ugcaauccaguaguugaag

SEQ ID NO: 2655234 - RNA, 19 nt, Artificial Sequence
  Description of Artificial Sequence: Synthetic oligonucleotide
cuucaccucuuucauccgg

SEQ ID NO: 2655235 - RNA, 19 nt, Artificial Sequence
  Description of Artificial Sequence: Synthetic oligonucleotide
uagacuggauccuguugag

SEQ ID NO: 2655236 - RNA, 19 nt, Artificial Sequence
  Description of Artificial Sequence: Synthetic oligonucleotide
accacugcuucauuucucu

SEQ ID NO: 2655237 - RNA, 19 nt, Artificial Sequence
  Description of Artificial Sequence: Synthetic oligonucleotide
uaguugaagcccagaacaa

SEQ ID NO: 2655238 - RNA, 19 nt, Artificial Sequence
  Description of Artificial Sequence: Synthetic oligonucleotide
cuugggcugaggcuugagg

SEQ ID NO: 2655239 - RNA, 19 nt, Artificial Sequence
  Description of Artificial Sequence: Synthetic oligonucleotide
auguccugcugcaggaugc

SEQ ID NO: 2655240 - RNA, 19 nt, Artificial Sequence
  Description of Artificial Sequence: Synthetic oligonucleotide
ucuggaacugaaagauguc

SEQ ID NO: 2655241 - RNA, 19 nt, Artificial Sequence
  Description of Artificial Sequence: Synthetic oligonucleotide
gcaccuguuccuuuggcgg

SEQ ID NO: 2655242 - RNA, 19 nt, Artificial Sequence
  Description of Artificial Sequence: Synthetic oligonucleotide
gaagcccagaacaaugaca

SEQ ID NO: 2655243 - RNA, 19 nt, Artificial Sequence
  Description of Artificial Sequence: Synthetic oligonucleotide
uccagcucgcccuggaacu

SEQ ID NO: 2655244 - RNA, 19 nt, Artificial Sequence
  Description of Artificial Sequence: Synthetic oligonucleotide
uucuuucacccgcaucucu

SEQ ID NO: 2655245 - RNA, 19 nt, Artificial Sequence
  Description of Artificial Sequence: Synthetic oligonucleotide
uucucguccucgugcaacc

SEQ ID NO: 2655246 - RNA, 19 nt, Artificial Sequence
  Description of Artificial Sequence: Synthetic oligonucleotide
uaacacaccggcucagguc

SEQ ID NO: 2655247 - RNA, 19 nt, Artificial Sequence
  Description of Artificial Sequence: Synthetic oligonucleotide
uucuucacacuguuccuuc

SEQ ID NO: 2655248 - RNA, 19 nt, Artificial Sequence
  Description of Artificial Sequence: Synthetic oligonucleotide
ugaggcuugagguccugcu

SEQ ID NO: 2655249 - RNA, 19 nt, Artificial Sequence
  Description of Artificial Sequence: Synthetic oligonucleotide
guggugauauuauucacua

SEQ ID NO: 2655250 - RNA, 19 nt, Artificial Sequence
  Description of Artificial Sequence: Synthetic oligonucleotide
ggaacugaaagauguccug

SEQ ID NO: 2655251 - RNA, 19 nt, Artificial Sequence
  Description of Artificial Sequence: Synthetic oligonucleotide
ucacccgcaucucuggaaa

SEQ ID NO: 2655252 - RNA, 19 nt, Artificial Sequence
  Description of Artificial Sequence: Synthetic oligonucleotide
ugagccucucgccuguggu

SEQ ID NO: 2655253 - RNA, 19 nt, Artificial Sequence
  Description of Artificial Sequence: Synthetic oligonucleotide
ucuuccacccguucuucac

SEQ ID NO: 2655254 - RNA, 19 nt, Artificial Sequence
  Description of Artificial Sequence: Synthetic oligonucleotide
ggcauucuccaucuggaag

SEQ ID NO: 2655255 - RNA, 19 nt, Artificial Sequence
  Description of Artificial Sequence: Synthetic oligonucleotide
cauaacuccucugcagagc

SEQ ID NO: 2655256 - RNA, 19 nt, Artificial Sequence
  Description of Artificial Sequence: Synthetic oligonucleotide
caucucuggaaaccacugc

SEQ ID NO: 2655257 - RNA, 19 nt, Artificial Sequence
  Description of Artificial Sequence: Synthetic oligonucleotide
uucuggucgucucuuccac

SEQ ID NO: 2655258 - RNA, 19 nt, Artificial Sequence
  Description of Artificial Sequence: Synthetic oligonucleotide
aaccacugcuucauuucuc

SEQ ID NO: 2655259 - RNA, 19 nt, Artificial Sequence
  Description of Artificial Sequence: Synthetic oligonucleotide
cuucuggaacugaaagaug

SEQ ID NO: 2655260 - RNA, 19 nt, Artificial Sequence
  Description of Artificial Sequence: Synthetic oligonucleotide
gagcuugcaauccaguagu

SEQ ID NO: 2655261 - RNA, 19 nt, Artificial Sequence
  Description of Artificial Sequence: Synthetic oligonucleotide
agagccuucagcuggucuu

SEQ ID NO: 2655262 - RNA, 19 nt, Artificial Sequence
  Description of Artificial Sequence: Synthetic oligonucleotide
cucugaugagccucucgcc

SEQ ID NO: 2655263 - RNA, 19 nt, Artificial Sequence
  Description of Artificial Sequence: Synthetic oligonucleotide
cuguggugauauuauucac

SEQ ID NO: 2655264 - RNA, 19 nt, Artificial Sequence
  Description of Artificial Sequence: Synthetic oligonucleotide
gacccggccuuccagcucc

SEQ ID NO: 2655265 - RNA, 19 nt, Artificial Sequence
  Description of Artificial Sequence: Synthetic oligonucleotide
accagggcaagccaggaua

SEQ ID NO: 2655266 - RNA, 19 nt, Artificial Sequence
  Description of Artificial Sequence: Synthetic oligonucleotide
aggcuggucauuucuuuca

SEQ ID NO: 2655267 - RNA, 19 nt, Artificial Sequence
  Description of Artificial Sequence: Synthetic oligonucleotide
acccgcaucucuggaaacc

SEQ ID NO: 2655268 - RNA, 19 nt, Artificial Sequence
  Description of Artificial Sequence: Synthetic oligonucleotide
ucuucacacuguuccuuca

SEQ ID NO: 2655269 - RNA, 19 nt, Artificial Sequence
  Description of Artificial Sequence: Synthetic oligonucleotide
augacacaggccaccaggg

SEQ ID NO: 2655270 - RNA, 19 nt, Artificial Sequence
  Description of Artificial Sequence: Synthetic oligonucleotide
aaaucgccuucucguccuc

SEQ ID NO: 2655271 - RNA, 19 nt, Artificial Sequence
  Description of Artificial Sequence: Synthetic oligonucleotide
ucguccucgugcaaccugu

SEQ ID NO: 2655272 - RNA, 19 nt, Artificial Sequence
  Description of Artificial Sequence: Synthetic oligonucleotide
cuuuggcgggaccauuugc

SEQ ID NO: 2655273 - RNA, 19 nt, Artificial Sequence
  Description of Artificial Sequence: Synthetic oligonucleotide
gaaagauguccugcugcag

SEQ ID NO: 2655274 - RNA, 19 nt, Artificial Sequence
  Description of Artificial Sequence: Synthetic oligonucleotide
cuucauuucucuuucuggu

SEQ ID NO: 2655275 - RNA, 19 nt, Artificial Sequence
  Description of Artificial Sequence: Synthetic oligonucleotide
guuaacacaccggcucagg

SEQ ID NO: 2655276 - RNA, 19 nt, Artificial Sequence
  Description of Artificial Sequence: Synthetic oligonucleotide
aaucgccuucucguccucg

SEQ ID NO: 2655277 - RNA, 19 nt, Artificial Sequence
  Description of Artificial Sequence: Synthetic oligonucleotide
ucuggaguuccacgcuucu

SEQ ID NO: 2655278 - RNA, 19 nt, Artificial Sequence
  Description of Artificial Sequence: Synthetic oligonucleotide
gaggcuugagguccugcug

SEQ ID NO: 2655279 - RNA, 19 nt, Artificial Sequence
  Description of Artificial Sequence: Synthetic oligonucleotide
uccgguuaacacaccggcu

SEQ ID NO: 2655280 - RNA, 19 nt, Artificial Sequence
  Description of Artificial Sequence: Synthetic oligonucleotide
uccccuuucccuuguggca

SEQ ID NO: 2655281 - RNA, 19 nt, Artificial Sequence
  Description of Artificial Sequence: Synthetic oligonucleotide
uauggcuagacuggauccu

SEQ ID NO: 2655282 - RNA, 19 nt, Artificial Sequence
  Description of Artificial Sequence: Synthetic oligonucleotide
cugcaggaugccauaacuc

SEQ ID NO: 2655283 - RNA, 19 nt, Artificial Sequence
  Description of Artificial Sequence: Synthetic oligonucleotide
caggucauaggugaacuuc

SEQ ID NO: 2655284 - RNA, 19 nt, Artificial Sequence
  Description of Artificial Sequence: Synthetic oligonucleotide
uuggcgggaccauuugcug

SEQ ID NO: 2655285 - RNA, 19 nt, Artificial Sequence
  Description of Artificial Sequence: Synthetic oligonucleotide
uccuguugaguugcucccg

SEQ ID NO: 2655286 - RNA, 19 nt, Artificial Sequence
  Description of Artificial Sequence: Synthetic oligonucleotide
gcaauccaguaguugaagc

SEQ ID NO: 2655287 - RNA, 19 nt, Artificial Sequence
  Description of Artificial Sequence: Synthetic oligonucleotide
uuccagcuccacaaugcgu

SEQ ID NO: 2655288 - RNA, 19 nt, Artificial Sequence
  Description of Artificial Sequence: Synthetic oligonucleotide
caccuguuccuuuggcggg

SEQ ID NO: 2655289 - RNA, 19 nt, Artificial Sequence
  Description of Artificial Sequence: Synthetic oligonucleotide
ggcaccuguuccuuuggcg

SEQ ID NO: 2655290 - RNA, 19 nt, Artificial Sequence
  Description of Artificial Sequence: Synthetic oligonucleotide
ucccuuguggcaccuguuc

SEQ ID NO: 2655291 - RNA, 19 nt, Artificial Sequence
  Description of Artificial Sequence: Synthetic oligonucleotide
ucuggucgucucuuccacc

SEQ ID NO: 2655292 - RNA, 19 nt, Artificial Sequence
  Description of Artificial Sequence: Synthetic oligonucleotide
gcuggacugguucuucugg

SEQ ID NO: 2655293 - RNA, 19 nt, Artificial Sequence
  Description of Artificial Sequence: Synthetic oligonucleotide
cugaugagccucucgccug

SEQ ID NO: 2655294 - RNA, 19 nt, Artificial Sequence
  Description of Artificial Sequence: Synthetic oligonucleotide
gugauauuauucacuaaaa

SEQ ID NO: 2655295 - RNA, 19 nt, Artificial Sequence
  Description of Artificial Sequence: Synthetic oligonucleotide
uggucgucucuuccacccg

SEQ ID NO: 2655296 - RNA, 19 nt, Artificial Sequence
  Description of Artificial Sequence: Synthetic oligonucleotide
uuucacccgcaucucugga

SEQ ID NO: 2655297 - RNA, 19 nt, Artificial Sequence
  Description of Artificial Sequence: Synthetic oligonucleotide
uuugugggcacauccccuu

SEQ ID NO: 2655298 - RNA, 19 nt, Artificial Sequence
  Description of Artificial Sequence: Synthetic oligonucleotide
ucgcccuggaacucguucu

SEQ ID NO: 2655299 - RNA, 19 nt, Artificial Sequence
  Description of Artificial Sequence: Synthetic oligonucleotide
cuucuggagcuugcaaucc

SEQ ID NO: 2655300 - RNA, 19 nt, Artificial Sequence
  Description of Artificial Sequence: Synthetic oligonucleotide
ucgccuguggugauauuau

SEQ ID NO: 2655301 - RNA, 19 nt, Artificial Sequence
  Description of Artificial Sequence: Synthetic oligonucleotide
ccugggacuuguuuguggg

SEQ ID NO: 2655302 - RNA, 19 nt, Artificial Sequence
  Description of Artificial Sequence: Synthetic oligonucleotide
ucgugcaaccuguuggcau

SEQ ID NO: 2655303 - RNA, 19 nt, Artificial Sequence
  Description of Artificial Sequence: Synthetic oligonucleotide
uuccacccguucuucacac

SEQ ID NO: 2655304 - RNA, 19 nt, Artificial Sequence
  Description of Artificial Sequence: Synthetic oligonucleotide
uggugauauuauucacuaa

SEQ ID NO: 2655305 - RNA, 19 nt, Artificial Sequence
  Description of Artificial Sequence: Synthetic oligonucleotide
uggcgggaccauuugcuga

SEQ ID NO: 2655306 - RNA, 19 nt, Artificial Sequence
  Description of Artificial Sequence: Synthetic oligonucleotide
gacuggauccuguugaguu

SEQ ID NO: 2655307 - RNA, 19 nt, Artificial Sequence
  Description of Artificial Sequence: Synthetic oligonucleotide
ugucuggaguuccacgcuu

SEQ ID NO: 2655308 - RNA, 19 nt, Artificial Sequence
  Description of Artificial Sequence: Synthetic oligonucleotide
cacacuguuccuucaccuc

SEQ ID NO: 2655309 - RNA, 19 nt, Artificial Sequence
  Description of Artificial Sequence: Synthetic oligonucleotide
gucauaggugaacuucauc

SEQ ID NO: 2655310 - RNA, 19 nt, Artificial Sequence
  Description of Artificial Sequence: Synthetic oligonucleotide
aggucauaggugaacuuca

SEQ ID NO: 2655311 - RNA, 19 nt, Artificial Sequence
  Description of Artificial Sequence: Synthetic oligonucleotide
cuggaagauauggcuagac

SEQ ID NO: 2655312 - RNA, 19 nt, Artificial Sequence
  Description of Artificial Sequence: Synthetic oligonucleotide
augagccucucgccugugg

SEQ ID NO: 2655313 - RNA, 19 nt, Artificial Sequence
  Description of Artificial Sequence: Synthetic oligonucleotide
uggacugguucuucuggaa

SEQ ID NO: 2655314 - RNA, 19 nt, Artificial Sequence
  Description of Artificial Sequence: Synthetic oligonucleotide
uucacccgcaucucuggaa

SEQ ID NO: 2655315 - RNA, 19 nt, Artificial Sequence
  Description of Artificial Sequence: Synthetic oligonucleotide
aguugaagcccagaacaau

SEQ ID NO: 2655316 - RNA, 19 nt, Artificial Sequence
  Description of Artificial Sequence: Synthetic oligonucleotide
ccagaacaaugacacaggc

SEQ ID NO: 2655317 - RNA, 19 nt, Artificial Sequence
  Description of Artificial Sequence: Synthetic oligonucleotide
cccagaacaaugacacagg

SEQ ID NO: 2655318 - RNA, 19 nt, Artificial Sequence
  Description of Artificial Sequence: Synthetic oligonucleotide
uucauccgguuaacacacc

SEQ ID NO: 2655319 - RNA, 19 nt, Artificial Sequence
  Description of Artificial Sequence: Synthetic oligonucleotide
ugcggacccggccuuccag

SEQ ID NO: 2655320 - RNA, 19 nt, Artificial Sequence
  Description of Artificial Sequence: Synthetic oligonucleotide
uccuuuggcgggaccauuu

SEQ ID NO: 2655321 - RNA, 19 nt, Artificial Sequence
  Description of Artificial Sequence: Synthetic oligonucleotide
gaacaaugacacaggccac

SEQ ID NO: 2655322 - RNA, 19 nt, Artificial Sequence
  Description of Artificial Sequence: Synthetic oligonucleotide
ugggcacauccccuuuccc

SEQ ID NO: 2655323 - RNA, 19 nt, Artificial Sequence
  Description of Artificial Sequence: Synthetic oligonucleotide
cuccagcucgcccuggaac

SEQ ID NO: 2655324 - RNA, 19 nt, Artificial Sequence
  Description of Artificial Sequence: Synthetic oligonucleotide
cuucucguccucgugcaac

SEQ ID NO: 2655325 - RNA, 19 nt, Artificial Sequence
  Description of Artificial Sequence: Synthetic oligonucleotide
gugggcacauccccuuucc

SEQ ID NO: 2655326 - RNA, 19 nt, Artificial Sequence
  Description of Artificial Sequence: Synthetic oligonucleotide
ugcccugcggacccggccu

SEQ ID NO: 2655327 - RNA, 19 nt, Artificial Sequence
  Description of Artificial Sequence: Synthetic oligonucleotide
uggcuagacuggauccugu

SEQ ID NO: 2655328 - RNA, 19 nt, Artificial Sequence
  Description of Artificial Sequence: Synthetic oligonucleotide
caguaguugaagcccagaa

SEQ ID NO: 2655329 - RNA, 19 nt, Artificial Sequence
  Description of Artificial Sequence: Synthetic oligonucleotide
acaaugcgugucuggaguu

SEQ ID NO: 2655330 - RNA, 19 nt, Artificial Sequence
  Description of Artificial Sequence: Synthetic oligonucleotide
uuccuucaccucuuucauc

SEQ ID NO: 2655331 - RNA, 19 nt, Artificial Sequence
  Description of Artificial Sequence: Synthetic oligonucleotide
auggcuagacuggauccug

SEQ ID NO: 2655332 - RNA, 19 nt, Artificial Sequence
  Description of Artificial Sequence: Synthetic oligonucleotide
ggugaacuucaucuccaug

SEQ ID NO: 2655333 - RNA, 19 nt, Artificial Sequence
  Description of Artificial Sequence: Synthetic oligonucleotide
gcuagacuggauccuguug

SEQ ID NO: 2655334 - RNA, 19 nt, Artificial Sequence
  Description of Artificial Sequence: Synthetic oligonucleotide
gcuucuggagcuugcaauc

SEQ ID NO: 2655335 - RNA, 19 nt, Artificial Sequence
  Description of Artificial Sequence: Synthetic oligonucleotide
guggcaccuguuccuuugg

SEQ ID NO: 2655336 - RNA, 19 nt, Artificial Sequence
  Description of Artificial Sequence: Synthetic oligonucleotide
uuucuuucacccgcaucuc

SEQ ID NO: 2655337 - RNA, 19 nt, Artificial Sequence
  Description of Artificial Sequence: Synthetic oligonucleotide
uggcauucuccaucuggaa

SEQ ID NO: 2655338 - RNA, 19 nt, Artificial Sequence
  Description of Artificial Sequence: Synthetic oligonucleotide
aucuccaugcuggacuggu

SEQ ID NO: 2655339 - RNA, 19 nt, Artificial Sequence
  Description of Artificial Sequence: Synthetic oligonucleotide
gccauaacuccucugcaga

SEQ ID NO: 2655340 - RNA, 19 nt, Artificial Sequence
  Description of Artificial Sequence: Synthetic oligonucleotide
ggacugguucuucuggaac

SEQ ID NO: 2655341 - RNA, 19 nt, Artificial Sequence
  Description of Artificial Sequence: Synthetic oligonucleotide
cucucugccgcugcccugc

SEQ ID NO: 2655342 - RNA, 19 nt, Artificial Sequence
  Description of Artificial Sequence: Synthetic oligonucleotide
ccauaacuccucugcagag

SEQ ID NO: 2655343 - RNA, 19 nt, Artificial Sequence
  Description of Artificial Sequence: Synthetic oligonucleotide
cucgcccuggaacucguuc

SEQ ID NO: 2655344 - RNA, 19 nt, Artificial Sequence
  Description of Artificial Sequence: Synthetic oligonucleotide
ccgguuaacacaccggcuc

SEQ ID NO: 2655345 - RNA, 19 nt, Artificial Sequence
  Description of Artificial Sequence: Synthetic oligonucleotide
auccaguaguugaagccca

SEQ ID NO: 2655346 - RNA, 19 nt, Artificial Sequence
  Description of Artificial Sequence: Synthetic oligonucleotide
ucgccuucucguccucgug

SEQ ID NO: 2655347 - RNA, 19 nt, Artificial Sequence
  Description of Artificial Sequence: Synthetic oligonucleotide
acaccggcucaggucauag

SEQ ID NO: 2655348 - RNA, 19 nt, Artificial Sequence
  Description of Artificial Sequence: Synthetic oligonucleotide
ucgucucuuccacccguuc

SEQ ID NO: 2655349 - RNA, 19 nt, Artificial Sequence
  Description of Artificial Sequence: Synthetic oligonucleotide
uggugccugggacuuguuu

SEQ ID NO: 2655350 - RNA, 19 nt, Artificial Sequence
  Description of Artificial Sequence: Synthetic oligonucleotide
cuuccacccguucuucaca

SEQ ID NO: 2655351 - RNA, 19 nt, Artificial Sequence
  Description of Artificial Sequence: Synthetic oligonucleotide
ucucucugccgcugcccug

SEQ ID NO: 2655352 - RNA, 19 nt, Artificial Sequence
  Description of Artificial Sequence: Synthetic oligonucleotide
gucauuucuuucacccgca

SEQ ID NO: 2655353 - RNA, 19 nt, Artificial Sequence
  Description of Artificial Sequence: Synthetic oligonucleotide
ucuccagcucgcccuggaa

SEQ ID NO: 2655354 - RNA, 19 nt, Artificial Sequence
  Description of Artificial Sequence: Synthetic oligonucleotide
gcgugucuggaguuccacg

SEQ ID NO: 2655355 - RNA, 19 nt, Artificial Sequence
  Description of Artificial Sequence: Synthetic oligonucleotide
guccucgugcaaccuguug

SEQ ID NO: 2655356 - RNA, 19 nt, Artificial Sequence
  Description of Artificial Sequence: Synthetic oligonucleotide
uggaaaccacugcuucauu

SEQ ID NO: 2655357 - RNA, 19 nt, Artificial Sequence
  Description of Artificial Sequence: Synthetic oligonucleotide
agccucucgccugugguga

SEQ ID NO: 2655358 - RNA, 19 nt, Artificial Sequence
  Description of Artificial Sequence: Synthetic oligonucleotide
ugcgugucuggaguuccac

SEQ ID NO: 2655359 - RNA, 19 nt, Artificial Sequence
  Description of Artificial Sequence: Synthetic oligonucleotide
uggauccuguugaguugcu

SEQ ID NO: 2655360 - RNA, 19 nt, Artificial Sequence
  Description of Artificial Sequence: Synthetic oligonucleotide
gcuugcaauccaguaguug

SEQ ID NO: 2655361 - RNA, 19 nt, Artificial Sequence
  Description of Artificial Sequence: Synthetic oligonucleotide
caugcuggacugguucuuc

SEQ ID NO: 2655362 - RNA, 19 nt, Artificial Sequence
  Description of Artificial Sequence: Synthetic oligonucleotide
gagguccugcugaggcugg

SEQ ID NO: 2655363 - RNA, 19 nt, Artificial Sequence
  Description of Artificial Sequence: Synthetic oligonucleotide
agacuggauccuguugagu

SEQ ID NO: 2655364 - RNA, 19 nt, Artificial Sequence
  Description of Artificial Sequence: Synthetic oligonucleotide
caccggcucaggucauagg

SEQ ID NO: 2655365 - RNA, 19 nt, Artificial Sequence
  Description of Artificial Sequence: Synthetic oligonucleotide
agcccagaacaaugacaca

SEQ ID NO: 2655366 - RNA, 19 nt, Artificial Sequence
  Description of Artificial Sequence: Synthetic oligonucleotide
acccguucuucacacuguu

SEQ ID NO: 2655367 - RNA, 19 nt, Artificial Sequence
  Description of Artificial Sequence: Synthetic oligonucleotide
caaugcgugucuggaguuc

SEQ ID NO: 2655368 - RNA, 19 nt, Artificial Sequence
  Description of Artificial Sequence: Synthetic oligonucleotide
ccacccguucuucacacug

SEQ ID NO: 2655369 - RNA, 19 nt, Artificial Sequence
  Description of Artificial Sequence: Synthetic oligonucleotide
ugcugaagcuugggcugag

SEQ ID NO: 2655370 - RNA, 19 nt, Artificial Sequence
  Description of Artificial Sequence: Synthetic oligonucleotide
gccuguggugauauuauuc

SEQ ID NO: 2655371 - RNA, 19 nt, Artificial Sequence
  Description of Artificial Sequence: Synthetic oligonucleotide
ccuguugaguugcucccgc

SEQ ID NO: 2655372 - RNA, 19 nt, Artificial Sequence
  Description of Artificial Sequence: Synthetic oligonucleotide
ggcuggucauuucuuucac

SEQ ID NO: 2655373 - RNA, 19 nt, Artificial Sequence
  Description of Artificial Sequence: Synthetic oligonucleotide
cccuuguggcaccuguucc

SEQ ID NO: 2655374 - RNA, 19 nt, Artificial Sequence
  Description of Artificial Sequence: Synthetic oligonucleotide
acgcuucuggagcuugcaa

SEQ ID NO: 2655375 - RNA, 19 nt, Artificial Sequence
  Description of Artificial Sequence: Synthetic oligonucleotide
uugugggcacauccccuuu

SEQ ID NO: 2655376 - RNA, 19 nt, Artificial Sequence
  Description of Artificial Sequence: Synthetic oligonucleotide
agauauggcuagacuggau

SEQ ID NO: 2655377 - RNA, 19 nt, Artificial Sequence
  Description of Artificial Sequence: Synthetic oligonucleotide
cugaggcuugagguccugc

SEQ ID NO: 2655378 - RNA, 19 nt, Artificial Sequence
  Description of Artificial Sequence: Synthetic oligonucleotide
acauccccuuucccuugug

SEQ ID NO: 2655379 - RNA, 19 nt, Artificial Sequence
  Description of Artificial Sequence: Synthetic oligonucleotide
ugcugaggcuggucauuuc

SEQ ID NO: 2655380 - RNA, 19 nt, Artificial Sequence
  Description of Artificial Sequence: Synthetic oligonucleotide
uccacccguucuucacacu

SEQ ID NO: 2655381 - RNA, 19 nt, Artificial Sequence
  Description of Artificial Sequence: Synthetic oligonucleotide
ccacaaugcgugucuggag

SEQ ID NO: 2655382 - RNA, 19 nt, Artificial Sequence
  Description of Artificial Sequence: Synthetic oligonucleotide
ggaguuccacgcuucugga

SEQ ID NO: 2655383 - RNA, 19 nt, Artificial Sequence
  Description of Artificial Sequence: Synthetic oligonucleotide
cucgccuguggugauauua

SEQ ID NO: 2655384 - RNA, 19 nt, Artificial Sequence
  Description of Artificial Sequence: Synthetic oligonucleotide
cagcucgcccuggaacucg

SEQ ID NO: 2655385 - RNA, 19 nt, Artificial Sequence
  Description of Artificial Sequence: Synthetic oligonucleotide
caucuccaugcuggacugg

SEQ ID NO: 2655386 - RNA, 19 nt, Artificial Sequence
  Description of Artificial Sequence: Synthetic oligonucleotide
gggacuuguuugugggcac

SEQ ID NO: 2655387 - RNA, 19 nt, Artificial Sequence
  Description of Artificial Sequence: Synthetic oligonucleotide
cacccgcaucucuggaaac

SEQ ID NO: 2655388 - RNA, 19 nt, Artificial Sequence
  Description of Artificial Sequence: Synthetic oligonucleotide
ucucguccucgugcaaccu

SEQ ID NO: 2655389 - RNA, 19 nt, Artificial Sequence
  Description of Artificial Sequence: Synthetic oligonucleotide
ugcaaccuguuggcauucu

SEQ ID NO: 2655390 - RNA, 19 nt, Artificial Sequence
  Description of Artificial Sequence: Synthetic oligonucleotide
cugcccugcggacccggcc

SEQ ID NO: 2655391 - RNA, 19 nt, Artificial Sequence
  Description of Artificial Sequence: Synthetic oligonucleotide
ccuucaccucuuucauccg

SEQ ID NO: 2655392 - RNA, 19 nt, Artificial Sequence
  Description of Artificial Sequence: Synthetic oligonucleotide
gucuggaguuccacgcuuc

SEQ ID NO: 2655393 - RNA, 19 nt, Artificial Sequence
  Description of Artificial Sequence: Synthetic oligonucleotide
accuguuccuuuggcggga

SEQ ID NO: 2655394 - RNA, 19 nt, Artificial Sequence
  Description of Artificial Sequence: Synthetic oligonucleotide
gugccugggacuuguuugu

SEQ ID NO: 2655395 - RNA, 19 nt, Artificial Sequence
  Description of Artificial Sequence: Synthetic oligonucleotide
ugccgcugcccugcggacc

SEQ ID NO: 2655396 - RNA, 19 nt, Artificial Sequence
  Description of Artificial Sequence: Synthetic oligonucleotide
uuguggcaccuguuccuuu

SEQ ID NO: 2655397 - RNA, 19 nt, Artificial Sequence
  Description of Artificial Sequence: Synthetic oligonucleotide
guugcucccgcugcuucuc

SEQ ID NO: 2655398 - RNA, 19 nt, Artificial Sequence
  Description of Artificial Sequence: Synthetic oligonucleotide
guuugugggcacauccccu

SEQ ID NO: 2655399 - RNA, 19 nt, Artificial Sequence
  Description of Artificial Sequence: Synthetic oligonucleotide
ggcgggaccauuugcugaa

SEQ ID NO: 2655400 - RNA, 19 nt, Artificial Sequence
  Description of Artificial Sequence: Synthetic oligonucleotide
gccaccagggcaagccagg

SEQ ID NO: 2655401 - RNA, 19 nt, Artificial Sequence
  Description of Artificial Sequence: Synthetic oligonucleotide
gcucaggucauaggugaac

SEQ ID NO: 2655402 - RNA, 19 nt, Artificial Sequence
  Description of Artificial Sequence: Synthetic oligonucleotide
gcacauccccuuucccuug

SEQ ID NO: 2655403 - RNA, 19 nt, Artificial Sequence
  Description of Artificial Sequence: Synthetic oligonucleotide
gcaaccuguuggcauucuc

SEQ ID NO: 2655404 - RNA, 19 nt, Artificial Sequence
  Description of Artificial Sequence: Synthetic oligonucleotide
gugucuggaguuccacgcu

SEQ ID NO: 2655405 - RNA, 19 nt, Artificial Sequence
  Description of Artificial Sequence: Synthetic oligonucleotide
cuggaaaccacugcuucau

SEQ ID NO: 2655406 - RNA, 19 nt, Artificial Sequence
  Description of Artificial Sequence: Synthetic oligonucleotide
uuccuuuggcgggaccauu

SEQ ID NO: 2655407 - RNA, 19 nt, Artificial Sequence
  Description of Artificial Sequence: Synthetic oligonucleotide
gccuucucguccucgugca

SEQ ID NO: 2655408 - RNA, 19 nt, Artificial Sequence
  Description of Artificial Sequence: Synthetic oligonucleotide
cagcuggucuugcaguucu

SEQ ID NO: 2655409 - RNA, 19 nt, Artificial Sequence
  Description of Artificial Sequence: Synthetic oligonucleotide
ccuuuggcgggaccauuug

SEQ ID NO: 2655410 - RNA, 19 nt, Artificial Sequence
  Description of Artificial Sequence: Synthetic oligonucleotide
ggccaccagggcaagccag

SEQ ID NO: 2655411 - RNA, 19 nt, Artificial Sequence
  Description of Artificial Sequence: Synthetic oligonucleotide
gcugaagcuugggcugagg

SEQ ID NO: 2655412 - RNA, 19 nt, Artificial Sequence
  Description of Artificial Sequence: Synthetic oligonucleotide
cuuucccuuguggcaccug

SEQ ID NO: 2655413 - RNA, 19 nt, Artificial Sequence
  Description of Artificial Sequence: Synthetic oligonucleotide
cucugccgcugcccugcgg

SEQ ID NO: 2655414 - RNA, 19 nt, Artificial Sequence
  Description of Artificial Sequence: Synthetic oligonucleotide
cuggagcuugcaauccagu

SEQ ID NO: 2655415 - RNA, 19 nt, Artificial Sequence
  Description of Artificial Sequence: Synthetic oligonucleotide
cagcuccacaaugcguguc

SEQ ID NO: 2655416 - RNA, 19 nt, Artificial Sequence
  Description of Artificial Sequence: Synthetic oligonucleotide
gcggacccggccuuccagc

SEQ ID NO: 2655417 - RNA, 19 nt, Artificial Sequence
  Description of Artificial Sequence: Synthetic oligonucleotide
gugcaaccuguuggcauuc

SEQ ID NO: 2655418 - RNA, 19 nt, Artificial Sequence
  Description of Artificial Sequence: Synthetic oligonucleotide
cucgugcaaccuguuggca

SEQ ID NO: 2655419 - RNA, 19 nt, Artificial Sequence
  Description of Artificial Sequence: Synthetic oligonucleotide
cacgcuucuggagcuugca

SEQ ID NO: 2655420 - RNA, 19 nt, Artificial Sequence
  Description of Artificial Sequence: Synthetic oligonucleotide
ccccuuucccuuguggcac

SEQ ID NO: 2655421 - RNA, 19 nt, Artificial Sequence
  Description of Artificial Sequence: Synthetic oligonucleotide
cugccgcugcccugcggac

SEQ ID NO: 2655422 - RNA, 19 nt, Artificial Sequence
  Description of Artificial Sequence: Synthetic oligonucleotide
ggcacauccccuuucccuu

SEQ ID NO: 2655423 - RNA, 19 nt, Artificial Sequence
  Description of Artificial Sequence: Synthetic oligonucleotide
ggauccuguugaguugcuc

SEQ ID NO: 2655424 - RNA, 19 nt, Artificial Sequence
  Description of Artificial Sequence: Synthetic oligonucleotide
ggacuuguuugugggcaca

SEQ ID NO: 2655425 - RNA, 19 nt, Artificial Sequence
  Description of Artificial Sequence: Synthetic oligonucleotide
agcuugcaauccaguaguu

SEQ ID NO: 2655426 - RNA, 19 nt, Artificial Sequence
  Description of Artificial Sequence: Synthetic oligonucleotide
auucuccaucuggaagaua

SEQ ID NO: 2655427 - RNA, 19 nt, Artificial Sequence
  Description of Artificial Sequence: Synthetic oligonucleotide
augcgugucuggaguucca

SEQ ID NO: 2655428 - RNA, 19 nt, Artificial Sequence
  Description of Artificial Sequence: Synthetic oligonucleotide
cacccguucuucacacugu

SEQ ID NO: 2655429 - RNA, 19 nt, Artificial Sequence
  Description of Artificial Sequence: Synthetic oligonucleotide
ccgcaucucuggaaaccac

SEQ ID NO: 2655430 - RNA, 19 nt, Artificial Sequence
  Description of Artificial Sequence: Synthetic oligonucleotide
cccuuucccuuguggcacc

SEQ ID NO: 2655431 - RNA, 19 nt, Artificial Sequence
  Description of Artificial Sequence: Synthetic oligonucleotide
ccagggcaagccaggauaa

SEQ ID NO: 2655432 - RNA, 19 nt, Artificial Sequence
  Description of Artificial Sequence: Synthetic oligonucleotide
ggucgucucuuccacccgu

SEQ ID NO: 2655433 - RNA, 19 nt, Artificial Sequence
  Description of Artificial Sequence: Synthetic oligonucleotide
gcaggaugccauaacuccu

SEQ ID NO: 2655434 - RNA, 19 nt, Artificial Sequence
  Description of Artificial Sequence: Synthetic oligonucleotide
cugaggcuggucauuucuu

SEQ ID NO: 2655435 - RNA, 19 nt, Artificial Sequence
  Description of Artificial Sequence: Synthetic oligonucleotide
ccucuuucauccgguuaac

SEQ ID NO: 2655436 - RNA, 19 nt, Artificial Sequence
  Description of Artificial Sequence: Synthetic oligonucleotide
ucucgccuguggugauauu

SEQ ID NO: 2655437 - RNA, 19 nt, Artificial Sequence
  Description of Artificial Sequence: Synthetic oligonucleotide
agcucgcccuggaacucgu

SEQ ID NO: 2655438 - RNA, 19 nt, Artificial Sequence
  Description of Artificial Sequence: Synthetic oligonucleotide
guccugcugcaggaugcca

SEQ ID NO: 2655439 - RNA, 19 nt, Artificial Sequence
  Description of Artificial Sequence: Synthetic oligonucleotide
gcaguucucugaugagccu

SEQ ID NO: 2655440 - RNA, 19 nt, Artificial Sequence
  Description of Artificial Sequence: Synthetic oligonucleotide
ggggcuggugccugggacu

SEQ ID NO: 2655441 - RNA, 19 nt, Artificial Sequence
  Description of Artificial Sequence: Synthetic oligonucleotide
cacuguuccuucaccucuu

SEQ ID NO: 2655442 - RNA, 19 nt, Artificial Sequence
  Description of Artificial Sequence: Synthetic oligonucleotide
guuccuuuggcgggaccau

SEQ ID NO: 2655443 - RNA, 19 nt, Artificial Sequence
  Description of Artificial Sequence: Synthetic oligonucleotide
cgguuaacacaccggcuca

SEQ ID NO: 2655444 - RNA, 19 nt, Artificial Sequence
  Description of Artificial Sequence: Synthetic oligonucleotide
cuuguggcaccuguuccuu

SEQ ID NO: 2655445 - RNA, 19 nt, Artificial Sequence
  Description of Artificial Sequence: Synthetic oligonucleotide
cccgcaucucuggaaacca

SEQ ID NO: 2655446 - RNA, 19 nt, Artificial Sequence
  Description of Artificial Sequence: Synthetic oligonucleotide
ggacccggccuuccagcuc

SEQ ID NO: 2655447 - RNA, 19 nt, Artificial Sequence
  Description of Artificial Sequence: Synthetic oligonucleotide
cacauccccuuucccuugu

SEQ ID NO: 2655448 - RNA, 19 nt, Artificial Sequence
  Description of Artificial Sequence: Synthetic oligonucleotide
cucucgccuguggugauau

SEQ ID NO: 2655449 - RNA, 19 nt, Artificial Sequence
  Description of Artificial Sequence: Synthetic oligonucleotide
ggucauaggugaacuucau

SEQ ID NO: 2655450 - RNA, 19 nt, Artificial Sequence
  Description of Artificial Sequence: Synthetic oligonucleotide
ggcuagacuggauccuguu

SEQ ID NO: 2655451 - RNA, 19 nt, Artificial Sequence
  Description of Artificial Sequence: Synthetic oligonucleotide
cugcggacccggccuucca

SEQ ID NO: 2655452 - RNA, 19 nt, Artificial Sequence
  Description of Artificial Sequence: Synthetic oligonucleotide
ccugcggacccggccuucc

SEQ ID NO: 2655453 - RNA, 19 nt, Artificial Sequence
  Description of Artificial Sequence: Synthetic oligonucleotide
gcgggaccauuugcugaag

SEQ ID NO: 2655454 - RNA, 19 nt, Artificial Sequence
  Description of Artificial Sequence: Synthetic oligonucleotide
ccuguuccuuuggcgggac

SEQ ID NO: 2655455 - RNA, 19 nt, Artificial Sequence
  Description of Artificial Sequence: Synthetic oligonucleotide
acacaccggcucaggucau

SEQ ID NO: 2655456 - RNA, 19 nt, Artificial Sequence
  Description of Artificial Sequence: Synthetic oligonucleotide
ccggccuuccagcuccaca

SEQ ID NO: 2655457 - RNA, 19 nt, Artificial Sequence
  Description of Artificial Sequence: Synthetic oligonucleotide
cgcuucuggagcuugcaau

SEQ ID NO: 2655458 - RNA, 19 nt, Artificial Sequence
  Description of Artificial Sequence: Synthetic oligonucleotide
caccagggcaagccaggau

SEQ ID NO: 2655459 - RNA, 19 nt, Artificial Sequence
  Description of Artificial Sequence: Synthetic oligonucleotide
cgucucuuccacccguucu

SEQ ID NO: 2655460 - RNA, 19 nt, Artificial Sequence
  Description of Artificial Sequence: Synthetic oligonucleotide
gcugcccugcggacccggc

SEQ ID NO: 2655461 - RNA, 19 nt, Artificial Sequence
  Description of Artificial Sequence: Synthetic oligonucleotide
cacaccggcucaggucaua

SEQ ID NO: 2655462 - RNA, 19 nt, Artificial Sequence
  Description of Artificial Sequence: Synthetic oligonucleotide
gucgucucuuccacccguu

SEQ ID NO: 2655463 - RNA, 19 nt, Artificial Sequence
  Description of Artificial Sequence: Synthetic oligonucleotide
ggcuggugccugggacuug

SEQ ID NO: 2655464 - RNA, 19 nt, Artificial Sequence
  Description of Artificial Sequence: Synthetic oligonucleotide
cgugcaaccuguuggcauu

SEQ ID NO: 2655465 - RNA, 19 nt, Artificial Sequence
  Description of Artificial Sequence: Synthetic oligonucleotide
ccagcuccacaaugcgugu

SEQ ID NO: 2655466 - RNA, 19 nt, Artificial Sequence
  Description of Artificial Sequence: Synthetic oligonucleotide
ccaccagggcaagccagga

SEQ ID NO: 2655467 - RNA, 19 nt, Artificial Sequence
  Description of Artificial Sequence: Synthetic oligonucleotide
ccuucucguccucgugcaa

SEQ ID NO: 2655468 - RNA, 19 nt, Artificial Sequence
  Description of Artificial Sequence: Synthetic oligonucleotide
acccggccuuccagcucca

SEQ ID NO: 2655469 - RNA, 19 nt, Artificial Sequence
  Description of Artificial Sequence: Synthetic oligonucleotide
gggcuggugccugggacuu

SEQ ID NO: 2655470 - RNA, 19 nt, Artificial Sequence
  Description of Artificial Sequence: Synthetic oligonucleotide
gccucucgccuguggugau

SEQ ID NO: 2655471 - RNA, 19 nt, Artificial Sequence
  Description of Artificial Sequence: Synthetic oligonucleotide
ccaugcuggacugguucuu

SEQ ID NO: 2655472 - RNA, 19 nt, Artificial Sequence
  Description of Artificial Sequence: Synthetic oligonucleotide
cggacccggccuuccagcu

SEQ ID NO: 2655473 - RNA, 19 nt, Artificial Sequence
  Description of Artificial Sequence: Synthetic oligonucleotide
ccuuucccuuguggcaccu

SEQ ID NO: 2655474 - RNA, 19 nt, Artificial Sequence
  Description of Artificial Sequence: Synthetic oligonucleotide
ccucucgccuguggugaua

SEQ ID NO: 2655475 - RNA, 19 nt, Artificial Sequence
  Description of Artificial Sequence: Synthetic oligonucleotide
ccgcugcccugcggacccg

SEQ ID NO: 2655476 - RNA, 19 nt, Artificial Sequence
  Description of Artificial Sequence: Synthetic oligonucleotide
cgccuguggugauauuauu

SEQ ID NO: 2655477 - RNA, 19 nt, Artificial Sequence
  Description of Artificial Sequence: Synthetic oligonucleotide
cgcccuggaacucguucuu

SEQ ID NO: 2655478 - RNA, 19 nt, Artificial Sequence
  Description of Artificial Sequence: Synthetic oligonucleotide
cguccucgugcaaccuguu

SEQ ID NO: 2655479 - RNA, 19 nt, Artificial Sequence
  Description of Artificial Sequence: Synthetic oligonucleotide
gcucgcccuggaacucguu

SEQ ID NO: 2655480 - RNA, 19 nt, Artificial Sequence
  Description of Artificial Sequence: Synthetic oligonucleotide
aauaggaaggacuugaacc

SEQ ID NO: 2655481 - RNA, 19 nt, Artificial Sequence
  Description of Artificial Sequence: Synthetic oligonucleotide
ucuaguauuguccaaaagg

SEQ ID NO: 2655482 - RNA, 19 nt, Artificial Sequence
  Description of Artificial Sequence: Synthetic oligonucleotide
aaagcaacagcuuuggaga

SEQ ID NO: 2655483 - RNA, 19 nt, Artificial Sequence
  Description of Artificial Sequence: Synthetic oligonucleotide
ugcaugucgaugaacaucg

SEQ ID NO: 2655484 - RNA, 19 nt, Artificial Sequence
  Description of Artificial Sequence: Synthetic oligonucleotide
caaauagaaauguauagag

SEQ ID NO: 2655485 - RNA, 19 nt, Artificial Sequence
  Description of Artificial Sequence: Synthetic oligonucleotide
auugcagggauucggaucc

SEQ ID NO: 2655486 - RNA, 19 nt, Artificial Sequence
  Description of Artificial Sequence: Synthetic oligonucleotide
aauuaaaguuguuauggug

SEQ ID NO: 2655487 - RNA, 19 nt, Artificial Sequence
  Description of Artificial Sequence: Synthetic oligonucleotide
ucgaugaacaucgugaugg

SEQ ID NO: 2655488 - RNA, 19 nt, Artificial Sequence
  Description of Artificial Sequence: Synthetic oligonucleotide
guugguauguuucaaaugc

SEQ ID NO: 2655489 - RNA, 19 nt, Artificial Sequence
  Description of Artificial Sequence: Synthetic oligonucleotide
gaaagcaacagcuuuggag

SEQ ID NO: 2655490 - RNA, 19 nt, Artificial Sequence
  Description of Artificial Sequence: Synthetic oligonucleotide
cuaguauuguccaaaaggc

SEQ ID NO: 2655491 - RNA, 19 nt, Artificial Sequence
  Description of Artificial Sequence: Synthetic oligonucleotide
aacuccuuggaguaccacc

SEQ ID NO: 2655492 - RNA, 19 nt, Artificial Sequence
  Description of Artificial Sequence: Synthetic oligonucleotide
aaauucucggguccgaguc

SEQ ID NO: 2655493 - RNA, 19 nt, Artificial Sequence
  Description of Artificial Sequence: Synthetic oligonucleotide
uggagaaauccucaaauag

SEQ ID NO: 2655494 - RNA, 19 nt, Artificial Sequence
  Description of Artificial Sequence: Synthetic oligonucleotide
ugcgagacaaaguagacgc

SEQ ID NO: 2655495 - RNA, 19 nt, Artificial Sequence
  Description of Artificial Sequence: Synthetic oligonucleotide
aaccacucgacgcagcgcc

SEQ ID NO: 2655496 - RNA, 19 nt, Artificial Sequence
  Description of Artificial Sequence: Synthetic oligonucleotide
aacaggaggaguauaaggg

SEQ ID NO: 2655497 - RNA, 19 nt, Artificial Sequence
  Description of Artificial Sequence: Synthetic oligonucleotide
uccucauacuuauagaaag

SEQ ID NO: 2655498 - RNA, 19 nt, Artificial Sequence
  Description of Artificial Sequence: Synthetic oligonucleotide
aaauagaaauguauagagg

SEQ ID NO: 2655499 - RNA, 19 nt, Artificial Sequence
  Description of Artificial Sequence: Synthetic oligonucleotide
ggaauuaaaguuguuaugg

SEQ ID NO: 2655500 - RNA, 19 nt, Artificial Sequence
  Description of Artificial Sequence: Synthetic oligonucleotide
uuuccuuugaagaaggcau

SEQ ID NO: 2655501 - RNA, 19 nt, Artificial Sequence
  Description of Artificial Sequence: Synthetic oligonucleotide
uauggugugaacugcauac

SEQ ID NO: 2655502 - RNA, 19 nt, Artificial Sequence
  Description of Artificial Sequence: Synthetic oligonucleotide
gaacaggaggaguauaagg

SEQ ID NO: 2655503 - RNA, 19 nt, Artificial Sequence
  Description of Artificial Sequence: Synthetic oligonucleotide
ucaaauagaaauguauaga

SEQ ID NO: 2655504 - RNA, 19 nt, Artificial Sequence
  Description of Artificial Sequence: Synthetic oligonucleotide
ugugggaucucccugguug

SEQ ID NO: 2655505 - RNA, 19 nt, Artificial Sequence
  Description of Artificial Sequence: Synthetic oligonucleotide
auagaaaggguuccgcaac

SEQ ID NO: 2655506 - RNA, 19 nt, Artificial Sequence
  Description of Artificial Sequence: Synthetic oligonucleotide
aaggcaacugugcuguggg

SEQ ID NO: 2655507 - RNA, 19 nt, Artificial Sequence
  Description of Artificial Sequence: Synthetic oligonucleotide
aacacaagcucacaaaaua

SEQ ID NO: 2655508 - RNA, 19 nt, Artificial Sequence
  Description of Artificial Sequence: Synthetic oligonucleotide
aauucucggguccgagucc

SEQ ID NO: 2655509 - RNA, 19 nt, Artificial Sequence
  Description of Artificial Sequence: Synthetic oligonucleotide
ucguucacggaaauucucg

SEQ ID NO: 2655510 - RNA, 19 nt, Artificial Sequence
  Description of Artificial Sequence: Synthetic oligonucleotide
auugcugaacuccugcggg

SEQ ID NO: 2655511 - RNA, 19 nt, Artificial Sequence
  Description of Artificial Sequence: Synthetic oligonucleotide
gagacauggguucagagca

SEQ ID NO: 2655512 - RNA, 19 nt, Artificial Sequence
  Description of Artificial Sequence: Synthetic oligonucleotide
auuaaaguuguuauggugu

SEQ ID NO: 2655513 - RNA, 19 nt, Artificial Sequence
  Description of Artificial Sequence: Synthetic oligonucleotide
aauccucaaauagaaaugu

SEQ ID NO: 2655514 - RNA, 19 nt, Artificial Sequence
  Description of Artificial Sequence: Synthetic oligonucleotide
auaggaaggacuugaacca

SEQ ID NO: 2655515 - RNA, 19 nt, Artificial Sequence
  Description of Artificial Sequence: Synthetic oligonucleotide
aaauguauagaggauugga

SEQ ID NO: 2655516 - RNA, 19 nt, Artificial Sequence
  Description of Artificial Sequence: Synthetic oligonucleotide
uuaaaguuguuauggugug

SEQ ID NO: 2655517 - RNA, 19 nt, Artificial Sequence
  Description of Artificial Sequence: Synthetic oligonucleotide
ggcauagacaccuaugagg

SEQ ID NO: 2655518 - RNA, 19 nt, Artificial Sequence
  Description of Artificial Sequence: Synthetic oligonucleotide
uccucaaauagaaauguau

SEQ ID NO: 2655519 - RNA, 19 nt, Artificial Sequence
  Description of Artificial Sequence: Synthetic oligonucleotide
cacaagcucacaaaauagg

SEQ ID NO: 2655520 - RNA, 19 nt, Artificial Sequence
  Description of Artificial Sequence: Synthetic oligonucleotide
uuccgcaacaugaacagga

SEQ ID NO: 2655521 - RNA, 19 nt, Artificial Sequence
  Description of Artificial Sequence: Synthetic oligonucleotide
auagacaccuaugaggguc

SEQ ID NO: 2655522 - RNA, 19 nt, Artificial Sequence
  Description of Artificial Sequence: Synthetic oligonucleotide
guuguuauggugugaacug

SEQ ID NO: 2655523 - RNA, 19 nt, Artificial Sequence
  Description of Artificial Sequence: Synthetic oligonucleotide
cucauacuuauagaaaggg

SEQ ID NO: 2655524 - RNA, 19 nt, Artificial Sequence
  Description of Artificial Sequence: Synthetic oligonucleotide
acaggaggaguauaagggg

SEQ ID NO: 2655525 - RNA, 19 nt, Artificial Sequence
  Description of Artificial Sequence: Synthetic oligonucleotide
uggaauuaaaguuguuaug

SEQ ID NO: 2655526 - RNA, 19 nt, Artificial Sequence
  Description of Artificial Sequence: Synthetic oligonucleotide
gauugcugaacuccugcgg

SEQ ID NO: 2655527 - RNA, 19 nt, Artificial Sequence
  Description of Artificial Sequence: Synthetic oligonucleotide
uuauagaaaggguuccgca

SEQ ID NO: 2655528 - RNA, 19 nt, Artificial Sequence
  Description of Artificial Sequence: Synthetic oligonucleotide
ucauacuuauagaaagggu

SEQ ID NO: 2655529 - RNA, 19 nt, Artificial Sequence
  Description of Artificial Sequence: Synthetic oligonucleotide
ugcggguacacuucgggcg

SEQ ID NO: 2655530 - RNA, 19 nt, Artificial Sequence
  Description of Artificial Sequence: Synthetic oligonucleotide
ugguauguuucaaaugcug

SEQ ID NO: 2655531 - RNA, 19 nt, Artificial Sequence
  Description of Artificial Sequence: Synthetic oligonucleotide
auacuuauagaaaggguuc

SEQ ID NO: 2655532 - RNA, 19 nt, Artificial Sequence
  Description of Artificial Sequence: Synthetic oligonucleotide
aaaggguuccgcaacauga

SEQ ID NO: 2655533 - RNA, 19 nt, Artificial Sequence
  Description of Artificial Sequence: Synthetic oligonucleotide
aggacuugaaccacaaugg

SEQ ID NO: 2655534 - RNA, 19 nt, Artificial Sequence
  Description of Artificial Sequence: Synthetic oligonucleotide
uucacggaaauucucgggu

SEQ ID NO: 2655535 - RNA, 19 nt, Artificial Sequence
  Description of Artificial Sequence: Synthetic oligonucleotide
aaguagacgcccagcaacc

SEQ ID NO: 2655536 - RNA, 19 nt, Artificial Sequence
  Description of Artificial Sequence: Synthetic oligonucleotide
uguauagaggauuggaauu

SEQ ID NO: 2655537 - RNA, 19 nt, Artificial Sequence
  Description of Artificial Sequence: Synthetic oligonucleotide
acaccuaugagggucaguc

SEQ ID NO: 2655538 - RNA, 19 nt, Artificial Sequence
  Description of Artificial Sequence: Synthetic oligonucleotide
uggaguaccaccgcaacag

SEQ ID NO: 2655539 - RNA, 19 nt, Artificial Sequence
  Description of Artificial Sequence: Synthetic oligonucleotide
gacuugaaccacaaugggg

SEQ ID NO: 2655540 - RNA, 19 nt, Artificial Sequence
  Description of Artificial Sequence: Synthetic oligonucleotide
uauagaaaggguuccgcaa

SEQ ID NO: 2655541 - RNA, 19 nt, Artificial Sequence
  Description of Artificial Sequence: Synthetic oligonucleotide
uguugguauguuucaaaug

SEQ ID NO: 2655542 - RNA, 19 nt, Artificial Sequence
  Description of Artificial Sequence: Synthetic oligonucleotide
cugcauacaugauugcagg

SEQ ID NO: 2655543 - RNA, 19 nt, Artificial Sequence
  Description of Artificial Sequence: Synthetic oligonucleotide
uaguauuguccaaaaggca

SEQ ID NO: 2655544 - RNA, 19 nt, Artificial Sequence
  Description of Artificial Sequence: Synthetic oligonucleotide
auguauagaggauuggaau

SEQ ID NO: 2655545 - RNA, 19 nt, Artificial Sequence
  Description of Artificial Sequence: Synthetic oligonucleotide
aaguuguuauggugugaac

SEQ ID NO: 2655546 - RNA, 19 nt, Artificial Sequence
  Description of Artificial Sequence: Synthetic oligonucleotide
aaaguuguuauggugugaa

SEQ ID NO: 2655547 - RNA, 19 nt, Artificial Sequence
  Description of Artificial Sequence: Synthetic oligonucleotide
acaaaguagacgcccagca

SEQ ID NO: 2655548 - RNA, 19 nt, Artificial Sequence
  Description of Artificial Sequence: Synthetic oligonucleotide
uguuauggugugaacugca

SEQ ID NO: 2655549 - RNA, 19 nt, Artificial Sequence
  Description of Artificial Sequence: Synthetic oligonucleotide
aauguauagaggauuggaa

SEQ ID NO: 2655550 - RNA, 19 nt, Artificial Sequence
  Description of Artificial Sequence: Synthetic oligonucleotide
uucuaguauuguccaaaag

SEQ ID NO: 2655551 - RNA, 19 nt, Artificial Sequence
  Description of Artificial Sequence: Synthetic oligonucleotide
acugcuguugguauguuuc

SEQ ID NO: 2655552 - RNA, 19 nt, Artificial Sequence
  Description of Artificial Sequence: Synthetic oligonucleotide
aggauuggaauuaaaguug

SEQ ID NO: 2655553 - RNA, 19 nt, Artificial Sequence
  Description of Artificial Sequence: Synthetic oligonucleotide
ugcauacaugauugcaggg

SEQ ID NO: 2655554 - RNA, 19 nt, Artificial Sequence
  Description of Artificial Sequence: Synthetic oligonucleotide
aguuguuauggugugaacu

SEQ ID NO: 2655555 - RNA, 19 nt, Artificial Sequence
  Description of Artificial Sequence: Synthetic oligonucleotide
agaaauguauagaggauug

SEQ ID NO: 2655556 - RNA, 19 nt, Artificial Sequence
  Description of Artificial Sequence: Synthetic oligonucleotide
gaaauguauagaggauugg

SEQ ID NO: 2655557 - RNA, 19 nt, Artificial Sequence
  Description of Artificial Sequence: Synthetic oligonucleotide
aaaggcaacugugcugugg

SEQ ID NO: 2655558 - RNA, 19 nt, Artificial Sequence
  Description of Artificial Sequence: Synthetic oligonucleotide
uuuucuaguauuguccaaa

SEQ ID NO: 2655559 - RNA, 19 nt, Artificial Sequence
  Description of Artificial Sequence: Synthetic oligonucleotide
aacaucgugauggggaugu

SEQ ID NO: 2655560 - RNA, 19 nt, Artificial Sequence
  Description of Artificial Sequence: Synthetic oligonucleotide
gcugcaacaggaaagaaag

SEQ ID NO: 2655561 - RNA, 19 nt, Artificial Sequence
  Description of Artificial Sequence: Synthetic oligonucleotide
agauugcugaacuccugcg

SEQ ID NO: 2655562 - RNA, 19 nt, Artificial Sequence
  Description of Artificial Sequence: Synthetic oligonucleotide
agaaggcauaugcugcaac

SEQ ID NO: 2655563 - RNA, 19 nt, Artificial Sequence
  Description of Artificial Sequence: Synthetic oligonucleotide
uaugcugcaacaggaaaga

SEQ ID NO: 2655564 - RNA, 19 nt, Artificial Sequence
  Description of Artificial Sequence: Synthetic oligonucleotide
gcauagacaccuaugaggg

SEQ ID NO: 2655565 - RNA, 19 nt, Artificial Sequence
  Description of Artificial Sequence: Synthetic oligonucleotide
aggcauaugcugcaacagg

SEQ ID NO: 2655566 - RNA, 19 nt, Artificial Sequence
  Description of Artificial Sequence: Synthetic oligonucleotide
caugauugcagggauucgg

SEQ ID NO: 2655567 - RNA, 19 nt, Artificial Sequence
  Description of Artificial Sequence: Synthetic oligonucleotide
uacuuauagaaaggguucc

SEQ ID NO: 2655568 - RNA, 19 nt, Artificial Sequence
  Description of Artificial Sequence: Synthetic oligonucleotide
cagggauucggauccaccg

SEQ ID NO: 2655569 - RNA, 19 nt, Artificial Sequence
  Description of Artificial Sequence: Synthetic oligonucleotide
caacagauugcugaacucc

SEQ ID NO: 2655570 - RNA, 19 nt, Artificial Sequence
  Description of Artificial Sequence: Synthetic oligonucleotide
aaggcauaugcugcaacag

SEQ ID NO: 2655571 - RNA, 19 nt, Artificial Sequence
  Description of Artificial Sequence: Synthetic oligonucleotide
aguauuguccaaaaggcaa

SEQ ID NO: 2655572 - RNA, 19 nt, Artificial Sequence
  Description of Artificial Sequence: Synthetic oligonucleotide
cuuauagaaaggguuccgc

SEQ ID NO: 2655573 - RNA, 19 nt, Artificial Sequence
  Description of Artificial Sequence: Synthetic oligonucleotide
agaaaggcagcuggaacac

SEQ ID NO: 2655574 - RNA, 19 nt, Artificial Sequence
  Description of Artificial Sequence: Synthetic oligonucleotide
acugcauacaugauugcag

SEQ ID NO: 2655575 - RNA, 19 nt, Artificial Sequence
  Description of Artificial Sequence: Synthetic oligonucleotide
aacugcauacaugauugca

SEQ ID NO: 2655576 - RNA, 19 nt, Artificial Sequence
  Description of Artificial Sequence: Synthetic oligonucleotide
ugcugcaacaggaaagaaa

SEQ ID NO: 2655577 - RNA, 19 nt, Artificial Sequence
  Description of Artificial Sequence: Synthetic oligonucleotide
gaaggcauaugcugcaaca

SEQ ID NO: 2655578 - RNA, 19 nt, Artificial Sequence
  Description of Artificial Sequence: Synthetic oligonucleotide
gauugcagggauucggauc

SEQ ID NO: 2655579 - RNA, 19 nt, Artificial Sequence
  Description of Artificial Sequence: Synthetic oligonucleotide
uacaugauugcagggauuc

SEQ ID NO: 2655580 - RNA, 19 nt, Artificial Sequence
  Description of Artificial Sequence: Synthetic oligonucleotide
acuuauagaaaggguuccg

SEQ ID NO: 2655581 - RNA, 19 nt, Artificial Sequence
  Description of Artificial Sequence: Synthetic oligonucleotide
guucacggaaauucucggg

SEQ ID NO: 2655582 - RNA, 19 nt, Artificial Sequence
  Description of Artificial Sequence: Synthetic oligonucleotide
accuaugagggucagucgu

SEQ ID NO: 2655583 - RNA, 19 nt, Artificial Sequence
  Description of Artificial Sequence: Synthetic oligonucleotide
uugguauguuucaaaugcu

SEQ ID NO: 2655584 - RNA, 19 nt, Artificial Sequence
  Description of Artificial Sequence: Synthetic oligonucleotide
augucgaugaacaucguga

SEQ ID NO: 2655585 - RNA, 19 nt, Artificial Sequence
  Description of Artificial Sequence: Synthetic oligonucleotide
acuccuuggaguaccaccg

SEQ ID NO: 2655586 - RNA, 19 nt, Artificial Sequence
  Description of Artificial Sequence: Synthetic oligonucleotide
caaaauaggaaggacuuga

SEQ ID NO: 2655587 - RNA, 19 nt, Artificial Sequence
  Description of Artificial Sequence: Synthetic oligonucleotide
auuuccuuugaagaaggca

SEQ ID NO: 2655588 - RNA, 19 nt, Artificial Sequence
  Description of Artificial Sequence: Synthetic oligonucleotide
aucgugauggggaugugcg

SEQ ID NO: 2655589 - RNA, 19 nt, Artificial Sequence
  Description of Artificial Sequence: Synthetic oligonucleotide
acacaagcucacaaaauag

SEQ ID NO: 2655590 - RNA, 19 nt, Artificial Sequence
  Description of Artificial Sequence: Synthetic oligonucleotide
gaugaacaucgugaugggg

SEQ ID NO: 2655591 - RNA, 19 nt, Artificial Sequence
  Description of Artificial Sequence: Synthetic oligonucleotide
uuucuaguauuguccaaaa

SEQ ID NO: 2655592 - RNA, 19 nt, Artificial Sequence
  Description of Artificial Sequence: Synthetic oligonucleotide
gaugugcgagacaaaguag

SEQ ID NO: 2655593 - RNA, 19 nt, Artificial Sequence
  Description of Artificial Sequence: Synthetic oligonucleotide
gagggucagucguucacgg

SEQ ID NO: 2655594 - RNA, 19 nt, Artificial Sequence
  Description of Artificial Sequence: Synthetic oligonucleotide
uccgcaacaugaacaggag

SEQ ID NO: 2655595 - RNA, 19 nt, Artificial Sequence
  Description of Artificial Sequence: Synthetic oligonucleotide
uggaacacaagcucacaaa

SEQ ID NO: 2655596 - RNA, 19 nt, Artificial Sequence
  Description of Artificial Sequence: Synthetic oligonucleotide
aaugcugcugagacauggg

SEQ ID NO: 2655597 - RNA, 19 nt, Artificial Sequence
  Description of Artificial Sequence: Synthetic oligonucleotide
ugagggucagucguucacg

SEQ ID NO: 2655598 - RNA, 19 nt, Artificial Sequence
  Description of Artificial Sequence: Synthetic oligonucleotide
aacuccugcggguacacuu

SEQ ID NO: 2655599 - RNA, 19 nt, Artificial Sequence
  Description of Artificial Sequence: Synthetic oligonucleotide
uucuccucauacuuauaga

SEQ ID NO: 2655600 - RNA, 19 nt, Artificial Sequence
  Description of Artificial Sequence: Synthetic oligonucleotide
aacagauugcugaacuccu

SEQ ID NO: 2655601 - RNA, 19 nt, Artificial Sequence
  Description of Artificial Sequence: Synthetic oligonucleotide
gaaaggguuccgcaacaug

SEQ ID NO: 2655602 - RNA, 19 nt, Artificial Sequence
  Description of Artificial Sequence: Synthetic oligonucleotide
guaccaccgcaacagauug

SEQ ID NO: 2655603 - RNA, 19 nt, Artificial Sequence
  Description of Artificial Sequence: Synthetic oligonucleotide
agggauucggauccaccgg

SEQ ID NO: 2655604 - RNA, 19 nt, Artificial Sequence
  Description of Artificial Sequence: Synthetic oligonucleotide
cauacuuauagaaaggguu

SEQ ID NO: 2655605 - RNA, 19 nt, Artificial Sequence
  Description of Artificial Sequence: Synthetic oligonucleotide
uccgaguccuuugaaagca

SEQ ID NO: 2655606 - RNA, 19 nt, Artificial Sequence
  Description of Artificial Sequence: Synthetic oligonucleotide
ugugcugugggaucucccu

SEQ ID NO: 2655607 - RNA, 19 nt, Artificial Sequence
  Description of Artificial Sequence: Synthetic oligonucleotide
cagucguucacggaaauuc

SEQ ID NO: 2655608 - RNA, 19 nt, Artificial Sequence
  Description of Artificial Sequence: Synthetic oligonucleotide
gguuccgcaacaugaacag

SEQ ID NO: 2655609 - RNA, 19 nt, Artificial Sequence
  Description of Artificial Sequence: Synthetic oligonucleotide
ugucgaugaacaucgugau

SEQ ID NO: 2655610 - RNA, 19 nt, Artificial Sequence
  Description of Artificial Sequence: Synthetic oligonucleotide
uuggaguaccaccgcaaca

SEQ ID NO: 2655611 - RNA, 19 nt, Artificial Sequence
  Description of Artificial Sequence: Synthetic oligonucleotide
ugaacaucgugauggggau

SEQ ID NO: 2655612 - RNA, 19 nt, Artificial Sequence
  Description of Artificial Sequence: Synthetic oligonucleotide
uuguuauggugugaacugc

SEQ ID NO: 2655613 - RNA, 19 nt, Artificial Sequence
  Description of Artificial Sequence: Synthetic oligonucleotide
gaauuaaaguuguuauggu

SEQ ID NO: 2655614 - RNA, 19 nt, Artificial Sequence
  Description of Artificial Sequence: Synthetic oligonucleotide
uagacgcccagcaaccacu

SEQ ID NO: 2655615 - RNA, 19 nt, Artificial Sequence
  Description of Artificial Sequence: Synthetic oligonucleotide
aggguuccgcaacaugaac

SEQ ID NO: 2655616 - RNA, 19 nt, Artificial Sequence
  Description of Artificial Sequence: Synthetic oligonucleotide
uuauggugugaacugcaua

SEQ ID NO: 2655617 - RNA, 19 nt, Artificial Sequence
  Description of Artificial Sequence: Synthetic oligonucleotide
agggucuuugaacuccuug

SEQ ID NO: 2655618 - RNA, 19 nt, Artificial Sequence
  Description of Artificial Sequence: Synthetic oligonucleotide
uagacaccuaugaggguca

SEQ ID NO: 2655619 - RNA, 19 nt, Artificial Sequence
  Description of Artificial Sequence: Synthetic oligonucleotide
agacaaaguagacgcccag

SEQ ID NO: 2655620 - RNA, 19 nt, Artificial Sequence
  Description of Artificial Sequence: Synthetic oligonucleotide
gguauguuucaaaugcugc

SEQ ID NO: 2655621 - RNA, 19 nt, Artificial Sequence
  Description of Artificial Sequence: Synthetic oligonucleotide
uauuguccaaaaggcaacu

SEQ ID NO: 2655622 - RNA, 19 nt, Artificial Sequence
  Description of Artificial Sequence: Synthetic oligonucleotide
cacggaaauucucgggucc

SEQ ID NO: 2655623 - RNA, 19 nt, Artificial Sequence
  Description of Artificial Sequence: Synthetic oligonucleotide
ggacuugaaccacaauggg

SEQ ID NO: 2655624 - RNA, 19 nt, Artificial Sequence
  Description of Artificial Sequence: Synthetic oligonucleotide
cauguucggguccugucag

SEQ ID NO: 2655625 - RNA, 19 nt, Artificial Sequence
  Description of Artificial Sequence: Synthetic oligonucleotide
gacaaaguagacgcccagc

SEQ ID NO: 2655626 - RNA, 19 nt, Artificial Sequence
  Description of Artificial Sequence: Synthetic oligonucleotide
aaaauaggaaggacuugaa

SEQ ID NO: 2655627 - RNA, 19 nt, Artificial Sequence
  Description of Artificial Sequence: Synthetic oligonucleotide
acaaaauaggaaggacuug

SEQ ID NO: 2655628 - RNA, 19 nt, Artificial Sequence
  Description of Artificial Sequence: Synthetic oligonucleotide
cugagacauggguucagag

SEQ ID NO: 2655629 - RNA, 19 nt, Artificial Sequence
  Description of Artificial Sequence: Synthetic oligonucleotide
uccuuggaguaccaccgca

SEQ ID NO: 2655630 - RNA, 19 nt, Artificial Sequence
  Description of Artificial Sequence: Synthetic oligonucleotide
ugaaagcaacagcuuugga

SEQ ID NO: 2655631 - RNA, 19 nt, Artificial Sequence
  Description of Artificial Sequence: Synthetic oligonucleotide
auggguucagagcaguuuu

SEQ ID NO: 2655632 - RNA, 19 nt, Artificial Sequence
  Description of Artificial Sequence: Synthetic oligonucleotide
uccaccggcaauuuccuuu

SEQ ID NO: 2655633 - RNA, 19 nt, Artificial Sequence
  Description of Artificial Sequence: Synthetic oligonucleotide
uacacuucgggcggcagca

SEQ ID NO: 2655634 - RNA, 19 nt, Artificial Sequence
  Description of Artificial Sequence: Synthetic oligonucleotide
ccucauacuuauagaaagg

SEQ ID NO: 2655635 - RNA, 19 nt, Artificial Sequence
  Description of Artificial Sequence: Synthetic oligonucleotide
aagcaacagcuuuggagaa

SEQ ID NO: 2655636 - RNA, 19 nt, Artificial Sequence
  Description of Artificial Sequence: Synthetic oligonucleotide
uaaaguuguuaugguguga

SEQ ID NO: 2655637 - RNA, 19 nt, Artificial Sequence
  Description of Artificial Sequence: Synthetic oligonucleotide
ucgacgcagcgccuggcgg

SEQ ID NO: 2655638 - RNA, 19 nt, Artificial Sequence
  Description of Artificial Sequence: Synthetic oligonucleotide
auagaaauguauagaggau

SEQ ID NO: 2655639 - RNA, 19 nt, Artificial Sequence
  Description of Artificial Sequence: Synthetic oligonucleotide
gugcgagacaaaguagacg

SEQ ID NO: 2655640 - RNA, 19 nt, Artificial Sequence
  Description of Artificial Sequence: Synthetic oligonucleotide
cuuggaguaccaccgcaac

SEQ ID NO: 2655641 - RNA, 19 nt, Artificial Sequence
  Description of Artificial Sequence: Synthetic oligonucleotide
guauuguccaaaaggcaac

SEQ ID NO: 2655642 - RNA, 19 nt, Artificial Sequence
  Description of Artificial Sequence: Synthetic oligonucleotide
augugcgagacaaaguaga

SEQ ID NO: 2655643 - RNA, 19 nt, Artificial Sequence
  Description of Artificial Sequence: Synthetic oligonucleotide
cuuugaacuccuuggagua

SEQ ID NO: 2655644 - RNA, 19 nt, Artificial Sequence
  Description of Artificial Sequence: Synthetic oligonucleotide
cugcaacaggaaagaaagg

SEQ ID NO: 2655645 - RNA, 19 nt, Artificial Sequence
  Description of Artificial Sequence: Synthetic oligonucleotide
gggguccugcaucagaggg

SEQ ID NO: 2655646 - RNA, 19 nt, Artificial Sequence
  Description of Artificial Sequence: Synthetic oligonucleotide
ggauccaccggcaauuucc

SEQ ID NO: 2655647 - RNA, 19 nt, Artificial Sequence
  Description of Artificial Sequence: Synthetic oligonucleotide
ucacggaaauucucggguc

SEQ ID NO: 2655648 - RNA, 19 nt, Artificial Sequence
  Description of Artificial Sequence: Synthetic oligonucleotide
caagcucacaaaauaggaa

SEQ ID NO: 2655649 - RNA, 19 nt, Artificial Sequence
  Description of Artificial Sequence: Synthetic oligonucleotide
uaugagggucagucguuca

SEQ ID NO: 2655650 - RNA, 19 nt, Artificial Sequence
  Description of Artificial Sequence: Synthetic oligonucleotide
cagagggucuuugaacucc

SEQ ID NO: 2655651 - RNA, 19 nt, Artificial Sequence
  Description of Artificial Sequence: Synthetic oligonucleotide
ugggcuaguggcuggcccc

SEQ ID NO: 2655652 - RNA, 19 nt, Artificial Sequence
  Description of Artificial Sequence: Synthetic oligonucleotide
caccgcaacagauugcuga

SEQ ID NO: 2655653 - RNA, 19 nt, Artificial Sequence
  Description of Artificial Sequence: Synthetic oligonucleotide
ggaacacaagcucacaaaa

SEQ ID NO: 2655654 - RNA, 19 nt, Artificial Sequence
  Description of Artificial Sequence: Synthetic oligonucleotide
auggggaugugcgagacaa

SEQ ID NO: 2655655 - RNA, 19 nt, Artificial Sequence
  Description of Artificial Sequence: Synthetic oligonucleotide
ggaugugcgagacaaagua

SEQ ID NO: 2655656 - RNA, 19 nt, Artificial Sequence
  Description of Artificial Sequence: Synthetic oligonucleotide
ugugaacugcauacaugau

SEQ ID NO: 2655657 - RNA, 19 nt, Artificial Sequence
  Description of Artificial Sequence: Synthetic oligonucleotide
aaaaggcaacugugcugug

SEQ ID NO: 2655658 - RNA, 19 nt, Artificial Sequence
  Description of Artificial Sequence: Synthetic oligonucleotide
acggaaauucucggguccg

SEQ ID NO: 2655659 - RNA, 19 nt, Artificial Sequence
  Description of Artificial Sequence: Synthetic oligonucleotide
caccuaugagggucagucg

SEQ ID NO: 2655660 - RNA, 19 nt, Artificial Sequence
  Description of Artificial Sequence: Synthetic oligonucleotide
accaccgcaacagauugcu

SEQ ID NO: 2655661 - RNA, 19 nt, Artificial Sequence
  Description of Artificial Sequence: Synthetic oligonucleotide
ggcaauuuccuuugaagaa

SEQ ID NO: 2655662 - RNA, 19 nt, Artificial Sequence
  Description of Artificial Sequence: Synthetic oligonucleotide
ugauugcagggauucggau

SEQ ID NO: 2655663 - RNA, 19 nt, Artificial Sequence
  Description of Artificial Sequence: Synthetic oligonucleotide
gcugcugagacauggguuc

SEQ ID NO: 2655664 - RNA, 19 nt, Artificial Sequence
  Description of Artificial Sequence: Synthetic oligonucleotide
acgcccagcaaccacucga

SEQ ID NO: 2655665 - RNA, 19 nt, Artificial Sequence
  Description of Artificial Sequence: Synthetic oligonucleotide
auuguccaaaaggcaacug

SEQ ID NO: 2655666 - RNA, 19 nt, Artificial Sequence
  Description of Artificial Sequence: Synthetic oligonucleotide
acaugauugcagggauucg

SEQ ID NO: 2655667 - RNA, 19 nt, Artificial Sequence
  Description of Artificial Sequence: Synthetic oligonucleotide
cauaugcugcaacaggaaa

SEQ ID NO: 2655668 - RNA, 19 nt, Artificial Sequence
  Description of Artificial Sequence: Synthetic oligonucleotide
gucgaugaacaucgugaug

SEQ ID NO: 2655669 - RNA, 19 nt, Artificial Sequence
  Description of Artificial Sequence: Synthetic oligonucleotide
ugguugggcuaguggcugg

SEQ ID NO: 2655670 - RNA, 19 nt, Artificial Sequence
  Description of Artificial Sequence: Synthetic oligonucleotide
ggggcauagacaccuauga

SEQ ID NO: 2655671 - RNA, 19 nt, Artificial Sequence
  Description of Artificial Sequence: Synthetic oligonucleotide
caucgugauggggaugugc

SEQ ID NO: 2655672 - RNA, 19 nt, Artificial Sequence
  Description of Artificial Sequence: Synthetic oligonucleotide
gaguccuuugaaagcaaca

SEQ ID NO: 2655673 - RNA, 19 nt, Artificial Sequence
  Description of Artificial Sequence: Synthetic oligonucleotide
cugcaugucgaugaacauc

SEQ ID NO: 2655674 - RNA, 19 nt, Artificial Sequence
  Description of Artificial Sequence: Synthetic oligonucleotide
cugcggguacacuucgggc

SEQ ID NO: 2655675 - RNA, 19 nt, Artificial Sequence
  Description of Artificial Sequence: Synthetic oligonucleotide
ucgggcggcagcaccaccu

SEQ ID NO: 2655676 - RNA, 19 nt, Artificial Sequence
  Description of Artificial Sequence: Synthetic oligonucleotide
gcaaccacucgacgcagcg

SEQ ID NO: 2655677 - RNA, 19 nt, Artificial Sequence
  Description of Artificial Sequence: Synthetic oligonucleotide
ccggcaauuuccuuugaag

SEQ ID NO: 2655678 - RNA, 19 nt, Artificial Sequence
  Description of Artificial Sequence: Synthetic oligonucleotide
accgcaacagauugcugaa

SEQ ID NO: 2655679 - RNA, 19 nt, Artificial Sequence
  Description of Artificial Sequence: Synthetic oligonucleotide
uugcugaacuccugcgggu

SEQ ID NO: 2655680 - RNA, 19 nt, Artificial Sequence
  Description of Artificial Sequence: Synthetic oligonucleotide
guacacuucgggcggcagc

SEQ ID NO: 2655681 - RNA, 19 nt, Artificial Sequence
  Description of Artificial Sequence: Synthetic oligonucleotide
uaccaccgcaacagauugc

SEQ ID NO: 2655682 - RNA, 19 nt, Artificial Sequence
  Description of Artificial Sequence: Synthetic oligonucleotide
ucggguccgaguccuuuga

SEQ ID NO: 2655683 - RNA, 19 nt, Artificial Sequence
  Description of Artificial Sequence: Synthetic oligonucleotide
auucggauccaccggcaau

SEQ ID NO: 2655684 - RNA, 19 nt, Artificial Sequence
  Description of Artificial Sequence: Synthetic oligonucleotide
gggauucggauccaccggc

SEQ ID NO: 2655685 - RNA, 19 nt, Artificial Sequence
  Description of Artificial Sequence: Synthetic oligonucleotide
uuuucuccucauacuuaua

SEQ ID NO: 2655686 - RNA, 19 nt, Artificial Sequence
  Description of Artificial Sequence: Synthetic oligonucleotide
uucggauccaccggcaauu

SEQ ID NO: 2655687 - RNA, 19 nt, Artificial Sequence
  Description of Artificial Sequence: Synthetic oligonucleotide
agcaccaccugcaugucga

SEQ ID NO: 2655688 - RNA, 19 nt, Artificial Sequence
  Description of Artificial Sequence: Synthetic oligonucleotide
cccagcaaccacucgacgc

SEQ ID NO: 2655689 - RNA, 19 nt, Artificial Sequence
  Description of Artificial Sequence: Synthetic oligonucleotide
guagacgcccagcaaccac

SEQ ID NO: 2655690 - RNA, 19 nt, Artificial Sequence
  Description of Artificial Sequence: Synthetic oligonucleotide
cccugguugggcuaguggc

SEQ ID NO: 2655691 - RNA, 19 nt, Artificial Sequence
  Description of Artificial Sequence: Synthetic oligonucleotide
gaaauucucggguccgagu

SEQ ID NO: 2655692 - RNA, 19 nt, Artificial Sequence
  Description of Artificial Sequence: Synthetic oligonucleotide
aaggguuccgcaacaugaa

SEQ ID NO: 2655693 - RNA, 19 nt, Artificial Sequence
  Description of Artificial Sequence: Synthetic oligonucleotide
acuccugcggguacacuuc

SEQ ID NO: 2655694 - RNA, 19 nt, Artificial Sequence
  Description of Artificial Sequence: Synthetic oligonucleotide
gcaacaggaaagaaaggca

SEQ ID NO: 2655695 - RNA, 19 nt, Artificial Sequence
  Description of Artificial Sequence: Synthetic oligonucleotide
agucguucacggaaauucu

SEQ ID NO: 2655696 - RNA, 19 nt, Artificial Sequence
  Description of Artificial Sequence: Synthetic oligonucleotide
ucgugauggggaugugcga

SEQ ID NO: 2655697 - RNA, 19 nt, Artificial Sequence
  Description of Artificial Sequence: Synthetic oligonucleotide
cgcaacaugaacaggagga

SEQ ID NO: 2655698 - RNA, 19 nt, Artificial Sequence
  Description of Artificial Sequence: Synthetic oligonucleotide
cucgacgcagcgccuggcg

SEQ ID NO: 2655699 - RNA, 19 nt, Artificial Sequence
  Description of Artificial Sequence: Synthetic oligonucleotide
ggcauaugcugcaacagga

SEQ ID NO: 2655700 - RNA, 19 nt, Artificial Sequence
  Description of Artificial Sequence: Synthetic oligonucleotide
aguaccaccgcaacagauu

SEQ ID NO: 2655701 - RNA, 19 nt, Artificial Sequence
  Description of Artificial Sequence: Synthetic oligonucleotide
uaguggcuggccccuauuu

SEQ ID NO: 2655702 - RNA, 19 nt, Artificial Sequence
  Description of Artificial Sequence: Synthetic oligonucleotide
cuccugcggguacacuucg

SEQ ID NO: 2655703 - RNA, 19 nt, Artificial Sequence
  Description of Artificial Sequence: Synthetic oligonucleotide
cuaugagggucagucguuc

SEQ ID NO: 2655704 - RNA, 19 nt, Artificial Sequence
  Description of Artificial Sequence: Synthetic oligonucleotide
cuggaacacaagcucacaa

SEQ ID NO: 2655705 - RNA, 19 nt, Artificial Sequence
  Description of Artificial Sequence: Synthetic oligonucleotide
agaaauccucaaauagaaa

SEQ ID NO: 2655706 - RNA, 19 nt, Artificial Sequence
  Description of Artificial Sequence: Synthetic oligonucleotide
auucucggguccgaguccu

SEQ ID NO: 2655707 - RNA, 19 nt, Artificial Sequence
  Description of Artificial Sequence: Synthetic oligonucleotide
ugggaucucccugguuggg

SEQ ID NO: 2655708 - RNA, 19 nt, Artificial Sequence
  Description of Artificial Sequence: Synthetic oligonucleotide
gauucggauccaccggcaa

SEQ ID NO: 2655709 - RNA, 19 nt, Artificial Sequence
  Description of Artificial Sequence: Synthetic oligonucleotide
guuccgcaacaugaacagg

SEQ ID NO: 2655710 - RNA, 19 nt, Artificial Sequence
  Description of Artificial Sequence: Synthetic oligonucleotide
cugugcugugggaucuccc

SEQ ID NO: 2655711 - RNA, 19 nt, Artificial Sequence
  Description of Artificial Sequence: Synthetic oligonucleotide
ugcugagacauggguucag

SEQ ID NO: 2655712 - RNA, 19 nt, Artificial Sequence
  Description of Artificial Sequence: Synthetic oligonucleotide
cauacaugauugcagggau

SEQ ID NO: 2655713 - RNA, 19 nt, Artificial Sequence
  Description of Artificial Sequence: Synthetic oligonucleotide
gacgcccagcaaccacucg

SEQ ID NO: 2655714 - RNA, 19 nt, Artificial Sequence
  Description of Artificial Sequence: Synthetic oligonucleotide
aguggcuggccccuauuuu

SEQ ID NO: 2655715 - RNA, 19 nt, Artificial Sequence
  Description of Artificial Sequence: Synthetic oligonucleotide
agcaaccacucgacgcagc

SEQ ID NO: 2655716 - RNA, 19 nt, Artificial Sequence
  Description of Artificial Sequence: Synthetic oligonucleotide
auggugugaacugcauaca

SEQ ID NO: 2655717 - RNA, 19 nt, Artificial Sequence
  Description of Artificial Sequence: Synthetic oligonucleotide
accggcaauuuccuuugaa

SEQ ID NO: 2655718 - RNA, 19 nt, Artificial Sequence
  Description of Artificial Sequence: Synthetic oligonucleotide
gcauacaugauugcaggga

SEQ ID NO: 2655719 - RNA, 19 nt, Artificial Sequence
  Description of Artificial Sequence: Synthetic oligonucleotide
ugcuguugguauguuucaa

SEQ ID NO: 2655720 - RNA, 19 nt, Artificial Sequence
  Description of Artificial Sequence: Synthetic oligonucleotide
acaugaacaggaggaguau

SEQ ID NO: 2655721 - RNA, 19 nt, Artificial Sequence
  Description of Artificial Sequence: Synthetic oligonucleotide
cacuucgggcggcagcacc

SEQ ID NO: 2655722 - RNA, 19 nt, Artificial Sequence
  Description of Artificial Sequence: Synthetic oligonucleotide
gaacaucgugauggggaug

SEQ ID NO: 2655723 - RNA, 19 nt, Artificial Sequence
  Description of Artificial Sequence: Synthetic oligonucleotide
uguucggguccugucaguu

SEQ ID NO: 2655724 - RNA, 19 nt, Artificial Sequence
  Description of Artificial Sequence: Synthetic oligonucleotide
ggaaauucucggguccgag

SEQ ID NO: 2655725 - RNA, 19 nt, Artificial Sequence
  Description of Artificial Sequence: Synthetic oligonucleotide
gggucagucguucacggaa

SEQ ID NO: 2655726 - RNA, 19 nt, Artificial Sequence
  Description of Artificial Sequence: Synthetic oligonucleotide
cugguugggcuaguggcug

SEQ ID NO: 2655727 - RNA, 19 nt, Artificial Sequence
  Description of Artificial Sequence: Synthetic oligonucleotide
aggaaggacuugaaccaca

SEQ ID NO: 2655728 - RNA, 19 nt, Artificial Sequence
  Description of Artificial Sequence: Synthetic oligonucleotide
gcggguacacuucgggcgg

SEQ ID NO: 2655729 - RNA, 19 nt, Artificial Sequence
  Description of Artificial Sequence: Synthetic oligonucleotide
caaaguagacgcccagcaa

SEQ ID NO: 2655730 - RNA, 19 nt, Artificial Sequence
  Description of Artificial Sequence: Synthetic oligonucleotide
gugcugugggaucucccug

SEQ ID NO: 2655731 - RNA, 19 nt, Artificial Sequence
  Description of Artificial Sequence: Synthetic oligonucleotide
cuguugguauguuucaaau

SEQ ID NO: 2655732 - RNA, 19 nt, Artificial Sequence
  Description of Artificial Sequence: Synthetic oligonucleotide
cguucacggaaauucucgg

SEQ ID NO: 2655733 - RNA, 19 nt, Artificial Sequence
  Description of Artificial Sequence: Synthetic oligonucleotide
cucggguccgaguccuuug

SEQ ID NO: 2655734 - RNA, 19 nt, Artificial Sequence
  Description of Artificial Sequence: Synthetic oligonucleotide
cgagacaaaguagacgccc

SEQ ID NO: 2655735 - RNA, 19 nt, Artificial Sequence
  Description of Artificial Sequence: Synthetic oligonucleotide
agcgccuggcggccagggc

SEQ ID NO: 2655736 - RNA, 19 nt, Artificial Sequence
  Description of Artificial Sequence: Synthetic oligonucleotide
gcaacagauugcugaacuc

SEQ ID NO: 2655737 - RNA, 19 nt, Artificial Sequence
  Description of Artificial Sequence: Synthetic oligonucleotide
gauggggaugugcgagaca

SEQ ID NO: 2655738 - RNA, 19 nt, Artificial Sequence
  Description of Artificial Sequence: Synthetic oligonucleotide
caaaugcugcugagacaug

SEQ ID NO: 2655739 - RNA, 19 nt, Artificial Sequence
  Description of Artificial Sequence: Synthetic oligonucleotide
cugcuguugguauguuuca

SEQ ID NO: 2655740 - RNA, 19 nt, Artificial Sequence
  Description of Artificial Sequence: Synthetic oligonucleotide
agaaaggguuccgcaacau

SEQ ID NO: 2655741 - RNA, 19 nt, Artificial Sequence
  Description of Artificial Sequence: Synthetic oligonucleotide
aucucccugguugggcuag

SEQ ID NO: 2655742 - RNA, 19 nt, Artificial Sequence
  Description of Artificial Sequence: Synthetic oligonucleotide
gucguucacggaaauucuc

SEQ ID NO: 2655743 - RNA, 19 nt, Artificial Sequence
  Description of Artificial Sequence: Synthetic oligonucleotide
gaacacaagcucacaaaau

SEQ ID NO: 2655744 - RNA, 19 nt, Artificial Sequence
  Description of Artificial Sequence: Synthetic oligonucleotide
acucgacgcagcgccuggc

SEQ ID NO: 2655745 - RNA, 19 nt, Artificial Sequence
  Description of Artificial Sequence: Synthetic oligonucleotide
gcaacugugcugugggauc

SEQ ID NO: 2655746 - RNA, 19 nt, Artificial Sequence
  Description of Artificial Sequence: Synthetic oligonucleotide
aguagacgcccagcaacca

SEQ ID NO: 2655747 - RNA, 19 nt, Artificial Sequence
  Description of Artificial Sequence: Synthetic oligonucleotide
cacucgacgcagcgccugg

SEQ ID NO: 2655748 - RNA, 19 nt, Artificial Sequence
  Description of Artificial Sequence: Synthetic oligonucleotide
ggaaagaaaggcagcugga

SEQ ID NO: 2655749 - RNA, 19 nt, Artificial Sequence
  Description of Artificial Sequence: Synthetic oligonucleotide
agggucagucguucacgga

SEQ ID NO: 2655750 - RNA, 19 nt, Artificial Sequence
  Description of Artificial Sequence: Synthetic oligonucleotide
gcuguugguauguuucaaa

SEQ ID NO: 2655751 - RNA, 19 nt, Artificial Sequence
  Description of Artificial Sequence: Synthetic oligonucleotide
agagggucuuugaacuccu

SEQ ID NO: 2655752 - RNA, 19 nt, Artificial Sequence
  Description of Artificial Sequence: Synthetic oligonucleotide
ucagucguucacggaaauu

SEQ ID NO: 2655753 - RNA, 19 nt, Artificial Sequence
  Description of Artificial Sequence: Synthetic oligonucleotide
ggguuccgcaacaugaaca

SEQ ID NO: 2655754 - RNA, 19 nt, Artificial Sequence
  Description of Artificial Sequence: Synthetic oligonucleotide
uucgggcggcagcaccacc

SEQ ID NO: 2655755 - RNA, 19 nt, Artificial Sequence
  Description of Artificial Sequence: Synthetic oligonucleotide
auguucggguccugucagu

SEQ ID NO: 2655756 - RNA, 19 nt, Artificial Sequence
  Description of Artificial Sequence: Synthetic oligonucleotide
gguccugcaucagaggguc

SEQ ID NO: 2655757 - RNA, 19 nt, Artificial Sequence
  Description of Artificial Sequence: Synthetic oligonucleotide
agacgcccagcaaccacuc

SEQ ID NO: 2655758 - RNA, 19 nt, Artificial Sequence
  Description of Artificial Sequence: Synthetic oligonucleotide
caaccacucgacgcagcgc

SEQ ID NO: 2655759 - RNA, 19 nt, Artificial Sequence
  Description of Artificial Sequence: Synthetic oligonucleotide
gaacuccuuggaguaccac

SEQ ID NO: 2655760 - RNA, 19 nt, Artificial Sequence
  Description of Artificial Sequence: Synthetic oligonucleotide
ugcagggauucggauccac

SEQ ID NO: 2655761 - RNA, 19 nt, Artificial Sequence
  Description of Artificial Sequence: Synthetic oligonucleotide
ccgcaacaugaacaggagg

SEQ ID NO: 2655762 - RNA, 19 nt, Artificial Sequence
  Description of Artificial Sequence: Synthetic oligonucleotide
cugcaucagagggucuuug

SEQ ID NO: 2655763 - RNA, 19 nt, Artificial Sequence
  Description of Artificial Sequence: Synthetic oligonucleotide
acuucgggcggcagcacca

SEQ ID NO: 2655764 - RNA, 19 nt, Artificial Sequence
  Description of Artificial Sequence: Synthetic oligonucleotide
gaaaggcagcuggaacaca

SEQ ID NO: 2655765 - RNA, 19 nt, Artificial Sequence
  Description of Artificial Sequence: Synthetic oligonucleotide
ggauuggaauuaaaguugu

SEQ ID NO: 2655766 - RNA, 19 nt, Artificial Sequence
  Description of Artificial Sequence: Synthetic oligonucleotide
cggcaauuuccuuugaaga

SEQ ID NO: 2655767 - RNA, 19 nt, Artificial Sequence
  Description of Artificial Sequence: Synthetic oligonucleotide
auccucaaauagaaaugua

SEQ ID NO: 2655768 - RNA, 19 nt, Artificial Sequence
  Description of Artificial Sequence: Synthetic oligonucleotide
auacaugauugcagggauu

SEQ ID NO: 2655769 - RNA, 19 nt, Artificial Sequence
  Description of Artificial Sequence: Synthetic oligonucleotide
ccaccggcaauuuccuuug

SEQ ID NO: 2655770 - RNA, 19 nt, Artificial Sequence
  Description of Artificial Sequence: Synthetic oligonucleotide
cgaugaacaucgugauggg

SEQ ID NO: 2655771 - RNA, 19 nt, Artificial Sequence
  Description of Artificial Sequence: Synthetic oligonucleotide
aggcaacugugcuguggga

SEQ ID NO: 2655772 - RNA, 19 nt, Artificial Sequence
  Description of Artificial Sequence: Synthetic oligonucleotide
gcgccuggcggccagggcc

SEQ ID NO: 2655773 - RNA, 19 nt, Artificial Sequence
  Description of Artificial Sequence: Synthetic oligonucleotide
gacauggguucagagcagu

SEQ ID NO: 2655774 - RNA, 19 nt, Artificial Sequence
  Description of Artificial Sequence: Synthetic oligonucleotide
cgugauggggaugugcgag

SEQ ID NO: 2655775 - RNA, 19 nt, Artificial Sequence
  Description of Artificial Sequence: Synthetic oligonucleotide
caugaacaggaggaguaua

SEQ ID NO: 2655776 - RNA, 19 nt, Artificial Sequence
  Description of Artificial Sequence: Synthetic oligonucleotide
guugggcuaguggcuggcc

SEQ ID NO: 2655777 - RNA, 19 nt, Artificial Sequence
  Description of Artificial Sequence: Synthetic oligonucleotide
gauccaccggcaauuuccu

SEQ ID NO: 2655778 - RNA, 19 nt, Artificial Sequence
  Description of Artificial Sequence: Synthetic oligonucleotide
acacuucgggcggcagcac

SEQ ID NO: 2655779 - RNA, 19 nt, Artificial Sequence
  Description of Artificial Sequence: Synthetic oligonucleotide
ccuuugaagaaggcauaug

SEQ ID NO: 2655780 - RNA, 19 nt, Artificial Sequence
  Description of Artificial Sequence: Synthetic oligonucleotide
gaucucccugguugggcua

SEQ ID NO: 2655781 - RNA, 19 nt, Artificial Sequence
  Description of Artificial Sequence: Synthetic oligonucleotide
gcugaacuccugcggguac

SEQ ID NO: 2655782 - RNA, 19 nt, Artificial Sequence
  Description of Artificial Sequence: Synthetic oligonucleotide
gaguaccaccgcaacagau

SEQ ID NO: 2655783 - RNA, 19 nt, Artificial Sequence
  Description of Artificial Sequence: Synthetic oligonucleotide
gcagggauucggauccacc

SEQ ID NO: 2655784 - RNA, 19 nt, Artificial Sequence
  Description of Artificial Sequence: Synthetic oligonucleotide
ggaaggacuugaaccacaa

SEQ ID NO: 2655785 - RNA, 19 nt, Artificial Sequence
  Description of Artificial Sequence: Synthetic oligonucleotide
ucucggguccgaguccuuu

SEQ ID NO: 2655786 - RNA, 19 nt, Artificial Sequence
  Description of Artificial Sequence: Synthetic oligonucleotide
gaaggacuugaaccacaau

SEQ ID NO: 2655787 - RNA, 19 nt, Artificial Sequence
  Description of Artificial Sequence: Synthetic oligonucleotide
ggaguaccaccgcaacaga

SEQ ID NO: 2655788 - RNA, 19 nt, Artificial Sequence
  Description of Artificial Sequence: Synthetic oligonucleotide
cugaacuccugcggguaca

SEQ ID NO: 2655789 - RNA, 19 nt, Artificial Sequence
  Description of Artificial Sequence: Synthetic oligonucleotide
ccauguucggguccuguca

SEQ ID NO: 2655790 - RNA, 19 nt, Artificial Sequence
  Description of Artificial Sequence: Synthetic oligonucleotide
guuauggugugaacugcau

SEQ ID NO: 2655791 - RNA, 19 nt, Artificial Sequence
  Description of Artificial Sequence: Synthetic oligonucleotide
ggguccgaguccuuugaaa

SEQ ID NO: 2655792 - RNA, 19 nt, Artificial Sequence
  Description of Artificial Sequence: Synthetic oligonucleotide
gggaucucccugguugggc

SEQ ID NO: 2655793 - RNA, 19 nt, Artificial Sequence
  Description of Artificial Sequence: Synthetic oligonucleotide
cauagacaccuaugagggu

SEQ ID NO: 2655794 - RNA, 19 nt, Artificial Sequence
  Description of Artificial Sequence: Synthetic oligonucleotide
cgaguccuuugaaagcaac

SEQ ID NO: 2655795 - RNA, 19 nt, Artificial Sequence
  Description of Artificial Sequence: Synthetic oligonucleotide
gguacacuucgggcggcag

SEQ ID NO: 2655796 - RNA, 19 nt, Artificial Sequence
  Description of Artificial Sequence: Synthetic oligonucleotide
ucggauccaccggcaauuu

SEQ ID NO: 2655797 - RNA, 19 nt, Artificial Sequence
  Description of Artificial Sequence: Synthetic oligonucleotide
gguugggcuaguggcuggc

SEQ ID NO: 2655798 - RNA, 19 nt, Artificial Sequence
  Description of Artificial Sequence: Synthetic oligonucleotide
ggaucucccugguugggcu

SEQ ID NO: 2655799 - RNA, 19 nt, Artificial Sequence
  Description of Artificial Sequence: Synthetic oligonucleotide
gcgagacaaaguagacgcc

SEQ ID NO: 2655800 - RNA, 19 nt, Artificial Sequence
  Description of Artificial Sequence: Synthetic oligonucleotide
gauuggaauuaaaguuguu

SEQ ID NO: 2655801 - RNA, 19 nt, Artificial Sequence
  Description of Artificial Sequence: Synthetic oligonucleotide
gcauaugcugcaacaggaa

SEQ ID NO: 2655802 - RNA, 19 nt, Artificial Sequence
  Description of Artificial Sequence: Synthetic oligonucleotide
acaucgugauggggaugug

SEQ ID NO: 2655803 - RNA, 19 nt, Artificial Sequence
  Description of Artificial Sequence: Synthetic oligonucleotide
cuucgggcggcagcaccac

SEQ ID NO: 2655804 - RNA, 19 nt, Artificial Sequence
  Description of Artificial Sequence: Synthetic oligonucleotide
cccauguucggguccuguc

SEQ ID NO: 2655805 - RNA, 19 nt, Artificial Sequence
  Description of Artificial Sequence: Synthetic oligonucleotide
auccaccggcaauuuccuu

SEQ ID NO: 2655806 - RNA, 19 nt, Artificial Sequence
  Description of Artificial Sequence: Synthetic oligonucleotide
acauggguucagagcaguu

SEQ ID NO: 2655807 - RNA, 19 nt, Artificial Sequence
  Description of Artificial Sequence: Synthetic oligonucleotide
ccuuggaguaccaccgcaa

SEQ ID NO: 2655808 - RNA, 19 nt, Artificial Sequence
  Description of Artificial Sequence: Synthetic oligonucleotide
cauggguucagagcaguuu

SEQ ID NO: 2655809 - RNA, 19 nt, Artificial Sequence
  Description of Artificial Sequence: Synthetic oligonucleotide
cugcugagacauggguuca

SEQ ID NO: 2655810 - RNA, 19 nt, Artificial Sequence
  Description of Artificial Sequence: Synthetic oligonucleotide
gcugagacauggguucaga

SEQ ID NO: 2655811 - RNA, 19 nt, Artificial Sequence
  Description of Artificial Sequence: Synthetic oligonucleotide
gucagucguucacggaaau

SEQ ID NO: 2655812 - RNA, 19 nt, Artificial Sequence
  Description of Artificial Sequence: Synthetic oligonucleotide
caacugugcugugggaucu

SEQ ID NO: 2655813 - RNA, 19 nt, Artificial Sequence
  Description of Artificial Sequence: Synthetic oligonucleotide
ggucagucguucacggaaa

SEQ ID NO: 2655814 - RNA, 19 nt, Artificial Sequence
  Description of Artificial Sequence: Synthetic oligonucleotide
cucccugguugggcuagug

SEQ ID NO: 2655815 - RNA, 19 nt, Artificial Sequence
  Description of Artificial Sequence: Synthetic oligonucleotide
ggauucggauccaccggca

SEQ ID NO: 2655816 - RNA, 19 nt, Artificial Sequence
  Description of Artificial Sequence: Synthetic oligonucleotide
cagcgccuggcggccaggg

SEQ ID NO: 2655817 - RNA, 19 nt, Artificial Sequence
  Description of Artificial Sequence: Synthetic oligonucleotide
cgacgcagcgccuggcggc

SEQ ID NO: 2655818 - RNA, 19 nt, Artificial Sequence
  Description of Artificial Sequence: Synthetic oligonucleotide
uucucggguccgaguccuu

SEQ ID NO: 2655819 - RNA, 19 nt, Artificial Sequence
  Description of Artificial Sequence: Synthetic oligonucleotide
ggcaacugugcugugggau

SEQ ID NO: 2655820 - RNA, 19 nt, Artificial Sequence
  Description of Artificial Sequence: Synthetic oligonucleotide
gacaccuaugagggucagu

SEQ ID NO: 2655821 - RNA, 19 nt, Artificial Sequence
  Description of Artificial Sequence: Synthetic oligonucleotide
cgcaacagauugcugaacu

SEQ ID NO: 2655822 - RNA, 19 nt, Artificial Sequence
  Description of Artificial Sequence: Synthetic oligonucleotide
accacucgacgcagcgccu

SEQ ID NO: 2655823 - RNA, 19 nt, Artificial Sequence
  Description of Artificial Sequence: Synthetic oligonucleotide
cgcccagcaaccacucgac

SEQ ID NO: 2655824 - RNA, 19 nt, Artificial Sequence
  Description of Artificial Sequence: Synthetic oligonucleotide
gggaugugcgagacaaagu

SEQ ID NO: 2655825 - RNA, 19 nt, Artificial Sequence
  Description of Artificial Sequence: Synthetic oligonucleotide
cacugcuguugguauguuu

SEQ ID NO: 2655826 - RNA, 19 nt, Artificial Sequence
  Description of Artificial Sequence: Synthetic oligonucleotide
ccuuugaaagcaacagcuu

SEQ ID NO: 2655827 - RNA, 19 nt, Artificial Sequence
  Description of Artificial Sequence: Synthetic oligonucleotide
ccaccgcaacagauugcug

SEQ ID NO: 2655828 - RNA, 19 nt, Artificial Sequence
  Description of Artificial Sequence: Synthetic oligonucleotide
gaacuccugcggguacacu

SEQ ID NO: 2655829 - RNA, 19 nt, Artificial Sequence
  Description of Artificial Sequence: Synthetic oligonucleotide
caccggcaauuuccuuuga

SEQ ID NO: 2655830 - RNA, 19 nt, Artificial Sequence
  Description of Artificial Sequence: Synthetic oligonucleotide
ccgcaacagauugcugaac

SEQ ID NO: 2655831 - RNA, 19 nt, Artificial Sequence
  Description of Artificial Sequence: Synthetic oligonucleotide
ccacucgacgcagcgccug

SEQ ID NO: 2655832 - RNA, 19 nt, Artificial Sequence
  Description of Artificial Sequence: Synthetic oligonucleotide
cuaguggcuggccccuauu

SEQ ID NO: 2655833 - RNA, 19 nt, Artificial Sequence
  Description of Artificial Sequence: Synthetic oligonucleotide
ggguccugcaucagagggu

SEQ ID NO: 2655834 - RNA, 19 nt, Artificial Sequence
  Description of Artificial Sequence: Synthetic oligonucleotide
ccgaguccuuugaaagcaa

SEQ ID NO: 2655835 - RNA, 19 nt, Artificial Sequence
  Description of Artificial Sequence: Synthetic oligonucleotide
ggguacacuucgggcggca

SEQ ID NO: 2655836 - RNA, 19 nt, Artificial Sequence
  Description of Artificial Sequence: Synthetic oligonucleotide
ccuaugagggucagucguu

SEQ ID NO: 2655837 - RNA, 19 nt, Artificial Sequence
  Description of Artificial Sequence: Synthetic oligonucleotide
cggauccaccggcaauuuc

SEQ ID NO: 2655838 - RNA, 19 nt, Artificial Sequence
  Description of Artificial Sequence: Synthetic oligonucleotide
gcuaguggcuggccccuau

SEQ ID NO: 2655839 - RNA, 19 nt, Artificial Sequence
  Description of Artificial Sequence: Synthetic oligonucleotide
gcagcgccuggcggccagg

SEQ ID NO: 2655840 - RNA, 19 nt, Artificial Sequence
  Description of Artificial Sequence: Synthetic oligonucleotide
cggaaauucucggguccga

SEQ ID NO: 2655841 - RNA, 19 nt, Artificial Sequence
  Description of Artificial Sequence: Synthetic oligonucleotide
gggcuaguggcuggccccu

SEQ ID NO: 2655842 - RNA, 19 nt, Artificial Sequence
  Description of Artificial Sequence: Synthetic oligonucleotide
cggguacacuucgggcggc

SEQ ID NO: 2655843 - RNA, 19 nt, Artificial Sequence
  Description of Artificial Sequence: Synthetic oligonucleotide
gcaugucgaugaacaucgu

SEQ ID NO: 2655844 - RNA, 19 nt, Artificial Sequence
  Description of Artificial Sequence: Synthetic oligonucleotide
cggguccgaguccuuugaa

SEQ ID NO: 2655845 - RNA, 19 nt, Artificial Sequence
  Description of Artificial Sequence: Synthetic oligonucleotide
gccuggcggccagggcccc

SEQ ID NO: 2655846 - RNA, 19 nt, Artificial Sequence
  Description of Artificial Sequence: Synthetic oligonucleotide
ggcuaguggcuggccccua

SEQ ID NO: 2655847 - RNA, 19 nt, Artificial Sequence
  Description of Artificial Sequence: Synthetic oligonucleotide
ccugcaucagagggucuuu

SEQ ID NO: 2655848 - RNA, 19 nt, Artificial Sequence
  Description of Artificial Sequence: Synthetic oligonucleotide
ccccauguucggguccugu

SEQ ID NO: 2655849 - RNA, 19 nt, Artificial Sequence
  Description of Artificial Sequence: Synthetic oligonucleotide
gcacugcuguugguauguu

SEQ ID NO: 2655850 - RNA, 19 nt, Artificial Sequence
  Description of Artificial Sequence: Synthetic oligonucleotide
aaacuggucauuuauuagc

SEQ ID NO: 2655851 - RNA, 19 nt, Artificial Sequence
  Description of Artificial Sequence: Synthetic oligonucleotide
ucauuuauuagcauggacc

SEQ ID NO: 2655852 - RNA, 19 nt, Artificial Sequence
  Description of Artificial Sequence: Synthetic oligonucleotide
aaagguaugagggaugggg

SEQ ID NO: 2655853 - RNA, 19 nt, Artificial Sequence
  Description of Artificial Sequence: Synthetic oligonucleotide
ugcucgaacacacacagag

SEQ ID NO: 2655854 - RNA, 19 nt, Artificial Sequence
  Description of Artificial Sequence: Synthetic oligonucleotide
aaagcucucauuaaacugg

SEQ ID NO: 2655855 - RNA, 19 nt, Artificial Sequence
  Description of Artificial Sequence: Synthetic oligonucleotide
uggucauuuauuagcaugg

SEQ ID NO: 2655856 - RNA, 19 nt, Artificial Sequence
  Description of Artificial Sequence: Synthetic oligonucleotide
gauggggccauacacauag

SEQ ID NO: 2655857 - RNA, 19 nt, Artificial Sequence
  Description of Artificial Sequence: Synthetic oligonucleotide
auacacauagugcuucucc

SEQ ID NO: 2655858 - RNA, 19 nt, Artificial Sequence
  Description of Artificial Sequence: Synthetic oligonucleotide
aagccgaugaagaacaugg

SEQ ID NO: 2655859 - RNA, 19 nt, Artificial Sequence
  Description of Artificial Sequence: Synthetic oligonucleotide
agaacaagugcaguaaagc

SEQ ID NO: 2655860 - RNA, 19 nt, Artificial Sequence
  Description of Artificial Sequence: Synthetic oligonucleotide
aauuggacuuucucauccc

SEQ ID NO: 2655861 - RNA, 19 nt, Artificial Sequence
  Description of Artificial Sequence: Synthetic oligonucleotide
ugugcucgaacacacacag

SEQ ID NO: 2655862 - RNA, 19 nt, Artificial Sequence
  Description of Artificial Sequence: Synthetic oligonucleotide
gauccauauaagcaggaag

SEQ ID NO: 2655863 - RNA, 19 nt, Artificial Sequence
  Description of Artificial Sequence: Synthetic oligonucleotide
agcaguaaggucuuacuuc

SEQ ID NO: 2655864 - RNA, 19 nt, Artificial Sequence
  Description of Artificial Sequence: Synthetic oligonucleotide
uucaucucagcaaagcucu

SEQ ID NO: 2655865 - RNA, 19 nt, Artificial Sequence
  Description of Artificial Sequence: Synthetic oligonucleotide
aaggucuuacuucuuccac

SEQ ID NO: 2655866 - RNA, 19 nt, Artificial Sequence
  Description of Artificial Sequence: Synthetic oligonucleotide
aguaaagccgaugaagaac

SEQ ID NO: 2655867 - RNA, 19 nt, Artificial Sequence
  Description of Artificial Sequence: Synthetic oligonucleotide
ucccaaaugagaacaagug

SEQ ID NO: 2655868 - RNA, 19 nt, Artificial Sequence
  Description of Artificial Sequence: Synthetic oligonucleotide
ucuagaucccggcugcucg

SEQ ID NO: 2655869 - RNA, 19 nt, Artificial Sequence
  Description of Artificial Sequence: Synthetic oligonucleotide
uaaacuggucauuuauuag

SEQ ID NO: 2655870 - RNA, 19 nt, Artificial Sequence
  Description of Artificial Sequence: Synthetic oligonucleotide
aaugagaacaagugcagua

SEQ ID NO: 2655871 - RNA, 19 nt, Artificial Sequence
  Description of Artificial Sequence: Synthetic oligonucleotide
aauuaggcuaagcacccug

SEQ ID NO: 2655872 - RNA, 19 nt, Artificial Sequence
  Description of Artificial Sequence: Synthetic oligonucleotide
acgaucaaagguaugaggg

SEQ ID NO: 2655873 - RNA, 19 nt, Artificial Sequence
  Description of Artificial Sequence: Synthetic oligonucleotide
agugcaguaaagccgauga

SEQ ID NO: 2655874 - RNA, 19 nt, Artificial Sequence
  Description of Artificial Sequence: Synthetic oligonucleotide
auuagcauggaccuuugga

SEQ ID NO: 2655875 - RNA, 19 nt, Artificial Sequence
  Description of Artificial Sequence: Synthetic oligonucleotide
ucucuugccaauuaggcua

SEQ ID NO: 2655876 - RNA, 19 nt, Artificial Sequence
  Description of Artificial Sequence: Synthetic oligonucleotide
guggaaauagcucucuugc

SEQ ID NO: 2655877 - RNA, 19 nt, Artificial Sequence
  Description of Artificial Sequence: Synthetic oligonucleotide
uggaccuuuggacacagca

SEQ ID NO: 2655878 - RNA, 19 nt, Artificial Sequence
  Description of Artificial Sequence: Synthetic oligonucleotide
ugcaguaaagccgaugaag

SEQ ID NO: 2655879 - RNA, 19 nt, Artificial Sequence
  Description of Artificial Sequence: Synthetic oligonucleotide
ucaucccuagacaagcugc

SEQ ID NO: 2655880 - RNA, 19 nt, Artificial Sequence
  Description of Artificial Sequence: Synthetic oligonucleotide
ucaaagguaugagggaugg

SEQ ID NO: 2655881 - RNA, 19 nt, Artificial Sequence
  Description of Artificial Sequence: Synthetic oligonucleotide
uacaauuggacuuucucau

SEQ ID NO: 2655882 - RNA, 19 nt, Artificial Sequence
  Description of Artificial Sequence: Synthetic oligonucleotide
aggcuaagcacccugguag

SEQ ID NO: 2655883 - RNA, 19 nt, Artificial Sequence
  Description of Artificial Sequence: Synthetic oligonucleotide
auuaaacuggaugcgguac

SEQ ID NO: 2655884 - RNA, 19 nt, Artificial Sequence
  Description of Artificial Sequence: Synthetic oligonucleotide
aagguaugagggauggggc

SEQ ID NO: 2655885 - RNA, 19 nt, Artificial Sequence
  Description of Artificial Sequence: Synthetic oligonucleotide
caauuggacuuucucaucc

SEQ ID NO: 2655886 - RNA, 19 nt, Artificial Sequence
  Description of Artificial Sequence: Synthetic oligonucleotide
acagcagccugacaugggc

SEQ ID NO: 2655887 - RNA, 19 nt, Artificial Sequence
  Description of Artificial Sequence: Synthetic oligonucleotide
uguucaucucagcaaagcu

SEQ ID NO: 2655888 - RNA, 19 nt, Artificial Sequence
  Description of Artificial Sequence: Synthetic oligonucleotide
caaagcucucauuaaacug

SEQ ID NO: 2655889 - RNA, 19 nt, Artificial Sequence
  Description of Artificial Sequence: Synthetic oligonucleotide
guagccaacauucugccac

SEQ ID NO: 2655890 - RNA, 19 nt, Artificial Sequence
  Description of Artificial Sequence: Synthetic oligonucleotide
agguaugagggauggggcc

SEQ ID NO: 2655891 - RNA, 19 nt, Artificial Sequence
  Description of Artificial Sequence: Synthetic oligonucleotide
ucuuacuucuuccacucgu

SEQ ID NO: 2655892 - RNA, 19 nt, Artificial Sequence
  Description of Artificial Sequence: Synthetic oligonucleotide
ucauuaaacuggaugcggu

SEQ ID NO: 2655893 - RNA, 19 nt, Artificial Sequence
  Description of Artificial Sequence: Synthetic oligonucleotide
ucucauuaaacuggaugcg

SEQ ID NO: 2655894 - RNA, 19 nt, Artificial Sequence
  Description of Artificial Sequence: Synthetic oligonucleotide
uuaaacuggaugcgguaca

SEQ ID NO: 2655895 - RNA, 19 nt, Artificial Sequence
  Description of Artificial Sequence: Synthetic oligonucleotide
gaagaacauggccaggccc

SEQ ID NO: 2655896 - RNA, 19 nt, Artificial Sequence
  Description of Artificial Sequence: Synthetic oligonucleotide
uuuauuagcauggaccuuu

SEQ ID NO: 2655897 - RNA, 19 nt, Artificial Sequence
  Description of Artificial Sequence: Synthetic oligonucleotide
cugguagccaacauucugc

SEQ ID NO: 2655898 - RNA, 19 nt, Artificial Sequence
  Description of Artificial Sequence: Synthetic oligonucleotide
uggacuuucucaucccuag

SEQ ID NO: 2655899 - RNA, 19 nt, Artificial Sequence
  Description of Artificial Sequence: Synthetic oligonucleotide
uaagcaggaagacuauagu

SEQ ID NO: 2655900 - RNA, 19 nt, Artificial Sequence
  Description of Artificial Sequence: Synthetic oligonucleotide
cuggucauuuauuagcaug

SEQ ID NO: 2655901 - RNA, 19 nt, Artificial Sequence
  Description of Artificial Sequence: Synthetic oligonucleotide
augggguuggccuucaugu

SEQ ID NO: 2655902 - RNA, 19 nt, Artificial Sequence
  Description of Artificial Sequence: Synthetic oligonucleotide
uuucucaucccuagacaag

SEQ ID NO: 2655903 - RNA, 19 nt, Artificial Sequence
  Description of Artificial Sequence: Synthetic oligonucleotide
auaagcaggaagacuauag

SEQ ID NO: 2655904 - RNA, 19 nt, Artificial Sequence
  Description of Artificial Sequence: Synthetic oligonucleotide
cuggaugcgguacaauugg

SEQ ID NO: 2655905 - RNA, 19 nt, Artificial Sequence
  Description of Artificial Sequence: Synthetic oligonucleotide
acaacugucuuccacucgu

SEQ ID NO: 2655906 - RNA, 19 nt, Artificial Sequence
  Description of Artificial Sequence: Synthetic oligonucleotide
uucacucuucacaacacuc

SEQ ID NO: 2655907 - RNA, 19 nt, Artificial Sequence
  Description of Artificial Sequence: Synthetic oligonucleotide
acuggcaagcaguaagguc

SEQ ID NO: 2655908 - RNA, 19 nt, Artificial Sequence
  Description of Artificial Sequence: Synthetic oligonucleotide
cacgaucaaagguaugagg

SEQ ID NO: 2655909 - RNA, 19 nt, Artificial Sequence
  Description of Artificial Sequence: Synthetic oligonucleotide
ugccaauuaggcuaagcac

SEQ ID NO: 2655910 - RNA, 19 nt, Artificial Sequence
  Description of Artificial Sequence: Synthetic oligonucleotide
ucccuagacaagcugcucc

SEQ ID NO: 2655911 - RNA, 19 nt, Artificial Sequence
  Description of Artificial Sequence: Synthetic oligonucleotide
cacccagucacgaucaaag

SEQ ID NO: 2655912 - RNA, 19 nt, Artificial Sequence
  Description of Artificial Sequence: Synthetic oligonucleotide
guacaauuggacuuucuca

SEQ ID NO: 2655913 - RNA, 19 nt, Artificial Sequence
  Description of Artificial Sequence: Synthetic oligonucleotide
ucccacuuggcagagaagc

SEQ ID NO: 2655914 - RNA, 19 nt, Artificial Sequence
  Description of Artificial Sequence: Synthetic oligonucleotide
aacuggaugcgguacaauu

SEQ ID NO: 2655915 - RNA, 19 nt, Artificial Sequence
  Description of Artificial Sequence: Synthetic oligonucleotide
gacuuucucaucccuagac

SEQ ID NO: 2655916 - RNA, 19 nt, Artificial Sequence
  Description of Artificial Sequence: Synthetic oligonucleotide
auccauauaagcaggaaga

SEQ ID NO: 2655917 - RNA, 19 nt, Artificial Sequence
  Description of Artificial Sequence: Synthetic oligonucleotide
ggaacuggcaagcaguaag

SEQ ID NO: 2655918 - RNA, 19 nt, Artificial Sequence
  Description of Artificial Sequence: Synthetic oligonucleotide
ucguagucccacuuggcag

SEQ ID NO: 2655919 - RNA, 19 nt, Artificial Sequence
  Description of Artificial Sequence: Synthetic oligonucleotide
uucucaucccuagacaagc

SEQ ID NO: 2655920 - RNA, 19 nt, Artificial Sequence
  Description of Artificial Sequence: Synthetic oligonucleotide
agcaaagcucucauuaaac

SEQ ID NO: 2655921 - RNA, 19 nt, Artificial Sequence
  Description of Artificial Sequence: Synthetic oligonucleotide
cucauuaaacuggaugcgg

SEQ ID NO: 2655922 - RNA, 19 nt, Artificial Sequence
  Description of Artificial Sequence: Synthetic oligonucleotide
guaaggucuuacuucuucc

SEQ ID NO: 2655923 - RNA, 19 nt, Artificial Sequence
  Description of Artificial Sequence: Synthetic oligonucleotide
ggcuacaucaggcaagggg

SEQ ID NO: 2655924 - RNA, 19 nt, Artificial Sequence
  Description of Artificial Sequence: Synthetic oligonucleotide
cuugugcucgaacacacac

SEQ ID NO: 2655925 - RNA, 19 nt, Artificial Sequence
  Description of Artificial Sequence: Synthetic oligonucleotide
ugaagaacauggccaggcc

SEQ ID NO: 2655926 - RNA, 19 nt, Artificial Sequence
  Description of Artificial Sequence: Synthetic oligonucleotide
uucacaacacucccuugug

SEQ ID NO: 2655927 - RNA, 19 nt, Artificial Sequence
  Description of Artificial Sequence: Synthetic oligonucleotide
uaaggucuuacuucuucca

SEQ ID NO: 2655928 - RNA, 19 nt, Artificial Sequence
  Description of Artificial Sequence: Synthetic oligonucleotide
gaacuggcaagcaguaagg

SEQ ID NO: 2655929 - RNA, 19 nt, Artificial Sequence
  Description of Artificial Sequence: Synthetic oligonucleotide
aggcccacaacugucuucc

SEQ ID NO: 2655930 - RNA, 19 nt, Artificial Sequence
  Description of Artificial Sequence: Synthetic oligonucleotide
aacugucuuccacucguug

SEQ ID NO: 2655931 - RNA, 19 nt, Artificial Sequence
  Description of Artificial Sequence: Synthetic oligonucleotide
aagcaguaaggucuuacuu

SEQ ID NO: 2655932 - RNA, 19 nt, Artificial Sequence
  Description of Artificial Sequence: Synthetic oligonucleotide
uggaaauagcucucuugcc

SEQ ID NO: 2655933 - RNA, 19 nt, Artificial Sequence
  Description of Artificial Sequence: Synthetic oligonucleotide
uauuagcauggaccuuugg

SEQ ID NO: 2655934 - RNA, 19 nt, Artificial Sequence
  Description of Artificial Sequence: Synthetic oligonucleotide
gagaacaagugcaguaaag

SEQ ID NO: 2655935 - RNA, 19 nt, Artificial Sequence
  Description of Artificial Sequence: Synthetic oligonucleotide
guaaagccgaugaagaaca

SEQ ID NO: 2655936 - RNA, 19 nt, Artificial Sequence
  Description of Artificial Sequence: Synthetic oligonucleotide
cuagcgaccgccgcgaccg

SEQ ID NO: 2655937 - RNA, 19 nt, Artificial Sequence
  Description of Artificial Sequence: Synthetic oligonucleotide
ugagaacaagugcaguaaa

SEQ ID NO: 2655938 - RNA, 19 nt, Artificial Sequence
  Description of Artificial Sequence: Synthetic oligonucleotide
ucacaacacucccuugugc

SEQ ID NO: 2655939 - RNA, 19 nt, Artificial Sequence
  Description of Artificial Sequence: Synthetic oligonucleotide
gaaauagcucucuugccaa

SEQ ID NO: 2655940 - RNA, 19 nt, Artificial Sequence
  Description of Artificial Sequence: Synthetic oligonucleotide
aaagccgaugaagaacaug

SEQ ID NO: 2655941 - RNA, 19 nt, Artificial Sequence
  Description of Artificial Sequence: Synthetic oligonucleotide
acuuucucaucccuagaca

SEQ ID NO: 2655942 - RNA, 19 nt, Artificial Sequence
  Description of Artificial Sequence: Synthetic oligonucleotide
cacacagagguggaaauag

SEQ ID NO: 2655943 - RNA, 19 nt, Artificial Sequence
  Description of Artificial Sequence: Synthetic oligonucleotide
cacgccgauccauauaagc

SEQ ID NO: 2655944 - RNA, 19 nt, Artificial Sequence
  Description of Artificial Sequence: Synthetic oligonucleotide
acauucugccacugcugcc

SEQ ID NO: 2655945 - RNA, 19 nt, Artificial Sequence
  Description of Artificial Sequence: Synthetic oligonucleotide
ccaaaugagaacaagugca

SEQ ID NO: 2655946 - RNA, 19 nt, Artificial Sequence
  Description of Artificial Sequence: Synthetic oligonucleotide
ucguuggugcuccuguuca

SEQ ID NO: 2655947 - RNA, 19 nt, Artificial Sequence
  Description of Artificial Sequence: Synthetic oligonucleotide
acuauagucuucacucuuc

SEQ ID NO: 2655948 - RNA, 19 nt, Artificial Sequence
  Description of Artificial Sequence: Synthetic oligonucleotide
cauuuauuagcauggaccu

SEQ ID NO: 2655949 - RNA, 19 nt, Artificial Sequence
  Description of Artificial Sequence: Synthetic oligonucleotide
uagacaagcugcuccaguc

SEQ ID NO: 2655950 - RNA, 19 nt, Artificial Sequence
  Description of Artificial Sequence: Synthetic oligonucleotide
uuauuagcauggaccuuug

SEQ ID NO: 2655951 - RNA, 19 nt, Artificial Sequence
  Description of Artificial Sequence: Synthetic oligonucleotide
acguaaacuggucauuuau

SEQ ID NO: 2655952 - RNA, 19 nt, Artificial Sequence
  Description of Artificial Sequence: Synthetic oligonucleotide
gcucucauuaaacuggaug

SEQ ID NO: 2655953 - RNA, 19 nt, Artificial Sequence
  Description of Artificial Sequence: Synthetic oligonucleotide
ugguagccaacauucugcc

SEQ ID NO: 2655954 - RNA, 19 nt, Artificial Sequence
  Description of Artificial Sequence: Synthetic oligonucleotide
gucauuuauuagcauggac

SEQ ID NO: 2655955 - RNA, 19 nt, Artificial Sequence
  Description of Artificial Sequence: Synthetic oligonucleotide
acccugguagccaacauuc

SEQ ID NO: 2655956 - RNA, 19 nt, Artificial Sequence
  Description of Artificial Sequence: Synthetic oligonucleotide
aacauggccaggcccacaa

SEQ ID NO: 2655957 - RNA, 19 nt, Artificial Sequence
  Description of Artificial Sequence: Synthetic oligonucleotide
acucccuugugcucgaaca

SEQ ID NO: 2655958 - RNA, 19 nt, Artificial Sequence
  Description of Artificial Sequence: Synthetic oligonucleotide
ucagcaaagcucucauuaa

SEQ ID NO: 2655959 - RNA, 19 nt, Artificial Sequence
  Description of Artificial Sequence: Synthetic oligonucleotide
cacucuucacaacacuccc

SEQ ID NO: 2655960 - RNA, 19 nt, Artificial Sequence
  Description of Artificial Sequence: Synthetic oligonucleotide
caugcugagaggagggaac

SEQ ID NO: 2655961 - RNA, 19 nt, Artificial Sequence
  Description of Artificial Sequence: Synthetic oligonucleotide
acaagugcaguaaagccga

SEQ ID NO: 2655962 - RNA, 19 nt, Artificial Sequence
  Description of Artificial Sequence: Synthetic oligonucleotide
ugggcuacaucaggcaagg

SEQ ID NO: 2655963 - RNA, 19 nt, Artificial Sequence
  Description of Artificial Sequence: Synthetic oligonucleotide
ucgaacacacacagaggug

SEQ ID NO: 2655964 - RNA, 19 nt, Artificial Sequence
  Description of Artificial Sequence: Synthetic oligonucleotide
gcagagaagcccugaaugg

SEQ ID NO: 2655965 - RNA, 19 nt, Artificial Sequence
  Description of Artificial Sequence: Synthetic oligonucleotide
ggaaauagcucucuugcca

SEQ ID NO: 2655966 - RNA, 19 nt, Artificial Sequence
  Description of Artificial Sequence: Synthetic oligonucleotide
gccaauuaggcuaagcacc

SEQ ID NO: 2655967 - RNA, 19 nt, Artificial Sequence
  Description of Artificial Sequence: Synthetic oligonucleotide
agugcuucucccaaaugag

SEQ ID NO: 2655968 - RNA, 19 nt, Artificial Sequence
  Description of Artificial Sequence: Synthetic oligonucleotide
cauucugccacugcugccc

SEQ ID NO: 2655969 - RNA, 19 nt, Artificial Sequence
  Description of Artificial Sequence: Synthetic oligonucleotide
cuggcaagcaguaaggucu

SEQ ID NO: 2655970 - RNA, 19 nt, Artificial Sequence
  Description of Artificial Sequence: Synthetic oligonucleotide
uccauauaagcaggaagac

SEQ ID NO: 2655971 - RNA, 19 nt, Artificial Sequence
  Description of Artificial Sequence: Synthetic oligonucleotide
ucacgaucaaagguaugag

SEQ ID NO: 2655972 - RNA, 19 nt, Artificial Sequence
  Description of Artificial Sequence: Synthetic oligonucleotide
aggucuuacuucuuccacu

SEQ ID NO: 2655973 - RNA, 19 nt, Artificial Sequence
  Description of Artificial Sequence: Synthetic oligonucleotide
uugugcucgaacacacaca

SEQ ID NO: 2655974 - RNA, 19 nt, Artificial Sequence
  Description of Artificial Sequence: Synthetic oligonucleotide
agagaagcccugaaugggg

SEQ ID NO: 2655975 - RNA, 19 nt, Artificial Sequence
  Description of Artificial Sequence: Synthetic oligonucleotide
uagcucucuugccaauuag

SEQ ID NO: 2655976 - RNA, 19 nt, Artificial Sequence
  Description of Artificial Sequence: Synthetic oligonucleotide
ccugacaugggcuacauca

SEQ ID NO: 2655977 - RNA, 19 nt, Artificial Sequence
  Description of Artificial Sequence: Synthetic oligonucleotide
auuaggcuaagcacccugg

SEQ ID NO: 2655978 - RNA, 19 nt, Artificial Sequence
  Description of Artificial Sequence: Synthetic oligonucleotide
acucguucuugucguaguc

SEQ ID NO: 2655979 - RNA, 19 nt, Artificial Sequence
  Description of Artificial Sequence: Synthetic oligonucleotide
gaugcgguacaauuggacu

SEQ ID NO: 2655980 - RNA, 19 nt, Artificial Sequence
  Description of Artificial Sequence: Synthetic oligonucleotide
aggaagacuauagucuuca

SEQ ID NO: 2655981 - RNA, 19 nt, Artificial Sequence
  Description of Artificial Sequence: Synthetic oligonucleotide
gggguagucacgccgaucc

SEQ ID NO: 2655982 - RNA, 19 nt, Artificial Sequence
  Description of Artificial Sequence: Synthetic oligonucleotide
ccuuccagcaugcugagag

SEQ ID NO: 2655983 - RNA, 19 nt, Artificial Sequence
  Description of Artificial Sequence: Synthetic oligonucleotide
agacuauagucuucacucu

SEQ ID NO: 2655984 - RNA, 19 nt, Artificial Sequence
  Description of Artificial Sequence: Synthetic oligonucleotide
ucucccaaaugagaacaag

SEQ ID NO: 2655985 - RNA, 19 nt, Artificial Sequence
  Description of Artificial Sequence: Synthetic oligonucleotide
gucacgaucaaagguauga

SEQ ID NO: 2655986 - RNA, 19 nt, Artificial Sequence
  Description of Artificial Sequence: Synthetic oligonucleotide
uuaggcuaagcacccuggu

SEQ ID NO: 2655987 - RNA, 19 nt, Artificial Sequence
  Description of Artificial Sequence: Synthetic oligonucleotide
gguggaaauagcucucuug

SEQ ID NO: 2655988 - RNA, 19 nt, Artificial Sequence
  Description of Artificial Sequence: Synthetic oligonucleotide
gguacaauuggacuuucuc

SEQ ID NO: 2655989 - RNA, 19 nt, Artificial Sequence
  Description of Artificial Sequence: Synthetic oligonucleotide
caacacucccuugugcucg

SEQ ID NO: 2655990 - RNA, 19 nt, Artificial Sequence
  Description of Artificial Sequence: Synthetic oligonucleotide
uccagcaugcugagaggag

SEQ ID NO: 2655991 - RNA, 19 nt, Artificial Sequence
  Description of Artificial Sequence: Synthetic oligonucleotide
aaauagcucucuugccaau

SEQ ID NO: 2655992 - RNA, 19 nt, Artificial Sequence
  Description of Artificial Sequence: Synthetic oligonucleotide
acccagucacgaucaaagg

SEQ ID NO: 2655993 - RNA, 19 nt, Artificial Sequence
  Description of Artificial Sequence: Synthetic oligonucleotide
ugucguagucccacuuggc

SEQ ID NO: 2655994 - RNA, 19 nt, Artificial Sequence
  Description of Artificial Sequence: Synthetic oligonucleotide
cuugucguagucccacuug

SEQ ID NO: 2655995 - RNA, 19 nt, Artificial Sequence
  Description of Artificial Sequence: Synthetic oligonucleotide
uuggugcuccuguucaucu

SEQ ID NO: 2655996 - RNA, 19 nt, Artificial Sequence
  Description of Artificial Sequence: Synthetic oligonucleotide
ucuuccacucguuggugcu

SEQ ID NO: 2655997 - RNA, 19 nt, Artificial Sequence
  Description of Artificial Sequence: Synthetic oligonucleotide
cagcaugcugagaggaggg

SEQ ID NO: 2655998 - RNA, 19 nt, Artificial Sequence
  Description of Artificial Sequence: Synthetic oligonucleotide
gcgaccgcccucuagaucc

SEQ ID NO: 2655999 - RNA, 19 nt, Artificial Sequence
  Description of Artificial Sequence: Synthetic oligonucleotide
uacaucaggcaagggguag

SEQ ID NO: 2656000 - RNA, 19 nt, Artificial Sequence
  Description of Artificial Sequence: Synthetic oligonucleotide
agcucucuugccaauuagg

SEQ ID NO: 2656001 - RNA, 19 nt, Artificial Sequence
  Description of Artificial Sequence: Synthetic oligonucleotide
ugagggauggggccauaca

SEQ ID NO: 2656002 - RNA, 19 nt, Artificial Sequence
  Description of Artificial Sequence: Synthetic oligonucleotide
acuggaugcgguacaauug

SEQ ID NO: 2656003 - RNA, 19 nt, Artificial Sequence
  Description of Artificial Sequence: Synthetic oligonucleotide
cccaaaugagaacaagugc

SEQ ID NO: 2656004 - RNA, 19 nt, Artificial Sequence
  Description of Artificial Sequence: Synthetic oligonucleotide
ugcccuagcgaccgccgcg

SEQ ID NO: 2656005 - RNA, 19 nt, Artificial Sequence
  Description of Artificial Sequence: Synthetic oligonucleotide
gucacgccgauccauauaa

SEQ ID NO: 2656006 - RNA, 19 nt, Artificial Sequence
  Description of Artificial Sequence: Synthetic oligonucleotide
gaagcccugaaugggguug

SEQ ID NO: 2656007 - RNA, 19 nt, Artificial Sequence
  Description of Artificial Sequence: Synthetic oligonucleotide
gagaggagggaacuggcaa

SEQ ID NO: 2656008 - RNA, 19 nt, Artificial Sequence
  Description of Artificial Sequence: Synthetic oligonucleotide
cuuccagcaugcugagagg

SEQ ID NO: 2656009 - RNA, 19 nt, Artificial Sequence
  Description of Artificial Sequence: Synthetic oligonucleotide
ccaauuaggcuaagcaccc

SEQ ID NO: 2656010 - RNA, 19 nt, Artificial Sequence
  Description of Artificial Sequence: Synthetic oligonucleotide
uucuggcuggcagacagca

SEQ ID NO: 2656011 - RNA, 19 nt, Artificial Sequence
  Description of Artificial Sequence: Synthetic oligonucleotide
agacaagcugcuccagucu

SEQ ID NO: 2656012 - RNA, 19 nt, Artificial Sequence
  Description of Artificial Sequence: Synthetic oligonucleotide
uuccagcaugcugagagga

SEQ ID NO: 2656013 - RNA, 19 nt, Artificial Sequence
  Description of Artificial Sequence: Synthetic oligonucleotide
ucugccacugcugcccuag

SEQ ID NO: 2656014 - RNA, 19 nt, Artificial Sequence
  Description of Artificial Sequence: Synthetic oligonucleotide
auagugcuucucccaaaug

SEQ ID NO: 2656015 - RNA, 19 nt, Artificial Sequence
  Description of Artificial Sequence: Synthetic oligonucleotide
augagaacaagugcaguaa

SEQ ID NO: 2656016 - RNA, 19 nt, Artificial Sequence
  Description of Artificial Sequence: Synthetic oligonucleotide
aagugcaguaaagccgaug

SEQ ID NO: 2656017 - RNA, 19 nt, Artificial Sequence
  Description of Artificial Sequence: Synthetic oligonucleotide
aacuggcaagcaguaaggu

SEQ ID NO: 2656018 - RNA, 19 nt, Artificial Sequence
  Description of Artificial Sequence: Synthetic oligonucleotide
augcgguacaauuggacuu

SEQ ID NO: 2656019 - RNA, 19 nt, Artificial Sequence
  Description of Artificial Sequence: Synthetic oligonucleotide
gccgaugaagaacauggcc

SEQ ID NO: 2656020 - RNA, 19 nt, Artificial Sequence
  Description of Artificial Sequence: Synthetic oligonucleotide
ucucaucccuagacaagcu

SEQ ID NO: 2656021 - RNA, 19 nt, Artificial Sequence
  Description of Artificial Sequence: Synthetic oligonucleotide
agagguggaaauagcucuc

SEQ ID NO: 2656022 - RNA, 19 nt, Artificial Sequence
  Description of Artificial Sequence: Synthetic oligonucleotide
aagcccugaaugggguugg

SEQ ID NO: 2656023 - RNA, 19 nt, Artificial Sequence
  Description of Artificial Sequence: Synthetic oligonucleotide
uuggacuuucucaucccua

SEQ ID NO: 2656024 - RNA, 19 nt, Artificial Sequence
  Description of Artificial Sequence: Synthetic oligonucleotide
cauccucuuggucugcaug

SEQ ID NO: 2656025 - RNA, 19 nt, Artificial Sequence
  Description of Artificial Sequence: Synthetic oligonucleotide
cucaucccuagacaagcug

SEQ ID NO: 2656026 - RNA, 19 nt, Artificial Sequence
  Description of Artificial Sequence: Synthetic oligonucleotide
aauagcucucuugccaauu

SEQ ID NO: 2656027 - RNA, 19 nt, Artificial Sequence
  Description of Artificial Sequence: Synthetic oligonucleotide
cacaacugucuuccacucg

SEQ ID NO: 2656028 - RNA, 19 nt, Artificial Sequence
  Description of Artificial Sequence: Synthetic oligonucleotide
cucguucuugucguagucc

SEQ ID NO: 2656029 - RNA, 19 nt, Artificial Sequence
  Description of Artificial Sequence: Synthetic oligonucleotide
uaagcacccugguagccaa

SEQ ID NO: 2656030 - RNA, 19 nt, Artificial Sequence
  Description of Artificial Sequence: Synthetic oligonucleotide
uaggcuaagcacccuggua

SEQ ID NO: 2656031 - RNA, 19 nt, Artificial Sequence
  Description of Artificial Sequence: Synthetic oligonucleotide
uauaagcaggaagacuaua

SEQ ID NO: 2656032 - RNA, 19 nt, Artificial Sequence
  Description of Artificial Sequence: Synthetic oligonucleotide
gucuuacuucuuccacucg

SEQ ID NO: 2656033 - RNA, 19 nt, Artificial Sequence
  Description of Artificial Sequence: Synthetic oligonucleotide
gucguagucccacuuggca

SEQ ID NO: 2656034 - RNA, 19 nt, Artificial Sequence
  Description of Artificial Sequence: Synthetic oligonucleotide
ucuugucguagucccacuu

SEQ ID NO: 2656035 - RNA, 19 nt, Artificial Sequence
  Description of Artificial Sequence: Synthetic oligonucleotide
aagcucucauuaaacugga

SEQ ID NO: 2656036 - RNA, 19 nt, Artificial Sequence
  Description of Artificial Sequence: Synthetic oligonucleotide
cuagaucccggcugcucgc

SEQ ID NO: 2656037 - RNA, 19 nt, Artificial Sequence
  Description of Artificial Sequence: Synthetic oligonucleotide
aucaaagguaugagggaug

SEQ ID NO: 2656038 - RNA, 19 nt, Artificial Sequence
  Description of Artificial Sequence: Synthetic oligonucleotide
ggucuuacuucuuccacuc

SEQ ID NO: 2656039 - RNA, 19 nt, Artificial Sequence
  Description of Artificial Sequence: Synthetic oligonucleotide
guucuugucguagucccac

SEQ ID NO: 2656040 - RNA, 19 nt, Artificial Sequence
  Description of Artificial Sequence: Synthetic oligonucleotide
agccgaugaagaacauggc

SEQ ID NO: 2656041 - RNA, 19 nt, Artificial Sequence
  Description of Artificial Sequence: Synthetic oligonucleotide
acgccgauccauauaagca

SEQ ID NO: 2656042 - RNA, 19 nt, Artificial Sequence
  Description of Artificial Sequence: Synthetic oligonucleotide
cgaacacacacagaggugg

SEQ ID NO: 2656043 - RNA, 19 nt, Artificial Sequence
  Description of Artificial Sequence: Synthetic oligonucleotide
ccgaugaagaacauggcca

SEQ ID NO: 2656044 - RNA, 19 nt, Artificial Sequence
  Description of Artificial Sequence: Synthetic oligonucleotide
auagcucucuugccaauua

SEQ ID NO: 2656045 - RNA, 19 nt, Artificial Sequence
  Description of Artificial Sequence: Synthetic oligonucleotide
aucccggcugcucgcgacc

SEQ ID NO: 2656046 - RNA, 19 nt, Artificial Sequence
  Description of Artificial Sequence: Synthetic oligonucleotide
gaucaaagguaugagggau

SEQ ID NO: 2656047 - RNA, 19 nt, Artificial Sequence
  Description of Artificial Sequence: Synthetic oligonucleotide
uuccuuccagcaugcugag

SEQ ID NO: 2656048 - RNA, 19 nt, Artificial Sequence
  Description of Artificial Sequence: Synthetic oligonucleotide
ucacgccgauccauauaag

SEQ ID NO: 2656049 - RNA, 19 nt, Artificial Sequence
  Description of Artificial Sequence: Synthetic oligonucleotide
ggagggaacuggcaagcag

SEQ ID NO: 2656050 - RNA, 19 nt, Artificial Sequence
  Description of Artificial Sequence: Synthetic oligonucleotide
uuccacucguuggugcucc

SEQ ID NO: 2656051 - RNA, 19 nt, Artificial Sequence
  Description of Artificial Sequence: Synthetic oligonucleotide
acuggucauuuauuagcau

SEQ ID NO: 2656052 - RNA, 19 nt, Artificial Sequence
  Description of Artificial Sequence: Synthetic oligonucleotide
gcaguaaagccgaugaaga

SEQ ID NO: 2656053 - RNA, 19 nt, Artificial Sequence
  Description of Artificial Sequence: Synthetic oligonucleotide
augagggauggggccauac

SEQ ID NO: 2656054 - RNA, 19 nt, Artificial Sequence
  Description of Artificial Sequence: Synthetic oligonucleotide
agaacauggccaggcccac

SEQ ID NO: 2656055 - RNA, 19 nt, Artificial Sequence
  Description of Artificial Sequence: Synthetic oligonucleotide
uagccaacauucugccacu

SEQ ID NO: 2656056 - RNA, 19 nt, Artificial Sequence
  Description of Artificial Sequence: Synthetic oligonucleotide
caagcugcuccagucugcc

SEQ ID NO: 2656057 - RNA, 19 nt, Artificial Sequence
  Description of Artificial Sequence: Synthetic oligonucleotide
gcucucuugccaauuaggc

SEQ ID NO: 2656058 - RNA, 19 nt, Artificial Sequence
  Description of Artificial Sequence: Synthetic oligonucleotide
gacagcagccugacauggg

SEQ ID NO: 2656059 - RNA, 19 nt, Artificial Sequence
  Description of Artificial Sequence: Synthetic oligonucleotide
uaaagccgaugaagaacau

SEQ ID NO: 2656060 - RNA, 19 nt, Artificial Sequence
  Description of Artificial Sequence: Synthetic oligonucleotide
ugucuuccacucguuggug

SEQ ID NO: 2656061 - RNA, 19 nt, Artificial Sequence
  Description of Artificial Sequence: Synthetic oligonucleotide
cucccaaaugagaacaagu

SEQ ID NO: 2656062 - RNA, 19 nt, Artificial Sequence
  Description of Artificial Sequence: Synthetic oligonucleotide
cuucacaacacucccuugu

SEQ ID NO: 2656063 - RNA, 19 nt, Artificial Sequence
  Description of Artificial Sequence: Synthetic oligonucleotide
cacaacacucccuugugcu

SEQ ID NO: 2656064 - RNA, 19 nt, Artificial Sequence
  Description of Artificial Sequence: Synthetic oligonucleotide
ggggccauacacauagugc

SEQ ID NO: 2656065 - RNA, 19 nt, Artificial Sequence
  Description of Artificial Sequence: Synthetic oligonucleotide
cacagagguggaaauagcu

SEQ ID NO: 2656066 - RNA, 19 nt, Artificial Sequence
  Description of Artificial Sequence: Synthetic oligonucleotide
uucuugucguagucccacu

SEQ ID NO: 2656067 - RNA, 19 nt, Artificial Sequence
  Description of Artificial Sequence: Synthetic oligonucleotide
ugcuccuguucaucucagc

SEQ ID NO: 2656068 - RNA, 19 nt, Artificial Sequence
  Description of Artificial Sequence: Synthetic oligonucleotide
ugcgguacaauuggacuuu

SEQ ID NO: 2656069 - RNA, 19 nt, Artificial Sequence
  Description of Artificial Sequence: Synthetic oligonucleotide
ggaccuuuggacacagcag

SEQ ID NO: 2656070 - RNA, 19 nt, Artificial Sequence
  Description of Artificial Sequence: Synthetic oligonucleotide
uagaucccggcugcucgcg

SEQ ID NO: 2656071 - RNA, 19 nt, Artificial Sequence
  Description of Artificial Sequence: Synthetic oligonucleotide
cgaugaagaacauggccag

SEQ ID NO: 2656072 - RNA, 19 nt, Artificial Sequence
  Description of Artificial Sequence: Synthetic oligonucleotide
gcuccuguucaucucagca

SEQ ID NO: 2656073 - RNA, 19 nt, Artificial Sequence
  Description of Artificial Sequence: Synthetic oligonucleotide
caagggguagucacgccga

SEQ ID NO: 2656074 - RNA, 19 nt, Artificial Sequence
  Description of Artificial Sequence: Synthetic oligonucleotide
cauggaccuuuggacacag

SEQ ID NO: 2656075 - RNA, 19 nt, Artificial Sequence
  Description of Artificial Sequence: Synthetic oligonucleotide
gccgauccauauaagcagg

SEQ ID NO: 2656076 - RNA, 19 nt, Artificial Sequence
  Description of Artificial Sequence: Synthetic oligonucleotide
gagggaacuggcaagcagu

SEQ ID NO: 2656077 - RNA, 19 nt, Artificial Sequence
  Description of Artificial Sequence: Synthetic oligonucleotide
caaagguaugagggauggg

SEQ ID NO: 2656078 - RNA, 19 nt, Artificial Sequence
  Description of Artificial Sequence: Synthetic oligonucleotide
gggccauacacauagugcu

SEQ ID NO: 2656079 - RNA, 19 nt, Artificial Sequence
  Description of Artificial Sequence: Synthetic oligonucleotide
gcaguaaggucuuacuucu

SEQ ID NO: 2656080 - RNA, 19 nt, Artificial Sequence
  Description of Artificial Sequence: Synthetic oligonucleotide
caguaaagccgaugaagaa

SEQ ID NO: 2656081 - RNA, 19 nt, Artificial Sequence
  Description of Artificial Sequence: Synthetic oligonucleotide
uccucuuggucugcauggc

SEQ ID NO: 2656082 - RNA, 19 nt, Artificial Sequence
  Description of Artificial Sequence: Synthetic oligonucleotide
gacuauagucuucacucuu

SEQ ID NO: 2656083 - RNA, 19 nt, Artificial Sequence
  Description of Artificial Sequence: Synthetic oligonucleotide
agcagccugacaugggcua

SEQ ID NO: 2656084 - RNA, 19 nt, Artificial Sequence
  Description of Artificial Sequence: Synthetic oligonucleotide
gaucccggcugcucgcgac

SEQ ID NO: 2656085 - RNA, 19 nt, Artificial Sequence
  Description of Artificial Sequence: Synthetic oligonucleotide
ggugcuccuguucaucuca

SEQ ID NO: 2656086 - RNA, 19 nt, Artificial Sequence
  Description of Artificial Sequence: Synthetic oligonucleotide
aaacuggaugcgguacaau

SEQ ID NO: 2656087 - RNA, 19 nt, Artificial Sequence
  Description of Artificial Sequence: Synthetic oligonucleotide
aucccuagacaagcugcuc

SEQ ID NO: 2656088 - RNA, 19 nt, Artificial Sequence
  Description of Artificial Sequence: Synthetic oligonucleotide
agggauggggccauacaca

SEQ ID NO: 2656089 - RNA, 19 nt, Artificial Sequence
  Description of Artificial Sequence: Synthetic oligonucleotide
ccugguagccaacauucug

SEQ ID NO: 2656090 - RNA, 19 nt, Artificial Sequence
  Description of Artificial Sequence: Synthetic oligonucleotide
cauacacauagugcuucuc

SEQ ID NO: 2656091 - RNA, 19 nt, Artificial Sequence
  Description of Artificial Sequence: Synthetic oligonucleotide
ugggguuggccuucauguc

SEQ ID NO: 2656092 - RNA, 19 nt, Artificial Sequence
  Description of Artificial Sequence: Synthetic oligonucleotide
cacugcugcccuagcgacc

SEQ ID NO: 2656093 - RNA, 19 nt, Artificial Sequence
  Description of Artificial Sequence: Synthetic oligonucleotide
aagggguagucacgccgau

SEQ ID NO: 2656094 - RNA, 19 nt, Artificial Sequence
  Description of Artificial Sequence: Synthetic oligonucleotide
cagcaaagcucucauuaaa

SEQ ID NO: 2656095 - RNA, 19 nt, Artificial Sequence
  Description of Artificial Sequence: Synthetic oligonucleotide
caagcaguaaggucuuacu

SEQ ID NO: 2656096 - RNA, 19 nt, Artificial Sequence
  Description of Artificial Sequence: Synthetic oligonucleotide
ggcuaagcacccugguagc

SEQ ID NO: 2656097 - RNA, 19 nt, Artificial Sequence
  Description of Artificial Sequence: Synthetic oligonucleotide
uagucacgccgauccauau

SEQ ID NO: 2656098 - RNA, 19 nt, Artificial Sequence
  Description of Artificial Sequence: Synthetic oligonucleotide
gcuacaucaggcaaggggu

SEQ ID NO: 2656099 - RNA, 19 nt, Artificial Sequence
  Description of Artificial Sequence: Synthetic oligonucleotide
ccagucacgaucaaaggua

SEQ ID NO: 2656100 - RNA, 19 nt, Artificial Sequence
  Description of Artificial Sequence: Synthetic oligonucleotide
uggcaagcaguaaggucuu

SEQ ID NO: 2656101 - RNA, 19 nt, Artificial Sequence
  Description of Artificial Sequence: Synthetic oligonucleotide
cucucuugccaauuaggcu

SEQ ID NO: 2656102 - RNA, 19 nt, Artificial Sequence
  Description of Artificial Sequence: Synthetic oligonucleotide
cgccgauccauauaagcag

SEQ ID NO: 2656103 - RNA, 19 nt, Artificial Sequence
  Description of Artificial Sequence: Synthetic oligonucleotide
acucuucacaacacucccu

SEQ ID NO: 2656104 - RNA, 19 nt, Artificial Sequence
  Description of Artificial Sequence: Synthetic oligonucleotide
cuaagcacccugguagcca

SEQ ID NO: 2656105 - RNA, 19 nt, Artificial Sequence
  Description of Artificial Sequence: Synthetic oligonucleotide
ggaugcgguacaauuggac

SEQ ID NO: 2656106 - RNA, 19 nt, Artificial Sequence
  Description of Artificial Sequence: Synthetic oligonucleotide
ugaaugggguuggccuuca

SEQ ID NO: 2656107 - RNA, 19 nt, Artificial Sequence
  Description of Artificial Sequence: Synthetic oligonucleotide
gcucgaacacacacagagg

SEQ ID NO: 2656108 - RNA, 19 nt, Artificial Sequence
  Description of Artificial Sequence: Synthetic oligonucleotide
agucacgccgauccauaua

SEQ ID NO: 2656109 - RNA, 19 nt, Artificial Sequence
  Description of Artificial Sequence: Synthetic oligonucleotide
ugcugcccuagcgaccgcc

SEQ ID NO: 2656110 - RNA, 19 nt, Artificial Sequence
  Description of Artificial Sequence: Synthetic oligonucleotide
guagucccacuuggcagag

SEQ ID NO: 2656111 - RNA, 19 nt, Artificial Sequence
  Description of Artificial Sequence: Synthetic oligonucleotide
caucaggcaagggguaguc

SEQ ID NO: 2656112 - RNA, 19 nt, Artificial Sequence
  Description of Artificial Sequence: Synthetic oligonucleotide
cugaaugggguuggccuuc

SEQ ID NO: 2656113 - RNA, 19 nt, Artificial Sequence
  Description of Artificial Sequence: Synthetic oligonucleotide
agguggaaauagcucucuu

SEQ ID NO: 2656114 - RNA, 19 nt, Artificial Sequence
  Description of Artificial Sequence: Synthetic oligonucleotide
cucuugccaauuaggcuaa

SEQ ID NO: 2656115 - RNA, 19 nt, Artificial Sequence
  Description of Artificial Sequence: Synthetic oligonucleotide
agggguagucacgccgauc

SEQ ID NO: 2656116 - RNA, 19 nt, Artificial Sequence
  Description of Artificial Sequence: Synthetic oligonucleotide
gcaagcaguaaggucuuac

SEQ ID NO: 2656117 - RNA, 19 nt, Artificial Sequence
  Description of Artificial Sequence: Synthetic oligonucleotide
ucccggcugcucgcgaccg

SEQ ID NO: 2656118 - RNA, 19 nt, Artificial Sequence
  Description of Artificial Sequence: Synthetic oligonucleotide
cauagugcuucucccaaau

SEQ ID NO: 2656119 - RNA, 19 nt, Artificial Sequence
  Description of Artificial Sequence: Synthetic oligonucleotide
cccuugugcucgaacacac

SEQ ID NO: 2656120 - RNA, 19 nt, Artificial Sequence
  Description of Artificial Sequence: Synthetic oligonucleotide
cccacuuggcagagaagcc

SEQ ID NO: 2656121 - RNA, 19 nt, Artificial Sequence
  Description of Artificial Sequence: Synthetic oligonucleotide
aagcacccugguagccaac

SEQ ID NO: 2656122 - RNA, 19 nt, Artificial Sequence
  Description of Artificial Sequence: Synthetic oligonucleotide
cacucccuugugcucgaac

SEQ ID NO: 2656123 - RNA, 19 nt, Artificial Sequence
  Description of Artificial Sequence: Synthetic oligonucleotide
ggaagacuauagucuucac

SEQ ID NO: 2656124 - RNA, 19 nt, Artificial Sequence
  Description of Artificial Sequence: Synthetic oligonucleotide
agcgaccgccgcgaccgcc

SEQ ID NO: 2656125 - RNA, 19 nt, Artificial Sequence
  Description of Artificial Sequence: Synthetic oligonucleotide
agucacgaucaaagguaug

SEQ ID NO: 2656126 - RNA, 19 nt, Artificial Sequence
  Description of Artificial Sequence: Synthetic oligonucleotide
ucuugccaauuaggcuaag

SEQ ID NO: 2656127 - RNA, 19 nt, Artificial Sequence
  Description of Artificial Sequence: Synthetic oligonucleotide
gccauacacauagugcuuc

SEQ ID NO: 2656128 - RNA, 19 nt, Artificial Sequence
  Description of Artificial Sequence: Synthetic oligonucleotide
cuacaucaggcaaggggua

SEQ ID NO: 2656129 - RNA, 19 nt, Artificial Sequence
  Description of Artificial Sequence: Synthetic oligonucleotide
cugucuuccacucguuggu

SEQ ID NO: 2656130 - RNA, 19 nt, Artificial Sequence
  Description of Artificial Sequence: Synthetic oligonucleotide
cccucuagaucccggcugc

SEQ ID NO: 2656131 - RNA, 19 nt, Artificial Sequence
  Description of Artificial Sequence: Synthetic oligonucleotide
gcccucuagaucccggcug

SEQ ID NO: 2656132 - RNA, 19 nt, Artificial Sequence
  Description of Artificial Sequence: Synthetic oligonucleotide
cucuucacaacacucccuu

SEQ ID NO: 2656133 - RNA, 19 nt, Artificial Sequence
  Description of Artificial Sequence: Synthetic oligonucleotide
cuagacaagcugcuccagu

SEQ ID NO: 2656134 - RNA, 19 nt, Artificial Sequence
  Description of Artificial Sequence: Synthetic oligonucleotide
cucuagaucccggcugcuc

SEQ ID NO: 2656135 - RNA, 19 nt, Artificial Sequence
  Description of Artificial Sequence: Synthetic oligonucleotide
auggaccuuuggacacagc

SEQ ID NO: 2656136 - RNA, 19 nt, Artificial Sequence
  Description of Artificial Sequence: Synthetic oligonucleotide
caucccuagacaagcugcu

SEQ ID NO: 2656137 - RNA, 19 nt, Artificial Sequence
  Description of Artificial Sequence: Synthetic oligonucleotide
cacguaaacuggucauuua

SEQ ID NO: 2656138 - RNA, 19 nt, Artificial Sequence
  Description of Artificial Sequence: Synthetic oligonucleotide
agcccugaaugggguuggc

SEQ ID NO: 2656139 - RNA, 19 nt, Artificial Sequence
  Description of Artificial Sequence: Synthetic oligonucleotide
ggucauuuauuagcaugga

SEQ ID NO: 2656140 - RNA, 19 nt, Artificial Sequence
  Description of Artificial Sequence: Synthetic oligonucleotide
cugcccuagcgaccgccgc

SEQ ID NO: 2656141 - RNA, 19 nt, Artificial Sequence
  Description of Artificial Sequence: Synthetic oligonucleotide
ccacaacugucuuccacuc

SEQ ID NO: 2656142 - RNA, 19 nt, Artificial Sequence
  Description of Artificial Sequence: Synthetic oligonucleotide
gugcuccuguucaucucag

SEQ ID NO: 2656143 - RNA, 19 nt, Artificial Sequence
  Description of Artificial Sequence: Synthetic oligonucleotide
gagaagcccugaauggggu

SEQ ID NO: 2656144 - RNA, 19 nt, Artificial Sequence
  Description of Artificial Sequence: Synthetic oligonucleotide
gagguggaaauagcucucu

SEQ ID NO: 2656145 - RNA, 19 nt, Artificial Sequence
  Description of Artificial Sequence: Synthetic oligonucleotide
agaucccggcugcucgcga

SEQ ID NO: 2656146 - RNA, 19 nt, Artificial Sequence
  Description of Artificial Sequence: Synthetic oligonucleotide
gguagccaacauucugcca

SEQ ID NO: 2656147 - RNA, 19 nt, Artificial Sequence
  Description of Artificial Sequence: Synthetic oligonucleotide
cuuccacucguuggugcuc

SEQ ID NO: 2656148 - RNA, 19 nt, Artificial Sequence
  Description of Artificial Sequence: Synthetic oligonucleotide
guagucacgccgauccaua

SEQ ID NO: 2656149 - RNA, 19 nt, Artificial Sequence
  Description of Artificial Sequence: Synthetic oligonucleotide
agccaacauucugccacug

SEQ ID NO: 2656150 - RNA, 19 nt, Artificial Sequence
  Description of Artificial Sequence: Synthetic oligonucleotide
accgcccucuagaucccgg

SEQ ID NO: 2656151 - RNA, 19 nt, Artificial Sequence
  Description of Artificial Sequence: Synthetic oligonucleotide
gaccgcccucuagaucccg

SEQ ID NO: 2656152 - RNA, 19 nt, Artificial Sequence
  Description of Artificial Sequence: Synthetic oligonucleotide
agggaacuggcaagcagua

SEQ ID NO: 2656153 - RNA, 19 nt, Artificial Sequence
  Description of Artificial Sequence: Synthetic oligonucleotide
ggcugcucgcgaccggaag

SEQ ID NO: 2656154 - RNA, 19 nt, Artificial Sequence
  Description of Artificial Sequence: Synthetic oligonucleotide
cagucacgaucaaagguau

SEQ ID NO: 2656155 - RNA, 19 nt, Artificial Sequence
  Description of Artificial Sequence: Synthetic oligonucleotide
ggacuuucucaucccuaga

SEQ ID NO: 2656156 - RNA, 19 nt, Artificial Sequence
  Description of Artificial Sequence: Synthetic oligonucleotide
cauggccacccagucacga

SEQ ID NO: 2656157 - RNA, 19 nt, Artificial Sequence
  Description of Artificial Sequence: Synthetic oligonucleotide
gcaggaagacuauagucuu

SEQ ID NO: 2656158 - RNA, 19 nt, Artificial Sequence
  Description of Artificial Sequence: Synthetic oligonucleotide
cgaucaaagguaugaggga

SEQ ID NO: 2656159 - RNA, 19 nt, Artificial Sequence
  Description of Artificial Sequence: Synthetic oligonucleotide
ccagucugccuucuccuuc

SEQ ID NO: 2656160 - RNA, 19 nt, Artificial Sequence
  Description of Artificial Sequence: Synthetic oligonucleotide
gucccacuuggcagagaag

SEQ ID NO: 2656161 - RNA, 19 nt, Artificial Sequence
  Description of Artificial Sequence: Synthetic oligonucleotide
accgccgcgaccgcccucu

SEQ ID NO: 2656162 - RNA, 19 nt, Artificial Sequence
  Description of Artificial Sequence: Synthetic oligonucleotide
cacucguuggugcuccugu

SEQ ID NO: 2656163 - RNA, 19 nt, Artificial Sequence
  Description of Artificial Sequence: Synthetic oligonucleotide
gccgcgaccgcccucuaga

SEQ ID NO: 2656164 - RNA, 19 nt, Artificial Sequence
  Description of Artificial Sequence: Synthetic oligonucleotide
uccuuccagcaugcugaga

SEQ ID NO: 2656165 - RNA, 19 nt, Artificial Sequence
  Description of Artificial Sequence: Synthetic oligonucleotide
gaacauggccaggcccaca

SEQ ID NO: 2656166 - RNA, 19 nt, Artificial Sequence
  Description of Artificial Sequence: Synthetic oligonucleotide
gggauggggccauacacau

SEQ ID NO: 2656167 - RNA, 19 nt, Artificial Sequence
  Description of Artificial Sequence: Synthetic oligonucleotide
cacucguucuugucguagu

SEQ ID NO: 2656168 - RNA, 19 nt, Artificial Sequence
  Description of Artificial Sequence: Synthetic oligonucleotide
cccuagacaagcugcucca

SEQ ID NO: 2656169 - RNA, 19 nt, Artificial Sequence
  Description of Artificial Sequence: Synthetic oligonucleotide
gcugcccuagcgaccgccg

SEQ ID NO: 2656170 - RNA, 19 nt, Artificial Sequence
  Description of Artificial Sequence: Synthetic oligonucleotide
cccacaacugucuuccacu

SEQ ID NO: 2656171 - RNA, 19 nt, Artificial Sequence
  Description of Artificial Sequence: Synthetic oligonucleotide
cccugaaugggguuggccu

SEQ ID NO: 2656172 - RNA, 19 nt, Artificial Sequence
  Description of Artificial Sequence: Synthetic oligonucleotide
ccuagcgaccgccgcgacc

SEQ ID NO: 2656173 - RNA, 19 nt, Artificial Sequence
  Description of Artificial Sequence: Synthetic oligonucleotide
cugccacugcugcccuagc

SEQ ID NO: 2656174 - RNA, 19 nt, Artificial Sequence
  Description of Artificial Sequence: Synthetic oligonucleotide
ccuagacaagcugcuccag

SEQ ID NO: 2656175 - RNA, 19 nt, Artificial Sequence
  Description of Artificial Sequence: Synthetic oligonucleotide
agccugacaugggcuacau

SEQ ID NO: 2656176 - RNA, 19 nt, Artificial Sequence
  Description of Artificial Sequence: Synthetic oligonucleotide
uucugccacugcugcccua

SEQ ID NO: 2656177 - RNA, 19 nt, Artificial Sequence
  Description of Artificial Sequence: Synthetic oligonucleotide
ccgauccauauaagcagga

SEQ ID NO: 2656178 - RNA, 19 nt, Artificial Sequence
  Description of Artificial Sequence: Synthetic oligonucleotide
agcucucauuaaacuggau

SEQ ID NO: 2656179 - RNA, 19 nt, Artificial Sequence
  Description of Artificial Sequence: Synthetic oligonucleotide
ggccacccagucacgauca

SEQ ID NO: 2656180 - RNA, 19 nt, Artificial Sequence
  Description of Artificial Sequence: Synthetic oligonucleotide
ccauauaagcaggaagacu

SEQ ID NO: 2656181 - RNA, 19 nt, Artificial Sequence
  Description of Artificial Sequence: Synthetic oligonucleotide
ggccuucuggcuggcagac

SEQ ID NO: 2656182 - RNA, 19 nt, Artificial Sequence
  Description of Artificial Sequence: Synthetic oligonucleotide
uagcgaccgccgcgaccgc

SEQ ID NO: 2656183 - RNA, 19 nt, Artificial Sequence
  Description of Artificial Sequence: Synthetic oligonucleotide
gcccugaaugggguuggcc

SEQ ID NO: 2656184 - RNA, 19 nt, Artificial Sequence
  Description of Artificial Sequence: Synthetic oligonucleotide
ccgcccucuagaucccggc

SEQ ID NO: 2656185 - RNA, 19 nt, Artificial Sequence
  Description of Artificial Sequence: Synthetic oligonucleotide
gguagucacgccgauccau

SEQ ID NO: 2656186 - RNA, 19 nt, Artificial Sequence
  Description of Artificial Sequence: Synthetic oligonucleotide
cagccugacaugggcuaca

SEQ ID NO: 2656187 - RNA, 19 nt, Artificial Sequence
  Description of Artificial Sequence: Synthetic oligonucleotide
ggguagucacgccgaucca

SEQ ID NO: 2656188 - RNA, 19 nt, Artificial Sequence
  Description of Artificial Sequence: Synthetic oligonucleotide
cacccugguagccaacauu

SEQ ID NO: 2656189 - RNA, 19 nt, Artificial Sequence
  Description of Artificial Sequence: Synthetic oligonucleotide
auggggccauacacauagu

SEQ ID NO: 2656190 - RNA, 19 nt, Artificial Sequence
  Description of Artificial Sequence: Synthetic oligonucleotide
gcauggccacccagucacg

SEQ ID NO: 2656191 - RNA, 19 nt, Artificial Sequence
  Description of Artificial Sequence: Synthetic oligonucleotide
caauuaggcuaagcacccu

SEQ ID NO: 2656192 - RNA, 19 nt, Artificial Sequence
  Description of Artificial Sequence: Synthetic oligonucleotide
ccuugugcucgaacacaca

SEQ ID NO: 2656193 - RNA, 19 nt, Artificial Sequence
  Description of Artificial Sequence: Synthetic oligonucleotide
gcauggaccuuuggacaca

SEQ ID NO: 2656194 - RNA, 19 nt, Artificial Sequence
  Description of Artificial Sequence: Synthetic oligonucleotide
ccauacacauagugcuucu

SEQ ID NO: 2656195 - RNA, 19 nt, Artificial Sequence
  Description of Artificial Sequence: Synthetic oligonucleotide
gggaacuggcaagcaguaa

SEQ ID NO: 2656196 - RNA, 19 nt, Artificial Sequence
  Description of Artificial Sequence: Synthetic oligonucleotide
cugcugcccuagcgaccgc

SEQ ID NO: 2656197 - RNA, 19 nt, Artificial Sequence
  Description of Artificial Sequence: Synthetic oligonucleotide
gaaugggguuggccuucau

SEQ ID NO: 2656198 - RNA, 19 nt, Artificial Sequence
  Description of Artificial Sequence: Synthetic oligonucleotide
caacugucuuccacucguu

SEQ ID NO: 2656199 - RNA, 19 nt, Artificial Sequence
  Description of Artificial Sequence: Synthetic oligonucleotide
gcgguacaauuggacuuuc

SEQ ID NO: 2656200 - RNA, 19 nt, Artificial Sequence
  Description of Artificial Sequence: Synthetic oligonucleotide
gccugacaugggcuacauc

SEQ ID NO: 2656201 - RNA, 19 nt, Artificial Sequence
  Description of Artificial Sequence: Synthetic oligonucleotide
caagugcaguaaagccgau

SEQ ID NO: 2656202 - RNA, 19 nt, Artificial Sequence
  Description of Artificial Sequence: Synthetic oligonucleotide
gaccgccgcgaccgcccuc

SEQ ID NO: 2656203 - RNA, 19 nt, Artificial Sequence
  Description of Artificial Sequence: Synthetic oligonucleotide
ccacucguuggugcuccug

SEQ ID NO: 2656204 - RNA, 19 nt, Artificial Sequence
  Description of Artificial Sequence: Synthetic oligonucleotide
gcccuagcgaccgccgcga

SEQ ID NO: 2656205 - RNA, 19 nt, Artificial Sequence
  Description of Artificial Sequence: Synthetic oligonucleotide
ccugaaugggguuggccuu

SEQ ID NO: 2656206 - RNA, 19 nt, Artificial Sequence
  Description of Artificial Sequence: Synthetic oligonucleotide
cgauccauauaagcaggaa

SEQ ID NO: 2656207 - RNA, 19 nt, Artificial Sequence
  Description of Artificial Sequence: Synthetic oligonucleotide
acacucccuugugcucgaa

SEQ ID NO: 2656208 - RNA, 19 nt, Artificial Sequence
  Description of Artificial Sequence: Synthetic oligonucleotide
ggauggggccauacacaua

SEQ ID NO: 2656209 - RNA, 19 nt, Artificial Sequence
  Description of Artificial Sequence: Synthetic oligonucleotide
cgaccgcccucuagauccc

SEQ ID NO: 2656210 - RNA, 19 nt, Artificial Sequence
  Description of Artificial Sequence: Synthetic oligonucleotide
ggccauacacauagugcuu

SEQ ID NO: 2656211 - RNA, 19 nt, Artificial Sequence
  Description of Artificial Sequence: Synthetic oligonucleotide
ccacccagucacgaucaaa

SEQ ID NO: 2656212 - RNA, 19 nt, Artificial Sequence
  Description of Artificial Sequence: Synthetic oligonucleotide
cgcgaccgcccucuagauc

SEQ ID NO: 2656213 - RNA, 19 nt, Artificial Sequence
  Description of Artificial Sequence: Synthetic oligonucleotide
gcacccugguagccaacau

SEQ ID NO: 2656214 - RNA, 19 nt, Artificial Sequence
  Description of Artificial Sequence: Synthetic oligonucleotide
gccacccagucacgaucaa

SEQ ID NO: 2656215 - RNA, 19 nt, Artificial Sequence
  Description of Artificial Sequence: Synthetic oligonucleotide
ggcaagcaguaaggucuua

SEQ ID NO: 2656216 - RNA, 19 nt, Artificial Sequence
  Description of Artificial Sequence: Synthetic oligonucleotide
gccuucuggcuggcagaca

SEQ ID NO: 2656217 - RNA, 19 nt, Artificial Sequence
  Description of Artificial Sequence: Synthetic oligonucleotide
cccuagcgaccgccgcgac

SEQ ID NO: 2656218 - RNA, 19 nt, Artificial Sequence
  Description of Artificial Sequence: Synthetic oligonucleotide
ccggcugcucgcgaccgga

SEQ ID NO: 2656219 - RNA, 19 nt, Artificial Sequence
  Description of Artificial Sequence: Synthetic oligonucleotide
cgguacaauuggacuuucu

SEQ ID NO: 2656220 - RNA, 19 nt, Artificial Sequence
  Description of Artificial Sequence: Synthetic oligonucleotide
cguuggugcuccuguucau

SEQ ID NO: 2656221 - RNA, 19 nt, Artificial Sequence
  Description of Artificial Sequence: Synthetic oligonucleotide
ccaggcccacaacugucuu

SEQ ID NO: 2656222 - RNA, 19 nt, Artificial Sequence
  Description of Artificial Sequence: Synthetic oligonucleotide
cgcccucuagaucccggcu

SEQ ID NO: 2656223 - RNA, 19 nt, Artificial Sequence
  Description of Artificial Sequence: Synthetic oligonucleotide
ccucuagaucccggcugcu

SEQ ID NO: 2656224 - RNA, 19 nt, Artificial Sequence
  Description of Artificial Sequence: Synthetic oligonucleotide
cggcugcucgcgaccggaa

SEQ ID NO: 2656225 - RNA, 19 nt, Artificial Sequence
  Description of Artificial Sequence: Synthetic oligonucleotide
cgaccgccgcgaccgcccu

SEQ ID NO: 2656226 - RNA, 19 nt, Artificial Sequence
  Description of Artificial Sequence: Synthetic oligonucleotide
aaaaguauguccuugaaca

SEQ ID NO: 2656227 - RNA, 19 nt, Artificial Sequence
  Description of Artificial Sequence: Synthetic oligonucleotide
aaaaguuaaagcugccagc

SEQ ID NO: 2656228 - RNA, 19 nt, Artificial Sequence
  Description of Artificial Sequence: Synthetic oligonucleotide
aaccaaagagaacaaaugg

SEQ ID NO: 2656229 - RNA, 19 nt, Artificial Sequence
  Description of Artificial Sequence: Synthetic oligonucleotide
uauaucugggauaagagca

SEQ ID NO: 2656230 - RNA, 19 nt, Artificial Sequence
  Description of Artificial Sequence: Synthetic oligonucleotide
aaguuuuagcauaacaugc

SEQ ID NO: 2656231 - RNA, 19 nt, Artificial Sequence
  Description of Artificial Sequence: Synthetic oligonucleotide
aguauguucugcuaccucc

SEQ ID NO: 2656232 - RNA, 19 nt, Artificial Sequence
  Description of Artificial Sequence: Synthetic oligonucleotide
uuuaaauggagccaacuca

SEQ ID NO: 2656233 - RNA, 19 nt, Artificial Sequence
  Description of Artificial Sequence: Synthetic oligonucleotide
uuuagcauaacaugcaaug

SEQ ID NO: 2656234 - RNA, 19 nt, Artificial Sequence
  Description of Artificial Sequence: Synthetic oligonucleotide
gaaaagccaccuuagagcg

SEQ ID NO: 2656235 - RNA, 19 nt, Artificial Sequence
  Description of Artificial Sequence: Synthetic oligonucleotide
auauaucugggauaagagc

SEQ ID NO: 2656236 - RNA, 19 nt, Artificial Sequence
  Description of Artificial Sequence: Synthetic oligonucleotide
gaaaaguuaaagcugccag

SEQ ID NO: 2656237 - RNA, 19 nt, Artificial Sequence
  Description of Artificial Sequence: Synthetic oligonucleotide
uuaaauggagccaacucag

SEQ ID NO: 2656238 - RNA, 19 nt, Artificial Sequence
  Description of Artificial Sequence: Synthetic oligonucleotide
uaaguuuuagcauaacaug

SEQ ID NO: 2656239 - RNA, 19 nt, Artificial Sequence
  Description of Artificial Sequence: Synthetic oligonucleotide
ugaaaagccaccuuagagc

SEQ ID NO: 2656240 - RNA, 19 nt, Artificial Sequence
  Description of Artificial Sequence: Synthetic oligonucleotide
aacucagugaccacuagcc

SEQ ID NO: 2656241 - RNA, 19 nt, Artificial Sequence
  Description of Artificial Sequence: Synthetic oligonucleotide
aguguuucgcaccaggucg

SEQ ID NO: 2656242 - RNA, 19 nt, Artificial Sequence
  Description of Artificial Sequence: Synthetic oligonucleotide
aucggcuuuaaauggagcc

SEQ ID NO: 2656243 - RNA, 19 nt, Artificial Sequence
  Description of Artificial Sequence: Synthetic oligonucleotide
agagugguuaaccaaagag

SEQ ID NO: 2656244 - RNA, 19 nt, Artificial Sequence
  Description of Artificial Sequence: Synthetic oligonucleotide
acauguacuacucuggcag

SEQ ID NO: 2656245 - RNA, 19 nt, Artificial Sequence
  Description of Artificial Sequence: Synthetic oligonucleotide
uaagaaagggaaaaguuaa

SEQ ID NO: 2656246 - RNA, 19 nt, Artificial Sequence
  Description of Artificial Sequence: Synthetic oligonucleotide
uguaaguuuuagcauaaca

SEQ ID NO: 2656247 - RNA, 19 nt, Artificial Sequence
  Description of Artificial Sequence: Synthetic oligonucleotide
uuaaccaaagagaacaaau

SEQ ID NO: 2656248 - RNA, 19 nt, Artificial Sequence
  Description of Artificial Sequence: Synthetic oligonucleotide
cauguguuggcaaagcucc

SEQ ID NO: 2656249 - RNA, 19 nt, Artificial Sequence
  Description of Artificial Sequence: Synthetic oligonucleotide
caccuuagagcguagaucg

SEQ ID NO: 2656250 - RNA, 19 nt, Artificial Sequence
  Description of Artificial Sequence: Synthetic oligonucleotide
auucacagcauguauauga

SEQ ID NO: 2656251 - RNA, 19 nt, Artificial Sequence
  Description of Artificial Sequence: Synthetic oligonucleotide
ugguuaaccaaagagaaca

SEQ ID NO: 2656252 - RNA, 19 nt, Artificial Sequence
  Description of Artificial Sequence: Synthetic oligonucleotide
agagacagccccuuaauuc

SEQ ID NO: 2656253 - RNA, 19 nt, Artificial Sequence
  Description of Artificial Sequence: Synthetic oligonucleotide
uaaccaaagagaacaaaug

SEQ ID NO: 2656254 - RNA, 19 nt, Artificial Sequence
  Description of Artificial Sequence: Synthetic oligonucleotide
aaagacgacauguacuacu

SEQ ID NO: 2656255 - RNA, 19 nt, Artificial Sequence
  Description of Artificial Sequence: Synthetic oligonucleotide
gauaagagcauuuguucag

SEQ ID NO: 2656256 - RNA, 19 nt, Artificial Sequence
  Description of Artificial Sequence: Synthetic oligonucleotide
aaaacagccucaauaacag

SEQ ID NO: 2656257 - RNA, 19 nt, Artificial Sequence
  Description of Artificial Sequence: Synthetic oligonucleotide
aauaaagacgacauguacu

SEQ ID NO: 2656258 - RNA, 19 nt, Artificial Sequence
  Description of Artificial Sequence: Synthetic oligonucleotide
agaagagagaauaaagacg

SEQ ID NO: 2656259 - RNA, 19 nt, Artificial Sequence
  Description of Artificial Sequence: Synthetic oligonucleotide
aauucuucccugguuauuc

SEQ ID NO: 2656260 - RNA, 19 nt, Artificial Sequence
  Description of Artificial Sequence: Synthetic oligonucleotide
aguauguccuugaacaugc

SEQ ID NO: 2656261 - RNA, 19 nt, Artificial Sequence
  Description of Artificial Sequence: Synthetic oligonucleotide
aaauggagccaacucagug

SEQ ID NO: 2656262 - RNA, 19 nt, Artificial Sequence
  Description of Artificial Sequence: Synthetic oligonucleotide
aaaguuaaagcugccagca

SEQ ID NO: 2656263 - RNA, 19 nt, Artificial Sequence
  Description of Artificial Sequence: Synthetic oligonucleotide
aaguaaggaacaugaguag

SEQ ID NO: 2656264 - RNA, 19 nt, Artificial Sequence
  Description of Artificial Sequence: Synthetic oligonucleotide
uagcauaacaugcaaugcc

SEQ ID NO: 2656265 - RNA, 19 nt, Artificial Sequence
  Description of Artificial Sequence: Synthetic oligonucleotide
ucuaagaaagggaaaaguu

SEQ ID NO: 2656266 - RNA, 19 nt, Artificial Sequence
  Description of Artificial Sequence: Synthetic oligonucleotide
guagaucggcuuuaaaugg

SEQ ID NO: 2656267 - RNA, 19 nt, Artificial Sequence
  Description of Artificial Sequence: Synthetic oligonucleotide
aauggagccaacucaguga

SEQ ID NO: 2656268 - RNA, 19 nt, Artificial Sequence
  Description of Artificial Sequence: Synthetic oligonucleotide
cauauaucugggauaagag

SEQ ID NO: 2656269 - RNA, 19 nt, Artificial Sequence
  Description of Artificial Sequence: Synthetic oligonucleotide
uguucugcuaccuccuugg

SEQ ID NO: 2656270 - RNA, 19 nt, Artificial Sequence
  Description of Artificial Sequence: Synthetic oligonucleotide
aguaaggaacaugaguagc

SEQ ID NO: 2656271 - RNA, 19 nt, Artificial Sequence
  Description of Artificial Sequence: Synthetic oligonucleotide
uguucaguuguccugggca

SEQ ID NO: 2656272 - RNA, 19 nt, Artificial Sequence
  Description of Artificial Sequence: Synthetic oligonucleotide
agagcauuuguucaguugu

SEQ ID NO: 2656273 - RNA, 19 nt, Artificial Sequence
  Description of Artificial Sequence: Synthetic oligonucleotide
gaauaaagacgacauguac

SEQ ID NO: 2656274 - RNA, 19 nt, Artificial Sequence
  Description of Artificial Sequence: Synthetic oligonucleotide
agggaaaaguuaaagcugc

SEQ ID NO: 2656275 - RNA, 19 nt, Artificial Sequence
  Description of Artificial Sequence: Synthetic oligonucleotide
uugggugagacacacugag

SEQ ID NO: 2656276 - RNA, 19 nt, Artificial Sequence
  Description of Artificial Sequence: Synthetic oligonucleotide
uguagagugguuaaccaaa

SEQ ID NO: 2656277 - RNA, 19 nt, Artificial Sequence
  Description of Artificial Sequence: Synthetic oligonucleotide
auguauaugaaaagccacc

SEQ ID NO: 2656278 - RNA, 19 nt, Artificial Sequence
  Description of Artificial Sequence: Synthetic oligonucleotide
cagacuguaaguuuuagca

SEQ ID NO: 2656279 - RNA, 19 nt, Artificial Sequence
  Description of Artificial Sequence: Synthetic oligonucleotide
cauguauaugaaaagccac

SEQ ID NO: 2656280 - RNA, 19 nt, Artificial Sequence
  Description of Artificial Sequence: Synthetic oligonucleotide
uacucuggcaggcacaggc

SEQ ID NO: 2656281 - RNA, 19 nt, Artificial Sequence
  Description of Artificial Sequence: Synthetic oligonucleotide
auaaagacgacauguacua

SEQ ID NO: 2656282 - RNA, 19 nt, Artificial Sequence
  Description of Artificial Sequence: Synthetic oligonucleotide
agaaagggaaaaguuaaag

SEQ ID NO: 2656283 - RNA, 19 nt, Artificial Sequence
  Description of Artificial Sequence: Synthetic oligonucleotide
aagggaaaaguuaaagcug

SEQ ID NO: 2656284 - RNA, 19 nt, Artificial Sequence
  Description of Artificial Sequence: Synthetic oligonucleotide
ugaccacuagcccagauuc

SEQ ID NO: 2656285 - RNA, 19 nt, Artificial Sequence
  Description of Artificial Sequence: Synthetic oligonucleotide
aagagcauuuguucaguug

SEQ ID NO: 2656286 - RNA, 19 nt, Artificial Sequence
  Description of Artificial Sequence: Synthetic oligonucleotide
auggagccaacucagugac

SEQ ID NO: 2656287 - RNA, 19 nt, Artificial Sequence
  Description of Artificial Sequence: Synthetic oligonucleotide
aguuaaagcugccagcacu

SEQ ID NO: 2656288 - RNA, 19 nt, Artificial Sequence
  Description of Artificial Sequence: Synthetic oligonucleotide
uuauucacagcauguauau

SEQ ID NO: 2656289 - RNA, 19 nt, Artificial Sequence
  Description of Artificial Sequence: Synthetic oligonucleotide
ucccugguuauucacagca

SEQ ID NO: 2656290 - RNA, 19 nt, Artificial Sequence
  Description of Artificial Sequence: Synthetic oligonucleotide
acagcauguauaugaaaag

SEQ ID NO: 2656291 - RNA, 19 nt, Artificial Sequence
  Description of Artificial Sequence: Synthetic oligonucleotide
agggaggacagagacagcc

SEQ ID NO: 2656292 - RNA, 19 nt, Artificial Sequence
  Description of Artificial Sequence: Synthetic oligonucleotide
gacgacauguacuacucug

SEQ ID NO: 2656293 - RNA, 19 nt, Artificial Sequence
  Description of Artificial Sequence: Synthetic oligonucleotide
caaguaaggaacaugagua

SEQ ID NO: 2656294 - RNA, 19 nt, Artificial Sequence
  Description of Artificial Sequence: Synthetic oligonucleotide
aggaacaugaguagcgacc

SEQ ID NO: 2656295 - RNA, 19 nt, Artificial Sequence
  Description of Artificial Sequence: Synthetic oligonucleotide
ucgucaucgcccaaguaag

SEQ ID NO: 2656296 - RNA, 19 nt, Artificial Sequence
  Description of Artificial Sequence: Synthetic oligonucleotide
cuuuaaauggagccaacuc

SEQ ID NO: 2656297 - RNA, 19 nt, Artificial Sequence
  Description of Artificial Sequence: Synthetic oligonucleotide
uaugaaaagccaccuuaga

SEQ ID NO: 2656298 - RNA, 19 nt, Artificial Sequence
  Description of Artificial Sequence: Synthetic oligonucleotide
uuagcauaacaugcaaugc

SEQ ID NO: 2656299 - RNA, 19 nt, Artificial Sequence
  Description of Artificial Sequence: Synthetic oligonucleotide
aagacgacauguacuacuc

SEQ ID NO: 2656300 - RNA, 19 nt, Artificial Sequence
  Description of Artificial Sequence: Synthetic oligonucleotide
gagaauaaagacgacaugu

SEQ ID NO: 2656301 - RNA, 19 nt, Artificial Sequence
  Description of Artificial Sequence: Synthetic oligonucleotide
acacugagcaaccaugugu

SEQ ID NO: 2656302 - RNA, 19 nt, Artificial Sequence
  Description of Artificial Sequence: Synthetic oligonucleotide
agcauuuguucaguugucc

SEQ ID NO: 2656303 - RNA, 19 nt, Artificial Sequence
  Description of Artificial Sequence: Synthetic oligonucleotide
aaaguauguccuugaacau

SEQ ID NO: 2656304 - RNA, 19 nt, Artificial Sequence
  Description of Artificial Sequence: Synthetic oligonucleotide
aaccauguguuggcaaagc

SEQ ID NO: 2656305 - RNA, 19 nt, Artificial Sequence
  Description of Artificial Sequence: Synthetic oligonucleotide
ugggauaagagcauuuguu

SEQ ID NO: 2656306 - RNA, 19 nt, Artificial Sequence
  Description of Artificial Sequence: Synthetic oligonucleotide
ugagcaaccauguguuggc

SEQ ID NO: 2656307 - RNA, 19 nt, Artificial Sequence
  Description of Artificial Sequence: Synthetic oligonucleotide
agagagaauaaagacgaca

SEQ ID NO: 2656308 - RNA, 19 nt, Artificial Sequence
  Description of Artificial Sequence: Synthetic oligonucleotide
agagaauaaagacgacaug

SEQ ID NO: 2656309 - RNA, 19 nt, Artificial Sequence
  Description of Artificial Sequence: Synthetic oligonucleotide
auuccagaguauguucugc

SEQ ID NO: 2656310 - RNA, 19 nt, Artificial Sequence
  Description of Artificial Sequence: Synthetic oligonucleotide
agugguuaaccaaagagaa

SEQ ID NO: 2656311 - RNA, 19 nt, Artificial Sequence
  Description of Artificial Sequence: Synthetic oligonucleotide
agcagcauauaucugggau

SEQ ID NO: 2656312 - RNA, 19 nt, Artificial Sequence
  Description of Artificial Sequence: Synthetic oligonucleotide
gguugucucguguagagug

SEQ ID NO: 2656313 - RNA, 19 nt, Artificial Sequence
  Description of Artificial Sequence: Synthetic oligonucleotide
uguccugggcagcuugucg

SEQ ID NO: 2656314 - RNA, 19 nt, Artificial Sequence
  Description of Artificial Sequence: Synthetic oligonucleotide
gacuguaaguuuuagcaua

SEQ ID NO: 2656315 - RNA, 19 nt, Artificial Sequence
  Description of Artificial Sequence: Synthetic oligonucleotide
auaugaaaagccaccuuag

SEQ ID NO: 2656316 - RNA, 19 nt, Artificial Sequence
  Description of Artificial Sequence: Synthetic oligonucleotide
uagaucggcuuuaaaugga

SEQ ID NO: 2656317 - RNA, 19 nt, Artificial Sequence
  Description of Artificial Sequence: Synthetic oligonucleotide
caugccaaaggucccuugg

SEQ ID NO: 2656318 - RNA, 19 nt, Artificial Sequence
  Description of Artificial Sequence: Synthetic oligonucleotide
uguguuggcaaagcucccg

SEQ ID NO: 2656319 - RNA, 19 nt, Artificial Sequence
  Description of Artificial Sequence: Synthetic oligonucleotide
ucuucccugguuauucaca

SEQ ID NO: 2656320 - RNA, 19 nt, Artificial Sequence
  Description of Artificial Sequence: Synthetic oligonucleotide
cagcauguauaugaaaagc

SEQ ID NO: 2656321 - RNA, 19 nt, Artificial Sequence
  Description of Artificial Sequence: Synthetic oligonucleotide
cuucccugguuauucacag

SEQ ID NO: 2656322 - RNA, 19 nt, Artificial Sequence
  Description of Artificial Sequence: Synthetic oligonucleotide
cagaguauguucugcuacc

SEQ ID NO: 2656323 - RNA, 19 nt, Artificial Sequence
  Description of Artificial Sequence: Synthetic oligonucleotide
gagugguuaaccaaagaga

SEQ ID NO: 2656324 - RNA, 19 nt, Artificial Sequence
  Description of Artificial Sequence: Synthetic oligonucleotide
cuugaacaugccaaagguc

SEQ ID NO: 2656325 - RNA, 19 nt, Artificial Sequence
  Description of Artificial Sequence: Synthetic oligonucleotide
gauuccagaguauguucug

SEQ ID NO: 2656326 - RNA, 19 nt, Artificial Sequence
  Description of Artificial Sequence: Synthetic oligonucleotide
accaguguuucgcaccagg

SEQ ID NO: 2656327 - RNA, 19 nt, Artificial Sequence
  Description of Artificial Sequence: Synthetic oligonucleotide
uucacagcauguauaugaa

SEQ ID NO: 2656328 - RNA, 19 nt, Artificial Sequence
  Description of Artificial Sequence: Synthetic oligonucleotide
ucugggauaagagcauuug

SEQ ID NO: 2656329 - RNA, 19 nt, Artificial Sequence
  Description of Artificial Sequence: Synthetic oligonucleotide
uuucgcaccaggucgcccc

SEQ ID NO: 2656330 - RNA, 19 nt, Artificial Sequence
  Description of Artificial Sequence: Synthetic oligonucleotide
cugagcaaccauguguugg

SEQ ID NO: 2656331 - RNA, 19 nt, Artificial Sequence
  Description of Artificial Sequence: Synthetic oligonucleotide
acagccccuuaauucuucc

SEQ ID NO: 2656332 - RNA, 19 nt, Artificial Sequence
  Description of Artificial Sequence: Synthetic oligonucleotide
cuuaauucuucccugguua

SEQ ID NO: 2656333 - RNA, 19 nt, Artificial Sequence
  Description of Artificial Sequence: Synthetic oligonucleotide
ucguguagagugguuaacc

SEQ ID NO: 2656334 - RNA, 19 nt, Artificial Sequence
  Description of Artificial Sequence: Synthetic oligonucleotide
auguacuacucuggcaggc

SEQ ID NO: 2656335 - RNA, 19 nt, Artificial Sequence
  Description of Artificial Sequence: Synthetic oligonucleotide
cagcuugucgucaucgccc

SEQ ID NO: 2656336 - RNA, 19 nt, Artificial Sequence
  Description of Artificial Sequence: Synthetic oligonucleotide
uuuguucaguuguccuggg

SEQ ID NO: 2656337 - RNA, 19 nt, Artificial Sequence
  Description of Artificial Sequence: Synthetic oligonucleotide
guucaguuguccugggcag

SEQ ID NO: 2656338 - RNA, 19 nt, Artificial Sequence
  Description of Artificial Sequence: Synthetic oligonucleotide
aguuuuagcauaacaugca

SEQ ID NO: 2656339 - RNA, 19 nt, Artificial Sequence
  Description of Artificial Sequence: Synthetic oligonucleotide
guuggcaaagcucccgcag

SEQ ID NO: 2656340 - RNA, 19 nt, Artificial Sequence
  Description of Artificial Sequence: Synthetic oligonucleotide
aacaugaguagcgaccaaa

SEQ ID NO: 2656341 - RNA, 19 nt, Artificial Sequence
  Description of Artificial Sequence: Synthetic oligonucleotide
uagcccagauuccagagua

SEQ ID NO: 2656342 - RNA, 19 nt, Artificial Sequence
  Description of Artificial Sequence: Synthetic oligonucleotide
uuaauucuucccugguuau

SEQ ID NO: 2656343 - RNA, 19 nt, Artificial Sequence
  Description of Artificial Sequence: Synthetic oligonucleotide
ucugccuccccagagagaa

SEQ ID NO: 2656344 - RNA, 19 nt, Artificial Sequence
  Description of Artificial Sequence: Synthetic oligonucleotide
uuugccagacuguaaguuu

SEQ ID NO: 2656345 - RNA, 19 nt, Artificial Sequence
  Description of Artificial Sequence: Synthetic oligonucleotide
aagagagaauaaagacgac

SEQ ID NO: 2656346 - RNA, 19 nt, Artificial Sequence
  Description of Artificial Sequence: Synthetic oligonucleotide
cauguacuacucuggcagg

SEQ ID NO: 2656347 - RNA, 19 nt, Artificial Sequence
  Description of Artificial Sequence: Synthetic oligonucleotide
uaaggaacaugaguagcga

SEQ ID NO: 2656348 - RNA, 19 nt, Artificial Sequence
  Description of Artificial Sequence: Synthetic oligonucleotide
guaaguuuuagcauaacau

SEQ ID NO: 2656349 - RNA, 19 nt, Artificial Sequence
  Description of Artificial Sequence: Synthetic oligonucleotide
augccaaaggucccuuggg

SEQ ID NO: 2656350 - RNA, 19 nt, Artificial Sequence
  Description of Artificial Sequence: Synthetic oligonucleotide
accuccuuggccuuugcca

SEQ ID NO: 2656351 - RNA, 19 nt, Artificial Sequence
  Description of Artificial Sequence: Synthetic oligonucleotide
caucgcccaaguaaggaac

SEQ ID NO: 2656352 - RNA, 19 nt, Artificial Sequence
  Description of Artificial Sequence: Synthetic oligonucleotide
aaagccaccuuagagcgua

SEQ ID NO: 2656353 - RNA, 19 nt, Artificial Sequence
  Description of Artificial Sequence: Synthetic oligonucleotide
agacuguaaguuuuagcau

SEQ ID NO: 2656354 - RNA, 19 nt, Artificial Sequence
  Description of Artificial Sequence: Synthetic oligonucleotide
uagagugguuaaccaaaga

SEQ ID NO: 2656355 - RNA, 19 nt, Artificial Sequence
  Description of Artificial Sequence: Synthetic oligonucleotide
uaaauggagccaacucagu

SEQ ID NO: 2656356 - RNA, 19 nt, Artificial Sequence
  Description of Artificial Sequence: Synthetic oligonucleotide
agcauaacaugcaaugcca

SEQ ID NO: 2656357 - RNA, 19 nt, Artificial Sequence
  Description of Artificial Sequence: Synthetic oligonucleotide
gucgucaucgcccaaguaa

SEQ ID NO: 2656358 - RNA, 19 nt, Artificial Sequence
  Description of Artificial Sequence: Synthetic oligonucleotide
caacucagugaccacuagc

SEQ ID NO: 2656359 - RNA, 19 nt, Artificial Sequence
  Description of Artificial Sequence: Synthetic oligonucleotide
agccccuuaauucuucccu

SEQ ID NO: 2656360 - RNA, 19 nt, Artificial Sequence
  Description of Artificial Sequence: Synthetic oligonucleotide
uuccagaguauguucugcu

SEQ ID NO: 2656361 - RNA, 19 nt, Artificial Sequence
  Description of Artificial Sequence: Synthetic oligonucleotide
cucaauaacagcagcauau

SEQ ID NO: 2656362 - RNA, 19 nt, Artificial Sequence
  Description of Artificial Sequence: Synthetic oligonucleotide
acgacauguacuacucugg

SEQ ID NO: 2656363 - RNA, 19 nt, Artificial Sequence
  Description of Artificial Sequence: Synthetic oligonucleotide
gggauaagagcauuuguuc

SEQ ID NO: 2656364 - RNA, 19 nt, Artificial Sequence
  Description of Artificial Sequence: Synthetic oligonucleotide
cucagugaccacuagccca

SEQ ID NO: 2656365 - RNA, 19 nt, Artificial Sequence
  Description of Artificial Sequence: Synthetic oligonucleotide
cagguugucucguguagag

SEQ ID NO: 2656366 - RNA, 19 nt, Artificial Sequence
  Description of Artificial Sequence: Synthetic oligonucleotide
ucggcuuuaaauggagcca

SEQ ID NO: 2656367 - RNA, 19 nt, Artificial Sequence
  Description of Artificial Sequence: Synthetic oligonucleotide
ucaucgcccaaguaaggaa

SEQ ID NO: 2656368 - RNA, 19 nt, Artificial Sequence
  Description of Artificial Sequence: Synthetic oligonucleotide
cagauuccagaguauguuc

SEQ ID NO: 2656369 - RNA, 19 nt, Artificial Sequence
  Description of Artificial Sequence: Synthetic oligonucleotide
cguagaucggcuuuaaaug

SEQ ID NO: 2656370 - RNA, 19 nt, Artificial Sequence
  Description of Artificial Sequence: Synthetic oligonucleotide
ucuggcaggcacaggccag

SEQ ID NO: 2656371 - RNA, 19 nt, Artificial Sequence
  Description of Artificial Sequence: Synthetic oligonucleotide
gacauguacuacucuggca

SEQ ID NO: 2656372 - RNA, 19 nt, Artificial Sequence
  Description of Artificial Sequence: Synthetic oligonucleotide
gggugagacacacugagca

SEQ ID NO: 2656373 - RNA, 19 nt, Artificial Sequence
  Description of Artificial Sequence: Synthetic oligonucleotide
uugccagacuguaaguuuu

SEQ ID NO: 2656374 - RNA, 19 nt, Artificial Sequence
  Description of Artificial Sequence: Synthetic oligonucleotide
aguuguccugggcagcuug

SEQ ID NO: 2656375 - RNA, 19 nt, Artificial Sequence
  Description of Artificial Sequence: Synthetic oligonucleotide
agauuccagaguauguucu

SEQ ID NO: 2656376 - RNA, 19 nt, Artificial Sequence
  Description of Artificial Sequence: Synthetic oligonucleotide
gagacagccccuuaauucu

SEQ ID NO: 2656377 - RNA, 19 nt, Artificial Sequence
  Description of Artificial Sequence: Synthetic oligonucleotide
uuguucaguuguccugggc

SEQ ID NO: 2656378 - RNA, 19 nt, Artificial Sequence
  Description of Artificial Sequence: Synthetic oligonucleotide
ucucguguagagugguuaa

SEQ ID NO: 2656379 - RNA, 19 nt, Artificial Sequence
  Description of Artificial Sequence: Synthetic oligonucleotide
cucagguugucucguguag

SEQ ID NO: 2656380 - RNA, 19 nt, Artificial Sequence
  Description of Artificial Sequence: Synthetic oligonucleotide
guagagugguuaaccaaag

SEQ ID NO: 2656381 - RNA, 19 nt, Artificial Sequence
  Description of Artificial Sequence: Synthetic oligonucleotide
accauguguuggcaaagcu

SEQ ID NO: 2656382 - RNA, 19 nt, Artificial Sequence
  Description of Artificial Sequence: Synthetic oligonucleotide
auguucugcuaccuccuug

SEQ ID NO: 2656383 - RNA, 19 nt, Artificial Sequence
  Description of Artificial Sequence: Synthetic oligonucleotide
aaggucccuugggugagac

SEQ ID NO: 2656384 - RNA, 19 nt, Artificial Sequence
  Description of Artificial Sequence: Synthetic oligonucleotide
guuaaagcugccagcacuc

SEQ ID NO: 2656385 - RNA, 19 nt, Artificial Sequence
  Description of Artificial Sequence: Synthetic oligonucleotide
auaagagcauuuguucagu

SEQ ID NO: 2656386 - RNA, 19 nt, Artificial Sequence
  Description of Artificial Sequence: Synthetic oligonucleotide
guugucucguguagagugg

SEQ ID NO: 2656387 - RNA, 19 nt, Artificial Sequence
  Description of Artificial Sequence: Synthetic oligonucleotide
gccuuugccagacuguaag

SEQ ID NO: 2656388 - RNA, 19 nt, Artificial Sequence
  Description of Artificial Sequence: Synthetic oligonucleotide
ugggugagacacacugagc

SEQ ID NO: 2656389 - RNA, 19 nt, Artificial Sequence
  Description of Artificial Sequence: Synthetic oligonucleotide
aagaaagggaaaaguuaaa

SEQ ID NO: 2656390 - RNA, 19 nt, Artificial Sequence
  Description of Artificial Sequence: Synthetic oligonucleotide
cuugucgucaucgcccaag

SEQ ID NO: 2656391 - RNA, 19 nt, Artificial Sequence
  Description of Artificial Sequence: Synthetic oligonucleotide
gugagacacacugagcaac

SEQ ID NO: 2656392 - RNA, 19 nt, Artificial Sequence
  Description of Artificial Sequence: Synthetic oligonucleotide
uguacuacucuggcaggca

SEQ ID NO: 2656393 - RNA, 19 nt, Artificial Sequence
  Description of Artificial Sequence: Synthetic oligonucleotide
agaucggcuuuaaauggag

SEQ ID NO: 2656394 - RNA, 19 nt, Artificial Sequence
  Description of Artificial Sequence: Synthetic oligonucleotide
agaauaaagacgacaugua

SEQ ID NO: 2656395 - RNA, 19 nt, Artificial Sequence
  Description of Artificial Sequence: Synthetic oligonucleotide
ccuugggugagacacacug

SEQ ID NO: 2656396 - RNA, 19 nt, Artificial Sequence
  Description of Artificial Sequence: Synthetic oligonucleotide
uagagcguagaucggcuuu

SEQ ID NO: 2656397 - RNA, 19 nt, Artificial Sequence
  Description of Artificial Sequence: Synthetic oligonucleotide
uguuggcaaagcucccgca

SEQ ID NO: 2656398 - RNA, 19 nt, Artificial Sequence
  Description of Artificial Sequence: Synthetic oligonucleotide
uugucgucaucgcccaagu

SEQ ID NO: 2656399 - RNA, 19 nt, Artificial Sequence
  Description of Artificial Sequence: Synthetic oligonucleotide
gcauauaucugggauaaga

SEQ ID NO: 2656400 - RNA, 19 nt, Artificial Sequence
  Description of Artificial Sequence: Synthetic oligonucleotide
cagcacucagguugucucg

SEQ ID NO: 2656401 - RNA, 19 nt, Artificial Sequence
  Description of Artificial Sequence: Synthetic oligonucleotide
gaucggcuuuaaauggagc

SEQ ID NO: 2656402 - RNA, 19 nt, Artificial Sequence
  Description of Artificial Sequence: Synthetic oligonucleotide
ugccuccccagagagaaga

SEQ ID NO: 2656403 - RNA, 19 nt, Artificial Sequence
  Description of Artificial Sequence: Synthetic oligonucleotide
uaaagacgacauguacuac

SEQ ID NO: 2656404 - RNA, 19 nt, Artificial Sequence
  Description of Artificial Sequence: Synthetic oligonucleotide
accacuagcccagauucca

SEQ ID NO: 2656405 - RNA, 19 nt, Artificial Sequence
  Description of Artificial Sequence: Synthetic oligonucleotide
gaguauguucugcuaccuc

SEQ ID NO: 2656406 - RNA, 19 nt, Artificial Sequence
  Description of Artificial Sequence: Synthetic oligonucleotide
guguuggcaaagcucccgc

SEQ ID NO: 2656407 - RNA, 19 nt, Artificial Sequence
  Description of Artificial Sequence: Synthetic oligonucleotide
ggucccuugggugagacac

SEQ ID NO: 2656408 - RNA, 19 nt, Artificial Sequence
  Description of Artificial Sequence: Synthetic oligonucleotide
uaagagcauuuguucaguu

SEQ ID NO: 2656409 - RNA, 19 nt, Artificial Sequence
  Description of Artificial Sequence: Synthetic oligonucleotide
agacacacugagcaaccau

SEQ ID NO: 2656410 - RNA, 19 nt, Artificial Sequence
  Description of Artificial Sequence: Synthetic oligonucleotide
uccagaguauguucugcua

SEQ ID NO: 2656411 - RNA, 19 nt, Artificial Sequence
  Description of Artificial Sequence: Synthetic oligonucleotide
ugguuauucacagcaugua

SEQ ID NO: 2656412 - RNA, 19 nt, Artificial Sequence
  Description of Artificial Sequence: Synthetic oligonucleotide
caguguuucgcaccagguc

SEQ ID NO: 2656413 - RNA, 19 nt, Artificial Sequence
  Description of Artificial Sequence: Synthetic oligonucleotide
uuaaagcugccagcacuca

SEQ ID NO: 2656414 - RNA, 19 nt, Artificial Sequence
  Description of Artificial Sequence: Synthetic oligonucleotide
guacuacucuggcaggcac

SEQ ID NO: 2656415 - RNA, 19 nt, Artificial Sequence
  Description of Artificial Sequence: Synthetic oligonucleotide
agaguauguucugcuaccu

SEQ ID NO: 2656416 - RNA, 19 nt, Artificial Sequence
  Description of Artificial Sequence: Synthetic oligonucleotide
acuguaaguuuuagcauaa

SEQ ID NO: 2656417 - RNA, 19 nt, Artificial Sequence
  Description of Artificial Sequence: Synthetic oligonucleotide
gcauguauaugaaaagcca

SEQ ID NO: 2656418 - RNA, 19 nt, Artificial Sequence
  Description of Artificial Sequence: Synthetic oligonucleotide
acucuggcaggcacaggcc

SEQ ID NO: 2656419 - RNA, 19 nt, Artificial Sequence
  Description of Artificial Sequence: Synthetic oligonucleotide
acugagcaaccauguguug

SEQ ID NO: 2656420 - RNA, 19 nt, Artificial Sequence
  Description of Artificial Sequence: Synthetic oligonucleotide
cagccucaauaacagcagc

SEQ ID NO: 2656421 - RNA, 19 nt, Artificial Sequence
  Description of Artificial Sequence: Synthetic oligonucleotide
guguagagugguuaaccaa

SEQ ID NO: 2656422 - RNA, 19 nt, Artificial Sequence
  Description of Artificial Sequence: Synthetic oligonucleotide
agcuugucgucaucgccca

SEQ ID NO: 2656423 - RNA, 19 nt, Artificial Sequence
  Description of Artificial Sequence: Synthetic oligonucleotide
ccagaguauguucugcuac

SEQ ID NO: 2656424 - RNA, 19 nt, Artificial Sequence
  Description of Artificial Sequence: Synthetic oligonucleotide
ccagacuguaaguuuuagc

SEQ ID NO: 2656425 - RNA, 19 nt, Artificial Sequence
  Description of Artificial Sequence: Synthetic oligonucleotide
ggagccaacucagugacca

SEQ ID NO: 2656426 - RNA, 19 nt, Artificial Sequence
  Description of Artificial Sequence: Synthetic oligonucleotide
uucccugguuauucacagc

SEQ ID NO: 2656427 - RNA, 19 nt, Artificial Sequence
  Description of Artificial Sequence: Synthetic oligonucleotide
uuagagcguagaucggcuu

SEQ ID NO: 2656428 - RNA, 19 nt, Artificial Sequence
  Description of Artificial Sequence: Synthetic oligonucleotide
agacgacauguacuacucu

SEQ ID NO: 2656429 - RNA, 19 nt, Artificial Sequence
  Description of Artificial Sequence: Synthetic oligonucleotide
auguguuggcaaagcuccc

SEQ ID NO: 2656430 - RNA, 19 nt, Artificial Sequence
  Description of Artificial Sequence: Synthetic oligonucleotide
agccucaauaacagcagca

SEQ ID NO: 2656431 - RNA, 19 nt, Artificial Sequence
  Description of Artificial Sequence: Synthetic oligonucleotide
agcaaccauguguuggcaa

SEQ ID NO: 2656432 - RNA, 19 nt, Artificial Sequence
  Description of Artificial Sequence: Synthetic oligonucleotide
ggaaaaguuaaagcugcca

SEQ ID NO: 2656433 - RNA, 19 nt, Artificial Sequence
  Description of Artificial Sequence: Synthetic oligonucleotide
ccugguuauucacagcaug

SEQ ID NO: 2656434 - RNA, 19 nt, Artificial Sequence
  Description of Artificial Sequence: Synthetic oligonucleotide
acacacugagcaaccaugu

SEQ ID NO: 2656435 - RNA, 19 nt, Artificial Sequence
  Description of Artificial Sequence: Synthetic oligonucleotide
cugguuauucacagcaugu

SEQ ID NO: 2656436 - RNA, 19 nt, Artificial Sequence
  Description of Artificial Sequence: Synthetic oligonucleotide
cagcauauaucugggauaa

SEQ ID NO: 2656437 - RNA, 19 nt, Artificial Sequence
  Description of Artificial Sequence: Synthetic oligonucleotide
caaccauguguuggcaaag

SEQ ID NO: 2656438 - RNA, 19 nt, Artificial Sequence
  Description of Artificial Sequence: Synthetic oligonucleotide
acucagguugucucgugua

SEQ ID NO: 2656439 - RNA, 19 nt, Artificial Sequence
  Description of Artificial Sequence: Synthetic oligonucleotide
uugucucguguagaguggu

SEQ ID NO: 2656440 - RNA, 19 nt, Artificial Sequence
  Description of Artificial Sequence: Synthetic oligonucleotide
auaucugggauaagagcau

SEQ ID NO: 2656441 - RNA, 19 nt, Artificial Sequence
  Description of Artificial Sequence: Synthetic oligonucleotide
ccauguguuggcaaagcuc

SEQ ID NO: 2656442 - RNA, 19 nt, Artificial Sequence
  Description of Artificial Sequence: Synthetic oligonucleotide
cacacugagcaaccaugug

SEQ ID NO: 2656443 - RNA, 19 nt, Artificial Sequence
  Description of Artificial Sequence: Synthetic oligonucleotide
ucccuugggugagacacac

SEQ ID NO: 2656444 - RNA, 19 nt, Artificial Sequence
  Description of Artificial Sequence: Synthetic oligonucleotide
caugcaaugccagccaaaa

SEQ ID NO: 2656445 - RNA, 19 nt, Artificial Sequence
  Description of Artificial Sequence: Synthetic oligonucleotide
gugguuaaccaaagagaac

SEQ ID NO: 2656446 - RNA, 19 nt, Artificial Sequence
  Description of Artificial Sequence: Synthetic oligonucleotide
cucuaagaaagggaaaagu

SEQ ID NO: 2656447 - RNA, 19 nt, Artificial Sequence
  Description of Artificial Sequence: Synthetic oligonucleotide
aaaagccaccuuagagcgu

SEQ ID NO: 2656448 - RNA, 19 nt, Artificial Sequence
  Description of Artificial Sequence: Synthetic oligonucleotide
cagccccuuaauucuuccc

SEQ ID NO: 2656449 - RNA, 19 nt, Artificial Sequence
  Description of Artificial Sequence: Synthetic oligonucleotide
uggagccaacucagugacc

SEQ ID NO: 2656450 - RNA, 19 nt, Artificial Sequence
  Description of Artificial Sequence: Synthetic oligonucleotide
gucaucgcccaaguaagga

SEQ ID NO: 2656451 - RNA, 19 nt, Artificial Sequence
  Description of Artificial Sequence: Synthetic oligonucleotide
ggccagggaggacagagac

SEQ ID NO: 2656452 - RNA, 19 nt, Artificial Sequence
  Description of Artificial Sequence: Synthetic oligonucleotide
ccuuagagcguagaucggc

SEQ ID NO: 2656453 - RNA, 19 nt, Artificial Sequence
  Description of Artificial Sequence: Synthetic oligonucleotide
cuuagagcguagaucggcu

SEQ ID NO: 2656454 - RNA, 19 nt, Artificial Sequence
  Description of Artificial Sequence: Synthetic oligonucleotide
gaccacuagcccagauucc

SEQ ID NO: 2656455 - RNA, 19 nt, Artificial Sequence
  Description of Artificial Sequence: Synthetic oligonucleotide
uguuucgcaccaggucgcc

SEQ ID NO: 2656456 - RNA, 19 nt, Artificial Sequence
  Description of Artificial Sequence: Synthetic oligonucleotide
uaucugggauaagagcauu

SEQ ID NO: 2656457 - RNA, 19 nt, Artificial Sequence
  Description of Artificial Sequence: Synthetic oligonucleotide
caggaccaguguuucgcac

SEQ ID NO: 2656458 - RNA, 19 nt, Artificial Sequence
  Description of Artificial Sequence: Synthetic oligonucleotide
gagcauuuguucaguuguc

SEQ ID NO: 2656459 - RNA, 19 nt, Artificial Sequence
  Description of Artificial Sequence: Synthetic oligonucleotide
guguuucgcaccaggucgc

SEQ ID NO: 2656460 - RNA, 19 nt, Artificial Sequence
  Description of Artificial Sequence: Synthetic oligonucleotide
ucccgcaggaccaguguuu

SEQ ID NO: 2656461 - RNA, 19 nt, Artificial Sequence
  Description of Artificial Sequence: Synthetic oligonucleotide
guucugcuaccuccuuggc

SEQ ID NO: 2656462 - RNA, 19 nt, Artificial Sequence
  Description of Artificial Sequence: Synthetic oligonucleotide
cucguguagagugguuaac

SEQ ID NO: 2656463 - RNA, 19 nt, Artificial Sequence
  Description of Artificial Sequence: Synthetic oligonucleotide
ccccuuaauucuucccugg

SEQ ID NO: 2656464 - RNA, 19 nt, Artificial Sequence
  Description of Artificial Sequence: Synthetic oligonucleotide
agcacucagguugucucgu

SEQ ID NO: 2656465 - RNA, 19 nt, Artificial Sequence
  Description of Artificial Sequence: Synthetic oligonucleotide
aacaugccaaaggucccuu

SEQ ID NO: 2656466 - RNA, 19 nt, Artificial Sequence
  Description of Artificial Sequence: Synthetic oligonucleotide
cacuagcccagauuccaga

SEQ ID NO: 2656467 - RNA, 19 nt, Artificial Sequence
  Description of Artificial Sequence: Synthetic oligonucleotide
agugaccacuagcccagau

SEQ ID NO: 2656468 - RNA, 19 nt, Artificial Sequence
  Description of Artificial Sequence: Synthetic oligonucleotide
gguuauucacagcauguau

SEQ ID NO: 2656469 - RNA, 19 nt, Artificial Sequence
  Description of Artificial Sequence: Synthetic oligonucleotide
accuuagagcguagaucgg

SEQ ID NO: 2656470 - RNA, 19 nt, Artificial Sequence
  Description of Artificial Sequence: Synthetic oligonucleotide
gcagcauauaucugggaua

SEQ ID NO: 2656471 - RNA, 19 nt, Artificial Sequence
  Description of Artificial Sequence: Synthetic oligonucleotide
gcaaccauguguuggcaaa

SEQ ID NO: 2656472 - RNA, 19 nt, Artificial Sequence
  Description of Artificial Sequence: Synthetic oligonucleotide
ugucgucaucgcccaagua

SEQ ID NO: 2656473 - RNA, 19 nt, Artificial Sequence
  Description of Artificial Sequence: Synthetic oligonucleotide
gcguagaucggcuuuaaau

SEQ ID NO: 2656474 - RNA, 19 nt, Artificial Sequence
  Description of Artificial Sequence: Synthetic oligonucleotide
ccaaguaaggaacaugagu

SEQ ID NO: 2656475 - RNA, 19 nt, Artificial Sequence
  Description of Artificial Sequence: Synthetic oligonucleotide
aucgcccaaguaaggaaca

SEQ ID NO: 2656476 - RNA, 19 nt, Artificial Sequence
  Description of Artificial Sequence: Synthetic oligonucleotide
agcauauaucugggauaag

SEQ ID NO: 2656477 - RNA, 19 nt, Artificial Sequence
  Description of Artificial Sequence: Synthetic oligonucleotide
ccaaaggucccuuggguga

SEQ ID NO: 2656478 - RNA, 19 nt, Artificial Sequence
  Description of Artificial Sequence: Synthetic oligonucleotide
cacugagcaaccauguguu

SEQ ID NO: 2656479 - RNA, 19 nt, Artificial Sequence
  Description of Artificial Sequence: Synthetic oligonucleotide
ugucucguguagagugguu

SEQ ID NO: 2656480 - RNA, 19 nt, Artificial Sequence
  Description of Artificial Sequence: Synthetic oligonucleotide
gggcagcuugucgucaucg

SEQ ID NO: 2656481 - RNA, 19 nt, Artificial Sequence
  Description of Artificial Sequence: Synthetic oligonucleotide
gccccuuaauucuucccug

SEQ ID NO: 2656482 - RNA, 19 nt, Artificial Sequence
  Description of Artificial Sequence: Synthetic oligonucleotide
cugggauaagagcauuugu

SEQ ID NO: 2656483 - RNA, 19 nt, Artificial Sequence
  Description of Artificial Sequence: Synthetic oligonucleotide
agagcguagaucggcuuua

SEQ ID NO: 2656484 - RNA, 19 nt, Artificial Sequence
  Description of Artificial Sequence: Synthetic oligonucleotide
gggaaaaguuaaagcugcc

SEQ ID NO: 2656485 - RNA, 19 nt, Artificial Sequence
  Description of Artificial Sequence: Synthetic oligonucleotide
agcguagaucggcuuuaaa

SEQ ID NO: 2656486 - RNA, 19 nt, Artificial Sequence
  Description of Artificial Sequence: Synthetic oligonucleotide
aaaggucccuugggugaga

SEQ ID NO: 2656487 - RNA, 19 nt, Artificial Sequence
  Description of Artificial Sequence: Synthetic oligonucleotide
gucucguguagagugguua

SEQ ID NO: 2656488 - RNA, 19 nt, Artificial Sequence
  Description of Artificial Sequence: Synthetic oligonucleotide
cgacauguacuacucuggc

SEQ ID NO: 2656489 - RNA, 19 nt, Artificial Sequence
  Description of Artificial Sequence: Synthetic oligonucleotide
ggugagacacacugagcaa

SEQ ID NO: 2656490 - RNA, 19 nt, Artificial Sequence
  Description of Artificial Sequence: Synthetic oligonucleotide
agguugucucguguagagu

SEQ ID NO: 2656491 - RNA, 19 nt, Artificial Sequence
  Description of Artificial Sequence: Synthetic oligonucleotide
ccuugaacaugccaaaggu

SEQ ID NO: 2656492 - RNA, 19 nt, Artificial Sequence
  Description of Artificial Sequence: Synthetic oligonucleotide
gcauuuguucaguuguccu

SEQ ID NO: 2656493 - RNA, 19 nt, Artificial Sequence
  Description of Artificial Sequence: Synthetic oligonucleotide
guauguucugcuaccuccu

SEQ ID NO: 2656494 - RNA, 19 nt, Artificial Sequence
  Description of Artificial Sequence: Synthetic oligonucleotide
guccugggcagcuugucgu

SEQ ID NO: 2656495 - RNA, 19 nt, Artificial Sequence
  Description of Artificial Sequence: Synthetic oligonucleotide
ugggcagcuugucgucauc

SEQ ID NO: 2656496 - RNA, 19 nt, Artificial Sequence
  Description of Artificial Sequence: Synthetic oligonucleotide
guuucgcaccaggucgccc

SEQ ID NO: 2656497 - RNA, 19 nt, Artificial Sequence
  Description of Artificial Sequence: Synthetic oligonucleotide
ccaccuuagagcguagauc

SEQ ID NO: 2656498 - RNA, 19 nt, Artificial Sequence
  Description of Artificial Sequence: Synthetic oligonucleotide
gcccagauuccagaguaug

SEQ ID NO: 2656499 - RNA, 19 nt, Artificial Sequence
  Description of Artificial Sequence: Synthetic oligonucleotide
aucugggauaagagcauuu

SEQ ID NO: 2656500 - RNA, 19 nt, Artificial Sequence
  Description of Artificial Sequence: Synthetic oligonucleotide
cuaccuccuuggccuuugc

SEQ ID NO: 2656501 - RNA, 19 nt, Artificial Sequence
  Description of Artificial Sequence: Synthetic oligonucleotide
gguuaaccaaagagaacaa

SEQ ID NO: 2656502 - RNA, 19 nt, Artificial Sequence
  Description of Artificial Sequence: Synthetic oligonucleotide
gagcaaccauguguuggca

SEQ ID NO: 2656503 - RNA, 19 nt, Artificial Sequence
  Description of Artificial Sequence: Synthetic oligonucleotide
ucgcccaaguaaggaacau

SEQ ID NO: 2656504 - RNA, 19 nt, Artificial Sequence
  Description of Artificial Sequence: Synthetic oligonucleotide
gccagacuguaaguuuuag

SEQ ID NO: 2656505 - RNA, 19 nt, Artificial Sequence
  Description of Artificial Sequence: Synthetic oligonucleotide
cguguagagugguuaacca

SEQ ID NO: 2656506 - RNA, 19 nt, Artificial Sequence
  Description of Artificial Sequence: Synthetic oligonucleotide
gaccaguguuucgcaccag

SEQ ID NO: 2656507 - RNA, 19 nt, Artificial Sequence
  Description of Artificial Sequence: Synthetic oligonucleotide
aagccaccuuagagcguag

SEQ ID NO: 2656508 - RNA, 19 nt, Artificial Sequence
  Description of Artificial Sequence: Synthetic oligonucleotide
cccucuaagaaagggaaaa

SEQ ID NO: 2656509 - RNA, 19 nt, Artificial Sequence
  Description of Artificial Sequence: Synthetic oligonucleotide
cuacucuggcaggcacagg

SEQ ID NO: 2656510 - RNA, 19 nt, Artificial Sequence
  Description of Artificial Sequence: Synthetic oligonucleotide
ccacuagcccagauuccag

SEQ ID NO: 2656511 - RNA, 19 nt, Artificial Sequence
  Description of Artificial Sequence: Synthetic oligonucleotide
cuuugccagacuguaaguu

SEQ ID NO: 2656512 - RNA, 19 nt, Artificial Sequence
  Description of Artificial Sequence: Synthetic oligonucleotide
gugaccacuagcccagauu

SEQ ID NO: 2656513 - RNA, 19 nt, Artificial Sequence
  Description of Artificial Sequence: Synthetic oligonucleotide
cagcagcauauaucuggga

SEQ ID NO: 2656514 - RNA, 19 nt, Artificial Sequence
  Description of Artificial Sequence: Synthetic oligonucleotide
cgcaggaccaguguuucgc

SEQ ID NO: 2656515 - RNA, 19 nt, Artificial Sequence
  Description of Artificial Sequence: Synthetic oligonucleotide
gcuuuaaauggagccaacu

SEQ ID NO: 2656516 - RNA, 19 nt, Artificial Sequence
  Description of Artificial Sequence: Synthetic oligonucleotide
aggucccuugggugagaca

SEQ ID NO: 2656517 - RNA, 19 nt, Artificial Sequence
  Description of Artificial Sequence: Synthetic oligonucleotide
agccaccuuagagcguaga

SEQ ID NO: 2656518 - RNA, 19 nt, Artificial Sequence
  Description of Artificial Sequence: Synthetic oligonucleotide
cugccuccccagagagaag

SEQ ID NO: 2656519 - RNA, 19 nt, Artificial Sequence
  Description of Artificial Sequence: Synthetic oligonucleotide
gcaggaccaguguuucgca

SEQ ID NO: 2656520 - RNA, 19 nt, Artificial Sequence
  Description of Artificial Sequence: Synthetic oligonucleotide
ggcuuuaaauggagccaac

SEQ ID NO: 2656521 - RNA, 19 nt, Artificial Sequence
  Description of Artificial Sequence: Synthetic oligonucleotide
agacagccccuuaauucuu

SEQ ID NO: 2656522 - RNA, 19 nt, Artificial Sequence
  Description of Artificial Sequence: Synthetic oligonucleotide
cucugccuccccagagaga

SEQ ID NO: 2656523 - RNA, 19 nt, Artificial Sequence
  Description of Artificial Sequence: Synthetic oligonucleotide
gagcguagaucggcuuuaa

SEQ ID NO: 2656524 - RNA, 19 nt, Artificial Sequence
  Description of Artificial Sequence: Synthetic oligonucleotide
cagagacagccccuuaauu

SEQ ID NO: 2656525 - RNA, 19 nt, Artificial Sequence
  Description of Artificial Sequence: Synthetic oligonucleotide
agcugccagcacucagguu

SEQ ID NO: 2656526 - RNA, 19 nt, Artificial Sequence
  Description of Artificial Sequence: Synthetic oligonucleotide
agcccagauuccagaguau

SEQ ID NO: 2656527 - RNA, 19 nt, Artificial Sequence
  Description of Artificial Sequence: Synthetic oligonucleotide
gccucaauaacagcagcau

SEQ ID NO: 2656528 - RNA, 19 nt, Artificial Sequence
  Description of Artificial Sequence: Synthetic oligonucleotide
gucccuugggugagacaca

SEQ ID NO: 2656529 - RNA, 19 nt, Artificial Sequence
  Description of Artificial Sequence: Synthetic oligonucleotide
guuguccugggcagcuugu

SEQ ID NO: 2656530 - RNA, 19 nt, Artificial Sequence
  Description of Artificial Sequence: Synthetic oligonucleotide
cccagauuccagaguaugu

SEQ ID NO: 2656531 - RNA, 19 nt, Artificial Sequence
  Description of Artificial Sequence: Synthetic oligonucleotide
ccgcaggaccaguguuucg

SEQ ID NO: 2656532 - RNA, 19 nt, Artificial Sequence
  Description of Artificial Sequence: Synthetic oligonucleotide
gccaccuuagagcguagau

SEQ ID NO: 2656533 - RNA, 19 nt, Artificial Sequence
  Description of Artificial Sequence: Synthetic oligonucleotide
gccaacucagugaccacua

SEQ ID NO: 2656534 - RNA, 19 nt, Artificial Sequence
  Description of Artificial Sequence: Synthetic oligonucleotide
ccaguguuucgcaccaggu

SEQ ID NO: 2656535 - RNA, 19 nt, Artificial Sequence
  Description of Artificial Sequence: Synthetic oligonucleotide
cccgcaggaccaguguuuc

SEQ ID NO: 2656536 - RNA, 19 nt, Artificial Sequence
  Description of Artificial Sequence: Synthetic oligonucleotide
cgcccaaguaaggaacaug

SEQ ID NO: 2656537 - RNA, 19 nt, Artificial Sequence
  Description of Artificial Sequence: Synthetic oligonucleotide
ccuuaauucuucccugguu

SEQ ID NO: 2656538 - RNA, 19 nt, Artificial Sequence
  Description of Artificial Sequence: Synthetic oligonucleotide
ccagauuccagaguauguu

SEQ ID NO: 2656539 - RNA, 19 nt, Artificial Sequence
  Description of Artificial Sequence: Synthetic oligonucleotide
ggacagagacagccccuua

SEQ ID NO: 2656540 - RNA, 19 nt, Artificial Sequence
  Description of Artificial Sequence: Synthetic oligonucleotide
ccccucuaagaaagggaaa

SEQ ID NO: 2656541 - RNA, 19 nt, Artificial Sequence
  Description of Artificial Sequence: Synthetic oligonucleotide
ccuuugccagacuguaagu

SEQ ID NO: 2656542 - RNA, 19 nt, Artificial Sequence
  Description of Artificial Sequence: Synthetic oligonucleotide
ugccagcacucagguuguc

SEQ ID NO: 2656543 - RNA, 19 nt, Artificial Sequence
  Description of Artificial Sequence: Synthetic oligonucleotide
ggccuuugccagacuguaa

SEQ ID NO: 2656544 - RNA, 19 nt, Artificial Sequence
  Description of Artificial Sequence: Synthetic oligonucleotide
gcucccgcaggaccagugu

SEQ ID NO: 2656545 - RNA, 19 nt, Artificial Sequence
  Description of Artificial Sequence: Synthetic oligonucleotide
cccugguuauucacagcau

SEQ ID NO: 2656546 - RNA, 19 nt, Artificial Sequence
  Description of Artificial Sequence: Synthetic oligonucleotide
caguuguccugggcagcuu

SEQ ID NO: 2656547 - RNA, 19 nt, Artificial Sequence
  Description of Artificial Sequence: Synthetic oligonucleotide
ucuucuuuuagcaagagca

SEQ ID NO: 2656548 - RNA, 19 nt, Artificial Sequence
  Description of Artificial Sequence: Synthetic oligonucleotide
uguacuuggagauuuaccg

SEQ ID NO: 2656549 - RNA, 19 nt, Artificial Sequence
  Description of Artificial Sequence: Synthetic oligonucleotide
uauuuuguagcucuggcug

SEQ ID NO: 2656550 - RNA, 19 nt, Artificial Sequence
  Description of Artificial Sequence: Synthetic oligonucleotide
guaaagacugcauagacug

SEQ ID NO: 2656551 - RNA, 19 nt, Artificial Sequence
  Description of Artificial Sequence: Synthetic oligonucleotide
ucaucgaccguccauauag

SEQ ID NO: 2656552 - RNA, 19 nt, Artificial Sequence
  Description of Artificial Sequence: Synthetic oligonucleotide
aauggaugaaagcccagac

SEQ ID NO: 2656553 - RNA, 19 nt, Artificial Sequence
  Description of Artificial Sequence: Synthetic oligonucleotide
cuugauaaaccacuggugg

SEQ ID NO: 2656554 - RNA, 19 nt, Artificial Sequence
  Description of Artificial Sequence: Synthetic oligonucleotide
ucuuuuagcaagagcaggg

SEQ ID NO: 2656555 - RNA, 19 nt, Artificial Sequence
  Description of Artificial Sequence: Synthetic oligonucleotide
gaauucaucggcaacaucc

SEQ ID NO: 2656556 - RNA, 19 nt, Artificial Sequence
  Description of Artificial Sequence: Synthetic oligonucleotide
ugucagaugaguuaucugc

SEQ ID NO: 2656557 - RNA, 19 nt, Artificial Sequence
  Description of Artificial Sequence: Synthetic oligonucleotide
  modified_base (4)..(4): a, c, u, g, unknown or other
uccngauucucacaucucg

SEQ ID NO: 2656558 - RNA, 19 nt, Artificial Sequence
  Description of Artificial Sequence: Synthetic oligonucleotide
ugaaauggcaacuggacca

SEQ ID NO: 2656559 - RNA, 19 nt, Artificial Sequence
  Description of Artificial Sequence: Synthetic oligonucleotide
ucuucuucugacaccaacg

SEQ ID NO: 2656560 - RNA, 19 nt, Artificial Sequence
  Description of Artificial Sequence: Synthetic oligonucleotide
ucuucuacuugauaaacca

SEQ ID NO: 2656561 - RNA, 19 nt, Artificial Sequence
  Description of Artificial Sequence: Synthetic oligonucleotide
gauucucacaucucgaagc

SEQ ID NO: 2656562 - RNA, 19 nt, Artificial Sequence
  Description of Artificial Sequence: Synthetic oligonucleotide
acuuguaaagacugcauag

SEQ ID NO: 2656563 - RNA, 19 nt, Artificial Sequence
  Description of Artificial Sequence: Synthetic oligonucleotide
aagagucugaaauggcaac

SEQ ID NO: 2656564 - RNA, 19 nt, Artificial Sequence
  Description of Artificial Sequence: Synthetic oligonucleotide
uguguuauuuuguagcucu

SEQ ID NO: 2656565 - RNA, 19 nt, Artificial Sequence
  Description of Artificial Sequence: Synthetic oligonucleotide
cugggauagaauuucaggc

SEQ ID NO: 2656566 - RNA, 19 nt, Artificial Sequence
  Description of Artificial Sequence: Synthetic oligonucleotide
uucaucggcaacauccugg

SEQ ID NO: 2656567 - RNA, 19 nt, Artificial Sequence
  Description of Artificial Sequence: Synthetic oligonucleotide
uacuugauaaaccacuggu

SEQ ID NO: 2656568 - RNA, 19 nt, Artificial Sequence
  Description of Artificial Sequence: Synthetic oligonucleotide
uucuacuugauaaaccacu

SEQ ID NO: 2656569 - RNA, 19 nt, Artificial Sequence
  Description of Artificial Sequence: Synthetic oligonucleotide
agaaucuucaugagaagcc

SEQ ID NO: 2656570 - RNA, 19 nt, Artificial Sequence
  Description of Artificial Sequence: Synthetic oligonucleotide
  modified_base (6)..(6): a, c, u, g, unknown or other
uuuccngauucucacaucu

SEQ ID NO: 2656571 - RNA, 19 nt, Artificial Sequence
  Description of Artificial Sequence: Synthetic oligonucleotide
gagaugucgacaucugugg

SEQ ID NO: 2656572 - RNA, 19 nt, Artificial Sequence
  Description of Artificial Sequence: Synthetic oligonucleotide
uuuagcaagagcagggccu

SEQ ID NO: 2656573 - RNA, 19 nt, Artificial Sequence
  Description of Artificial Sequence: Synthetic oligonucleotide
gaguugucauagcagaggg

SEQ ID NO: 2656574 - RNA, 19 nt, Artificial Sequence
  Description of Artificial Sequence: Synthetic oligonucleotide
ucuucugacaccaacgcau

SEQ ID NO: 2656575 - RNA, 19 nt, Artificial Sequence
  Description of Artificial Sequence: Synthetic oligonucleotide
ucugaaauggcaacuggac

SEQ ID NO: 2656576 - RNA, 19 nt, Artificial Sequence
  Description of Artificial Sequence: Synthetic oligonucleotide
gacugcauagacugcaagg

SEQ ID NO: 2656577 - RNA, 19 nt, Artificial Sequence
  Description of Artificial Sequence: Synthetic oligonucleotide
ucuacuugauaaaccacug

SEQ ID NO: 2656578 - RNA, 19 nt, Artificial Sequence
  Description of Artificial Sequence: Synthetic oligonucleotide
caugcuuuguguuauuuug

SEQ ID NO: 2656579 - RNA, 19 nt, Artificial Sequence
  Description of Artificial Sequence: Synthetic oligonucleotide
uguaaagacugcauagacu

SEQ ID NO: 2656580 - RNA, 19 nt, Artificial Sequence
  Description of Artificial Sequence: Synthetic oligonucleotide
auauagagggcucugucug

SEQ ID NO: 2656581 - RNA, 19 nt, Artificial Sequence
  Description of Artificial Sequence: Synthetic oligonucleotide
aagcucacguucucuuucc

SEQ ID NO: 2656582 - RNA, 19 nt, Artificial Sequence
  Description of Artificial Sequence: Synthetic oligonucleotide
aucggcaacauccuggcag

SEQ ID NO: 2656583 - RNA, 19 nt, Artificial Sequence
  Description of Artificial Sequence: Synthetic oligonucleotide
ugaguuaucugcaugcuuu

SEQ ID NO: 2656584 - RNA, 19 nt, Artificial Sequence
  Description of Artificial Sequence: Synthetic oligonucleotide
uuuguguuauuuuguagcu

SEQ ID NO: 2656585 - RNA, 19 nt, Artificial Sequence
  Description of Artificial Sequence: Synthetic oligonucleotide
uuuuagcaagagcagggcc

SEQ ID NO: 2656586 - RNA, 19 nt, Artificial Sequence
  Description of Artificial Sequence: Synthetic oligonucleotide
uuguaaagacugcauagac

SEQ ID NO: 2656587 - RNA, 19 nt, Artificial Sequence
  Description of Artificial Sequence: Synthetic oligonucleotide
ugcauagacugcaagggca

SEQ ID NO: 2656588 - RNA, 19 nt, Artificial Sequence
  Description of Artificial Sequence: Synthetic oligonucleotide
acuguucucaggcauuuuc

SEQ ID NO: 2656589 - RNA, 19 nt, Artificial Sequence
  Description of Artificial Sequence: Synthetic oligonucleotide
uucuuuuagcaagagcagg

SEQ ID NO: 2656590 - RNA, 19 nt, Artificial Sequence
  Description of Artificial Sequence: Synthetic oligonucleotide
acugcauagacugcaaggg

SEQ ID NO: 2656591 - RNA, 19 nt, Artificial Sequence
  Description of Artificial Sequence: Synthetic oligonucleotide
ucgaccguccauauagagg

SEQ ID NO: 2656592 - RNA, 19 nt, Artificial Sequence
  Description of Artificial Sequence: Synthetic oligonucleotide
uacuuggagauuuaccgca

SEQ ID NO: 2656593 - RNA, 19 nt, Artificial Sequence
  Description of Artificial Sequence: Synthetic oligonucleotide
gaugucgacaucuguggag

SEQ ID NO: 2656594 - RNA, 19 nt, Artificial Sequence
  Description of Artificial Sequence: Synthetic oligonucleotide
aaagacugcauagacugca

SEQ ID NO: 2656595 - RNA, 19 nt, Artificial Sequence
  Description of Artificial Sequence: Synthetic oligonucleotide
ugagauggucuucuuuuag

SEQ ID NO: 2656596 - RNA, 19 nt, Artificial Sequence
  Description of Artificial Sequence: Synthetic oligonucleotide
uuguacuuggagauuuacc

SEQ ID NO: 2656597 - RNA, 19 nt, Artificial Sequence
  Description of Artificial Sequence: Synthetic oligonucleotide
ugggauagaauuucaggcu

SEQ ID NO: 2656598 - RNA, 19 nt, Artificial Sequence
  Description of Artificial Sequence: Synthetic oligonucleotide
uugugcccggaauucaucg

SEQ ID NO: 2656599 - RNA, 19 nt, Artificial Sequence
  Description of Artificial Sequence: Synthetic oligonucleotide
uagcagagggcacagaauc

SEQ ID NO: 2656600 - RNA, 19 nt, Artificial Sequence
  Description of Artificial Sequence: Synthetic oligonucleotide
acacacaucuucuacuuga

SEQ ID NO: 2656601 - RNA, 19 nt, Artificial Sequence
  Description of Artificial Sequence: Synthetic oligonucleotide
uggagauuuaccgcaacag

SEQ ID NO: 2656602 - RNA, 19 nt, Artificial Sequence
  Description of Artificial Sequence: Synthetic oligonucleotide
aucuucuacuugauaaacc

SEQ ID NO: 2656603 - RNA, 19 nt, Artificial Sequence
  Description of Artificial Sequence: Synthetic oligonucleotide
uuuaccgcaacagucugug

SEQ ID NO: 2656604 - RNA, 19 nt, Artificial Sequence
  Description of Artificial Sequence: Synthetic oligonucleotide
uugauaaaccacuggugga

SEQ ID NO: 2656605 - RNA, 19 nt, Artificial Sequence
  Description of Artificial Sequence: Synthetic oligonucleotide
cacagaaucuucaugagaa

SEQ ID NO: 2656606 - RNA, 19 nt, Artificial Sequence
  Description of Artificial Sequence: Synthetic oligonucleotide
gagauggucuucuuuuagc

SEQ ID NO: 2656607 - RNA, 19 nt, Artificial Sequence
  Description of Artificial Sequence: Synthetic oligonucleotide
agucugaaauggcaacugg

SEQ ID NO: 2656608 - RNA, 19 nt, Artificial Sequence
  Description of Artificial Sequence: Synthetic oligonucleotide
agauggucuucuuuuagca

SEQ ID NO: 2656609 - RNA, 19 nt, Artificial Sequence
  Description of Artificial Sequence: Synthetic oligonucleotide
  modified_base (8)..(8): a, c, u, g, unknown or other
auuuuccngauucucacau

SEQ ID NO: 2656610 - RNA, 19 nt, Artificial Sequence
  Description of Artificial Sequence: Synthetic oligonucleotide
cuucuuuuagcaagagcag

SEQ ID NO: 2656611 - RNA, 19 nt, Artificial Sequence
  Description of Artificial Sequence: Synthetic oligonucleotide
cugaaauggcaacuggacc

SEQ ID NO: 2656612 - RNA, 19 nt, Artificial Sequence
  Description of Artificial Sequence: Synthetic oligonucleotide
gagauuuaccgcaacaguc

SEQ ID NO: 2656613 - RNA, 19 nt, Artificial Sequence
  Description of Artificial Sequence: Synthetic oligonucleotide
ugcaccaaaaccuggcccu

SEQ ID NO: 2656614 - RNA, 19 nt, Artificial Sequence
  Description of Artificial Sequence: Synthetic oligonucleotide
cuucuucugacaccaacgc

SEQ ID NO: 2656615 - RNA, 19 nt, Artificial Sequence
  Description of Artificial Sequence: Synthetic oligonucleotide
gacaccaacgcauucugca

SEQ ID NO: 2656616 - RNA, 19 nt, Artificial Sequence
  Description of Artificial Sequence: Synthetic oligonucleotide
gacgaguugucauagcaga

SEQ ID NO: 2656617 - RNA, 19 nt, Artificial Sequence
  Description of Artificial Sequence: Synthetic oligonucleotide
ugcaacugggagcaaguca

SEQ ID NO: 2656618 - RNA, 19 nt, Artificial Sequence
  Description of Artificial Sequence: Synthetic oligonucleotide
cucacguucucuuucccgc

SEQ ID NO: 2656619 - RNA, 19 nt, Artificial Sequence
  Description of Artificial Sequence: Synthetic oligonucleotide
ugggaucugagcuggagga

SEQ ID NO: 2656620 - RNA, 19 nt, Artificial Sequence
  Description of Artificial Sequence: Synthetic oligonucleotide
uuggagauuuaccgcaaca

SEQ ID NO: 2656621 - RNA, 19 nt, Artificial Sequence
  Description of Artificial Sequence: Synthetic oligonucleotide
cagaaucuucaugagaagc

SEQ ID NO: 2656622 - RNA, 19 nt, Artificial Sequence
  Description of Artificial Sequence: Synthetic oligonucleotide
cuacuugauaaaccacugg

SEQ ID NO: 2656623 - RNA, 19 nt, Artificial Sequence
  Description of Artificial Sequence: Synthetic oligonucleotide
gauuuaccgcaacagucug

SEQ ID NO: 2656624 - RNA, 19 nt, Artificial Sequence
  Description of Artificial Sequence: Synthetic oligonucleotide
accacugguggaucaacgg

SEQ ID NO: 2656625 - RNA, 19 nt, Artificial Sequence
  Description of Artificial Sequence: Synthetic oligonucleotide
cuguucucaggcauuuucc

SEQ ID NO: 2656626 - RNA, 19 nt, Artificial Sequence
  Description of Artificial Sequence: Synthetic oligonucleotide
acgcauucugcaccaaaac

SEQ ID NO: 2656627 - RNA, 19 nt, Artificial Sequence
  Description of Artificial Sequence: Synthetic oligonucleotide
uggaccagagcuucugcag

SEQ ID NO: 2656628 - RNA, 19 nt, Artificial Sequence
  Description of Artificial Sequence: Synthetic oligonucleotide
ucugcaccaaaaccuggcc

SEQ ID NO: 2656629 - RNA, 19 nt, Artificial Sequence
  Description of Artificial Sequence: Synthetic oligonucleotide
agaauuucaggcugcacuu

SEQ ID NO: 2656630 - RNA, 19 nt, Artificial Sequence
  Description of Artificial Sequence: Synthetic oligonucleotide
uaaagacugcauagacugc

SEQ ID NO: 2656631 - RNA, 19 nt, Artificial Sequence
  Description of Artificial Sequence: Synthetic oligonucleotide
aauggcaacuggaccagag

SEQ ID NO: 2656632 - RNA, 19 nt, Artificial Sequence
  Description of Artificial Sequence: Synthetic oligonucleotide
ucaucggcaacauccuggc

SEQ ID NO: 2656633 - RNA, 19 nt, Artificial Sequence
  Description of Artificial Sequence: Synthetic oligonucleotide
augucgacaucuguggagg

SEQ ID NO: 2656634 - RNA, 19 nt, Artificial Sequence
  Description of Artificial Sequence: Synthetic oligonucleotide
agcccagacaucaucgacc

SEQ ID NO: 2656635 - RNA, 19 nt, Artificial Sequence
  Description of Artificial Sequence: Synthetic oligonucleotide
acuggaccagagcuucugc

SEQ ID NO: 2656636 - RNA, 19 nt, Artificial Sequence
  Description of Artificial Sequence: Synthetic oligonucleotide
aaaccacugguggaucaac

SEQ ID NO: 2656637 - RNA, 19 nt, Artificial Sequence
  Description of Artificial Sequence: Synthetic oligonucleotide
gaucaacgggugcugcugg

SEQ ID NO: 2656638 - RNA, 19 nt, Artificial Sequence
  Description of Artificial Sequence: Synthetic oligonucleotide
ucugugucagaugaguuau

SEQ ID NO: 2656639 - RNA, 19 nt, Artificial Sequence
  Description of Artificial Sequence: Synthetic oligonucleotide
uuucaggcugcacuuguaa

SEQ ID NO: 2656640 - RNA, 19 nt, Artificial Sequence
  Description of Artificial Sequence: Synthetic oligonucleotide
uagacugcaagggcagugg

SEQ ID NO: 2656641 - RNA, 19 nt, Artificial Sequence
  Description of Artificial Sequence: Synthetic oligonucleotide
uucuucugacaccaacgca

SEQ ID NO: 2656642 - RNA, 19 nt, Artificial Sequence
  Description of Artificial Sequence: Synthetic oligonucleotide
aauucaucggcaacauccu

SEQ ID NO: 2656643 - RNA, 19 nt, Artificial Sequence
  Description of Artificial Sequence: Synthetic oligonucleotide
ugauaaaccacugguggau

SEQ ID NO: 2656644 - RNA, 19 nt, Artificial Sequence
  Description of Artificial Sequence: Synthetic oligonucleotide
cuucaugagaagccaaguc

SEQ ID NO: 2656645 - RNA, 19 nt, Artificial Sequence
  Description of Artificial Sequence: Synthetic oligonucleotide
cuucuacuugauaaaccac

SEQ ID NO: 2656646 - RNA, 19 nt, Artificial Sequence
  Description of Artificial Sequence: Synthetic oligonucleotide
auaaaccacugguggauca

SEQ ID NO: 2656647 - RNA, 19 nt, Artificial Sequence
  Description of Artificial Sequence: Synthetic oligonucleotide
agauuuaccgcaacagucu

SEQ ID NO: 2656648 - RNA, 19 nt, Artificial Sequence
  Description of Artificial Sequence: Synthetic oligonucleotide
uucgaagacgaguugucau

SEQ ID NO: 2656649 - RNA, 19 nt, Artificial Sequence
  Description of Artificial Sequence: Synthetic oligonucleotide
gaaauggcaacuggaccag

SEQ ID NO: 2656650 - RNA, 19 nt, Artificial Sequence
  Description of Artificial Sequence: Synthetic oligonucleotide
acuugauaaaccacuggug

SEQ ID NO: 2656651 - RNA, 19 nt, Artificial Sequence
  Description of Artificial Sequence: Synthetic oligonucleotide
acaucuucuacuugauaaa

SEQ ID NO: 2656652 - RNA, 19 nt, Artificial Sequence
  Description of Artificial Sequence: Synthetic oligonucleotide
gaagcucacguucucuuuc

SEQ ID NO: 2656653 - RNA, 19 nt, Artificial Sequence
  Description of Artificial Sequence: Synthetic oligonucleotide
uucuucugcucucuguguc

SEQ ID NO: 2656654 - RNA, 19 nt, Artificial Sequence
  Description of Artificial Sequence: Synthetic oligonucleotide
ugugcccggaauucaucgg

SEQ ID NO: 2656655 - RNA, 19 nt, Artificial Sequence
  Description of Artificial Sequence: Synthetic oligonucleotide
accgcaacagucuguggag

SEQ ID NO: 2656656 - RNA, 19 nt, Artificial Sequence
  Description of Artificial Sequence: Synthetic oligonucleotide
aaccacugguggaucaacg

SEQ ID NO: 2656657 - RNA, 19 nt, Artificial Sequence
  Description of Artificial Sequence: Synthetic oligonucleotide
gugggaucugagcuggagg

SEQ ID NO: 2656658 - RNA, 19 nt, Artificial Sequence
  Description of Artificial Sequence: Synthetic oligonucleotide
  modified_base (10)..(10): a, c, u, g, unknown or other
gcauuuuccngauucucac

SEQ ID NO: 2656659 - RNA, 19 nt, Artificial Sequence
  Description of Artificial Sequence: Synthetic oligonucleotide
aucgaccguccauauagag

SEQ ID NO: 2656660 - RNA, 19 nt, Artificial Sequence
  Description of Artificial Sequence: Synthetic oligonucleotide
cuuuuagcaagagcagggc

SEQ ID NO: 2656661 - RNA, 19 nt, Artificial Sequence
  Description of Artificial Sequence: Synthetic oligonucleotide
gaaucuucaugagaagcca

SEQ ID NO: 2656662 - RNA, 19 nt, Artificial Sequence
  Description of Artificial Sequence: Synthetic oligonucleotide
agcaagucacuguucucag

SEQ ID NO: 2656663 - RNA, 19 nt, Artificial Sequence
  Description of Artificial Sequence: Synthetic oligonucleotide
gaguuaucugcaugcuuug

SEQ ID NO: 2656664 - RNA, 19 nt, Artificial Sequence
  Description of Artificial Sequence: Synthetic oligonucleotide
ccugggauagaauuucagg

SEQ ID NO: 2656665 - RNA, 19 nt, Artificial Sequence
  Description of Artificial Sequence: Synthetic oligonucleotide
cucugucugugcaacuggg

SEQ ID NO: 2656666 - RNA, 19 nt, Artificial Sequence
  Description of Artificial Sequence: Synthetic oligonucleotide
gggauagaauuucaggcug

SEQ ID NO: 2656667 - RNA, 19 nt, Artificial Sequence
  Description of Artificial Sequence: Synthetic oligonucleotide
  modified_base (7)..(7): a, c, u, g, unknown or other
uuuuccngauucucacauc

SEQ ID NO: 2656668 - RNA, 19 nt, Artificial Sequence
  Description of Artificial Sequence: Synthetic oligonucleotide
aggaagagucugaaauggc

SEQ ID NO: 2656669 - RNA, 19 nt, Artificial Sequence
  Description of Artificial Sequence: Synthetic oligonucleotide
ucuucugcucucuguguca

SEQ ID NO: 2656670 - RNA, 19 nt, Artificial Sequence
  Description of Artificial Sequence: Synthetic oligonucleotide
caucuucuacuugauaaac

SEQ ID NO: 2656671 - RNA, 19 nt, Artificial Sequence
  Description of Artificial Sequence: Synthetic oligonucleotide
ugcuuuguguuauuuugua

SEQ ID NO: 2656672 - RNA, 19 nt, Artificial Sequence
  Description of Artificial Sequence: Synthetic oligonucleotide
ucuucaugagaagccaagu

SEQ ID NO: 2656673 - RNA, 19 nt, Artificial Sequence
  Description of Artificial Sequence: Synthetic oligonucleotide
auagaauuucaggcugcac

SEQ ID NO: 2656674 - RNA, 19 nt, Artificial Sequence
  Description of Artificial Sequence: Synthetic oligonucleotide
uucugcagcagggagcucu

SEQ ID NO: 2656675 - RNA, 19 nt, Artificial Sequence
  Description of Artificial Sequence: Synthetic oligonucleotide
gucuucuuuuagcaagagc

SEQ ID NO: 2656676 - RNA, 19 nt, Artificial Sequence
  Description of Artificial Sequence: Synthetic oligonucleotide
agcuucugcagcagggagc

SEQ ID NO: 2656677 - RNA, 19 nt, Artificial Sequence
  Description of Artificial Sequence: Synthetic oligonucleotide
aguugucauagcagagggc

SEQ ID NO: 2656678 - RNA, 19 nt, Artificial Sequence
  Description of Artificial Sequence: Synthetic oligonucleotide
gagucugaaauggcaacug

SEQ ID NO: 2656679 - RNA, 19 nt, Artificial Sequence
  Description of Artificial Sequence: Synthetic oligonucleotide
ucaugagauggucuucuuu

SEQ ID NO: 2656680 - RNA, 19 nt, Artificial Sequence
  Description of Artificial Sequence: Synthetic oligonucleotide
ggaggaagagucugaaaug

SEQ ID NO: 2656681 - RNA, 19 nt, Artificial Sequence
  Description of Artificial Sequence: Synthetic oligonucleotide
cugcauagacugcaagggc

SEQ ID NO: 2656682 - RNA, 19 nt, Artificial Sequence
  Description of Artificial Sequence: Synthetic oligonucleotide
ggcaaagaauggaugaaag

SEQ ID NO: 2656683 - RNA, 19 nt, Artificial Sequence
  Description of Artificial Sequence: Synthetic oligonucleotide
agcucuucuucugacacca

SEQ ID NO: 2656684 - RNA, 19 nt, Artificial Sequence
  Description of Artificial Sequence: Synthetic oligonucleotide
cagucuguggaggaggaag

SEQ ID NO: 2656685 - RNA, 19 nt, Artificial Sequence
  Description of Artificial Sequence: Synthetic oligonucleotide
aacugggagcaagucacug

SEQ ID NO: 2656686 - RNA, 19 nt, Artificial Sequence
  Description of Artificial Sequence: Synthetic oligonucleotide
gaagacgaguugucauagc

SEQ ID NO: 2656687 - RNA, 19 nt, Artificial Sequence
  Description of Artificial Sequence: Synthetic oligonucleotide
uauagagggcucugucugu

SEQ ID NO: 2656688 - RNA, 19 nt, Artificial Sequence
  Description of Artificial Sequence: Synthetic oligonucleotide
ucugcaugcuuuguguuau

SEQ ID NO: 2656689 - RNA, 19 nt, Artificial Sequence
  Description of Artificial Sequence: Synthetic oligonucleotide
cugcaccaaaaccuggccc

SEQ ID NO: 2656690 - RNA, 19 nt, Artificial Sequence
  Description of Artificial Sequence: Synthetic oligonucleotide
ucgaagacgaguugucaua

SEQ ID NO: 2656691 - RNA, 19 nt, Artificial Sequence
  Description of Artificial Sequence: Synthetic oligonucleotide
aacgcauucugcaccaaaa

SEQ ID NO: 2656692 - RNA, 19 nt, Artificial Sequence
  Description of Artificial Sequence: Synthetic oligonucleotide
cacucugccuucgaagacg

SEQ ID NO: 2656693 - RNA, 19 nt, Artificial Sequence
  Description of Artificial Sequence: Synthetic oligonucleotide
agucacuguucucaggcau

SEQ ID NO: 2656694 - RNA, 19 nt, Artificial Sequence
  Description of Artificial Sequence: Synthetic oligonucleotide
caacagucuguggaggagg

SEQ ID NO: 2656695 - RNA, 19 nt, Artificial Sequence
  Description of Artificial Sequence: Synthetic oligonucleotide
cuuguaaagacugcauaga

SEQ ID NO: 2656696 - RNA, 19 nt, Artificial Sequence
  Description of Artificial Sequence: Synthetic oligonucleotide
ugucgacaucuguggaggg

SEQ ID NO: 2656697 - RNA, 19 nt, Artificial Sequence
  Description of Artificial Sequence: Synthetic oligonucleotide
  modified_base (16)..(16): a, c, u, g, unknown or other
ucucaggcauuuuccngau

SEQ ID NO: 2656698 - RNA, 19 nt, Artificial Sequence
  Description of Artificial Sequence: Synthetic oligonucleotide
agagucugaaauggcaacu

SEQ ID NO: 2656699 - RNA, 19 nt, Artificial Sequence
  Description of Artificial Sequence: Synthetic oligonucleotide
caccaacgcauucugcacc

SEQ ID NO: 2656700 - RNA, 19 nt, Artificial Sequence
  Description of Artificial Sequence: Synthetic oligonucleotide
aacuggaccagagcuucug

SEQ ID NO: 2656701 - RNA, 19 nt, Artificial Sequence
  Description of Artificial Sequence: Synthetic oligonucleotide
gggcacagaaucuucauga

SEQ ID NO: 2656702 - RNA, 19 nt, Artificial Sequence
  Description of Artificial Sequence: Synthetic oligonucleotide
cucacucugccuucgaaga

SEQ ID NO: 2656703 - RNA, 19 nt, Artificial Sequence
  Description of Artificial Sequence: Synthetic oligonucleotide
gcuuuguguuauuuuguag

SEQ ID NO: 2656704 - RNA, 19 nt, Artificial Sequence
  Description of Artificial Sequence: Synthetic oligonucleotide
caugagaagccaagucuuc

SEQ ID NO: 2656705 - RNA, 19 nt, Artificial Sequence
  Description of Artificial Sequence: Synthetic oligonucleotide
ggagaugucgacaucugug

SEQ ID NO: 2656706 - RNA, 19 nt, Artificial Sequence
  Description of Artificial Sequence: Synthetic oligonucleotide
ucuugugcccggaauucau

SEQ ID NO: 2656707 - RNA, 19 nt, Artificial Sequence
  Description of Artificial Sequence: Synthetic oligonucleotide
ugacaccaacgcauucugc

SEQ ID NO: 2656708 - RNA, 19 nt, Artificial Sequence
  Description of Artificial Sequence: Synthetic oligonucleotide
ucacaucucgaagcucacg

SEQ ID NO: 2656709 - RNA, 19 nt, Artificial Sequence
  Description of Artificial Sequence: Synthetic oligonucleotide
gauagaauuucaggcugca

SEQ ID NO: 2656710 - RNA, 19 nt, Artificial Sequence
  Description of Artificial Sequence: Synthetic oligonucleotide
cugacaccaacgcauucug

SEQ ID NO: 2656711 - RNA, 19 nt, Artificial Sequence
  Description of Artificial Sequence: Synthetic oligonucleotide
auagacugcaagggcagug

SEQ ID NO: 2656712 - RNA, 19 nt, Artificial Sequence
  Description of Artificial Sequence: Synthetic oligonucleotide
uucaggcugcacuuguaaa

SEQ ID NO: 2656713 - RNA, 19 nt, Artificial Sequence
  Description of Artificial Sequence: Synthetic oligonucleotide
cuggcugcacucauccgag

SEQ ID NO: 2656714 - RNA, 19 nt, Artificial Sequence
  Description of Artificial Sequence: Synthetic oligonucleotide
agacgaguugucauagcag

SEQ ID NO: 2656715 - RNA, 19 nt, Artificial Sequence
  Description of Artificial Sequence: Synthetic oligonucleotide
auucaucggcaacauccug

SEQ ID NO: 2656716 - RNA, 19 nt, Artificial Sequence
  Description of Artificial Sequence: Synthetic oligonucleotide
accaacgcauucugcacca

SEQ ID NO: 2656717 - RNA, 19 nt, Artificial Sequence
  Description of Artificial Sequence: Synthetic oligonucleotide
agaugucgacaucugugga

SEQ ID NO: 2656718 - RNA, 19 nt, Artificial Sequence
  Description of Artificial Sequence: Synthetic oligonucleotide
ggagcucuucuucugacac

SEQ ID NO: 2656719 - RNA, 19 nt, Artificial Sequence
  Description of Artificial Sequence: Synthetic oligonucleotide
aacgggugcugcugguugu

SEQ ID NO: 2656720 - RNA, 19 nt, Artificial Sequence
  Description of Artificial Sequence: Synthetic oligonucleotide
ugguggaucaacgggugcu

SEQ ID NO: 2656721 - RNA, 19 nt, Artificial Sequence
  Description of Artificial Sequence: Synthetic oligonucleotide
cucuuucccgcucacucug

SEQ ID NO: 2656722 - RNA, 19 nt, Artificial Sequence
  Description of Artificial Sequence: Synthetic oligonucleotide
gaauuucaggcugcacuug

SEQ ID NO: 2656723 - RNA, 19 nt, Artificial Sequence
  Description of Artificial Sequence: Synthetic oligonucleotide
gcugcacuuguaaagacug

SEQ ID NO: 2656724 - RNA, 19 nt, Artificial Sequence
  Description of Artificial Sequence: Synthetic oligonucleotide
guggugggaucugagcugg

SEQ ID NO: 2656725 - RNA, 19 nt, Artificial Sequence
  Description of Artificial Sequence: Synthetic oligonucleotide
gcccagacaucaucgaccg

SEQ ID NO: 2656726 - RNA, 19 nt, Artificial Sequence
  Description of Artificial Sequence: Synthetic oligonucleotide
aggagaugucgacaucugu

SEQ ID NO: 2656727 - RNA, 19 nt, Artificial Sequence
  Description of Artificial Sequence: Synthetic oligonucleotide
aagucuucuucugcucucu

SEQ ID NO: 2656728 - RNA, 19 nt, Artificial Sequence
  Description of Artificial Sequence: Synthetic oligonucleotide
gauaaaccacugguggauc

SEQ ID NO: 2656729 - RNA, 19 nt, Artificial Sequence
  Description of Artificial Sequence: Synthetic oligonucleotide
gcaacugggagcaagucac

SEQ ID NO: 2656730 - RNA, 19 nt, Artificial Sequence
  Description of Artificial Sequence: Synthetic oligonucleotide
uuaccgcaacagucugugg

SEQ ID NO: 2656731 - RNA, 19 nt, Artificial Sequence
  Description of Artificial Sequence: Synthetic oligonucleotide
guuguacuuggagauuuac

SEQ ID NO: 2656732 - RNA, 19 nt, Artificial Sequence
  Description of Artificial Sequence: Synthetic oligonucleotide
gugcccggaauucaucggc

SEQ ID NO: 2656733 - RNA, 19 nt, Artificial Sequence
  Description of Artificial Sequence: Synthetic oligonucleotide
aacagucuguggaggagga

SEQ ID NO: 2656734 - RNA, 19 nt, Artificial Sequence
  Description of Artificial Sequence: Synthetic oligonucleotide
  modified_base (5)..(5): a, c, u, g, unknown or other
uuccngauucucacaucuc

SEQ ID NO: 2656735 - RNA, 19 nt, Artificial Sequence
  Description of Artificial Sequence: Synthetic oligonucleotide
cuuggagauuuaccgcaac

SEQ ID NO: 2656736 - RNA, 19 nt, Artificial Sequence
  Description of Artificial Sequence: Synthetic oligonucleotide
uaucugcaugcuuuguguu

SEQ ID NO: 2656737 - RNA, 19 nt, Artificial Sequence
  Description of Artificial Sequence: Synthetic oligonucleotide
uccauauagagggcucugu

SEQ ID NO: 2656738 - RNA, 19 nt, Artificial Sequence
  Description of Artificial Sequence: Synthetic oligonucleotide
uuguguuauuuuguagcuc

SEQ ID NO: 2656739 - RNA, 19 nt, Artificial Sequence
  Description of Artificial Sequence: Synthetic oligonucleotide
ugcccggaauucaucggca

SEQ ID NO: 2656740 - RNA, 19 nt, Artificial Sequence
  Description of Artificial Sequence: Synthetic oligonucleotide
ucucuugugcccggaauuc

SEQ ID NO: 2656741 - RNA, 19 nt, Artificial Sequence
  Description of Artificial Sequence: Synthetic oligonucleotide
augaguuaucugcaugcuu

SEQ ID NO: 2656742 - RNA, 19 nt, Artificial Sequence
  Description of Artificial Sequence: Synthetic oligonucleotide
cugcugguuguacuuggag

SEQ ID NO: 2656743 - RNA, 19 nt, Artificial Sequence
  Description of Artificial Sequence: Synthetic oligonucleotide
uggaucaacgggugcugcu

SEQ ID NO: 2656744 - RNA, 19 nt, Artificial Sequence
  Description of Artificial Sequence: Synthetic oligonucleotide
ucuuucccgcucacucugc

SEQ ID NO: 2656745 - RNA, 19 nt, Artificial Sequence
  Description of Artificial Sequence: Synthetic oligonucleotide
ucauugcacucaugagaug

SEQ ID NO: 2656746 - RNA, 19 nt, Artificial Sequence
  Description of Artificial Sequence: Synthetic oligonucleotide
  modified_base (9)..(9): a, c, u, g, unknown or other
cauuuuccngauucucaca

SEQ ID NO: 2656747 - RNA, 19 nt, Artificial Sequence
  Description of Artificial Sequence: Synthetic oligonucleotide
gucgacaucuguggagggg

SEQ ID NO: 2656748 - RNA, 19 nt, Artificial Sequence
  Description of Artificial Sequence: Synthetic oligonucleotide
ucgaagcucacguucucuu

SEQ ID NO: 2656749 - RNA, 19 nt, Artificial Sequence
  Description of Artificial Sequence: Synthetic oligonucleotide
uucccgcucacucugccuu

SEQ ID NO: 2656750 - RNA, 19 nt, Artificial Sequence
  Description of Artificial Sequence: Synthetic oligonucleotide
caugagauggucuucuuuu

SEQ ID NO: 2656751 - RNA, 19 nt, Artificial Sequence
  Description of Artificial Sequence: Synthetic oligonucleotide
ggcacagaaucuucaugag

SEQ ID NO: 2656752 - RNA, 19 nt, Artificial Sequence
  Description of Artificial Sequence: Synthetic oligonucleotide
cauauagagggcucugucu

SEQ ID NO: 2656753 - RNA, 19 nt, Artificial Sequence
  Description of Artificial Sequence: Synthetic oligonucleotide
cacucauccgaguccucag

SEQ ID NO: 2656754 - RNA, 19 nt, Artificial Sequence
  Description of Artificial Sequence: Synthetic oligonucleotide
gcucacucugccuucgaag

SEQ ID NO: 2656755 - RNA, 19 nt, Artificial Sequence
  Description of Artificial Sequence: Synthetic oligonucleotide
acaucaucgaccguccaua

SEQ ID NO: 2656756 - RNA, 19 nt, Artificial Sequence
  Description of Artificial Sequence: Synthetic oligonucleotide
aucugcaugcuuuguguua

SEQ ID NO: 2656757 - RNA, 19 nt, Artificial Sequence
  Description of Artificial Sequence: Synthetic oligonucleotide
ggaagagucugaaauggca

SEQ ID NO: 2656758 - RNA, 19 nt, Artificial Sequence
  Description of Artificial Sequence: Synthetic oligonucleotide
ucacguucucuuucccgcu

SEQ ID NO: 2656759 - RNA, 19 nt, Artificial Sequence
  Description of Artificial Sequence: Synthetic oligonucleotide
uucugacaccaacgcauuc

SEQ ID NO: 2656760 - RNA, 19 nt, Artificial Sequence
  Description of Artificial Sequence: Synthetic oligonucleotide
gcucacguucucuuucccg

SEQ ID NO: 2656761 - RNA, 19 nt, Artificial Sequence
  Description of Artificial Sequence: Synthetic oligonucleotide
augagauggucuucuuuua

SEQ ID NO: 2656762 - RNA, 19 nt, Artificial Sequence
  Description of Artificial Sequence: Synthetic oligonucleotide
  modified_base (2)..(2): a, c, u, g, unknown or other
cngauucucacaucucgaa

SEQ ID NO: 2656763 - RNA, 19 nt, Artificial Sequence
  Description of Artificial Sequence: Synthetic oligonucleotide
gaguccucaggcauucuuc

SEQ ID NO: 2656764 - RNA, 19 nt, Artificial Sequence
  Description of Artificial Sequence: Synthetic oligonucleotide
agcaagagcagggccuguc

SEQ ID NO: 2656765 - RNA, 19 nt, Artificial Sequence
  Description of Artificial Sequence: Synthetic oligonucleotide
ugccuucgaagacgaguug

SEQ ID NO: 2656766 - RNA, 19 nt, Artificial Sequence
  Description of Artificial Sequence: Synthetic oligonucleotide
cuugugcccggaauucauc

SEQ ID NO: 2656767 - RNA, 19 nt, Artificial Sequence
  Description of Artificial Sequence: Synthetic oligonucleotide
uaaaccacugguggaucaa

SEQ ID NO: 2656768 - RNA, 19 nt, Artificial Sequence
  Description of Artificial Sequence: Synthetic oligonucleotide
caacgggugcugcugguug

SEQ ID NO: 2656769 - RNA, 19 nt, Artificial Sequence
  Description of Artificial Sequence: Synthetic oligonucleotide
acgaguugucauagcagag

SEQ ID NO: 2656770 - RNA, 19 nt, Artificial Sequence
  Description of Artificial Sequence: Synthetic oligonucleotide
gaggagaugucgacaucug

SEQ ID NO: 2656771 - RNA, 19 nt, Artificial Sequence
  Description of Artificial Sequence: Synthetic oligonucleotide
augcuuuguguuauuuugu

SEQ ID NO: 2656772 - RNA, 19 nt, Artificial Sequence
  Description of Artificial Sequence: Synthetic oligonucleotide
ggaccagagcuucugcagc

SEQ ID NO: 2656773 - RNA, 19 nt, Artificial Sequence
  Description of Artificial Sequence: Synthetic oligonucleotide
cacuuguaaagacugcaua

SEQ ID NO: 2656774 - RNA, 19 nt, Artificial Sequence
  Description of Artificial Sequence: Synthetic oligonucleotide
agaauggaugaaagcccag

SEQ ID NO: 2656775 - RNA, 19 nt, Artificial Sequence
  Description of Artificial Sequence: Synthetic oligonucleotide
ggauagaauuucaggcugc

SEQ ID NO: 2656776 - RNA, 19 nt, Artificial Sequence
  Description of Artificial Sequence: Synthetic oligonucleotide
uuucccgcucacucugccu

SEQ ID NO: 2656777 - RNA, 19 nt, Artificial Sequence
  Description of Artificial Sequence: Synthetic oligonucleotide
agacugcaagggcaguggu

SEQ ID NO: 2656778 - RNA, 19 nt, Artificial Sequence
  Description of Artificial Sequence: Synthetic oligonucleotide
aguuaucugcaugcuuugu

SEQ ID NO: 2656779 - RNA, 19 nt, Artificial Sequence
  Description of Artificial Sequence: Synthetic oligonucleotide
aggcauucuuccucacaca

SEQ ID NO: 2656780 - RNA, 19 nt, Artificial Sequence
  Description of Artificial Sequence: Synthetic oligonucleotide
cacaucucgaagcucacgu

SEQ ID NO: 2656781 - RNA, 19 nt, Artificial Sequence
  Description of Artificial Sequence: Synthetic oligonucleotide
agucuguggaggaggaaga

SEQ ID NO: 2656782 - RNA, 19 nt, Artificial Sequence
  Description of Artificial Sequence: Synthetic oligonucleotide
accguccauauagagggcu

SEQ ID NO: 2656783 - RNA, 19 nt, Artificial Sequence
  Description of Artificial Sequence: Synthetic oligonucleotide
cucacaucucgaagcucac

SEQ ID NO: 2656784 - RNA, 19 nt, Artificial Sequence
  Description of Artificial Sequence: Synthetic oligonucleotide
acguucucuuucccgcuca

SEQ ID NO: 2656785 - RNA, 19 nt, Artificial Sequence
  Description of Artificial Sequence: Synthetic oligonucleotide
cgcauucugcaccaaaacc

SEQ ID NO: 2656786 - RNA, 19 nt, Artificial Sequence
  Description of Artificial Sequence: Synthetic oligonucleotide
ccaggcaaagaauggauga

SEQ ID NO: 2656787 - RNA, 19 nt, Artificial Sequence
  Description of Artificial Sequence: Synthetic oligonucleotide
agagggcacagaaucuuca

SEQ ID NO: 2656788 - RNA, 19 nt, Artificial Sequence
  Description of Artificial Sequence: Synthetic oligonucleotide
cugguggaucaacgggugc

SEQ ID NO: 2656789 - RNA, 19 nt, Artificial Sequence
  Description of Artificial Sequence: Synthetic oligonucleotide
aagacugcauagacugcaa

SEQ ID NO: 2656790 - RNA, 19 nt, Artificial Sequence
  Description of Artificial Sequence: Synthetic oligonucleotide
ugggagcaagucacuguuc

SEQ ID NO: 2656791 - RNA, 19 nt, Artificial Sequence
  Description of Artificial Sequence: Synthetic oligonucleotide
gcaagucacuguucucagg

SEQ ID NO: 2656792 - RNA, 19 nt, Artificial Sequence
  Description of Artificial Sequence: Synthetic oligonucleotide
  modified_base (11)..(11): a, c, u, g, unknown or other
ggcauuuuccngauucuca

SEQ ID NO: 2656793 - RNA, 19 nt, Artificial Sequence
  Description of Artificial Sequence: Synthetic oligonucleotide
uugcacucaugagaugguc

SEQ ID NO: 2656794 - RNA, 19 nt, Artificial Sequence
  Description of Artificial Sequence: Synthetic oligonucleotide
gcauagacugcaagggcag

SEQ ID NO: 2656795 - RNA, 19 nt, Artificial Sequence
  Description of Artificial Sequence: Synthetic oligonucleotide
cuggaccagagcuucugca

SEQ ID NO: 2656796 - RNA, 19 nt, Artificial Sequence
  Description of Artificial Sequence: Synthetic oligonucleotide
gcauucugcaccaaaaccu

SEQ ID NO: 2656797 - RNA, 19 nt, Artificial Sequence
  Description of Artificial Sequence: Synthetic oligonucleotide
acaucucgaagcucacguu

SEQ ID NO: 2656798 - RNA, 19 nt, Artificial Sequence
  Description of Artificial Sequence: Synthetic oligonucleotide
gaugaguuaucugcaugcu

SEQ ID NO: 2656799 - RNA, 19 nt, Artificial Sequence
  Description of Artificial Sequence: Synthetic oligonucleotide
uggcccugggauagaauuu

SEQ ID NO: 2656800 - RNA, 19 nt, Artificial Sequence
  Description of Artificial Sequence: Synthetic oligonucleotide
auuuaccgcaacagucugu

SEQ ID NO: 2656801 - RNA, 19 nt, Artificial Sequence
  Description of Artificial Sequence: Synthetic oligonucleotide
aucaacgggugcugcuggu

SEQ ID NO: 2656802 - RNA, 19 nt, Artificial Sequence
  Description of Artificial Sequence: Synthetic oligonucleotide
ggagauuuaccgcaacagu

SEQ ID NO: 2656803 - RNA, 19 nt, Artificial Sequence
  Description of Artificial Sequence: Synthetic oligonucleotide
cugcaagggcagugguggg

SEQ ID NO: 2656804 - RNA, 19 nt, Artificial Sequence
  Description of Artificial Sequence: Synthetic oligonucleotide
auagcagagggcacagaau

SEQ ID NO: 2656805 - RNA, 19 nt, Artificial Sequence
  Description of Artificial Sequence: Synthetic oligonucleotide
cuucgaagacgaguuguca

SEQ ID NO: 2656806 - RNA, 19 nt, Artificial Sequence
  Description of Artificial Sequence: Synthetic oligonucleotide
gcacagaaucuucaugaga

SEQ ID NO: 2656807 - RNA, 19 nt, Artificial Sequence
  Description of Artificial Sequence: Synthetic oligonucleotide
uccgaguccucaggcauuc

SEQ ID NO: 2656808 - RNA, 19 nt, Artificial Sequence
  Description of Artificial Sequence: Synthetic oligonucleotide
ccucacacacaucuucuac

SEQ ID NO: 2656809 - RNA, 19 nt, Artificial Sequence
  Description of Artificial Sequence: Synthetic oligonucleotide
cgaguugucauagcagagg

SEQ ID NO: 2656810 - RNA, 19 nt, Artificial Sequence
  Description of Artificial Sequence: Synthetic oligonucleotide
caaaaccuggcccugggau

SEQ ID NO: 2656811 - RNA, 19 nt, Artificial Sequence
  Description of Artificial Sequence: Synthetic oligonucleotide
caguggugggaucugagcu

SEQ ID NO: 2656812 - RNA, 19 nt, Artificial Sequence
  Description of Artificial Sequence: Synthetic oligonucleotide
cacugguggaucaacgggu

SEQ ID NO: 2656813 - RNA, 19 nt, Artificial Sequence
  Description of Artificial Sequence: Synthetic oligonucleotide
guccauauagagggcucug

SEQ ID NO: 2656814 - RNA, 19 nt, Artificial Sequence
  Description of Artificial Sequence: Synthetic oligonucleotide
ggaucaacgggugcugcug

SEQ ID NO: 2656815 - RNA, 19 nt, Artificial Sequence
  Description of Artificial Sequence: Synthetic oligonucleotide
uucucacaucucgaagcuc

SEQ ID NO: 2656816 - RNA, 19 nt, Artificial Sequence
  Description of Artificial Sequence: Synthetic oligonucleotide
caccaaaaccuggcccugg

SEQ ID NO: 2656817 - RNA, 19 nt, Artificial Sequence
  Description of Artificial Sequence: Synthetic oligonucleotide
agccaggcaaagaauggau

SEQ ID NO: 2656818 - RNA, 19 nt, Artificial Sequence
  Description of Artificial Sequence: Synthetic oligonucleotide
acucugccuucgaagacga

SEQ ID NO: 2656819 - RNA, 19 nt, Artificial Sequence
  Description of Artificial Sequence: Synthetic oligonucleotide
aucaucgaccguccauaua

SEQ ID NO: 2656820 - RNA, 19 nt, Artificial Sequence
  Description of Artificial Sequence: Synthetic oligonucleotide
ggugggaucugagcuggag

SEQ ID NO: 2656821 - RNA, 19 nt, Artificial Sequence
  Description of Artificial Sequence: Synthetic oligonucleotide
cacguucucuuucccgcuc

SEQ ID NO: 2656822 - RNA, 19 nt, Artificial Sequence
  Description of Artificial Sequence: Synthetic oligonucleotide
guggaucaacgggugcugc

SEQ ID NO: 2656823 - RNA, 19 nt, Artificial Sequence
  Description of Artificial Sequence: Synthetic oligonucleotide
gcaacagucuguggaggag

SEQ ID NO: 2656824 - RNA, 19 nt, Artificial Sequence
  Description of Artificial Sequence: Synthetic oligonucleotide
ccuucgaagacgaguuguc

SEQ ID NO: 2656825 - RNA, 19 nt, Artificial Sequence
  Description of Artificial Sequence: Synthetic oligonucleotide
gggagcaagucacuguucu

SEQ ID NO: 2656826 - RNA, 19 nt, Artificial Sequence
  Description of Artificial Sequence: Synthetic oligonucleotide
ggcucugucugugcaacug

SEQ ID NO: 2656827 - RNA, 19 nt, Artificial Sequence
  Description of Artificial Sequence: Synthetic oligonucleotide
gccaggcaaagaauggaug

SEQ ID NO: 2656828 - RNA, 19 nt, Artificial Sequence
  Description of Artificial Sequence: Synthetic oligonucleotide
caucgaccguccauauaga

SEQ ID NO: 2656829 - RNA, 19 nt, Artificial Sequence
  Description of Artificial Sequence: Synthetic oligonucleotide
  modified_base (3)..(3): a, c, u, g, unknown or other
ccngauucucacaucucga

SEQ ID NO: 2656830 - RNA, 19 nt, Artificial Sequence
  Description of Artificial Sequence: Synthetic oligonucleotide
ggaauucaucggcaacauc

SEQ ID NO: 2656831 - RNA, 19 nt, Artificial Sequence
  Description of Artificial Sequence: Synthetic oligonucleotide
cacucaugagauggucuuc

SEQ ID NO: 2656832 - RNA, 19 nt, Artificial Sequence
  Description of Artificial Sequence: Synthetic oligonucleotide
gguggaucaacgggugcug

SEQ ID NO: 2656833 - RNA, 19 nt, Artificial Sequence
  Description of Artificial Sequence: Synthetic oligonucleotide
gagggcucugucugugcaa

SEQ ID NO: 2656834 - RNA, 19 nt, Artificial Sequence
  Description of Artificial Sequence: Synthetic oligonucleotide
ucaacgggugcugcugguu

SEQ ID NO: 2656835 - RNA, 19 nt, Artificial Sequence
  Description of Artificial Sequence: Synthetic oligonucleotide
cgaagacgaguugucauag

SEQ ID NO: 2656836 - RNA, 19 nt, Artificial Sequence
  Description of Artificial Sequence: Synthetic oligonucleotide
caacgcauucugcaccaaa

SEQ ID NO: 2656837 - RNA, 19 nt, Artificial Sequence
  Description of Artificial Sequence: Synthetic oligonucleotide
cuggcccugggauagaauu

SEQ ID NO: 2656838 - RNA, 19 nt, Artificial Sequence
  Description of Artificial Sequence: Synthetic oligonucleotide
gagggcacagaaucuucau

SEQ ID NO: 2656839 - RNA, 19 nt, Artificial Sequence
  Description of Artificial Sequence: Synthetic oligonucleotide
gaccguccauauagagggc

SEQ ID NO: 2656840 - RNA, 19 nt, Artificial Sequence
  Description of Artificial Sequence: Synthetic oligonucleotide
ugcacucauccgaguccuc

SEQ ID NO: 2656841 - RNA, 19 nt, Artificial Sequence
  Description of Artificial Sequence: Synthetic oligonucleotide
gggaucugagcuggaggag

SEQ ID NO: 2656842 - RNA, 19 nt, Artificial Sequence
  Description of Artificial Sequence: Synthetic oligonucleotide
auuucaggcugcacuugua

SEQ ID NO: 2656843 - RNA, 19 nt, Artificial Sequence
  Description of Artificial Sequence: Synthetic oligonucleotide
cauccgaguccucaggcau

SEQ ID NO: 2656844 - RNA, 19 nt, Artificial Sequence
  Description of Artificial Sequence: Synthetic oligonucleotide
ggcccugggauagaauuuc

SEQ ID NO: 2656845 - RNA, 19 nt, Artificial Sequence
  Description of Artificial Sequence: Synthetic oligonucleotide
cucuugugcccggaauuca

SEQ ID NO: 2656846 - RNA, 19 nt, Artificial Sequence
  Description of Artificial Sequence: Synthetic oligonucleotide
uggugggaucugagcugga

SEQ ID NO: 2656847 - RNA, 19 nt, Artificial Sequence
  Description of Artificial Sequence: Synthetic oligonucleotide
augaaagcccagacaucau

SEQ ID NO: 2656848 - RNA, 19 nt, Artificial Sequence
  Description of Artificial Sequence: Synthetic oligonucleotide
ucccgcucacucugccuuc

SEQ ID NO: 2656849 - RNA, 19 nt, Artificial Sequence
  Description of Artificial Sequence: Synthetic oligonucleotide
cugggagcaagucacuguu

SEQ ID NO: 2656850 - RNA, 19 nt, Artificial Sequence
  Description of Artificial Sequence: Synthetic oligonucleotide
caaucucuugugcccggaa

SEQ ID NO: 2656851 - RNA, 19 nt, Artificial Sequence
  Description of Artificial Sequence: Synthetic oligonucleotide
gcuggaggagaugucgaca

SEQ ID NO: 2656852 - RNA, 19 nt, Artificial Sequence
  Description of Artificial Sequence: Synthetic oligonucleotide
gugcaacugggagcaaguc

SEQ ID NO: 2656853 - RNA, 19 nt, Artificial Sequence
  Description of Artificial Sequence: Synthetic oligonucleotide
cccggaauucaucggcaac

SEQ ID NO: 2656854 - RNA, 19 nt, Artificial Sequence
  Description of Artificial Sequence: Synthetic oligonucleotide
ccucaggcauucuuccuca

SEQ ID NO: 2656855 - RNA, 19 nt, Artificial Sequence
  Description of Artificial Sequence: Synthetic oligonucleotide
gcacucauccgaguccuca

SEQ ID NO: 2656856 - RNA, 19 nt, Artificial Sequence
  Description of Artificial Sequence: Synthetic oligonucleotide
ccguccauauagagggcuc

SEQ ID NO: 2656857 - RNA, 19 nt, Artificial Sequence
  Description of Artificial Sequence: Synthetic oligonucleotide
acagucuguggaggaggaa

SEQ ID NO: 2656858 - RNA, 19 nt, Artificial Sequence
  Description of Artificial Sequence: Synthetic oligonucleotide
uagcaagagcagggccugu

SEQ ID NO: 2656859 - RNA, 19 nt, Artificial Sequence
  Description of Artificial Sequence: Synthetic oligonucleotide
ccgcaacagucuguggagg

SEQ ID NO: 2656860 - RNA, 19 nt, Artificial Sequence
  Description of Artificial Sequence: Synthetic oligonucleotide
gcacucaugagauggucuu

SEQ ID NO: 2656861 - RNA, 19 nt, Artificial Sequence
  Description of Artificial Sequence: Synthetic oligonucleotide
gcucucugugucagaugag

SEQ ID NO: 2656862 - RNA, 19 nt, Artificial Sequence
  Description of Artificial Sequence: Synthetic oligonucleotide
caucaucgaccguccauau

SEQ ID NO: 2656863 - RNA, 19 nt, Artificial Sequence
  Description of Artificial Sequence: Synthetic oligonucleotide
caucggcaacauccuggca

SEQ ID NO: 2656864 - RNA, 19 nt, Artificial Sequence
  Description of Artificial Sequence: Synthetic oligonucleotide
ccaagucuucuucugcucu

SEQ ID NO: 2656865 - RNA, 19 nt, Artificial Sequence
  Description of Artificial Sequence: Synthetic oligonucleotide
ggcugcacuuguaaagacu

SEQ ID NO: 2656866 - RNA, 19 nt, Artificial Sequence
  Description of Artificial Sequence: Synthetic oligonucleotide
auccgaguccucaggcauu

SEQ ID NO: 2656867 - RNA, 19 nt, Artificial Sequence
  Description of Artificial Sequence: Synthetic oligonucleotide
accuggcccugggauagaa

SEQ ID NO: 2656868 - RNA, 19 nt, Artificial Sequence
  Description of Artificial Sequence: Synthetic oligonucleotide
gccuucgaagacgaguugu

SEQ ID NO: 2656869 - RNA, 19 nt, Artificial Sequence
  Description of Artificial Sequence: Synthetic oligonucleotide
gguuguacuuggagauuua

SEQ ID NO: 2656870 - RNA, 19 nt, Artificial Sequence
  Description of Artificial Sequence: Synthetic oligonucleotide
cauagacugcaagggcagu

SEQ ID NO: 2656871 - RNA, 19 nt, Artificial Sequence
  Description of Artificial Sequence: Synthetic oligonucleotide
cgcaacagucuguggagga

SEQ ID NO: 2656872 - RNA, 19 nt, Artificial Sequence
  Description of Artificial Sequence: Synthetic oligonucleotide
gcugcugguuguacuugga

SEQ ID NO: 2656873 - RNA, 19 nt, Artificial Sequence
  Description of Artificial Sequence: Synthetic oligonucleotide
cucaugagauggucuucuu

SEQ ID NO: 2656874 - RNA, 19 nt, Artificial Sequence
  Description of Artificial Sequence: Synthetic oligonucleotide
gcacuuguaaagacugcau

SEQ ID NO: 2656875 - RNA, 19 nt, Artificial Sequence
  Description of Artificial Sequence: Synthetic oligonucleotide
caacuggaccagagcuucu

SEQ ID NO: 2656876 - RNA, 19 nt, Artificial Sequence
  Description of Artificial Sequence: Synthetic oligonucleotide
gcccggaauucaucggcaa

SEQ ID NO: 2656877 - RNA, 19 nt, Artificial Sequence
  Description of Artificial Sequence: Synthetic oligonucleotide
cccgcucacucugccuucg

SEQ ID NO: 2656878 - RNA, 19 nt, Artificial Sequence
  Description of Artificial Sequence: Synthetic oligonucleotide
cguucucuuucccgcucac

SEQ ID NO: 2656879 - RNA, 19 nt, Artificial Sequence
  Description of Artificial Sequence: Synthetic oligonucleotide
gcccugggauagaauuuca

SEQ ID NO: 2656880 - RNA, 19 nt, Artificial Sequence
  Description of Artificial Sequence: Synthetic oligonucleotide
cugguuguacuuggagauu

SEQ ID NO: 2656881 - RNA, 19 nt, Artificial Sequence
  Description of Artificial Sequence: Synthetic oligonucleotide
  modified_base (15)..(15): a, c, u, g, unknown or other
cucaggcauuuuccngauu

SEQ ID NO: 2656882 - RNA, 19 nt, Artificial Sequence
  Description of Artificial Sequence: Synthetic oligonucleotide
cugcaugcuuuguguuauu

SEQ ID NO: 2656883 - RNA, 19 nt, Artificial Sequence
  Description of Artificial Sequence: Synthetic oligonucleotide
gggcucugucugugcaacu

SEQ ID NO: 2656884 - RNA, 19 nt, Artificial Sequence
  Description of Artificial Sequence: Synthetic oligonucleotide
cggcaacauccuggcagcc

SEQ ID NO: 2656885 - RNA, 19 nt, Artificial Sequence
  Description of Artificial Sequence: Synthetic oligonucleotide
cguccauauagagggcucu

SEQ ID NO: 2656886 - RNA, 19 nt, Artificial Sequence
  Description of Artificial Sequence: Synthetic oligonucleotide
cgcucacucugccuucgaa

SEQ ID NO: 2656887 - RNA, 19 nt, Artificial Sequence
  Description of Artificial Sequence: Synthetic oligonucleotide
cgaagcucacguucucuuu

SEQ ID NO: 2656888 - RNA, 19 nt, Artificial Sequence
  Description of Artificial Sequence: Synthetic oligonucleotide
cgaguccucaggcauucuu

SEQ ID NO: 2656889 - RNA, 19 nt, Artificial Sequence
  Description of Artificial Sequence: Synthetic oligonucleotide
ccaacgcauucugcaccaa

SEQ ID NO: 2656890 - RNA, 19 nt, Artificial Sequence
  Description of Artificial Sequence: Synthetic oligonucleotide
ccgcucacucugccuucga

SEQ ID NO: 2656891 - RNA, 19 nt, Artificial Sequence
  Description of Artificial Sequence: Synthetic oligonucleotide
ccuggcccugggauagaau

SEQ ID NO: 2656892 - RNA, 19 nt, Artificial Sequence
  Description of Artificial Sequence: Synthetic oligonucleotide
cccagacaucaucgaccgu

SEQ ID NO: 2656893 - RNA, 19 nt, Artificial Sequence
  Description of Artificial Sequence: Synthetic oligonucleotide
  modified_base (1)..(1): a, c, u, g, unknown or other
ngauucucacaucucgaag

SEQ ID NO: 2656894 - RNA, 19 nt, Artificial Sequence
  Description of Artificial Sequence: Synthetic oligonucleotide
aauaaauuugcacaucuuc

SEQ ID NO: 2656895 - RNA, 19 nt, Artificial Sequence
  Description of Artificial Sequence: Synthetic oligonucleotide
aacauuguauuuaucaucc

SEQ ID NO: 2656896 - RNA, 19 nt, Artificial Sequence
  Description of Artificial Sequence: Synthetic oligonucleotide
aauuugcacaucuucacac

SEQ ID NO: 2656897 - RNA, 19 nt, Artificial Sequence
  Description of Artificial Sequence: Synthetic oligonucleotide
cauaguuuguguaacagcg

SEQ ID NO: 2656898 - RNA, 19 nt, Artificial Sequence
  Description of Artificial Sequence: Synthetic oligonucleotide
aauuccuccccguauaugg

SEQ ID NO: 2656899 - RNA, 19 nt, Artificial Sequence
  Description of Artificial Sequence: Synthetic oligonucleotide
ucuacuuaccccaacauug

SEQ ID NO: 2656900 - RNA, 19 nt, Artificial Sequence
  Description of Artificial Sequence: Synthetic oligonucleotide
uacucaaagauguauacag

SEQ ID NO: 2656901 - RNA, 19 nt, Artificial Sequence
  Description of Artificial Sequence: Synthetic oligonucleotide
gugaauuuagguuucauag

SEQ ID NO: 2656902 - RNA, 19 nt, Artificial Sequence
  Description of Artificial Sequence: Synthetic oligonucleotide
auaaggaggauccgcaacc

SEQ ID NO: 2656903 - RNA, 19 nt, Artificial Sequence
  Description of Artificial Sequence: Synthetic oligonucleotide
agauagauaaggaggaucc

SEQ ID NO: 2656904 - RNA, 19 nt, Artificial Sequence
  Description of Artificial Sequence: Synthetic oligonucleotide
uucugauacacgcugggcg

SEQ ID NO: 2656905 - RNA, 19 nt, Artificial Sequence
  Description of Artificial Sequence: Synthetic oligonucleotide
aagauguauacagagaugu

SEQ ID NO: 2656906 - RNA, 19 nt, Artificial Sequence
  Description of Artificial Sequence: Synthetic oligonucleotide
cucagcauaaaauuccugg

SEQ ID NO: 2656907 - RNA, 19 nt, Artificial Sequence
  Description of Artificial Sequence: Synthetic oligonucleotide
uuuaucaucccuuccuggg

SEQ ID NO: 2656908 - RNA, 19 nt, Artificial Sequence
  Description of Artificial Sequence: Synthetic oligonucleotide
aauucauugguccaaguuu

SEQ ID NO: 2656909 - RNA, 19 nt, Artificial Sequence
  Description of Artificial Sequence: Synthetic oligonucleotide
aauuuagguuucauagucc

SEQ ID NO: 2656910 - RNA, 19 nt, Artificial Sequence
  Description of Artificial Sequence: Synthetic oligonucleotide
gaauuuagguuucauaguc

SEQ ID NO: 2656911 - RNA, 19 nt, Artificial Sequence
  Description of Artificial Sequence: Synthetic oligonucleotide
acacaugcaauucugccac

SEQ ID NO: 2656912 - RNA, 19 nt, Artificial Sequence
  Description of Artificial Sequence: Synthetic oligonucleotide
guaacagcggaauucauug

SEQ ID NO: 2656913 - RNA, 19 nt, Artificial Sequence
  Description of Artificial Sequence: Synthetic oligonucleotide
uauauggcgaaucuucugu

SEQ ID NO: 2656914 - RNA, 19 nt, Artificial Sequence
  Description of Artificial Sequence: Synthetic oligonucleotide
auagauaaggaggauccgc

SEQ ID NO: 2656915 - RNA, 19 nt, Artificial Sequence
  Description of Artificial Sequence: Synthetic oligonucleotide
gaagacaaauuccuccccg

SEQ ID NO: 2656916 - RNA, 19 nt, Artificial Sequence
  Description of Artificial Sequence: Synthetic oligonucleotide
ugugcaagucgcaaagcgg

SEQ ID NO: 2656917 - RNA, 19 nt, Artificial Sequence
  Description of Artificial Sequence: Synthetic oligonucleotide
gauucuuccgggcaagucc

SEQ ID NO: 2656918 - RNA, 19 nt, Artificial Sequence
  Description of Artificial Sequence: Synthetic oligonucleotide
agagauguccucccugugc

SEQ ID NO: 2656919 - RNA, 19 nt, Artificial Sequence
  Description of Artificial Sequence: Synthetic oligonucleotide
aaauuugcacaucuucaca

SEQ ID NO: 2656920 - RNA, 19 nt, Artificial Sequence
  Description of Artificial Sequence: Synthetic oligonucleotide
ucaaagauguauacagaga

SEQ ID NO: 2656921 - RNA, 19 nt, Artificial Sequence
  Description of Artificial Sequence: Synthetic oligonucleotide
uguauuuaucaucccuucc

SEQ ID NO: 2656922 - RNA, 19 nt, Artificial Sequence
  Description of Artificial Sequence: Synthetic oligonucleotide
aguucuccucuacuuaccc

SEQ ID NO: 2656923 - RNA, 19 nt, Artificial Sequence
  Description of Artificial Sequence: Synthetic oligonucleotide
acuguaccaaaacuggcuc

SEQ ID NO: 2656924 - RNA, 19 nt, Artificial Sequence
  Description of Artificial Sequence: Synthetic oligonucleotide
aacagcggaauucauuggu

SEQ ID NO: 2656925 - RNA, 19 nt, Artificial Sequence
  Description of Artificial Sequence: Synthetic oligonucleotide
ucugucguacucaaagaug

SEQ ID NO: 2656926 - RNA, 19 nt, Artificial Sequence
  Description of Artificial Sequence: Synthetic oligonucleotide
uauacagagauguccuccc

SEQ ID NO: 2656927 - RNA, 19 nt, Artificial Sequence
  Description of Artificial Sequence: Synthetic oligonucleotide
ugaauuuagguuucauagu

SEQ ID NO: 2656928 - RNA, 19 nt, Artificial Sequence
  Description of Artificial Sequence: Synthetic oligonucleotide
uagauaaggaggauccgca

SEQ ID NO: 2656929 - RNA, 19 nt, Artificial Sequence
  Description of Artificial Sequence: Synthetic oligonucleotide
cacgaugucaaaacugugc

SEQ ID NO: 2656930 - RNA, 19 nt, Artificial Sequence
  Description of Artificial Sequence: Synthetic oligonucleotide
aaccggacuguuucggacg

SEQ ID NO: 2656931 - RNA, 19 nt, Artificial Sequence
  Description of Artificial Sequence: Synthetic oligonucleotide
uauggcgaaucuucugucg

SEQ ID NO: 2656932 - RNA, 19 nt, Artificial Sequence
  Description of Artificial Sequence: Synthetic oligonucleotide
ucagcauaaaauuccugga

SEQ ID NO: 2656933 - RNA, 19 nt, Artificial Sequence
  Description of Artificial Sequence: Synthetic oligonucleotide
aaucauaguuuguguaaca

SEQ ID NO: 2656934 - RNA, 19 nt, Artificial Sequence
  Description of Artificial Sequence: Synthetic oligonucleotide
uuagguuucauaguccaga

SEQ ID NO: 2656935 - RNA, 19 nt, Artificial Sequence
  Description of Artificial Sequence: Synthetic oligonucleotide
ucugcucagcauaaaauuc

SEQ ID NO: 2656936 - RNA, 19 nt, Artificial Sequence
  Description of Artificial Sequence: Synthetic oligonucleotide
uuguagucauagaagacaa

SEQ ID NO: 2656937 - RNA, 19 nt, Artificial Sequence
  Description of Artificial Sequence: Synthetic oligonucleotide
cauaguccagaccagaauc

SEQ ID NO: 2656938 - RNA, 19 nt, Artificial Sequence
  Description of Artificial Sequence: Synthetic oligonucleotide
auaaauuugcacaucuuca

SEQ ID NO: 2656939 - RNA, 19 nt, Artificial Sequence
  Description of Artificial Sequence: Synthetic oligonucleotide
auucauugguccaaguuuc

SEQ ID NO: 2656940 - RNA, 19 nt, Artificial Sequence
  Description of Artificial Sequence: Synthetic oligonucleotide
cauugguccaaguuucggg

SEQ ID NO: 2656941 - RNA, 19 nt, Artificial Sequence
  Description of Artificial Sequence: Synthetic oligonucleotide
ucugauacacgcugggcgc

SEQ ID NO: 2656942 - RNA, 19 nt, Artificial Sequence
  Description of Artificial Sequence: Synthetic oligonucleotide
agaaucauaguuuguguaa

SEQ ID NO: 2656943 - RNA, 19 nt, Artificial Sequence
  Description of Artificial Sequence: Synthetic oligonucleotide
gucaaaacugugcucgggg

SEQ ID NO: 2656944 - RNA, 19 nt, Artificial Sequence
  Description of Artificial Sequence: Synthetic oligonucleotide
ccucagauagauaaggagg

SEQ ID NO: 2656945 - RNA, 19 nt, Artificial Sequence
  Description of Artificial Sequence: Synthetic oligonucleotide
uccugugcaagucgcaaag

SEQ ID NO: 2656946 - RNA, 19 nt, Artificial Sequence
  Description of Artificial Sequence: Synthetic oligonucleotide
acauuguauuuaucauccc

SEQ ID NO: 2656947 - RNA, 19 nt, Artificial Sequence
  Description of Artificial Sequence: Synthetic oligonucleotide
uguguaacagcggaauuca

SEQ ID NO: 2656948 - RNA, 19 nt, Artificial Sequence
  Description of Artificial Sequence: Synthetic oligonucleotide
uguaccaaaacuggcucag

SEQ ID NO: 2656949 - RNA, 19 nt, Artificial Sequence
  Description of Artificial Sequence: Synthetic oligonucleotide
ucggacgucuuccugagac

SEQ ID NO: 2656950 - RNA, 19 nt, Artificial Sequence
  Description of Artificial Sequence: Synthetic oligonucleotide
uaaaauuccuggagagcug

SEQ ID NO: 2656951 - RNA, 19 nt, Artificial Sequence
  Description of Artificial Sequence: Synthetic oligonucleotide
gauaaggaggauccgcaac

SEQ ID NO: 2656952 - RNA, 19 nt, Artificial Sequence
  Description of Artificial Sequence: Synthetic oligonucleotide
uucauugguccaaguuucg

SEQ ID NO: 2656953 - RNA, 19 nt, Artificial Sequence
  Description of Artificial Sequence: Synthetic oligonucleotide
uaaggcgugggaagaaagc

SEQ ID NO: 2656954 - RNA, 19 nt, Artificial Sequence
  Description of Artificial Sequence: Synthetic oligonucleotide
cugugcaagucgcaaagcg

SEQ ID NO: 2656955 - RNA, 19 nt, Artificial Sequence
  Description of Artificial Sequence: Synthetic oligonucleotide
uccgcaaccacgaugucaa

SEQ ID NO: 2656956 - RNA, 19 nt, Artificial Sequence
  Description of Artificial Sequence: Synthetic oligonucleotide
aaagauguauacagagaug

SEQ ID NO: 2656957 - RNA, 19 nt, Artificial Sequence
  Description of Artificial Sequence: Synthetic oligonucleotide
uaccaaaacuggcucagcu

SEQ ID NO: 2656958 - RNA, 19 nt, Artificial Sequence
  Description of Artificial Sequence: Synthetic oligonucleotide
accagaaucauaguuugug

SEQ ID NO: 2656959 - RNA, 19 nt, Artificial Sequence
  Description of Artificial Sequence: Synthetic oligonucleotide
ugacuguaccaaaacuggc

SEQ ID NO: 2656960 - RNA, 19 nt, Artificial Sequence
  Description of Artificial Sequence: Synthetic oligonucleotide
uucugucguacucaaagau

SEQ ID NO: 2656961 - RNA, 19 nt, Artificial Sequence
  Description of Artificial Sequence: Synthetic oligonucleotide
aaggaggauccgcaaccac

SEQ ID NO: 2656962 - RNA, 19 nt, Artificial Sequence
  Description of Artificial Sequence: Synthetic oligonucleotide
uuaucaucccuuccuggga

SEQ ID NO: 2656963 - RNA, 19 nt, Artificial Sequence
  Description of Artificial Sequence: Synthetic oligonucleotide
cagcauaaaauuccuggag

SEQ ID NO: 2656964 - RNA, 19 nt, Artificial Sequence
  Description of Artificial Sequence: Synthetic oligonucleotide
uguaacagcggaauucauu

SEQ ID NO: 2656965 - RNA, 19 nt, Artificial Sequence
  Description of Artificial Sequence: Synthetic oligonucleotide
auauggcgaaucuucuguc

SEQ ID NO: 2656966 - RNA, 19 nt, Artificial Sequence
  Description of Artificial Sequence: Synthetic oligonucleotide
gauagauaaggaggauccg

SEQ ID NO: 2656967 - RNA, 19 nt, Artificial Sequence
  Description of Artificial Sequence: Synthetic oligonucleotide
uaacagcggaauucauugg

SEQ ID NO: 2656968 - RNA, 19 nt, Artificial Sequence
  Description of Artificial Sequence: Synthetic oligonucleotide
aguggauuguuguagucau

SEQ ID NO: 2656969 - RNA, 19 nt, Artificial Sequence
  Description of Artificial Sequence: Synthetic oligonucleotide
ucaaaacugugcucgggga

SEQ ID NO: 2656970 - RNA, 19 nt, Artificial Sequence
  Description of Artificial Sequence: Synthetic oligonucleotide
cauaaaauuccuggagagc

SEQ ID NO: 2656971 - RNA, 19 nt, Artificial Sequence
  Description of Artificial Sequence: Synthetic oligonucleotide
ugccaugugaauuuagguu

SEQ ID NO: 2656972 - RNA, 19 nt, Artificial Sequence
  Description of Artificial Sequence: Synthetic oligonucleotide
aaagcgguguccugacugu

SEQ ID NO: 2656973 - RNA, 19 nt, Artificial Sequence
  Description of Artificial Sequence: Synthetic oligonucleotide
uuccucagauagauaagga

SEQ ID NO: 2656974 - RNA, 19 nt, Artificial Sequence
  Description of Artificial Sequence: Synthetic oligonucleotide
aguuucgggaguguucugg

SEQ ID NO: 2656975 - RNA, 19 nt, Artificial Sequence
  Description of Artificial Sequence: Synthetic oligonucleotide
caaagcgguguccugacug

SEQ ID NO: 2656976 - RNA, 19 nt, Artificial Sequence
  Description of Artificial Sequence: Synthetic oligonucleotide
acgucuuccugagacauuc

SEQ ID NO: 2656977 - RNA, 19 nt, Artificial Sequence
  Description of Artificial Sequence: Synthetic oligonucleotide
guauacagagauguccucc

SEQ ID NO: 2656978 - RNA, 19 nt, Artificial Sequence
  Description of Artificial Sequence: Synthetic oligonucleotide
cuaaggcgugggaagaaag

SEQ ID NO: 2656979 - RNA, 19 nt, Artificial Sequence
  Description of Artificial Sequence: Synthetic oligonucleotide
uuguguaacagcggaauuc

SEQ ID NO: 2656980 - RNA, 19 nt, Artificial Sequence
  Description of Artificial Sequence: Synthetic oligonucleotide
aaucuucugucguacucaa

SEQ ID NO: 2656981 - RNA, 19 nt, Artificial Sequence
  Description of Artificial Sequence: Synthetic oligonucleotide
ucauugguccaaguuucgg

SEQ ID NO: 2656982 - RNA, 19 nt, Artificial Sequence
  Description of Artificial Sequence: Synthetic oligonucleotide
uuccuccccguauauggcg

SEQ ID NO: 2656983 - RNA, 19 nt, Artificial Sequence
  Description of Artificial Sequence: Synthetic oligonucleotide
accaaaacuggcucagcug

SEQ ID NO: 2656984 - RNA, 19 nt, Artificial Sequence
  Description of Artificial Sequence: Synthetic oligonucleotide
uagucauagaagacaaauu

SEQ ID NO: 2656985 - RNA, 19 nt, Artificial Sequence
  Description of Artificial Sequence: Synthetic oligonucleotide
aaggcgugggaagaaagcu

SEQ ID NO: 2656986 - RNA, 19 nt, Artificial Sequence
  Description of Artificial Sequence: Synthetic oligonucleotide
ucguacucaaagauguaua

SEQ ID NO: 2656987 - RNA, 19 nt, Artificial Sequence
  Description of Artificial Sequence: Synthetic oligonucleotide
ugcucagcauaaaauuccu

SEQ ID NO: 2656988 - RNA, 19 nt, Artificial Sequence
  Description of Artificial Sequence: Synthetic oligonucleotide
uuccgggcaaguccagugg

SEQ ID NO: 2656989 - RNA, 19 nt, Artificial Sequence
  Description of Artificial Sequence: Synthetic oligonucleotide
ugugcucggggauucuucc

SEQ ID NO: 2656990 - RNA, 19 nt, Artificial Sequence
  Description of Artificial Sequence: Synthetic oligonucleotide
uuucggacgucuuccugag

SEQ ID NO: 2656991 - RNA, 19 nt, Artificial Sequence
  Description of Artificial Sequence: Synthetic oligonucleotide
cucacacaugcaauucugc

SEQ ID NO: 2656992 - RNA, 19 nt, Artificial Sequence
  Description of Artificial Sequence: Synthetic oligonucleotide
aaacuggcucagcugccag

SEQ ID NO: 2656993 - RNA, 19 nt, Artificial Sequence
  Description of Artificial Sequence: Synthetic oligonucleotide
aaacugugcucggggauuc

SEQ ID NO: 2656994 - RNA, 19 nt, Artificial Sequence
  Description of Artificial Sequence: Synthetic oligonucleotide
aagucgcaaagcggugucc

SEQ ID NO: 2656995 - RNA, 19 nt, Artificial Sequence
  Description of Artificial Sequence: Synthetic oligonucleotide
caaagauguauacagagau

SEQ ID NO: 2656996 - RNA, 19 nt, Artificial Sequence
  Description of Artificial Sequence: Synthetic oligonucleotide
guauauggcgaaucuucug

SEQ ID NO: 2656997 - RNA, 19 nt, Artificial Sequence
  Description of Artificial Sequence: Synthetic oligonucleotide
ccugacuguaccaaaacug

SEQ ID NO: 2656998 - RNA, 19 nt, Artificial Sequence
  Description of Artificial Sequence: Synthetic oligonucleotide
auaguuuguguaacagcgg

SEQ ID NO: 2656999 - RNA, 19 nt, Artificial Sequence
  Description of Artificial Sequence: Synthetic oligonucleotide
gaaccuugccccgagucag

SEQ ID NO: 2657000 - RNA, 19 nt, Artificial Sequence
  Description of Artificial Sequence: Synthetic oligonucleotide
uguccugacuguaccaaaa

SEQ ID NO: 2657001 - RNA, 19 nt, Artificial Sequence
  Description of Artificial Sequence: Synthetic oligonucleotide
auuguauuuaucaucccuu

SEQ ID NO: 2657002 - RNA, 19 nt, Artificial Sequence
  Description of Artificial Sequence: Synthetic oligonucleotide
uucgggaguguucuggaau

SEQ ID NO: 2657003 - RNA, 19 nt, Artificial Sequence
  Description of Artificial Sequence: Synthetic oligonucleotide
augucaaaacugugcucgg

SEQ ID NO: 2657004 - RNA, 19 nt, Artificial Sequence
  Description of Artificial Sequence: Synthetic oligonucleotide
uaucaucccuuccugggau

SEQ ID NO: 2657005 - RNA, 19 nt, Artificial Sequence
  Description of Artificial Sequence: Synthetic oligonucleotide
aggaggauccgcaaccacg

SEQ ID NO: 2657006 - RNA, 19 nt, Artificial Sequence
  Description of Artificial Sequence: Synthetic oligonucleotide
uugguccaaguuucgggag

SEQ ID NO: 2657007 - RNA, 19 nt, Artificial Sequence
  Description of Artificial Sequence: Synthetic oligonucleotide
gaaucuucugucguacuca

SEQ ID NO: 2657008 - RNA, 19 nt, Artificial Sequence
  Description of Artificial Sequence: Synthetic oligonucleotide
ugacggcuccuguacagag

SEQ ID NO: 2657009 - RNA, 19 nt, Artificial Sequence
  Description of Artificial Sequence: Synthetic oligonucleotide
uguuucggacgucuuccug

SEQ ID NO: 2657010 - RNA, 19 nt, Artificial Sequence
  Description of Artificial Sequence: Synthetic oligonucleotide
acaaauuccuccccguaua

SEQ ID NO: 2657011 - RNA, 19 nt, Artificial Sequence
  Description of Artificial Sequence: Synthetic oligonucleotide
agaaccuugccccgaguca

SEQ ID NO: 2657012 - RNA, 19 nt, Artificial Sequence
  Description of Artificial Sequence: Synthetic oligonucleotide
uuuguguaacagcggaauu

SEQ ID NO: 2657013 - RNA, 19 nt, Artificial Sequence
  Description of Artificial Sequence: Synthetic oligonucleotide
acggcuccuguacagagca

SEQ ID NO: 2657014 - RNA, 19 nt, Artificial Sequence
  Description of Artificial Sequence: Synthetic oligonucleotide
caugacggcuccuguacag

SEQ ID NO: 2657015 - RNA, 19 nt, Artificial Sequence
  Description of Artificial Sequence: Synthetic oligonucleotide
guuucggacgucuuccuga

SEQ ID NO: 2657016 - RNA, 19 nt, Artificial Sequence
  Description of Artificial Sequence: Synthetic oligonucleotide
uguauacagagauguccuc

SEQ ID NO: 2657017 - RNA, 19 nt, Artificial Sequence
  Description of Artificial Sequence: Synthetic oligonucleotide
aaauuccuccccguauaug

SEQ ID NO: 2657018 - RNA, 19 nt, Artificial Sequence
  Description of Artificial Sequence: Synthetic oligonucleotide
aggauccgcaaccacgaug

SEQ ID NO: 2657019 - RNA, 19 nt, Artificial Sequence
  Description of Artificial Sequence: Synthetic oligonucleotide
uccaguggauuguuguagu

SEQ ID NO: 2657020 - RNA, 19 nt, Artificial Sequence
  Description of Artificial Sequence: Synthetic oligonucleotide
cagauagauaaggaggauc

SEQ ID NO: 2657021 - RNA, 19 nt, Artificial Sequence
  Description of Artificial Sequence: Synthetic oligonucleotide
ugaguugccugcucuucca

SEQ ID NO: 2657022 - RNA, 19 nt, Artificial Sequence
  Description of Artificial Sequence: Synthetic oligonucleotide
gcaaccacgaugucaaaac

SEQ ID NO: 2657023 - RNA, 19 nt, Artificial Sequence
  Description of Artificial Sequence: Synthetic oligonucleotide
uucacaccaaggagcugag

SEQ ID NO: 2657024 - RNA, 19 nt, Artificial Sequence
  Description of Artificial Sequence: Synthetic oligonucleotide
gaaccggacuguuucggac

SEQ ID NO: 2657025 - RNA, 19 nt, Artificial Sequence
  Description of Artificial Sequence: Synthetic oligonucleotide
acgcugggcgcacucacac

SEQ ID NO: 2657026 - RNA, 19 nt, Artificial Sequence
  Description of Artificial Sequence: Synthetic oligonucleotide
cacacaugcaauucugcca

SEQ ID NO: 2657027 - RNA, 19 nt, Artificial Sequence
  Description of Artificial Sequence: Synthetic oligonucleotide
ggaauaaauuugcacaucu

SEQ ID NO: 2657028 - RNA, 19 nt, Artificial Sequence
  Description of Artificial Sequence: Synthetic oligonucleotide
auggcgaaucuucugucgu

SEQ ID NO: 2657029 - RNA, 19 nt, Artificial Sequence
  Description of Artificial Sequence: Synthetic oligonucleotide
agcggaauucauuggucca

SEQ ID NO: 2657030 - RNA, 19 nt, Artificial Sequence
  Description of Artificial Sequence: Synthetic oligonucleotide
aucgcuuccugugcaaguc

SEQ ID NO: 2657031 - RNA, 19 nt, Artificial Sequence
  Description of Artificial Sequence: Synthetic oligonucleotide
agagcugcuaaggcguggg

SEQ ID NO: 2657032 - RNA, 19 nt, Artificial Sequence
  Description of Artificial Sequence: Synthetic oligonucleotide
ucggggauucuuccgggca

SEQ ID NO: 2657033 - RNA, 19 nt, Artificial Sequence
  Description of Artificial Sequence: Synthetic oligonucleotide
ugcaagucgcaaagcggug

SEQ ID NO: 2657034 - RNA, 19 nt, Artificial Sequence
  Description of Artificial Sequence: Synthetic oligonucleotide
cugucguacucaaagaugu

SEQ ID NO: 2657035 - RNA, 19 nt, Artificial Sequence
  Description of Artificial Sequence: Synthetic oligonucleotide
ugguccaaguuucgggagu

SEQ ID NO: 2657036 - RNA, 19 nt, Artificial Sequence
  Description of Artificial Sequence: Synthetic oligonucleotide
auuccuccccguauauggc

SEQ ID NO: 2657037 - RNA, 19 nt, Artificial Sequence
  Description of Artificial Sequence: Synthetic oligonucleotide
gcugcuaaggcgugggaag

SEQ ID NO: 2657038 - RNA, 19 nt, Artificial Sequence
  Description of Artificial Sequence: Synthetic oligonucleotide
uuccuggagagcugcuaag

SEQ ID NO: 2657039 - RNA, 19 nt, Artificial Sequence
  Description of Artificial Sequence: Synthetic oligonucleotide
cauuguauuuaucaucccu

SEQ ID NO: 2657040 - RNA, 19 nt, Artificial Sequence
  Description of Artificial Sequence: Synthetic oligonucleotide
acagcggaauucauugguc

SEQ ID NO: 2657041 - RNA, 19 nt, Artificial Sequence
  Description of Artificial Sequence: Synthetic oligonucleotide
acacgcugggcgcacucac

SEQ ID NO: 2657042 - RNA, 19 nt, Artificial Sequence
  Description of Artificial Sequence: Synthetic oligonucleotide
guagucauagaagacaaau

SEQ ID NO: 2657043 - RNA, 19 nt, Artificial Sequence
  Description of Artificial Sequence: Synthetic oligonucleotide
uuccugagacauuccucag

SEQ ID NO: 2657044 - RNA, 19 nt, Artificial Sequence
  Description of Artificial Sequence: Synthetic oligonucleotide
guacagagcagaaccuugc

SEQ ID NO: 2657045 - RNA, 19 nt, Artificial Sequence
  Description of Artificial Sequence: Synthetic oligonucleotide
gacuguuucggacgucuuc

SEQ ID NO: 2657046 - RNA, 19 nt, Artificial Sequence
  Description of Artificial Sequence: Synthetic oligonucleotide
gaauucauugguccaaguu

SEQ ID NO: 2657047 - RNA, 19 nt, Artificial Sequence
  Description of Artificial Sequence: Synthetic oligonucleotide
uaccccaacauuguauuua

SEQ ID NO: 2657048 - RNA, 19 nt, Artificial Sequence
  Description of Artificial Sequence: Synthetic oligonucleotide
uaaggaggauccgcaacca

SEQ ID NO: 2657049 - RNA, 19 nt, Artificial Sequence
  Description of Artificial Sequence: Synthetic oligonucleotide
ggcgugggaagaaagcugg

SEQ ID NO: 2657050 - RNA, 19 nt, Artificial Sequence
  Description of Artificial Sequence: Synthetic oligonucleotide
uccgggcaaguccagugga

SEQ ID NO: 2657051 - RNA, 19 nt, Artificial Sequence
  Description of Artificial Sequence: Synthetic oligonucleotide
ucgggaguguucuggaaua

SEQ ID NO: 2657052 - RNA, 19 nt, Artificial Sequence
  Description of Artificial Sequence: Synthetic oligonucleotide
agauaaggaggauccgcaa

SEQ ID NO: 2657053 - RNA, 19 nt, Artificial Sequence
  Description of Artificial Sequence: Synthetic oligonucleotide
cagaaucauaguuugugua

SEQ ID NO: 2657054 - RNA, 19 nt, Artificial Sequence
  Description of Artificial Sequence: Synthetic oligonucleotide
aggaaccggacuguuucgg

SEQ ID NO: 2657055 - RNA, 19 nt, Artificial Sequence
  Description of Artificial Sequence: Synthetic oligonucleotide
agcagaaccuugccccgag

SEQ ID NO: 2657056 - RNA, 19 nt, Artificial Sequence
  Description of Artificial Sequence: Synthetic oligonucleotide
cuucugauacacgcugggc

SEQ ID NO: 2657057 - RNA, 19 nt, Artificial Sequence
  Description of Artificial Sequence: Synthetic oligonucleotide
cugggguauaucaucaucu

SEQ ID NO: 2657058 - RNA, 19 nt, Artificial Sequence
  Description of Artificial Sequence: Synthetic oligonucleotide
ccguauauggcgaaucuuc

SEQ ID NO: 2657059 - RNA, 19 nt, Artificial Sequence
  Description of Artificial Sequence: Synthetic oligonucleotide
uccuccccguauauggcga

SEQ ID NO: 2657060 - RNA, 19 nt, Artificial Sequence
  Description of Artificial Sequence: Synthetic oligonucleotide
caggaaccggacuguuucg

SEQ ID NO: 2657061 - RNA, 19 nt, Artificial Sequence
  Description of Artificial Sequence: Synthetic oligonucleotide
auacacgcugggcgcacuc

SEQ ID NO: 2657062 - RNA, 19 nt, Artificial Sequence
  Description of Artificial Sequence: Synthetic oligonucleotide
ugggguauaucaucaucuu

SEQ ID NO: 2657063 - RNA, 19 nt, Artificial Sequence
  Description of Artificial Sequence: Synthetic oligonucleotide
acucaaagauguauacaga

SEQ ID NO: 2657064 - RNA, 19 nt, Artificial Sequence
  Description of Artificial Sequence: Synthetic oligonucleotide
cuucugucguacucaaaga

SEQ ID NO: 2657065 - RNA, 19 nt, Artificial Sequence
  Description of Artificial Sequence: Synthetic oligonucleotide
cagaaccuugccccgaguc

SEQ ID NO: 2657066 - RNA, 19 nt, Artificial Sequence
  Description of Artificial Sequence: Synthetic oligonucleotide
acuuaccccaacauuguau

SEQ ID NO: 2657067 - RNA, 19 nt, Artificial Sequence
  Description of Artificial Sequence: Synthetic oligonucleotide
auacagagauguccucccu

SEQ ID NO: 2657068 - RNA, 19 nt, Artificial Sequence
  Description of Artificial Sequence: Synthetic oligonucleotide
gacuguaccaaaacuggcu

SEQ ID NO: 2657069 - RNA, 19 nt, Artificial Sequence
  Description of Artificial Sequence: Synthetic oligonucleotide
ucgcaaagcgguguccuga

SEQ ID NO: 2657070 - RNA, 19 nt, Artificial Sequence
  Description of Artificial Sequence: Synthetic oligonucleotide
uacuuaccccaacauugua

SEQ ID NO: 2657071 - RNA, 19 nt, Artificial Sequence
  Description of Artificial Sequence: Synthetic oligonucleotide
agcuucugauacacgcugg

SEQ ID NO: 2657072 - RNA, 19 nt, Artificial Sequence
  Description of Artificial Sequence: Synthetic oligonucleotide
agcgaucgcuuccugugca

SEQ ID NO: 2657073 - RNA, 19 nt, Artificial Sequence
  Description of Artificial Sequence: Synthetic oligonucleotide
acaugcaauucugccaccu

SEQ ID NO: 2657074 - RNA, 19 nt, Artificial Sequence
  Description of Artificial Sequence: Synthetic oligonucleotide
gcagcgaucgcuuccugug

SEQ ID NO: 2657075 - RNA, 19 nt, Artificial Sequence
  Description of Artificial Sequence: Synthetic oligonucleotide
agacaaauuccuccccgua

SEQ ID NO: 2657076 - RNA, 19 nt, Artificial Sequence
  Description of Artificial Sequence: Synthetic oligonucleotide
uuccugugcaagucgcaaa

SEQ ID NO: 2657077 - RNA, 19 nt, Artificial Sequence
  Description of Artificial Sequence: Synthetic oligonucleotide
gacaaauuccuccccguau

SEQ ID NO: 2657078 - RNA, 19 nt, Artificial Sequence
  Description of Artificial Sequence: Synthetic oligonucleotide
cguacucaaagauguauac

SEQ ID NO: 2657079 - RNA, 19 nt, Artificial Sequence
  Description of Artificial Sequence: Synthetic oligonucleotide
aguccaguggauuguugua

SEQ ID NO: 2657080 - RNA, 19 nt, Artificial Sequence
  Description of Artificial Sequence: Synthetic oligonucleotide
guuucgggaguguucugga

SEQ ID NO: 2657081 - RNA, 19 nt, Artificial Sequence
  Description of Artificial Sequence: Synthetic oligonucleotide
caagucgcaaagcgguguc

SEQ ID NO: 2657082 - RNA, 19 nt, Artificial Sequence
  Description of Artificial Sequence: Synthetic oligonucleotide
agcagcgaucgcuuccugu

SEQ ID NO: 2657083 - RNA, 19 nt, Artificial Sequence
  Description of Artificial Sequence: Synthetic oligonucleotide
ugucguacucaaagaugua

SEQ ID NO: 2657084 - RNA, 19 nt, Artificial Sequence
  Description of Artificial Sequence: Synthetic oligonucleotide
agucgcaaagcgguguccu

SEQ ID NO: 2657085 - RNA, 19 nt, Artificial Sequence
  Description of Artificial Sequence: Synthetic oligonucleotide
uccagaccagaaucauagu

SEQ ID NO: 2657086 - RNA, 19 nt, Artificial Sequence
  Description of Artificial Sequence: Synthetic oligonucleotide
uuucgggaguguucuggaa

SEQ ID NO: 2657087 - RNA, 19 nt, Artificial Sequence
  Description of Artificial Sequence: Synthetic oligonucleotide
cggagcuucugauacacgc

SEQ ID NO: 2657088 - RNA, 19 nt, Artificial Sequence
  Description of Artificial Sequence: Synthetic oligonucleotide
auccgcaaccacgauguca

SEQ ID NO: 2657089 - RNA, 19 nt, Artificial Sequence
  Description of Artificial Sequence: Synthetic oligonucleotide
agcgguguccugacuguac

SEQ ID NO: 2657090 - RNA, 19 nt, Artificial Sequence
  Description of Artificial Sequence: Synthetic oligonucleotide
uuccaugacggcuccugua

SEQ ID NO: 2657091 - RNA, 19 nt, Artificial Sequence
  Description of Artificial Sequence: Synthetic oligonucleotide
accggacuguuucggacgu

SEQ ID NO: 2657092 - RNA, 19 nt, Artificial Sequence
  Description of Artificial Sequence: Synthetic oligonucleotide
caguggauuguuguaguca

SEQ ID NO: 2657093 - RNA, 19 nt, Artificial Sequence
  Description of Artificial Sequence: Synthetic oligonucleotide
uuaccccaacauuguauuu

SEQ ID NO: 2657094 - RNA, 19 nt, Artificial Sequence
  Description of Artificial Sequence: Synthetic oligonucleotide
uucuuccgggcaaguccag

SEQ ID NO: 2657095 - RNA, 19 nt, Artificial Sequence
  Description of Artificial Sequence: Synthetic oligonucleotide
cucggggauucuuccgggc

SEQ ID NO: 2657096 - RNA, 19 nt, Artificial Sequence
  Description of Artificial Sequence: Synthetic oligonucleotide
uggacugcuucugcucagc

SEQ ID NO: 2657097 - RNA, 19 nt, Artificial Sequence
  Description of Artificial Sequence: Synthetic oligonucleotide
aaccuugccccgagucagg

SEQ ID NO: 2657098 - RNA, 19 nt, Artificial Sequence
  Description of Artificial Sequence: Synthetic oligonucleotide
cuuaccccaacauuguauu

SEQ ID NO: 2657099 - RNA, 19 nt, Artificial Sequence
  Description of Artificial Sequence: Synthetic oligonucleotide
uaguccagaccagaaucau

SEQ ID NO: 2657100 - RNA, 19 nt, Artificial Sequence
  Description of Artificial Sequence: Synthetic oligonucleotide
cacaugcaauucugccacc

SEQ ID NO: 2657101 - RNA, 19 nt, Artificial Sequence
  Description of Artificial Sequence: Synthetic oligonucleotide
gggguauaucaucaucuuc

SEQ ID NO: 2657102 - RNA, 19 nt, Artificial Sequence
  Description of Artificial Sequence: Synthetic oligonucleotide
uccaaguuucgggaguguu

SEQ ID NO: 2657103 - RNA, 19 nt, Artificial Sequence
  Description of Artificial Sequence: Synthetic oligonucleotide
ugccccgagucaggaaccg

SEQ ID NO: 2657104 - RNA, 19 nt, Artificial Sequence
  Description of Artificial Sequence: Synthetic oligonucleotide
gccaugugaauuuagguuu

SEQ ID NO: 2657105 - RNA, 19 nt, Artificial Sequence
  Description of Artificial Sequence: Synthetic oligonucleotide
cagcgaucgcuuccugugc

SEQ ID NO: 2657106 - RNA, 19 nt, Artificial Sequence
  Description of Artificial Sequence: Synthetic oligonucleotide
uggcgaaucuucugucgua

SEQ ID NO: 2657107 - RNA, 19 nt, Artificial Sequence
  Description of Artificial Sequence: Synthetic oligonucleotide
aggcgugggaagaaagcug

SEQ ID NO: 2657108 - RNA, 19 nt, Artificial Sequence
  Description of Artificial Sequence: Synthetic oligonucleotide
uccccguauauggcgaauc

SEQ ID NO: 2657109 - RNA, 19 nt, Artificial Sequence
  Description of Artificial Sequence: Synthetic oligonucleotide
cuacuuaccccaacauugu

SEQ ID NO: 2657110 - RNA, 19 nt, Artificial Sequence
  Description of Artificial Sequence: Synthetic oligonucleotide
agcugcuaaggcgugggaa

SEQ ID NO: 2657111 - RNA, 19 nt, Artificial Sequence
  Description of Artificial Sequence: Synthetic oligonucleotide
augugaauuuagguuucau

SEQ ID NO: 2657112 - RNA, 19 nt, Artificial Sequence
  Description of Artificial Sequence: Synthetic oligonucleotide
gcugggguauaucaucauc

SEQ ID NO: 2657113 - RNA, 19 nt, Artificial Sequence
  Description of Artificial Sequence: Synthetic oligonucleotide
cgagucaggaaccggacug

SEQ ID NO: 2657114 - RNA, 19 nt, Artificial Sequence
  Description of Artificial Sequence: Synthetic oligonucleotide
gucgcaaagcgguguccug

SEQ ID NO: 2657115 - RNA, 19 nt, Artificial Sequence
  Description of Artificial Sequence: Synthetic oligonucleotide
cacaccaaggagcugaguu

SEQ ID NO: 2657116 - RNA, 19 nt, Artificial Sequence
  Description of Artificial Sequence: Synthetic oligonucleotide
gugcaagucgcaaagcggu

SEQ ID NO: 2657117 - RNA, 19 nt, Artificial Sequence
  Description of Artificial Sequence: Synthetic oligonucleotide
gaucgcuuccugugcaagu

SEQ ID NO: 2657118 - RNA, 19 nt, Artificial Sequence
  Description of Artificial Sequence: Synthetic oligonucleotide
gaauaaauuugcacaucuu

SEQ ID NO: 2657119 - RNA, 19 nt, Artificial Sequence
  Description of Artificial Sequence: Synthetic oligonucleotide
ucuuccgggcaaguccagu

SEQ ID NO: 2657120 - RNA, 19 nt, Artificial Sequence
  Description of Artificial Sequence: Synthetic oligonucleotide
ucuucacaccaaggagcug

SEQ ID NO: 2657121 - RNA, 19 nt, Artificial Sequence
  Description of Artificial Sequence: Synthetic oligonucleotide
ccaugugaauuuagguuuc

SEQ ID NO: 2657122 - RNA, 19 nt, Artificial Sequence
  Description of Artificial Sequence: Synthetic oligonucleotide
guaccaaaacuggcucagc

SEQ ID NO: 2657123 - RNA, 19 nt, Artificial Sequence
  Description of Artificial Sequence: Synthetic oligonucleotide
ugauacacgcugggcgcac

SEQ ID NO: 2657124 - RNA, 19 nt, Artificial Sequence
  Description of Artificial Sequence: Synthetic oligonucleotide
ggauccgcaaccacgaugu

SEQ ID NO: 2657125 - RNA, 19 nt, Artificial Sequence
  Description of Artificial Sequence: Synthetic oligonucleotide
ggcgcacucacacaugcaa

SEQ ID NO: 2657126 - RNA, 19 nt, Artificial Sequence
  Description of Artificial Sequence: Synthetic oligonucleotide
cuccuguacagagcagaac

SEQ ID NO: 2657127 - RNA, 19 nt, Artificial Sequence
  Description of Artificial Sequence: Synthetic oligonucleotide
ugcuaaggcgugggaagaa

SEQ ID NO: 2657128 - RNA, 19 nt, Artificial Sequence
  Description of Artificial Sequence: Synthetic oligonucleotide
ucccggagcuucugauaca

SEQ ID NO: 2657129 - RNA, 19 nt, Artificial Sequence
  Description of Artificial Sequence: Synthetic oligonucleotide
uacacgcugggcgcacuca

SEQ ID NO: 2657130 - RNA, 19 nt, Artificial Sequence
  Description of Artificial Sequence: Synthetic oligonucleotide
uucggacgucuuccugaga

SEQ ID NO: 2657131 - RNA, 19 nt, Artificial Sequence
  Description of Artificial Sequence: Synthetic oligonucleotide
ggaggauccgcaaccacga

SEQ ID NO: 2657132 - RNA, 19 nt, Artificial Sequence
  Description of Artificial Sequence: Synthetic oligonucleotide
gguccaaguuucgggagug

SEQ ID NO: 2657133 - RNA, 19 nt, Artificial Sequence
  Description of Artificial Sequence: Synthetic oligonucleotide
agcugaguugccugcucuu

SEQ ID NO: 2657134 - RNA, 19 nt, Artificial Sequence
  Description of Artificial Sequence: Synthetic oligonucleotide
ggcgaaucuucugucguac

SEQ ID NO: 2657135 - RNA, 19 nt, Artificial Sequence
  Description of Artificial Sequence: Synthetic oligonucleotide
gucguacucaaagauguau

SEQ ID NO: 2657136 - RNA, 19 nt, Artificial Sequence
  Description of Artificial Sequence: Synthetic oligonucleotide
gcgguguccugacuguacc

SEQ ID NO: 2657137 - RNA, 19 nt, Artificial Sequence
  Description of Artificial Sequence: Synthetic oligonucleotide
augacggcuccuguacaga

SEQ ID NO: 2657138 - RNA, 19 nt, Artificial Sequence
  Description of Artificial Sequence: Synthetic oligonucleotide
cuccucuacuuaccccaac

SEQ ID NO: 2657139 - RNA, 19 nt, Artificial Sequence
  Description of Artificial Sequence: Synthetic oligonucleotide
cacucacacaugcaauucu

SEQ ID NO: 2657140 - RNA, 19 nt, Artificial Sequence
  Description of Artificial Sequence: Synthetic oligonucleotide
cgaaucuucugucguacuc

SEQ ID NO: 2657141 - RNA, 19 nt, Artificial Sequence
  Description of Artificial Sequence: Synthetic oligonucleotide
ggaaccggacuguuucgga

SEQ ID NO: 2657142 - RNA, 19 nt, Artificial Sequence
  Description of Artificial Sequence: Synthetic oligonucleotide
caaaacugugcucggggau

SEQ ID NO: 2657143 - RNA, 19 nt, Artificial Sequence
  Description of Artificial Sequence: Synthetic oligonucleotide
cugggcgcacucacacaug

SEQ ID NO: 2657144 - RNA, 19 nt, Artificial Sequence
  Description of Artificial Sequence: Synthetic oligonucleotide
aggagcugaguugccugcu

SEQ ID NO: 2657145 - RNA, 19 nt, Artificial Sequence
  Description of Artificial Sequence: Synthetic oligonucleotide
ccacgaugucaaaacugug

SEQ ID NO: 2657146 - RNA, 19 nt, Artificial Sequence
  Description of Artificial Sequence: Synthetic oligonucleotide
cucuacuuaccccaacauu

SEQ ID NO: 2657147 - RNA, 19 nt, Artificial Sequence
  Description of Artificial Sequence: Synthetic oligonucleotide
ccaguggauuguuguaguc

SEQ ID NO: 2657148 - RNA, 19 nt, Artificial Sequence
  Description of Artificial Sequence: Synthetic oligonucleotide
gcucagcauaaaauuccug

SEQ ID NO: 2657149 - RNA, 19 nt, Artificial Sequence
  Description of Artificial Sequence: Synthetic oligonucleotide
aagcgguguccugacugua

SEQ ID NO: 2657150 - RNA, 19 nt, Artificial Sequence
  Description of Artificial Sequence: Synthetic oligonucleotide
gauccgcaaccacgauguc

SEQ ID NO: 2657151 - RNA, 19 nt, Artificial Sequence
  Description of Artificial Sequence: Synthetic oligonucleotide
cugauacacgcugggcgca

SEQ ID NO: 2657152 - RNA, 19 nt, Artificial Sequence
  Description of Artificial Sequence: Synthetic oligonucleotide
gcacucacacaugcaauuc

SEQ ID NO: 2657153 - RNA, 19 nt, Artificial Sequence
  Description of Artificial Sequence: Synthetic oligonucleotide
caaauuccuccccguauau

SEQ ID NO: 2657154 - RNA, 19 nt, Artificial Sequence
  Description of Artificial Sequence: Synthetic oligonucleotide
gagcagaaccuugccccga

SEQ ID NO: 2657155 - RNA, 19 nt, Artificial Sequence
  Description of Artificial Sequence: Synthetic oligonucleotide
ccagaaucauaguuugugu

SEQ ID NO: 2657156 - RNA, 19 nt, Artificial Sequence
  Description of Artificial Sequence: Synthetic oligonucleotide
ggacugcuucugcucagca

SEQ ID NO: 2657157 - RNA, 19 nt, Artificial Sequence
  Description of Artificial Sequence: Synthetic oligonucleotide
cuggcucagcugccaguuc

SEQ ID NO: 2657158 - RNA, 19 nt, Artificial Sequence
  Description of Artificial Sequence: Synthetic oligonucleotide
gcugaguugccugcucuuc

SEQ ID NO: 2657159 - RNA, 19 nt, Artificial Sequence
  Description of Artificial Sequence: Synthetic oligonucleotide
cacgcugggcgcacucaca

SEQ ID NO: 2657160 - RNA, 19 nt, Artificial Sequence
  Description of Artificial Sequence: Synthetic oligonucleotide
cugagacauuccucagaua

SEQ ID NO: 2657161 - RNA, 19 nt, Artificial Sequence
  Description of Artificial Sequence: Synthetic oligonucleotide
cuuccaugacggcuccugu

SEQ ID NO: 2657162 - RNA, 19 nt, Artificial Sequence
  Description of Artificial Sequence: Synthetic oligonucleotide
gcugggcgcacucacacau

SEQ ID NO: 2657163 - RNA, 19 nt, Artificial Sequence
  Description of Artificial Sequence: Synthetic oligonucleotide
ccggagcuucugauacacg

SEQ ID NO: 2657164 - RNA, 19 nt, Artificial Sequence
  Description of Artificial Sequence: Synthetic oligonucleotide
cugcucuuccaugacggcu

SEQ ID NO: 2657165 - RNA, 19 nt, Artificial Sequence
  Description of Artificial Sequence: Synthetic oligonucleotide
ggagcuucugauacacgcu

SEQ ID NO: 2657166 - RNA, 19 nt, Artificial Sequence
  Description of Artificial Sequence: Synthetic oligonucleotide
gcggaauucauugguccaa

SEQ ID NO: 2657167 - RNA, 19 nt, Artificial Sequence
  Description of Artificial Sequence: Synthetic oligonucleotide
cggaauucauugguccaag

SEQ ID NO: 2657168 - RNA, 19 nt, Artificial Sequence
  Description of Artificial Sequence: Synthetic oligonucleotide
ccccgagucaggaaccgga

SEQ ID NO: 2657169 - RNA, 19 nt, Artificial Sequence
  Description of Artificial Sequence: Synthetic oligonucleotide
gcuaaggcgugggaagaaa

SEQ ID NO: 2657170 - RNA, 19 nt, Artificial Sequence
  Description of Artificial Sequence: Synthetic oligonucleotide
ccuguacagagcagaaccu

SEQ ID NO: 2657171 - RNA, 19 nt, Artificial Sequence
  Description of Artificial Sequence: Synthetic oligonucleotide
gggaguguucuggaauaaa

SEQ ID NO: 2657172 - RNA, 19 nt, Artificial Sequence
  Description of Artificial Sequence: Synthetic oligonucleotide
ggaagaaagcugggguaua

SEQ ID NO: 2657173 - RNA, 19 nt, Artificial Sequence
  Description of Artificial Sequence: Synthetic oligonucleotide
gauacacgcugggcgcacu

SEQ ID NO: 2657174 - RNA, 19 nt, Artificial Sequence
  Description of Artificial Sequence: Synthetic oligonucleotide
cguauauggcgaaucuucu

SEQ ID NO: 2657175 - RNA, 19 nt, Artificial Sequence
  Description of Artificial Sequence: Synthetic oligonucleotide
caugcaauucugccaccuu

SEQ ID NO: 2657176 - RNA, 19 nt, Artificial Sequence
  Description of Artificial Sequence: Synthetic oligonucleotide
ggacgucuuccugagacau

SEQ ID NO: 2657177 - RNA, 19 nt, Artificial Sequence
  Description of Artificial Sequence: Synthetic oligonucleotide
cagcagcgaucgcuuccug

SEQ ID NO: 2657178 - RNA, 19 nt, Artificial Sequence
  Description of Artificial Sequence: Synthetic oligonucleotide
guggauuguuguagucaua

SEQ ID NO: 2657179 - RNA, 19 nt, Artificial Sequence
  Description of Artificial Sequence: Synthetic oligonucleotide
ggcaaguccaguggauugu

SEQ ID NO: 2657180 - RNA, 19 nt, Artificial Sequence
  Description of Artificial Sequence: Synthetic oligonucleotide
gcaagucgcaaagcggugu

SEQ ID NO: 2657181 - RNA, 19 nt, Artificial Sequence
  Description of Artificial Sequence: Synthetic oligonucleotide
gcuccuguacagagcagaa

SEQ ID NO: 2657182 - RNA, 19 nt, Artificial Sequence
  Description of Artificial Sequence: Synthetic oligonucleotide
gaggauccgcaaccacgau

SEQ ID NO: 2657183 - RNA, 19 nt, Artificial Sequence
  Description of Artificial Sequence: Synthetic oligonucleotide
ccccaacauuguauuuauc

SEQ ID NO: 2657184 - RNA, 19 nt, Artificial Sequence
  Description of Artificial Sequence: Synthetic oligonucleotide
gcuuccugugcaagucgca

SEQ ID NO: 2657185 - RNA, 19 nt, Artificial Sequence
  Description of Artificial Sequence: Synthetic oligonucleotide
cgaucgcuuccugugcaag

SEQ ID NO: 2657186 - RNA, 19 nt, Artificial Sequence
  Description of Artificial Sequence: Synthetic oligonucleotide
ccaugacggcuccuguaca

SEQ ID NO: 2657187 - RNA, 19 nt, Artificial Sequence
  Description of Artificial Sequence: Synthetic oligonucleotide
gccccgagucaggaaccgg

SEQ ID NO: 2657188 - RNA, 19 nt, Artificial Sequence
  Description of Artificial Sequence: Synthetic oligonucleotide
gcgaucgcuuccugugcaa

SEQ ID NO: 2657189 - RNA, 19 nt, Artificial Sequence
  Description of Artificial Sequence: Synthetic oligonucleotide
guguaacagcggaauucau

SEQ ID NO: 2657190 - RNA, 19 nt, Artificial Sequence
  Description of Artificial Sequence: Synthetic oligonucleotide
gacgucuuccugagacauu

SEQ ID NO: 2657191 - RNA, 19 nt, Artificial Sequence
  Description of Artificial Sequence: Synthetic oligonucleotide
guccaaguuucgggagugu

SEQ ID NO: 2657192 - RNA, 19 nt, Artificial Sequence
  Description of Artificial Sequence: Synthetic oligonucleotide
ccccguauauggcgaaucu

SEQ ID NO: 2657193 - RNA, 19 nt, Artificial Sequence
  Description of Artificial Sequence: Synthetic oligonucleotide
cggacgucuuccugagaca

SEQ ID NO: 2657194 - RNA, 19 nt, Artificial Sequence
  Description of Artificial Sequence: Synthetic oligonucleotide
cgguguccugacuguacca

SEQ ID NO: 2657195 - RNA, 19 nt, Artificial Sequence
  Description of Artificial Sequence: Synthetic oligonucleotide
gggcgcacucacacaugca

SEQ ID NO: 2657196 - RNA, 19 nt, Artificial Sequence
  Description of Artificial Sequence: Synthetic oligonucleotide
cgcacucacacaugcaauu

SEQ ID NO: 2657197 - RNA, 19 nt, Artificial Sequence
  Description of Artificial Sequence: Synthetic oligonucleotide
gcaaguccaguggauuguu

SEQ ID NO: 2657198 - RNA, 19 nt, Artificial Sequence
  Description of Artificial Sequence: Synthetic oligonucleotide
gcagaaccuugccccgagu

SEQ ID NO: 2657199 - RNA, 19 nt, Artificial Sequence
  Description of Artificial Sequence: Synthetic oligonucleotide
cugggaugguggacugcuu

SEQ ID NO: 2657200 - RNA, 19 nt, Artificial Sequence
  Description of Artificial Sequence: Synthetic oligonucleotide
ccgagucaggaaccggacu

SEQ ID NO: 2657201 - RNA, 19 nt, Artificial Sequence
  Description of Artificial Sequence: Synthetic oligonucleotide
cggggauucuuccgggcaa

SEQ ID NO: 2657202 - RNA, 19 nt, Artificial Sequence
  Description of Artificial Sequence: Synthetic oligonucleotide
ccuccccguauauggcgaa

SEQ ID NO: 2657203 - RNA, 19 nt, Artificial Sequence
  Description of Artificial Sequence: Synthetic oligonucleotide
gcgcacucacacaugcaau

SEQ ID NO: 2657204 - RNA, 19 nt, Artificial Sequence
  Description of Artificial Sequence: Synthetic oligonucleotide
cuccccguauauggcgaau

SEQ ID NO: 2657205 - RNA, 19 nt, Artificial Sequence
  Description of Artificial Sequence: Synthetic oligonucleotide
cccguauauggcgaaucuu

SEQ ID NO: 2657206 - RNA, 19 nt, Artificial Sequence
  Description of Artificial Sequence: Synthetic oligonucleotide
ccggacuguuucggacguc

SEQ ID NO: 2657207 - RNA, 19 nt, Artificial Sequence
  Description of Artificial Sequence: Synthetic oligonucleotide
cgcugggcgcacucacaca

SEQ ID NO: 2657208 - RNA, 19 nt, Artificial Sequence
  Description of Artificial Sequence: Synthetic oligonucleotide
ccgggcaaguccaguggau

SEQ ID NO: 2657209 - RNA, 19 nt, Artificial Sequence
  Description of Artificial Sequence: Synthetic oligonucleotide
cgggaguguucuggaauaa

SEQ ID NO: 2657210 - RNA, 19 nt, Artificial Sequence
  Description of Artificial Sequence: Synthetic oligonucleotide
aagacgagaagaucgaucg

SEQ ID NO: 2657211 - RNA, 19 nt, Artificial Sequence
  Description of Artificial Sequence: Synthetic oligonucleotide
aauagaugcauguuggaag

SEQ ID NO: 2657212 - RNA, 19 nt, Artificial Sequence
  Description of Artificial Sequence: Synthetic oligonucleotide
aaagaagacgagaagaucg

SEQ ID NO: 2657213 - RNA, 19 nt, Artificial Sequence
  Description of Artificial Sequence: Synthetic oligonucleotide
ucugcuuugaugaugacgc

SEQ ID NO: 2657214 - RNA, 19 nt, Artificial Sequence
  Description of Artificial Sequence: Synthetic oligonucleotide
acugcuagcaacuuggagg

SEQ ID NO: 2657215 - RNA, 19 nt, Artificial Sequence
  Description of Artificial Sequence: Synthetic oligonucleotide
uuuugcuuuaaauaggaca

SEQ ID NO: 2657216 - RNA, 19 nt, Artificial Sequence
  Description of Artificial Sequence: Synthetic oligonucleotide
ugcaauagaugcauguugg

SEQ ID NO: 2657217 - RNA, 19 nt, Artificial Sequence
  Description of Artificial Sequence: Synthetic oligonucleotide
aaauaggacacaagguucc

SEQ ID NO: 2657218 - RNA, 19 nt, Artificial Sequence
  Description of Artificial Sequence: Synthetic oligonucleotide
uagacugcuagcaacuugg

SEQ ID NO: 2657219 - RNA, 19 nt, Artificial Sequence
  Description of Artificial Sequence: Synthetic oligonucleotide
auagaugcauguuggaagg

SEQ ID NO: 2657220 - RNA, 19 nt, Artificial Sequence
  Description of Artificial Sequence: Synthetic oligonucleotide
uguuguagcgaucucauuc

SEQ ID NO: 2657221 - RNA, 19 nt, Artificial Sequence
  Description of Artificial Sequence: Synthetic oligonucleotide
uccacaaguagacugcuag

SEQ ID NO: 2657222 - RNA, 19 nt, Artificial Sequence
  Description of Artificial Sequence: Synthetic oligonucleotide
ucuaucucugauuggagag

SEQ ID NO: 2657223 - RNA, 19 nt, Artificial Sequence
  Description of Artificial Sequence: Synthetic oligonucleotide
uucaguagaagcaugcccu

SEQ ID NO: 2657224 - RNA, 19 nt, Artificial Sequence
  Description of Artificial Sequence: Synthetic oligonucleotide
guagcgaucucauucgucg

SEQ ID NO: 2657225 - RNA, 19 nt, Artificial Sequence
  Description of Artificial Sequence: Synthetic oligonucleotide
aaaagaagacgagaagauc

SEQ ID NO: 2657226 - RNA, 19 nt, Artificial Sequence
  Description of Artificial Sequence: Synthetic oligonucleotide
cugcuuuugcuuuaaauag

SEQ ID NO: 2657227 - RNA, 19 nt, Artificial Sequence
  Description of Artificial Sequence: Synthetic oligonucleotide
aguagaagcaugcccugcc

SEQ ID NO: 2657228 - RNA, 19 nt, Artificial Sequence
  Description of Artificial Sequence: Synthetic oligonucleotide
ugcuuuugcuuuaaauagg

SEQ ID NO: 2657229 - RNA, 19 nt, Artificial Sequence
  Description of Artificial Sequence: Synthetic oligonucleotide
ugagagaacucacaaggug

SEQ ID NO: 2657230 - RNA, 19 nt, Artificial Sequence
  Description of Artificial Sequence: Synthetic oligonucleotide
uuugccuccaguugaaccc

SEQ ID NO: 2657231 - RNA, 19 nt, Artificial Sequence
  Description of Artificial Sequence: Synthetic oligonucleotide
guuguagcgaucucauucg

SEQ ID NO: 2657232 - RNA, 19 nt, Artificial Sequence
  Description of Artificial Sequence: Synthetic oligonucleotide
gacacaagguuccuaagug

SEQ ID NO: 2657233 - RNA, 19 nt, Artificial Sequence
  Description of Artificial Sequence: Synthetic oligonucleotide
uccaaaagaagacgagaag

SEQ ID NO: 2657234 - RNA, 19 nt, Artificial Sequence
  Description of Artificial Sequence: Synthetic oligonucleotide
aguugaacccuccacaagu

SEQ ID NO: 2657235 - RNA, 19 nt, Artificial Sequence
  Description of Artificial Sequence: Synthetic oligonucleotide
uuuacggucucgcuuguca

SEQ ID NO: 2657236 - RNA, 19 nt, Artificial Sequence
  Description of Artificial Sequence: Synthetic oligonucleotide
caaacggagacgcugagug

SEQ ID NO: 2657237 - RNA, 19 nt, Artificial Sequence
  Description of Artificial Sequence: Synthetic oligonucleotide
ucauucgucgauuaauuaa

SEQ ID NO: 2657238 - RNA, 19 nt, Artificial Sequence
  Description of Artificial Sequence: Synthetic oligonucleotide
aagccaaacagaguuuggg

SEQ ID NO: 2657239 - RNA, 19 nt, Artificial Sequence
  Description of Artificial Sequence: Synthetic oligonucleotide
aucguugucacuguuguag

SEQ ID NO: 2657240 - RNA, 19 nt, Artificial Sequence
  Description of Artificial Sequence: Synthetic oligonucleotide
agcaacuuggaggucaccc

SEQ ID NO: 2657241 - RNA, 19 nt, Artificial Sequence
  Description of Artificial Sequence: Synthetic oligonucleotide
gaugaugacgcgcuggcac

SEQ ID NO: 2657242 - RNA, 19 nt, Artificial Sequence
  Description of Artificial Sequence: Synthetic oligonucleotide
ugcauugccaucagaacgu

SEQ ID NO: 2657243 - RNA, 19 nt, Artificial Sequence
  Description of Artificial Sequence: Synthetic oligonucleotide
uccaguugaacccuccaca

SEQ ID NO: 2657244 - RNA, 19 nt, Artificial Sequence
  Description of Artificial Sequence: Synthetic oligonucleotide
uaucccguucagcugaugc

SEQ ID NO: 2657245 - RNA, 19 nt, Artificial Sequence
  Description of Artificial Sequence: Synthetic oligonucleotide
acacaagguuccuaagugg

SEQ ID NO: 2657246 - RNA, 19 nt, Artificial Sequence
  Description of Artificial Sequence: Synthetic oligonucleotide
agaguuugggagaggaugc

SEQ ID NO: 2657247 - RNA, 19 nt, Artificial Sequence
  Description of Artificial Sequence: Synthetic oligonucleotide
uucugcuuugaugaugacg

SEQ ID NO: 2657248 - RNA, 19 nt, Artificial Sequence
  Description of Artificial Sequence: Synthetic oligonucleotide
uaucucugauuggagaggg

SEQ ID NO: 2657249 - RNA, 19 nt, Artificial Sequence
  Description of Artificial Sequence: Synthetic oligonucleotide
cuucaguagaagcaugccc

SEQ ID NO: 2657250 - RNA, 19 nt, Artificial Sequence
  Description of Artificial Sequence: Synthetic oligonucleotide
gucacccugcaauagaugc

SEQ ID NO: 2657251 - RNA, 19 nt, Artificial Sequence
  Description of Artificial Sequence: Synthetic oligonucleotide
ugccaagccaaacagaguu

SEQ ID NO: 2657252 - RNA, 19 nt, Artificial Sequence
  Description of Artificial Sequence: Synthetic oligonucleotide
uuuccaaaagaagacgaga

SEQ ID NO: 2657253 - RNA, 19 nt, Artificial Sequence
  Description of Artificial Sequence: Synthetic oligonucleotide
augaagaaccccuguguuc

SEQ ID NO: 2657254 - RNA, 19 nt, Artificial Sequence
  Description of Artificial Sequence: Synthetic oligonucleotide
ugaagaaccccuguguucu

SEQ ID NO: 2657255 - RNA, 19 nt, Artificial Sequence
  Description of Artificial Sequence: Synthetic oligonucleotide
cuuuccaaaagaagacgag

SEQ ID NO: 2657256 - RNA, 19 nt, Artificial Sequence
  Description of Artificial Sequence: Synthetic oligonucleotide
agugucugaacuugggcug

SEQ ID NO: 2657257 - RNA, 19 nt, Artificial Sequence
  Description of Artificial Sequence: Synthetic oligonucleotide
ucgcuugucacucuggcuc

SEQ ID NO: 2657258 - RNA, 19 nt, Artificial Sequence
  Description of Artificial Sequence: Synthetic oligonucleotide
ugaacccuccacaaguaga

SEQ ID NO: 2657259 - RNA, 19 nt, Artificial Sequence
  Description of Artificial Sequence: Synthetic oligonucleotide
caaguagacugcuagcaac

SEQ ID NO: 2657260 - RNA, 19 nt, Artificial Sequence
  Description of Artificial Sequence: Synthetic oligonucleotide
cuugggcugguccaaacgg

SEQ ID NO: 2657261 - RNA, 19 nt, Artificial Sequence
  Description of Artificial Sequence: Synthetic oligonucleotide
ugucccuccauccuguuuc

SEQ ID NO: 2657262 - RNA, 19 nt, Artificial Sequence
  Description of Artificial Sequence: Synthetic oligonucleotide
uuggaggucacccugcaau

SEQ ID NO: 2657263 - RNA, 19 nt, Artificial Sequence
  Description of Artificial Sequence: Synthetic oligonucleotide
ucuucuccaaacugccccg

SEQ ID NO: 2657264 - RNA, 19 nt, Artificial Sequence
  Description of Artificial Sequence: Synthetic oligonucleotide
agaagaucgaucguuguca

SEQ ID NO: 2657265 - RNA, 19 nt, Artificial Sequence
  Description of Artificial Sequence: Synthetic oligonucleotide
uccuaucccguucagcuga

SEQ ID NO: 2657266 - RNA, 19 nt, Artificial Sequence
  Description of Artificial Sequence: Synthetic oligonucleotide
cuuugccuccaguugaacc

SEQ ID NO: 2657267 - RNA, 19 nt, Artificial Sequence
  Description of Artificial Sequence: Synthetic oligonucleotide
ugagugaucuugagcuggg

SEQ ID NO: 2657268 - RNA, 19 nt, Artificial Sequence
  Description of Artificial Sequence: Synthetic oligonucleotide
aacuugggcugguccaaac

SEQ ID NO: 2657269 - RNA, 19 nt, Artificial Sequence
  Description of Artificial Sequence: Synthetic oligonucleotide
ugugggagcagcuguccgg

SEQ ID NO: 2657270 - RNA, 19 nt, Artificial Sequence
  Description of Artificial Sequence: Synthetic oligonucleotide
auguuggaagggaaguugc

SEQ ID NO: 2657271 - RNA, 19 nt, Artificial Sequence
  Description of Artificial Sequence: Synthetic oligonucleotide
uguccggugcuuccuaucc

SEQ ID NO: 2657272 - RNA, 19 nt, Artificial Sequence
  Description of Artificial Sequence: Synthetic oligonucleotide
cuuucugcuuugaugauga

SEQ ID NO: 2657273 - RNA, 19 nt, Artificial Sequence
  Description of Artificial Sequence: Synthetic oligonucleotide
uccggugcuuccuaucccg

SEQ ID NO: 2657274 - RNA, 19 nt, Artificial Sequence
  Description of Artificial Sequence: Synthetic oligonucleotide
aacucacaaggugggaagg

SEQ ID NO: 2657275 - RNA, 19 nt, Artificial Sequence
  Description of Artificial Sequence: Synthetic oligonucleotide
uugaacccuccacaaguag

SEQ ID NO: 2657276 - RNA, 19 nt, Artificial Sequence
  Description of Artificial Sequence: Synthetic oligonucleotide
cugcaauagaugcauguug

SEQ ID NO: 2657277 - RNA, 19 nt, Artificial Sequence
  Description of Artificial Sequence: Synthetic oligonucleotide
acgcugagugaucuugagc

SEQ ID NO: 2657278 - RNA, 19 nt, Artificial Sequence
  Description of Artificial Sequence: Synthetic oligonucleotide
guugcuguucuucaguaga

SEQ ID NO: 2657279 - RNA, 19 nt, Artificial Sequence
  Description of Artificial Sequence: Synthetic oligonucleotide
uaggacacaagguuccuaa

SEQ ID NO: 2657280 - RNA, 19 nt, Artificial Sequence
  Description of Artificial Sequence: Synthetic oligonucleotide
ucucauucgucgauuaauu

SEQ ID NO: 2657281 - RNA, 19 nt, Artificial Sequence
  Description of Artificial Sequence: Synthetic oligonucleotide
ugcugagagaacucacaag

SEQ ID NO: 2657282 - RNA, 19 nt, Artificial Sequence
  Description of Artificial Sequence: Synthetic oligonucleotide
acuugggcugguccaaacg

SEQ ID NO: 2657283 - RNA, 19 nt, Artificial Sequence
  Description of Artificial Sequence: Synthetic oligonucleotide
agaagcaugcccugccaag

SEQ ID NO: 2657284 - RNA, 19 nt, Artificial Sequence
  Description of Artificial Sequence: Synthetic oligonucleotide
uccuaaguggccucugugu

SEQ ID NO: 2657285 - RNA, 19 nt, Artificial Sequence
  Description of Artificial Sequence: Synthetic oligonucleotide
ucgaucguugucacuguug

SEQ ID NO: 2657286 - RNA, 19 nt, Artificial Sequence
  Description of Artificial Sequence: Synthetic oligonucleotide
aacugcugagagaacucac

SEQ ID NO: 2657287 - RNA, 19 nt, Artificial Sequence
  Description of Artificial Sequence: Synthetic oligonucleotide
cugagugaucuugagcugg

SEQ ID NO: 2657288 - RNA, 19 nt, Artificial Sequence
  Description of Artificial Sequence: Synthetic oligonucleotide
ucucgcuugucacucuggc

SEQ ID NO: 2657289 - RNA, 19 nt, Artificial Sequence
  Description of Artificial Sequence: Synthetic oligonucleotide
aaguagacugcuagcaacu

SEQ ID NO: 2657290 - RNA, 19 nt, Artificial Sequence
  Description of Artificial Sequence: Synthetic oligonucleotide
gagaagaucgaucguuguc

SEQ ID NO: 2657291 - RNA, 19 nt, Artificial Sequence
  Description of Artificial Sequence: Synthetic oligonucleotide
ggagcuuucugcuuugaug

SEQ ID NO: 2657292 - RNA, 19 nt, Artificial Sequence
  Description of Artificial Sequence: Synthetic oligonucleotide
uuugggagaggaugcugcc

SEQ ID NO: 2657293 - RNA, 19 nt, Artificial Sequence
  Description of Artificial Sequence: Synthetic oligonucleotide
ugcuuugaugaugacgcgc

SEQ ID NO: 2657294 - RNA, 19 nt, Artificial Sequence
  Description of Artificial Sequence: Synthetic oligonucleotide
acaagguuccuaaguggcc

SEQ ID NO: 2657295 - RNA, 19 nt, Artificial Sequence
  Description of Artificial Sequence: Synthetic oligonucleotide
uuccuaaguggccucugug

SEQ ID NO: 2657296 - RNA, 19 nt, Artificial Sequence
  Description of Artificial Sequence: Synthetic oligonucleotide
gacugcuagcaacuuggag

SEQ ID NO: 2657297 - RNA, 19 nt, Artificial Sequence
  Description of Artificial Sequence: Synthetic oligonucleotide
ucaguagaagcaugcccug

SEQ ID NO: 2657298 - RNA, 19 nt, Artificial Sequence
  Description of Artificial Sequence: Synthetic oligonucleotide
ugggaaggagcuuucugcu

SEQ ID NO: 2657299 - RNA, 19 nt, Artificial Sequence
  Description of Artificial Sequence: Synthetic oligonucleotide
gagagggccuuuccaaaag

SEQ ID NO: 2657300 - RNA, 19 nt, Artificial Sequence
  Description of Artificial Sequence: Synthetic oligonucleotide
acucacaaggugggaaggc

SEQ ID NO: 2657301 - RNA, 19 nt, Artificial Sequence
  Description of Artificial Sequence: Synthetic oligonucleotide
cauguuggaagggaaguug

SEQ ID NO: 2657302 - RNA, 19 nt, Artificial Sequence
  Description of Artificial Sequence: Synthetic oligonucleotide
gaagaucgaucguugucac

SEQ ID NO: 2657303 - RNA, 19 nt, Artificial Sequence
  Description of Artificial Sequence: Synthetic oligonucleotide
aucagaacguucuuccuuu

SEQ ID NO: 2657304 - RNA, 19 nt, Artificial Sequence
  Description of Artificial Sequence: Synthetic oligonucleotide
aagaagacgagaagaucga

SEQ ID NO: 2657305 - RNA, 19 nt, Artificial Sequence
  Description of Artificial Sequence: Synthetic oligonucleotide
aacggagacgcugagugau

SEQ ID NO: 2657306 - RNA, 19 nt, Artificial Sequence
  Description of Artificial Sequence: Synthetic oligonucleotide
cuaucucugauuggagagg

SEQ ID NO: 2657307 - RNA, 19 nt, Artificial Sequence
  Description of Artificial Sequence: Synthetic oligonucleotide
aaacugccccgucuaucuc

SEQ ID NO: 2657308 - RNA, 19 nt, Artificial Sequence
  Description of Artificial Sequence: Synthetic oligonucleotide
uguuggaagggaaguugcu

SEQ ID NO: 2657309 - RNA, 19 nt, Artificial Sequence
  Description of Artificial Sequence: Synthetic oligonucleotide
ugcauguuggaagggaagu

SEQ ID NO: 2657310 - RNA, 19 nt, Artificial Sequence
  Description of Artificial Sequence: Synthetic oligonucleotide
ucuguguagagguggcagu

SEQ ID NO: 2657311 - RNA, 19 nt, Artificial Sequence
  Description of Artificial Sequence: Synthetic oligonucleotide
agggaaguugcuguucuuc

SEQ ID NO: 2657312 - RNA, 19 nt, Artificial Sequence
  Description of Artificial Sequence: Synthetic oligonucleotide
cuuuugcuuuaaauaggac

SEQ ID NO: 2657313 - RNA, 19 nt, Artificial Sequence
  Description of Artificial Sequence: Synthetic oligonucleotide
guuugggagaggaugcugc

SEQ ID NO: 2657314 - RNA, 19 nt, Artificial Sequence
  Description of Artificial Sequence: Synthetic oligonucleotide
ucguugucacuguuguagc

SEQ ID NO: 2657315 - RNA, 19 nt, Artificial Sequence
  Description of Artificial Sequence: Synthetic oligonucleotide
gaacccuccacaaguagac

SEQ ID NO: 2657316 - RNA, 19 nt, Artificial Sequence
  Description of Artificial Sequence: Synthetic oligonucleotide
gauuggagagggccuuucc

SEQ ID NO: 2657317 - RNA, 19 nt, Artificial Sequence
  Description of Artificial Sequence: Synthetic oligonucleotide
ccugccaagccaaacagag

SEQ ID NO: 2657318 - RNA, 19 nt, Artificial Sequence
  Description of Artificial Sequence: Synthetic oligonucleotide
ugcccugccaagccaaaca

SEQ ID NO: 2657319 - RNA, 19 nt, Artificial Sequence
  Description of Artificial Sequence: Synthetic oligonucleotide
guagacugcuagcaacuug

SEQ ID NO: 2657320 - RNA, 19 nt, Artificial Sequence
  Description of Artificial Sequence: Synthetic oligonucleotide
ucccguucagcugaugcag

SEQ ID NO: 2657321 - RNA, 19 nt, Artificial Sequence
  Description of Artificial Sequence: Synthetic oligonucleotide
ucacccugcaauagaugca

SEQ ID NO: 2657322 - RNA, 19 nt, Artificial Sequence
  Description of Artificial Sequence: Synthetic oligonucleotide
uguagcgaucucauucguc

SEQ ID NO: 2657323 - RNA, 19 nt, Artificial Sequence
  Description of Artificial Sequence: Synthetic oligonucleotide
gagacgcugagugaucuug

SEQ ID NO: 2657324 - RNA, 19 nt, Artificial Sequence
  Description of Artificial Sequence: Synthetic oligonucleotide
aaacggagacgcugaguga

SEQ ID NO: 2657325 - RNA, 19 nt, Artificial Sequence
  Description of Artificial Sequence: Synthetic oligonucleotide
gaagcaugcccugccaagc

SEQ ID NO: 2657326 - RNA, 19 nt, Artificial Sequence
  Description of Artificial Sequence: Synthetic oligonucleotide
acaaguagacugcuagcaa

SEQ ID NO: 2657327 - RNA, 19 nt, Artificial Sequence
  Description of Artificial Sequence: Synthetic oligonucleotide
ugaucuugagcugggcuac

SEQ ID NO: 2657328 - RNA, 19 nt, Artificial Sequence
  Description of Artificial Sequence: Synthetic oligonucleotide
ucagcugaugcagaguuuu

SEQ ID NO: 2657329 - RNA, 19 nt, Artificial Sequence
  Description of Artificial Sequence: Synthetic oligonucleotide
uggcagugucugaacuugg

SEQ ID NO: 2657330 - RNA, 19 nt, Artificial Sequence
  Description of Artificial Sequence: Synthetic oligonucleotide
gccaucagaacguucuucc

SEQ ID NO: 2657331 - RNA, 19 nt, Artificial Sequence
  Description of Artificial Sequence: Synthetic oligonucleotide
aauaggacacaagguuccu

SEQ ID NO: 2657332 - RNA, 19 nt, Artificial Sequence
  Description of Artificial Sequence: Synthetic oligonucleotide
gacgcugagugaucuugag

SEQ ID NO: 2657333 - RNA, 19 nt, Artificial Sequence
  Description of Artificial Sequence: Synthetic oligonucleotide
cugguccaaacggagacgc

SEQ ID NO: 2657334 - RNA, 19 nt, Artificial Sequence
  Description of Artificial Sequence: Synthetic oligonucleotide
ucacaaggugggaaggcau

SEQ ID NO: 2657335 - RNA, 19 nt, Artificial Sequence
  Description of Artificial Sequence: Synthetic oligonucleotide
gucuaucucugauuggaga

SEQ ID NO: 2657336 - RNA, 19 nt, Artificial Sequence
  Description of Artificial Sequence: Synthetic oligonucleotide
cuuccuaucccguucagcu

SEQ ID NO: 2657337 - RNA, 19 nt, Artificial Sequence
  Description of Artificial Sequence: Synthetic oligonucleotide
ccuguuucugggaaggagc

SEQ ID NO: 2657338 - RNA, 19 nt, Artificial Sequence
  Description of Artificial Sequence: Synthetic oligonucleotide
cucuguguagagguggcag

SEQ ID NO: 2657339 - RNA, 19 nt, Artificial Sequence
  Description of Artificial Sequence: Synthetic oligonucleotide
uuacggucucgcuugucac

SEQ ID NO: 2657340 - RNA, 19 nt, Artificial Sequence
  Description of Artificial Sequence: Synthetic oligonucleotide
cuggcucuucuccaaacug

SEQ ID NO: 2657341 - RNA, 19 nt, Artificial Sequence
  Description of Artificial Sequence: Synthetic oligonucleotide
uccaaacggagacgcugag

SEQ ID NO: 2657342 - RNA, 19 nt, Artificial Sequence
  Description of Artificial Sequence: Synthetic oligonucleotide
uagaugcauguuggaaggg

SEQ ID NO: 2657343 - RNA, 19 nt, Artificial Sequence
  Description of Artificial Sequence: Synthetic oligonucleotide
aucucauucgucgauuaau

SEQ ID NO: 2657344 - RNA, 19 nt, Artificial Sequence
  Description of Artificial Sequence: Synthetic oligonucleotide
aaggcaugaagaaccccug

SEQ ID NO: 2657345 - RNA, 19 nt, Artificial Sequence
  Description of Artificial Sequence: Synthetic oligonucleotide
uuuucccucugugggagca

SEQ ID NO: 2657346 - RNA, 19 nt, Artificial Sequence
  Description of Artificial Sequence: Synthetic oligonucleotide
cacaaguagacugcuagca

SEQ ID NO: 2657347 - RNA, 19 nt, Artificial Sequence
  Description of Artificial Sequence: Synthetic oligonucleotide
uuccuaucccguucagcug

SEQ ID NO: 2657348 - RNA, 19 nt, Artificial Sequence
  Description of Artificial Sequence: Synthetic oligonucleotide
uggcacugggugcauugcc

SEQ ID NO: 2657349 - RNA, 19 nt, Artificial Sequence
  Description of Artificial Sequence: Synthetic oligonucleotide
caaaagaagacgagaagau

SEQ ID NO: 2657350 - RNA, 19 nt, Artificial Sequence
  Description of Artificial Sequence: Synthetic oligonucleotide
aaacagaguuugggagagg

SEQ ID NO: 2657351 - RNA, 19 nt, Artificial Sequence
  Description of Artificial Sequence: Synthetic oligonucleotide
agaugcauguuggaaggga

SEQ ID NO: 2657352 - RNA, 19 nt, Artificial Sequence
  Description of Artificial Sequence: Synthetic oligonucleotide
gaagggaaguugcuguucu

SEQ ID NO: 2657353 - RNA, 19 nt, Artificial Sequence
  Description of Artificial Sequence: Synthetic oligonucleotide
agagggccuuuccaaaaga

SEQ ID NO: 2657354 - RNA, 19 nt, Artificial Sequence
  Description of Artificial Sequence: Synthetic oligonucleotide
cuagcaacuuggaggucac

SEQ ID NO: 2657355 - RNA, 19 nt, Artificial Sequence
  Description of Artificial Sequence: Synthetic oligonucleotide
uuguagcgaucucauucgu

SEQ ID NO: 2657356 - RNA, 19 nt, Artificial Sequence
  Description of Artificial Sequence: Synthetic oligonucleotide
aucccguucagcugaugca

SEQ ID NO: 2657357 - RNA, 19 nt, Artificial Sequence
  Description of Artificial Sequence: Synthetic oligonucleotide
ugggcuacuuugccuccag

SEQ ID NO: 2657358 - RNA, 19 nt, Artificial Sequence
  Description of Artificial Sequence: Synthetic oligonucleotide
cugaacuugggcuggucca

SEQ ID NO: 2657359 - RNA, 19 nt, Artificial Sequence
  Description of Artificial Sequence: Synthetic oligonucleotide
agggccuuuccaaaagaag

SEQ ID NO: 2657360 - RNA, 19 nt, Artificial Sequence
  Description of Artificial Sequence: Synthetic oligonucleotide
gugaucuugagcugggcua

SEQ ID NO: 2657361 - RNA, 19 nt, Artificial Sequence
  Description of Artificial Sequence: Synthetic oligonucleotide
acggucucgcuugucacuc

SEQ ID NO: 2657362 - RNA, 19 nt, Artificial Sequence
  Description of Artificial Sequence: Synthetic oligonucleotide
ggugcauugccaucagaac

SEQ ID NO: 2657363 - RNA, 19 nt, Artificial Sequence
  Description of Artificial Sequence: Synthetic oligonucleotide
gaggucacccugcaauaga

SEQ ID NO: 2657364 - RNA, 19 nt, Artificial Sequence
  Description of Artificial Sequence: Synthetic oligonucleotide
agggaggcugaucacccca

SEQ ID NO: 2657365 - RNA, 19 nt, Artificial Sequence
  Description of Artificial Sequence: Synthetic oligonucleotide
acgagaagaucgaucguug

SEQ ID NO: 2657366 - RNA, 19 nt, Artificial Sequence
  Description of Artificial Sequence: Synthetic oligonucleotide
cugcuuugaugaugacgcg

SEQ ID NO: 2657367 - RNA, 19 nt, Artificial Sequence
  Description of Artificial Sequence: Synthetic oligonucleotide
caguugaacccuccacaag

SEQ ID NO: 2657368 - RNA, 19 nt, Artificial Sequence
  Description of Artificial Sequence: Synthetic oligonucleotide
aguuugggagaggaugcug

SEQ ID NO: 2657369 - RNA, 19 nt, Artificial Sequence
  Description of Artificial Sequence: Synthetic oligonucleotide
acuguuguagcgaucucau

SEQ ID NO: 2657370 - RNA, 19 nt, Artificial Sequence
  Description of Artificial Sequence: Synthetic oligonucleotide
aaguggccucuguguagag

SEQ ID NO: 2657371 - RNA, 19 nt, Artificial Sequence
  Description of Artificial Sequence: Synthetic oligonucleotide
caauagaugcauguuggaa

SEQ ID NO: 2657372 - RNA, 19 nt, Artificial Sequence
  Description of Artificial Sequence: Synthetic oligonucleotide
gccuuuccaaaagaagacg

SEQ ID NO: 2657373 - RNA, 19 nt, Artificial Sequence
  Description of Artificial Sequence: Synthetic oligonucleotide
uguguagagguggcagugu

SEQ ID NO: 2657374 - RNA, 19 nt, Artificial Sequence
  Description of Artificial Sequence: Synthetic oligonucleotide
augcauguuggaagggaag

SEQ ID NO: 2657375 - RNA, 19 nt, Artificial Sequence
  Description of Artificial Sequence: Synthetic oligonucleotide
uagcgaucucauucgucga

SEQ ID NO: 2657376 - RNA, 19 nt, Artificial Sequence
  Description of Artificial Sequence: Synthetic oligonucleotide
cugugggagcagcuguccg

SEQ ID NO: 2657377 - RNA, 19 nt, Artificial Sequence
  Description of Artificial Sequence: Synthetic oligonucleotide
gcuuuugcuuuaaauagga

SEQ ID NO: 2657378 - RNA, 19 nt, Artificial Sequence
  Description of Artificial Sequence: Synthetic oligonucleotide
ucugauuggagagggccuu

SEQ ID NO: 2657379 - RNA, 19 nt, Artificial Sequence
  Description of Artificial Sequence: Synthetic oligonucleotide
agcgaucucauucgucgau

SEQ ID NO: 2657380 - RNA, 19 nt, Artificial Sequence
  Description of Artificial Sequence: Synthetic oligonucleotide
auucgucgauuaauuaacu

SEQ ID NO: 2657381 - RNA, 19 nt, Artificial Sequence
  Description of Artificial Sequence: Synthetic oligonucleotide
gggccuuuccaaaagaaga

SEQ ID NO: 2657382 - RNA, 19 nt, Artificial Sequence
  Description of Artificial Sequence: Synthetic oligonucleotide
agaaccccuguguucuccu

SEQ ID NO: 2657383 - RNA, 19 nt, Artificial Sequence
  Description of Artificial Sequence: Synthetic oligonucleotide
cuguguagagguggcagug

SEQ ID NO: 2657384 - RNA, 19 nt, Artificial Sequence
  Description of Artificial Sequence: Synthetic oligonucleotide
ccuuuccaaaagaagacga

SEQ ID NO: 2657385 - RNA, 19 nt, Artificial Sequence
  Description of Artificial Sequence: Synthetic oligonucleotide
cuuugaugaugacgcgcug

SEQ ID NO: 2657386 - RNA, 19 nt, Artificial Sequence
  Description of Artificial Sequence: Synthetic oligonucleotide
ugccacaggagcugucccu

SEQ ID NO: 2657387 - RNA, 19 nt, Artificial Sequence
  Description of Artificial Sequence: Synthetic oligonucleotide
uggaggucacccugcaaua

SEQ ID NO: 2657388 - RNA, 19 nt, Artificial Sequence
  Description of Artificial Sequence: Synthetic oligonucleotide
gaucucauucgucgauuaa

SEQ ID NO: 2657389 - RNA, 19 nt, Artificial Sequence
  Description of Artificial Sequence: Synthetic oligonucleotide
aggcaugaagaaccccugu

SEQ ID NO: 2657390 - RNA, 19 nt, Artificial Sequence
  Description of Artificial Sequence: Synthetic oligonucleotide
acuuugccuccaguugaac

SEQ ID NO: 2657391 - RNA, 19 nt, Artificial Sequence
  Description of Artificial Sequence: Synthetic oligonucleotide
gaugacgcgcuggcacugg

SEQ ID NO: 2657392 - RNA, 19 nt, Artificial Sequence
  Description of Artificial Sequence: Synthetic oligonucleotide
guagaagcaugcccugcca

SEQ ID NO: 2657393 - RNA, 19 nt, Artificial Sequence
  Description of Artificial Sequence: Synthetic oligonucleotide
aucucugauuggagagggc

SEQ ID NO: 2657394 - RNA, 19 nt, Artificial Sequence
  Description of Artificial Sequence: Synthetic oligonucleotide
gguccaaacggagacgcug

SEQ ID NO: 2657395 - RNA, 19 nt, Artificial Sequence
  Description of Artificial Sequence: Synthetic oligonucleotide
agacgagaagaucgaucgu

SEQ ID NO: 2657396 - RNA, 19 nt, Artificial Sequence
  Description of Artificial Sequence: Synthetic oligonucleotide
caaacugccccgucuaucu

SEQ ID NO: 2657397 - RNA, 19 nt, Artificial Sequence
  Description of Artificial Sequence: Synthetic oligonucleotide
augacgcgcuggcacuggg

SEQ ID NO: 2657398 - RNA, 19 nt, Artificial Sequence
  Description of Artificial Sequence: Synthetic oligonucleotide
agcaugcccugccaagcca

SEQ ID NO: 2657399 - RNA, 19 nt, Artificial Sequence
  Description of Artificial Sequence: Synthetic oligonucleotide
guucagcugaugcagaguu

SEQ ID NO: 2657400 - RNA, 19 nt, Artificial Sequence
  Description of Artificial Sequence: Synthetic oligonucleotide
gugggaaggcaugaagaac

SEQ ID NO: 2657401 - RNA, 19 nt, Artificial Sequence
  Description of Artificial Sequence: Synthetic oligonucleotide
ugccaucagaacguucuuc

SEQ ID NO: 2657402 - RNA, 19 nt, Artificial Sequence
  Description of Artificial Sequence: Synthetic oligonucleotide
uccaaacugccccgucuau

SEQ ID NO: 2657403 - RNA, 19 nt, Artificial Sequence
  Description of Artificial Sequence: Synthetic oligonucleotide
aagggaaguugcuguucuu

SEQ ID NO: 2657404 - RNA, 19 nt, Artificial Sequence
  Description of Artificial Sequence: Synthetic oligonucleotide
ugccccgucuaucucugau

SEQ ID NO: 2657405 - RNA, 19 nt, Artificial Sequence
  Description of Artificial Sequence: Synthetic oligonucleotide
ugaugacgcgcuggcacug

SEQ ID NO: 2657406 - RNA, 19 nt, Artificial Sequence
  Description of Artificial Sequence: Synthetic oligonucleotide
cacuguuguagcgaucuca

SEQ ID NO: 2657407 - RNA, 19 nt, Artificial Sequence
  Description of Artificial Sequence: Synthetic oligonucleotide
caguagaagcaugcccugc

SEQ ID NO: 2657408 - RNA, 19 nt, Artificial Sequence
  Description of Artificial Sequence: Synthetic oligonucleotide
ggugcuuccuaucccguuc

SEQ ID NO: 2657409 - RNA, 19 nt, Artificial Sequence
  Description of Artificial Sequence: Synthetic oligonucleotide
ugucacuguuguagcgauc

SEQ ID NO: 2657410 - RNA, 19 nt, Artificial Sequence
  Description of Artificial Sequence: Synthetic oligonucleotide
gcuagcaacuuggagguca

SEQ ID NO: 2657411 - RNA, 19 nt, Artificial Sequence
  Description of Artificial Sequence: Synthetic oligonucleotide
ugggugcauugccaucaga

SEQ ID NO: 2657412 - RNA, 19 nt, Artificial Sequence
  Description of Artificial Sequence: Synthetic oligonucleotide
cucauucgucgauuaauua

SEQ ID NO: 2657413 - RNA, 19 nt, Artificial Sequence
  Description of Artificial Sequence: Synthetic oligonucleotide
uucccucugugggagcagc

SEQ ID NO: 2657414 - RNA, 19 nt, Artificial Sequence
  Description of Artificial Sequence: Synthetic oligonucleotide
aggagcuuucugcuuugau

SEQ ID NO: 2657415 - RNA, 19 nt, Artificial Sequence
  Description of Artificial Sequence: Synthetic oligonucleotide
ggcucuucuccaaacugcc

SEQ ID NO: 2657416 - RNA, 19 nt, Artificial Sequence
  Description of Artificial Sequence: Synthetic oligonucleotide
agcagcuguccggugcuuc

SEQ ID NO: 2657417 - RNA, 19 nt, Artificial Sequence
  Description of Artificial Sequence: Synthetic oligonucleotide
gacgagaagaucgaucguu

SEQ ID NO: 2657418 - RNA, 19 nt, Artificial Sequence
  Description of Artificial Sequence: Synthetic oligonucleotide
uuucugcuuugaugaugac

SEQ ID NO: 2657419 - RNA, 19 nt, Artificial Sequence
  Description of Artificial Sequence: Synthetic oligonucleotide
uugccuccaguugaacccu

SEQ ID NO: 2657420 - RNA, 19 nt, Artificial Sequence
  Description of Artificial Sequence: Synthetic oligonucleotide
ccacaaguagacugcuagc

SEQ ID NO: 2657421 - RNA, 19 nt, Artificial Sequence
  Description of Artificial Sequence: Synthetic oligonucleotide
cccuccacaaguagacugc

SEQ ID NO: 2657422 - RNA, 19 nt, Artificial Sequence
  Description of Artificial Sequence: Synthetic oligonucleotide
uagagguggcagugucuga

SEQ ID NO: 2657423 - RNA, 19 nt, Artificial Sequence
  Description of Artificial Sequence: Synthetic oligonucleotide
ggccucuguguagaggugg

SEQ ID NO: 2657424 - RNA, 19 nt, Artificial Sequence
  Description of Artificial Sequence: Synthetic oligonucleotide
ugguccaaacggagacgcu

SEQ ID NO: 2657425 - RNA, 19 nt, Artificial Sequence
  Description of Artificial Sequence: Synthetic oligonucleotide
ccaagccaaacagaguuug

SEQ ID NO: 2657426 - RNA, 19 nt, Artificial Sequence
  Description of Artificial Sequence: Synthetic oligonucleotide
gggagcagcuguccggugc

SEQ ID NO: 2657427 - RNA, 19 nt, Artificial Sequence
  Description of Artificial Sequence: Synthetic oligonucleotide
uuucccucugugggagcag

SEQ ID NO: 2657428 - RNA, 19 nt, Artificial Sequence
  Description of Artificial Sequence: Synthetic oligonucleotide
augcccugccaagccaaac

SEQ ID NO: 2657429 - RNA, 19 nt, Artificial Sequence
  Description of Artificial Sequence: Synthetic oligonucleotide
ugacgcgcuggcacugggu

SEQ ID NO: 2657430 - RNA, 19 nt, Artificial Sequence
  Description of Artificial Sequence: Synthetic oligonucleotide
gagggccuuuccaaaagaa

SEQ ID NO: 2657431 - RNA, 19 nt, Artificial Sequence
  Description of Artificial Sequence: Synthetic oligonucleotide
cucacaaggugggaaggca

SEQ ID NO: 2657432 - RNA, 19 nt, Artificial Sequence
  Description of Artificial Sequence: Synthetic oligonucleotide
gcuggcacugggugcauug

SEQ ID NO: 2657433 - RNA, 19 nt, Artificial Sequence
  Description of Artificial Sequence: Synthetic oligonucleotide
ucagaacguucuuccuuuu

SEQ ID NO: 2657434 - RNA, 19 nt, Artificial Sequence
  Description of Artificial Sequence: Synthetic oligonucleotide
gagugaucuugagcugggc

SEQ ID NO: 2657435 - RNA, 19 nt, Artificial Sequence
  Description of Artificial Sequence: Synthetic oligonucleotide
gucucgcuugucacucugg

SEQ ID NO: 2657436 - RNA, 19 nt, Artificial Sequence
  Description of Artificial Sequence: Synthetic oligonucleotide
uugccaucagaacguucuu

SEQ ID NO: 2657437 - RNA, 19 nt, Artificial Sequence
  Description of Artificial Sequence: Synthetic oligonucleotide
agcuuucugcuuugaugau

SEQ ID NO: 2657438 - RNA, 19 nt, Artificial Sequence
  Description of Artificial Sequence: Synthetic oligonucleotide
gcaauagaugcauguugga

SEQ ID NO: 2657439 - RNA, 19 nt, Artificial Sequence
  Description of Artificial Sequence: Synthetic oligonucleotide
gcugagugaucuugagcug

SEQ ID NO: 2657440 - RNA, 19 nt, Artificial Sequence
  Description of Artificial Sequence: Synthetic oligonucleotide
guccggugcuuccuauccc

SEQ ID NO: 2657441 - RNA, 19 nt, Artificial Sequence
  Description of Artificial Sequence: Synthetic oligonucleotide
gugcuuccuaucccguuca

SEQ ID NO: 2657442 - RNA, 19 nt, Artificial Sequence
  Description of Artificial Sequence: Synthetic oligonucleotide
cugagagaacucacaaggu

SEQ ID NO: 2657443 - RNA, 19 nt, Artificial Sequence
  Description of Artificial Sequence: Synthetic oligonucleotide
aucgaucguugucacuguu

SEQ ID NO: 2657444 - RNA, 19 nt, Artificial Sequence
  Description of Artificial Sequence: Synthetic oligonucleotide
guccaaacggagacgcuga

SEQ ID NO: 2657445 - RNA, 19 nt, Artificial Sequence
  Description of Artificial Sequence: Synthetic oligonucleotide
ccccgucuaucucugauug

SEQ ID NO: 2657446 - RNA, 19 nt, Artificial Sequence
  Description of Artificial Sequence: Synthetic oligonucleotide
gggugcauugccaucagaa

SEQ ID NO: 2657447 - RNA, 19 nt, Artificial Sequence
  Description of Artificial Sequence: Synthetic oligonucleotide
ggaggucacccugcaauag

SEQ ID NO: 2657448 - RNA, 19 nt, Artificial Sequence
  Description of Artificial Sequence: Synthetic oligonucleotide
aguagacugcuagcaacuu

SEQ ID NO: 2657449 - RNA, 19 nt, Artificial Sequence
  Description of Artificial Sequence: Synthetic oligonucleotide
caugaagaaccccuguguu

SEQ ID NO: 2657450 - RNA, 19 nt, Artificial Sequence
  Description of Artificial Sequence: Synthetic oligonucleotide
uuuuacggucucgcuuguc

SEQ ID NO: 2657451 - RNA, 19 nt, Artificial Sequence
  Description of Artificial Sequence: Synthetic oligonucleotide
ggucucgcuugucacucug

SEQ ID NO: 2657452 - RNA, 19 nt, Artificial Sequence
  Description of Artificial Sequence: Synthetic oligonucleotide
gaucgaucguugucacugu

SEQ ID NO: 2657453 - RNA, 19 nt, Artificial Sequence
  Description of Artificial Sequence: Synthetic oligonucleotide
cuggcacugggugcauugc

SEQ ID NO: 2657454 - RNA, 19 nt, Artificial Sequence
  Description of Artificial Sequence: Synthetic oligonucleotide
caagguuccuaaguggccu

SEQ ID NO: 2657455 - RNA, 19 nt, Artificial Sequence
  Description of Artificial Sequence: Synthetic oligonucleotide
auaggacacaagguuccua

SEQ ID NO: 2657456 - RNA, 19 nt, Artificial Sequence
  Description of Artificial Sequence: Synthetic oligonucleotide
cuguccggugcuuccuauc

SEQ ID NO: 2657457 - RNA, 19 nt, Artificial Sequence
  Description of Artificial Sequence: Synthetic oligonucleotide
gaucguugucacuguugua

SEQ ID NO: 2657458 - RNA, 19 nt, Artificial Sequence
  Description of Artificial Sequence: Synthetic oligonucleotide
agacgcugagugaucuuga

SEQ ID NO: 2657459 - RNA, 19 nt, Artificial Sequence
  Description of Artificial Sequence: Synthetic oligonucleotide
guugaacccuccacaagua

SEQ ID NO: 2657460 - RNA, 19 nt, Artificial Sequence
  Description of Artificial Sequence: Synthetic oligonucleotide
gcugguccaaacggagacg

SEQ ID NO: 2657461 - RNA, 19 nt, Artificial Sequence
  Description of Artificial Sequence: Synthetic oligonucleotide
gcagcuguccggugcuucc

SEQ ID NO: 2657462 - RNA, 19 nt, Artificial Sequence
  Description of Artificial Sequence: Synthetic oligonucleotide
gggaaggcaugaagaaccc

SEQ ID NO: 2657463 - RNA, 19 nt, Artificial Sequence
  Description of Artificial Sequence: Synthetic oligonucleotide
uguuucugggaaggagcuu

SEQ ID NO: 2657464 - RNA, 19 nt, Artificial Sequence
  Description of Artificial Sequence: Synthetic oligonucleotide
acugccccgucuaucucug

SEQ ID NO: 2657465 - RNA, 19 nt, Artificial Sequence
  Description of Artificial Sequence: Synthetic oligonucleotide
cucugauuggagagggccu

SEQ ID NO: 2657466 - RNA, 19 nt, Artificial Sequence
  Description of Artificial Sequence: Synthetic oligonucleotide
ggaaggcaugaagaacccc

SEQ ID NO: 2657467 - RNA, 19 nt, Artificial Sequence
  Description of Artificial Sequence: Synthetic oligonucleotide
ugucugaacuugggcuggu

SEQ ID NO: 2657468 - RNA, 19 nt, Artificial Sequence
  Description of Artificial Sequence: Synthetic oligonucleotide
caggagcugucccuccauc

SEQ ID NO: 2657469 - RNA, 19 nt, Artificial Sequence
  Description of Artificial Sequence: Synthetic oligonucleotide
cgcugagugaucuugagcu

SEQ ID NO: 2657470 - RNA, 19 nt, Artificial Sequence
  Description of Artificial Sequence: Synthetic oligonucleotide
acggagacgcugagugauc

SEQ ID NO: 2657471 - RNA, 19 nt, Artificial Sequence
  Description of Artificial Sequence: Synthetic oligonucleotide
ggagagggccuuuccaaaa

SEQ ID NO: 2657472 - RNA, 19 nt, Artificial Sequence
  Description of Artificial Sequence: Synthetic oligonucleotide
caucagaacguucuuccuu

SEQ ID NO: 2657473 - RNA, 19 nt, Artificial Sequence
  Description of Artificial Sequence: Synthetic oligonucleotide
ccguucagcugaugcagag

SEQ ID NO: 2657474 - RNA, 19 nt, Artificial Sequence
  Description of Artificial Sequence: Synthetic oligonucleotide
uagcaacuuggaggucacc

SEQ ID NO: 2657475 - RNA, 19 nt, Artificial Sequence
  Description of Artificial Sequence: Synthetic oligonucleotide
guuccuaaguggccucugu

SEQ ID NO: 2657476 - RNA, 19 nt, Artificial Sequence
  Description of Artificial Sequence: Synthetic oligonucleotide
ggaaggagcuuucugcuuu

SEQ ID NO: 2657477 - RNA, 19 nt, Artificial Sequence
  Description of Artificial Sequence: Synthetic oligonucleotide
acagaguuugggagaggau

SEQ ID NO: 2657478 - RNA, 19 nt, Artificial Sequence
  Description of Artificial Sequence: Synthetic oligonucleotide
gagcugggcuacuuugccu

SEQ ID NO: 2657479 - RNA, 19 nt, Artificial Sequence
  Description of Artificial Sequence: Synthetic oligonucleotide
ugggagcagcuguccggug

SEQ ID NO: 2657480 - RNA, 19 nt, Artificial Sequence
  Description of Artificial Sequence: Synthetic oligonucleotide
ugccugcuuuugcuuuaaa

SEQ ID NO: 2657481 - RNA, 19 nt, Artificial Sequence
  Description of Artificial Sequence: Synthetic oligonucleotide
gcuuccuaucccguucagc

SEQ ID NO: 2657482 - RNA, 19 nt, Artificial Sequence
  Description of Artificial Sequence: Synthetic oligonucleotide
gcuuugaugaugacgcgcu

SEQ ID NO: 2657483 - RNA, 19 nt, Artificial Sequence
  Description of Artificial Sequence: Synthetic oligonucleotide
agacugcuagcaacuugga

SEQ ID NO: 2657484 - RNA, 19 nt, Artificial Sequence
  Description of Artificial Sequence: Synthetic oligonucleotide
cgucuaucucugauuggag

SEQ ID NO: 2657485 - RNA, 19 nt, Artificial Sequence
  Description of Artificial Sequence: Synthetic oligonucleotide
ccaguugaacccuccacaa

SEQ ID NO: 2657486 - RNA, 19 nt, Artificial Sequence
  Description of Artificial Sequence: Synthetic oligonucleotide
cccgucuaucucugauugg

SEQ ID NO: 2657487 - RNA, 19 nt, Artificial Sequence
  Description of Artificial Sequence: Synthetic oligonucleotide
ccgucuaucucugauugga

SEQ ID NO: 2657488 - RNA, 19 nt, Artificial Sequence
  Description of Artificial Sequence: Synthetic oligonucleotide
auccuguuucugggaagga

SEQ ID NO: 2657489 - RNA, 19 nt, Artificial Sequence
  Description of Artificial Sequence: Synthetic oligonucleotide
ggucacccugcaauagaug

SEQ ID NO: 2657490 - RNA, 19 nt, Artificial Sequence
  Description of Artificial Sequence: Synthetic oligonucleotide
gcugggcuacuuugccucc

SEQ ID NO: 2657491 - RNA, 19 nt, Artificial Sequence
  Description of Artificial Sequence: Synthetic oligonucleotide
aucaccccagcugccugcu

SEQ ID NO: 2657492 - RNA, 19 nt, Artificial Sequence
  Description of Artificial Sequence: Synthetic oligonucleotide
ggcacugggugcauugcca

SEQ ID NO: 2657493 - RNA, 19 nt, Artificial Sequence
  Description of Artificial Sequence: Synthetic oligonucleotide
gaacuugggcugguccaaa

SEQ ID NO: 2657494 - RNA, 19 nt, Artificial Sequence
  Description of Artificial Sequence: Synthetic oligonucleotide
agcuguccggugcuuccua

SEQ ID NO: 2657495 - RNA, 19 nt, Artificial Sequence
  Description of Artificial Sequence: Synthetic oligonucleotide
aucuugagcugggcuacuu

SEQ ID NO: 2657496 - RNA, 19 nt, Artificial Sequence
  Description of Artificial Sequence: Synthetic oligonucleotide
accccagcugccugcuuuu

SEQ ID NO: 2657497 - RNA, 19 nt, Artificial Sequence
  Description of Artificial Sequence: Synthetic oligonucleotide
ccuaaguggccucugugua

SEQ ID NO: 2657498 - RNA, 19 nt, Artificial Sequence
  Description of Artificial Sequence: Synthetic oligonucleotide
ucccuccauccuguuucug

SEQ ID NO: 2657499 - RNA, 19 nt, Artificial Sequence
  Description of Artificial Sequence: Synthetic oligonucleotide
ggcuacuuugccuccaguu

SEQ ID NO: 2657500 - RNA, 19 nt, Artificial Sequence
  Description of Artificial Sequence: Synthetic oligonucleotide
ggagcugucccuccauccu

SEQ ID NO: 2657501 - RNA, 19 nt, Artificial Sequence
  Description of Artificial Sequence: Synthetic oligonucleotide
cucgcuugucacucuggcu

SEQ ID NO: 2657502 - RNA, 19 nt, Artificial Sequence
  Description of Artificial Sequence: Synthetic oligonucleotide
cuccacaaguagacugcua

SEQ ID NO: 2657503 - RNA, 19 nt, Artificial Sequence
  Description of Artificial Sequence: Synthetic oligonucleotide
gccucuguguagagguggc

SEQ ID NO: 2657504 - RNA, 19 nt, Artificial Sequence
  Description of Artificial Sequence: Synthetic oligonucleotide
ccaaacugccccgucuauc

SEQ ID NO: 2657505 - RNA, 19 nt, Artificial Sequence
  Description of Artificial Sequence: Synthetic oligonucleotide
acccugcaauagaugcaug

SEQ ID NO: 2657506 - RNA, 19 nt, Artificial Sequence
  Description of Artificial Sequence: Synthetic oligonucleotide
cacccugcaauagaugcau

SEQ ID NO: 2657507 - RNA, 19 nt, Artificial Sequence
  Description of Artificial Sequence: Synthetic oligonucleotide
gccugcuuuugcuuuaaau

SEQ ID NO: 2657508 - RNA, 19 nt, Artificial Sequence
  Description of Artificial Sequence: Synthetic oligonucleotide
ugcuagcaacuuggagguc

SEQ ID NO: 2657509 - RNA, 19 nt, Artificial Sequence
  Description of Artificial Sequence: Synthetic oligonucleotide
cuaucccguucagcugaug

SEQ ID NO: 2657510 - RNA, 19 nt, Artificial Sequence
  Description of Artificial Sequence: Synthetic oligonucleotide
gucugaacuugggcugguc

SEQ ID NO: 2657511 - RNA, 19 nt, Artificial Sequence
  Description of Artificial Sequence: Synthetic oligonucleotide
cugccaagccaaacagagu

SEQ ID NO: 2657512 - RNA, 19 nt, Artificial Sequence
  Description of Artificial Sequence: Synthetic oligonucleotide
caugcccugccaagccaaa

SEQ ID NO: 2657513 - RNA, 19 nt, Artificial Sequence
  Description of Artificial Sequence: Synthetic oligonucleotide
cccugcaauagaugcaugu

SEQ ID NO: 2657514 - RNA, 19 nt, Artificial Sequence
  Description of Artificial Sequence: Synthetic oligonucleotide
gaucuugagcugggcuacu

SEQ ID NO: 2657515 - RNA, 19 nt, Artificial Sequence
  Description of Artificial Sequence: Synthetic oligonucleotide
cugggcuacuuugccucca

SEQ ID NO: 2657516 - RNA, 19 nt, Artificial Sequence
  Description of Artificial Sequence: Synthetic oligonucleotide
cgaucguugucacuguugu

SEQ ID NO: 2657517 - RNA, 19 nt, Artificial Sequence
  Description of Artificial Sequence: Synthetic oligonucleotide
ucaccccagcugccugcuu

SEQ ID NO: 2657518 - RNA, 19 nt, Artificial Sequence
  Description of Artificial Sequence: Synthetic oligonucleotide
gucccuccauccuguuucu

SEQ ID NO: 2657519 - RNA, 19 nt, Artificial Sequence
  Description of Artificial Sequence: Synthetic oligonucleotide
gaaccccuguguucuccuu

SEQ ID NO: 2657520 - RNA, 19 nt, Artificial Sequence
  Description of Artificial Sequence: Synthetic oligonucleotide
cccugccaagccaaacaga

SEQ ID NO: 2657521 - RNA, 19 nt, Artificial Sequence
  Description of Artificial Sequence: Synthetic oligonucleotide
gcaugcccugccaagccaa

SEQ ID NO: 2657522 - RNA, 19 nt, Artificial Sequence
  Description of Artificial Sequence: Synthetic oligonucleotide
gggcugguccaaacggaga

SEQ ID NO: 2657523 - RNA, 19 nt, Artificial Sequence
  Description of Artificial Sequence: Synthetic oligonucleotide
cuguuguagcgaucucauu

SEQ ID NO: 2657524 - RNA, 19 nt, Artificial Sequence
  Description of Artificial Sequence: Synthetic oligonucleotide
caccccagcugccugcuuu

SEQ ID NO: 2657525 - RNA, 19 nt, Artificial Sequence
  Description of Artificial Sequence: Synthetic oligonucleotide
cgaucucauucgucgauua

SEQ ID NO: 2657526 - RNA, 19 nt, Artificial Sequence
  Description of Artificial Sequence: Synthetic oligonucleotide
ccaucagaacguucuuccu

SEQ ID NO: 2657527 - RNA, 19 nt, Artificial Sequence
  Description of Artificial Sequence: Synthetic oligonucleotide
gggaaggagcuuucugcuu

SEQ ID NO: 2657528 - RNA, 19 nt, Artificial Sequence
  Description of Artificial Sequence: Synthetic oligonucleotide
gcauguuggaagggaaguu

SEQ ID NO: 2657529 - RNA, 19 nt, Artificial Sequence
  Description of Artificial Sequence: Synthetic oligonucleotide
cgagaagaucgaucguugu

SEQ ID NO: 2657530 - RNA, 19 nt, Artificial Sequence
  Description of Artificial Sequence: Synthetic oligonucleotide
cugccccgucuaucucuga

SEQ ID NO: 2657531 - RNA, 19 nt, Artificial Sequence
  Description of Artificial Sequence: Synthetic oligonucleotide
ccugcaauagaugcauguu

SEQ ID NO: 2657532 - RNA, 19 nt, Artificial Sequence
  Description of Artificial Sequence: Synthetic oligonucleotide
cagcugccugcuuuugcuu

SEQ ID NO: 2657533 - RNA, 19 nt, Artificial Sequence
  Description of Artificial Sequence: Synthetic oligonucleotide
gcuguccggugcuuccuau

SEQ ID NO: 2657534 - RNA, 19 nt, Artificial Sequence
  Description of Artificial Sequence: Synthetic oligonucleotide
gggcuacuuugccuccagu

SEQ ID NO: 2657535 - RNA, 19 nt, Artificial Sequence
  Description of Artificial Sequence: Synthetic oligonucleotide
gcgaucucauucgucgauu

SEQ ID NO: 2657536 - RNA, 19 nt, Artificial Sequence
  Description of Artificial Sequence: Synthetic oligonucleotide
gccccgucuaucucugauu

SEQ ID NO: 2657537 - RNA, 19 nt, Artificial Sequence
  Description of Artificial Sequence: Synthetic oligonucleotide
cgcgcuggcacugggugca

SEQ ID NO: 2657538 - RNA, 19 nt, Artificial Sequence
  Description of Artificial Sequence: Synthetic oligonucleotide
ccaaacggagacgcugagu

SEQ ID NO: 2657539 - RNA, 19 nt, Artificial Sequence
  Description of Artificial Sequence: Synthetic oligonucleotide
gccaagccaaacagaguuu

SEQ ID NO: 2657540 - RNA, 19 nt, Artificial Sequence
  Description of Artificial Sequence: Synthetic oligonucleotide
ccuccacaaguagacugcu

SEQ ID NO: 2657541 - RNA, 19 nt, Artificial Sequence
  Description of Artificial Sequence: Synthetic oligonucleotide
cggagacgcugagugaucu

SEQ ID NO: 2657542 - RNA, 19 nt, Artificial Sequence
  Description of Artificial Sequence: Synthetic oligonucleotide
ccggugcuuccuaucccgu

SEQ ID NO: 2657543 - RNA, 19 nt, Artificial Sequence
  Description of Artificial Sequence: Synthetic oligonucleotide
cguucagcugaugcagagu

SEQ ID NO: 2657544 - RNA, 19 nt, Artificial Sequence
  Description of Artificial Sequence: Synthetic oligonucleotide
ccuaucccguucagcugau

SEQ ID NO: 2657545 - RNA, 19 nt, Artificial Sequence
  Description of Artificial Sequence: Synthetic oligonucleotide
cggugcuuccuaucccguu

SEQ ID NO: 2657546 - RNA, 19 nt, Artificial Sequence
  Description of Artificial Sequence: Synthetic oligonucleotide
aacugaaggucacacaacc

SEQ ID NO: 2657547 - RNA, 19 nt, Artificial Sequence
  Description of Artificial Sequence: Synthetic oligonucleotide
aguacuucuguccacaucg

SEQ ID NO: 2657548 - RNA, 19 nt, Artificial Sequence
  Description of Artificial Sequence: Synthetic oligonucleotide
ugaggaucaggccagaugc

SEQ ID NO: 2657549 - RNA, 19 nt, Artificial Sequence
  Description of Artificial Sequence: Synthetic oligonucleotide
acuggaauuggguuggacc

SEQ ID NO: 2657550 - RNA, 19 nt, Artificial Sequence
  Description of Artificial Sequence: Synthetic oligonucleotide
ugugaugaggaucaggcca

SEQ ID NO: 2657551 - RNA, 19 nt, Artificial Sequence
  Description of Artificial Sequence: Synthetic oligonucleotide
ugaccaagcaaacuguucc

SEQ ID NO: 2657552 - RNA, 19 nt, Artificial Sequence
  Description of Artificial Sequence: Synthetic oligonucleotide
aguaauuucucgucagggg

SEQ ID NO: 2657553 - RNA, 19 nt, Artificial Sequence
  Description of Artificial Sequence: Synthetic oligonucleotide
uccgguacaacucugcagc

SEQ ID NO: 2657554 - RNA, 19 nt, Artificial Sequence
  Description of Artificial Sequence: Synthetic oligonucleotide
caggauaguggccagaagg

SEQ ID NO: 2657555 - RNA, 19 nt, Artificial Sequence
  Description of Artificial Sequence: Synthetic oligonucleotide
gaugagcacaccugcagcg

SEQ ID NO: 2657556 - RNA, 19 nt, Artificial Sequence
  Description of Artificial Sequence: Synthetic oligonucleotide
guaauuucucgucaggggc

SEQ ID NO: 2657557 - RNA, 19 nt, Artificial Sequence
  Description of Artificial Sequence: Synthetic oligonucleotide
caaacuguucccaggauag

SEQ ID NO: 2657558 - RNA, 19 nt, Artificial Sequence
  Description of Artificial Sequence: Synthetic oligonucleotide
acaguagucaaguacuucu

SEQ ID NO: 2657559 - RNA, 19 nt, Artificial Sequence
  Description of Artificial Sequence: Synthetic oligonucleotide
agaguaggcaccaaaguac

SEQ ID NO: 2657560 - RNA, 19 nt, Artificial Sequence
  Description of Artificial Sequence: Synthetic oligonucleotide
ucuguuacuggaauugggu

SEQ ID NO: 2657561 - RNA, 19 nt, Artificial Sequence
  Description of Artificial Sequence: Synthetic oligonucleotide
gauagaguaggcaccaaag

SEQ ID NO: 2657562 - RNA, 19 nt, Artificial Sequence
  Description of Artificial Sequence: Synthetic oligonucleotide
agaugagcacaccugcagc

SEQ ID NO: 2657563 - RNA, 19 nt, Artificial Sequence
  Description of Artificial Sequence: Synthetic oligonucleotide
uaguaauuucucgucaggg

SEQ ID NO: 2657564 - RNA, 19 nt, Artificial Sequence
  Description of Artificial Sequence: Synthetic oligonucleotide
auaguaauuucucgucagg

SEQ ID NO: 2657565 - RNA, 19 nt, Artificial Sequence
  Description of Artificial Sequence: Synthetic oligonucleotide
aaguaccacugugugaagc

SEQ ID NO: 2657566 - RNA, 19 nt, Artificial Sequence
  Description of Artificial Sequence: Synthetic oligonucleotide
gaagguagaucacacuggc

SEQ ID NO: 2657567 - RNA, 19 nt, Artificial Sequence
  Description of Artificial Sequence: Synthetic oligonucleotide
aacagcuucaccacaguag

SEQ ID NO: 2657568 - RNA, 19 nt, Artificial Sequence
  Description of Artificial Sequence: Synthetic oligonucleotide
uaaagcaggagcugcagac

SEQ ID NO: 2657569 - RNA, 19 nt, Artificial Sequence
  Description of Artificial Sequence: Synthetic oligonucleotide
auggcgaggacccugaaca

SEQ ID NO: 2657570 - RNA, 19 nt, Artificial Sequence
  Description of Artificial Sequence: Synthetic oligonucleotide
aauuucucgucaggggccc

SEQ ID NO: 2657571 - RNA, 19 nt, Artificial Sequence
  Description of Artificial Sequence: Synthetic oligonucleotide
aggagcugcagacagcaac

SEQ ID NO: 2657572 - RNA, 19 nt, Artificial Sequence
  Description of Artificial Sequence: Synthetic oligonucleotide
uaauuucucgucaggggcc

SEQ ID NO: 2657573 - RNA, 19 nt, Artificial Sequence
  Description of Artificial Sequence: Synthetic oligonucleotide
cauaguaauuucucgucag

SEQ ID NO: 2657574 - RNA, 19 nt, Artificial Sequence
  Description of Artificial Sequence: Synthetic oligonucleotide
ucaucuguuacuggaauug

SEQ ID NO: 2657575 - RNA, 19 nt, Artificial Sequence
  Description of Artificial Sequence: Synthetic oligonucleotide
ugaaggucacacaaccuca

SEQ ID NO: 2657576 - RNA, 19 nt, Artificial Sequence
  Description of Artificial Sequence: Synthetic oligonucleotide
ucgucaggggcccaaacag

SEQ ID NO: 2657577 - RNA, 19 nt, Artificial Sequence
  Description of Artificial Sequence: Synthetic oligonucleotide
gacagaugagcacaccugc

SEQ ID NO: 2657578 - RNA, 19 nt, Artificial Sequence
  Description of Artificial Sequence: Synthetic oligonucleotide
agguagaucacacuggcaa

SEQ ID NO: 2657579 - RNA, 19 nt, Artificial Sequence
  Description of Artificial Sequence: Synthetic oligonucleotide
gacauaguaauuucucguc

SEQ ID NO: 2657580 - RNA, 19 nt, Artificial Sequence
  Description of Artificial Sequence: Synthetic oligonucleotide
aagcaaacuguucccagga

SEQ ID NO: 2657581 - RNA, 19 nt, Artificial Sequence
  Description of Artificial Sequence: Synthetic oligonucleotide
aaguacuucuguccacauc

SEQ ID NO: 2657582 - RNA, 19 nt, Artificial Sequence
  Description of Artificial Sequence: Synthetic oligonucleotide
caagaaguggaggacagcc

SEQ ID NO: 2657583 - RNA, 19 nt, Artificial Sequence
  Description of Artificial Sequence: Synthetic oligonucleotide
ucauuggcccacauggccc

SEQ ID NO: 2657584 - RNA, 19 nt, Artificial Sequence
  Description of Artificial Sequence: Synthetic oligonucleotide
accaaaguaccacugugug

SEQ ID NO: 2657585 - RNA, 19 nt, Artificial Sequence
  Description of Artificial Sequence: Synthetic oligonucleotide
aagaaguggaggacagccc

SEQ ID NO: 2657586 - RNA, 19 nt, Artificial Sequence
  Description of Artificial Sequence: Synthetic oligonucleotide
uccacaucgcuccauggug

SEQ ID NO: 2657587 - RNA, 19 nt, Artificial Sequence
  Description of Artificial Sequence: Synthetic oligonucleotide
acauaguaauuucucguca

SEQ ID NO: 2657588 - RNA, 19 nt, Artificial Sequence
  Description of Artificial Sequence: Synthetic oligonucleotide
cuggcaaugaccaagcaaa

SEQ ID NO: 2657589 - RNA, 19 nt, Artificial Sequence
  Description of Artificial Sequence: Synthetic oligonucleotide
gaucacacuggcaaugacc

SEQ ID NO: 2657590 - RNA, 19 nt, Artificial Sequence
  Description of Artificial Sequence: Synthetic oligonucleotide
auagaguaggcaccaaagu

SEQ ID NO: 2657591 - RNA, 19 nt, Artificial Sequence
  Description of Artificial Sequence: Synthetic oligonucleotide
acagcuucaccacaguagu

SEQ ID NO: 2657592 - RNA, 19 nt, Artificial Sequence
  Description of Artificial Sequence: Synthetic oligonucleotide
caagcaaacuguucccagg

SEQ ID NO: 2657593 - RNA, 19 nt, Artificial Sequence
  Description of Artificial Sequence: Synthetic oligonucleotide
agucaaguacuucugucca

SEQ ID NO: 2657594 - RNA, 19 nt, Artificial Sequence
  Description of Artificial Sequence: Synthetic oligonucleotide
auugguagguggcugcuug

SEQ ID NO: 2657595 - RNA, 19 nt, Artificial Sequence
  Description of Artificial Sequence: Synthetic oligonucleotide
aacuguucccaggauagug

SEQ ID NO: 2657596 - RNA, 19 nt, Artificial Sequence
  Description of Artificial Sequence: Synthetic oligonucleotide
ugugaagcgcccagcagug

SEQ ID NO: 2657597 - RNA, 19 nt, Artificial Sequence
  Description of Artificial Sequence: Synthetic oligonucleotide
uuaaagcaggagcugcaga

SEQ ID NO: 2657598 - RNA, 19 nt, Artificial Sequence
  Description of Artificial Sequence: Synthetic oligonucleotide
aggucacacaaccucaucu

SEQ ID NO: 2657599 - RNA, 19 nt, Artificial Sequence
  Description of Artificial Sequence: Synthetic oligonucleotide
aaacuuaaagcaggagcug

SEQ ID NO: 2657600 - RNA, 19 nt, Artificial Sequence
  Description of Artificial Sequence: Synthetic oligonucleotide
gaaggaagccugcaggcac

SEQ ID NO: 2657601 - RNA, 19 nt, Artificial Sequence
  Description of Artificial Sequence: Synthetic oligonucleotide
aaggucacacaaccucauc

SEQ ID NO: 2657602 - RNA, 19 nt, Artificial Sequence
  Description of Artificial Sequence: Synthetic oligonucleotide
cugaaggucacacaaccuc

SEQ ID NO: 2657603 - RNA, 19 nt, Artificial Sequence
  Description of Artificial Sequence: Synthetic oligonucleotide
ugaacacgcagccguuccg

SEQ ID NO: 2657604 - RNA, 19 nt, Artificial Sequence
  Description of Artificial Sequence: Synthetic oligonucleotide
cucauuggcccacauggcc

SEQ ID NO: 2657605 - RNA, 19 nt, Artificial Sequence
  Description of Artificial Sequence: Synthetic oligonucleotide
ugaagcgcccagcaguggc

SEQ ID NO: 2657606 - RNA, 19 nt, Artificial Sequence
  Description of Artificial Sequence: Synthetic oligonucleotide
ucaaguacuucuguccaca

SEQ ID NO: 2657607 - RNA, 19 nt, Artificial Sequence
  Description of Artificial Sequence: Synthetic oligonucleotide
aguagucaaguacuucugu

SEQ ID NO: 2657608 - RNA, 19 nt, Artificial Sequence
  Description of Artificial Sequence: Synthetic oligonucleotide
gcugccagaagguagauca

SEQ ID NO: 2657609 - RNA, 19 nt, Artificial Sequence
  Description of Artificial Sequence: Synthetic oligonucleotide
cacacuuggcuucuugcgg

SEQ ID NO: 2657610 - RNA, 19 nt, Artificial Sequence
  Description of Artificial Sequence: Synthetic oligonucleotide
cacucgaucugccccaugg

SEQ ID NO: 2657611 - RNA, 19 nt, Artificial Sequence
  Description of Artificial Sequence: Synthetic oligonucleotide
acacaaccucaucuguuac

SEQ ID NO: 2657612 - RNA, 19 nt, Artificial Sequence
  Description of Artificial Sequence: Synthetic oligonucleotide
acaaccucaucuguuacug

SEQ ID NO: 2657613 - RNA, 19 nt, Artificial Sequence
  Description of Artificial Sequence: Synthetic oligonucleotide
ugugugaagcgcccagcag

SEQ ID NO: 2657614 - RNA, 19 nt, Artificial Sequence
  Description of Artificial Sequence: Synthetic oligonucleotide
gauggcugccagaagguag

SEQ ID NO: 2657615 - RNA, 19 nt, Artificial Sequence
  Description of Artificial Sequence: Synthetic oligonucleotide
caaaguaccacugugugaa

SEQ ID NO: 2657616 - RNA, 19 nt, Artificial Sequence
  Description of Artificial Sequence: Synthetic oligonucleotide
aucgcuccaugguggagcc

SEQ ID NO: 2657617 - RNA, 19 nt, Artificial Sequence
  Description of Artificial Sequence: Synthetic oligonucleotide
acuucuguccacaucgcuc

SEQ ID NO: 2657618 - RNA, 19 nt, Artificial Sequence
  Description of Artificial Sequence: Synthetic oligonucleotide
aucacacuggcaaugacca

SEQ ID NO: 2657619 - RNA, 19 nt, Artificial Sequence
  Description of Artificial Sequence: Synthetic oligonucleotide
ucgaucugccccauggcga

SEQ ID NO: 2657620 - RNA, 19 nt, Artificial Sequence
  Description of Artificial Sequence: Synthetic oligonucleotide
accacaguagucaaguacu

SEQ ID NO: 2657621 - RNA, 19 nt, Artificial Sequence
  Description of Artificial Sequence: Synthetic oligonucleotide
uuccgguacaacucugcag

SEQ ID NO: 2657622 - RNA, 19 nt, Artificial Sequence
  Description of Artificial Sequence: Synthetic oligonucleotide
acucgaucugccccauggc

SEQ ID NO: 2657623 - RNA, 19 nt, Artificial Sequence
  Description of Artificial Sequence: Synthetic oligonucleotide
gaccaagcaaacuguuccc

SEQ ID NO: 2657624 - RNA, 19 nt, Artificial Sequence
  Description of Artificial Sequence: Synthetic oligonucleotide
aaaguaccacugugugaag

SEQ ID NO: 2657625 - RNA, 19 nt, Artificial Sequence
  Description of Artificial Sequence: Synthetic oligonucleotide
uaccacugugugaagcgcc

SEQ ID NO: 2657626 - RNA, 19 nt, Artificial Sequence
  Description of Artificial Sequence: Synthetic oligonucleotide
caccacaguagucaaguac

SEQ ID NO: 2657627 - RNA, 19 nt, Artificial Sequence
  Description of Artificial Sequence: Synthetic oligonucleotide
cacacuggcaaugaccaag

SEQ ID NO: 2657628 - RNA, 19 nt, Artificial Sequence
  Description of Artificial Sequence: Synthetic oligonucleotide
gaguaggcaccaaaguacc

SEQ ID NO: 2657629 - RNA, 19 nt, Artificial Sequence
  Description of Artificial Sequence: Synthetic oligonucleotide
acuggcaaugaccaagcaa

SEQ ID NO: 2657630 - RNA, 19 nt, Artificial Sequence
  Description of Artificial Sequence: Synthetic oligonucleotide
ugauggugccuccaaccug

SEQ ID NO: 2657631 - RNA, 19 nt, Artificial Sequence
  Description of Artificial Sequence: Synthetic oligonucleotide
uguccacaucgcuccaugg

SEQ ID NO: 2657632 - RNA, 19 nt, Artificial Sequence
  Description of Artificial Sequence: Synthetic oligonucleotide
agcuucaccacaguaguca

SEQ ID NO: 2657633 - RNA, 19 nt, Artificial Sequence
  Description of Artificial Sequence: Synthetic oligonucleotide
ccagcaguggccacgaugc

SEQ ID NO: 2657634 - RNA, 19 nt, Artificial Sequence
  Description of Artificial Sequence: Synthetic oligonucleotide
cagacagcaacugaagguc

SEQ ID NO: 2657635 - RNA, 19 nt, Artificial Sequence
  Description of Artificial Sequence: Synthetic oligonucleotide
gaucaggccagaugccagc

SEQ ID NO: 2657636 - RNA, 19 nt, Artificial Sequence
  Description of Artificial Sequence: Synthetic oligonucleotide
acccugaacacgcagccgu

SEQ ID NO: 2657637 - RNA, 19 nt, Artificial Sequence
  Description of Artificial Sequence: Synthetic oligonucleotide
guagaucacacuggcaaug

SEQ ID NO: 2657638 - RNA, 19 nt, Artificial Sequence
  Description of Artificial Sequence: Synthetic oligonucleotide
aaagcaggagcugcagaca

SEQ ID NO: 2657639 - RNA, 19 nt, Artificial Sequence
  Description of Artificial Sequence: Synthetic oligonucleotide
caucuguuacuggaauugg

SEQ ID NO: 2657640 - RNA, 19 nt, Artificial Sequence
  Description of Artificial Sequence: Synthetic oligonucleotide
uguucccaggauaguggcc

SEQ ID NO: 2657641 - RNA, 19 nt, Artificial Sequence
  Description of Artificial Sequence: Synthetic oligonucleotide
uacuucuguccacaucgcu

SEQ ID NO: 2657642 - RNA, 19 nt, Artificial Sequence
  Description of Artificial Sequence: Synthetic oligonucleotide
cagcgauagaguaggcacc

SEQ ID NO: 2657643 - RNA, 19 nt, Artificial Sequence
  Description of Artificial Sequence: Synthetic oligonucleotide
caguagucaaguacuucug

SEQ ID NO: 2657644 - RNA, 19 nt, Artificial Sequence
  Description of Artificial Sequence: Synthetic oligonucleotide
cugugaugaggaucaggcc

SEQ ID NO: 2657645 - RNA, 19 nt, Artificial Sequence
  Description of Artificial Sequence: Synthetic oligonucleotide
augaccaagcaaacuguuc

SEQ ID NO: 2657646 - RNA, 19 nt, Artificial Sequence
  Description of Artificial Sequence: Synthetic oligonucleotide
ucacacaaccucaucuguu

SEQ ID NO: 2657647 - RNA, 19 nt, Artificial Sequence
  Description of Artificial Sequence: Synthetic oligonucleotide
acagcccggacauaguaau

SEQ ID NO: 2657648 - RNA, 19 nt, Artificial Sequence
  Description of Artificial Sequence: Synthetic oligonucleotide
gcaacugaaggucacacaa

SEQ ID NO: 2657649 - RNA, 19 nt, Artificial Sequence
  Description of Artificial Sequence: Synthetic oligonucleotide
cugcagacagcaacugaag

SEQ ID NO: 2657650 - RNA, 19 nt, Artificial Sequence
  Description of Artificial Sequence: Synthetic oligonucleotide
guaggcaccaaaguaccac

SEQ ID NO: 2657651 - RNA, 19 nt, Artificial Sequence
  Description of Artificial Sequence: Synthetic oligonucleotide
aaugaccaagcaaacuguu

SEQ ID NO: 2657652 - RNA, 19 nt, Artificial Sequence
  Description of Artificial Sequence: Synthetic oligonucleotide
accacugugugaagcgccc

SEQ ID NO: 2657653 - RNA, 19 nt, Artificial Sequence
  Description of Artificial Sequence: Synthetic oligonucleotide
caucgcuccaugguggagc

SEQ ID NO: 2657654 - RNA, 19 nt, Artificial Sequence
  Description of Artificial Sequence: Synthetic oligonucleotide
gaggacccugaacacgcag

SEQ ID NO: 2657655 - RNA, 19 nt, Artificial Sequence
  Description of Artificial Sequence: Synthetic oligonucleotide
agacagaugagcacaccug

SEQ ID NO: 2657656 - RNA, 19 nt, Artificial Sequence
  Description of Artificial Sequence: Synthetic oligonucleotide
ugcagcgauagaguaggca

SEQ ID NO: 2657657 - RNA, 19 nt, Artificial Sequence
  Description of Artificial Sequence: Synthetic oligonucleotide
ugcgggccuccacuggugg

SEQ ID NO: 2657658 - RNA, 19 nt, Artificial Sequence
  Description of Artificial Sequence: Synthetic oligonucleotide
aggauaguggccagaagga

SEQ ID NO: 2657659 - RNA, 19 nt, Artificial Sequence
  Description of Artificial Sequence: Synthetic oligonucleotide
uggcaaugaccaagcaaac

SEQ ID NO: 2657660 - RNA, 19 nt, Artificial Sequence
  Description of Artificial Sequence: Synthetic oligonucleotide
ccugcagcgauagaguagg

SEQ ID NO: 2657661 - RNA, 19 nt, Artificial Sequence
  Description of Artificial Sequence: Synthetic oligonucleotide
caaccucaucuguuacugg

SEQ ID NO: 2657662 - RNA, 19 nt, Artificial Sequence
  Description of Artificial Sequence: Synthetic oligonucleotide
guggccagaaggaagccug

SEQ ID NO: 2657663 - RNA, 19 nt, Artificial Sequence
  Description of Artificial Sequence: Synthetic oligonucleotide
guucccaggauaguggcca

SEQ ID NO: 2657664 - RNA, 19 nt, Artificial Sequence
  Description of Artificial Sequence: Synthetic oligonucleotide
cuucaccacaguagucaag

SEQ ID NO: 2657665 - RNA, 19 nt, Artificial Sequence
  Description of Artificial Sequence: Synthetic oligonucleotide
cuggaauuggguuggaccu

SEQ ID NO: 2657666 - RNA, 19 nt, Artificial Sequence
  Description of Artificial Sequence: Synthetic oligonucleotide
agcacaccugcagcgauag

SEQ ID NO: 2657667 - RNA, 19 nt, Artificial Sequence
  Description of Artificial Sequence: Synthetic oligonucleotide
agcagacagaugagcacac

SEQ ID NO: 2657668 - RNA, 19 nt, Artificial Sequence
  Description of Artificial Sequence: Synthetic oligonucleotide
aacacgcagccguuccggu

SEQ ID NO: 2657669 - RNA, 19 nt, Artificial Sequence
  Description of Artificial Sequence: Synthetic oligonucleotide
uucuugcgggccuccacug

SEQ ID NO: 2657670 - RNA, 19 nt, Artificial Sequence
  Description of Artificial Sequence: Synthetic oligonucleotide
cacgcagccguuccgguac

SEQ ID NO: 2657671 - RNA, 19 nt, Artificial Sequence
  Description of Artificial Sequence: Synthetic oligonucleotide
uggugccuccaaccugugg

SEQ ID NO: 2657672 - RNA, 19 nt, Artificial Sequence
  Description of Artificial Sequence: Synthetic oligonucleotide
ccggauggcugccagaagg

SEQ ID NO: 2657673 - RNA, 19 nt, Artificial Sequence
  Description of Artificial Sequence: Synthetic oligonucleotide
ugagcacaccugcagcgau

SEQ ID NO: 2657674 - RNA, 19 nt, Artificial Sequence
  Description of Artificial Sequence: Synthetic oligonucleotide
agcgauagaguaggcacca

SEQ ID NO: 2657675 - RNA, 19 nt, Artificial Sequence
  Description of Artificial Sequence: Synthetic oligonucleotide
ggaauuggguuggaccugg

SEQ ID NO: 2657676 - RNA, 19 nt, Artificial Sequence
  Description of Artificial Sequence: Synthetic oligonucleotide
acuuaaagcaggagcugca

SEQ ID NO: 2657677 - RNA, 19 nt, Artificial Sequence
  Description of Artificial Sequence: Synthetic oligonucleotide
aucaggccagaugccagcg

SEQ ID NO: 2657678 - RNA, 19 nt, Artificial Sequence
  Description of Artificial Sequence: Synthetic oligonucleotide
acuuggcuucuugcgggcc

SEQ ID NO: 2657679 - RNA, 19 nt, Artificial Sequence
  Description of Artificial Sequence: Synthetic oligonucleotide
uggaauuggguuggaccug

SEQ ID NO: 2657680 - RNA, 19 nt, Artificial Sequence
  Description of Artificial Sequence: Synthetic oligonucleotide
gucaaguacuucuguccac

SEQ ID NO: 2657681 - RNA, 19 nt, Artificial Sequence
  Description of Artificial Sequence: Synthetic oligonucleotide
aggcacugacagcaagaag

SEQ ID NO: 2657682 - RNA, 19 nt, Artificial Sequence
  Description of Artificial Sequence: Synthetic oligonucleotide
agccguuccgguacaacuc

SEQ ID NO: 2657683 - RNA, 19 nt, Artificial Sequence
  Description of Artificial Sequence: Synthetic oligonucleotide
gcaccaaaguaccacugug

SEQ ID NO: 2657684 - RNA, 19 nt, Artificial Sequence
  Description of Artificial Sequence: Synthetic oligonucleotide
aaguggaggacagcccgga

SEQ ID NO: 2657685 - RNA, 19 nt, Artificial Sequence
  Description of Artificial Sequence: Synthetic oligonucleotide
cggacauaguaauuucucg

SEQ ID NO: 2657686 - RNA, 19 nt, Artificial Sequence
  Description of Artificial Sequence: Synthetic oligonucleotide
aaacuguucccaggauagu

SEQ ID NO: 2657687 - RNA, 19 nt, Artificial Sequence
  Description of Artificial Sequence: Synthetic oligonucleotide
gacagcaacugaaggucac

SEQ ID NO: 2657688 - RNA, 19 nt, Artificial Sequence
  Description of Artificial Sequence: Synthetic oligonucleotide
agaaggaagccugcaggca

SEQ ID NO: 2657689 - RNA, 19 nt, Artificial Sequence
  Description of Artificial Sequence: Synthetic oligonucleotide
ugcucaccccggauggcug

SEQ ID NO: 2657690 - RNA, 19 nt, Artificial Sequence
  Description of Artificial Sequence: Synthetic oligonucleotide
aagguagaucacacuggca

SEQ ID NO: 2657691 - RNA, 19 nt, Artificial Sequence
  Description of Artificial Sequence: Synthetic oligonucleotide
gauggugccuccaaccugu

SEQ ID NO: 2657692 - RNA, 19 nt, Artificial Sequence
  Description of Artificial Sequence: Synthetic oligonucleotide
aggaucaggccagaugcca

SEQ ID NO: 2657693 - RNA, 19 nt, Artificial Sequence
  Description of Artificial Sequence: Synthetic oligonucleotide
ggacauaguaauuucucgu

SEQ ID NO: 2657694 - RNA, 19 nt, Artificial Sequence
  Description of Artificial Sequence: Synthetic oligonucleotide
agaugccagcgccugcuca

SEQ ID NO: 2657695 - RNA, 19 nt, Artificial Sequence
  Description of Artificial Sequence: Synthetic oligonucleotide
uacaacucugcagcucacu

SEQ ID NO: 2657696 - RNA, 19 nt, Artificial Sequence
  Description of Artificial Sequence: Synthetic oligonucleotide
cauggcgaggacccugaac

SEQ ID NO: 2657697 - RNA, 19 nt, Artificial Sequence
  Description of Artificial Sequence: Synthetic oligonucleotide
gugugaagcgcccagcagu

SEQ ID NO: 2657698 - RNA, 19 nt, Artificial Sequence
  Description of Artificial Sequence: Synthetic oligonucleotide
cacacaaccucaucuguua

SEQ ID NO: 2657699 - RNA, 19 nt, Artificial Sequence
  Description of Artificial Sequence: Synthetic oligonucleotide
caggggcccaaacagcuuc

SEQ ID NO: 2657700 - RNA, 19 nt, Artificial Sequence
  Description of Artificial Sequence: Synthetic oligonucleotide
ucucgucaggggcccaaac

SEQ ID NO: 2657701 - RNA, 19 nt, Artificial Sequence
  Description of Artificial Sequence: Synthetic oligonucleotide
caaugaccaagcaaacugu

SEQ ID NO: 2657702 - RNA, 19 nt, Artificial Sequence
  Description of Artificial Sequence: Synthetic oligonucleotide
cagcaacugaaggucacac

SEQ ID NO: 2657703 - RNA, 19 nt, Artificial Sequence
  Description of Artificial Sequence: Synthetic oligonucleotide
cuguccacaucgcuccaug

SEQ ID NO: 2657704 - RNA, 19 nt, Artificial Sequence
  Description of Artificial Sequence: Synthetic oligonucleotide
ugccuccaaccuguggccg

SEQ ID NO: 2657705 - RNA, 19 nt, Artificial Sequence
  Description of Artificial Sequence: Synthetic oligonucleotide
ccacaucgcuccauggugg

SEQ ID NO: 2657706 - RNA, 19 nt, Artificial Sequence
  Description of Artificial Sequence: Synthetic oligonucleotide
acugaaggucacacaaccu

SEQ ID NO: 2657707 - RNA, 19 nt, Artificial Sequence
  Description of Artificial Sequence: Synthetic oligonucleotide
gaagcgcccagcaguggcc

SEQ ID NO: 2657708 - RNA, 19 nt, Artificial Sequence
  Description of Artificial Sequence: Synthetic oligonucleotide
gacccugaacacgcagccg

SEQ ID NO: 2657709 - RNA, 19 nt, Artificial Sequence
  Description of Artificial Sequence: Synthetic oligonucleotide
agcaggagcugcagacagc

SEQ ID NO: 2657710 - RNA, 19 nt, Artificial Sequence
  Description of Artificial Sequence: Synthetic oligonucleotide
cacaguagucaaguacuuc

SEQ ID NO: 2657711 - RNA, 19 nt, Artificial Sequence
  Description of Artificial Sequence: Synthetic oligonucleotide
gggauugguagguggcugc

SEQ ID NO: 2657712 - RNA, 19 nt, Artificial Sequence
  Description of Artificial Sequence: Synthetic oligonucleotide
guaccacugugugaagcgc

SEQ ID NO: 2657713 - RNA, 19 nt, Artificial Sequence
  Description of Artificial Sequence: Synthetic oligonucleotide
uagguggcugcuugauggu

SEQ ID NO: 2657714 - RNA, 19 nt, Artificial Sequence
  Description of Artificial Sequence: Synthetic oligonucleotide
agcaaacuguucccaggau

SEQ ID NO: 2657715 - RNA, 19 nt, Artificial Sequence
  Description of Artificial Sequence: Synthetic oligonucleotide
cacuuggcuucuugcgggc

SEQ ID NO: 2657716 - RNA, 19 nt, Artificial Sequence
  Description of Artificial Sequence: Synthetic oligonucleotide
gaggaucaggccagaugcc

SEQ ID NO: 2657717 - RNA, 19 nt, Artificial Sequence
  Description of Artificial Sequence: Synthetic oligonucleotide
ccaagcaaacuguucccag

SEQ ID NO: 2657718 - RNA, 19 nt, Artificial Sequence
  Description of Artificial Sequence: Synthetic oligonucleotide
accugcagcgauagaguag

SEQ ID NO: 2657719 - RNA, 19 nt, Artificial Sequence
  Description of Artificial Sequence: Synthetic oligonucleotide
uccaugguggagcccuuuu

SEQ ID NO: 2657720 - RNA, 19 nt, Artificial Sequence
  Description of Artificial Sequence: Synthetic oligonucleotide
ggggccguccagcugaggc

SEQ ID NO: 2657721 - RNA, 19 nt, Artificial Sequence
  Description of Artificial Sequence: Synthetic oligonucleotide
gccagaaggaagccugcag

SEQ ID NO: 2657722 - RNA, 19 nt, Artificial Sequence
  Description of Artificial Sequence: Synthetic oligonucleotide
ccggacauaguaauuucuc

SEQ ID NO: 2657723 - RNA, 19 nt, Artificial Sequence
  Description of Artificial Sequence: Synthetic oligonucleotide
cucgucaggggcccaaaca

SEQ ID NO: 2657724 - RNA, 19 nt, Artificial Sequence
  Description of Artificial Sequence: Synthetic oligonucleotide
acaccugcagcgauagagu

SEQ ID NO: 2657725 - RNA, 19 nt, Artificial Sequence
  Description of Artificial Sequence: Synthetic oligonucleotide
uacuggaauuggguuggac

SEQ ID NO: 2657726 - RNA, 19 nt, Artificial Sequence
  Description of Artificial Sequence: Synthetic oligonucleotide
agcccggacauaguaauuu

SEQ ID NO: 2657727 - RNA, 19 nt, Artificial Sequence
  Description of Artificial Sequence: Synthetic oligonucleotide
uguggccgcuccuuggguu

SEQ ID NO: 2657728 - RNA, 19 nt, Artificial Sequence
  Description of Artificial Sequence: Synthetic oligonucleotide
acagaugagcacaccugca

SEQ ID NO: 2657729 - RNA, 19 nt, Artificial Sequence
  Description of Artificial Sequence: Synthetic oligonucleotide
uugcgggccuccacuggug

SEQ ID NO: 2657730 - RNA, 19 nt, Artificial Sequence
  Description of Artificial Sequence: Synthetic oligonucleotide
agacagcaacugaagguca

SEQ ID NO: 2657731 - RNA, 19 nt, Artificial Sequence
  Description of Artificial Sequence: Synthetic oligonucleotide
gguagguggcugcuugaug

SEQ ID NO: 2657732 - RNA, 19 nt, Artificial Sequence
  Description of Artificial Sequence: Synthetic oligonucleotide
auggcccacucgaucugcc

SEQ ID NO: 2657733 - RNA, 19 nt, Artificial Sequence
  Description of Artificial Sequence: Synthetic oligonucleotide
uggcccacucgaucugccc

SEQ ID NO: 2657734 - RNA, 19 nt, Artificial Sequence
  Description of Artificial Sequence: Synthetic oligonucleotide
gguggcugcuugauggugc

SEQ ID NO: 2657735 - RNA, 19 nt, Artificial Sequence
  Description of Artificial Sequence: Synthetic oligonucleotide
cauuggcccacauggccca

SEQ ID NO: 2657736 - RNA, 19 nt, Artificial Sequence
  Description of Artificial Sequence: Synthetic oligonucleotide
uggcgaggacccugaacac

SEQ ID NO: 2657737 - RNA, 19 nt, Artificial Sequence
  Description of Artificial Sequence: Synthetic oligonucleotide
gagcugcagacagcaacug

SEQ ID NO: 2657738 - RNA, 19 nt, Artificial Sequence
  Description of Artificial Sequence: Synthetic oligonucleotide
guacuucuguccacaucgc

SEQ ID NO: 2657739 - RNA, 19 nt, Artificial Sequence
  Description of Artificial Sequence: Synthetic oligonucleotide
ucaccacaguagucaagua

SEQ ID NO: 2657740 - RNA, 19 nt, Artificial Sequence
  Description of Artificial Sequence: Synthetic oligonucleotide
gcaaacuguucccaggaua

SEQ ID NO: 2657741 - RNA, 19 nt, Artificial Sequence
  Description of Artificial Sequence: Synthetic oligonucleotide
ggcgaggacccugaacacg

SEQ ID NO: 2657742 - RNA, 19 nt, Artificial Sequence
  Description of Artificial Sequence: Synthetic oligonucleotide
gucacacaaccucaucugu

SEQ ID NO: 2657743 - RNA, 19 nt, Artificial Sequence
  Description of Artificial Sequence: Synthetic oligonucleotide
augagcacaccugcagcga

SEQ ID NO: 2657744 - RNA, 19 nt, Artificial Sequence
  Description of Artificial Sequence: Synthetic oligonucleotide
caccaaaguaccacugugu

SEQ ID NO: 2657745 - RNA, 19 nt, Artificial Sequence
  Description of Artificial Sequence: Synthetic oligonucleotide
ggcccacucgaucugcccc

SEQ ID NO: 2657746 - RNA, 19 nt, Artificial Sequence
  Description of Artificial Sequence: Synthetic oligonucleotide
aguaggcaccaaaguacca

SEQ ID NO: 2657747 - RNA, 19 nt, Artificial Sequence
  Description of Artificial Sequence: Synthetic oligonucleotide
cagcaagaaguggaggaca

SEQ ID NO: 2657748 - RNA, 19 nt, Artificial Sequence
  Description of Artificial Sequence: Synthetic oligonucleotide
gacagcccggacauaguaa

SEQ ID NO: 2657749 - RNA, 19 nt, Artificial Sequence
  Description of Artificial Sequence: Synthetic oligonucleotide
aggcaccaaaguaccacug

SEQ ID NO: 2657750 - RNA, 19 nt, Artificial Sequence
  Description of Artificial Sequence: Synthetic oligonucleotide
ucaggggcccaaacagcuu

SEQ ID NO: 2657751 - RNA, 19 nt, Artificial Sequence
  Description of Artificial Sequence: Synthetic oligonucleotide
gaugccagcgccugcucau

SEQ ID NO: 2657752 - RNA, 19 nt, Artificial Sequence
  Description of Artificial Sequence: Synthetic oligonucleotide
cagcuucaccacaguaguc

SEQ ID NO: 2657753 - RNA, 19 nt, Artificial Sequence
  Description of Artificial Sequence: Synthetic oligonucleotide
uuucucgucaggggcccaa

SEQ ID NO: 2657754 - RNA, 19 nt, Artificial Sequence
  Description of Artificial Sequence: Synthetic oligonucleotide
gaucugccccauggcgagg

SEQ ID NO: 2657755 - RNA, 19 nt, Artificial Sequence
  Description of Artificial Sequence: Synthetic oligonucleotide
ucuguccacaucgcuccau

SEQ ID NO: 2657756 - RNA, 19 nt, Artificial Sequence
  Description of Artificial Sequence: Synthetic oligonucleotide
gcuugauggugccuccaac

SEQ ID NO: 2657757 - RNA, 19 nt, Artificial Sequence
  Description of Artificial Sequence: Synthetic oligonucleotide
gcccacauggcccacucga

SEQ ID NO: 2657758 - RNA, 19 nt, Artificial Sequence
  Description of Artificial Sequence: Synthetic oligonucleotide
cuguuacuggaauuggguu

SEQ ID NO: 2657759 - RNA, 19 nt, Artificial Sequence
  Description of Artificial Sequence: Synthetic oligonucleotide
acaucgcuccaugguggag

SEQ ID NO: 2657760 - RNA, 19 nt, Artificial Sequence
  Description of Artificial Sequence: Synthetic oligonucleotide
agcgcccagcaguggccac

SEQ ID NO: 2657761 - RNA, 19 nt, Artificial Sequence
  Description of Artificial Sequence: Synthetic oligonucleotide
guccacaucgcuccauggu

SEQ ID NO: 2657762 - RNA, 19 nt, Artificial Sequence
  Description of Artificial Sequence: Synthetic oligonucleotide
ccuguggccgcuccuuggg

SEQ ID NO: 2657763 - RNA, 19 nt, Artificial Sequence
  Description of Artificial Sequence: Synthetic oligonucleotide
cacaaccucaucuguuacu

SEQ ID NO: 2657764 - RNA, 19 nt, Artificial Sequence
  Description of Artificial Sequence: Synthetic oligonucleotide
cacaucgcuccauggugga

SEQ ID NO: 2657765 - RNA, 19 nt, Artificial Sequence
  Description of Artificial Sequence: Synthetic oligonucleotide
ccaaaguaccacuguguga

SEQ ID NO: 2657766 - RNA, 19 nt, Artificial Sequence
  Description of Artificial Sequence: Synthetic oligonucleotide
cugccccauggcgaggacc

SEQ ID NO: 2657767 - RNA, 19 nt, Artificial Sequence
  Description of Artificial Sequence: Synthetic oligonucleotide
uuacuggaauuggguugga

SEQ ID NO: 2657768 - RNA, 19 nt, Artificial Sequence
  Description of Artificial Sequence: Synthetic oligonucleotide
gugaagcgcccagcagugg

SEQ ID NO: 2657769 - RNA, 19 nt, Artificial Sequence
  Description of Artificial Sequence: Synthetic oligonucleotide
auuggcccacauggcccac

SEQ ID NO: 2657770 - RNA, 19 nt, Artificial Sequence
  Description of Artificial Sequence: Synthetic oligonucleotide
cagccguuccgguacaacu

SEQ ID NO: 2657771 - RNA, 19 nt, Artificial Sequence
  Description of Artificial Sequence: Synthetic oligonucleotide
cguuccgguacaacucugc

SEQ ID NO: 2657772 - RNA, 19 nt, Artificial Sequence
  Description of Artificial Sequence: Synthetic oligonucleotide
aggaagccugcaggcacug

SEQ ID NO: 2657773 - RNA, 19 nt, Artificial Sequence
  Description of Artificial Sequence: Synthetic oligonucleotide
caccugcagcgauagagua

SEQ ID NO: 2657774 - RNA, 19 nt, Artificial Sequence
  Description of Artificial Sequence: Synthetic oligonucleotide
gguacuccagcagacagau

SEQ ID NO: 2657775 - RNA, 19 nt, Artificial Sequence
  Description of Artificial Sequence: Synthetic oligonucleotide
ucugccccauggcgaggac

SEQ ID NO: 2657776 - RNA, 19 nt, Artificial Sequence
  Description of Artificial Sequence: Synthetic oligonucleotide
cccagcaguggccacgaug

SEQ ID NO: 2657777 - RNA, 19 nt, Artificial Sequence
  Description of Artificial Sequence: Synthetic oligonucleotide
gggcccaaacagcuucacc

SEQ ID NO: 2657778 - RNA, 19 nt, Artificial Sequence
  Description of Artificial Sequence: Synthetic oligonucleotide
acacgcagccguuccggua

SEQ ID NO: 2657779 - RNA, 19 nt, Artificial Sequence
  Description of Artificial Sequence: Synthetic oligonucleotide
gaaggucacacaaccucau

SEQ ID NO: 2657780 - RNA, 19 nt, Artificial Sequence
  Description of Artificial Sequence: Synthetic oligonucleotide
caggcacugacagcaagaa

SEQ ID NO: 2657781 - RNA, 19 nt, Artificial Sequence
  Description of Artificial Sequence: Synthetic oligonucleotide
cucaucuguuacuggaauu

SEQ ID NO: 2657782 - RNA, 19 nt, Artificial Sequence
  Description of Artificial Sequence: Synthetic oligonucleotide
guacaacucugcagcucac

SEQ ID NO: 2657783 - RNA, 19 nt, Artificial Sequence
  Description of Artificial Sequence: Synthetic oligonucleotide
gguagaucacacuggcaau

SEQ ID NO: 2657784 - RNA, 19 nt, Artificial Sequence
  Description of Artificial Sequence: Synthetic oligonucleotide
caccccggauggcugccag

SEQ ID NO: 2657785 - RNA, 19 nt, Artificial Sequence
  Description of Artificial Sequence: Synthetic oligonucleotide
cgaucugccccauggcgag

SEQ ID NO: 2657786 - RNA, 19 nt, Artificial Sequence
  Description of Artificial Sequence: Synthetic oligonucleotide
ggauaguggccagaaggaa

SEQ ID NO: 2657787 - RNA, 19 nt, Artificial Sequence
  Description of Artificial Sequence: Synthetic oligonucleotide
ccacugcucaccccggaug

SEQ ID NO: 2657788 - RNA, 19 nt, Artificial Sequence
  Description of Artificial Sequence: Synthetic oligonucleotide
ggcaccaaaguaccacugu

SEQ ID NO: 2657789 - RNA, 19 nt, Artificial Sequence
  Description of Artificial Sequence: Synthetic oligonucleotide
cucaccccggauggcugcc

SEQ ID NO: 2657790 - RNA, 19 nt, Artificial Sequence
  Description of Artificial Sequence: Synthetic oligonucleotide
uucucgucaggggcccaaa

SEQ ID NO: 2657791 - RNA, 19 nt, Artificial Sequence
  Description of Artificial Sequence: Synthetic oligonucleotide
ggagcugcagacagcaacu

SEQ ID NO: 2657792 - RNA, 19 nt, Artificial Sequence
  Description of Artificial Sequence: Synthetic oligonucleotide
gcaggcacugacagcaaga

SEQ ID NO: 2657793 - RNA, 19 nt, Artificial Sequence
  Description of Artificial Sequence: Synthetic oligonucleotide
cuugcgggccuccacuggu

SEQ ID NO: 2657794 - RNA, 19 nt, Artificial Sequence
  Description of Artificial Sequence: Synthetic oligonucleotide
ccaggauaguggccagaag

SEQ ID NO: 2657795 - RNA, 19 nt, Artificial Sequence
  Description of Artificial Sequence: Synthetic oligonucleotide
cgucaggggcccaaacagc

SEQ ID NO: 2657796 - RNA, 19 nt, Artificial Sequence
  Description of Artificial Sequence: Synthetic oligonucleotide
ccacauggcccacucgauc

SEQ ID NO: 2657797 - RNA, 19 nt, Artificial Sequence
  Description of Artificial Sequence: Synthetic oligonucleotide
gcucaccccggauggcugc

SEQ ID NO: 2657798 - RNA, 19 nt, Artificial Sequence
  Description of Artificial Sequence: Synthetic oligonucleotide
cagaugccagcgccugcuc

SEQ ID NO: 2657799 - RNA, 19 nt, Artificial Sequence
  Description of Artificial Sequence: Synthetic oligonucleotide
cacuggcaaugaccaagca

SEQ ID NO: 2657800 - RNA, 19 nt, Artificial Sequence
  Description of Artificial Sequence: Synthetic oligonucleotide
ggcaaugaccaagcaaacu

SEQ ID NO: 2657801 - RNA, 19 nt, Artificial Sequence
  Description of Artificial Sequence: Synthetic oligonucleotide
uggccgcuccuuggguuug

SEQ ID NO: 2657802 - RNA, 19 nt, Artificial Sequence
  Description of Artificial Sequence: Synthetic oligonucleotide
ggcccacauggcccacucg

SEQ ID NO: 2657803 - RNA, 19 nt, Artificial Sequence
  Description of Artificial Sequence: Synthetic oligonucleotide
gaugaggaucaggccagau

SEQ ID NO: 2657804 - RNA, 19 nt, Artificial Sequence
  Description of Artificial Sequence: Synthetic oligonucleotide
auuucucgucaggggccca

SEQ ID NO: 2657805 - RNA, 19 nt, Artificial Sequence
  Description of Artificial Sequence: Synthetic oligonucleotide
aggacagcccggacauagu

SEQ ID NO: 2657806 - RNA, 19 nt, Artificial Sequence
  Description of Artificial Sequence: Synthetic oligonucleotide
aggggcccaaacagcuuca

SEQ ID NO: 2657807 - RNA, 19 nt, Artificial Sequence
  Description of Artificial Sequence: Synthetic oligonucleotide
ggguacuccagcagacaga

SEQ ID NO: 2657808 - RNA, 19 nt, Artificial Sequence
  Description of Artificial Sequence: Synthetic oligonucleotide
ggccagaugccagcgccug

SEQ ID NO: 2657809 - RNA, 19 nt, Artificial Sequence
  Description of Artificial Sequence: Synthetic oligonucleotide
cccaaacagcuucaccaca

SEQ ID NO: 2657810 - RNA, 19 nt, Artificial Sequence
  Description of Artificial Sequence: Synthetic oligonucleotide
acgcagccguuccgguaca

SEQ ID NO: 2657811 - RNA, 19 nt, Artificial Sequence
  Description of Artificial Sequence: Synthetic oligonucleotide
gagcacaccugcagcgaua

SEQ ID NO: 2657812 - RNA, 19 nt, Artificial Sequence
  Description of Artificial Sequence: Synthetic oligonucleotide
uggcugcuugauggugccu

SEQ ID NO: 2657813 - RNA, 19 nt, Artificial Sequence
  Description of Artificial Sequence: Synthetic oligonucleotide
gcccacucgaucugcccca

SEQ ID NO: 2657814 - RNA, 19 nt, Artificial Sequence
  Description of Artificial Sequence: Synthetic oligonucleotide
uggcugccagaagguagau

SEQ ID NO: 2657815 - RNA, 19 nt, Artificial Sequence
  Description of Artificial Sequence: Synthetic oligonucleotide
cgauagaguaggcaccaaa

SEQ ID NO: 2657816 - RNA, 19 nt, Artificial Sequence
  Description of Artificial Sequence: Synthetic oligonucleotide
cugcuugauggugccucca

SEQ ID NO: 2657817 - RNA, 19 nt, Artificial Sequence
  Description of Artificial Sequence: Synthetic oligonucleotide
gccguuccgguacaacucu

SEQ ID NO: 2657818 - RNA, 19 nt, Artificial Sequence
  Description of Artificial Sequence: Synthetic oligonucleotide
gccuccacugguggccggg

SEQ ID NO: 2657819 - RNA, 19 nt, Artificial Sequence
  Description of Artificial Sequence: Synthetic oligonucleotide
gauugguagguggcugcuu

SEQ ID NO: 2657820 - RNA, 19 nt, Artificial Sequence
  Description of Artificial Sequence: Synthetic oligonucleotide
gcgcccagcaguggccacg

SEQ ID NO: 2657821 - RNA, 19 nt, Artificial Sequence
  Description of Artificial Sequence: Synthetic oligonucleotide
gggguccacugcucacccc

SEQ ID NO: 2657822 - RNA, 19 nt, Artificial Sequence
  Description of Artificial Sequence: Synthetic oligonucleotide
ccugaacacgcagccguuc

SEQ ID NO: 2657823 - RNA, 19 nt, Artificial Sequence
  Description of Artificial Sequence: Synthetic oligonucleotide
auggugccuccaaccugug

SEQ ID NO: 2657824 - RNA, 19 nt, Artificial Sequence
  Description of Artificial Sequence: Synthetic oligonucleotide
ccguuccgguacaacucug

SEQ ID NO: 2657825 - RNA, 19 nt, Artificial Sequence
  Description of Artificial Sequence: Synthetic oligonucleotide
cccggacauaguaauuucu

SEQ ID NO: 2657826 - RNA, 19 nt, Artificial Sequence
  Description of Artificial Sequence: Synthetic oligonucleotide
ccgcuccuuggguuugggc

SEQ ID NO: 2657827 - RNA, 19 nt, Artificial Sequence
  Description of Artificial Sequence: Synthetic oligonucleotide
gcagccguuccgguacaac

SEQ ID NO: 2657828 - RNA, 19 nt, Artificial Sequence
  Description of Artificial Sequence: Synthetic oligonucleotide
gcgggccuccacugguggc

SEQ ID NO: 2657829 - RNA, 19 nt, Artificial Sequence
  Description of Artificial Sequence: Synthetic oligonucleotide
cccauggcgaggacccuga

SEQ ID NO: 2657830 - RNA, 19 nt, Artificial Sequence
  Description of Artificial Sequence: Synthetic oligonucleotide
ggcugccagaagguagauc

SEQ ID NO: 2657831 - RNA, 19 nt, Artificial Sequence
  Description of Artificial Sequence: Synthetic oligonucleotide
ggccuccacugguggccgg

SEQ ID NO: 2657832 - RNA, 19 nt, Artificial Sequence
  Description of Artificial Sequence: Synthetic oligonucleotide
guggccgcuccuuggguuu

SEQ ID NO: 2657833 - RNA, 19 nt, Artificial Sequence
  Description of Artificial Sequence: Synthetic oligonucleotide
cugcucaccccggauggcu

SEQ ID NO: 2657834 - RNA, 19 nt, Artificial Sequence
  Description of Artificial Sequence: Synthetic oligonucleotide
ggauugguagguggcugcu

SEQ ID NO: 2657835 - RNA, 19 nt, Artificial Sequence
  Description of Artificial Sequence: Synthetic oligonucleotide
augccagcgccugcucauu

SEQ ID NO: 2657836 - RNA, 19 nt, Artificial Sequence
  Description of Artificial Sequence: Synthetic oligonucleotide
cccaggauaguggccagaa

SEQ ID NO: 2657837 - RNA, 19 nt, Artificial Sequence
  Description of Artificial Sequence: Synthetic oligonucleotide
cgggccuccacugguggcc

SEQ ID NO: 2657838 - RNA, 19 nt, Artificial Sequence
  Description of Artificial Sequence: Synthetic oligonucleotide
gggccguccagcugaggcu

SEQ ID NO: 2657839 - RNA, 19 nt, Artificial Sequence
  Description of Artificial Sequence: Synthetic oligonucleotide
gccgcuccuuggguuuggg

SEQ ID NO: 2657840 - RNA, 19 nt, Artificial Sequence
  Description of Artificial Sequence: Synthetic oligonucleotide
uccuuggguuugggcucaa

SEQ ID NO: 2657841 - RNA, 19 nt, Artificial Sequence
  Description of Artificial Sequence: Synthetic oligonucleotide
ggccgcuccuuggguuugg

SEQ ID NO: 2657842 - RNA, 19 nt, Artificial Sequence
  Description of Artificial Sequence: Synthetic oligonucleotide
cuccaaccuguggccgcuc

SEQ ID NO: 2657843 - RNA, 19 nt, Artificial Sequence
  Description of Artificial Sequence: Synthetic oligonucleotide
ccccauggcgaggacccug

SEQ ID NO: 2657844 - RNA, 19 nt, Artificial Sequence
  Description of Artificial Sequence: Synthetic oligonucleotide
cuguggccgcuccuugggu

SEQ ID NO: 2657845 - RNA, 19 nt, Artificial Sequence
  Description of Artificial Sequence: Synthetic oligonucleotide
cgguacaacucugcagcuc

SEQ ID NO: 2657846 - RNA, 19 nt, Artificial Sequence
  Description of Artificial Sequence: Synthetic oligonucleotide
cagcccggacauaguaauu

SEQ ID NO: 2657847 - RNA, 19 nt, Artificial Sequence
  Description of Artificial Sequence: Synthetic oligonucleotide
ccacaguagucaaguacuu

SEQ ID NO: 2657848 - RNA, 19 nt, Artificial Sequence
  Description of Artificial Sequence: Synthetic oligonucleotide
gcgauagaguaggcaccaa

SEQ ID NO: 2657849 - RNA, 19 nt, Artificial Sequence
  Description of Artificial Sequence: Synthetic oligonucleotide
ccgguacaacucugcagcu

SEQ ID NO: 2657850 - RNA, 19 nt, Artificial Sequence
  Description of Artificial Sequence: Synthetic oligonucleotide
cggauggcugccagaaggu

SEQ ID NO: 2657851 - RNA, 19 nt, Artificial Sequence
  Description of Artificial Sequence: Synthetic oligonucleotide
ccacugugugaagcgccca

SEQ ID NO: 2657852 - RNA, 19 nt, Artificial Sequence
  Description of Artificial Sequence: Synthetic oligonucleotide
cgaggacccugaacacgca

SEQ ID NO: 2657853 - RNA, 19 nt, Artificial Sequence
  Description of Artificial Sequence: Synthetic oligonucleotide
cccacauggcccacucgau

SEQ ID NO: 2657854 - RNA, 19 nt, Artificial Sequence
  Description of Artificial Sequence: Synthetic oligonucleotide
cuccaugguggagcccuuu

SEQ ID NO: 2657855 - RNA, 19 nt, Artificial Sequence
  Description of Artificial Sequence: Synthetic oligonucleotide
ggaggacagcccggacaua

SEQ ID NO: 2657856 - RNA, 19 nt, Artificial Sequence
  Description of Artificial Sequence: Synthetic oligonucleotide
ccauggcgaggacccugaa

SEQ ID NO: 2657857 - RNA, 19 nt, Artificial Sequence
  Description of Artificial Sequence: Synthetic oligonucleotide
ccugcucauuggcccacau

SEQ ID NO: 2657858 - RNA, 19 nt, Artificial Sequence
  Description of Artificial Sequence: Synthetic oligonucleotide
cccugaacacgcagccguu

SEQ ID NO: 2657859 - RNA, 19 nt, Artificial Sequence
  Description of Artificial Sequence: Synthetic oligonucleotide
cgcccagcaguggccacga

SEQ ID NO: 2657860 - RNA, 19 nt, Artificial Sequence
  Description of Artificial Sequence: Synthetic oligonucleotide
gcuccaugguggagcccuu

SEQ ID NO: 2657861 - RNA, 19 nt, Artificial Sequence
  Description of Artificial Sequence: Synthetic oligonucleotide
cccacucgaucugccccau

SEQ ID NO: 2657862 - RNA, 19 nt, Artificial Sequence
  Description of Artificial Sequence: Synthetic oligonucleotide
gcccagcaguggccacgau

SEQ ID NO: 2657863 - RNA, 19 nt, Artificial Sequence
  Description of Artificial Sequence: Synthetic oligonucleotide
aagaccuuaacucagaagc

SEQ ID NO: 2657864 - RNA, 19 nt, Artificial Sequence
  Description of Artificial Sequence: Synthetic oligonucleotide
aacauuagaauacauaggg

SEQ ID NO: 2657865 - RNA, 19 nt, Artificial Sequence
  Description of Artificial Sequence: Synthetic oligonucleotide
aauuuugcuacagagaaac

SEQ ID NO: 2657866 - RNA, 19 nt, Artificial Sequence
  Description of Artificial Sequence: Synthetic oligonucleotide
uuuaacauccuauaaacag

SEQ ID NO: 2657867 - RNA, 19 nt, Artificial Sequence
  Description of Artificial Sequence: Synthetic oligonucleotide
ugaucuaaaugcaaaagcg

SEQ ID NO: 2657868 - RNA, 19 nt, Artificial Sequence
  Description of Artificial Sequence: Synthetic oligonucleotide
aaaagcguuagccacaauc

SEQ ID NO: 2657869 - RNA, 19 nt, Artificial Sequence
  Description of Artificial Sequence: Synthetic oligonucleotide
aaaugcaaaagcguuagcc

SEQ ID NO: 2657870 - RNA, 19 nt, Artificial Sequence
  Description of Artificial Sequence: Synthetic oligonucleotide
caaacauuagaauacauag

SEQ ID NO: 2657871 - RNA, 19 nt, Artificial Sequence
  Description of Artificial Sequence: Synthetic oligonucleotide
ucucaugugaucuaaaugc

SEQ ID NO: 2657872 - RNA, 19 nt, Artificial Sequence
  Description of Artificial Sequence: Synthetic oligonucleotide
aacucaacaacaaagcggc

SEQ ID NO: 2657873 - RNA, 19 nt, Artificial Sequence
  Description of Artificial Sequence: Synthetic oligonucleotide
aguuuugacauauuuaguc

SEQ ID NO: 2657874 - RNA, 19 nt, Artificial Sequence
  Description of Artificial Sequence: Synthetic oligonucleotide
uuaaauugcucucuuauga

SEQ ID NO: 2657875 - RNA, 19 nt, Artificial Sequence
  Description of Artificial Sequence: Synthetic oligonucleotide
ucuccuugcaguaagauga

SEQ ID NO: 2657876 - RNA, 19 nt, Artificial Sequence
  Description of Artificial Sequence: Synthetic oligonucleotide
augggaacaauuuugcuac

SEQ ID NO: 2657877 - RNA, 19 nt, Artificial Sequence
  Description of Artificial Sequence: Synthetic oligonucleotide
uccacaucuacuuuggagg

SEQ ID NO: 2657878 - RNA, 19 nt, Artificial Sequence
  Description of Artificial Sequence: Synthetic oligonucleotide
aaagcguuagccacaaucc

SEQ ID NO: 2657879 - RNA, 19 nt, Artificial Sequence
  Description of Artificial Sequence: Synthetic oligonucleotide
aucaguugcacuuucuggc

SEQ ID NO: 2657880 - RNA, 19 nt, Artificial Sequence
  Description of Artificial Sequence: Synthetic oligonucleotide
uacucuuugacuucgaaug

SEQ ID NO: 2657881 - RNA, 19 nt, Artificial Sequence
  Description of Artificial Sequence: Synthetic oligonucleotide
uguuuaacauccuauaaac

SEQ ID NO: 2657882 - RNA, 19 nt, Artificial Sequence
  Description of Artificial Sequence: Synthetic oligonucleotide
uuucugaagaaccagguac

SEQ ID NO: 2657883 - RNA, 19 nt, Artificial Sequence
  Description of Artificial Sequence: Synthetic oligonucleotide
uaugauuacuucaaugagc

SEQ ID NO: 2657884 - RNA, 19 nt, Artificial Sequence
  Description of Artificial Sequence: Synthetic oligonucleotide
augauuacuucaaugagcc

SEQ ID NO: 2657885 - RNA, 19 nt, Artificial Sequence
  Description of Artificial Sequence: Synthetic oligonucleotide
agaaacuuuaaauugcucu

SEQ ID NO: 2657886 - RNA, 19 nt, Artificial Sequence
  Description of Artificial Sequence: Synthetic oligonucleotide
auaauccauccauugaacc

SEQ ID NO: 2657887 - RNA, 19 nt, Artificial Sequence
  Description of Artificial Sequence: Synthetic oligonucleotide
aaacucaacaacaaagcgg

SEQ ID NO: 2657888 - RNA, 19 nt, Artificial Sequence
  Description of Artificial Sequence: Synthetic oligonucleotide
ucagacaguacacuaauca

SEQ ID NO: 2657889 - RNA, 19 nt, Artificial Sequence
  Description of Artificial Sequence: Synthetic oligonucleotide
aagaugaguauuguuuugc

SEQ ID NO: 2657890 - RNA, 19 nt, Artificial Sequence
  Description of Artificial Sequence: Synthetic oligonucleotide
gaacaauuuugcuacagag

SEQ ID NO: 2657891 - RNA, 19 nt, Artificial Sequence
  Description of Artificial Sequence: Synthetic oligonucleotide
auugaacccagucuuuucc

SEQ ID NO: 2657892 - RNA, 19 nt, Artificial Sequence
  Description of Artificial Sequence: Synthetic oligonucleotide
uuaugauuacuucaaugag

SEQ ID NO: 2657893 - RNA, 19 nt, Artificial Sequence
  Description of Artificial Sequence: Synthetic oligonucleotide
acauauuuaguccuugcuc

SEQ ID NO: 2657894 - RNA, 19 nt, Artificial Sequence
  Description of Artificial Sequence: Synthetic oligonucleotide
cauuagaauacauaggguc

SEQ ID NO: 2657895 - RNA, 19 nt, Artificial Sequence
  Description of Artificial Sequence: Synthetic oligonucleotide
aaugccagaaaccuuuugu

SEQ ID NO: 2657896 - RNA, 19 nt, Artificial Sequence
  Description of Artificial Sequence: Synthetic oligonucleotide
uguaacuccuccaauguug

SEQ ID NO: 2657897 - RNA, 19 nt, Artificial Sequence
  Description of Artificial Sequence: Synthetic oligonucleotide
acaauuuugcuacagagaa

SEQ ID NO: 2657898 - RNA, 19 nt, Artificial Sequence
  Description of Artificial Sequence: Synthetic oligonucleotide
uauuguuuugcccaugaac

SEQ ID NO: 2657899 - RNA, 19 nt, Artificial Sequence
  Description of Artificial Sequence: Synthetic oligonucleotide
uuaacauccuauaaacaga

SEQ ID NO: 2657900 - RNA, 19 nt, Artificial Sequence
  Description of Artificial Sequence: Synthetic oligonucleotide
uuuuccagcaaacauuaga

SEQ ID NO: 2657901 - RNA, 19 nt, Artificial Sequence
  Description of Artificial Sequence: Synthetic oligonucleotide
ugaacaucaaucuuccugu

SEQ ID NO: 2657902 - RNA, 19 nt, Artificial Sequence
  Description of Artificial Sequence: Synthetic oligonucleotide
cuuaugauuacuucaauga

SEQ ID NO: 2657903 - RNA, 19 nt, Artificial Sequence
  Description of Artificial Sequence: Synthetic oligonucleotide
aaugggaacaauuuugcua

SEQ ID NO: 2657904 - RNA, 19 nt, Artificial Sequence
  Description of Artificial Sequence: Synthetic oligonucleotide
aacagaacucgcuuucuuc

SEQ ID NO: 2657905 - RNA, 19 nt, Artificial Sequence
  Description of Artificial Sequence: Synthetic oligonucleotide
ucuuaugauuacuucaaug

SEQ ID NO: 2657906 - RNA, 19 nt, Artificial Sequence
  Description of Artificial Sequence: Synthetic oligonucleotide
auaaacagaacucgcuuuc

SEQ ID NO: 2657907 - RNA, 19 nt, Artificial Sequence
  Description of Artificial Sequence: Synthetic oligonucleotide
augaacaucaaucuuccug

SEQ ID NO: 2657908 - RNA, 19 nt, Artificial Sequence
  Description of Artificial Sequence: Synthetic oligonucleotide
auguugaauacucuuugac

SEQ ID NO: 2657909 - RNA, 19 nt, Artificial Sequence
  Description of Artificial Sequence: Synthetic oligonucleotide
aaacauuagaauacauagg

SEQ ID NO: 2657910 - RNA, 19 nt, Artificial Sequence
  Description of Artificial Sequence: Synthetic oligonucleotide
uccacuugaguccacaucu

SEQ ID NO: 2657911 - RNA, 19 nt, Artificial Sequence
  Description of Artificial Sequence: Synthetic oligonucleotide
ugcaguaagaugaguauug

SEQ ID NO: 2657912 - RNA, 19 nt, Artificial Sequence
  Description of Artificial Sequence: Synthetic oligonucleotide
ucaacaacaaagcggcugc

SEQ ID NO: 2657913 - RNA, 19 nt, Artificial Sequence
  Description of Artificial Sequence: Synthetic oligonucleotide
acacauucugagaagagcc

SEQ ID NO: 2657914 - RNA, 19 nt, Artificial Sequence
  Description of Artificial Sequence: Synthetic oligonucleotide
ucagauaauccauccauug

SEQ ID NO: 2657915 - RNA, 19 nt, Artificial Sequence
  Description of Artificial Sequence: Synthetic oligonucleotide
augaguauuguuuugccca

SEQ ID NO: 2657916 - RNA, 19 nt, Artificial Sequence
  Description of Artificial Sequence: Synthetic oligonucleotide
uuuaaauugcucucuuaug

SEQ ID NO: 2657917 - RNA, 19 nt, Artificial Sequence
  Description of Artificial Sequence: Synthetic oligonucleotide
gaaacuuuaaauugcucuc

SEQ ID NO: 2657918 - RNA, 19 nt, Artificial Sequence
  Description of Artificial Sequence: Synthetic oligonucleotide
agaugaguauuguuuugcc

SEQ ID NO: 2657919 - RNA, 19 nt, Artificial Sequence
  Description of Artificial Sequence: Synthetic oligonucleotide
uaauccauccauugaaccc

SEQ ID NO: 2657920 - RNA, 19 nt, Artificial Sequence
  Description of Artificial Sequence: Synthetic oligonucleotide
ugaagaaccagguacuccu

SEQ ID NO: 2657921 - RNA, 19 nt, Artificial Sequence
  Description of Artificial Sequence: Synthetic oligonucleotide
uguugaauacucuuugacu

SEQ ID NO: 2657922 - RNA, 19 nt, Artificial Sequence
  Description of Artificial Sequence: Synthetic oligonucleotide
ucaaauuccuuuuguaacu

SEQ ID NO: 2657923 - RNA, 19 nt, Artificial Sequence
  Description of Artificial Sequence: Synthetic oligonucleotide
augcaaaagcguuagccac

SEQ ID NO: 2657924 - RNA, 19 nt, Artificial Sequence
  Description of Artificial Sequence: Synthetic oligonucleotide
auuuuaccagcccaagcac

SEQ ID NO: 2657925 - RNA, 19 nt, Artificial Sequence
  Description of Artificial Sequence: Synthetic oligonucleotide
auuguuuugcccaugaaca

SEQ ID NO: 2657926 - RNA, 19 nt, Artificial Sequence
  Description of Artificial Sequence: Synthetic oligonucleotide
uuuggagguuuucugaaga

SEQ ID NO: 2657927 - RNA, 19 nt, Artificial Sequence
  Description of Artificial Sequence: Synthetic oligonucleotide
aacucagaagcccacuucu

SEQ ID NO: 2657928 - RNA, 19 nt, Artificial Sequence
  Description of Artificial Sequence: Synthetic oligonucleotide
aauguugaauacucuuuga

SEQ ID NO: 2657929 - RNA, 19 nt, Artificial Sequence
  Description of Artificial Sequence: Synthetic oligonucleotide
uuaccaauggcuccuguca

SEQ ID NO: 2657930 - RNA, 19 nt, Artificial Sequence
  Description of Artificial Sequence: Synthetic oligonucleotide
uucuccacaguuuugacau

SEQ ID NO: 2657931 - RNA, 19 nt, Artificial Sequence
  Description of Artificial Sequence: Synthetic oligonucleotide
uugcccaugaacaucaauc

SEQ ID NO: 2657932 - RNA, 19 nt, Artificial Sequence
  Description of Artificial Sequence: Synthetic oligonucleotide
cauccuauaaacagaacuc

SEQ ID NO: 2657933 - RNA, 19 nt, Artificial Sequence
  Description of Artificial Sequence: Synthetic oligonucleotide
uacacuaaucauuuucucu

SEQ ID NO: 2657934 - RNA, 19 nt, Artificial Sequence
  Description of Artificial Sequence: Synthetic oligonucleotide
ugugaucuaaaugcaaaag

SEQ ID NO: 2657935 - RNA, 19 nt, Artificial Sequence
  Description of Artificial Sequence: Synthetic oligonucleotide
ugaauacucuuugacuucg

SEQ ID NO: 2657936 - RNA, 19 nt, Artificial Sequence
  Description of Artificial Sequence: Synthetic oligonucleotide
uaacauccuauaaacagaa

SEQ ID NO: 2657937 - RNA, 19 nt, Artificial Sequence
  Description of Artificial Sequence: Synthetic oligonucleotide
acucuuugacuucgaaugc

SEQ ID NO: 2657938 - RNA, 19 nt, Artificial Sequence
  Description of Artificial Sequence: Synthetic oligonucleotide
gaugaguauuguuuugccc

SEQ ID NO: 2657939 - RNA, 19 nt, Artificial Sequence
  Description of Artificial Sequence: Synthetic oligonucleotide
aagcguuagccacaauccg

SEQ ID NO: 2657940 - RNA, 19 nt, Artificial Sequence
  Description of Artificial Sequence: Synthetic oligonucleotide
agauaauccauccauugaa

SEQ ID NO: 2657941 - RNA, 19 nt, Artificial Sequence
  Description of Artificial Sequence: Synthetic oligonucleotide
uccagcaaacauuagaaua

SEQ ID NO: 2657942 - RNA, 19 nt, Artificial Sequence
  Description of Artificial Sequence: Synthetic oligonucleotide
uuuuguguuccguugguac

SEQ ID NO: 2657943 - RNA, 19 nt, Artificial Sequence
  Description of Artificial Sequence: Synthetic oligonucleotide
ucucuuaugauuacuucaa

SEQ ID NO: 2657944 - RNA, 19 nt, Artificial Sequence
  Description of Artificial Sequence: Synthetic oligonucleotide
ugucaagaccuuaacucag

SEQ ID NO: 2657945 - RNA, 19 nt, Artificial Sequence
  Description of Artificial Sequence: Synthetic oligonucleotide
uccuauaaacagaacucgc

SEQ ID NO: 2657946 - RNA, 19 nt, Artificial Sequence
  Description of Artificial Sequence: Synthetic oligonucleotide
aauccauccauugaaccca

SEQ ID NO: 2657947 - RNA, 19 nt, Artificial Sequence
  Description of Artificial Sequence: Synthetic oligonucleotide
uuaguccuugcucucaugu

SEQ ID NO: 2657948 - RNA, 19 nt, Artificial Sequence
  Description of Artificial Sequence: Synthetic oligonucleotide
cuaaaugcaaaagcguuag

SEQ ID NO: 2657949 - RNA, 19 nt, Artificial Sequence
  Description of Artificial Sequence: Synthetic oligonucleotide
auccuauaaacagaacucg

SEQ ID NO: 2657950 - RNA, 19 nt, Artificial Sequence
  Description of Artificial Sequence: Synthetic oligonucleotide
ucauucacuucauuuuacc

SEQ ID NO: 2657951 - RNA, 19 nt, Artificial Sequence
  Description of Artificial Sequence: Synthetic oligonucleotide
ugcaguuucaaauuccuuu

SEQ ID NO: 2657952 - RNA, 19 nt, Artificial Sequence
  Description of Artificial Sequence: Synthetic oligonucleotide
acaauccgucaucaguugc

SEQ ID NO: 2657953 - RNA, 19 nt, Artificial Sequence
  Description of Artificial Sequence: Synthetic oligonucleotide
ucugucuccuugcaguaag

SEQ ID NO: 2657954 - RNA, 19 nt, Artificial Sequence
  Description of Artificial Sequence: Synthetic oligonucleotide
aacaaagcggcugcuuuac

SEQ ID NO: 2657955 - RNA, 19 nt, Artificial Sequence
  Description of Artificial Sequence: Synthetic oligonucleotide
ucuaaaugcaaaagcguua

SEQ ID NO: 2657956 - RNA, 19 nt, Artificial Sequence
  Description of Artificial Sequence: Synthetic oligonucleotide
uuccuuuuguaacuccucc

SEQ ID NO: 2657957 - RNA, 19 nt, Artificial Sequence
  Description of Artificial Sequence: Synthetic oligonucleotide
auguuuaacauccuauaaa

SEQ ID NO: 2657958 - RNA, 19 nt, Artificial Sequence
  Description of Artificial Sequence: Synthetic oligonucleotide
aucauuuucucuuugcauu

SEQ ID NO: 2657959 - RNA, 19 nt, Artificial Sequence
  Description of Artificial Sequence: Synthetic oligonucleotide
ugcauuucuuuccacuuga

SEQ ID NO: 2657960 - RNA, 19 nt, Artificial Sequence
  Description of Artificial Sequence: Synthetic oligonucleotide
caucaguugcacuuucugg

SEQ ID NO: 2657961 - RNA, 19 nt, Artificial Sequence
  Description of Artificial Sequence: Synthetic oligonucleotide
ucauuuuaccagcccaagc

SEQ ID NO: 2657962 - RNA, 19 nt, Artificial Sequence
  Description of Artificial Sequence: Synthetic oligonucleotide
aguaagaugaguauuguuu

SEQ ID NO: 2657963 - RNA, 19 nt, Artificial Sequence
  Description of Artificial Sequence: Synthetic oligonucleotide
acuucgaaugccagaaacc

SEQ ID NO: 2657964 - RNA, 19 nt, Artificial Sequence
  Description of Artificial Sequence: Synthetic oligonucleotide
aacaauuuugcuacagaga

SEQ ID NO: 2657965 - RNA, 19 nt, Artificial Sequence
  Description of Artificial Sequence: Synthetic oligonucleotide
caauguugaauacucuuug

SEQ ID NO: 2657966 - RNA, 19 nt, Artificial Sequence
  Description of Artificial Sequence: Synthetic oligonucleotide
uguugcuucugucuccuug

SEQ ID NO: 2657967 - RNA, 19 nt, Artificial Sequence
  Description of Artificial Sequence: Synthetic oligonucleotide
acacuaaucauuuucucuu

SEQ ID NO: 2657968 - RNA, 19 nt, Artificial Sequence
  Description of Artificial Sequence: Synthetic oligonucleotide
uuuaccagcccaagcacac

SEQ ID NO: 2657969 - RNA, 19 nt, Artificial Sequence
  Description of Artificial Sequence: Synthetic oligonucleotide
cacuuucuggccaagugcc

SEQ ID NO: 2657970 - RNA, 19 nt, Artificial Sequence
  Description of Artificial Sequence: Synthetic oligonucleotide
uaagaugaguauuguuuug

SEQ ID NO: 2657971 - RNA, 19 nt, Artificial Sequence
  Description of Artificial Sequence: Synthetic oligonucleotide
gacuucgaaugccagaaac

SEQ ID NO: 2657972 - RNA, 19 nt, Artificial Sequence
  Description of Artificial Sequence: Synthetic oligonucleotide
uacuccuugauguugcuuc

SEQ ID NO: 2657973 - RNA, 19 nt, Artificial Sequence
  Description of Artificial Sequence: Synthetic oligonucleotide
auuagaauacauagggucu

SEQ ID NO: 2657974 - RNA, 19 nt, Artificial Sequence
  Description of Artificial Sequence: Synthetic oligonucleotide
ugguacuuuuguuucagac

SEQ ID NO: 2657975 - RNA, 19 nt, Artificial Sequence
  Description of Artificial Sequence: Synthetic oligonucleotide
uauaaacagaacucgcuuu

SEQ ID NO: 2657976 - RNA, 19 nt, Artificial Sequence
  Description of Artificial Sequence: Synthetic oligonucleotide
ucgaaugccagaaaccuuu

SEQ ID NO: 2657977 - RNA, 19 nt, Artificial Sequence
  Description of Artificial Sequence: Synthetic oligonucleotide
ucuacuuuggagguuuucu

SEQ ID NO: 2657978 - RNA, 19 nt, Artificial Sequence
  Description of Artificial Sequence: Synthetic oligonucleotide
acaucaaucuuccugucaa

SEQ ID NO: 2657979 - RNA, 19 nt, Artificial Sequence
  Description of Artificial Sequence: Synthetic oligonucleotide
ucaaucuuccugucaagac

SEQ ID NO: 2657980 - RNA, 19 nt, Artificial Sequence
  Description of Artificial Sequence: Synthetic oligonucleotide
auauuuaguccuugcucuc

SEQ ID NO: 2657981 - RNA, 19 nt, Artificial Sequence
  Description of Artificial Sequence: Synthetic oligonucleotide
aauccgucaucaguugcac

SEQ ID NO: 2657982 - RNA, 19 nt, Artificial Sequence
  Description of Artificial Sequence: Synthetic oligonucleotide
ggucuuuucauguuuaaca

SEQ ID NO: 2657983 - RNA, 19 nt, Artificial Sequence
  Description of Artificial Sequence: Synthetic oligonucleotide
aguauuguuuugcccauga

SEQ ID NO: 2657984 - RNA, 19 nt, Artificial Sequence
  Description of Artificial Sequence: Synthetic oligonucleotide
uccuucagauaauccaucc

SEQ ID NO: 2657985 - RNA, 19 nt, Artificial Sequence
  Description of Artificial Sequence: Synthetic oligonucleotide
uuugacuucgaaugccaga

SEQ ID NO: 2657986 - RNA, 19 nt, Artificial Sequence
  Description of Artificial Sequence: Synthetic oligonucleotide
aauuccuuuuguaacuccu

SEQ ID NO: 2657987 - RNA, 19 nt, Artificial Sequence
  Description of Artificial Sequence: Synthetic oligonucleotide
gauuacuucaaugagcccu

SEQ ID NO: 2657988 - RNA, 19 nt, Artificial Sequence
  Description of Artificial Sequence: Synthetic oligonucleotide
uacauagggucuuuucaug

SEQ ID NO: 2657989 - RNA, 19 nt, Artificial Sequence
  Description of Artificial Sequence: Synthetic oligonucleotide
ugacauauuuaguccuugc

SEQ ID NO: 2657990 - RNA, 19 nt, Artificial Sequence
  Description of Artificial Sequence: Synthetic oligonucleotide
augagcccuccccaaaggc

SEQ ID NO: 2657991 - RNA, 19 nt, Artificial Sequence
  Description of Artificial Sequence: Synthetic oligonucleotide
acuaaucauuuucucuuug

SEQ ID NO: 2657992 - RNA, 19 nt, Artificial Sequence
  Description of Artificial Sequence: Synthetic oligonucleotide
gaauacauagggucuuuuc

SEQ ID NO: 2657993 - RNA, 19 nt, Artificial Sequence
  Description of Artificial Sequence: Synthetic oligonucleotide
uguuucagacaguacacua

SEQ ID NO: 2657994 - RNA, 19 nt, Artificial Sequence
  Description of Artificial Sequence: Synthetic oligonucleotide
ugcccaugaacaucaaucu

SEQ ID NO: 2657995 - RNA, 19 nt, Artificial Sequence
  Description of Artificial Sequence: Synthetic oligonucleotide
guccacaucuacuuuggag

SEQ ID NO: 2657996 - RNA, 19 nt, Artificial Sequence
  Description of Artificial Sequence: Synthetic oligonucleotide
augccagaaaccuuuugug

SEQ ID NO: 2657997 - RNA, 19 nt, Artificial Sequence
  Description of Artificial Sequence: Synthetic oligonucleotide
agaacucgcuuucuucggg

SEQ ID NO: 2657998 - RNA, 19 nt, Artificial Sequence
  Description of Artificial Sequence: Synthetic oligonucleotide
aagcacacauucugagaag

SEQ ID NO: 2657999 - RNA, 19 nt, Artificial Sequence
  Description of Artificial Sequence: Synthetic oligonucleotide
uuuguguuccguugguacu

SEQ ID NO: 2658000 - RNA, 19 nt, Artificial Sequence
  Description of Artificial Sequence: Synthetic oligonucleotide
aaaccuuuuguguuccguu

SEQ ID NO: 2658001 - RNA, 19 nt, Artificial Sequence
  Description of Artificial Sequence: Synthetic oligonucleotide
uugacuucgaaugccagaa

SEQ ID NO: 2658002 - RNA, 19 nt, Artificial Sequence
  Description of Artificial Sequence: Synthetic oligonucleotide
agaccuuaacucagaagcc

SEQ ID NO: 2658003 - RNA, 19 nt, Artificial Sequence
  Description of Artificial Sequence: Synthetic oligonucleotide
gaacucgcuuucuucgggg

SEQ ID NO: 2658004 - RNA, 19 nt, Artificial Sequence
  Description of Artificial Sequence: Synthetic oligonucleotide
uuugcauuucuuuccacuu

SEQ ID NO: 2658005 - RNA, 19 nt, Artificial Sequence
  Description of Artificial Sequence: Synthetic oligonucleotide
uccaauguugaauacucuu

SEQ ID NO: 2658006 - RNA, 19 nt, Artificial Sequence
  Description of Artificial Sequence: Synthetic oligonucleotide
uugcauuucuuuccacuug

SEQ ID NO: 2658007 - RNA, 19 nt, Artificial Sequence
  Description of Artificial Sequence: Synthetic oligonucleotide
ucuuuucauguuuaacauc

SEQ ID NO: 2658008 - RNA, 19 nt, Artificial Sequence
  Description of Artificial Sequence: Synthetic oligonucleotide
gauaauccauccauugaac

SEQ ID NO: 2658009 - RNA, 19 nt, Artificial Sequence
  Description of Artificial Sequence: Synthetic oligonucleotide
aggcagaggaaacucaaca

SEQ ID NO: 2658010 - RNA, 19 nt, Artificial Sequence
  Description of Artificial Sequence: Synthetic oligonucleotide
aaagcggcugcuuuaccaa

SEQ ID NO: 2658011 - RNA, 19 nt, Artificial Sequence
  Description of Artificial Sequence: Synthetic oligonucleotide
ucaugugaucuaaaugcaa

SEQ ID NO: 2658012 - RNA, 19 nt, Artificial Sequence
  Description of Artificial Sequence: Synthetic oligonucleotide
uguuccguugguacuuuug

SEQ ID NO: 2658013 - RNA, 19 nt, Artificial Sequence
  Description of Artificial Sequence: Synthetic oligonucleotide
cucucaugugaucuaaaug

SEQ ID NO: 2658014 - RNA, 19 nt, Artificial Sequence
  Description of Artificial Sequence: Synthetic oligonucleotide
agcccaagcacacauucug

SEQ ID NO: 2658015 - RNA, 19 nt, Artificial Sequence
  Description of Artificial Sequence: Synthetic oligonucleotide
auuacuucaaugagcccuc

SEQ ID NO: 2658016 - RNA, 19 nt, Artificial Sequence
  Description of Artificial Sequence: Synthetic oligonucleotide
uccugucaagaccuuaacu

SEQ ID NO: 2658017 - RNA, 19 nt, Artificial Sequence
  Description of Artificial Sequence: Synthetic oligonucleotide
aacuuuaaauugcucucuu

SEQ ID NO: 2658018 - RNA, 19 nt, Artificial Sequence
  Description of Artificial Sequence: Synthetic oligonucleotide
ggaaacucaacaacaaagc

SEQ ID NO: 2658019 - RNA, 19 nt, Artificial Sequence
  Description of Artificial Sequence: Synthetic oligonucleotide
uuagccacaauccgucauc

SEQ ID NO: 2658020 - RNA, 19 nt, Artificial Sequence
  Description of Artificial Sequence: Synthetic oligonucleotide
uuuaccaauggcuccuguc

SEQ ID NO: 2658021 - RNA, 19 nt, Artificial Sequence
  Description of Artificial Sequence: Synthetic oligonucleotide
cucucuuaugauuacuuca

SEQ ID NO: 2658022 - RNA, 19 nt, Artificial Sequence
  Description of Artificial Sequence: Synthetic oligonucleotide
cucagaagcccacuucucc

SEQ ID NO: 2658023 - RNA, 19 nt, Artificial Sequence
  Description of Artificial Sequence: Synthetic oligonucleotide
ugccagaaaccuuuugugu

SEQ ID NO: 2658024 - RNA, 19 nt, Artificial Sequence
  Description of Artificial Sequence: Synthetic oligonucleotide
uugaauacucuuugacuuc

SEQ ID NO: 2658025 - RNA, 19 nt, Artificial Sequence
  Description of Artificial Sequence: Synthetic oligonucleotide
gaccuuaacucagaagccc

SEQ ID NO: 2658026 - RNA, 19 nt, Artificial Sequence
  Description of Artificial Sequence: Synthetic oligonucleotide
cuacuuuggagguuuucug

SEQ ID NO: 2658027 - RNA, 19 nt, Artificial Sequence
  Description of Artificial Sequence: Synthetic oligonucleotide
cagaggaaacucaacaaca

SEQ ID NO: 2658028 - RNA, 19 nt, Artificial Sequence
  Description of Artificial Sequence: Synthetic oligonucleotide
guugaauacucuuugacuu

SEQ ID NO: 2658029 - RNA, 19 nt, Artificial Sequence
  Description of Artificial Sequence: Synthetic oligonucleotide
uuaacucagaagcccacuu

SEQ ID NO: 2658030 - RNA, 19 nt, Artificial Sequence
  Description of Artificial Sequence: Synthetic oligonucleotide
uucauuuuaccagcccaag

SEQ ID NO: 2658031 - RNA, 19 nt, Artificial Sequence
  Description of Artificial Sequence: Synthetic oligonucleotide
uaaaugcaaaagcguuagc

SEQ ID NO: 2658032 - RNA, 19 nt, Artificial Sequence
  Description of Artificial Sequence: Synthetic oligonucleotide
cacacauucugagaagagc

SEQ ID NO: 2658033 - RNA, 19 nt, Artificial Sequence
  Description of Artificial Sequence: Synthetic oligonucleotide
auacucuuugacuucgaau

SEQ ID NO: 2658034 - RNA, 19 nt, Artificial Sequence
  Description of Artificial Sequence: Synthetic oligonucleotide
uccgucaucaguugcacuu

SEQ ID NO: 2658035 - RNA, 19 nt, Artificial Sequence
  Description of Artificial Sequence: Synthetic oligonucleotide
caagaccuuaacucagaag

SEQ ID NO: 2658036 - RNA, 19 nt, Artificial Sequence
  Description of Artificial Sequence: Synthetic oligonucleotide
cucaacaacaaagcggcug

SEQ ID NO: 2658037 - RNA, 19 nt, Artificial Sequence
  Description of Artificial Sequence: Synthetic oligonucleotide
cuuuggagguuuucugaag

SEQ ID NO: 2658038 - RNA, 19 nt, Artificial Sequence
  Description of Artificial Sequence: Synthetic oligonucleotide
aacuccuccaauguugaau

SEQ ID NO: 2658039 - RNA, 19 nt, Artificial Sequence
  Description of Artificial Sequence: Synthetic oligonucleotide
uucagauaauccauccauu

SEQ ID NO: 2658040 - RNA, 19 nt, Artificial Sequence
  Description of Artificial Sequence: Synthetic oligonucleotide
aacauccuauaaacagaac

SEQ ID NO: 2658041 - RNA, 19 nt, Artificial Sequence
  Description of Artificial Sequence: Synthetic oligonucleotide
ugagcccuccccaaaggca

SEQ ID NO: 2658042 - RNA, 19 nt, Artificial Sequence
  Description of Artificial Sequence: Synthetic oligonucleotide
uuuucauguuuaacauccu

SEQ ID NO: 2658043 - RNA, 19 nt, Artificial Sequence
  Description of Artificial Sequence: Synthetic oligonucleotide
caugugaucuaaaugcaaa

SEQ ID NO: 2658044 - RNA, 19 nt, Artificial Sequence
  Description of Artificial Sequence: Synthetic oligonucleotide
ucuucggggaaugggaaca

SEQ ID NO: 2658045 - RNA, 19 nt, Artificial Sequence
  Description of Artificial Sequence: Synthetic oligonucleotide
uccuugauguugcuucugu

SEQ ID NO: 2658046 - RNA, 19 nt, Artificial Sequence
  Description of Artificial Sequence: Synthetic oligonucleotide
aaggcagaggaaacucaac

SEQ ID NO: 2658047 - RNA, 19 nt, Artificial Sequence
  Description of Artificial Sequence: Synthetic oligonucleotide
gaguccacaucuacuuugg

SEQ ID NO: 2658048 - RNA, 19 nt, Artificial Sequence
  Description of Artificial Sequence: Synthetic oligonucleotide
uaacucagaagcccacuuc

SEQ ID NO: 2658049 - RNA, 19 nt, Artificial Sequence
  Description of Artificial Sequence: Synthetic oligonucleotide
augugaucuaaaugcaaaa

SEQ ID NO: 2658050 - RNA, 19 nt, Artificial Sequence
  Description of Artificial Sequence: Synthetic oligonucleotide
uauuuaguccuugcucuca

SEQ ID NO: 2658051 - RNA, 19 nt, Artificial Sequence
  Description of Artificial Sequence: Synthetic oligonucleotide
gguuuucugaagaaccagg

SEQ ID NO: 2658052 - RNA, 19 nt, Artificial Sequence
  Description of Artificial Sequence: Synthetic oligonucleotide
uugacauauuuaguccuug

SEQ ID NO: 2658053 - RNA, 19 nt, Artificial Sequence
  Description of Artificial Sequence: Synthetic oligonucleotide
cuuugacuucgaaugccag

SEQ ID NO: 2658054 - RNA, 19 nt, Artificial Sequence
  Description of Artificial Sequence: Synthetic oligonucleotide
gagaagagccccugaaguc

SEQ ID NO: 2658055 - RNA, 19 nt, Artificial Sequence
  Description of Artificial Sequence: Synthetic oligonucleotide
guugguacuuuuguuucag

SEQ ID NO: 2658056 - RNA, 19 nt, Artificial Sequence
  Description of Artificial Sequence: Synthetic oligonucleotide
ugcucucuuaugauuacuu

SEQ ID NO: 2658057 - RNA, 19 nt, Artificial Sequence
  Description of Artificial Sequence: Synthetic oligonucleotide
cugucaagaccuuaacuca

SEQ ID NO: 2658058 - RNA, 19 nt, Artificial Sequence
  Description of Artificial Sequence: Synthetic oligonucleotide
acaaagcggcugcuuuacc

SEQ ID NO: 2658059 - RNA, 19 nt, Artificial Sequence
  Description of Artificial Sequence: Synthetic oligonucleotide
acuuuggagguuuucugaa

SEQ ID NO: 2658060 - RNA, 19 nt, Artificial Sequence
  Description of Artificial Sequence: Synthetic oligonucleotide
acaacaaagcggcugcuuu

SEQ ID NO: 2658061 - RNA, 19 nt, Artificial Sequence
  Description of Artificial Sequence: Synthetic oligonucleotide
cugagaagagccccugaag

SEQ ID NO: 2658062 - RNA, 19 nt, Artificial Sequence
  Description of Artificial Sequence: Synthetic oligonucleotide
aucuaaaugcaaaagcguu

SEQ ID NO: 2658063 - RNA, 19 nt, Artificial Sequence
  Description of Artificial Sequence: Synthetic oligonucleotide
cuuuuguuucagacaguac

SEQ ID NO: 2658064 - RNA, 19 nt, Artificial Sequence
  Description of Artificial Sequence: Synthetic oligonucleotide
acuuuuguuucagacagua

SEQ ID NO: 2658065 - RNA, 19 nt, Artificial Sequence
  Description of Artificial Sequence: Synthetic oligonucleotide
cagaacucgcuuucuucgg

SEQ ID NO: 2658066 - RNA, 19 nt, Artificial Sequence
  Description of Artificial Sequence: Synthetic oligonucleotide
gggaaugggaacaauuuug

SEQ ID NO: 2658067 - RNA, 19 nt, Artificial Sequence
  Description of Artificial Sequence: Synthetic oligonucleotide
cugcuuuaccaauggcucc

SEQ ID NO: 2658068 - RNA, 19 nt, Artificial Sequence
  Description of Artificial Sequence: Synthetic oligonucleotide
ggaaugggaacaauuuugc

SEQ ID NO: 2658069 - RNA, 19 nt, Artificial Sequence
  Description of Artificial Sequence: Synthetic oligonucleotide
ugcuacagagaaacuuuaa

SEQ ID NO: 2658070 - RNA, 19 nt, Artificial Sequence
  Description of Artificial Sequence: Synthetic oligonucleotide
gacauauuuaguccuugcu

SEQ ID NO: 2658071 - RNA, 19 nt, Artificial Sequence
  Description of Artificial Sequence: Synthetic oligonucleotide
gaaugccagaaaccuuuug

SEQ ID NO: 2658072 - RNA, 19 nt, Artificial Sequence
  Description of Artificial Sequence: Synthetic oligonucleotide
aacucgcuuucuucgggga

SEQ ID NO: 2658073 - RNA, 19 nt, Artificial Sequence
  Description of Artificial Sequence: Synthetic oligonucleotide
uguuuugcccaugaacauc

SEQ ID NO: 2658074 - RNA, 19 nt, Artificial Sequence
  Description of Artificial Sequence: Synthetic oligonucleotide
ugauuacuucaaugagccc

SEQ ID NO: 2658075 - RNA, 19 nt, Artificial Sequence
  Description of Artificial Sequence: Synthetic oligonucleotide
ugaguauuguuuugcccau

SEQ ID NO: 2658076 - RNA, 19 nt, Artificial Sequence
  Description of Artificial Sequence: Synthetic oligonucleotide
aucaaucuuccugucaaga

SEQ ID NO: 2658077 - RNA, 19 nt, Artificial Sequence
  Description of Artificial Sequence: Synthetic oligonucleotide
uacuucaaugagcccuccc

SEQ ID NO: 2658078 - RNA, 19 nt, Artificial Sequence
  Description of Artificial Sequence: Synthetic oligonucleotide
aguccugcaguuucaaauu

SEQ ID NO: 2658079 - RNA, 19 nt, Artificial Sequence
  Description of Artificial Sequence: Synthetic oligonucleotide
uuguuuugcccaugaacau

SEQ ID NO: 2658080 - RNA, 19 nt, Artificial Sequence
  Description of Artificial Sequence: Synthetic oligonucleotide
gaucuaaaugcaaaagcgu

SEQ ID NO: 2658081 - RNA, 19 nt, Artificial Sequence
  Description of Artificial Sequence: Synthetic oligonucleotide
cucaugugaucuaaaugca

SEQ ID NO: 2658082 - RNA, 19 nt, Artificial Sequence
  Description of Artificial Sequence: Synthetic oligonucleotide
uucagacaguacacuaauc

SEQ ID NO: 2658083 - RNA, 19 nt, Artificial Sequence
  Description of Artificial Sequence: Synthetic oligonucleotide
caaugagcccuccccaaag

SEQ ID NO: 2658084 - RNA, 19 nt, Artificial Sequence
  Description of Artificial Sequence: Synthetic oligonucleotide
ucaaugagcccuccccaaa

SEQ ID NO: 2658085 - RNA, 19 nt, Artificial Sequence
  Description of Artificial Sequence: Synthetic oligonucleotide
auagggucuuuucauguuu

SEQ ID NO: 2658086 - RNA, 19 nt, Artificial Sequence
  Description of Artificial Sequence: Synthetic oligonucleotide
agguuuucugaagaaccag

SEQ ID NO: 2658087 - RNA, 19 nt, Artificial Sequence
  Description of Artificial Sequence: Synthetic oligonucleotide
ugcuuuaccaauggcuccu

SEQ ID NO: 2658088 - RNA, 19 nt, Artificial Sequence
  Description of Artificial Sequence: Synthetic oligonucleotide
uaaacagaacucgcuuucu

SEQ ID NO: 2658089 - RNA, 19 nt, Artificial Sequence
  Description of Artificial Sequence: Synthetic oligonucleotide
agaaaccuuuuguguuccg

SEQ ID NO: 2658090 - RNA, 19 nt, Artificial Sequence
  Description of Artificial Sequence: Synthetic oligonucleotide
uugcuacagagaaacuuua

SEQ ID NO: 2658091 - RNA, 19 nt, Artificial Sequence
  Description of Artificial Sequence: Synthetic oligonucleotide
uuuaguccuugcucucaug

SEQ ID NO: 2658092 - RNA, 19 nt, Artificial Sequence
  Description of Artificial Sequence: Synthetic oligonucleotide
uggagguuuucugaagaac

SEQ ID NO: 2658093 - RNA, 19 nt, Artificial Sequence
  Description of Artificial Sequence: Synthetic oligonucleotide
gaggaaacucaacaacaaa

SEQ ID NO: 2658094 - RNA, 19 nt, Artificial Sequence
  Description of Artificial Sequence: Synthetic oligonucleotide
gcagaggaaacucaacaac

SEQ ID NO: 2658095 - RNA, 19 nt, Artificial Sequence
  Description of Artificial Sequence: Synthetic oligonucleotide
uuggagguuuucugaagaa

SEQ ID NO: 2658096 - RNA, 19 nt, Artificial Sequence
  Description of Artificial Sequence: Synthetic oligonucleotide
uuguuucagacaguacacu

SEQ ID NO: 2658097 - RNA, 19 nt, Artificial Sequence
  Description of Artificial Sequence: Synthetic oligonucleotide
uaguccuugcucucaugug

SEQ ID NO: 2658098 - RNA, 19 nt, Artificial Sequence
  Description of Artificial Sequence: Synthetic oligonucleotide
acauuagaauacauagggu

SEQ ID NO: 2658099 - RNA, 19 nt, Artificial Sequence
  Description of Artificial Sequence: Synthetic oligonucleotide
cacuucauuuuaccagccc

SEQ ID NO: 2658100 - RNA, 19 nt, Artificial Sequence
  Description of Artificial Sequence: Synthetic oligonucleotide
agcacacauucugagaaga

SEQ ID NO: 2658101 - RNA, 19 nt, Artificial Sequence
  Description of Artificial Sequence: Synthetic oligonucleotide
cugaagaaccagguacucc

SEQ ID NO: 2658102 - RNA, 19 nt, Artificial Sequence
  Description of Artificial Sequence: Synthetic oligonucleotide
caaagcggcugcuuuacca

SEQ ID NO: 2658103 - RNA, 19 nt, Artificial Sequence
  Description of Artificial Sequence: Synthetic oligonucleotide
caucaaucuuccugucaag

SEQ ID NO: 2658104 - RNA, 19 nt, Artificial Sequence
  Description of Artificial Sequence: Synthetic oligonucleotide
cauugaacccagucuuuuc

SEQ ID NO: 2658105 - RNA, 19 nt, Artificial Sequence
  Description of Artificial Sequence: Synthetic oligonucleotide
uuccugucaagaccuuaac

SEQ ID NO: 2658106 - RNA, 19 nt, Artificial Sequence
  Description of Artificial Sequence: Synthetic oligonucleotide
ucggggaaugggaacaauu

SEQ ID NO: 2658107 - RNA, 19 nt, Artificial Sequence
  Description of Artificial Sequence: Synthetic oligonucleotide
gagguuuucugaagaacca

SEQ ID NO: 2658108 - RNA, 19 nt, Artificial Sequence
  Description of Artificial Sequence: Synthetic oligonucleotide
auuuaguccuugcucucau

SEQ ID NO: 2658109 - RNA, 19 nt, Artificial Sequence
  Description of Artificial Sequence: Synthetic oligonucleotide
uuguaacuccuccaauguu

SEQ ID NO: 2658110 - RNA, 19 nt, Artificial Sequence
  Description of Artificial Sequence: Synthetic oligonucleotide
cagauaauccauccauuga

SEQ ID NO: 2658111 - RNA, 19 nt, Artificial Sequence
  Description of Artificial Sequence: Synthetic oligonucleotide
uagggucuuuucauguuua

SEQ ID NO: 2658112 - RNA, 19 nt, Artificial Sequence
  Description of Artificial Sequence: Synthetic oligonucleotide
guaagaugaguauuguuuu

SEQ ID NO: 2658113 - RNA, 19 nt, Artificial Sequence
  Description of Artificial Sequence: Synthetic oligonucleotide
cuucauuuuaccagcccaa

SEQ ID NO: 2658114 - RNA, 19 nt, Artificial Sequence
  Description of Artificial Sequence: Synthetic oligonucleotide
uaccagcccaagcacacau

SEQ ID NO: 2658115 - RNA, 19 nt, Artificial Sequence
  Description of Artificial Sequence: Synthetic oligonucleotide
agacaguacacuaaucauu

SEQ ID NO: 2658116 - RNA, 19 nt, Artificial Sequence
  Description of Artificial Sequence: Synthetic oligonucleotide
uucuucggggaaugggaac

SEQ ID NO: 2658117 - RNA, 19 nt, Artificial Sequence
  Description of Artificial Sequence: Synthetic oligonucleotide
cacuugaguccacaucuac

SEQ ID NO: 2658118 - RNA, 19 nt, Artificial Sequence
  Description of Artificial Sequence: Synthetic oligonucleotide
uaccaauggcuccugucau

SEQ ID NO: 2658119 - RNA, 19 nt, Artificial Sequence
  Description of Artificial Sequence: Synthetic oligonucleotide
cuucagauaauccauccau

SEQ ID NO: 2658120 - RNA, 19 nt, Artificial Sequence
  Description of Artificial Sequence: Synthetic oligonucleotide
caauccgucaucaguugca

SEQ ID NO: 2658121 - RNA, 19 nt, Artificial Sequence
  Description of Artificial Sequence: Synthetic oligonucleotide
acuuucuggccaagugccc

SEQ ID NO: 2658122 - RNA, 19 nt, Artificial Sequence
  Description of Artificial Sequence: Synthetic oligonucleotide
cacaauccgucaucaguug

SEQ ID NO: 2658123 - RNA, 19 nt, Artificial Sequence
  Description of Artificial Sequence: Synthetic oligonucleotide
ccuccaauguugaauacuc

SEQ ID NO: 2658124 - RNA, 19 nt, Artificial Sequence
  Description of Artificial Sequence: Synthetic oligonucleotide
uucgaaugccagaaaccuu

SEQ ID NO: 2658125 - RNA, 19 nt, Artificial Sequence
  Description of Artificial Sequence: Synthetic oligonucleotide
uacuuuuguuucagacagu

SEQ ID NO: 2658126 - RNA, 19 nt, Artificial Sequence
  Description of Artificial Sequence: Synthetic oligonucleotide
agaggaaacucaacaacaa

SEQ ID NO: 2658127 - RNA, 19 nt, Artificial Sequence
  Description of Artificial Sequence: Synthetic oligonucleotide
gucuuuucauguuuaacau

SEQ ID NO: 2658128 - RNA, 19 nt, Artificial Sequence
  Description of Artificial Sequence: Synthetic oligonucleotide
gacaguacacuaaucauuu

SEQ ID NO: 2658129 - RNA, 19 nt, Artificial Sequence
  Description of Artificial Sequence: Synthetic oligonucleotide
ggaacaauuuugcuacaga

SEQ ID NO: 2658130 - RNA, 19 nt, Artificial Sequence
  Description of Artificial Sequence: Synthetic oligonucleotide
acuugaguccacaucuacu

SEQ ID NO: 2658131 - RNA, 19 nt, Artificial Sequence
  Description of Artificial Sequence: Synthetic oligonucleotide
uugguacuuuuguuucaga

SEQ ID NO: 2658132 - RNA, 19 nt, Artificial Sequence
  Description of Artificial Sequence: Synthetic oligonucleotide
gaacaucaaucuuccuguc

SEQ ID NO: 2658133 - RNA, 19 nt, Artificial Sequence
  Description of Artificial Sequence: Synthetic oligonucleotide
cuucaaugagcccucccca

SEQ ID NO: 2658134 - RNA, 19 nt, Artificial Sequence
  Description of Artificial Sequence: Synthetic oligonucleotide
cuccuucagauaauccauc

SEQ ID NO: 2658135 - RNA, 19 nt, Artificial Sequence
  Description of Artificial Sequence: Synthetic oligonucleotide
uugaguccacaucuacuuu

SEQ ID NO: 2658136 - RNA, 19 nt, Artificial Sequence
  Description of Artificial Sequence: Synthetic oligonucleotide
gcuacagagaaacuuuaaa

SEQ ID NO: 2658137 - RNA, 19 nt, Artificial Sequence
  Description of Artificial Sequence: Synthetic oligonucleotide
uccauugaacccagucuuu

SEQ ID NO: 2658138 - RNA, 19 nt, Artificial Sequence
  Description of Artificial Sequence: Synthetic oligonucleotide
agagccccugaaguccugc

SEQ ID NO: 2658139 - RNA, 19 nt, Artificial Sequence
  Description of Artificial Sequence: Synthetic oligonucleotide
aacaacaaagcggcugcuu

SEQ ID NO: 2658140 - RNA, 19 nt, Artificial Sequence
  Description of Artificial Sequence: Synthetic oligonucleotide
cagaagcccacuucuccac

SEQ ID NO: 2658141 - RNA, 19 nt, Artificial Sequence
  Description of Artificial Sequence: Synthetic oligonucleotide
guuucagacaguacacuaa

SEQ ID NO: 2658142 - RNA, 19 nt, Artificial Sequence
  Description of Artificial Sequence: Synthetic oligonucleotide
gaaugggaacaauuuugcu

SEQ ID NO: 2658143 - RNA, 19 nt, Artificial Sequence
  Description of Artificial Sequence: Synthetic oligonucleotide
cuuccugucaagaccuuaa

SEQ ID NO: 2658144 - RNA, 19 nt, Artificial Sequence
  Description of Artificial Sequence: Synthetic oligonucleotide
cuccuugcaguaagaugag

SEQ ID NO: 2658145 - RNA, 19 nt, Artificial Sequence
  Description of Artificial Sequence: Synthetic oligonucleotide
aagcccacuucuccacagu

SEQ ID NO: 2658146 - RNA, 19 nt, Artificial Sequence
  Description of Artificial Sequence: Synthetic oligonucleotide
cucuuugcauuucuuucca

SEQ ID NO: 2658147 - RNA, 19 nt, Artificial Sequence
  Description of Artificial Sequence: Synthetic oligonucleotide
aguugcacuuucuggccaa

SEQ ID NO: 2658148 - RNA, 19 nt, Artificial Sequence
  Description of Artificial Sequence: Synthetic oligonucleotide
agcguuagccacaauccgu

SEQ ID NO: 2658149 - RNA, 19 nt, Artificial Sequence
  Description of Artificial Sequence: Synthetic oligonucleotide
agccccugaaguccugcag

SEQ ID NO: 2658150 - RNA, 19 nt, Artificial Sequence
  Description of Artificial Sequence: Synthetic oligonucleotide
accuuaacucagaagccca

SEQ ID NO: 2658151 - RNA, 19 nt, Artificial Sequence
  Description of Artificial Sequence: Synthetic oligonucleotide
gcugcuuuaccaauggcuc

SEQ ID NO: 2658152 - RNA, 19 nt, Artificial Sequence
  Description of Artificial Sequence: Synthetic oligonucleotide
cuugcaguaagaugaguau

SEQ ID NO: 2658153 - RNA, 19 nt, Artificial Sequence
  Description of Artificial Sequence: Synthetic oligonucleotide
cauccauugaacccagucu

SEQ ID NO: 2658154 - RNA, 19 nt, Artificial Sequence
  Description of Artificial Sequence: Synthetic oligonucleotide
auucugagaagagccccug

SEQ ID NO: 2658155 - RNA, 19 nt, Artificial Sequence
  Description of Artificial Sequence: Synthetic oligonucleotide
cuucgaaugccagaaaccu

SEQ ID NO: 2658156 - RNA, 19 nt, Artificial Sequence
  Description of Artificial Sequence: Synthetic oligonucleotide
aagcggcugcuuuaccaau

SEQ ID NO: 2658157 - RNA, 19 nt, Artificial Sequence
  Description of Artificial Sequence: Synthetic oligonucleotide
ugacuucgaaugccagaaa

SEQ ID NO: 2658158 - RNA, 19 nt, Artificial Sequence
  Description of Artificial Sequence: Synthetic oligonucleotide
ugucuccuugcaguaagau

SEQ ID NO: 2658159 - RNA, 19 nt, Artificial Sequence
  Description of Artificial Sequence: Synthetic oligonucleotide
uuccguugguacuuuuguu

SEQ ID NO: 2658160 - RNA, 19 nt, Artificial Sequence
  Description of Artificial Sequence: Synthetic oligonucleotide
ugggaacaauuuugcuaca

SEQ ID NO: 2658161 - RNA, 19 nt, Artificial Sequence
  Description of Artificial Sequence: Synthetic oligonucleotide
cagguacuccuugauguug

SEQ ID NO: 2658162 - RNA, 19 nt, Artificial Sequence
  Description of Artificial Sequence: Synthetic oligonucleotide
guuccguugguacuuuugu

SEQ ID NO: 2658163 - RNA, 19 nt, Artificial Sequence
  Description of Artificial Sequence: Synthetic oligonucleotide
ugcucucaugugaucuaaa

SEQ ID NO: 2658164 - RNA, 19 nt, Artificial Sequence
  Description of Artificial Sequence: Synthetic oligonucleotide
uuguguuccguugguacuu

SEQ ID NO: 2658165 - RNA, 19 nt, Artificial Sequence
  Description of Artificial Sequence: Synthetic oligonucleotide
uugcucucuuaugauuacu

SEQ ID NO: 2658166 - RNA, 19 nt, Artificial Sequence
  Description of Artificial Sequence: Synthetic oligonucleotide
ccagaaaccuuuuguguuc

SEQ ID NO: 2658167 - RNA, 19 nt, Artificial Sequence
  Description of Artificial Sequence: Synthetic oligonucleotide
uuacuucaaugagcccucc

SEQ ID NO: 2658168 - RNA, 19 nt, Artificial Sequence
  Description of Artificial Sequence: Synthetic oligonucleotide
cccaagcacacauucugag

SEQ ID NO: 2658169 - RNA, 19 nt, Artificial Sequence
  Description of Artificial Sequence: Synthetic oligonucleotide
gaguauuguuuugcccaug

SEQ ID NO: 2658170 - RNA, 19 nt, Artificial Sequence
  Description of Artificial Sequence: Synthetic oligonucleotide
agccacaauccgucaucag

SEQ ID NO: 2658171 - RNA, 19 nt, Artificial Sequence
  Description of Artificial Sequence: Synthetic oligonucleotide
agcaaacauuagaauacau

SEQ ID NO: 2658172 - RNA, 19 nt, Artificial Sequence
  Description of Artificial Sequence: Synthetic oligonucleotide
gcggcugcuuuaccaaugg

SEQ ID NO: 2658173 - RNA, 19 nt, Artificial Sequence
  Description of Artificial Sequence: Synthetic oligonucleotide
agggucuuuucauguuuaa

SEQ ID NO: 2658174 - RNA, 19 nt, Artificial Sequence
  Description of Artificial Sequence: Synthetic oligonucleotide
uagaauacauagggucuuu

SEQ ID NO: 2658175 - RNA, 19 nt, Artificial Sequence
  Description of Artificial Sequence: Synthetic oligonucleotide
ucgcuuucuucggggaaug

SEQ ID NO: 2658176 - RNA, 19 nt, Artificial Sequence
  Description of Artificial Sequence: Synthetic oligonucleotide
cuccuccaauguugaauac

SEQ ID NO: 2658177 - RNA, 19 nt, Artificial Sequence
  Description of Artificial Sequence: Synthetic oligonucleotide
gcucucuuaugauuacuuc

SEQ ID NO: 2658178 - RNA, 19 nt, Artificial Sequence
  Description of Artificial Sequence: Synthetic oligonucleotide
auuuugcuacagagaaacu

SEQ ID NO: 2658179 - RNA, 19 nt, Artificial Sequence
  Description of Artificial Sequence: Synthetic oligonucleotide
acaguacacuaaucauuuu

SEQ ID NO: 2658180 - RNA, 19 nt, Artificial Sequence
  Description of Artificial Sequence: Synthetic oligonucleotide
agaauacauagggucuuuu

SEQ ID NO: 2658181 - RNA, 19 nt, Artificial Sequence
  Description of Artificial Sequence: Synthetic oligonucleotide
uuucuggccaagugcccuu

SEQ ID NO: 2658182 - RNA, 19 nt, Artificial Sequence
  Description of Artificial Sequence: Synthetic oligonucleotide
acucgcuuucuucggggaa

SEQ ID NO: 2658183 - RNA, 19 nt, Artificial Sequence
  Description of Artificial Sequence: Synthetic oligonucleotide
guauuguuuugcccaugaa

SEQ ID NO: 2658184 - RNA, 19 nt, Artificial Sequence
  Description of Artificial Sequence: Synthetic oligonucleotide
gucaagaccuuaacucaga

SEQ ID NO: 2658185 - RNA, 19 nt, Artificial Sequence
  Description of Artificial Sequence: Synthetic oligonucleotide
uuaccagcccaagcacaca

SEQ ID NO: 2658186 - RNA, 19 nt, Artificial Sequence
  Description of Artificial Sequence: Synthetic oligonucleotide
agcccacuucuccacaguu

SEQ ID NO: 2658187 - RNA, 19 nt, Artificial Sequence
  Description of Artificial Sequence: Synthetic oligonucleotide
accaauggcuccugucauu

SEQ ID NO: 2658188 - RNA, 19 nt, Artificial Sequence
  Description of Artificial Sequence: Synthetic oligonucleotide
ccuugcaguaagaugagua

SEQ ID NO: 2658189 - RNA, 19 nt, Artificial Sequence
  Description of Artificial Sequence: Synthetic oligonucleotide
auccgucaucaguugcacu

SEQ ID NO: 2658190 - RNA, 19 nt, Artificial Sequence
  Description of Artificial Sequence: Synthetic oligonucleotide
uccuugcaguaagaugagu

SEQ ID NO: 2658191 - RNA, 19 nt, Artificial Sequence
  Description of Artificial Sequence: Synthetic oligonucleotide
caguuuugacauauuuagu

SEQ ID NO: 2658192 - RNA, 19 nt, Artificial Sequence
  Description of Artificial Sequence: Synthetic oligonucleotide
ccuauaaacagaacucgcu

SEQ ID NO: 2658193 - RNA, 19 nt, Artificial Sequence
  Description of Artificial Sequence: Synthetic oligonucleotide
ccagcccaagcacacauuc

SEQ ID NO: 2658194 - RNA, 19 nt, Artificial Sequence
  Description of Artificial Sequence: Synthetic oligonucleotide
caacaaagcggcugcuuua

SEQ ID NO: 2658195 - RNA, 19 nt, Artificial Sequence
  Description of Artificial Sequence: Synthetic oligonucleotide
uccuugcucucaugugauc

SEQ ID NO: 2658196 - RNA, 19 nt, Artificial Sequence
  Description of Artificial Sequence: Synthetic oligonucleotide
cuugcucucaugugaucua

SEQ ID NO: 2658197 - RNA, 19 nt, Artificial Sequence
  Description of Artificial Sequence: Synthetic oligonucleotide
auccauccauugaacccag

SEQ ID NO: 2658198 - RNA, 19 nt, Artificial Sequence
  Description of Artificial Sequence: Synthetic oligonucleotide
agcggcugcuuuaccaaug

SEQ ID NO: 2658199 - RNA, 19 nt, Artificial Sequence
  Description of Artificial Sequence: Synthetic oligonucleotide
guuagccacaauccgucau

SEQ ID NO: 2658200 - RNA, 19 nt, Artificial Sequence
  Description of Artificial Sequence: Synthetic oligonucleotide
caguugcacuuucuggcca

SEQ ID NO: 2658201 - RNA, 19 nt, Artificial Sequence
  Description of Artificial Sequence: Synthetic oligonucleotide
uccauccauugaacccagu

SEQ ID NO: 2658202 - RNA, 19 nt, Artificial Sequence
  Description of Artificial Sequence: Synthetic oligonucleotide
cuucugucuccuugcagua

SEQ ID NO: 2658203 - RNA, 19 nt, Artificial Sequence
  Description of Artificial Sequence: Synthetic oligonucleotide
gggucuuuucauguuuaac

SEQ ID NO: 2658204 - RNA, 19 nt, Artificial Sequence
  Description of Artificial Sequence: Synthetic oligonucleotide
gccacaauccgucaucagu

SEQ ID NO: 2658205 - RNA, 19 nt, Artificial Sequence
  Description of Artificial Sequence: Synthetic oligonucleotide
ucuccacaguuuugacaua

SEQ ID NO: 2658206 - RNA, 19 nt, Artificial Sequence
  Description of Artificial Sequence: Synthetic oligonucleotide
uguguuccguugguacuuu

SEQ ID NO: 2658207 - RNA, 19 nt, Artificial Sequence
  Description of Artificial Sequence: Synthetic oligonucleotide
ccaauggcuccugucauuc

SEQ ID NO: 2658208 - RNA, 19 nt, Artificial Sequence
  Description of Artificial Sequence: Synthetic oligonucleotide
gagccccugaaguccugca

SEQ ID NO: 2658209 - RNA, 19 nt, Artificial Sequence
  Description of Artificial Sequence: Synthetic oligonucleotide
gcguuagccacaauccguc

SEQ ID NO: 2658210 - RNA, 19 nt, Artificial Sequence
  Description of Artificial Sequence: Synthetic oligonucleotide
cugucuccuugcaguaaga

SEQ ID NO: 2658211 - RNA, 19 nt, Artificial Sequence
  Description of Artificial Sequence: Synthetic oligonucleotide
ccuucagauaauccaucca

SEQ ID NO: 2658212 - RNA, 19 nt, Artificial Sequence
  Description of Artificial Sequence: Synthetic oligonucleotide
uucggggaaugggaacaau

SEQ ID NO: 2658213 - RNA, 19 nt, Artificial Sequence
  Description of Artificial Sequence: Synthetic oligonucleotide
cuccaauguugaauacucu

SEQ ID NO: 2658214 - RNA, 19 nt, Artificial Sequence
  Description of Artificial Sequence: Synthetic oligonucleotide
cuuuuguguuccguuggua

SEQ ID NO: 2658215 - RNA, 19 nt, Artificial Sequence
  Description of Artificial Sequence: Synthetic oligonucleotide
gccagaaaccuuuuguguu

SEQ ID NO: 2658216 - RNA, 19 nt, Artificial Sequence
  Description of Artificial Sequence: Synthetic oligonucleotide
caauggcuccugucauuca

SEQ ID NO: 2658217 - RNA, 19 nt, Artificial Sequence
  Description of Artificial Sequence: Synthetic oligonucleotide
caguaagaugaguauuguu

SEQ ID NO: 2658218 - RNA, 19 nt, Artificial Sequence
  Description of Artificial Sequence: Synthetic oligonucleotide
acucaacaacaaagcggcu

SEQ ID NO: 2658219 - RNA, 19 nt, Artificial Sequence
  Description of Artificial Sequence: Synthetic oligonucleotide
cucuuaugauuacuucaau

SEQ ID NO: 2658220 - RNA, 19 nt, Artificial Sequence
  Description of Artificial Sequence: Synthetic oligonucleotide
gcaaaagcguuagccacaa

SEQ ID NO: 2658221 - RNA, 19 nt, Artificial Sequence
  Description of Artificial Sequence: Synthetic oligonucleotide
ccaauguugaauacucuuu

SEQ ID NO: 2658222 - RNA, 19 nt, Artificial Sequence
  Description of Artificial Sequence: Synthetic oligonucleotide
caugaacaucaaucuuccu

SEQ ID NO: 2658223 - RNA, 19 nt, Artificial Sequence
  Description of Artificial Sequence: Synthetic oligonucleotide
ggggaaugggaacaauuuu

SEQ ID NO: 2658224 - RNA, 19 nt, Artificial Sequence
  Description of Artificial Sequence: Synthetic oligonucleotide
cuuuaccaauggcuccugu

SEQ ID NO: 2658225 - RNA, 19 nt, Artificial Sequence
  Description of Artificial Sequence: Synthetic oligonucleotide
ccacaauccgucaucaguu

SEQ ID NO: 2658226 - RNA, 19 nt, Artificial Sequence
  Description of Artificial Sequence: Synthetic oligonucleotide
gcuuuaccaauggcuccug

SEQ ID NO: 2658227 - RNA, 19 nt, Artificial Sequence
  Description of Artificial Sequence: Synthetic oligonucleotide
gcaguaagaugaguauugu

SEQ ID NO: 2658228 - RNA, 19 nt, Artificial Sequence
  Description of Artificial Sequence: Synthetic oligonucleotide
gaagaaccagguacuccuu

SEQ ID NO: 2658229 - RNA, 19 nt, Artificial Sequence
  Description of Artificial Sequence: Synthetic oligonucleotide
cuucggggaaugggaacaa

SEQ ID NO: 2658230 - RNA, 19 nt, Artificial Sequence
  Description of Artificial Sequence: Synthetic oligonucleotide
auguugcuucugucuccuu

SEQ ID NO: 2658231 - RNA, 19 nt, Artificial Sequence
  Description of Artificial Sequence: Synthetic oligonucleotide
cagcccaagcacacauucu

SEQ ID NO: 2658232 - RNA, 19 nt, Artificial Sequence
  Description of Artificial Sequence: Synthetic oligonucleotide
ccacaucuacuuuggaggu

SEQ ID NO: 2658233 - RNA, 19 nt, Artificial Sequence
  Description of Artificial Sequence: Synthetic oligonucleotide
cucgcuuucuucggggaau

SEQ ID NO: 2658234 - RNA, 19 nt, Artificial Sequence
  Description of Artificial Sequence: Synthetic oligonucleotide
ccuugcucucaugugaucu

SEQ ID NO: 2658235 - RNA, 19 nt, Artificial Sequence
  Description of Artificial Sequence: Synthetic oligonucleotide
gccccugaaguccugcagu

SEQ ID NO: 2658236 - RNA, 19 nt, Artificial Sequence
  Description of Artificial Sequence: Synthetic oligonucleotide
cccagucuuuuccagcaaa

SEQ ID NO: 2658237 - RNA, 19 nt, Artificial Sequence
  Description of Artificial Sequence: Synthetic oligonucleotide
cguugguacuuuuguuuca

SEQ ID NO: 2658238 - RNA, 19 nt, Artificial Sequence
  Description of Artificial Sequence: Synthetic oligonucleotide
cgucaucaguugcacuuuc

SEQ ID NO: 2658239 - RNA, 19 nt, Artificial Sequence
  Description of Artificial Sequence: Synthetic oligonucleotide
accagcccaagcacacauu

SEQ ID NO: 2658240 - RNA, 19 nt, Artificial Sequence
  Description of Artificial Sequence: Synthetic oligonucleotide
caacaacaaagcggcugcu

SEQ ID NO: 2658241 - RNA, 19 nt, Artificial Sequence
  Description of Artificial Sequence: Synthetic oligonucleotide
guacuccuugauguugcuu

SEQ ID NO: 2658242 - RNA, 19 nt, Artificial Sequence
  Description of Artificial Sequence: Synthetic oligonucleotide
gcccaugaacaucaaucuu

SEQ ID NO: 2658243 - RNA, 19 nt, Artificial Sequence
  Description of Artificial Sequence: Synthetic oligonucleotide
cguuagccacaauccguca

SEQ ID NO: 2658244 - RNA, 19 nt, Artificial Sequence
  Description of Artificial Sequence: Synthetic oligonucleotide
cccaaaggcagaggaaacu

SEQ ID NO: 2658245 - RNA, 19 nt, Artificial Sequence
  Description of Artificial Sequence: Synthetic oligonucleotide
ccacuugaguccacaucua

SEQ ID NO: 2658246 - RNA, 19 nt, Artificial Sequence
  Description of Artificial Sequence: Synthetic oligonucleotide
cacaucuacuuuggagguu

SEQ ID NO: 2658247 - RNA, 19 nt, Artificial Sequence
  Description of Artificial Sequence: Synthetic oligonucleotide
cggggaaugggaacaauuu

SEQ ID NO: 2658248 - RNA, 19 nt, Artificial Sequence
  Description of Artificial Sequence: Synthetic oligonucleotide
guguuccguugguacuuuu

SEQ ID NO: 2658249 - RNA, 19 nt, Artificial Sequence
  Description of Artificial Sequence: Synthetic oligonucleotide
caaaagcguuagccacaau

SEQ ID NO: 2658250 - RNA, 19 nt, Artificial Sequence
  Description of Artificial Sequence: Synthetic oligonucleotide
cgaaugccagaaaccuuuu

SEQ ID NO: 2658251 - RNA, 19 nt, Artificial Sequence
  Description of Artificial Sequence: Synthetic oligonucleotide
ccgucaucaguugcacuuu

SEQ ID NO: 2658252 - RNA, 19 nt, Artificial Sequence
  Description of Artificial Sequence: Synthetic oligonucleotide
uaaacuuguaauuauaugc

SEQ ID NO: 2658253 - RNA, 19 nt, Artificial Sequence
  Description of Artificial Sequence: Synthetic oligonucleotide
aauuauaugcuccaacguc

SEQ ID NO: 2658254 - RNA, 19 nt, Artificial Sequence
  Description of Artificial Sequence: Synthetic oligonucleotide
guaauuauaugcuccaacg

SEQ ID NO: 2658255 - RNA, 19 nt, Artificial Sequence
  Description of Artificial Sequence: Synthetic oligonucleotide
aacuuguaauuauaugcuc

SEQ ID NO: 2658256 - RNA, 19 nt, Artificial Sequence
  Description of Artificial Sequence: Synthetic oligonucleotide
uguaauuauaugcuccaac

SEQ ID NO: 2658257 - RNA, 19 nt, Artificial Sequence
  Description of Artificial Sequence: Synthetic oligonucleotide
auaaacuuguaauuauaug

SEQ ID NO: 2658258 - RNA, 19 nt, Artificial Sequence
  Description of Artificial Sequence: Synthetic oligonucleotide
aaacuuguaauuauaugcu

SEQ ID NO: 2658259 - RNA, 19 nt, Artificial Sequence
  Description of Artificial Sequence: Synthetic oligonucleotide
ucccaauagaggaugaugu

SEQ ID NO: 2658260 - RNA, 19 nt, Artificial Sequence
  Description of Artificial Sequence: Synthetic oligonucleotide
uaauuauaugcuccaacgu

SEQ ID NO: 2658261 - RNA, 19 nt, Artificial Sequence
  Description of Artificial Sequence: Synthetic oligonucleotide
ucugaaaggaaguucccug

SEQ ID NO: 2658262 - RNA, 19 nt, Artificial Sequence
  Description of Artificial Sequence: Synthetic oligonucleotide
agaagccggagacaguggc

SEQ ID NO: 2658263 - RNA, 19 nt, Artificial Sequence
  Description of Artificial Sequence: Synthetic oligonucleotide
uugacaaccaggccguccc

SEQ ID NO: 2658264 - RNA, 19 nt, Artificial Sequence
  Description of Artificial Sequence: Synthetic oligonucleotide
gagacaguggcacacgaac

SEQ ID NO: 2658265 - RNA, 19 nt, Artificial Sequence
  Description of Artificial Sequence: Synthetic oligonucleotide
acacgaacugcaaauggcc

SEQ ID NO: 2658266 - RNA, 19 nt, Artificial Sequence
  Description of Artificial Sequence: Synthetic oligonucleotide
auuauaugcuccaacgucu

SEQ ID NO: 2658267 - RNA, 19 nt, Artificial Sequence
  Description of Artificial Sequence: Synthetic oligonucleotide
auagaggaugauguccugc

SEQ ID NO: 2658268 - RNA, 19 nt, Artificial Sequence
  Description of Artificial Sequence: Synthetic oligonucleotide
uagaggaugauguccugcc

SEQ ID NO: 2658269 - RNA, 19 nt, Artificial Sequence
  Description of Artificial Sequence: Synthetic oligonucleotide
cacacgaacugcaaauggc

SEQ ID NO: 2658270 - RNA, 19 nt, Artificial Sequence
  Description of Artificial Sequence: Synthetic oligonucleotide
ucgauaaacuuguaauuau

SEQ ID NO: 2658271 - RNA, 19 nt, Artificial Sequence
  Description of Artificial Sequence: Synthetic oligonucleotide
aagccggagacaguggcac

SEQ ID NO: 2658272 - RNA, 19 nt, Artificial Sequence
  Description of Artificial Sequence: Synthetic oligonucleotide
gacaguggcacacgaacug

SEQ ID NO: 2658273 - RNA, 19 nt, Artificial Sequence
  Description of Artificial Sequence: Synthetic oligonucleotide
aauagaggaugauguccug

SEQ ID NO: 2658274 - RNA, 19 nt, Artificial Sequence
  Description of Artificial Sequence: Synthetic oligonucleotide
ucuggggccuucugaaagg

SEQ ID NO: 2658275 - RNA, 19 nt, Artificial Sequence
  Description of Artificial Sequence: Synthetic oligonucleotide
aucuggggccuucugaaag

SEQ ID NO: 2658276 - RNA, 19 nt, Artificial Sequence
  Description of Artificial Sequence: Synthetic oligonucleotide
guagaagccggagacagug

SEQ ID NO: 2658277 - RNA, 19 nt, Artificial Sequence
  Description of Artificial Sequence: Synthetic oligonucleotide
acaguggcacacgaacugc

SEQ ID NO: 2658278 - RNA, 19 nt, Artificial Sequence
  Description of Artificial Sequence: Synthetic oligonucleotide
  modified_base (4)..(4): a, c, u, g, unknown or other
uucnccaacugugcguuug

SEQ ID NO: 2658279 - RNA, 19 nt, Artificial Sequence
  Description of Artificial Sequence: Synthetic oligonucleotide
gauaaacuuguaauuauau

SEQ ID NO: 2658280 - RNA, 19 nt, Artificial Sequence
  Description of Artificial Sequence: Synthetic oligonucleotide
uagaagccggagacagugg

SEQ ID NO: 2658281 - RNA, 19 nt, Artificial Sequence
  Description of Artificial Sequence: Synthetic oligonucleotide
uucugaaaggaaguucccu

SEQ ID NO: 2658282 - RNA, 19 nt, Artificial Sequence
  Description of Artificial Sequence: Synthetic oligonucleotide
cugccaucccaauagagga

SEQ ID NO: 2658283 - RNA, 19 nt, Artificial Sequence
  Description of Artificial Sequence: Synthetic oligonucleotide
  modified_base (3)..(3): a, c, u, g, unknown or other
ucnccaacugugcguuugc

SEQ ID NO: 2658284 - RNA, 19 nt, Artificial Sequence
  Description of Artificial Sequence: Synthetic oligonucleotide
aucccaauagaggaugaug

SEQ ID NO: 2658285 - RNA, 19 nt, Artificial Sequence
  Description of Artificial Sequence: Synthetic oligonucleotide
uggcacacgaacugcaaau

SEQ ID NO: 2658286 - RNA, 19 nt, Artificial Sequence
  Description of Artificial Sequence: Synthetic oligonucleotide
ccaauagaggaugaugucc

SEQ ID NO: 2658287 - RNA, 19 nt, Artificial Sequence
  Description of Artificial Sequence: Synthetic oligonucleotide
  modified_base (8)..(8): a, c, u, g, unknown or other
gcauuucnccaacugugcg

SEQ ID NO: 2658288 - RNA, 19 nt, Artificial Sequence
  Description of Artificial Sequence: Synthetic oligonucleotide
gcacacgaacugcaaaugg

SEQ ID NO: 2658289 - RNA, 19 nt, Artificial Sequence
  Description of Artificial Sequence: Synthetic oligonucleotide
caauagaggaugauguccu

SEQ ID NO: 2658290 - RNA, 19 nt, Artificial Sequence
  Description of Artificial Sequence: Synthetic oligonucleotide
  modified_base (6)..(6): a, c, u, g, unknown or other
auuucnccaacugugcguu

SEQ ID NO: 2658291 - RNA, 19 nt, Artificial Sequence
  Description of Artificial Sequence: Synthetic oligonucleotide
acgaacugcaaauggccau

SEQ ID NO: 2658292 - RNA, 19 nt, Artificial Sequence
  Description of Artificial Sequence: Synthetic oligonucleotide
acaaccaggccgucccuug

SEQ ID NO: 2658293 - RNA, 19 nt, Artificial Sequence
  Description of Artificial Sequence: Synthetic oligonucleotide
cuugacaaccaggccgucc

SEQ ID NO: 2658294 - RNA, 19 nt, Artificial Sequence
  Description of Artificial Sequence: Synthetic oligonucleotide
uuguaauuauaugcuccaa

SEQ ID NO: 2658295 - RNA, 19 nt, Artificial Sequence
  Description of Artificial Sequence: Synthetic oligonucleotide
  modified_base (7)..(7): a, c, u, g, unknown or other
cauuucnccaacugugcgu

SEQ ID NO: 2658296 - RNA, 19 nt, Artificial Sequence
  Description of Artificial Sequence: Synthetic oligonucleotide
cacgaacugcaaauggcca

SEQ ID NO: 2658297 - RNA, 19 nt, Artificial Sequence
  Description of Artificial Sequence: Synthetic oligonucleotide
accaggccgucccuugauc

SEQ ID NO: 2658298 - RNA, 19 nt, Artificial Sequence
  Description of Artificial Sequence: Synthetic oligonucleotide
ggggccuucugaaaggaag

SEQ ID NO: 2658299 - RNA, 19 nt, Artificial Sequence
  Description of Artificial Sequence: Synthetic oligonucleotide
ugccaucccaauagaggau

SEQ ID NO: 2658300 - RNA, 19 nt, Artificial Sequence
  Description of Artificial Sequence: Synthetic oligonucleotide
  modified_base (9)..(9): a, c, u, g, unknown or other
ggcauuucnccaacugugc

SEQ ID NO: 2658301 - RNA, 19 nt, Artificial Sequence
  Description of Artificial Sequence: Synthetic oligonucleotide
aaccaggccgucccuugau

SEQ ID NO: 2658302 - RNA, 19 nt, Artificial Sequence
  Description of Artificial Sequence: Synthetic oligonucleotide
agacaguggcacacgaacu

SEQ ID NO: 2658303 - RNA, 19 nt, Artificial Sequence
  Description of Artificial Sequence: Synthetic oligonucleotide
caggccgucccuugaucag

SEQ ID NO: 2658304 - RNA, 19 nt, Artificial Sequence
  Description of Artificial Sequence: Synthetic oligonucleotide
ugacaaccaggccgucccu

SEQ ID NO: 2658305 - RNA, 19 nt, Artificial Sequence
  Description of Artificial Sequence: Synthetic oligonucleotide
gaagccggagacaguggca

SEQ ID NO: 2658306 - RNA, 19 nt, Artificial Sequence
  Description of Artificial Sequence: Synthetic oligonucleotide
gccaucccaauagaggaug

SEQ ID NO: 2658307 - RNA, 19 nt, Artificial Sequence
  Description of Artificial Sequence: Synthetic oligonucleotide
ggcacacgaacugcaaaug

SEQ ID NO: 2658308 - RNA, 19 nt, Artificial Sequence
  Description of Artificial Sequence: Synthetic oligonucleotide
caguggcacacgaacugca

SEQ ID NO: 2658309 - RNA, 19 nt, Artificial Sequence
  Description of Artificial Sequence: Synthetic oligonucleotide
uggggccuucugaaaggaa

SEQ ID NO: 2658310 - RNA, 19 nt, Artificial Sequence
  Description of Artificial Sequence: Synthetic oligonucleotide
cccaauagaggaugauguc

SEQ ID NO: 2658311 - RNA, 19 nt, Artificial Sequence
  Description of Artificial Sequence: Synthetic oligonucleotide
ggcaucuggggccuucuga

SEQ ID NO: 2658312 - RNA, 19 nt, Artificial Sequence
  Description of Artificial Sequence: Synthetic oligonucleotide
gcaucuggggccuucugaa

SEQ ID NO: 2658313 - RNA, 19 nt, Artificial Sequence
  Description of Artificial Sequence: Synthetic oligonucleotide
  modified_base (5)..(5): a, c, u, g, unknown or other
uuucnccaacugugcguuu

SEQ ID NO: 2658314 - RNA, 19 nt, Artificial Sequence
  Description of Artificial Sequence: Synthetic oligonucleotide
acuugacaaccaggccguc

SEQ ID NO: 2658315 - RNA, 19 nt, Artificial Sequence
  Description of Artificial Sequence: Synthetic oligonucleotide
aguggcacacgaacugcaa

SEQ ID NO: 2658316 - RNA, 19 nt, Artificial Sequence
  Description of Artificial Sequence: Synthetic oligonucleotide
gccuucugaaaggaaguuc

SEQ ID NO: 2658317 - RNA, 19 nt, Artificial Sequence
  Description of Artificial Sequence: Synthetic oligonucleotide
agccggagacaguggcaca

SEQ ID NO: 2658318 - RNA, 19 nt, Artificial Sequence
  Description of Artificial Sequence: Synthetic oligonucleotide
aggccgucccuugaucagu

SEQ ID NO: 2658319 - RNA, 19 nt, Artificial Sequence
  Description of Artificial Sequence: Synthetic oligonucleotide
cgauaaacuuguaauuaua

SEQ ID NO: 2658320 - RNA, 19 nt, Artificial Sequence
  Description of Artificial Sequence: Synthetic oligonucleotide
caucuggggccuucugaaa

SEQ ID NO: 2658321 - RNA, 19 nt, Artificial Sequence
  Description of Artificial Sequence: Synthetic oligonucleotide
cgaacugcaaauggccaug

SEQ ID NO: 2658322 - RNA, 19 nt, Artificial Sequence
  Description of Artificial Sequence: Synthetic oligonucleotide
caaccaggccgucccuuga

SEQ ID NO: 2658323 - RNA, 19 nt, Artificial Sequence
  Description of Artificial Sequence: Synthetic oligonucleotide
cuggggccuucugaaagga

SEQ ID NO: 2658324 - RNA, 19 nt, Artificial Sequence
  Description of Artificial Sequence: Synthetic oligonucleotide
gccggagacaguggcacac

SEQ ID NO: 2658325 - RNA, 19 nt, Artificial Sequence
  Description of Artificial Sequence: Synthetic oligonucleotide
ccaggccgucccuugauca

SEQ ID NO: 2658326 - RNA, 19 nt, Artificial Sequence
  Description of Artificial Sequence: Synthetic oligonucleotide
  modified_base (2)..(2): a, c, u, g, unknown or other
cnccaacugugcguuugca

SEQ ID NO: 2658327 - RNA, 19 nt, Artificial Sequence
  Description of Artificial Sequence: Synthetic oligonucleotide
ccaucccaauagaggauga

SEQ ID NO: 2658328 - RNA, 19 nt, Artificial Sequence
  Description of Artificial Sequence: Synthetic oligonucleotide
ggccgucccuugaucagug

SEQ ID NO: 2658329 - RNA, 19 nt, Artificial Sequence
  Description of Artificial Sequence: Synthetic oligonucleotide
ggagacaguggcacacgaa

SEQ ID NO: 2658330 - RNA, 19 nt, Artificial Sequence
  Description of Artificial Sequence: Synthetic oligonucleotide
ccggagacaguggcacacg

SEQ ID NO: 2658331 - RNA, 19 nt, Artificial Sequence
  Description of Artificial Sequence: Synthetic oligonucleotide
gacaaccaggccgucccuu

SEQ ID NO: 2658332 - RNA, 19 nt, Artificial Sequence
  Description of Artificial Sequence: Synthetic oligonucleotide
caucccaauagaggaugau

SEQ ID NO: 2658333 - RNA, 19 nt, Artificial Sequence
  Description of Artificial Sequence: Synthetic oligonucleotide
cggagacaguggcacacga

SEQ ID NO: 2658334 - RNA, 19 nt, Artificial Sequence
  Description of Artificial Sequence: Synthetic oligonucleotide
ggccuucugaaaggaaguu

SEQ ID NO: 2658335 - RNA, 19 nt, Artificial Sequence
  Description of Artificial Sequence: Synthetic oligonucleotide
ccgucccuugaucaguguu

SEQ ID NO: 2658336 - RNA, 19 nt, Artificial Sequence
  Description of Artificial Sequence: Synthetic oligonucleotide
gccgucccuugaucagugu

SEQ ID NO: 2658337 - RNA, 19 nt, Artificial Sequence
  Description of Artificial Sequence: Synthetic oligonucleotide
ugaagaaucgcucacacug

SEQ ID NO: 2658338 - RNA, 19 nt, Artificial Sequence
  Description of Artificial Sequence: Synthetic oligonucleotide
aucaguauauuccaggagc

SEQ ID NO: 2658339 - RNA, 19 nt, Artificial Sequence
  Description of Artificial Sequence: Synthetic oligonucleotide
ucuaguuugaauuucacgu

SEQ ID NO: 2658340 - RNA, 19 nt, Artificial Sequence
  Description of Artificial Sequence: Synthetic oligonucleotide
acaaagguaagcuuuuccc

SEQ ID NO: 2658341 - RNA, 19 nt, Artificial Sequence
  Description of Artificial Sequence: Synthetic oligonucleotide
aaugagaacuguuucagcu

SEQ ID NO: 2658342 - RNA, 19 nt, Artificial Sequence
  Description of Artificial Sequence: Synthetic oligonucleotide
aaacauacgguucuggucu

SEQ ID NO: 2658343 - RNA, 19 nt, Artificial Sequence
  Description of Artificial Sequence: Synthetic oligonucleotide
aaaacggcacaugaaagcc

SEQ ID NO: 2658344 - RNA, 19 nt, Artificial Sequence
  Description of Artificial Sequence: Synthetic oligonucleotide
ucagaauuguagcagagcc

SEQ ID NO: 2658345 - RNA, 19 nt, Artificial Sequence
  Description of Artificial Sequence: Synthetic oligonucleotide
aaaccaugagaauuucccc

SEQ ID NO: 2658346 - RNA, 19 nt, Artificial Sequence
  Description of Artificial Sequence: Synthetic oligonucleotide
ucuaagacgucauagguga

SEQ ID NO: 2658347 - RNA, 19 nt, Artificial Sequence
  Description of Artificial Sequence: Synthetic oligonucleotide
auuggcuucuaucauaguc

SEQ ID NO: 2658348 - RNA, 19 nt, Artificial Sequence
  Description of Artificial Sequence: Synthetic oligonucleotide
aaugcagcaauuuucucca

SEQ ID NO: 2658349 - RNA, 19 nt, Artificial Sequence
  Description of Artificial Sequence: Synthetic oligonucleotide
caaauuugggaacucaucc

SEQ ID NO: 2658350 - RNA, 19 nt, Artificial Sequence
  Description of Artificial Sequence: Synthetic oligonucleotide
caaaccaugagaauuuccc

SEQ ID NO: 2658351 - RNA, 19 nt, Artificial Sequence
  Description of Artificial Sequence: Synthetic oligonucleotide
guuaggaaaauccagaucu

SEQ ID NO: 2658352 - RNA, 19 nt, Artificial Sequence
  Description of Artificial Sequence: Synthetic oligonucleotide
aagcuuuuccccugcaaac

SEQ ID NO: 2658353 - RNA, 19 nt, Artificial Sequence
  Description of Artificial Sequence: Synthetic oligonucleotide
agaauuguagcagagccgg

SEQ ID NO: 2658354 - RNA, 19 nt, Artificial Sequence
  Description of Artificial Sequence: Synthetic oligonucleotide
aguuguuccaaguacugag

SEQ ID NO: 2658355 - RNA, 19 nt, Artificial Sequence
  Description of Artificial Sequence: Synthetic oligonucleotide
ucaaaacggcacaugaaag

SEQ ID NO: 2658356 - RNA, 19 nt, Artificial Sequence
  Description of Artificial Sequence: Synthetic oligonucleotide
agcauaugcacuuguugcc

SEQ ID NO: 2658357 - RNA, 19 nt, Artificial Sequence
  Description of Artificial Sequence: Synthetic oligonucleotide
aagccuucaaauuugggaa

SEQ ID NO: 2658358 - RNA, 19 nt, Artificial Sequence
  Description of Artificial Sequence: Synthetic oligonucleotide
aauuguagcagagccggac

SEQ ID NO: 2658359 - RNA, 19 nt, Artificial Sequence
  Description of Artificial Sequence: Synthetic oligonucleotide
aaguccauuaucugguucu

SEQ ID NO: 2658360 - RNA, 19 nt, Artificial Sequence
  Description of Artificial Sequence: Synthetic oligonucleotide
uaguuugaauuucacgucc

SEQ ID NO: 2658361 - RNA, 19 nt, Artificial Sequence
  Description of Artificial Sequence: Synthetic oligonucleotide
gaaucgcucacacugcagg

SEQ ID NO: 2658362 - RNA, 19 nt, Artificial Sequence
  Description of Artificial Sequence: Synthetic oligonucleotide
aaauuugggaacucaucca

SEQ ID NO: 2658363 - RNA, 19 nt, Artificial Sequence
  Description of Artificial Sequence: Synthetic oligonucleotide
gauguaacgcaagauggcg

SEQ ID NO: 2658364 - RNA, 19 nt, Artificial Sequence
  Description of Artificial Sequence: Synthetic oligonucleotide
aaccaugagaauuucccca

SEQ ID NO: 2658365 - RNA, 19 nt, Artificial Sequence
  Description of Artificial Sequence: Synthetic oligonucleotide
aucuaguuugaauuucacg

SEQ ID NO: 2658366 - RNA, 19 nt, Artificial Sequence
  Description of Artificial Sequence: Synthetic oligonucleotide
cuugggcucaaacauacgg

SEQ ID NO: 2658367 - RNA, 19 nt, Artificial Sequence
  Description of Artificial Sequence: Synthetic oligonucleotide
uucacguccagccauuggc

SEQ ID NO: 2658368 - RNA, 19 nt, Artificial Sequence
  Description of Artificial Sequence: Synthetic oligonucleotide
auuguagcagagccggacc

SEQ ID NO: 2658369 - RNA, 19 nt, Artificial Sequence
  Description of Artificial Sequence: Synthetic oligonucleotide
agguaguuguuccaaguac

SEQ ID NO: 2658370 - RNA, 19 nt, Artificial Sequence
  Description of Artificial Sequence: Synthetic oligonucleotide
auugauuggcaucuugaag

SEQ ID NO: 2658371 - RNA, 19 nt, Artificial Sequence
  Description of Artificial Sequence: Synthetic oligonucleotide
aaguacugaggcuucaggu

SEQ ID NO: 2658372 - RNA, 19 nt, Artificial Sequence
  Description of Artificial Sequence: Synthetic oligonucleotide
ucagcauaugcacuuguug

SEQ ID NO: 2658373 - RNA, 19 nt, Artificial Sequence
  Description of Artificial Sequence: Synthetic oligonucleotide
aaaguccacaaagguaagc

SEQ ID NO: 2658374 - RNA, 19 nt, Artificial Sequence
  Description of Artificial Sequence: Synthetic oligonucleotide
acauguuaugcuugcgggc

SEQ ID NO: 2658375 - RNA, 19 nt, Artificial Sequence
  Description of Artificial Sequence: Synthetic oligonucleotide
ugaaagccuucaaauuugg

SEQ ID NO: 2658376 - RNA, 19 nt, Artificial Sequence
  Description of Artificial Sequence: Synthetic oligonucleotide
caaaacggcacaugaaagc

SEQ ID NO: 2658377 - RNA, 19 nt, Artificial Sequence
  Description of Artificial Sequence: Synthetic oligonucleotide
acacauguuaugcuugcgg

SEQ ID NO: 2658378 - RNA, 19 nt, Artificial Sequence
  Description of Artificial Sequence: Synthetic oligonucleotide
caaagguaagcuuuucccc

SEQ ID NO: 2658379 - RNA, 19 nt, Artificial Sequence
  Description of Artificial Sequence: Synthetic oligonucleotide
uaucaguauauuccaggag

SEQ ID NO: 2658380 - RNA, 19 nt, Artificial Sequence
  Description of Artificial Sequence: Synthetic oligonucleotide
ucaguauauuccaggagca

SEQ ID NO: 2658381 - RNA, 19 nt, Artificial Sequence
  Description of Artificial Sequence: Synthetic oligonucleotide
uccagaucuaguuugaauu

SEQ ID NO: 2658382 - RNA, 19 nt, Artificial Sequence
  Description of Artificial Sequence: Synthetic oligonucleotide
uggucuaagacgucauagg

SEQ ID NO: 2658383 - RNA, 19 nt, Artificial Sequence
  Description of Artificial Sequence: Synthetic oligonucleotide
cagcauaugcacuuguugc

SEQ ID NO: 2658384 - RNA, 19 nt, Artificial Sequence
  Description of Artificial Sequence: Synthetic oligonucleotide
cacauguuaugcuugcggg

SEQ ID NO: 2658385 - RNA, 19 nt, Artificial Sequence
  Description of Artificial Sequence: Synthetic oligonucleotide
ucauggucagaauuguagc

SEQ ID NO: 2658386 - RNA, 19 nt, Artificial Sequence
  Description of Artificial Sequence: Synthetic oligonucleotide
ucagugucgccacacaugu

SEQ ID NO: 2658387 - RNA, 19 nt, Artificial Sequence
  Description of Artificial Sequence: Synthetic oligonucleotide
guucuucccguccauaagg

SEQ ID NO: 2658388 - RNA, 19 nt, Artificial Sequence
  Description of Artificial Sequence: Synthetic oligonucleotide
cuucccguccauaagguag

SEQ ID NO: 2658389 - RNA, 19 nt, Artificial Sequence
  Description of Artificial Sequence: Synthetic oligonucleotide
cuuguuauugauuggcauc

SEQ ID NO: 2658390 - RNA, 19 nt, Artificial Sequence
  Description of Artificial Sequence: Synthetic oligonucleotide
acacguguaccguuucucc

SEQ ID NO: 2658391 - RNA, 19 nt, Artificial Sequence
  Description of Artificial Sequence: Synthetic oligonucleotide
uuggcaucuugaagaaucg

SEQ ID NO: 2658392 - RNA, 19 nt, Artificial Sequence
  Description of Artificial Sequence: Synthetic oligonucleotide
uuguuccaaguacugaggc

SEQ ID NO: 2658393 - RNA, 19 nt, Artificial Sequence
  Description of Artificial Sequence: Synthetic oligonucleotide
augauguccacucguaucu

SEQ ID NO: 2658394 - RNA, 19 nt, Artificial Sequence
  Description of Artificial Sequence: Synthetic oligonucleotide
aaguccacaaagguaagcu

SEQ ID NO: 2658395 - RNA, 19 nt, Artificial Sequence
  Description of Artificial Sequence: Synthetic oligonucleotide
acgguucuggucuaagacg

SEQ ID NO: 2658396 - RNA, 19 nt, Artificial Sequence
  Description of Artificial Sequence: Synthetic oligonucleotide
acaaugagaacuguuucag

SEQ ID NO: 2658397 - RNA, 19 nt, Artificial Sequence
  Description of Artificial Sequence: Synthetic oligonucleotide
uacgguucuggucuaagac

SEQ ID NO: 2658398 - RNA, 19 nt, Artificial Sequence
  Description of Artificial Sequence: Synthetic oligonucleotide
uuguuauugauuggcaucu

SEQ ID NO: 2658399 - RNA, 19 nt, Artificial Sequence
  Description of Artificial Sequence: Synthetic oligonucleotide
aggcuucagguuuucaugg

SEQ ID NO: 2658400 - RNA, 19 nt, Artificial Sequence
  Description of Artificial Sequence: Synthetic oligonucleotide
uccauuaucugguucucca

SEQ ID NO: 2658401 - RNA, 19 nt, Artificial Sequence
  Description of Artificial Sequence: Synthetic oligonucleotide
auuaucugguucuccauga

SEQ ID NO: 2658402 - RNA, 19 nt, Artificial Sequence
  Description of Artificial Sequence: Synthetic oligonucleotide
aauuuccccaggaacaaug

SEQ ID NO: 2658403 - RNA, 19 nt, Artificial Sequence
  Description of Artificial Sequence: Synthetic oligonucleotide
agccggaccagcugcaugc

SEQ ID NO: 2658404 - RNA, 19 nt, Artificial Sequence
  Description of Artificial Sequence: Synthetic oligonucleotide
ucaaacauacgguucuggu

SEQ ID NO: 2658405 - RNA, 19 nt, Artificial Sequence
  Description of Artificial Sequence: Synthetic oligonucleotide
gaacaaugagaacuguuuc

SEQ ID NO: 2658406 - RNA, 19 nt, Artificial Sequence
  Description of Artificial Sequence: Synthetic oligonucleotide
ugaauuucacguccagcca

SEQ ID NO: 2658407 - RNA, 19 nt, Artificial Sequence
  Description of Artificial Sequence: Synthetic oligonucleotide
cuccagagccucaaaacgg

SEQ ID NO: 2658408 - RNA, 19 nt, Artificial Sequence
  Description of Artificial Sequence: Synthetic oligonucleotide
caucuuguuauugauuggc

SEQ ID NO: 2658409 - RNA, 19 nt, Artificial Sequence
  Description of Artificial Sequence: Synthetic oligonucleotide
uucagugucgccacacaug

SEQ ID NO: 2658410 - RNA, 19 nt, Artificial Sequence
  Description of Artificial Sequence: Synthetic oligonucleotide
cacacugcaggaaugcagc

SEQ ID NO: 2658411 - RNA, 19 nt, Artificial Sequence
  Description of Artificial Sequence: Synthetic oligonucleotide
cagaauuguagcagagccg

SEQ ID NO: 2658412 - RNA, 19 nt, Artificial Sequence
  Description of Artificial Sequence: Synthetic oligonucleotide
aguauauuccaggagcaug

SEQ ID NO: 2658413 - RNA, 19 nt, Artificial Sequence
  Description of Artificial Sequence: Synthetic oligonucleotide
cuugaagaaucgcucacac

SEQ ID NO: 2658414 - RNA, 19 nt, Artificial Sequence
  Description of Artificial Sequence: Synthetic oligonucleotide
uauugauuggcaucuugaa

SEQ ID NO: 2658415 - RNA, 19 nt, Artificial Sequence
  Description of Artificial Sequence: Synthetic oligonucleotide
cuaguuugaauuucacguc

SEQ ID NO: 2658416 - RNA, 19 nt, Artificial Sequence
  Description of Artificial Sequence: Synthetic oligonucleotide
uucccguccauaagguagg

SEQ ID NO: 2658417 - RNA, 19 nt, Artificial Sequence
  Description of Artificial Sequence: Synthetic oligonucleotide
agcuucuccacacguguac

SEQ ID NO: 2658418 - RNA, 19 nt, Artificial Sequence
  Description of Artificial Sequence: Synthetic oligonucleotide
uaggaaaauccagaucuag

SEQ ID NO: 2658419 - RNA, 19 nt, Artificial Sequence
  Description of Artificial Sequence: Synthetic oligonucleotide
accguuucuccucauagcu

SEQ ID NO: 2658420 - RNA, 19 nt, Artificial Sequence
  Description of Artificial Sequence: Synthetic oligonucleotide
accaugagaauuuccccag

SEQ ID NO: 2658421 - RNA, 19 nt, Artificial Sequence
  Description of Artificial Sequence: Synthetic oligonucleotide
uguucuucccguccauaag

SEQ ID NO: 2658422 - RNA, 19 nt, Artificial Sequence
  Description of Artificial Sequence: Synthetic oligonucleotide
ucuuguuauugauuggcau

SEQ ID NO: 2658423 - RNA, 19 nt, Artificial Sequence
  Description of Artificial Sequence: Synthetic oligonucleotide
aagaaucgcucacacugca

SEQ ID NO: 2658424 - RNA, 19 nt, Artificial Sequence
  Description of Artificial Sequence: Synthetic oligonucleotide
ugaagguaguuguuccaag

SEQ ID NO: 2658425 - RNA, 19 nt, Artificial Sequence
  Description of Artificial Sequence: Synthetic oligonucleotide
guuucagcugugaagguag

SEQ ID NO: 2658426 - RNA, 19 nt, Artificial Sequence
  Description of Artificial Sequence: Synthetic oligonucleotide
uccagagccucaaaacggc

SEQ ID NO: 2658427 - RNA, 19 nt, Artificial Sequence
  Description of Artificial Sequence: Synthetic oligonucleotide
guaccguuucuccucauag

SEQ ID NO: 2658428 - RNA, 19 nt, Artificial Sequence
  Description of Artificial Sequence: Synthetic oligonucleotide
aagguaagcuuuuccccug

SEQ ID NO: 2658429 - RNA, 19 nt, Artificial Sequence
  Description of Artificial Sequence: Synthetic oligonucleotide
guuauugauuggcaucuug

SEQ ID NO: 2658430 - RNA, 19 nt, Artificial Sequence
  Description of Artificial Sequence: Synthetic oligonucleotide
gcugguaucaguauauucc

SEQ ID NO: 2658431 - RNA, 19 nt, Artificial Sequence
  Description of Artificial Sequence: Synthetic oligonucleotide
uucuccagagccucaaaac

SEQ ID NO: 2658432 - RNA, 19 nt, Artificial Sequence
  Description of Artificial Sequence: Synthetic oligonucleotide
agccuucaaauuugggaac

SEQ ID NO: 2658433 - RNA, 19 nt, Artificial Sequence
  Description of Artificial Sequence: Synthetic oligonucleotide
cugugaagguaguuguucc

SEQ ID NO: 2658434 - RNA, 19 nt, Artificial Sequence
  Description of Artificial Sequence: Synthetic oligonucleotide
cacaaagguaagcuuuucc

SEQ ID NO: 2658435 - RNA, 19 nt, Artificial Sequence
  Description of Artificial Sequence: Synthetic oligonucleotide
caaacauacgguucugguc

SEQ ID NO: 2658436 - RNA, 19 nt, Artificial Sequence
  Description of Artificial Sequence: Synthetic oligonucleotide
guaucaguauauuccagga

SEQ ID NO: 2658437 - RNA, 19 nt, Artificial Sequence
  Description of Artificial Sequence: Synthetic oligonucleotide
ucuccaugauguccacucg

SEQ ID NO: 2658438 - RNA, 19 nt, Artificial Sequence
  Description of Artificial Sequence: Synthetic oligonucleotide
uucagguuuucauggucag

SEQ ID NO: 2658439 - RNA, 19 nt, Artificial Sequence
  Description of Artificial Sequence: Synthetic oligonucleotide
agugucgccacacauguua

SEQ ID NO: 2658440 - RNA, 19 nt, Artificial Sequence
  Description of Artificial Sequence: Synthetic oligonucleotide
uuucacguccagccauugg

SEQ ID NO: 2658441 - RNA, 19 nt, Artificial Sequence
  Description of Artificial Sequence: Synthetic oligonucleotide
uuuucauggucagaauugu

SEQ ID NO: 2658442 - RNA, 19 nt, Artificial Sequence
  Description of Artificial Sequence: Synthetic oligonucleotide
aaucgcucacacugcagga

SEQ ID NO: 2658443 - RNA, 19 nt, Artificial Sequence
  Description of Artificial Sequence: Synthetic oligonucleotide
ugguaucaguauauuccag

SEQ ID NO: 2658444 - RNA, 19 nt, Artificial Sequence
  Description of Artificial Sequence: Synthetic oligonucleotide
caugauguccacucguauc

SEQ ID NO: 2658445 - RNA, 19 nt, Artificial Sequence
  Description of Artificial Sequence: Synthetic oligonucleotide
cauuaucugguucuccaug

SEQ ID NO: 2658446 - RNA, 19 nt, Artificial Sequence
  Description of Artificial Sequence: Synthetic oligonucleotide
caaguacugaggcuucagg

SEQ ID NO: 2658447 - RNA, 19 nt, Artificial Sequence
  Description of Artificial Sequence: Synthetic oligonucleotide
ugugaagguaguuguucca

SEQ ID NO: 2658448 - RNA, 19 nt, Artificial Sequence
  Description of Artificial Sequence: Synthetic oligonucleotide
uauauuccaggagcaugcg

SEQ ID NO: 2658449 - RNA, 19 nt, Artificial Sequence
  Description of Artificial Sequence: Synthetic oligonucleotide
aucugguucuccaugaugu

SEQ ID NO: 2658450 - RNA, 19 nt, Artificial Sequence
  Description of Artificial Sequence: Synthetic oligonucleotide
acguguaccguuucuccuc

SEQ ID NO: 2658451 - RNA, 19 nt, Artificial Sequence
  Description of Artificial Sequence: Synthetic oligonucleotide
auggucagaauuguagcag

SEQ ID NO: 2658452 - RNA, 19 nt, Artificial Sequence
  Description of Artificial Sequence: Synthetic oligonucleotide
caguaacccagaaccauag

SEQ ID NO: 2658453 - RNA, 19 nt, Artificial Sequence
  Description of Artificial Sequence: Synthetic oligonucleotide
guuguuccaaguacugagg

SEQ ID NO: 2658454 - RNA, 19 nt, Artificial Sequence
  Description of Artificial Sequence: Synthetic oligonucleotide
uuguagcagagccggacca

SEQ ID NO: 2658455 - RNA, 19 nt, Artificial Sequence
  Description of Artificial Sequence: Synthetic oligonucleotide
agguaagcuuuuccccugc

SEQ ID NO: 2658456 - RNA, 19 nt, Artificial Sequence
  Description of Artificial Sequence: Synthetic oligonucleotide
uggucagaauuguagcaga

SEQ ID NO: 2658457 - RNA, 19 nt, Artificial Sequence
  Description of Artificial Sequence: Synthetic oligonucleotide
acaugaaagccuucaaauu

SEQ ID NO: 2658458 - RNA, 19 nt, Artificial Sequence
  Description of Artificial Sequence: Synthetic oligonucleotide
uguuccaaguacugaggcu

SEQ ID NO: 2658459 - RNA, 19 nt, Artificial Sequence
  Description of Artificial Sequence: Synthetic oligonucleotide
cucaaaacggcacaugaaa

SEQ ID NO: 2658460 - RNA, 19 nt, Artificial Sequence
  Description of Artificial Sequence: Synthetic oligonucleotide
cuggucuaagacgucauag

SEQ ID NO: 2658461 - RNA, 19 nt, Artificial Sequence
  Description of Artificial Sequence: Synthetic oligonucleotide
ugaggcuucagguuuucau

SEQ ID NO: 2658462 - RNA, 19 nt, Artificial Sequence
  Description of Artificial Sequence: Synthetic oligonucleotide
gcgauguaacgcaagaugg

SEQ ID NO: 2658463 - RNA, 19 nt, Artificial Sequence
  Description of Artificial Sequence: Synthetic oligonucleotide
cauaugcacuuguugcccc

SEQ ID NO: 2658464 - RNA, 19 nt, Artificial Sequence
  Description of Artificial Sequence: Synthetic oligonucleotide
aguacugaggcuucagguu

SEQ ID NO: 2658465 - RNA, 19 nt, Artificial Sequence
  Description of Artificial Sequence: Synthetic oligonucleotide
uaggugagaaaguccacaa

SEQ ID NO: 2658466 - RNA, 19 nt, Artificial Sequence
  Description of Artificial Sequence: Synthetic oligonucleotide
ggcgauguaacgcaagaug

SEQ ID NO: 2658467 - RNA, 19 nt, Artificial Sequence
  Description of Artificial Sequence: Synthetic oligonucleotide
caaugagaacuguuucagc

SEQ ID NO: 2658468 - RNA, 19 nt, Artificial Sequence
  Description of Artificial Sequence: Synthetic oligonucleotide
uguaacgcaagauggcguu

SEQ ID NO: 2658469 - RNA, 19 nt, Artificial Sequence
  Description of Artificial Sequence: Synthetic oligonucleotide
gaaagccuucaaauuuggg

SEQ ID NO: 2658470 - RNA, 19 nt, Artificial Sequence
  Description of Artificial Sequence: Synthetic oligonucleotide
cuucuccacacguguaccg

SEQ ID NO: 2658471 - RNA, 19 nt, Artificial Sequence
  Description of Artificial Sequence: Synthetic oligonucleotide
ucguaucuuuucuucuuca

SEQ ID NO: 2658472 - RNA, 19 nt, Artificial Sequence
  Description of Artificial Sequence: Synthetic oligonucleotide
aagacgucauaggugagaa

SEQ ID NO: 2658473 - RNA, 19 nt, Artificial Sequence
  Description of Artificial Sequence: Synthetic oligonucleotide
uaagacgucauaggugaga

SEQ ID NO: 2658474 - RNA, 19 nt, Artificial Sequence
  Description of Artificial Sequence: Synthetic oligonucleotide
gcggaaguccauuaucugg

SEQ ID NO: 2658475 - RNA, 19 nt, Artificial Sequence
  Description of Artificial Sequence: Synthetic oligonucleotide
agagccucaaaacggcaca

SEQ ID NO: 2658476 - RNA, 19 nt, Artificial Sequence
  Description of Artificial Sequence: Synthetic oligonucleotide
agguuaggaaaauccagau

SEQ ID NO: 2658477 - RNA, 19 nt, Artificial Sequence
  Description of Artificial Sequence: Synthetic oligonucleotide
gaagaaucgcucacacugc

SEQ ID NO: 2658478 - RNA, 19 nt, Artificial Sequence
  Description of Artificial Sequence: Synthetic oligonucleotide
auaggugagaaaguccaca

SEQ ID NO: 2658479 - RNA, 19 nt, Artificial Sequence
  Description of Artificial Sequence: Synthetic oligonucleotide
uuaggaaaauccagaucua

SEQ ID NO: 2658480 - RNA, 19 nt, Artificial Sequence
  Description of Artificial Sequence: Synthetic oligonucleotide
cuucagguuuucaugguca

SEQ ID NO: 2658481 - RNA, 19 nt, Artificial Sequence
  Description of Artificial Sequence: Synthetic oligonucleotide
uucuucccguccauaaggu

SEQ ID NO: 2658482 - RNA, 19 nt, Artificial Sequence
  Description of Artificial Sequence: Synthetic oligonucleotide
cagguuaggaaaauccaga

SEQ ID NO: 2658483 - RNA, 19 nt, Artificial Sequence
  Description of Artificial Sequence: Synthetic oligonucleotide
uaccguuucuccucauagc

SEQ ID NO: 2658484 - RNA, 19 nt, Artificial Sequence
  Description of Artificial Sequence: Synthetic oligonucleotide
cugguaucaguauauucca

SEQ ID NO: 2658485 - RNA, 19 nt, Artificial Sequence
  Description of Artificial Sequence: Synthetic oligonucleotide
auaagguagggcagguuag

SEQ ID NO: 2658486 - RNA, 19 nt, Artificial Sequence
  Description of Artificial Sequence: Synthetic oligonucleotide
uucuccucauagcugguau

SEQ ID NO: 2658487 - RNA, 19 nt, Artificial Sequence
  Description of Artificial Sequence: Synthetic oligonucleotide
cauggucagaauuguagca

SEQ ID NO: 2658488 - RNA, 19 nt, Artificial Sequence
  Description of Artificial Sequence: Synthetic oligonucleotide
gucgccacacauguuaugc

SEQ ID NO: 2658489 - RNA, 19 nt, Artificial Sequence
  Description of Artificial Sequence: Synthetic oligonucleotide
gaaguccauuaucugguuc

SEQ ID NO: 2658490 - RNA, 19 nt, Artificial Sequence
  Description of Artificial Sequence: Synthetic oligonucleotide
ugggugagcuuguucuucc

SEQ ID NO: 2658491 - RNA, 19 nt, Artificial Sequence
  Description of Artificial Sequence: Synthetic oligonucleotide
uuuccccugcaaaccauga

SEQ ID NO: 2658492 - RNA, 19 nt, Artificial Sequence
  Description of Artificial Sequence: Synthetic oligonucleotide
uaacgcaagauggcguugc

SEQ ID NO: 2658493 - RNA, 19 nt, Artificial Sequence
  Description of Artificial Sequence: Synthetic oligonucleotide
gucuaagacgucauaggug

SEQ ID NO: 2658494 - RNA, 19 nt, Artificial Sequence
  Description of Artificial Sequence: Synthetic oligonucleotide
uugaagaaucgcucacacu

SEQ ID NO: 2658495 - RNA, 19 nt, Artificial Sequence
  Description of Artificial Sequence: Synthetic oligonucleotide
cauaagguagggcagguua

SEQ ID NO: 2658496 - RNA, 19 nt, Artificial Sequence
  Description of Artificial Sequence: Synthetic oligonucleotide
ugcggaaguccauuaucug

SEQ ID NO: 2658497 - RNA, 19 nt, Artificial Sequence
  Description of Artificial Sequence: Synthetic oligonucleotide
ucuucagugucgccacaca

SEQ ID NO: 2658498 - RNA, 19 nt, Artificial Sequence
  Description of Artificial Sequence: Synthetic oligonucleotide
ugggcucaaacauacgguu

SEQ ID NO: 2658499 - RNA, 19 nt, Artificial Sequence
  Description of Artificial Sequence: Synthetic oligonucleotide
caugcggaaguccauuauc

SEQ ID NO: 2658500 - RNA, 19 nt, Artificial Sequence
  Description of Artificial Sequence: Synthetic oligonucleotide
ucacguccagccauuggcu

SEQ ID NO: 2658501 - RNA, 19 nt, Artificial Sequence
  Description of Artificial Sequence: Synthetic oligonucleotide
cagccauuggcuucuauca

SEQ ID NO: 2658502 - RNA, 19 nt, Artificial Sequence
  Description of Artificial Sequence: Synthetic oligonucleotide
agaucuaguuugaauuuca

SEQ ID NO: 2658503 - RNA, 19 nt, Artificial Sequence
  Description of Artificial Sequence: Synthetic oligonucleotide
acguccagccauuggcuuc

SEQ ID NO: 2658504 - RNA, 19 nt, Artificial Sequence
  Description of Artificial Sequence: Synthetic oligonucleotide
uuaugcuugcgggcgaugu

SEQ ID NO: 2658505 - RNA, 19 nt, Artificial Sequence
  Description of Artificial Sequence: Synthetic oligonucleotide
uccaugauguccacucgua

SEQ ID NO: 2658506 - RNA, 19 nt, Artificial Sequence
  Description of Artificial Sequence: Synthetic oligonucleotide
gaucuaguuugaauuucac

SEQ ID NO: 2658507 - RNA, 19 nt, Artificial Sequence
  Description of Artificial Sequence: Synthetic oligonucleotide
cguuucuccucauagcugg

SEQ ID NO: 2658508 - RNA, 19 nt, Artificial Sequence
  Description of Artificial Sequence: Synthetic oligonucleotide
auccagaucuaguuugaau

SEQ ID NO: 2658509 - RNA, 19 nt, Artificial Sequence
  Description of Artificial Sequence: Synthetic oligonucleotide
uuucauggucagaauugua

SEQ ID NO: 2658510 - RNA, 19 nt, Artificial Sequence
  Description of Artificial Sequence: Synthetic oligonucleotide
gaagguaguuguuccaagu

SEQ ID NO: 2658511 - RNA, 19 nt, Artificial Sequence
  Description of Artificial Sequence: Synthetic oligonucleotide
gucagaauuguagcagagc

SEQ ID NO: 2658512 - RNA, 19 nt, Artificial Sequence
  Description of Artificial Sequence: Synthetic oligonucleotide
auagcugguaucaguauau

SEQ ID NO: 2658513 - RNA, 19 nt, Artificial Sequence
  Description of Artificial Sequence: Synthetic oligonucleotide
auacgguucuggucuaaga

SEQ ID NO: 2658514 - RNA, 19 nt, Artificial Sequence
  Description of Artificial Sequence: Synthetic oligonucleotide
cacaugaaagccuucaaau

SEQ ID NO: 2658515 - RNA, 19 nt, Artificial Sequence
  Description of Artificial Sequence: Synthetic oligonucleotide
cagagccucaaaacggcac

SEQ ID NO: 2658516 - RNA, 19 nt, Artificial Sequence
  Description of Artificial Sequence: Synthetic oligonucleotide
uguuucagcugugaaggua

SEQ ID NO: 2658517 - RNA, 19 nt, Artificial Sequence
  Description of Artificial Sequence: Synthetic oligonucleotide
ucauagcugguaucaguau

SEQ ID NO: 2658518 - RNA, 19 nt, Artificial Sequence
  Description of Artificial Sequence: Synthetic oligonucleotide
gucaggagcuucuccacac

SEQ ID NO: 2658519 - RNA, 19 nt, Artificial Sequence
  Description of Artificial Sequence: Synthetic oligonucleotide
uguagcagagccggaccag

SEQ ID NO: 2658520 - RNA, 19 nt, Artificial Sequence
  Description of Artificial Sequence: Synthetic oligonucleotide
uugcgggcgauguaacgca

SEQ ID NO: 2658521 - RNA, 19 nt, Artificial Sequence
  Description of Artificial Sequence: Synthetic oligonucleotide
uuaucugguucuccaugau

SEQ ID NO: 2658522 - RNA, 19 nt, Artificial Sequence
  Description of Artificial Sequence: Synthetic oligonucleotide
caugaaagccuucaaauuu

SEQ ID NO: 2658523 - RNA, 19 nt, Artificial Sequence
  Description of Artificial Sequence: Synthetic oligonucleotide
cauaggugagaaaguccac

SEQ ID NO: 2658524 - RNA, 19 nt, Artificial Sequence
  Description of Artificial Sequence: Synthetic oligonucleotide
cucguaucuuuucuucuuc

SEQ ID NO: 2658525 - RNA, 19 nt, Artificial Sequence
  Description of Artificial Sequence: Synthetic oligonucleotide
ggugagcuuguucuucccg

SEQ ID NO: 2658526 - RNA, 19 nt, Artificial Sequence
  Description of Artificial Sequence: Synthetic oligonucleotide
aaacggcacaugaaagccu

SEQ ID NO: 2658527 - RNA, 19 nt, Artificial Sequence
  Description of Artificial Sequence: Synthetic oligonucleotide
ccauuggcuucuaucauag

SEQ ID NO: 2658528 - RNA, 19 nt, Artificial Sequence
  Description of Artificial Sequence: Synthetic oligonucleotide
uguaccguuucuccucaua

SEQ ID NO: 2658529 - RNA, 19 nt, Artificial Sequence
  Description of Artificial Sequence: Synthetic oligonucleotide
acucguaucuuuucuucuu

SEQ ID NO: 2658530 - RNA, 19 nt, Artificial Sequence
  Description of Artificial Sequence: Synthetic oligonucleotide
cagcaauuuucuccagagc

SEQ ID NO: 2658531 - RNA, 19 nt, Artificial Sequence
  Description of Artificial Sequence: Synthetic oligonucleotide
uagucaggagcuucuccac

SEQ ID NO: 2658532 - RNA, 19 nt, Artificial Sequence
  Description of Artificial Sequence: Synthetic oligonucleotide
agcuuguucuucccgucca

SEQ ID NO: 2658533 - RNA, 19 nt, Artificial Sequence
  Description of Artificial Sequence: Synthetic oligonucleotide
gaauuucacguccagccau

SEQ ID NO: 2658534 - RNA, 19 nt, Artificial Sequence
  Description of Artificial Sequence: Synthetic oligonucleotide
agaauuuccccaggaacaa

SEQ ID NO: 2658535 - RNA, 19 nt, Artificial Sequence
  Description of Artificial Sequence: Synthetic oligonucleotide
agucaggagcuucuccaca

SEQ ID NO: 2658536 - RNA, 19 nt, Artificial Sequence
  Description of Artificial Sequence: Synthetic oligonucleotide
aguccauuaucugguucuc

SEQ ID NO: 2658537 - RNA, 19 nt, Artificial Sequence
  Description of Artificial Sequence: Synthetic oligonucleotide
uucuggucuaagacgucau

SEQ ID NO: 2658538 - RNA, 19 nt, Artificial Sequence
  Description of Artificial Sequence: Synthetic oligonucleotide
ucuggucuaagacgucaua

SEQ ID NO: 2658539 - RNA, 19 nt, Artificial Sequence
  Description of Artificial Sequence: Synthetic oligonucleotide
cagguuuucauggucagaa

SEQ ID NO: 2658540 - RNA, 19 nt, Artificial Sequence
  Description of Artificial Sequence: Synthetic oligonucleotide
aguaacccagaaccauaga

SEQ ID NO: 2658541 - RNA, 19 nt, Artificial Sequence
  Description of Artificial Sequence: Synthetic oligonucleotide
auaugcacuuguugcccca

SEQ ID NO: 2658542 - RNA, 19 nt, Artificial Sequence
  Description of Artificial Sequence: Synthetic oligonucleotide
cagaucuaguuugaauuuc

SEQ ID NO: 2658543 - RNA, 19 nt, Artificial Sequence
  Description of Artificial Sequence: Synthetic oligonucleotide
cuaagacgucauaggugag

SEQ ID NO: 2658544 - RNA, 19 nt, Artificial Sequence
  Description of Artificial Sequence: Synthetic oligonucleotide
gguuaggaaaauccagauc

SEQ ID NO: 2658545 - RNA, 19 nt, Artificial Sequence
  Description of Artificial Sequence: Synthetic oligonucleotide
uguccacucguaucuuuuc

SEQ ID NO: 2658546 - RNA, 19 nt, Artificial Sequence
  Description of Artificial Sequence: Synthetic oligonucleotide
uucuucagugucgccacac

SEQ ID NO: 2658547 - RNA, 19 nt, Artificial Sequence
  Description of Artificial Sequence: Synthetic oligonucleotide
aacggcacaugaaagccuu

SEQ ID NO: 2658548 - RNA, 19 nt, Artificial Sequence
  Description of Artificial Sequence: Synthetic oligonucleotide
uccacucguaucuuuucuu

SEQ ID NO: 2658549 - RNA, 19 nt, Artificial Sequence
  Description of Artificial Sequence: Synthetic oligonucleotide
aauccagaucuaguuugaa

SEQ ID NO: 2658550 - RNA, 19 nt, Artificial Sequence
  Description of Artificial Sequence: Synthetic oligonucleotide
cuucaaauuugggaacuca

SEQ ID NO: 2658551 - RNA, 19 nt, Artificial Sequence
  Description of Artificial Sequence: Synthetic oligonucleotide
ugucgccacacauguuaug

SEQ ID NO: 2658552 - RNA, 19 nt, Artificial Sequence
  Description of Artificial Sequence: Synthetic oligonucleotide
agggcagguuaggaaaauc

SEQ ID NO: 2658553 - RNA, 19 nt, Artificial Sequence
  Description of Artificial Sequence: Synthetic oligonucleotide
ugcacuuguugccccacuu

SEQ ID NO: 2658554 - RNA, 19 nt, Artificial Sequence
  Description of Artificial Sequence: Synthetic oligonucleotide
agguagggcagguuaggaa

SEQ ID NO: 2658555 - RNA, 19 nt, Artificial Sequence
  Description of Artificial Sequence: Synthetic oligonucleotide
cauagcugguaucaguaua

SEQ ID NO: 2658556 - RNA, 19 nt, Artificial Sequence
  Description of Artificial Sequence: Synthetic oligonucleotide
uggcaucuugaagaaucgc

SEQ ID NO: 2658557 - RNA, 19 nt, Artificial Sequence
  Description of Artificial Sequence: Synthetic oligonucleotide
aacauacgguucuggucua

SEQ ID NO: 2658558 - RNA, 19 nt, Artificial Sequence
  Description of Artificial Sequence: Synthetic oligonucleotide
ucgccacacauguuaugcu

SEQ ID NO: 2658559 - RNA, 19 nt, Artificial Sequence
  Description of Artificial Sequence: Synthetic oligonucleotide
ugcaggaaugcagcaauuu

SEQ ID NO: 2658560 - RNA, 19 nt, Artificial Sequence
  Description of Artificial Sequence: Synthetic oligonucleotide
aauuucacguccagccauu

SEQ ID NO: 2658561 - RNA, 19 nt, Artificial Sequence
  Description of Artificial Sequence: Synthetic oligonucleotide
ucagguuuucauggucaga

SEQ ID NO: 2658562 - RNA, 19 nt, Artificial Sequence
  Description of Artificial Sequence: Synthetic oligonucleotide
ugcaugcggaaguccauua

SEQ ID NO: 2658563 - RNA, 19 nt, Artificial Sequence
  Description of Artificial Sequence: Synthetic oligonucleotide
uaugcuugcgggcgaugua

SEQ ID NO: 2658564 - RNA, 19 nt, Artificial Sequence
  Description of Artificial Sequence: Synthetic oligonucleotide
uccauaagguagggcaggu

SEQ ID NO: 2658565 - RNA, 19 nt, Artificial Sequence
  Description of Artificial Sequence: Synthetic oligonucleotide
cauacgguucuggucuaag

SEQ ID NO: 2658566 - RNA, 19 nt, Artificial Sequence
  Description of Artificial Sequence: Synthetic oligonucleotide
uucuccacacguguaccgu

SEQ ID NO: 2658567 - RNA, 19 nt, Artificial Sequence
  Description of Artificial Sequence: Synthetic oligonucleotide
auguaacgcaagauggcgu

SEQ ID NO: 2658568 - RNA, 19 nt, Artificial Sequence
  Description of Artificial Sequence: Synthetic oligonucleotide
cacacauguuaugcuugcg

SEQ ID NO: 2658569 - RNA, 19 nt, Artificial Sequence
  Description of Artificial Sequence: Synthetic oligonucleotide
cuuggccaucuuguuauug

SEQ ID NO: 2658570 - RNA, 19 nt, Artificial Sequence
  Description of Artificial Sequence: Synthetic oligonucleotide
ugcaaaccaugagaauuuc

SEQ ID NO: 2658571 - RNA, 19 nt, Artificial Sequence
  Description of Artificial Sequence: Synthetic oligonucleotide
ccguccauaagguagggca

SEQ ID NO: 2658572 - RNA, 19 nt, Artificial Sequence
  Description of Artificial Sequence: Synthetic oligonucleotide
auuuccccaggaacaauga

SEQ ID NO: 2658573 - RNA, 19 nt, Artificial Sequence
  Description of Artificial Sequence: Synthetic oligonucleotide
agaaucgcucacacugcag

SEQ ID NO: 2658574 - RNA, 19 nt, Artificial Sequence
  Description of Artificial Sequence: Synthetic oligonucleotide
auguuaugcuugcgggcga

SEQ ID NO: 2658575 - RNA, 19 nt, Artificial Sequence
  Description of Artificial Sequence: Synthetic oligonucleotide
gccucaaaacggcacauga

SEQ ID NO: 2658576 - RNA, 19 nt, Artificial Sequence
  Description of Artificial Sequence: Synthetic oligonucleotide
ggucuaagacgucauaggu

SEQ ID NO: 2658577 - RNA, 19 nt, Artificial Sequence
  Description of Artificial Sequence: Synthetic oligonucleotide
uccacacguguaccguuuc

SEQ ID NO: 2658578 - RNA, 19 nt, Artificial Sequence
  Description of Artificial Sequence: Synthetic oligonucleotide
guagcagagccggaccagc

SEQ ID NO: 2658579 - RNA, 19 nt, Artificial Sequence
  Description of Artificial Sequence: Synthetic oligonucleotide
ggucagaauuguagcagag

SEQ ID NO: 2658580 - RNA, 19 nt, Artificial Sequence
  Description of Artificial Sequence: Synthetic oligonucleotide
gcauaugcacuuguugccc

SEQ ID NO: 2658581 - RNA, 19 nt, Artificial Sequence
  Description of Artificial Sequence: Synthetic oligonucleotide
ucuucccguccauaaggua

SEQ ID NO: 2658582 - RNA, 19 nt, Artificial Sequence
  Description of Artificial Sequence: Synthetic oligonucleotide
uacugaggcuucagguuuu

SEQ ID NO: 2658583 - RNA, 19 nt, Artificial Sequence
  Description of Artificial Sequence: Synthetic oligonucleotide
uccaaguacugaggcuuca

SEQ ID NO: 2658584 - RNA, 19 nt, Artificial Sequence
  Description of Artificial Sequence: Synthetic oligonucleotide
cacacguguaccguuucuc

SEQ ID NO: 2658585 - RNA, 19 nt, Artificial Sequence
  Description of Artificial Sequence: Synthetic oligonucleotide
uaugcacuuguugccccac

SEQ ID NO: 2658586 - RNA, 19 nt, Artificial Sequence
  Description of Artificial Sequence: Synthetic oligonucleotide
auuucacguccagccauug

SEQ ID NO: 2658587 - RNA, 19 nt, Artificial Sequence
  Description of Artificial Sequence: Synthetic oligonucleotide
aggaacaaugagaacuguu

SEQ ID NO: 2658588 - RNA, 19 nt, Artificial Sequence
  Description of Artificial Sequence: Synthetic oligonucleotide
cacuuggccaucuuguuau

SEQ ID NO: 2658589 - RNA, 19 nt, Artificial Sequence
  Description of Artificial Sequence: Synthetic oligonucleotide
ucuccacacguguaccguu

SEQ ID NO: 2658590 - RNA, 19 nt, Artificial Sequence
  Description of Artificial Sequence: Synthetic oligonucleotide
guuccaaguacugaggcuu

SEQ ID NO: 2658591 - RNA, 19 nt, Artificial Sequence
  Description of Artificial Sequence: Synthetic oligonucleotide
guccauuaucugguucucc

SEQ ID NO: 2658592 - RNA, 19 nt, Artificial Sequence
  Description of Artificial Sequence: Synthetic oligonucleotide
cgauguaacgcaagauggc

SEQ ID NO: 2658593 - RNA, 19 nt, Artificial Sequence
  Description of Artificial Sequence: Synthetic oligonucleotide
gugaagguaguuguuccaa

SEQ ID NO: 2658594 - RNA, 19 nt, Artificial Sequence
  Description of Artificial Sequence: Synthetic oligonucleotide
guaacgcaagauggcguug

SEQ ID NO: 2658595 - RNA, 19 nt, Artificial Sequence
  Description of Artificial Sequence: Synthetic oligonucleotide
gagccggaccagcugcaug

SEQ ID NO: 2658596 - RNA, 19 nt, Artificial Sequence
  Description of Artificial Sequence: Synthetic oligonucleotide
cguaucuuuucuucuucag

SEQ ID NO: 2658597 - RNA, 19 nt, Artificial Sequence
  Description of Artificial Sequence: Synthetic oligonucleotide
uguuaugcuugcgggcgau

SEQ ID NO: 2658598 - RNA, 19 nt, Artificial Sequence
  Description of Artificial Sequence: Synthetic oligonucleotide
gcaaaccaugagaauuucc

SEQ ID NO: 2658599 - RNA, 19 nt, Artificial Sequence
  Description of Artificial Sequence: Synthetic oligonucleotide
gcugugaagguaguuguuc

SEQ ID NO: 2658600 - RNA, 19 nt, Artificial Sequence
  Description of Artificial Sequence: Synthetic oligonucleotide
gcacaugaaagccuucaaa

SEQ ID NO: 2658601 - RNA, 19 nt, Artificial Sequence
  Description of Artificial Sequence: Synthetic oligonucleotide
guacugaggcuucagguuu

SEQ ID NO: 2658602 - RNA, 19 nt, Artificial Sequence
  Description of Artificial Sequence: Synthetic oligonucleotide
acgucauaggugagaaagu

SEQ ID NO: 2658603 - RNA, 19 nt, Artificial Sequence
  Description of Artificial Sequence: Synthetic oligonucleotide
gugagcuuguucuucccgu

SEQ ID NO: 2658604 - RNA, 19 nt, Artificial Sequence
  Description of Artificial Sequence: Synthetic oligonucleotide
gguaguuguuccaaguacu

SEQ ID NO: 2658605 - RNA, 19 nt, Artificial Sequence
  Description of Artificial Sequence: Synthetic oligonucleotide
ucccguccauaagguaggg

SEQ ID NO: 2658606 - RNA, 19 nt, Artificial Sequence
  Description of Artificial Sequence: Synthetic oligonucleotide
gcacuuguugccccacuug

SEQ ID NO: 2658607 - RNA, 19 nt, Artificial Sequence
  Description of Artificial Sequence: Synthetic oligonucleotide
ggaacaaugagaacuguuu

SEQ ID NO: 2658608 - RNA, 19 nt, Artificial Sequence
  Description of Artificial Sequence: Synthetic oligonucleotide
ccacucguaucuuuucuuc

SEQ ID NO: 2658609 - RNA, 19 nt, Artificial Sequence
  Description of Artificial Sequence: Synthetic oligonucleotide
ggaaugcagcaauuuucuc

SEQ ID NO: 2658610 - RNA, 19 nt, Artificial Sequence
  Description of Artificial Sequence: Synthetic oligonucleotide
ugcgggcgauguaacgcaa

SEQ ID NO: 2658611 - RNA, 19 nt, Artificial Sequence
  Description of Artificial Sequence: Synthetic oligonucleotide
uguuauugauuggcaucuu

SEQ ID NO: 2658612 - RNA, 19 nt, Artificial Sequence
  Description of Artificial Sequence: Synthetic oligonucleotide
uucagcugugaagguaguu

SEQ ID NO: 2658613 - RNA, 19 nt, Artificial Sequence
  Description of Artificial Sequence: Synthetic oligonucleotide
gcucacacugcaggaaugc

SEQ ID NO: 2658614 - RNA, 19 nt, Artificial Sequence
  Description of Artificial Sequence: Synthetic oligonucleotide
augcacuuguugccccacu

SEQ ID NO: 2658615 - RNA, 19 nt, Artificial Sequence
  Description of Artificial Sequence: Synthetic oligonucleotide
ggagcuucuccacacgugu

SEQ ID NO: 2658616 - RNA, 19 nt, Artificial Sequence
  Description of Artificial Sequence: Synthetic oligonucleotide
gccacacauguuaugcuug

SEQ ID NO: 2658617 - RNA, 19 nt, Artificial Sequence
  Description of Artificial Sequence: Synthetic oligonucleotide
cagcugugaagguaguugu

SEQ ID NO: 2658618 - RNA, 19 nt, Artificial Sequence
  Description of Artificial Sequence: Synthetic oligonucleotide
aucgcucacacugcaggaa

SEQ ID NO: 2658619 - RNA, 19 nt, Artificial Sequence
  Description of Artificial Sequence: Synthetic oligonucleotide
gaccagcugcaugcggaag

SEQ ID NO: 2658620 - RNA, 19 nt, Artificial Sequence
  Description of Artificial Sequence: Synthetic oligonucleotide
cugcaaaccaugagaauuu

SEQ ID NO: 2658621 - RNA, 19 nt, Artificial Sequence
  Description of Artificial Sequence: Synthetic oligonucleotide
ggcaucuugaagaaucgcu

SEQ ID NO: 2658622 - RNA, 19 nt, Artificial Sequence
  Description of Artificial Sequence: Synthetic oligonucleotide
gaauuguagcagagccgga

SEQ ID NO: 2658623 - RNA, 19 nt, Artificial Sequence
  Description of Artificial Sequence: Synthetic oligonucleotide
uagggcagguuaggaaaau

SEQ ID NO: 2658624 - RNA, 19 nt, Artificial Sequence
  Description of Artificial Sequence: Synthetic oligonucleotide
cacucguaucuuuucuucu

SEQ ID NO: 2658625 - RNA, 19 nt, Artificial Sequence
  Description of Artificial Sequence: Synthetic oligonucleotide
guccacucguaucuuuucu

SEQ ID NO: 2658626 - RNA, 19 nt, Artificial Sequence
  Description of Artificial Sequence: Synthetic oligonucleotide
gcuucuccacacguguacc

SEQ ID NO: 2658627 - RNA, 19 nt, Artificial Sequence
  Description of Artificial Sequence: Synthetic oligonucleotide
guuaugcuugcgggcgaug

SEQ ID NO: 2658628 - RNA, 19 nt, Artificial Sequence
  Description of Artificial Sequence: Synthetic oligonucleotide
auguccacucguaucuuuu

SEQ ID NO: 2658629 - RNA, 19 nt, Artificial Sequence
  Description of Artificial Sequence: Synthetic oligonucleotide
uagcugguaucaguauauu

SEQ ID NO: 2658630 - RNA, 19 nt, Artificial Sequence
  Description of Artificial Sequence: Synthetic oligonucleotide
ccguuucuccucauagcug

SEQ ID NO: 2658631 - RNA, 19 nt, Artificial Sequence
  Description of Artificial Sequence: Synthetic oligonucleotide
cuccaugauguccacucgu

SEQ ID NO: 2658632 - RNA, 19 nt, Artificial Sequence
  Description of Artificial Sequence: Synthetic oligonucleotide
cucacacugcaggaaugca

SEQ ID NO: 2658633 - RNA, 19 nt, Artificial Sequence
  Description of Artificial Sequence: Synthetic oligonucleotide
cuucagugucgccacacau

SEQ ID NO: 2658634 - RNA, 19 nt, Artificial Sequence
  Description of Artificial Sequence: Synthetic oligonucleotide
cacguguaccguuucuccu

SEQ ID NO: 2658635 - RNA, 19 nt, Artificial Sequence
  Description of Artificial Sequence: Synthetic oligonucleotide
gguaagcuuuuccccugca

SEQ ID NO: 2658636 - RNA, 19 nt, Artificial Sequence
  Description of Artificial Sequence: Synthetic oligonucleotide
ggcacaugaaagccuucaa

SEQ ID NO: 2658637 - RNA, 19 nt, Artificial Sequence
  Description of Artificial Sequence: Synthetic oligonucleotide
gcaauuuucuccagagccu

SEQ ID NO: 2658638 - RNA, 19 nt, Artificial Sequence
  Description of Artificial Sequence: Synthetic oligonucleotide
acggcacaugaaagccuuc

SEQ ID NO: 2658639 - RNA, 19 nt, Artificial Sequence
  Description of Artificial Sequence: Synthetic oligonucleotide
ccaaguacugaggcuucag

SEQ ID NO: 2658640 - RNA, 19 nt, Artificial Sequence
  Description of Artificial Sequence: Synthetic oligonucleotide
gcucaaacauacgguucug

SEQ ID NO: 2658641 - RNA, 19 nt, Artificial Sequence
  Description of Artificial Sequence: Synthetic oligonucleotide
ccucaaaacggcacaugaa

SEQ ID NO: 2658642 - RNA, 19 nt, Artificial Sequence
  Description of Artificial Sequence: Synthetic oligonucleotide
cacugcaggaaugcagcaa

SEQ ID NO: 2658643 - RNA, 19 nt, Artificial Sequence
  Description of Artificial Sequence: Synthetic oligonucleotide
cucagcauaugcacuuguu

SEQ ID NO: 2658644 - RNA, 19 nt, Artificial Sequence
  Description of Artificial Sequence: Synthetic oligonucleotide
agcugugaagguaguuguu

SEQ ID NO: 2658645 - RNA, 19 nt, Artificial Sequence
  Description of Artificial Sequence: Synthetic oligonucleotide
ccaguaacccagaaccaua

SEQ ID NO: 2658646 - RNA, 19 nt, Artificial Sequence
  Description of Artificial Sequence: Synthetic oligonucleotide
acauacgguucuggucuaa

SEQ ID NO: 2658647 - RNA, 19 nt, Artificial Sequence
  Description of Artificial Sequence: Synthetic oligonucleotide
gcaggaaugcagcaauuuu

SEQ ID NO: 2658648 - RNA, 19 nt, Artificial Sequence
  Description of Artificial Sequence: Synthetic oligonucleotide
cagagccggaccagcugca

SEQ ID NO: 2658649 - RNA, 19 nt, Artificial Sequence
  Description of Artificial Sequence: Synthetic oligonucleotide
uugccccacuuggccaucu

SEQ ID NO: 2658650 - RNA, 19 nt, Artificial Sequence
  Description of Artificial Sequence: Synthetic oligonucleotide
gagcuucuccacacgugua

SEQ ID NO: 2658651 - RNA, 19 nt, Artificial Sequence
  Description of Artificial Sequence: Synthetic oligonucleotide
cuguuucagcugugaaggu

SEQ ID NO: 2658652 - RNA, 19 nt, Artificial Sequence
  Description of Artificial Sequence: Synthetic oligonucleotide
ggaccagcugcaugcggaa

SEQ ID NO: 2658653 - RNA, 19 nt, Artificial Sequence
  Description of Artificial Sequence: Synthetic oligonucleotide
agagccggaccagcugcau

SEQ ID NO: 2658654 - RNA, 19 nt, Artificial Sequence
  Description of Artificial Sequence: Synthetic oligonucleotide
ccagagccucaaaacggca

SEQ ID NO: 2658655 - RNA, 19 nt, Artificial Sequence
  Description of Artificial Sequence: Synthetic oligonucleotide
cauuggcuucuaucauagu

SEQ ID NO: 2658656 - RNA, 19 nt, Artificial Sequence
  Description of Artificial Sequence: Synthetic oligonucleotide
gguucuggucuaagacguc

SEQ ID NO: 2658657 - RNA, 19 nt, Artificial Sequence
  Description of Artificial Sequence: Synthetic oligonucleotide
cgguucuggucuaagacgu

SEQ ID NO: 2658658 - RNA, 19 nt, Artificial Sequence
  Description of Artificial Sequence: Synthetic oligonucleotide
gcgggcgauguaacgcaag

SEQ ID NO: 2658659 - RNA, 19 nt, Artificial Sequence
  Description of Artificial Sequence: Synthetic oligonucleotide
caguauauuccaggagcau

SEQ ID NO: 2658660 - RNA, 19 nt, Artificial Sequence
  Description of Artificial Sequence: Synthetic oligonucleotide
caggaacaaugagaacugu

SEQ ID NO: 2658661 - RNA, 19 nt, Artificial Sequence
  Description of Artificial Sequence: Synthetic oligonucleotide
cuccacacguguaccguuu

SEQ ID NO: 2658662 - RNA, 19 nt, Artificial Sequence
  Description of Artificial Sequence: Synthetic oligonucleotide
ccacuuggccaucuuguua

SEQ ID NO: 2658663 - RNA, 19 nt, Artificial Sequence
  Description of Artificial Sequence: Synthetic oligonucleotide
cccguccauaagguagggc

SEQ ID NO: 2658664 - RNA, 19 nt, Artificial Sequence
  Description of Artificial Sequence: Synthetic oligonucleotide
cuaucauagucaggagcuu

SEQ ID NO: 2658665 - RNA, 19 nt, Artificial Sequence
  Description of Artificial Sequence: Synthetic oligonucleotide
cacguccagccauuggcuu

SEQ ID NO: 2658666 - RNA, 19 nt, Artificial Sequence
  Description of Artificial Sequence: Synthetic oligonucleotide
cguguaccguuucuccuca

SEQ ID NO: 2658667 - RNA, 19 nt, Artificial Sequence
  Description of Artificial Sequence: Synthetic oligonucleotide
gugucgccacacauguuau

SEQ ID NO: 2658668 - RNA, 19 nt, Artificial Sequence
  Description of Artificial Sequence: Synthetic oligonucleotide
cgggcgauguaacgcaaga

SEQ ID NO: 2658669 - RNA, 19 nt, Artificial Sequence
  Description of Artificial Sequence: Synthetic oligonucleotide
ccauuaucugguucuccau

SEQ ID NO: 2658670 - RNA, 19 nt, Artificial Sequence
  Description of Artificial Sequence: Synthetic oligonucleotide
cugcaugcggaaguccauu

SEQ ID NO: 2658671 - RNA, 19 nt, Artificial Sequence
  Description of Artificial Sequence: Synthetic oligonucleotide
ccaugauguccacucguau

SEQ ID NO: 2658672 - RNA, 19 nt, Artificial Sequence
  Description of Artificial Sequence: Synthetic oligonucleotide
cccaguaacccagaaccau

SEQ ID NO: 2658673 - RNA, 19 nt, Artificial Sequence
  Description of Artificial Sequence: Synthetic oligonucleotide
gggcgauguaacgcaagau

SEQ ID NO: 2658674 - RNA, 19 nt, Artificial Sequence
  Description of Artificial Sequence: Synthetic oligonucleotide
guguaccguuucuccucau

SEQ ID NO: 2658675 - RNA, 19 nt, Artificial Sequence
  Description of Artificial Sequence: Synthetic oligonucleotide
ccacacguguaccguuucu

SEQ ID NO: 2658676 - RNA, 19 nt, Artificial Sequence
  Description of Artificial Sequence: Synthetic oligonucleotide
cagugucgccacacauguu

SEQ ID NO: 2658677 - RNA, 19 nt, Artificial Sequence
  Description of Artificial Sequence: Synthetic oligonucleotide
cguccagccauuggcuucu

SEQ ID NO: 2658678 - RNA, 19 nt, Artificial Sequence
  Description of Artificial Sequence: Synthetic oligonucleotide
guccagccauuggcuucua

SEQ ID NO: 2658679 - RNA, 19 nt, Artificial Sequence
  Description of Artificial Sequence: Synthetic oligonucleotide
ccauaagguagggcagguu

SEQ ID NO: 2658680 - RNA, 19 nt, Artificial Sequence
  Description of Artificial Sequence: Synthetic oligonucleotide
aaaugcagauuauuuaagg

SEQ ID NO: 2658681 - RNA, 19 nt, Artificial Sequence
  Description of Artificial Sequence: Synthetic oligonucleotide
ucugguuucaguaaauucc

SEQ ID NO: 2658682 - RNA, 19 nt, Artificial Sequence
  Description of Artificial Sequence: Synthetic oligonucleotide
auaaacuuuaagcuguugg

SEQ ID NO: 2658683 - RNA, 19 nt, Artificial Sequence
  Description of Artificial Sequence: Synthetic oligonucleotide
uggaauauaaaacugcaac

SEQ ID NO: 2658684 - RNA, 19 nt, Artificial Sequence
  Description of Artificial Sequence: Synthetic oligonucleotide
uaaacuuuaagcuguuggg

SEQ ID NO: 2658685 - RNA, 19 nt, Artificial Sequence
  Description of Artificial Sequence: Synthetic oligonucleotide
aauuguugcauaaauaucu

SEQ ID NO: 2658686 - RNA, 19 nt, Artificial Sequence
  Description of Artificial Sequence: Synthetic oligonucleotide
uuauuuaaggugaaucugc

SEQ ID NO: 2658687 - RNA, 19 nt, Artificial Sequence
  Description of Artificial Sequence: Synthetic oligonucleotide
uuuaaggugaaucugcuuc

SEQ ID NO: 2658688 - RNA, 19 nt, Artificial Sequence
  Description of Artificial Sequence: Synthetic oligonucleotide
aauauaaaacugcaacaug

SEQ ID NO: 2658689 - RNA, 19 nt, Artificial Sequence
  Description of Artificial Sequence: Synthetic oligonucleotide
uaaaacugcaacauguucu

SEQ ID NO: 2658690 - RNA, 19 nt, Artificial Sequence
  Description of Artificial Sequence: Synthetic oligonucleotide
aaagguuucggccaaagaa

SEQ ID NO: 2658691 - RNA, 19 nt, Artificial Sequence
  Description of Artificial Sequence: Synthetic oligonucleotide
auugcagagauuaauaagg

SEQ ID NO: 2658692 - RNA, 19 nt, Artificial Sequence
  Description of Artificial Sequence: Synthetic oligonucleotide
agauccaaagguuucggcc

SEQ ID NO: 2658693 - RNA, 19 nt, Artificial Sequence
  Description of Artificial Sequence: Synthetic oligonucleotide
cuagagguaagccagacgc

SEQ ID NO: 2658694 - RNA, 19 nt, Artificial Sequence
  Description of Artificial Sequence: Synthetic oligonucleotide
guaaauuccagucuaauuc

SEQ ID NO: 2658695 - RNA, 19 nt, Artificial Sequence
  Description of Artificial Sequence: Synthetic oligonucleotide
uguacaguuagauccaaag

SEQ ID NO: 2658696 - RNA, 19 nt, Artificial Sequence
  Description of Artificial Sequence: Synthetic oligonucleotide
uuguguuugaauaaacaug

SEQ ID NO: 2658697 - RNA, 19 nt, Artificial Sequence
  Description of Artificial Sequence: Synthetic oligonucleotide
aaugcagauuauuuaaggu

SEQ ID NO: 2658698 - RNA, 19 nt, Artificial Sequence
  Description of Artificial Sequence: Synthetic oligonucleotide
ugcagauuauuuaagguga

SEQ ID NO: 2658699 - RNA, 19 nt, Artificial Sequence
  Description of Artificial Sequence: Synthetic oligonucleotide
guuugaauaaacaugaauc

SEQ ID NO: 2658700 - RNA, 19 nt, Artificial Sequence
  Description of Artificial Sequence: Synthetic oligonucleotide
uguugcauaaauaucuggu

SEQ ID NO: 2658701 - RNA, 19 nt, Artificial Sequence
  Description of Artificial Sequence: Synthetic oligonucleotide
agauuauuuaaggugaauc

SEQ ID NO: 2658702 - RNA, 19 nt, Artificial Sequence
  Description of Artificial Sequence: Synthetic oligonucleotide
ugaaaucuggcccaaagaa

SEQ ID NO: 2658703 - RNA, 19 nt, Artificial Sequence
  Description of Artificial Sequence: Synthetic oligonucleotide
agaaguccauaauuguugc

SEQ ID NO: 2658704 - RNA, 19 nt, Artificial Sequence
  Description of Artificial Sequence: Synthetic oligonucleotide
ucaauccugaauaacugcc

SEQ ID NO: 2658705 - RNA, 19 nt, Artificial Sequence
  Description of Artificial Sequence: Synthetic oligonucleotide
uuaauaaggcucuguacag

SEQ ID NO: 2658706 - RNA, 19 nt, Artificial Sequence
  Description of Artificial Sequence: Synthetic oligonucleotide
ucuggaauauaaaacugca

SEQ ID NO: 2658707 - RNA, 19 nt, Artificial Sequence
  Description of Artificial Sequence: Synthetic oligonucleotide
auaaaacugcaacauguuc

SEQ ID NO: 2658708 - RNA, 19 nt, Artificial Sequence
  Description of Artificial Sequence: Synthetic oligonucleotide
uucuggaauauaaaacugc

SEQ ID NO: 2658709 - RNA, 19 nt, Artificial Sequence
  Description of Artificial Sequence: Synthetic oligonucleotide
uccuuugugacugugauga

SEQ ID NO: 2658710 - RNA, 19 nt, Artificial Sequence
  Description of Artificial Sequence: Synthetic oligonucleotide
ucuuuaaucauugccacca

SEQ ID NO: 2658711 - RNA, 19 nt, Artificial Sequence
  Description of Artificial Sequence: Synthetic oligonucleotide
gaaaaugcagauuauuuaa

SEQ ID NO: 2658712 - RNA, 19 nt, Artificial Sequence
  Description of Artificial Sequence: Synthetic oligonucleotide
ugguauaaacuuuaagcug

SEQ ID NO: 2658713 - RNA, 19 nt, Artificial Sequence
  Description of Artificial Sequence: Synthetic oligonucleotide
auaaauaucugguuucagu

SEQ ID NO: 2658714 - RNA, 19 nt, Artificial Sequence
  Description of Artificial Sequence: Synthetic oligonucleotide
aauaucugguuucaguaaa

SEQ ID NO: 2658715 - RNA, 19 nt, Artificial Sequence
  Description of Artificial Sequence: Synthetic oligonucleotide
uaaauaucugguuucagua

SEQ ID NO: 2658716 - RNA, 19 nt, Artificial Sequence
  Description of Artificial Sequence: Synthetic oligonucleotide
uguuugaauaaacaugaau

SEQ ID NO: 2658717 - RNA, 19 nt, Artificial Sequence
  Description of Artificial Sequence: Synthetic oligonucleotide
augcagauuauuuaaggug

SEQ ID NO: 2658718 - RNA, 19 nt, Artificial Sequence
  Description of Artificial Sequence: Synthetic oligonucleotide
ucuuguguuugaauaaaca

SEQ ID NO: 2658719 - RNA, 19 nt, Artificial Sequence
  Description of Artificial Sequence: Synthetic oligonucleotide
gaugaaaucuggcccaaag

SEQ ID NO: 2658720 - RNA, 19 nt, Artificial Sequence
  Description of Artificial Sequence: Synthetic oligonucleotide
uccaacaguucuuuaauca

SEQ ID NO: 2658721 - RNA, 19 nt, Artificial Sequence
  Description of Artificial Sequence: Synthetic oligonucleotide
uaagcuguugggauuuggg

SEQ ID NO: 2658722 - RNA, 19 nt, Artificial Sequence
  Description of Artificial Sequence: Synthetic oligonucleotide
aagaaguccauaauuguug

SEQ ID NO: 2658723 - RNA, 19 nt, Artificial Sequence
  Description of Artificial Sequence: Synthetic oligonucleotide
uaaauuccagucuaauucu

SEQ ID NO: 2658724 - RNA, 19 nt, Artificial Sequence
  Description of Artificial Sequence: Synthetic oligonucleotide
uucagggugaugauggagc

SEQ ID NO: 2658725 - RNA, 19 nt, Artificial Sequence
  Description of Artificial Sequence: Synthetic oligonucleotide
uuuuacuccuucaauccug

SEQ ID NO: 2658726 - RNA, 19 nt, Artificial Sequence
  Description of Artificial Sequence: Synthetic oligonucleotide
ugaauaacugccuggccag

SEQ ID NO: 2658727 - RNA, 19 nt, Artificial Sequence
  Description of Artificial Sequence: Synthetic oligonucleotide
aaaucuggcccaaagaaga

SEQ ID NO: 2658728 - RNA, 19 nt, Artificial Sequence
  Description of Artificial Sequence: Synthetic oligonucleotide
aauccugaauaacugccug

SEQ ID NO: 2658729 - RNA, 19 nt, Artificial Sequence
  Description of Artificial Sequence: Synthetic oligonucleotide
aaucauugccaccaccuca

SEQ ID NO: 2658730 - RNA, 19 nt, Artificial Sequence
  Description of Artificial Sequence: Synthetic oligonucleotide
uguagaucacgucaccacc

SEQ ID NO: 2658731 - RNA, 19 nt, Artificial Sequence
  Description of Artificial Sequence: Synthetic oligonucleotide
guuucaguaaauuccaguc

SEQ ID NO: 2658732 - RNA, 19 nt, Artificial Sequence
  Description of Artificial Sequence: Synthetic oligonucleotide
gauuaauaaggcucuguac

SEQ ID NO: 2658733 - RNA, 19 nt, Artificial Sequence
  Description of Artificial Sequence: Synthetic oligonucleotide
aacauguucugaaucccgc

SEQ ID NO: 2658734 - RNA, 19 nt, Artificial Sequence
  Description of Artificial Sequence: Synthetic oligonucleotide
ugaaucccgcuuuucaggg

SEQ ID NO: 2658735 - RNA, 19 nt, Artificial Sequence
  Description of Artificial Sequence: Synthetic oligonucleotide
aacuuuaagcuguugggau

SEQ ID NO: 2658736 - RNA, 19 nt, Artificial Sequence
  Description of Artificial Sequence: Synthetic oligonucleotide
uuuaaucauugccaccacc

SEQ ID NO: 2658737 - RNA, 19 nt, Artificial Sequence
  Description of Artificial Sequence: Synthetic oligonucleotide
aaugccaucuucaaagccu

SEQ ID NO: 2658738 - RNA, 19 nt, Artificial Sequence
  Description of Artificial Sequence: Synthetic oligonucleotide
guacaguuagauccaaagg

SEQ ID NO: 2658739 - RNA, 19 nt, Artificial Sequence
  Description of Artificial Sequence: Synthetic oligonucleotide
gauuauuuaaggugaaucu

SEQ ID NO: 2658740 - RNA, 19 nt, Artificial Sequence
  Description of Artificial Sequence: Synthetic oligonucleotide
uuguugcauaaauaucugg

SEQ ID NO: 2658741 - RNA, 19 nt, Artificial Sequence
  Description of Artificial Sequence: Synthetic oligonucleotide
aacaguucuuuaaucauug

SEQ ID NO: 2658742 - RNA, 19 nt, Artificial Sequence
  Description of Artificial Sequence: Synthetic oligonucleotide
aucugguuucaguaaauuc

SEQ ID NO: 2658743 - RNA, 19 nt, Artificial Sequence
  Description of Artificial Sequence: Synthetic oligonucleotide
ucggccaaagaaaaugcag

SEQ ID NO: 2658744 - RNA, 19 nt, Artificial Sequence
  Description of Artificial Sequence: Synthetic oligonucleotide
cauugcagagauuaauaag

SEQ ID NO: 2658745 - RNA, 19 nt, Artificial Sequence
  Description of Artificial Sequence: Synthetic oligonucleotide
aaauaucugguuucaguaa

SEQ ID NO: 2658746 - RNA, 19 nt, Artificial Sequence
  Description of Artificial Sequence: Synthetic oligonucleotide
uuucggccaaagaaaaugc

SEQ ID NO: 2658747 - RNA, 19 nt, Artificial Sequence
  Description of Artificial Sequence: Synthetic oligonucleotide
caagaacuggcuuuccugg

SEQ ID NO: 2658748 - RNA, 19 nt, Artificial Sequence
  Description of Artificial Sequence: Synthetic oligonucleotide
acaaugccaucuucaaagc

SEQ ID NO: 2658749 - RNA, 19 nt, Artificial Sequence
  Description of Artificial Sequence: Synthetic oligonucleotide
ucaagaacuggcuuuccug

SEQ ID NO: 2658750 - RNA, 19 nt, Artificial Sequence
  Description of Artificial Sequence: Synthetic oligonucleotide
uaauuguugcauaaauauc

SEQ ID NO: 2658751 - RNA, 19 nt, Artificial Sequence
  Description of Artificial Sequence: Synthetic oligonucleotide
aauaaggcucuguacaguu

SEQ ID NO: 2658752 - RNA, 19 nt, Artificial Sequence
  Description of Artificial Sequence: Synthetic oligonucleotide
aguucuuuaaucauugcca

SEQ ID NO: 2658753 - RNA, 19 nt, Artificial Sequence
  Description of Artificial Sequence: Synthetic oligonucleotide
gaucacgucaccaccaucc

SEQ ID NO: 2658754 - RNA, 19 nt, Artificial Sequence
  Description of Artificial Sequence: Synthetic oligonucleotide
uauuuaaggugaaucugcu

SEQ ID NO: 2658755 - RNA, 19 nt, Artificial Sequence
  Description of Artificial Sequence: Synthetic oligonucleotide
uucaauccugaauaacugc

SEQ ID NO: 2658756 - RNA, 19 nt, Artificial Sequence
  Description of Artificial Sequence: Synthetic oligonucleotide
ugcacaguaggccguaucc

SEQ ID NO: 2658757 - RNA, 19 nt, Artificial Sequence
  Description of Artificial Sequence: Synthetic oligonucleotide
aaagccucuguagaucacg

SEQ ID NO: 2658758 - RNA, 19 nt, Artificial Sequence
  Description of Artificial Sequence: Synthetic oligonucleotide
ucugaaucccgcuuuucag

SEQ ID NO: 2658759 - RNA, 19 nt, Artificial Sequence
  Description of Artificial Sequence: Synthetic oligonucleotide
caguucuuuaaucauugcc

SEQ ID NO: 2658760 - RNA, 19 nt, Artificial Sequence
  Description of Artificial Sequence: Synthetic oligonucleotide
acuccuucaauccugaaua

SEQ ID NO: 2658761 - RNA, 19 nt, Artificial Sequence
  Description of Artificial Sequence: Synthetic oligonucleotide
aaucccgcuuuucagggug

SEQ ID NO: 2658762 - RNA, 19 nt, Artificial Sequence
  Description of Artificial Sequence: Synthetic oligonucleotide
cugugaugaaaucuggccc

SEQ ID NO: 2658763 - RNA, 19 nt, Artificial Sequence
  Description of Artificial Sequence: Synthetic oligonucleotide
aaacuuuaagcuguuggga

SEQ ID NO: 2658764 - RNA, 19 nt, Artificial Sequence
  Description of Artificial Sequence: Synthetic oligonucleotide
aagaaaaugcagauuauuu

SEQ ID NO: 2658765 - RNA, 19 nt, Artificial Sequence
  Description of Artificial Sequence: Synthetic oligonucleotide
cuucaauccugaauaacug

SEQ ID NO: 2658766 - RNA, 19 nt, Artificial Sequence
  Description of Artificial Sequence: Synthetic oligonucleotide
aauuccagucuaauucuuc

SEQ ID NO: 2658767 - RNA, 19 nt, Artificial Sequence
  Description of Artificial Sequence: Synthetic oligonucleotide
uauccuaguguccaacagu

SEQ ID NO: 2658768 - RNA, 19 nt, Artificial Sequence
  Description of Artificial Sequence: Synthetic oligonucleotide
gucacuagagguaagccag

SEQ ID NO: 2658769 - RNA, 19 nt, Artificial Sequence
  Description of Artificial Sequence: Synthetic oligonucleotide
aacugcaacauguucugaa

SEQ ID NO: 2658770 - RNA, 19 nt, Artificial Sequence
  Description of Artificial Sequence: Synthetic oligonucleotide
gaaaucuggcccaaagaag

SEQ ID NO: 2658771 - RNA, 19 nt, Artificial Sequence
  Description of Artificial Sequence: Synthetic oligonucleotide
agggugaugauggagcugg

SEQ ID NO: 2658772 - RNA, 19 nt, Artificial Sequence
  Description of Artificial Sequence: Synthetic oligonucleotide
ucaucauccaucaccugcu

SEQ ID NO: 2658773 - RNA, 19 nt, Artificial Sequence
  Description of Artificial Sequence: Synthetic oligonucleotide
guuucagccgcacaaugcc

SEQ ID NO: 2658774 - RNA, 19 nt, Artificial Sequence
  Description of Artificial Sequence: Synthetic oligonucleotide
gucaccaccauccuccugc

SEQ ID NO: 2658775 - RNA, 19 nt, Artificial Sequence
  Description of Artificial Sequence: Synthetic oligonucleotide
cugaaucccgcuuuucagg

SEQ ID NO: 2658776 - RNA, 19 nt, Artificial Sequence
  Description of Artificial Sequence: Synthetic oligonucleotide
uggaguuucagccgcacaa

SEQ ID NO: 2658777 - RNA, 19 nt, Artificial Sequence
  Description of Artificial Sequence: Synthetic oligonucleotide
uuuacuccuucaauccuga

SEQ ID NO: 2658778 - RNA, 19 nt, Artificial Sequence
  Description of Artificial Sequence: Synthetic oligonucleotide
guuagauccaaagguuucg

SEQ ID NO: 2658779 - RNA, 19 nt, Artificial Sequence
  Description of Artificial Sequence: Synthetic oligonucleotide
uuuccuuugugacugugau

SEQ ID NO: 2658780 - RNA, 19 nt, Artificial Sequence
  Description of Artificial Sequence: Synthetic oligonucleotide
gauccaaagguuucggcca

SEQ ID NO: 2658781 - RNA, 19 nt, Artificial Sequence
  Description of Artificial Sequence: Synthetic oligonucleotide
gugaugauggagcuggggc

SEQ ID NO: 2658782 - RNA, 19 nt, Artificial Sequence
  Description of Artificial Sequence: Synthetic oligonucleotide
uuagauccaaagguuucgg

SEQ ID NO: 2658783 - RNA, 19 nt, Artificial Sequence
  Description of Artificial Sequence: Synthetic oligonucleotide
guuucggccaaagaaaaug

SEQ ID NO: 2658784 - RNA, 19 nt, Artificial Sequence
  Description of Artificial Sequence: Synthetic oligonucleotide
agauuaauaaggcucugua

SEQ ID NO: 2658785 - RNA, 19 nt, Artificial Sequence
  Description of Artificial Sequence: Synthetic oligonucleotide
ggaauauaaaacugcaaca

SEQ ID NO: 2658786 - RNA, 19 nt, Artificial Sequence
  Description of Artificial Sequence: Synthetic oligonucleotide
aguuucagccgcacaaugc

SEQ ID NO: 2658787 - RNA, 19 nt, Artificial Sequence
  Description of Artificial Sequence: Synthetic oligonucleotide
agucacuagagguaagcca

SEQ ID NO: 2658788 - RNA, 19 nt, Artificial Sequence
  Description of Artificial Sequence: Synthetic oligonucleotide
aguaaauuccagucuaauu

SEQ ID NO: 2658789 - RNA, 19 nt, Artificial Sequence
  Description of Artificial Sequence: Synthetic oligonucleotide
caacauguucugaaucccg

SEQ ID NO: 2658790 - RNA, 19 nt, Artificial Sequence
  Description of Artificial Sequence: Synthetic oligonucleotide
uguccaacaguucuuuaau

SEQ ID NO: 2658791 - RNA, 19 nt, Artificial Sequence
  Description of Artificial Sequence: Synthetic oligonucleotide
acuagagguaagccagacg

SEQ ID NO: 2658792 - RNA, 19 nt, Artificial Sequence
  Description of Artificial Sequence: Synthetic oligonucleotide
gacgcaaagaaguccauaa

SEQ ID NO: 2658793 - RNA, 19 nt, Artificial Sequence
  Description of Artificial Sequence: Synthetic oligonucleotide
auccugaauaacugccugg

SEQ ID NO: 2658794 - RNA, 19 nt, Artificial Sequence
  Description of Artificial Sequence: Synthetic oligonucleotide
aaagaaguccauaauuguu

SEQ ID NO: 2658795 - RNA, 19 nt, Artificial Sequence
  Description of Artificial Sequence: Synthetic oligonucleotide
aauaacugccuggccagag

SEQ ID NO: 2658796 - RNA, 19 nt, Artificial Sequence
  Description of Artificial Sequence: Synthetic oligonucleotide
agguaagccagacgcaaag

SEQ ID NO: 2658797 - RNA, 19 nt, Artificial Sequence
  Description of Artificial Sequence: Synthetic oligonucleotide
cugguauaaacuuuaagcu

SEQ ID NO: 2658798 - RNA, 19 nt, Artificial Sequence
  Description of Artificial Sequence: Synthetic oligonucleotide
agcuguugggauuuggggu

SEQ ID NO: 2658799 - RNA, 19 nt, Artificial Sequence
  Description of Artificial Sequence: Synthetic oligonucleotide
ugcagagauuaauaaggcu

SEQ ID NO: 2658800 - RNA, 19 nt, Artificial Sequence
  Description of Artificial Sequence: Synthetic oligonucleotide
aguuagauccaaagguuuc

SEQ ID NO: 2658801 - RNA, 19 nt, Artificial Sequence
  Description of Artificial Sequence: Synthetic oligonucleotide
augaaaucuggcccaaaga

SEQ ID NO: 2658802 - RNA, 19 nt, Artificial Sequence
  Description of Artificial Sequence: Synthetic oligonucleotide
auaacugccuggccagagg

SEQ ID NO: 2658803 - RNA, 19 nt, Artificial Sequence
  Description of Artificial Sequence: Synthetic oligonucleotide
aagguuucggccaaagaaa

SEQ ID NO: 2658804 - RNA, 19 nt, Artificial Sequence
  Description of Artificial Sequence: Synthetic oligonucleotide
uccugaauaacugccuggc

SEQ ID NO: 2658805 - RNA, 19 nt, Artificial Sequence
  Description of Artificial Sequence: Synthetic oligonucleotide
ucagucacuagagguaagc

SEQ ID NO: 2658806 - RNA, 19 nt, Artificial Sequence
  Description of Artificial Sequence: Synthetic oligonucleotide
uacuccuucaauccugaau

SEQ ID NO: 2658807 - RNA, 19 nt, Artificial Sequence
  Description of Artificial Sequence: Synthetic oligonucleotide
guuuccucagucacuagag

SEQ ID NO: 2658808 - RNA, 19 nt, Artificial Sequence
  Description of Artificial Sequence: Synthetic oligonucleotide
uuaagcuguugggauuugg

SEQ ID NO: 2658809 - RNA, 19 nt, Artificial Sequence
  Description of Artificial Sequence: Synthetic oligonucleotide
guauccuaguguccaacag

SEQ ID NO: 2658810 - RNA, 19 nt, Artificial Sequence
  Description of Artificial Sequence: Synthetic oligonucleotide
uggcuuuccugguauaaac

SEQ ID NO: 2658811 - RNA, 19 nt, Artificial Sequence
  Description of Artificial Sequence: Synthetic oligonucleotide
uucggccaaagaaaaugca

SEQ ID NO: 2658812 - RNA, 19 nt, Artificial Sequence
  Description of Artificial Sequence: Synthetic oligonucleotide
ucuguagaucacgucacca

SEQ ID NO: 2658813 - RNA, 19 nt, Artificial Sequence
  Description of Artificial Sequence: Synthetic oligonucleotide
uagauccaaagguuucggc

SEQ ID NO: 2658814 - RNA, 19 nt, Artificial Sequence
  Description of Artificial Sequence: Synthetic oligonucleotide
cauccuccugcacaguagg

SEQ ID NO: 2658815 - RNA, 19 nt, Artificial Sequence
  Description of Artificial Sequence: Synthetic oligonucleotide
gcagagauuaauaaggcuc

SEQ ID NO: 2658816 - RNA, 19 nt, Artificial Sequence
  Description of Artificial Sequence: Synthetic oligonucleotide
uaaucauugccaccaccuc

SEQ ID NO: 2658817 - RNA, 19 nt, Artificial Sequence
  Description of Artificial Sequence: Synthetic oligonucleotide
ugguuucaguaaauuccag

SEQ ID NO: 2658818 - RNA, 19 nt, Artificial Sequence
  Description of Artificial Sequence: Synthetic oligonucleotide
ugguccucgucucaagaac

SEQ ID NO: 2658819 - RNA, 19 nt, Artificial Sequence
  Description of Artificial Sequence: Synthetic oligonucleotide
gaaagcugcggcuggcgug

SEQ ID NO: 2658820 - RNA, 19 nt, Artificial Sequence
  Description of Artificial Sequence: Synthetic oligonucleotide
acaccuuccacuucuggaa

SEQ ID NO: 2658821 - RNA, 19 nt, Artificial Sequence
  Description of Artificial Sequence: Synthetic oligonucleotide
gaguuucagccgcacaaug

SEQ ID NO: 2658822 - RNA, 19 nt, Artificial Sequence
  Description of Artificial Sequence: Synthetic oligonucleotide
uauaaacuuuaagcuguug

SEQ ID NO: 2658823 - RNA, 19 nt, Artificial Sequence
  Description of Artificial Sequence: Synthetic oligonucleotide
aguccaugguccucgucuc

SEQ ID NO: 2658824 - RNA, 19 nt, Artificial Sequence
  Description of Artificial Sequence: Synthetic oligonucleotide
auuguugcauaaauaucug

SEQ ID NO: 2658825 - RNA, 19 nt, Artificial Sequence
  Description of Artificial Sequence: Synthetic oligonucleotide
uuucagccgcacaaugcca

SEQ ID NO: 2658826 - RNA, 19 nt, Artificial Sequence
  Description of Artificial Sequence: Synthetic oligonucleotide
uggugcaggagcccuggag

SEQ ID NO: 2658827 - RNA, 19 nt, Artificial Sequence
  Description of Artificial Sequence: Synthetic oligonucleotide
cuuguguuugaauaaacau

SEQ ID NO: 2658828 - RNA, 19 nt, Artificial Sequence
  Description of Artificial Sequence: Synthetic oligonucleotide
ucagggugaugauggagcu

SEQ ID NO: 2658829 - RNA, 19 nt, Artificial Sequence
  Description of Artificial Sequence: Synthetic oligonucleotide
ugggauuuggggugucuug

SEQ ID NO: 2658830 - RNA, 19 nt, Artificial Sequence
  Description of Artificial Sequence: Synthetic oligonucleotide
uagagguaagccagacgca

SEQ ID NO: 2658831 - RNA, 19 nt, Artificial Sequence
  Description of Artificial Sequence: Synthetic oligonucleotide
cauaaauaucugguuucag

SEQ ID NO: 2658832 - RNA, 19 nt, Artificial Sequence
  Description of Artificial Sequence: Synthetic oligonucleotide
gacugugaugaaaucuggc

SEQ ID NO: 2658833 - RNA, 19 nt, Artificial Sequence
  Description of Artificial Sequence: Synthetic oligonucleotide
uaauaaggcucuguacagu

SEQ ID NO: 2658834 - RNA, 19 nt, Artificial Sequence
  Description of Artificial Sequence: Synthetic oligonucleotide
uccuccugcacaguaggcc

SEQ ID NO: 2658835 - RNA, 19 nt, Artificial Sequence
  Description of Artificial Sequence: Synthetic oligonucleotide
guaagccagacgcaaagaa

SEQ ID NO: 2658836 - RNA, 19 nt, Artificial Sequence
  Description of Artificial Sequence: Synthetic oligonucleotide
acuuuaagcuguugggauu

SEQ ID NO: 2658837 - RNA, 19 nt, Artificial Sequence
  Description of Artificial Sequence: Synthetic oligonucleotide
uucagccgcacaaugccau

SEQ ID NO: 2658838 - RNA, 19 nt, Artificial Sequence
  Description of Artificial Sequence: Synthetic oligonucleotide
gguauaaacuuuaagcugu

SEQ ID NO: 2658839 - RNA, 19 nt, Artificial Sequence
  Description of Artificial Sequence: Synthetic oligonucleotide
ggugucuuguguuugaaua

SEQ ID NO: 2658840 - RNA, 19 nt, Artificial Sequence
  Description of Artificial Sequence: Synthetic oligonucleotide
uccucgucucaagaacugg

SEQ ID NO: 2658841 - RNA, 19 nt, Artificial Sequence
  Description of Artificial Sequence: Synthetic oligonucleotide
uccauaauuguugcauaaa

SEQ ID NO: 2658842 - RNA, 19 nt, Artificial Sequence
  Description of Artificial Sequence: Synthetic oligonucleotide
uuccuuugugacugugaug

SEQ ID NO: 2658843 - RNA, 19 nt, Artificial Sequence
  Description of Artificial Sequence: Synthetic oligonucleotide
agaucacgucaccaccauc

SEQ ID NO: 2658844 - RNA, 19 nt, Artificial Sequence
  Description of Artificial Sequence: Synthetic oligonucleotide
ucaccugcucuacaccuuc

SEQ ID NO: 2658845 - RNA, 19 nt, Artificial Sequence
  Description of Artificial Sequence: Synthetic oligonucleotide
agcggaaagcugcggcugg

SEQ ID NO: 2658846 - RNA, 19 nt, Artificial Sequence
  Description of Artificial Sequence: Synthetic oligonucleotide
aguaggccguauccuagug

SEQ ID NO: 2658847 - RNA, 19 nt, Artificial Sequence
  Description of Artificial Sequence: Synthetic oligonucleotide
cugcaacauguucugaauc

SEQ ID NO: 2658848 - RNA, 19 nt, Artificial Sequence
  Description of Artificial Sequence: Synthetic oligonucleotide
acaguuagauccaaagguu

SEQ ID NO: 2658849 - RNA, 19 nt, Artificial Sequence
  Description of Artificial Sequence: Synthetic oligonucleotide
auuuaaggugaaucugcuu

SEQ ID NO: 2658850 - RNA, 19 nt, Artificial Sequence
  Description of Artificial Sequence: Synthetic oligonucleotide
cuuuaaucauugccaccac

SEQ ID NO: 2658851 - RNA, 19 nt, Artificial Sequence
  Description of Artificial Sequence: Synthetic oligonucleotide
aguccauaauuguugcaua

SEQ ID NO: 2658852 - RNA, 19 nt, Artificial Sequence
  Description of Artificial Sequence: Synthetic oligonucleotide
auuuggggugucuuguguu

SEQ ID NO: 2658853 - RNA, 19 nt, Artificial Sequence
  Description of Artificial Sequence: Synthetic oligonucleotide
aaggugaaucugcuucuuu

SEQ ID NO: 2658854 - RNA, 19 nt, Artificial Sequence
  Description of Artificial Sequence: Synthetic oligonucleotide
gaaguccauaauuguugca

SEQ ID NO: 2658855 - RNA, 19 nt, Artificial Sequence
  Description of Artificial Sequence: Synthetic oligonucleotide
uccuucaauccugaauaac

SEQ ID NO: 2658856 - RNA, 19 nt, Artificial Sequence
  Description of Artificial Sequence: Synthetic oligonucleotide
uguucugaaucccgcuuuu

SEQ ID NO: 2658857 - RNA, 19 nt, Artificial Sequence
  Description of Artificial Sequence: Synthetic oligonucleotide
cagagauuaauaaggcucu

SEQ ID NO: 2658858 - RNA, 19 nt, Artificial Sequence
  Description of Artificial Sequence: Synthetic oligonucleotide
guguccaacaguucuuuaa

SEQ ID NO: 2658859 - RNA, 19 nt, Artificial Sequence
  Description of Artificial Sequence: Synthetic oligonucleotide
cagucacuagagguaagcc

SEQ ID NO: 2658860 - RNA, 19 nt, Artificial Sequence
  Description of Artificial Sequence: Synthetic oligonucleotide
ucgucucaagaacuggcuu

SEQ ID NO: 2658861 - RNA, 19 nt, Artificial Sequence
  Description of Artificial Sequence: Synthetic oligonucleotide
uuccagucuaauucuucau

SEQ ID NO: 2658862 - RNA, 19 nt, Artificial Sequence
  Description of Artificial Sequence: Synthetic oligonucleotide
cucuguagaucacgucacc

SEQ ID NO: 2658863 - RNA, 19 nt, Artificial Sequence
  Description of Artificial Sequence: Synthetic oligonucleotide
auguucugaaucccgcuuu

SEQ ID NO: 2658864 - RNA, 19 nt, Artificial Sequence
  Description of Artificial Sequence: Synthetic oligonucleotide
uagaucacgucaccaccau

SEQ ID NO: 2658865 - RNA, 19 nt, Artificial Sequence
  Description of Artificial Sequence: Synthetic oligonucleotide
gugucuuguguuugaauaa

SEQ ID NO: 2658866 - RNA, 19 nt, Artificial Sequence
  Description of Artificial Sequence: Synthetic oligonucleotide
acaguaggccguauccuag

SEQ ID NO: 2658867 - RNA, 19 nt, Artificial Sequence
  Description of Artificial Sequence: Synthetic oligonucleotide
uaucugguuucaguaaauu

SEQ ID NO: 2658868 - RNA, 19 nt, Artificial Sequence
  Description of Artificial Sequence: Synthetic oligonucleotide
gccucuguagaucacguca

SEQ ID NO: 2658869 - RNA, 19 nt, Artificial Sequence
  Description of Artificial Sequence: Synthetic oligonucleotide
gggaaguccaugguccucg

SEQ ID NO: 2658870 - RNA, 19 nt, Artificial Sequence
  Description of Artificial Sequence: Synthetic oligonucleotide
ggcguggggaaguccaugg

SEQ ID NO: 2658871 - RNA, 19 nt, Artificial Sequence
  Description of Artificial Sequence: Synthetic oligonucleotide
cuggaauauaaaacugcaa

SEQ ID NO: 2658872 - RNA, 19 nt, Artificial Sequence
  Description of Artificial Sequence: Synthetic oligonucleotide
guccaacaguucuuuaauc

SEQ ID NO: 2658873 - RNA, 19 nt, Artificial Sequence
  Description of Artificial Sequence: Synthetic oligonucleotide
agagauuaauaaggcucug

SEQ ID NO: 2658874 - RNA, 19 nt, Artificial Sequence
  Description of Artificial Sequence: Synthetic oligonucleotide
guugcauaaauaucugguu

SEQ ID NO: 2658875 - RNA, 19 nt, Artificial Sequence
  Description of Artificial Sequence: Synthetic oligonucleotide
guagaucacgucaccacca

SEQ ID NO: 2658876 - RNA, 19 nt, Artificial Sequence
  Description of Artificial Sequence: Synthetic oligonucleotide
ccuccugcacaguaggccg

SEQ ID NO: 2658877 - RNA, 19 nt, Artificial Sequence
  Description of Artificial Sequence: Synthetic oligonucleotide
augguccucgucucaagaa

SEQ ID NO: 2658878 - RNA, 19 nt, Artificial Sequence
  Description of Artificial Sequence: Synthetic oligonucleotide
aaacugcaacauguucuga

SEQ ID NO: 2658879 - RNA, 19 nt, Artificial Sequence
  Description of Artificial Sequence: Synthetic oligonucleotide
acgcaaagaaguccauaau

SEQ ID NO: 2658880 - RNA, 19 nt, Artificial Sequence
  Description of Artificial Sequence: Synthetic oligonucleotide
aagccucuguagaucacgu

SEQ ID NO: 2658881 - RNA, 19 nt, Artificial Sequence
  Description of Artificial Sequence: Synthetic oligonucleotide
gucuuguguuugaauaaac

SEQ ID NO: 2658882 - RNA, 19 nt, Artificial Sequence
  Description of Artificial Sequence: Synthetic oligonucleotide
uggcccaaagaagacacuu

SEQ ID NO: 2658883 - RNA, 19 nt, Artificial Sequence
  Description of Artificial Sequence: Synthetic oligonucleotide
aucacgucaccaccauccu

SEQ ID NO: 2658884 - RNA, 19 nt, Artificial Sequence
  Description of Artificial Sequence: Synthetic oligonucleotide
uuggggugucuuguguuug

SEQ ID NO: 2658885 - RNA, 19 nt, Artificial Sequence
  Description of Artificial Sequence: Synthetic oligonucleotide
aucauugccaccaccucau

SEQ ID NO: 2658886 - RNA, 19 nt, Artificial Sequence
  Description of Artificial Sequence: Synthetic oligonucleotide
uggggugucuuguguuuga

SEQ ID NO: 2658887 - RNA, 19 nt, Artificial Sequence
  Description of Artificial Sequence: Synthetic oligonucleotide
ucacgucaccaccauccuc

SEQ ID NO: 2658888 - RNA, 19 nt, Artificial Sequence
  Description of Artificial Sequence: Synthetic oligonucleotide
uccuaguguccaacaguuc

SEQ ID NO: 2658889 - RNA, 19 nt, Artificial Sequence
  Description of Artificial Sequence: Synthetic oligonucleotide
cucagucacuagagguaag

SEQ ID NO: 2658890 - RNA, 19 nt, Artificial Sequence
  Description of Artificial Sequence: Synthetic oligonucleotide
ucucaagaacuggcuuucc

SEQ ID NO: 2658891 - RNA, 19 nt, Artificial Sequence
  Description of Artificial Sequence: Synthetic oligonucleotide
gagauuaauaaggcucugu

SEQ ID NO: 2658892 - RNA, 19 nt, Artificial Sequence
  Description of Artificial Sequence: Synthetic oligonucleotide
agccagacgcaaagaaguc

SEQ ID NO: 2658893 - RNA, 19 nt, Artificial Sequence
  Description of Artificial Sequence: Synthetic oligonucleotide
gggguguuuccucagucac

SEQ ID NO: 2658894 - RNA, 19 nt, Artificial Sequence
  Description of Artificial Sequence: Synthetic oligonucleotide
gucucaagaacuggcuuuc

SEQ ID NO: 2658895 - RNA, 19 nt, Artificial Sequence
  Description of Artificial Sequence: Synthetic oligonucleotide
gcaacauguucugaauccc

SEQ ID NO: 2658896 - RNA, 19 nt, Artificial Sequence
  Description of Artificial Sequence: Synthetic oligonucleotide
gguuucaguaaauuccagu

SEQ ID NO: 2658897 - RNA, 19 nt, Artificial Sequence
  Description of Artificial Sequence: Synthetic oligonucleotide
ggugaugauggagcugggg

SEQ ID NO: 2658898 - RNA, 19 nt, Artificial Sequence
  Description of Artificial Sequence: Synthetic oligonucleotide
ccucgucucaagaacuggc

SEQ ID NO: 2658899 - RNA, 19 nt, Artificial Sequence
  Description of Artificial Sequence: Synthetic oligonucleotide
gagcggaaagcugcggcug

SEQ ID NO: 2658900 - RNA, 19 nt, Artificial Sequence
  Description of Artificial Sequence: Synthetic oligonucleotide
auccuccugcacaguaggc

SEQ ID NO: 2658901 - RNA, 19 nt, Artificial Sequence
  Description of Artificial Sequence: Synthetic oligonucleotide
caaagccucuguagaucac

SEQ ID NO: 2658902 - RNA, 19 nt, Artificial Sequence
  Description of Artificial Sequence: Synthetic oligonucleotide
agguuucggccaaagaaaa

SEQ ID NO: 2658903 - RNA, 19 nt, Artificial Sequence
  Description of Artificial Sequence: Synthetic oligonucleotide
ccuucaauccugaauaacu

SEQ ID NO: 2658904 - RNA, 19 nt, Artificial Sequence
  Description of Artificial Sequence: Synthetic oligonucleotide
cacuagagguaagccagac

SEQ ID NO: 2658905 - RNA, 19 nt, Artificial Sequence
  Description of Artificial Sequence: Synthetic oligonucleotide
caaagguuucggccaaaga

SEQ ID NO: 2658906 - RNA, 19 nt, Artificial Sequence
  Description of Artificial Sequence: Synthetic oligonucleotide
auaucugguuucaguaaau

SEQ ID NO: 2658907 - RNA, 19 nt, Artificial Sequence
  Description of Artificial Sequence: Synthetic oligonucleotide
cucuacaccuuccacuucu

SEQ ID NO: 2658908 - RNA, 19 nt, Artificial Sequence
  Description of Artificial Sequence: Synthetic oligonucleotide
uccaugguccucgucucaa

SEQ ID NO: 2658909 - RNA, 19 nt, Artificial Sequence
  Description of Artificial Sequence: Synthetic oligonucleotide
aggccguauccuagugucc

SEQ ID NO: 2658910 - RNA, 19 nt, Artificial Sequence
  Description of Artificial Sequence: Synthetic oligonucleotide
caugguccucgucucaaga

SEQ ID NO: 2658911 - RNA, 19 nt, Artificial Sequence
  Description of Artificial Sequence: Synthetic oligonucleotide
ucaccaccauccuccugca

SEQ ID NO: 2658912 - RNA, 19 nt, Artificial Sequence
  Description of Artificial Sequence: Synthetic oligonucleotide
ccagacgcaaagaagucca

SEQ ID NO: 2658913 - RNA, 19 nt, Artificial Sequence
  Description of Artificial Sequence: Synthetic oligonucleotide
gggagcggaaagcugcggc

SEQ ID NO: 2658914 - RNA, 19 nt, Artificial Sequence
  Description of Artificial Sequence: Synthetic oligonucleotide
ggauuuggggugucuugug

SEQ ID NO: 2658915 - RNA, 19 nt, Artificial Sequence
  Description of Artificial Sequence: Synthetic oligonucleotide
caauccugaauaacugccu

SEQ ID NO: 2658916 - RNA, 19 nt, Artificial Sequence
  Description of Artificial Sequence: Synthetic oligonucleotide
aacuggcuuuccugguaua

SEQ ID NO: 2658917 - RNA, 19 nt, Artificial Sequence
  Description of Artificial Sequence: Synthetic oligonucleotide
caucaccugcucuacaccu

SEQ ID NO: 2658918 - RNA, 19 nt, Artificial Sequence
  Description of Artificial Sequence: Synthetic oligonucleotide
gcuuuucagggugaugaug

SEQ ID NO: 2658919 - RNA, 19 nt, Artificial Sequence
  Description of Artificial Sequence: Synthetic oligonucleotide
uaaggugaaucugcuucuu

SEQ ID NO: 2658920 - RNA, 19 nt, Artificial Sequence
  Description of Artificial Sequence: Synthetic oligonucleotide
cacaguaggccguauccua

SEQ ID NO: 2658921 - RNA, 19 nt, Artificial Sequence
  Description of Artificial Sequence: Synthetic oligonucleotide
aguguccaacaguucuuua

SEQ ID NO: 2658922 - RNA, 19 nt, Artificial Sequence
  Description of Artificial Sequence: Synthetic oligonucleotide
aaggcucuguacaguuaga

SEQ ID NO: 2658923 - RNA, 19 nt, Artificial Sequence
  Description of Artificial Sequence: Synthetic oligonucleotide
gaacuggcuuuccugguau

SEQ ID NO: 2658924 - RNA, 19 nt, Artificial Sequence
  Description of Artificial Sequence: Synthetic oligonucleotide
caaagaaaaugcagauuau

SEQ ID NO: 2658925 - RNA, 19 nt, Artificial Sequence
  Description of Artificial Sequence: Synthetic oligonucleotide
cugcucuacaccuuccacu

SEQ ID NO: 2658926 - RNA, 19 nt, Artificial Sequence
  Description of Artificial Sequence: Synthetic oligonucleotide
auccaucaccugcucuaca

SEQ ID NO: 2658927 - RNA, 19 nt, Artificial Sequence
  Description of Artificial Sequence: Synthetic oligonucleotide
uuacuccuucaauccugaa

SEQ ID NO: 2658928 - RNA, 19 nt, Artificial Sequence
  Description of Artificial Sequence: Synthetic oligonucleotide
caccugcucuacaccuucc

SEQ ID NO: 2658929 - RNA, 19 nt, Artificial Sequence
  Description of Artificial Sequence: Synthetic oligonucleotide
gccagacgcaaagaagucc

SEQ ID NO: 2658930 - RNA, 19 nt, Artificial Sequence
  Description of Artificial Sequence: Synthetic oligonucleotide
guguuuccucagucacuag

SEQ ID NO: 2658931 - RNA, 19 nt, Artificial Sequence
  Description of Artificial Sequence: Synthetic oligonucleotide
caucauccaucaccugcuc

SEQ ID NO: 2658932 - RNA, 19 nt, Artificial Sequence
  Description of Artificial Sequence: Synthetic oligonucleotide
agaggggagcggaaagcug

SEQ ID NO: 2658933 - RNA, 19 nt, Artificial Sequence
  Description of Artificial Sequence: Synthetic oligonucleotide
aggggagcggaaagcugcg

SEQ ID NO: 2658934 - RNA, 19 nt, Artificial Sequence
  Description of Artificial Sequence: Synthetic oligonucleotide
ugaugaaaucuggcccaaa

SEQ ID NO: 2658935 - RNA, 19 nt, Artificial Sequence
  Description of Artificial Sequence: Synthetic oligonucleotide
cugcacaguaggccguauc

SEQ ID NO: 2658936 - RNA, 19 nt, Artificial Sequence
  Description of Artificial Sequence: Synthetic oligonucleotide
gaauaacugccuggccaga

SEQ ID NO: 2658937 - RNA, 19 nt, Artificial Sequence
  Description of Artificial Sequence: Synthetic oligonucleotide
gccagaggggagcggaaag

SEQ ID NO: 2658938 - RNA, 19 nt, Artificial Sequence
  Description of Artificial Sequence: Synthetic oligonucleotide
ccuaguguccaacaguucu

SEQ ID NO: 2658939 - RNA, 19 nt, Artificial Sequence
  Description of Artificial Sequence: Synthetic oligonucleotide
agacgcaaagaaguccaua

SEQ ID NO: 2658940 - RNA, 19 nt, Artificial Sequence
  Description of Artificial Sequence: Synthetic oligonucleotide
cucgucucaagaacuggcu

SEQ ID NO: 2658941 - RNA, 19 nt, Artificial Sequence
  Description of Artificial Sequence: Synthetic oligonucleotide
ccauccuccugcacaguag

SEQ ID NO: 2658942 - RNA, 19 nt, Artificial Sequence
  Description of Artificial Sequence: Synthetic oligonucleotide
ggugcaggagcccuggagu

SEQ ID NO: 2658943 - RNA, 19 nt, Artificial Sequence
  Description of Artificial Sequence: Synthetic oligonucleotide
uggcguggggaaguccaug

SEQ ID NO: 2658944 - RNA, 19 nt, Artificial Sequence
  Description of Artificial Sequence: Synthetic oligonucleotide
cuccuucaauccugaauaa

SEQ ID NO: 2658945 - RNA, 19 nt, Artificial Sequence
  Description of Artificial Sequence: Synthetic oligonucleotide
ccaucaccugcucuacacc

SEQ ID NO: 2658946 - RNA, 19 nt, Artificial Sequence
  Description of Artificial Sequence: Synthetic oligonucleotide
cugccuggccagaggggag

SEQ ID NO: 2658947 - RNA, 19 nt, Artificial Sequence
  Description of Artificial Sequence: Synthetic oligonucleotide
gccaucuucaaagccucug

SEQ ID NO: 2658948 - RNA, 19 nt, Artificial Sequence
  Description of Artificial Sequence: Synthetic oligonucleotide
cucaagaacuggcuuuccu

SEQ ID NO: 2658949 - RNA, 19 nt, Artificial Sequence
  Description of Artificial Sequence: Synthetic oligonucleotide
cuuuaagcuguugggauuu

SEQ ID NO: 2658950 - RNA, 19 nt, Artificial Sequence
  Description of Artificial Sequence: Synthetic oligonucleotide
guaggccguauccuagugu

SEQ ID NO: 2658951 - RNA, 19 nt, Artificial Sequence
  Description of Artificial Sequence: Synthetic oligonucleotide
guucugaaucccgcuuuuc

SEQ ID NO: 2658952 - RNA, 19 nt, Artificial Sequence
  Description of Artificial Sequence: Synthetic oligonucleotide
ggccaaagaaaaugcagau

SEQ ID NO: 2658953 - RNA, 19 nt, Artificial Sequence
  Description of Artificial Sequence: Synthetic oligonucleotide
auaaggcucuguacaguua

SEQ ID NO: 2658954 - RNA, 19 nt, Artificial Sequence
  Description of Artificial Sequence: Synthetic oligonucleotide
gcccuggaguuucagccgc

SEQ ID NO: 2658955 - RNA, 19 nt, Artificial Sequence
  Description of Artificial Sequence: Synthetic oligonucleotide
ugcggcuggcguggggaag

SEQ ID NO: 2658956 - RNA, 19 nt, Artificial Sequence
  Description of Artificial Sequence: Synthetic oligonucleotide
guguuugaauaaacaugaa

SEQ ID NO: 2658957 - RNA, 19 nt, Artificial Sequence
  Description of Artificial Sequence: Synthetic oligonucleotide
gcuggugcaggagcccugg

SEQ ID NO: 2658958 - RNA, 19 nt, Artificial Sequence
  Description of Artificial Sequence: Synthetic oligonucleotide
ccugcucuacaccuuccac

SEQ ID NO: 2658959 - RNA, 19 nt, Artificial Sequence
  Description of Artificial Sequence: Synthetic oligonucleotide
gguaagccagacgcaaaga

SEQ ID NO: 2658960 - RNA, 19 nt, Artificial Sequence
  Description of Artificial Sequence: Synthetic oligonucleotide
ccauaauuguugcauaaau

SEQ ID NO: 2658961 - RNA, 19 nt, Artificial Sequence
  Description of Artificial Sequence: Synthetic oligonucleotide
cuggaguuucagccgcaca

SEQ ID NO: 2658962 - RNA, 19 nt, Artificial Sequence
  Description of Artificial Sequence: Synthetic oligonucleotide
ccaaagguuucggccaaag

SEQ ID NO: 2658963 - RNA, 19 nt, Artificial Sequence
  Description of Artificial Sequence: Synthetic oligonucleotide
gcuuuccugguauaaacuu

SEQ ID NO: 2658964 - RNA, 19 nt, Artificial Sequence
  Description of Artificial Sequence: Synthetic oligonucleotide
cuaguguccaacaguucuu

SEQ ID NO: 2658965 - RNA, 19 nt, Artificial Sequence
  Description of Artificial Sequence: Synthetic oligonucleotide
gaaucccgcuuuucagggu

SEQ ID NO: 2658966 - RNA, 19 nt, Artificial Sequence
  Description of Artificial Sequence: Synthetic oligonucleotide
cauguucugaaucccgcuu

SEQ ID NO: 2658967 - RNA, 19 nt, Artificial Sequence
  Description of Artificial Sequence: Synthetic oligonucleotide
ggccguauccuagugucca

SEQ ID NO: 2658968 - RNA, 19 nt, Artificial Sequence
  Description of Artificial Sequence: Synthetic oligonucleotide
agccgcacaaugccaucuu

SEQ ID NO: 2658969 - RNA, 19 nt, Artificial Sequence
  Description of Artificial Sequence: Synthetic oligonucleotide
ugcaggagcccuggaguuu

SEQ ID NO: 2658970 - RNA, 19 nt, Artificial Sequence
  Description of Artificial Sequence: Synthetic oligonucleotide
gugaugaaaucuggcccaa

SEQ ID NO: 2658971 - RNA, 19 nt, Artificial Sequence
  Description of Artificial Sequence: Synthetic oligonucleotide
guccaugguccucgucuca

SEQ ID NO: 2658972 - RNA, 19 nt, Artificial Sequence
  Description of Artificial Sequence: Synthetic oligonucleotide
gcuggcguggggaagucca

SEQ ID NO: 2658973 - RNA, 19 nt, Artificial Sequence
  Description of Artificial Sequence: Synthetic oligonucleotide
ccgcacaaugccaucuuca

SEQ ID NO: 2658974 - RNA, 19 nt, Artificial Sequence
  Description of Artificial Sequence: Synthetic oligonucleotide
uccugcacaguaggccgua

SEQ ID NO: 2658975 - RNA, 19 nt, Artificial Sequence
  Description of Artificial Sequence: Synthetic oligonucleotide
gcagauuauuuaaggugaa

SEQ ID NO: 2658976 - RNA, 19 nt, Artificial Sequence
  Description of Artificial Sequence: Synthetic oligonucleotide
ggagcggaaagcugcggcu

SEQ ID NO: 2658977 - RNA, 19 nt, Artificial Sequence
  Description of Artificial Sequence: Synthetic oligonucleotide
ccaacaguucuuuaaucau

SEQ ID NO: 2658978 - RNA, 19 nt, Artificial Sequence
  Description of Artificial Sequence: Synthetic oligonucleotide
ccaugguccucgucucaag

SEQ ID NO: 2658979 - RNA, 19 nt, Artificial Sequence
  Description of Artificial Sequence: Synthetic oligonucleotide
caguaaauuccagucuaau

SEQ ID NO: 2658980 - RNA, 19 nt, Artificial Sequence
  Description of Artificial Sequence: Synthetic oligonucleotide
ccagucuaauucuucauuu

SEQ ID NO: 2658981 - RNA, 19 nt, Artificial Sequence
  Description of Artificial Sequence: Synthetic oligonucleotide
guauaaacuuuaagcuguu

SEQ ID NO: 2658982 - RNA, 19 nt, Artificial Sequence
  Description of Artificial Sequence: Synthetic oligonucleotide
gcccaaagaagacacuuuu

SEQ ID NO: 2658983 - RNA, 19 nt, Artificial Sequence
  Description of Artificial Sequence: Synthetic oligonucleotide
cguauccuaguguccaaca

SEQ ID NO: 2658984 - RNA, 19 nt, Artificial Sequence
  Description of Artificial Sequence: Synthetic oligonucleotide
cagauuauuuaaggugaau

SEQ ID NO: 2658985 - RNA, 19 nt, Artificial Sequence
  Description of Artificial Sequence: Synthetic oligonucleotide
ggcuuuccugguauaaacu

SEQ ID NO: 2658986 - RNA, 19 nt, Artificial Sequence
  Description of Artificial Sequence: Synthetic oligonucleotide
gguccucgucucaagaacu

SEQ ID NO: 2658987 - RNA, 19 nt, Artificial Sequence
  Description of Artificial Sequence: Synthetic oligonucleotide
gccgcacaaugccaucuuc

SEQ ID NO: 2658988 - RNA, 19 nt, Artificial Sequence
  Description of Artificial Sequence: Synthetic oligonucleotide
ggaaagcugcggcuggcgu

SEQ ID NO: 2658989 - RNA, 19 nt, Artificial Sequence
  Description of Artificial Sequence: Synthetic oligonucleotide
ucccgcuuuucagggugau

SEQ ID NO: 2658990 - RNA, 19 nt, Artificial Sequence
  Description of Artificial Sequence: Synthetic oligonucleotide
caguaggccguauccuagu

SEQ ID NO: 2658991 - RNA, 19 nt, Artificial Sequence
  Description of Artificial Sequence: Synthetic oligonucleotide
aucccgcuuuucaggguga

SEQ ID NO: 2658992 - RNA, 19 nt, Artificial Sequence
  Description of Artificial Sequence: Synthetic oligonucleotide
caccaccauccuccugcac

SEQ ID NO: 2658993 - RNA, 19 nt, Artificial Sequence
  Description of Artificial Sequence: Synthetic oligonucleotide
ggggagcggaaagcugcgg

SEQ ID NO: 2658994 - RNA, 19 nt, Artificial Sequence
  Description of Artificial Sequence: Synthetic oligonucleotide
guugggauuuggggugucu

SEQ ID NO: 2658995 - RNA, 19 nt, Artificial Sequence
  Description of Artificial Sequence: Synthetic oligonucleotide
ccguauccuaguguccaac

SEQ ID NO: 2658996 - RNA, 19 nt, Artificial Sequence
  Description of Artificial Sequence: Synthetic oligonucleotide
gcugcggcuggcgugggga

SEQ ID NO: 2658997 - RNA, 19 nt, Artificial Sequence
  Description of Artificial Sequence: Synthetic oligonucleotide
ccaccaccucaucaucuuc

SEQ ID NO: 2658998 - RNA, 19 nt, Artificial Sequence
  Description of Artificial Sequence: Synthetic oligonucleotide
gccaaagaaaaugcagauu

SEQ ID NO: 2658999 - RNA, 19 nt, Artificial Sequence
  Description of Artificial Sequence: Synthetic oligonucleotide
ggaguuucagccgcacaau

SEQ ID NO: 2659000 - RNA, 19 nt, Artificial Sequence
  Description of Artificial Sequence: Synthetic oligonucleotide
gcggaaagcugcggcuggc

SEQ ID NO: 2659001 - RNA, 19 nt, Artificial Sequence
  Description of Artificial Sequence: Synthetic oligonucleotide
gggugucuuguguuugaau

SEQ ID NO: 2659002 - RNA, 19 nt, Artificial Sequence
  Description of Artificial Sequence: Synthetic oligonucleotide
cagacgcaaagaaguccau

SEQ ID NO: 2659003 - RNA, 19 nt, Artificial Sequence
  Description of Artificial Sequence: Synthetic oligonucleotide
cggaaagcugcggcuggcg

SEQ ID NO: 2659004 - RNA, 19 nt, Artificial Sequence
  Description of Artificial Sequence: Synthetic oligonucleotide
gcacaguaggccguauccu

SEQ ID NO: 2659005 - RNA, 19 nt, Artificial Sequence
  Description of Artificial Sequence: Synthetic oligonucleotide
cagccgcacaaugccaucu

SEQ ID NO: 2659006 - RNA, 19 nt, Artificial Sequence
  Description of Artificial Sequence: Synthetic oligonucleotide
cuggugcaggagcccugga

SEQ ID NO: 2659007 - RNA, 19 nt, Artificial Sequence
  Description of Artificial Sequence: Synthetic oligonucleotide
gccguauccuaguguccaa

SEQ ID NO: 2659008 - RNA, 19 nt, Artificial Sequence
  Description of Artificial Sequence: Synthetic oligonucleotide
ggcuggcguggggaagucc

SEQ ID NO: 2659009 - RNA, 19 nt, Artificial Sequence
  Description of Artificial Sequence: Synthetic oligonucleotide
gguuucggccaaagaaaau

SEQ ID NO: 2659010 - RNA, 19 nt, Artificial Sequence
  Description of Artificial Sequence: Synthetic oligonucleotide
ggggugucuuguguuugaa

SEQ ID NO: 2659011 - RNA, 19 nt, Artificial Sequence
  Description of Artificial Sequence: Synthetic oligonucleotide
ggaaguccaugguccucgu

SEQ ID NO: 2659012 - RNA, 19 nt, Artificial Sequence
  Description of Artificial Sequence: Synthetic oligonucleotide
cgucucaagaacuggcuuu

SEQ ID NO: 2659013 - RNA, 19 nt, Artificial Sequence
  Description of Artificial Sequence: Synthetic oligonucleotide
ggcccaaagaagacacuuu

SEQ ID NO: 2659014 - RNA, 19 nt, Artificial Sequence
  Description of Artificial Sequence: Synthetic oligonucleotide
cuggcguggggaaguccau

SEQ ID NO: 2659015 - RNA, 19 nt, Artificial Sequence
  Description of Artificial Sequence: Synthetic oligonucleotide
gcguggggaaguccauggu

SEQ ID NO: 2659016 - RNA, 19 nt, Artificial Sequence
  Description of Artificial Sequence: Synthetic oligonucleotide
caccauccuccugcacagu

SEQ ID NO: 2659017 - RNA, 19 nt, Artificial Sequence
  Description of Artificial Sequence: Synthetic oligonucleotide
cggcuggcguggggaaguc

SEQ ID NO: 2659018 - RNA, 19 nt, Artificial Sequence
  Description of Artificial Sequence: Synthetic oligonucleotide
ccugcacaguaggccguau

SEQ ID NO: 2659019 - RNA, 19 nt, Artificial Sequence
  Description of Artificial Sequence: Synthetic oligonucleotide
aaagagacacaucuggagc

SEQ ID NO: 2659020 - RNA, 19 nt, Artificial Sequence
  Description of Artificial Sequence: Synthetic oligonucleotide
aauaaugcaaacaaggaug

SEQ ID NO: 2659021 - RNA, 19 nt, Artificial Sequence
  Description of Artificial Sequence: Synthetic oligonucleotide
aaaggaagaaagaagaaag

SEQ ID NO: 2659022 - RNA, 19 nt, Artificial Sequence
  Description of Artificial Sequence: Synthetic oligonucleotide
ucugugauggcaaagagac

SEQ ID NO: 2659023 - RNA, 19 nt, Artificial Sequence
  Description of Artificial Sequence: Synthetic oligonucleotide
aacaaggaugccuaucacc

SEQ ID NO: 2659024 - RNA, 19 nt, Artificial Sequence
  Description of Artificial Sequence: Synthetic oligonucleotide
uucuuugagaguuugaggc

SEQ ID NO: 2659025 - RNA, 19 nt, Artificial Sequence
  Description of Artificial Sequence: Synthetic oligonucleotide
agucaauaauaccucaucc

SEQ ID NO: 2659026 - RNA, 19 nt, Artificial Sequence
  Description of Artificial Sequence: Synthetic oligonucleotide
aaaguuuccagucuccaag

SEQ ID NO: 2659027 - RNA, 19 nt, Artificial Sequence
  Description of Artificial Sequence: Synthetic oligonucleotide
acugaauacgucuuugccc

SEQ ID NO: 2659028 - RNA, 19 nt, Artificial Sequence
  Description of Artificial Sequence: Synthetic oligonucleotide
cacaaugccaccuagguag

SEQ ID NO: 2659029 - RNA, 19 nt, Artificial Sequence
  Description of Artificial Sequence: Synthetic oligonucleotide
aaagaaaggaagaaagaag

SEQ ID NO: 2659030 - RNA, 19 nt, Artificial Sequence
  Description of Artificial Sequence: Synthetic oligonucleotide
aaugaaagugaagaagcgg

SEQ ID NO: 2659031 - RNA, 19 nt, Artificial Sequence
  Description of Artificial Sequence: Synthetic oligonucleotide
  modified_base (18)..(18): a, c, u, g, unknown or other
agaaagagagaaaagagng

SEQ ID NO: 2659032 - RNA, 19 nt, Artificial Sequence
  Description of Artificial Sequence: Synthetic oligonucleotide
aagaaaggaagaaagaaga

SEQ ID NO: 2659033 - RNA, 19 nt, Artificial Sequence
  Description of Artificial Sequence: Synthetic oligonucleotide
auggcaaagagacacaucu

SEQ ID NO: 2659034 - RNA, 19 nt, Artificial Sequence
  Description of Artificial Sequence: Synthetic oligonucleotide
auggguugauugcauaucc

SEQ ID NO: 2659035 - RNA, 19 nt, Artificial Sequence
  Description of Artificial Sequence: Synthetic oligonucleotide
cugaauacgucuuugcccc

SEQ ID NO: 2659036 - RNA, 19 nt, Artificial Sequence
  Description of Artificial Sequence: Synthetic oligonucleotide
aaugcaaacaaggaugccu

SEQ ID NO: 2659037 - RNA, 19 nt, Artificial Sequence
  Description of Artificial Sequence: Synthetic oligonucleotide
auaaugcaaacaaggaugc

SEQ ID NO: 2659038 - RNA, 19 nt, Artificial Sequence
  Description of Artificial Sequence: Synthetic oligonucleotide
ugugauggcaaagagacac

SEQ ID NO: 2659039 - RNA, 19 nt, Artificial Sequence
  Description of Artificial Sequence: Synthetic oligonucleotide
gugaauuaagcccagguac

SEQ ID NO: 2659040 - RNA, 19 nt, Artificial Sequence
  Description of Artificial Sequence: Synthetic oligonucleotide
uuguccuugucugugaugg

SEQ ID NO: 2659041 - RNA, 19 nt, Artificial Sequence
  Description of Artificial Sequence: Synthetic oligonucleotide
aagugcuggacuguugucc

SEQ ID NO: 2659042 - RNA, 19 nt, Artificial Sequence
  Description of Artificial Sequence: Synthetic oligonucleotide
accacugguacccaccacc

SEQ ID NO: 2659043 - RNA, 19 nt, Artificial Sequence
  Description of Artificial Sequence: Synthetic oligonucleotide
aacgaaugaaggaaggaag

SEQ ID NO: 2659044 - RNA, 19 nt, Artificial Sequence
  Description of Artificial Sequence: Synthetic oligonucleotide
uagguaggcacccaggaug

SEQ ID NO: 2659045 - RNA, 19 nt, Artificial Sequence
  Description of Artificial Sequence: Synthetic oligonucleotide
ugagccuuuaaucccagca

SEQ ID NO: 2659046 - RNA, 19 nt, Artificial Sequence
  Description of Artificial Sequence: Synthetic oligonucleotide
aagagacacaucuggagca

SEQ ID NO: 2659047 - RNA, 19 nt, Artificial Sequence
  Description of Artificial Sequence: Synthetic oligonucleotide
uuuccagucuccaagaguu

SEQ ID NO: 2659048 - RNA, 19 nt, Artificial Sequence
  Description of Artificial Sequence: Synthetic oligonucleotide
ugaauuaagcccagguaca

SEQ ID NO: 2659049 - RNA, 19 nt, Artificial Sequence
  Description of Artificial Sequence: Synthetic oligonucleotide
aaaacuaaacaaagaaaga

SEQ ID NO: 2659050 - RNA, 19 nt, Artificial Sequence
  Description of Artificial Sequence: Synthetic oligonucleotide
aaacaaggaugccuaucac

SEQ ID NO: 2659051 - RNA, 19 nt, Artificial Sequence
  Description of Artificial Sequence: Synthetic oligonucleotide
aaaaggagggaacgaacga

SEQ ID NO: 2659052 - RNA, 19 nt, Artificial Sequence
  Description of Artificial Sequence: Synthetic oligonucleotide
cccaauaaugcaaacaagg

SEQ ID NO: 2659053 - RNA, 19 nt, Artificial Sequence
  Description of Artificial Sequence: Synthetic oligonucleotide
aauacgucuuugccccagc

SEQ ID NO: 2659054 - RNA, 19 nt, Artificial Sequence
  Description of Artificial Sequence: Synthetic oligonucleotide
caaugaaagugaagaagcg

SEQ ID NO: 2659055 - RNA, 19 nt, Artificial Sequence
  Description of Artificial Sequence: Synthetic oligonucleotide
aucaccucugccucagucc

SEQ ID NO: 2659056 - RNA, 19 nt, Artificial Sequence
  Description of Artificial Sequence: Synthetic oligonucleotide
uacacaaugccaccuaggu

SEQ ID NO: 2659057 - RNA, 19 nt, Artificial Sequence
  Description of Artificial Sequence: Synthetic oligonucleotide
aaggaugccuaucaccucu

SEQ ID NO: 2659058 - RNA, 19 nt, Artificial Sequence
  Description of Artificial Sequence: Synthetic oligonucleotide
agcaaugaaagugaagaag

SEQ ID NO: 2659059 - RNA, 19 nt, Artificial Sequence
  Description of Artificial Sequence: Synthetic oligonucleotide
caaagagacacaucuggag

SEQ ID NO: 2659060 - RNA, 19 nt, Artificial Sequence
  Description of Artificial Sequence: Synthetic oligonucleotide
uacauagggaguuccagga

SEQ ID NO: 2659061 - RNA, 19 nt, Artificial Sequence
  Description of Artificial Sequence: Synthetic oligonucleotide
ggcaaagagacacaucugg

SEQ ID NO: 2659062 - RNA, 19 nt, Artificial Sequence
  Description of Artificial Sequence: Synthetic oligonucleotide
aucgcagucaauaauaccu

SEQ ID NO: 2659063 - RNA, 19 nt, Artificial Sequence
  Description of Artificial Sequence: Synthetic oligonucleotide
guugauugcauaucccgag

SEQ ID NO: 2659064 - RNA, 19 nt, Artificial Sequence
  Description of Artificial Sequence: Synthetic oligonucleotide
ucuccaagaguuccgaggu

SEQ ID NO: 2659065 - RNA, 19 nt, Artificial Sequence
  Description of Artificial Sequence: Synthetic oligonucleotide
agggcuacacgagaaaccc

SEQ ID NO: 2659066 - RNA, 19 nt, Artificial Sequence
  Description of Artificial Sequence: Synthetic oligonucleotide
guucuuugagaguuugagg

SEQ ID NO: 2659067 - RNA, 19 nt, Artificial Sequence
  Description of Artificial Sequence: Synthetic oligonucleotide
uggacuguuguccuugucu

SEQ ID NO: 2659068 - RNA, 19 nt, Artificial Sequence
  Description of Artificial Sequence: Synthetic oligonucleotide
agaggcaaaagguucuuug

SEQ ID NO: 2659069 - RNA, 19 nt, Artificial Sequence
  Description of Artificial Sequence: Synthetic oligonucleotide
cuacauagggaguuccagg

SEQ ID NO: 2659070 - RNA, 19 nt, Artificial Sequence
  Description of Artificial Sequence: Synthetic oligonucleotide
ugcuggagugaauuaagcc

SEQ ID NO: 2659071 - RNA, 19 nt, Artificial Sequence
  Description of Artificial Sequence: Synthetic oligonucleotide
uacacgagaaacccugucu

SEQ ID NO: 2659072 - RNA, 19 nt, Artificial Sequence
  Description of Artificial Sequence: Synthetic oligonucleotide
aagugaagaagcggggagg

SEQ ID NO: 2659073 - RNA, 19 nt, Artificial Sequence
  Description of Artificial Sequence: Synthetic oligonucleotide
agugaagaagcggggaggc

SEQ ID NO: 2659074 - RNA, 19 nt, Artificial Sequence
  Description of Artificial Sequence: Synthetic oligonucleotide
gcaaaagguucuuugagag

SEQ ID NO: 2659075 - RNA, 19 nt, Artificial Sequence
  Description of Artificial Sequence: Synthetic oligonucleotide
auuaagcccagguacacaa

SEQ ID NO: 2659076 - RNA, 19 nt, Artificial Sequence
  Description of Artificial Sequence: Synthetic oligonucleotide
ugaagaagcggggaggcag

SEQ ID NO: 2659077 - RNA, 19 nt, Artificial Sequence
  Description of Artificial Sequence: Synthetic oligonucleotide
ucuuugagaguuugaggcc

SEQ ID NO: 2659078 - RNA, 19 nt, Artificial Sequence
  Description of Artificial Sequence: Synthetic oligonucleotide
ugucugugauggcaaagag

SEQ ID NO: 2659079 - RNA, 19 nt, Artificial Sequence
  Description of Artificial Sequence: Synthetic oligonucleotide
aacgaacgaaugaaggaag

SEQ ID NO: 2659080 - RNA, 19 nt, Artificial Sequence
  Description of Artificial Sequence: Synthetic oligonucleotide
gcuggagugaauuaagccc

SEQ ID NO: 2659081 - RNA, 19 nt, Artificial Sequence
  Description of Artificial Sequence: Synthetic oligonucleotide
gucuccaagaguuccgagg

SEQ ID NO: 2659082 - RNA, 19 nt, Artificial Sequence
  Description of Artificial Sequence: Synthetic oligonucleotide
accccaauaaugcaaacaa

SEQ ID NO: 2659083 - RNA, 19 nt, Artificial Sequence
  Description of Artificial Sequence: Synthetic oligonucleotide
aaaaguuuccagucuccaa

SEQ ID NO: 2659084 - RNA, 19 nt, Artificial Sequence
  Description of Artificial Sequence: Synthetic oligonucleotide
acgucuuugccccagccag

SEQ ID NO: 2659085 - RNA, 19 nt, Artificial Sequence
  Description of Artificial Sequence: Synthetic oligonucleotide
gucaauaauaccucaucca

SEQ ID NO: 2659086 - RNA, 19 nt, Artificial Sequence
  Description of Artificial Sequence: Synthetic oligonucleotide
uggcgugagccuuuaaucc

SEQ ID NO: 2659087 - RNA, 19 nt, Artificial Sequence
  Description of Artificial Sequence: Synthetic oligonucleotide
augccuaucaccucugccu

SEQ ID NO: 2659088 - RNA, 19 nt, Artificial Sequence
  Description of Artificial Sequence: Synthetic oligonucleotide
gcaaugaaagugaagaagc

SEQ ID NO: 2659089 - RNA, 19 nt, Artificial Sequence
  Description of Artificial Sequence: Synthetic oligonucleotide
aaguuuccagucuccaaga

SEQ ID NO: 2659090 - RNA, 19 nt, Artificial Sequence
  Description of Artificial Sequence: Synthetic oligonucleotide
acgaaugaaggaaggaagg

SEQ ID NO: 2659091 - RNA, 19 nt, Artificial Sequence
  Description of Artificial Sequence: Synthetic oligonucleotide
cauccuggucuacauaggg

SEQ ID NO: 2659092 - RNA, 19 nt, Artificial Sequence
  Description of Artificial Sequence: Synthetic oligonucleotide
ucaccucugccucaguccc

SEQ ID NO: 2659093 - RNA, 19 nt, Artificial Sequence
  Description of Artificial Sequence: Synthetic oligonucleotide
caaacaaggaugccuauca

SEQ ID NO: 2659094 - RNA, 19 nt, Artificial Sequence
  Description of Artificial Sequence: Synthetic oligonucleotide
acaaggaugccuaucaccu

SEQ ID NO: 2659095 - RNA, 19 nt, Artificial Sequence
  Description of Artificial Sequence: Synthetic oligonucleotide
uagggacaccccaauaaug

SEQ ID NO: 2659096 - RNA, 19 nt, Artificial Sequence
  Description of Artificial Sequence: Synthetic oligonucleotide
cacaucuggagcaucgcag

SEQ ID NO: 2659097 - RNA, 19 nt, Artificial Sequence
  Description of Artificial Sequence: Synthetic oligonucleotide
agaguuccgagguaugcug

SEQ ID NO: 2659098 - RNA, 19 nt, Artificial Sequence
  Description of Artificial Sequence: Synthetic oligonucleotide
agugaauuaagcccaggua

SEQ ID NO: 2659099 - RNA, 19 nt, Artificial Sequence
  Description of Artificial Sequence: Synthetic oligonucleotide
cacugaauacgucuuugcc

SEQ ID NO: 2659100 - RNA, 19 nt, Artificial Sequence
  Description of Artificial Sequence: Synthetic oligonucleotide
ggguugauugcauaucccg

SEQ ID NO: 2659101 - RNA, 19 nt, Artificial Sequence
  Description of Artificial Sequence: Synthetic oligonucleotide
auacgucuuugccccagcc

SEQ ID NO: 2659102 - RNA, 19 nt, Artificial Sequence
  Description of Artificial Sequence: Synthetic oligonucleotide
ucacgggauggguugauug

SEQ ID NO: 2659103 - RNA, 19 nt, Artificial Sequence
  Description of Artificial Sequence: Synthetic oligonucleotide
aggaagaaagaagaaagaa

SEQ ID NO: 2659104 - RNA, 19 nt, Artificial Sequence
  Description of Artificial Sequence: Synthetic oligonucleotide
gaugccuaucaccucugcc

SEQ ID NO: 2659105 - RNA, 19 nt, Artificial Sequence
  Description of Artificial Sequence: Synthetic oligonucleotide
acugguacccaccaccagu

SEQ ID NO: 2659106 - RNA, 19 nt, Artificial Sequence
  Description of Artificial Sequence: Synthetic oligonucleotide
auugcauaucccgaguuca

SEQ ID NO: 2659107 - RNA, 19 nt, Artificial Sequence
  Description of Artificial Sequence: Synthetic oligonucleotide
cuggagugaauuaagccca

SEQ ID NO: 2659108 - RNA, 19 nt, Artificial Sequence
  Description of Artificial Sequence: Synthetic oligonucleotide
aaaggagggaacgaacgaa

SEQ ID NO: 2659109 - RNA, 19 nt, Artificial Sequence
  Description of Artificial Sequence: Synthetic oligonucleotide
gaagcggggaggcagguca

SEQ ID NO: 2659110 - RNA, 19 nt, Artificial Sequence
  Description of Artificial Sequence: Synthetic oligonucleotide
gauugcauaucccgaguuc

SEQ ID NO: 2659111 - RNA, 19 nt, Artificial Sequence
  Description of Artificial Sequence: Synthetic oligonucleotide
ugagaguuugaggccaucc

SEQ ID NO: 2659112 - RNA, 19 nt, Artificial Sequence
  Description of Artificial Sequence: Synthetic oligonucleotide
cauaucccgaguucaugcc

SEQ ID NO: 2659113 - RNA, 19 nt, Artificial Sequence
  Description of Artificial Sequence: Synthetic oligonucleotide
uccgagguaugcuggagug

SEQ ID NO: 2659114 - RNA, 19 nt, Artificial Sequence
  Description of Artificial Sequence: Synthetic oligonucleotide
uugauugcauaucccgagu

SEQ ID NO: 2659115 - RNA, 19 nt, Artificial Sequence
  Description of Artificial Sequence: Synthetic oligonucleotide
aguucaugccuagggacac

SEQ ID NO: 2659116 - RNA, 19 nt, Artificial Sequence
  Description of Artificial Sequence: Synthetic oligonucleotide
augccaccuagguaggcac

SEQ ID NO: 2659117 - RNA, 19 nt, Artificial Sequence
  Description of Artificial Sequence: Synthetic oligonucleotide
gguucuuugagaguuugag

SEQ ID NO: 2659118 - RNA, 19 nt, Artificial Sequence
  Description of Artificial Sequence: Synthetic oligonucleotide
uggguugauugcauauccc

SEQ ID NO: 2659119 - RNA, 19 nt, Artificial Sequence
  Description of Artificial Sequence: Synthetic oligonucleotide
gaacgaacgaaugaaggaa

SEQ ID NO: 2659120 - RNA, 19 nt, Artificial Sequence
  Description of Artificial Sequence: Synthetic oligonucleotide
aagguucuuugagaguuug

SEQ ID NO: 2659121 - RNA, 19 nt, Artificial Sequence
  Description of Artificial Sequence: Synthetic oligonucleotide
uaggcacccaggaugggug

SEQ ID NO: 2659122 - RNA, 19 nt, Artificial Sequence
  Description of Artificial Sequence: Synthetic oligonucleotide
uugucugugauggcaaaga

SEQ ID NO: 2659123 - RNA, 19 nt, Artificial Sequence
  Description of Artificial Sequence: Synthetic oligonucleotide
aaugccaccuagguaggca

SEQ ID NO: 2659124 - RNA, 19 nt, Artificial Sequence
  Description of Artificial Sequence: Synthetic oligonucleotide
uuugccccagccagcaaug

SEQ ID NO: 2659125 - RNA, 19 nt, Artificial Sequence
  Description of Artificial Sequence: Synthetic oligonucleotide
caucgcagucaauaauacc

SEQ ID NO: 2659126 - RNA, 19 nt, Artificial Sequence
  Description of Artificial Sequence: Synthetic oligonucleotide
uccagucuccaagaguucc

SEQ ID NO: 2659127 - RNA, 19 nt, Artificial Sequence
  Description of Artificial Sequence: Synthetic oligonucleotide
ucuggagcaucgcagucaa

SEQ ID NO: 2659128 - RNA, 19 nt, Artificial Sequence
  Description of Artificial Sequence: Synthetic oligonucleotide
aauuaagcccagguacaca

SEQ ID NO: 2659129 - RNA, 19 nt, Artificial Sequence
  Description of Artificial Sequence: Synthetic oligonucleotide
aguuuccagucuccaagag

SEQ ID NO: 2659130 - RNA, 19 nt, Artificial Sequence
  Description of Artificial Sequence: Synthetic oligonucleotide
guucccggcacugaauacg

SEQ ID NO: 2659131 - RNA, 19 nt, Artificial Sequence
  Description of Artificial Sequence: Synthetic oligonucleotide
aagaguuccgagguaugcu

SEQ ID NO: 2659132 - RNA, 19 nt, Artificial Sequence
  Description of Artificial Sequence: Synthetic oligonucleotide
cagucaauaauaccucauc

SEQ ID NO: 2659133 - RNA, 19 nt, Artificial Sequence
  Description of Artificial Sequence: Synthetic oligonucleotide
gaacgaaugaaggaaggaa

SEQ ID NO: 2659134 - RNA, 19 nt, Artificial Sequence
  Description of Artificial Sequence: Synthetic oligonucleotide
ggugcuaccacugguaccc

SEQ ID NO: 2659135 - RNA, 19 nt, Artificial Sequence
  Description of Artificial Sequence: Synthetic oligonucleotide
accaccaguuguucccggc

SEQ ID NO: 2659136 - RNA, 19 nt, Artificial Sequence
  Description of Artificial Sequence: Synthetic oligonucleotide
uaucaccucugccucaguc

SEQ ID NO: 2659137 - RNA, 19 nt, Artificial Sequence
  Description of Artificial Sequence: Synthetic oligonucleotide
uggagcaucgcagucaaua

SEQ ID NO: 2659138 - RNA, 19 nt, Artificial Sequence
  Description of Artificial Sequence: Synthetic oligonucleotide
auagggaguuccaggauag

SEQ ID NO: 2659139 - RNA, 19 nt, Artificial Sequence
  Description of Artificial Sequence: Synthetic oligonucleotide
cagggcuacacgagaaacc

SEQ ID NO: 2659140 - RNA, 19 nt, Artificial Sequence
  Description of Artificial Sequence: Synthetic oligonucleotide
agacacaucuggagcaucg

SEQ ID NO: 2659141 - RNA, 19 nt, Artificial Sequence
  Description of Artificial Sequence: Synthetic oligonucleotide
ugauugcauaucccgaguu

SEQ ID NO: 2659142 - RNA, 19 nt, Artificial Sequence
  Description of Artificial Sequence: Synthetic oligonucleotide
gccauccuggucuacauag

SEQ ID NO: 2659143 - RNA, 19 nt, Artificial Sequence
  Description of Artificial Sequence: Synthetic oligonucleotide
augcuggagugaauuaagc

SEQ ID NO: 2659144 - RNA, 19 nt, Artificial Sequence
  Description of Artificial Sequence: Synthetic oligonucleotide
uacgucuuugccccagcca

SEQ ID NO: 2659145 - RNA, 19 nt, Artificial Sequence
  Description of Artificial Sequence: Synthetic oligonucleotide
agugcuggacuguuguccu

SEQ ID NO: 2659146 - RNA, 19 nt, Artificial Sequence
  Description of Artificial Sequence: Synthetic oligonucleotide
acaucuggagcaucgcagu

SEQ ID NO: 2659147 - RNA, 19 nt, Artificial Sequence
  Description of Artificial Sequence: Synthetic oligonucleotide
aguggcgugagccuuuaau

SEQ ID NO: 2659148 - RNA, 19 nt, Artificial Sequence
  Description of Artificial Sequence: Synthetic oligonucleotide
gaauuaagcccagguacac

SEQ ID NO: 2659149 - RNA, 19 nt, Artificial Sequence
  Description of Artificial Sequence: Synthetic oligonucleotide
uucaugccuagggacaccc

SEQ ID NO: 2659150 - RNA, 19 nt, Artificial Sequence
  Description of Artificial Sequence: Synthetic oligonucleotide
uggagugaauuaagcccag

SEQ ID NO: 2659151 - RNA, 19 nt, Artificial Sequence
  Description of Artificial Sequence: Synthetic oligonucleotide
ucgcagucaauaauaccuc

SEQ ID NO: 2659152 - RNA, 19 nt, Artificial Sequence
  Description of Artificial Sequence: Synthetic oligonucleotide
uggcaaagagacacaucug

SEQ ID NO: 2659153 - RNA, 19 nt, Artificial Sequence
  Description of Artificial Sequence: Synthetic oligonucleotide
auaucccgaguucaugccu

SEQ ID NO: 2659154 - RNA, 19 nt, Artificial Sequence
  Description of Artificial Sequence: Synthetic oligonucleotide
gaagaagcggggaggcagg

SEQ ID NO: 2659155 - RNA, 19 nt, Artificial Sequence
  Description of Artificial Sequence: Synthetic oligonucleotide
uccaagaguuccgagguau

SEQ ID NO: 2659156 - RNA, 19 nt, Artificial Sequence
  Description of Artificial Sequence: Synthetic oligonucleotide
acuguuguccuugucugug

SEQ ID NO: 2659157 - RNA, 19 nt, Artificial Sequence
  Description of Artificial Sequence: Synthetic oligonucleotide
ggaacgaacgaaugaagga

SEQ ID NO: 2659158 - RNA, 19 nt, Artificial Sequence
  Description of Artificial Sequence: Synthetic oligonucleotide
cacgggauggguugauugc

SEQ ID NO: 2659159 - RNA, 19 nt, Artificial Sequence
  Description of Artificial Sequence: Synthetic oligonucleotide
acgaacgaaugaaggaagg

SEQ ID NO: 2659160 - RNA, 19 nt, Artificial Sequence
  Description of Artificial Sequence: Synthetic oligonucleotide
gcauaucccgaguucaugc

SEQ ID NO: 2659161 - RNA, 19 nt, Artificial Sequence
  Description of Artificial Sequence: Synthetic oligonucleotide
acacgagaaacccugucuu

SEQ ID NO: 2659162 - RNA, 19 nt, Artificial Sequence
  Description of Artificial Sequence: Synthetic oligonucleotide
caagaguuccgagguaugc

SEQ ID NO: 2659163 - RNA, 19 nt, Artificial Sequence
  Description of Artificial Sequence: Synthetic oligonucleotide
guggcgugagccuuuaauc

SEQ ID NO: 2659164 - RNA, 19 nt, Artificial Sequence
  Description of Artificial Sequence: Synthetic oligonucleotide
acccaccaccaguuguucc

SEQ ID NO: 2659165 - RNA, 19 nt, Artificial Sequence
  Description of Artificial Sequence: Synthetic oligonucleotide
uuccgagguaugcuggagu

SEQ ID NO: 2659166 - RNA, 19 nt, Artificial Sequence
  Description of Artificial Sequence: Synthetic oligonucleotide
gaguuccgagguaugcugg

SEQ ID NO: 2659167 - RNA, 19 nt, Artificial Sequence
  Description of Artificial Sequence: Synthetic oligonucleotide
uccuugucugugauggcaa

SEQ ID NO: 2659168 - RNA, 19 nt, Artificial Sequence
  Description of Artificial Sequence: Synthetic oligonucleotide
guacacaaugccaccuagg

SEQ ID NO: 2659169 - RNA, 19 nt, Artificial Sequence
  Description of Artificial Sequence: Synthetic oligonucleotide
ugggugcuaccacugguac

SEQ ID NO: 2659170 - RNA, 19 nt, Artificial Sequence
  Description of Artificial Sequence: Synthetic oligonucleotide
ucugccucagucccaggaa

SEQ ID NO: 2659171 - RNA, 19 nt, Artificial Sequence
  Description of Artificial Sequence: Synthetic oligonucleotide
gagugaauuaagcccaggu

SEQ ID NO: 2659172 - RNA, 19 nt, Artificial Sequence
  Description of Artificial Sequence: Synthetic oligonucleotide
gauggguugauugcauauc

SEQ ID NO: 2659173 - RNA, 19 nt, Artificial Sequence
  Description of Artificial Sequence: Synthetic oligonucleotide
ugccuaucaccucugccuc

SEQ ID NO: 2659174 - RNA, 19 nt, Artificial Sequence
  Description of Artificial Sequence: Synthetic oligonucleotide
gguacacaaugccaccuag

SEQ ID NO: 2659175 - RNA, 19 nt, Artificial Sequence
  Description of Artificial Sequence: Synthetic oligonucleotide
ccagcaaugaaagugaaga

SEQ ID NO: 2659176 - RNA, 19 nt, Artificial Sequence
  Description of Artificial Sequence: Synthetic oligonucleotide
uucccggcacugaauacgu

SEQ ID NO: 2659177 - RNA, 19 nt, Artificial Sequence
  Description of Artificial Sequence: Synthetic oligonucleotide
gaauacgucuuugccccag

SEQ ID NO: 2659178 - RNA, 19 nt, Artificial Sequence
  Description of Artificial Sequence: Synthetic oligonucleotide
acaccccaauaaugcaaac

SEQ ID NO: 2659179 - RNA, 19 nt, Artificial Sequence
  Description of Artificial Sequence: Synthetic oligonucleotide
acacaucuggagcaucgca

SEQ ID NO: 2659180 - RNA, 19 nt, Artificial Sequence
  Description of Artificial Sequence: Synthetic oligonucleotide
uaucccgaguucaugccua

SEQ ID NO: 2659181 - RNA, 19 nt, Artificial Sequence
  Description of Artificial Sequence: Synthetic oligonucleotide
ugauggcaaagagacacau

SEQ ID NO: 2659182 - RNA, 19 nt, Artificial Sequence
  Description of Artificial Sequence: Synthetic oligonucleotide
gagggaacgaacgaaugaa

SEQ ID NO: 2659183 - RNA, 19 nt, Artificial Sequence
  Description of Artificial Sequence: Synthetic oligonucleotide
aaggagggaacgaacgaau

SEQ ID NO: 2659184 - RNA, 19 nt, Artificial Sequence
  Description of Artificial Sequence: Synthetic oligonucleotide
ggacuguuguccuugucug

SEQ ID NO: 2659185 - RNA, 19 nt, Artificial Sequence
  Description of Artificial Sequence: Synthetic oligonucleotide
ucccaggaagugcuggacu

SEQ ID NO: 2659186 - RNA, 19 nt, Artificial Sequence
  Description of Artificial Sequence: Synthetic oligonucleotide
agguaggcacccaggaugg

SEQ ID NO: 2659187 - RNA, 19 nt, Artificial Sequence
  Description of Artificial Sequence: Synthetic oligonucleotide
ugcauaucccgaguucaug

SEQ ID NO: 2659188 - RNA, 19 nt, Artificial Sequence
  Description of Artificial Sequence: Synthetic oligonucleotide
uguuguccuugucugugau

SEQ ID NO: 2659189 - RNA, 19 nt, Artificial Sequence
  Description of Artificial Sequence: Synthetic oligonucleotide
uaaugcaaacaaggaugcc

SEQ ID NO: 2659190 - RNA, 19 nt, Artificial Sequence
  Description of Artificial Sequence: Synthetic oligonucleotide
cuuugagaguuugaggcca

SEQ ID NO: 2659191 - RNA, 19 nt, Artificial Sequence
  Description of Artificial Sequence: Synthetic oligonucleotide
caggucacgggauggguug

SEQ ID NO: 2659192 - RNA, 19 nt, Artificial Sequence
  Description of Artificial Sequence: Synthetic oligonucleotide
agaaaggaagaaagaagaa

SEQ ID NO: 2659193 - RNA, 19 nt, Artificial Sequence
  Description of Artificial Sequence: Synthetic oligonucleotide
ggcaaaagguucuuugaga

SEQ ID NO: 2659194 - RNA, 19 nt, Artificial Sequence
  Description of Artificial Sequence: Synthetic oligonucleotide
aguuguucccggcacugaa

SEQ ID NO: 2659195 - RNA, 19 nt, Artificial Sequence
  Description of Artificial Sequence: Synthetic oligonucleotide
cuugucugugauggcaaag

SEQ ID NO: 2659196 - RNA, 19 nt, Artificial Sequence
  Description of Artificial Sequence: Synthetic oligonucleotide
uuugagaguuugaggccau

SEQ ID NO: 2659197 - RNA, 19 nt, Artificial Sequence
  Description of Artificial Sequence: Synthetic oligonucleotide
auagccagggcuacacgag

SEQ ID NO: 2659198 - RNA, 19 nt, Artificial Sequence
  Description of Artificial Sequence: Synthetic oligonucleotide
ccaauaaugcaaacaagga

SEQ ID NO: 2659199 - RNA, 19 nt, Artificial Sequence
  Description of Artificial Sequence: Synthetic oligonucleotide
aggcacccaggaugggugc

SEQ ID NO: 2659200 - RNA, 19 nt, Artificial Sequence
  Description of Artificial Sequence: Synthetic oligonucleotide
acgagaaacccugucuuga

SEQ ID NO: 2659201 - RNA, 19 nt, Artificial Sequence
  Description of Artificial Sequence: Synthetic oligonucleotide
ccagccagcaaugaaagug

SEQ ID NO: 2659202 - RNA, 19 nt, Artificial Sequence
  Description of Artificial Sequence: Synthetic oligonucleotide
gaguucaugccuagggaca

SEQ ID NO: 2659203 - RNA, 19 nt, Artificial Sequence
  Description of Artificial Sequence: Synthetic oligonucleotide
cacgagaaacccugucuug

SEQ ID NO: 2659204 - RNA, 19 nt, Artificial Sequence
  Description of Artificial Sequence: Synthetic oligonucleotide
ugcuggacuguuguccuug

SEQ ID NO: 2659205 - RNA, 19 nt, Artificial Sequence
  Description of Artificial Sequence: Synthetic oligonucleotide
agucuccaagaguuccgag

SEQ ID NO: 2659206 - RNA, 19 nt, Artificial Sequence
  Description of Artificial Sequence: Synthetic oligonucleotide
agcaucgcagucaauaaua

SEQ ID NO: 2659207 - RNA, 19 nt, Artificial Sequence
  Description of Artificial Sequence: Synthetic oligonucleotide
ugccucagucccaggaagu

SEQ ID NO: 2659208 - RNA, 19 nt, Artificial Sequence
  Description of Artificial Sequence: Synthetic oligonucleotide
agggaacgaacgaaugaag

SEQ ID NO: 2659209 - RNA, 19 nt, Artificial Sequence
  Description of Artificial Sequence: Synthetic oligonucleotide
aguuccgagguaugcugga

SEQ ID NO: 2659210 - RNA, 19 nt, Artificial Sequence
  Description of Artificial Sequence: Synthetic oligonucleotide
cagccagcaaugaaaguga

SEQ ID NO: 2659211 - RNA, 19 nt, Artificial Sequence
  Description of Artificial Sequence: Synthetic oligonucleotide
uugcauaucccgaguucau

SEQ ID NO: 2659212 - RNA, 19 nt, Artificial Sequence
  Description of Artificial Sequence: Synthetic oligonucleotide
ggcgugagccuuuaauccc

SEQ ID NO: 2659213 - RNA, 19 nt, Artificial Sequence
  Description of Artificial Sequence: Synthetic oligonucleotide
uguucccggcacugaauac

SEQ ID NO: 2659214 - RNA, 19 nt, Artificial Sequence
  Description of Artificial Sequence: Synthetic oligonucleotide
cccagguacacaaugccac

SEQ ID NO: 2659215 - RNA, 19 nt, Artificial Sequence
  Description of Artificial Sequence: Synthetic oligonucleotide
ggcuacacgagaaacccug

SEQ ID NO: 2659216 - RNA, 19 nt, Artificial Sequence
  Description of Artificial Sequence: Synthetic oligonucleotide
uuaagcccagguacacaau

SEQ ID NO: 2659217 - RNA, 19 nt, Artificial Sequence
  Description of Artificial Sequence: Synthetic oligonucleotide
cauagggaguuccaggaua

SEQ ID NO: 2659218 - RNA, 19 nt, Artificial Sequence
  Description of Artificial Sequence: Synthetic oligonucleotide
cuacacgagaaacccuguc

SEQ ID NO: 2659219 - RNA, 19 nt, Artificial Sequence
  Description of Artificial Sequence: Synthetic oligonucleotide
caugccuagggacacccca

SEQ ID NO: 2659220 - RNA, 19 nt, Artificial Sequence
  Description of Artificial Sequence: Synthetic oligonucleotide
gaagugcuggacuguuguc

SEQ ID NO: 2659221 - RNA, 19 nt, Artificial Sequence
  Description of Artificial Sequence: Synthetic oligonucleotide
agguaugcuggagugaauu

SEQ ID NO: 2659222 - RNA, 19 nt, Artificial Sequence
  Description of Artificial Sequence: Synthetic oligonucleotide
guaugcuggagugaauuaa

SEQ ID NO: 2659223 - RNA, 19 nt, Artificial Sequence
  Description of Artificial Sequence: Synthetic oligonucleotide
cccgaguucaugccuaggg

SEQ ID NO: 2659224 - RNA, 19 nt, Artificial Sequence
  Description of Artificial Sequence: Synthetic oligonucleotide
ugccaccuagguaggcacc

SEQ ID NO: 2659225 - RNA, 19 nt, Artificial Sequence
  Description of Artificial Sequence: Synthetic oligonucleotide
acacaaugccaccuaggua

SEQ ID NO: 2659226 - RNA, 19 nt, Artificial Sequence
  Description of Artificial Sequence: Synthetic oligonucleotide
acauagggaguuccaggau

SEQ ID NO: 2659227 - RNA, 19 nt, Artificial Sequence
  Description of Artificial Sequence: Synthetic oligonucleotide
gacacaucuggagcaucgc

SEQ ID NO: 2659228 - RNA, 19 nt, Artificial Sequence
  Description of Artificial Sequence: Synthetic oligonucleotide
gacaccccaauaaugcaaa

SEQ ID NO: 2659229 - RNA, 19 nt, Artificial Sequence
  Description of Artificial Sequence: Synthetic oligonucleotide
gagaguuugaggccauccu

SEQ ID NO: 2659230 - RNA, 19 nt, Artificial Sequence
  Description of Artificial Sequence: Synthetic oligonucleotide
gauggcaaagagacacauc

SEQ ID NO: 2659231 - RNA, 19 nt, Artificial Sequence
  Description of Artificial Sequence: Synthetic oligonucleotide
ucagucccaggaagugcug

SEQ ID NO: 2659232 - RNA, 19 nt, Artificial Sequence
  Description of Artificial Sequence: Synthetic oligonucleotide
ugaauacgucuuugcccca

SEQ ID NO: 2659233 - RNA, 19 nt, Artificial Sequence
  Description of Artificial Sequence: Synthetic oligonucleotide
ggagggaacgaacgaauga

SEQ ID NO: 2659234 - RNA, 19 nt, Artificial Sequence
  Description of Artificial Sequence: Synthetic oligonucleotide
ucaugccuagggacacccc

SEQ ID NO: 2659235 - RNA, 19 nt, Artificial Sequence
  Description of Artificial Sequence: Synthetic oligonucleotide
acaaugccaccuagguagg

SEQ ID NO: 2659236 - RNA, 19 nt, Artificial Sequence
  Description of Artificial Sequence: Synthetic oligonucleotide
uguccuugucugugauggc

SEQ ID NO: 2659237 - RNA, 19 nt, Artificial Sequence
  Description of Artificial Sequence: Synthetic oligonucleotide
ugcaaacaaggaugccuau

SEQ ID NO: 2659238 - RNA, 19 nt, Artificial Sequence
  Description of Artificial Sequence: Synthetic oligonucleotide
gcacugaauacgucuuugc

SEQ ID NO: 2659239 - RNA, 19 nt, Artificial Sequence
  Description of Artificial Sequence: Synthetic oligonucleotide
augcaaacaaggaugccua

SEQ ID NO: 2659240 - RNA, 19 nt, Artificial Sequence
  Description of Artificial Sequence: Synthetic oligonucleotide
gucugugauggcaaagaga

SEQ ID NO: 2659241 - RNA, 19 nt, Artificial Sequence
  Description of Artificial Sequence: Synthetic oligonucleotide
accaguuguucccggcacu

SEQ ID NO: 2659242 - RNA, 19 nt, Artificial Sequence
  Description of Artificial Sequence: Synthetic oligonucleotide
guuuccagucuccaagagu

SEQ ID NO: 2659243 - RNA, 19 nt, Artificial Sequence
  Description of Artificial Sequence: Synthetic oligonucleotide
accuagguaggcacccagg

SEQ ID NO: 2659244 - RNA, 19 nt, Artificial Sequence
  Description of Artificial Sequence: Synthetic oligonucleotide
aucccgaguucaugccuag

SEQ ID NO: 2659245 - RNA, 19 nt, Artificial Sequence
  Description of Artificial Sequence: Synthetic oligonucleotide
acccaggaugggugcuacc

SEQ ID NO: 2659246 - RNA, 19 nt, Artificial Sequence
  Description of Artificial Sequence: Synthetic oligonucleotide
caccuagguaggcacccag

SEQ ID NO: 2659247 - RNA, 19 nt, Artificial Sequence
  Description of Artificial Sequence: Synthetic oligonucleotide
aggagggaacgaacgaaug

SEQ ID NO: 2659248 - RNA, 19 nt, Artificial Sequence
  Description of Artificial Sequence: Synthetic oligonucleotide
caccaguuguucccggcac

SEQ ID NO: 2659249 - RNA, 19 nt, Artificial Sequence
  Description of Artificial Sequence: Synthetic oligonucleotide
ugguacccaccaccaguug

SEQ ID NO: 2659250 - RNA, 19 nt, Artificial Sequence
  Description of Artificial Sequence: Synthetic oligonucleotide
uuccagucuccaagaguuc

SEQ ID NO: 2659251 - RNA, 19 nt, Artificial Sequence
  Description of Artificial Sequence: Synthetic oligonucleotide
cagucccaggaagugcugg

SEQ ID NO: 2659252 - RNA, 19 nt, Artificial Sequence
  Description of Artificial Sequence: Synthetic oligonucleotide
aaagguucuuugagaguuu

SEQ ID NO: 2659253 - RNA, 19 nt, Artificial Sequence
  Description of Artificial Sequence: Synthetic oligonucleotide
agguacacaaugccaccua

SEQ ID NO: 2659254 - RNA, 19 nt, Artificial Sequence
  Description of Artificial Sequence: Synthetic oligonucleotide
cagcaaugaaagugaagaa

SEQ ID NO: 2659255 - RNA, 19 nt, Artificial Sequence
  Description of Artificial Sequence: Synthetic oligonucleotide
acgggauggguugauugca

SEQ ID NO: 2659256 - RNA, 19 nt, Artificial Sequence
  Description of Artificial Sequence: Synthetic oligonucleotide
guccuugucugugauggca

SEQ ID NO: 2659257 - RNA, 19 nt, Artificial Sequence
  Description of Artificial Sequence: Synthetic oligonucleotide
caucuggagcaucgcaguc

SEQ ID NO: 2659258 - RNA, 19 nt, Artificial Sequence
  Description of Artificial Sequence: Synthetic oligonucleotide
aggaugggugcuaccacug

SEQ ID NO: 2659259 - RNA, 19 nt, Artificial Sequence
  Description of Artificial Sequence: Synthetic oligonucleotide
accucugccucagucccag

SEQ ID NO: 2659260 - RNA, 19 nt, Artificial Sequence
  Description of Artificial Sequence: Synthetic oligonucleotide
ccagucuccaagaguuccg

SEQ ID NO: 2659261 - RNA, 19 nt, Artificial Sequence
  Description of Artificial Sequence: Synthetic oligonucleotide
cgaguucaugccuagggac

SEQ ID NO: 2659262 - RNA, 19 nt, Artificial Sequence
  Description of Artificial Sequence: Synthetic oligonucleotide
ugcuaccacugguacccac

SEQ ID NO: 2659263 - RNA, 19 nt, Artificial Sequence
  Description of Artificial Sequence: Synthetic oligonucleotide
cucagucccaggaagugcu

SEQ ID NO: 2659264 - RNA, 19 nt, Artificial Sequence
  Description of Artificial Sequence: Synthetic oligonucleotide
gguugauugcauaucccga

SEQ ID NO: 2659265 - RNA, 19 nt, Artificial Sequence
  Description of Artificial Sequence: Synthetic oligonucleotide
ggcacugaauacgucuuug

SEQ ID NO: 2659266 - RNA, 19 nt, Artificial Sequence
  Description of Artificial Sequence: Synthetic oligonucleotide
ccccaauaaugcaaacaag

SEQ ID NO: 2659267 - RNA, 19 nt, Artificial Sequence
  Description of Artificial Sequence: Synthetic oligonucleotide
ugccccagccagcaaugaa

SEQ ID NO: 2659268 - RNA, 19 nt, Artificial Sequence
  Description of Artificial Sequence: Synthetic oligonucleotide
cuaccacugguacccacca

SEQ ID NO: 2659269 - RNA, 19 nt, Artificial Sequence
  Description of Artificial Sequence: Synthetic oligonucleotide
ugccuagggacaccccaau

SEQ ID NO: 2659270 - RNA, 19 nt, Artificial Sequence
  Description of Artificial Sequence: Synthetic oligonucleotide
guuccgagguaugcuggag

SEQ ID NO: 2659271 - RNA, 19 nt, Artificial Sequence
  Description of Artificial Sequence: Synthetic oligonucleotide
aagaagcggggaggcaggu

SEQ ID NO: 2659272 - RNA, 19 nt, Artificial Sequence
  Description of Artificial Sequence: Synthetic oligonucleotide
ccagguacacaaugccacc

SEQ ID NO: 2659273 - RNA, 19 nt, Artificial Sequence
  Description of Artificial Sequence: Synthetic oligonucleotide
caccccaauaaugcaaaca

SEQ ID NO: 2659274 - RNA, 19 nt, Artificial Sequence
  Description of Artificial Sequence: Synthetic oligonucleotide
agagacacaucuggagcau

SEQ ID NO: 2659275 - RNA, 19 nt, Artificial Sequence
  Description of Artificial Sequence: Synthetic oligonucleotide
uaccacugguacccaccac

SEQ ID NO: 2659276 - RNA, 19 nt, Artificial Sequence
  Description of Artificial Sequence: Synthetic oligonucleotide
cucugccucagucccagga

SEQ ID NO: 2659277 - RNA, 19 nt, Artificial Sequence
  Description of Artificial Sequence: Synthetic oligonucleotide
ucccgaguucaugccuagg

SEQ ID NO: 2659278 - RNA, 19 nt, Artificial Sequence
  Description of Artificial Sequence: Synthetic oligonucleotide
ggagcaucgcagucaauaa

SEQ ID NO: 2659279 - RNA, 19 nt, Artificial Sequence
  Description of Artificial Sequence: Synthetic oligonucleotide
agaagcggggaggcagguc

SEQ ID NO: 2659280 - RNA, 19 nt, Artificial Sequence
  Description of Artificial Sequence: Synthetic oligonucleotide
caaaagguucuuugagagu

SEQ ID NO: 2659281 - RNA, 19 nt, Artificial Sequence
  Description of Artificial Sequence: Synthetic oligonucleotide
ggagugaauuaagcccagg

SEQ ID NO: 2659282 - RNA, 19 nt, Artificial Sequence
  Description of Artificial Sequence: Synthetic oligonucleotide
gugagccuuuaaucccagc

SEQ ID NO: 2659283 - RNA, 19 nt, Artificial Sequence
  Description of Artificial Sequence: Synthetic oligonucleotide
cacugguacccaccaccag

SEQ ID NO: 2659284 - RNA, 19 nt, Artificial Sequence
  Description of Artificial Sequence: Synthetic oligonucleotide
gcuaccacugguacccacc

SEQ ID NO: 2659285 - RNA, 19 nt, Artificial Sequence
  Description of Artificial Sequence: Synthetic oligonucleotide
ccauccuggucuacauagg

SEQ ID NO: 2659286 - RNA, 19 nt, Artificial Sequence
  Description of Artificial Sequence: Synthetic oligonucleotide
ccccagccagcaaugaaag

SEQ ID NO: 2659287 - RNA, 19 nt, Artificial Sequence
  Description of Artificial Sequence: Synthetic oligonucleotide
caccaccaguuguucccgg

SEQ ID NO: 2659288 - RNA, 19 nt, Artificial Sequence
  Description of Artificial Sequence: Synthetic oligonucleotide
ggaggcaggucacgggaug

SEQ ID NO: 2659289 - RNA, 19 nt, Artificial Sequence
  Description of Artificial Sequence: Synthetic oligonucleotide
gucuuugccccagccagca

SEQ ID NO: 2659290 - RNA, 19 nt, Artificial Sequence
  Description of Artificial Sequence: Synthetic oligonucleotide
gagacacaucuggagcauc

SEQ ID NO: 2659291 - RNA, 19 nt, Artificial Sequence
  Description of Artificial Sequence: Synthetic oligonucleotide
gagcaucgcagucaauaau

SEQ ID NO: 2659292 - RNA, 19 nt, Artificial Sequence
  Description of Artificial Sequence: Synthetic oligonucleotide
ccuagggacaccccaauaa

SEQ ID NO: 2659293 - RNA, 19 nt, Artificial Sequence
  Description of Artificial Sequence: Synthetic oligonucleotide
gcaucgcagucaauaauac

SEQ ID NO: 2659294 - RNA, 19 nt, Artificial Sequence
  Description of Artificial Sequence: Synthetic oligonucleotide
caaugccaccuagguaggc

SEQ ID NO: 2659295 - RNA, 19 nt, Artificial Sequence
  Description of Artificial Sequence: Synthetic oligonucleotide
gggugcuaccacugguacc

SEQ ID NO: 2659296 - RNA, 19 nt, Artificial Sequence
  Description of Artificial Sequence: Synthetic oligonucleotide
gggacaccccaauaaugca

SEQ ID NO: 2659297 - RNA, 19 nt, Artificial Sequence
  Description of Artificial Sequence: Synthetic oligonucleotide
gguaugcuggagugaauua

SEQ ID NO: 2659298 - RNA, 19 nt, Artificial Sequence
  Description of Artificial Sequence: Synthetic oligonucleotide
cuagggacaccccaauaau

SEQ ID NO: 2659299 - RNA, 19 nt, Artificial Sequence
  Description of Artificial Sequence: Synthetic oligonucleotide
gacuguuguccuugucugu

SEQ ID NO: 2659300 - RNA, 19 nt, Artificial Sequence
  Description of Artificial Sequence: Synthetic oligonucleotide
cuggcagcaguggcgugag

SEQ ID NO: 2659301 - RNA, 19 nt, Artificial Sequence
  Description of Artificial Sequence: Synthetic oligonucleotide
gcaaacaaggaugccuauc

SEQ ID NO: 2659302 - RNA, 19 nt, Artificial Sequence
  Description of Artificial Sequence: Synthetic oligonucleotide
guucaugccuagggacacc

SEQ ID NO: 2659303 - RNA, 19 nt, Artificial Sequence
  Description of Artificial Sequence: Synthetic oligonucleotide
ucuuugccccagccagcaa

SEQ ID NO: 2659304 - RNA, 19 nt, Artificial Sequence
  Description of Artificial Sequence: Synthetic oligonucleotide
cugugauggcaaagagaca

SEQ ID NO: 2659305 - RNA, 19 nt, Artificial Sequence
  Description of Artificial Sequence: Synthetic oligonucleotide
gugauggcaaagagacaca

SEQ ID NO: 2659306 - RNA, 19 nt, Artificial Sequence
  Description of Artificial Sequence: Synthetic oligonucleotide
uugagaguuugaggccauc

SEQ ID NO: 2659307 - RNA, 19 nt, Artificial Sequence
  Description of Artificial Sequence: Synthetic oligonucleotide
ggaugccuaucaccucugc

SEQ ID NO: 2659308 - RNA, 19 nt, Artificial Sequence
  Description of Artificial Sequence: Synthetic oligonucleotide
augggugcuaccacuggua

SEQ ID NO: 2659309 - RNA, 19 nt, Artificial Sequence
  Description of Artificial Sequence: Synthetic oligonucleotide
agguucuuugagaguuuga

SEQ ID NO: 2659310 - RNA, 19 nt, Artificial Sequence
  Description of Artificial Sequence: Synthetic oligonucleotide
gguacccaccaccaguugu

SEQ ID NO: 2659311 - RNA, 19 nt, Artificial Sequence
  Description of Artificial Sequence: Synthetic oligonucleotide
ccaagaguuccgagguaug

SEQ ID NO: 2659312 - RNA, 19 nt, Artificial Sequence
  Description of Artificial Sequence: Synthetic oligonucleotide
caggaugggugcuaccacu

SEQ ID NO: 2659313 - RNA, 19 nt, Artificial Sequence
  Description of Artificial Sequence: Synthetic oligonucleotide
ccagggcuacacgagaaac

SEQ ID NO: 2659314 - RNA, 19 nt, Artificial Sequence
  Description of Artificial Sequence: Synthetic oligonucleotide
ccuaucaccucugccucag

SEQ ID NO: 2659315 - RNA, 19 nt, Artificial Sequence
  Description of Artificial Sequence: Synthetic oligonucleotide
aggaugccuaucaccucug

SEQ ID NO: 2659316 - RNA, 19 nt, Artificial Sequence
  Description of Artificial Sequence: Synthetic oligonucleotide
uacccaccaccaguuguuc

SEQ ID NO: 2659317 - RNA, 19 nt, Artificial Sequence
  Description of Artificial Sequence: Synthetic oligonucleotide
cuggacuguuguccuuguc

SEQ ID NO: 2659318 - RNA, 19 nt, Artificial Sequence
  Description of Artificial Sequence: Synthetic oligonucleotide
ggacaccccaauaaugcaa

SEQ ID NO: 2659319 - RNA, 19 nt, Artificial Sequence
  Description of Artificial Sequence: Synthetic oligonucleotide
gccaccuagguaggcaccc

SEQ ID NO: 2659320 - RNA, 19 nt, Artificial Sequence
  Description of Artificial Sequence: Synthetic oligonucleotide
uugccccagccagcaauga

SEQ ID NO: 2659321 - RNA, 19 nt, Artificial Sequence
  Description of Artificial Sequence: Synthetic oligonucleotide
cagucuccaagaguuccga

SEQ ID NO: 2659322 - RNA, 19 nt, Artificial Sequence
  Description of Artificial Sequence: Synthetic oligonucleotide
ucccggcacugaauacguc

SEQ ID NO: 2659323 - RNA, 19 nt, Artificial Sequence
  Description of Artificial Sequence: Synthetic oligonucleotide
ccucagucccaggaagugc

SEQ ID NO: 2659324 - RNA, 19 nt, Artificial Sequence
  Description of Artificial Sequence: Synthetic oligonucleotide
agccagggcuacacgagaa

SEQ ID NO: 2659325 - RNA, 19 nt, Artificial Sequence
  Description of Artificial Sequence: Synthetic oligonucleotide
guaggcacccaggaugggu

SEQ ID NO: 2659326 - RNA, 19 nt, Artificial Sequence
  Description of Artificial Sequence: Synthetic oligonucleotide
augccuagggacaccccaa

SEQ ID NO: 2659327 - RNA, 19 nt, Artificial Sequence
  Description of Artificial Sequence: Synthetic oligonucleotide
ccaggaugggugcuaccac

SEQ ID NO: 2659328 - RNA, 19 nt, Artificial Sequence
  Description of Artificial Sequence: Synthetic oligonucleotide
cacccaggaugggugcuac

SEQ ID NO: 2659329 - RNA, 19 nt, Artificial Sequence
  Description of Artificial Sequence: Synthetic oligonucleotide
agccagcaaugaaagugaa

SEQ ID NO: 2659330 - RNA, 19 nt, Artificial Sequence
  Description of Artificial Sequence: Synthetic oligonucleotide
cugguacccaccaccaguu

SEQ ID NO: 2659331 - RNA, 19 nt, Artificial Sequence
  Description of Artificial Sequence: Synthetic oligonucleotide
cuagguaggcacccaggau

SEQ ID NO: 2659332 - RNA, 19 nt, Artificial Sequence
  Description of Artificial Sequence: Synthetic oligonucleotide
gugaagaagcggggaggca

SEQ ID NO: 2659333 - RNA, 19 nt, Artificial Sequence
  Description of Artificial Sequence: Synthetic oligonucleotide
ccaguuguucccggcacug

SEQ ID NO: 2659334 - RNA, 19 nt, Artificial Sequence
  Description of Artificial Sequence: Synthetic oligonucleotide
gccucagucccaggaagug

SEQ ID NO: 2659335 - RNA, 19 nt, Artificial Sequence
  Description of Artificial Sequence: Synthetic oligonucleotide
aggucacgggauggguuga

SEQ ID NO: 2659336 - RNA, 19 nt, Artificial Sequence
  Description of Artificial Sequence: Synthetic oligonucleotide
ccgaguucaugccuaggga

SEQ ID NO: 2659337 - RNA, 19 nt, Artificial Sequence
  Description of Artificial Sequence: Synthetic oligonucleotide
uggcagcaguggcgugagc

SEQ ID NO: 2659338 - RNA, 19 nt, Artificial Sequence
  Description of Artificial Sequence: Synthetic oligonucleotide
cagguacacaaugccaccu

SEQ ID NO: 2659339 - RNA, 19 nt, Artificial Sequence
  Description of Artificial Sequence: Synthetic oligonucleotide
ccacugguacccaccacca

SEQ ID NO: 2659340 - RNA, 19 nt, Artificial Sequence
  Description of Artificial Sequence: Synthetic oligonucleotide
ccaccaccaguuguucccg

SEQ ID NO: 2659341 - RNA, 19 nt, Artificial Sequence
  Description of Artificial Sequence: Synthetic oligonucleotide
gcgugagccuuuaauccca

SEQ ID NO: 2659342 - RNA, 19 nt, Artificial Sequence
  Description of Artificial Sequence: Synthetic oligonucleotide
gggauggguugauugcaua

SEQ ID NO: 2659343 - RNA, 19 nt, Artificial Sequence
  Description of Artificial Sequence: Synthetic oligonucleotide
gccccagccagcaaugaaa

SEQ ID NO: 2659344 - RNA, 19 nt, Artificial Sequence
  Description of Artificial Sequence: Synthetic oligonucleotide
cgcagucaauaauaccuca

SEQ ID NO: 2659345 - RNA, 19 nt, Artificial Sequence
  Description of Artificial Sequence: Synthetic oligonucleotide
guacccaccaccaguuguu

SEQ ID NO: 2659346 - RNA, 19 nt, Artificial Sequence
  Description of Artificial Sequence: Synthetic oligonucleotide
cccaggaugggugcuacca

SEQ ID NO: 2659347 - RNA, 19 nt, Artificial Sequence
  Description of Artificial Sequence: Synthetic oligonucleotide
cgucuuugccccagccagc

SEQ ID NO: 2659348 - RNA, 19 nt, Artificial Sequence
  Description of Artificial Sequence: Synthetic oligonucleotide
cgugagccuuuaaucccag

SEQ ID NO: 2659349 - RNA, 19 nt, Artificial Sequence
  Description of Artificial Sequence: Synthetic oligonucleotide
guuguucccggcacugaau

SEQ ID NO: 2659350 - RNA, 19 nt, Artificial Sequence
  Description of Artificial Sequence: Synthetic oligonucleotide
cuccaagaguuccgaggua

SEQ ID NO: 2659351 - RNA, 19 nt, Artificial Sequence
  Description of Artificial Sequence: Synthetic oligonucleotide
cccggcacugaauacgucu

SEQ ID NO: 2659352 - RNA, 19 nt, Artificial Sequence
  Description of Artificial Sequence: Synthetic oligonucleotide
gcagucaauaauaccucau

SEQ ID NO: 2659353 - RNA, 19 nt, Artificial Sequence
  Description of Artificial Sequence: Synthetic oligonucleotide
gccuaucaccucugccuca

SEQ ID NO: 2659354 - RNA, 19 nt, Artificial Sequence
  Description of Artificial Sequence: Synthetic oligonucleotide
agcaguggcgugagccuuu

SEQ ID NO: 2659355 - RNA, 19 nt, Artificial Sequence
  Description of Artificial Sequence: Synthetic oligonucleotide
gcagcaguggcgugagccu

SEQ ID NO: 2659356 - RNA, 19 nt, Artificial Sequence
  Description of Artificial Sequence: Synthetic oligonucleotide
cgaacgaaugaaggaagga

SEQ ID NO: 2659357 - RNA, 19 nt, Artificial Sequence
  Description of Artificial Sequence: Synthetic oligonucleotide
gccagggcuacacgagaaa

SEQ ID NO: 2659358 - RNA, 19 nt, Artificial Sequence
  Description of Artificial Sequence: Synthetic oligonucleotide
cgagguaugcuggagugaa

SEQ ID NO: 2659359 - RNA, 19 nt, Artificial Sequence
  Description of Artificial Sequence: Synthetic oligonucleotide
ccuggcagcaguggcguga

SEQ ID NO: 2659360 - RNA, 19 nt, Artificial Sequence
  Description of Artificial Sequence: Synthetic oligonucleotide
ccuugucugugauggcaaa

SEQ ID NO: 2659361 - RNA, 19 nt, Artificial Sequence
  Description of Artificial Sequence: Synthetic oligonucleotide
gagguaugcuggagugaau

SEQ ID NO: 2659362 - RNA, 19 nt, Artificial Sequence
  Description of Artificial Sequence: Synthetic oligonucleotide
gccuagggacaccccaaua

SEQ ID NO: 2659363 - RNA, 19 nt, Artificial Sequence
  Description of Artificial Sequence: Synthetic oligonucleotide
gugcuaccacugguaccca

SEQ ID NO: 2659364 - RNA, 19 nt, Artificial Sequence
  Description of Artificial Sequence: Synthetic oligonucleotide
caggaagugcuggacuguu

SEQ ID NO: 2659365 - RNA, 19 nt, Artificial Sequence
  Description of Artificial Sequence: Synthetic oligonucleotide
gcuacacgagaaacccugu

SEQ ID NO: 2659366 - RNA, 19 nt, Artificial Sequence
  Description of Artificial Sequence: Synthetic oligonucleotide
gcuggacuguuguccuugu

SEQ ID NO: 2659367 - RNA, 19 nt, Artificial Sequence
  Description of Artificial Sequence: Synthetic oligonucleotide
cuaucaccucugccucagu

SEQ ID NO: 2659368 - RNA, 19 nt, Artificial Sequence
  Description of Artificial Sequence: Synthetic oligonucleotide
cagaggcaaaagguucuuu

SEQ ID NO: 2659369 - RNA, 19 nt, Artificial Sequence
  Description of Artificial Sequence: Synthetic oligonucleotide
ccgagguaugcuggaguga

SEQ ID NO: 2659370 - RNA, 19 nt, Artificial Sequence
  Description of Artificial Sequence: Synthetic oligonucleotide
gccuggcagcaguggcgug

SEQ ID NO: 2659371 - RNA, 19 nt, Artificial Sequence
  Description of Artificial Sequence: Synthetic oligonucleotide
gucacgggauggguugauu

SEQ ID NO: 2659372 - RNA, 19 nt, Artificial Sequence
  Description of Artificial Sequence: Synthetic oligonucleotide
gugcuggacuguuguccuu

SEQ ID NO: 2659373 - RNA, 19 nt, Artificial Sequence
  Description of Artificial Sequence: Synthetic oligonucleotide
gggcuacacgagaaacccu

SEQ ID NO: 2659374 - RNA, 19 nt, Artificial Sequence
  Description of Artificial Sequence: Synthetic oligonucleotide
gcaggucacgggauggguu

SEQ ID NO: 2659375 - RNA, 19 nt, Artificial Sequence
  Description of Artificial Sequence: Synthetic oligonucleotide
caguggcgugagccuuuaa

SEQ ID NO: 2659376 - RNA, 19 nt, Artificial Sequence
  Description of Artificial Sequence: Synthetic oligonucleotide
ccggcacugaauacgucuu

SEQ ID NO: 2659377 - RNA, 19 nt, Artificial Sequence
  Description of Artificial Sequence: Synthetic oligonucleotide
cagcaguggcgugagccuu

SEQ ID NO: 2659378 - RNA, 19 nt, Artificial Sequence
  Description of Artificial Sequence: Synthetic oligonucleotide
gcagaggcaaaagguucuu

SEQ ID NO: 2659379 - RNA, 19 nt, Artificial Sequence
  Description of Artificial Sequence: Synthetic oligonucleotide
ggcacccaggaugggugcu

SEQ ID NO: 2659380 - RNA, 19 nt, Artificial Sequence
  Description of Artificial Sequence: Synthetic oligonucleotide
ccaggaagugcuggacugu

SEQ ID NO: 2659381 - RNA, 19 nt, Artificial Sequence
  Description of Artificial Sequence: Synthetic oligonucleotide
ccaccuagguaggcaccca

SEQ ID NO: 2659382 - RNA, 19 nt, Artificial Sequence
  Description of Artificial Sequence: Synthetic oligonucleotide
gcaguggcgugagccuuua

SEQ ID NO: 2659383 - RNA, 19 nt, Artificial Sequence
  Description of Artificial Sequence: Synthetic oligonucleotide
gggaggcaggucacgggau

SEQ ID NO: 2659384 - RNA, 19 nt, Artificial Sequence
  Description of Artificial Sequence: Synthetic oligonucleotide
cuggagcaucgcagucaau

SEQ ID NO: 2659385 - RNA, 19 nt, Artificial Sequence
  Description of Artificial Sequence: Synthetic oligonucleotide
ggucacgggauggguugau

SEQ ID NO: 2659386 - RNA, 19 nt, Artificial Sequence
  Description of Artificial Sequence: Synthetic oligonucleotide
cgggauggguugauugcau

SEQ ID NO: 2659387 - RNA, 19 nt, Artificial Sequence
  Description of Artificial Sequence: Synthetic oligonucleotide
cggcacugaauacgucuuu

SEQ ID NO: 2659388 - RNA, 19 nt, Artificial Sequence
  Description of Artificial Sequence: Synthetic oligonucleotide
  modified_base (4)..(4): a, c, u, g, unknown or other
ggunaaggggccuugaagg

SEQ ID NO: 2659389 - RNA, 19 nt, Artificial Sequence
  Description of Artificial Sequence: Synthetic oligonucleotide
uuagccugggaccuugggg

SEQ ID NO: 2659390 - RNA, 19 nt, Artificial Sequence
  Description of Artificial Sequence: Synthetic oligonucleotide
acccacgucgaccagcagc

SEQ ID NO: 2659391 - RNA, 19 nt, Artificial Sequence
  Description of Artificial Sequence: Synthetic oligonucleotide
  modified_base (3)..(3): a, c, u, g, unknown or other
gunaaggggccuugaaggg

SEQ ID NO: 2659392 - RNA, 19 nt, Artificial Sequence
  Description of Artificial Sequence: Synthetic oligonucleotide
uguaccgcgguccagccac

SEQ ID NO: 2659393 - RNA, 19 nt, Artificial Sequence
  Description of Artificial Sequence: Synthetic oligonucleotide
  modified_base (5)..(5): a, c, u, g, unknown or other
aggunaaggggccuugaag

SEQ ID NO: 2659394 - RNA, 19 nt, Artificial Sequence
  Description of Artificial Sequence: Synthetic oligonucleotide
uagccugggaccuuggggc

SEQ ID NO: 2659395 - RNA, 19 nt, Artificial Sequence
  Description of Artificial Sequence: Synthetic oligonucleotide
ugaucggcuggcccgcucg

SEQ ID NO: 2659396 - RNA, 19 nt, Artificial Sequence
  Description of Artificial Sequence: Synthetic oligonucleotide
gagcucgugcagcacacgg

SEQ ID NO: 2659397 - RNA, 19 nt, Artificial Sequence
  Description of Artificial Sequence: Synthetic oligonucleotide
cagccacugacccacgucg

SEQ ID NO: 2659398 - RNA, 19 nt, Artificial Sequence
  Description of Artificial Sequence: Synthetic oligonucleotide
ucgaccagcagcucggcac

SEQ ID NO: 2659399 - RNA, 19 nt, Artificial Sequence
  Description of Artificial Sequence: Synthetic oligonucleotide
agcucggcaccccacuccc

SEQ ID NO: 2659400 - RNA, 19 nt, Artificial Sequence
  Description of Artificial Sequence: Synthetic oligonucleotide
  modified_base (7)..(7): a, c, u, g, unknown or other
aaaggunaaggggccuuga

SEQ ID NO: 2659401 - RNA, 19 nt, Artificial Sequence
  Description of Artificial Sequence: Synthetic oligonucleotide
  modified_base (6)..(6): a, c, u, g, unknown or other
aaggunaaggggccuugaa

SEQ ID NO: 2659402 - RNA, 19 nt, Artificial Sequence
  Description of Artificial Sequence: Synthetic oligonucleotide
ugacccacgucgaccagca

SEQ ID NO: 2659403 - RNA, 19 nt, Artificial Sequence
  Description of Artificial Sequence: Synthetic oligonucleotide
cacgucgaccagcagcucg

SEQ ID NO: 2659404 - RNA, 19 nt, Artificial Sequence
  Description of Artificial Sequence: Synthetic oligonucleotide
ggagccaggguguaccgcg

SEQ ID NO: 2659405 - RNA, 19 nt, Artificial Sequence
  Description of Artificial Sequence: Synthetic oligonucleotide
  modified_base (2)..(2): a, c, u, g, unknown or other
unaaggggccuugaagggu

SEQ ID NO: 2659406 - RNA, 19 nt, Artificial Sequence
  Description of Artificial Sequence: Synthetic oligonucleotide
cagcacacgggccagcggc

SEQ ID NO: 2659407 - RNA, 19 nt, Artificial Sequence
  Description of Artificial Sequence: Synthetic oligonucleotide
  modified_base (8)..(8): a, c, u, g, unknown or other
gaaaggunaaggggccuug

SEQ ID NO: 2659408 - RNA, 19 nt, Artificial Sequence
  Description of Artificial Sequence: Synthetic oligonucleotide
ucuuagccugggaccuugg

SEQ ID NO: 2659409 - RNA, 19 nt, Artificial Sequence
  Description of Artificial Sequence: Synthetic oligonucleotide
cuuagccugggaccuuggg

SEQ ID NO: 2659410 - RNA, 19 nt, Artificial Sequence
  Description of Artificial Sequence: Synthetic oligonucleotide
ugcagcacacgggccagcg

SEQ ID NO: 2659411 - RNA, 19 nt, Artificial Sequence
  Description of Artificial Sequence: Synthetic oligonucleotide
ggcgugaucggcuggcccg

SEQ ID NO: 2659412 - RNA, 19 nt, Artificial Sequence
  Description of Artificial Sequence: Synthetic oligonucleotide
cucggcaccccacucccgg

SEQ ID NO: 2659413 - RNA, 19 nt, Artificial Sequence
  Description of Artificial Sequence: Synthetic oligonucleotide
ucggcugcgucccgccccg

SEQ ID NO: 2659414 - RNA, 19 nt, Artificial Sequence
  Description of Artificial Sequence: Synthetic oligonucleotide
gcucgugcagcacacgggc

SEQ ID NO: 2659415 - RNA, 19 nt, Artificial Sequence
  Description of Artificial Sequence: Synthetic oligonucleotide
acgucgaccagcagcucgg

SEQ ID NO: 2659416 - RNA, 19 nt, Artificial Sequence
  Description of Artificial Sequence: Synthetic oligonucleotide
gaucggcuggcccgcucgg

SEQ ID NO: 2659417 - RNA, 19 nt, Artificial Sequence
  Description of Artificial Sequence: Synthetic oligonucleotide
cacugacccacgucgacca

SEQ ID NO: 2659418 - RNA, 19 nt, Artificial Sequence
  Description of Artificial Sequence: Synthetic oligonucleotide
agcucgugcagcacacggg

SEQ ID NO: 2659419 - RNA, 19 nt, Artificial Sequence
  Description of Artificial Sequence: Synthetic oligonucleotide
cucgugcagcacacgggcc

SEQ ID NO: 2659420 - RNA, 19 nt, Artificial Sequence
  Description of Artificial Sequence: Synthetic oligonucleotide
agcagcucggcaccccacu

SEQ ID NO: 2659421 - RNA, 19 nt, Artificial Sequence
  Description of Artificial Sequence: Synthetic oligonucleotide
cccacucccggcgugaucg

SEQ ID NO: 2659422 - RNA, 19 nt, Artificial Sequence
  Description of Artificial Sequence: Synthetic oligonucleotide
cugacccacgucgaccagc

SEQ ID NO: 2659423 - RNA, 19 nt, Artificial Sequence
  Description of Artificial Sequence: Synthetic oligonucleotide
uccagccacugacccacgu

SEQ ID NO: 2659424 - RNA, 19 nt, Artificial Sequence
  Description of Artificial Sequence: Synthetic oligonucleotide
cagcucggcaccccacucc

SEQ ID NO: 2659425 - RNA, 19 nt, Artificial Sequence
  Description of Artificial Sequence: Synthetic oligonucleotide
cucggcugcgucccgcccc

SEQ ID NO: 2659426 - RNA, 19 nt, Artificial Sequence
  Description of Artificial Sequence: Synthetic oligonucleotide
acugacccacgucgaccag

SEQ ID NO: 2659427 - RNA, 19 nt, Artificial Sequence
  Description of Artificial Sequence: Synthetic oligonucleotide
gagccaggguguaccgcgg

SEQ ID NO: 2659428 - RNA, 19 nt, Artificial Sequence
  Description of Artificial Sequence: Synthetic oligonucleotide
ucccggcgugaucggcugg

SEQ ID NO: 2659429 - RNA, 19 nt, Artificial Sequence
  Description of Artificial Sequence: Synthetic oligonucleotide
aucggcuggcccgcucggc

SEQ ID NO: 2659430 - RNA, 19 nt, Artificial Sequence
  Description of Artificial Sequence: Synthetic oligonucleotide
agccugggaccuuggggcu

SEQ ID NO: 2659431 - RNA, 19 nt, Artificial Sequence
  Description of Artificial Sequence: Synthetic oligonucleotide
gguguaccgcgguccagcc

SEQ ID NO: 2659432 - RNA, 19 nt, Artificial Sequence
  Description of Artificial Sequence: Synthetic oligonucleotide
ucccgccccgagcucgugc

SEQ ID NO: 2659433 - RNA, 19 nt, Artificial Sequence
  Description of Artificial Sequence: Synthetic oligonucleotide
ucggcaccccacucccggc

SEQ ID NO: 2659434 - RNA, 19 nt, Artificial Sequence
  Description of Artificial Sequence: Synthetic oligonucleotide
gcgguccagccacugaccc

SEQ ID NO: 2659435 - RNA, 19 nt, Artificial Sequence
  Description of Artificial Sequence: Synthetic oligonucleotide
cucccggcgugaucggcug

SEQ ID NO: 2659436 - RNA, 19 nt, Artificial Sequence
  Description of Artificial Sequence: Synthetic oligonucleotide
ggguguaccgcgguccagc

SEQ ID NO: 2659437 - RNA, 19 nt, Artificial Sequence
  Description of Artificial Sequence: Synthetic oligonucleotide
agccaggguguaccgcggu

SEQ ID NO: 2659438 - RNA, 19 nt, Artificial Sequence
  Description of Artificial Sequence: Synthetic oligonucleotide
ccaggguguaccgcggucc

SEQ ID NO: 2659439 - RNA, 19 nt, Artificial Sequence
  Description of Artificial Sequence: Synthetic oligonucleotide
accgcgguccagccacuga

SEQ ID NO: 2659440 - RNA, 19 nt, Artificial Sequence
  Description of Artificial Sequence: Synthetic oligonucleotide
acucccggcgugaucggcu

SEQ ID NO: 2659441 - RNA, 19 nt, Artificial Sequence
  Description of Artificial Sequence: Synthetic oligonucleotide
ccacugacccacgucgacc

SEQ ID NO: 2659442 - RNA, 19 nt, Artificial Sequence
  Description of Artificial Sequence: Synthetic oligonucleotide
gcagcacacgggccagcgg

SEQ ID NO: 2659443 - RNA, 19 nt, Artificial Sequence
  Description of Artificial Sequence: Synthetic oligonucleotide
gacccacgucgaccagcag

SEQ ID NO: 2659444 - RNA, 19 nt, Artificial Sequence
  Description of Artificial Sequence: Synthetic oligonucleotide
gucgaccagcagcucggca

SEQ ID NO: 2659445 - RNA, 19 nt, Artificial Sequence
  Description of Artificial Sequence: Synthetic oligonucleotide
cagcagcucggcaccccac

SEQ ID NO: 2659446 - RNA, 19 nt, Artificial Sequence
  Description of Artificial Sequence: Synthetic oligonucleotide
caggguguaccgcggucca

SEQ ID NO: 2659447 - RNA, 19 nt, Artificial Sequence
  Description of Artificial Sequence: Synthetic oligonucleotide
aggguguaccgcgguccag

SEQ ID NO: 2659448 - RNA, 19 nt, Artificial Sequence
  Description of Artificial Sequence: Synthetic oligonucleotide
gcugcgucccgccccgagc

SEQ ID NO: 2659449 - RNA, 19 nt, Artificial Sequence
  Description of Artificial Sequence: Synthetic oligonucleotide
uaccgcgguccagccacug

SEQ ID NO: 2659450 - RNA, 19 nt, Artificial Sequence
  Description of Artificial Sequence: Synthetic oligonucleotide
uggcccgcucggcugcguc

SEQ ID NO: 2659451 - RNA, 19 nt, Artificial Sequence
  Description of Artificial Sequence: Synthetic oligonucleotide
agccacugacccacgucga

SEQ ID NO: 2659452 - RNA, 19 nt, Artificial Sequence
  Description of Artificial Sequence: Synthetic oligonucleotide
gccacugacccacgucgac

SEQ ID NO: 2659453 - RNA, 19 nt, Artificial Sequence
  Description of Artificial Sequence: Synthetic oligonucleotide
cacucccggcgugaucggc

SEQ ID NO: 2659454 - RNA, 19 nt, Artificial Sequence
  Description of Artificial Sequence: Synthetic oligonucleotide
guguaccgcgguccagcca

SEQ ID NO: 2659455 - RNA, 19 nt, Artificial Sequence
  Description of Artificial Sequence: Synthetic oligonucleotide
ccgagcucgugcagcacac

SEQ ID NO: 2659456 - RNA, 19 nt, Artificial Sequence
  Description of Artificial Sequence: Synthetic oligonucleotide
ccgcgguccagccacugac

SEQ ID NO: 2659457 - RNA, 19 nt, Artificial Sequence
  Description of Artificial Sequence: Synthetic oligonucleotide
ugcgucccgccccgagcuc

SEQ ID NO: 2659458 - RNA, 19 nt, Artificial Sequence
  Description of Artificial Sequence: Synthetic oligonucleotide
ccagccacugacccacguc

SEQ ID NO: 2659459 - RNA, 19 nt, Artificial Sequence
  Description of Artificial Sequence: Synthetic oligonucleotide
ggcuggcccgcucggcugc

SEQ ID NO: 2659460 - RNA, 19 nt, Artificial Sequence
  Description of Artificial Sequence: Synthetic oligonucleotide
cccacgucgaccagcagcu

SEQ ID NO: 2659461 - RNA, 19 nt, Artificial Sequence
  Description of Artificial Sequence: Synthetic oligonucleotide
gcgucccgccccgagcucg

SEQ ID NO: 2659462 - RNA, 19 nt, Artificial Sequence
  Description of Artificial Sequence: Synthetic oligonucleotide
gcagcucggcaccccacuc

SEQ ID NO: 2659463 - RNA, 19 nt, Artificial Sequence
  Description of Artificial Sequence: Synthetic oligonucleotide
ggcugcgucccgccccgag

SEQ ID NO: 2659464 - RNA, 19 nt, Artificial Sequence
  Description of Artificial Sequence: Synthetic oligonucleotide
cugcgucccgccccgagcu

SEQ ID NO: 2659465 - RNA, 19 nt, Artificial Sequence
  Description of Artificial Sequence: Synthetic oligonucleotide
gccaggguguaccgcgguc

SEQ ID NO: 2659466 - RNA, 19 nt, Artificial Sequence
  Description of Artificial Sequence: Synthetic oligonucleotide
cgcgguccagccacugacc

SEQ ID NO: 2659467 - RNA, 19 nt, Artificial Sequence
  Description of Artificial Sequence: Synthetic oligonucleotide
gugcagcacacgggccagc

SEQ ID NO: 2659468 - RNA, 19 nt, Artificial Sequence
  Description of Artificial Sequence: Synthetic oligonucleotide
cccgagcucgugcagcaca

SEQ ID NO: 2659469 - RNA, 19 nt, Artificial Sequence
  Description of Artificial Sequence: Synthetic oligonucleotide
gccccgagcucgugcagca

SEQ ID NO: 2659470 - RNA, 19 nt, Artificial Sequence
  Description of Artificial Sequence: Synthetic oligonucleotide
gcgugaucggcuggcccgc

SEQ ID NO: 2659471 - RNA, 19 nt, Artificial Sequence
  Description of Artificial Sequence: Synthetic oligonucleotide
cccggcgugaucggcuggc

SEQ ID NO: 2659472 - RNA, 19 nt, Artificial Sequence
  Description of Artificial Sequence: Synthetic oligonucleotide
ccacucccggcgugaucgg

SEQ ID NO: 2659473 - RNA, 19 nt, Artificial Sequence
  Description of Artificial Sequence: Synthetic oligonucleotide
gcucggcugcgucccgccc

SEQ ID NO: 2659474 - RNA, 19 nt, Artificial Sequence
  Description of Artificial Sequence: Synthetic oligonucleotide
gcaccccacucccggcgug

SEQ ID NO: 2659475 - RNA, 19 nt, Artificial Sequence
  Description of Artificial Sequence: Synthetic oligonucleotide
cggcaccccacucccggcg

SEQ ID NO: 2659476 - RNA, 19 nt, Artificial Sequence
  Description of Artificial Sequence: Synthetic oligonucleotide
gcucggcaccccacucccg

SEQ ID NO: 2659477 - RNA, 19 nt, Artificial Sequence
  Description of Artificial Sequence: Synthetic oligonucleotide
ccagcagcucggcacccca

SEQ ID NO: 2659478 - RNA, 19 nt, Artificial Sequence
  Description of Artificial Sequence: Synthetic oligonucleotide
gcccgcucggcugcguccc

SEQ ID NO: 2659479 - RNA, 19 nt, Artificial Sequence
  Description of Artificial Sequence: Synthetic oligonucleotide
cgugcagcacacgggccag

SEQ ID NO: 2659480 - RNA, 19 nt, Artificial Sequence
  Description of Artificial Sequence: Synthetic oligonucleotide
caccccacucccggcguga

SEQ ID NO: 2659481 - RNA, 19 nt, Artificial Sequence
  Description of Artificial Sequence: Synthetic oligonucleotide
cggcgugaucggcuggccc

SEQ ID NO: 2659482 - RNA, 19 nt, Artificial Sequence
  Description of Artificial Sequence: Synthetic oligonucleotide
accccacucccggcgugau

SEQ ID NO: 2659483 - RNA, 19 nt, Artificial Sequence
  Description of Artificial Sequence: Synthetic oligonucleotide
cccgccccgagcucgugca

SEQ ID NO: 2659484 - RNA, 19 nt, Artificial Sequence
  Description of Artificial Sequence: Synthetic oligonucleotide
cgagcucgugcagcacacg

SEQ ID NO: 2659485 - RNA, 19 nt, Artificial Sequence
  Description of Artificial Sequence: Synthetic oligonucleotide
cgcucggcugcgucccgcc

SEQ ID NO: 2659486 - RNA, 19 nt, Artificial Sequence
  Description of Artificial Sequence: Synthetic oligonucleotide
ggcaccccacucccggcgu

SEQ ID NO: 2659487 - RNA, 19 nt, Artificial Sequence
  Description of Artificial Sequence: Synthetic oligonucleotide
ccggcgugaucggcuggcc

SEQ ID NO: 2659488 - RNA, 19 nt, Artificial Sequence
  Description of Artificial Sequence: Synthetic oligonucleotide
cgccccgagcucgugcagc

SEQ ID NO: 2659489 - RNA, 19 nt, Artificial Sequence
  Description of Artificial Sequence: Synthetic oligonucleotide
gucccgccccgagcucgug

SEQ ID NO: 2659490 - RNA, 19 nt, Artificial Sequence
  Description of Artificial Sequence: Synthetic oligonucleotide
cggcuggcccgcucggcug

SEQ ID NO: 2659491 - RNA, 19 nt, Artificial Sequence
  Description of Artificial Sequence: Synthetic oligonucleotide
cgucgaccagcagcucggc

SEQ ID NO: 2659492 - RNA, 19 nt, Artificial Sequence
  Description of Artificial Sequence: Synthetic oligonucleotide
cccgcucggcugcgucccg

SEQ ID NO: 2659493 - RNA, 19 nt, Artificial Sequence
  Description of Artificial Sequence: Synthetic oligonucleotide
ccgccccgagcucgugcag

SEQ ID NO: 2659494 - RNA, 19 nt, Artificial Sequence
  Description of Artificial Sequence: Synthetic oligonucleotide
guaccgcgguccagccacu

SEQ ID NO: 2659495 - RNA, 19 nt, Artificial Sequence
  Description of Artificial Sequence: Synthetic oligonucleotide
ccccacucccggcgugauc

SEQ ID NO: 2659496 - RNA, 19 nt, Artificial Sequence
  Description of Artificial Sequence: Synthetic oligonucleotide
  modified_base (9)..(9): a, c, u, g, unknown or other
cgaaaggunaaggggccuu

SEQ ID NO: 2659497 - RNA, 19 nt, Artificial Sequence
  Description of Artificial Sequence: Synthetic oligonucleotide
ccacgucgaccagcagcuc

SEQ ID NO: 2659498 - RNA, 19 nt, Artificial Sequence
  Description of Artificial Sequence: Synthetic oligonucleotide
ccccgagcucgugcagcac

SEQ ID NO: 2659499 - RNA, 19 nt, Artificial Sequence
  Description of Artificial Sequence: Synthetic oligonucleotide
cuggcccgcucggcugcgu

SEQ ID NO: 2659500 - RNA, 19 nt, Artificial Sequence
  Description of Artificial Sequence: Synthetic oligonucleotide
cgucccgccccgagcucgu

SEQ ID NO: 2659501 - RNA, 19 nt, Artificial Sequence
  Description of Artificial Sequence: Synthetic oligonucleotide
cggcugcgucccgccccga

SEQ ID NO: 2659502 - RNA, 19 nt, Artificial Sequence
  Description of Artificial Sequence: Synthetic oligonucleotide
aauuaagacacacagagug

SEQ ID NO: 2659503 - RNA, 19 nt, Artificial Sequence
  Description of Artificial Sequence: Synthetic oligonucleotide
auaauuaagacacacagag

SEQ ID NO: 2659504 - RNA, 19 nt, Artificial Sequence
  Description of Artificial Sequence: Synthetic oligonucleotide
uaauaauuaagacacacag

SEQ ID NO: 2659505 - RNA, 19 nt, Artificial Sequence
  Description of Artificial Sequence: Synthetic oligonucleotide
aauaauaauuaagacacac

SEQ ID NO: 2659506 - RNA, 19 nt, Artificial Sequence
  Description of Artificial Sequence: Synthetic oligonucleotide
acaaauaauaauuaagaca

SEQ ID NO: 2659507 - RNA, 19 nt, Artificial Sequence
  Description of Artificial Sequence: Synthetic oligonucleotide
auagaaaucugucaggcuc

SEQ ID NO: 2659508 - RNA, 19 nt, Artificial Sequence
  Description of Artificial Sequence: Synthetic oligonucleotide
aauuaaaacacaaauaaua

SEQ ID NO: 2659509 - RNA, 19 nt, Artificial Sequence
  Description of Artificial Sequence: Synthetic oligonucleotide
aacauaguugcccuccagc

SEQ ID NO: 2659510 - RNA, 19 nt, Artificial Sequence
  Description of Artificial Sequence: Synthetic oligonucleotide
uacgcuuaaauuaaaacac

SEQ ID NO: 2659511 - RNA, 19 nt, Artificial Sequence
  Description of Artificial Sequence: Synthetic oligonucleotide
auaagucuaagguuggagg

SEQ ID NO: 2659512 - RNA, 19 nt, Artificial Sequence
  Description of Artificial Sequence: Synthetic oligonucleotide
auacgcuuaaauuaaaaca

SEQ ID NO: 2659513 - RNA, 19 nt, Artificial Sequence
  Description of Artificial Sequence: Synthetic oligonucleotide
cuugcaaaagaccagccgg

SEQ ID NO: 2659514 - RNA, 19 nt, Artificial Sequence
  Description of Artificial Sequence: Synthetic oligonucleotide
uuuaaauaagucuaagguu

SEQ ID NO: 2659515 - RNA, 19 nt, Artificial Sequence
  Description of Artificial Sequence: Synthetic oligonucleotide
auaguugcccuccagcggc

SEQ ID NO: 2659516 - RNA, 19 nt, Artificial Sequence
  Description of Artificial Sequence: Synthetic oligonucleotide
acaaucgcggcucaacugc

SEQ ID NO: 2659517 - RNA, 19 nt, Artificial Sequence
  Description of Artificial Sequence: Synthetic oligonucleotide
aguuccaccguucucgggc

SEQ ID NO: 2659518 - RNA, 19 nt, Artificial Sequence
  Description of Artificial Sequence: Synthetic oligonucleotide
gauacgcuuaaauuaaaac

SEQ ID NO: 2659519 - RNA, 19 nt, Artificial Sequence
  Description of Artificial Sequence: Synthetic oligonucleotide
gaagggcuaaggcagaagg

SEQ ID NO: 2659520 - RNA, 19 nt, Artificial Sequence
  Description of Artificial Sequence: Synthetic oligonucleotide
uagaaugauagaaaucugu

SEQ ID NO: 2659521 - RNA, 19 nt, Artificial Sequence
  Description of Artificial Sequence: Synthetic oligonucleotide
ucuugcaaaagaccagccg

SEQ ID NO: 2659522 - RNA, 19 nt, Artificial Sequence
  Description of Artificial Sequence: Synthetic oligonucleotide
aauaagucuaagguuggag

SEQ ID NO: 2659523 - RNA, 19 nt, Artificial Sequence
  Description of Artificial Sequence: Synthetic oligonucleotide
cacaaauaauaauuaagac

SEQ ID NO: 2659524 - RNA, 19 nt, Artificial Sequence
  Description of Artificial Sequence: Synthetic oligonucleotide
uaagucuaagguuggaggc

SEQ ID NO: 2659525 - RNA, 19 nt, Artificial Sequence
  Description of Artificial Sequence: Synthetic oligonucleotide
ugaaggaagggcuaaggca

SEQ ID NO: 2659526 - RNA, 19 nt, Artificial Sequence
  Description of Artificial Sequence: Synthetic oligonucleotide
gaaggaagggcuaaggcag

SEQ ID NO: 2659527 - RNA, 19 nt, Artificial Sequence
  Description of Artificial Sequence: Synthetic oligonucleotide
acauaguugcccuccagcg

SEQ ID NO: 2659528 - RNA, 19 nt, Artificial Sequence
  Description of Artificial Sequence: Synthetic oligonucleotide
agcccuaggucccaaacgc

SEQ ID NO: 2659529 - RNA, 19 nt, Artificial Sequence
  Description of Artificial Sequence: Synthetic oligonucleotide
acacaaauaauaauuaaga

SEQ ID NO: 2659530 - RNA, 19 nt, Artificial Sequence
  Description of Artificial Sequence: Synthetic oligonucleotide
uuccucuugcaaaagacca

SEQ ID NO: 2659531 - RNA, 19 nt, Artificial Sequence
  Description of Artificial Sequence: Synthetic oligonucleotide
ugauagaaaucugucaggc

SEQ ID NO: 2659532 - RNA, 19 nt, Artificial Sequence
  Description of Artificial Sequence: Synthetic oligonucleotide
acaggauacgcuuaaauua

SEQ ID NO: 2659533 - RNA, 19 nt, Artificial Sequence
  Description of Artificial Sequence: Synthetic oligonucleotide
augauagaaaucugucagg

SEQ ID NO: 2659534 - RNA, 19 nt, Artificial Sequence
  Description of Artificial Sequence: Synthetic oligonucleotide
uuagaaugauagaaaucug

SEQ ID NO: 2659535 - RNA, 19 nt, Artificial Sequence
  Description of Artificial Sequence: Synthetic oligonucleotide
aauaauuaagacacacaga

SEQ ID NO: 2659536 - RNA, 19 nt, Artificial Sequence
  Description of Artificial Sequence: Synthetic oligonucleotide
gaguauauacaggauacgc

SEQ ID NO: 2659537 - RNA, 19 nt, Artificial Sequence
  Description of Artificial Sequence: Synthetic oligonucleotide
ucagguagagcuugggcag

SEQ ID NO: 2659538 - RNA, 19 nt, Artificial Sequence
  Description of Artificial Sequence: Synthetic oligonucleotide
cuuagaaugauagaaaucu

SEQ ID NO: 2659539 - RNA, 19 nt, Artificial Sequence
  Description of Artificial Sequence: Synthetic oligonucleotide
uccugugggcacauuaggg

SEQ ID NO: 2659540 - RNA, 19 nt, Artificial Sequence
  Description of Artificial Sequence: Synthetic oligonucleotide
caugagcgcaucacaaucg

SEQ ID NO: 2659541 - RNA, 19 nt, Artificial Sequence
  Description of Artificial Sequence: Synthetic oligonucleotide
augagcgcaucacaaucgc

SEQ ID NO: 2659542 - RNA, 19 nt, Artificial Sequence
  Description of Artificial Sequence: Synthetic oligonucleotide
agagguuccggguccaccg

SEQ ID NO: 2659543 - RNA, 19 nt, Artificial Sequence
  Description of Artificial Sequence: Synthetic oligonucleotide
uaauuaagacacacagagu

SEQ ID NO: 2659544 - RNA, 19 nt, Artificial Sequence
  Description of Artificial Sequence: Synthetic oligonucleotide
agcaaggcagaggaggugc

SEQ ID NO: 2659545 - RNA, 19 nt, Artificial Sequence
  Description of Artificial Sequence: Synthetic oligonucleotide
aacugcucacuguccacgg

SEQ ID NO: 2659546 - RNA, 19 nt, Artificial Sequence
  Description of Artificial Sequence: Synthetic oligonucleotide
uugcaaaagaccagccggc

SEQ ID NO: 2659547 - RNA, 19 nt, Artificial Sequence
  Description of Artificial Sequence: Synthetic oligonucleotide
gagcgcaucacaaucgcgg

SEQ ID NO: 2659548 - RNA, 19 nt, Artificial Sequence
  Description of Artificial Sequence: Synthetic oligonucleotide
aaacauaguugcccuccag

SEQ ID NO: 2659549 - RNA, 19 nt, Artificial Sequence
  Description of Artificial Sequence: Synthetic oligonucleotide
uuaagacacacagagugaa

SEQ ID NO: 2659550 - RNA, 19 nt, Artificial Sequence
  Description of Artificial Sequence: Synthetic oligonucleotide
ucaucgggacccgacaugg

SEQ ID NO: 2659551 - RNA, 19 nt, Artificial Sequence
  Description of Artificial Sequence: Synthetic oligonucleotide
uacaggauacgcuuaaauu

SEQ ID NO: 2659552 - RNA, 19 nt, Artificial Sequence
  Description of Artificial Sequence: Synthetic oligonucleotide
agcgcaucacaaucgcggc

SEQ ID NO: 2659553 - RNA, 19 nt, Artificial Sequence
  Description of Artificial Sequence: Synthetic oligonucleotide
cuuguccccucccaggucg

SEQ ID NO: 2659554 - RNA, 19 nt, Artificial Sequence
  Description of Artificial Sequence: Synthetic oligonucleotide
auaauaauuaagacacaca

SEQ ID NO: 2659555 - RNA, 19 nt, Artificial Sequence
  Description of Artificial Sequence: Synthetic oligonucleotide
aguauauacaggauacgcu

SEQ ID NO: 2659556 - RNA, 19 nt, Artificial Sequence
  Description of Artificial Sequence: Synthetic oligonucleotide
aacgcgcucccaaacauag

SEQ ID NO: 2659557 - RNA, 19 nt, Artificial Sequence
  Description of Artificial Sequence: Synthetic oligonucleotide
cacgggaccgaagagacgg

SEQ ID NO: 2659558 - RNA, 19 nt, Artificial Sequence
  Description of Artificial Sequence: Synthetic oligonucleotide
uguggcacgggucggacgu

SEQ ID NO: 2659559 - RNA, 19 nt, Artificial Sequence
  Description of Artificial Sequence: Synthetic oligonucleotide
cuugggcagcccuaggucc

SEQ ID NO: 2659560 - RNA, 19 nt, Artificial Sequence
  Description of Artificial Sequence: Synthetic oligonucleotide
gaaguuccaccguucucgg

SEQ ID NO: 2659561 - RNA, 19 nt, Artificial Sequence
  Description of Artificial Sequence: Synthetic oligonucleotide
uccacgggaccgaagagac

SEQ ID NO: 2659562 - RNA, 19 nt, Artificial Sequence
  Description of Artificial Sequence: Synthetic oligonucleotide
gcaggcagaguauauacag

SEQ ID NO: 2659563 - RNA, 19 nt, Artificial Sequence
  Description of Artificial Sequence: Synthetic oligonucleotide
agaguauauacaggauacg

SEQ ID NO: 2659564 - RNA, 19 nt, Artificial Sequence
  Description of Artificial Sequence: Synthetic oligonucleotide
ugagcgcaucacaaucgcg

SEQ ID NO: 2659565 - RNA, 19 nt, Artificial Sequence
  Description of Artificial Sequence: Synthetic oligonucleotide
agugaaggaagggcuaagg

SEQ ID NO: 2659566 - RNA, 19 nt, Artificial Sequence
  Description of Artificial Sequence: Synthetic oligonucleotide
cauaguugcccuccagcgg

SEQ ID NO: 2659567 - RNA, 19 nt, Artificial Sequence
  Description of Artificial Sequence: Synthetic oligonucleotide
auacaggauacgcuuaaau

SEQ ID NO: 2659568 - RNA, 19 nt, Artificial Sequence
  Description of Artificial Sequence: Synthetic oligonucleotide
ucacaaucgcggcucaacu

SEQ ID NO: 2659569 - RNA, 19 nt, Artificial Sequence
  Description of Artificial Sequence: Synthetic oligonucleotide
gugaaggaagggcuaaggc

SEQ ID NO: 2659570 - RNA, 19 nt, Artificial Sequence
  Description of Artificial Sequence: Synthetic oligonucleotide
gagugcaggacagcgacag

SEQ ID NO: 2659571 - RNA, 19 nt, Artificial Sequence
  Description of Artificial Sequence: Synthetic oligonucleotide
cucccaaacauaguugccc

SEQ ID NO: 2659572 - RNA, 19 nt, Artificial Sequence
  Description of Artificial Sequence: Synthetic oligonucleotide
accagagugcaggacagcg

SEQ ID NO: 2659573 - RNA, 19 nt, Artificial Sequence
  Description of Artificial Sequence: Synthetic oligonucleotide
caggcagaguauauacagg

SEQ ID NO: 2659574 - RNA, 19 nt, Artificial Sequence
  Description of Artificial Sequence: Synthetic oligonucleotide
ugcaaaagaccagccggcg

SEQ ID NO: 2659575 - RNA, 19 nt, Artificial Sequence
  Description of Artificial Sequence: Synthetic oligonucleotide
aucacaaucgcggcucaac

SEQ ID NO: 2659576 - RNA, 19 nt, Artificial Sequence
  Description of Artificial Sequence: Synthetic oligonucleotide
acaccuugcuccugugugg

SEQ ID NO: 2659577 - RNA, 19 nt, Artificial Sequence
  Description of Artificial Sequence: Synthetic oligonucleotide
auauacaggauacgcuuaa

SEQ ID NO: 2659578 - RNA, 19 nt, Artificial Sequence
  Description of Artificial Sequence: Synthetic oligonucleotide
gaggcagccggccaugagc

SEQ ID NO: 2659579 - RNA, 19 nt, Artificial Sequence
  Description of Artificial Sequence: Synthetic oligonucleotide
gagacggcggcacaccuug

SEQ ID NO: 2659580 - RNA, 19 nt, Artificial Sequence
  Description of Artificial Sequence: Synthetic oligonucleotide
ucggacgucaucgggaccc

SEQ ID NO: 2659581 - RNA, 19 nt, Artificial Sequence
  Description of Artificial Sequence: Synthetic oligonucleotide
aagucuaagguuggaggcu

SEQ ID NO: 2659582 - RNA, 19 nt, Artificial Sequence
  Description of Artificial Sequence: Synthetic oligonucleotide
aaauaagucuaagguugga

SEQ ID NO: 2659583 - RNA, 19 nt, Artificial Sequence
  Description of Artificial Sequence: Synthetic oligonucleotide
ucccaaacauaguugcccu

SEQ ID NO: 2659584 - RNA, 19 nt, Artificial Sequence
  Description of Artificial Sequence: Synthetic oligonucleotide
cagagugcaggacagcgac

SEQ ID NO: 2659585 - RNA, 19 nt, Artificial Sequence
  Description of Artificial Sequence: Synthetic oligonucleotide
cauuagggcuuccucuugc

SEQ ID NO: 2659586 - RNA, 19 nt, Artificial Sequence
  Description of Artificial Sequence: Synthetic oligonucleotide
agggcuaaggcagaaggug

SEQ ID NO: 2659587 - RNA, 19 nt, Artificial Sequence
  Description of Artificial Sequence: Synthetic oligonucleotide
ugcaggacagcgacagggc

SEQ ID NO: 2659588 - RNA, 19 nt, Artificial Sequence
  Description of Artificial Sequence: Synthetic oligonucleotide
cucuugcaaaagaccagcc

SEQ ID NO: 2659589 - RNA, 19 nt, Artificial Sequence
  Description of Artificial Sequence: Synthetic oligonucleotide
guauauacaggauacgcuu

SEQ ID NO: 2659590 - RNA, 19 nt, Artificial Sequence
  Description of Artificial Sequence: Synthetic oligonucleotide
aaguuccaccguucucggg

SEQ ID NO: 2659591 - RNA, 19 nt, Artificial Sequence
  Description of Artificial Sequence: Synthetic oligonucleotide
auuaagacacacagaguga

SEQ ID NO: 2659592 - RNA, 19 nt, Artificial Sequence
  Description of Artificial Sequence: Synthetic oligonucleotide
ccguuugcgacccugagag

SEQ ID NO: 2659593 - RNA, 19 nt, Artificial Sequence
  Description of Artificial Sequence: Synthetic oligonucleotide
aagagacggcggcacaccu

SEQ ID NO: 2659594 - RNA, 19 nt, Artificial Sequence
  Description of Artificial Sequence: Synthetic oligonucleotide
cacgggucggacgucaucg

SEQ ID NO: 2659595 - RNA, 19 nt, Artificial Sequence
  Description of Artificial Sequence: Synthetic oligonucleotide
uccguuugcgacccugaga

SEQ ID NO: 2659596 - RNA, 19 nt, Artificial Sequence
  Description of Artificial Sequence: Synthetic oligonucleotide
caggauacgcuuaaauuaa

SEQ ID NO: 2659597 - RNA, 19 nt, Artificial Sequence
  Description of Artificial Sequence: Synthetic oligonucleotide
aucgggacccgacauggug

SEQ ID NO: 2659598 - RNA, 19 nt, Artificial Sequence
  Description of Artificial Sequence: Synthetic oligonucleotide
ucgucugccuccguuugcg

SEQ ID NO: 2659599 - RNA, 19 nt, Artificial Sequence
  Description of Artificial Sequence: Synthetic oligonucleotide
agggugaggccuccugugg

SEQ ID NO: 2659600 - RNA, 19 nt, Artificial Sequence
  Description of Artificial Sequence: Synthetic oligonucleotide
gacgaagucgaaguuccac

SEQ ID NO: 2659601 - RNA, 19 nt, Artificial Sequence
  Description of Artificial Sequence: Synthetic oligonucleotide
agggccgugagacaccaga

SEQ ID NO: 2659602 - RNA, 19 nt, Artificial Sequence
  Description of Artificial Sequence: Synthetic oligonucleotide
uguccacgggaccgaagag

SEQ ID NO: 2659603 - RNA, 19 nt, Artificial Sequence
  Description of Artificial Sequence: Synthetic oligonucleotide
agucuaagguuggaggcug

SEQ ID NO: 2659604 - RNA, 19 nt, Artificial Sequence
  Description of Artificial Sequence: Synthetic oligonucleotide
aggacagcgacagggccac

SEQ ID NO: 2659605 - RNA, 19 nt, Artificial Sequence
  Description of Artificial Sequence: Synthetic oligonucleotide
cacaaucgcggcucaacug

SEQ ID NO: 2659606 - RNA, 19 nt, Artificial Sequence
  Description of Artificial Sequence: Synthetic oligonucleotide
auuagggcuuccucuugca

SEQ ID NO: 2659607 - RNA, 19 nt, Artificial Sequence
  Description of Artificial Sequence: Synthetic oligonucleotide
ccagccggcgcuuagaaug

SEQ ID NO: 2659608 - RNA, 19 nt, Artificial Sequence
  Description of Artificial Sequence: Synthetic oligonucleotide
accgaagagacggcggcac

SEQ ID NO: 2659609 - RNA, 19 nt, Artificial Sequence
  Description of Artificial Sequence: Synthetic oligonucleotide
uccagcggcgucucgguga

SEQ ID NO: 2659610 - RNA, 19 nt, Artificial Sequence
  Description of Artificial Sequence: Synthetic oligonucleotide
gagggugaggccuccugug

SEQ ID NO: 2659611 - RNA, 19 nt, Artificial Sequence
  Description of Artificial Sequence: Synthetic oligonucleotide
cagcccuaggucccaaacg

SEQ ID NO: 2659612 - RNA, 19 nt, Artificial Sequence
  Description of Artificial Sequence: Synthetic oligonucleotide
gauagaaaucugucaggcu

SEQ ID NO: 2659613 - RNA, 19 nt, Artificial Sequence
  Description of Artificial Sequence: Synthetic oligonucleotide
acauuagggcuuccucuug

SEQ ID NO: 2659614 - RNA, 19 nt, Artificial Sequence
  Description of Artificial Sequence: Synthetic oligonucleotide
agggcuuccucuugcaaaa

SEQ ID NO: 2659615 - RNA, 19 nt, Artificial Sequence
  Description of Artificial Sequence: Synthetic oligonucleotide
uuagggcuuccucuugcaa

SEQ ID NO: 2659616 - RNA, 19 nt, Artificial Sequence
  Description of Artificial Sequence: Synthetic oligonucleotide
agcuugggcagcccuaggu

SEQ ID NO: 2659617 - RNA, 19 nt, Artificial Sequence
  Description of Artificial Sequence: Synthetic oligonucleotide
agggccacauggucgucgg

SEQ ID NO: 2659618 - RNA, 19 nt, Artificial Sequence
  Description of Artificial Sequence: Synthetic oligonucleotide
gccgugagacaccagagug

SEQ ID NO: 2659619 - RNA, 19 nt, Artificial Sequence
  Description of Artificial Sequence: Synthetic oligonucleotide
agguagagcuugggcagcc

SEQ ID NO: 2659620 - RNA, 19 nt, Artificial Sequence
  Description of Artificial Sequence: Synthetic oligonucleotide
agaagagggugaggccucc

SEQ ID NO: 2659621 - RNA, 19 nt, Artificial Sequence
  Description of Artificial Sequence: Synthetic oligonucleotide
caggucgucacggccaccg

SEQ ID NO: 2659622 - RNA, 19 nt, Artificial Sequence
  Description of Artificial Sequence: Synthetic oligonucleotide
gaagagacggcggcacacc

SEQ ID NO: 2659623 - RNA, 19 nt, Artificial Sequence
  Description of Artificial Sequence: Synthetic oligonucleotide
acgcuuaaauuaaaacaca

SEQ ID NO: 2659624 - RNA, 19 nt, Artificial Sequence
  Description of Artificial Sequence: Synthetic oligonucleotide
cucggugacgaagucgaag

SEQ ID NO: 2659625 - RNA, 19 nt, Artificial Sequence
  Description of Artificial Sequence: Synthetic oligonucleotide
uaguugcccuccagcggcg

SEQ ID NO: 2659626 - RNA, 19 nt, Artificial Sequence
  Description of Artificial Sequence: Synthetic oligonucleotide
ucgaaguuccaccguucuc

SEQ ID NO: 2659627 - RNA, 19 nt, Artificial Sequence
  Description of Artificial Sequence: Synthetic oligonucleotide
aggcagccggccaugagcg

SEQ ID NO: 2659628 - RNA, 19 nt, Artificial Sequence
  Description of Artificial Sequence: Synthetic oligonucleotide
gucucggugacgaagucga

SEQ ID NO: 2659629 - RNA, 19 nt, Artificial Sequence
  Description of Artificial Sequence: Synthetic oligonucleotide
agagcuugggcagcccuag

SEQ ID NO: 2659630 - RNA, 19 nt, Artificial Sequence
  Description of Artificial Sequence: Synthetic oligonucleotide
ugucaggcucgucugccuc

SEQ ID NO: 2659631 - RNA, 19 nt, Artificial Sequence
  Description of Artificial Sequence: Synthetic oligonucleotide
aucgcggcucaacugcuca

SEQ ID NO: 2659632 - RNA, 19 nt, Artificial Sequence
  Description of Artificial Sequence: Synthetic oligonucleotide
ugugggcacauuagggcuu

SEQ ID NO: 2659633 - RNA, 19 nt, Artificial Sequence
  Description of Artificial Sequence: Synthetic oligonucleotide
gagguuccggguccaccgg

SEQ ID NO: 2659634 - RNA, 19 nt, Artificial Sequence
  Description of Artificial Sequence: Synthetic oligonucleotide
guccucagggccgugagac

SEQ ID NO: 2659635 - RNA, 19 nt, Artificial Sequence
  Description of Artificial Sequence: Synthetic oligonucleotide
gcagaguauauacaggaua

SEQ ID NO: 2659636 - RNA, 19 nt, Artificial Sequence
  Description of Artificial Sequence: Synthetic oligonucleotide
agguuccggguccaccggg

SEQ ID NO: 2659637 - RNA, 19 nt, Artificial Sequence
  Description of Artificial Sequence: Synthetic oligonucleotide
acugcagaagagggugagg

SEQ ID NO: 2659638 - RNA, 19 nt, Artificial Sequence
  Description of Artificial Sequence: Synthetic oligonucleotide
acggcggcacaccuugcuc

SEQ ID NO: 2659639 - RNA, 19 nt, Artificial Sequence
  Description of Artificial Sequence: Synthetic oligonucleotide
ccaaacauaguugcccucc

SEQ ID NO: 2659640 - RNA, 19 nt, Artificial Sequence
  Description of Artificial Sequence: Synthetic oligonucleotide
gucgucacggccaccgcgg

SEQ ID NO: 2659641 - RNA, 19 nt, Artificial Sequence
  Description of Artificial Sequence: Synthetic oligonucleotide
aaucgcggcucaacugcuc

SEQ ID NO: 2659642 - RNA, 19 nt, Artificial Sequence
  Description of Artificial Sequence: Synthetic oligonucleotide
aggucccaaacgcgcuccc

SEQ ID NO: 2659643 - RNA, 19 nt, Artificial Sequence
  Description of Artificial Sequence: Synthetic oligonucleotide
uauacaggauacgcuuaaa

SEQ ID NO: 2659644 - RNA, 19 nt, Artificial Sequence
  Description of Artificial Sequence: Synthetic oligonucleotide
ccggcgcuuagaaugauag

SEQ ID NO: 2659645 - RNA, 19 nt, Artificial Sequence
  Description of Artificial Sequence: Synthetic oligonucleotide
guuccaccguucucgggcc

SEQ ID NO: 2659646 - RNA, 19 nt, Artificial Sequence
  Description of Artificial Sequence: Synthetic oligonucleotide
cgaagucgaaguuccaccg

SEQ ID NO: 2659647 - RNA, 19 nt, Artificial Sequence
  Description of Artificial Sequence: Synthetic oligonucleotide
gagugaaggaagggcuaag

SEQ ID NO: 2659648 - RNA, 19 nt, Artificial Sequence
  Description of Artificial Sequence: Synthetic oligonucleotide
caaaagaccagccggcgcu

SEQ ID NO: 2659649 - RNA, 19 nt, Artificial Sequence
  Description of Artificial Sequence: Synthetic oligonucleotide
ggcucaacugcucacuguc

SEQ ID NO: 2659650 - RNA, 19 nt, Artificial Sequence
  Description of Artificial Sequence: Synthetic oligonucleotide
uaggucccaaacgcgcucc

SEQ ID NO: 2659651 - RNA, 19 nt, Artificial Sequence
  Description of Artificial Sequence: Synthetic oligonucleotide
uuugcgacccugagagguu

SEQ ID NO: 2659652 - RNA, 19 nt, Artificial Sequence
  Description of Artificial Sequence: Synthetic oligonucleotide
gggcuaaggcagaaggugg

SEQ ID NO: 2659653 - RNA, 19 nt, Artificial Sequence
  Description of Artificial Sequence: Synthetic oligonucleotide
ugacgaagucgaaguucca

SEQ ID NO: 2659654 - RNA, 19 nt, Artificial Sequence
  Description of Artificial Sequence: Synthetic oligonucleotide
gggcaggcagaguauauac

SEQ ID NO: 2659655 - RNA, 19 nt, Artificial Sequence
  Description of Artificial Sequence: Synthetic oligonucleotide
gucaucgggacccgacaug

SEQ ID NO: 2659656 - RNA, 19 nt, Artificial Sequence
  Description of Artificial Sequence: Synthetic oligonucleotide
gcagaggaggugcugggcc

SEQ ID NO: 2659657 - RNA, 19 nt, Artificial Sequence
  Description of Artificial Sequence: Synthetic oligonucleotide
guuugcgacccugagaggu

SEQ ID NO: 2659658 - RNA, 19 nt, Artificial Sequence
  Description of Artificial Sequence: Synthetic oligonucleotide
agagugaaggaagggcuaa

SEQ ID NO: 2659659 - RNA, 19 nt, Artificial Sequence
  Description of Artificial Sequence: Synthetic oligonucleotide
uagagcuugggcagcccua

SEQ ID NO: 2659660 - RNA, 19 nt, Artificial Sequence
  Description of Artificial Sequence: Synthetic oligonucleotide
ugcugggccgcuugucccc

SEQ ID NO: 2659661 - RNA, 19 nt, Artificial Sequence
  Description of Artificial Sequence: Synthetic oligonucleotide
ggucgucacggccaccgcg

SEQ ID NO: 2659662 - RNA, 19 nt, Artificial Sequence
  Description of Artificial Sequence: Synthetic oligonucleotide
ucgucacggccaccgcggg

SEQ ID NO: 2659663 - RNA, 19 nt, Artificial Sequence
  Description of Artificial Sequence: Synthetic oligonucleotide
ggcuaaggcagaagguggg

SEQ ID NO: 2659664 - RNA, 19 nt, Artificial Sequence
  Description of Artificial Sequence: Synthetic oligonucleotide
acgucaucgggacccgaca

SEQ ID NO: 2659665 - RNA, 19 nt, Artificial Sequence
  Description of Artificial Sequence: Synthetic oligonucleotide
ggaccgaagagacggcggc

SEQ ID NO: 2659666 - RNA, 19 nt, Artificial Sequence
  Description of Artificial Sequence: Synthetic oligonucleotide
ggccacauggucgucgggg

SEQ ID NO: 2659667 - RNA, 19 nt, Artificial Sequence
  Description of Artificial Sequence: Synthetic oligonucleotide
gagagguuccggguccacc

SEQ ID NO: 2659668 - RNA, 19 nt, Artificial Sequence
  Description of Artificial Sequence: Synthetic oligonucleotide
ggugacgaagucgaaguuc

SEQ ID NO: 2659669 - RNA, 19 nt, Artificial Sequence
  Description of Artificial Sequence: Synthetic oligonucleotide
gcaaaagaccagccggcgc

SEQ ID NO: 2659670 - RNA, 19 nt, Artificial Sequence
  Description of Artificial Sequence: Synthetic oligonucleotide
gcuuccucuugcaaaagac

SEQ ID NO: 2659671 - RNA, 19 nt, Artificial Sequence
  Description of Artificial Sequence: Synthetic oligonucleotide
aggucgucacggccaccgc

SEQ ID NO: 2659672 - RNA, 19 nt, Artificial Sequence
  Description of Artificial Sequence: Synthetic oligonucleotide
acgggucggacgucaucgg

SEQ ID NO: 2659673 - RNA, 19 nt, Artificial Sequence
  Description of Artificial Sequence: Synthetic oligonucleotide
gcuuagaaugauagaaauc

SEQ ID NO: 2659674 - RNA, 19 nt, Artificial Sequence
  Description of Artificial Sequence: Synthetic oligonucleotide
cuaggucccaaacgcgcuc

SEQ ID NO: 2659675 - RNA, 19 nt, Artificial Sequence
  Description of Artificial Sequence: Synthetic oligonucleotide
ccucuugcaaaagaccagc

SEQ ID NO: 2659676 - RNA, 19 nt, Artificial Sequence
  Description of Artificial Sequence: Synthetic oligonucleotide
ugcgacccugagagguucc

SEQ ID NO: 2659677 - RNA, 19 nt, Artificial Sequence
  Description of Artificial Sequence: Synthetic oligonucleotide
ccaugagcgcaucacaauc

SEQ ID NO: 2659678 - RNA, 19 nt, Artificial Sequence
  Description of Artificial Sequence: Synthetic oligonucleotide
gggugaggccuccuguggg

SEQ ID NO: 2659679 - RNA, 19 nt, Artificial Sequence
  Description of Artificial Sequence: Synthetic oligonucleotide
caccuugcuccuguguggc

SEQ ID NO: 2659680 - RNA, 19 nt, Artificial Sequence
  Description of Artificial Sequence: Synthetic oligonucleotide
caaacauaguugcccucca

SEQ ID NO: 2659681 - RNA, 19 nt, Artificial Sequence
  Description of Artificial Sequence: Synthetic oligonucleotide
cucagggccgugagacacc

SEQ ID NO: 2659682 - RNA, 19 nt, Artificial Sequence
  Description of Artificial Sequence: Synthetic oligonucleotide
gacgucaucgggacccgac

SEQ ID NO: 2659683 - RNA, 19 nt, Artificial Sequence
  Description of Artificial Sequence: Synthetic oligonucleotide
caggacagcgacagggcca

SEQ ID NO: 2659684 - RNA, 19 nt, Artificial Sequence
  Description of Artificial Sequence: Synthetic oligonucleotide
cccuaggucccaaacgcgc

SEQ ID NO: 2659685 - RNA, 19 nt, Artificial Sequence
  Description of Artificial Sequence: Synthetic oligonucleotide
acccugagagguuccgggu

SEQ ID NO: 2659686 - RNA, 19 nt, Artificial Sequence
  Description of Artificial Sequence: Synthetic oligonucleotide
ggcacauuagggcuuccuc

SEQ ID NO: 2659687 - RNA, 19 nt, Artificial Sequence
  Description of Artificial Sequence: Synthetic oligonucleotide
ucccaaacgcgcucccaaa

SEQ ID NO: 2659688 - RNA, 19 nt, Artificial Sequence
  Description of Artificial Sequence: Synthetic oligonucleotide
guguggcacgggucggacg

SEQ ID NO: 2659689 - RNA, 19 nt, Artificial Sequence
  Description of Artificial Sequence: Synthetic oligonucleotide
gaagucgaaguuccaccgu

SEQ ID NO: 2659690 - RNA, 19 nt, Artificial Sequence
  Description of Artificial Sequence: Synthetic oligonucleotide
agcggcgucucggugacga

SEQ ID NO: 2659691 - RNA, 19 nt, Artificial Sequence
  Description of Artificial Sequence: Synthetic oligonucleotide
agaaaucugucaggcucgu

SEQ ID NO: 2659692 - RNA, 19 nt, Artificial Sequence
  Description of Artificial Sequence: Synthetic oligonucleotide
cuccguuugcgacccugag

SEQ ID NO: 2659693 - RNA, 19 nt, Artificial Sequence
  Description of Artificial Sequence: Synthetic oligonucleotide
ccugagagguuccgggucc

SEQ ID NO: 2659694 - RNA, 19 nt, Artificial Sequence
  Description of Artificial Sequence: Synthetic oligonucleotide
gagcuugggcagcccuagg

SEQ ID NO: 2659695 - RNA, 19 nt, Artificial Sequence
  Description of Artificial Sequence: Synthetic oligonucleotide
ccgugagacaccagagugc

SEQ ID NO: 2659696 - RNA, 19 nt, Artificial Sequence
  Description of Artificial Sequence: Synthetic oligonucleotide
cucgucugccuccguuugc

SEQ ID NO: 2659697 - RNA, 19 nt, Artificial Sequence
  Description of Artificial Sequence: Synthetic oligonucleotide
aaaagaccagccggcgcuu

SEQ ID NO: 2659698 - RNA, 19 nt, Artificial Sequence
  Description of Artificial Sequence: Synthetic oligonucleotide
gucuaagguuggaggcugg

SEQ ID NO: 2659699 - RNA, 19 nt, Artificial Sequence
  Description of Artificial Sequence: Synthetic oligonucleotide
cagggccacauggucgucg

SEQ ID NO: 2659700 - RNA, 19 nt, Artificial Sequence
  Description of Artificial Sequence: Synthetic oligonucleotide
gcuaaggcagaaggugggg

SEQ ID NO: 2659701 - RNA, 19 nt, Artificial Sequence
  Description of Artificial Sequence: Synthetic oligonucleotide
cuggcccacugcagaagag

SEQ ID NO: 2659702 - RNA, 19 nt, Artificial Sequence
  Description of Artificial Sequence: Synthetic oligonucleotide
ugggccgcuuguccccucc

SEQ ID NO: 2659703 - RNA, 19 nt, Artificial Sequence
  Description of Artificial Sequence: Synthetic oligonucleotide
ccuccugugggcacauuag

SEQ ID NO: 2659704 - RNA, 19 nt, Artificial Sequence
  Description of Artificial Sequence: Synthetic oligonucleotide
ggucggacgucaucgggac

SEQ ID NO: 2659705 - RNA, 19 nt, Artificial Sequence
  Description of Artificial Sequence: Synthetic oligonucleotide
gcaggacagcgacagggcc

SEQ ID NO: 2659706 - RNA, 19 nt, Artificial Sequence
  Description of Artificial Sequence: Synthetic oligonucleotide
uguguggcacgggucggac

SEQ ID NO: 2659707 - RNA, 19 nt, Artificial Sequence
  Description of Artificial Sequence: Synthetic oligonucleotide
aaacgcgcucccaaacaua

SEQ ID NO: 2659708 - RNA, 19 nt, Artificial Sequence
  Description of Artificial Sequence: Synthetic oligonucleotide
uccucagggccgugagaca

SEQ ID NO: 2659709 - RNA, 19 nt, Artificial Sequence
  Description of Artificial Sequence: Synthetic oligonucleotide
gccaccgcgggacccaggg

SEQ ID NO: 2659710 - RNA, 19 nt, Artificial Sequence
  Description of Artificial Sequence: Synthetic oligonucleotide
ggauacgcuuaaauuaaaa

SEQ ID NO: 2659711 - RNA, 19 nt, Artificial Sequence
  Description of Artificial Sequence: Synthetic oligonucleotide
ucacuguccacgggaccga

SEQ ID NO: 2659712 - RNA, 19 nt, Artificial Sequence
  Description of Artificial Sequence: Synthetic oligonucleotide
gucgaaguuccaccguucu

SEQ ID NO: 2659713 - RNA, 19 nt, Artificial Sequence
  Description of Artificial Sequence: Synthetic oligonucleotide
cagagugaaggaagggcua

SEQ ID NO: 2659714 - RNA, 19 nt, Artificial Sequence
  Description of Artificial Sequence: Synthetic oligonucleotide
gucccaaacgcgcucccaa

SEQ ID NO: 2659715 - RNA, 19 nt, Artificial Sequence
  Description of Artificial Sequence: Synthetic oligonucleotide
guccacgggaccgaagaga

SEQ ID NO: 2659716 - RNA, 19 nt, Artificial Sequence
  Description of Artificial Sequence: Synthetic oligonucleotide
cugccuccguuugcgaccc

SEQ ID NO: 2659717 - RNA, 19 nt, Artificial Sequence
  Description of Artificial Sequence: Synthetic oligonucleotide
gcacauuagggcuuccucu

SEQ ID NO: 2659718 - RNA, 19 nt, Artificial Sequence
  Description of Artificial Sequence: Synthetic oligonucleotide
gggaccgaagagacggcgg

SEQ ID NO: 2659719 - RNA, 19 nt, Artificial Sequence
  Description of Artificial Sequence: Synthetic oligonucleotide
uugcgacccugagagguuc

SEQ ID NO: 2659720 - RNA, 19 nt, Artificial Sequence
  Description of Artificial Sequence: Synthetic oligonucleotide
gaccagccggcgcuuagaa

SEQ ID NO: 2659721 - RNA, 19 nt, Artificial Sequence
  Description of Artificial Sequence: Synthetic oligonucleotide
ugcuccuguguggcacggg

SEQ ID NO: 2659722 - RNA, 19 nt, Artificial Sequence
  Description of Artificial Sequence: Synthetic oligonucleotide
agcgacagggccacauggu

SEQ ID NO: 2659723 - RNA, 19 nt, Artificial Sequence
  Description of Artificial Sequence: Synthetic oligonucleotide
guagagcuugggcagcccu

SEQ ID NO: 2659724 - RNA, 19 nt, Artificial Sequence
  Description of Artificial Sequence: Synthetic oligonucleotide
ggcuuccucuugcaaaaga

SEQ ID NO: 2659725 - RNA, 19 nt, Artificial Sequence
  Description of Artificial Sequence: Synthetic oligonucleotide
cugcagcaaggcagaggag

SEQ ID NO: 2659726 - RNA, 19 nt, Artificial Sequence
  Description of Artificial Sequence: Synthetic oligonucleotide
ucucggugacgaagucgaa

SEQ ID NO: 2659727 - RNA, 19 nt, Artificial Sequence
  Description of Artificial Sequence: Synthetic oligonucleotide
aggauacgcuuaaauuaaa

SEQ ID NO: 2659728 - RNA, 19 nt, Artificial Sequence
  Description of Artificial Sequence: Synthetic oligonucleotide
acgggaccgaagagacggc

SEQ ID NO: 2659729 - RNA, 19 nt, Artificial Sequence
  Description of Artificial Sequence: Synthetic oligonucleotide
ucgcggcucaacugcucac

SEQ ID NO: 2659730 - RNA, 19 nt, Artificial Sequence
  Description of Artificial Sequence: Synthetic oligonucleotide
ggaagggcuaaggcagaag

SEQ ID NO: 2659731 - RNA, 19 nt, Artificial Sequence
  Description of Artificial Sequence: Synthetic oligonucleotide
cgcuuaaauuaaaacacaa

SEQ ID NO: 2659732 - RNA, 19 nt, Artificial Sequence
  Description of Artificial Sequence: Synthetic oligonucleotide
uuguccccucccaggucgu

SEQ ID NO: 2659733 - RNA, 19 nt, Artificial Sequence
  Description of Artificial Sequence: Synthetic oligonucleotide
gaaaucugucaggcucguc

SEQ ID NO: 2659734 - RNA, 19 nt, Artificial Sequence
  Description of Artificial Sequence: Synthetic oligonucleotide
uuccaccguucucgggccu

SEQ ID NO: 2659735 - RNA, 19 nt, Artificial Sequence
  Description of Artificial Sequence: Synthetic oligonucleotide
uggcacgggucggacguca

SEQ ID NO: 2659736 - RNA, 19 nt, Artificial Sequence
  Description of Artificial Sequence: Synthetic oligonucleotide
gcagcccuaggucccaaac

SEQ ID NO: 2659737 - RNA, 19 nt, Artificial Sequence
  Description of Artificial Sequence: Synthetic oligonucleotide
cacauuagggcuuccucuu

SEQ ID NO: 2659738 - RNA, 19 nt, Artificial Sequence
  Description of Artificial Sequence: Synthetic oligonucleotide
aggugcugggccgcuuguc

SEQ ID NO: 2659739 - RNA, 19 nt, Artificial Sequence
  Description of Artificial Sequence: Synthetic oligonucleotide
agggcaggcagaguauaua

SEQ ID NO: 2659740 - RNA, 19 nt, Artificial Sequence
  Description of Artificial Sequence: Synthetic oligonucleotide
aaagaccagccggcgcuua

SEQ ID NO: 2659741 - RNA, 19 nt, Artificial Sequence
  Description of Artificial Sequence: Synthetic oligonucleotide
gguuccggguccaccgggg

SEQ ID NO: 2659742 - RNA, 19 nt, Artificial Sequence
  Description of Artificial Sequence: Synthetic oligonucleotide
caaacgcgcucccaaacau

SEQ ID NO: 2659743 - RNA, 19 nt, Artificial Sequence
  Description of Artificial Sequence: Synthetic oligonucleotide
gucggacgucaucgggacc

SEQ ID NO: 2659744 - RNA, 19 nt, Artificial Sequence
  Description of Artificial Sequence: Synthetic oligonucleotide
acuguccacgggaccgaag

SEQ ID NO: 2659745 - RNA, 19 nt, Artificial Sequence
  Description of Artificial Sequence: Synthetic oligonucleotide
ugagagguuccggguccac

SEQ ID NO: 2659746 - RNA, 19 nt, Artificial Sequence
  Description of Artificial Sequence: Synthetic oligonucleotide
gcgacagggccacaugguc

SEQ ID NO: 2659747 - RNA, 19 nt, Artificial Sequence
  Description of Artificial Sequence: Synthetic oligonucleotide
gccgcuuguccccucccag

SEQ ID NO: 2659748 - RNA, 19 nt, Artificial Sequence
  Description of Artificial Sequence: Synthetic oligonucleotide
aggaagggcuaaggcagaa

SEQ ID NO: 2659749 - RNA, 19 nt, Artificial Sequence
  Description of Artificial Sequence: Synthetic oligonucleotide
cagcaaggcagaggaggug

SEQ ID NO: 2659750 - RNA, 19 nt, Artificial Sequence
  Description of Artificial Sequence: Synthetic oligonucleotide
accagccggcgcuuagaau

SEQ ID NO: 2659751 - RNA, 19 nt, Artificial Sequence
  Description of Artificial Sequence: Synthetic oligonucleotide
cccaaacgcgcucccaaac

SEQ ID NO: 2659752 - RNA, 19 nt, Artificial Sequence
  Description of Artificial Sequence: Synthetic oligonucleotide
agagugcaggacagcgaca

SEQ ID NO: 2659753 - RNA, 19 nt, Artificial Sequence
  Description of Artificial Sequence: Synthetic oligonucleotide
agaccagccggcgcuuaga

SEQ ID NO: 2659754 - RNA, 19 nt, Artificial Sequence
  Description of Artificial Sequence: Synthetic oligonucleotide
gacggcggcacaccuugcu

SEQ ID NO: 2659755 - RNA, 19 nt, Artificial Sequence
  Description of Artificial Sequence: Synthetic oligonucleotide
aggcucgucugccuccguu

SEQ ID NO: 2659756 - RNA, 19 nt, Artificial Sequence
  Description of Artificial Sequence: Synthetic oligonucleotide
gcucccaaacauaguugcc

SEQ ID NO: 2659757 - RNA, 19 nt, Artificial Sequence
  Description of Artificial Sequence: Synthetic oligonucleotide
cagccggcgcuuagaauga

SEQ ID NO: 2659758 - RNA, 19 nt, Artificial Sequence
  Description of Artificial Sequence: Synthetic oligonucleotide
uccaccguucucgggccuc

SEQ ID NO: 2659759 - RNA, 19 nt, Artificial Sequence
  Description of Artificial Sequence: Synthetic oligonucleotide
agacggcggcacaccuugc

SEQ ID NO: 2659760 - RNA, 19 nt, Artificial Sequence
  Description of Artificial Sequence: Synthetic oligonucleotide
ccuugcuccuguguggcac

SEQ ID NO: 2659761 - RNA, 19 nt, Artificial Sequence
  Description of Artificial Sequence: Synthetic oligonucleotide
caccagagugcaggacagc

SEQ ID NO: 2659762 - RNA, 19 nt, Artificial Sequence
  Description of Artificial Sequence: Synthetic oligonucleotide
accccugcagcaaggcaga

SEQ ID NO: 2659763 - RNA, 19 nt, Artificial Sequence
  Description of Artificial Sequence: Synthetic oligonucleotide
ccgcuuguccccucccagg

SEQ ID NO: 2659764 - RNA, 19 nt, Artificial Sequence
  Description of Artificial Sequence: Synthetic oligonucleotide
gcggcucaacugcucacug

SEQ ID NO: 2659765 - RNA, 19 nt, Artificial Sequence
  Description of Artificial Sequence: Synthetic oligonucleotide
gggccgugagacaccagag

SEQ ID NO: 2659766 - RNA, 19 nt, Artificial Sequence
  Description of Artificial Sequence: Synthetic oligonucleotide
uggaggcagccggccauga

SEQ ID NO: 2659767 - RNA, 19 nt, Artificial Sequence
  Description of Artificial Sequence: Synthetic oligonucleotide
gcccuaggucccaaacgcg

SEQ ID NO: 2659768 - RNA, 19 nt, Artificial Sequence
  Description of Artificial Sequence: Synthetic oligonucleotide
ccaaacgcgcucccaaaca

SEQ ID NO: 2659769 - RNA, 19 nt, Artificial Sequence
  Description of Artificial Sequence: Synthetic oligonucleotide
accgcgggacccagggcuc

SEQ ID NO: 2659770 - RNA, 19 nt, Artificial Sequence
  Description of Artificial Sequence: Synthetic oligonucleotide
gcgcuuagaaugauagaaa

SEQ ID NO: 2659771 - RNA, 19 nt, Artificial Sequence
  Description of Artificial Sequence: Synthetic oligonucleotide
caccgcgggacccagggcu

SEQ ID NO: 2659772 - RNA, 19 nt, Artificial Sequence
  Description of Artificial Sequence: Synthetic oligonucleotide
ggaggcagccggccaugag

SEQ ID NO: 2659773 - RNA, 19 nt, Artificial Sequence
  Description of Artificial Sequence: Synthetic oligonucleotide
gcgcucccaaacauaguug

SEQ ID NO: 2659774 - RNA, 19 nt, Artificial Sequence
  Description of Artificial Sequence: Synthetic oligonucleotide
cgucucggugacgaagucg

SEQ ID NO: 2659775 - RNA, 19 nt, Artificial Sequence
  Description of Artificial Sequence: Synthetic oligonucleotide
cccaaacauaguugcccuc

SEQ ID NO: 2659776 - RNA, 19 nt, Artificial Sequence
  Description of Artificial Sequence: Synthetic oligonucleotide
gacagcgacagggccacau

SEQ ID NO: 2659777 - RNA, 19 nt, Artificial Sequence
  Description of Artificial Sequence: Synthetic oligonucleotide
cuccagcggcgucucggug

SEQ ID NO: 2659778 - RNA, 19 nt, Artificial Sequence
  Description of Artificial Sequence: Synthetic oligonucleotide
ggccaugagcgcaucacaa

SEQ ID NO: 2659779 - RNA, 19 nt, Artificial Sequence
  Description of Artificial Sequence: Synthetic oligonucleotide
gguagagcuugggcagccc

SEQ ID NO: 2659780 - RNA, 19 nt, Artificial Sequence
  Description of Artificial Sequence: Synthetic oligonucleotide
gacccagggcucagguaga

SEQ ID NO: 2659781 - RNA, 19 nt, Artificial Sequence
  Description of Artificial Sequence: Synthetic oligonucleotide
gggucggacgucaucggga

SEQ ID NO: 2659782 - RNA, 19 nt, Artificial Sequence
  Description of Artificial Sequence: Synthetic oligonucleotide
cggcggcacaccuugcucc

SEQ ID NO: 2659783 - RNA, 19 nt, Artificial Sequence
  Description of Artificial Sequence: Synthetic oligonucleotide
cccugagagguuccggguc

SEQ ID NO: 2659784 - RNA, 19 nt, Artificial Sequence
  Description of Artificial Sequence: Synthetic oligonucleotide
cgugagacaccagagugca

SEQ ID NO: 2659785 - RNA, 19 nt, Artificial Sequence
  Description of Artificial Sequence: Synthetic oligonucleotide
caaucgcggcucaacugcu

SEQ ID NO: 2659786 - RNA, 19 nt, Artificial Sequence
  Description of Artificial Sequence: Synthetic oligonucleotide
ggcacaccuugcuccugug

SEQ ID NO: 2659787 - RNA, 19 nt, Artificial Sequence
  Description of Artificial Sequence: Synthetic oligonucleotide
cgcaucacaaucgcggcuc

SEQ ID NO: 2659788 - RNA, 19 nt, Artificial Sequence
  Description of Artificial Sequence: Synthetic oligonucleotide
ugggcacauuagggcuucc

SEQ ID NO: 2659789 - RNA, 19 nt, Artificial Sequence
  Description of Artificial Sequence: Synthetic oligonucleotide
ggccuccuggcccacugca

SEQ ID NO: 2659790 - RNA, 19 nt, Artificial Sequence
  Description of Artificial Sequence: Synthetic oligonucleotide
gcgacccugagagguuccg

SEQ ID NO: 2659791 - RNA, 19 nt, Artificial Sequence
  Description of Artificial Sequence: Synthetic oligonucleotide
aguugcccuccagcggcgu

SEQ ID NO: 2659792 - RNA, 19 nt, Artificial Sequence
  Description of Artificial Sequence: Synthetic oligonucleotide
ccacgggaccgaagagacg

SEQ ID NO: 2659793 - RNA, 19 nt, Artificial Sequence
  Description of Artificial Sequence: Synthetic oligonucleotide
agagacggcggcacaccuu

SEQ ID NO: 2659794 - RNA, 19 nt, Artificial Sequence
  Description of Artificial Sequence: Synthetic oligonucleotide
gccuccugugggcacauua

SEQ ID NO: 2659795 - RNA, 19 nt, Artificial Sequence
  Description of Artificial Sequence: Synthetic oligonucleotide
cgcuuagaaugauagaaau

SEQ ID NO: 2659796 - RNA, 19 nt, Artificial Sequence
  Description of Artificial Sequence: Synthetic oligonucleotide
gcaucacaaucgcggcuca

SEQ ID NO: 2659797 - RNA, 19 nt, Artificial Sequence
  Description of Artificial Sequence: Synthetic oligonucleotide
cgaagagacggcggcacac

SEQ ID NO: 2659798 - RNA, 19 nt, Artificial Sequence
  Description of Artificial Sequence: Synthetic oligonucleotide
ccuggcccacugcagaaga

SEQ ID NO: 2659799 - RNA, 19 nt, Artificial Sequence
  Description of Artificial Sequence: Synthetic oligonucleotide
gaggugcugggccgcuugu

SEQ ID NO: 2659800 - RNA, 19 nt, Artificial Sequence
  Description of Artificial Sequence: Synthetic oligonucleotide
ccagcggcgucucggugac

SEQ ID NO: 2659801 - RNA, 19 nt, Artificial Sequence
  Description of Artificial Sequence: Synthetic oligonucleotide
ccggccaugagcgcaucac

SEQ ID NO: 2659802 - RNA, 19 nt, Artificial Sequence
  Description of Artificial Sequence: Synthetic oligonucleotide
ccuguguggcacgggucgg

SEQ ID NO: 2659803 - RNA, 19 nt, Artificial Sequence
  Description of Artificial Sequence: Synthetic oligonucleotide
gagggcaggcagaguauau

SEQ ID NO: 2659804 - RNA, 19 nt, Artificial Sequence
  Description of Artificial Sequence: Synthetic oligonucleotide
gggcuuccucuugcaaaag

SEQ ID NO: 2659805 - RNA, 19 nt, Artificial Sequence
  Description of Artificial Sequence: Synthetic oligonucleotide
cuguguggcacgggucgga

SEQ ID NO: 2659806 - RNA, 19 nt, Artificial Sequence
  Description of Artificial Sequence: Synthetic oligonucleotide
cguuugcgacccugagagg

SEQ ID NO: 2659807 - RNA, 19 nt, Artificial Sequence
  Description of Artificial Sequence: Synthetic oligonucleotide
cagggccgugagacaccag

SEQ ID NO: 2659808 - RNA, 19 nt, Artificial Sequence
  Description of Artificial Sequence: Synthetic oligonucleotide
gcuuguccccucccagguc

SEQ ID NO: 2659809 - RNA, 19 nt, Artificial Sequence
  Description of Artificial Sequence: Synthetic oligonucleotide
cgggucggacgucaucggg

SEQ ID NO: 2659810 - RNA, 19 nt, Artificial Sequence
  Description of Artificial Sequence: Synthetic oligonucleotide
ggccgugagacaccagagu

SEQ ID NO: 2659811 - RNA, 19 nt, Artificial Sequence
  Description of Artificial Sequence: Synthetic oligonucleotide
gccuccguuugcgacccug

SEQ ID NO: 2659812 - RNA, 19 nt, Artificial Sequence
  Description of Artificial Sequence: Synthetic oligonucleotide
gaagagggugaggccuccu

SEQ ID NO: 2659813 - RNA, 19 nt, Artificial Sequence
  Description of Artificial Sequence: Synthetic oligonucleotide
cgggaccgaagagacggcg

SEQ ID NO: 2659814 - RNA, 19 nt, Artificial Sequence
  Description of Artificial Sequence: Synthetic oligonucleotide
ggcagaguauauacaggau

SEQ ID NO: 2659815 - RNA, 19 nt, Artificial Sequence
  Description of Artificial Sequence: Synthetic oligonucleotide
ggagggcaggcagaguaua

SEQ ID NO: 2659816 - RNA, 19 nt, Artificial Sequence
  Description of Artificial Sequence: Synthetic oligonucleotide
ggcgucucggugacgaagu

SEQ ID NO: 2659817 - RNA, 19 nt, Artificial Sequence
  Description of Artificial Sequence: Synthetic oligonucleotide
gccaugagcgcaucacaau

SEQ ID NO: 2659818 - RNA, 19 nt, Artificial Sequence
  Description of Artificial Sequence: Synthetic oligonucleotide
acgcgcucccaaacauagu

SEQ ID NO: 2659819 - RNA, 19 nt, Artificial Sequence
  Description of Artificial Sequence: Synthetic oligonucleotide
caucacaaucgcggcucaa

SEQ ID NO: 2659820 - RNA, 19 nt, Artificial Sequence
  Description of Artificial Sequence: Synthetic oligonucleotide
agccggccaugagcgcauc

SEQ ID NO: 2659821 - RNA, 19 nt, Artificial Sequence
  Description of Artificial Sequence: Synthetic oligonucleotide
ccuccguuugcgacccuga

SEQ ID NO: 2659822 - RNA, 19 nt, Artificial Sequence
  Description of Artificial Sequence: Synthetic oligonucleotide
ggucccaaacgcgcuccca

SEQ ID NO: 2659823 - RNA, 19 nt, Artificial Sequence
  Description of Artificial Sequence: Synthetic oligonucleotide
gcacgggucggacgucauc

SEQ ID NO: 2659824 - RNA, 19 nt, Artificial Sequence
  Description of Artificial Sequence: Synthetic oligonucleotide
ggcggcacaccuugcuccu

SEQ ID NO: 2659825 - RNA, 19 nt, Artificial Sequence
  Description of Artificial Sequence: Synthetic oligonucleotide
gcgucucggugacgaaguc

SEQ ID NO: 2659826 - RNA, 19 nt, Artificial Sequence
  Description of Artificial Sequence: Synthetic oligonucleotide
gggccgcuuguccccuccc

SEQ ID NO: 2659827 - RNA, 19 nt, Artificial Sequence
  Description of Artificial Sequence: Synthetic oligonucleotide
cgacccugagagguuccgg

SEQ ID NO: 2659828 - RNA, 19 nt, Artificial Sequence
  Description of Artificial Sequence: Synthetic oligonucleotide
ugccuccguuugcgacccu

SEQ ID NO: 2659829 - RNA, 19 nt, Artificial Sequence
  Description of Artificial Sequence: Synthetic oligonucleotide
caucgggacccgacauggu

SEQ ID NO: 2659830 - RNA, 19 nt, Artificial Sequence
  Description of Artificial Sequence: Synthetic oligonucleotide
ccaccguucucgggccucc

SEQ ID NO: 2659831 - RNA, 19 nt, Artificial Sequence
  Description of Artificial Sequence: Synthetic oligonucleotide
cugggccgcuuguccccuc

SEQ ID NO: 2659832 - RNA, 19 nt, Artificial Sequence
  Description of Artificial Sequence: Synthetic oligonucleotide
gcgcaucacaaucgcggcu

SEQ ID NO: 2659833 - RNA, 19 nt, Artificial Sequence
  Description of Artificial Sequence: Synthetic oligonucleotide
agccggcgcuuagaaugau

SEQ ID NO: 2659834 - RNA, 19 nt, Artificial Sequence
  Description of Artificial Sequence: Synthetic oligonucleotide
ggcucgucugccuccguuu

SEQ ID NO: 2659835 - RNA, 19 nt, Artificial Sequence
  Description of Artificial Sequence: Synthetic oligonucleotide
cggcgucucggugacgaag

SEQ ID NO: 2659836 - RNA, 19 nt, Artificial Sequence
  Description of Artificial Sequence: Synthetic oligonucleotide
aggccuccugugggcacau

SEQ ID NO: 2659837 - RNA, 19 nt, Artificial Sequence
  Description of Artificial Sequence: Synthetic oligonucleotide
cacuguccacgggaccgaa

SEQ ID NO: 2659838 - RNA, 19 nt, Artificial Sequence
  Description of Artificial Sequence: Synthetic oligonucleotide
ggcagcccuaggucccaaa

SEQ ID NO: 2659839 - RNA, 19 nt, Artificial Sequence
  Description of Artificial Sequence: Synthetic oligonucleotide
guggcacgggucggacguc

SEQ ID NO: 2659840 - RNA, 19 nt, Artificial Sequence
  Description of Artificial Sequence: Synthetic oligonucleotide
ccgaagagacggcggcaca

SEQ ID NO: 2659841 - RNA, 19 nt, Artificial Sequence
  Description of Artificial Sequence: Synthetic oligonucleotide
ccaccgcgggacccagggc

SEQ ID NO: 2659842 - RNA, 19 nt, Artificial Sequence
  Description of Artificial Sequence: Synthetic oligonucleotide
gccggccaugagcgcauca

SEQ ID NO: 2659843 - RNA, 19 nt, Artificial Sequence
  Description of Artificial Sequence: Synthetic oligonucleotide
ccccucccaggucgucacg

SEQ ID NO: 2659844 - RNA, 19 nt, Artificial Sequence
  Description of Artificial Sequence: Synthetic oligonucleotide
cgcgcucccaaacauaguu

SEQ ID NO: 2659845 - RNA, 19 nt, Artificial Sequence
  Description of Artificial Sequence: Synthetic oligonucleotide
gggcacauuagggcuuccu

SEQ ID NO: 2659846 - RNA, 19 nt, Artificial Sequence
  Description of Artificial Sequence: Synthetic oligonucleotide
cagcggcgucucggugacg

SEQ ID NO: 2659847 - RNA, 19 nt, Artificial Sequence
  Description of Artificial Sequence: Synthetic oligonucleotide
gggcugaccccugcagcaa

SEQ ID NO: 2659848 - RNA, 19 nt, Artificial Sequence
  Description of Artificial Sequence: Synthetic oligonucleotide
gcccuccagcggcgucucg

SEQ ID NO: 2659849 - RNA, 19 nt, Artificial Sequence
  Description of Artificial Sequence: Synthetic oligonucleotide
cggcgcuuagaaugauaga

SEQ ID NO: 2659850 - RNA, 19 nt, Artificial Sequence
  Description of Artificial Sequence: Synthetic oligonucleotide
ggacgucaucgggacccga

SEQ ID NO: 2659851 - RNA, 19 nt, Artificial Sequence
  Description of Artificial Sequence: Synthetic oligonucleotide
gcggcacaccuugcuccug

SEQ ID NO: 2659852 - RNA, 19 nt, Artificial Sequence
  Description of Artificial Sequence: Synthetic oligonucleotide
cggacgucaucgggacccg

SEQ ID NO: 2659853 - RNA, 19 nt, Artificial Sequence
  Description of Artificial Sequence: Synthetic oligonucleotide
gccggcgcuuagaaugaua

SEQ ID NO: 2659854 - RNA, 19 nt, Artificial Sequence
  Description of Artificial Sequence: Synthetic oligonucleotide
ccaggucgucacggccacc

SEQ ID NO: 2659855 - RNA, 19 nt, Artificial Sequence
  Description of Artificial Sequence: Synthetic oligonucleotide
cgcuuguccccucccaggu

SEQ ID NO: 2659856 - RNA, 19 nt, Artificial Sequence
  Description of Artificial Sequence: Synthetic oligonucleotide
cgucaucgggacccgacau

SEQ ID NO: 2659857 - RNA, 19 nt, Artificial Sequence
  Description of Artificial Sequence: Synthetic oligonucleotide
cgucugccuccguuugcga

SEQ ID NO: 2659858 - RNA, 19 nt, Artificial Sequence
  Description of Artificial Sequence: Synthetic oligonucleotide
gcggcgucucggugacgaa

SEQ ID NO: 2659859 - RNA, 19 nt, Artificial Sequence
  Description of Artificial Sequence: Synthetic oligonucleotide
cggcucaacugcucacugu

SEQ ID NO: 2659860 - RNA, 19 nt, Artificial Sequence
  Description of Artificial Sequence: Synthetic oligonucleotide
gcugggccgcuuguccccu

SEQ ID NO: 2659861 - RNA, 19 nt, Artificial Sequence
  Description of Artificial Sequence: Synthetic oligonucleotide
cgucacggccaccgcggga

SEQ ID NO: 2659862 - RNA, 19 nt, Artificial Sequence
  Description of Artificial Sequence: Synthetic oligonucleotide
caggcucgucugccuccgu

SEQ ID NO: 2659863 - RNA, 19 nt, Artificial Sequence
  Description of Artificial Sequence: Synthetic oligonucleotide
cggcacaccuugcuccugu

SEQ ID NO: 2659864 - RNA, 19 nt, Artificial Sequence
  Description of Artificial Sequence: Synthetic oligonucleotide
caccguucucgggccuccu

SEQ ID NO: 2659865 - RNA, 19 nt, Artificial Sequence
  Description of Artificial Sequence: Synthetic oligonucleotide
ggacagcgacagggccaca

SEQ ID NO: 2659866 - RNA, 19 nt, Artificial Sequence
  Description of Artificial Sequence: Synthetic oligonucleotide
gggcagcccuaggucccaa

SEQ ID NO: 2659867 - RNA, 19 nt, Artificial Sequence
  Description of Artificial Sequence: Synthetic oligonucleotide
cgcggcucaacugcucacu

SEQ ID NO: 2659868 - RNA, 19 nt, Artificial Sequence
  Description of Artificial Sequence: Synthetic oligonucleotide
ggcacgggucggacgucau

SEQ ID NO: 2659869 - RNA, 19 nt, Artificial Sequence
  Description of Artificial Sequence: Synthetic oligonucleotide
ccgcgggacccagggcuca

SEQ ID NO: 2659870 - RNA, 19 nt, Artificial Sequence
  Description of Artificial Sequence: Synthetic oligonucleotide
cggccaccgcgggacccag

SEQ ID NO: 2659871 - RNA, 19 nt, Artificial Sequence
  Description of Artificial Sequence: Synthetic oligonucleotide
ggccuccugugggcacauu

SEQ ID NO: 2659872 - RNA, 19 nt, Artificial Sequence
  Description of Artificial Sequence: Synthetic oligonucleotide
acacuaauaauacuuaacc

SEQ ID NO: 2659873 - RNA, 19 nt, Artificial Sequence
  Description of Artificial Sequence: Synthetic oligonucleotide
aauauacuaguuuauugac

SEQ ID NO: 2659874 - RNA, 19 nt, Artificial Sequence
  Description of Artificial Sequence: Synthetic oligonucleotide
uuaauuuuaagaauagaca

SEQ ID NO: 2659875 - RNA, 19 nt, Artificial Sequence
  Description of Artificial Sequence: Synthetic oligonucleotide
cuuaauuuuaagaauagac

SEQ ID NO: 2659876 - RNA, 19 nt, Artificial Sequence
  Description of Artificial Sequence: Synthetic oligonucleotide
aagaccucuccuuaaagcc

SEQ ID NO: 2659877 - RNA, 19 nt, Artificial Sequence
  Description of Artificial Sequence: Synthetic oligonucleotide
aauagcaaagcucagugug

SEQ ID NO: 2659878 - RNA, 19 nt, Artificial Sequence
  Description of Artificial Sequence: Synthetic oligonucleotide
aauacuuaacccucucuac

SEQ ID NO: 2659879 - RNA, 19 nt, Artificial Sequence
  Description of Artificial Sequence: Synthetic oligonucleotide
acuaauaauacuuaacccu

SEQ ID NO: 2659880 - RNA, 19 nt, Artificial Sequence
  Description of Artificial Sequence: Synthetic oligonucleotide
uaagaauagacacuaauaa

SEQ ID NO: 2659881 - RNA, 19 nt, Artificial Sequence
  Description of Artificial Sequence: Synthetic oligonucleotide
cuugcuuuacacaaguugg

SEQ ID NO: 2659882 - RNA, 19 nt, Artificial Sequence
  Description of Artificial Sequence: Synthetic oligonucleotide
uauacuaguuuauugacac

SEQ ID NO: 2659883 - RNA, 19 nt, Artificial Sequence
  Description of Artificial Sequence: Synthetic oligonucleotide
uuuauugacaccaguacga

SEQ ID NO: 2659884 - RNA, 19 nt, Artificial Sequence
  Description of Artificial Sequence: Synthetic oligonucleotide
aaaccaaugucauuaucuc

SEQ ID NO: 2659885 - RNA, 19 nt, Artificial Sequence
  Description of Artificial Sequence: Synthetic oligonucleotide
aguuuauugacaccaguac

SEQ ID NO: 2659886 - RNA, 19 nt, Artificial Sequence
  Description of Artificial Sequence: Synthetic oligonucleotide
aacacagcuugcuuuacac

SEQ ID NO: 2659887 - RNA, 19 nt, Artificial Sequence
  Description of Artificial Sequence: Synthetic oligonucleotide
aauaauacuuaacccucuc

SEQ ID NO: 2659888 - RNA, 19 nt, Artificial Sequence
  Description of Artificial Sequence: Synthetic oligonucleotide
ugaauauacuaguuuauug

SEQ ID NO: 2659889 - RNA, 19 nt, Artificial Sequence
  Description of Artificial Sequence: Synthetic oligonucleotide
aaugucauuaucucccucu

SEQ ID NO: 2659890 - RNA, 19 nt, Artificial Sequence
  Description of Artificial Sequence: Synthetic oligonucleotide
gaauauacuaguuuauuga

SEQ ID NO: 2659891 - RNA, 19 nt, Artificial Sequence
  Description of Artificial Sequence: Synthetic oligonucleotide
uuuguauccaagcaagaca

SEQ ID NO: 2659892 - RNA, 19 nt, Artificial Sequence
  Description of Artificial Sequence: Synthetic oligonucleotide
uuaucucccucuaucaagg

SEQ ID NO: 2659893 - RNA, 19 nt, Artificial Sequence
  Description of Artificial Sequence: Synthetic oligonucleotide
aaagcuguugagucgagug

SEQ ID NO: 2659894 - RNA, 19 nt, Artificial Sequence
  Description of Artificial Sequence: Synthetic oligonucleotide
ugaaauaaccccuuggcaa

SEQ ID NO: 2659895 - RNA, 19 nt, Artificial Sequence
  Description of Artificial Sequence: Synthetic oligonucleotide
uuaagaauagacacuaaua

SEQ ID NO: 2659896 - RNA, 19 nt, Artificial Sequence
  Description of Artificial Sequence: Synthetic oligonucleotide
uuuaagaauagacacuaau

SEQ ID NO: 2659897 - RNA, 19 nt, Artificial Sequence
  Description of Artificial Sequence: Synthetic oligonucleotide
guuuauugacaccaguacg

SEQ ID NO: 2659898 - RNA, 19 nt, Artificial Sequence
  Description of Artificial Sequence: Synthetic oligonucleotide
ucuuaaggcggucugacug

SEQ ID NO: 2659899 - RNA, 19 nt, Artificial Sequence
  Description of Artificial Sequence: Synthetic oligonucleotide
agugaaagcaagcacagga

SEQ ID NO: 2659900 - RNA, 19 nt, Artificial Sequence
  Description of Artificial Sequence: Synthetic oligonucleotide
uuguauccaagcaagacac

SEQ ID NO: 2659901 - RNA, 19 nt, Artificial Sequence
  Description of Artificial Sequence: Synthetic oligonucleotide
uuagcuuuuguauccaagc

SEQ ID NO: 2659902 - RNA, 19 nt, Artificial Sequence
  Description of Artificial Sequence: Synthetic oligonucleotide
accaaugucauuaucuccc

SEQ ID NO: 2659903 - RNA, 19 nt, Artificial Sequence
  Description of Artificial Sequence: Synthetic oligonucleotide
gaucaagccagaaacacag

SEQ ID NO: 2659904 - RNA, 19 nt, Artificial Sequence
  Description of Artificial Sequence: Synthetic oligonucleotide
gaaauaaccccuuggcaag

SEQ ID NO: 2659905 - RNA, 19 nt, Artificial Sequence
  Description of Artificial Sequence: Synthetic oligonucleotide
uguuugguaaagcuguuga

SEQ ID NO: 2659906 - RNA, 19 nt, Artificial Sequence
  Description of Artificial Sequence: Synthetic oligonucleotide
aagaauagacacuaauaau

SEQ ID NO: 2659907 - RNA, 19 nt, Artificial Sequence
  Description of Artificial Sequence: Synthetic oligonucleotide
aacucagcucuuuuccagc

SEQ ID NO: 2659908 - RNA, 19 nt, Artificial Sequence
  Description of Artificial Sequence: Synthetic oligonucleotide
ucgagugaaagcaagcaca

SEQ ID NO: 2659909 - RNA, 19 nt, Artificial Sequence
  Description of Artificial Sequence: Synthetic oligonucleotide
cacuaauaauacuuaaccc

SEQ ID NO: 2659910 - RNA, 19 nt, Artificial Sequence
  Description of Artificial Sequence: Synthetic oligonucleotide
auugacaccaguacgacuc

SEQ ID NO: 2659911 - RNA, 19 nt, Artificial Sequence
  Description of Artificial Sequence: Synthetic oligonucleotide
uuuagcuuuuguauccaag

SEQ ID NO: 2659912 - RNA, 19 nt, Artificial Sequence
  Description of Artificial Sequence: Synthetic oligonucleotide
ucucccucuaucaagguca

SEQ ID NO: 2659913 - RNA, 19 nt, Artificial Sequence
  Description of Artificial Sequence: Synthetic oligonucleotide
auuaucucccucuaucaag

SEQ ID NO: 2659914 - RNA, 19 nt, Artificial Sequence
  Description of Artificial Sequence: Synthetic oligonucleotide
auccaagcaagacacuggc

SEQ ID NO: 2659915 - RNA, 19 nt, Artificial Sequence
  Description of Artificial Sequence: Synthetic oligonucleotide
uggaccaaccaccacaccc

SEQ ID NO: 2659916 - RNA, 19 nt, Artificial Sequence
  Description of Artificial Sequence: Synthetic oligonucleotide
uacuaguuuauugacacca

SEQ ID NO: 2659917 - RNA, 19 nt, Artificial Sequence
  Description of Artificial Sequence: Synthetic oligonucleotide
uaauacuuaacccucucua

SEQ ID NO: 2659918 - RNA, 19 nt, Artificial Sequence
  Description of Artificial Sequence: Synthetic oligonucleotide
gaauagacacuaauaauac

SEQ ID NO: 2659919 - RNA, 19 nt, Artificial Sequence
  Description of Artificial Sequence: Synthetic oligonucleotide
gaagaugaucccuggaggc

SEQ ID NO: 2659920 - RNA, 19 nt, Artificial Sequence
  Description of Artificial Sequence: Synthetic oligonucleotide
uacagaggcaggaucaagc

SEQ ID NO: 2659921 - RNA, 19 nt, Artificial Sequence
  Description of Artificial Sequence: Synthetic oligonucleotide
cuaucaaggucauugcuac

SEQ ID NO: 2659922 - RNA, 19 nt, Artificial Sequence
  Description of Artificial Sequence: Synthetic oligonucleotide
ugcuuuagcuuuuguaucc

SEQ ID NO: 2659923 - RNA, 19 nt, Artificial Sequence
  Description of Artificial Sequence: Synthetic oligonucleotide
cuuaaagccugccugugcc

SEQ ID NO: 2659924 - RNA, 19 nt, Artificial Sequence
  Description of Artificial Sequence: Synthetic oligonucleotide
ucuaucaaggucauugcua

SEQ ID NO: 2659925 - RNA, 19 nt, Artificial Sequence
  Description of Artificial Sequence: Synthetic oligonucleotide
aggacaccuaugcugagac

SEQ ID NO: 2659926 - RNA, 19 nt, Artificial Sequence
  Description of Artificial Sequence: Synthetic oligonucleotide
agaauagacacuaauaaua

SEQ ID NO: 2659927 - RNA, 19 nt, Artificial Sequence
  Description of Artificial Sequence: Synthetic oligonucleotide
uuaacccucucuacuggcg

SEQ ID NO: 2659928 - RNA, 19 nt, Artificial Sequence
  Description of Artificial Sequence: Synthetic oligonucleotide
ugagucgagugaaagcaag

SEQ ID NO: 2659929 - RNA, 19 nt, Artificial Sequence
  Description of Artificial Sequence: Synthetic oligonucleotide
cuuuacacaaguuggccug

SEQ ID NO: 2659930 - RNA, 19 nt, Artificial Sequence
  Description of Artificial Sequence: Synthetic oligonucleotide
ucauuaucucccucuauca

SEQ ID NO: 2659931 - RNA, 19 nt, Artificial Sequence
  Description of Artificial Sequence: Synthetic oligonucleotide
auacuaguuuauugacacc

SEQ ID NO: 2659932 - RNA, 19 nt, Artificial Sequence
  Description of Artificial Sequence: Synthetic oligonucleotide
aguacgacucccaggaagc

SEQ ID NO: 2659933 - RNA, 19 nt, Artificial Sequence
  Description of Artificial Sequence: Synthetic oligonucleotide
guagccaggacaccuaugc

SEQ ID NO: 2659934 - RNA, 19 nt, Artificial Sequence
  Description of Artificial Sequence: Synthetic oligonucleotide
accaguacgacucccagga

SEQ ID NO: 2659935 - RNA, 19 nt, Artificial Sequence
  Description of Artificial Sequence: Synthetic oligonucleotide
uaguuuauugacaccagua

SEQ ID NO: 2659936 - RNA, 19 nt, Artificial Sequence
  Description of Artificial Sequence: Synthetic oligonucleotide
uacuuaacccucucuacug

SEQ ID NO: 2659937 - RNA, 19 nt, Artificial Sequence
  Description of Artificial Sequence: Synthetic oligonucleotide
cugguaaauagcaaagcuc

SEQ ID NO: 2659938 - RNA, 19 nt, Artificial Sequence
  Description of Artificial Sequence: Synthetic oligonucleotide
uguugagucgagugaaagc

SEQ ID NO: 2659939 - RNA, 19 nt, Artificial Sequence
  Description of Artificial Sequence: Synthetic oligonucleotide
uuuuguauccaagcaagac

SEQ ID NO: 2659940 - RNA, 19 nt, Artificial Sequence
  Description of Artificial Sequence: Synthetic oligonucleotide
caagaccucuccuuaaagc

SEQ ID NO: 2659941 - RNA, 19 nt, Artificial Sequence
  Description of Artificial Sequence: Synthetic oligonucleotide
ugguaaagcuguugagucg

SEQ ID NO: 2659942 - RNA, 19 nt, Artificial Sequence
  Description of Artificial Sequence: Synthetic oligonucleotide
auagacacuaauaauacuu

SEQ ID NO: 2659943 - RNA, 19 nt, Artificial Sequence
  Description of Artificial Sequence: Synthetic oligonucleotide
cauugcuacaagcaggcug

SEQ ID NO: 2659944 - RNA, 19 nt, Artificial Sequence
  Description of Artificial Sequence: Synthetic oligonucleotide
uaacccucucuacuggcgg

SEQ ID NO: 2659945 - RNA, 19 nt, Artificial Sequence
  Description of Artificial Sequence: Synthetic oligonucleotide
uaacucagcucuuuuccag

SEQ ID NO: 2659946 - RNA, 19 nt, Artificial Sequence
  Description of Artificial Sequence: Synthetic oligonucleotide
aauaaccccuuggcaaggc

SEQ ID NO: 2659947 - RNA, 19 nt, Artificial Sequence
  Description of Artificial Sequence: Synthetic oligonucleotide
acuuaacccucucuacugg

SEQ ID NO: 2659948 - RNA, 19 nt, Artificial Sequence
  Description of Artificial Sequence: Synthetic oligonucleotide
auacuuaacccucucuacu

SEQ ID NO: 2659949 - RNA, 19 nt, Artificial Sequence
  Description of Artificial Sequence: Synthetic oligonucleotide
aagagggcagagcagggca

SEQ ID NO: 2659950 - RNA, 19 nt, Artificial Sequence
  Description of Artificial Sequence: Synthetic oligonucleotide
agaaaccaaugucauuauc

SEQ ID NO: 2659951 - RNA, 19 nt, Artificial Sequence
  Description of Artificial Sequence: Synthetic oligonucleotide
uuuuccagcccacuuaauu

SEQ ID NO: 2659952 - RNA, 19 nt, Artificial Sequence
  Description of Artificial Sequence: Synthetic oligonucleotide
auaauacuuaacccucucu

SEQ ID NO: 2659953 - RNA, 19 nt, Artificial Sequence
  Description of Artificial Sequence: Synthetic oligonucleotide
uugcuuuacacaaguuggc

SEQ ID NO: 2659954 - RNA, 19 nt, Artificial Sequence
  Description of Artificial Sequence: Synthetic oligonucleotide
uagacacuaauaauacuua

SEQ ID NO: 2659955 - RNA, 19 nt, Artificial Sequence
  Description of Artificial Sequence: Synthetic oligonucleotide
aaggucauugcuacaagca

SEQ ID NO: 2659956 - RNA, 19 nt, Artificial Sequence
  Description of Artificial Sequence: Synthetic oligonucleotide
agacacuggcaucuguaac

SEQ ID NO: 2659957 - RNA, 19 nt, Artificial Sequence
  Description of Artificial Sequence: Synthetic oligonucleotide
guugagucgagugaaagca

SEQ ID NO: 2659958 - RNA, 19 nt, Artificial Sequence
  Description of Artificial Sequence: Synthetic oligonucleotide
aacggcagggacuuuucca

SEQ ID NO: 2659959 - RNA, 19 nt, Artificial Sequence
  Description of Artificial Sequence: Synthetic oligonucleotide
ucuuuuccagcccacuuaa

SEQ ID NO: 2659960 - RNA, 19 nt, Artificial Sequence
  Description of Artificial Sequence: Synthetic oligonucleotide
aaauaaccccuuggcaagg

SEQ ID NO: 2659961 - RNA, 19 nt, Artificial Sequence
  Description of Artificial Sequence: Synthetic oligonucleotide
gucauuaucucccucuauc

SEQ ID NO: 2659962 - RNA, 19 nt, Artificial Sequence
  Description of Artificial Sequence: Synthetic oligonucleotide
ucagcucuuuuccagccca

SEQ ID NO: 2659963 - RNA, 19 nt, Artificial Sequence
  Description of Artificial Sequence: Synthetic oligonucleotide
auaaccccuuggcaaggcc

SEQ ID NO: 2659964 - RNA, 19 nt, Artificial Sequence
  Description of Artificial Sequence: Synthetic oligonucleotide
uaaccccuuggcaaggccc

SEQ ID NO: 2659965 - RNA, 19 nt, Artificial Sequence
  Description of Artificial Sequence: Synthetic oligonucleotide
aaacacagcuugcuuuaca

SEQ ID NO: 2659966 - RNA, 19 nt, Artificial Sequence
  Description of Artificial Sequence: Synthetic oligonucleotide
uuucuugaauauacuaguu

SEQ ID NO: 2659967 - RNA, 19 nt, Artificial Sequence
  Description of Artificial Sequence: Synthetic oligonucleotide
guuugguaaagcuguugag

SEQ ID NO: 2659968 - RNA, 19 nt, Artificial Sequence
  Description of Artificial Sequence: Synthetic oligonucleotide
cuuaaggcggucugacugc

SEQ ID NO: 2659969 - RNA, 19 nt, Artificial Sequence
  Description of Artificial Sequence: Synthetic oligonucleotide
uuuuccaagaccucuccuu

SEQ ID NO: 2659970 - RNA, 19 nt, Artificial Sequence
  Description of Artificial Sequence: Synthetic oligonucleotide
uuuccagcccacuuaauuu

SEQ ID NO: 2659971 - RNA, 19 nt, Artificial Sequence
  Description of Artificial Sequence: Synthetic oligonucleotide
gcuacaagcaggcuggacc

SEQ ID NO: 2659972 - RNA, 19 nt, Artificial Sequence
  Description of Artificial Sequence: Synthetic oligonucleotide
aauacagcugagguagcca

SEQ ID NO: 2659973 - RNA, 19 nt, Artificial Sequence
  Description of Artificial Sequence: Synthetic oligonucleotide
cuucccuacaguauggcca

SEQ ID NO: 2659974 - RNA, 19 nt, Artificial Sequence
  Description of Artificial Sequence: Synthetic oligonucleotide
agcccacuuaauuuuaaga

SEQ ID NO: 2659975 - RNA, 19 nt, Artificial Sequence
  Description of Artificial Sequence: Synthetic oligonucleotide
ugcuuuacacaaguuggcc

SEQ ID NO: 2659976 - RNA, 19 nt, Artificial Sequence
  Description of Artificial Sequence: Synthetic oligonucleotide
gcaugcaggacccaagagg

SEQ ID NO: 2659977 - RNA, 19 nt, Artificial Sequence
  Description of Artificial Sequence: Synthetic oligonucleotide
agcuuuuguauccaagcaa

SEQ ID NO: 2659978 - RNA, 19 nt, Artificial Sequence
  Description of Artificial Sequence: Synthetic oligonucleotide
uuuacacaaguuggccugg

SEQ ID NO: 2659979 - RNA, 19 nt, Artificial Sequence
  Description of Artificial Sequence: Synthetic oligonucleotide
gacccaagagggcagagca

SEQ ID NO: 2659980 - RNA, 19 nt, Artificial Sequence
  Description of Artificial Sequence: Synthetic oligonucleotide
uuuuaagaauagacacuaa

SEQ ID NO: 2659981 - RNA, 19 nt, Artificial Sequence
  Description of Artificial Sequence: Synthetic oligonucleotide
gcuugcuuuacacaaguug

SEQ ID NO: 2659982 - RNA, 19 nt, Artificial Sequence
  Description of Artificial Sequence: Synthetic oligonucleotide
acaggggagaaaccaaugu

SEQ ID NO: 2659983 - RNA, 19 nt, Artificial Sequence
  Description of Artificial Sequence: Synthetic oligonucleotide
cuuaacccucucuacuggc

SEQ ID NO: 2659984 - RNA, 19 nt, Artificial Sequence
  Description of Artificial Sequence: Synthetic oligonucleotide
uuuccaagaccucuccuua

SEQ ID NO: 2659985 - RNA, 19 nt, Artificial Sequence
  Description of Artificial Sequence: Synthetic oligonucleotide
agcucaguguguuugguaa

SEQ ID NO: 2659986 - RNA, 19 nt, Artificial Sequence
  Description of Artificial Sequence: Synthetic oligonucleotide
aucucccucuaucaagguc

SEQ ID NO: 2659987 - RNA, 19 nt, Artificial Sequence
  Description of Artificial Sequence: Synthetic oligonucleotide
caaagcucaguguguuugg

SEQ ID NO: 2659988 - RNA, 19 nt, Artificial Sequence
  Description of Artificial Sequence: Synthetic oligonucleotide
gucauugcuacaagcaggc

SEQ ID NO: 2659989 - RNA, 19 nt, Artificial Sequence
  Description of Artificial Sequence: Synthetic oligonucleotide
agaaacacagcuugcuuua

SEQ ID NO: 2659990 - RNA, 19 nt, Artificial Sequence
  Description of Artificial Sequence: Synthetic oligonucleotide
acuuaauuuuaagaauaga

SEQ ID NO: 2659991 - RNA, 19 nt, Artificial Sequence
  Description of Artificial Sequence: Synthetic oligonucleotide
caguacgacucccaggaag

SEQ ID NO: 2659992 - RNA, 19 nt, Artificial Sequence
  Description of Artificial Sequence: Synthetic oligonucleotide
acgacucccaggaagcccc

SEQ ID NO: 2659993 - RNA, 19 nt, Artificial Sequence
  Description of Artificial Sequence: Synthetic oligonucleotide
ugcaugcaggacccaagag

SEQ ID NO: 2659994 - RNA, 19 nt, Artificial Sequence
  Description of Artificial Sequence: Synthetic oligonucleotide
uugaauauacuaguuuauu

SEQ ID NO: 2659995 - RNA, 19 nt, Artificial Sequence
  Description of Artificial Sequence: Synthetic oligonucleotide
acuggcaucuguaacucag

SEQ ID NO: 2659996 - RNA, 19 nt, Artificial Sequence
  Description of Artificial Sequence: Synthetic oligonucleotide
ccugaaauaaccccuuggc

SEQ ID NO: 2659997 - RNA, 19 nt, Artificial Sequence
  Description of Artificial Sequence: Synthetic oligonucleotide
agcaggcuggaccaaccac

SEQ ID NO: 2659998 - RNA, 19 nt, Artificial Sequence
  Description of Artificial Sequence: Synthetic oligonucleotide
auauacuaguuuauugaca

SEQ ID NO: 2659999 - RNA, 19 nt, Artificial Sequence
  Description of Artificial Sequence: Synthetic oligonucleotide
cacacggcugguaaauagc

SEQ ID NO: 2660000 - RNA, 19 nt, Artificial Sequence
  Description of Artificial Sequence: Synthetic oligonucleotide
ugagguagccaggacaccu

SEQ ID NO: 2660001 - RNA, 19 nt, Artificial Sequence
  Description of Artificial Sequence: Synthetic oligonucleotide
cacaaguuggccuggcuuc

SEQ ID NO: 2660002 - RNA, 19 nt, Artificial Sequence
  Description of Artificial Sequence: Synthetic oligonucleotide
uuaaagccugccugugccc

SEQ ID NO: 2660003 - RNA, 19 nt, Artificial Sequence
  Description of Artificial Sequence: Synthetic oligonucleotide
cucacggugaacggcaggg

SEQ ID NO: 2660004 - RNA, 19 nt, Artificial Sequence
  Description of Artificial Sequence: Synthetic oligonucleotide
gaauacagcugagguagcc

SEQ ID NO: 2660005 - RNA, 19 nt, Artificial Sequence
  Description of Artificial Sequence: Synthetic oligonucleotide
uggcaucuguaacucagcu

SEQ ID NO: 2660006 - RNA, 19 nt, Artificial Sequence
  Description of Artificial Sequence: Synthetic oligonucleotide
gugcacugcaugcaggacc

SEQ ID NO: 2660007 - RNA, 19 nt, Artificial Sequence
  Description of Artificial Sequence: Synthetic oligonucleotide
uggaggaugggcucuucug

SEQ ID NO: 2660008 - RNA, 19 nt, Artificial Sequence
  Description of Artificial Sequence: Synthetic oligonucleotide
ggucauugcuacaagcagg

SEQ ID NO: 2660009 - RNA, 19 nt, Artificial Sequence
  Description of Artificial Sequence: Synthetic oligonucleotide
cuggcuucccuacaguaug

SEQ ID NO: 2660010 - RNA, 19 nt, Artificial Sequence
  Description of Artificial Sequence: Synthetic oligonucleotide
cugcuuuagcuuuuguauc

SEQ ID NO: 2660011 - RNA, 19 nt, Artificial Sequence
  Description of Artificial Sequence: Synthetic oligonucleotide
aucaaggucauugcuacaa

SEQ ID NO: 2660012 - RNA, 19 nt, Artificial Sequence
  Description of Artificial Sequence: Synthetic oligonucleotide
cugaaauaaccccuuggca

SEQ ID NO: 2660013 - RNA, 19 nt, Artificial Sequence
  Description of Artificial Sequence: Synthetic oligonucleotide
ggagaaaccaaugucauua

SEQ ID NO: 2660014 - RNA, 19 nt, Artificial Sequence
  Description of Artificial Sequence: Synthetic oligonucleotide
gcaucuguaacucagcucu

SEQ ID NO: 2660015 - RNA, 19 nt, Artificial Sequence
  Description of Artificial Sequence: Synthetic oligonucleotide
gucgagugaaagcaagcac

SEQ ID NO: 2660016 - RNA, 19 nt, Artificial Sequence
  Description of Artificial Sequence: Synthetic oligonucleotide
ucuguaacucagcucuuuu

SEQ ID NO: 2660017 - RNA, 19 nt, Artificial Sequence
  Description of Artificial Sequence: Synthetic oligonucleotide
agaccucacggugaacggc

SEQ ID NO: 2660018 - RNA, 19 nt, Artificial Sequence
  Description of Artificial Sequence: Synthetic oligonucleotide
aaggcggucugacugcuuu

SEQ ID NO: 2660019 - RNA, 19 nt, Artificial Sequence
  Description of Artificial Sequence: Synthetic oligonucleotide
uccaagaccucuccuuaaa

SEQ ID NO: 2660020 - RNA, 19 nt, Artificial Sequence
  Description of Artificial Sequence: Synthetic oligonucleotide
cuggaggcuacagaggcag

SEQ ID NO: 2660021 - RNA, 19 nt, Artificial Sequence
  Description of Artificial Sequence: Synthetic oligonucleotide
gacaccuaugcugagaccu

SEQ ID NO: 2660022 - RNA, 19 nt, Artificial Sequence
  Description of Artificial Sequence: Synthetic oligonucleotide
agucgagugaaagcaagca

SEQ ID NO: 2660023 - RNA, 19 nt, Artificial Sequence
  Description of Artificial Sequence: Synthetic oligonucleotide
uugacaccaguacgacucc

SEQ ID NO: 2660024 - RNA, 19 nt, Artificial Sequence
  Description of Artificial Sequence: Synthetic oligonucleotide
ucugcucugacaggggaga

SEQ ID NO: 2660025 - RNA, 19 nt, Artificial Sequence
  Description of Artificial Sequence: Synthetic oligonucleotide
gugagggugcacugcaugc

SEQ ID NO: 2660026 - RNA, 19 nt, Artificial Sequence
  Description of Artificial Sequence: Synthetic oligonucleotide
acaccaguacgacucccag

SEQ ID NO: 2660027 - RNA, 19 nt, Artificial Sequence
  Description of Artificial Sequence: Synthetic oligonucleotide
uguauccaagcaagacacu

SEQ ID NO: 2660028 - RNA, 19 nt, Artificial Sequence
  Description of Artificial Sequence: Synthetic oligonucleotide
cuacaagcaggcuggacca

SEQ ID NO: 2660029 - RNA, 19 nt, Artificial Sequence
  Description of Artificial Sequence: Synthetic oligonucleotide
cucaguguguuugguaaag

SEQ ID NO: 2660030 - RNA, 19 nt, Artificial Sequence
  Description of Artificial Sequence: Synthetic oligonucleotide
uugagucgagugaaagcaa

SEQ ID NO: 2660031 - RNA, 19 nt, Artificial Sequence
  Description of Artificial Sequence: Synthetic oligonucleotide
gcagaccucacggugaacg

SEQ ID NO: 2660032 - RNA, 19 nt, Artificial Sequence
  Description of Artificial Sequence: Synthetic oligonucleotide
acuaguuuauugacaccag

SEQ ID NO: 2660033 - RNA, 19 nt, Artificial Sequence
  Description of Artificial Sequence: Synthetic oligonucleotide
guaacucagcucuuuucca

SEQ ID NO: 2660034 - RNA, 19 nt, Artificial Sequence
  Description of Artificial Sequence: Synthetic oligonucleotide
uccaagcaagacacuggca

SEQ ID NO: 2660035 - RNA, 19 nt, Artificial Sequence
  Description of Artificial Sequence: Synthetic oligonucleotide
caagcaagacacuggcauc

SEQ ID NO: 2660036 - RNA, 19 nt, Artificial Sequence
  Description of Artificial Sequence: Synthetic oligonucleotide
aaagcucaguguguuuggu

SEQ ID NO: 2660037 - RNA, 19 nt, Artificial Sequence
  Description of Artificial Sequence: Synthetic oligonucleotide
aggaugggcucuucugcuc

SEQ ID NO: 2660038 - RNA, 19 nt, Artificial Sequence
  Description of Artificial Sequence: Synthetic oligonucleotide
acaggacucccgaagauga

SEQ ID NO: 2660039 - RNA, 19 nt, Artificial Sequence
  Description of Artificial Sequence: Synthetic oligonucleotide
cuguugagucgagugaaag

SEQ ID NO: 2660040 - RNA, 19 nt, Artificial Sequence
  Description of Artificial Sequence: Synthetic oligonucleotide
ugagaccugccauggggug

SEQ ID NO: 2660041 - RNA, 19 nt, Artificial Sequence
  Description of Artificial Sequence: Synthetic oligonucleotide
acacaaguuggccuggcuu

SEQ ID NO: 2660042 - RNA, 19 nt, Artificial Sequence
  Description of Artificial Sequence: Synthetic oligonucleotide
aggacucccgaagaugauc

SEQ ID NO: 2660043 - RNA, 19 nt, Artificial Sequence
  Description of Artificial Sequence: Synthetic oligonucleotide
acaagcaggcuggaccaac

SEQ ID NO: 2660044 - RNA, 19 nt, Artificial Sequence
  Description of Artificial Sequence: Synthetic oligonucleotide
aagcaggcuggaccaacca

SEQ ID NO: 2660045 - RNA, 19 nt, Artificial Sequence
  Description of Artificial Sequence: Synthetic oligonucleotide
uuccagcccacuuaauuuu

SEQ ID NO: 2660046 - RNA, 19 nt, Artificial Sequence
  Description of Artificial Sequence: Synthetic oligonucleotide
cucccaccucuuaaggcgg

SEQ ID NO: 2660047 - RNA, 19 nt, Artificial Sequence
  Description of Artificial Sequence: Synthetic oligonucleotide
cugagaauacagcugaggu

SEQ ID NO: 2660048 - RNA, 19 nt, Artificial Sequence
  Description of Artificial Sequence: Synthetic oligonucleotide
ggaggaugggcucuucugc

SEQ ID NO: 2660049 - RNA, 19 nt, Artificial Sequence
  Description of Artificial Sequence: Synthetic oligonucleotide
gugaaagcaagcacaggac

SEQ ID NO: 2660050 - RNA, 19 nt, Artificial Sequence
  Description of Artificial Sequence: Synthetic oligonucleotide
cagaccucacggugaacgg

SEQ ID NO: 2660051 - RNA, 19 nt, Artificial Sequence
  Description of Artificial Sequence: Synthetic oligonucleotide
gagucgagugaaagcaagc

SEQ ID NO: 2660052 - RNA, 19 nt, Artificial Sequence
  Description of Artificial Sequence: Synthetic oligonucleotide
uacacaaguuggccuggcu

SEQ ID NO: 2660053 - RNA, 19 nt, Artificial Sequence
  Description of Artificial Sequence: Synthetic oligonucleotide
aacccucucuacuggcggu

SEQ ID NO: 2660054 - RNA, 19 nt, Artificial Sequence
  Description of Artificial Sequence: Synthetic oligonucleotide
agaauacagcugagguagc

SEQ ID NO: 2660055 - RNA, 19 nt, Artificial Sequence
  Description of Artificial Sequence: Synthetic oligonucleotide
gaccucuccuuaaagccug

SEQ ID NO: 2660056 - RNA, 19 nt, Artificial Sequence
  Description of Artificial Sequence: Synthetic oligonucleotide
cuuuuguauccaagcaaga

SEQ ID NO: 2660057 - RNA, 19 nt, Artificial Sequence
  Description of Artificial Sequence: Synthetic oligonucleotide
auggccagggcugcccucc

SEQ ID NO: 2660058 - RNA, 19 nt, Artificial Sequence
  Description of Artificial Sequence: Synthetic oligonucleotide
cccucuaucaaggucauug

SEQ ID NO: 2660059 - RNA, 19 nt, Artificial Sequence
  Description of Artificial Sequence: Synthetic oligonucleotide
uaucaaggucauugcuaca

SEQ ID NO: 2660060 - RNA, 19 nt, Artificial Sequence
  Description of Artificial Sequence: Synthetic oligonucleotide
auagcaaagcucagugugu

SEQ ID NO: 2660061 - RNA, 19 nt, Artificial Sequence
  Description of Artificial Sequence: Synthetic oligonucleotide
gacaggggagaaaccaaug

SEQ ID NO: 2660062 - RNA, 19 nt, Artificial Sequence
  Description of Artificial Sequence: Synthetic oligonucleotide
acggcagggacuuuuccaa

SEQ ID NO: 2660063 - RNA, 19 nt, Artificial Sequence
  Description of Artificial Sequence: Synthetic oligonucleotide
aagcucaguguguuuggua

SEQ ID NO: 2660064 - RNA, 19 nt, Artificial Sequence
  Description of Artificial Sequence: Synthetic oligonucleotide
caccaguacgacucccagg

SEQ ID NO: 2660065 - RNA, 19 nt, Artificial Sequence
  Description of Artificial Sequence: Synthetic oligonucleotide
ugccauggggugagggugc

SEQ ID NO: 2660066 - RNA, 19 nt, Artificial Sequence
  Description of Artificial Sequence: Synthetic oligonucleotide
ugcccucccaccucuuaag

SEQ ID NO: 2660067 - RNA, 19 nt, Artificial Sequence
  Description of Artificial Sequence: Synthetic oligonucleotide
uaaagccugccugugcccu

SEQ ID NO: 2660068 - RNA, 19 nt, Artificial Sequence
  Description of Artificial Sequence: Synthetic oligonucleotide
gcccacuuaauuuuaagaa

SEQ ID NO: 2660069 - RNA, 19 nt, Artificial Sequence
  Description of Artificial Sequence: Synthetic oligonucleotide
ugaacggcagggacuuuuc

SEQ ID NO: 2660070 - RNA, 19 nt, Artificial Sequence
  Description of Artificial Sequence: Synthetic oligonucleotide
augcugagaccugccaugg

SEQ ID NO: 2660071 - RNA, 19 nt, Artificial Sequence
  Description of Artificial Sequence: Synthetic oligonucleotide
aucaagccagaaacacagc

SEQ ID NO: 2660072 - RNA, 19 nt, Artificial Sequence
  Description of Artificial Sequence: Synthetic oligonucleotide
cagcccacuuaauuuuaag

SEQ ID NO: 2660073 - RNA, 19 nt, Artificial Sequence
  Description of Artificial Sequence: Synthetic oligonucleotide
uacgacucccaggaagccc

SEQ ID NO: 2660074 - RNA, 19 nt, Artificial Sequence
  Description of Artificial Sequence: Synthetic oligonucleotide
uacuggcgguggaggaugg

SEQ ID NO: 2660075 - RNA, 19 nt, Artificial Sequence
  Description of Artificial Sequence: Synthetic oligonucleotide
cagggacuuuuccaagacc

SEQ ID NO: 2660076 - RNA, 19 nt, Artificial Sequence
  Description of Artificial Sequence: Synthetic oligonucleotide
gcaaagcucaguguguuug

SEQ ID NO: 2660077 - RNA, 19 nt, Artificial Sequence
  Description of Artificial Sequence: Synthetic oligonucleotide
gguaaagcuguugagucga

SEQ ID NO: 2660078 - RNA, 19 nt, Artificial Sequence
  Description of Artificial Sequence: Synthetic oligonucleotide
guguguuugguaaagcugu

SEQ ID NO: 2660079 - RNA, 19 nt, Artificial Sequence
  Description of Artificial Sequence: Synthetic oligonucleotide
ugagggugcacugcaugca

SEQ ID NO: 2660080 - RNA, 19 nt, Artificial Sequence
  Description of Artificial Sequence: Synthetic oligonucleotide
cuugaauauacuaguuuau

SEQ ID NO: 2660081 - RNA, 19 nt, Artificial Sequence
  Description of Artificial Sequence: Synthetic oligonucleotide
uguguuugguaaagcuguu

SEQ ID NO: 2660082 - RNA, 19 nt, Artificial Sequence
  Description of Artificial Sequence: Synthetic oligonucleotide
ccgaagaugaucccuggag

SEQ ID NO: 2660083 - RNA, 19 nt, Artificial Sequence
  Description of Artificial Sequence: Synthetic oligonucleotide
uccuuaaagccugccugug

SEQ ID NO: 2660084 - RNA, 19 nt, Artificial Sequence
  Description of Artificial Sequence: Synthetic oligonucleotide
uaaagcuguugagucgagu

SEQ ID NO: 2660085 - RNA, 19 nt, Artificial Sequence
  Description of Artificial Sequence: Synthetic oligonucleotide
agccagaaacacagcuugc

SEQ ID NO: 2660086 - RNA, 19 nt, Artificial Sequence
  Description of Artificial Sequence: Synthetic oligonucleotide
gaucccuggaggcuacaga

SEQ ID NO: 2660087 - RNA, 19 nt, Artificial Sequence
  Description of Artificial Sequence: Synthetic oligonucleotide
cacggugaacggcagggac

SEQ ID NO: 2660088 - RNA, 19 nt, Artificial Sequence
  Description of Artificial Sequence: Synthetic oligonucleotide
accuaugcugagaccugcc

SEQ ID NO: 2660089 - RNA, 19 nt, Artificial Sequence
  Description of Artificial Sequence: Synthetic oligonucleotide
cucagcucuuuuccagccc

SEQ ID NO: 2660090 - RNA, 19 nt, Artificial Sequence
  Description of Artificial Sequence: Synthetic oligonucleotide
ugaucccuggaggcuacag

SEQ ID NO: 2660091 - RNA, 19 nt, Artificial Sequence
  Description of Artificial Sequence: Synthetic oligonucleotide
cagggcagaccucacggug

SEQ ID NO: 2660092 - RNA, 19 nt, Artificial Sequence
  Description of Artificial Sequence: Synthetic oligonucleotide
gguaaauagcaaagcucag

SEQ ID NO: 2660093 - RNA, 19 nt, Artificial Sequence
  Description of Artificial Sequence: Synthetic oligonucleotide
uagccaggacaccuaugcu

SEQ ID NO: 2660094 - RNA, 19 nt, Artificial Sequence
  Description of Artificial Sequence: Synthetic oligonucleotide
ggacucccgaagaugaucc

SEQ ID NO: 2660095 - RNA, 19 nt, Artificial Sequence
  Description of Artificial Sequence: Synthetic oligonucleotide
ccacuuaauuuuaagaaua

SEQ ID NO: 2660096 - RNA, 19 nt, Artificial Sequence
  Description of Artificial Sequence: Synthetic oligonucleotide
agcuguugagucgagugaa

SEQ ID NO: 2660097 - RNA, 19 nt, Artificial Sequence
  Description of Artificial Sequence: Synthetic oligonucleotide
cauuaucucccucuaucaa

SEQ ID NO: 2660098 - RNA, 19 nt, Artificial Sequence
  Description of Artificial Sequence: Synthetic oligonucleotide
augucauuaucucccucua

SEQ ID NO: 2660099 - RNA, 19 nt, Artificial Sequence
  Description of Artificial Sequence: Synthetic oligonucleotide
uaucucccucuaucaaggu

SEQ ID NO: 2660100 - RNA, 19 nt, Artificial Sequence
  Description of Artificial Sequence: Synthetic oligonucleotide
acacggcugguaaauagca

SEQ ID NO: 2660101 - RNA, 19 nt, Artificial Sequence
  Description of Artificial Sequence: Synthetic oligonucleotide
uuaaggcggucugacugcu

SEQ ID NO: 2660102 - RNA, 19 nt, Artificial Sequence
  Description of Artificial Sequence: Synthetic oligonucleotide
uuacacaaguuggccuggc

SEQ ID NO: 2660103 - RNA, 19 nt, Artificial Sequence
  Description of Artificial Sequence: Synthetic oligonucleotide
gcugguaaauagcaaagcu

SEQ ID NO: 2660104 - RNA, 19 nt, Artificial Sequence
  Description of Artificial Sequence: Synthetic oligonucleotide
acugcaugcaggacccaag

SEQ ID NO: 2660105 - RNA, 19 nt, Artificial Sequence
  Description of Artificial Sequence: Synthetic oligonucleotide
ggugagggugcacugcaug

SEQ ID NO: 2660106 - RNA, 19 nt, Artificial Sequence
  Description of Artificial Sequence: Synthetic oligonucleotide
agaccucuccuuaaagccu

SEQ ID NO: 2660107 - RNA, 19 nt, Artificial Sequence
  Description of Artificial Sequence: Synthetic oligonucleotide
guguuugguaaagcuguug

SEQ ID NO: 2660108 - RNA, 19 nt, Artificial Sequence
  Description of Artificial Sequence: Synthetic oligonucleotide
cccugaaauaaccccuugg

SEQ ID NO: 2660109 - RNA, 19 nt, Artificial Sequence
  Description of Artificial Sequence: Synthetic oligonucleotide
cacaggacucccgaagaug

SEQ ID NO: 2660110 - RNA, 19 nt, Artificial Sequence
  Description of Artificial Sequence: Synthetic oligonucleotide
guuggccuggcuucccuac

SEQ ID NO: 2660111 - RNA, 19 nt, Artificial Sequence
  Description of Artificial Sequence: Synthetic oligonucleotide
cugccugugcccucccacc

SEQ ID NO: 2660112 - RNA, 19 nt, Artificial Sequence
  Description of Artificial Sequence: Synthetic oligonucleotide
caggaucaagccagaaaca

SEQ ID NO: 2660113 - RNA, 19 nt, Artificial Sequence
  Description of Artificial Sequence: Synthetic oligonucleotide
aaccccuuggcaaggccca

SEQ ID NO: 2660114 - RNA, 19 nt, Artificial Sequence
  Description of Artificial Sequence: Synthetic oligonucleotide
ugacugcuuuagcuuuugu

SEQ ID NO: 2660115 - RNA, 19 nt, Artificial Sequence
  Description of Artificial Sequence: Synthetic oligonucleotide
gacucccgaagaugauccc

SEQ ID NO: 2660116 - RNA, 19 nt, Artificial Sequence
  Description of Artificial Sequence: Synthetic oligonucleotide
ccugagaauacagcugagg

SEQ ID NO: 2660117 - RNA, 19 nt, Artificial Sequence
  Description of Artificial Sequence: Synthetic oligonucleotide
agaccugccauggggugag

SEQ ID NO: 2660118 - RNA, 19 nt, Artificial Sequence
  Description of Artificial Sequence: Synthetic oligonucleotide
gaccucacggugaacggca

SEQ ID NO: 2660119 - RNA, 19 nt, Artificial Sequence
  Description of Artificial Sequence: Synthetic oligonucleotide
cuacagaggcaggaucaag

SEQ ID NO: 2660120 - RNA, 19 nt, Artificial Sequence
  Description of Artificial Sequence: Synthetic oligonucleotide
cugccauggggugagggug

SEQ ID NO: 2660121 - RNA, 19 nt, Artificial Sequence
  Description of Artificial Sequence: Synthetic oligonucleotide
ccucuaucaaggucauugc

SEQ ID NO: 2660122 - RNA, 19 nt, Artificial Sequence
  Description of Artificial Sequence: Synthetic oligonucleotide
cuacuggcgguggaggaug

SEQ ID NO: 2660123 - RNA, 19 nt, Artificial Sequence
  Description of Artificial Sequence: Synthetic oligonucleotide
acucccgaagaugaucccu

SEQ ID NO: 2660124 - RNA, 19 nt, Artificial Sequence
  Description of Artificial Sequence: Synthetic oligonucleotide
caaugucauuaucucccuc

SEQ ID NO: 2660125 - RNA, 19 nt, Artificial Sequence
  Description of Artificial Sequence: Synthetic oligonucleotide
uagcaaagcucaguguguu

SEQ ID NO: 2660126 - RNA, 19 nt, Artificial Sequence
  Description of Artificial Sequence: Synthetic oligonucleotide
ucuacuggcgguggaggau

SEQ ID NO: 2660127 - RNA, 19 nt, Artificial Sequence
  Description of Artificial Sequence: Synthetic oligonucleotide
cgagugaaagcaagcacag

SEQ ID NO: 2660128 - RNA, 19 nt, Artificial Sequence
  Description of Artificial Sequence: Synthetic oligonucleotide
auggggugagggugcacug

SEQ ID NO: 2660129 - RNA, 19 nt, Artificial Sequence
  Description of Artificial Sequence: Synthetic oligonucleotide
cccaagagggcagagcagg

SEQ ID NO: 2660130 - RNA, 19 nt, Artificial Sequence
  Description of Artificial Sequence: Synthetic oligonucleotide
ugacaccaguacgacuccc

SEQ ID NO: 2660131 - RNA, 19 nt, Artificial Sequence
  Description of Artificial Sequence: Synthetic oligonucleotide
cuaguuuauugacaccagu

SEQ ID NO: 2660132 - RNA, 19 nt, Artificial Sequence
  Description of Artificial Sequence: Synthetic oligonucleotide
gcaaggcccacacggcugg

SEQ ID NO: 2660133 - RNA, 19 nt, Artificial Sequence
  Description of Artificial Sequence: Synthetic oligonucleotide
gcccugagaauacagcuga

SEQ ID NO: 2660134 - RNA, 19 nt, Artificial Sequence
  Description of Artificial Sequence: Synthetic oligonucleotide
ggcugguaaauagcaaagc

SEQ ID NO: 2660135 - RNA, 19 nt, Artificial Sequence
  Description of Artificial Sequence: Synthetic oligonucleotide
gacaccaguacgacuccca

SEQ ID NO: 2660136 - RNA, 19 nt, Artificial Sequence
  Description of Artificial Sequence: Synthetic oligonucleotide
gcaggcuggaccaaccacc

SEQ ID NO: 2660137 - RNA, 19 nt, Artificial Sequence
  Description of Artificial Sequence: Synthetic oligonucleotide
gcuucccuacaguauggcc

SEQ ID NO: 2660138 - RNA, 19 nt, Artificial Sequence
  Description of Artificial Sequence: Synthetic oligonucleotide
gcucugacaggggagaaac

SEQ ID NO: 2660139 - RNA, 19 nt, Artificial Sequence
  Description of Artificial Sequence: Synthetic oligonucleotide
caccucuuaaggcggucug

SEQ ID NO: 2660140 - RNA, 19 nt, Artificial Sequence
  Description of Artificial Sequence: Synthetic oligonucleotide
caccuaugcugagaccugc

SEQ ID NO: 2660141 - RNA, 19 nt, Artificial Sequence
  Description of Artificial Sequence: Synthetic oligonucleotide
gaugaucccuggaggcuac

SEQ ID NO: 2660142 - RNA, 19 nt, Artificial Sequence
  Description of Artificial Sequence: Synthetic oligonucleotide
ccacacggcugguaaauag

SEQ ID NO: 2660143 - RNA, 19 nt, Artificial Sequence
  Description of Artificial Sequence: Synthetic oligonucleotide
augcaggacccaagagggc

SEQ ID NO: 2660144 - RNA, 19 nt, Artificial Sequence
  Description of Artificial Sequence: Synthetic oligonucleotide
uggggugagggugcacugc

SEQ ID NO: 2660145 - RNA, 19 nt, Artificial Sequence
  Description of Artificial Sequence: Synthetic oligonucleotide
cuuuagcuuuuguauccaa

SEQ ID NO: 2660146 - RNA, 19 nt, Artificial Sequence
  Description of Artificial Sequence: Synthetic oligonucleotide
accugccauggggugaggg

SEQ ID NO: 2660147 - RNA, 19 nt, Artificial Sequence
  Description of Artificial Sequence: Synthetic oligonucleotide
agguagccaggacaccuau

SEQ ID NO: 2660148 - RNA, 19 nt, Artificial Sequence
  Description of Artificial Sequence: Synthetic oligonucleotide
cugacaggggagaaaccaa

SEQ ID NO: 2660149 - RNA, 19 nt, Artificial Sequence
  Description of Artificial Sequence: Synthetic oligonucleotide
ccaagaccucuccuuaaag

SEQ ID NO: 2660150 - RNA, 19 nt, Artificial Sequence
  Description of Artificial Sequence: Synthetic oligonucleotide
guaaagcuguugagucgag

SEQ ID NO: 2660151 - RNA, 19 nt, Artificial Sequence
  Description of Artificial Sequence: Synthetic oligonucleotide
ggcaucuguaacucagcuc

SEQ ID NO: 2660152 - RNA, 19 nt, Artificial Sequence
  Description of Artificial Sequence: Synthetic oligonucleotide
ccuuaaagccugccugugc

SEQ ID NO: 2660153 - RNA, 19 nt, Artificial Sequence
  Description of Artificial Sequence: Synthetic oligonucleotide
gagaaaccaaugucauuau

SEQ ID NO: 2660154 - RNA, 19 nt, Artificial Sequence
  Description of Artificial Sequence: Synthetic oligonucleotide
cugcaugcaggacccaaga

SEQ ID NO: 2660155 - RNA, 19 nt, Artificial Sequence
  Description of Artificial Sequence: Synthetic oligonucleotide
gcagggacuuuuccaagac

SEQ ID NO: 2660156 - RNA, 19 nt, Artificial Sequence
  Description of Artificial Sequence: Synthetic oligonucleotide
ggcuacagaggcaggauca

SEQ ID NO: 2660157 - RNA, 19 nt, Artificial Sequence
  Description of Artificial Sequence: Synthetic oligonucleotide
gcuuuacacaaguuggccu

SEQ ID NO: 2660158 - RNA, 19 nt, Artificial Sequence
  Description of Artificial Sequence: Synthetic oligonucleotide
ugugcccucccaccucuua

SEQ ID NO: 2660159 - RNA, 19 nt, Artificial Sequence
  Description of Artificial Sequence: Synthetic oligonucleotide
ucauugcuacaagcaggcu

SEQ ID NO: 2660160 - RNA, 19 nt, Artificial Sequence
  Description of Artificial Sequence: Synthetic oligonucleotide
cagagcagggcagaccuca

SEQ ID NO: 2660161 - RNA, 19 nt, Artificial Sequence
  Description of Artificial Sequence: Synthetic oligonucleotide
acggugaacggcagggacu

SEQ ID NO: 2660162 - RNA, 19 nt, Artificial Sequence
  Description of Artificial Sequence: Synthetic oligonucleotide
agcaaagcucaguguguuu

SEQ ID NO: 2660163 - RNA, 19 nt, Artificial Sequence
  Description of Artificial Sequence: Synthetic oligonucleotide
cucuaucaaggucauugcu

SEQ ID NO: 2660164 - RNA, 19 nt, Artificial Sequence
  Description of Artificial Sequence: Synthetic oligonucleotide
cuccuggcccugagaauac

SEQ ID NO: 2660165 - RNA, 19 nt, Artificial Sequence
  Description of Artificial Sequence: Synthetic oligonucleotide
cucuacuggcgguggagga

SEQ ID NO: 2660166 - RNA, 19 nt, Artificial Sequence
  Description of Artificial Sequence: Synthetic oligonucleotide
ccuacaguauggccagggc

SEQ ID NO: 2660167 - RNA, 19 nt, Artificial Sequence
  Description of Artificial Sequence: Synthetic oligonucleotide
ucacggugaacggcaggga

SEQ ID NO: 2660168 - RNA, 19 nt, Artificial Sequence
  Description of Artificial Sequence: Synthetic oligonucleotide
ccaagagggcagagcaggg

SEQ ID NO: 2660169 - RNA, 19 nt, Artificial Sequence
  Description of Artificial Sequence: Synthetic oligonucleotide
aucuguaacucagcucuuu

SEQ ID NO: 2660170 - RNA, 19 nt, Artificial Sequence
  Description of Artificial Sequence: Synthetic oligonucleotide
gagaccugccaugggguga

SEQ ID NO: 2660171 - RNA, 19 nt, Artificial Sequence
  Description of Artificial Sequence: Synthetic oligonucleotide
acaccuaugcugagaccug

SEQ ID NO: 2660172 - RNA, 19 nt, Artificial Sequence
  Description of Artificial Sequence: Synthetic oligonucleotide
accucuccuuaaagccugc

SEQ ID NO: 2660173 - RNA, 19 nt, Artificial Sequence
  Description of Artificial Sequence: Synthetic oligonucleotide
accucuuaaggcggucuga

SEQ ID NO: 2660174 - RNA, 19 nt, Artificial Sequence
  Description of Artificial Sequence: Synthetic oligonucleotide
guacgacucccaggaagcc

SEQ ID NO: 2660175 - RNA, 19 nt, Artificial Sequence
  Description of Artificial Sequence: Synthetic oligonucleotide
ggcaggaucaagccagaaa

SEQ ID NO: 2660176 - RNA, 19 nt, Artificial Sequence
  Description of Artificial Sequence: Synthetic oligonucleotide
agcaagacacuggcaucug

SEQ ID NO: 2660177 - RNA, 19 nt, Artificial Sequence
  Description of Artificial Sequence: Synthetic oligonucleotide
ucccaccucuuaaggcggu

SEQ ID NO: 2660178 - RNA, 19 nt, Artificial Sequence
  Description of Artificial Sequence: Synthetic oligonucleotide
cuccuuaaagccugccugu

SEQ ID NO: 2660179 - RNA, 19 nt, Artificial Sequence
  Description of Artificial Sequence: Synthetic oligonucleotide
ccuggcccugagaauacag

SEQ ID NO: 2660180 - RNA, 19 nt, Artificial Sequence
  Description of Artificial Sequence: Synthetic oligonucleotide
cuggaccaaccaccacacc

SEQ ID NO: 2660181 - RNA, 19 nt, Artificial Sequence
  Description of Artificial Sequence: Synthetic oligonucleotide
ggcccugagaauacagcug

SEQ ID NO: 2660182 - RNA, 19 nt, Artificial Sequence
  Description of Artificial Sequence: Synthetic oligonucleotide
cggcugguaaauagcaaag

SEQ ID NO: 2660183 - RNA, 19 nt, Artificial Sequence
  Description of Artificial Sequence: Synthetic oligonucleotide
ggcggucugacugcuuuag

SEQ ID NO: 2660184 - RNA, 19 nt, Artificial Sequence
  Description of Artificial Sequence: Synthetic oligonucleotide
gggugcacugcaugcagga

SEQ ID NO: 2660185 - RNA, 19 nt, Artificial Sequence
  Description of Artificial Sequence: Synthetic oligonucleotide
cugagaccugccauggggu

SEQ ID NO: 2660186 - RNA, 19 nt, Artificial Sequence
  Description of Artificial Sequence: Synthetic oligonucleotide
acccaagagggcagagcag

SEQ ID NO: 2660187 - RNA, 19 nt, Artificial Sequence
  Description of Artificial Sequence: Synthetic oligonucleotide
cagcuugcuuuacacaagu

SEQ ID NO: 2660188 - RNA, 19 nt, Artificial Sequence
  Description of Artificial Sequence: Synthetic oligonucleotide
aggacccaagagggcagag

SEQ ID NO: 2660189 - RNA, 19 nt, Artificial Sequence
  Description of Artificial Sequence: Synthetic oligonucleotide
ugcccuccuggcccugaga

SEQ ID NO: 2660190 - RNA, 19 nt, Artificial Sequence
  Description of Artificial Sequence: Synthetic oligonucleotide
ccaagcaagacacuggcau

SEQ ID NO: 2660191 - RNA, 19 nt, Artificial Sequence
  Description of Artificial Sequence: Synthetic oligonucleotide
cccuacaguauggccaggg

SEQ ID NO: 2660192 - RNA, 19 nt, Artificial Sequence
  Description of Artificial Sequence: Synthetic oligonucleotide
acccucucuacuggcggug

SEQ ID NO: 2660193 - RNA, 19 nt, Artificial Sequence
  Description of Artificial Sequence: Synthetic oligonucleotide
ggaggcuacagaggcagga

SEQ ID NO: 2660194 - RNA, 19 nt, Artificial Sequence
  Description of Artificial Sequence: Synthetic oligonucleotide
ucccuacaguauggccagg

SEQ ID NO: 2660195 - RNA, 19 nt, Artificial Sequence
  Description of Artificial Sequence: Synthetic oligonucleotide
ccucuuaaggcggucugac

SEQ ID NO: 2660196 - RNA, 19 nt, Artificial Sequence
  Description of Artificial Sequence: Synthetic oligonucleotide
uacaagcaggcuggaccaa

SEQ ID NO: 2660197 - RNA, 19 nt, Artificial Sequence
  Description of Artificial Sequence: Synthetic oligonucleotide
acuggcgguggaggauggg

SEQ ID NO: 2660198 - RNA, 19 nt, Artificial Sequence
  Description of Artificial Sequence: Synthetic oligonucleotide
ggggugagggugcacugca

SEQ ID NO: 2660199 - RNA, 19 nt, Artificial Sequence
  Description of Artificial Sequence: Synthetic oligonucleotide
ggacccaagagggcagagc

SEQ ID NO: 2660200 - RNA, 19 nt, Artificial Sequence
  Description of Artificial Sequence: Synthetic oligonucleotide
uaaggcggucugacugcuu

SEQ ID NO: 2660201 - RNA, 19 nt, Artificial Sequence
  Description of Artificial Sequence: Synthetic oligonucleotide
ggcaaggcccacacggcug

SEQ ID NO: 2660202 - RNA, 19 nt, Artificial Sequence
  Description of Artificial Sequence: Synthetic oligonucleotide
cccacuuaauuuuaagaau

SEQ ID NO: 2660203 - RNA, 19 nt, Artificial Sequence
  Description of Artificial Sequence: Synthetic oligonucleotide
cauggggugagggugcacu

SEQ ID NO: 2660204 - RNA, 19 nt, Artificial Sequence
  Description of Artificial Sequence: Synthetic oligonucleotide
gcuuuagcuuuuguaucca

SEQ ID NO: 2660205 - RNA, 19 nt, Artificial Sequence
  Description of Artificial Sequence: Synthetic oligonucleotide
caggacaccuaugcugaga

SEQ ID NO: 2660206 - RNA, 19 nt, Artificial Sequence
  Description of Artificial Sequence: Synthetic oligonucleotide
ggucugacugcuuuagcuu

SEQ ID NO: 2660207 - RNA, 19 nt, Artificial Sequence
  Description of Artificial Sequence: Synthetic oligonucleotide
cagcugagguagccaggac

SEQ ID NO: 2660208 - RNA, 19 nt, Artificial Sequence
  Description of Artificial Sequence: Synthetic oligonucleotide
cacuggcaucuguaacuca

SEQ ID NO: 2660209 - RNA, 19 nt, Artificial Sequence
  Description of Artificial Sequence: Synthetic oligonucleotide
augggcucuucugcucuga

SEQ ID NO: 2660210 - RNA, 19 nt, Artificial Sequence
  Description of Artificial Sequence: Synthetic oligonucleotide
gagguagccaggacaccua

SEQ ID NO: 2660211 - RNA, 19 nt, Artificial Sequence
  Description of Artificial Sequence: Synthetic oligonucleotide
ggcuucccuacaguauggc

SEQ ID NO: 2660212 - RNA, 19 nt, Artificial Sequence
  Description of Artificial Sequence: Synthetic oligonucleotide
aaggcccacacggcuggua

SEQ ID NO: 2660213 - RNA, 19 nt, Artificial Sequence
  Description of Artificial Sequence: Synthetic oligonucleotide
gguagccaggacaccuaug

SEQ ID NO: 2660214 - RNA, 19 nt, Artificial Sequence
  Description of Artificial Sequence: Synthetic oligonucleotide
accucacggugaacggcag

SEQ ID NO: 2660215 - RNA, 19 nt, Artificial Sequence
  Description of Artificial Sequence: Synthetic oligonucleotide
cucuuaaggcggucugacu

SEQ ID NO: 2660216 - RNA, 19 nt, Artificial Sequence
  Description of Artificial Sequence: Synthetic oligonucleotide
ccuaugcugagaccugcca

SEQ ID NO: 2660217 - RNA, 19 nt, Artificial Sequence
  Description of Artificial Sequence: Synthetic oligonucleotide
cccugagaauacagcugag

SEQ ID NO: 2660218 - RNA, 19 nt, Artificial Sequence
  Description of Artificial Sequence: Synthetic oligonucleotide
gggacuuuuccaagaccuc

SEQ ID NO: 2660219 - RNA, 19 nt, Artificial Sequence
  Description of Artificial Sequence: Synthetic oligonucleotide
ccucacggugaacggcagg

SEQ ID NO: 2660220 - RNA, 19 nt, Artificial Sequence
  Description of Artificial Sequence: Synthetic oligonucleotide
gcggucugacugcuuuagc

SEQ ID NO: 2660221 - RNA, 19 nt, Artificial Sequence
  Description of Artificial Sequence: Synthetic oligonucleotide
aggcggucugacugcuuua

SEQ ID NO: 2660222 - RNA, 19 nt, Artificial Sequence
  Description of Artificial Sequence: Synthetic oligonucleotide
cacugcaugcaggacccaa

SEQ ID NO: 2660223 - RNA, 19 nt, Artificial Sequence
  Description of Artificial Sequence: Synthetic oligonucleotide
ggugcacugcaugcaggac

SEQ ID NO: 2660224 - RNA, 19 nt, Artificial Sequence
  Description of Artificial Sequence: Synthetic oligonucleotide
gugaacggcagggacuuuu

SEQ ID NO: 2660225 - RNA, 19 nt, Artificial Sequence
  Description of Artificial Sequence: Synthetic oligonucleotide
aggcaggaucaagccagaa

SEQ ID NO: 2660226 - RNA, 19 nt, Artificial Sequence
  Description of Artificial Sequence: Synthetic oligonucleotide
ccaggacaccuaugcugag

SEQ ID NO: 2660227 - RNA, 19 nt, Artificial Sequence
  Description of Artificial Sequence: Synthetic oligonucleotide
augaucccuggaggcuaca

SEQ ID NO: 2660228 - RNA, 19 nt, Artificial Sequence
  Description of Artificial Sequence: Synthetic oligonucleotide
ccccugaaauaaccccuug

SEQ ID NO: 2660229 - RNA, 19 nt, Artificial Sequence
  Description of Artificial Sequence: Synthetic oligonucleotide
gaccugccauggggugagg

SEQ ID NO: 2660230 - RNA, 19 nt, Artificial Sequence
  Description of Artificial Sequence: Synthetic oligonucleotide
gcuacagaggcaggaucaa

SEQ ID NO: 2660231 - RNA, 19 nt, Artificial Sequence
  Description of Artificial Sequence: Synthetic oligonucleotide
cccucucuacuggcggugg

SEQ ID NO: 2660232 - RNA, 19 nt, Artificial Sequence
  Description of Artificial Sequence: Synthetic oligonucleotide
cggucugacugcuuuagcu

SEQ ID NO: 2660233 - RNA, 19 nt, Artificial Sequence
  Description of Artificial Sequence: Synthetic oligonucleotide
gcuguugagucgagugaaa

SEQ ID NO: 2660234 - RNA, 19 nt, Artificial Sequence
  Description of Artificial Sequence: Synthetic oligonucleotide
ccagcccacuuaauuuuaa

SEQ ID NO: 2660235 - RNA, 19 nt, Artificial Sequence
  Description of Artificial Sequence: Synthetic oligonucleotide
cucccucuaucaaggucau

SEQ ID NO: 2660236 - RNA, 19 nt, Artificial Sequence
  Description of Artificial Sequence: Synthetic oligonucleotide
caucuguaacucagcucuu

SEQ ID NO: 2660237 - RNA, 19 nt, Artificial Sequence
  Description of Artificial Sequence: Synthetic oligonucleotide
ucccucuaucaaggucauu

SEQ ID NO: 2660238 - RNA, 19 nt, Artificial Sequence
  Description of Artificial Sequence: Synthetic oligonucleotide
cugcucugacaggggagaa

SEQ ID NO: 2660239 - RNA, 19 nt, Artificial Sequence
  Description of Artificial Sequence: Synthetic oligonucleotide
ccuggcuucccuacaguau

SEQ ID NO: 2660240 - RNA, 19 nt, Artificial Sequence
  Description of Artificial Sequence: Synthetic oligonucleotide
ccugccauggggugagggu

SEQ ID NO: 2660241 - RNA, 19 nt, Artificial Sequence
  Description of Artificial Sequence: Synthetic oligonucleotide
gcacaggacucccgaagau

SEQ ID NO: 2660242 - RNA, 19 nt, Artificial Sequence
  Description of Artificial Sequence: Synthetic oligonucleotide
caggacucccgaagaugau

SEQ ID NO: 2660243 - RNA, 19 nt, Artificial Sequence
  Description of Artificial Sequence: Synthetic oligonucleotide
ggcccacacggcugguaaa

SEQ ID NO: 2660244 - RNA, 19 nt, Artificial Sequence
  Description of Artificial Sequence: Synthetic oligonucleotide
gguggaggaugggcucuuc

SEQ ID NO: 2660245 - RNA, 19 nt, Artificial Sequence
  Description of Artificial Sequence: Synthetic oligonucleotide
ggcagaccucacggugaac

SEQ ID NO: 2660246 - RNA, 19 nt, Artificial Sequence
  Description of Artificial Sequence: Synthetic oligonucleotide
ccucucuacuggcggugga

SEQ ID NO: 2660247 - RNA, 19 nt, Artificial Sequence
  Description of Artificial Sequence: Synthetic oligonucleotide
cccaccucuuaaggcgguc

SEQ ID NO: 2660248 - RNA, 19 nt, Artificial Sequence
  Description of Artificial Sequence: Synthetic oligonucleotide
gcccacacggcugguaaau

SEQ ID NO: 2660249 - RNA, 19 nt, Artificial Sequence
  Description of Artificial Sequence: Synthetic oligonucleotide
ccaguacgacucccaggaa

SEQ ID NO: 2660250 - RNA, 19 nt, Artificial Sequence
  Description of Artificial Sequence: Synthetic oligonucleotide
gccugccugugcccuccca

SEQ ID NO: 2660251 - RNA, 19 nt, Artificial Sequence
  Description of Artificial Sequence: Synthetic oligonucleotide
gcgguggaggaugggcucu

SEQ ID NO: 2660252 - RNA, 19 nt, Artificial Sequence
  Description of Artificial Sequence: Synthetic oligonucleotide
ccaccucuuaaggcggucu

SEQ ID NO: 2660253 - RNA, 19 nt, Artificial Sequence
  Description of Artificial Sequence: Synthetic oligonucleotide
ccauggggugagggugcac

SEQ ID NO: 2660254 - RNA, 19 nt, Artificial Sequence
  Description of Artificial Sequence: Synthetic oligonucleotide
gcacugcaugcaggaccca

SEQ ID NO: 2660255 - RNA, 19 nt, Artificial Sequence
  Description of Artificial Sequence: Synthetic oligonucleotide
cccacacggcugguaaaua

SEQ ID NO: 2660256 - RNA, 19 nt, Artificial Sequence
  Description of Artificial Sequence: Synthetic oligonucleotide
caaggcccacacggcuggu

SEQ ID NO: 2660257 - RNA, 19 nt, Artificial Sequence
  Description of Artificial Sequence: Synthetic oligonucleotide
cugugcccucccaccucuu

SEQ ID NO: 2660258 - RNA, 19 nt, Artificial Sequence
  Description of Artificial Sequence: Synthetic oligonucleotide
cggugaacggcagggacuu

SEQ ID NO: 2660259 - RNA, 19 nt, Artificial Sequence
  Description of Artificial Sequence: Synthetic oligonucleotide
ggugaacggcagggacuuu

SEQ ID NO: 2660260 - RNA, 19 nt, Artificial Sequence
  Description of Artificial Sequence: Synthetic oligonucleotide
aaacuuguugcucagaauc

SEQ ID NO: 2660261 - RNA, 19 nt, Artificial Sequence
  Description of Artificial Sequence: Synthetic oligonucleotide
uacaaugagaaacuuguug

SEQ ID NO: 2660262 - RNA, 19 nt, Artificial Sequence
  Description of Artificial Sequence: Synthetic oligonucleotide
acgaauugaaucuggggcc

SEQ ID NO: 2660263 - RNA, 19 nt, Artificial Sequence
  Description of Artificial Sequence: Synthetic oligonucleotide
gacuguagcacacaggacc

SEQ ID NO: 2660264 - RNA, 19 nt, Artificial Sequence
  Description of Artificial Sequence: Synthetic oligonucleotide
uaagagguuuccaagggag

SEQ ID NO: 2660265 - RNA, 19 nt, Artificial Sequence
  Description of Artificial Sequence: Synthetic oligonucleotide
aguuaagagguuuccaagg

SEQ ID NO: 2660266 - RNA, 19 nt, Artificial Sequence
  Description of Artificial Sequence: Synthetic oligonucleotide
ugaaucuggggccaugugg

SEQ ID NO: 2660267 - RNA, 19 nt, Artificial Sequence
  Description of Artificial Sequence: Synthetic oligonucleotide
ugaggacuucgcaagaugg

SEQ ID NO: 2660268 - RNA, 19 nt, Artificial Sequence
  Description of Artificial Sequence: Synthetic oligonucleotide
auggaggucaucuuacccc

SEQ ID NO: 2660269 - RNA, 19 nt, Artificial Sequence
  Description of Artificial Sequence: Synthetic oligonucleotide
aacucccacgaauugaauc

SEQ ID NO: 2660270 - RNA, 19 nt, Artificial Sequence
  Description of Artificial Sequence: Synthetic oligonucleotide
cacgaauugaaucuggggc

SEQ ID NO: 2660271 - RNA, 19 nt, Artificial Sequence
  Description of Artificial Sequence: Synthetic oligonucleotide
cagugcaugggcuugaucc

SEQ ID NO: 2660272 - RNA, 19 nt, Artificial Sequence
  Description of Artificial Sequence: Synthetic oligonucleotide
caagcaggcaguuaagagg

SEQ ID NO: 2660273 - RNA, 19 nt, Artificial Sequence
  Description of Artificial Sequence: Synthetic oligonucleotide
cauucguacaaugagaaac

SEQ ID NO: 2660274 - RNA, 19 nt, Artificial Sequence
  Description of Artificial Sequence: Synthetic oligonucleotide
agccauuucaagcaggcag

SEQ ID NO: 2660275 - RNA, 19 nt, Artificial Sequence
  Description of Artificial Sequence: Synthetic oligonucleotide
guuaagagguuuccaaggg

SEQ ID NO: 2660276 - RNA, 19 nt, Artificial Sequence
  Description of Artificial Sequence: Synthetic oligonucleotide
cugaagucagggaagaaag

SEQ ID NO: 2660277 - RNA, 19 nt, Artificial Sequence
  Description of Artificial Sequence: Synthetic oligonucleotide
ugauccagccauuucaagc

SEQ ID NO: 2660278 - RNA, 19 nt, Artificial Sequence
  Description of Artificial Sequence: Synthetic oligonucleotide
aaaccugcggcagucuucc

SEQ ID NO: 2660279 - RNA, 19 nt, Artificial Sequence
  Description of Artificial Sequence: Synthetic oligonucleotide
aaccgcaucaggcuugauc

SEQ ID NO: 2660280 - RNA, 19 nt, Artificial Sequence
  Description of Artificial Sequence: Synthetic oligonucleotide
auuucaagcaggcaguuaa

SEQ ID NO: 2660281 - RNA, 19 nt, Artificial Sequence
  Description of Artificial Sequence: Synthetic oligonucleotide
ucagcuacacaguggaugc

SEQ ID NO: 2660282 - RNA, 19 nt, Artificial Sequence
  Description of Artificial Sequence: Synthetic oligonucleotide
ugaugaacagccuccagga

SEQ ID NO: 2660283 - RNA, 19 nt, Artificial Sequence
  Description of Artificial Sequence: Synthetic oligonucleotide
ucaagcaggcaguuaagag

SEQ ID NO: 2660284 - RNA, 19 nt, Artificial Sequence
  Description of Artificial Sequence: Synthetic oligonucleotide
uugucagcuacacagugga

SEQ ID NO: 2660285 - RNA, 19 nt, Artificial Sequence
  Description of Artificial Sequence: Synthetic oligonucleotide
ucucauucguacaaugaga

SEQ ID NO: 2660286 - RNA, 19 nt, Artificial Sequence
  Description of Artificial Sequence: Synthetic oligonucleotide
uggauggcaucuuuguggg

SEQ ID NO: 2660287 - RNA, 19 nt, Artificial Sequence
  Description of Artificial Sequence: Synthetic oligonucleotide
ucucgguaaaaccugcggc

SEQ ID NO: 2660288 - RNA, 19 nt, Artificial Sequence
  Description of Artificial Sequence: Synthetic oligonucleotide
agcaggguaaaucagugca

SEQ ID NO: 2660289 - RNA, 19 nt, Artificial Sequence
  Description of Artificial Sequence: Synthetic oligonucleotide
aaauacucugguggguccc

SEQ ID NO: 2660290 - RNA, 19 nt, Artificial Sequence
  Description of Artificial Sequence: Synthetic oligonucleotide
ugaacagccuccaggacca

SEQ ID NO: 2660291 - RNA, 19 nt, Artificial Sequence
  Description of Artificial Sequence: Synthetic oligonucleotide
ucagugaggcccaaacucc

SEQ ID NO: 2660292 - RNA, 19 nt, Artificial Sequence
  Description of Artificial Sequence: Synthetic oligonucleotide
accgcaucaggcuugauca

SEQ ID NO: 2660293 - RNA, 19 nt, Artificial Sequence
  Description of Artificial Sequence: Synthetic oligonucleotide
aagauggaggucaucuuac

SEQ ID NO: 2660294 - RNA, 19 nt, Artificial Sequence
  Description of Artificial Sequence: Synthetic oligonucleotide
gcucgaaauacucuggugg

SEQ ID NO: 2660295 - RNA, 19 nt, Artificial Sequence
  Description of Artificial Sequence: Synthetic oligonucleotide
cucgaaauacucugguggg

SEQ ID NO: 2660296 - RNA, 19 nt, Artificial Sequence
  Description of Artificial Sequence: Synthetic oligonucleotide
uuaagagguuuccaaggga

SEQ ID NO: 2660297 - RNA, 19 nt, Artificial Sequence
  Description of Artificial Sequence: Synthetic oligonucleotide
gcuagugucagcuggagag

SEQ ID NO: 2660298 - RNA, 19 nt, Artificial Sequence
  Description of Artificial Sequence: Synthetic oligonucleotide
gcugcaaucucucugcugg

SEQ ID NO: 2660299 - RNA, 19 nt, Artificial Sequence
  Description of Artificial Sequence: Synthetic oligonucleotide
gauccagccauuucaagca

SEQ ID NO: 2660300 - RNA, 19 nt, Artificial Sequence
  Description of Artificial Sequence: Synthetic oligonucleotide
acucccacgaauugaaucu

SEQ ID NO: 2660301 - RNA, 19 nt, Artificial Sequence
  Description of Artificial Sequence: Synthetic oligonucleotide
gauggaggucaucuuaccc

SEQ ID NO: 2660302 - RNA, 19 nt, Artificial Sequence
  Description of Artificial Sequence: Synthetic oligonucleotide
cucucauucguacaaugag

SEQ ID NO: 2660303 - RNA, 19 nt, Artificial Sequence
  Description of Artificial Sequence: Synthetic oligonucleotide
acuguaguucucucauucg

SEQ ID NO: 2660304 - RNA, 19 nt, Artificial Sequence
  Description of Artificial Sequence: Synthetic oligonucleotide
ucucucauucguacaauga

SEQ ID NO: 2660305 - RNA, 19 nt, Artificial Sequence
  Description of Artificial Sequence: Synthetic oligonucleotide
ucguacaaugagaaacuug

SEQ ID NO: 2660306 - RNA, 19 nt, Artificial Sequence
  Description of Artificial Sequence: Synthetic oligonucleotide
aggauguaggcucggauug

SEQ ID NO: 2660307 - RNA, 19 nt, Artificial Sequence
  Description of Artificial Sequence: Synthetic oligonucleotide
agauggaggucaucuuacc

SEQ ID NO: 2660308 - RNA, 19 nt, Artificial Sequence
  Description of Artificial Sequence: Synthetic oligonucleotide
uccucuucauaccagcgcu

SEQ ID NO: 2660309 - RNA, 19 nt, Artificial Sequence
  Description of Artificial Sequence: Synthetic oligonucleotide
gaaaccacggagucugagc

SEQ ID NO: 2660310 - RNA, 19 nt, Artificial Sequence
  Description of Artificial Sequence: Synthetic oligonucleotide
gagucugagccaugggucg

SEQ ID NO: 2660311 - RNA, 19 nt, Artificial Sequence
  Description of Artificial Sequence: Synthetic oligonucleotide
agaaacuuguugcucagaa

SEQ ID NO: 2660312 - RNA, 19 nt, Artificial Sequence
  Description of Artificial Sequence: Synthetic oligonucleotide
ucaugcucucgguaaaacc

SEQ ID NO: 2660313 - RNA, 19 nt, Artificial Sequence
  Description of Artificial Sequence: Synthetic oligonucleotide
cuuuccacaguacuuagca

SEQ ID NO: 2660314 - RNA, 19 nt, Artificial Sequence
  Description of Artificial Sequence: Synthetic oligonucleotide
ugggcaaggauguaggcuc

SEQ ID NO: 2660315 - RNA, 19 nt, Artificial Sequence
  Description of Artificial Sequence: Synthetic oligonucleotide
gguaaaucagugcaugggc

SEQ ID NO: 2660316 - RNA, 19 nt, Artificial Sequence
  Description of Artificial Sequence: Synthetic oligonucleotide
agcacacaggaccacggcg

SEQ ID NO: 2660317 - RNA, 19 nt, Artificial Sequence
  Description of Artificial Sequence: Synthetic oligonucleotide
ucagaaucugcugaugaac

SEQ ID NO: 2660318 - RNA, 19 nt, Artificial Sequence
  Description of Artificial Sequence: Synthetic oligonucleotide
aggguaaaucagugcaugg

SEQ ID NO: 2660319 - RNA, 19 nt, Artificial Sequence
  Description of Artificial Sequence: Synthetic oligonucleotide
caguuaagagguuuccaag

SEQ ID NO: 2660320 - RNA, 19 nt, Artificial Sequence
  Description of Artificial Sequence: Synthetic oligonucleotide
uguagcacacaggaccacg

SEQ ID NO: 2660321 - RNA, 19 nt, Artificial Sequence
  Description of Artificial Sequence: Synthetic oligonucleotide
aucuuugugggcaaggaug

SEQ ID NO: 2660322 - RNA, 19 nt, Artificial Sequence
  Description of Artificial Sequence: Synthetic oligonucleotide
ugagaaacuuguugcucag

SEQ ID NO: 2660323 - RNA, 19 nt, Artificial Sequence
  Description of Artificial Sequence: Synthetic oligonucleotide
uuucaagcaggcaguuaag

SEQ ID NO: 2660324 - RNA, 19 nt, Artificial Sequence
  Description of Artificial Sequence: Synthetic oligonucleotide
uccacuguaguucucucau

SEQ ID NO: 2660325 - RNA, 19 nt, Artificial Sequence
  Description of Artificial Sequence: Synthetic oligonucleotide
uucauaccagcgcugcuca

SEQ ID NO: 2660326 - RNA, 19 nt, Artificial Sequence
  Description of Artificial Sequence: Synthetic oligonucleotide
gaaucugcugaugaacagc

SEQ ID NO: 2660327 - RNA, 19 nt, Artificial Sequence
  Description of Artificial Sequence: Synthetic oligonucleotide
caugaacuccaccagccgc

SEQ ID NO: 2660328 - RNA, 19 nt, Artificial Sequence
  Description of Artificial Sequence: Synthetic oligonucleotide
uucucucauucguacaaug

SEQ ID NO: 2660329 - RNA, 19 nt, Artificial Sequence
  Description of Artificial Sequence: Synthetic oligonucleotide
ucucucugcuggcagaaac

SEQ ID NO: 2660330 - RNA, 19 nt, Artificial Sequence
  Description of Artificial Sequence: Synthetic oligonucleotide
guaguucucucauucguac

SEQ ID NO: 2660331 - RNA, 19 nt, Artificial Sequence
  Description of Artificial Sequence: Synthetic oligonucleotide
aaaucagugcaugggcuug

SEQ ID NO: 2660332 - RNA, 19 nt, Artificial Sequence
  Description of Artificial Sequence: Synthetic oligonucleotide
cucggauuggcccacuggc

SEQ ID NO: 2660333 - RNA, 19 nt, Artificial Sequence
  Description of Artificial Sequence: Synthetic oligonucleotide
uccagccauuucaagcagg

SEQ ID NO: 2660334 - RNA, 19 nt, Artificial Sequence
  Description of Artificial Sequence: Synthetic oligonucleotide
aguucucucauucguacaa

SEQ ID NO: 2660335 - RNA, 19 nt, Artificial Sequence
  Description of Artificial Sequence: Synthetic oligonucleotide
gauggcaucuuugugggca

SEQ ID NO: 2660336 - RNA, 19 nt, Artificial Sequence
  Description of Artificial Sequence: Synthetic oligonucleotide
uguaguucucucauucgua

SEQ ID NO: 2660337 - RNA, 19 nt, Artificial Sequence
  Description of Artificial Sequence: Synthetic oligonucleotide
ucccacgaauugaaucugg

SEQ ID NO: 2660338 - RNA, 19 nt, Artificial Sequence
  Description of Artificial Sequence: Synthetic oligonucleotide
aagagguuuccaagggagg

SEQ ID NO: 2660339 - RNA, 19 nt, Artificial Sequence
  Description of Artificial Sequence: Synthetic oligonucleotide
uguggcgugcucgaaauac

SEQ ID NO: 2660340 - RNA, 19 nt, Artificial Sequence
  Description of Artificial Sequence: Synthetic oligonucleotide
ucaggcuugaucagggcua

SEQ ID NO: 2660341 - RNA, 19 nt, Artificial Sequence
  Description of Artificial Sequence: Synthetic oligonucleotide
cugcugaugaacagccucc

SEQ ID NO: 2660342 - RNA, 19 nt, Artificial Sequence
  Description of Artificial Sequence: Synthetic oligonucleotide
cacuguaguucucucauuc

SEQ ID NO: 2660343 - RNA, 19 nt, Artificial Sequence
  Description of Artificial Sequence: Synthetic oligonucleotide
cucucgguaaaaccugcgg

SEQ ID NO: 2660344 - RNA, 19 nt, Artificial Sequence
  Description of Artificial Sequence: Synthetic oligonucleotide
ugagccaugggucguguuc

SEQ ID NO: 2660345 - RNA, 19 nt, Artificial Sequence
  Description of Artificial Sequence: Synthetic oligonucleotide
agccugaggacuucgcaag

SEQ ID NO: 2660346 - RNA, 19 nt, Artificial Sequence
  Description of Artificial Sequence: Synthetic oligonucleotide
gucagcuacacaguggaug

SEQ ID NO: 2660347 - RNA, 19 nt, Artificial Sequence
  Description of Artificial Sequence: Synthetic oligonucleotide
cucauucguacaaugagaa

SEQ ID NO: 2660348 - RNA, 19 nt, Artificial Sequence
  Description of Artificial Sequence: Synthetic oligonucleotide
aacuuguugcucagaaucu

SEQ ID NO: 2660349 - RNA, 19 nt, Artificial Sequence
  Description of Artificial Sequence: Synthetic oligonucleotide
ucuggugggucccaucagu

SEQ ID NO: 2660350 - RNA, 19 nt, Artificial Sequence
  Description of Artificial Sequence: Synthetic oligonucleotide
uaaaucagugcaugggcuu

SEQ ID NO: 2660351 - RNA, 19 nt, Artificial Sequence
  Description of Artificial Sequence: Synthetic oligonucleotide
ugucagugaggcccaaacu

SEQ ID NO: 2660352 - RNA, 19 nt, Artificial Sequence
  Description of Artificial Sequence: Synthetic oligonucleotide
aaaacgcccuucaugcucu

SEQ ID NO: 2660353 - RNA, 19 nt, Artificial Sequence
  Description of Artificial Sequence: Synthetic oligonucleotide
uggaggucaucuuaccccu

SEQ ID NO: 2660354 - RNA, 19 nt, Artificial Sequence
  Description of Artificial Sequence: Synthetic oligonucleotide
ugaggcccaaacucccacg

SEQ ID NO: 2660355 - RNA, 19 nt, Artificial Sequence
  Description of Artificial Sequence: Synthetic oligonucleotide
auucguacaaugagaaacu

SEQ ID NO: 2660356 - RNA, 19 nt, Artificial Sequence
  Description of Artificial Sequence: Synthetic oligonucleotide
cucucugcuggcagaaacc

SEQ ID NO: 2660357 - RNA, 19 nt, Artificial Sequence
  Description of Artificial Sequence: Synthetic oligonucleotide
uugauccagccauuucaag

SEQ ID NO: 2660358 - RNA, 19 nt, Artificial Sequence
  Description of Artificial Sequence: Synthetic oligonucleotide
uuucuggacuguagcacac

SEQ ID NO: 2660359 - RNA, 19 nt, Artificial Sequence
  Description of Artificial Sequence: Synthetic oligonucleotide
uucaagcaggcaguuaaga

SEQ ID NO: 2660360 - RNA, 19 nt, Artificial Sequence
  Description of Artificial Sequence: Synthetic oligonucleotide
ugggugggcaaccgcauca

SEQ ID NO: 2660361 - RNA, 19 nt, Artificial Sequence
  Description of Artificial Sequence: Synthetic oligonucleotide
aggucaucuuaccccuggc

SEQ ID NO: 2660362 - RNA, 19 nt, Artificial Sequence
  Description of Artificial Sequence: Synthetic oligonucleotide
aggacuucgcaagauggag

SEQ ID NO: 2660363 - RNA, 19 nt, Artificial Sequence
  Description of Artificial Sequence: Synthetic oligonucleotide
uuaccccuggcuuuccaca

SEQ ID NO: 2660364 - RNA, 19 nt, Artificial Sequence
  Description of Artificial Sequence: Synthetic oligonucleotide
uggccaugaacuccaccag

SEQ ID NO: 2660365 - RNA, 19 nt, Artificial Sequence
  Description of Artificial Sequence: Synthetic oligonucleotide
ucgguaaaaccugcggcag

SEQ ID NO: 2660366 - RNA, 19 nt, Artificial Sequence
  Description of Artificial Sequence: Synthetic oligonucleotide
acgcccuucaugcucucgg

SEQ ID NO: 2660367 - RNA, 19 nt, Artificial Sequence
  Description of Artificial Sequence: Synthetic oligonucleotide
acucuggugggucccauca

SEQ ID NO: 2660368 - RNA, 19 nt, Artificial Sequence
  Description of Artificial Sequence: Synthetic oligonucleotide
aacuccaccagccgcugau

SEQ ID NO: 2660369 - RNA, 19 nt, Artificial Sequence
  Description of Artificial Sequence: Synthetic oligonucleotide
aggcaguuaagagguuucc

SEQ ID NO: 2660370 - RNA, 19 nt, Artificial Sequence
  Description of Artificial Sequence: Synthetic oligonucleotide
agcgcugcucacugaaguc

SEQ ID NO: 2660371 - RNA, 19 nt, Artificial Sequence
  Description of Artificial Sequence: Synthetic oligonucleotide
ucggauuggcccacuggcc

SEQ ID NO: 2660372 - RNA, 19 nt, Artificial Sequence
  Description of Artificial Sequence: Synthetic oligonucleotide
cucgguaaaaccugcggca

SEQ ID NO: 2660373 - RNA, 19 nt, Artificial Sequence
  Description of Artificial Sequence: Synthetic oligonucleotide
auaccagcgcugcucacug

SEQ ID NO: 2660374 - RNA, 19 nt, Artificial Sequence
  Description of Artificial Sequence: Synthetic oligonucleotide
ugaucagggcuagugucag

SEQ ID NO: 2660375 - RNA, 19 nt, Artificial Sequence
  Description of Artificial Sequence: Synthetic oligonucleotide
guuuggggcuuccuguuug

SEQ ID NO: 2660376 - RNA, 19 nt, Artificial Sequence
  Description of Artificial Sequence: Synthetic oligonucleotide
ucaucuuaccccuggcuuu

SEQ ID NO: 2660377 - RNA, 19 nt, Artificial Sequence
  Description of Artificial Sequence: Synthetic oligonucleotide
agugcaugggcuugaucca

SEQ ID NO: 2660378 - RNA, 19 nt, Artificial Sequence
  Description of Artificial Sequence: Synthetic oligonucleotide
ggguaaaucagugcauggg

SEQ ID NO: 2660379 - RNA, 19 nt, Artificial Sequence
  Description of Artificial Sequence: Synthetic oligonucleotide
uuccgggugucagugaggc

SEQ ID NO: 2660380 - RNA, 19 nt, Artificial Sequence
  Description of Artificial Sequence: Synthetic oligonucleotide
agagguuuccaagggagga

SEQ ID NO: 2660381 - RNA, 19 nt, Artificial Sequence
  Description of Artificial Sequence: Synthetic oligonucleotide
caugcucucgguaaaaccu

SEQ ID NO: 2660382 - RNA, 19 nt, Artificial Sequence
  Description of Artificial Sequence: Synthetic oligonucleotide
uaguucucucauucguaca

SEQ ID NO: 2660383 - RNA, 19 nt, Artificial Sequence
  Description of Artificial Sequence: Synthetic oligonucleotide
cugcucacugaagucaggg

SEQ ID NO: 2660384 - RNA, 19 nt, Artificial Sequence
  Description of Artificial Sequence: Synthetic oligonucleotide
ugugggcaaggauguaggc

SEQ ID NO: 2660385 - RNA, 19 nt, Artificial Sequence
  Description of Artificial Sequence: Synthetic oligonucleotide
gauguaggcucggauuggc

SEQ ID NO: 2660386 - RNA, 19 nt, Artificial Sequence
  Description of Artificial Sequence: Synthetic oligonucleotide
ucacugaagucagggaaga

SEQ ID NO: 2660387 - RNA, 19 nt, Artificial Sequence
  Description of Artificial Sequence: Synthetic oligonucleotide
gcagaaaccacggagucug

SEQ ID NO: 2660388 - RNA, 19 nt, Artificial Sequence
  Description of Artificial Sequence: Synthetic oligonucleotide
uaaaaccugcggcagucuu

SEQ ID NO: 2660389 - RNA, 19 nt, Artificial Sequence
  Description of Artificial Sequence: Synthetic oligonucleotide
cuucgcaagauggagguca

SEQ ID NO: 2660390 - RNA, 19 nt, Artificial Sequence
  Description of Artificial Sequence: Synthetic oligonucleotide
caaacucccacgaauugaa

SEQ ID NO: 2660391 - RNA, 19 nt, Artificial Sequence
  Description of Artificial Sequence: Synthetic oligonucleotide
uggcagaaaccacggaguc

SEQ ID NO: 2660392 - RNA, 19 nt, Artificial Sequence
  Description of Artificial Sequence: Synthetic oligonucleotide
acuuguugcucagaaucug

SEQ ID NO: 2660393 - RNA, 19 nt, Artificial Sequence
  Description of Artificial Sequence: Synthetic oligonucleotide
ucauucguacaaugagaaa

SEQ ID NO: 2660394 - RNA, 19 nt, Artificial Sequence
  Description of Artificial Sequence: Synthetic oligonucleotide
caucaguguccuccaaagc

SEQ ID NO: 2660395 - RNA, 19 nt, Artificial Sequence
  Description of Artificial Sequence: Synthetic oligonucleotide
agagccugaggacuucgca

SEQ ID NO: 2660396 - RNA, 19 nt, Artificial Sequence
  Description of Artificial Sequence: Synthetic oligonucleotide
cuucauaccagcgcugcuc

SEQ ID NO: 2660397 - RNA, 19 nt, Artificial Sequence
  Description of Artificial Sequence: Synthetic oligonucleotide
cucuucauaccagcgcugc

SEQ ID NO: 2660398 - RNA, 19 nt, Artificial Sequence
  Description of Artificial Sequence: Synthetic oligonucleotide
uccuguuugucagcuacac

SEQ ID NO: 2660399 - RNA, 19 nt, Artificial Sequence
  Description of Artificial Sequence: Synthetic oligonucleotide
gacuucgcaagauggaggu

SEQ ID NO: 2660400 - RNA, 19 nt, Artificial Sequence
  Description of Artificial Sequence: Synthetic oligonucleotide
ugcucacugaagucaggga

SEQ ID NO: 2660401 - RNA, 19 nt, Artificial Sequence
  Description of Artificial Sequence: Synthetic oligonucleotide
cagugaggcccaaacuccc

SEQ ID NO: 2660402 - RNA, 19 nt, Artificial Sequence
  Description of Artificial Sequence: Synthetic oligonucleotide
ggucccaucaguguccucc

SEQ ID NO: 2660403 - RNA, 19 nt, Artificial Sequence
  Description of Artificial Sequence: Synthetic oligonucleotide
ucuucauaccagcgcugcu

SEQ ID NO: 2660404 - RNA, 19 nt, Artificial Sequence
  Description of Artificial Sequence: Synthetic oligonucleotide
cugaggacuucgcaagaug

SEQ ID NO: 2660405 - RNA, 19 nt, Artificial Sequence
  Description of Artificial Sequence: Synthetic oligonucleotide
cuuaccccuggcuuuccac

SEQ ID NO: 2660406 - RNA, 19 nt, Artificial Sequence
  Description of Artificial Sequence: Synthetic oligonucleotide
uucaugcucucgguaaaac

SEQ ID NO: 2660407 - RNA, 19 nt, Artificial Sequence
  Description of Artificial Sequence: Synthetic oligonucleotide
aaucucucugcuggcagaa

SEQ ID NO: 2660408 - RNA, 19 nt, Artificial Sequence
  Description of Artificial Sequence: Synthetic oligonucleotide
uggcgugcucgaaauacuc

SEQ ID NO: 2660409 - RNA, 19 nt, Artificial Sequence
  Description of Artificial Sequence: Synthetic oligonucleotide
uccaaagcuggauggcauc

SEQ ID NO: 2660410 - RNA, 19 nt, Artificial Sequence
  Description of Artificial Sequence: Synthetic oligonucleotide
guuuccaagggaggacagg

SEQ ID NO: 2660411 - RNA, 19 nt, Artificial Sequence
  Description of Artificial Sequence: Synthetic oligonucleotide
aaccacggagucugagcca

SEQ ID NO: 2660412 - RNA, 19 nt, Artificial Sequence
  Description of Artificial Sequence: Synthetic oligonucleotide
gugggcaaccgcaucaggc

SEQ ID NO: 2660413 - RNA, 19 nt, Artificial Sequence
  Description of Artificial Sequence: Synthetic oligonucleotide
aauacucugguggguccca

SEQ ID NO: 2660414 - RNA, 19 nt, Artificial Sequence
  Description of Artificial Sequence: Synthetic oligonucleotide
ugggucguguuccgggugu

SEQ ID NO: 2660415 - RNA, 19 nt, Artificial Sequence
  Description of Artificial Sequence: Synthetic oligonucleotide
aaucagugcaugggcuuga

SEQ ID NO: 2660416 - RNA, 19 nt, Artificial Sequence
  Description of Artificial Sequence: Synthetic oligonucleotide
cuagugucagcuggagagc

SEQ ID NO: 2660417 - RNA, 19 nt, Artificial Sequence
  Description of Artificial Sequence: Synthetic oligonucleotide
cuggugggucccaucagug

SEQ ID NO: 2660418 - RNA, 19 nt, Artificial Sequence
  Description of Artificial Sequence: Synthetic oligonucleotide
ucgaaauacucuggugggu

SEQ ID NO: 2660419 - RNA, 19 nt, Artificial Sequence
  Description of Artificial Sequence: Synthetic oligonucleotide
cacggagucugagccaugg

SEQ ID NO: 2660420 - RNA, 19 nt, Artificial Sequence
  Description of Artificial Sequence: Synthetic oligonucleotide
ccacgaauugaaucugggg

SEQ ID NO: 2660421 - RNA, 19 nt, Artificial Sequence
  Description of Artificial Sequence: Synthetic oligonucleotide
auguaggcucggauuggcc

SEQ ID NO: 2660422 - RNA, 19 nt, Artificial Sequence
  Description of Artificial Sequence: Synthetic oligonucleotide
uugcucagaaucugcugau

SEQ ID NO: 2660423 - RNA, 19 nt, Artificial Sequence
  Description of Artificial Sequence: Synthetic oligonucleotide
ucuuaccccuggcuuucca

SEQ ID NO: 2660424 - RNA, 19 nt, Artificial Sequence
  Description of Artificial Sequence: Synthetic oligonucleotide
gcaguuaagagguuuccaa

SEQ ID NO: 2660425 - RNA, 19 nt, Artificial Sequence
  Description of Artificial Sequence: Synthetic oligonucleotide
agcugcaaucucucugcug

SEQ ID NO: 2660426 - RNA, 19 nt, Artificial Sequence
  Description of Artificial Sequence: Synthetic oligonucleotide
gaggcccaaacucccacga

SEQ ID NO: 2660427 - RNA, 19 nt, Artificial Sequence
  Description of Artificial Sequence: Synthetic oligonucleotide
ggacuucgcaagauggagg

SEQ ID NO: 2660428 - RNA, 19 nt, Artificial Sequence
  Description of Artificial Sequence: Synthetic oligonucleotide
agguuuccaagggaggaca

SEQ ID NO: 2660429 - RNA, 19 nt, Artificial Sequence
  Description of Artificial Sequence: Synthetic oligonucleotide
augaacuccaccagccgcu

SEQ ID NO: 2660430 - RNA, 19 nt, Artificial Sequence
  Description of Artificial Sequence: Synthetic oligonucleotide
aaacgcccuucaugcucuc

SEQ ID NO: 2660431 - RNA, 19 nt, Artificial Sequence
  Description of Artificial Sequence: Synthetic oligonucleotide
cuccaccagccgcugauag

SEQ ID NO: 2660432 - RNA, 19 nt, Artificial Sequence
  Description of Artificial Sequence: Synthetic oligonucleotide
aguacuuagcaggguaaau

SEQ ID NO: 2660433 - RNA, 19 nt, Artificial Sequence
  Description of Artificial Sequence: Synthetic oligonucleotide
guaggcucggauuggccca

SEQ ID NO: 2660434 - RNA, 19 nt, Artificial Sequence
  Description of Artificial Sequence: Synthetic oligonucleotide
caucaggcuugaucagggc

SEQ ID NO: 2660435 - RNA, 19 nt, Artificial Sequence
  Description of Artificial Sequence: Synthetic oligonucleotide
uggugggucccaucagugu

SEQ ID NO: 2660436 - RNA, 19 nt, Artificial Sequence
  Description of Artificial Sequence: Synthetic oligonucleotide
aacgcccuucaugcucucg

SEQ ID NO: 2660437 - RNA, 19 nt, Artificial Sequence
  Description of Artificial Sequence: Synthetic oligonucleotide
ugcucagaaucugcugaug

SEQ ID NO: 2660438 - RNA, 19 nt, Artificial Sequence
  Description of Artificial Sequence: Synthetic oligonucleotide
acggagucugagccauggg

SEQ ID NO: 2660439 - RNA, 19 nt, Artificial Sequence
  Description of Artificial Sequence: Synthetic oligonucleotide
uucgcaagauggaggucau

SEQ ID NO: 2660440 - RNA, 19 nt, Artificial Sequence
  Description of Artificial Sequence: Synthetic oligonucleotide
gcgugcucgaaauacucug

SEQ ID NO: 2660441 - RNA, 19 nt, Artificial Sequence
  Description of Artificial Sequence: Synthetic oligonucleotide
accagcgcugcucacugaa

SEQ ID NO: 2660442 - RNA, 19 nt, Artificial Sequence
  Description of Artificial Sequence: Synthetic oligonucleotide
cacaguacuuagcagggua

SEQ ID NO: 2660443 - RNA, 19 nt, Artificial Sequence
  Description of Artificial Sequence: Synthetic oligonucleotide
cguacaaugagaaacuugu

SEQ ID NO: 2660444 - RNA, 19 nt, Artificial Sequence
  Description of Artificial Sequence: Synthetic oligonucleotide
guaaaucagugcaugggcu

SEQ ID NO: 2660445 - RNA, 19 nt, Artificial Sequence
  Description of Artificial Sequence: Synthetic oligonucleotide
gcucacugaagucagggaa

SEQ ID NO: 2660446 - RNA, 19 nt, Artificial Sequence
  Description of Artificial Sequence: Synthetic oligonucleotide
uucguacaaugagaaacuu

SEQ ID NO: 2660447 - RNA, 19 nt, Artificial Sequence
  Description of Artificial Sequence: Synthetic oligonucleotide
gaaacuuguugcucagaau

SEQ ID NO: 2660448 - RNA, 19 nt, Artificial Sequence
  Description of Artificial Sequence: Synthetic oligonucleotide
ggugggucccaucaguguc

SEQ ID NO: 2660449 - RNA, 19 nt, Artificial Sequence
  Description of Artificial Sequence: Synthetic oligonucleotide
cccacgaauugaaucuggg

SEQ ID NO: 2660450 - RNA, 19 nt, Artificial Sequence
  Description of Artificial Sequence: Synthetic oligonucleotide
gaucagggcuagugucagc

SEQ ID NO: 2660451 - RNA, 19 nt, Artificial Sequence
  Description of Artificial Sequence: Synthetic oligonucleotide
acaguacuuagcaggguaa

SEQ ID NO: 2660452 - RNA, 19 nt, Artificial Sequence
  Description of Artificial Sequence: Synthetic oligonucleotide
cugcaaucucucugcuggc

SEQ ID NO: 2660453 - RNA, 19 nt, Artificial Sequence
  Description of Artificial Sequence: Synthetic oligonucleotide
augcucucgguaaaaccug

SEQ ID NO: 2660454 - RNA, 19 nt, Artificial Sequence
  Description of Artificial Sequence: Synthetic oligonucleotide
agccaugggucguguuccg

SEQ ID NO: 2660455 - RNA, 19 nt, Artificial Sequence
  Description of Artificial Sequence: Synthetic oligonucleotide
gaggacuucgcaagaugga

SEQ ID NO: 2660456 - RNA, 19 nt, Artificial Sequence
  Description of Artificial Sequence: Synthetic oligonucleotide
gccaugaacuccaccagcc

SEQ ID NO: 2660457 - RNA, 19 nt, Artificial Sequence
  Description of Artificial Sequence: Synthetic oligonucleotide
accacggcgcagcuggggu

SEQ ID NO: 2660458 - RNA, 19 nt, Artificial Sequence
  Description of Artificial Sequence: Synthetic oligonucleotide
gugaggcccaaacucccac

SEQ ID NO: 2660459 - RNA, 19 nt, Artificial Sequence
  Description of Artificial Sequence: Synthetic oligonucleotide
ugggguuccuccucuucau

SEQ ID NO: 2660460 - RNA, 19 nt, Artificial Sequence
  Description of Artificial Sequence: Synthetic oligonucleotide
ccaugggucguguuccggg

SEQ ID NO: 2660461 - RNA, 19 nt, Artificial Sequence
  Description of Artificial Sequence: Synthetic oligonucleotide
gucguguuccgggugucag

SEQ ID NO: 2660462 - RNA, 19 nt, Artificial Sequence
  Description of Artificial Sequence: Synthetic oligonucleotide
cagugggugggcaaccgca

SEQ ID NO: 2660463 - RNA, 19 nt, Artificial Sequence
  Description of Artificial Sequence: Synthetic oligonucleotide
caaucucucugcuggcaga

SEQ ID NO: 2660464 - RNA, 19 nt, Artificial Sequence
  Description of Artificial Sequence: Synthetic oligonucleotide
aucuuaccccuggcuuucc

SEQ ID NO: 2660465 - RNA, 19 nt, Artificial Sequence
  Description of Artificial Sequence: Synthetic oligonucleotide
ucguguuccgggugucagu

SEQ ID NO: 2660466 - RNA, 19 nt, Artificial Sequence
  Description of Artificial Sequence: Synthetic oligonucleotide
gcucggauuggcccacugg

SEQ ID NO: 2660467 - RNA, 19 nt, Artificial Sequence
  Description of Artificial Sequence: Synthetic oligonucleotide
caucuuaccccuggcuuuc

SEQ ID NO: 2660468 - RNA, 19 nt, Artificial Sequence
  Description of Artificial Sequence: Synthetic oligonucleotide
acuucgcaagauggagguc

SEQ ID NO: 2660469 - RNA, 19 nt, Artificial Sequence
  Description of Artificial Sequence: Synthetic oligonucleotide
ugucagcuacacaguggau

SEQ ID NO: 2660470 - RNA, 19 nt, Artificial Sequence
  Description of Artificial Sequence: Synthetic oligonucleotide
gucaucuuaccccuggcuu

SEQ ID NO: 2660471 - RNA, 19 nt, Artificial Sequence
  Description of Artificial Sequence: Synthetic oligonucleotide
ggauguaggcucggauugg

SEQ ID NO: 2660472 - RNA, 19 nt, Artificial Sequence
  Description of Artificial Sequence: Synthetic oligonucleotide
gugcaugggcuugauccag

SEQ ID NO: 2660473 - RNA, 19 nt, Artificial Sequence
  Description of Artificial Sequence: Synthetic oligonucleotide
accacggagucugagccau

SEQ ID NO: 2660474 - RNA, 19 nt, Artificial Sequence
  Description of Artificial Sequence: Synthetic oligonucleotide
caggcuugaucagggcuag

SEQ ID NO: 2660475 - RNA, 19 nt, Artificial Sequence
  Description of Artificial Sequence: Synthetic oligonucleotide
ccaugaacuccaccagccg

SEQ ID NO: 2660476 - RNA, 19 nt, Artificial Sequence
  Description of Artificial Sequence: Synthetic oligonucleotide
cucuggugggucccaucag

SEQ ID NO: 2660477 - RNA, 19 nt, Artificial Sequence
  Description of Artificial Sequence: Synthetic oligonucleotide
cucccacgaauugaaucug

SEQ ID NO: 2660478 - RNA, 19 nt, Artificial Sequence
  Description of Artificial Sequence: Synthetic oligonucleotide
aaacucccacgaauugaau

SEQ ID NO: 2660479 - RNA, 19 nt, Artificial Sequence
  Description of Artificial Sequence: Synthetic oligonucleotide
gaccacggcgcagcugggg

SEQ ID NO: 2660480 - RNA, 19 nt, Artificial Sequence
  Description of Artificial Sequence: Synthetic oligonucleotide
ucauaccagcgcugcucac

SEQ ID NO: 2660481 - RNA, 19 nt, Artificial Sequence
  Description of Artificial Sequence: Synthetic oligonucleotide
cagccuccaggaccagugg

SEQ ID NO: 2660482 - RNA, 19 nt, Artificial Sequence
  Description of Artificial Sequence: Synthetic oligonucleotide
cugguuuggggcuuccugu

SEQ ID NO: 2660483 - RNA, 19 nt, Artificial Sequence
  Description of Artificial Sequence: Synthetic oligonucleotide
ggugggcaaccgcaucagg

SEQ ID NO: 2660484 - RNA, 19 nt, Artificial Sequence
  Description of Artificial Sequence: Synthetic oligonucleotide
gcugaugaacagccuccag

SEQ ID NO: 2660485 - RNA, 19 nt, Artificial Sequence
  Description of Artificial Sequence: Synthetic oligonucleotide
ugggcuugauccagccauu

SEQ ID NO: 2660486 - RNA, 19 nt, Artificial Sequence
  Description of Artificial Sequence: Synthetic oligonucleotide
uacucuggugggucccauc

SEQ ID NO: 2660487 - RNA, 19 nt, Artificial Sequence
  Description of Artificial Sequence: Synthetic oligonucleotide
gaccagugggugggcaacc

SEQ ID NO: 2660488 - RNA, 19 nt, Artificial Sequence
  Description of Artificial Sequence: Synthetic oligonucleotide
ucugagccaugggucgugu

SEQ ID NO: 2660489 - RNA, 19 nt, Artificial Sequence
  Description of Artificial Sequence: Synthetic oligonucleotide
gguuuccaagggaggacag

SEQ ID NO: 2660490 - RNA, 19 nt, Artificial Sequence
  Description of Artificial Sequence: Synthetic oligonucleotide
ggagagccugaggacuucg

SEQ ID NO: 2660491 - RNA, 19 nt, Artificial Sequence
  Description of Artificial Sequence: Synthetic oligonucleotide
cauguggcgugcucgaaau

SEQ ID NO: 2660492 - RNA, 19 nt, Artificial Sequence
  Description of Artificial Sequence: Synthetic oligonucleotide
gugcucgaaauacucuggu

SEQ ID NO: 2660493 - RNA, 19 nt, Artificial Sequence
  Description of Artificial Sequence: Synthetic oligonucleotide
agugaggcccaaacuccca

SEQ ID NO: 2660494 - RNA, 19 nt, Artificial Sequence
  Description of Artificial Sequence: Synthetic oligonucleotide
agucugagccaugggucgu

SEQ ID NO: 2660495 - RNA, 19 nt, Artificial Sequence
  Description of Artificial Sequence: Synthetic oligonucleotide
cccaaacucccacgaauug

SEQ ID NO: 2660496 - RNA, 19 nt, Artificial Sequence
  Description of Artificial Sequence: Synthetic oligonucleotide
cccacuggccaugaacucc

SEQ ID NO: 2660497 - RNA, 19 nt, Artificial Sequence
  Description of Artificial Sequence: Synthetic oligonucleotide
ggcaguuaagagguuucca

SEQ ID NO: 2660498 - RNA, 19 nt, Artificial Sequence
  Description of Artificial Sequence: Synthetic oligonucleotide
gcucucgguaaaaccugcg

SEQ ID NO: 2660499 - RNA, 19 nt, Artificial Sequence
  Description of Artificial Sequence: Synthetic oligonucleotide
agggcuagugucagcugga

SEQ ID NO: 2660500 - RNA, 19 nt, Artificial Sequence
  Description of Artificial Sequence: Synthetic oligonucleotide
aggucugguuuggggcuuc

SEQ ID NO: 2660501 - RNA, 19 nt, Artificial Sequence
  Description of Artificial Sequence: Synthetic oligonucleotide
cagcuacacaguggaugcc

SEQ ID NO: 2660502 - RNA, 19 nt, Artificial Sequence
  Description of Artificial Sequence: Synthetic oligonucleotide
gggcaaggauguaggcucg

SEQ ID NO: 2660503 - RNA, 19 nt, Artificial Sequence
  Description of Artificial Sequence: Synthetic oligonucleotide
uaggcucggauuggcccac

SEQ ID NO: 2660504 - RNA, 19 nt, Artificial Sequence
  Description of Artificial Sequence: Synthetic oligonucleotide
gugggcaaggauguaggcu

SEQ ID NO: 2660505 - RNA, 19 nt, Artificial Sequence
  Description of Artificial Sequence: Synthetic oligonucleotide
uaccagcgcugcucacuga

SEQ ID NO: 2660506 - RNA, 19 nt, Artificial Sequence
  Description of Artificial Sequence: Synthetic oligonucleotide
aggcccaaacucccacgaa

SEQ ID NO: 2660507 - RNA, 19 nt, Artificial Sequence
  Description of Artificial Sequence: Synthetic oligonucleotide
caguacuuagcaggguaaa

SEQ ID NO: 2660508 - RNA, 19 nt, Artificial Sequence
  Description of Artificial Sequence: Synthetic oligonucleotide
ggcaaccgcaucaggcuug

SEQ ID NO: 2660509 - RNA, 19 nt, Artificial Sequence
  Description of Artificial Sequence: Synthetic oligonucleotide
cuguagcacacaggaccac

SEQ ID NO: 2660510 - RNA, 19 nt, Artificial Sequence
  Description of Artificial Sequence: Synthetic oligonucleotide
gcuugaucagggcuagugu

SEQ ID NO: 2660511 - RNA, 19 nt, Artificial Sequence
  Description of Artificial Sequence: Synthetic oligonucleotide
aaccugcggcagucuuccu

SEQ ID NO: 2660512 - RNA, 19 nt, Artificial Sequence
  Description of Artificial Sequence: Synthetic oligonucleotide
gugggugggcaaccgcauc

SEQ ID NO: 2660513 - RNA, 19 nt, Artificial Sequence
  Description of Artificial Sequence: Synthetic oligonucleotide
caaggauguaggcucggau

SEQ ID NO: 2660514 - RNA, 19 nt, Artificial Sequence
  Description of Artificial Sequence: Synthetic oligonucleotide
ccaaacucccacgaauuga

SEQ ID NO: 2660515 - RNA, 19 nt, Artificial Sequence
  Description of Artificial Sequence: Synthetic oligonucleotide
gcaucuuugugggcaagga

SEQ ID NO: 2660516 - RNA, 19 nt, Artificial Sequence
  Description of Artificial Sequence: Synthetic oligonucleotide
auuggcccacuggccauga

SEQ ID NO: 2660517 - RNA, 19 nt, Artificial Sequence
  Description of Artificial Sequence: Synthetic oligonucleotide
agugggugggcaaccgcau

SEQ ID NO: 2660518 - RNA, 19 nt, Artificial Sequence
  Description of Artificial Sequence: Synthetic oligonucleotide
uggagagccugaggacuuc

SEQ ID NO: 2660519 - RNA, 19 nt, Artificial Sequence
  Description of Artificial Sequence: Synthetic oligonucleotide
ggcaaggauguaggcucgg

SEQ ID NO: 2660520 - RNA, 19 nt, Artificial Sequence
  Description of Artificial Sequence: Synthetic oligonucleotide
ggucaucuuaccccuggcu

SEQ ID NO: 2660521 - RNA, 19 nt, Artificial Sequence
  Description of Artificial Sequence: Synthetic oligonucleotide
uuggggcuuccuguuuguc

SEQ ID NO: 2660522 - RNA, 19 nt, Artificial Sequence
  Description of Artificial Sequence: Synthetic oligonucleotide
ccucuucauaccagcgcug

SEQ ID NO: 2660523 - RNA, 19 nt, Artificial Sequence
  Description of Artificial Sequence: Synthetic oligonucleotide
cauaccagcgcugcucacu

SEQ ID NO: 2660524 - RNA, 19 nt, Artificial Sequence
  Description of Artificial Sequence: Synthetic oligonucleotide
ggcuagugucagcuggaga

SEQ ID NO: 2660525 - RNA, 19 nt, Artificial Sequence
  Description of Artificial Sequence: Synthetic oligonucleotide
cacggcgcagcugggguuc

SEQ ID NO: 2660526 - RNA, 19 nt, Artificial Sequence
  Description of Artificial Sequence: Synthetic oligonucleotide
ggauggcaucuuugugggc

SEQ ID NO: 2660527 - RNA, 19 nt, Artificial Sequence
  Description of Artificial Sequence: Synthetic oligonucleotide
aguguccuccaaagcugga

SEQ ID NO: 2660528 - RNA, 19 nt, Artificial Sequence
  Description of Artificial Sequence: Synthetic oligonucleotide
uaggucugguuuggggcuu

SEQ ID NO: 2660529 - RNA, 19 nt, Artificial Sequence
  Description of Artificial Sequence: Synthetic oligonucleotide
auguggcgugcucgaaaua

SEQ ID NO: 2660530 - RNA, 19 nt, Artificial Sequence
  Description of Artificial Sequence: Synthetic oligonucleotide
caugggucguguuccgggu

SEQ ID NO: 2660531 - RNA, 19 nt, Artificial Sequence
  Description of Artificial Sequence: Synthetic oligonucleotide
cauuucaagcaggcaguua

SEQ ID NO: 2660532 - RNA, 19 nt, Artificial Sequence
  Description of Artificial Sequence: Synthetic oligonucleotide
cgcugcucacugaagucag

SEQ ID NO: 2660533 - RNA, 19 nt, Artificial Sequence
  Description of Artificial Sequence: Synthetic oligonucleotide
ggaccagugggugggcaac

SEQ ID NO: 2660534 - RNA, 19 nt, Artificial Sequence
  Description of Artificial Sequence: Synthetic oligonucleotide
guguuccgggugucaguga

SEQ ID NO: 2660535 - RNA, 19 nt, Artificial Sequence
  Description of Artificial Sequence: Synthetic oligonucleotide
cagaaaccacggagucuga

SEQ ID NO: 2660536 - RNA, 19 nt, Artificial Sequence
  Description of Artificial Sequence: Synthetic oligonucleotide
cguguuccgggugucagug

SEQ ID NO: 2660537 - RNA, 19 nt, Artificial Sequence
  Description of Artificial Sequence: Synthetic oligonucleotide
guaaaaccugcggcagucu

SEQ ID NO: 2660538 - RNA, 19 nt, Artificial Sequence
  Description of Artificial Sequence: Synthetic oligonucleotide
gggcuagugucagcuggag

SEQ ID NO: 2660539 - RNA, 19 nt, Artificial Sequence
  Description of Artificial Sequence: Synthetic oligonucleotide
gcgcugcucacugaaguca

SEQ ID NO: 2660540 - RNA, 19 nt, Artificial Sequence
  Description of Artificial Sequence: Synthetic oligonucleotide
auacucuggugggucccau

SEQ ID NO: 2660541 - RNA, 19 nt, Artificial Sequence
  Description of Artificial Sequence: Synthetic oligonucleotide
ucgcaagauggaggucauc

SEQ ID NO: 2660542 - RNA, 19 nt, Artificial Sequence
  Description of Artificial Sequence: Synthetic oligonucleotide
ggcucggauuggcccacug

SEQ ID NO: 2660543 - RNA, 19 nt, Artificial Sequence
  Description of Artificial Sequence: Synthetic oligonucleotide
gccaugggucguguuccgg

SEQ ID NO: 2660544 - RNA, 19 nt, Artificial Sequence
  Description of Artificial Sequence: Synthetic oligonucleotide
guacaaugagaaacuuguu

SEQ ID NO: 2660545 - RNA, 19 nt, Artificial Sequence
  Description of Artificial Sequence: Synthetic oligonucleotide
gcgcagcugggguuccucc

SEQ ID NO: 2660546 - RNA, 19 nt, Artificial Sequence
  Description of Artificial Sequence: Synthetic oligonucleotide
guucucucauucguacaau

SEQ ID NO: 2660547 - RNA, 19 nt, Artificial Sequence
  Description of Artificial Sequence: Synthetic oligonucleotide
cagccauuucaagcaggca

SEQ ID NO: 2660548 - RNA, 19 nt, Artificial Sequence
  Description of Artificial Sequence: Synthetic oligonucleotide
aucucucugcuggcagaaa

SEQ ID NO: 2660549 - RNA, 19 nt, Artificial Sequence
  Description of Artificial Sequence: Synthetic oligonucleotide
gccugaggacuucgcaaga

SEQ ID NO: 2660550 - RNA, 19 nt, Artificial Sequence
  Description of Artificial Sequence: Synthetic oligonucleotide
ccgcaucaggcuugaucag

SEQ ID NO: 2660551 - RNA, 19 nt, Artificial Sequence
  Description of Artificial Sequence: Synthetic oligonucleotide
guggcgugcucgaaauacu

SEQ ID NO: 2660552 - RNA, 19 nt, Artificial Sequence
  Description of Artificial Sequence: Synthetic oligonucleotide
ccuccaaagcuggauggca

SEQ ID NO: 2660553 - RNA, 19 nt, Artificial Sequence
  Description of Artificial Sequence: Synthetic oligonucleotide
cuacacaguggaugccuuu

SEQ ID NO: 2660554 - RNA, 19 nt, Artificial Sequence
  Description of Artificial Sequence: Synthetic oligonucleotide
cggauuggcccacuggcca

SEQ ID NO: 2660555 - RNA, 19 nt, Artificial Sequence
  Description of Artificial Sequence: Synthetic oligonucleotide
ggcagaaaccacggagucu

SEQ ID NO: 2660556 - RNA, 19 nt, Artificial Sequence
  Description of Artificial Sequence: Synthetic oligonucleotide
cgcaagauggaggucaucu

SEQ ID NO: 2660557 - RNA, 19 nt, Artificial Sequence
  Description of Artificial Sequence: Synthetic oligonucleotide
ccauguggcgugcucgaaa

SEQ ID NO: 2660558 - RNA, 19 nt, Artificial Sequence
  Description of Artificial Sequence: Synthetic oligonucleotide
gcaaccgcaucaggcuuga

SEQ ID NO: 2660559 - RNA, 19 nt, Artificial Sequence
  Description of Artificial Sequence: Synthetic oligonucleotide
caccagccgcugauagaaa

SEQ ID NO: 2660560 - RNA, 19 nt, Artificial Sequence
  Description of Artificial Sequence: Synthetic oligonucleotide
ggcgugcucgaaauacucu

SEQ ID NO: 2660561 - RNA, 19 nt, Artificial Sequence
  Description of Artificial Sequence: Synthetic oligonucleotide
ggucguguuccggguguca

SEQ ID NO: 2660562 - RNA, 19 nt, Artificial Sequence
  Description of Artificial Sequence: Synthetic oligonucleotide
aggcuugaucagggcuagu

SEQ ID NO: 2660563 - RNA, 19 nt, Artificial Sequence
  Description of Artificial Sequence: Synthetic oligonucleotide
gcaggcaguuaagagguuu

SEQ ID NO: 2660564 - RNA, 19 nt, Artificial Sequence
  Description of Artificial Sequence: Synthetic oligonucleotide
gcccuucaugcucucggua

SEQ ID NO: 2660565 - RNA, 19 nt, Artificial Sequence
  Description of Artificial Sequence: Synthetic oligonucleotide
ccaaagcuggauggcaucu

SEQ ID NO: 2660566 - RNA, 19 nt, Artificial Sequence
  Description of Artificial Sequence: Synthetic oligonucleotide
ggaccacggcgcagcuggg

SEQ ID NO: 2660567 - RNA, 19 nt, Artificial Sequence
  Description of Artificial Sequence: Synthetic oligonucleotide
caaagcuggauggcaucuu

SEQ ID NO: 2660568 - RNA, 19 nt, Artificial Sequence
  Description of Artificial Sequence: Synthetic oligonucleotide
ccugcggcagucuuccuuu

SEQ ID NO: 2660569 - RNA, 19 nt, Artificial Sequence
  Description of Artificial Sequence: Synthetic oligonucleotide
gcccaaacucccacgaauu

SEQ ID NO: 2660570 - RNA, 19 nt, Artificial Sequence
  Description of Artificial Sequence: Synthetic oligonucleotide
gggcaaccgcaucaggcuu

SEQ ID NO: 2660571 - RNA, 19 nt, Artificial Sequence
  Description of Artificial Sequence: Synthetic oligonucleotide
aggcucggauuggcccacu

SEQ ID NO: 2660572 - RNA, 19 nt, Artificial Sequence
  Description of Artificial Sequence: Synthetic oligonucleotide
ccacggagucugagccaug

SEQ ID NO: 2660573 - RNA, 19 nt, Artificial Sequence
  Description of Artificial Sequence: Synthetic oligonucleotide
gcuacacaguggaugccuu

SEQ ID NO: 2660574 - RNA, 19 nt, Artificial Sequence
  Description of Artificial Sequence: Synthetic oligonucleotide
cugagccaugggucguguu

SEQ ID NO: 2660575 - RNA, 19 nt, Artificial Sequence
  Description of Artificial Sequence: Synthetic oligonucleotide
ccugaggacuucgcaagau

SEQ ID NO: 2660576 - RNA, 19 nt, Artificial Sequence
  Description of Artificial Sequence: Synthetic oligonucleotide
gccauguggcgugcucgaa

SEQ ID NO: 2660577 - RNA, 19 nt, Artificial Sequence
  Description of Artificial Sequence: Synthetic oligonucleotide
gggucccaucaguguccuc

SEQ ID NO: 2660578 - RNA, 19 nt, Artificial Sequence
  Description of Artificial Sequence: Synthetic oligonucleotide
cugcggcagucuuccuuuu

SEQ ID NO: 2660579 - RNA, 19 nt, Artificial Sequence
  Description of Artificial Sequence: Synthetic oligonucleotide
ccauuucaagcaggcaguu

SEQ ID NO: 2660580 - RNA, 19 nt, Artificial Sequence
  Description of Artificial Sequence: Synthetic oligonucleotide
cgguaaaaccugcggcagu

SEQ ID NO: 2660581 - RNA, 19 nt, Artificial Sequence
  Description of Artificial Sequence: Synthetic oligonucleotide
ccacuguaguucucucauu

SEQ ID NO: 2660582 - RNA, 19 nt, Artificial Sequence
  Description of Artificial Sequence: Synthetic oligonucleotide
ccacaguacuuagcagggu

SEQ ID NO: 2660583 - RNA, 19 nt, Artificial Sequence
  Description of Artificial Sequence: Synthetic oligonucleotide
cgcagcugggguuccuccu

SEQ ID NO: 2660584 - RNA, 19 nt, Artificial Sequence
  Description of Artificial Sequence: Synthetic oligonucleotide
cgcccuucaugcucucggu

SEQ ID NO: 2660585 - RNA, 19 nt, Artificial Sequence
  Description of Artificial Sequence: Synthetic oligonucleotide
caaccgcaucaggcuugau

SEQ ID NO: 2660586 - RNA, 19 nt, Artificial Sequence
  Description of Artificial Sequence: Synthetic oligonucleotide
uguaugaugaggcucaugg

SEQ ID NO: 2660587 - RNA, 19 nt, Artificial Sequence
  Description of Artificial Sequence: Synthetic oligonucleotide
aagauggucugcuuguucc

SEQ ID NO: 2660588 - RNA, 19 nt, Artificial Sequence
  Description of Artificial Sequence: Synthetic oligonucleotide
aaaucuucuuuacagauga

SEQ ID NO: 2660589 - RNA, 19 nt, Artificial Sequence
  Description of Artificial Sequence: Synthetic oligonucleotide
uuacagaugaaauugucag

SEQ ID NO: 2660590 - RNA, 19 nt, Artificial Sequence
  Description of Artificial Sequence: Synthetic oligonucleotide
aaauugucaguguugaagu

SEQ ID NO: 2660591 - RNA, 19 nt, Artificial Sequence
  Description of Artificial Sequence: Synthetic oligonucleotide
uuugucgcagacaagcacg

SEQ ID NO: 2660592 - RNA, 19 nt, Artificial Sequence
  Description of Artificial Sequence: Synthetic oligonucleotide
uccucaaugacuuugucgc

SEQ ID NO: 2660593 - RNA, 19 nt, Artificial Sequence
  Description of Artificial Sequence: Synthetic oligonucleotide
uucuuuacagaugaaauug

SEQ ID NO: 2660594 - RNA, 19 nt, Artificial Sequence
  Description of Artificial Sequence: Synthetic oligonucleotide
gaaauugucaguguugaag

SEQ ID NO: 2660595 - RNA, 19 nt, Artificial Sequence
  Description of Artificial Sequence: Synthetic oligonucleotide
agagaaagccuccacaauc

SEQ ID NO: 2660596 - RNA, 19 nt, Artificial Sequence
  Description of Artificial Sequence: Synthetic oligonucleotide
aaacgugcaguccugguag

SEQ ID NO: 2660597 - RNA, 19 nt, Artificial Sequence
  Description of Artificial Sequence: Synthetic oligonucleotide
acaauccucuccuugaagg

SEQ ID NO: 2660598 - RNA, 19 nt, Artificial Sequence
  Description of Artificial Sequence: Synthetic oligonucleotide
ugcugagaaaaucaggggc

SEQ ID NO: 2660599 - RNA, 19 nt, Artificial Sequence
  Description of Artificial Sequence: Synthetic oligonucleotide
cauguccucaaaaucagcg

SEQ ID NO: 2660600 - RNA, 19 nt, Artificial Sequence
  Description of Artificial Sequence: Synthetic oligonucleotide
cuugccaucaccauccaag

SEQ ID NO: 2660601 - RNA, 19 nt, Artificial Sequence
  Description of Artificial Sequence: Synthetic oligonucleotide
acuucuaggccccugcagc

SEQ ID NO: 2660602 - RNA, 19 nt, Artificial Sequence
  Description of Artificial Sequence: Synthetic oligonucleotide
ugcuuguuccccauggugg

SEQ ID NO: 2660603 - RNA, 19 nt, Artificial Sequence
  Description of Artificial Sequence: Synthetic oligonucleotide
ucuugaaggcauaauuugc

SEQ ID NO: 2660604 - RNA, 19 nt, Artificial Sequence
  Description of Artificial Sequence: Synthetic oligonucleotide
cuugaaggcauaauuugcc

SEQ ID NO: 2660605 - RNA, 19 nt, Artificial Sequence
  Description of Artificial Sequence: Synthetic oligonucleotide
aagucauugaaggugaggu

SEQ ID NO: 2660606 - RNA, 19 nt, Artificial Sequence
  Description of Artificial Sequence: Synthetic oligonucleotide
aauugucaguguugaaguc

SEQ ID NO: 2660607 - RNA, 19 nt, Artificial Sequence
  Description of Artificial Sequence: Synthetic oligonucleotide
uaaaucuucuuuacagaug

SEQ ID NO: 2660608 - RNA, 19 nt, Artificial Sequence
  Description of Artificial Sequence: Synthetic oligonucleotide
aaaucagcgaagcccagcu

SEQ ID NO: 2660609 - RNA, 19 nt, Artificial Sequence
  Description of Artificial Sequence: Synthetic oligonucleotide
gaaggcauaauuugccuug

SEQ ID NO: 2660610 - RNA, 19 nt, Artificial Sequence
  Description of Artificial Sequence: Synthetic oligonucleotide
aaaaucagcgaagcccagc

SEQ ID NO: 2660611 - RNA, 19 nt, Artificial Sequence
  Description of Artificial Sequence: Synthetic oligonucleotide
ucagauucggauguggaag

SEQ ID NO: 2660612 - RNA, 19 nt, Artificial Sequence
  Description of Artificial Sequence: Synthetic oligonucleotide
aucuugaaggcauaauuug

SEQ ID NO: 2660613 - RNA, 19 nt, Artificial Sequence
  Description of Artificial Sequence: Synthetic oligonucleotide
aaaucaggggccuuggcaa

SEQ ID NO: 2660614 - RNA, 19 nt, Artificial Sequence
  Description of Artificial Sequence: Synthetic oligonucleotide
acagaugaaauugucagug

SEQ ID NO: 2660615 - RNA, 19 nt, Artificial Sequence
  Description of Artificial Sequence: Synthetic oligonucleotide
agcucuaaaucuucuuuac

SEQ ID NO: 2660616 - RNA, 19 nt, Artificial Sequence
  Description of Artificial Sequence: Synthetic oligonucleotide
augacuuugucgcagacaa

SEQ ID NO: 2660617 - RNA, 19 nt, Artificial Sequence
  Description of Artificial Sequence: Synthetic oligonucleotide
aagggauucucccggagcu

SEQ ID NO: 2660618 - RNA, 19 nt, Artificial Sequence
  Description of Artificial Sequence: Synthetic oligonucleotide
auucggauguggaaggugc

SEQ ID NO: 2660619 - RNA, 19 nt, Artificial Sequence
  Description of Artificial Sequence: Synthetic oligonucleotide
gaugaaauugucaguguug

SEQ ID NO: 2660620 - RNA, 19 nt, Artificial Sequence
  Description of Artificial Sequence: Synthetic oligonucleotide
cauagaagcgcgcauggag

SEQ ID NO: 2660621 - RNA, 19 nt, Artificial Sequence
  Description of Artificial Sequence: Synthetic oligonucleotide
uugccuugagcucucgggg

SEQ ID NO: 2660622 - RNA, 19 nt, Artificial Sequence
  Description of Artificial Sequence: Synthetic oligonucleotide
ucugacuuagugagucgcg

SEQ ID NO: 2660623 - RNA, 19 nt, Artificial Sequence
  Description of Artificial Sequence: Synthetic oligonucleotide
agugagucgcgccaggguc

SEQ ID NO: 2660624 - RNA, 19 nt, Artificial Sequence
  Description of Artificial Sequence: Synthetic oligonucleotide
auagaagcgcgcauggagc

SEQ ID NO: 2660625 - RNA, 19 nt, Artificial Sequence
  Description of Artificial Sequence: Synthetic oligonucleotide
acucacagagcacagagaa

SEQ ID NO: 2660626 - RNA, 19 nt, Artificial Sequence
  Description of Artificial Sequence: Synthetic oligonucleotide
cacaaagucauugaaggug

SEQ ID NO: 2660627 - RNA, 19 nt, Artificial Sequence
  Description of Artificial Sequence: Synthetic oligonucleotide
uguccucaaaaucagcgaa

SEQ ID NO: 2660628 - RNA, 19 nt, Artificial Sequence
  Description of Artificial Sequence: Synthetic oligonucleotide
uguccucagauucggaugu

SEQ ID NO: 2660629 - RNA, 19 nt, Artificial Sequence
  Description of Artificial Sequence: Synthetic oligonucleotide
aucagcgaagcccagcuug

SEQ ID NO: 2660630 - RNA, 19 nt, Artificial Sequence
  Description of Artificial Sequence: Synthetic oligonucleotide
aguguugaagucauagauc

SEQ ID NO: 2660631 - RNA, 19 nt, Artificial Sequence
  Description of Artificial Sequence: Synthetic oligonucleotide
cauaauuugccuugagcuc

SEQ ID NO: 2660632 - RNA, 19 nt, Artificial Sequence
  Description of Artificial Sequence: Synthetic oligonucleotide
cacgaccucauccucaucc

SEQ ID NO: 2660633 - RNA, 19 nt, Artificial Sequence
  Description of Artificial Sequence: Synthetic oligonucleotide
aaggugagguuccccucgc

SEQ ID NO: 2660634 - RNA, 19 nt, Artificial Sequence
  Description of Artificial Sequence: Synthetic oligonucleotide
uggagcuugaggauguccu

SEQ ID NO: 2660635 - RNA, 19 nt, Artificial Sequence
  Description of Artificial Sequence: Synthetic oligonucleotide
ucgcagacaagcacgaccu

SEQ ID NO: 2660636 - RNA, 19 nt, Artificial Sequence
  Description of Artificial Sequence: Synthetic oligonucleotide
gucaguguugaagucauag

SEQ ID NO: 2660637 - RNA, 19 nt, Artificial Sequence
  Description of Artificial Sequence: Synthetic oligonucleotide
aaaacgugcaguccuggua

SEQ ID NO: 2660638 - RNA, 19 nt, Artificial Sequence
  Description of Artificial Sequence: Synthetic oligonucleotide
ucagcucuaaaucuucuuu

SEQ ID NO: 2660639 - RNA, 19 nt, Artificial Sequence
  Description of Artificial Sequence: Synthetic oligonucleotide
cagcuugccaucaccaucc

SEQ ID NO: 2660640 - RNA, 19 nt, Artificial Sequence
  Description of Artificial Sequence: Synthetic oligonucleotide
uugaaggugagguuccccu

SEQ ID NO: 2660641 - RNA, 19 nt, Artificial Sequence
  Description of Artificial Sequence: Synthetic oligonucleotide
gaggcucaugggcacaugg

SEQ ID NO: 2660642 - RNA, 19 nt, Artificial Sequence
  Description of Artificial Sequence: Synthetic oligonucleotide
uugaggauguccuucuuau

SEQ ID NO: 2660643 - RNA, 19 nt, Artificial Sequence
  Description of Artificial Sequence: Synthetic oligonucleotide
acaagcacgaccucauccu

SEQ ID NO: 2660644 - RNA, 19 nt, Artificial Sequence
  Description of Artificial Sequence: Synthetic oligonucleotide
uccauggggacgagguugg

SEQ ID NO: 2660645 - RNA, 19 nt, Artificial Sequence
  Description of Artificial Sequence: Synthetic oligonucleotide
caaucauguccucaaaauc

SEQ ID NO: 2660646 - RNA, 19 nt, Artificial Sequence
  Description of Artificial Sequence: Synthetic oligonucleotide
ucaguguugaagucauaga

SEQ ID NO: 2660647 - RNA, 19 nt, Artificial Sequence
  Description of Artificial Sequence: Synthetic oligonucleotide
agcucugacuuagugaguc

SEQ ID NO: 2660648 - RNA, 19 nt, Artificial Sequence
  Description of Artificial Sequence: Synthetic oligonucleotide
uccucaaaaucagcgaagc

SEQ ID NO: 2660649 - RNA, 19 nt, Artificial Sequence
  Description of Artificial Sequence: Synthetic oligonucleotide
gaagggauucucccggagc

SEQ ID NO: 2660650 - RNA, 19 nt, Artificial Sequence
  Description of Artificial Sequence: Synthetic oligonucleotide
agcucuggcaucuguauga

SEQ ID NO: 2660651 - RNA, 19 nt, Artificial Sequence
  Description of Artificial Sequence: Synthetic oligonucleotide
guaugaugaggcucauggg

SEQ ID NO: 2660652 - RNA, 19 nt, Artificial Sequence
  Description of Artificial Sequence: Synthetic oligonucleotide
aaugacuuugucgcagaca

SEQ ID NO: 2660653 - RNA, 19 nt, Artificial Sequence
  Description of Artificial Sequence: Synthetic oligonucleotide
agaugaaauugucaguguu

SEQ ID NO: 2660654 - RNA, 19 nt, Artificial Sequence
  Description of Artificial Sequence: Synthetic oligonucleotide
gucgcagacaagcacgacc

SEQ ID NO: 2660655 - RNA, 19 nt, Artificial Sequence
  Description of Artificial Sequence: Synthetic oligonucleotide
auugaaggugagguucccc

SEQ ID NO: 2660656 - RNA, 19 nt, Artificial Sequence
  Description of Artificial Sequence: Synthetic oligonucleotide
ugacuuagugagucgcgcc

SEQ ID NO: 2660657 - RNA, 19 nt, Artificial Sequence
  Description of Artificial Sequence: Synthetic oligonucleotide
gugcugagaaaaucagggg

SEQ ID NO: 2660658 - RNA, 19 nt, Artificial Sequence
  Description of Artificial Sequence: Synthetic oligonucleotide
acaaagucauugaagguga

SEQ ID NO: 2660659 - RNA, 19 nt, Artificial Sequence
  Description of Artificial Sequence: Synthetic oligonucleotide
auguggaaggugcugagaa

SEQ ID NO: 2660660 - RNA, 19 nt, Artificial Sequence
  Description of Artificial Sequence: Synthetic oligonucleotide
ucaaugacuuugucgcaga

SEQ ID NO: 2660661 - RNA, 19 nt, Artificial Sequence
  Description of Artificial Sequence: Synthetic oligonucleotide
gagaaaaucaggggccuug

SEQ ID NO: 2660662 - RNA, 19 nt, Artificial Sequence
  Description of Artificial Sequence: Synthetic oligonucleotide
ugaagggauucucccggag

SEQ ID NO: 2660663 - RNA, 19 nt, Artificial Sequence
  Description of Artificial Sequence: Synthetic oligonucleotide
cuuugucgcagacaagcac

SEQ ID NO: 2660664 - RNA, 19 nt, Artificial Sequence
  Description of Artificial Sequence: Synthetic oligonucleotide
gacgauggggcucuuccug

SEQ ID NO: 2660665 - RNA, 19 nt, Artificial Sequence
  Description of Artificial Sequence: Synthetic oligonucleotide
uuagugagucgcgccaggg

SEQ ID NO: 2660666 - RNA, 19 nt, Artificial Sequence
  Description of Artificial Sequence: Synthetic oligonucleotide
ucagcgaagcccagcuugc

SEQ ID NO: 2660667 - RNA, 19 nt, Artificial Sequence
  Description of Artificial Sequence: Synthetic oligonucleotide
gcauaauuugccuugagcu

SEQ ID NO: 2660668 - RNA, 19 nt, Artificial Sequence
  Description of Artificial Sequence: Synthetic oligonucleotide
cucaaugacuuugucgcag

SEQ ID NO: 2660669 - RNA, 19 nt, Artificial Sequence
  Description of Artificial Sequence: Synthetic oligonucleotide
ggcauaauuugccuugagc

SEQ ID NO: 2660670 - RNA, 19 nt, Artificial Sequence
  Description of Artificial Sequence: Synthetic oligonucleotide
ugaaggcauaauuugccuu

SEQ ID NO: 2660671 - RNA, 19 nt, Artificial Sequence
  Description of Artificial Sequence: Synthetic oligonucleotide
auuugccuugagcucucgg

SEQ ID NO: 2660672 - RNA, 19 nt, Artificial Sequence
  Description of Artificial Sequence: Synthetic oligonucleotide
uccucagauucggaugugg

SEQ ID NO: 2660673 - RNA, 19 nt, Artificial Sequence
  Description of Artificial Sequence: Synthetic oligonucleotide
cuucuaggccccugcagcc

SEQ ID NO: 2660674 - RNA, 19 nt, Artificial Sequence
  Description of Artificial Sequence: Synthetic oligonucleotide
aucuguaugaugaggcuca

SEQ ID NO: 2660675 - RNA, 19 nt, Artificial Sequence
  Description of Artificial Sequence: Synthetic oligonucleotide
gacuuagugagucgcgcca

SEQ ID NO: 2660676 - RNA, 19 nt, Artificial Sequence
  Description of Artificial Sequence: Synthetic oligonucleotide
uagaagcgcgcauggagcu

SEQ ID NO: 2660677 - RNA, 19 nt, Artificial Sequence
  Description of Artificial Sequence: Synthetic oligonucleotide
uugucgcagacaagcacga

SEQ ID NO: 2660678 - RNA, 19 nt, Artificial Sequence
  Description of Artificial Sequence: Synthetic oligonucleotide
uucagugaagauggucugc

SEQ ID NO: 2660679 - RNA, 19 nt, Artificial Sequence
  Description of Artificial Sequence: Synthetic oligonucleotide
gaagauggucugcuuguuc

SEQ ID NO: 2660680 - RNA, 19 nt, Artificial Sequence
  Description of Artificial Sequence: Synthetic oligonucleotide
gaagccacaccuucacaga

SEQ ID NO: 2660681 - RNA, 19 nt, Artificial Sequence
  Description of Artificial Sequence: Synthetic oligonucleotide
ucggggugccgacucacag

SEQ ID NO: 2660682 - RNA, 19 nt, Artificial Sequence
  Description of Artificial Sequence: Synthetic oligonucleotide
ggcaucuguaugaugaggc

SEQ ID NO: 2660683 - RNA, 19 nt, Artificial Sequence
  Description of Artificial Sequence: Synthetic oligonucleotide
gauggggcucuuccuguag

SEQ ID NO: 2660684 - RNA, 19 nt, Artificial Sequence
  Description of Artificial Sequence: Synthetic oligonucleotide
cugcucuucagugaagaug

SEQ ID NO: 2660685 - RNA, 19 nt, Artificial Sequence
  Description of Artificial Sequence: Synthetic oligonucleotide
gauucggauguggaaggug

SEQ ID NO: 2660686 - RNA, 19 nt, Artificial Sequence
  Description of Artificial Sequence: Synthetic oligonucleotide
gcugagaaaaucaggggcc

SEQ ID NO: 2660687 - RNA, 19 nt, Artificial Sequence
  Description of Artificial Sequence: Synthetic oligonucleotide
ggugccgacucacagagca

SEQ ID NO: 2660688 - RNA, 19 nt, Artificial Sequence
  Description of Artificial Sequence: Synthetic oligonucleotide
cuuagugagucgcgccagg

SEQ ID NO: 2660689 - RNA, 19 nt, Artificial Sequence
  Description of Artificial Sequence: Synthetic oligonucleotide
cugacuuagugagucgcgc

SEQ ID NO: 2660690 - RNA, 19 nt, Artificial Sequence
  Description of Artificial Sequence: Synthetic oligonucleotide
guuaucgguggccgcggcg

SEQ ID NO: 2660691 - RNA, 19 nt, Artificial Sequence
  Description of Artificial Sequence: Synthetic oligonucleotide
augggcacauggacgaugg

SEQ ID NO: 2660692 - RNA, 19 nt, Artificial Sequence
  Description of Artificial Sequence: Synthetic oligonucleotide
agcuugaggauguccuucu

SEQ ID NO: 2660693 - RNA, 19 nt, Artificial Sequence
  Description of Artificial Sequence: Synthetic oligonucleotide
cagacuucuaggccccugc

SEQ ID NO: 2660694 - RNA, 19 nt, Artificial Sequence
  Description of Artificial Sequence: Synthetic oligonucleotide
cucagagaaagccuccaca

SEQ ID NO: 2660695 - RNA, 19 nt, Artificial Sequence
  Description of Artificial Sequence: Synthetic oligonucleotide
auccagcucugacuuagug

SEQ ID NO: 2660696 - RNA, 19 nt, Artificial Sequence
  Description of Artificial Sequence: Synthetic oligonucleotide
caucuguaugaugaggcuc

SEQ ID NO: 2660697 - RNA, 19 nt, Artificial Sequence
  Description of Artificial Sequence: Synthetic oligonucleotide
aaggcauaauuugccuuga

SEQ ID NO: 2660698 - RNA, 19 nt, Artificial Sequence
  Description of Artificial Sequence: Synthetic oligonucleotide
uccuguaguccauggggac

SEQ ID NO: 2660699 - RNA, 19 nt, Artificial Sequence
  Description of Artificial Sequence: Synthetic oligonucleotide
uuaucgguggccgcggcgu

SEQ ID NO: 2660700 - RNA, 19 nt, Artificial Sequence
  Description of Artificial Sequence: Synthetic oligonucleotide
caaagucauugaaggugag

SEQ ID NO: 2660701 - RNA, 19 nt, Artificial Sequence
  Description of Artificial Sequence: Synthetic oligonucleotide
uguggaaggugcugagaaa

SEQ ID NO: 2660702 - RNA, 19 nt, Artificial Sequence
  Description of Artificial Sequence: Synthetic oligonucleotide
aauuugccuugagcucucg

SEQ ID NO: 2660703 - RNA, 19 nt, Artificial Sequence
  Description of Artificial Sequence: Synthetic oligonucleotide
gagcucuggcaucuguaug

SEQ ID NO: 2660704 - RNA, 19 nt, Artificial Sequence
  Description of Artificial Sequence: Synthetic oligonucleotide
ugccgacucacagagcaca

SEQ ID NO: 2660705 - RNA, 19 nt, Artificial Sequence
  Description of Artificial Sequence: Synthetic oligonucleotide
gaagcgcgcauggagcuug

SEQ ID NO: 2660706 - RNA, 19 nt, Artificial Sequence
  Description of Artificial Sequence: Synthetic oligonucleotide
ggggugccgacucacagag

SEQ ID NO: 2660707 - RNA, 19 nt, Artificial Sequence
  Description of Artificial Sequence: Synthetic oligonucleotide
agacaagcacgaccucauc

SEQ ID NO: 2660708 - RNA, 19 nt, Artificial Sequence
  Description of Artificial Sequence: Synthetic oligonucleotide
ggcacauggacgauggggc

SEQ ID NO: 2660709 - RNA, 19 nt, Artificial Sequence
  Description of Artificial Sequence: Synthetic oligonucleotide
guccauggggacgagguug

SEQ ID NO: 2660710 - RNA, 19 nt, Artificial Sequence
  Description of Artificial Sequence: Synthetic oligonucleotide
uagugagucgcgccagggu

SEQ ID NO: 2660711 - RNA, 19 nt, Artificial Sequence
  Description of Artificial Sequence: Synthetic oligonucleotide
cagagcacagagaacaugu

SEQ ID NO: 2660712 - RNA, 19 nt, Artificial Sequence
  Description of Artificial Sequence: Synthetic oligonucleotide
uugaagggauucucccgga

SEQ ID NO: 2660713 - RNA, 19 nt, Artificial Sequence
  Description of Artificial Sequence: Synthetic oligonucleotide
gacagcaggccagagggca

SEQ ID NO: 2660714 - RNA, 19 nt, Artificial Sequence
  Description of Artificial Sequence: Synthetic oligonucleotide
cucacagagcacagagaac

SEQ ID NO: 2660715 - RNA, 19 nt, Artificial Sequence
  Description of Artificial Sequence: Synthetic oligonucleotide
caaaaucagcgaagcccag

SEQ ID NO: 2660716 - RNA, 19 nt, Artificial Sequence
  Description of Artificial Sequence: Synthetic oligonucleotide
acuuagugagucgcgccag

SEQ ID NO: 2660717 - RNA, 19 nt, Artificial Sequence
  Description of Artificial Sequence: Synthetic oligonucleotide
gaucuugaaggcauaauuu

SEQ ID NO: 2660718 - RNA, 19 nt, Artificial Sequence
  Description of Artificial Sequence: Synthetic oligonucleotide
guaguuguccagcugcucu

SEQ ID NO: 2660719 - RNA, 19 nt, Artificial Sequence
  Description of Artificial Sequence: Synthetic oligonucleotide
aggugagguuccccucgcc

SEQ ID NO: 2660720 - RNA, 19 nt, Artificial Sequence
  Description of Artificial Sequence: Synthetic oligonucleotide
acagagcacagagaacaug

SEQ ID NO: 2660721 - RNA, 19 nt, Artificial Sequence
  Description of Artificial Sequence: Synthetic oligonucleotide
aggcauaauuugccuugag

SEQ ID NO: 2660722 - RNA, 19 nt, Artificial Sequence
  Description of Artificial Sequence: Synthetic oligonucleotide
guggccgcggcguuaucgg

SEQ ID NO: 2660723 - RNA, 19 nt, Artificial Sequence
  Description of Artificial Sequence: Synthetic oligonucleotide
uccugguaguuguccagcu

SEQ ID NO: 2660724 - RNA, 19 nt, Artificial Sequence
  Description of Artificial Sequence: Synthetic oligonucleotide
ugagguuccccucgccauc

SEQ ID NO: 2660725 - RNA, 19 nt, Artificial Sequence
  Description of Artificial Sequence: Synthetic oligonucleotide
auagaucuugaaggcauaa

SEQ ID NO: 2660726 - RNA, 19 nt, Artificial Sequence
  Description of Artificial Sequence: Synthetic oligonucleotide
gggcacauggacgaugggg

SEQ ID NO: 2660727 - RNA, 19 nt, Artificial Sequence
  Description of Artificial Sequence: Synthetic oligonucleotide
ugccuugagcucucggggu

SEQ ID NO: 2660728 - RNA, 19 nt, Artificial Sequence
  Description of Artificial Sequence: Synthetic oligonucleotide
uguugaagucauagaucuu

SEQ ID NO: 2660729 - RNA, 19 nt, Artificial Sequence
  Description of Artificial Sequence: Synthetic oligonucleotide
caguguugaagucauagau

SEQ ID NO: 2660730 - RNA, 19 nt, Artificial Sequence
  Description of Artificial Sequence: Synthetic oligonucleotide
gucauagaucuugaaggca

SEQ ID NO: 2660731 - RNA, 19 nt, Artificial Sequence
  Description of Artificial Sequence: Synthetic oligonucleotide
ucauagaagcgcgcaugga

SEQ ID NO: 2660732 - RNA, 19 nt, Artificial Sequence
  Description of Artificial Sequence: Synthetic oligonucleotide
uagaucuugaaggcauaau

SEQ ID NO: 2660733 - RNA, 19 nt, Artificial Sequence
  Description of Artificial Sequence: Synthetic oligonucleotide
caaugacuuugucgcagac

SEQ ID NO: 2660734 - RNA, 19 nt, Artificial Sequence
  Description of Artificial Sequence: Synthetic oligonucleotide
gccauccucagagaaagcc

SEQ ID NO: 2660735 - RNA, 19 nt, Artificial Sequence
  Description of Artificial Sequence: Synthetic oligonucleotide
acgauggggcucuuccugu

SEQ ID NO: 2660736 - RNA, 19 nt, Artificial Sequence
  Description of Artificial Sequence: Synthetic oligonucleotide
aagcacgaccucauccuca

SEQ ID NO: 2660737 - RNA, 19 nt, Artificial Sequence
  Description of Artificial Sequence: Synthetic oligonucleotide
ugagcucucggggugccga

SEQ ID NO: 2660738 - RNA, 19 nt, Artificial Sequence
  Description of Artificial Sequence: Synthetic oligonucleotide
gugaagauggucugcuugu

SEQ ID NO: 2660739 - RNA, 19 nt, Artificial Sequence
  Description of Artificial Sequence: Synthetic oligonucleotide
cucagauucggauguggaa

SEQ ID NO: 2660740 - RNA, 19 nt, Artificial Sequence
  Description of Artificial Sequence: Synthetic oligonucleotide
cuucuuuacagaugaaauu

SEQ ID NO: 2660741 - RNA, 19 nt, Artificial Sequence
  Description of Artificial Sequence: Synthetic oligonucleotide
uucucccggagcucuggca

SEQ ID NO: 2660742 - RNA, 19 nt, Artificial Sequence
  Description of Artificial Sequence: Synthetic oligonucleotide
acauggacgauggggcucu

SEQ ID NO: 2660743 - RNA, 19 nt, Artificial Sequence
  Description of Artificial Sequence: Synthetic oligonucleotide
agcucauagaagcgcgcau

SEQ ID NO: 2660744 - RNA, 19 nt, Artificial Sequence
  Description of Artificial Sequence: Synthetic oligonucleotide
gccccugcagccuuggcag

SEQ ID NO: 2660745 - RNA, 19 nt, Artificial Sequence
  Description of Artificial Sequence: Synthetic oligonucleotide
gauguggaaggugcugaga

SEQ ID NO: 2660746 - RNA, 19 nt, Artificial Sequence
  Description of Artificial Sequence: Synthetic oligonucleotide
cagcucuaaaucuucuuua

SEQ ID NO: 2660747 - RNA, 19 nt, Artificial Sequence
  Description of Artificial Sequence: Synthetic oligonucleotide
ggauguggaaggugcugag

SEQ ID NO: 2660748 - RNA, 19 nt, Artificial Sequence
  Description of Artificial Sequence: Synthetic oligonucleotide
ucgcgccagggucagcucu

SEQ ID NO: 2660749 - RNA, 19 nt, Artificial Sequence
  Description of Artificial Sequence: Synthetic oligonucleotide
agucgcgccagggucagcu

SEQ ID NO: 2660750 - RNA, 19 nt, Artificial Sequence
  Description of Artificial Sequence: Synthetic oligonucleotide
uggcaaucauguccucaaa

SEQ ID NO: 2660751 - RNA, 19 nt, Artificial Sequence
  Description of Artificial Sequence: Synthetic oligonucleotide
ccagggucagcucuaaauc

SEQ ID NO: 2660752 - RNA, 19 nt, Artificial Sequence
  Description of Artificial Sequence: Synthetic oligonucleotide
acuuugucgcagacaagca

SEQ ID NO: 2660753 - RNA, 19 nt, Artificial Sequence
  Description of Artificial Sequence: Synthetic oligonucleotide
guaguccauggggacgagg

SEQ ID NO: 2660754 - RNA, 19 nt, Artificial Sequence
  Description of Artificial Sequence: Synthetic oligonucleotide
caagcacgaccucauccuc

SEQ ID NO: 2660755 - RNA, 19 nt, Artificial Sequence
  Description of Artificial Sequence: Synthetic oligonucleotide
agacagcaggccagagggc

SEQ ID NO: 2660756 - RNA, 19 nt, Artificial Sequence
  Description of Artificial Sequence: Synthetic oligonucleotide
uggggcucuuccuguaguc

SEQ ID NO: 2660757 - RNA, 19 nt, Artificial Sequence
  Description of Artificial Sequence: Synthetic oligonucleotide
ccagagggcagacuucuag

SEQ ID NO: 2660758 - RNA, 19 nt, Artificial Sequence
  Description of Artificial Sequence: Synthetic oligonucleotide
ggcguuaucgguggccgcg

SEQ ID NO: 2660759 - RNA, 19 nt, Artificial Sequence
  Description of Artificial Sequence: Synthetic oligonucleotide
caugggcacauggacgaug

SEQ ID NO: 2660760 - RNA, 19 nt, Artificial Sequence
  Description of Artificial Sequence: Synthetic oligonucleotide
aucaggggccuuggcaauc

SEQ ID NO: 2660761 - RNA, 19 nt, Artificial Sequence
  Description of Artificial Sequence: Synthetic oligonucleotide
gccagcucauagaagcgcg

SEQ ID NO: 2660762 - RNA, 19 nt, Artificial Sequence
  Description of Artificial Sequence: Synthetic oligonucleotide
ugagucgcgccagggucag

SEQ ID NO: 2660763 - RNA, 19 nt, Artificial Sequence
  Description of Artificial Sequence: Synthetic oligonucleotide
gcaaucauguccucaaaau

SEQ ID NO: 2660764 - RNA, 19 nt, Artificial Sequence
  Description of Artificial Sequence: Synthetic oligonucleotide
gacucacagagcacagaga

SEQ ID NO: 2660765 - RNA, 19 nt, Artificial Sequence
  Description of Artificial Sequence: Synthetic oligonucleotide
ccucaaaaucagcgaagcc

SEQ ID NO: 2660766 - RNA, 19 nt, Artificial Sequence
  Description of Artificial Sequence: Synthetic oligonucleotide
ugaagauggucugcuuguu

SEQ ID NO: 2660767 - RNA, 19 nt, Artificial Sequence
  Description of Artificial Sequence: Synthetic oligonucleotide
cuuggcaguguccucagau

SEQ ID NO: 2660768 - RNA, 19 nt, Artificial Sequence
  Description of Artificial Sequence: Synthetic oligonucleotide
uguuccccaugguggccgc

SEQ ID NO: 2660769 - RNA, 19 nt, Artificial Sequence
  Description of Artificial Sequence: Synthetic oligonucleotide
agggauucucccggagcuc

SEQ ID NO: 2660770 - RNA, 19 nt, Artificial Sequence
  Description of Artificial Sequence: Synthetic oligonucleotide
gguggccgcggcguuaucg

SEQ ID NO: 2660771 - RNA, 19 nt, Artificial Sequence
  Description of Artificial Sequence: Synthetic oligonucleotide
ugcaguccugguaguuguc

SEQ ID NO: 2660772 - RNA, 19 nt, Artificial Sequence
  Description of Artificial Sequence: Synthetic oligonucleotide
cuguaguccauggggacga

SEQ ID NO: 2660773 - RNA, 19 nt, Artificial Sequence
  Description of Artificial Sequence: Synthetic oligonucleotide
cagggucagcucuaaaucu

SEQ ID NO: 2660774 - RNA, 19 nt, Artificial Sequence
  Description of Artificial Sequence: Synthetic oligonucleotide
ggugagguuccccucgcca

SEQ ID NO: 2660775 - RNA, 19 nt, Artificial Sequence
  Description of Artificial Sequence: Synthetic oligonucleotide
gcacagagaacauguccac

SEQ ID NO: 2660776 - RNA, 19 nt, Artificial Sequence
  Description of Artificial Sequence: Synthetic oligonucleotide
gcgcgcauggagcuugagg

SEQ ID NO: 2660777 - RNA, 19 nt, Artificial Sequence
  Description of Artificial Sequence: Synthetic oligonucleotide
ccuguaguccauggggacg

SEQ ID NO: 2660778 - RNA, 19 nt, Artificial Sequence
  Description of Artificial Sequence: Synthetic oligonucleotide
caguccugguaguugucca

SEQ ID NO: 2660779 - RNA, 19 nt, Artificial Sequence
  Description of Artificial Sequence: Synthetic oligonucleotide
gaugaggcucaugggcaca

SEQ ID NO: 2660780 - RNA, 19 nt, Artificial Sequence
  Description of Artificial Sequence: Synthetic oligonucleotide
cacauggacgauggggcuc

SEQ ID NO: 2660781 - RNA, 19 nt, Artificial Sequence
  Description of Artificial Sequence: Synthetic oligonucleotide
ugagaaaaucaggggccuu

SEQ ID NO: 2660782 - RNA, 19 nt, Artificial Sequence
  Description of Artificial Sequence: Synthetic oligonucleotide
uguaguccauggggacgag

SEQ ID NO: 2660783 - RNA, 19 nt, Artificial Sequence
  Description of Artificial Sequence: Synthetic oligonucleotide
uugagcucucggggugccg

SEQ ID NO: 2660784 - RNA, 19 nt, Artificial Sequence
  Description of Artificial Sequence: Synthetic oligonucleotide
cuugagcucucggggugcc

SEQ ID NO: 2660785 - RNA, 19 nt, Artificial Sequence
  Description of Artificial Sequence: Synthetic oligonucleotide
guuccccucgccauccuca

SEQ ID NO: 2660786 - RNA, 19 nt, Artificial Sequence
  Description of Artificial Sequence: Synthetic oligonucleotide
cgcgcauggagcuugagga

SEQ ID NO: 2660787 - RNA, 19 nt, Artificial Sequence
  Description of Artificial Sequence: Synthetic oligonucleotide
gccgcggcguuaucggugg

SEQ ID NO: 2660788 - RNA, 19 nt, Artificial Sequence
  Description of Artificial Sequence: Synthetic oligonucleotide
ucucggggugccgacucac

SEQ ID NO: 2660789 - RNA, 19 nt, Artificial Sequence
  Description of Artificial Sequence: Synthetic oligonucleotide
agggucagcucuaaaucuu

SEQ ID NO: 2660790 - RNA, 19 nt, Artificial Sequence
  Description of Artificial Sequence: Synthetic oligonucleotide
cagaugaaauugucagugu

SEQ ID NO: 2660791 - RNA, 19 nt, Artificial Sequence
  Description of Artificial Sequence: Synthetic oligonucleotide
gcagacaagcacgaccuca

SEQ ID NO: 2660792 - RNA, 19 nt, Artificial Sequence
  Description of Artificial Sequence: Synthetic oligonucleotide
aguccauggggacgagguu

SEQ ID NO: 2660793 - RNA, 19 nt, Artificial Sequence
  Description of Artificial Sequence: Synthetic oligonucleotide
agcaggccagagggcagac

SEQ ID NO: 2660794 - RNA, 19 nt, Artificial Sequence
  Description of Artificial Sequence: Synthetic oligonucleotide
ucuguaugaugaggcucau

SEQ ID NO: 2660795 - RNA, 19 nt, Artificial Sequence
  Description of Artificial Sequence: Synthetic oligonucleotide
cuguaugaugaggcucaug

SEQ ID NO: 2660796 - RNA, 19 nt, Artificial Sequence
  Description of Artificial Sequence: Synthetic oligonucleotide
uaggccccugcagccuugg

SEQ ID NO: 2660797 - RNA, 19 nt, Artificial Sequence
  Description of Artificial Sequence: Synthetic oligonucleotide
gugcaguccugguaguugu

SEQ ID NO: 2660798 - RNA, 19 nt, Artificial Sequence
  Description of Artificial Sequence: Synthetic oligonucleotide
gcggcguuaucgguggccg

SEQ ID NO: 2660799 - RNA, 19 nt, Artificial Sequence
  Description of Artificial Sequence: Synthetic oligonucleotide
ugucgcagacaagcacgac

SEQ ID NO: 2660800 - RNA, 19 nt, Artificial Sequence
  Description of Artificial Sequence: Synthetic oligonucleotide
ugaggcucaugggcacaug

SEQ ID NO: 2660801 - RNA, 19 nt, Artificial Sequence
  Description of Artificial Sequence: Synthetic oligonucleotide
ccagcucauagaagcgcgc

SEQ ID NO: 2660802 - RNA, 19 nt, Artificial Sequence
  Description of Artificial Sequence: Synthetic oligonucleotide
aggccccugcagccuuggc

SEQ ID NO: 2660803 - RNA, 19 nt, Artificial Sequence
  Description of Artificial Sequence: Synthetic oligonucleotide
gugagucgcgccaggguca

SEQ ID NO: 2660804 - RNA, 19 nt, Artificial Sequence
  Description of Artificial Sequence: Synthetic oligonucleotide
cagcucauagaagcgcgca

SEQ ID NO: 2660805 - RNA, 19 nt, Artificial Sequence
  Description of Artificial Sequence: Synthetic oligonucleotide
ggggccuuggcaaucaugu

SEQ ID NO: 2660806 - RNA, 19 nt, Artificial Sequence
  Description of Artificial Sequence: Synthetic oligonucleotide
gggccagcucauagaagcg

SEQ ID NO: 2660807 - RNA, 19 nt, Artificial Sequence
  Description of Artificial Sequence: Synthetic oligonucleotide
gagcucucggggugccgac

SEQ ID NO: 2660808 - RNA, 19 nt, Artificial Sequence
  Description of Artificial Sequence: Synthetic oligonucleotide
uccccucgccauccucaga

SEQ ID NO: 2660809 - RNA, 19 nt, Artificial Sequence
  Description of Artificial Sequence: Synthetic oligonucleotide
gugagguuccccucgccau

SEQ ID NO: 2660810 - RNA, 19 nt, Artificial Sequence
  Description of Artificial Sequence: Synthetic oligonucleotide
ccugguaguuguccagcug

SEQ ID NO: 2660811 - RNA, 19 nt, Artificial Sequence
  Description of Artificial Sequence: Synthetic oligonucleotide
ccucagauucggaugugga

SEQ ID NO: 2660812 - RNA, 19 nt, Artificial Sequence
  Description of Artificial Sequence: Synthetic oligonucleotide
cugagaaaaucaggggccu

SEQ ID NO: 2660813 - RNA, 19 nt, Artificial Sequence
  Description of Artificial Sequence: Synthetic oligonucleotide
cucccggagcucuggcauc

SEQ ID NO: 2660814 - RNA, 19 nt, Artificial Sequence
  Description of Artificial Sequence: Synthetic oligonucleotide
ccucagagaaagccuccac

SEQ ID NO: 2660815 - RNA, 19 nt, Artificial Sequence
  Description of Artificial Sequence: Synthetic oligonucleotide
uggccgcggcguuaucggu

SEQ ID NO: 2660816 - RNA, 19 nt, Artificial Sequence
  Description of Artificial Sequence: Synthetic oligonucleotide
gggucagcucuaaaucuuc

SEQ ID NO: 2660817 - RNA, 19 nt, Artificial Sequence
  Description of Artificial Sequence: Synthetic oligonucleotide
gcaucuguaugaugaggcu

SEQ ID NO: 2660818 - RNA, 19 nt, Artificial Sequence
  Description of Artificial Sequence: Synthetic oligonucleotide
ucaugggcacauggacgau

SEQ ID NO: 2660819 - RNA, 19 nt, Artificial Sequence
  Description of Artificial Sequence: Synthetic oligonucleotide
ggagcucuggcaucuguau

SEQ ID NO: 2660820 - RNA, 19 nt, Artificial Sequence
  Description of Artificial Sequence: Synthetic oligonucleotide
augguggccgcggcguuau

SEQ ID NO: 2660821 - RNA, 19 nt, Artificial Sequence
  Description of Artificial Sequence: Synthetic oligonucleotide
cauggagcuugaggauguc

SEQ ID NO: 2660822 - RNA, 19 nt, Artificial Sequence
  Description of Artificial Sequence: Synthetic oligonucleotide
guccucagauucggaugug

SEQ ID NO: 2660823 - RNA, 19 nt, Artificial Sequence
  Description of Artificial Sequence: Synthetic oligonucleotide
cagagaaagccuccacaau

SEQ ID NO: 2660824 - RNA, 19 nt, Artificial Sequence
  Description of Artificial Sequence: Synthetic oligonucleotide
cugcagccuuggcaguguc

SEQ ID NO: 2660825 - RNA, 19 nt, Artificial Sequence
  Description of Artificial Sequence: Synthetic oligonucleotide
gggcagacuucuaggcccc

SEQ ID NO: 2660826 - RNA, 19 nt, Artificial Sequence
  Description of Artificial Sequence: Synthetic oligonucleotide
gcguuaucgguggccgcgg

SEQ ID NO: 2660827 - RNA, 19 nt, Artificial Sequence
  Description of Artificial Sequence: Synthetic oligonucleotide
caguguccucagauucgga

SEQ ID NO: 2660828 - RNA, 19 nt, Artificial Sequence
  Description of Artificial Sequence: Synthetic oligonucleotide
cucggggugccgacucaca

SEQ ID NO: 2660829 - RNA, 19 nt, Artificial Sequence
  Description of Artificial Sequence: Synthetic oligonucleotide
agaagcgcgcauggagcuu

SEQ ID NO: 2660830 - RNA, 19 nt, Artificial Sequence
  Description of Artificial Sequence: Synthetic oligonucleotide
cgcauggagcuugaggaug

SEQ ID NO: 2660831 - RNA, 19 nt, Artificial Sequence
  Description of Artificial Sequence: Synthetic oligonucleotide
gcucucggggugccgacuc

SEQ ID NO: 2660832 - RNA, 19 nt, Artificial Sequence
  Description of Artificial Sequence: Synthetic oligonucleotide
agcucucggggugccgacu

SEQ ID NO: 2660833 - RNA, 19 nt, Artificial Sequence
  Description of Artificial Sequence: Synthetic oligonucleotide
agguuccccucgccauccu

SEQ ID NO: 2660834 - RNA, 19 nt, Artificial Sequence
  Description of Artificial Sequence: Synthetic oligonucleotide
cacagagcacagagaacau

SEQ ID NO: 2660835 - RNA, 19 nt, Artificial Sequence
  Description of Artificial Sequence: Synthetic oligonucleotide
gugccgacucacagagcac

SEQ ID NO: 2660836 - RNA, 19 nt, Artificial Sequence
  Description of Artificial Sequence: Synthetic oligonucleotide
cgugcaguccugguaguug

SEQ ID NO: 2660837 - RNA, 19 nt, Artificial Sequence
  Description of Artificial Sequence: Synthetic oligonucleotide
gguuccccucgccauccuc

SEQ ID NO: 2660838 - RNA, 19 nt, Artificial Sequence
  Description of Artificial Sequence: Synthetic oligonucleotide
cucuccuugaagggauucu

SEQ ID NO: 2660839 - RNA, 19 nt, Artificial Sequence
  Description of Artificial Sequence: Synthetic oligonucleotide
ccucaaugacuuugucgca

SEQ ID NO: 2660840 - RNA, 19 nt, Artificial Sequence
  Description of Artificial Sequence: Synthetic oligonucleotide
aagcgcgcauggagcuuga

SEQ ID NO: 2660841 - RNA, 19 nt, Artificial Sequence
  Description of Artificial Sequence: Synthetic oligonucleotide
gcucuuccuguaguccaug

SEQ ID NO: 2660842 - RNA, 19 nt, Artificial Sequence
  Description of Artificial Sequence: Synthetic oligonucleotide
gcagacuucuaggccccug

SEQ ID NO: 2660843 - RNA, 19 nt, Artificial Sequence
  Description of Artificial Sequence: Synthetic oligonucleotide
agcgcgcauggagcuugag

SEQ ID NO: 2660844 - RNA, 19 nt, Artificial Sequence
  Description of Artificial Sequence: Synthetic oligonucleotide
ggccgcggcguuaucggug

SEQ ID NO: 2660845 - RNA, 19 nt, Artificial Sequence
  Description of Artificial Sequence: Synthetic oligonucleotide
cgaccucauccucauccag

SEQ ID NO: 2660846 - RNA, 19 nt, Artificial Sequence
  Description of Artificial Sequence: Synthetic oligonucleotide
gggauucucccggagcucu

SEQ ID NO: 2660847 - RNA, 19 nt, Artificial Sequence
  Description of Artificial Sequence: Synthetic oligonucleotide
gucgcgccagggucagcuc

SEQ ID NO: 2660848 - RNA, 19 nt, Artificial Sequence
  Description of Artificial Sequence: Synthetic oligonucleotide
cucucggggugccgacuca

SEQ ID NO: 2660849 - RNA, 19 nt, Artificial Sequence
  Description of Artificial Sequence: Synthetic oligonucleotide
ccucgccauccucagagaa

SEQ ID NO: 2660850 - RNA, 19 nt, Artificial Sequence
  Description of Artificial Sequence: Synthetic oligonucleotide
gcacauggacgauggggcu

SEQ ID NO: 2660851 - RNA, 19 nt, Artificial Sequence
  Description of Artificial Sequence: Synthetic oligonucleotide
ggacgauggggcucuuccu

SEQ ID NO: 2660852 - RNA, 19 nt, Artificial Sequence
  Description of Artificial Sequence: Synthetic oligonucleotide
ggccagagggcagacuucu

SEQ ID NO: 2660853 - RNA, 19 nt, Artificial Sequence
  Description of Artificial Sequence: Synthetic oligonucleotide
cauccagcucugacuuagu

SEQ ID NO: 2660854 - RNA, 19 nt, Artificial Sequence
  Description of Artificial Sequence: Synthetic oligonucleotide
ggagcuugaggauguccuu

SEQ ID NO: 2660855 - RNA, 19 nt, Artificial Sequence
  Description of Artificial Sequence: Synthetic oligonucleotide
cggauguggaaggugcuga

SEQ ID NO: 2660856 - RNA, 19 nt, Artificial Sequence
  Description of Artificial Sequence: Synthetic oligonucleotide
cguuaucgguggccgcggc

SEQ ID NO: 2660857 - RNA, 19 nt, Artificial Sequence
  Description of Artificial Sequence: Synthetic oligonucleotide
caugguggccgcggcguua

SEQ ID NO: 2660858 - RNA, 19 nt, Artificial Sequence
  Description of Artificial Sequence: Synthetic oligonucleotide
ugguggccgcggcguuauc

SEQ ID NO: 2660859 - RNA, 19 nt, Artificial Sequence
  Description of Artificial Sequence: Synthetic oligonucleotide
gagucgcgccagggucagc

SEQ ID NO: 2660860 - RNA, 19 nt, Artificial Sequence
  Description of Artificial Sequence: Synthetic oligonucleotide
cgcggcguuaucgguggcc

SEQ ID NO: 2660861 - RNA, 19 nt, Artificial Sequence
  Description of Artificial Sequence: Synthetic oligonucleotide
cgccauccucagagaaagc

SEQ ID NO: 2660862 - RNA, 19 nt, Artificial Sequence
  Description of Artificial Sequence: Synthetic oligonucleotide
gcgcauggagcuugaggau

SEQ ID NO: 2660863 - RNA, 19 nt, Artificial Sequence
  Description of Artificial Sequence: Synthetic oligonucleotide
gggugccgacucacagagc

SEQ ID NO: 2660864 - RNA, 19 nt, Artificial Sequence
  Description of Artificial Sequence: Synthetic oligonucleotide
gcacgaccucauccucauc

SEQ ID NO: 2660865 - RNA, 19 nt, Artificial Sequence
  Description of Artificial Sequence: Synthetic oligonucleotide
ccgacucacagagcacaga

SEQ ID NO: 2660866 - RNA, 19 nt, Artificial Sequence
  Description of Artificial Sequence: Synthetic oligonucleotide
cggggugccgacucacaga

SEQ ID NO: 2660867 - RNA, 19 nt, Artificial Sequence
  Description of Artificial Sequence: Synthetic oligonucleotide
cggcguuaucgguggccgc

SEQ ID NO: 2660868 - RNA, 19 nt, Artificial Sequence
  Description of Artificial Sequence: Synthetic oligonucleotide
cgcagacaagcacgaccuc

SEQ ID NO: 2660869 - RNA, 19 nt, Artificial Sequence
  Description of Artificial Sequence: Synthetic oligonucleotide
gcucuggcaucuguaugau

SEQ ID NO: 2660870 - RNA, 19 nt, Artificial Sequence
  Description of Artificial Sequence: Synthetic oligonucleotide
cgauggggcucuuccugua

SEQ ID NO: 2660871 - RNA, 19 nt, Artificial Sequence
  Description of Artificial Sequence: Synthetic oligonucleotide
ccggagcucuggcaucugu

SEQ ID NO: 2660872 - RNA, 19 nt, Artificial Sequence
  Description of Artificial Sequence: Synthetic oligonucleotide
ccgcggcguuaucgguggc

SEQ ID NO: 2660873 - RNA, 19 nt, Artificial Sequence
  Description of Artificial Sequence: Synthetic oligonucleotide
caggggccuuggcaaucau

SEQ ID NO: 2660874 - RNA, 19 nt, Artificial Sequence
  Description of Artificial Sequence: Synthetic oligonucleotide
gccagagggcagacuucua

SEQ ID NO: 2660875 - RNA, 19 nt, Artificial Sequence
  Description of Artificial Sequence: Synthetic oligonucleotide
ggcagacuucuaggccccu

SEQ ID NO: 2660876 - RNA, 19 nt, Artificial Sequence
  Description of Artificial Sequence: Synthetic oligonucleotide
cauggacgauggggcucuu

SEQ ID NO: 2660877 - RNA, 19 nt, Artificial Sequence
  Description of Artificial Sequence: Synthetic oligonucleotide
cgccagggucagcucuaaa

SEQ ID NO: 2660878 - RNA, 19 nt, Artificial Sequence
  Description of Artificial Sequence: Synthetic oligonucleotide
agaaacagggcacagagcc

SEQ ID NO: 2660879 - RNA, 19 nt, Artificial Sequence
  Description of Artificial Sequence: Synthetic oligonucleotide
uauccuuucagaaaagggg

SEQ ID NO: 2660880 - RNA, 19 nt, Artificial Sequence
  Description of Artificial Sequence: Synthetic oligonucleotide
aauggaagccaacacuacc

SEQ ID NO: 2660881 - RNA, 19 nt, Artificial Sequence
  Description of Artificial Sequence: Synthetic oligonucleotide
uguauagaaaccuaggagu

SEQ ID NO: 2660882 - RNA, 19 nt, Artificial Sequence
  Description of Artificial Sequence: Synthetic oligonucleotide
gaaaccuaggaguagaaag

SEQ ID NO: 2660883 - RNA, 19 nt, Artificial Sequence
  Description of Artificial Sequence: Synthetic oligonucleotide
agcacuucggacuucagcc

SEQ ID NO: 2660884 - RNA, 19 nt, Artificial Sequence
  Description of Artificial Sequence: Synthetic oligonucleotide
ucaaaguucugaaugagug

SEQ ID NO: 2660885 - RNA, 19 nt, Artificial Sequence
  Description of Artificial Sequence: Synthetic oligonucleotide
uguauuuaggcucugcccc

SEQ ID NO: 2660886 - RNA, 19 nt, Artificial Sequence
  Description of Artificial Sequence: Synthetic oligonucleotide
aaauaaacccugcaguugu

SEQ ID NO: 2660887 - RNA, 19 nt, Artificial Sequence
  Description of Artificial Sequence: Synthetic oligonucleotide
aaaucaaaguucugaauga

SEQ ID NO: 2660888 - RNA, 19 nt, Artificial Sequence
  Description of Artificial Sequence: Synthetic oligonucleotide
aaagacuucagucuuggaa

SEQ ID NO: 2660889 - RNA, 19 nt, Artificial Sequence
  Description of Artificial Sequence: Synthetic oligonucleotide
aaggccaucaaagaugagg

SEQ ID NO: 2660890 - RNA, 19 nt, Artificial Sequence
  Description of Artificial Sequence: Synthetic oligonucleotide
aggaguagaaaguacuagg

SEQ ID NO: 2660891 - RNA, 19 nt, Artificial Sequence
  Description of Artificial Sequence: Synthetic oligonucleotide
aaucaaacagcacuucgga

SEQ ID NO: 2660892 - RNA, 19 nt, Artificial Sequence
  Description of Artificial Sequence: Synthetic oligonucleotide
agaaucaaacagcacuucg

SEQ ID NO: 2660893 - RNA, 19 nt, Artificial Sequence
  Description of Artificial Sequence: Synthetic oligonucleotide
cauauuucuugugagagcc

SEQ ID NO: 2660894 - RNA, 19 nt, Artificial Sequence
  Description of Artificial Sequence: Synthetic oligonucleotide
uuacccaacagcaugcaca

SEQ ID NO: 2660895 - RNA, 19 nt, Artificial Sequence
  Description of Artificial Sequence: Synthetic oligonucleotide
uguuccuuggucaagggaa

SEQ ID NO: 2660896 - RNA, 19 nt, Artificial Sequence
  Description of Artificial Sequence: Synthetic oligonucleotide
aacagcaugcacauguuuc

SEQ ID NO: 2660897 - RNA, 19 nt, Artificial Sequence
  Description of Artificial Sequence: Synthetic oligonucleotide
ugcauauuucuugugagag

SEQ ID NO: 2660898 - RNA, 19 nt, Artificial Sequence
  Description of Artificial Sequence: Synthetic oligonucleotide
caagaaacagggcacagag

SEQ ID NO: 2660899 - RNA, 19 nt, Artificial Sequence
  Description of Artificial Sequence: Synthetic oligonucleotide
ccaucuauuagccugaggg

SEQ ID NO: 2660900 - RNA, 19 nt, Artificial Sequence
  Description of Artificial Sequence: Synthetic oligonucleotide
uguuguuagaagcucggca

SEQ ID NO: 2660901 - RNA, 19 nt, Artificial Sequence
  Description of Artificial Sequence: Synthetic oligonucleotide
ugaguuuucaguucagccu

SEQ ID NO: 2660902 - RNA, 19 nt, Artificial Sequence
  Description of Artificial Sequence: Synthetic oligonucleotide
aacccugcaguugucaggc

SEQ ID NO: 2660903 - RNA, 19 nt, Artificial Sequence
  Description of Artificial Sequence: Synthetic oligonucleotide
uguucagcugagcugauga

SEQ ID NO: 2660904 - RNA, 19 nt, Artificial Sequence
  Description of Artificial Sequence: Synthetic oligonucleotide
gaagggcaggaacagaggg

SEQ ID NO: 2660905 - RNA, 19 nt, Artificial Sequence
  Description of Artificial Sequence: Synthetic oligonucleotide
uuaaagacuucagucuugg

SEQ ID NO: 2660906 - RNA, 19 nt, Artificial Sequence
  Description of Artificial Sequence: Synthetic oligonucleotide
ugcuguauagaaaccuagg

SEQ ID NO: 2660907 - RNA, 19 nt, Artificial Sequence
  Description of Artificial Sequence: Synthetic oligonucleotide
aguaccuuguuccuugguc

SEQ ID NO: 2660908 - RNA, 19 nt, Artificial Sequence
  Description of Artificial Sequence: Synthetic oligonucleotide
uuagaugcucugcuuagcc

SEQ ID NO: 2660909 - RNA, 19 nt, Artificial Sequence
  Description of Artificial Sequence: Synthetic oligonucleotide
gaaucaaacagcacuucgg

SEQ ID NO: 2660910 - RNA, 19 nt, Artificial Sequence
  Description of Artificial Sequence: Synthetic oligonucleotide
cuguauagaaaccuaggag

SEQ ID NO: 2660911 - RNA, 19 nt, Artificial Sequence
  Description of Artificial Sequence: Synthetic oligonucleotide
gacucuuguauuuaggcuc

SEQ ID NO: 2660912 - RNA, 19 nt, Artificial Sequence
  Description of Artificial Sequence: Synthetic oligonucleotide
augcacauguuucugggac

SEQ ID NO: 2660913 - RNA, 19 nt, Artificial Sequence
  Description of Artificial Sequence: Synthetic oligonucleotide
agaagcucggcauccuucc

SEQ ID NO: 2660914 - RNA, 19 nt, Artificial Sequence
  Description of Artificial Sequence: Synthetic oligonucleotide
cagacagagggcaagaaac

SEQ ID NO: 2660915 - RNA, 19 nt, Artificial Sequence
  Description of Artificial Sequence: Synthetic oligonucleotide
cugcuaaguaccuuguucc

SEQ ID NO: 2660916 - RNA, 19 nt, Artificial Sequence
  Description of Artificial Sequence: Synthetic oligonucleotide
aaguuacccaacagcaugc

SEQ ID NO: 2660917 - RNA, 19 nt, Artificial Sequence
  Description of Artificial Sequence: Synthetic oligonucleotide
ucugcuaaguaccuuguuc

SEQ ID NO: 2660918 - RNA, 19 nt, Artificial Sequence
  Description of Artificial Sequence: Synthetic oligonucleotide
aguacuagggauugcauau

SEQ ID NO: 2660919 - RNA, 19 nt, Artificial Sequence
  Description of Artificial Sequence: Synthetic oligonucleotide
uuguauuuaggcucugccc

SEQ ID NO: 2660920 - RNA, 19 nt, Artificial Sequence
  Description of Artificial Sequence: Synthetic oligonucleotide
ucagccgucaucccagggg

SEQ ID NO: 2660921 - RNA, 19 nt, Artificial Sequence
  Description of Artificial Sequence: Synthetic oligonucleotide
cuuguauuuaggcucugcc

SEQ ID NO: 2660922 - RNA, 19 nt, Artificial Sequence
  Description of Artificial Sequence: Synthetic oligonucleotide
cugaguuuucaguucagcc

SEQ ID NO: 2660923 - RNA, 19 nt, Artificial Sequence
  Description of Artificial Sequence: Synthetic oligonucleotide
ucuauuagccugagggcag

SEQ ID NO: 2660924 - RNA, 19 nt, Artificial Sequence
  Description of Artificial Sequence: Synthetic oligonucleotide
aaacccugcaguugucagg

SEQ ID NO: 2660925 - RNA, 19 nt, Artificial Sequence
  Description of Artificial Sequence: Synthetic oligonucleotide
agggauugcauauuucuug

SEQ ID NO: 2660926 - RNA, 19 nt, Artificial Sequence
  Description of Artificial Sequence: Synthetic oligonucleotide
uuucaguucagccuccaaa

SEQ ID NO: 2660927 - RNA, 19 nt, Artificial Sequence
  Description of Artificial Sequence: Synthetic oligonucleotide
aaacagggcacagagccag

SEQ ID NO: 2660928 - RNA, 19 nt, Artificial Sequence
  Description of Artificial Sequence: Synthetic oligonucleotide
cuaaguaccuuguuccuug

SEQ ID NO: 2660929 - RNA, 19 nt, Artificial Sequence
  Description of Artificial Sequence: Synthetic oligonucleotide
auauccuuucagaaaaggg

SEQ ID NO: 2660930 - RNA, 19 nt, Artificial Sequence
  Description of Artificial Sequence: Synthetic oligonucleotide
aucaaacagcacuucggac

SEQ ID NO: 2660931 - RNA, 19 nt, Artificial Sequence
  Description of Artificial Sequence: Synthetic oligonucleotide
aacugcaagcaacugaguu

SEQ ID NO: 2660932 - RNA, 19 nt, Artificial Sequence
  Description of Artificial Sequence: Synthetic oligonucleotide
aaaccuaggaguagaaagu

SEQ ID NO: 2660933 - RNA, 19 nt, Artificial Sequence
  Description of Artificial Sequence: Synthetic oligonucleotide
caaaguucugaaugagugc

SEQ ID NO: 2660934 - RNA, 19 nt, Artificial Sequence
  Description of Artificial Sequence: Synthetic oligonucleotide
uaacccauauccuuucaga

SEQ ID NO: 2660935 - RNA, 19 nt, Artificial Sequence
  Description of Artificial Sequence: Synthetic oligonucleotide
uucaguucuccaguuaaag

SEQ ID NO: 2660936 - RNA, 19 nt, Artificial Sequence
  Description of Artificial Sequence: Synthetic oligonucleotide
aacagagggcuguucagcu

SEQ ID NO: 2660937 - RNA, 19 nt, Artificial Sequence
  Description of Artificial Sequence: Synthetic oligonucleotide
aacccauauccuuucagaa

SEQ ID NO: 2660938 - RNA, 19 nt, Artificial Sequence
  Description of Artificial Sequence: Synthetic oligonucleotide
gagagaaagaaccuguugu

SEQ ID NO: 2660939 - RNA, 19 nt, Artificial Sequence
  Description of Artificial Sequence: Synthetic oligonucleotide
cugaaugagugcuguauag

SEQ ID NO: 2660940 - RNA, 19 nt, Artificial Sequence
  Description of Artificial Sequence: Synthetic oligonucleotide
agagagaaagaaccuguug

SEQ ID NO: 2660941 - RNA, 19 nt, Artificial Sequence
  Description of Artificial Sequence: Synthetic oligonucleotide
uuagccugagggcaggugu

SEQ ID NO: 2660942 - RNA, 19 nt, Artificial Sequence
  Description of Artificial Sequence: Synthetic oligonucleotide
gaagccaacacuaccacca

SEQ ID NO: 2660943 - RNA, 19 nt, Artificial Sequence
  Description of Artificial Sequence: Synthetic oligonucleotide
aucccaggggcacagacag

SEQ ID NO: 2660944 - RNA, 19 nt, Artificial Sequence
  Description of Artificial Sequence: Synthetic oligonucleotide
uauagaaaccuaggaguag

SEQ ID NO: 2660945 - RNA, 19 nt, Artificial Sequence
  Description of Artificial Sequence: Synthetic oligonucleotide
uagaaaguacuagggauug

SEQ ID NO: 2660946 - RNA, 19 nt, Artificial Sequence
  Description of Artificial Sequence: Synthetic oligonucleotide
cuccaaauaaacccugcag

SEQ ID NO: 2660947 - RNA, 19 nt, Artificial Sequence
  Description of Artificial Sequence: Synthetic oligonucleotide
gaaugagugcuguauagaa

SEQ ID NO: 2660948 - RNA, 19 nt, Artificial Sequence
  Description of Artificial Sequence: Synthetic oligonucleotide
caucuauuagccugagggc

SEQ ID NO: 2660949 - RNA, 19 nt, Artificial Sequence
  Description of Artificial Sequence: Synthetic oligonucleotide
gagcugaugacagagcccc

SEQ ID NO: 2660950 - RNA, 19 nt, Artificial Sequence
  Description of Artificial Sequence: Synthetic oligonucleotide
ucuguaacccauauccuuu

SEQ ID NO: 2660951 - RNA, 19 nt, Artificial Sequence
  Description of Artificial Sequence: Synthetic oligonucleotide
aggugucugguccucuugc

SEQ ID NO: 2660952 - RNA, 19 nt, Artificial Sequence
  Description of Artificial Sequence: Synthetic oligonucleotide
cauauccuuucagaaaagg

SEQ ID NO: 2660953 - RNA, 19 nt, Artificial Sequence
  Description of Artificial Sequence: Synthetic oligonucleotide
guugucaggcaauggaagc

SEQ ID NO: 2660954 - RNA, 19 nt, Artificial Sequence
  Description of Artificial Sequence: Synthetic oligonucleotide
caagcaacugaguuuucag

SEQ ID NO: 2660955 - RNA, 19 nt, Artificial Sequence
  Description of Artificial Sequence: Synthetic oligonucleotide
aaguacuagggauugcaua

SEQ ID NO: 2660956 - RNA, 19 nt, Artificial Sequence
  Description of Artificial Sequence: Synthetic oligonucleotide
ucuccaguuaaagacuuca

SEQ ID NO: 2660957 - RNA, 19 nt, Artificial Sequence
  Description of Artificial Sequence: Synthetic oligonucleotide
aagaaacagggcacagagc

SEQ ID NO: 2660958 - RNA, 19 nt, Artificial Sequence
  Description of Artificial Sequence: Synthetic oligonucleotide
gaaaguacuagggauugca

SEQ ID NO: 2660959 - RNA, 19 nt, Artificial Sequence
  Description of Artificial Sequence: Synthetic oligonucleotide
agcccucuuuacuugcugc

SEQ ID NO: 2660960 - RNA, 19 nt, Artificial Sequence
  Description of Artificial Sequence: Synthetic oligonucleotide
uaaacccugcaguugucag

SEQ ID NO: 2660961 - RNA, 19 nt, Artificial Sequence
  Description of Artificial Sequence: Synthetic oligonucleotide
caagggaacugcaagcaac

SEQ ID NO: 2660962 - RNA, 19 nt, Artificial Sequence
  Description of Artificial Sequence: Synthetic oligonucleotide
ugggacucuuguauuuagg

SEQ ID NO: 2660963 - RNA, 19 nt, Artificial Sequence
  Description of Artificial Sequence: Synthetic oligonucleotide
uacuugcugcuccucaugc

SEQ ID NO: 2660964 - RNA, 19 nt, Artificial Sequence
  Description of Artificial Sequence: Synthetic oligonucleotide
ugaugacagagccccaucu

SEQ ID NO: 2660965 - RNA, 19 nt, Artificial Sequence
  Description of Artificial Sequence: Synthetic oligonucleotide
agggcacagagccagccac

SEQ ID NO: 2660966 - RNA, 19 nt, Artificial Sequence
  Description of Artificial Sequence: Synthetic oligonucleotide
ggaguagaaaguacuaggg

SEQ ID NO: 2660967 - RNA, 19 nt, Artificial Sequence
  Description of Artificial Sequence: Synthetic oligonucleotide
uguuagaagcucggcaucc

SEQ ID NO: 2660968 - RNA, 19 nt, Artificial Sequence
  Description of Artificial Sequence: Synthetic oligonucleotide
guauuuaggcucugccccg

SEQ ID NO: 2660969 - RNA, 19 nt, Artificial Sequence
  Description of Artificial Sequence: Synthetic oligonucleotide
gaguagaaaguacuaggga

SEQ ID NO: 2660970 - RNA, 19 nt, Artificial Sequence
  Description of Artificial Sequence: Synthetic oligonucleotide
aaccuguuguuagaagcuc

SEQ ID NO: 2660971 - RNA, 19 nt, Artificial Sequence
  Description of Artificial Sequence: Synthetic oligonucleotide
aggcuguugggugagggcc

SEQ ID NO: 2660972 - RNA, 19 nt, Artificial Sequence
  Description of Artificial Sequence: Synthetic oligonucleotide
agcaacugaguuuucaguu

SEQ ID NO: 2660973 - RNA, 19 nt, Artificial Sequence
  Description of Artificial Sequence: Synthetic oligonucleotide
uugcccuuaaguuacccaa

SEQ ID NO: 2660974 - RNA, 19 nt, Artificial Sequence
  Description of Artificial Sequence: Synthetic oligonucleotide
aucuauuagccugagggca

SEQ ID NO: 2660975 - RNA, 19 nt, Artificial Sequence
  Description of Artificial Sequence: Synthetic oligonucleotide
cagacagaaucaaacagca

SEQ ID NO: 2660976 - RNA, 19 nt, Artificial Sequence
  Description of Artificial Sequence: Synthetic oligonucleotide
aggcaauggaagccaacac

SEQ ID NO: 2660977 - RNA, 19 nt, Artificial Sequence
  Description of Artificial Sequence: Synthetic oligonucleotide
augaggaguggccaggcug

SEQ ID NO: 2660978 - RNA, 19 nt, Artificial Sequence
  Description of Artificial Sequence: Synthetic oligonucleotide
ugagugcuguauagaaacc

SEQ ID NO: 2660979 - RNA, 19 nt, Artificial Sequence
  Description of Artificial Sequence: Synthetic oligonucleotide
agagccccaucuauuagcc

SEQ ID NO: 2660980 - RNA, 19 nt, Artificial Sequence
  Description of Artificial Sequence: Synthetic oligonucleotide
caggggcacagacagaggg

SEQ ID NO: 2660981 - RNA, 19 nt, Artificial Sequence
  Description of Artificial Sequence: Synthetic oligonucleotide
ucugcuuagcccucuuuac

SEQ ID NO: 2660982 - RNA, 19 nt, Artificial Sequence
  Description of Artificial Sequence: Synthetic oligonucleotide
acagcaugcacauguuucu

SEQ ID NO: 2660983 - RNA, 19 nt, Artificial Sequence
  Description of Artificial Sequence: Synthetic oligonucleotide
auagaaaccuaggaguaga

SEQ ID NO: 2660984 - RNA, 19 nt, Artificial Sequence
  Description of Artificial Sequence: Synthetic oligonucleotide
ugaggaguggccaggcugu

SEQ ID NO: 2660985 - RNA, 19 nt, Artificial Sequence
  Description of Artificial Sequence: Synthetic oligonucleotide
aaagaaccuguuguuagaa

SEQ ID NO: 2660986 - RNA, 19 nt, Artificial Sequence
  Description of Artificial Sequence: Synthetic oligonucleotide
guaacccauauccuuucag

SEQ ID NO: 2660987 - RNA, 19 nt, Artificial Sequence
  Description of Artificial Sequence: Synthetic oligonucleotide
gaaagaaccuguuguuaga

SEQ ID NO: 2660988 - RNA, 19 nt, Artificial Sequence
  Description of Artificial Sequence: Synthetic oligonucleotide
ugaaugagugcuguauaga

SEQ ID NO: 2660989 - RNA, 19 nt, Artificial Sequence
  Description of Artificial Sequence: Synthetic oligonucleotide
ccuuaaguuacccaacagc

SEQ ID NO: 2660990 - RNA, 19 nt, Artificial Sequence
  Description of Artificial Sequence: Synthetic oligonucleotide
cauccuucccugcugcugg

SEQ ID NO: 2660991 - RNA, 19 nt, Artificial Sequence
  Description of Artificial Sequence: Synthetic oligonucleotide
uucagucuuggaaaucaaa

SEQ ID NO: 2660992 - RNA, 19 nt, Artificial Sequence
  Description of Artificial Sequence: Synthetic oligonucleotide
gacagagggcaagaaacag

SEQ ID NO: 2660993 - RNA, 19 nt, Artificial Sequence
  Description of Artificial Sequence: Synthetic oligonucleotide
cuuagcccucuuuacuugc

SEQ ID NO: 2660994 - RNA, 19 nt, Artificial Sequence
  Description of Artificial Sequence: Synthetic oligonucleotide
aggaacagagggcuguuca

SEQ ID NO: 2660995 - RNA, 19 nt, Artificial Sequence
  Description of Artificial Sequence: Synthetic oligonucleotide
uuacuugcugcuccucaug

SEQ ID NO: 2660996 - RNA, 19 nt, Artificial Sequence
  Description of Artificial Sequence: Synthetic oligonucleotide
acugcaagcaacugaguuu

SEQ ID NO: 2660997 - RNA, 19 nt, Artificial Sequence
  Description of Artificial Sequence: Synthetic oligonucleotide
uugucaggcaauggaagcc

SEQ ID NO: 2660998 - RNA, 19 nt, Artificial Sequence
  Description of Artificial Sequence: Synthetic oligonucleotide
agggcaagaaacagggcac

SEQ ID NO: 2660999 - RNA, 19 nt, Artificial Sequence
  Description of Artificial Sequence: Synthetic oligonucleotide
accaaccccucuguaaccc

SEQ ID NO: 2661000 - RNA, 19 nt, Artificial Sequence
  Description of Artificial Sequence: Synthetic oligonucleotide
aauaaacccugcaguuguc

SEQ ID NO: 2661001 - RNA, 19 nt, Artificial Sequence
  Description of Artificial Sequence: Synthetic oligonucleotide
cagagccccaucuauuagc

SEQ ID NO: 2661002 - RNA, 19 nt, Artificial Sequence
  Description of Artificial Sequence: Synthetic oligonucleotide
guaccuuguuccuugguca

SEQ ID NO: 2661003 - RNA, 19 nt, Artificial Sequence
  Description of Artificial Sequence: Synthetic oligonucleotide
uuguuccuuggucaaggga

SEQ ID NO: 2661004 - RNA, 19 nt, Artificial Sequence
  Description of Artificial Sequence: Synthetic oligonucleotide
aguugucaggcaauggaag

SEQ ID NO: 2661005 - RNA, 19 nt, Artificial Sequence
  Description of Artificial Sequence: Synthetic oligonucleotide
agaaaguacuagggauugc

SEQ ID NO: 2661006 - RNA, 19 nt, Artificial Sequence
  Description of Artificial Sequence: Synthetic oligonucleotide
acagagggcaagaaacagg

SEQ ID NO: 2661007 - RNA, 19 nt, Artificial Sequence
  Description of Artificial Sequence: Synthetic oligonucleotide
uguaacccauauccuuuca

SEQ ID NO: 2661008 - RNA, 19 nt, Artificial Sequence
  Description of Artificial Sequence: Synthetic oligonucleotide
ugcuccucaugcuuccucc

SEQ ID NO: 2661009 - RNA, 19 nt, Artificial Sequence
  Description of Artificial Sequence: Synthetic oligonucleotide
caacacuaccaccaacccc

SEQ ID NO: 2661010 - RNA, 19 nt, Artificial Sequence
  Description of Artificial Sequence: Synthetic oligonucleotide
uuuacuugcugcuccucau

SEQ ID NO: 2661011 - RNA, 19 nt, Artificial Sequence
  Description of Artificial Sequence: Synthetic oligonucleotide
gggacucuuguauuuaggc

SEQ ID NO: 2661012 - RNA, 19 nt, Artificial Sequence
  Description of Artificial Sequence: Synthetic oligonucleotide
aaugagugcuguauagaaa

SEQ ID NO: 2661013 - RNA, 19 nt, Artificial Sequence
  Description of Artificial Sequence: Synthetic oligonucleotide
auccuuucagaaaagggga

SEQ ID NO: 2661014 - RNA, 19 nt, Artificial Sequence
  Description of Artificial Sequence: Synthetic oligonucleotide
uguugggugagggccagag

SEQ ID NO: 2661015 - RNA, 19 nt, Artificial Sequence
  Description of Artificial Sequence: Synthetic oligonucleotide
uuguuagaagcucggcauc

SEQ ID NO: 2661016 - RNA, 19 nt, Artificial Sequence
  Description of Artificial Sequence: Synthetic oligonucleotide
ucaucccaggggcacagac

SEQ ID NO: 2661017 - RNA, 19 nt, Artificial Sequence
  Description of Artificial Sequence: Synthetic oligonucleotide
uagaagcucggcauccuuc

SEQ ID NO: 2661018 - RNA, 19 nt, Artificial Sequence
  Description of Artificial Sequence: Synthetic oligonucleotide
augacagagccccaucuau

SEQ ID NO: 2661019 - RNA, 19 nt, Artificial Sequence
  Description of Artificial Sequence: Synthetic oligonucleotide
ucaagggaacugcaagcaa

SEQ ID NO: 2661020 - RNA, 19 nt, Artificial Sequence
  Description of Artificial Sequence: Synthetic oligonucleotide
auauuucuugugagagccc

SEQ ID NO: 2661021 - RNA, 19 nt, Artificial Sequence
  Description of Artificial Sequence: Synthetic oligonucleotide
uccuuucagaaaaggggaa

SEQ ID NO: 2661022 - RNA, 19 nt, Artificial Sequence
  Description of Artificial Sequence: Synthetic oligonucleotide
gaaaaggggaaggccauca

SEQ ID NO: 2661023 - RNA, 19 nt, Artificial Sequence
  Description of Artificial Sequence: Synthetic oligonucleotide
agaugaggaguggccaggc

SEQ ID NO: 2661024 - RNA, 19 nt, Artificial Sequence
  Description of Artificial Sequence: Synthetic oligonucleotide
ucuuguauuuaggcucugc

SEQ ID NO: 2661025 - RNA, 19 nt, Artificial Sequence
  Description of Artificial Sequence: Synthetic oligonucleotide
uacuagggauugcauauuu

SEQ ID NO: 2661026 - RNA, 19 nt, Artificial Sequence
  Description of Artificial Sequence: Synthetic oligonucleotide
aacagcacuucggacuuca

SEQ ID NO: 2661027 - RNA, 19 nt, Artificial Sequence
  Description of Artificial Sequence: Synthetic oligonucleotide
ugcuuagcccucuuuacuu

SEQ ID NO: 2661028 - RNA, 19 nt, Artificial Sequence
  Description of Artificial Sequence: Synthetic oligonucleotide
aguucugaaugagugcugu

SEQ ID NO: 2661029 - RNA, 19 nt, Artificial Sequence
  Description of Artificial Sequence: Synthetic oligonucleotide
acagacagagggcaagaaa

SEQ ID NO: 2661030 - RNA, 19 nt, Artificial Sequence
  Description of Artificial Sequence: Synthetic oligonucleotide
cuccaguuaaagacuucag

SEQ ID NO: 2661031 - RNA, 19 nt, Artificial Sequence
  Description of Artificial Sequence: Synthetic oligonucleotide
ugcuaaguaccuuguuccu

SEQ ID NO: 2661032 - RNA, 19 nt, Artificial Sequence
  Description of Artificial Sequence: Synthetic oligonucleotide
uagaaaccuaggaguagaa

SEQ ID NO: 2661033 - RNA, 19 nt, Artificial Sequence
  Description of Artificial Sequence: Synthetic oligonucleotide
auguuucugggacucuugu

SEQ ID NO: 2661034 - RNA, 19 nt, Artificial Sequence
  Description of Artificial Sequence: Synthetic oligonucleotide
ggucaagggaacugcaagc

SEQ ID NO: 2661035 - RNA, 19 nt, Artificial Sequence
  Description of Artificial Sequence: Synthetic oligonucleotide
ugcaguugucaggcaaugg

SEQ ID NO: 2661036 - RNA, 19 nt, Artificial Sequence
  Description of Artificial Sequence: Synthetic oligonucleotide
guuguuagaagcucggcau

SEQ ID NO: 2661037 - RNA, 19 nt, Artificial Sequence
  Description of Artificial Sequence: Synthetic oligonucleotide
agccaacacuaccaccaac

SEQ ID NO: 2661038 - RNA, 19 nt, Artificial Sequence
  Description of Artificial Sequence: Synthetic oligonucleotide
gggccagagagaaagaacc

SEQ ID NO: 2661039 - RNA, 19 nt, Artificial Sequence
  Description of Artificial Sequence: Synthetic oligonucleotide
acagagccccaucuauuag

SEQ ID NO: 2661040 - RNA, 19 nt, Artificial Sequence
  Description of Artificial Sequence: Synthetic oligonucleotide
ugcacauguuucugggacu

SEQ ID NO: 2661041 - RNA, 19 nt, Artificial Sequence
  Description of Artificial Sequence: Synthetic oligonucleotide
caauggaagccaacacuac

SEQ ID NO: 2661042 - RNA, 19 nt, Artificial Sequence
  Description of Artificial Sequence: Synthetic oligonucleotide
accuguuguuagaagcucg

SEQ ID NO: 2661043 - RNA, 19 nt, Artificial Sequence
  Description of Artificial Sequence: Synthetic oligonucleotide
uuggucaagggaacugcaa

SEQ ID NO: 2661044 - RNA, 19 nt, Artificial Sequence
  Description of Artificial Sequence: Synthetic oligonucleotide
gcuguauagaaaccuagga

SEQ ID NO: 2661045 - RNA, 19 nt, Artificial Sequence
  Description of Artificial Sequence: Synthetic oligonucleotide
agggccagagagaaagaac

SEQ ID NO: 2661046 - RNA, 19 nt, Artificial Sequence
  Description of Artificial Sequence: Synthetic oligonucleotide
accuaggaguagaaaguac

SEQ ID NO: 2661047 - RNA, 19 nt, Artificial Sequence
  Description of Artificial Sequence: Synthetic oligonucleotide
uucagccgucaucccaggg

SEQ ID NO: 2661048 - RNA, 19 nt, Artificial Sequence
  Description of Artificial Sequence: Synthetic oligonucleotide
aaccuaggaguagaaagua

SEQ ID NO: 2661049 - RNA, 19 nt, Artificial Sequence
  Description of Artificial Sequence: Synthetic oligonucleotide
acuagggauugcauauuuc

SEQ ID NO: 2661050 - RNA, 19 nt, Artificial Sequence
  Description of Artificial Sequence: Synthetic oligonucleotide
gugcuguauagaaaccuag

SEQ ID NO: 2661051 - RNA, 19 nt, Artificial Sequence
  Description of Artificial Sequence: Synthetic oligonucleotide
ugcccuuaaguuacccaac

SEQ ID NO: 2661052 - RNA, 19 nt, Artificial Sequence
  Description of Artificial Sequence: Synthetic oligonucleotide
guuucugggacucuuguau

SEQ ID NO: 2661053 - RNA, 19 nt, Artificial Sequence
  Description of Artificial Sequence: Synthetic oligonucleotide
aaaguacuagggauugcau

SEQ ID NO: 2661054 - RNA, 19 nt, Artificial Sequence
  Description of Artificial Sequence: Synthetic oligonucleotide
uuagcccucuuuacuugcu

SEQ ID NO: 2661055 - RNA, 19 nt, Artificial Sequence
  Description of Artificial Sequence: Synthetic oligonucleotide
cugggacucuuguauuuag

SEQ ID NO: 2661056 - RNA, 19 nt, Artificial Sequence
  Description of Artificial Sequence: Synthetic oligonucleotide
acccauauccuuucagaaa

SEQ ID NO: 2661057 - RNA, 19 nt, Artificial Sequence
  Description of Artificial Sequence: Synthetic oligonucleotide
ucaguucagccuccaaaua

SEQ ID NO: 2661058 - RNA, 19 nt, Artificial Sequence
  Description of Artificial Sequence: Synthetic oligonucleotide
aaguaccuuguuccuuggu

SEQ ID NO: 2661059 - RNA, 19 nt, Artificial Sequence
  Description of Artificial Sequence: Synthetic oligonucleotide
aggggaaggccaucaaaga

SEQ ID NO: 2661060 - RNA, 19 nt, Artificial Sequence
  Description of Artificial Sequence: Synthetic oligonucleotide
gacuucagccgucauccca

SEQ ID NO: 2661061 - RNA, 19 nt, Artificial Sequence
  Description of Artificial Sequence: Synthetic oligonucleotide
caacugaguuuucaguuca

SEQ ID NO: 2661062 - RNA, 19 nt, Artificial Sequence
  Description of Artificial Sequence: Synthetic oligonucleotide
ucaggcaauggaagccaac

SEQ ID NO: 2661063 - RNA, 19 nt, Artificial Sequence
  Description of Artificial Sequence: Synthetic oligonucleotide
guauagaaaccuaggagua

SEQ ID NO: 2661064 - RNA, 19 nt, Artificial Sequence
  Description of Artificial Sequence: Synthetic oligonucleotide
uuuucaguucagccuccaa

SEQ ID NO: 2661065 - RNA, 19 nt, Artificial Sequence
  Description of Artificial Sequence: Synthetic oligonucleotide
cagccgucaucccaggggc

SEQ ID NO: 2661066 - RNA, 19 nt, Artificial Sequence
  Description of Artificial Sequence: Synthetic oligonucleotide
gggaaggccaucaaagaug

SEQ ID NO: 2661067 - RNA, 19 nt, Artificial Sequence
  Description of Artificial Sequence: Synthetic oligonucleotide
aacugaguuuucaguucag

SEQ ID NO: 2661068 - RNA, 19 nt, Artificial Sequence
  Description of Artificial Sequence: Synthetic oligonucleotide
gccaacacuaccaccaacc

SEQ ID NO: 2661069 - RNA, 19 nt, Artificial Sequence
  Description of Artificial Sequence: Synthetic oligonucleotide
ucggcauccuucccugcug

SEQ ID NO: 2661070 - RNA, 19 nt, Artificial Sequence
  Description of Artificial Sequence: Synthetic oligonucleotide
uuucugggacucuuguauu

SEQ ID NO: 2661071 - RNA, 19 nt, Artificial Sequence
  Description of Artificial Sequence: Synthetic oligonucleotide
uguuucugggacucuugua

SEQ ID NO: 2661072 - RNA, 19 nt, Artificial Sequence
  Description of Artificial Sequence: Synthetic oligonucleotide
uagcccucuuuacuugcug

SEQ ID NO: 2661073 - RNA, 19 nt, Artificial Sequence
  Description of Artificial Sequence: Synthetic oligonucleotide
uuagaagcucggcauccuu

SEQ ID NO: 2661074 - RNA, 19 nt, Artificial Sequence
  Description of Artificial Sequence: Synthetic oligonucleotide
cuguaacccauauccuuuc

SEQ ID NO: 2661075 - RNA, 19 nt, Artificial Sequence
  Description of Artificial Sequence: Synthetic oligonucleotide
ugacagagccccaucuauu

SEQ ID NO: 2661076 - RNA, 19 nt, Artificial Sequence
  Description of Artificial Sequence: Synthetic oligonucleotide
ugggugagggccagagaga

SEQ ID NO: 2661077 - RNA, 19 nt, Artificial Sequence
  Description of Artificial Sequence: Synthetic oligonucleotide
caaagaugaggaguggcca

SEQ ID NO: 2661078 - RNA, 19 nt, Artificial Sequence
  Description of Artificial Sequence: Synthetic oligonucleotide
uauuuaggcucugccccgc

SEQ ID NO: 2661079 - RNA, 19 nt, Artificial Sequence
  Description of Artificial Sequence: Synthetic oligonucleotide
ccuguuguuagaagcucgg

SEQ ID NO: 2661080 - RNA, 19 nt, Artificial Sequence
  Description of Artificial Sequence: Synthetic oligonucleotide
gcauauuucuugugagagc

SEQ ID NO: 2661081 - RNA, 19 nt, Artificial Sequence
  Description of Artificial Sequence: Synthetic oligonucleotide
gugucugguccucuugccc

SEQ ID NO: 2661082 - RNA, 19 nt, Artificial Sequence
  Description of Artificial Sequence: Synthetic oligonucleotide
uucugggacucuuguauuu

SEQ ID NO: 2661083 - RNA, 19 nt, Artificial Sequence
  Description of Artificial Sequence: Synthetic oligonucleotide
ucuugcccuuaaguuaccc

SEQ ID NO: 2661084 - RNA, 19 nt, Artificial Sequence
  Description of Artificial Sequence: Synthetic oligonucleotide
cuaggaguagaaaguacua

SEQ ID NO: 2661085 - RNA, 19 nt, Artificial Sequence
  Description of Artificial Sequence: Synthetic oligonucleotide
caguucagccuccaaauaa

SEQ ID NO: 2661086 - RNA, 19 nt, Artificial Sequence
  Description of Artificial Sequence: Synthetic oligonucleotide
ggaacagagggcuguucag

SEQ ID NO: 2661087 - RNA, 19 nt, Artificial Sequence
  Description of Artificial Sequence: Synthetic oligonucleotide
gucaagggaacugcaagca

SEQ ID NO: 2661088 - RNA, 19 nt, Artificial Sequence
  Description of Artificial Sequence: Synthetic oligonucleotide
guuacccaacagcaugcac

SEQ ID NO: 2661089 - RNA, 19 nt, Artificial Sequence
  Description of Artificial Sequence: Synthetic oligonucleotide
cuauuagccugagggcagg

SEQ ID NO: 2661090 - RNA, 19 nt, Artificial Sequence
  Description of Artificial Sequence: Synthetic oligonucleotide
gcaguugucaggcaaugga

SEQ ID NO: 2661091 - RNA, 19 nt, Artificial Sequence
  Description of Artificial Sequence: Synthetic oligonucleotide
acucuuguauuuaggcucu

SEQ ID NO: 2661092 - RNA, 19 nt, Artificial Sequence
  Description of Artificial Sequence: Synthetic oligonucleotide
aggggcacagacagagggc

SEQ ID NO: 2661093 - RNA, 19 nt, Artificial Sequence
  Description of Artificial Sequence: Synthetic oligonucleotide
aguucagccuccaaauaaa

SEQ ID NO: 2661094 - RNA, 19 nt, Artificial Sequence
  Description of Artificial Sequence: Synthetic oligonucleotide
gagaaagaaccuguuguua

SEQ ID NO: 2661095 - RNA, 19 nt, Artificial Sequence
  Description of Artificial Sequence: Synthetic oligonucleotide
uaccuuguuccuuggucaa

SEQ ID NO: 2661096 - RNA, 19 nt, Artificial Sequence
  Description of Artificial Sequence: Synthetic oligonucleotide
gaugacagagccccaucua

SEQ ID NO: 2661097 - RNA, 19 nt, Artificial Sequence
  Description of Artificial Sequence: Synthetic oligonucleotide
agcucggcauccuucccug

SEQ ID NO: 2661098 - RNA, 19 nt, Artificial Sequence
  Description of Artificial Sequence: Synthetic oligonucleotide
cuugcccuuaaguuaccca

SEQ ID NO: 2661099 - RNA, 19 nt, Artificial Sequence
  Description of Artificial Sequence: Synthetic oligonucleotide
agagggcaagaaacagggc

SEQ ID NO: 2661100 - RNA, 19 nt, Artificial Sequence
  Description of Artificial Sequence: Synthetic oligonucleotide
ggggcagacagaaucaaac

SEQ ID NO: 2661101 - RNA, 19 nt, Artificial Sequence
  Description of Artificial Sequence: Synthetic oligonucleotide
gaagcucggcauccuuccc

SEQ ID NO: 2661102 - RNA, 19 nt, Artificial Sequence
  Description of Artificial Sequence: Synthetic oligonucleotide
ugagggccagagagaaaga

SEQ ID NO: 2661103 - RNA, 19 nt, Artificial Sequence
  Description of Artificial Sequence: Synthetic oligonucleotide
cuuggucaagggaacugca

SEQ ID NO: 2661104 - RNA, 19 nt, Artificial Sequence
  Description of Artificial Sequence: Synthetic oligonucleotide
ggaagccaacacuaccacc

SEQ ID NO: 2661105 - RNA, 19 nt, Artificial Sequence
  Description of Artificial Sequence: Synthetic oligonucleotide
ccucuuuacuugcugcucc

SEQ ID NO: 2661106 - RNA, 19 nt, Artificial Sequence
  Description of Artificial Sequence: Synthetic oligonucleotide
ugguccucuugcccuuaag

SEQ ID NO: 2661107 - RNA, 19 nt, Artificial Sequence
  Description of Artificial Sequence: Synthetic oligonucleotide
agaaaccuaggaguagaaa

SEQ ID NO: 2661108 - RNA, 19 nt, Artificial Sequence
  Description of Artificial Sequence: Synthetic oligonucleotide
aagccuccccucugcuaag

SEQ ID NO: 2661109 - RNA, 19 nt, Artificial Sequence
  Description of Artificial Sequence: Synthetic oligonucleotide
gaaccuguuguuagaagcu

SEQ ID NO: 2661110 - RNA, 19 nt, Artificial Sequence
  Description of Artificial Sequence: Synthetic oligonucleotide
gcaacugaguuuucaguuc

SEQ ID NO: 2661111 - RNA, 19 nt, Artificial Sequence
  Description of Artificial Sequence: Synthetic oligonucleotide
cuguuguuagaagcucggc

SEQ ID NO: 2661112 - RNA, 19 nt, Artificial Sequence
  Description of Artificial Sequence: Synthetic oligonucleotide
caguugucaggcaauggaa

SEQ ID NO: 2661113 - RNA, 19 nt, Artificial Sequence
  Description of Artificial Sequence: Synthetic oligonucleotide
guucagcugagcugaugac

SEQ ID NO: 2661114 - RNA, 19 nt, Artificial Sequence
  Description of Artificial Sequence: Synthetic oligonucleotide
gggaacugcaagcaacuga

SEQ ID NO: 2661115 - RNA, 19 nt, Artificial Sequence
  Description of Artificial Sequence: Synthetic oligonucleotide
aaacagcacuucggacuuc

SEQ ID NO: 2661116 - RNA, 19 nt, Artificial Sequence
  Description of Artificial Sequence: Synthetic oligonucleotide
caggcuguugggugagggc

SEQ ID NO: 2661117 - RNA, 19 nt, Artificial Sequence
  Description of Artificial Sequence: Synthetic oligonucleotide
guucagccuccaaauaaac

SEQ ID NO: 2661118 - RNA, 19 nt, Artificial Sequence
  Description of Artificial Sequence: Synthetic oligonucleotide
gagugcuguauagaaaccu

SEQ ID NO: 2661119 - RNA, 19 nt, Artificial Sequence
  Description of Artificial Sequence: Synthetic oligonucleotide
gcacuucggacuucagccg

SEQ ID NO: 2661120 - RNA, 19 nt, Artificial Sequence
  Description of Artificial Sequence: Synthetic oligonucleotide
ucugggacucuuguauuua

SEQ ID NO: 2661121 - RNA, 19 nt, Artificial Sequence
  Description of Artificial Sequence: Synthetic oligonucleotide
caccaaccccucuguaacc

SEQ ID NO: 2661122 - RNA, 19 nt, Artificial Sequence
  Description of Artificial Sequence: Synthetic oligonucleotide
cacggaagggcaggaacag

SEQ ID NO: 2661123 - RNA, 19 nt, Artificial Sequence
  Description of Artificial Sequence: Synthetic oligonucleotide
cagaaucaaacagcacuuc

SEQ ID NO: 2661124 - RNA, 19 nt, Artificial Sequence
  Description of Artificial Sequence: Synthetic oligonucleotide
cccauauccuuucagaaaa

SEQ ID NO: 2661125 - RNA, 19 nt, Artificial Sequence
  Description of Artificial Sequence: Synthetic oligonucleotide
ccuuguuccuuggucaagg

SEQ ID NO: 2661126 - RNA, 19 nt, Artificial Sequence
  Description of Artificial Sequence: Synthetic oligonucleotide
gaaacagggcacagagcca

SEQ ID NO: 2661127 - RNA, 19 nt, Artificial Sequence
  Description of Artificial Sequence: Synthetic oligonucleotide
ggauugcauauuucuugug

SEQ ID NO: 2661128 - RNA, 19 nt, Artificial Sequence
  Description of Artificial Sequence: Synthetic oligonucleotide
auuagccugagggcaggug

SEQ ID NO: 2661129 - RNA, 19 nt, Artificial Sequence
  Description of Artificial Sequence: Synthetic oligonucleotide
ccaacacuaccaccaaccc

SEQ ID NO: 2661130 - RNA, 19 nt, Artificial Sequence
  Description of Artificial Sequence: Synthetic oligonucleotide
guuccuuggucaagggaac

SEQ ID NO: 2661131 - RNA, 19 nt, Artificial Sequence
  Description of Artificial Sequence: Synthetic oligonucleotide
ccucaugcuuccuccaaag

SEQ ID NO: 2661132 - RNA, 19 nt, Artificial Sequence
  Description of Artificial Sequence: Synthetic oligonucleotide
cugaugacagagccccauc

SEQ ID NO: 2661133 - RNA, 19 nt, Artificial Sequence
  Description of Artificial Sequence: Synthetic oligonucleotide
gcuuagcccucuuuacuug

SEQ ID NO: 2661134 - RNA, 19 nt, Artificial Sequence
  Description of Artificial Sequence: Synthetic oligonucleotide
caugcacauguuucuggga

SEQ ID NO: 2661135 - RNA, 19 nt, Artificial Sequence
  Description of Artificial Sequence: Synthetic oligonucleotide
cccucugcuaaguaccuug

SEQ ID NO: 2661136 - RNA, 19 nt, Artificial Sequence
  Description of Artificial Sequence: Synthetic oligonucleotide
ggcaauggaagccaacacu

SEQ ID NO: 2661137 - RNA, 19 nt, Artificial Sequence
  Description of Artificial Sequence: Synthetic oligonucleotide
ggcuguucagcugagcuga

SEQ ID NO: 2661138 - RNA, 19 nt, Artificial Sequence
  Description of Artificial Sequence: Synthetic oligonucleotide
aguuacccaacagcaugca

SEQ ID NO: 2661139 - RNA, 19 nt, Artificial Sequence
  Description of Artificial Sequence: Synthetic oligonucleotide
guagaaaguacuagggauu

SEQ ID NO: 2661140 - RNA, 19 nt, Artificial Sequence
  Description of Artificial Sequence: Synthetic oligonucleotide
ucuuuacuugcugcuccuc

SEQ ID NO: 2661141 - RNA, 19 nt, Artificial Sequence
  Description of Artificial Sequence: Synthetic oligonucleotide
gcaauggaagccaacacua

SEQ ID NO: 2661142 - RNA, 19 nt, Artificial Sequence
  Description of Artificial Sequence: Synthetic oligonucleotide
gccagagagaaagaaccug

SEQ ID NO: 2661143 - RNA, 19 nt, Artificial Sequence
  Description of Artificial Sequence: Synthetic oligonucleotide
uucccugcugcugggaaua

SEQ ID NO: 2661144 - RNA, 19 nt, Artificial Sequence
  Description of Artificial Sequence: Synthetic oligonucleotide
cuucaguucuccaguuaaa

SEQ ID NO: 2661145 - RNA, 19 nt, Artificial Sequence
  Description of Artificial Sequence: Synthetic oligonucleotide
acauguuucugggacucuu

SEQ ID NO: 2661146 - RNA, 19 nt, Artificial Sequence
  Description of Artificial Sequence: Synthetic oligonucleotide
ggccaucaaagaugaggag

SEQ ID NO: 2661147 - RNA, 19 nt, Artificial Sequence
  Description of Artificial Sequence: Synthetic oligonucleotide
acuucggacuucagccguc

SEQ ID NO: 2661148 - RNA, 19 nt, Artificial Sequence
  Description of Artificial Sequence: Synthetic oligonucleotide
ggcacagagccagccacgg

SEQ ID NO: 2661149 - RNA, 19 nt, Artificial Sequence
  Description of Artificial Sequence: Synthetic oligonucleotide
ccauauccuuucagaaaag

SEQ ID NO: 2661150 - RNA, 19 nt, Artificial Sequence
  Description of Artificial Sequence: Synthetic oligonucleotide
gggauugcauauuucuugu

SEQ ID NO: 2661151 - RNA, 19 nt, Artificial Sequence
  Description of Artificial Sequence: Synthetic oligonucleotide
caucccaggggcacagaca

SEQ ID NO: 2661152 - RNA, 19 nt, Artificial Sequence
  Description of Artificial Sequence: Synthetic oligonucleotide
uauuagccugagggcaggu

SEQ ID NO: 2661153 - RNA, 19 nt, Artificial Sequence
  Description of Artificial Sequence: Synthetic oligonucleotide
caggugucugguccucuug

SEQ ID NO: 2661154 - RNA, 19 nt, Artificial Sequence
  Description of Artificial Sequence: Synthetic oligonucleotide
ccuaggaguagaaaguacu

SEQ ID NO: 2661155 - RNA, 19 nt, Artificial Sequence
  Description of Artificial Sequence: Synthetic oligonucleotide
cucuugcccuuaaguuacc

SEQ ID NO: 2661156 - RNA, 19 nt, Artificial Sequence
  Description of Artificial Sequence: Synthetic oligonucleotide
accuuguuccuuggucaag

SEQ ID NO: 2661157 - RNA, 19 nt, Artificial Sequence
  Description of Artificial Sequence: Synthetic oligonucleotide
ggacucuuguauuuaggcu

SEQ ID NO: 2661158 - RNA, 19 nt, Artificial Sequence
  Description of Artificial Sequence: Synthetic oligonucleotide
agggaacugcaagcaacug

SEQ ID NO: 2661159 - RNA, 19 nt, Artificial Sequence
  Description of Artificial Sequence: Synthetic oligonucleotide
gggcuguucagcugagcug

SEQ ID NO: 2661160 - RNA, 19 nt, Artificial Sequence
  Description of Artificial Sequence: Synthetic oligonucleotide
cccaggggcacagacagag

SEQ ID NO: 2661161 - RNA, 19 nt, Artificial Sequence
  Description of Artificial Sequence: Synthetic oligonucleotide
accccucuguaacccauau

SEQ ID NO: 2661162 - RNA, 19 nt, Artificial Sequence
  Description of Artificial Sequence: Synthetic oligonucleotide
gaugcucugcuuagcccuc

SEQ ID NO: 2661163 - RNA, 19 nt, Artificial Sequence
  Description of Artificial Sequence: Synthetic oligonucleotide
cucuguaacccauauccuu

SEQ ID NO: 2661164 - RNA, 19 nt, Artificial Sequence
  Description of Artificial Sequence: Synthetic oligonucleotide
cccuuaaguuacccaacag

SEQ ID NO: 2661165 - RNA, 19 nt, Artificial Sequence
  Description of Artificial Sequence: Synthetic oligonucleotide
ugcaagcaacugaguuuuc

SEQ ID NO: 2661166 - RNA, 19 nt, Artificial Sequence
  Description of Artificial Sequence: Synthetic oligonucleotide
gcccuuaaguuacccaaca

SEQ ID NO: 2661167 - RNA, 19 nt, Artificial Sequence
  Description of Artificial Sequence: Synthetic oligonucleotide
gcaagcaacugaguuuuca

SEQ ID NO: 2661168 - RNA, 19 nt, Artificial Sequence
  Description of Artificial Sequence: Synthetic oligonucleotide
caaacagcacuucggacuu

SEQ ID NO: 2661169 - RNA, 19 nt, Artificial Sequence
  Description of Artificial Sequence: Synthetic oligonucleotide
gguccucuugcccuuaagu

SEQ ID NO: 2661170 - RNA, 19 nt, Artificial Sequence
  Description of Artificial Sequence: Synthetic oligonucleotide
guugggugagggccagaga

SEQ ID NO: 2661171 - RNA, 19 nt, Artificial Sequence
  Description of Artificial Sequence: Synthetic oligonucleotide
uucggacuucagccgucau

SEQ ID NO: 2661172 - RNA, 19 nt, Artificial Sequence
  Description of Artificial Sequence: Synthetic oligonucleotide
gaugaggaguggccaggcu

SEQ ID NO: 2661173 - RNA, 19 nt, Artificial Sequence
  Description of Artificial Sequence: Synthetic oligonucleotide
cuguucagcugagcugaug

SEQ ID NO: 2661174 - RNA, 19 nt, Artificial Sequence
  Description of Artificial Sequence: Synthetic oligonucleotide
ggggcacagacagagggca

SEQ ID NO: 2661175 - RNA, 19 nt, Artificial Sequence
  Description of Artificial Sequence: Synthetic oligonucleotide
guucugaaugagugcugua

SEQ ID NO: 2661176 - RNA, 19 nt, Artificial Sequence
  Description of Artificial Sequence: Synthetic oligonucleotide
cugcuuagcccucuuuacu

SEQ ID NO: 2661177 - RNA, 19 nt, Artificial Sequence
  Description of Artificial Sequence: Synthetic oligonucleotide
cugcaagcaacugaguuuu

SEQ ID NO: 2661178 - RNA, 19 nt, Artificial Sequence
  Description of Artificial Sequence: Synthetic oligonucleotide
gcacauguuucugggacuc

SEQ ID NO: 2661179 - RNA, 19 nt, Artificial Sequence
  Description of Artificial Sequence: Synthetic oligonucleotide
gcaagaaacagggcacaga

SEQ ID NO: 2661180 - RNA, 19 nt, Artificial Sequence
  Description of Artificial Sequence: Synthetic oligonucleotide
ucccaggggcacagacaga

SEQ ID NO: 2661181 - RNA, 19 nt, Artificial Sequence
  Description of Artificial Sequence: Synthetic oligonucleotide
cucuuuacuugcugcuccu

SEQ ID NO: 2661182 - RNA, 19 nt, Artificial Sequence
  Description of Artificial Sequence: Synthetic oligonucleotide
ccuccaaauaaacccugca

SEQ ID NO: 2661183 - RNA, 19 nt, Artificial Sequence
  Description of Artificial Sequence: Synthetic oligonucleotide
aggaguggccaggcuguug

SEQ ID NO: 2661184 - RNA, 19 nt, Artificial Sequence
  Description of Artificial Sequence: Synthetic oligonucleotide
acacuaccaccaaccccuc

SEQ ID NO: 2661185 - RNA, 19 nt, Artificial Sequence
  Description of Artificial Sequence: Synthetic oligonucleotide
acggaagggcaggaacaga

SEQ ID NO: 2661186 - RNA, 19 nt, Artificial Sequence
  Description of Artificial Sequence: Synthetic oligonucleotide
ggggaaggccaucaaagau

SEQ ID NO: 2661187 - RNA, 19 nt, Artificial Sequence
  Description of Artificial Sequence: Synthetic oligonucleotide
ugcucugcuuagcccucuu

SEQ ID NO: 2661188 - RNA, 19 nt, Artificial Sequence
  Description of Artificial Sequence: Synthetic oligonucleotide
agccugagggcaggugucu

SEQ ID NO: 2661189 - RNA, 19 nt, Artificial Sequence
  Description of Artificial Sequence: Synthetic oligonucleotide
cccaucuauuagccugagg

SEQ ID NO: 2661190 - RNA, 19 nt, Artificial Sequence
  Description of Artificial Sequence: Synthetic oligonucleotide
ccagccacggaagggcagg

SEQ ID NO: 2661191 - RNA, 19 nt, Artificial Sequence
  Description of Artificial Sequence: Synthetic oligonucleotide
cucuuguauuuaggcucug

SEQ ID NO: 2661192 - RNA, 19 nt, Artificial Sequence
  Description of Artificial Sequence: Synthetic oligonucleotide
caggaacagagggcuguuc

SEQ ID NO: 2661193 - RNA, 19 nt, Artificial Sequence
  Description of Artificial Sequence: Synthetic oligonucleotide
gggcacagagccagccacg

SEQ ID NO: 2661194 - RNA, 19 nt, Artificial Sequence
  Description of Artificial Sequence: Synthetic oligonucleotide
cuucggacuucagccguca

SEQ ID NO: 2661195 - RNA, 19 nt, Artificial Sequence
  Description of Artificial Sequence: Synthetic oligonucleotide
cacuucggacuucagccgu

SEQ ID NO: 2661196 - RNA, 19 nt, Artificial Sequence
  Description of Artificial Sequence: Synthetic oligonucleotide
cuccucaugcuuccuccaa

SEQ ID NO: 2661197 - RNA, 19 nt, Artificial Sequence
  Description of Artificial Sequence: Synthetic oligonucleotide
aaccccucuguaacccaua

SEQ ID NO: 2661198 - RNA, 19 nt, Artificial Sequence
  Description of Artificial Sequence: Synthetic oligonucleotide
guuagaagcucggcauccu

SEQ ID NO: 2661199 - RNA, 19 nt, Artificial Sequence
  Description of Artificial Sequence: Synthetic oligonucleotide
ggacuucagccgucauccc

SEQ ID NO: 2661200 - RNA, 19 nt, Artificial Sequence
  Description of Artificial Sequence: Synthetic oligonucleotide
cagagagaaagaaccuguu

SEQ ID NO: 2661201 - RNA, 19 nt, Artificial Sequence
  Description of Artificial Sequence: Synthetic oligonucleotide
gggugagggccagagagaa

SEQ ID NO: 2661202 - RNA, 19 nt, Artificial Sequence
  Description of Artificial Sequence: Synthetic oligonucleotide
ucugguccucuugcccuua

SEQ ID NO: 2661203 - RNA, 19 nt, Artificial Sequence
  Description of Artificial Sequence: Synthetic oligonucleotide
cacagacagagggcaagaa

SEQ ID NO: 2661204 - RNA, 19 nt, Artificial Sequence
  Description of Artificial Sequence: Synthetic oligonucleotide
gaacugcaagcaacugagu

SEQ ID NO: 2661205 - RNA, 19 nt, Artificial Sequence
  Description of Artificial Sequence: Synthetic oligonucleotide
gucaggcaauggaagccaa

SEQ ID NO: 2661206 - RNA, 19 nt, Artificial Sequence
  Description of Artificial Sequence: Synthetic oligonucleotide
gcuguugggugagggccag

SEQ ID NO: 2661207 - RNA, 19 nt, Artificial Sequence
  Description of Artificial Sequence: Synthetic oligonucleotide
agccagccacggaagggca

SEQ ID NO: 2661208 - RNA, 19 nt, Artificial Sequence
  Description of Artificial Sequence: Synthetic oligonucleotide
acccugcaguugucaggca

SEQ ID NO: 2661209 - RNA, 19 nt, Artificial Sequence
  Description of Artificial Sequence: Synthetic oligonucleotide
gcuccucaugcuuccucca

SEQ ID NO: 2661210 - RNA, 19 nt, Artificial Sequence
  Description of Artificial Sequence: Synthetic oligonucleotide
agccuccccucugcuaagu

SEQ ID NO: 2661211 - RNA, 19 nt, Artificial Sequence
  Description of Artificial Sequence: Synthetic oligonucleotide
gcacagacagagggcaaga

SEQ ID NO: 2661212 - RNA, 19 nt, Artificial Sequence
  Description of Artificial Sequence: Synthetic oligonucleotide
agcugaugacagagcccca

SEQ ID NO: 2661213 - RNA, 19 nt, Artificial Sequence
  Description of Artificial Sequence: Synthetic oligonucleotide
cuucccugcugcugggaau

SEQ ID NO: 2661214 - RNA, 19 nt, Artificial Sequence
  Description of Artificial Sequence: Synthetic oligonucleotide
cccucuuuacuugcugcuc

SEQ ID NO: 2661215 - RNA, 19 nt, Artificial Sequence
  Description of Artificial Sequence: Synthetic oligonucleotide
caaccccucuguaacccau

SEQ ID NO: 2661216 - RNA, 19 nt, Artificial Sequence
  Description of Artificial Sequence: Synthetic oligonucleotide
guacuagggauugcauauu

SEQ ID NO: 2661217 - RNA, 19 nt, Artificial Sequence
  Description of Artificial Sequence: Synthetic oligonucleotide
ggccaggcuguugggugag

SEQ ID NO: 2661218 - RNA, 19 nt, Artificial Sequence
  Description of Artificial Sequence: Synthetic oligonucleotide
gccccaucuauuagccuga

SEQ ID NO: 2661219 - RNA, 19 nt, Artificial Sequence
  Description of Artificial Sequence: Synthetic oligonucleotide
cugagggcaggugucuggu

SEQ ID NO: 2661220 - RNA, 19 nt, Artificial Sequence
  Description of Artificial Sequence: Synthetic oligonucleotide
gcucggcauccuucccugc

SEQ ID NO: 2661221 - RNA, 19 nt, Artificial Sequence
  Description of Artificial Sequence: Synthetic oligonucleotide
agccacggaagggcaggaa

SEQ ID NO: 2661222 - RNA, 19 nt, Artificial Sequence
  Description of Artificial Sequence: Synthetic oligonucleotide
cggcauccuucccugcugc

SEQ ID NO: 2661223 - RNA, 19 nt, Artificial Sequence
  Description of Artificial Sequence: Synthetic oligonucleotide
gccagccacggaagggcag

SEQ ID NO: 2661224 - RNA, 19 nt, Artificial Sequence
  Description of Artificial Sequence: Synthetic oligonucleotide
ggccagagagaaagaaccu

SEQ ID NO: 2661225 - RNA, 19 nt, Artificial Sequence
  Description of Artificial Sequence: Synthetic oligonucleotide
gcuaaguaccuuguuccuu

SEQ ID NO: 2661226 - RNA, 19 nt, Artificial Sequence
  Description of Artificial Sequence: Synthetic oligonucleotide
cucugcuaaguaccuuguu

SEQ ID NO: 2661227 - RNA, 19 nt, Artificial Sequence
  Description of Artificial Sequence: Synthetic oligonucleotide
cugguccucuugcccuuaa

SEQ ID NO: 2661228 - RNA, 19 nt, Artificial Sequence
  Description of Artificial Sequence: Synthetic oligonucleotide
ccccucuguaacccauauc

SEQ ID NO: 2661229 - RNA, 19 nt, Artificial Sequence
  Description of Artificial Sequence: Synthetic oligonucleotide
gcugaugacagagccccau

SEQ ID NO: 2661230 - RNA, 19 nt, Artificial Sequence
  Description of Artificial Sequence: Synthetic oligonucleotide
cgucaucccaggggcacag

SEQ ID NO: 2661231 - RNA, 19 nt, Artificial Sequence
  Description of Artificial Sequence: Synthetic oligonucleotide
ccuucccugcugcugggaa

SEQ ID NO: 2661232 - RNA, 19 nt, Artificial Sequence
  Description of Artificial Sequence: Synthetic oligonucleotide
ccucugcuaaguaccuugu

SEQ ID NO: 2661233 - RNA, 19 nt, Artificial Sequence
  Description of Artificial Sequence: Synthetic oligonucleotide
ccccaucuauuagccugag

SEQ ID NO: 2661234 - RNA, 19 nt, Artificial Sequence
  Description of Artificial Sequence: Synthetic oligonucleotide
ggugagggccagagagaaa

SEQ ID NO: 2661235 - RNA, 19 nt, Artificial Sequence
  Description of Artificial Sequence: Synthetic oligonucleotide
cccuucaguucuccaguua

SEQ ID NO: 2661236 - RNA, 19 nt, Artificial Sequence
  Description of Artificial Sequence: Synthetic oligonucleotide
cuguugggugagggccaga

SEQ ID NO: 2661237 - RNA, 19 nt, Artificial Sequence
  Description of Artificial Sequence: Synthetic oligonucleotide
ccaacagcaugcacauguu

SEQ ID NO: 2661238 - RNA, 19 nt, Artificial Sequence
  Description of Artificial Sequence: Synthetic oligonucleotide
gggcaggugucugguccuc

SEQ ID NO: 2661239 - RNA, 19 nt, Artificial Sequence
  Description of Artificial Sequence: Synthetic oligonucleotide
gaggaguggccaggcuguu

SEQ ID NO: 2661240 - RNA, 19 nt, Artificial Sequence
  Description of Artificial Sequence: Synthetic oligonucleotide
ggcaggugucugguccucu

SEQ ID NO: 2661241 - RNA, 19 nt, Artificial Sequence
  Description of Artificial Sequence: Synthetic oligonucleotide
ccgucaucccaggggcaca

SEQ ID NO: 2661242 - RNA, 19 nt, Artificial Sequence
  Description of Artificial Sequence: Synthetic oligonucleotide
ccccuucaguucuccaguu

SEQ ID NO: 2661243 - RNA, 19 nt, Artificial Sequence
  Description of Artificial Sequence: Synthetic oligonucleotide
gcuguucagcugagcugau

SEQ ID NO: 2661244 - RNA, 19 nt, Artificial Sequence
  Description of Artificial Sequence: Synthetic oligonucleotide
ccccucugcuaaguaccuu

SEQ ID NO: 2661245 - RNA, 19 nt, Artificial Sequence
  Description of Artificial Sequence: Synthetic oligonucleotide
aauucuuucucccaaaguc

SEQ ID NO: 2661246 - RNA, 19 nt, Artificial Sequence
  Description of Artificial Sequence: Synthetic oligonucleotide
ugaauauuugucuagaucu

SEQ ID NO: 2661247 - RNA, 19 nt, Artificial Sequence
  Description of Artificial Sequence: Synthetic oligonucleotide
aaguuaguaccuuaacugc

SEQ ID NO: 2661248 - RNA, 19 nt, Artificial Sequence
  Description of Artificial Sequence: Synthetic oligonucleotide
aaagucugaguuuucaggg

SEQ ID NO: 2661249 - RNA, 19 nt, Artificial Sequence
  Description of Artificial Sequence: Synthetic oligonucleotide
gauccauacaucuugaaug

SEQ ID NO: 2661250 - RNA, 19 nt, Artificial Sequence
  Description of Artificial Sequence: Synthetic oligonucleotide
aaggcgaccacauauucac

SEQ ID NO: 2661251 - RNA, 19 nt, Artificial Sequence
  Description of Artificial Sequence: Synthetic oligonucleotide
uguuaauucugacacaccc

SEQ ID NO: 2661252 - RNA, 19 nt, Artificial Sequence
  Description of Artificial Sequence: Synthetic oligonucleotide
aauucugacacacccagug

SEQ ID NO: 2661253 - RNA, 19 nt, Artificial Sequence
  Description of Artificial Sequence: Synthetic oligonucleotide
uuaauucugacacacccag

SEQ ID NO: 2661254 - RNA, 19 nt, Artificial Sequence
  Description of Artificial Sequence: Synthetic oligonucleotide
uaugcugccauccucaggc

SEQ ID NO: 2661255 - RNA, 19 nt, Artificial Sequence
  Description of Artificial Sequence: Synthetic oligonucleotide
ucaaaugugauucuucccu

SEQ ID NO: 2661256 - RNA, 19 nt, Artificial Sequence
  Description of Artificial Sequence: Synthetic oligonucleotide
aauagccuggaauagguca

SEQ ID NO: 2661257 - RNA, 19 nt, Artificial Sequence
  Description of Artificial Sequence: Synthetic oligonucleotide
ucacuguuaauucugacac

SEQ ID NO: 2661258 - RNA, 19 nt, Artificial Sequence
  Description of Artificial Sequence: Synthetic oligonucleotide
agauuuucugguuucaguc

SEQ ID NO: 2661259 - RNA, 19 nt, Artificial Sequence
  Description of Artificial Sequence: Synthetic oligonucleotide
aaaccuacaaaagucauca

SEQ ID NO: 2661260 - RNA, 19 nt, Artificial Sequence
  Description of Artificial Sequence: Synthetic oligonucleotide
ucaaacagcgagaacaugu

SEQ ID NO: 2661261 - RNA, 19 nt, Artificial Sequence
  Description of Artificial Sequence: Synthetic oligonucleotide
auccauacaucuugaaugc

SEQ ID NO: 2661262 - RNA, 19 nt, Artificial Sequence
  Description of Artificial Sequence: Synthetic oligonucleotide
uacaaaagucaucaaaugu

SEQ ID NO: 2661263 - RNA, 19 nt, Artificial Sequence
  Description of Artificial Sequence: Synthetic oligonucleotide
uuggucaggguacaaauag

SEQ ID NO: 2661264 - RNA, 19 nt, Artificial Sequence
  Description of Artificial Sequence: Synthetic oligonucleotide
ucugcaaaccuacaaaagu

SEQ ID NO: 2661265 - RNA, 19 nt, Artificial Sequence
  Description of Artificial Sequence: Synthetic oligonucleotide
cugaagucaaugcagaagc

SEQ ID NO: 2661266 - RNA, 19 nt, Artificial Sequence
  Description of Artificial Sequence: Synthetic oligonucleotide
aagucugaguuuucagggc

SEQ ID NO: 2661267 - RNA, 19 nt, Artificial Sequence
  Description of Artificial Sequence: Synthetic oligonucleotide
guacaaauaguccucugcg

SEQ ID NO: 2661268 - RNA, 19 nt, Artificial Sequence
  Description of Artificial Sequence: Synthetic oligonucleotide
caaagucugaguuuucagg

SEQ ID NO: 2661269 - RNA, 19 nt, Artificial Sequence
  Description of Artificial Sequence: Synthetic oligonucleotide
aauguguuuggucagggua

SEQ ID NO: 2661270 - RNA, 19 nt, Artificial Sequence
  Description of Artificial Sequence: Synthetic oligonucleotide
ucaggguacaaauaguccu

SEQ ID NO: 2661271 - RNA, 19 nt, Artificial Sequence
  Description of Artificial Sequence: Synthetic oligonucleotide
caucaaaugugauucuucc

SEQ ID NO: 2661272 - RNA, 19 nt, Artificial Sequence
  Description of Artificial Sequence: Synthetic oligonucleotide
agucaggguacauuucugc

SEQ ID NO: 2661273 - RNA, 19 nt, Artificial Sequence
  Description of Artificial Sequence: Synthetic oligonucleotide
acaaaagucaucaaaugug

SEQ ID NO: 2661274 - RNA, 19 nt, Artificial Sequence
  Description of Artificial Sequence: Synthetic oligonucleotide
aggcugaucucaucuaugc

SEQ ID NO: 2661275 - RNA, 19 nt, Artificial Sequence
  Description of Artificial Sequence: Synthetic oligonucleotide
ugcaaaccuacaaaaguca

SEQ ID NO: 2661276 - RNA, 19 nt, Artificial Sequence
  Description of Artificial Sequence: Synthetic oligonucleotide
acucucgucaaacagcgag

SEQ ID NO: 2661277 - RNA, 19 nt, Artificial Sequence
  Description of Artificial Sequence: Synthetic oligonucleotide
aguaccuuaacugccaaag

SEQ ID NO: 2661278 - RNA, 19 nt, Artificial Sequence
  Description of Artificial Sequence: Synthetic oligonucleotide
aagauuuucugguuucagu

SEQ ID NO: 2661279 - RNA, 19 nt, Artificial Sequence
  Description of Artificial Sequence: Synthetic oligonucleotide
agccauugggaguuggugc

SEQ ID NO: 2661280 - RNA, 19 nt, Artificial Sequence
  Description of Artificial Sequence: Synthetic oligonucleotide
aguuaguaccuuaacugcc

SEQ ID NO: 2661281 - RNA, 19 nt, Artificial Sequence
  Description of Artificial Sequence: Synthetic oligonucleotide
caaugcagaagccauuggg

SEQ ID NO: 2661282 - RNA, 19 nt, Artificial Sequence
  Description of Artificial Sequence: Synthetic oligonucleotide
aaugugauucuucccuucu

SEQ ID NO: 2661283 - RNA, 19 nt, Artificial Sequence
  Description of Artificial Sequence: Synthetic oligonucleotide
gucgaaauguguuugguca

SEQ ID NO: 2661284 - RNA, 19 nt, Artificial Sequence
  Description of Artificial Sequence: Synthetic oligonucleotide
cugaucucaucuaugcugc

SEQ ID NO: 2661285 - RNA, 19 nt, Artificial Sequence
  Description of Artificial Sequence: Synthetic oligonucleotide
ucucugaauauuugucuag

SEQ ID NO: 2661286 - RNA, 19 nt, Artificial Sequence
  Description of Artificial Sequence: Synthetic oligonucleotide
uucugacacacccagugca

SEQ ID NO: 2661287 - RNA, 19 nt, Artificial Sequence
  Description of Artificial Sequence: Synthetic oligonucleotide
cauacaucuugaaugccag

SEQ ID NO: 2661288 - RNA, 19 nt, Artificial Sequence
  Description of Artificial Sequence: Synthetic oligonucleotide
aggucuaucucaccgucac

SEQ ID NO: 2661289 - RNA, 19 nt, Artificial Sequence
  Description of Artificial Sequence: Synthetic oligonucleotide
acggaggucuaucucaccg

SEQ ID NO: 2661290 - RNA, 19 nt, Artificial Sequence
  Description of Artificial Sequence: Synthetic oligonucleotide
ugucugugcacaguugucg

SEQ ID NO: 2661291 - RNA, 19 nt, Artificial Sequence
  Description of Artificial Sequence: Synthetic oligonucleotide
uucacggaggucuaucuca

SEQ ID NO: 2661292 - RNA, 19 nt, Artificial Sequence
  Description of Artificial Sequence: Synthetic oligonucleotide
cucaccgucaccacucucg

SEQ ID NO: 2661293 - RNA, 19 nt, Artificial Sequence
  Description of Artificial Sequence: Synthetic oligonucleotide
acaggaaccuccaaguagg

SEQ ID NO: 2661294 - RNA, 19 nt, Artificial Sequence
  Description of Artificial Sequence: Synthetic oligonucleotide
aaauaguccucugcgaagu

SEQ ID NO: 2661295 - RNA, 19 nt, Artificial Sequence
  Description of Artificial Sequence: Synthetic oligonucleotide
agugcagucuugaggaugc

SEQ ID NO: 2661296 - RNA, 19 nt, Artificial Sequence
  Description of Artificial Sequence: Synthetic oligonucleotide
uuggucaauagccuggaau

SEQ ID NO: 2661297 - RNA, 19 nt, Artificial Sequence
  Description of Artificial Sequence: Synthetic oligonucleotide
cugcacaccacagacaagg

SEQ ID NO: 2661298 - RNA, 19 nt, Artificial Sequence
  Description of Artificial Sequence: Synthetic oligonucleotide
ugcacaguugucgaaaugu

SEQ ID NO: 2661299 - RNA, 19 nt, Artificial Sequence
  Description of Artificial Sequence: Synthetic oligonucleotide
ucaucaaaugugauucuuc

SEQ ID NO: 2661300 - RNA, 19 nt, Artificial Sequence
  Description of Artificial Sequence: Synthetic oligonucleotide
uggucaauagccuggaaua

SEQ ID NO: 2661301 - RNA, 19 nt, Artificial Sequence
  Description of Artificial Sequence: Synthetic oligonucleotide
cuggcaaacuccaggaggc

SEQ ID NO: 2661302 - RNA, 19 nt, Artificial Sequence
  Description of Artificial Sequence: Synthetic oligonucleotide
uauuugucuagaucuuucu

SEQ ID NO: 2661303 - RNA, 19 nt, Artificial Sequence
  Description of Artificial Sequence: Synthetic oligonucleotide
cugcaaaccuacaaaaguc

SEQ ID NO: 2661304 - RNA, 19 nt, Artificial Sequence
  Description of Artificial Sequence: Synthetic oligonucleotide
acaaauaguccucugcgaa

SEQ ID NO: 2661305 - RNA, 19 nt, Artificial Sequence
  Description of Artificial Sequence: Synthetic oligonucleotide
uggaauaggucagucacug

SEQ ID NO: 2661306 - RNA, 19 nt, Artificial Sequence
  Description of Artificial Sequence: Synthetic oligonucleotide
ucaggcgauccauacaucu

SEQ ID NO: 2661307 - RNA, 19 nt, Artificial Sequence
  Description of Artificial Sequence: Synthetic oligonucleotide
ucaaugcagaagccauugg

SEQ ID NO: 2661308 - RNA, 19 nt, Artificial Sequence
  Description of Artificial Sequence: Synthetic oligonucleotide
ucugggauggccugcacac

SEQ ID NO: 2661309 - RNA, 19 nt, Artificial Sequence
  Description of Artificial Sequence: Synthetic oligonucleotide
ggaaccuccaaguaggcug

SEQ ID NO: 2661310 - RNA, 19 nt, Artificial Sequence
  Description of Artificial Sequence: Synthetic oligonucleotide
accgucaccacucucguca

SEQ ID NO: 2661311 - RNA, 19 nt, Artificial Sequence
  Description of Artificial Sequence: Synthetic oligonucleotide
gaaauguguuuggucaggg

SEQ ID NO: 2661312 - RNA, 19 nt, Artificial Sequence
  Description of Artificial Sequence: Synthetic oligonucleotide
aacagcgagaacauguccu

SEQ ID NO: 2661313 - RNA, 19 nt, Artificial Sequence
  Description of Artificial Sequence: Synthetic oligonucleotide
ugaagucaaugcagaagcc

SEQ ID NO: 2661314 - RNA, 19 nt, Artificial Sequence
  Description of Artificial Sequence: Synthetic oligonucleotide
acaaggcgaccacauauuc

SEQ ID NO: 2661315 - RNA, 19 nt, Artificial Sequence
  Description of Artificial Sequence: Synthetic oligonucleotide
guugucgaaauguguuugg

SEQ ID NO: 2661316 - RNA, 19 nt, Artificial Sequence
  Description of Artificial Sequence: Synthetic oligonucleotide
uacaaauaguccucugcga

SEQ ID NO: 2661317 - RNA, 19 nt, Artificial Sequence
  Description of Artificial Sequence: Synthetic oligonucleotide
ucugacacacccagugcag

SEQ ID NO: 2661318 - RNA, 19 nt, Artificial Sequence
  Description of Artificial Sequence: Synthetic oligonucleotide
auauuugucuagaucuuuc

SEQ ID NO: 2661319 - RNA, 19 nt, Artificial Sequence
  Description of Artificial Sequence: Synthetic oligonucleotide
cucuuggucaauagccugg

SEQ ID NO: 2661320 - RNA, 19 nt, Artificial Sequence
  Description of Artificial Sequence: Synthetic oligonucleotide
ucgaaauguguuuggucag

SEQ ID NO: 2661321 - RNA, 19 nt, Artificial Sequence
  Description of Artificial Sequence: Synthetic oligonucleotide
gucuagaucuuucucaaga

SEQ ID NO: 2661322 - RNA, 19 nt, Artificial Sequence
  Description of Artificial Sequence: Synthetic oligonucleotide
uugaggaugcaggacaggc

SEQ ID NO: 2661323 - RNA, 19 nt, Artificial Sequence
  Description of Artificial Sequence: Synthetic oligonucleotide
accuacaaaagucaucaaa

SEQ ID NO: 2661324 - RNA, 19 nt, Artificial Sequence
  Description of Artificial Sequence: Synthetic oligonucleotide
gguacaaauaguccucugc

SEQ ID NO: 2661325 - RNA, 19 nt, Artificial Sequence
  Description of Artificial Sequence: Synthetic oligonucleotide
caaauaguccucugcgaag

SEQ ID NO: 2661326 - RNA, 19 nt, Artificial Sequence
  Description of Artificial Sequence: Synthetic oligonucleotide
agacaaggcgaccacauau

SEQ ID NO: 2661327 - RNA, 19 nt, Artificial Sequence
  Description of Artificial Sequence: Synthetic oligonucleotide
uaucucaccgucaccacuc

SEQ ID NO: 2661328 - RNA, 19 nt, Artificial Sequence
  Description of Artificial Sequence: Synthetic oligonucleotide
acagcgagaacauguccuc

SEQ ID NO: 2661329 - RNA, 19 nt, Artificial Sequence
  Description of Artificial Sequence: Synthetic oligonucleotide
ucuagaucuuucucaagau

SEQ ID NO: 2661330 - RNA, 19 nt, Artificial Sequence
  Description of Artificial Sequence: Synthetic oligonucleotide
ugcacucucugaauauuug

SEQ ID NO: 2661331 - RNA, 19 nt, Artificial Sequence
  Description of Artificial Sequence: Synthetic oligonucleotide
auguguuuggucaggguac

SEQ ID NO: 2661332 - RNA, 19 nt, Artificial Sequence
  Description of Artificial Sequence: Synthetic oligonucleotide
aaauguguuuggucagggu

SEQ ID NO: 2661333 - RNA, 19 nt, Artificial Sequence
  Description of Artificial Sequence: Synthetic oligonucleotide
uugucuagaucuuucucaa

SEQ ID NO: 2661334 - RNA, 19 nt, Artificial Sequence
  Description of Artificial Sequence: Synthetic oligonucleotide
aauauuugucuagaucuuu

SEQ ID NO: 2661335 - RNA, 19 nt, Artificial Sequence
  Description of Artificial Sequence: Synthetic oligonucleotide
uauucacggaggucuaucu

SEQ ID NO: 2661336 - RNA, 19 nt, Artificial Sequence
  Description of Artificial Sequence: Synthetic oligonucleotide
uccagcgcauccgagacag

SEQ ID NO: 2661337 - RNA, 19 nt, Artificial Sequence
  Description of Artificial Sequence: Synthetic oligonucleotide
cacaccacagacaaggcga

SEQ ID NO: 2661338 - RNA, 19 nt, Artificial Sequence
  Description of Artificial Sequence: Synthetic oligonucleotide
aggcgauccauacaucuug

SEQ ID NO: 2661339 - RNA, 19 nt, Artificial Sequence
  Description of Artificial Sequence: Synthetic oligonucleotide
ucugggagcccaaucuucu

SEQ ID NO: 2661340 - RNA, 19 nt, Artificial Sequence
  Description of Artificial Sequence: Synthetic oligonucleotide
auucacggaggucuaucuc

SEQ ID NO: 2661341 - RNA, 19 nt, Artificial Sequence
  Description of Artificial Sequence: Synthetic oligonucleotide
ggugucagcaggcaagcgg

SEQ ID NO: 2661342 - RNA, 19 nt, Artificial Sequence
  Description of Artificial Sequence: Synthetic oligonucleotide
ucucaagauuuucugguuu

SEQ ID NO: 2661343 - RNA, 19 nt, Artificial Sequence
  Description of Artificial Sequence: Synthetic oligonucleotide
gcaagcggaaguuaguacc

SEQ ID NO: 2661344 - RNA, 19 nt, Artificial Sequence
  Description of Artificial Sequence: Synthetic oligonucleotide
ucuccucucuucauccuug

SEQ ID NO: 2661345 - RNA, 19 nt, Artificial Sequence
  Description of Artificial Sequence: Synthetic oligonucleotide
auccucaggcgauccauac

SEQ ID NO: 2661346 - RNA, 19 nt, Artificial Sequence
  Description of Artificial Sequence: Synthetic oligonucleotide
gucaauagccuggaauagg

SEQ ID NO: 2661347 - RNA, 19 nt, Artificial Sequence
  Description of Artificial Sequence: Synthetic oligonucleotide
caaaccuacaaaagucauc

SEQ ID NO: 2661348 - RNA, 19 nt, Artificial Sequence
  Description of Artificial Sequence: Synthetic oligonucleotide
auccgagacaggaaccucc

SEQ ID NO: 2661349 - RNA, 19 nt, Artificial Sequence
  Description of Artificial Sequence: Synthetic oligonucleotide
gaagucaaugcagaagcca

SEQ ID NO: 2661350 - RNA, 19 nt, Artificial Sequence
  Description of Artificial Sequence: Synthetic oligonucleotide
ugucgaaauguguuugguc

SEQ ID NO: 2661351 - RNA, 19 nt, Artificial Sequence
  Description of Artificial Sequence: Synthetic oligonucleotide
guaggcugcgaacucuggg

SEQ ID NO: 2661352 - RNA, 19 nt, Artificial Sequence
  Description of Artificial Sequence: Synthetic oligonucleotide
aguugucgaaauguguuug

SEQ ID NO: 2661353 - RNA, 19 nt, Artificial Sequence
  Description of Artificial Sequence: Synthetic oligonucleotide
cacucucugaauauuuguc

SEQ ID NO: 2661354 - RNA, 19 nt, Artificial Sequence
  Description of Artificial Sequence: Synthetic oligonucleotide
uucauccuugcacucucug

SEQ ID NO: 2661355 - RNA, 19 nt, Artificial Sequence
  Description of Artificial Sequence: Synthetic oligonucleotide
caaacagcgagaacauguc

SEQ ID NO: 2661356 - RNA, 19 nt, Artificial Sequence
  Description of Artificial Sequence: Synthetic oligonucleotide
auauucacggaggucuauc

SEQ ID NO: 2661357 - RNA, 19 nt, Artificial Sequence
  Description of Artificial Sequence: Synthetic oligonucleotide
cucaucuaugcugccaucc

SEQ ID NO: 2661358 - RNA, 19 nt, Artificial Sequence
  Description of Artificial Sequence: Synthetic oligonucleotide
ggcgaccacauauucacgg

SEQ ID NO: 2661359 - RNA, 19 nt, Artificial Sequence
  Description of Artificial Sequence: Synthetic oligonucleotide
augugauucuucccuucuc

SEQ ID NO: 2661360 - RNA, 19 nt, Artificial Sequence
  Description of Artificial Sequence: Synthetic oligonucleotide
uggccugcacaccacagac

SEQ ID NO: 2661361 - RNA, 19 nt, Artificial Sequence
  Description of Artificial Sequence: Synthetic oligonucleotide
uuuggucaggguacaaaua

SEQ ID NO: 2661362 - RNA, 19 nt, Artificial Sequence
  Description of Artificial Sequence: Synthetic oligonucleotide
guuuucagggcugaaguca

SEQ ID NO: 2661363 - RNA, 19 nt, Artificial Sequence
  Description of Artificial Sequence: Synthetic oligonucleotide
ugcagaagccauugggagu

SEQ ID NO: 2661364 - RNA, 19 nt, Artificial Sequence
  Description of Artificial Sequence: Synthetic oligonucleotide
gucaaugcagaagccauug

SEQ ID NO: 2661365 - RNA, 19 nt, Artificial Sequence
  Description of Artificial Sequence: Synthetic oligonucleotide
uccgaggccccucacgagc

SEQ ID NO: 2661366 - RNA, 19 nt, Artificial Sequence
  Description of Artificial Sequence: Synthetic oligonucleotide
ugucuagaucuuucucaag

SEQ ID NO: 2661367 - RNA, 19 nt, Artificial Sequence
  Description of Artificial Sequence: Synthetic oligonucleotide
ucaagauuuucugguuuca

SEQ ID NO: 2661368 - RNA, 19 nt, Artificial Sequence
  Description of Artificial Sequence: Synthetic oligonucleotide
aucucaucuaugcugccau

SEQ ID NO: 2661369 - RNA, 19 nt, Artificial Sequence
  Description of Artificial Sequence: Synthetic oligonucleotide
ucuaugcugccauccucag

SEQ ID NO: 2661370 - RNA, 19 nt, Artificial Sequence
  Description of Artificial Sequence: Synthetic oligonucleotide
uuaguaccuuaacugccaa

SEQ ID NO: 2661371 - RNA, 19 nt, Artificial Sequence
  Description of Artificial Sequence: Synthetic oligonucleotide
uucugguuucaguccgagg

SEQ ID NO: 2661372 - RNA, 19 nt, Artificial Sequence
  Description of Artificial Sequence: Synthetic oligonucleotide
ugauucuucccuucuccuc

SEQ ID NO: 2661373 - RNA, 19 nt, Artificial Sequence
  Description of Artificial Sequence: Synthetic oligonucleotide
agggcugaagucaaugcag

SEQ ID NO: 2661374 - RNA, 19 nt, Artificial Sequence
  Description of Artificial Sequence: Synthetic oligonucleotide
guaccuuaacugccaaagc

SEQ ID NO: 2661375 - RNA, 19 nt, Artificial Sequence
  Description of Artificial Sequence: Synthetic oligonucleotide
aauaggucagucacuguua

SEQ ID NO: 2661376 - RNA, 19 nt, Artificial Sequence
  Description of Artificial Sequence: Synthetic oligonucleotide
aggucagucacuguuaauu

SEQ ID NO: 2661377 - RNA, 19 nt, Artificial Sequence
  Description of Artificial Sequence: Synthetic oligonucleotide
gagacaggaaccuccaagu

SEQ ID NO: 2661378 - RNA, 19 nt, Artificial Sequence
  Description of Artificial Sequence: Synthetic oligonucleotide
auagccuggaauaggucag

SEQ ID NO: 2661379 - RNA, 19 nt, Artificial Sequence
  Description of Artificial Sequence: Synthetic oligonucleotide
gaauaggucagucacuguu

SEQ ID NO: 2661380 - RNA, 19 nt, Artificial Sequence
  Description of Artificial Sequence: Synthetic oligonucleotide
gucuaucucaccgucacca

SEQ ID NO: 2661381 - RNA, 19 nt, Artificial Sequence
  Description of Artificial Sequence: Synthetic oligonucleotide
uuuucugguuucaguccga

SEQ ID NO: 2661382 - RNA, 19 nt, Artificial Sequence
  Description of Artificial Sequence: Synthetic oligonucleotide
auaggucagucacuguuaa

SEQ ID NO: 2661383 - RNA, 19 nt, Artificial Sequence
  Description of Artificial Sequence: Synthetic oligonucleotide
accuuaacugccaaagcca

SEQ ID NO: 2661384 - RNA, 19 nt, Artificial Sequence
  Description of Artificial Sequence: Synthetic oligonucleotide
aggguacauuucugcaaac

SEQ ID NO: 2661385 - RNA, 19 nt, Artificial Sequence
  Description of Artificial Sequence: Synthetic oligonucleotide
agcgagaacauguccucca

SEQ ID NO: 2661386 - RNA, 19 nt, Artificial Sequence
  Description of Artificial Sequence: Synthetic oligonucleotide
caggguacaaauaguccuc

SEQ ID NO: 2661387 - RNA, 19 nt, Artificial Sequence
  Description of Artificial Sequence: Synthetic oligonucleotide
aguccgaggccccucacga

SEQ ID NO: 2661388 - RNA, 19 nt, Artificial Sequence
  Description of Artificial Sequence: Synthetic oligonucleotide
cugguuucaguccgaggcc

SEQ ID NO: 2661389 - RNA, 19 nt, Artificial Sequence
  Description of Artificial Sequence: Synthetic oligonucleotide
ucacggaggucuaucucac

SEQ ID NO: 2661390 - RNA, 19 nt, Artificial Sequence
  Description of Artificial Sequence: Synthetic oligonucleotide
uaauucugacacacccagu

SEQ ID NO: 2661391 - RNA, 19 nt, Artificial Sequence
  Description of Artificial Sequence: Synthetic oligonucleotide
uccuugcacucucugaaua

SEQ ID NO: 2661392 - RNA, 19 nt, Artificial Sequence
  Description of Artificial Sequence: Synthetic oligonucleotide
uuucugguuucaguccgag

SEQ ID NO: 2661393 - RNA, 19 nt, Artificial Sequence
  Description of Artificial Sequence: Synthetic oligonucleotide
caagauuuucugguuucag

SEQ ID NO: 2661394 - RNA, 19 nt, Artificial Sequence
  Description of Artificial Sequence: Synthetic oligonucleotide
uccgagacaggaaccucca

SEQ ID NO: 2661395 - RNA, 19 nt, Artificial Sequence
  Description of Artificial Sequence: Synthetic oligonucleotide
uaguccacuuucuuacaaa

SEQ ID NO: 2661396 - RNA, 19 nt, Artificial Sequence
  Description of Artificial Sequence: Synthetic oligonucleotide
agucaucaaaugugauucu

SEQ ID NO: 2661397 - RNA, 19 nt, Artificial Sequence
  Description of Artificial Sequence: Synthetic oligonucleotide
guuaguaccuuaacugcca

SEQ ID NO: 2661398 - RNA, 19 nt, Artificial Sequence
  Description of Artificial Sequence: Synthetic oligonucleotide
guuaauucugacacaccca

SEQ ID NO: 2661399 - RNA, 19 nt, Artificial Sequence
  Description of Artificial Sequence: Synthetic oligonucleotide
gaaccuccaaguaggcugc

SEQ ID NO: 2661400 - RNA, 19 nt, Artificial Sequence
  Description of Artificial Sequence: Synthetic oligonucleotide
ugguuucaguccgaggccc

SEQ ID NO: 2661401 - RNA, 19 nt, Artificial Sequence
  Description of Artificial Sequence: Synthetic oligonucleotide
ucuaucucaccgucaccac

SEQ ID NO: 2661402 - RNA, 19 nt, Artificial Sequence
  Description of Artificial Sequence: Synthetic oligonucleotide
agccuggcaaacuccagga

SEQ ID NO: 2661403 - RNA, 19 nt, Artificial Sequence
  Description of Artificial Sequence: Synthetic oligonucleotide
uucucaagauuuucugguu

SEQ ID NO: 2661404 - RNA, 19 nt, Artificial Sequence
  Description of Artificial Sequence: Synthetic oligonucleotide
cuggaugguggccaggguc

SEQ ID NO: 2661405 - RNA, 19 nt, Artificial Sequence
  Description of Artificial Sequence: Synthetic oligonucleotide
aagucaggguacauuucug

SEQ ID NO: 2661406 - RNA, 19 nt, Artificial Sequence
  Description of Artificial Sequence: Synthetic oligonucleotide
aggcugcgaacucugggag

SEQ ID NO: 2661407 - RNA, 19 nt, Artificial Sequence
  Description of Artificial Sequence: Synthetic oligonucleotide
ucucgucaaacagcgagaa

SEQ ID NO: 2661408 - RNA, 19 nt, Artificial Sequence
  Description of Artificial Sequence: Synthetic oligonucleotide
ugcagucuugaggaugcag

SEQ ID NO: 2661409 - RNA, 19 nt, Artificial Sequence
  Description of Artificial Sequence: Synthetic oligonucleotide
acaggcugaucucaucuau

SEQ ID NO: 2661410 - RNA, 19 nt, Artificial Sequence
  Description of Artificial Sequence: Synthetic oligonucleotide
ucugaguuuucagggcuga

SEQ ID NO: 2661411 - RNA, 19 nt, Artificial Sequence
  Description of Artificial Sequence: Synthetic oligonucleotide
ucaccacucucgucaaaca

SEQ ID NO: 2661412 - RNA, 19 nt, Artificial Sequence
  Description of Artificial Sequence: Synthetic oligonucleotide
aaguaggcugcgaacucug

SEQ ID NO: 2661413 - RNA, 19 nt, Artificial Sequence
  Description of Artificial Sequence: Synthetic oligonucleotide
aucuaugcugccauccuca

SEQ ID NO: 2661414 - RNA, 19 nt, Artificial Sequence
  Description of Artificial Sequence: Synthetic oligonucleotide
ugugcacaguugucgaaau

SEQ ID NO: 2661415 - RNA, 19 nt, Artificial Sequence
  Description of Artificial Sequence: Synthetic oligonucleotide
ucuuggucaauagccugga

SEQ ID NO: 2661416 - RNA, 19 nt, Artificial Sequence
  Description of Artificial Sequence: Synthetic oligonucleotide
uguguuuggucaggguaca

SEQ ID NO: 2661417 - RNA, 19 nt, Artificial Sequence
  Description of Artificial Sequence: Synthetic oligonucleotide
ucucccaaagucugaguuu

SEQ ID NO: 2661418 - RNA, 19 nt, Artificial Sequence
  Description of Artificial Sequence: Synthetic oligonucleotide
uugucgaaauguguuuggu

SEQ ID NO: 2661419 - RNA, 19 nt, Artificial Sequence
  Description of Artificial Sequence: Synthetic oligonucleotide
guccucugcgaagucaggg

SEQ ID NO: 2661420 - RNA, 19 nt, Artificial Sequence
  Description of Artificial Sequence: Synthetic oligonucleotide
uccucaggcgauccauaca

SEQ ID NO: 2661421 - RNA, 19 nt, Artificial Sequence
  Description of Artificial Sequence: Synthetic oligonucleotide
uugggaguuggugccgggg

SEQ ID NO: 2661422 - RNA, 19 nt, Artificial Sequence
  Description of Artificial Sequence: Synthetic oligonucleotide
uucaguccgaggccccuca

SEQ ID NO: 2661423 - RNA, 19 nt, Artificial Sequence
  Description of Artificial Sequence: Synthetic oligonucleotide
cuaugcugccauccucagg

SEQ ID NO: 2661424 - RNA, 19 nt, Artificial Sequence
  Description of Artificial Sequence: Synthetic oligonucleotide
ugacacacccagugcaguc

SEQ ID NO: 2661425 - RNA, 19 nt, Artificial Sequence
  Description of Artificial Sequence: Synthetic oligonucleotide
ucaccgucaccacucucgu

SEQ ID NO: 2661426 - RNA, 19 nt, Artificial Sequence
  Description of Artificial Sequence: Synthetic oligonucleotide
ucugcgaagucaggguaca

SEQ ID NO: 2661427 - RNA, 19 nt, Artificial Sequence
  Description of Artificial Sequence: Synthetic oligonucleotide
cacgagccuggcaaacucc

SEQ ID NO: 2661428 - RNA, 19 nt, Artificial Sequence
  Description of Artificial Sequence: Synthetic oligonucleotide
gcacaccacagacaaggcg

SEQ ID NO: 2661429 - RNA, 19 nt, Artificial Sequence
  Description of Artificial Sequence: Synthetic oligonucleotide
gguacauuucugcaaaccu

SEQ ID NO: 2661430 - RNA, 19 nt, Artificial Sequence
  Description of Artificial Sequence: Synthetic oligonucleotide
gauggccugcacaccacag

SEQ ID NO: 2661431 - RNA, 19 nt, Artificial Sequence
  Description of Artificial Sequence: Synthetic oligonucleotide
gucaccacucucgucaaac

SEQ ID NO: 2661432 - RNA, 19 nt, Artificial Sequence
  Description of Artificial Sequence: Synthetic oligonucleotide
agaagccauugggaguugg

SEQ ID NO: 2661433 - RNA, 19 nt, Artificial Sequence
  Description of Artificial Sequence: Synthetic oligonucleotide
cuccaaguaggcugcgaac

SEQ ID NO: 2661434 - RNA, 19 nt, Artificial Sequence
  Description of Artificial Sequence: Synthetic oligonucleotide
auaguccucugcgaaguca

SEQ ID NO: 2661435 - RNA, 19 nt, Artificial Sequence
  Description of Artificial Sequence: Synthetic oligonucleotide
ugcugccauccucaggcga

SEQ ID NO: 2661436 - RNA, 19 nt, Artificial Sequence
  Description of Artificial Sequence: Synthetic oligonucleotide
caggcugaucucaucuaug

SEQ ID NO: 2661437 - RNA, 19 nt, Artificial Sequence
  Description of Artificial Sequence: Synthetic oligonucleotide
gccauugggaguuggugcc

SEQ ID NO: 2661438 - RNA, 19 nt, Artificial Sequence
  Description of Artificial Sequence: Synthetic oligonucleotide
ggucagucacuguuaauuc

SEQ ID NO: 2661439 - RNA, 19 nt, Artificial Sequence
  Description of Artificial Sequence: Synthetic oligonucleotide
guggccagggucugggaug

SEQ ID NO: 2661440 - RNA, 19 nt, Artificial Sequence
  Description of Artificial Sequence: Synthetic oligonucleotide
acaccacagacaaggcgac

SEQ ID NO: 2661441 - RNA, 19 nt, Artificial Sequence
  Description of Artificial Sequence: Synthetic oligonucleotide
ucucuucauccuugcacuc

SEQ ID NO: 2661442 - RNA, 19 nt, Artificial Sequence
  Description of Artificial Sequence: Synthetic oligonucleotide
ccaaagucugaguuuucag

SEQ ID NO: 2661443 - RNA, 19 nt, Artificial Sequence
  Description of Artificial Sequence: Synthetic oligonucleotide
caaggcgaccacauauuca

SEQ ID NO: 2661444 - RNA, 19 nt, Artificial Sequence
  Description of Artificial Sequence: Synthetic oligonucleotide
ggucaauagccuggaauag

SEQ ID NO: 2661445 - RNA, 19 nt, Artificial Sequence
  Description of Artificial Sequence: Synthetic oligonucleotide
cauugggaguuggugccgg

SEQ ID NO: 2661446 - RNA, 19 nt, Artificial Sequence
  Description of Artificial Sequence: Synthetic oligonucleotide
gcaaacuccaggaggcagg

SEQ ID NO: 2661447 - RNA, 19 nt, Artificial Sequence
  Description of Artificial Sequence: Synthetic oligonucleotide
uaguaccuuaacugccaaa

SEQ ID NO: 2661448 - RNA, 19 nt, Artificial Sequence
  Description of Artificial Sequence: Synthetic oligonucleotide
cuugaggaugcaggacagg

SEQ ID NO: 2661449 - RNA, 19 nt, Artificial Sequence
  Description of Artificial Sequence: Synthetic oligonucleotide
cagucuugaggaugcagga

SEQ ID NO: 2661450 - RNA, 19 nt, Artificial Sequence
  Description of Artificial Sequence: Synthetic oligonucleotide
cccagugcagucuugagga

SEQ ID NO: 2661451 - RNA, 19 nt, Artificial Sequence
  Description of Artificial Sequence: Synthetic oligonucleotide
caggaaccuccaaguaggc

SEQ ID NO: 2661452 - RNA, 19 nt, Artificial Sequence
  Description of Artificial Sequence: Synthetic oligonucleotide
agacaggaaccuccaagua

SEQ ID NO: 2661453 - RNA, 19 nt, Artificial Sequence
  Description of Artificial Sequence: Synthetic oligonucleotide
gugucagcaggcaagcgga

SEQ ID NO: 2661454 - RNA, 19 nt, Artificial Sequence
  Description of Artificial Sequence: Synthetic oligonucleotide
gucugugcacaguugucga

SEQ ID NO: 2661455 - RNA, 19 nt, Artificial Sequence
  Description of Artificial Sequence: Synthetic oligonucleotide
aggguacaaauaguccucu

SEQ ID NO: 2661456 - RNA, 19 nt, Artificial Sequence
  Description of Artificial Sequence: Synthetic oligonucleotide
cucucgucaaacagcgaga

SEQ ID NO: 2661457 - RNA, 19 nt, Artificial Sequence
  Description of Artificial Sequence: Synthetic oligonucleotide
ccuacaaaagucaucaaau

SEQ ID NO: 2661458 - RNA, 19 nt, Artificial Sequence
  Description of Artificial Sequence: Synthetic oligonucleotide
agcggaaguuaguaccuua

SEQ ID NO: 2661459 - RNA, 19 nt, Artificial Sequence
  Description of Artificial Sequence: Synthetic oligonucleotide
ugcgaagucaggguacauu

SEQ ID NO: 2661460 - RNA, 19 nt, Artificial Sequence
  Description of Artificial Sequence: Synthetic oligonucleotide
cagugcagucuugaggaug

SEQ ID NO: 2661461 - RNA, 19 nt, Artificial Sequence
  Description of Artificial Sequence: Synthetic oligonucleotide
caguccgaggccccucacg

SEQ ID NO: 2661462 - RNA, 19 nt, Artificial Sequence
  Description of Artificial Sequence: Synthetic oligonucleotide
gcugcgaacucugggagcc

SEQ ID NO: 2661463 - RNA, 19 nt, Artificial Sequence
  Description of Artificial Sequence: Synthetic oligonucleotide
ucucaucuaugcugccauc

SEQ ID NO: 2661464 - RNA, 19 nt, Artificial Sequence
  Description of Artificial Sequence: Synthetic oligonucleotide
ugcgaacucugggagccca

SEQ ID NO: 2661465 - RNA, 19 nt, Artificial Sequence
  Description of Artificial Sequence: Synthetic oligonucleotide
gugcacaguugucgaaaug

SEQ ID NO: 2661466 - RNA, 19 nt, Artificial Sequence
  Description of Artificial Sequence: Synthetic oligonucleotide
gcaggcaagcggaaguuag

SEQ ID NO: 2661467 - RNA, 19 nt, Artificial Sequence
  Description of Artificial Sequence: Synthetic oligonucleotide
ggcaagcggaaguuaguac

SEQ ID NO: 2661468 - RNA, 19 nt, Artificial Sequence
  Description of Artificial Sequence: Synthetic oligonucleotide
cgagacaggaaccuccaag

SEQ ID NO: 2661469 - RNA, 19 nt, Artificial Sequence
  Description of Artificial Sequence: Synthetic oligonucleotide
gucaaacagcgagaacaug

SEQ ID NO: 2661470 - RNA, 19 nt, Artificial Sequence
  Description of Artificial Sequence: Synthetic oligonucleotide
cacuguuaauucugacaca

SEQ ID NO: 2661471 - RNA, 19 nt, Artificial Sequence
  Description of Artificial Sequence: Synthetic oligonucleotide
ggaggucuaucucaccguc

SEQ ID NO: 2661472 - RNA, 19 nt, Artificial Sequence
  Description of Artificial Sequence: Synthetic oligonucleotide
gucugaguuuucagggcug

SEQ ID NO: 2661473 - RNA, 19 nt, Artificial Sequence
  Description of Artificial Sequence: Synthetic oligonucleotide
gacaggcugaucucaucua

SEQ ID NO: 2661474 - RNA, 19 nt, Artificial Sequence
  Description of Artificial Sequence: Synthetic oligonucleotide
cucgucaaacagcgagaac

SEQ ID NO: 2661475 - RNA, 19 nt, Artificial Sequence
  Description of Artificial Sequence: Synthetic oligonucleotide
caagcggaaguuaguaccu

SEQ ID NO: 2661476 - RNA, 19 nt, Artificial Sequence
  Description of Artificial Sequence: Synthetic oligonucleotide
gccugcacaccacagacaa

SEQ ID NO: 2661477 - RNA, 19 nt, Artificial Sequence
  Description of Artificial Sequence: Synthetic oligonucleotide
cacggaggucuaucucacc

SEQ ID NO: 2661478 - RNA, 19 nt, Artificial Sequence
  Description of Artificial Sequence: Synthetic oligonucleotide
aggaggcaggugucagcag

SEQ ID NO: 2661479 - RNA, 19 nt, Artificial Sequence
  Description of Artificial Sequence: Synthetic oligonucleotide
aggaaccuccaaguaggcu

SEQ ID NO: 2661480 - RNA, 19 nt, Artificial Sequence
  Description of Artificial Sequence: Synthetic oligonucleotide
uaggucagucacuguuaau

SEQ ID NO: 2661481 - RNA, 19 nt, Artificial Sequence
  Description of Artificial Sequence: Synthetic oligonucleotide
aucucaccgucaccacucu

SEQ ID NO: 2661482 - RNA, 19 nt, Artificial Sequence
  Description of Artificial Sequence: Synthetic oligonucleotide
aggcaagcggaaguuagua

SEQ ID NO: 2661483 - RNA, 19 nt, Artificial Sequence
  Description of Artificial Sequence: Synthetic oligonucleotide
gugauucuucccuucuccu

SEQ ID NO: 2661484 - RNA, 19 nt, Artificial Sequence
  Description of Artificial Sequence: Synthetic oligonucleotide
cucaggcgauccauacauc

SEQ ID NO: 2661485 - RNA, 19 nt, Artificial Sequence
  Description of Artificial Sequence: Synthetic oligonucleotide
gcgagaacauguccuccag

SEQ ID NO: 2661486 - RNA, 19 nt, Artificial Sequence
  Description of Artificial Sequence: Synthetic oligonucleotide
gaggucuaucucaccguca

SEQ ID NO: 2661487 - RNA, 19 nt, Artificial Sequence
  Description of Artificial Sequence: Synthetic oligonucleotide
gcgcauccgagacaggaac

SEQ ID NO: 2661488 - RNA, 19 nt, Artificial Sequence
  Description of Artificial Sequence: Synthetic oligonucleotide
ggguacaaauaguccucug

SEQ ID NO: 2661489 - RNA, 19 nt, Artificial Sequence
  Description of Artificial Sequence: Synthetic oligonucleotide
acgagccuggcaaacucca

SEQ ID NO: 2661490 - RNA, 19 nt, Artificial Sequence
  Description of Artificial Sequence: Synthetic oligonucleotide
ucaguccgaggccccucac

SEQ ID NO: 2661491 - RNA, 19 nt, Artificial Sequence
  Description of Artificial Sequence: Synthetic oligonucleotide
aagcggaaguuaguaccuu

SEQ ID NO: 2661492 - RNA, 19 nt, Artificial Sequence
  Description of Artificial Sequence: Synthetic oligonucleotide
cuagaucuuucucaagauu

SEQ ID NO: 2661493 - RNA, 19 nt, Artificial Sequence
  Description of Artificial Sequence: Synthetic oligonucleotide
gcacaguugucgaaaugug

SEQ ID NO: 2661494 - RNA, 19 nt, Artificial Sequence
  Description of Artificial Sequence: Synthetic oligonucleotide
uagccuggaauaggucagu

SEQ ID NO: 2661495 - RNA, 19 nt, Artificial Sequence
  Description of Artificial Sequence: Synthetic oligonucleotide
aggcgaccacauauucacg

SEQ ID NO: 2661496 - RNA, 19 nt, Artificial Sequence
  Description of Artificial Sequence: Synthetic oligonucleotide
cagcgcauccgagacagga

SEQ ID NO: 2661497 - RNA, 19 nt, Artificial Sequence
  Description of Artificial Sequence: Synthetic oligonucleotide
ggucuaucucaccgucacc

SEQ ID NO: 2661498 - RNA, 19 nt, Artificial Sequence
  Description of Artificial Sequence: Synthetic oligonucleotide
cugugcacaguugucgaaa

SEQ ID NO: 2661499 - RNA, 19 nt, Artificial Sequence
  Description of Artificial Sequence: Synthetic oligonucleotide
agucaaugcagaagccauu

SEQ ID NO: 2661500 - RNA, 19 nt, Artificial Sequence
  Description of Artificial Sequence: Synthetic oligonucleotide
uuucaguccgaggccccuc

SEQ ID NO: 2661501 - RNA, 19 nt, Artificial Sequence
  Description of Artificial Sequence: Synthetic oligonucleotide
cuaucucaccgucaccacu

SEQ ID NO: 2661502 - RNA, 19 nt, Artificial Sequence
  Description of Artificial Sequence: Synthetic oligonucleotide
gggagcccaaucuucucuc

SEQ ID NO: 2661503 - RNA, 19 nt, Artificial Sequence
  Description of Artificial Sequence: Synthetic oligonucleotide
gagcccaaucuucucuccu

SEQ ID NO: 2661504 - RNA, 19 nt, Artificial Sequence
  Description of Artificial Sequence: Synthetic oligonucleotide
guccgaggccccucacgag

SEQ ID NO: 2661505 - RNA, 19 nt, Artificial Sequence
  Description of Artificial Sequence: Synthetic oligonucleotide
cuggaauaggucagucacu

SEQ ID NO: 2661506 - RNA, 19 nt, Artificial Sequence
  Description of Artificial Sequence: Synthetic oligonucleotide
gacacacccagugcagucu

SEQ ID NO: 2661507 - RNA, 19 nt, Artificial Sequence
  Description of Artificial Sequence: Synthetic oligonucleotide
cauccgagacaggaaccuc

SEQ ID NO: 2661508 - RNA, 19 nt, Artificial Sequence
  Description of Artificial Sequence: Synthetic oligonucleotide
gugucugugcacaguuguc

SEQ ID NO: 2661509 - RNA, 19 nt, Artificial Sequence
  Description of Artificial Sequence: Synthetic oligonucleotide
acauauucacggaggucua

SEQ ID NO: 2661510 - RNA, 19 nt, Artificial Sequence
  Description of Artificial Sequence: Synthetic oligonucleotide
gaagccauugggaguuggu

SEQ ID NO: 2661511 - RNA, 19 nt, Artificial Sequence
  Description of Artificial Sequence: Synthetic oligonucleotide
gcgaccacauauucacgga

SEQ ID NO: 2661512 - RNA, 19 nt, Artificial Sequence
  Description of Artificial Sequence: Synthetic oligonucleotide
cacagacaaggcgaccaca

SEQ ID NO: 2661513 - RNA, 19 nt, Artificial Sequence
  Description of Artificial Sequence: Synthetic oligonucleotide
gcacucucugaauauuugu

SEQ ID NO: 2661514 - RNA, 19 nt, Artificial Sequence
  Description of Artificial Sequence: Synthetic oligonucleotide
gacaaggcgaccacauauu

SEQ ID NO: 2661515 - RNA, 19 nt, Artificial Sequence
  Description of Artificial Sequence: Synthetic oligonucleotide
gcgaagucaggguacauuu

SEQ ID NO: 2661516 - RNA, 19 nt, Artificial Sequence
  Description of Artificial Sequence: Synthetic oligonucleotide
gguuucaguccgaggcccc

SEQ ID NO: 2661517 - RNA, 19 nt, Artificial Sequence
  Description of Artificial Sequence: Synthetic oligonucleotide
agcgcauccgagacaggaa

SEQ ID NO: 2661518 - RNA, 19 nt, Artificial Sequence
  Description of Artificial Sequence: Synthetic oligonucleotide
caaguaggcugcgaacucu

SEQ ID NO: 2661519 - RNA, 19 nt, Artificial Sequence
  Description of Artificial Sequence: Synthetic oligonucleotide
cauccucaggcgauccaua

SEQ ID NO: 2661520 - RNA, 19 nt, Artificial Sequence
  Description of Artificial Sequence: Synthetic oligonucleotide
cgcauccgagacaggaacc

SEQ ID NO: 2661521 - RNA, 19 nt, Artificial Sequence
  Description of Artificial Sequence: Synthetic oligonucleotide
cggaaguuaguaccuuaac

SEQ ID NO: 2661522 - RNA, 19 nt, Artificial Sequence
  Description of Artificial Sequence: Synthetic oligonucleotide
caguugucgaaauguguuu

SEQ ID NO: 2661523 - RNA, 19 nt, Artificial Sequence
  Description of Artificial Sequence: Synthetic oligonucleotide
agcaggcaagcggaaguua

SEQ ID NO: 2661524 - RNA, 19 nt, Artificial Sequence
  Description of Artificial Sequence: Synthetic oligonucleotide
ggauggccugcacaccaca

SEQ ID NO: 2661525 - RNA, 19 nt, Artificial Sequence
  Description of Artificial Sequence: Synthetic oligonucleotide
accuccaaguaggcugcga

SEQ ID NO: 2661526 - RNA, 19 nt, Artificial Sequence
  Description of Artificial Sequence: Synthetic oligonucleotide
cuuggucaauagccuggaa

SEQ ID NO: 2661527 - RNA, 19 nt, Artificial Sequence
  Description of Artificial Sequence: Synthetic oligonucleotide
ccgaggccccucacgagcc

SEQ ID NO: 2661528 - RNA, 19 nt, Artificial Sequence
  Description of Artificial Sequence: Synthetic oligonucleotide
aggcaggugucagcaggca

SEQ ID NO: 2661529 - RNA, 19 nt, Artificial Sequence
  Description of Artificial Sequence: Synthetic oligonucleotide
ggcgauccauacaucuuga

SEQ ID NO: 2661530 - RNA, 19 nt, Artificial Sequence
  Description of Artificial Sequence: Synthetic oligonucleotide
ccauugggaguuggugccg

SEQ ID NO: 2661531 - RNA, 19 nt, Artificial Sequence
  Description of Artificial Sequence: Synthetic oligonucleotide
gcggaaguuaguaccuuaa

SEQ ID NO: 2661532 - RNA, 19 nt, Artificial Sequence
  Description of Artificial Sequence: Synthetic oligonucleotide
caccgucaccacucucguc

SEQ ID NO: 2661533 - RNA, 19 nt, Artificial Sequence
  Description of Artificial Sequence: Synthetic oligonucleotide
ccacagacaaggcgaccac

SEQ ID NO: 2661534 - RNA, 19 nt, Artificial Sequence
  Description of Artificial Sequence: Synthetic oligonucleotide
caggcaagcggaaguuagu

SEQ ID NO: 2661535 - RNA, 19 nt, Artificial Sequence
  Description of Artificial Sequence: Synthetic oligonucleotide
cagacaaggcgaccacaua

SEQ ID NO: 2661536 - RNA, 19 nt, Artificial Sequence
  Description of Artificial Sequence: Synthetic oligonucleotide
ggcaggugucagcaggcaa

SEQ ID NO: 2661537 - RNA, 19 nt, Artificial Sequence
  Description of Artificial Sequence: Synthetic oligonucleotide
ccucaggcgauccauacau

SEQ ID NO: 2661538 - RNA, 19 nt, Artificial Sequence
  Description of Artificial Sequence: Synthetic oligonucleotide
cugcgaacucugggagccc

SEQ ID NO: 2661539 - RNA, 19 nt, Artificial Sequence
  Description of Artificial Sequence: Synthetic oligonucleotide
ccuccaaguaggcugcgaa

SEQ ID NO: 2661540 - RNA, 19 nt, Artificial Sequence
  Description of Artificial Sequence: Synthetic oligonucleotide
gcagaagccauugggaguu

SEQ ID NO: 2661541 - RNA, 19 nt, Artificial Sequence
  Description of Artificial Sequence: Synthetic oligonucleotide
caaacuccaggaggcaggu

SEQ ID NO: 2661542 - RNA, 19 nt, Artificial Sequence
  Description of Artificial Sequence: Synthetic oligonucleotide
ggcugaucucaucuaugcu

SEQ ID NO: 2661543 - RNA, 19 nt, Artificial Sequence
  Description of Artificial Sequence: Synthetic oligonucleotide
cuugcacucucugaauauu

SEQ ID NO: 2661544 - RNA, 19 nt, Artificial Sequence
  Description of Artificial Sequence: Synthetic oligonucleotide
cuucauccuugcacucucu

SEQ ID NO: 2661545 - RNA, 19 nt, Artificial Sequence
  Description of Artificial Sequence: Synthetic oligonucleotide
cacucucgucaaacagcga

SEQ ID NO: 2661546 - RNA, 19 nt, Artificial Sequence
  Description of Artificial Sequence: Synthetic oligonucleotide
gcaaaccuacaaaagucau

SEQ ID NO: 2661547 - RNA, 19 nt, Artificial Sequence
  Description of Artificial Sequence: Synthetic oligonucleotide
cccaaucuucucuccucuc

SEQ ID NO: 2661548 - RNA, 19 nt, Artificial Sequence
  Description of Artificial Sequence: Synthetic oligonucleotide
ggaauaggucagucacugu

SEQ ID NO: 2661549 - RNA, 19 nt, Artificial Sequence
  Description of Artificial Sequence: Synthetic oligonucleotide
cuccagcgcauccgagaca

SEQ ID NO: 2661550 - RNA, 19 nt, Artificial Sequence
  Description of Artificial Sequence: Synthetic oligonucleotide
gcgauccauacaucuugaa

SEQ ID NO: 2661551 - RNA, 19 nt, Artificial Sequence
  Description of Artificial Sequence: Synthetic oligonucleotide
gcauccgagacaggaaccu

SEQ ID NO: 2661552 - RNA, 19 nt, Artificial Sequence
  Description of Artificial Sequence: Synthetic oligonucleotide
caggcgauccauacaucuu

SEQ ID NO: 2661553 - RNA, 19 nt, Artificial Sequence
  Description of Artificial Sequence: Synthetic oligonucleotide
ggaugguggccagggucug

SEQ ID NO: 2661554 - RNA, 19 nt, Artificial Sequence
  Description of Artificial Sequence: Synthetic oligonucleotide
ggggugucugugcacaguu

SEQ ID NO: 2661555 - RNA, 19 nt, Artificial Sequence
  Description of Artificial Sequence: Synthetic oligonucleotide
gguggccagggucugggau

SEQ ID NO: 2661556 - RNA, 19 nt, Artificial Sequence
  Description of Artificial Sequence: Synthetic oligonucleotide
cauauucacggaggucuau

SEQ ID NO: 2661557 - RNA, 19 nt, Artificial Sequence
  Description of Artificial Sequence: Synthetic oligonucleotide
gccauccucaggcgaucca

SEQ ID NO: 2661558 - RNA, 19 nt, Artificial Sequence
  Description of Artificial Sequence: Synthetic oligonucleotide
ggucugggauggccugcac

SEQ ID NO: 2661559 - RNA, 19 nt, Artificial Sequence
  Description of Artificial Sequence: Synthetic oligonucleotide
ccuugcacucucugaauau

SEQ ID NO: 2661560 - RNA, 19 nt, Artificial Sequence
  Description of Artificial Sequence: Synthetic oligonucleotide
cgauccauacaucuugaau

SEQ ID NO: 2661561 - RNA, 19 nt, Artificial Sequence
  Description of Artificial Sequence: Synthetic oligonucleotide
ggccugcacaccacagaca

SEQ ID NO: 2661562 - RNA, 19 nt, Artificial Sequence
  Description of Artificial Sequence: Synthetic oligonucleotide
ccagcgcauccgagacagg

SEQ ID NO: 2661563 - RNA, 19 nt, Artificial Sequence
  Description of Artificial Sequence: Synthetic oligonucleotide
gcugccauccucaggcgau

SEQ ID NO: 2661564 - RNA, 19 nt, Artificial Sequence
  Description of Artificial Sequence: Synthetic oligonucleotide
cagcaggcaagcggaaguu

SEQ ID NO: 2661565 - RNA, 19 nt, Artificial Sequence
  Description of Artificial Sequence: Synthetic oligonucleotide
gccccucacgagccuggca

SEQ ID NO: 2661566 - RNA, 19 nt, Artificial Sequence
  Description of Artificial Sequence: Synthetic oligonucleotide
cccucacgagccuggcaaa

SEQ ID NO: 2661567 - RNA, 19 nt, Artificial Sequence
  Description of Artificial Sequence: Synthetic oligonucleotide
ccgucaccacucucgucaa

SEQ ID NO: 2661568 - RNA, 19 nt, Artificial Sequence
  Description of Artificial Sequence: Synthetic oligonucleotide
ccauccucaggcgauccau

SEQ ID NO: 2661569 - RNA, 19 nt, Artificial Sequence
  Description of Artificial Sequence: Synthetic oligonucleotide
cggaggucuaucucaccgu

SEQ ID NO: 2661570 - RNA, 19 nt, Artificial Sequence
  Description of Artificial Sequence: Synthetic oligonucleotide
ccgagacaggaaccuccaa

SEQ ID NO: 2661571 - RNA, 19 nt, Artificial Sequence
  Description of Artificial Sequence: Synthetic oligonucleotide
cugcgaagucaggguacau

SEQ ID NO: 2661572 - RNA, 19 nt, Artificial Sequence
  Description of Artificial Sequence: Synthetic oligonucleotide
ccagugcagucuugaggau

SEQ ID NO: 2661573 - RNA, 19 nt, Artificial Sequence
  Description of Artificial Sequence: Synthetic oligonucleotide
cgucaccacucucgucaaa

SEQ ID NO: 2661574 - RNA, 19 nt, Artificial Sequence
  Description of Artificial Sequence: Synthetic oligonucleotide
cgaggccccucacgagccu

SEQ ID NO: 2661575 - RNA, 19 nt, Artificial Sequence
  Description of Artificial Sequence: Synthetic oligonucleotide
aaaaguucuauguuugagg

SEQ ID NO: 2661576 - RNA, 19 nt, Artificial Sequence
  Description of Artificial Sequence: Synthetic oligonucleotide
uguucaucaacccaggaug

SEQ ID NO: 2661577 - RNA, 19 nt, Artificial Sequence
  Description of Artificial Sequence: Synthetic oligonucleotide
aauuuaaguuucuccuugc

SEQ ID NO: 2661578 - RNA, 19 nt, Artificial Sequence
  Description of Artificial Sequence: Synthetic oligonucleotide
uuaaugaggauuuugcugu

SEQ ID NO: 2661579 - RNA, 19 nt, Artificial Sequence
  Description of Artificial Sequence: Synthetic oligonucleotide
uuuaaugaggauuuugcug

SEQ ID NO: 2661580 - RNA, 19 nt, Artificial Sequence
  Description of Artificial Sequence: Synthetic oligonucleotide
aacacgaugucccuuuugg

SEQ ID NO: 2661581 - RNA, 19 nt, Artificial Sequence
  Description of Artificial Sequence: Synthetic oligonucleotide
aaaguucuauguuugaggu

SEQ ID NO: 2661582 - RNA, 19 nt, Artificial Sequence
  Description of Artificial Sequence: Synthetic oligonucleotide
uucaauuuaaguuucuccu

SEQ ID NO: 2661583 - RNA, 19 nt, Artificial Sequence
  Description of Artificial Sequence: Synthetic oligonucleotide
aauugcggcacucaaaagu

SEQ ID NO: 2661584 - RNA, 19 nt, Artificial Sequence
  Description of Artificial Sequence: Synthetic oligonucleotide
uuucuaguaagcuaaguga

SEQ ID NO: 2661585 - RNA, 19 nt, Artificial Sequence
  Description of Artificial Sequence: Synthetic oligonucleotide
uauguuugagguaucacug

SEQ ID NO: 2661586 - RNA, 19 nt, Artificial Sequence
  Description of Artificial Sequence: Synthetic oligonucleotide
aaaaucagcuuuaaugagg

SEQ ID NO: 2661587 - RNA, 19 nt, Artificial Sequence
  Description of Artificial Sequence: Synthetic oligonucleotide
aaagccuguaauuuguuca

SEQ ID NO: 2661588 - RNA, 19 nt, Artificial Sequence
  Description of Artificial Sequence: Synthetic oligonucleotide
aaaauugcggcacucaaaa

SEQ ID NO: 2661589 - RNA, 19 nt, Artificial Sequence
  Description of Artificial Sequence: Synthetic oligonucleotide
uucuaguaagcuaagugag

SEQ ID NO: 2661590 - RNA, 19 nt, Artificial Sequence
  Description of Artificial Sequence: Synthetic oligonucleotide
ugagguaucacuguaagac

SEQ ID NO: 2661591 - RNA, 19 nt, Artificial Sequence
  Description of Artificial Sequence: Synthetic oligonucleotide
uaagacaugccaauguggc

SEQ ID NO: 2661592 - RNA, 19 nt, Artificial Sequence
  Description of Artificial Sequence: Synthetic oligonucleotide
guuucuuuuguuuugaaga

SEQ ID NO: 2661593 - RNA, 19 nt, Artificial Sequence
  Description of Artificial Sequence: Synthetic oligonucleotide
uuugagguaucacuguaag

SEQ ID NO: 2661594 - RNA, 19 nt, Artificial Sequence
  Description of Artificial Sequence: Synthetic oligonucleotide
uuucuuuuguuuugaagag

SEQ ID NO: 2661595 - RNA, 19 nt, Artificial Sequence
  Description of Artificial Sequence: Synthetic oligonucleotide
ucuucaguggagcugguag

SEQ ID NO: 2661596 - RNA, 19 nt, Artificial Sequence
  Description of Artificial Sequence: Synthetic oligonucleotide
ugaagaguccucuucagug

SEQ ID NO: 2661597 - RNA, 19 nt, Artificial Sequence
  Description of Artificial Sequence: Synthetic oligonucleotide
ucuuuuguuuugaagaguc

SEQ ID NO: 2661598 - RNA, 19 nt, Artificial Sequence
  Description of Artificial Sequence: Synthetic oligonucleotide
cuucaauuuaaguuucucc

SEQ ID NO: 2661599 - RNA, 19 nt, Artificial Sequence
  Description of Artificial Sequence: Synthetic oligonucleotide
acuugugcugcugacaucc

SEQ ID NO: 2661600 - RNA, 19 nt, Artificial Sequence
  Description of Artificial Sequence: Synthetic oligonucleotide
gcacucaaaagucagaugg

SEQ ID NO: 2661601 - RNA, 19 nt, Artificial Sequence
  Description of Artificial Sequence: Synthetic oligonucleotide
uguaagacaugccaaugug

SEQ ID NO: 2661602 - RNA, 19 nt, Artificial Sequence
  Description of Artificial Sequence: Synthetic oligonucleotide
uuuugaagaguccucuuca

SEQ ID NO: 2661603 - RNA, 19 nt, Artificial Sequence
  Description of Artificial Sequence: Synthetic oligonucleotide
acugccaugaugcagguga

SEQ ID NO: 2661604 - RNA, 19 nt, Artificial Sequence
  Description of Artificial Sequence: Synthetic oligonucleotide
aucacuguaagacaugcca

SEQ ID NO: 2661605 - RNA, 19 nt, Artificial Sequence
  Description of Artificial Sequence: Synthetic oligonucleotide
cuuucuaguaagcuaagug

SEQ ID NO: 2661606 - RNA, 19 nt, Artificial Sequence
  Description of Artificial Sequence: Synthetic oligonucleotide
aauuuguucaguucuucau

SEQ ID NO: 2661607 - RNA, 19 nt, Artificial Sequence
  Description of Artificial Sequence: Synthetic oligonucleotide
gauacuucuguuucuuuug

SEQ ID NO: 2661608 - RNA, 19 nt, Artificial Sequence
  Description of Artificial Sequence: Synthetic oligonucleotide
uguuucuuuuguuuugaag

SEQ ID NO: 2661609 - RNA, 19 nt, Artificial Sequence
  Description of Artificial Sequence: Synthetic oligonucleotide
acauccaacacgauguccc

SEQ ID NO: 2661610 - RNA, 19 nt, Artificial Sequence
  Description of Artificial Sequence: Synthetic oligonucleotide
ucagcuuuaaugaggauuu

SEQ ID NO: 2661611 - RNA, 19 nt, Artificial Sequence
  Description of Artificial Sequence: Synthetic oligonucleotide
acucaaaagucagauggcc

SEQ ID NO: 2661612 - RNA, 19 nt, Artificial Sequence
  Description of Artificial Sequence: Synthetic oligonucleotide
gaagaguccucuucagugg

SEQ ID NO: 2661613 - RNA, 19 nt, Artificial Sequence
  Description of Artificial Sequence: Synthetic oligonucleotide
acccugauaauccugacca

SEQ ID NO: 2661614 - RNA, 19 nt, Artificial Sequence
  Description of Artificial Sequence: Synthetic oligonucleotide
aagccuguaauuuguucag

SEQ ID NO: 2661615 - RNA, 19 nt, Artificial Sequence
  Description of Artificial Sequence: Synthetic oligonucleotide
aguaagcuaagugaguguc

SEQ ID NO: 2661616 - RNA, 19 nt, Artificial Sequence
  Description of Artificial Sequence: Synthetic oligonucleotide
uuuuguuuugaagaguccu

SEQ ID NO: 2661617 - RNA, 19 nt, Artificial Sequence
  Description of Artificial Sequence: Synthetic oligonucleotide
uauucuuuucuccugcaaa

SEQ ID NO: 2661618 - RNA, 19 nt, Artificial Sequence
  Description of Artificial Sequence: Synthetic oligonucleotide
uuuucuccugcaaagccug

SEQ ID NO: 2661619 - RNA, 19 nt, Artificial Sequence
  Description of Artificial Sequence: Synthetic oligonucleotide
ucgcguuagguucaggucc

SEQ ID NO: 2661620 - RNA, 19 nt, Artificial Sequence
  Description of Artificial Sequence: Synthetic oligonucleotide
uaagugagugucuuuaaaa

SEQ ID NO: 2661621 - RNA, 19 nt, Artificial Sequence
  Description of Artificial Sequence: Synthetic oligonucleotide
agacaugccaauguggcac

SEQ ID NO: 2661622 - RNA, 19 nt, Artificial Sequence
  Description of Artificial Sequence: Synthetic oligonucleotide
aaaagucagauggccaggg

SEQ ID NO: 2661623 - RNA, 19 nt, Artificial Sequence
  Description of Artificial Sequence: Synthetic oligonucleotide
acccggagaaaauugcggc

SEQ ID NO: 2661624 - RNA, 19 nt, Artificial Sequence
  Description of Artificial Sequence: Synthetic oligonucleotide
aaaucagcuuuaaugagga

SEQ ID NO: 2661625 - RNA, 19 nt, Artificial Sequence
  Description of Artificial Sequence: Synthetic oligonucleotide
ugcuguuuccacacaaaag

SEQ ID NO: 2661626 - RNA, 19 nt, Artificial Sequence
  Description of Artificial Sequence: Synthetic oligonucleotide
aggauuuugcuguuuccac

SEQ ID NO: 2661627 - RNA, 19 nt, Artificial Sequence
  Description of Artificial Sequence: Synthetic oligonucleotide
cacaaaaguucuauguuug

SEQ ID NO: 2661628 - RNA, 19 nt, Artificial Sequence
  Description of Artificial Sequence: Synthetic oligonucleotide
uguccuuguugcaaccugg

SEQ ID NO: 2661629 - RNA, 19 nt, Artificial Sequence
  Description of Artificial Sequence: Synthetic oligonucleotide
aucaacccaggauggaccc

SEQ ID NO: 2661630 - RNA, 19 nt, Artificial Sequence
  Description of Artificial Sequence: Synthetic oligonucleotide
cacgaugucccuuuugggg

SEQ ID NO: 2661631 - RNA, 19 nt, Artificial Sequence
  Description of Artificial Sequence: Synthetic oligonucleotide
ucggacauuguccuuguug

SEQ ID NO: 2661632 - RNA, 19 nt, Artificial Sequence
  Description of Artificial Sequence: Synthetic oligonucleotide
uguuuccacacaaaaguuc

SEQ ID NO: 2661633 - RNA, 19 nt, Artificial Sequence
  Description of Artificial Sequence: Synthetic oligonucleotide
caauuuaaguuucuccuug

SEQ ID NO: 2661634 - RNA, 19 nt, Artificial Sequence
  Description of Artificial Sequence: Synthetic oligonucleotide
ucuacccggagaaaauugc

SEQ ID NO: 2661635 - RNA, 19 nt, Artificial Sequence
  Description of Artificial Sequence: Synthetic oligonucleotide
aguucuauguuugagguau

SEQ ID NO: 2661636 - RNA, 19 nt, Artificial Sequence
  Description of Artificial Sequence: Synthetic oligonucleotide
uucagguccgcugagagga

SEQ ID NO: 2661637 - RNA, 19 nt, Artificial Sequence
  Description of Artificial Sequence: Synthetic oligonucleotide
uacccggagaaaauugcgg

SEQ ID NO: 2661638 - RNA, 19 nt, Artificial Sequence
  Description of Artificial Sequence: Synthetic oligonucleotide
acagaauccucccugccag

SEQ ID NO: 2661639 - RNA, 19 nt, Artificial Sequence
  Description of Artificial Sequence: Synthetic oligonucleotide
uuagguucagguccgcuga

SEQ ID NO: 2661640 - RNA, 19 nt, Artificial Sequence
  Description of Artificial Sequence: Synthetic oligonucleotide
acauuguccuuguugcaac

SEQ ID NO: 2661641 - RNA, 19 nt, Artificial Sequence
  Description of Artificial Sequence: Synthetic oligonucleotide
cacguguucaucaacccag

SEQ ID NO: 2661642 - RNA, 19 nt, Artificial Sequence
  Description of Artificial Sequence: Synthetic oligonucleotide
gauaauccugaccagcaca

SEQ ID NO: 2661643 - RNA, 19 nt, Artificial Sequence
  Description of Artificial Sequence: Synthetic oligonucleotide
aauccugaccagcacagaa

SEQ ID NO: 2661644 - RNA, 19 nt, Artificial Sequence
  Description of Artificial Sequence: Synthetic oligonucleotide
uuugaagaguccucuucag

SEQ ID NO: 2661645 - RNA, 19 nt, Artificial Sequence
  Description of Artificial Sequence: Synthetic oligonucleotide
ugcaaagccuguaauuugu

SEQ ID NO: 2661646 - RNA, 19 nt, Artificial Sequence
  Description of Artificial Sequence: Synthetic oligonucleotide
uuuguuuugaagaguccuc

SEQ ID NO: 2661647 - RNA, 19 nt, Artificial Sequence
  Description of Artificial Sequence: Synthetic oligonucleotide
uguucaguucuucauuuuc

SEQ ID NO: 2661648 - RNA, 19 nt, Artificial Sequence
  Description of Artificial Sequence: Synthetic oligonucleotide
agcacagaauccucccugc

SEQ ID NO: 2661649 - RNA, 19 nt, Artificial Sequence
  Description of Artificial Sequence: Synthetic oligonucleotide
cuaguaagcuaagugagug

SEQ ID NO: 2661650 - RNA, 19 nt, Artificial Sequence
  Description of Artificial Sequence: Synthetic oligonucleotide
gguaguaaguaccuuuucc

SEQ ID NO: 2661651 - RNA, 19 nt, Artificial Sequence
  Description of Artificial Sequence: Synthetic oligonucleotide
ucuaguaagcuaagugagu

SEQ ID NO: 2661652 - RNA, 19 nt, Artificial Sequence
  Description of Artificial Sequence: Synthetic oligonucleotide
uuuaaguuucuccuugcuu

SEQ ID NO: 2661653 - RNA, 19 nt, Artificial Sequence
  Description of Artificial Sequence: Synthetic oligonucleotide
accagcacagaauccuccc

SEQ ID NO: 2661654 - RNA, 19 nt, Artificial Sequence
  Description of Artificial Sequence: Synthetic oligonucleotide
uuuugcuguuuccacacaa

SEQ ID NO: 2661655 - RNA, 19 nt, Artificial Sequence
  Description of Artificial Sequence: Synthetic oligonucleotide
uccucuucaguggagcugg

SEQ ID NO: 2661656 - RNA, 19 nt, Artificial Sequence
  Description of Artificial Sequence: Synthetic oligonucleotide
guaagacaugccaaugugg

SEQ ID NO: 2661657 - RNA, 19 nt, Artificial Sequence
  Description of Artificial Sequence: Synthetic oligonucleotide
aaauugcggcacucaaaag

SEQ ID NO: 2661658 - RNA, 19 nt, Artificial Sequence
  Description of Artificial Sequence: Synthetic oligonucleotide
gcugcugacauccaacacg

SEQ ID NO: 2661659 - RNA, 19 nt, Artificial Sequence
  Description of Artificial Sequence: Synthetic oligonucleotide
uuuguucaguucuucauuu

SEQ ID NO: 2661660 - RNA, 19 nt, Artificial Sequence
  Description of Artificial Sequence: Synthetic oligonucleotide
ucgagaucgcguuagguuc

SEQ ID NO: 2661661 - RNA, 19 nt, Artificial Sequence
  Description of Artificial Sequence: Synthetic oligonucleotide
auugcggcacucaaaaguc

SEQ ID NO: 2661662 - RNA, 19 nt, Artificial Sequence
  Description of Artificial Sequence: Synthetic oligonucleotide
cauuuauucuuuucuccug

SEQ ID NO: 2661663 - RNA, 19 nt, Artificial Sequence
  Description of Artificial Sequence: Synthetic oligonucleotide
acacaaaaguucuauguuu

SEQ ID NO: 2661664 - RNA, 19 nt, Artificial Sequence
  Description of Artificial Sequence: Synthetic oligonucleotide
ugcggcacucaaaagucag

SEQ ID NO: 2661665 - RNA, 19 nt, Artificial Sequence
  Description of Artificial Sequence: Synthetic oligonucleotide
caaaaguucuauguuugag

SEQ ID NO: 2661666 - RNA, 19 nt, Artificial Sequence
  Description of Artificial Sequence: Synthetic oligonucleotide
uuuauucuuuucuccugca

SEQ ID NO: 2661667 - RNA, 19 nt, Artificial Sequence
  Description of Artificial Sequence: Synthetic oligonucleotide
ugugcugcugacauccaac

SEQ ID NO: 2661668 - RNA, 19 nt, Artificial Sequence
  Description of Artificial Sequence: Synthetic oligonucleotide
cuuuuguuuugaagagucc

SEQ ID NO: 2661669 - RNA, 19 nt, Artificial Sequence
  Description of Artificial Sequence: Synthetic oligonucleotide
uccugggcuuucgagaucg

SEQ ID NO: 2661670 - RNA, 19 nt, Artificial Sequence
  Description of Artificial Sequence: Synthetic oligonucleotide
aauccucccugccagacuu

SEQ ID NO: 2661671 - RNA, 19 nt, Artificial Sequence
  Description of Artificial Sequence: Synthetic oligonucleotide
ucaauuuaaguuucuccuu

SEQ ID NO: 2661672 - RNA, 19 nt, Artificial Sequence
  Description of Artificial Sequence: Synthetic oligonucleotide
aagaguccucuucagugga

SEQ ID NO: 2661673 - RNA, 19 nt, Artificial Sequence
  Description of Artificial Sequence: Synthetic oligonucleotide
aagucagauggccagggua

SEQ ID NO: 2661674 - RNA, 19 nt, Artificial Sequence
  Description of Artificial Sequence: Synthetic oligonucleotide
caucaacccaggauggacc

SEQ ID NO: 2661675 - RNA, 19 nt, Artificial Sequence
  Description of Artificial Sequence: Synthetic oligonucleotide
aucgcguuagguucagguc

SEQ ID NO: 2661676 - RNA, 19 nt, Artificial Sequence
  Description of Artificial Sequence: Synthetic oligonucleotide
uuugcagccugcucggaca

SEQ ID NO: 2661677 - RNA, 19 nt, Artificial Sequence
  Description of Artificial Sequence: Synthetic oligonucleotide
cuacccggagaaaauugcg

SEQ ID NO: 2661678 - RNA, 19 nt, Artificial Sequence
  Description of Artificial Sequence: Synthetic oligonucleotide
ugauacuucuguuucuuuu

SEQ ID NO: 2661679 - RNA, 19 nt, Artificial Sequence
  Description of Artificial Sequence: Synthetic oligonucleotide
auuuaaguuucuccuugcu

SEQ ID NO: 2661680 - RNA, 19 nt, Artificial Sequence
  Description of Artificial Sequence: Synthetic oligonucleotide
uccgcugagaggacaacgc

SEQ ID NO: 2661681 - RNA, 19 nt, Artificial Sequence
  Description of Artificial Sequence: Synthetic oligonucleotide
aguaaguaccuuuuccuuu

SEQ ID NO: 2661682 - RNA, 19 nt, Artificial Sequence
  Description of Artificial Sequence: Synthetic oligonucleotide
ucacuguaagacaugccaa

SEQ ID NO: 2661683 - RNA, 19 nt, Artificial Sequence
  Description of Artificial Sequence: Synthetic oligonucleotide
aauguggcacacguguuca

SEQ ID NO: 2661684 - RNA, 19 nt, Artificial Sequence
  Description of Artificial Sequence: Synthetic oligonucleotide
uggacccugauaauccuga

SEQ ID NO: 2661685 - RNA, 19 nt, Artificial Sequence
  Description of Artificial Sequence: Synthetic oligonucleotide
guuagguucagguccgcug

SEQ ID NO: 2661686 - RNA, 19 nt, Artificial Sequence
  Description of Artificial Sequence: Synthetic oligonucleotide
uguuugagguaucacugua

SEQ ID NO: 2661687 - RNA, 19 nt, Artificial Sequence
  Description of Artificial Sequence: Synthetic oligonucleotide
aagacaugccaauguggca

SEQ ID NO: 2661688 - RNA, 19 nt, Artificial Sequence
  Description of Artificial Sequence: Synthetic oligonucleotide
auaauccugaccagcacag

SEQ ID NO: 2661689 - RNA, 19 nt, Artificial Sequence
  Description of Artificial Sequence: Synthetic oligonucleotide
uccugaccagcacagaauc

SEQ ID NO: 2661690 - RNA, 19 nt, Artificial Sequence
  Description of Artificial Sequence: Synthetic oligonucleotide
guaucacuguaagacaugc

SEQ ID NO: 2661691 - RNA, 19 nt, Artificial Sequence
  Description of Artificial Sequence: Synthetic oligonucleotide
uccacacaaaaguucuaug

SEQ ID NO: 2661692 - RNA, 19 nt, Artificial Sequence
  Description of Artificial Sequence: Synthetic oligonucleotide
uugaagaguccucuucagu

SEQ ID NO: 2661693 - RNA, 19 nt, Artificial Sequence
  Description of Artificial Sequence: Synthetic oligonucleotide
aggauggacccugauaauc

SEQ ID NO: 2661694 - RNA, 19 nt, Artificial Sequence
  Description of Artificial Sequence: Synthetic oligonucleotide
uuugugauguuuuccuuuu

SEQ ID NO: 2661695 - RNA, 19 nt, Artificial Sequence
  Description of Artificial Sequence: Synthetic oligonucleotide
agaaaauugcggcacucaa

SEQ ID NO: 2661696 - RNA, 19 nt, Artificial Sequence
  Description of Artificial Sequence: Synthetic oligonucleotide
guuuugaagaguccucuuc

SEQ ID NO: 2661697 - RNA, 19 nt, Artificial Sequence
  Description of Artificial Sequence: Synthetic oligonucleotide
uuauucuuuucuccugcaa

SEQ ID NO: 2661698 - RNA, 19 nt, Artificial Sequence
  Description of Artificial Sequence: Synthetic oligonucleotide
uugcuguuuccacacaaaa

SEQ ID NO: 2661699 - RNA, 19 nt, Artificial Sequence
  Description of Artificial Sequence: Synthetic oligonucleotide
ugggcuuucgagaucgcgu

SEQ ID NO: 2661700 - RNA, 19 nt, Artificial Sequence
  Description of Artificial Sequence: Synthetic oligonucleotide
uaucacuguaagacaugcc

SEQ ID NO: 2661701 - RNA, 19 nt, Artificial Sequence
  Description of Artificial Sequence: Synthetic oligonucleotide
uuguuuugaagaguccucu

SEQ ID NO: 2661702 - RNA, 19 nt, Artificial Sequence
  Description of Artificial Sequence: Synthetic oligonucleotide
ucccuuuuggggucuaccc

SEQ ID NO: 2661703 - RNA, 19 nt, Artificial Sequence
  Description of Artificial Sequence: Synthetic oligonucleotide
ccugggacugccaugaugc

SEQ ID NO: 2661704 - RNA, 19 nt, Artificial Sequence
  Description of Artificial Sequence: Synthetic oligonucleotide
ugauaauccugaccagcac

SEQ ID NO: 2661705 - RNA, 19 nt, Artificial Sequence
  Description of Artificial Sequence: Synthetic oligonucleotide
acgaugucccuuuuggggu

SEQ ID NO: 2661706 - RNA, 19 nt, Artificial Sequence
  Description of Artificial Sequence: Synthetic oligonucleotide
uucgagaucgcguuagguu

SEQ ID NO: 2661707 - RNA, 19 nt, Artificial Sequence
  Description of Artificial Sequence: Synthetic oligonucleotide
uuugcuguuuccacacaaa

SEQ ID NO: 2661708 - RNA, 19 nt, Artificial Sequence
  Description of Artificial Sequence: Synthetic oligonucleotide
uuguccuuguugcaaccug

SEQ ID NO: 2661709 - RNA, 19 nt, Artificial Sequence
  Description of Artificial Sequence: Synthetic oligonucleotide
gcuuuaaugaggauuuugc

SEQ ID NO: 2661710 - RNA, 19 nt, Artificial Sequence
  Description of Artificial Sequence: Synthetic oligonucleotide
cacucaaaagucagauggc

SEQ ID NO: 2661711 - RNA, 19 nt, Artificial Sequence
  Description of Artificial Sequence: Synthetic oligonucleotide
agacuuucuaguaagcuaa

SEQ ID NO: 2661712 - RNA, 19 nt, Artificial Sequence
  Description of Artificial Sequence: Synthetic oligonucleotide
augccaauguggcacacgu

SEQ ID NO: 2661713 - RNA, 19 nt, Artificial Sequence
  Description of Artificial Sequence: Synthetic oligonucleotide
agucagauggccaggguag

SEQ ID NO: 2661714 - RNA, 19 nt, Artificial Sequence
  Description of Artificial Sequence: Synthetic oligonucleotide
guucaucaacccaggaugg

SEQ ID NO: 2661715 - RNA, 19 nt, Artificial Sequence
  Description of Artificial Sequence: Synthetic oligonucleotide
gacccugauaauccugacc

SEQ ID NO: 2661716 - RNA, 19 nt, Artificial Sequence
  Description of Artificial Sequence: Synthetic oligonucleotide
uuuugcagccugcucggac

SEQ ID NO: 2661717 - RNA, 19 nt, Artificial Sequence
  Description of Artificial Sequence: Synthetic oligonucleotide
guaguaaguaccuuuuccu

SEQ ID NO: 2661718 - RNA, 19 nt, Artificial Sequence
  Description of Artificial Sequence: Synthetic oligonucleotide
uuggggucuacccggagaa

SEQ ID NO: 2661719 - RNA, 19 nt, Artificial Sequence
  Description of Artificial Sequence: Synthetic oligonucleotide
cugacauccaacacgaugu

SEQ ID NO: 2661720 - RNA, 19 nt, Artificial Sequence
  Description of Artificial Sequence: Synthetic oligonucleotide
acacgaugucccuuuuggg

SEQ ID NO: 2661721 - RNA, 19 nt, Artificial Sequence
  Description of Artificial Sequence: Synthetic oligonucleotide
aucagcuuuaaugaggauu

SEQ ID NO: 2661722 - RNA, 19 nt, Artificial Sequence
  Description of Artificial Sequence: Synthetic oligonucleotide
auacuucuguuucuuuugu

SEQ ID NO: 2661723 - RNA, 19 nt, Artificial Sequence
  Description of Artificial Sequence: Synthetic oligonucleotide
gagguaucacuguaagaca

SEQ ID NO: 2661724 - RNA, 19 nt, Artificial Sequence
  Description of Artificial Sequence: Synthetic oligonucleotide
uugagguaucacuguaaga

SEQ ID NO: 2661725 - RNA, 19 nt, Artificial Sequence
  Description of Artificial Sequence: Synthetic oligonucleotide
aaagucagauggccagggu

SEQ ID NO: 2661726 - RNA, 19 nt, Artificial Sequence
  Description of Artificial Sequence: Synthetic oligonucleotide
cugauaauccugaccagca

SEQ ID NO: 2661727 - RNA, 19 nt, Artificial Sequence
  Description of Artificial Sequence: Synthetic oligonucleotide
cuauguuugagguaucacu

SEQ ID NO: 2661728 - RNA, 19 nt, Artificial Sequence
  Description of Artificial Sequence: Synthetic oligonucleotide
uaguaaguaccuuuuccuu

SEQ ID NO: 2661729 - RNA, 19 nt, Artificial Sequence
  Description of Artificial Sequence: Synthetic oligonucleotide
agcuuuaaugaggauuuug

SEQ ID NO: 2661730 - RNA, 19 nt, Artificial Sequence
  Description of Artificial Sequence: Synthetic oligonucleotide
ucuauguuugagguaucac

SEQ ID NO: 2661731 - RNA, 19 nt, Artificial Sequence
  Description of Artificial Sequence: Synthetic oligonucleotide
ucaucaacccaggauggac

SEQ ID NO: 2661732 - RNA, 19 nt, Artificial Sequence
  Description of Artificial Sequence: Synthetic oligonucleotide
uaguaagcuaagugagugu

SEQ ID NO: 2661733 - RNA, 19 nt, Artificial Sequence
  Description of Artificial Sequence: Synthetic oligonucleotide
auguuugagguaucacugu

SEQ ID NO: 2661734 - RNA, 19 nt, Artificial Sequence
  Description of Artificial Sequence: Synthetic oligonucleotide
cacacguguucaucaaccc

SEQ ID NO: 2661735 - RNA, 19 nt, Artificial Sequence
  Description of Artificial Sequence: Synthetic oligonucleotide
caaagccuguaauuuguuc

SEQ ID NO: 2661736 - RNA, 19 nt, Artificial Sequence
  Description of Artificial Sequence: Synthetic oligonucleotide
agaauccucccugccagac

SEQ ID NO: 2661737 - RNA, 19 nt, Artificial Sequence
  Description of Artificial Sequence: Synthetic oligonucleotide
gcugacauccaacacgaug

SEQ ID NO: 2661738 - RNA, 19 nt, Artificial Sequence
  Description of Artificial Sequence: Synthetic oligonucleotide
uucugauacuucuguuucu

SEQ ID NO: 2661739 - RNA, 19 nt, Artificial Sequence
  Description of Artificial Sequence: Synthetic oligonucleotide
acuguaagacaugccaaug

SEQ ID NO: 2661740 - RNA, 19 nt, Artificial Sequence
  Description of Artificial Sequence: Synthetic oligonucleotide
gcuguuuccacacaaaagu

SEQ ID NO: 2661741 - RNA, 19 nt, Artificial Sequence
  Description of Artificial Sequence: Synthetic oligonucleotide
uaagcuaagugagugucuu

SEQ ID NO: 2661742 - RNA, 19 nt, Artificial Sequence
  Description of Artificial Sequence: Synthetic oligonucleotide
uggagcugguaguaaguac

SEQ ID NO: 2661743 - RNA, 19 nt, Artificial Sequence
  Description of Artificial Sequence: Synthetic oligonucleotide
cugcaaagccuguaauuug

SEQ ID NO: 2661744 - RNA, 19 nt, Artificial Sequence
  Description of Artificial Sequence: Synthetic oligonucleotide
ugcucggacauuguccuug

SEQ ID NO: 2661745 - RNA, 19 nt, Artificial Sequence
  Description of Artificial Sequence: Synthetic oligonucleotide
cauuguccuuguugcaacc

SEQ ID NO: 2661746 - RNA, 19 nt, Artificial Sequence
  Description of Artificial Sequence: Synthetic oligonucleotide
caaaagucagauggccagg

SEQ ID NO: 2661747 - RNA, 19 nt, Artificial Sequence
  Description of Artificial Sequence: Synthetic oligonucleotide
acacguguucaucaaccca

SEQ ID NO: 2661748 - RNA, 19 nt, Artificial Sequence
  Description of Artificial Sequence: Synthetic oligonucleotide
aaguucuauguuugaggua

SEQ ID NO: 2661749 - RNA, 19 nt, Artificial Sequence
  Description of Artificial Sequence: Synthetic oligonucleotide
uuccacacaaaaguucuau

SEQ ID NO: 2661750 - RNA, 19 nt, Artificial Sequence
  Description of Artificial Sequence: Synthetic oligonucleotide
augcaggugagcggagucc

SEQ ID NO: 2661751 - RNA, 19 nt, Artificial Sequence
  Description of Artificial Sequence: Synthetic oligonucleotide
ccuuguugcaaccugggac

SEQ ID NO: 2661752 - RNA, 19 nt, Artificial Sequence
  Description of Artificial Sequence: Synthetic oligonucleotide
gggacugccaugaugcagg

SEQ ID NO: 2661753 - RNA, 19 nt, Artificial Sequence
  Description of Artificial Sequence: Synthetic oligonucleotide
ucuucaucgcuguccucgc

SEQ ID NO: 2661754 - RNA, 19 nt, Artificial Sequence
  Description of Artificial Sequence: Synthetic oligonucleotide
gaguccugggcuuucgaga

SEQ ID NO: 2661755 - RNA, 19 nt, Artificial Sequence
  Description of Artificial Sequence: Synthetic oligonucleotide
gccaugaugcaggugagcg

SEQ ID NO: 2661756 - RNA, 19 nt, Artificial Sequence
  Description of Artificial Sequence: Synthetic oligonucleotide
aguccugggcuuucgagau

SEQ ID NO: 2661757 - RNA, 19 nt, Artificial Sequence
  Description of Artificial Sequence: Synthetic oligonucleotide
ccuuuuggggucuacccgg

SEQ ID NO: 2661758 - RNA, 19 nt, Artificial Sequence
  Description of Artificial Sequence: Synthetic oligonucleotide
ugguaguaaguaccuuuuc

SEQ ID NO: 2661759 - RNA, 19 nt, Artificial Sequence
  Description of Artificial Sequence: Synthetic oligonucleotide
cugcugacauccaacacga

SEQ ID NO: 2661760 - RNA, 19 nt, Artificial Sequence
  Description of Artificial Sequence: Synthetic oligonucleotide
gacauccaacacgaugucc

SEQ ID NO: 2661761 - RNA, 19 nt, Artificial Sequence
  Description of Artificial Sequence: Synthetic oligonucleotide
cuuguugcaaccugggacu

SEQ ID NO: 2661762 - RNA, 19 nt, Artificial Sequence
  Description of Artificial Sequence: Synthetic oligonucleotide
uguccucgcuacuugugcu

SEQ ID NO: 2661763 - RNA, 19 nt, Artificial Sequence
  Description of Artificial Sequence: Synthetic oligonucleotide
caauguggcacacguguuc

SEQ ID NO: 2661764 - RNA, 19 nt, Artificial Sequence
  Description of Artificial Sequence: Synthetic oligonucleotide
gaugcaggugagcggaguc

SEQ ID NO: 2661765 - RNA, 19 nt, Artificial Sequence
  Description of Artificial Sequence: Synthetic oligonucleotide
cuguccucgcuacuugugc

SEQ ID NO: 2661766 - RNA, 19 nt, Artificial Sequence
  Description of Artificial Sequence: Synthetic oligonucleotide
uucaucgcuguccucgcua

SEQ ID NO: 2661767 - RNA, 19 nt, Artificial Sequence
  Description of Artificial Sequence: Synthetic oligonucleotide
uccaacacgaugucccuuu

SEQ ID NO: 2661768 - RNA, 19 nt, Artificial Sequence
  Description of Artificial Sequence: Synthetic oligonucleotide
guugcaaccugggacugcc

SEQ ID NO: 2661769 - RNA, 19 nt, Artificial Sequence
  Description of Artificial Sequence: Synthetic oligonucleotide
uaaguuucuccuugcuuuu

SEQ ID NO: 2661770 - RNA, 19 nt, Artificial Sequence
  Description of Artificial Sequence: Synthetic oligonucleotide
uccuuguugcaaccuggga

SEQ ID NO: 2661771 - RNA, 19 nt, Artificial Sequence
  Description of Artificial Sequence: Synthetic oligonucleotide
gaucgcguuagguucaggu

SEQ ID NO: 2661772 - RNA, 19 nt, Artificial Sequence
  Description of Artificial Sequence: Synthetic oligonucleotide
uccugcaaagccuguaauu

SEQ ID NO: 2661773 - RNA, 19 nt, Artificial Sequence
  Description of Artificial Sequence: Synthetic oligonucleotide
cuuuaaugaggauuuugcu

SEQ ID NO: 2661774 - RNA, 19 nt, Artificial Sequence
  Description of Artificial Sequence: Synthetic oligonucleotide
caugaugcaggugagcgga

SEQ ID NO: 2661775 - RNA, 19 nt, Artificial Sequence
  Description of Artificial Sequence: Synthetic oligonucleotide
uuucgagaucgcguuaggu

SEQ ID NO: 2661776 - RNA, 19 nt, Artificial Sequence
  Description of Artificial Sequence: Synthetic oligonucleotide
gagaaaauugcggcacuca

SEQ ID NO: 2661777 - RNA, 19 nt, Artificial Sequence
  Description of Artificial Sequence: Synthetic oligonucleotide
gaaaauugcggcacucaaa

SEQ ID NO: 2661778 - RNA, 19 nt, Artificial Sequence
  Description of Artificial Sequence: Synthetic oligonucleotide
ugcaaccugggacugccau

SEQ ID NO: 2661779 - RNA, 19 nt, Artificial Sequence
  Description of Artificial Sequence: Synthetic oligonucleotide
cuuucgagaucgcguuagg

SEQ ID NO: 2661780 - RNA, 19 nt, Artificial Sequence
  Description of Artificial Sequence: Synthetic oligonucleotide
ucaucgcuguccucgcuac

SEQ ID NO: 2661781 - RNA, 19 nt, Artificial Sequence
  Description of Artificial Sequence: Synthetic oligonucleotide
guuuccacacaaaaguucu

SEQ ID NO: 2661782 - RNA, 19 nt, Artificial Sequence
  Description of Artificial Sequence: Synthetic oligonucleotide
gacauuguccuuguugcaa

SEQ ID NO: 2661783 - RNA, 19 nt, Artificial Sequence
  Description of Artificial Sequence: Synthetic oligonucleotide
uguuuugaagaguccucuu

SEQ ID NO: 2661784 - RNA, 19 nt, Artificial Sequence
  Description of Artificial Sequence: Synthetic oligonucleotide
ggauggacccugauaaucc

SEQ ID NO: 2661785 - RNA, 19 nt, Artificial Sequence
  Description of Artificial Sequence: Synthetic oligonucleotide
uugcggcacucaaaaguca

SEQ ID NO: 2661786 - RNA, 19 nt, Artificial Sequence
  Description of Artificial Sequence: Synthetic oligonucleotide
ugcugcugacauccaacac

SEQ ID NO: 2661787 - RNA, 19 nt, Artificial Sequence
  Description of Artificial Sequence: Synthetic oligonucleotide
ugacauccaacacgauguc

SEQ ID NO: 2661788 - RNA, 19 nt, Artificial Sequence
  Description of Artificial Sequence: Synthetic oligonucleotide
cagacuuucuaguaagcua

SEQ ID NO: 2661789 - RNA, 19 nt, Artificial Sequence
  Description of Artificial Sequence: Synthetic oligonucleotide
uagguucagguccgcugag

SEQ ID NO: 2661790 - RNA, 19 nt, Artificial Sequence
  Description of Artificial Sequence: Synthetic oligonucleotide
agguaucacuguaagacau

SEQ ID NO: 2661791 - RNA, 19 nt, Artificial Sequence
  Description of Artificial Sequence: Synthetic oligonucleotide
gacuuucuaguaagcuaag

SEQ ID NO: 2661792 - RNA, 19 nt, Artificial Sequence
  Description of Artificial Sequence: Synthetic oligonucleotide
cggacauuguccuuguugc

SEQ ID NO: 2661793 - RNA, 19 nt, Artificial Sequence
  Description of Artificial Sequence: Synthetic oligonucleotide
ugaccagcacagaauccuc

SEQ ID NO: 2661794 - RNA, 19 nt, Artificial Sequence
  Description of Artificial Sequence: Synthetic oligonucleotide
agcuaagugagugucuuua

SEQ ID NO: 2661795 - RNA, 19 nt, Artificial Sequence
  Description of Artificial Sequence: Synthetic oligonucleotide
ucccugccagacuuucuag

SEQ ID NO: 2661796 - RNA, 19 nt, Artificial Sequence
  Description of Artificial Sequence: Synthetic oligonucleotide
acuuucuaguaagcuaagu

SEQ ID NO: 2661797 - RNA, 19 nt, Artificial Sequence
  Description of Artificial Sequence: Synthetic oligonucleotide
cuaagugagugucuuuaaa

SEQ ID NO: 2661798 - RNA, 19 nt, Artificial Sequence
  Description of Artificial Sequence: Synthetic oligonucleotide
gucuacccggagaaaauug

SEQ ID NO: 2661799 - RNA, 19 nt, Artificial Sequence
  Description of Artificial Sequence: Synthetic oligonucleotide
agccugcucggacauuguc

SEQ ID NO: 2661800 - RNA, 19 nt, Artificial Sequence
  Description of Artificial Sequence: Synthetic oligonucleotide
auuuugcuguuuccacaca

SEQ ID NO: 2661801 - RNA, 19 nt, Artificial Sequence
  Description of Artificial Sequence: Synthetic oligonucleotide
ggauuuugcuguuuccaca

SEQ ID NO: 2661802 - RNA, 19 nt, Artificial Sequence
  Description of Artificial Sequence: Synthetic oligonucleotide
gaccagcacagaauccucc

SEQ ID NO: 2661803 - RNA, 19 nt, Artificial Sequence
  Description of Artificial Sequence: Synthetic oligonucleotide
ucgcuacuugugcugcuga

SEQ ID NO: 2661804 - RNA, 19 nt, Artificial Sequence
  Description of Artificial Sequence: Synthetic oligonucleotide
uugugcugcugacauccaa

SEQ ID NO: 2661805 - RNA, 19 nt, Artificial Sequence
  Description of Artificial Sequence: Synthetic oligonucleotide
aggugagcggaguccuggg

SEQ ID NO: 2661806 - RNA, 19 nt, Artificial Sequence
  Description of Artificial Sequence: Synthetic oligonucleotide
uucaucaacccaggaugga

SEQ ID NO: 2661807 - RNA, 19 nt, Artificial Sequence
  Description of Artificial Sequence: Synthetic oligonucleotide
aaugaggauuuugcuguuu

SEQ ID NO: 2661808 - RNA, 19 nt, Artificial Sequence
  Description of Artificial Sequence: Synthetic oligonucleotide
guccgcugagaggacaacg

SEQ ID NO: 2661809 - RNA, 19 nt, Artificial Sequence
  Description of Artificial Sequence: Synthetic oligonucleotide
cuuuucuccugcaaagccu

SEQ ID NO: 2661810 - RNA, 19 nt, Artificial Sequence
  Description of Artificial Sequence: Synthetic oligonucleotide
uucaguggagcugguagua

SEQ ID NO: 2661811 - RNA, 19 nt, Artificial Sequence
  Description of Artificial Sequence: Synthetic oligonucleotide
auuguccuuguugcaaccu

SEQ ID NO: 2661812 - RNA, 19 nt, Artificial Sequence
  Description of Artificial Sequence: Synthetic oligonucleotide
ugccaauguggcacacgug

SEQ ID NO: 2661813 - RNA, 19 nt, Artificial Sequence
  Description of Artificial Sequence: Synthetic oligonucleotide
guccuuguugcaaccuggg

SEQ ID NO: 2661814 - RNA, 19 nt, Artificial Sequence
  Description of Artificial Sequence: Synthetic oligonucleotide
ccugauaauccugaccagc

SEQ ID NO: 2661815 - RNA, 19 nt, Artificial Sequence
  Description of Artificial Sequence: Synthetic oligonucleotide
ugcaggugagcggaguccu

SEQ ID NO: 2661816 - RNA, 19 nt, Artificial Sequence
  Description of Artificial Sequence: Synthetic oligonucleotide
ccuguaauuuguucaguuc

SEQ ID NO: 2661817 - RNA, 19 nt, Artificial Sequence
  Description of Artificial Sequence: Synthetic oligonucleotide
gacaugccaauguggcaca

SEQ ID NO: 2661818 - RNA, 19 nt, Artificial Sequence
  Description of Artificial Sequence: Synthetic oligonucleotide
ucgcuguccucgcuacuug

SEQ ID NO: 2661819 - RNA, 19 nt, Artificial Sequence
  Description of Artificial Sequence: Synthetic oligonucleotide
caugccaauguggcacacg

SEQ ID NO: 2661820 - RNA, 19 nt, Artificial Sequence
  Description of Artificial Sequence: Synthetic oligonucleotide
uuguucaguucuucauuuu

SEQ ID NO: 2661821 - RNA, 19 nt, Artificial Sequence
  Description of Artificial Sequence: Synthetic oligonucleotide
uccucgcuacuugugcugc

SEQ ID NO: 2661822 - RNA, 19 nt, Artificial Sequence
  Description of Artificial Sequence: Synthetic oligonucleotide
cacagaauccucccugcca

SEQ ID NO: 2661823 - RNA, 19 nt, Artificial Sequence
  Description of Artificial Sequence: Synthetic oligonucleotide
uguggcacacguguucauc

SEQ ID NO: 2661824 - RNA, 19 nt, Artificial Sequence
  Description of Artificial Sequence: Synthetic oligonucleotide
uacuucuguuucuuuuguu

SEQ ID NO: 2661825 - RNA, 19 nt, Artificial Sequence
  Description of Artificial Sequence: Synthetic oligonucleotide
aagcuaagugagugucuuu

SEQ ID NO: 2661826 - RNA, 19 nt, Artificial Sequence
  Description of Artificial Sequence: Synthetic oligonucleotide
ggaguccugggcuuucgag

SEQ ID NO: 2661827 - RNA, 19 nt, Artificial Sequence
  Description of Artificial Sequence: Synthetic oligonucleotide
ccaggauggacccugauaa

SEQ ID NO: 2661828 - RNA, 19 nt, Artificial Sequence
  Description of Artificial Sequence: Synthetic oligonucleotide
cugggcuuucgagaucgcg

SEQ ID NO: 2661829 - RNA, 19 nt, Artificial Sequence
  Description of Artificial Sequence: Synthetic oligonucleotide
guaaguaccuuuuccuuuu

SEQ ID NO: 2661830 - RNA, 19 nt, Artificial Sequence
  Description of Artificial Sequence: Synthetic oligonucleotide
gcacacguguucaucaacc

SEQ ID NO: 2661831 - RNA, 19 nt, Artificial Sequence
  Description of Artificial Sequence: Synthetic oligonucleotide
aguggagcugguaguaagu

SEQ ID NO: 2661832 - RNA, 19 nt, Artificial Sequence
  Description of Artificial Sequence: Synthetic oligonucleotide
uuucuccugcaaagccugu

SEQ ID NO: 2661833 - RNA, 19 nt, Artificial Sequence
  Description of Artificial Sequence: Synthetic oligonucleotide
gugcugcugacauccaaca

SEQ ID NO: 2661834 - RNA, 19 nt, Artificial Sequence
  Description of Artificial Sequence: Synthetic oligonucleotide
caacacgaugucccuuuug

SEQ ID NO: 2661835 - RNA, 19 nt, Artificial Sequence
  Description of Artificial Sequence: Synthetic oligonucleotide
gcuuucgagaucgcguuag

SEQ ID NO: 2661836 - RNA, 19 nt, Artificial Sequence
  Description of Artificial Sequence: Synthetic oligonucleotide
uuguugcaaccugggacug

SEQ ID NO: 2661837 - RNA, 19 nt, Artificial Sequence
  Description of Artificial Sequence: Synthetic oligonucleotide
acguguucaucaacccagg

SEQ ID NO: 2661838 - RNA, 19 nt, Artificial Sequence
  Description of Artificial Sequence: Synthetic oligonucleotide
gauggacccugauaauccu

SEQ ID NO: 2661839 - RNA, 19 nt, Artificial Sequence
  Description of Artificial Sequence: Synthetic oligonucleotide
ggcacucaaaagucagaug

SEQ ID NO: 2661840 - RNA, 19 nt, Artificial Sequence
  Description of Artificial Sequence: Synthetic oligonucleotide
uguugcaaccugggacugc

SEQ ID NO: 2661841 - RNA, 19 nt, Artificial Sequence
  Description of Artificial Sequence: Synthetic oligonucleotide
caacccaggauggacccug

SEQ ID NO: 2661842 - RNA, 19 nt, Artificial Sequence
  Description of Artificial Sequence: Synthetic oligonucleotide
guccucgcuacuugugcug

SEQ ID NO: 2661843 - RNA, 19 nt, Artificial Sequence
  Description of Artificial Sequence: Synthetic oligonucleotide
caaccugggacugccauga

SEQ ID NO: 2661844 - RNA, 19 nt, Artificial Sequence
  Description of Artificial Sequence: Synthetic oligonucleotide
cuguaagacaugccaaugu

SEQ ID NO: 2661845 - RNA, 19 nt, Artificial Sequence
  Description of Artificial Sequence: Synthetic oligonucleotide
guuugagguaucacuguaa

SEQ ID NO: 2661846 - RNA, 19 nt, Artificial Sequence
  Description of Artificial Sequence: Synthetic oligonucleotide
cugccaugaugcaggugag

SEQ ID NO: 2661847 - RNA, 19 nt, Artificial Sequence
  Description of Artificial Sequence: Synthetic oligonucleotide
ugaugcaggugagcggagu

SEQ ID NO: 2661848 - RNA, 19 nt, Artificial Sequence
  Description of Artificial Sequence: Synthetic oligonucleotide
gccaauguggcacacgugu

SEQ ID NO: 2661849 - RNA, 19 nt, Artificial Sequence
  Description of Artificial Sequence: Synthetic oligonucleotide
ugagcggaguccugggcuu

SEQ ID NO: 2661850 - RNA, 19 nt, Artificial Sequence
  Description of Artificial Sequence: Synthetic oligonucleotide
guguucaucaacccaggau

SEQ ID NO: 2661851 - RNA, 19 nt, Artificial Sequence
  Description of Artificial Sequence: Synthetic oligonucleotide
gguaucacuguaagacaug

SEQ ID NO: 2661852 - RNA, 19 nt, Artificial Sequence
  Description of Artificial Sequence: Synthetic oligonucleotide
uaauccugaccagcacaga

SEQ ID NO: 2661853 - RNA, 19 nt, Artificial Sequence
  Description of Artificial Sequence: Synthetic oligonucleotide
ucaguggagcugguaguaa

SEQ ID NO: 2661854 - RNA, 19 nt, Artificial Sequence
  Description of Artificial Sequence: Synthetic oligonucleotide
cccuuuuggggucuacccg

SEQ ID NO: 2661855 - RNA, 19 nt, Artificial Sequence
  Description of Artificial Sequence: Synthetic oligonucleotide
acaugccaauguggcacac

SEQ ID NO: 2661856 - RNA, 19 nt, Artificial Sequence
  Description of Artificial Sequence: Synthetic oligonucleotide
ccaugaugcaggugagcgg

SEQ ID NO: 2661857 - RNA, 19 nt, Artificial Sequence
  Description of Artificial Sequence: Synthetic oligonucleotide
ugccaugaugcaggugagc

SEQ ID NO: 2661858 - RNA, 19 nt, Artificial Sequence
  Description of Artificial Sequence: Synthetic oligonucleotide
cacacaaaaguucuauguu

SEQ ID NO: 2661859 - RNA, 19 nt, Artificial Sequence
  Description of Artificial Sequence: Synthetic oligonucleotide
uugcagccugcucggacau

SEQ ID NO: 2661860 - RNA, 19 nt, Artificial Sequence
  Description of Artificial Sequence: Synthetic oligonucleotide
cuacuugugcugcugacau

SEQ ID NO: 2661861 - RNA, 19 nt, Artificial Sequence
  Description of Artificial Sequence: Synthetic oligonucleotide
gucccuuuuggggucuacc

SEQ ID NO: 2661862 - RNA, 19 nt, Artificial Sequence
  Description of Artificial Sequence: Synthetic oligonucleotide
uacuugugcugcugacauc

SEQ ID NO: 2661863 - RNA, 19 nt, Artificial Sequence
  Description of Artificial Sequence: Synthetic oligonucleotide
auggacccugauaauccug

SEQ ID NO: 2661864 - RNA, 19 nt, Artificial Sequence
  Description of Artificial Sequence: Synthetic oligonucleotide
gagaucgcguuagguucag

SEQ ID NO: 2661865 - RNA, 19 nt, Artificial Sequence
  Description of Artificial Sequence: Synthetic oligonucleotide
agaguccucuucaguggag

SEQ ID NO: 2661866 - RNA, 19 nt, Artificial Sequence
  Description of Artificial Sequence: Synthetic oligonucleotide
cucgcuacuugugcugcug

SEQ ID NO: 2661867 - RNA, 19 nt, Artificial Sequence
  Description of Artificial Sequence: Synthetic oligonucleotide
cugaccagcacagaauccu

SEQ ID NO: 2661868 - RNA, 19 nt, Artificial Sequence
  Description of Artificial Sequence: Synthetic oligonucleotide
ucagguccgcugagaggac

SEQ ID NO: 2661869 - RNA, 19 nt, Artificial Sequence
  Description of Artificial Sequence: Synthetic oligonucleotide
ccugaccagcacagaaucc

SEQ ID NO: 2661870 - RNA, 19 nt, Artificial Sequence
  Description of Artificial Sequence: Synthetic oligonucleotide
uucuccugcaaagccugua

SEQ ID NO: 2661871 - RNA, 19 nt, Artificial Sequence
  Description of Artificial Sequence: Synthetic oligonucleotide
ccacacaaaaguucuaugu

SEQ ID NO: 2661872 - RNA, 19 nt, Artificial Sequence
  Description of Artificial Sequence: Synthetic oligonucleotide
auccugaccagcacagaau

SEQ ID NO: 2661873 - RNA, 19 nt, Artificial Sequence
  Description of Artificial Sequence: Synthetic oligonucleotide
gucagauggccaggguagc

SEQ ID NO: 2661874 - RNA, 19 nt, Artificial Sequence
  Description of Artificial Sequence: Synthetic oligonucleotide
aucgcuguccucgcuacuu

SEQ ID NO: 2661875 - RNA, 19 nt, Artificial Sequence
  Description of Artificial Sequence: Synthetic oligonucleotide
cugccagacuuucuaguaa

SEQ ID NO: 2661876 - RNA, 19 nt, Artificial Sequence
  Description of Artificial Sequence: Synthetic oligonucleotide
cuucaguggagcugguagu

SEQ ID NO: 2661877 - RNA, 19 nt, Artificial Sequence
  Description of Artificial Sequence: Synthetic oligonucleotide
gugagcggaguccugggcu

SEQ ID NO: 2661878 - RNA, 19 nt, Artificial Sequence
  Description of Artificial Sequence: Synthetic oligonucleotide
uugcaaccugggacugcca

SEQ ID NO: 2661879 - RNA, 19 nt, Artificial Sequence
  Description of Artificial Sequence: Synthetic oligonucleotide
ggugagcggaguccugggc

SEQ ID NO: 2661880 - RNA, 19 nt, Artificial Sequence
  Description of Artificial Sequence: Synthetic oligonucleotide
cacuguaagacaugccaau

SEQ ID NO: 2661881 - RNA, 19 nt, Artificial Sequence
  Description of Artificial Sequence: Synthetic oligonucleotide
agccuguaauuuguucagu

SEQ ID NO: 2661882 - RNA, 19 nt, Artificial Sequence
  Description of Artificial Sequence: Synthetic oligonucleotide
gcaaccugggacugccaug

SEQ ID NO: 2661883 - RNA, 19 nt, Artificial Sequence
  Description of Artificial Sequence: Synthetic oligonucleotide
ggcacacguguucaucaac

SEQ ID NO: 2661884 - RNA, 19 nt, Artificial Sequence
  Description of Artificial Sequence: Synthetic oligonucleotide
gcagccugcucggacauug

SEQ ID NO: 2661885 - RNA, 19 nt, Artificial Sequence
  Description of Artificial Sequence: Synthetic oligonucleotide
ucaacccaggauggacccu

SEQ ID NO: 2661886 - RNA, 19 nt, Artificial Sequence
  Description of Artificial Sequence: Synthetic oligonucleotide
ggagaaaauugcggcacuc

SEQ ID NO: 2661887 - RNA, 19 nt, Artificial Sequence
  Description of Artificial Sequence: Synthetic oligonucleotide
gccugcucggacauugucc

SEQ ID NO: 2661888 - RNA, 19 nt, Artificial Sequence
  Description of Artificial Sequence: Synthetic oligonucleotide
cugguaguaaguaccuuuu

SEQ ID NO: 2661889 - RNA, 19 nt, Artificial Sequence
  Description of Artificial Sequence: Synthetic oligonucleotide
gcacagaauccucccugcc

SEQ ID NO: 2661890 - RNA, 19 nt, Artificial Sequence
  Description of Artificial Sequence: Synthetic oligonucleotide
ccggagaaaauugcggcac

SEQ ID NO: 2661891 - RNA, 19 nt, Artificial Sequence
  Description of Artificial Sequence: Synthetic oligonucleotide
cuguuuccacacaaaaguu

SEQ ID NO: 2661892 - RNA, 19 nt, Artificial Sequence
  Description of Artificial Sequence: Synthetic oligonucleotide
uccucccugccagacuuuc

SEQ ID NO: 2661893 - RNA, 19 nt, Artificial Sequence
  Description of Artificial Sequence: Synthetic oligonucleotide
gaauccucccugccagacu

SEQ ID NO: 2661894 - RNA, 19 nt, Artificial Sequence
  Description of Artificial Sequence: Synthetic oligonucleotide
guaagcuaagugagugucu

SEQ ID NO: 2661895 - RNA, 19 nt, Artificial Sequence
  Description of Artificial Sequence: Synthetic oligonucleotide
gcuaagugagugucuuuaa

SEQ ID NO: 2661896 - RNA, 19 nt, Artificial Sequence
  Description of Artificial Sequence: Synthetic oligonucleotide
cucccugccagacuuucua

SEQ ID NO: 2661897 - RNA, 19 nt, Artificial Sequence
  Description of Artificial Sequence: Synthetic oligonucleotide
agaucgcguuagguucagg

SEQ ID NO: 2661898 - RNA, 19 nt, Artificial Sequence
  Description of Artificial Sequence: Synthetic oligonucleotide
cgcguuagguucagguccg

SEQ ID NO: 2661899 - RNA, 19 nt, Artificial Sequence
  Description of Artificial Sequence: Synthetic oligonucleotide
ggacauuguccuuguugca

SEQ ID NO: 2661900 - RNA, 19 nt, Artificial Sequence
  Description of Artificial Sequence: Synthetic oligonucleotide
gcuacuugugcugcugaca

SEQ ID NO: 2661901 - RNA, 19 nt, Artificial Sequence
  Description of Artificial Sequence: Synthetic oligonucleotide
agcggaguccugggcuuuc

SEQ ID NO: 2661902 - RNA, 19 nt, Artificial Sequence
  Description of Artificial Sequence: Synthetic oligonucleotide
agguucagguccgcugaga

SEQ ID NO: 2661903 - RNA, 19 nt, Artificial Sequence
  Description of Artificial Sequence: Synthetic oligonucleotide
auguggcacacguguucau

SEQ ID NO: 2661904 - RNA, 19 nt, Artificial Sequence
  Description of Artificial Sequence: Synthetic oligonucleotide
aaccugggacugccaugau

SEQ ID NO: 2661905 - RNA, 19 nt, Artificial Sequence
  Description of Artificial Sequence: Synthetic oligonucleotide
augaugcaggugagcggag

SEQ ID NO: 2661906 - RNA, 19 nt, Artificial Sequence
  Description of Artificial Sequence: Synthetic oligonucleotide
guggagcugguaguaagua

SEQ ID NO: 2661907 - RNA, 19 nt, Artificial Sequence
  Description of Artificial Sequence: Synthetic oligonucleotide
guucuauguuugagguauc

SEQ ID NO: 2661908 - RNA, 19 nt, Artificial Sequence
  Description of Artificial Sequence: Synthetic oligonucleotide
gacugccaugaugcaggug

SEQ ID NO: 2661909 - RNA, 19 nt, Artificial Sequence
  Description of Artificial Sequence: Synthetic oligonucleotide
ugucccuuuuggggucuac

SEQ ID NO: 2661910 - RNA, 19 nt, Artificial Sequence
  Description of Artificial Sequence: Synthetic oligonucleotide
cuugugcugcugacaucca

SEQ ID NO: 2661911 - RNA, 19 nt, Artificial Sequence
  Description of Artificial Sequence: Synthetic oligonucleotide
gccagacuuucuaguaagc

SEQ ID NO: 2661912 - RNA, 19 nt, Artificial Sequence
  Description of Artificial Sequence: Synthetic oligonucleotide
cccugauaauccugaccag

SEQ ID NO: 2661913 - RNA, 19 nt, Artificial Sequence
  Description of Artificial Sequence: Synthetic oligonucleotide
aacccaggauggacccuga

SEQ ID NO: 2661914 - RNA, 19 nt, Artificial Sequence
  Description of Artificial Sequence: Synthetic oligonucleotide
ggacccugauaauccugac

SEQ ID NO: 2661915 - RNA, 19 nt, Artificial Sequence
  Description of Artificial Sequence: Synthetic oligonucleotide
gauggccaggguagccaca

SEQ ID NO: 2661916 - RNA, 19 nt, Artificial Sequence
  Description of Artificial Sequence: Synthetic oligonucleotide
ggggucuacccggagaaaa

SEQ ID NO: 2661917 - RNA, 19 nt, Artificial Sequence
  Description of Artificial Sequence: Synthetic oligonucleotide
cagaauccucccugccaga

SEQ ID NO: 2661918 - RNA, 19 nt, Artificial Sequence
  Description of Artificial Sequence: Synthetic oligonucleotide
gcuguccucgcuacuugug

SEQ ID NO: 2661919 - RNA, 19 nt, Artificial Sequence
  Description of Artificial Sequence: Synthetic oligonucleotide
auccaacacgaugucccuu

SEQ ID NO: 2661920 - RNA, 19 nt, Artificial Sequence
  Description of Artificial Sequence: Synthetic oligonucleotide
cccggagaaaauugcggca

SEQ ID NO: 2661921 - RNA, 19 nt, Artificial Sequence
  Description of Artificial Sequence: Synthetic oligonucleotide
cugggacugccaugaugca

SEQ ID NO: 2661922 - RNA, 19 nt, Artificial Sequence
  Description of Artificial Sequence: Synthetic oligonucleotide
agguccgcugagaggacaa

SEQ ID NO: 2661923 - RNA, 19 nt, Artificial Sequence
  Description of Artificial Sequence: Synthetic oligonucleotide
ccugccagacuuucuagua

SEQ ID NO: 2661924 - RNA, 19 nt, Artificial Sequence
  Description of Artificial Sequence: Synthetic oligonucleotide
acccaggauggacccugau

SEQ ID NO: 2661925 - RNA, 19 nt, Artificial Sequence
  Description of Artificial Sequence: Synthetic oligonucleotide
uggggucuacccggagaaa

SEQ ID NO: 2661926 - RNA, 19 nt, Artificial Sequence
  Description of Artificial Sequence: Synthetic oligonucleotide
gaugucccuuuuggggucu

SEQ ID NO: 2661927 - RNA, 19 nt, Artificial Sequence
  Description of Artificial Sequence: Synthetic oligonucleotide
ccugcucggacauuguccu

SEQ ID NO: 2661928 - RNA, 19 nt, Artificial Sequence
  Description of Artificial Sequence: Synthetic oligonucleotide
gccuguaauuuguucaguu

SEQ ID NO: 2661929 - RNA, 19 nt, Artificial Sequence
  Description of Artificial Sequence: Synthetic oligonucleotide
guccugggcuuucgagauc

SEQ ID NO: 2661930 - RNA, 19 nt, Artificial Sequence
  Description of Artificial Sequence: Synthetic oligonucleotide
cugauacuucuguuucuuu

SEQ ID NO: 2661931 - RNA, 19 nt, Artificial Sequence
  Description of Artificial Sequence: Synthetic oligonucleotide
cuccugcaaagccuguaau

SEQ ID NO: 2661932 - RNA, 19 nt, Artificial Sequence
  Description of Artificial Sequence: Synthetic oligonucleotide
cagguccgcugagaggaca

SEQ ID NO: 2661933 - RNA, 19 nt, Artificial Sequence
  Description of Artificial Sequence: Synthetic oligonucleotide
ccugcaaagccuguaauuu

SEQ ID NO: 2661934 - RNA, 19 nt, Artificial Sequence
  Description of Artificial Sequence: Synthetic oligonucleotide
cgagaucgcguuagguuca

SEQ ID NO: 2661935 - RNA, 19 nt, Artificial Sequence
  Description of Artificial Sequence: Synthetic oligonucleotide
cgcuacuugugcugcugac

SEQ ID NO: 2661936 - RNA, 19 nt, Artificial Sequence
  Description of Artificial Sequence: Synthetic oligonucleotide
gggcuuucgagaucgcguu

SEQ ID NO: 2661937 - RNA, 19 nt, Artificial Sequence
  Description of Artificial Sequence: Synthetic oligonucleotide
gcggaguccugggcuuucg

SEQ ID NO: 2661938 - RNA, 19 nt, Artificial Sequence
  Description of Artificial Sequence: Synthetic oligonucleotide
caggauggacccugauaau

SEQ ID NO: 2661939 - RNA, 19 nt, Artificial Sequence
  Description of Artificial Sequence: Synthetic oligonucleotide
cucuucaguggagcuggua

SEQ ID NO: 2661940 - RNA, 19 nt, Artificial Sequence
  Description of Artificial Sequence: Synthetic oligonucleotide
cuucaucgcuguccucgcu

SEQ ID NO: 2661941 - RNA, 19 nt, Artificial Sequence
  Description of Artificial Sequence: Synthetic oligonucleotide
ccgcugagaggacaacgca

SEQ ID NO: 2661942 - RNA, 19 nt, Artificial Sequence
  Description of Artificial Sequence: Synthetic oligonucleotide
ggcuuucgagaucgcguua

SEQ ID NO: 2661943 - RNA, 19 nt, Artificial Sequence
  Description of Artificial Sequence: Synthetic oligonucleotide
gcggcacucaaaagucaga

SEQ ID NO: 2661944 - RNA, 19 nt, Artificial Sequence
  Description of Artificial Sequence: Synthetic oligonucleotide
gguccgcugagaggacaac

SEQ ID NO: 2661945 - RNA, 19 nt, Artificial Sequence
  Description of Artificial Sequence: Synthetic oligonucleotide
ggucuacccggagaaaauu

SEQ ID NO: 2661946 - RNA, 19 nt, Artificial Sequence
  Description of Artificial Sequence: Synthetic oligonucleotide
ccugggcuuucgagaucgc

SEQ ID NO: 2661947 - RNA, 19 nt, Artificial Sequence
  Description of Artificial Sequence: Synthetic oligonucleotide
gcaggugagcggaguccug

SEQ ID NO: 2661948 - RNA, 19 nt, Artificial Sequence
  Description of Artificial Sequence: Synthetic oligonucleotide
cguguucaucaacccagga

SEQ ID NO: 2661949 - RNA, 19 nt, Artificial Sequence
  Description of Artificial Sequence: Synthetic oligonucleotide
gcucggacauuguccuugu

SEQ ID NO: 2661950 - RNA, 19 nt, Artificial Sequence
  Description of Artificial Sequence: Synthetic oligonucleotide
ggacugccaugaugcaggu

SEQ ID NO: 2661951 - RNA, 19 nt, Artificial Sequence
  Description of Artificial Sequence: Synthetic oligonucleotide
gggucuacccggagaaaau

SEQ ID NO: 2661952 - RNA, 19 nt, Artificial Sequence
  Description of Artificial Sequence: Synthetic oligonucleotide
caucgcuguccucgcuacu

SEQ ID NO: 2661953 - RNA, 19 nt, Artificial Sequence
  Description of Artificial Sequence: Synthetic oligonucleotide
cccugccagacuuucuagu

SEQ ID NO: 2661954 - RNA, 19 nt, Artificial Sequence
  Description of Artificial Sequence: Synthetic oligonucleotide
ccagcacagaauccucccu

SEQ ID NO: 2661955 - RNA, 19 nt, Artificial Sequence
  Description of Artificial Sequence: Synthetic oligonucleotide
gcguuagguucagguccgc

SEQ ID NO: 2661956 - RNA, 19 nt, Artificial Sequence
  Description of Artificial Sequence: Synthetic oligonucleotide
auccucccugccagacuuu

SEQ ID NO: 2661957 - RNA, 19 nt, Artificial Sequence
  Description of Artificial Sequence: Synthetic oligonucleotide
gcaaagccuguaauuuguu

SEQ ID NO: 2661958 - RNA, 19 nt, Artificial Sequence
  Description of Artificial Sequence: Synthetic oligonucleotide
cagccugcucggacauugu

SEQ ID NO: 2661959 - RNA, 19 nt, Artificial Sequence
  Description of Artificial Sequence: Synthetic oligonucleotide
ccaauguggcacacguguu

SEQ ID NO: 2661960 - RNA, 19 nt, Artificial Sequence
  Description of Artificial Sequence: Synthetic oligonucleotide
gccaggguagccacauuuu

SEQ ID NO: 2661961 - RNA, 19 nt, Artificial Sequence
  Description of Artificial Sequence: Synthetic oligonucleotide
gagcggaguccugggcuuu

SEQ ID NO: 2661962 - RNA, 19 nt, Artificial Sequence
  Description of Artificial Sequence: Synthetic oligonucleotide
cagcuuuaaugaggauuuu

SEQ ID NO: 2661963 - RNA, 19 nt, Artificial Sequence
  Description of Artificial Sequence: Synthetic oligonucleotide
cggcacucaaaagucagau

SEQ ID NO: 2661964 - RNA, 19 nt, Artificial Sequence
  Description of Artificial Sequence: Synthetic oligonucleotide
cggagaaaauugcggcacu

SEQ ID NO: 2661965 - RNA, 19 nt, Artificial Sequence
  Description of Artificial Sequence: Synthetic oligonucleotide
cugcucggacauuguccuu

SEQ ID NO: 2661966 - RNA, 19 nt, Artificial Sequence
  Description of Artificial Sequence: Synthetic oligonucleotide
cucggacauuguccuuguu

SEQ ID NO: 2661967 - RNA, 19 nt, Artificial Sequence
  Description of Artificial Sequence: Synthetic oligonucleotide
ccucccugccagacuuucu

SEQ ID NO: 2661968 - RNA, 19 nt, Artificial Sequence
  Description of Artificial Sequence: Synthetic oligonucleotide
cggaguccugggcuuucga

SEQ ID NO: 2661969 - RNA, 19 nt, Artificial Sequence
  Description of Artificial Sequence: Synthetic oligonucleotide
ccucgcuacuugugcugcu

SEQ ID NO: 2661970 - RNA, 19 nt, Artificial Sequence
  Description of Artificial Sequence: Synthetic oligonucleotide
cgcuguccucgcuacuugu

SEQ ID NO: 2661971 - RNA, 19 nt, Artificial Sequence
  Description of Artificial Sequence: Synthetic oligonucleotide
cguuagguucagguccgcu

SEQ ID NO: 2661972 - RNA, 19 nt, Artificial Sequence
  Description of Artificial Sequence: Synthetic oligonucleotide
aaagaugagcuucacaggc

SEQ ID NO: 2661973 - RNA, 19 nt, Artificial Sequence
  Description of Artificial Sequence: Synthetic oligonucleotide
aaaaucaaguaccacacug

SEQ ID NO: 2661974 - RNA, 19 nt, Artificial Sequence
  Description of Artificial Sequence: Synthetic oligonucleotide
aagaaaaucaaguaccaca

SEQ ID NO: 2661975 - RNA, 19 nt, Artificial Sequence
  Description of Artificial Sequence: Synthetic oligonucleotide
acagaagaaaaucaaguac

SEQ ID NO: 2661976 - RNA, 19 nt, Artificial Sequence
  Description of Artificial Sequence: Synthetic oligonucleotide
acaggcaagaagcagacgc

SEQ ID NO: 2661977 - RNA, 19 nt, Artificial Sequence
  Description of Artificial Sequence: Synthetic oligonucleotide
gaugaaguagcugaggucg

SEQ ID NO: 2661978 - RNA, 19 nt, Artificial Sequence
  Description of Artificial Sequence: Synthetic oligonucleotide
uacuugagguaaaugaugg

SEQ ID NO: 2661979 - RNA, 19 nt, Artificial Sequence
  Description of Artificial Sequence: Synthetic oligonucleotide
ucaaguaccacacugcaga

SEQ ID NO: 2661980 - RNA, 19 nt, Artificial Sequence
  Description of Artificial Sequence: Synthetic oligonucleotide
cagaagaaaaucaaguacc

SEQ ID NO: 2661981 - RNA, 19 nt, Artificial Sequence
  Description of Artificial Sequence: Synthetic oligonucleotide
  modified_base (10)..(10): a, c, u, g, unknown or other
aaugaugggnuccccgagg

SEQ ID NO: 2661982 - RNA, 19 nt, Artificial Sequence
  Description of Artificial Sequence: Synthetic oligonucleotide
uguagaagagguccaaggg

SEQ ID NO: 2661983 - RNA, 19 nt, Artificial Sequence
  Description of Artificial Sequence: Synthetic oligonucleotide
cugaaguagucaaugaugg

SEQ ID NO: 2661984 - RNA, 19 nt, Artificial Sequence
  Description of Artificial Sequence: Synthetic oligonucleotide
aaaucaaguaccacacugc

SEQ ID NO: 2661985 - RNA, 19 nt, Artificial Sequence
  Description of Artificial Sequence: Synthetic oligonucleotide
ugcaacauggcgcacagcc

SEQ ID NO: 2661986 - RNA, 19 nt, Artificial Sequence
  Description of Artificial Sequence: Synthetic oligonucleotide
ugcagggugaacaggaugg

SEQ ID NO: 2661987 - RNA, 19 nt, Artificial Sequence
  Description of Artificial Sequence: Synthetic oligonucleotide
acaccagagccuuugaccc

SEQ ID NO: 2661988 - RNA, 19 nt, Artificial Sequence
  Description of Artificial Sequence: Synthetic oligonucleotide
uuguagaagagguccaagg

SEQ ID NO: 2661989 - RNA, 19 nt, Artificial Sequence
  Description of Artificial Sequence: Synthetic oligonucleotide
agcuucacaggcaagaagc

SEQ ID NO: 2661990 - RNA, 19 nt, Artificial Sequence
  Description of Artificial Sequence: Synthetic oligonucleotide
gagacgaugaaguagcuga

SEQ ID NO: 2661991 - RNA, 19 nt, Artificial Sequence
  Description of Artificial Sequence: Synthetic oligonucleotide
ugaacauggugaaacgaag

SEQ ID NO: 2661992 - RNA, 19 nt, Artificial Sequence
  Description of Artificial Sequence: Synthetic oligonucleotide
accaugaacauggugaaac

SEQ ID NO: 2661993 - RNA, 19 nt, Artificial Sequence
  Description of Artificial Sequence: Synthetic oligonucleotide
cauggugaaacgaagauga

SEQ ID NO: 2661994 - RNA, 19 nt, Artificial Sequence
  Description of Artificial Sequence: Synthetic oligonucleotide
aaucaaguaccacacugca

SEQ ID NO: 2661995 - RNA, 19 nt, Artificial Sequence
  Description of Artificial Sequence: Synthetic oligonucleotide
uguagcucccgaaacagug

SEQ ID NO: 2661996 - RNA, 19 nt, Artificial Sequence
  Description of Artificial Sequence: Synthetic oligonucleotide
  modified_base (7)..(7): a, c, u, g, unknown or other
gaugggnuccccgaggagg

SEQ ID NO: 2661997 - RNA, 19 nt, Artificial Sequence
  Description of Artificial Sequence: Synthetic oligonucleotide
gaagcagacgcacuuguag

SEQ ID NO: 2661998 - RNA, 19 nt, Artificial Sequence
  Description of Artificial Sequence: Synthetic oligonucleotide
aucaugaugaaccacccgu

SEQ ID NO: 2661999 - RNA, 19 nt, Artificial Sequence
  Description of Artificial Sequence: Synthetic oligonucleotide
gagccuuugacccacccgg

SEQ ID NO: 2662000 - RNA, 19 nt, Artificial Sequence
  Description of Artificial Sequence: Synthetic oligonucleotide
cucaccaccuccuucauag

SEQ ID NO: 2662001 - RNA, 19 nt, Artificial Sequence
  Description of Artificial Sequence: Synthetic oligonucleotide
uugagguaaaugauggaga

SEQ ID NO: 2662002 - RNA, 19 nt, Artificial Sequence
  Description of Artificial Sequence: Synthetic oligonucleotide
aacagugcaacauggcgca

SEQ ID NO: 2662003 - RNA, 19 nt, Artificial Sequence
  Description of Artificial Sequence: Synthetic oligonucleotide
gaaacgaagaugaggcugg

SEQ ID NO: 2662004 - RNA, 19 nt, Artificial Sequence
  Description of Artificial Sequence: Synthetic oligonucleotide
uagaagagguccaagggac

SEQ ID NO: 2662005 - RNA, 19 nt, Artificial Sequence
  Description of Artificial Sequence: Synthetic oligonucleotide
auggagacgaugaaguagc

SEQ ID NO: 2662006 - RNA, 19 nt, Artificial Sequence
  Description of Artificial Sequence: Synthetic oligonucleotide
agguaaaugauggagacga

SEQ ID NO: 2662007 - RNA, 19 nt, Artificial Sequence
  Description of Artificial Sequence: Synthetic oligonucleotide
gacaccagagccuuugacc

SEQ ID NO: 2662008 - RNA, 19 nt, Artificial Sequence
  Description of Artificial Sequence: Synthetic oligonucleotide
ugaaacgaagaugaggcug

SEQ ID NO: 2662009 - RNA, 19 nt, Artificial Sequence
  Description of Artificial Sequence: Synthetic oligonucleotide
ugagguaaaugauggagac

SEQ ID NO: 2662010 - RNA, 19 nt, Artificial Sequence
  Description of Artificial Sequence: Synthetic oligonucleotide
aacauggugaaacgaagau

SEQ ID NO: 2662011 - RNA, 19 nt, Artificial Sequence
  Description of Artificial Sequence: Synthetic oligonucleotide
ugugcaagaucucauuggu

SEQ ID NO: 2662012 - RNA, 19 nt, Artificial Sequence
  Description of Artificial Sequence: Synthetic oligonucleotide
  modified_base (19)..(19): a, c, u, g, unknown or other
gaaguagucaaugaugggn

SEQ ID NO: 2662013 - RNA, 19 nt, Artificial Sequence
  Description of Artificial Sequence: Synthetic oligonucleotide
ggugaaacgaagaugaggc

SEQ ID NO: 2662014 - RNA, 19 nt, Artificial Sequence
  Description of Artificial Sequence: Synthetic oligonucleotide
auagccacaaagaugagcu

SEQ ID NO: 2662015 - RNA, 19 nt, Artificial Sequence
  Description of Artificial Sequence: Synthetic oligonucleotide
gauggagacgaugaaguag

SEQ ID NO: 2662016 - RNA, 19 nt, Artificial Sequence
  Description of Artificial Sequence: Synthetic oligonucleotide
acggcaaucuuccgcaccc

SEQ ID NO: 2662017 - RNA, 19 nt, Artificial Sequence
  Description of Artificial Sequence: Synthetic oligonucleotide
gauggcuccguacaggcug

SEQ ID NO: 2662018 - RNA, 19 nt, Artificial Sequence
  Description of Artificial Sequence: Synthetic oligonucleotide
aggauggcuccguacaggc

SEQ ID NO: 2662019 - RNA, 19 nt, Artificial Sequence
  Description of Artificial Sequence: Synthetic oligonucleotide
aguagcugaggucgaagac

SEQ ID NO: 2662020 - RNA, 19 nt, Artificial Sequence
  Description of Artificial Sequence: Synthetic oligonucleotide
guggcgaucaugaugaacc

SEQ ID NO: 2662021 - RNA, 19 nt, Artificial Sequence
  Description of Artificial Sequence: Synthetic oligonucleotide
uggugaaacgaagaugagg

SEQ ID NO: 2662022 - RNA, 19 nt, Artificial Sequence
  Description of Artificial Sequence: Synthetic oligonucleotide
ugaaguagucaaugauggg

SEQ ID NO: 2662023 - RNA, 19 nt, Artificial Sequence
  Description of Artificial Sequence: Synthetic oligonucleotide
gaucucauuggucucuggc

SEQ ID NO: 2662024 - RNA, 19 nt, Artificial Sequence
  Description of Artificial Sequence: Synthetic oligonucleotide
caaagaugagcuucacagg

SEQ ID NO: 2662025 - RNA, 19 nt, Artificial Sequence
  Description of Artificial Sequence: Synthetic oligonucleotide
acgaagaugaggcuggccu

SEQ ID NO: 2662026 - RNA, 19 nt, Artificial Sequence
  Description of Artificial Sequence: Synthetic oligonucleotide
agguccaagggacagaaga

SEQ ID NO: 2662027 - RNA, 19 nt, Artificial Sequence
  Description of Artificial Sequence: Synthetic oligonucleotide
aggagggugacaccagagc

SEQ ID NO: 2662028 - RNA, 19 nt, Artificial Sequence
  Description of Artificial Sequence: Synthetic oligonucleotide
aaguagcugaggucgaaga

SEQ ID NO: 2662029 - RNA, 19 nt, Artificial Sequence
  Description of Artificial Sequence: Synthetic oligonucleotide
gauguagcucccgaaacag

SEQ ID NO: 2662030 - RNA, 19 nt, Artificial Sequence
  Description of Artificial Sequence: Synthetic oligonucleotide
ucaugaugaaccacccgug

SEQ ID NO: 2662031 - RNA, 19 nt, Artificial Sequence
  Description of Artificial Sequence: Synthetic oligonucleotide
aaucuuccgcacccucacc

SEQ ID NO: 2662032 - RNA, 19 nt, Artificial Sequence
  Description of Artificial Sequence: Synthetic oligonucleotide
aagcagacgcacuuguaga

SEQ ID NO: 2662033 - RNA, 19 nt, Artificial Sequence
  Description of Artificial Sequence: Synthetic oligonucleotide
uagcugaggucgaagacug

SEQ ID NO: 2662034 - RNA, 19 nt, Artificial Sequence
  Description of Artificial Sequence: Synthetic oligonucleotide
auggcgcacagccaggacg

SEQ ID NO: 2662035 - RNA, 19 nt, Artificial Sequence
  Description of Artificial Sequence: Synthetic oligonucleotide
gaucaugaugaaccacccg

SEQ ID NO: 2662036 - RNA, 19 nt, Artificial Sequence
  Description of Artificial Sequence: Synthetic oligonucleotide
  modified_base (16)..(16): a, c, u, g, unknown or other
guagucaaugaugggnucc

SEQ ID NO: 2662037 - RNA, 19 nt, Artificial Sequence
  Description of Artificial Sequence: Synthetic oligonucleotide
gaugaaccacccguggugg

SEQ ID NO: 2662038 - RNA, 19 nt, Artificial Sequence
  Description of Artificial Sequence: Synthetic oligonucleotide
acugggaagagcggcacgc

SEQ ID NO: 2662039 - RNA, 19 nt, Artificial Sequence
  Description of Artificial Sequence: Synthetic oligonucleotide
caugaugaaccacccgugg

SEQ ID NO: 2662040 - RNA, 19 nt, Artificial Sequence
  Description of Artificial Sequence: Synthetic oligonucleotide
uccaagggacagaagaaaa

SEQ ID NO: 2662041 - RNA, 19 nt, Artificial Sequence
  Description of Artificial Sequence: Synthetic oligonucleotide
uccucgaaguagcugcucc

SEQ ID NO: 2662042 - RNA, 19 nt, Artificial Sequence
  Description of Artificial Sequence: Synthetic oligonucleotide
guaaaugauggagacgaug

SEQ ID NO: 2662043 - RNA, 19 nt, Artificial Sequence
  Description of Artificial Sequence: Synthetic oligonucleotide
agcggcacgcgcgagaagc

SEQ ID NO: 2662044 - RNA, 19 nt, Artificial Sequence
  Description of Artificial Sequence: Synthetic oligonucleotide
  modified_base (18)..(18): a, c, u, g, unknown or other
aaguagucaaugaugggnu

SEQ ID NO: 2662045 - RNA, 19 nt, Artificial Sequence
  Description of Artificial Sequence: Synthetic oligonucleotide
gaagacugggaagagcggc

SEQ ID NO: 2662046 - RNA, 19 nt, Artificial Sequence
  Description of Artificial Sequence: Synthetic oligonucleotide
acgcgcgagaagcugagcg

SEQ ID NO: 2662047 - RNA, 19 nt, Artificial Sequence
  Description of Artificial Sequence: Synthetic oligonucleotide
aacgaagaugaggcuggcc

SEQ ID NO: 2662048 - RNA, 19 nt, Artificial Sequence
  Description of Artificial Sequence: Synthetic oligonucleotide
guagaagagguccaaggga

SEQ ID NO: 2662049 - RNA, 19 nt, Artificial Sequence
  Description of Artificial Sequence: Synthetic oligonucleotide
caacauggcgcacagccag

SEQ ID NO: 2662050 - RNA, 19 nt, Artificial Sequence
  Description of Artificial Sequence: Synthetic oligonucleotide
agccgagcgggucugcugc

SEQ ID NO: 2662051 - RNA, 19 nt, Artificial Sequence
  Description of Artificial Sequence: Synthetic oligonucleotide
agagccuuugacccacccg

SEQ ID NO: 2662052 - RNA, 19 nt, Artificial Sequence
  Description of Artificial Sequence: Synthetic oligonucleotide
ugaggucgaagacugggaa

SEQ ID NO: 2662053 - RNA, 19 nt, Artificial Sequence
  Description of Artificial Sequence: Synthetic oligonucleotide
gacacagggagccgagcgg

SEQ ID NO: 2662054 - RNA, 19 nt, Artificial Sequence
  Description of Artificial Sequence: Synthetic oligonucleotide
cuccuucauagccacaaag

SEQ ID NO: 2662055 - RNA, 19 nt, Artificial Sequence
  Description of Artificial Sequence: Synthetic oligonucleotide
auacuugagguaaaugaug

SEQ ID NO: 2662056 - RNA, 19 nt, Artificial Sequence
  Description of Artificial Sequence: Synthetic oligonucleotide
agugcaacauggcgcacag

SEQ ID NO: 2662057 - RNA, 19 nt, Artificial Sequence
  Description of Artificial Sequence: Synthetic oligonucleotide
ugauggaugcccacggcaa

SEQ ID NO: 2662058 - RNA, 19 nt, Artificial Sequence
  Description of Artificial Sequence: Synthetic oligonucleotide
cuccagguuggacaggagg

SEQ ID NO: 2662059 - RNA, 19 nt, Artificial Sequence
  Description of Artificial Sequence: Synthetic oligonucleotide
gaagagguccaagggacag

SEQ ID NO: 2662060 - RNA, 19 nt, Artificial Sequence
  Description of Artificial Sequence: Synthetic oligonucleotide
agaagaaaaucaaguacca

SEQ ID NO: 2662061 - RNA, 19 nt, Artificial Sequence
  Description of Artificial Sequence: Synthetic oligonucleotide
ucucauuggucucuggcuu

SEQ ID NO: 2662062 - RNA, 19 nt, Artificial Sequence
  Description of Artificial Sequence: Synthetic oligonucleotide
gagguaaaugauggagacg

SEQ ID NO: 2662063 - RNA, 19 nt, Artificial Sequence
  Description of Artificial Sequence: Synthetic oligonucleotide
aaguaccacacugcagagg

SEQ ID NO: 2662064 - RNA, 19 nt, Artificial Sequence
  Description of Artificial Sequence: Synthetic oligonucleotide
caagggacagaagaaaauc

SEQ ID NO: 2662065 - RNA, 19 nt, Artificial Sequence
  Description of Artificial Sequence: Synthetic oligonucleotide
aaacgaagaugaggcuggc

SEQ ID NO: 2662066 - RNA, 19 nt, Artificial Sequence
  Description of Artificial Sequence: Synthetic oligonucleotide
gaggucgaagacugggaag

SEQ ID NO: 2662067 - RNA, 19 nt, Artificial Sequence
  Description of Artificial Sequence: Synthetic oligonucleotide
agggugaacaggauggcuc

SEQ ID NO: 2662068 - RNA, 19 nt, Artificial Sequence
  Description of Artificial Sequence: Synthetic oligonucleotide
acauggugaaacgaagaug

SEQ ID NO: 2662069 - RNA, 19 nt, Artificial Sequence
  Description of Artificial Sequence: Synthetic oligonucleotide
uggucucuggcuuccagac

SEQ ID NO: 2662070 - RNA, 19 nt, Artificial Sequence
  Description of Artificial Sequence: Synthetic oligonucleotide
uggggaaagacaugugcaa

SEQ ID NO: 2662071 - RNA, 19 nt, Artificial Sequence
  Description of Artificial Sequence: Synthetic oligonucleotide
uagcucccgaaacagugca

SEQ ID NO: 2662072 - RNA, 19 nt, Artificial Sequence
  Description of Artificial Sequence: Synthetic oligonucleotide
gacgcacuuguagaagagg

SEQ ID NO: 2662073 - RNA, 19 nt, Artificial Sequence
  Description of Artificial Sequence: Synthetic oligonucleotide
ggagggugacaccagagcc

SEQ ID NO: 2662074 - RNA, 19 nt, Artificial Sequence
  Description of Artificial Sequence: Synthetic oligonucleotide
ggagcuguugcugaaguag

SEQ ID NO: 2662075 - RNA, 19 nt, Artificial Sequence
  Description of Artificial Sequence: Synthetic oligonucleotide
ugugcgugauggaugccca

SEQ ID NO: 2662076 - RNA, 19 nt, Artificial Sequence
  Description of Artificial Sequence: Synthetic oligonucleotide
  modified_base (9)..(9): a, c, u, g, unknown or other
augaugggnuccccgagga

SEQ ID NO: 2662077 - RNA, 19 nt, Artificial Sequence
  Description of Artificial Sequence: Synthetic oligonucleotide
aagacaugugcaagaucuc

SEQ ID NO: 2662078 - RNA, 19 nt, Artificial Sequence
  Description of Artificial Sequence: Synthetic oligonucleotide
aucuuccgcacccucacca

SEQ ID NO: 2662079 - RNA, 19 nt, Artificial Sequence
  Description of Artificial Sequence: Synthetic oligonucleotide
ugcgugauggaugcccacg

SEQ ID NO: 2662080 - RNA, 19 nt, Artificial Sequence
  Description of Artificial Sequence: Synthetic oligonucleotide
gaaagacaugugcaagauc

SEQ ID NO: 2662081 - RNA, 19 nt, Artificial Sequence
  Description of Artificial Sequence: Synthetic oligonucleotide
agucgggccaggauguagc

SEQ ID NO: 2662082 - RNA, 19 nt, Artificial Sequence
  Description of Artificial Sequence: Synthetic oligonucleotide
ugaggcuggccuuggacac

SEQ ID NO: 2662083 - RNA, 19 nt, Artificial Sequence
  Description of Artificial Sequence: Synthetic oligonucleotide
gaaguagcugaggucgaag

SEQ ID NO: 2662084 - RNA, 19 nt, Artificial Sequence
  Description of Artificial Sequence: Synthetic oligonucleotide
uccagacuccucgaaguag

SEQ ID NO: 2662085 - RNA, 19 nt, Artificial Sequence
  Description of Artificial Sequence: Synthetic oligonucleotide
gcugaaguagucaaugaug

SEQ ID NO: 2662086 - RNA, 19 nt, Artificial Sequence
  Description of Artificial Sequence: Synthetic oligonucleotide
  modified_base (6)..(6): a, c, u, g, unknown or other
augggnuccccgaggaggc

SEQ ID NO: 2662087 - RNA, 19 nt, Artificial Sequence
  Description of Artificial Sequence: Synthetic oligonucleotide
aggcaagaagcagacgcac

SEQ ID NO: 2662088 - RNA, 19 nt, Artificial Sequence
  Description of Artificial Sequence: Synthetic oligonucleotide
gaacauggugaaacgaaga

SEQ ID NO: 2662089 - RNA, 19 nt, Artificial Sequence
  Description of Artificial Sequence: Synthetic oligonucleotide
uggcucauacuugagguaa

SEQ ID NO: 2662090 - RNA, 19 nt, Artificial Sequence
  Description of Artificial Sequence: Synthetic oligonucleotide
cuuugacccacccgguggc

SEQ ID NO: 2662091 - RNA, 19 nt, Artificial Sequence
  Description of Artificial Sequence: Synthetic oligonucleotide
aggucgaagacugggaaga

SEQ ID NO: 2662092 - RNA, 19 nt, Artificial Sequence
  Description of Artificial Sequence: Synthetic oligonucleotide
gugguagugguggugugcg

SEQ ID NO: 2662093 - RNA, 19 nt, Artificial Sequence
  Description of Artificial Sequence: Synthetic oligonucleotide
gaagcugagcgccagcucu

SEQ ID NO: 2662094 - RNA, 19 nt, Artificial Sequence
  Description of Artificial Sequence: Synthetic oligonucleotide
caaguaccacacugcagag

SEQ ID NO: 2662095 - RNA, 19 nt, Artificial Sequence
  Description of Artificial Sequence: Synthetic oligonucleotide
gcacuuguagaagaggucc

SEQ ID NO: 2662096 - RNA, 19 nt, Artificial Sequence
  Description of Artificial Sequence: Synthetic oligonucleotide
agacaugugcaagaucuca

SEQ ID NO: 2662097 - RNA, 19 nt, Artificial Sequence
  Description of Artificial Sequence: Synthetic oligonucleotide
  modified_base (11)..(11): a, c, u, g, unknown or other
caaugaugggnuccccgag

SEQ ID NO: 2662098 - RNA, 19 nt, Artificial Sequence
  Description of Artificial Sequence: Synthetic oligonucleotide
caaucuuccgcacccucac

SEQ ID NO: 2662099 - RNA, 19 nt, Artificial Sequence
  Description of Artificial Sequence: Synthetic oligonucleotide
ugggaagagcggcacgcgc

SEQ ID NO: 2662100 - RNA, 19 nt, Artificial Sequence
  Description of Artificial Sequence: Synthetic oligonucleotide
augaacauggugaaacgaa

SEQ ID NO: 2662101 - RNA, 19 nt, Artificial Sequence
  Description of Artificial Sequence: Synthetic oligonucleotide
ggcaagucgggccaggaug

SEQ ID NO: 2662102 - RNA, 19 nt, Artificial Sequence
  Description of Artificial Sequence: Synthetic oligonucleotide
acuugagguaaaugaugga

SEQ ID NO: 2662103 - RNA, 19 nt, Artificial Sequence
  Description of Artificial Sequence: Synthetic oligonucleotide
ccgaaacagugcaacaugg

SEQ ID NO: 2662104 - RNA, 19 nt, Artificial Sequence
  Description of Artificial Sequence: Synthetic oligonucleotide
ggacacagggagccgagcg

SEQ ID NO: 2662105 - RNA, 19 nt, Artificial Sequence
  Description of Artificial Sequence: Synthetic oligonucleotide
acacagggagccgagcggg

SEQ ID NO: 2662106 - RNA, 19 nt, Artificial Sequence
  Description of Artificial Sequence: Synthetic oligonucleotide
gccagcaggauacuggagc

SEQ ID NO: 2662107 - RNA, 19 nt, Artificial Sequence
  Description of Artificial Sequence: Synthetic oligonucleotide
acccucaccaccuccuuca

SEQ ID NO: 2662108 - RNA, 19 nt, Artificial Sequence
  Description of Artificial Sequence: Synthetic oligonucleotide
gaacaggauggcuccguac

SEQ ID NO: 2662109 - RNA, 19 nt, Artificial Sequence
  Description of Artificial Sequence: Synthetic oligonucleotide
  modified_base (8)..(8): a, c, u, g, unknown or other
ugaugggnuccccgaggag

SEQ ID NO: 2662110 - RNA, 19 nt, Artificial Sequence
  Description of Artificial Sequence: Synthetic oligonucleotide
gagcgggucugcugcaggg

SEQ ID NO: 2662111 - RNA, 19 nt, Artificial Sequence
  Description of Artificial Sequence: Synthetic oligonucleotide
cacagcuccuggcucauac

SEQ ID NO: 2662112 - RNA, 19 nt, Artificial Sequence
  Description of Artificial Sequence: Synthetic oligonucleotide
agaucucauuggucucugg

SEQ ID NO: 2662113 - RNA, 19 nt, Artificial Sequence
  Description of Artificial Sequence: Synthetic oligonucleotide
cauacuugagguaaaugau

SEQ ID NO: 2662114 - RNA, 19 nt, Artificial Sequence
  Description of Artificial Sequence: Synthetic oligonucleotide
agcuccacagcuccuggcu

SEQ ID NO: 2662115 - RNA, 19 nt, Artificial Sequence
  Description of Artificial Sequence: Synthetic oligonucleotide
agcagacgcacuuguagaa

SEQ ID NO: 2662116 - RNA, 19 nt, Artificial Sequence
  Description of Artificial Sequence: Synthetic oligonucleotide
gcgaucaugaugaaccacc

SEQ ID NO: 2662117 - RNA, 19 nt, Artificial Sequence
  Description of Artificial Sequence: Synthetic oligonucleotide
gacugggaagagcggcacg

SEQ ID NO: 2662118 - RNA, 19 nt, Artificial Sequence
  Description of Artificial Sequence: Synthetic oligonucleotide
aagacugggaagagcggca

SEQ ID NO: 2662119 - RNA, 19 nt, Artificial Sequence
  Description of Artificial Sequence: Synthetic oligonucleotide
gugauggaugcccacggca

SEQ ID NO: 2662120 - RNA, 19 nt, Artificial Sequence
  Description of Artificial Sequence: Synthetic oligonucleotide
uuccgcacccucaccaccu

SEQ ID NO: 2662121 - RNA, 19 nt, Artificial Sequence
  Description of Artificial Sequence: Synthetic oligonucleotide
gggacagaagaaaaucaag

SEQ ID NO: 2662122 - RNA, 19 nt, Artificial Sequence
  Description of Artificial Sequence: Synthetic oligonucleotide
aagucgggccaggauguag

SEQ ID NO: 2662123 - RNA, 19 nt, Artificial Sequence
  Description of Artificial Sequence: Synthetic oligonucleotide
ugcagaggccagcaggaua

SEQ ID NO: 2662124 - RNA, 19 nt, Artificial Sequence
  Description of Artificial Sequence: Synthetic oligonucleotide
ucucccaggcucagcgcag

SEQ ID NO: 2662125 - RNA, 19 nt, Artificial Sequence
  Description of Artificial Sequence: Synthetic oligonucleotide
aucaaguaccacacugcag

SEQ ID NO: 2662126 - RNA, 19 nt, Artificial Sequence
  Description of Artificial Sequence: Synthetic oligonucleotide
gaaccacccguggugguag

SEQ ID NO: 2662127 - RNA, 19 nt, Artificial Sequence
  Description of Artificial Sequence: Synthetic oligonucleotide
cuugguggggaaagacaug

SEQ ID NO: 2662128 - RNA, 19 nt, Artificial Sequence
  Description of Artificial Sequence: Synthetic oligonucleotide
acgcacuuguagaagaggu

SEQ ID NO: 2662129 - RNA, 19 nt, Artificial Sequence
  Description of Artificial Sequence: Synthetic oligonucleotide
ccaugaacauggugaaacg

SEQ ID NO: 2662130 - RNA, 19 nt, Artificial Sequence
  Description of Artificial Sequence: Synthetic oligonucleotide
ucucuggcuuccagacucc

SEQ ID NO: 2662131 - RNA, 19 nt, Artificial Sequence
  Description of Artificial Sequence: Synthetic oligonucleotide
gcugaggucgaagacuggg

SEQ ID NO: 2662132 - RNA, 19 nt, Artificial Sequence
  Description of Artificial Sequence: Synthetic oligonucleotide
gacgccaccggguggcgcc

SEQ ID NO: 2662133 - RNA, 19 nt, Artificial Sequence
  Description of Artificial Sequence: Synthetic oligonucleotide
ugaacaggauggcuccgua

SEQ ID NO: 2662134 - RNA, 19 nt, Artificial Sequence
  Description of Artificial Sequence: Synthetic oligonucleotide
uggcgaucaugaugaacca

SEQ ID NO: 2662135 - RNA, 19 nt, Artificial Sequence
  Description of Artificial Sequence: Synthetic oligonucleotide
ucccgaaacagugcaacau

SEQ ID NO: 2662136 - RNA, 19 nt, Artificial Sequence
  Description of Artificial Sequence: Synthetic oligonucleotide
gugugcgugauggaugccc

SEQ ID NO: 2662137 - RNA, 19 nt, Artificial Sequence
  Description of Artificial Sequence: Synthetic oligonucleotide
gggaaagacaugugcaaga

SEQ ID NO: 2662138 - RNA, 19 nt, Artificial Sequence
  Description of Artificial Sequence: Synthetic oligonucleotide
caugaacauggugaaacga

SEQ ID NO: 2662139 - RNA, 19 nt, Artificial Sequence
  Description of Artificial Sequence: Synthetic oligonucleotide
guggggaaagacaugugca

SEQ ID NO: 2662140 - RNA, 19 nt, Artificial Sequence
  Description of Artificial Sequence: Synthetic oligonucleotide
cagacgcacuuguagaaga

SEQ ID NO: 2662141 - RNA, 19 nt, Artificial Sequence
  Description of Artificial Sequence: Synthetic oligonucleotide
ccagacuccucgaaguagc

SEQ ID NO: 2662142 - RNA, 19 nt, Artificial Sequence
  Description of Artificial Sequence: Synthetic oligonucleotide
uuccagacuccucgaagua

SEQ ID NO: 2662143 - RNA, 19 nt, Artificial Sequence
  Description of Artificial Sequence: Synthetic oligonucleotide
cucauuggucucuggcuuc

SEQ ID NO: 2662144 - RNA, 19 nt, Artificial Sequence
  Description of Artificial Sequence: Synthetic oligonucleotide
agggacagaagaaaaucaa

SEQ ID NO: 2662145 - RNA, 19 nt, Artificial Sequence
  Description of Artificial Sequence: Synthetic oligonucleotide
gacagcuccacagcuccug

SEQ ID NO: 2662146 - RNA, 19 nt, Artificial Sequence
  Description of Artificial Sequence: Synthetic oligonucleotide
gggugaacaggauggcucc

SEQ ID NO: 2662147 - RNA, 19 nt, Artificial Sequence
  Description of Artificial Sequence: Synthetic oligonucleotide
ucuuccgcacccucaccac

SEQ ID NO: 2662148 - RNA, 19 nt, Artificial Sequence
  Description of Artificial Sequence: Synthetic oligonucleotide
agagguccaagggacagaa

SEQ ID NO: 2662149 - RNA, 19 nt, Artificial Sequence
  Description of Artificial Sequence: Synthetic oligonucleotide
acugcagaggccagcagga

SEQ ID NO: 2662150 - RNA, 19 nt, Artificial Sequence
  Description of Artificial Sequence: Synthetic oligonucleotide
uuugacccacccgguggcg

SEQ ID NO: 2662151 - RNA, 19 nt, Artificial Sequence
  Description of Artificial Sequence: Synthetic oligonucleotide
gcuuccagacuccucgaag

SEQ ID NO: 2662152 - RNA, 19 nt, Artificial Sequence
  Description of Artificial Sequence: Synthetic oligonucleotide
ccuuugacccacccggugg

SEQ ID NO: 2662153 - RNA, 19 nt, Artificial Sequence
  Description of Artificial Sequence: Synthetic oligonucleotide
cuuccgcacccucaccacc

SEQ ID NO: 2662154 - RNA, 19 nt, Artificial Sequence
  Description of Artificial Sequence: Synthetic oligonucleotide
guagcucccgaaacagugc

SEQ ID NO: 2662155 - RNA, 19 nt, Artificial Sequence
  Description of Artificial Sequence: Synthetic oligonucleotide
aagcugagcgccagcucuc

SEQ ID NO: 2662156 - RNA, 19 nt, Artificial Sequence
  Description of Artificial Sequence: Synthetic oligonucleotide
caggauggcuccguacagg

SEQ ID NO: 2662157 - RNA, 19 nt, Artificial Sequence
  Description of Artificial Sequence: Synthetic oligonucleotide
ggauguagcucccgaaaca

SEQ ID NO: 2662158 - RNA, 19 nt, Artificial Sequence
  Description of Artificial Sequence: Synthetic oligonucleotide
accuccuucauagccacaa

SEQ ID NO: 2662159 - RNA, 19 nt, Artificial Sequence
  Description of Artificial Sequence: Synthetic oligonucleotide
gucgaagacugggaagagc

SEQ ID NO: 2662160 - RNA, 19 nt, Artificial Sequence
  Description of Artificial Sequence: Synthetic oligonucleotide
agacgcacuuguagaagag

SEQ ID NO: 2662161 - RNA, 19 nt, Artificial Sequence
  Description of Artificial Sequence: Synthetic oligonucleotide
guggugugcgugauggaug

SEQ ID NO: 2662162 - RNA, 19 nt, Artificial Sequence
  Description of Artificial Sequence: Synthetic oligonucleotide
agcugagcgccagcucucc

SEQ ID NO: 2662163 - RNA, 19 nt, Artificial Sequence
  Description of Artificial Sequence: Synthetic oligonucleotide
ggugacaccagagccuuug

SEQ ID NO: 2662164 - RNA, 19 nt, Artificial Sequence
  Description of Artificial Sequence: Synthetic oligonucleotide
caggcaagaagcagacgca

SEQ ID NO: 2662165 - RNA, 19 nt, Artificial Sequence
  Description of Artificial Sequence: Synthetic oligonucleotide
cacccgguggcgaucauga

SEQ ID NO: 2662166 - RNA, 19 nt, Artificial Sequence
  Description of Artificial Sequence: Synthetic oligonucleotide
gcagaggccagcaggauac

SEQ ID NO: 2662167 - RNA, 19 nt, Artificial Sequence
  Description of Artificial Sequence: Synthetic oligonucleotide
gggaagagcggcacgcgcg

SEQ ID NO: 2662168 - RNA, 19 nt, Artificial Sequence
  Description of Artificial Sequence: Synthetic oligonucleotide
acuuguagaagagguccaa

SEQ ID NO: 2662169 - RNA, 19 nt, Artificial Sequence
  Description of Artificial Sequence: Synthetic oligonucleotide
gcgugauggaugcccacgg

SEQ ID NO: 2662170 - RNA, 19 nt, Artificial Sequence
  Description of Artificial Sequence: Synthetic oligonucleotide
guagcugaggucgaagacu

SEQ ID NO: 2662171 - RNA, 19 nt, Artificial Sequence
  Description of Artificial Sequence: Synthetic oligonucleotide
cugaggucgaagacuggga

SEQ ID NO: 2662172 - RNA, 19 nt, Artificial Sequence
  Description of Artificial Sequence: Synthetic oligonucleotide
ccgguggcgaucaugauga

SEQ ID NO: 2662173 - RNA, 19 nt, Artificial Sequence
  Description of Artificial Sequence: Synthetic oligonucleotide
caggauguagcucccgaaa

SEQ ID NO: 2662174 - RNA, 19 nt, Artificial Sequence
  Description of Artificial Sequence: Synthetic oligonucleotide
auggugaaacgaagaugag

SEQ ID NO: 2662175 - RNA, 19 nt, Artificial Sequence
  Description of Artificial Sequence: Synthetic oligonucleotide
cagagccuuugacccaccc

SEQ ID NO: 2662176 - RNA, 19 nt, Artificial Sequence
  Description of Artificial Sequence: Synthetic oligonucleotide
cagccaggacgccaccggg

SEQ ID NO: 2662177 - RNA, 19 nt, Artificial Sequence
  Description of Artificial Sequence: Synthetic oligonucleotide
uggagcuguugcugaagua

SEQ ID NO: 2662178 - RNA, 19 nt, Artificial Sequence
  Description of Artificial Sequence: Synthetic oligonucleotide
caggacgccaccggguggc

SEQ ID NO: 2662179 - RNA, 19 nt, Artificial Sequence
  Description of Artificial Sequence: Synthetic oligonucleotide
acacugcagaggccagcag

SEQ ID NO: 2662180 - RNA, 19 nt, Artificial Sequence
  Description of Artificial Sequence: Synthetic oligonucleotide
cucucccaggcucagcgca

SEQ ID NO: 2662181 - RNA, 19 nt, Artificial Sequence
  Description of Artificial Sequence: Synthetic oligonucleotide
ugaaccacccgugguggua

SEQ ID NO: 2662182 - RNA, 19 nt, Artificial Sequence
  Description of Artificial Sequence: Synthetic oligonucleotide
cccgaaacagugcaacaug

SEQ ID NO: 2662183 - RNA, 19 nt, Artificial Sequence
  Description of Artificial Sequence: Synthetic oligonucleotide
auggcuccguacaggcugg

SEQ ID NO: 2662184 - RNA, 19 nt, Artificial Sequence
  Description of Artificial Sequence: Synthetic oligonucleotide
cuuggacacagggagccga

SEQ ID NO: 2662185 - RNA, 19 nt, Artificial Sequence
  Description of Artificial Sequence: Synthetic oligonucleotide
agaggccagcaggauacug

SEQ ID NO: 2662186 - RNA, 19 nt, Artificial Sequence
  Description of Artificial Sequence: Synthetic oligonucleotide
cugggaagagcggcacgcg

SEQ ID NO: 2662187 - RNA, 19 nt, Artificial Sequence
  Description of Artificial Sequence: Synthetic oligonucleotide
cgaucaugaugaaccaccc

SEQ ID NO: 2662188 - RNA, 19 nt, Artificial Sequence
  Description of Artificial Sequence: Synthetic oligonucleotide
augaaccacccgugguggu

SEQ ID NO: 2662189 - RNA, 19 nt, Artificial Sequence
  Description of Artificial Sequence: Synthetic oligonucleotide
ggagacgaugaaguagcug

SEQ ID NO: 2662190 - RNA, 19 nt, Artificial Sequence
  Description of Artificial Sequence: Synthetic oligonucleotide
uggcuuccagacuccucga

SEQ ID NO: 2662191 - RNA, 19 nt, Artificial Sequence
  Description of Artificial Sequence: Synthetic oligonucleotide
ugcccacggcaaucuuccg

SEQ ID NO: 2662192 - RNA, 19 nt, Artificial Sequence
  Description of Artificial Sequence: Synthetic oligonucleotide
gccuuggacacagggagcc

SEQ ID NO: 2662193 - RNA, 19 nt, Artificial Sequence
  Description of Artificial Sequence: Synthetic oligonucleotide
uugacccacccgguggcga

SEQ ID NO: 2662194 - RNA, 19 nt, Artificial Sequence
  Description of Artificial Sequence: Synthetic oligonucleotide
ggugguagugguggugugc

SEQ ID NO: 2662195 - RNA, 19 nt, Artificial Sequence
  Description of Artificial Sequence: Synthetic oligonucleotide
cacaggcaagaagcagacg

SEQ ID NO: 2662196 - RNA, 19 nt, Artificial Sequence
  Description of Artificial Sequence: Synthetic oligonucleotide
uggacacagggagccgagc

SEQ ID NO: 2662197 - RNA, 19 nt, Artificial Sequence
  Description of Artificial Sequence: Synthetic oligonucleotide
agggugacaccagagccuu

SEQ ID NO: 2662198 - RNA, 19 nt, Artificial Sequence
  Description of Artificial Sequence: Synthetic oligonucleotide
acagugcaacauggcgcac

SEQ ID NO: 2662199 - RNA, 19 nt, Artificial Sequence
  Description of Artificial Sequence: Synthetic oligonucleotide
gcagacgcacuuguagaag

SEQ ID NO: 2662200 - RNA, 19 nt, Artificial Sequence
  Description of Artificial Sequence: Synthetic oligonucleotide
gcucagcgcagagagcagg

SEQ ID NO: 2662201 - RNA, 19 nt, Artificial Sequence
  Description of Artificial Sequence: Synthetic oligonucleotide
gugaaacgaagaugaggcu

SEQ ID NO: 2662202 - RNA, 19 nt, Artificial Sequence
  Description of Artificial Sequence: Synthetic oligonucleotide
gaagagcggcacgcgcgag

SEQ ID NO: 2662203 - RNA, 19 nt, Artificial Sequence
  Description of Artificial Sequence: Synthetic oligonucleotide
cacacugcagaggccagca

SEQ ID NO: 2662204 - RNA, 19 nt, Artificial Sequence
  Description of Artificial Sequence: Synthetic oligonucleotide
caggcucagcgcagagagc

SEQ ID NO: 2662205 - RNA, 19 nt, Artificial Sequence
  Description of Artificial Sequence: Synthetic oligonucleotide
ugacccacccgguggcgau

SEQ ID NO: 2662206 - RNA, 19 nt, Artificial Sequence
  Description of Artificial Sequence: Synthetic oligonucleotide
uagccacaaagaugagcuu

SEQ ID NO: 2662207 - RNA, 19 nt, Artificial Sequence
  Description of Artificial Sequence: Synthetic oligonucleotide
gugcaagaucucauugguc

SEQ ID NO: 2662208 - RNA, 19 nt, Artificial Sequence
  Description of Artificial Sequence: Synthetic oligonucleotide
gagggugacaccagagccu

SEQ ID NO: 2662209 - RNA, 19 nt, Artificial Sequence
  Description of Artificial Sequence: Synthetic oligonucleotide
aaccacccguggugguagu

SEQ ID NO: 2662210 - RNA, 19 nt, Artificial Sequence
  Description of Artificial Sequence: Synthetic oligonucleotide
ugguagugguggugugcgu

SEQ ID NO: 2662211 - RNA, 19 nt, Artificial Sequence
  Description of Artificial Sequence: Synthetic oligonucleotide
gcucccgaaacagugcaac

SEQ ID NO: 2662212 - RNA, 19 nt, Artificial Sequence
  Description of Artificial Sequence: Synthetic oligonucleotide
ugguggugugcgugaugga

SEQ ID NO: 2662213 - RNA, 19 nt, Artificial Sequence
  Description of Artificial Sequence: Synthetic oligonucleotide
aggcaagucgggccaggau

SEQ ID NO: 2662214 - RNA, 19 nt, Artificial Sequence
  Description of Artificial Sequence: Synthetic oligonucleotide
auguagcucccgaaacagu

SEQ ID NO: 2662215 - RNA, 19 nt, Artificial Sequence
  Description of Artificial Sequence: Synthetic oligonucleotide
gagguccaagggacagaag

SEQ ID NO: 2662216 - RNA, 19 nt, Artificial Sequence
  Description of Artificial Sequence: Synthetic oligonucleotide
ucagcgcagagagcagguc

SEQ ID NO: 2662217 - RNA, 19 nt, Artificial Sequence
  Description of Artificial Sequence: Synthetic oligonucleotide
gcccacggcaaucuuccgc

SEQ ID NO: 2662218 - RNA, 19 nt, Artificial Sequence
  Description of Artificial Sequence: Synthetic oligonucleotide
cccgguggcgaucaugaug

SEQ ID NO: 2662219 - RNA, 19 nt, Artificial Sequence
  Description of Artificial Sequence: Synthetic oligonucleotide
gguggcgaucaugaugaac

SEQ ID NO: 2662220 - RNA, 19 nt, Artificial Sequence
  Description of Artificial Sequence: Synthetic oligonucleotide
ggaagagcggcacgcgcga

SEQ ID NO: 2662221 - RNA, 19 nt, Artificial Sequence
  Description of Artificial Sequence: Synthetic oligonucleotide
cuggcucauacuugaggua

SEQ ID NO: 2662222 - RNA, 19 nt, Artificial Sequence
  Description of Artificial Sequence: Synthetic oligonucleotide
cccacggcaaucuuccgca

SEQ ID NO: 2662223 - RNA, 19 nt, Artificial Sequence
  Description of Artificial Sequence: Synthetic oligonucleotide
gccaggacgccaccgggug

SEQ ID NO: 2662224 - RNA, 19 nt, Artificial Sequence
  Description of Artificial Sequence: Synthetic oligonucleotide
ggucgaagacugggaagag

SEQ ID NO: 2662225 - RNA, 19 nt, Artificial Sequence
  Description of Artificial Sequence: Synthetic oligonucleotide
cgaagacugggaagagcgg

SEQ ID NO: 2662226 - RNA, 19 nt, Artificial Sequence
  Description of Artificial Sequence: Synthetic oligonucleotide
ggcaaucuuccgcacccuc

SEQ ID NO: 2662227 - RNA, 19 nt, Artificial Sequence
  Description of Artificial Sequence: Synthetic oligonucleotide
acuccucgaaguagcugcu

SEQ ID NO: 2662228 - RNA, 19 nt, Artificial Sequence
  Description of Artificial Sequence: Synthetic oligonucleotide
agcugaggucgaagacugg

SEQ ID NO: 2662229 - RNA, 19 nt, Artificial Sequence
  Description of Artificial Sequence: Synthetic oligonucleotide
cagcaggauacuggagcug

SEQ ID NO: 2662230 - RNA, 19 nt, Artificial Sequence
  Description of Artificial Sequence: Synthetic oligonucleotide
gcgcgagaagcugagcgcc

SEQ ID NO: 2662231 - RNA, 19 nt, Artificial Sequence
  Description of Artificial Sequence: Synthetic oligonucleotide
agaagcagacgcacuugua

SEQ ID NO: 2662232 - RNA, 19 nt, Artificial Sequence
  Description of Artificial Sequence: Synthetic oligonucleotide
gaggcaagucgggccagga

SEQ ID NO: 2662233 - RNA, 19 nt, Artificial Sequence
  Description of Artificial Sequence: Synthetic oligonucleotide
guggugguagugguggugu

SEQ ID NO: 2662234 - RNA, 19 nt, Artificial Sequence
  Description of Artificial Sequence: Synthetic oligonucleotide
gccuuugacccacccggug

SEQ ID NO: 2662235 - RNA, 19 nt, Artificial Sequence
  Description of Artificial Sequence: Synthetic oligonucleotide
gccgggacagcuccacagc

SEQ ID NO: 2662236 - RNA, 19 nt, Artificial Sequence
  Description of Artificial Sequence: Synthetic oligonucleotide
ccuucauagccacaaagau

SEQ ID NO: 2662237 - RNA, 19 nt, Artificial Sequence
  Description of Artificial Sequence: Synthetic oligonucleotide
ggcgaucaugaugaaccac

SEQ ID NO: 2662238 - RNA, 19 nt, Artificial Sequence
  Description of Artificial Sequence: Synthetic oligonucleotide
uccgcacccucaccaccuc

SEQ ID NO: 2662239 - RNA, 19 nt, Artificial Sequence
  Description of Artificial Sequence: Synthetic oligonucleotide
caccggguggcgccgggac

SEQ ID NO: 2662240 - RNA, 19 nt, Artificial Sequence
  Description of Artificial Sequence: Synthetic oligonucleotide
gcaagaagcagacgcacuu

SEQ ID NO: 2662241 - RNA, 19 nt, Artificial Sequence
  Description of Artificial Sequence: Synthetic oligonucleotide
aggaggcaagucgggccag

SEQ ID NO: 2662242 - RNA, 19 nt, Artificial Sequence
  Description of Artificial Sequence: Synthetic oligonucleotide
ggaaagacaugugcaagau

SEQ ID NO: 2662243 - RNA, 19 nt, Artificial Sequence
  Description of Artificial Sequence: Synthetic oligonucleotide
accggguggcgccgggaca

SEQ ID NO: 2662244 - RNA, 19 nt, Artificial Sequence
  Description of Artificial Sequence: Synthetic oligonucleotide
gcuucacaggcaagaagca

SEQ ID NO: 2662245 - RNA, 19 nt, Artificial Sequence
  Description of Artificial Sequence: Synthetic oligonucleotide
gccaggauguagcucccga

SEQ ID NO: 2662246 - RNA, 19 nt, Artificial Sequence
  Description of Artificial Sequence: Synthetic oligonucleotide
uagugguggugugcgugau

SEQ ID NO: 2662247 - RNA, 19 nt, Artificial Sequence
  Description of Artificial Sequence: Synthetic oligonucleotide
ccacccguggugguagugg

SEQ ID NO: 2662248 - RNA, 19 nt, Artificial Sequence
  Description of Artificial Sequence: Synthetic oligonucleotide
ucgggccaggauguagcuc

SEQ ID NO: 2662249 - RNA, 19 nt, Artificial Sequence
  Description of Artificial Sequence: Synthetic oligonucleotide
cccgaggaggcaagucggg

SEQ ID NO: 2662250 - RNA, 19 nt, Artificial Sequence
  Description of Artificial Sequence: Synthetic oligonucleotide
  modified_base (5)..(5): a, c, u, g, unknown or other
ugggnuccccgaggaggca

SEQ ID NO: 2662251 - RNA, 19 nt, Artificial Sequence
  Description of Artificial Sequence: Synthetic oligonucleotide
agcgggucugcugcagggu

SEQ ID NO: 2662252 - RNA, 19 nt, Artificial Sequence
  Description of Artificial Sequence: Synthetic oligonucleotide
ccuugguggggaaagacau

SEQ ID NO: 2662253 - RNA, 19 nt, Artificial Sequence
  Description of Artificial Sequence: Synthetic oligonucleotide
gcuccguacaggcuggccu

SEQ ID NO: 2662254 - RNA, 19 nt, Artificial Sequence
  Description of Artificial Sequence: Synthetic oligonucleotide
cucagcgcagagagcaggu

SEQ ID NO: 2662255 - RNA, 19 nt, Artificial Sequence
  Description of Artificial Sequence: Synthetic oligonucleotide
gagcggcacgcgcgagaag

SEQ ID NO: 2662256 - RNA, 19 nt, Artificial Sequence
  Description of Artificial Sequence: Synthetic oligonucleotide
  modified_base (3)..(3): a, c, u, g, unknown or other
ggnuccccgaggaggcaag

SEQ ID NO: 2662257 - RNA, 19 nt, Artificial Sequence
  Description of Artificial Sequence: Synthetic oligonucleotide
ggccuugguggggaaagac

SEQ ID NO: 2662258 - RNA, 19 nt, Artificial Sequence
  Description of Artificial Sequence: Synthetic oligonucleotide
agccaggacgccaccgggu

SEQ ID NO: 2662259 - RNA, 19 nt, Artificial Sequence
  Description of Artificial Sequence: Synthetic oligonucleotide
accacccguggugguagug

SEQ ID NO: 2662260 - RNA, 19 nt, Artificial Sequence
  Description of Artificial Sequence: Synthetic oligonucleotide
ggaggcaagucgggccagg

SEQ ID NO: 2662261 - RNA, 19 nt, Artificial Sequence
  Description of Artificial Sequence: Synthetic oligonucleotide
cgcacuuguagaagagguc

SEQ ID NO: 2662262 - RNA, 19 nt, Artificial Sequence
  Description of Artificial Sequence: Synthetic oligonucleotide
agccuuugacccacccggu

SEQ ID NO: 2662263 - RNA, 19 nt, Artificial Sequence
  Description of Artificial Sequence: Synthetic oligonucleotide
agggagccgagcgggucug

SEQ ID NO: 2662264 - RNA, 19 nt, Artificial Sequence
  Description of Artificial Sequence: Synthetic oligonucleotide
cgcgcgagaagcugagcgc

SEQ ID NO: 2662265 - RNA, 19 nt, Artificial Sequence
  Description of Artificial Sequence: Synthetic oligonucleotide
gccuugguggggaaagaca

SEQ ID NO: 2662266 - RNA, 19 nt, Artificial Sequence
  Description of Artificial Sequence: Synthetic oligonucleotide
cuccucgaaguagcugcuc

SEQ ID NO: 2662267 - RNA, 19 nt, Artificial Sequence
  Description of Artificial Sequence: Synthetic oligonucleotide
acccacccgguggcgauca

SEQ ID NO: 2662268 - RNA, 19 nt, Artificial Sequence
  Description of Artificial Sequence: Synthetic oligonucleotide
gugaacaggauggcuccgu

SEQ ID NO: 2662269 - RNA, 19 nt, Artificial Sequence
  Description of Artificial Sequence: Synthetic oligonucleotide
cgugauggaugcccacggc

SEQ ID NO: 2662270 - RNA, 19 nt, Artificial Sequence
  Description of Artificial Sequence: Synthetic oligonucleotide
ccaggacgccaccgggugg

SEQ ID NO: 2662271 - RNA, 19 nt, Artificial Sequence
  Description of Artificial Sequence: Synthetic oligonucleotide
cagacuccucgaaguagcu

SEQ ID NO: 2662272 - RNA, 19 nt, Artificial Sequence
  Description of Artificial Sequence: Synthetic oligonucleotide
aggacgccaccggguggcg

SEQ ID NO: 2662273 - RNA, 19 nt, Artificial Sequence
  Description of Artificial Sequence: Synthetic oligonucleotide
ccucgaaguagcugcucca

SEQ ID NO: 2662274 - RNA, 19 nt, Artificial Sequence
  Description of Artificial Sequence: Synthetic oligonucleotide
gguggugugcgugauggau

SEQ ID NO: 2662275 - RNA, 19 nt, Artificial Sequence
  Description of Artificial Sequence: Synthetic oligonucleotide
cacgcgcgagaagcugagc

SEQ ID NO: 2662276 - RNA, 19 nt, Artificial Sequence
  Description of Artificial Sequence: Synthetic oligonucleotide
acccguggugguaguggug

SEQ ID NO: 2662277 - RNA, 19 nt, Artificial Sequence
  Description of Artificial Sequence: Synthetic oligonucleotide
cgccgggacagcuccacag

SEQ ID NO: 2662278 - RNA, 19 nt, Artificial Sequence
  Description of Artificial Sequence: Synthetic oligonucleotide
ccgaggaggcaagucgggc

SEQ ID NO: 2662279 - RNA, 19 nt, Artificial Sequence
  Description of Artificial Sequence: Synthetic oligonucleotide
gcugagcgccagcucuccc

SEQ ID NO: 2662280 - RNA, 19 nt, Artificial Sequence
  Description of Artificial Sequence: Synthetic oligonucleotide
ccaagggacagaagaaaau

SEQ ID NO: 2662281 - RNA, 19 nt, Artificial Sequence
  Description of Artificial Sequence: Synthetic oligonucleotide
ccagcaggauacuggagcu

SEQ ID NO: 2662282 - RNA, 19 nt, Artificial Sequence
  Description of Artificial Sequence: Synthetic oligonucleotide
ccuuggacacagggagccg

SEQ ID NO: 2662283 - RNA, 19 nt, Artificial Sequence
  Description of Artificial Sequence: Synthetic oligonucleotide
gcaagucgggccaggaugu

SEQ ID NO: 2662284 - RNA, 19 nt, Artificial Sequence
  Description of Artificial Sequence: Synthetic oligonucleotide
gucgggccaggauguagcu

SEQ ID NO: 2662285 - RNA, 19 nt, Artificial Sequence
  Description of Artificial Sequence: Synthetic oligonucleotide
ggccaggauguagcucccg

SEQ ID NO: 2662286 - RNA, 19 nt, Artificial Sequence
  Description of Artificial Sequence: Synthetic oligonucleotide
gugcaacauggcgcacagc

SEQ ID NO: 2662287 - RNA, 19 nt, Artificial Sequence
  Description of Artificial Sequence: Synthetic oligonucleotide
uggcgccgggacagcucca

SEQ ID NO: 2662288 - RNA, 19 nt, Artificial Sequence
  Description of Artificial Sequence: Synthetic oligonucleotide
uggcuccguacaggcuggc

SEQ ID NO: 2662289 - RNA, 19 nt, Artificial Sequence
  Description of Artificial Sequence: Synthetic oligonucleotide
acgccaccggguggcgccg

SEQ ID NO: 2662290 - RNA, 19 nt, Artificial Sequence
  Description of Artificial Sequence: Synthetic oligonucleotide
acccgguggcgaucaugau

SEQ ID NO: 2662291 - RNA, 19 nt, Artificial Sequence
  Description of Artificial Sequence: Synthetic oligonucleotide
cacccguggugguaguggu

SEQ ID NO: 2662292 - RNA, 19 nt, Artificial Sequence
  Description of Artificial Sequence: Synthetic oligonucleotide
ccaggauguagcucccgaa

SEQ ID NO: 2662293 - RNA, 19 nt, Artificial Sequence
  Description of Artificial Sequence: Synthetic oligonucleotide
cuccguacaggcuggccuu

SEQ ID NO: 2662294 - RNA, 19 nt, Artificial Sequence
  Description of Artificial Sequence: Synthetic oligonucleotide
ccacaaagaugagcuucac

SEQ ID NO: 2662295 - RNA, 19 nt, Artificial Sequence
  Description of Artificial Sequence: Synthetic oligonucleotide
ggcucagcgcagagagcag

SEQ ID NO: 2662296 - RNA, 19 nt, Artificial Sequence
  Description of Artificial Sequence: Synthetic oligonucleotide
cagcucucccaggcucagc

SEQ ID NO: 2662297 - RNA, 19 nt, Artificial Sequence
  Description of Artificial Sequence: Synthetic oligonucleotide
ccggguggcgccgggacag

SEQ ID NO: 2662298 - RNA, 19 nt, Artificial Sequence
  Description of Artificial Sequence: Synthetic oligonucleotide
cgagcgggucugcugcagg

SEQ ID NO: 2662299 - RNA, 19 nt, Artificial Sequence
  Description of Artificial Sequence: Synthetic oligonucleotide
ggcuccguacaggcuggcc

SEQ ID NO: 2662300 - RNA, 19 nt, Artificial Sequence
  Description of Artificial Sequence: Synthetic oligonucleotide
ggcaagaagcagacgcacu

SEQ ID NO: 2662301 - RNA, 19 nt, Artificial Sequence
  Description of Artificial Sequence: Synthetic oligonucleotide
cauuggucucuggcuucca

SEQ ID NO: 2662302 - RNA, 19 nt, Artificial Sequence
  Description of Artificial Sequence: Synthetic oligonucleotide
cagggagccgagcgggucu

SEQ ID NO: 2662303 - RNA, 19 nt, Artificial Sequence
  Description of Artificial Sequence: Synthetic oligonucleotide
ggcucauacuugagguaaa

SEQ ID NO: 2662304 - RNA, 19 nt, Artificial Sequence
  Description of Artificial Sequence: Synthetic oligonucleotide
  modified_base (4)..(4): a, c, u, g, unknown or other
gggnuccccgaggaggcaa

SEQ ID NO: 2662305 - RNA, 19 nt, Artificial Sequence
  Description of Artificial Sequence: Synthetic oligonucleotide
ggugugcgugauggaugcc

SEQ ID NO: 2662306 - RNA, 19 nt, Artificial Sequence
  Description of Artificial Sequence: Synthetic oligonucleotide
  modified_base (2)..(2): a, c, u, g, unknown or other
gnuccccgaggaggcaagu

SEQ ID NO: 2662307 - RNA, 19 nt, Artificial Sequence
  Description of Artificial Sequence: Synthetic oligonucleotide
cgggacagcuccacagcuc

SEQ ID NO: 2662308 - RNA, 19 nt, Artificial Sequence
  Description of Artificial Sequence: Synthetic oligonucleotide
ccgcacccucaccaccucc

SEQ ID NO: 2662309 - RNA, 19 nt, Artificial Sequence
  Description of Artificial Sequence: Synthetic oligonucleotide
gguaaaugauggagacgau

SEQ ID NO: 2662310 - RNA, 19 nt, Artificial Sequence
  Description of Artificial Sequence: Synthetic oligonucleotide
ggacgccaccggguggcgc

SEQ ID NO: 2662311 - RNA, 19 nt, Artificial Sequence
  Description of Artificial Sequence: Synthetic oligonucleotide
caagucgggccaggaugua

SEQ ID NO: 2662312 - RNA, 19 nt, Artificial Sequence
  Description of Artificial Sequence: Synthetic oligonucleotide
ccgagcgggucugcugcag

SEQ ID NO: 2662313 - RNA, 19 nt, Artificial Sequence
  Description of Artificial Sequence: Synthetic oligonucleotide
cgcagagagcagguccaug

SEQ ID NO: 2662314 - RNA, 19 nt, Artificial Sequence
  Description of Artificial Sequence: Synthetic oligonucleotide
gccgagcgggucugcugca

SEQ ID NO: 2662315 - RNA, 19 nt, Artificial Sequence
  Description of Artificial Sequence: Synthetic oligonucleotide
ggauggcuccguacaggcu

SEQ ID NO: 2662316 - RNA, 19 nt, Artificial Sequence
  Description of Artificial Sequence: Synthetic oligonucleotide
ccgggacagcuccacagcu

SEQ ID NO: 2662317 - RNA, 19 nt, Artificial Sequence
  Description of Artificial Sequence: Synthetic oligonucleotide
gcuggccuugguggggaaa

SEQ ID NO: 2662318 - RNA, 19 nt, Artificial Sequence
  Description of Artificial Sequence: Synthetic oligonucleotide
cgcgagaagcugagcgcca

SEQ ID NO: 2662319 - RNA, 19 nt, Artificial Sequence
  Description of Artificial Sequence: Synthetic oligonucleotide
cccaggcucagcgcagaga

SEQ ID NO: 2662320 - RNA, 19 nt, Artificial Sequence
  Description of Artificial Sequence: Synthetic oligonucleotide
gggagccgagcgggucugc

SEQ ID NO: 2662321 - RNA, 19 nt, Artificial Sequence
  Description of Artificial Sequence: Synthetic oligonucleotide
ggagccgagcgggucugcu

SEQ ID NO: 2662322 - RNA, 19 nt, Artificial Sequence
  Description of Artificial Sequence: Synthetic oligonucleotide
gcgccgggacagcuccaca

SEQ ID NO: 2662323 - RNA, 19 nt, Artificial Sequence
  Description of Artificial Sequence: Synthetic oligonucleotide
ccucaccaccuccuucaua

SEQ ID NO: 2662324 - RNA, 19 nt, Artificial Sequence
  Description of Artificial Sequence: Synthetic oligonucleotide
cugcagaggccagcaggau

SEQ ID NO: 2662325 - RNA, 19 nt, Artificial Sequence
  Description of Artificial Sequence: Synthetic oligonucleotide
cggcacgcgcgagaagcug

SEQ ID NO: 2662326 - RNA, 19 nt, Artificial Sequence
  Description of Artificial Sequence: Synthetic oligonucleotide
ggacagcuccacagcuccu

SEQ ID NO: 2662327 - RNA, 19 nt, Artificial Sequence
  Description of Artificial Sequence: Synthetic oligonucleotide
gcggcacgcgcgagaagcu

SEQ ID NO: 2662328 - RNA, 19 nt, Artificial Sequence
  Description of Artificial Sequence: Synthetic oligonucleotide
gcgcagagagcagguccau

SEQ ID NO: 2662329 - RNA, 19 nt, Artificial Sequence
  Description of Artificial Sequence: Synthetic oligonucleotide
cggguggcgccgggacagc

SEQ ID NO: 2662330 - RNA, 19 nt, Artificial Sequence
  Description of Artificial Sequence: Synthetic oligonucleotide
cgguggcgaucaugaugaa

SEQ ID NO: 2662331 - RNA, 19 nt, Artificial Sequence
  Description of Artificial Sequence: Synthetic oligonucleotide
gggugacaccagagccuuu

SEQ ID NO: 2662332 - RNA, 19 nt, Artificial Sequence
  Description of Artificial Sequence: Synthetic oligonucleotide
cggcaaucuuccgcacccu

SEQ ID NO: 2662333 - RNA, 19 nt, Artificial Sequence
  Description of Artificial Sequence: Synthetic oligonucleotide
cccacccgguggcgaucau

SEQ ID NO: 2662334 - RNA, 19 nt, Artificial Sequence
  Description of Artificial Sequence: Synthetic oligonucleotide
  modified_base (1)..(1): a, c, u, g, unknown or other
nuccccgaggaggcaaguc

SEQ ID NO: 2662335 - RNA, 19 nt, Artificial Sequence
  Description of Artificial Sequence: Synthetic oligonucleotide
auauuccucaaucagaggc

SEQ ID NO: 2662336 - RNA, 19 nt, Artificial Sequence
  Description of Artificial Sequence: Synthetic oligonucleotide
uuauuuauuaaaauuauau

SEQ ID NO: 2662337 - RNA, 19 nt, Artificial Sequence
  Description of Artificial Sequence: Synthetic oligonucleotide
uuuaauaucaaugaaugca

SEQ ID NO: 2662338 - RNA, 19 nt, Artificial Sequence
  Description of Artificial Sequence: Synthetic oligonucleotide
uuuaguugugucuugauug

SEQ ID NO: 2662339 - RNA, 19 nt, Artificial Sequence
  Description of Artificial Sequence: Synthetic oligonucleotide
aauaucaguacacacacaa

SEQ ID NO: 2662340 - RNA, 19 nt, Artificial Sequence
  Description of Artificial Sequence: Synthetic oligonucleotide
uuaauaucaguacacacac

SEQ ID NO: 2662341 - RNA, 19 nt, Artificial Sequence
  Description of Artificial Sequence: Synthetic oligonucleotide
uauauaagggcuuuaauau

SEQ ID NO: 2662342 - RNA, 19 nt, Artificial Sequence
  Description of Artificial Sequence: Synthetic oligonucleotide
uucuauugcgccaacagcc

SEQ ID NO: 2662343 - RNA, 19 nt, Artificial Sequence
  Description of Artificial Sequence: Synthetic oligonucleotide
uauaagggcuuuaauauca

SEQ ID NO: 2662344 - RNA, 19 nt, Artificial Sequence
  Description of Artificial Sequence: Synthetic oligonucleotide
aaggcagaaagacugugac

SEQ ID NO: 2662345 - RNA, 19 nt, Artificial Sequence
  Description of Artificial Sequence: Synthetic oligonucleotide
aacucaaguaugccguucc

SEQ ID NO: 2662346 - RNA, 19 nt, Artificial Sequence
  Description of Artificial Sequence: Synthetic oligonucleotide
uauauuacuucauuuaaaa

SEQ ID NO: 2662347 - RNA, 19 nt, Artificial Sequence
  Description of Artificial Sequence: Synthetic oligonucleotide
aaauauuccucaaucagag

SEQ ID NO: 2662348 - RNA, 19 nt, Artificial Sequence
  Description of Artificial Sequence: Synthetic oligonucleotide
uuauauaagggcuuuaaua

SEQ ID NO: 2662349 - RNA, 19 nt, Artificial Sequence
  Description of Artificial Sequence: Synthetic oligonucleotide
aaugaccugaccuuggcca

SEQ ID NO: 2662350 - RNA, 19 nt, Artificial Sequence
  Description of Artificial Sequence: Synthetic oligonucleotide
gaaaagcggauucagaaug

SEQ ID NO: 2662351 - RNA, 19 nt, Artificial Sequence
  Description of Artificial Sequence: Synthetic oligonucleotide
ucuuugacagaacaccccg

SEQ ID NO: 2662352 - RNA, 19 nt, Artificial Sequence
  Description of Artificial Sequence: Synthetic oligonucleotide
aauaucaaugaaugcacgu

SEQ ID NO: 2662353 - RNA, 19 nt, Artificial Sequence
  Description of Artificial Sequence: Synthetic oligonucleotide
aaucuuugacagaacaccc

SEQ ID NO: 2662354 - RNA, 19 nt, Artificial Sequence
  Description of Artificial Sequence: Synthetic oligonucleotide
aacgugugcguucaaagag

SEQ ID NO: 2662355 - RNA, 19 nt, Artificial Sequence
  Description of Artificial Sequence: Synthetic oligonucleotide
aaaugcagccuucuagaac

SEQ ID NO: 2662356 - RNA, 19 nt, Artificial Sequence
  Description of Artificial Sequence: Synthetic oligonucleotide
ugugcguucaaagagagca

SEQ ID NO: 2662357 - RNA, 19 nt, Artificial Sequence
  Description of Artificial Sequence: Synthetic oligonucleotide
uguagguuguauagaaagg

SEQ ID NO: 2662358 - RNA, 19 nt, Artificial Sequence
  Description of Artificial Sequence: Synthetic oligonucleotide
ucagccaggagauucaaag

SEQ ID NO: 2662359 - RNA, 19 nt, Artificial Sequence
  Description of Artificial Sequence: Synthetic oligonucleotide
uaauaucaaugaaugcacg

SEQ ID NO: 2662360 - RNA, 19 nt, Artificial Sequence
  Description of Artificial Sequence: Synthetic oligonucleotide
aaagucagccaggagauuc

SEQ ID NO: 2662361 - RNA, 19 nt, Artificial Sequence
  Description of Artificial Sequence: Synthetic oligonucleotide
ucagaaugcaaucauuacu

SEQ ID NO: 2662362 - RNA, 19 nt, Artificial Sequence
  Description of Artificial Sequence: Synthetic oligonucleotide
uuguauagaaaggugaccc

SEQ ID NO: 2662363 - RNA, 19 nt, Artificial Sequence
  Description of Artificial Sequence: Synthetic oligonucleotide
uuaucaagugaaccaaaag

SEQ ID NO: 2662364 - RNA, 19 nt, Artificial Sequence
  Description of Artificial Sequence: Synthetic oligonucleotide
aaucauuacucuguaauca

SEQ ID NO: 2662365 - RNA, 19 nt, Artificial Sequence
  Description of Artificial Sequence: Synthetic oligonucleotide
agaacaccccgacaaagcc

SEQ ID NO: 2662366 - RNA, 19 nt, Artificial Sequence
  Description of Artificial Sequence: Synthetic oligonucleotide
uuaguugugucuugauugg

SEQ ID NO: 2662367 - RNA, 19 nt, Artificial Sequence
  Description of Artificial Sequence: Synthetic oligonucleotide
accaucaugagugucauuc

SEQ ID NO: 2662368 - RNA, 19 nt, Artificial Sequence
  Description of Artificial Sequence: Synthetic oligonucleotide
acgucauuacugcucaucc

SEQ ID NO: 2662369 - RNA, 19 nt, Artificial Sequence
  Description of Artificial Sequence: Synthetic oligonucleotide
uggguuaucaccacuuuug

SEQ ID NO: 2662370 - RNA, 19 nt, Artificial Sequence
  Description of Artificial Sequence: Synthetic oligonucleotide
guuccuuccaccauguucg

SEQ ID NO: 2662371 - RNA, 19 nt, Artificial Sequence
  Description of Artificial Sequence: Synthetic oligonucleotide
gcuauauuuauauaagggc

SEQ ID NO: 2662372 - RNA, 19 nt, Artificial Sequence
  Description of Artificial Sequence: Synthetic oligonucleotide
ugugacaaguuaauaucag

SEQ ID NO: 2662373 - RNA, 19 nt, Artificial Sequence
  Description of Artificial Sequence: Synthetic oligonucleotide
aauauuccucaaucagagg

SEQ ID NO: 2662374 - RNA, 19 nt, Artificial Sequence
  Description of Artificial Sequence: Synthetic oligonucleotide
ucgcuauauuuauauaagg

SEQ ID NO: 2662375 - RNA, 19 nt, Artificial Sequence
  Description of Artificial Sequence: Synthetic oligonucleotide
cagaaugcaaucauuacuc

SEQ ID NO: 2662376 - RNA, 19 nt, Artificial Sequence
  Description of Artificial Sequence: Synthetic oligonucleotide
auauaagggcuuuaauauc

SEQ ID NO: 2662377 - RNA, 19 nt, Artificial Sequence
  Description of Artificial Sequence: Synthetic oligonucleotide
ucuugauuggaaugcuugg

SEQ ID NO: 2662378 - RNA, 19 nt, Artificial Sequence
  Description of Artificial Sequence: Synthetic oligonucleotide
cuuuaauaucaaugaaugc

SEQ ID NO: 2662379 - RNA, 19 nt, Artificial Sequence
  Description of Artificial Sequence: Synthetic oligonucleotide
uguauagaaaggugacccg

SEQ ID NO: 2662380 - RNA, 19 nt, Artificial Sequence
  Description of Artificial Sequence: Synthetic oligonucleotide
caaucuuugacagaacacc

SEQ ID NO: 2662381 - RNA, 19 nt, Artificial Sequence
  Description of Artificial Sequence: Synthetic oligonucleotide
acagguuuuguccucgagg

SEQ ID NO: 2662382 - RNA, 19 nt, Artificial Sequence
  Description of Artificial Sequence: Synthetic oligonucleotide
caagugaaccaaaaggcag

SEQ ID NO: 2662383 - RNA, 19 nt, Artificial Sequence
  Description of Artificial Sequence: Synthetic oligonucleotide
augcauaccaucaugagug

SEQ ID NO: 2662384 - RNA, 19 nt, Artificial Sequence
  Description of Artificial Sequence: Synthetic oligonucleotide
auuacuucauuuaaaauau

SEQ ID NO: 2662385 - RNA, 19 nt, Artificial Sequence
  Description of Artificial Sequence: Synthetic oligonucleotide
aagggcuuuaauaucaaug

SEQ ID NO: 2662386 - RNA, 19 nt, Artificial Sequence
  Description of Artificial Sequence: Synthetic oligonucleotide
ugacccgccaucuaacagg

SEQ ID NO: 2662387 - RNA, 19 nt, Artificial Sequence
  Description of Artificial Sequence: Synthetic oligonucleotide
ugugucuugauuggaaugc

SEQ ID NO: 2662388 - RNA, 19 nt, Artificial Sequence
  Description of Artificial Sequence: Synthetic oligonucleotide
ucuuguagguuguauagaa

SEQ ID NO: 2662389 - RNA, 19 nt, Artificial Sequence
  Description of Artificial Sequence: Synthetic oligonucleotide
gauucaaagguggguaugg

SEQ ID NO: 2662390 - RNA, 19 nt, Artificial Sequence
  Description of Artificial Sequence: Synthetic oligonucleotide
acugggguucuauugcgcc

SEQ ID NO: 2662391 - RNA, 19 nt, Artificial Sequence
  Description of Artificial Sequence: Synthetic oligonucleotide
uuggaucacgucauuacug

SEQ ID NO: 2662392 - RNA, 19 nt, Artificial Sequence
  Description of Artificial Sequence: Synthetic oligonucleotide
gaaugcuuggaucacguca

SEQ ID NO: 2662393 - RNA, 19 nt, Artificial Sequence
  Description of Artificial Sequence: Synthetic oligonucleotide
aucauuacucuguaaucag

SEQ ID NO: 2662394 - RNA, 19 nt, Artificial Sequence
  Description of Artificial Sequence: Synthetic oligonucleotide
ugaaugcacguuaucaagu

SEQ ID NO: 2662395 - RNA, 19 nt, Artificial Sequence
  Description of Artificial Sequence: Synthetic oligonucleotide
guuaauaucaguacacaca

SEQ ID NO: 2662396 - RNA, 19 nt, Artificial Sequence
  Description of Artificial Sequence: Synthetic oligonucleotide
agaacgugugcguucaaag

SEQ ID NO: 2662397 - RNA, 19 nt, Artificial Sequence
  Description of Artificial Sequence: Synthetic oligonucleotide
aagaacucaaguaugccgu

SEQ ID NO: 2662398 - RNA, 19 nt, Artificial Sequence
  Description of Artificial Sequence: Synthetic oligonucleotide
uuuauauaagggcuuuaau

SEQ ID NO: 2662399 - RNA, 19 nt, Artificial Sequence
  Description of Artificial Sequence: Synthetic oligonucleotide
aacaccccgacaaagccac

SEQ ID NO: 2662400 - RNA, 19 nt, Artificial Sequence
  Description of Artificial Sequence: Synthetic oligonucleotide
gaaugcaaucauuacucug

SEQ ID NO: 2662401 - RNA, 19 nt, Artificial Sequence
  Description of Artificial Sequence: Synthetic oligonucleotide
uggguauggguuaucacca

SEQ ID NO: 2662402 - RNA, 19 nt, Artificial Sequence
  Description of Artificial Sequence: Synthetic oligonucleotide
uagguuguauagaaaggug

SEQ ID NO: 2662403 - RNA, 19 nt, Artificial Sequence
  Description of Artificial Sequence: Synthetic oligonucleotide
uuugacagaacaccccgac

SEQ ID NO: 2662404 - RNA, 19 nt, Artificial Sequence
  Description of Artificial Sequence: Synthetic oligonucleotide
ucaaguaugccguuccuuc

SEQ ID NO: 2662405 - RNA, 19 nt, Artificial Sequence
  Description of Artificial Sequence: Synthetic oligonucleotide
ugcgccaacagccaugaac

SEQ ID NO: 2662406 - RNA, 19 nt, Artificial Sequence
  Description of Artificial Sequence: Synthetic oligonucleotide
cauuacucuguaaucaguc

SEQ ID NO: 2662407 - RNA, 19 nt, Artificial Sequence
  Description of Artificial Sequence: Synthetic oligonucleotide
uuacugcucauccacauuu

SEQ ID NO: 2662408 - RNA, 19 nt, Artificial Sequence
  Description of Artificial Sequence: Synthetic oligonucleotide
uggaucacgucauuacugc

SEQ ID NO: 2662409 - RNA, 19 nt, Artificial Sequence
  Description of Artificial Sequence: Synthetic oligonucleotide
agcaucgcuauauuuauau

SEQ ID NO: 2662410 - RNA, 19 nt, Artificial Sequence
  Description of Artificial Sequence: Synthetic oligonucleotide
acaucaggccaccaccagc

SEQ ID NO: 2662411 - RNA, 19 nt, Artificial Sequence
  Description of Artificial Sequence: Synthetic oligonucleotide
accauguucgcaucaauga

SEQ ID NO: 2662412 - RNA, 19 nt, Artificial Sequence
  Description of Artificial Sequence: Synthetic oligonucleotide
ucagucuuuaguugugucu

SEQ ID NO: 2662413 - RNA, 19 nt, Artificial Sequence
  Description of Artificial Sequence: Synthetic oligonucleotide
uagugugcacaucaggcca

SEQ ID NO: 2662414 - RNA, 19 nt, Artificial Sequence
  Description of Artificial Sequence: Synthetic oligonucleotide
gucauuacugcucauccac

SEQ ID NO: 2662415 - RNA, 19 nt, Artificial Sequence
  Description of Artificial Sequence: Synthetic oligonucleotide
aaguuaauaucaguacaca

SEQ ID NO: 2662416 - RNA, 19 nt, Artificial Sequence
  Description of Artificial Sequence: Synthetic oligonucleotide
ucugaaaagcggauucaga

SEQ ID NO: 2662417 - RNA, 19 nt, Artificial Sequence
  Description of Artificial Sequence: Synthetic oligonucleotide
cuagugugcacaucaggcc

SEQ ID NO: 2662418 - RNA, 19 nt, Artificial Sequence
  Description of Artificial Sequence: Synthetic oligonucleotide
agcacaaugccuagugugc

SEQ ID NO: 2662419 - RNA, 19 nt, Artificial Sequence
  Description of Artificial Sequence: Synthetic oligonucleotide
uaaucagucuuuaguugug

SEQ ID NO: 2662420 - RNA, 19 nt, Artificial Sequence
  Description of Artificial Sequence: Synthetic oligonucleotide
gaacugggguucuauugcg

SEQ ID NO: 2662421 - RNA, 19 nt, Artificial Sequence
  Description of Artificial Sequence: Synthetic oligonucleotide
ugagugucauucuccagug

SEQ ID NO: 2662422 - RNA, 19 nt, Artificial Sequence
  Description of Artificial Sequence: Synthetic oligonucleotide
agccaggagauucaaaggu

SEQ ID NO: 2662423 - RNA, 19 nt, Artificial Sequence
  Description of Artificial Sequence: Synthetic oligonucleotide
aucgcuauauuuauauaag

SEQ ID NO: 2662424 - RNA, 19 nt, Artificial Sequence
  Description of Artificial Sequence: Synthetic oligonucleotide
uugauuggaaugcuuggau

SEQ ID NO: 2662425 - RNA, 19 nt, Artificial Sequence
  Description of Artificial Sequence: Synthetic oligonucleotide
ucuauugcgccaacagcca

SEQ ID NO: 2662426 - RNA, 19 nt, Artificial Sequence
  Description of Artificial Sequence: Synthetic oligonucleotide
uccacauuuccaugcauac

SEQ ID NO: 2662427 - RNA, 19 nt, Artificial Sequence
  Description of Artificial Sequence: Synthetic oligonucleotide
auagcaucgcuauauuuau

SEQ ID NO: 2662428 - RNA, 19 nt, Artificial Sequence
  Description of Artificial Sequence: Synthetic oligonucleotide
uugugucuugauuggaaug

SEQ ID NO: 2662429 - RNA, 19 nt, Artificial Sequence
  Description of Artificial Sequence: Synthetic oligonucleotide
caaucauuacucuguaauc

SEQ ID NO: 2662430 - RNA, 19 nt, Artificial Sequence
  Description of Artificial Sequence: Synthetic oligonucleotide
caucgcuauauuuauauaa

SEQ ID NO: 2662431 - RNA, 19 nt, Artificial Sequence
  Description of Artificial Sequence: Synthetic oligonucleotide
ugaaaagcggauucagaau

SEQ ID NO: 2662432 - RNA, 19 nt, Artificial Sequence
  Description of Artificial Sequence: Synthetic oligonucleotide
aaguaugccguuccuucca

SEQ ID NO: 2662433 - RNA, 19 nt, Artificial Sequence
  Description of Artificial Sequence: Synthetic oligonucleotide
aucuuugacagaacacccc

SEQ ID NO: 2662434 - RNA, 19 nt, Artificial Sequence
  Description of Artificial Sequence: Synthetic oligonucleotide
aaaauauagcaucgcuaua

SEQ ID NO: 2662435 - RNA, 19 nt, Artificial Sequence
  Description of Artificial Sequence: Synthetic oligonucleotide
cacguuaucaagugaacca

SEQ ID NO: 2662436 - RNA, 19 nt, Artificial Sequence
  Description of Artificial Sequence: Synthetic oligonucleotide
aaugcuuggaucacgucau

SEQ ID NO: 2662437 - RNA, 19 nt, Artificial Sequence
  Description of Artificial Sequence: Synthetic oligonucleotide
cugaaaagcggauucagaa

SEQ ID NO: 2662438 - RNA, 19 nt, Artificial Sequence
  Description of Artificial Sequence: Synthetic oligonucleotide
aucacgucauuacugcuca

SEQ ID NO: 2662439 - RNA, 19 nt, Artificial Sequence
  Description of Artificial Sequence: Synthetic oligonucleotide
guucuauugcgccaacagc

SEQ ID NO: 2662440 - RNA, 19 nt, Artificial Sequence
  Description of Artificial Sequence: Synthetic oligonucleotide
uugccaaucuuugacagaa

SEQ ID NO: 2662441 - RNA, 19 nt, Artificial Sequence
  Description of Artificial Sequence: Synthetic oligonucleotide
aucuaacagguuuuguccu

SEQ ID NO: 2662442 - RNA, 19 nt, Artificial Sequence
  Description of Artificial Sequence: Synthetic oligonucleotide
augccuagugugcacauca

SEQ ID NO: 2662443 - RNA, 19 nt, Artificial Sequence
  Description of Artificial Sequence: Synthetic oligonucleotide
gguucuauugcgccaacag

SEQ ID NO: 2662444 - RNA, 19 nt, Artificial Sequence
  Description of Artificial Sequence: Synthetic oligonucleotide
cgcuauauuuauauaaggg

SEQ ID NO: 2662445 - RNA, 19 nt, Artificial Sequence
  Description of Artificial Sequence: Synthetic oligonucleotide
caaucagaggcucugaaaa

SEQ ID NO: 2662446 - RNA, 19 nt, Artificial Sequence
  Description of Artificial Sequence: Synthetic oligonucleotide
ucauuacugcucauccaca

SEQ ID NO: 2662447 - RNA, 19 nt, Artificial Sequence
  Description of Artificial Sequence: Synthetic oligonucleotide
uauugcgccaacagccaug

SEQ ID NO: 2662448 - RNA, 19 nt, Artificial Sequence
  Description of Artificial Sequence: Synthetic oligonucleotide
aaggugacccgccaucuaa

SEQ ID NO: 2662449 - RNA, 19 nt, Artificial Sequence
  Description of Artificial Sequence: Synthetic oligonucleotide
ccuagugugcacaucaggc

SEQ ID NO: 2662450 - RNA, 19 nt, Artificial Sequence
  Description of Artificial Sequence: Synthetic oligonucleotide
ucaaucagaggcucugaaa

SEQ ID NO: 2662451 - RNA, 19 nt, Artificial Sequence
  Description of Artificial Sequence: Synthetic oligonucleotide
aacugggguucuauugcgc

SEQ ID NO: 2662452 - RNA, 19 nt, Artificial Sequence
  Description of Artificial Sequence: Synthetic oligonucleotide
aguaugccguuccuuccac

SEQ ID NO: 2662453 - RNA, 19 nt, Artificial Sequence
  Description of Artificial Sequence: Synthetic oligonucleotide
auuggaaugcuuggaucac

SEQ ID NO: 2662454 - RNA, 19 nt, Artificial Sequence
  Description of Artificial Sequence: Synthetic oligonucleotide
guuguauagaaaggugacc

SEQ ID NO: 2662455 - RNA, 19 nt, Artificial Sequence
  Description of Artificial Sequence: Synthetic oligonucleotide
agaaugcaaucauuacucu

SEQ ID NO: 2662456 - RNA, 19 nt, Artificial Sequence
  Description of Artificial Sequence: Synthetic oligonucleotide
uuaucaccacuuuugccaa

SEQ ID NO: 2662457 - RNA, 19 nt, Artificial Sequence
  Description of Artificial Sequence: Synthetic oligonucleotide
cuaacagguuuuguccucg

SEQ ID NO: 2662458 - RNA, 19 nt, Artificial Sequence
  Description of Artificial Sequence: Synthetic oligonucleotide
uuggaaugcuuggaucacg

SEQ ID NO: 2662459 - RNA, 19 nt, Artificial Sequence
  Description of Artificial Sequence: Synthetic oligonucleotide
cugugacaaguuaauauca

SEQ ID NO: 2662460 - RNA, 19 nt, Artificial Sequence
  Description of Artificial Sequence: Synthetic oligonucleotide
uucgcaucaaugaccugac

SEQ ID NO: 2662461 - RNA, 19 nt, Artificial Sequence
  Description of Artificial Sequence: Synthetic oligonucleotide
caaguaugccguuccuucc

SEQ ID NO: 2662462 - RNA, 19 nt, Artificial Sequence
  Description of Artificial Sequence: Synthetic oligonucleotide
  modified_base (18)..(18): a, c, u, g, unknown or other
gguuuuguccucgaggcng

SEQ ID NO: 2662463 - RNA, 19 nt, Artificial Sequence
  Description of Artificial Sequence: Synthetic oligonucleotide
uuugccaaucuuugacaga

SEQ ID NO: 2662464 - RNA, 19 nt, Artificial Sequence
  Description of Artificial Sequence: Synthetic oligonucleotide
gaacgugugcguucaaaga

SEQ ID NO: 2662465 - RNA, 19 nt, Artificial Sequence
  Description of Artificial Sequence: Synthetic oligonucleotide
caccauguucgcaucaaug

SEQ ID NO: 2662466 - RNA, 19 nt, Artificial Sequence
  Description of Artificial Sequence: Synthetic oligonucleotide
aaugccuagugugcacauc

SEQ ID NO: 2662467 - RNA, 19 nt, Artificial Sequence
  Description of Artificial Sequence: Synthetic oligonucleotide
guucgcaucaaugaccuga

SEQ ID NO: 2662468 - RNA, 19 nt, Artificial Sequence
  Description of Artificial Sequence: Synthetic oligonucleotide
auauagcaucgcuauauuu

SEQ ID NO: 2662469 - RNA, 19 nt, Artificial Sequence
  Description of Artificial Sequence: Synthetic oligonucleotide
ugcacguuaucaagugaac

SEQ ID NO: 2662470 - RNA, 19 nt, Artificial Sequence
  Description of Artificial Sequence: Synthetic oligonucleotide
cuuuugccaaucuuugaca

SEQ ID NO: 2662471 - RNA, 19 nt, Artificial Sequence
  Description of Artificial Sequence: Synthetic oligonucleotide
uuuccaugcauaccaucau

SEQ ID NO: 2662472 - RNA, 19 nt, Artificial Sequence
  Description of Artificial Sequence: Synthetic oligonucleotide
cagccaggagauucaaagg

SEQ ID NO: 2662473 - RNA, 19 nt, Artificial Sequence
  Description of Artificial Sequence: Synthetic oligonucleotide
aaagcggauucagaaugca

SEQ ID NO: 2662474 - RNA, 19 nt, Artificial Sequence
  Description of Artificial Sequence: Synthetic oligonucleotide
ucuaacagguuuuguccuc

SEQ ID NO: 2662475 - RNA, 19 nt, Artificial Sequence
  Description of Artificial Sequence: Synthetic oligonucleotide
auagaaaggugacccgcca

SEQ ID NO: 2662476 - RNA, 19 nt, Artificial Sequence
  Description of Artificial Sequence: Synthetic oligonucleotide
ccaggagauucaaaggugg

SEQ ID NO: 2662477 - RNA, 19 nt, Artificial Sequence
  Description of Artificial Sequence: Synthetic oligonucleotide
cuuggccagaacgugugcg

SEQ ID NO: 2662478 - RNA, 19 nt, Artificial Sequence
  Description of Artificial Sequence: Synthetic oligonucleotide
auaucaaugaaugcacguu

SEQ ID NO: 2662479 - RNA, 19 nt, Artificial Sequence
  Description of Artificial Sequence: Synthetic oligonucleotide
gaucacgucauuacugcuc

SEQ ID NO: 2662480 - RNA, 19 nt, Artificial Sequence
  Description of Artificial Sequence: Synthetic oligonucleotide
auucaaagguggguauggg

SEQ ID NO: 2662481 - RNA, 19 nt, Artificial Sequence
  Description of Artificial Sequence: Synthetic oligonucleotide
cagaggcucugaaaagcgg

SEQ ID NO: 2662482 - RNA, 19 nt, Artificial Sequence
  Description of Artificial Sequence: Synthetic oligonucleotide
  modified_base (9)..(9): a, c, u, g, unknown or other
cucgaggcnguucccacag

SEQ ID NO: 2662483 - RNA, 19 nt, Artificial Sequence
  Description of Artificial Sequence: Synthetic oligonucleotide
ggcagaaagacugugacaa

SEQ ID NO: 2662484 - RNA, 19 nt, Artificial Sequence
  Description of Artificial Sequence: Synthetic oligonucleotide
ccugaccuuggccagaacg

SEQ ID NO: 2662485 - RNA, 19 nt, Artificial Sequence
  Description of Artificial Sequence: Synthetic oligonucleotide
uccucaaucagaggcucug

SEQ ID NO: 2662486 - RNA, 19 nt, Artificial Sequence
  Description of Artificial Sequence: Synthetic oligonucleotide
caaugaccugaccuuggcc

SEQ ID NO: 2662487 - RNA, 19 nt, Artificial Sequence
  Description of Artificial Sequence: Synthetic oligonucleotide
gguuaucaccacuuuugcc

SEQ ID NO: 2662488 - RNA, 19 nt, Artificial Sequence
  Description of Artificial Sequence: Synthetic oligonucleotide
gcaagcacaaugccuagug

SEQ ID NO: 2662489 - RNA, 19 nt, Artificial Sequence
  Description of Artificial Sequence: Synthetic oligonucleotide
agccuucuagaacuggggu

SEQ ID NO: 2662490 - RNA, 19 nt, Artificial Sequence
  Description of Artificial Sequence: Synthetic oligonucleotide
auguucgcaucaaugaccu

SEQ ID NO: 2662491 - RNA, 19 nt, Artificial Sequence
  Description of Artificial Sequence: Synthetic oligonucleotide
agauucaaagguggguaug

SEQ ID NO: 2662492 - RNA, 19 nt, Artificial Sequence
  Description of Artificial Sequence: Synthetic oligonucleotide
uauggguuaucaccacuuu

SEQ ID NO: 2662493 - RNA, 19 nt, Artificial Sequence
  Description of Artificial Sequence: Synthetic oligonucleotide
aguguaaaugcagccuucu

SEQ ID NO: 2662494 - RNA, 19 nt, Artificial Sequence
  Description of Artificial Sequence: Synthetic oligonucleotide
augugcugagucuuccaca

SEQ ID NO: 2662495 - RNA, 19 nt, Artificial Sequence
  Description of Artificial Sequence: Synthetic oligonucleotide
agcggauucagaaugcaau

SEQ ID NO: 2662496 - RNA, 19 nt, Artificial Sequence
  Description of Artificial Sequence: Synthetic oligonucleotide
guagguuguauagaaaggu

SEQ ID NO: 2662497 - RNA, 19 nt, Artificial Sequence
  Description of Artificial Sequence: Synthetic oligonucleotide
caucaaugaccugaccuug

SEQ ID NO: 2662498 - RNA, 19 nt, Artificial Sequence
  Description of Artificial Sequence: Synthetic oligonucleotide
accacuuuugccaaucuuu

SEQ ID NO: 2662499 - RNA, 19 nt, Artificial Sequence
  Description of Artificial Sequence: Synthetic oligonucleotide
uagaaaggugacccgccau

SEQ ID NO: 2662500 - RNA, 19 nt, Artificial Sequence
  Description of Artificial Sequence: Synthetic oligonucleotide
caugagugucauucuccag

SEQ ID NO: 2662501 - RNA, 19 nt, Artificial Sequence
  Description of Artificial Sequence: Synthetic oligonucleotide
uuggccagaacgugugcgu

SEQ ID NO: 2662502 - RNA, 19 nt, Artificial Sequence
  Description of Artificial Sequence: Synthetic oligonucleotide
guuaucaagugaaccaaaa

SEQ ID NO: 2662503 - RNA, 19 nt, Artificial Sequence
  Description of Artificial Sequence: Synthetic oligonucleotide
ugccuagugugcacaucag

SEQ ID NO: 2662504 - RNA, 19 nt, Artificial Sequence
  Description of Artificial Sequence: Synthetic oligonucleotide
ugcaaucauuacucuguaa

SEQ ID NO: 2662505 - RNA, 19 nt, Artificial Sequence
  Description of Artificial Sequence: Synthetic oligonucleotide
ugucuugauuggaaugcuu

SEQ ID NO: 2662506 - RNA, 19 nt, Artificial Sequence
  Description of Artificial Sequence: Synthetic oligonucleotide
aggagauucaaaggugggu

SEQ ID NO: 2662507 - RNA, 19 nt, Artificial Sequence
  Description of Artificial Sequence: Synthetic oligonucleotide
uauuuauauaagggcuuua

SEQ ID NO: 2662508 - RNA, 19 nt, Artificial Sequence
  Description of Artificial Sequence: Synthetic oligonucleotide
ugaccuuggccagaacgug

SEQ ID NO: 2662509 - RNA, 19 nt, Artificial Sequence
  Description of Artificial Sequence: Synthetic oligonucleotide
aggcagaaagacugugaca

SEQ ID NO: 2662510 - RNA, 19 nt, Artificial Sequence
  Description of Artificial Sequence: Synthetic oligonucleotide
gagucuuccacaggaagaa

SEQ ID NO: 2662511 - RNA, 19 nt, Artificial Sequence
  Description of Artificial Sequence: Synthetic oligonucleotide
gugacccgccaucuaacag

SEQ ID NO: 2662512 - RNA, 19 nt, Artificial Sequence
  Description of Artificial Sequence: Synthetic oligonucleotide
acguuaucaagugaaccaa

SEQ ID NO: 2662513 - RNA, 19 nt, Artificial Sequence
  Description of Artificial Sequence: Synthetic oligonucleotide
auggguuaucaccacuuuu

SEQ ID NO: 2662514 - RNA, 19 nt, Artificial Sequence
  Description of Artificial Sequence: Synthetic oligonucleotide
gcaaucauuacucuguaau

SEQ ID NO: 2662515 - RNA, 19 nt, Artificial Sequence
  Description of Artificial Sequence: Synthetic oligonucleotide
acaaugccuagugugcaca

SEQ ID NO: 2662516 - RNA, 19 nt, Artificial Sequence
  Description of Artificial Sequence: Synthetic oligonucleotide
ugcauaccaucaugagugu

SEQ ID NO: 2662517 - RNA, 19 nt, Artificial Sequence
  Description of Artificial Sequence: Synthetic oligonucleotide
auugcgccaacagccauga

SEQ ID NO: 2662518 - RNA, 19 nt, Artificial Sequence
  Description of Artificial Sequence: Synthetic oligonucleotide
ggguuaucaccacuuuugc

SEQ ID NO: 2662519 - RNA, 19 nt, Artificial Sequence
  Description of Artificial Sequence: Synthetic oligonucleotide
auuacugcucauccacauu

SEQ ID NO: 2662520 - RNA, 19 nt, Artificial Sequence
  Description of Artificial Sequence: Synthetic oligonucleotide
ggcucugaaaagcggauuc

SEQ ID NO: 2662521 - RNA, 19 nt, Artificial Sequence
  Description of Artificial Sequence: Synthetic oligonucleotide
accagcaaagucagccagg

SEQ ID NO: 2662522 - RNA, 19 nt, Artificial Sequence
  Description of Artificial Sequence: Synthetic oligonucleotide
aaaggugacccgccaucua

SEQ ID NO: 2662523 - RNA, 19 nt, Artificial Sequence
  Description of Artificial Sequence: Synthetic oligonucleotide
acucaaguaugccguuccu

SEQ ID NO: 2662524 - RNA, 19 nt, Artificial Sequence
  Description of Artificial Sequence: Synthetic oligonucleotide
caugcauaccaucaugagu

SEQ ID NO: 2662525 - RNA, 19 nt, Artificial Sequence
  Description of Artificial Sequence: Synthetic oligonucleotide
agaaagacugugacaaguu

SEQ ID NO: 2662526 - RNA, 19 nt, Artificial Sequence
  Description of Artificial Sequence: Synthetic oligonucleotide
cuuguagguuguauagaaa

SEQ ID NO: 2662527 - RNA, 19 nt, Artificial Sequence
  Description of Artificial Sequence: Synthetic oligonucleotide
aguugugucuugauuggaa

SEQ ID NO: 2662528 - RNA, 19 nt, Artificial Sequence
  Description of Artificial Sequence: Synthetic oligonucleotide
  modified_base (13)..(13): a, c, u, g, unknown or other
uguccucgaggcnguuccc

SEQ ID NO: 2662529 - RNA, 19 nt, Artificial Sequence
  Description of Artificial Sequence: Synthetic oligonucleotide
agugaaccaaaaggcagaa

SEQ ID NO: 2662530 - RNA, 19 nt, Artificial Sequence
  Description of Artificial Sequence: Synthetic oligonucleotide
uaguugugucuugauugga

SEQ ID NO: 2662531 - RNA, 19 nt, Artificial Sequence
  Description of Artificial Sequence: Synthetic oligonucleotide
  modified_base (11)..(11): a, c, u, g, unknown or other
uccucgaggcnguucccac

SEQ ID NO: 2662532 - RNA, 19 nt, Artificial Sequence
  Description of Artificial Sequence: Synthetic oligonucleotide
gaacucaaguaugccguuc

SEQ ID NO: 2662533 - RNA, 19 nt, Artificial Sequence
  Description of Artificial Sequence: Synthetic oligonucleotide
  modified_base (19)..(19): a, c, u, g, unknown or other
agguuuuguccucgaggcn

SEQ ID NO: 2662534 - RNA, 19 nt, Artificial Sequence
  Description of Artificial Sequence: Synthetic oligonucleotide
gaacaccccgacaaagcca

SEQ ID NO: 2662535 - RNA, 19 nt, Artificial Sequence
  Description of Artificial Sequence: Synthetic oligonucleotide
gcacguuaucaagugaacc

SEQ ID NO: 2662536 - RNA, 19 nt, Artificial Sequence
  Description of Artificial Sequence: Synthetic oligonucleotide
agaacucaaguaugccguu

SEQ ID NO: 2662537 - RNA, 19 nt, Artificial Sequence
  Description of Artificial Sequence: Synthetic oligonucleotide
cacgucauuacugcucauc

SEQ ID NO: 2662538 - RNA, 19 nt, Artificial Sequence
  Description of Artificial Sequence: Synthetic oligonucleotide
cuuugacagaacaccccga

SEQ ID NO: 2662539 - RNA, 19 nt, Artificial Sequence
  Description of Artificial Sequence: Synthetic oligonucleotide
ucgcaucaaugaccugacc

SEQ ID NO: 2662540 - RNA, 19 nt, Artificial Sequence
  Description of Artificial Sequence: Synthetic oligonucleotide
ugggguucuauugcgccaa

SEQ ID NO: 2662541 - RNA, 19 nt, Artificial Sequence
  Description of Artificial Sequence: Synthetic oligonucleotide
ugccaaucuuugacagaac

SEQ ID NO: 2662542 - RNA, 19 nt, Artificial Sequence
  Description of Artificial Sequence: Synthetic oligonucleotide
aagguggguauggguuauc

SEQ ID NO: 2662543 - RNA, 19 nt, Artificial Sequence
  Description of Artificial Sequence: Synthetic oligonucleotide
auaccaucaugagugucau

SEQ ID NO: 2662544 - RNA, 19 nt, Artificial Sequence
  Description of Artificial Sequence: Synthetic oligonucleotide
aggugacccgccaucuaac

SEQ ID NO: 2662545 - RNA, 19 nt, Artificial Sequence
  Description of Artificial Sequence: Synthetic oligonucleotide
ccauguucgcaucaaugac

SEQ ID NO: 2662546 - RNA, 19 nt, Artificial Sequence
  Description of Artificial Sequence: Synthetic oligonucleotide
aagcggauucagaaugcaa

SEQ ID NO: 2662547 - RNA, 19 nt, Artificial Sequence
  Description of Artificial Sequence: Synthetic oligonucleotide
guaugccguuccuuccacc

SEQ ID NO: 2662548 - RNA, 19 nt, Artificial Sequence
  Description of Artificial Sequence: Synthetic oligonucleotide
gagauucaaagguggguau

SEQ ID NO: 2662549 - RNA, 19 nt, Artificial Sequence
  Description of Artificial Sequence: Synthetic oligonucleotide
cagucuuguagguuguaua

SEQ ID NO: 2662550 - RNA, 19 nt, Artificial Sequence
  Description of Artificial Sequence: Synthetic oligonucleotide
ggagauucaaaggugggua

SEQ ID NO: 2662551 - RNA, 19 nt, Artificial Sequence
  Description of Artificial Sequence: Synthetic oligonucleotide
auaucaguacacacacaaa

SEQ ID NO: 2662552 - RNA, 19 nt, Artificial Sequence
  Description of Artificial Sequence: Synthetic oligonucleotide
caaagguggguauggguua

SEQ ID NO: 2662553 - RNA, 19 nt, Artificial Sequence
  Description of Artificial Sequence: Synthetic oligonucleotide
ccaugcauaccaucaugag

SEQ ID NO: 2662554 - RNA, 19 nt, Artificial Sequence
  Description of Artificial Sequence: Synthetic oligonucleotide
uagcaucgcuauauuuaua

SEQ ID NO: 2662555 - RNA, 19 nt, Artificial Sequence
  Description of Artificial Sequence: Synthetic oligonucleotide
agguggguauggguuauca

SEQ ID NO: 2662556 - RNA, 19 nt, Artificial Sequence
  Description of Artificial Sequence: Synthetic oligonucleotide
acgugugcguucaaagaga

SEQ ID NO: 2662557 - RNA, 19 nt, Artificial Sequence
  Description of Artificial Sequence: Synthetic oligonucleotide
gcggauucagaaugcaauc

SEQ ID NO: 2662558 - RNA, 19 nt, Artificial Sequence
  Description of Artificial Sequence: Synthetic oligonucleotide
gucuuguagguuguauaga

SEQ ID NO: 2662559 - RNA, 19 nt, Artificial Sequence
  Description of Artificial Sequence: Synthetic oligonucleotide
  modified_base (7)..(7): a, c, u, g, unknown or other
cgaggcnguucccacagcc

SEQ ID NO: 2662560 - RNA, 19 nt, Artificial Sequence
  Description of Artificial Sequence: Synthetic oligonucleotide
uguucgcaucaaugaccug

SEQ ID NO: 2662561 - RNA, 19 nt, Artificial Sequence
  Description of Artificial Sequence: Synthetic oligonucleotide
auaagggcuuuaauaucaa

SEQ ID NO: 2662562 - RNA, 19 nt, Artificial Sequence
  Description of Artificial Sequence: Synthetic oligonucleotide
cagaaagacugugacaagu

SEQ ID NO: 2662563 - RNA, 19 nt, Artificial Sequence
  Description of Artificial Sequence: Synthetic oligonucleotide
ggcuuuaauaucaaugaau

SEQ ID NO: 2662564 - RNA, 19 nt, Artificial Sequence
  Description of Artificial Sequence: Synthetic oligonucleotide
gauucagaaugcaaucauu

SEQ ID NO: 2662565 - RNA, 19 nt, Artificial Sequence
  Description of Artificial Sequence: Synthetic oligonucleotide
  modified_base (8)..(8): a, c, u, g, unknown or other
ucgaggcnguucccacagc

SEQ ID NO: 2662566 - RNA, 19 nt, Artificial Sequence
  Description of Artificial Sequence: Synthetic oligonucleotide
ccccgacaaagccacauag

SEQ ID NO: 2662567 - RNA, 19 nt, Artificial Sequence
  Description of Artificial Sequence: Synthetic oligonucleotide
gaaaggugacccgccaucu

SEQ ID NO: 2662568 - RNA, 19 nt, Artificial Sequence
  Description of Artificial Sequence: Synthetic oligonucleotide
cgacaaagccacauaguug

SEQ ID NO: 2662569 - RNA, 19 nt, Artificial Sequence
  Description of Artificial Sequence: Synthetic oligonucleotide
gguggguauggguuaucac

SEQ ID NO: 2662570 - RNA, 19 nt, Artificial Sequence
  Description of Artificial Sequence: Synthetic oligonucleotide
agacugugacaaguuaaua

SEQ ID NO: 2662571 - RNA, 19 nt, Artificial Sequence
  Description of Artificial Sequence: Synthetic oligonucleotide
gccaugaacucuccaucug

SEQ ID NO: 2662572 - RNA, 19 nt, Artificial Sequence
  Description of Artificial Sequence: Synthetic oligonucleotide
gccaggagauucaaaggug

SEQ ID NO: 2662573 - RNA, 19 nt, Artificial Sequence
  Description of Artificial Sequence: Synthetic oligonucleotide
cgugugcguucaaagagag

SEQ ID NO: 2662574 - RNA, 19 nt, Artificial Sequence
  Description of Artificial Sequence: Synthetic oligonucleotide
uaucaccacuuuugccaau

SEQ ID NO: 2662575 - RNA, 19 nt, Artificial Sequence
  Description of Artificial Sequence: Synthetic oligonucleotide
cguuccuuccaccauguuc

SEQ ID NO: 2662576 - RNA, 19 nt, Artificial Sequence
  Description of Artificial Sequence: Synthetic oligonucleotide
cauuacugcucauccacau

SEQ ID NO: 2662577 - RNA, 19 nt, Artificial Sequence
  Description of Artificial Sequence: Synthetic oligonucleotide
ugaccugaccuuggccaga

SEQ ID NO: 2662578 - RNA, 19 nt, Artificial Sequence
  Description of Artificial Sequence: Synthetic oligonucleotide
guguaaaugcagccuucua

SEQ ID NO: 2662579 - RNA, 19 nt, Artificial Sequence
  Description of Artificial Sequence: Synthetic oligonucleotide
gcguucaaagagagcaagc

SEQ ID NO: 2662580 - RNA, 19 nt, Artificial Sequence
  Description of Artificial Sequence: Synthetic oligonucleotide
ggugacccgccaucuaaca

SEQ ID NO: 2662581 - RNA, 19 nt, Artificial Sequence
  Description of Artificial Sequence: Synthetic oligonucleotide
guauggguuaucaccacuu

SEQ ID NO: 2662582 - RNA, 19 nt, Artificial Sequence
  Description of Artificial Sequence: Synthetic oligonucleotide
  modified_base (16)..(16): a, c, u, g, unknown or other
uuuuguccucgaggcnguu

SEQ ID NO: 2662583 - RNA, 19 nt, Artificial Sequence
  Description of Artificial Sequence: Synthetic oligonucleotide
ggaaugcuuggaucacguc

SEQ ID NO: 2662584 - RNA, 19 nt, Artificial Sequence
  Description of Artificial Sequence: Synthetic oligonucleotide
gguauggguuaucaccacu

SEQ ID NO: 2662585 - RNA, 19 nt, Artificial Sequence
  Description of Artificial Sequence: Synthetic oligonucleotide
gugugcguucaaagagagc

SEQ ID NO: 2662586 - RNA, 19 nt, Artificial Sequence
  Description of Artificial Sequence: Synthetic oligonucleotide
ggguauggguuaucaccac

SEQ ID NO: 2662587 - RNA, 19 nt, Artificial Sequence
  Description of Artificial Sequence: Synthetic oligonucleotide
caagcacaaugccuagugu

SEQ ID NO: 2662588 - RNA, 19 nt, Artificial Sequence
  Description of Artificial Sequence: Synthetic oligonucleotide
gcgccaacagccaugaacu

SEQ ID NO: 2662589 - RNA, 19 nt, Artificial Sequence
  Description of Artificial Sequence: Synthetic oligonucleotide
cagucuuuaguugugucuu

SEQ ID NO: 2662590 - RNA, 19 nt, Artificial Sequence
  Description of Artificial Sequence: Synthetic oligonucleotide
ucacgucauuacugcucau

SEQ ID NO: 2662591 - RNA, 19 nt, Artificial Sequence
  Description of Artificial Sequence: Synthetic oligonucleotide
uggccagaacgugugcguu

SEQ ID NO: 2662592 - RNA, 19 nt, Artificial Sequence
  Description of Artificial Sequence: Synthetic oligonucleotide
gaccuuggccagaacgugu

SEQ ID NO: 2662593 - RNA, 19 nt, Artificial Sequence
  Description of Artificial Sequence: Synthetic oligonucleotide
gacccgccaucuaacaggu

SEQ ID NO: 2662594 - RNA, 19 nt, Artificial Sequence
  Description of Artificial Sequence: Synthetic oligonucleotide
cagaacgugugcguucaaa

SEQ ID NO: 2662595 - RNA, 19 nt, Artificial Sequence
  Description of Artificial Sequence: Synthetic oligonucleotide
ugcagucuuguagguugua

SEQ ID NO: 2662596 - RNA, 19 nt, Artificial Sequence
  Description of Artificial Sequence: Synthetic oligonucleotide
  modified_base (12)..(12): a, c, u, g, unknown or other
guccucgaggcnguuccca

SEQ ID NO: 2662597 - RNA, 19 nt, Artificial Sequence
  Description of Artificial Sequence: Synthetic oligonucleotide
ggccagaacgugugcguuc

SEQ ID NO: 2662598 - RNA, 19 nt, Artificial Sequence
  Description of Artificial Sequence: Synthetic oligonucleotide
gaccugaccuuggccagaa

SEQ ID NO: 2662599 - RNA, 19 nt, Artificial Sequence
  Description of Artificial Sequence: Synthetic oligonucleotide
augcuuggaucacgucauu

SEQ ID NO: 2662600 - RNA, 19 nt, Artificial Sequence
  Description of Artificial Sequence: Synthetic oligonucleotide
gugucuugauuggaaugcu

SEQ ID NO: 2662601 - RNA, 19 nt, Artificial Sequence
  Description of Artificial Sequence: Synthetic oligonucleotide
gugcguucaaagagagcaa

SEQ ID NO: 2662602 - RNA, 19 nt, Artificial Sequence
  Description of Artificial Sequence: Synthetic oligonucleotide
gccagaacgugugcguuca

SEQ ID NO: 2662603 - RNA, 19 nt, Artificial Sequence
  Description of Artificial Sequence: Synthetic oligonucleotide
ggaucacgucauuacugcu

SEQ ID NO: 2662604 - RNA, 19 nt, Artificial Sequence
  Description of Artificial Sequence: Synthetic oligonucleotide
gcauaccaucaugaguguc

SEQ ID NO: 2662605 - RNA, 19 nt, Artificial Sequence
  Description of Artificial Sequence: Synthetic oligonucleotide
ccgacaaagccacauaguu

SEQ ID NO: 2662606 - RNA, 19 nt, Artificial Sequence
  Description of Artificial Sequence: Synthetic oligonucleotide
cuauugcgccaacagccau

SEQ ID NO: 2662607 - RNA, 19 nt, Artificial Sequence
  Description of Artificial Sequence: Synthetic oligonucleotide
  modified_base (10)..(10): a, c, u, g, unknown or other
ccucgaggcnguucccaca

SEQ ID NO: 2662608 - RNA, 19 nt, Artificial Sequence
  Description of Artificial Sequence: Synthetic oligonucleotide
caaugccuagugugcacau

SEQ ID NO: 2662609 - RNA, 19 nt, Artificial Sequence
  Description of Artificial Sequence: Synthetic oligonucleotide
cguuaucaagugaaccaaa

SEQ ID NO: 2662610 - RNA, 19 nt, Artificial Sequence
  Description of Artificial Sequence: Synthetic oligonucleotide
ggguucuauugcgccaaca

SEQ ID NO: 2662611 - RNA, 19 nt, Artificial Sequence
  Description of Artificial Sequence: Synthetic oligonucleotide
uugcgccaacagccaugaa

SEQ ID NO: 2662612 - RNA, 19 nt, Artificial Sequence
  Description of Artificial Sequence: Synthetic oligonucleotide
  modified_base (2)..(2): a, c, u, g, unknown or other
cnguucccacagccccaug

SEQ ID NO: 2662613 - RNA, 19 nt, Artificial Sequence
  Description of Artificial Sequence: Synthetic oligonucleotide
gcugagucuuccacaggaa

SEQ ID NO: 2662614 - RNA, 19 nt, Artificial Sequence
  Description of Artificial Sequence: Synthetic oligonucleotide
cuccaucugcagucuugua

SEQ ID NO: 2662615 - RNA, 19 nt, Artificial Sequence
  Description of Artificial Sequence: Synthetic oligonucleotide
gggguucuauugcgccaac

SEQ ID NO: 2662616 - RNA, 19 nt, Artificial Sequence
  Description of Artificial Sequence: Synthetic oligonucleotide
cccgacaaagccacauagu

SEQ ID NO: 2662617 - RNA, 19 nt, Artificial Sequence
  Description of Artificial Sequence: Synthetic oligonucleotide
gcagucuuguagguuguau

SEQ ID NO: 2662618 - RNA, 19 nt, Artificial Sequence
  Description of Artificial Sequence: Synthetic oligonucleotide
caccccgacaaagccacau

SEQ ID NO: 2662619 - RNA, 19 nt, Artificial Sequence
  Description of Artificial Sequence: Synthetic oligonucleotide
gccaucuaacagguuuugu

SEQ ID NO: 2662620 - RNA, 19 nt, Artificial Sequence
  Description of Artificial Sequence: Synthetic oligonucleotide
ccucaaucagaggcucuga

SEQ ID NO: 2662621 - RNA, 19 nt, Artificial Sequence
  Description of Artificial Sequence: Synthetic oligonucleotide
cgccaucuaacagguuuug

SEQ ID NO: 2662622 - RNA, 19 nt, Artificial Sequence
  Description of Artificial Sequence: Synthetic oligonucleotide
cgccaacagccaugaacuc

SEQ ID NO: 2662623 - RNA, 19 nt, Artificial Sequence
  Description of Artificial Sequence: Synthetic oligonucleotide
gccguuccuuccaccaugu

SEQ ID NO: 2662624 - RNA, 19 nt, Artificial Sequence
  Description of Artificial Sequence: Synthetic oligonucleotide
caaagucagccaggagauu

SEQ ID NO: 2662625 - RNA, 19 nt, Artificial Sequence
  Description of Artificial Sequence: Synthetic oligonucleotide
  modified_base (3)..(3): a, c, u, g, unknown or other
gcnguucccacagccccau

SEQ ID NO: 2662626 - RNA, 19 nt, Artificial Sequence
  Description of Artificial Sequence: Synthetic oligonucleotide
ccgccaucuaacagguuuu

SEQ ID NO: 2662627 - RNA, 19 nt, Artificial Sequence
  Description of Artificial Sequence: Synthetic oligonucleotide
acccgccaucuaacagguu

SEQ ID NO: 2662628 - RNA, 19 nt, Artificial Sequence
  Description of Artificial Sequence: Synthetic oligonucleotide
ccagaacgugugcguucaa

SEQ ID NO: 2662629 - RNA, 19 nt, Artificial Sequence
  Description of Artificial Sequence: Synthetic oligonucleotide
ccguuccuuccaccauguu

SEQ ID NO: 2662630 - RNA, 19 nt, Artificial Sequence
  Description of Artificial Sequence: Synthetic oligonucleotide
aaauauaauauuuaaaugc

SEQ ID NO: 2662631 - RNA, 19 nt, Artificial Sequence
  Description of Artificial Sequence: Synthetic oligonucleotide
aauguauauaaauuuaauc

SEQ ID NO: 2662632 - RNA, 19 nt, Artificial Sequence
  Description of Artificial Sequence: Synthetic oligonucleotide
auguauauaaauuuaaucu

SEQ ID NO: 2662633 - RNA, 19 nt, Artificial Sequence
  Description of Artificial Sequence: Synthetic oligonucleotide
aaauaggaaauauuuaaug

SEQ ID NO: 2662634 - RNA, 19 nt, Artificial Sequence
  Description of Artificial Sequence: Synthetic oligonucleotide
aauaggaaauauuuaaugu

SEQ ID NO: 2662635 - RNA, 19 nt, Artificial Sequence
  Description of Artificial Sequence: Synthetic oligonucleotide
ugguauuugacaaacaagc

SEQ ID NO: 2662636 - RNA, 19 nt, Artificial Sequence
  Description of Artificial Sequence: Synthetic oligonucleotide
uauggaaccucaaagagcc

SEQ ID NO: 2662637 - RNA, 19 nt, Artificial Sequence
  Description of Artificial Sequence: Synthetic oligonucleotide
ugagguauaaauauaauau

SEQ ID NO: 2662638 - RNA, 19 nt, Artificial Sequence
  Description of Artificial Sequence: Synthetic oligonucleotide
uaaguuaaggugaaagagg

SEQ ID NO: 2662639 - RNA, 19 nt, Artificial Sequence
  Description of Artificial Sequence: Synthetic oligonucleotide
aauacugugguauuugaca

SEQ ID NO: 2662640 - RNA, 19 nt, Artificial Sequence
  Description of Artificial Sequence: Synthetic oligonucleotide
uauuugacaaacaagccca

SEQ ID NO: 2662641 - RNA, 19 nt, Artificial Sequence
  Description of Artificial Sequence: Synthetic oligonucleotide
uuuuggaugacucuuggug

SEQ ID NO: 2662642 - RNA, 19 nt, Artificial Sequence
  Description of Artificial Sequence: Synthetic oligonucleotide
cauucugugaucauguggg

SEQ ID NO: 2662643 - RNA, 19 nt, Artificial Sequence
  Description of Artificial Sequence: Synthetic oligonucleotide
aauauaauauuuaaaugca

SEQ ID NO: 2662644 - RNA, 19 nt, Artificial Sequence
  Description of Artificial Sequence: Synthetic oligonucleotide
aauuuaaucugccuuggca

SEQ ID NO: 2662645 - RNA, 19 nt, Artificial Sequence
  Description of Artificial Sequence: Synthetic oligonucleotide
auauuuuauuuccauuggc

SEQ ID NO: 2662646 - RNA, 19 nt, Artificial Sequence
  Description of Artificial Sequence: Synthetic oligonucleotide
uauuuuauuuccauuggca

SEQ ID NO: 2662647 - RNA, 19 nt, Artificial Sequence
  Description of Artificial Sequence: Synthetic oligonucleotide
uauaaauuuaaucugccuu

SEQ ID NO: 2662648 - RNA, 19 nt, Artificial Sequence
  Description of Artificial Sequence: Synthetic oligonucleotide
uuaaaugcaaaauauuuua

SEQ ID NO: 2662649 - RNA, 19 nt, Artificial Sequence
  Description of Artificial Sequence: Synthetic oligonucleotide
aaugaguaaaauacugugg

SEQ ID NO: 2662650 - RNA, 19 nt, Artificial Sequence
  Description of Artificial Sequence: Synthetic oligonucleotide
aaguuaaggugaaagaggg

SEQ ID NO: 2662651 - RNA, 19 nt, Artificial Sequence
  Description of Artificial Sequence: Synthetic oligonucleotide
aaauuuaaucugccuuggc

SEQ ID NO: 2662652 - RNA, 19 nt, Artificial Sequence
  Description of Artificial Sequence: Synthetic oligonucleotide
auugauaccaacaauugag

SEQ ID NO: 2662653 - RNA, 19 nt, Artificial Sequence
  Description of Artificial Sequence: Synthetic oligonucleotide
ucuuucuucgcuaaguuaa

SEQ ID NO: 2662654 - RNA, 19 nt, Artificial Sequence
  Description of Artificial Sequence: Synthetic oligonucleotide
uuuuauuuccauuggcaag

SEQ ID NO: 2662655 - RNA, 19 nt, Artificial Sequence
  Description of Artificial Sequence: Synthetic oligonucleotide
uugauaccaacaauugagg

SEQ ID NO: 2662656 - RNA, 19 nt, Artificial Sequence
  Description of Artificial Sequence: Synthetic oligonucleotide
uuuaaaugcaaaauauuuu

SEQ ID NO: 2662657 - RNA, 19 nt, Artificial Sequence
  Description of Artificial Sequence: Synthetic oligonucleotide
guauuugacaaacaagccc

SEQ ID NO: 2662658 - RNA, 19 nt, Artificial Sequence
  Description of Artificial Sequence: Synthetic oligonucleotide
ugauugauaccaacaauug

SEQ ID NO: 2662659 - RNA, 19 nt, Artificial Sequence
  Description of Artificial Sequence: Synthetic oligonucleotide
augaguaaaauacuguggu

SEQ ID NO: 2662660 - RNA, 19 nt, Artificial Sequence
  Description of Artificial Sequence: Synthetic oligonucleotide
aacaaugaguaaaauacug

SEQ ID NO: 2662661 - RNA, 19 nt, Artificial Sequence
  Description of Artificial Sequence: Synthetic oligonucleotide
uauacaugagguauaaaua

SEQ ID NO: 2662662 - RNA, 19 nt, Artificial Sequence
  Description of Artificial Sequence: Synthetic oligonucleotide
guuaaggugaaagagggag

SEQ ID NO: 2662663 - RNA, 19 nt, Artificial Sequence
  Description of Artificial Sequence: Synthetic oligonucleotide
aaaugcaaaauauuuuauu

SEQ ID NO: 2662664 - RNA, 19 nt, Artificial Sequence
  Description of Artificial Sequence: Synthetic oligonucleotide
cuaaguuaaggugaaagag

SEQ ID NO: 2662665 - RNA, 19 nt, Artificial Sequence
  Description of Artificial Sequence: Synthetic oligonucleotide
uuaaggugaaagagggagg

SEQ ID NO: 2662666 - RNA, 19 nt, Artificial Sequence
  Description of Artificial Sequence: Synthetic oligonucleotide
ucauauggaaccucaaaga

SEQ ID NO: 2662667 - RNA, 19 nt, Artificial Sequence
  Description of Artificial Sequence: Synthetic oligonucleotide
uuuauuuccauuggcaaga

SEQ ID NO: 2662668 - RNA, 19 nt, Artificial Sequence
  Description of Artificial Sequence: Synthetic oligonucleotide
uauuuacaacugaugauug

SEQ ID NO: 2662669 - RNA, 19 nt, Artificial Sequence
  Description of Artificial Sequence: Synthetic oligonucleotide
cucauauggaaccucaaag

SEQ ID NO: 2662670 - RNA, 19 nt, Artificial Sequence
  Description of Artificial Sequence: Synthetic oligonucleotide
guauauaaauuuaaucugc

SEQ ID NO: 2662671 - RNA, 19 nt, Artificial Sequence
  Description of Artificial Sequence: Synthetic oligonucleotide
auguguggaaaguugcccc

SEQ ID NO: 2662672 - RNA, 19 nt, Artificial Sequence
  Description of Artificial Sequence: Synthetic oligonucleotide
caaugaguaaaauacugug

SEQ ID NO: 2662673 - RNA, 19 nt, Artificial Sequence
  Description of Artificial Sequence: Synthetic oligonucleotide
auacaugagguauaaauau

SEQ ID NO: 2662674 - RNA, 19 nt, Artificial Sequence
  Description of Artificial Sequence: Synthetic oligonucleotide
acaacugaugauugauacc

SEQ ID NO: 2662675 - RNA, 19 nt, Artificial Sequence
  Description of Artificial Sequence: Synthetic oligonucleotide
uacaacugaugauugauac

SEQ ID NO: 2662676 - RNA, 19 nt, Artificial Sequence
  Description of Artificial Sequence: Synthetic oligonucleotide
cacacggccagauucaugg

SEQ ID NO: 2662677 - RNA, 19 nt, Artificial Sequence
  Description of Artificial Sequence: Synthetic oligonucleotide
uaaggugaaagagggaggg

SEQ ID NO: 2662678 - RNA, 19 nt, Artificial Sequence
  Description of Artificial Sequence: Synthetic oligonucleotide
aaaauacugugguauuuga

SEQ ID NO: 2662679 - RNA, 19 nt, Artificial Sequence
  Description of Artificial Sequence: Synthetic oligonucleotide
gauaacaaugaguaaaaua

SEQ ID NO: 2662680 - RNA, 19 nt, Artificial Sequence
  Description of Artificial Sequence: Synthetic oligonucleotide
uugacaaacaagcccaccu

SEQ ID NO: 2662681 - RNA, 19 nt, Artificial Sequence
  Description of Artificial Sequence: Synthetic oligonucleotide
uuauuuacaacugaugauu

SEQ ID NO: 2662682 - RNA, 19 nt, Artificial Sequence
  Description of Artificial Sequence: Synthetic oligonucleotide
ucuuuuggaugacucuugg

SEQ ID NO: 2662683 - RNA, 19 nt, Artificial Sequence
  Description of Artificial Sequence: Synthetic oligonucleotide
ugaugauugauaccaacaa

SEQ ID NO: 2662684 - RNA, 19 nt, Artificial Sequence
  Description of Artificial Sequence: Synthetic oligonucleotide
acugaugauugauaccaac

SEQ ID NO: 2662685 - RNA, 19 nt, Artificial Sequence
  Description of Artificial Sequence: Synthetic oligonucleotide
uaauguauauaaauuuaau

SEQ ID NO: 2662686 - RNA, 19 nt, Artificial Sequence
  Description of Artificial Sequence: Synthetic oligonucleotide
guggauuucagccuccagg

SEQ ID NO: 2662687 - RNA, 19 nt, Artificial Sequence
  Description of Artificial Sequence: Synthetic oligonucleotide
uuuggaugacucuugguga

SEQ ID NO: 2662688 - RNA, 19 nt, Artificial Sequence
  Description of Artificial Sequence: Synthetic oligonucleotide
ucuucgcuaaguuaaggug

SEQ ID NO: 2662689 - RNA, 19 nt, Artificial Sequence
  Description of Artificial Sequence: Synthetic oligonucleotide
ugcagcuugauugucauug

SEQ ID NO: 2662690 - RNA, 19 nt, Artificial Sequence
  Description of Artificial Sequence: Synthetic oligonucleotide
ucagccuccagguaggagc

SEQ ID NO: 2662691 - RNA, 19 nt, Artificial Sequence
  Description of Artificial Sequence: Synthetic oligonucleotide
auaggaaauauuuaaugua

SEQ ID NO: 2662692 - RNA, 19 nt, Artificial Sequence
  Description of Artificial Sequence: Synthetic oligonucleotide
auuuaaucugccuuggcaa

SEQ ID NO: 2662693 - RNA, 19 nt, Artificial Sequence
  Description of Artificial Sequence: Synthetic oligonucleotide
aaauacugugguauuugac

SEQ ID NO: 2662694 - RNA, 19 nt, Artificial Sequence
  Description of Artificial Sequence: Synthetic oligonucleotide
uuucaccaaguucacuacg

SEQ ID NO: 2662695 - RNA, 19 nt, Artificial Sequence
  Description of Artificial Sequence: Synthetic oligonucleotide
uauuucuuuuggaugacuc

SEQ ID NO: 2662696 - RNA, 19 nt, Artificial Sequence
  Description of Artificial Sequence: Synthetic oligonucleotide
uuugaaagcaggucugugu

SEQ ID NO: 2662697 - RNA, 19 nt, Artificial Sequence
  Description of Artificial Sequence: Synthetic oligonucleotide
auuuuauuuccauuggcaa

SEQ ID NO: 2662698 - RNA, 19 nt, Artificial Sequence
  Description of Artificial Sequence: Synthetic oligonucleotide
auuuccauuggcaagauaa

SEQ ID NO: 2662699 - RNA, 19 nt, Artificial Sequence
  Description of Artificial Sequence: Synthetic oligonucleotide
uaacaaugaguaaaauacu

SEQ ID NO: 2662700 - RNA, 19 nt, Artificial Sequence
  Description of Artificial Sequence: Synthetic oligonucleotide
uaaaauacugugguauuug

SEQ ID NO: 2662701 - RNA, 19 nt, Artificial Sequence
  Description of Artificial Sequence: Synthetic oligonucleotide
uuggcaagauaacaaugag

SEQ ID NO: 2662702 - RNA, 19 nt, Artificial Sequence
  Description of Artificial Sequence: Synthetic oligonucleotide
ugagcuuucuuucuucgcu

SEQ ID NO: 2662703 - RNA, 19 nt, Artificial Sequence
  Description of Artificial Sequence: Synthetic oligonucleotide
acugugguauuugacaaac

SEQ ID NO: 2662704 - RNA, 19 nt, Artificial Sequence
  Description of Artificial Sequence: Synthetic oligonucleotide
auauaaauuuaaucugccu

SEQ ID NO: 2662705 - RNA, 19 nt, Artificial Sequence
  Description of Artificial Sequence: Synthetic oligonucleotide
uucagaucuggcuucccgg

SEQ ID NO: 2662706 - RNA, 19 nt, Artificial Sequence
  Description of Artificial Sequence: Synthetic oligonucleotide
uucacuacgucguggagga

SEQ ID NO: 2662707 - RNA, 19 nt, Artificial Sequence
  Description of Artificial Sequence: Synthetic oligonucleotide
uuugaauuucucccgugcu

SEQ ID NO: 2662708 - RNA, 19 nt, Artificial Sequence
  Description of Artificial Sequence: Synthetic oligonucleotide
auucaugggcgucaucugg

SEQ ID NO: 2662709 - RNA, 19 nt, Artificial Sequence
  Description of Artificial Sequence: Synthetic oligonucleotide
augagguauaaauauaaua

SEQ ID NO: 2662710 - RNA, 19 nt, Artificial Sequence
  Description of Artificial Sequence: Synthetic oligonucleotide
uguguggaaaguugccccg

SEQ ID NO: 2662711 - RNA, 19 nt, Artificial Sequence
  Description of Artificial Sequence: Synthetic oligonucleotide
uuuacaacugaugauugau

SEQ ID NO: 2662712 - RNA, 19 nt, Artificial Sequence
  Description of Artificial Sequence: Synthetic oligonucleotide
cuuugaauuucucccgugc

SEQ ID NO: 2662713 - RNA, 19 nt, Artificial Sequence
  Description of Artificial Sequence: Synthetic oligonucleotide
cugggcugcagcuugauug

SEQ ID NO: 2662714 - RNA, 19 nt, Artificial Sequence
  Description of Artificial Sequence: Synthetic oligonucleotide
aaacaagcccaccuuuuga

SEQ ID NO: 2662715 - RNA, 19 nt, Artificial Sequence
  Description of Artificial Sequence: Synthetic oligonucleotide
ugauaccaacaauugaggu

SEQ ID NO: 2662716 - RNA, 19 nt, Artificial Sequence
  Description of Artificial Sequence: Synthetic oligonucleotide
aaguucacuacgucgugga

SEQ ID NO: 2662717 - RNA, 19 nt, Artificial Sequence
  Description of Artificial Sequence: Synthetic oligonucleotide
gauugauaccaacaauuga

SEQ ID NO: 2662718 - RNA, 19 nt, Artificial Sequence
  Description of Artificial Sequence: Synthetic oligonucleotide
gagcccuuggaugagaugc

SEQ ID NO: 2662719 - RNA, 19 nt, Artificial Sequence
  Description of Artificial Sequence: Synthetic oligonucleotide
uggcaauuauuuacaacug

SEQ ID NO: 2662720 - RNA, 19 nt, Artificial Sequence
  Description of Artificial Sequence: Synthetic oligonucleotide
uucaccaaguucacuacgu

SEQ ID NO: 2662721 - RNA, 19 nt, Artificial Sequence
  Description of Artificial Sequence: Synthetic oligonucleotide
ugccuuggcaauuauuuac

SEQ ID NO: 2662722 - RNA, 19 nt, Artificial Sequence
  Description of Artificial Sequence: Synthetic oligonucleotide
agauucaugggcgucaucu

SEQ ID NO: 2662723 - RNA, 19 nt, Artificial Sequence
  Description of Artificial Sequence: Synthetic oligonucleotide
caccaucucauauggaacc

SEQ ID NO: 2662724 - RNA, 19 nt, Artificial Sequence
  Description of Artificial Sequence: Synthetic oligonucleotide
uucuucgcuaaguuaaggu

SEQ ID NO: 2662725 - RNA, 19 nt, Artificial Sequence
  Description of Artificial Sequence: Synthetic oligonucleotide
ucauugagguccuucagau

SEQ ID NO: 2662726 - RNA, 19 nt, Artificial Sequence
  Description of Artificial Sequence: Synthetic oligonucleotide
uauguguggaaaguugccc

SEQ ID NO: 2662727 - RNA, 19 nt, Artificial Sequence
  Description of Artificial Sequence: Synthetic oligonucleotide
gauaccaacaauugaggua

SEQ ID NO: 2662728 - RNA, 19 nt, Artificial Sequence
  Description of Artificial Sequence: Synthetic oligonucleotide
aacaagcccaccuuuugaa

SEQ ID NO: 2662729 - RNA, 19 nt, Artificial Sequence
  Description of Artificial Sequence: Synthetic oligonucleotide
caccaaguucacuacgucg

SEQ ID NO: 2662730 - RNA, 19 nt, Artificial Sequence
  Description of Artificial Sequence: Synthetic oligonucleotide
ucccaagucuuccaggcug

SEQ ID NO: 2662731 - RNA, 19 nt, Artificial Sequence
  Description of Artificial Sequence: Synthetic oligonucleotide
uggcaagauaacaaugagu

SEQ ID NO: 2662732 - RNA, 19 nt, Artificial Sequence
  Description of Artificial Sequence: Synthetic oligonucleotide
aaaguugccccgcucucug

SEQ ID NO: 2662733 - RNA, 19 nt, Artificial Sequence
  Description of Artificial Sequence: Synthetic oligonucleotide
gaucaugugggcgagcccc

SEQ ID NO: 2662734 - RNA, 19 nt, Artificial Sequence
  Description of Artificial Sequence: Synthetic oligonucleotide
aagauaacaaugaguaaaa

SEQ ID NO: 2662735 - RNA, 19 nt, Artificial Sequence
  Description of Artificial Sequence: Synthetic oligonucleotide
auuucuuuuggaugacucu

SEQ ID NO: 2662736 - RNA, 19 nt, Artificial Sequence
  Description of Artificial Sequence: Synthetic oligonucleotide
cauuggcaagauaacaaug

SEQ ID NO: 2662737 - RNA, 19 nt, Artificial Sequence
  Description of Artificial Sequence: Synthetic oligonucleotide
uucuuuuggaugacucuug

SEQ ID NO: 2662738 - RNA, 19 nt, Artificial Sequence
  Description of Artificial Sequence: Synthetic oligonucleotide
agaucuggcuucccggugg

SEQ ID NO: 2662739 - RNA, 19 nt, Artificial Sequence
  Description of Artificial Sequence: Synthetic oligonucleotide
agcaccaucucauauggaa

SEQ ID NO: 2662740 - RNA, 19 nt, Artificial Sequence
  Description of Artificial Sequence: Synthetic oligonucleotide
auuggcaagauaacaauga

SEQ ID NO: 2662741 - RNA, 19 nt, Artificial Sequence
  Description of Artificial Sequence: Synthetic oligonucleotide
uucugugaucaugugggcg

SEQ ID NO: 2662742 - RNA, 19 nt, Artificial Sequence
  Description of Artificial Sequence: Synthetic oligonucleotide
aaccucaaagagccgguug

SEQ ID NO: 2662743 - RNA, 19 nt, Artificial Sequence
  Description of Artificial Sequence: Synthetic oligonucleotide
auucugugaucaugugggc

SEQ ID NO: 2662744 - RNA, 19 nt, Artificial Sequence
  Description of Artificial Sequence: Synthetic oligonucleotide
uggaaaguugccccgcucu

SEQ ID NO: 2662745 - RNA, 19 nt, Artificial Sequence
  Description of Artificial Sequence: Synthetic oligonucleotide
caacugaugauugauacca

SEQ ID NO: 2662746 - RNA, 19 nt, Artificial Sequence
  Description of Artificial Sequence: Synthetic oligonucleotide
uugaaagcaggucuguguu

SEQ ID NO: 2662747 - RNA, 19 nt, Artificial Sequence
  Description of Artificial Sequence: Synthetic oligonucleotide
auacugugguauuugacaa

SEQ ID NO: 2662748 - RNA, 19 nt, Artificial Sequence
  Description of Artificial Sequence: Synthetic oligonucleotide
cuuggcaauuauuuacaac

SEQ ID NO: 2662749 - RNA, 19 nt, Artificial Sequence
  Description of Artificial Sequence: Synthetic oligonucleotide
gaugagaugcuccagguau

SEQ ID NO: 2662750 - RNA, 19 nt, Artificial Sequence
  Description of Artificial Sequence: Synthetic oligonucleotide
uggagcaccaucucauaug

SEQ ID NO: 2662751 - RNA, 19 nt, Artificial Sequence
  Description of Artificial Sequence: Synthetic oligonucleotide
uuucuucgcuaaguuaagg

SEQ ID NO: 2662752 - RNA, 19 nt, Artificial Sequence
  Description of Artificial Sequence: Synthetic oligonucleotide
ggagcaccaucucauaugg

SEQ ID NO: 2662753 - RNA, 19 nt, Artificial Sequence
  Description of Artificial Sequence: Synthetic oligonucleotide
augauugauaccaacaauu

SEQ ID NO: 2662754 - RNA, 19 nt, Artificial Sequence
  Description of Artificial Sequence: Synthetic oligonucleotide
cuucgcuaaguuaagguga

SEQ ID NO: 2662755 - RNA, 19 nt, Artificial Sequence
  Description of Artificial Sequence: Synthetic oligonucleotide
uacaugagguauaaauaua

SEQ ID NO: 2662756 - RNA, 19 nt, Artificial Sequence
  Description of Artificial Sequence: Synthetic oligonucleotide
aguugccccgcucucugcc

SEQ ID NO: 2662757 - RNA, 19 nt, Artificial Sequence
  Description of Artificial Sequence: Synthetic oligonucleotide
guucacuacgucguggagg

SEQ ID NO: 2662758 - RNA, 19 nt, Artificial Sequence
  Description of Artificial Sequence: Synthetic oligonucleotide
uccagguauguguggaaag

SEQ ID NO: 2662759 - RNA, 19 nt, Artificial Sequence
  Description of Artificial Sequence: Synthetic oligonucleotide
auuuacaacugaugauuga

SEQ ID NO: 2662760 - RNA, 19 nt, Artificial Sequence
  Description of Artificial Sequence: Synthetic oligonucleotide
guucccaagucuuccaggc

SEQ ID NO: 2662761 - RNA, 19 nt, Artificial Sequence
  Description of Artificial Sequence: Synthetic oligonucleotide
uuuaaucugccuuggcaau

SEQ ID NO: 2662762 - RNA, 19 nt, Artificial Sequence
  Description of Artificial Sequence: Synthetic oligonucleotide
ucuguguugucugggcugg

SEQ ID NO: 2662763 - RNA, 19 nt, Artificial Sequence
  Description of Artificial Sequence: Synthetic oligonucleotide
aguaaaauacugugguauu

SEQ ID NO: 2662764 - RNA, 19 nt, Artificial Sequence
  Description of Artificial Sequence: Synthetic oligonucleotide
ggguguguggauuucagcc

SEQ ID NO: 2662765 - RNA, 19 nt, Artificial Sequence
  Description of Artificial Sequence: Synthetic oligonucleotide
cugaugauugauaccaaca

SEQ ID NO: 2662766 - RNA, 19 nt, Artificial Sequence
  Description of Artificial Sequence: Synthetic oligonucleotide
cuucagaucuggcuucccg

SEQ ID NO: 2662767 - RNA, 19 nt, Artificial Sequence
  Description of Artificial Sequence: Synthetic oligonucleotide
uuacaacugaugauugaua

SEQ ID NO: 2662768 - RNA, 19 nt, Artificial Sequence
  Description of Artificial Sequence: Synthetic oligonucleotide
uuucuuucuucgcuaaguu

SEQ ID NO: 2662769 - RNA, 19 nt, Artificial Sequence
  Description of Artificial Sequence: Synthetic oligonucleotide
acaaugaguaaaauacugu

SEQ ID NO: 2662770 - RNA, 19 nt, Artificial Sequence
  Description of Artificial Sequence: Synthetic oligonucleotide
cagacacacggccagauuc

SEQ ID NO: 2662771 - RNA, 19 nt, Artificial Sequence
  Description of Artificial Sequence: Synthetic oligonucleotide
acuacgucguggaggaagc

SEQ ID NO: 2662772 - RNA, 19 nt, Artificial Sequence
  Description of Artificial Sequence: Synthetic oligonucleotide
uucgcuaaguuaaggugaa

SEQ ID NO: 2662773 - RNA, 19 nt, Artificial Sequence
  Description of Artificial Sequence: Synthetic oligonucleotide
ggcaagauaacaaugagua

SEQ ID NO: 2662774 - RNA, 19 nt, Artificial Sequence
  Description of Artificial Sequence: Synthetic oligonucleotide
ugggacaggugacccaucc

SEQ ID NO: 2662775 - RNA, 19 nt, Artificial Sequence
  Description of Artificial Sequence: Synthetic oligonucleotide
uucaugggcgucaucuggu

SEQ ID NO: 2662776 - RNA, 19 nt, Artificial Sequence
  Description of Artificial Sequence: Synthetic oligonucleotide
uuuugaaagcaggucugug

SEQ ID NO: 2662777 - RNA, 19 nt, Artificial Sequence
  Description of Artificial Sequence: Synthetic oligonucleotide
aaguugccccgcucucugc

SEQ ID NO: 2662778 - RNA, 19 nt, Artificial Sequence
  Description of Artificial Sequence: Synthetic oligonucleotide
uuucuuuuggaugacucuu

SEQ ID NO: 2662779 - RNA, 19 nt, Artificial Sequence
  Description of Artificial Sequence: Synthetic oligonucleotide
guugcauucugugaucaug

SEQ ID NO: 2662780 - RNA, 19 nt, Artificial Sequence
  Description of Artificial Sequence: Synthetic oligonucleotide
ugaguaaaauacuguggua

SEQ ID NO: 2662781 - RNA, 19 nt, Artificial Sequence
  Description of Artificial Sequence: Synthetic oligonucleotide
cuuucuucgcuaaguuaag

SEQ ID NO: 2662782 - RNA, 19 nt, Artificial Sequence
  Description of Artificial Sequence: Synthetic oligonucleotide
gauucaugggcgucaucug

SEQ ID NO: 2662783 - RNA, 19 nt, Artificial Sequence
  Description of Artificial Sequence: Synthetic oligonucleotide
uguugucugggcugggaca

SEQ ID NO: 2662784 - RNA, 19 nt, Artificial Sequence
  Description of Artificial Sequence: Synthetic oligonucleotide
uugaauuucucccgugcuu

SEQ ID NO: 2662785 - RNA, 19 nt, Artificial Sequence
  Description of Artificial Sequence: Synthetic oligonucleotide
uuugacaaacaagcccacc

SEQ ID NO: 2662786 - RNA, 19 nt, Artificial Sequence
  Description of Artificial Sequence: Synthetic oligonucleotide
gguggcguauuucuuuugg

SEQ ID NO: 2662787 - RNA, 19 nt, Artificial Sequence
  Description of Artificial Sequence: Synthetic oligonucleotide
auauaauauuuaaaugcaa

SEQ ID NO: 2662788 - RNA, 19 nt, Artificial Sequence
  Description of Artificial Sequence: Synthetic oligonucleotide
caaacaagcccaccuuuug

SEQ ID NO: 2662789 - RNA, 19 nt, Artificial Sequence
  Description of Artificial Sequence: Synthetic oligonucleotide
gaguaaaauacugugguau

SEQ ID NO: 2662790 - RNA, 19 nt, Artificial Sequence
  Description of Artificial Sequence: Synthetic oligonucleotide
agguccuucagaucuggcu

SEQ ID NO: 2662791 - RNA, 19 nt, Artificial Sequence
  Description of Artificial Sequence: Synthetic oligonucleotide
uggcguauuucuuuuggau

SEQ ID NO: 2662792 - RNA, 19 nt, Artificial Sequence
  Description of Artificial Sequence: Synthetic oligonucleotide
aaggugaaagagggagggg

SEQ ID NO: 2662793 - RNA, 19 nt, Artificial Sequence
  Description of Artificial Sequence: Synthetic oligonucleotide
uguggauuucagccuccag

SEQ ID NO: 2662794 - RNA, 19 nt, Artificial Sequence
  Description of Artificial Sequence: Synthetic oligonucleotide
ggcguauuucuuuuggaug

SEQ ID NO: 2662795 - RNA, 19 nt, Artificial Sequence
  Description of Artificial Sequence: Synthetic oligonucleotide
ucagaucuggcuucccggu

SEQ ID NO: 2662796 - RNA, 19 nt, Artificial Sequence
  Description of Artificial Sequence: Synthetic oligonucleotide
uguguucccaagucuucca

SEQ ID NO: 2662797 - RNA, 19 nt, Artificial Sequence
  Description of Artificial Sequence: Synthetic oligonucleotide
auuucagccuccagguagg

SEQ ID NO: 2662798 - RNA, 19 nt, Artificial Sequence
  Description of Artificial Sequence: Synthetic oligonucleotide
gguauuugacaaacaagcc

SEQ ID NO: 2662799 - RNA, 19 nt, Artificial Sequence
  Description of Artificial Sequence: Synthetic oligonucleotide
ugacaaacaagcccaccuu

SEQ ID NO: 2662800 - RNA, 19 nt, Artificial Sequence
  Description of Artificial Sequence: Synthetic oligonucleotide
ucaaagagccgguugcauu

SEQ ID NO: 2662801 - RNA, 19 nt, Artificial Sequence
  Description of Artificial Sequence: Synthetic oligonucleotide
uucuuucuucgcuaaguua

SEQ ID NO: 2662802 - RNA, 19 nt, Artificial Sequence
  Description of Artificial Sequence: Synthetic oligonucleotide
gguauguguggaaaguugc

SEQ ID NO: 2662803 - RNA, 19 nt, Artificial Sequence
  Description of Artificial Sequence: Synthetic oligonucleotide
uucccgguggcguauuucu

SEQ ID NO: 2662804 - RNA, 19 nt, Artificial Sequence
  Description of Artificial Sequence: Synthetic oligonucleotide
ugagguccuucagaucugg

SEQ ID NO: 2662805 - RNA, 19 nt, Artificial Sequence
  Description of Artificial Sequence: Synthetic oligonucleotide
caaguucacuacgucgugg

SEQ ID NO: 2662806 - RNA, 19 nt, Artificial Sequence
  Description of Artificial Sequence: Synthetic oligonucleotide
cugguucucuuucaccaag

SEQ ID NO: 2662807 - RNA, 19 nt, Artificial Sequence
  Description of Artificial Sequence: Synthetic oligonucleotide
auuugacaaacaagcccac

SEQ ID NO: 2662808 - RNA, 19 nt, Artificial Sequence
  Description of Artificial Sequence: Synthetic oligonucleotide
guugucugggcugggacag

SEQ ID NO: 2662809 - RNA, 19 nt, Artificial Sequence
  Description of Artificial Sequence: Synthetic oligonucleotide
acaggugacccauccuuug

SEQ ID NO: 2662810 - RNA, 19 nt, Artificial Sequence
  Description of Artificial Sequence: Synthetic oligonucleotide
gucuguguugucugggcug

SEQ ID NO: 2662811 - RNA, 19 nt, Artificial Sequence
  Description of Artificial Sequence: Synthetic oligonucleotide
uguggaaaguugccccgcu

SEQ ID NO: 2662812 - RNA, 19 nt, Artificial Sequence
  Description of Artificial Sequence: Synthetic oligonucleotide
acggccagauucaugggcg

SEQ ID NO: 2662813 - RNA, 19 nt, Artificial Sequence
  Description of Artificial Sequence: Synthetic oligonucleotide
ugguucucuuucaccaagu

SEQ ID NO: 2662814 - RNA, 19 nt, Artificial Sequence
  Description of Artificial Sequence: Synthetic oligonucleotide
cacuacgucguggaggaag

SEQ ID NO: 2662815 - RNA, 19 nt, Artificial Sequence
  Description of Artificial Sequence: Synthetic oligonucleotide
ugcauucugugaucaugug

SEQ ID NO: 2662816 - RNA, 19 nt, Artificial Sequence
  Description of Artificial Sequence: Synthetic oligonucleotide
agguauguguggaaaguug

SEQ ID NO: 2662817 - RNA, 19 nt, Artificial Sequence
  Description of Artificial Sequence: Synthetic oligonucleotide
gugaucaugugggcgagcc

SEQ ID NO: 2662818 - RNA, 19 nt, Artificial Sequence
  Description of Artificial Sequence: Synthetic oligonucleotide
cacggccagauucaugggc

SEQ ID NO: 2662819 - RNA, 19 nt, Artificial Sequence
  Description of Artificial Sequence: Synthetic oligonucleotide
aguucacuacgucguggag

SEQ ID NO: 2662820 - RNA, 19 nt, Artificial Sequence
  Description of Artificial Sequence: Synthetic oligonucleotide
uggguguguggauuucagc

SEQ ID NO: 2662821 - RNA, 19 nt, Artificial Sequence
  Description of Artificial Sequence: Synthetic oligonucleotide
cucccgugcuucuuucugg

SEQ ID NO: 2662822 - RNA, 19 nt, Artificial Sequence
  Description of Artificial Sequence: Synthetic oligonucleotide
gagccgguugcauucugug

SEQ ID NO: 2662823 - RNA, 19 nt, Artificial Sequence
  Description of Artificial Sequence: Synthetic oligonucleotide
ggaaauauuuaauguauau

SEQ ID NO: 2662824 - RNA, 19 nt, Artificial Sequence
  Description of Artificial Sequence: Synthetic oligonucleotide
ugaucaugugggcgagccc

SEQ ID NO: 2662825 - RNA, 19 nt, Artificial Sequence
  Description of Artificial Sequence: Synthetic oligonucleotide
ggcaauuauuuacaacuga

SEQ ID NO: 2662826 - RNA, 19 nt, Artificial Sequence
  Description of Artificial Sequence: Synthetic oligonucleotide
gaagcacaggagugucugc

SEQ ID NO: 2662827 - RNA, 19 nt, Artificial Sequence
  Description of Artificial Sequence: Synthetic oligonucleotide
uacugugguauuugacaaa

SEQ ID NO: 2662828 - RNA, 19 nt, Artificial Sequence
  Description of Artificial Sequence: Synthetic oligonucleotide
cuguguucccaagucuucc

SEQ ID NO: 2662829 - RNA, 19 nt, Artificial Sequence
  Description of Artificial Sequence: Synthetic oligonucleotide
agucuuccaggcugggugu

SEQ ID NO: 2662830 - RNA, 19 nt, Artificial Sequence
  Description of Artificial Sequence: Synthetic oligonucleotide
gaaagcaggucuguguugu

SEQ ID NO: 2662831 - RNA, 19 nt, Artificial Sequence
  Description of Artificial Sequence: Synthetic oligonucleotide
guguguggauuucagccuc

SEQ ID NO: 2662832 - RNA, 19 nt, Artificial Sequence
  Description of Artificial Sequence: Synthetic oligonucleotide
ugacucuuggugagcuuuc

SEQ ID NO: 2662833 - RNA, 19 nt, Artificial Sequence
  Description of Artificial Sequence: Synthetic oligonucleotide
uacgucguggaggaagcac

SEQ ID NO: 2662834 - RNA, 19 nt, Artificial Sequence
  Description of Artificial Sequence: Synthetic oligonucleotide
aaagagccgguugcauucu

SEQ ID NO: 2662835 - RNA, 19 nt, Artificial Sequence
  Description of Artificial Sequence: Synthetic oligonucleotide
agauaacaaugaguaaaau

SEQ ID NO: 2662836 - RNA, 19 nt, Artificial Sequence
  Description of Artificial Sequence: Synthetic oligonucleotide
acaagcccaccuuuugaaa

SEQ ID NO: 2662837 - RNA, 19 nt, Artificial Sequence
  Description of Artificial Sequence: Synthetic oligonucleotide
uaaucugccuuggcaauua

SEQ ID NO: 2662838 - RNA, 19 nt, Artificial Sequence
  Description of Artificial Sequence: Synthetic oligonucleotide
ucccgugcuucuuucugga

SEQ ID NO: 2662839 - RNA, 19 nt, Artificial Sequence
  Description of Artificial Sequence: Synthetic oligonucleotide
cuuggaugagaugcuccag

SEQ ID NO: 2662840 - RNA, 19 nt, Artificial Sequence
  Description of Artificial Sequence: Synthetic oligonucleotide
ggaagcacaggagugucug

SEQ ID NO: 2662841 - RNA, 19 nt, Artificial Sequence
  Description of Artificial Sequence: Synthetic oligonucleotide
gaucuggcuucccgguggc

SEQ ID NO: 2662842 - RNA, 19 nt, Artificial Sequence
  Description of Artificial Sequence: Synthetic oligonucleotide
uauuuccauuggcaagaua

SEQ ID NO: 2662843 - RNA, 19 nt, Artificial Sequence
  Description of Artificial Sequence: Synthetic oligonucleotide
uuaaucugccuuggcaauu

SEQ ID NO: 2662844 - RNA, 19 nt, Artificial Sequence
  Description of Artificial Sequence: Synthetic oligonucleotide
cagguaggagcuccgggac

SEQ ID NO: 2662845 - RNA, 19 nt, Artificial Sequence
  Description of Artificial Sequence: Synthetic oligonucleotide
aggaaauauuuaauguaua

SEQ ID NO: 2662846 - RNA, 19 nt, Artificial Sequence
  Description of Artificial Sequence: Synthetic oligonucleotide
uguguugucugggcuggga

SEQ ID NO: 2662847 - RNA, 19 nt, Artificial Sequence
  Description of Artificial Sequence: Synthetic oligonucleotide
acacggccagauucauggg

SEQ ID NO: 2662848 - RNA, 19 nt, Artificial Sequence
  Description of Artificial Sequence: Synthetic oligonucleotide
augacucuuggugagcuuu

SEQ ID NO: 2662849 - RNA, 19 nt, Artificial Sequence
  Description of Artificial Sequence: Synthetic oligonucleotide
ugggcgagccccugggcug

SEQ ID NO: 2662850 - RNA, 19 nt, Artificial Sequence
  Description of Artificial Sequence: Synthetic oligonucleotide
cgugcuucuuucuggagcc

SEQ ID NO: 2662851 - RNA, 19 nt, Artificial Sequence
  Description of Artificial Sequence: Synthetic oligonucleotide
caccuuuugaaagcagguc

SEQ ID NO: 2662852 - RNA, 19 nt, Artificial Sequence
  Description of Artificial Sequence: Synthetic oligonucleotide
caugugggcgagccccugg

SEQ ID NO: 2662853 - RNA, 19 nt, Artificial Sequence
  Description of Artificial Sequence: Synthetic oligonucleotide
ggagcuccgggacuggagc

SEQ ID NO: 2662854 - RNA, 19 nt, Artificial Sequence
  Description of Artificial Sequence: Synthetic oligonucleotide
guggaggaagcacaggagu

SEQ ID NO: 2662855 - RNA, 19 nt, Artificial Sequence
  Description of Artificial Sequence: Synthetic oligonucleotide
uggaugacucuuggugagc

SEQ ID NO: 2662856 - RNA, 19 nt, Artificial Sequence
  Description of Artificial Sequence: Synthetic oligonucleotide
aggugacccauccuuugaa

SEQ ID NO: 2662857 - RNA, 19 nt, Artificial Sequence
  Description of Artificial Sequence: Synthetic oligonucleotide
accaucucauauggaaccu

SEQ ID NO: 2662858 - RNA, 19 nt, Artificial Sequence
  Description of Artificial Sequence: Synthetic oligonucleotide
ugugggcgagccccugggc

SEQ ID NO: 2662859 - RNA, 19 nt, Artificial Sequence
  Description of Artificial Sequence: Synthetic oligonucleotide
gacaaacaagcccaccuuu

SEQ ID NO: 2662860 - RNA, 19 nt, Artificial Sequence
  Description of Artificial Sequence: Synthetic oligonucleotide
aacugaugauugauaccaa

SEQ ID NO: 2662861 - RNA, 19 nt, Artificial Sequence
  Description of Artificial Sequence: Synthetic oligonucleotide
guggcguauuucuuuugga

SEQ ID NO: 2662862 - RNA, 19 nt, Artificial Sequence
  Description of Artificial Sequence: Synthetic oligonucleotide
aguuaaggugaaagaggga

SEQ ID NO: 2662863 - RNA, 19 nt, Artificial Sequence
  Description of Artificial Sequence: Synthetic oligonucleotide
agacacacggccagauuca

SEQ ID NO: 2662864 - RNA, 19 nt, Artificial Sequence
  Description of Artificial Sequence: Synthetic oligonucleotide
agcuccgggacuggagcac

SEQ ID NO: 2662865 - RNA, 19 nt, Artificial Sequence
  Description of Artificial Sequence: Synthetic oligonucleotide
acaaacaagcccaccuuuu

SEQ ID NO: 2662866 - RNA, 19 nt, Artificial Sequence
  Description of Artificial Sequence: Synthetic oligonucleotide
acgucguggaggaagcaca

SEQ ID NO: 2662867 - RNA, 19 nt, Artificial Sequence
  Description of Artificial Sequence: Synthetic oligonucleotide
agguaggagcuccgggacu

SEQ ID NO: 2662868 - RNA, 19 nt, Artificial Sequence
  Description of Artificial Sequence: Synthetic oligonucleotide
gguaggagcuccgggacug

SEQ ID NO: 2662869 - RNA, 19 nt, Artificial Sequence
  Description of Artificial Sequence: Synthetic oligonucleotide
ccgugcuucuuucuggagc

SEQ ID NO: 2662870 - RNA, 19 nt, Artificial Sequence
  Description of Artificial Sequence: Synthetic oligonucleotide
ugugaucaugugggcgagc

SEQ ID NO: 2662871 - RNA, 19 nt, Artificial Sequence
  Description of Artificial Sequence: Synthetic oligonucleotide
caugagguauaaauauaau

SEQ ID NO: 2662872 - RNA, 19 nt, Artificial Sequence
  Description of Artificial Sequence: Synthetic oligonucleotide
cugggcugggacaggugac

SEQ ID NO: 2662873 - RNA, 19 nt, Artificial Sequence
  Description of Artificial Sequence: Synthetic oligonucleotide
caugggcgucaucugguuc

SEQ ID NO: 2662874 - RNA, 19 nt, Artificial Sequence
  Description of Artificial Sequence: Synthetic oligonucleotide
cagaucuggcuucccggug

SEQ ID NO: 2662875 - RNA, 19 nt, Artificial Sequence
  Description of Artificial Sequence: Synthetic oligonucleotide
ucaugggcgucaucugguu

SEQ ID NO: 2662876 - RNA, 19 nt, Artificial Sequence
  Description of Artificial Sequence: Synthetic oligonucleotide
gcaggucuguguugucugg

SEQ ID NO: 2662877 - RNA, 19 nt, Artificial Sequence
  Description of Artificial Sequence: Synthetic oligonucleotide
accaacaauugagguaaaa

SEQ ID NO: 2662878 - RNA, 19 nt, Artificial Sequence
  Description of Artificial Sequence: Synthetic oligonucleotide
cugugaucaugugggcgag

SEQ ID NO: 2662879 - RNA, 19 nt, Artificial Sequence
  Description of Artificial Sequence: Synthetic oligonucleotide
gcaauuauuuacaacugau

SEQ ID NO: 2662880 - RNA, 19 nt, Artificial Sequence
  Description of Artificial Sequence: Synthetic oligonucleotide
gucguggaggaagcacagg

SEQ ID NO: 2662881 - RNA, 19 nt, Artificial Sequence
  Description of Artificial Sequence: Synthetic oligonucleotide
guguggaaaguugccccgc

SEQ ID NO: 2662882 - RNA, 19 nt, Artificial Sequence
  Description of Artificial Sequence: Synthetic oligonucleotide
cugugguauuugacaaaca

SEQ ID NO: 2662883 - RNA, 19 nt, Artificial Sequence
  Description of Artificial Sequence: Synthetic oligonucleotide
gcaagauaacaaugaguaa

SEQ ID NO: 2662884 - RNA, 19 nt, Artificial Sequence
  Description of Artificial Sequence: Synthetic oligonucleotide
gagcuccgggacuggagca

SEQ ID NO: 2662885 - RNA, 19 nt, Artificial Sequence
  Description of Artificial Sequence: Synthetic oligonucleotide
ccagcuguguucccaaguc

SEQ ID NO: 2662886 - RNA, 19 nt, Artificial Sequence
  Description of Artificial Sequence: Synthetic oligonucleotide
uaccaacaauugagguaaa

SEQ ID NO: 2662887 - RNA, 19 nt, Artificial Sequence
  Description of Artificial Sequence: Synthetic oligonucleotide
ggaaaguugccccgcucuc

SEQ ID NO: 2662888 - RNA, 19 nt, Artificial Sequence
  Description of Artificial Sequence: Synthetic oligonucleotide
gacuggagcaccaucucau

SEQ ID NO: 2662889 - RNA, 19 nt, Artificial Sequence
  Description of Artificial Sequence: Synthetic oligonucleotide
agcccaccuuuugaaagca

SEQ ID NO: 2662890 - RNA, 19 nt, Artificial Sequence
  Description of Artificial Sequence: Synthetic oligonucleotide
ccuuugaauuucucccgug

SEQ ID NO: 2662891 - RNA, 19 nt, Artificial Sequence
  Description of Artificial Sequence: Synthetic oligonucleotide
guggaaaguugccccgcuc

SEQ ID NO: 2662892 - RNA, 19 nt, Artificial Sequence
  Description of Artificial Sequence: Synthetic oligonucleotide
gcaccaucucauauggaac

SEQ ID NO: 2662893 - RNA, 19 nt, Artificial Sequence
  Description of Artificial Sequence: Synthetic oligonucleotide
uuucagccuccagguagga

SEQ ID NO: 2662894 - RNA, 19 nt, Artificial Sequence
  Description of Artificial Sequence: Synthetic oligonucleotide
cuuuuggaugacucuuggu

SEQ ID NO: 2662895 - RNA, 19 nt, Artificial Sequence
  Description of Artificial Sequence: Synthetic oligonucleotide
auggaaccucaaagagccg

SEQ ID NO: 2662896 - RNA, 19 nt, Artificial Sequence
  Description of Artificial Sequence: Synthetic oligonucleotide
caggugacccauccuuuga

SEQ ID NO: 2662897 - RNA, 19 nt, Artificial Sequence
  Description of Artificial Sequence: Synthetic oligonucleotide
agagccgguugcauucugu

SEQ ID NO: 2662898 - RNA, 19 nt, Artificial Sequence
  Description of Artificial Sequence: Synthetic oligonucleotide
aggagcuccgggacuggag

SEQ ID NO: 2662899 - RNA, 19 nt, Artificial Sequence
  Description of Artificial Sequence: Synthetic oligonucleotide
guaggagcuccgggacugg

SEQ ID NO: 2662900 - RNA, 19 nt, Artificial Sequence
  Description of Artificial Sequence: Synthetic oligonucleotide
cugccuuggcaauuauuua

SEQ ID NO: 2662901 - RNA, 19 nt, Artificial Sequence
  Description of Artificial Sequence: Synthetic oligonucleotide
ucaugugggcgagccccug

SEQ ID NO: 2662902 - RNA, 19 nt, Artificial Sequence
  Description of Artificial Sequence: Synthetic oligonucleotide
gugacccauccuuugaauu

SEQ ID NO: 2662903 - RNA, 19 nt, Artificial Sequence
  Description of Artificial Sequence: Synthetic oligonucleotide
ccagguaggagcuccggga

SEQ ID NO: 2662904 - RNA, 19 nt, Artificial Sequence
  Description of Artificial Sequence: Synthetic oligonucleotide
aucucauauggaaccucaa

SEQ ID NO: 2662905 - RNA, 19 nt, Artificial Sequence
  Description of Artificial Sequence: Synthetic oligonucleotide
uaggagcuccgggacugga

SEQ ID NO: 2662906 - RNA, 19 nt, Artificial Sequence
  Description of Artificial Sequence: Synthetic oligonucleotide
cuucccgguggcguauuuc

SEQ ID NO: 2662907 - RNA, 19 nt, Artificial Sequence
  Description of Artificial Sequence: Synthetic oligonucleotide
ccaaguucacuacgucgug

SEQ ID NO: 2662908 - RNA, 19 nt, Artificial Sequence
  Description of Artificial Sequence: Synthetic oligonucleotide
aggcuggguguguggauuu

SEQ ID NO: 2662909 - RNA, 19 nt, Artificial Sequence
  Description of Artificial Sequence: Synthetic oligonucleotide
gcagcuugauugucauuga

SEQ ID NO: 2662910 - RNA, 19 nt, Artificial Sequence
  Description of Artificial Sequence: Synthetic oligonucleotide
guugccccgcucucugcca

SEQ ID NO: 2662911 - RNA, 19 nt, Artificial Sequence
  Description of Artificial Sequence: Synthetic oligonucleotide
cuccagguauguguggaaa

SEQ ID NO: 2662912 - RNA, 19 nt, Artificial Sequence
  Description of Artificial Sequence: Synthetic oligonucleotide
ucccgguggcguauuucuu

SEQ ID NO: 2662913 - RNA, 19 nt, Artificial Sequence
  Description of Artificial Sequence: Synthetic oligonucleotide
aucuggcuucccgguggcg

SEQ ID NO: 2662914 - RNA, 19 nt, Artificial Sequence
  Description of Artificial Sequence: Synthetic oligonucleotide
agcccuuggaugagaugcu

SEQ ID NO: 2662915 - RNA, 19 nt, Artificial Sequence
  Description of Artificial Sequence: Synthetic oligonucleotide
ggacaggugacccauccuu

SEQ ID NO: 2662916 - RNA, 19 nt, Artificial Sequence
  Description of Artificial Sequence: Synthetic oligonucleotide
aucaugugggcgagccccu

SEQ ID NO: 2662917 - RNA, 19 nt, Artificial Sequence
  Description of Artificial Sequence: Synthetic oligonucleotide
ucgcuaaguuaaggugaaa

SEQ ID NO: 2662918 - RNA, 19 nt, Artificial Sequence
  Description of Artificial Sequence: Synthetic oligonucleotide
ggaugagaugcuccaggua

SEQ ID NO: 2662919 - RNA, 19 nt, Artificial Sequence
  Description of Artificial Sequence: Synthetic oligonucleotide
gucuuccaggcugggugug

SEQ ID NO: 2662920 - RNA, 19 nt, Artificial Sequence
  Description of Artificial Sequence: Synthetic oligonucleotide
gccgguugcauucugugau

SEQ ID NO: 2662921 - RNA, 19 nt, Artificial Sequence
  Description of Artificial Sequence: Synthetic oligonucleotide
gccagauucaugggcguca

SEQ ID NO: 2662922 - RNA, 19 nt, Artificial Sequence
  Description of Artificial Sequence: Synthetic oligonucleotide
cuguguugucugggcuggg

SEQ ID NO: 2662923 - RNA, 19 nt, Artificial Sequence
  Description of Artificial Sequence: Synthetic oligonucleotide
gugggcgagccccugggcu

SEQ ID NO: 2662924 - RNA, 19 nt, Artificial Sequence
  Description of Artificial Sequence: Synthetic oligonucleotide
cagauucaugggcgucauc

SEQ ID NO: 2662925 - RNA, 19 nt, Artificial Sequence
  Description of Artificial Sequence: Synthetic oligonucleotide
ccuccagguaggagcuccg

SEQ ID NO: 2662926 - RNA, 19 nt, Artificial Sequence
  Description of Artificial Sequence: Synthetic oligonucleotide
gugcuucuuucuggagccc

SEQ ID NO: 2662927 - RNA, 19 nt, Artificial Sequence
  Description of Artificial Sequence: Synthetic oligonucleotide
cuggagcaccaucucauau

SEQ ID NO: 2662928 - RNA, 19 nt, Artificial Sequence
  Description of Artificial Sequence: Synthetic oligonucleotide
gaugacucuuggugagcuu

SEQ ID NO: 2662929 - RNA, 19 nt, Artificial Sequence
  Description of Artificial Sequence: Synthetic oligonucleotide
cgucguggaggaagcacag

SEQ ID NO: 2662930 - RNA, 19 nt, Artificial Sequence
  Description of Artificial Sequence: Synthetic oligonucleotide
gcuguguucccaagucuuc

SEQ ID NO: 2662931 - RNA, 19 nt, Artificial Sequence
  Description of Artificial Sequence: Synthetic oligonucleotide
ggaugacucuuggugagcu

SEQ ID NO: 2662932 - RNA, 19 nt, Artificial Sequence
  Description of Artificial Sequence: Synthetic oligonucleotide
gccccugggcugcagcuug

SEQ ID NO: 2662933 - RNA, 19 nt, Artificial Sequence
  Description of Artificial Sequence: Synthetic oligonucleotide
gacaggugacccauccuuu

SEQ ID NO: 2662934 - RNA, 19 nt, Artificial Sequence
  Description of Artificial Sequence: Synthetic oligonucleotide
ccauuggcaagauaacaau

SEQ ID NO: 2662935 - RNA, 19 nt, Artificial Sequence
  Description of Artificial Sequence: Synthetic oligonucleotide
uccgggacuggagcaccau

SEQ ID NO: 2662936 - RNA, 19 nt, Artificial Sequence
  Description of Artificial Sequence: Synthetic oligonucleotide
ccaccuuuugaaagcaggu

SEQ ID NO: 2662937 - RNA, 19 nt, Artificial Sequence
  Description of Artificial Sequence: Synthetic oligonucleotide
ggauuucagccuccaggua

SEQ ID NO: 2662938 - RNA, 19 nt, Artificial Sequence
  Description of Artificial Sequence: Synthetic oligonucleotide
ggugacccauccuuugaau

SEQ ID NO: 2662939 - RNA, 19 nt, Artificial Sequence
  Description of Artificial Sequence: Synthetic oligonucleotide
ccgguugcauucugugauc

SEQ ID NO: 2662940 - RNA, 19 nt, Artificial Sequence
  Description of Artificial Sequence: Synthetic oligonucleotide
cuccgggacuggagcacca

SEQ ID NO: 2662941 - RNA, 19 nt, Artificial Sequence
  Description of Artificial Sequence: Synthetic oligonucleotide
ggaaccucaaagagccggu

SEQ ID NO: 2662942 - RNA, 19 nt, Artificial Sequence
  Description of Artificial Sequence: Synthetic oligonucleotide
ccaagucuuccaggcuggg

SEQ ID NO: 2662943 - RNA, 19 nt, Artificial Sequence
  Description of Artificial Sequence: Synthetic oligonucleotide
cagguauguguggaaaguu

SEQ ID NO: 2662944 - RNA, 19 nt, Artificial Sequence
  Description of Artificial Sequence: Synthetic oligonucleotide
ggcugggacaggugaccca

SEQ ID NO: 2662945 - RNA, 19 nt, Artificial Sequence
  Description of Artificial Sequence: Synthetic oligonucleotide
uggcuucccgguggcguau

SEQ ID NO: 2662946 - RNA, 19 nt, Artificial Sequence
  Description of Artificial Sequence: Synthetic oligonucleotide
gaaccucaaagagccgguu

SEQ ID NO: 2662947 - RNA, 19 nt, Artificial Sequence
  Description of Artificial Sequence: Synthetic oligonucleotide
cucaaagagccgguugcau

SEQ ID NO: 2662948 - RNA, 19 nt, Artificial Sequence
  Description of Artificial Sequence: Synthetic oligonucleotide
cccgugcuucuuucuggag

SEQ ID NO: 2662949 - RNA, 19 nt, Artificial Sequence
  Description of Artificial Sequence: Synthetic oligonucleotide
cuacgucguggaggaagca

SEQ ID NO: 2662950 - RNA, 19 nt, Artificial Sequence
  Description of Artificial Sequence: Synthetic oligonucleotide
ggggccagacacacggcca

SEQ ID NO: 2662951 - RNA, 19 nt, Artificial Sequence
  Description of Artificial Sequence: Synthetic oligonucleotide
ucacuacgucguggaggaa

SEQ ID NO: 2662952 - RNA, 19 nt, Artificial Sequence
  Description of Artificial Sequence: Synthetic oligonucleotide
gccagcuguguucccaagu

SEQ ID NO: 2662953 - RNA, 19 nt, Artificial Sequence
  Description of Artificial Sequence: Synthetic oligonucleotide
caagucuuccaggcugggu

SEQ ID NO: 2662954 - RNA, 19 nt, Artificial Sequence
  Description of Artificial Sequence: Synthetic oligonucleotide
ggccagauucaugggcguc

SEQ ID NO: 2662955 - RNA, 19 nt, Artificial Sequence
  Description of Artificial Sequence: Synthetic oligonucleotide
ggcgucaucugguucucuu

SEQ ID NO: 2662956 - RNA, 19 nt, Artificial Sequence
  Description of Artificial Sequence: Synthetic oligonucleotide
ccagguauguguggaaagu

SEQ ID NO: 2662957 - RNA, 19 nt, Artificial Sequence
  Description of Artificial Sequence: Synthetic oligonucleotide
gguugcauucugugaucau

SEQ ID NO: 2662958 - RNA, 19 nt, Artificial Sequence
  Description of Artificial Sequence: Synthetic oligonucleotide
gcccuuggaugagaugcuc

SEQ ID NO: 2662959 - RNA, 19 nt, Artificial Sequence
  Description of Artificial Sequence: Synthetic oligonucleotide
ccgggacuggagcaccauc

SEQ ID NO: 2662960 - RNA, 19 nt, Artificial Sequence
  Description of Artificial Sequence: Synthetic oligonucleotide
gcugggacaggugacccau

SEQ ID NO: 2662961 - RNA, 19 nt, Artificial Sequence
  Description of Artificial Sequence: Synthetic oligonucleotide
gggcgagccccugggcugc

SEQ ID NO: 2662962 - RNA, 19 nt, Artificial Sequence
  Description of Artificial Sequence: Synthetic oligonucleotide
caggcuggguguguggauu

SEQ ID NO: 2662963 - RNA, 19 nt, Artificial Sequence
  Description of Artificial Sequence: Synthetic oligonucleotide
cgguggcguauuucuuuug

SEQ ID NO: 2662964 - RNA, 19 nt, Artificial Sequence
  Description of Artificial Sequence: Synthetic oligonucleotide
cccgcucucugccagcugu

SEQ ID NO: 2662965 - RNA, 19 nt, Artificial Sequence
  Description of Artificial Sequence: Synthetic oligonucleotide
cgguugcauucugugauca

SEQ ID NO: 2662966 - RNA, 19 nt, Artificial Sequence
  Description of Artificial Sequence: Synthetic oligonucleotide
gcgucaucugguucucuuu

SEQ ID NO: 2662967 - RNA, 19 nt, Artificial Sequence
  Description of Artificial Sequence: Synthetic oligonucleotide
cugcagcuugauugucauu

SEQ ID NO: 2662968 - RNA, 19 nt, Artificial Sequence
  Description of Artificial Sequence: Synthetic oligonucleotide
cccgguggcguauuucuuu

SEQ ID NO: 2662969 - RNA, 19 nt, Artificial Sequence
  Description of Artificial Sequence: Synthetic oligonucleotide
gccagacacacggccagau

SEQ ID NO: 2662970 - RNA, 19 nt, Artificial Sequence
  Description of Artificial Sequence: Synthetic oligonucleotide
ccagauucaugggcgucau

SEQ ID NO: 2662971 - RNA, 19 nt, Artificial Sequence
  Description of Artificial Sequence: Synthetic oligonucleotide
ccccgcucucugccagcug

SEQ ID NO: 2662972 - RNA, 19 nt, Artificial Sequence
  Description of Artificial Sequence: Synthetic oligonucleotide
ccagacacacggccagauu

SEQ ID NO: 2662973 - RNA, 19 nt, Artificial Sequence
  Description of Artificial Sequence: Synthetic oligonucleotide
ccaggcuggguguguggau

SEQ ID NO: 2662974 - RNA, 19 nt, Artificial Sequence
  Description of Artificial Sequence: Synthetic oligonucleotide
gcuucccgguggcguauuu

SEQ ID NO: 2662975 - RNA, 19 nt, Artificial Sequence
  Description of Artificial Sequence: Synthetic oligonucleotide
gggcgucaucugguucucu

SEQ ID NO: 2662976 - RNA, 19 nt, Artificial Sequence
  Description of Artificial Sequence: Synthetic oligonucleotide
cggccagauucaugggcgu

SEQ ID NO: 2662977 - RNA, 19 nt, Artificial Sequence
  Description of Artificial Sequence: Synthetic oligonucleotide
ggcgagccccugggcugca

SEQ ID NO: 2662978 - RNA, 19 nt, Artificial Sequence
  Description of Artificial Sequence: Synthetic oligonucleotide
ggcuucccgguggcguauu

SEQ ID NO: 2662979 - RNA, 19 nt, Artificial Sequence
  Description of Artificial Sequence: Synthetic oligonucleotide
aaacgaagaaguuacagcc

SEQ ID NO: 2662980 - RNA, 19 nt, Artificial Sequence
  Description of Artificial Sequence: Synthetic oligonucleotide
aaaaccauaucccaaggcc

SEQ ID NO: 2662981 - RNA, 19 nt, Artificial Sequence
  Description of Artificial Sequence: Synthetic oligonucleotide
aaagcauaaagucaugugg

SEQ ID NO: 2662982 - RNA, 19 nt, Artificial Sequence
  Description of Artificial Sequence: Synthetic oligonucleotide
aagguauacagacagcugc

SEQ ID NO: 2662983 - RNA, 19 nt, Artificial Sequence
  Description of Artificial Sequence: Synthetic oligonucleotide
gaaguuacagcccaaaucc

SEQ ID NO: 2662984 - RNA, 19 nt, Artificial Sequence
  Description of Artificial Sequence: Synthetic oligonucleotide
aaagggacaaagcauaaag

SEQ ID NO: 2662985 - RNA, 19 nt, Artificial Sequence
  Description of Artificial Sequence: Synthetic oligonucleotide
uuuaauauuagaugggaug

SEQ ID NO: 2662986 - RNA, 19 nt, Artificial Sequence
  Description of Artificial Sequence: Synthetic oligonucleotide
aauuacauuucucaguuga

SEQ ID NO: 2662987 - RNA, 19 nt, Artificial Sequence
  Description of Artificial Sequence: Synthetic oligonucleotide
uguggaaaauacaaauugg

SEQ ID NO: 2662988 - RNA, 19 nt, Artificial Sequence
  Description of Artificial Sequence: Synthetic oligonucleotide
aaagucauguggaaaauac

SEQ ID NO: 2662989 - RNA, 19 nt, Artificial Sequence
  Description of Artificial Sequence: Synthetic oligonucleotide
ucuagaguguuuuagaggu

SEQ ID NO: 2662990 - RNA, 19 nt, Artificial Sequence
  Description of Artificial Sequence: Synthetic oligonucleotide
acugauaaaggccucguac

SEQ ID NO: 2662991 - RNA, 19 nt, Artificial Sequence
  Description of Artificial Sequence: Synthetic oligonucleotide
ugggccuugauauucaugg

SEQ ID NO: 2662992 - RNA, 19 nt, Artificial Sequence
  Description of Artificial Sequence: Synthetic oligonucleotide
guaacuuuggucuccaggg

SEQ ID NO: 2662993 - RNA, 19 nt, Artificial Sequence
  Description of Artificial Sequence: Synthetic oligonucleotide
ucaaucagugauuauuagg

SEQ ID NO: 2662994 - RNA, 19 nt, Artificial Sequence
  Description of Artificial Sequence: Synthetic oligonucleotide
guugaagguauacagacag

SEQ ID NO: 2662995 - RNA, 19 nt, Artificial Sequence
  Description of Artificial Sequence: Synthetic oligonucleotide
gaacuugagagcuucagcc

SEQ ID NO: 2662996 - RNA, 19 nt, Artificial Sequence
  Description of Artificial Sequence: Synthetic oligonucleotide
ugucaaacgaagaaguuac

SEQ ID NO: 2662997 - RNA, 19 nt, Artificial Sequence
  Description of Artificial Sequence: Synthetic oligonucleotide
agaaguuacagcccaaauc

SEQ ID NO: 2662998 - RNA, 19 nt, Artificial Sequence
  Description of Artificial Sequence: Synthetic oligonucleotide
uuaauauuagaugggauga

SEQ ID NO: 2662999 - RNA, 19 nt, Artificial Sequence
  Description of Artificial Sequence: Synthetic oligonucleotide
auuccuaaggcauucuagg

SEQ ID NO: 2663000 - RNA, 19 nt, Artificial Sequence
  Description of Artificial Sequence: Synthetic oligonucleotide
aaucagugauuauuagggg

SEQ ID NO: 2663001 - RNA, 19 nt, Artificial Sequence
  Description of Artificial Sequence: Synthetic oligonucleotide
acaaauuggaggcaagauc

SEQ ID NO: 2663002 - RNA, 19 nt, Artificial Sequence
  Description of Artificial Sequence: Synthetic oligonucleotide
ucuccuacaguauccaagg

SEQ ID NO: 2663003 - RNA, 19 nt, Artificial Sequence
  Description of Artificial Sequence: Synthetic oligonucleotide
uuguaguucucuaaguccc

SEQ ID NO: 2663004 - RNA, 19 nt, Artificial Sequence
  Description of Artificial Sequence: Synthetic oligonucleotide
gcucuuuaauauuagaugg

SEQ ID NO: 2663005 - RNA, 19 nt, Artificial Sequence
  Description of Artificial Sequence: Synthetic oligonucleotide
ugauaaaggccucguaccg

SEQ ID NO: 2663006 - RNA, 19 nt, Artificial Sequence
  Description of Artificial Sequence: Synthetic oligonucleotide
ucaauuacauuucucaguu

SEQ ID NO: 2663007 - RNA, 19 nt, Artificial Sequence
  Description of Artificial Sequence: Synthetic oligonucleotide
aguaacuuuggucuccagg

SEQ ID NO: 2663008 - RNA, 19 nt, Artificial Sequence
  Description of Artificial Sequence: Synthetic oligonucleotide
uuuuagagguucuacagaa

SEQ ID NO: 2663009 - RNA, 19 nt, Artificial Sequence
  Description of Artificial Sequence: Synthetic oligonucleotide
cucaguugaagguauacag

SEQ ID NO: 2663010 - RNA, 19 nt, Artificial Sequence
  Description of Artificial Sequence: Synthetic oligonucleotide
uuagaugggaugaagcagu

SEQ ID NO: 2663011 - RNA, 19 nt, Artificial Sequence
  Description of Artificial Sequence: Synthetic oligonucleotide
ucuagcaucauguggauau

SEQ ID NO: 2663012 - RNA, 19 nt, Artificial Sequence
  Description of Artificial Sequence: Synthetic oligonucleotide
ugcaguacgucacugauaa

SEQ ID NO: 2663013 - RNA, 19 nt, Artificial Sequence
  Description of Artificial Sequence: Synthetic oligonucleotide
auauuagaugggaugaagc

SEQ ID NO: 2663014 - RNA, 19 nt, Artificial Sequence
  Description of Artificial Sequence: Synthetic oligonucleotide
uccaccugcauauauaacu

SEQ ID NO: 2663015 - RNA, 19 nt, Artificial Sequence
  Description of Artificial Sequence: Synthetic oligonucleotide
gaaaggaugggucuuccag

SEQ ID NO: 2663016 - RNA, 19 nt, Artificial Sequence
  Description of Artificial Sequence: Synthetic oligonucleotide
uaugugauuccuaaggcau

SEQ ID NO: 2663017 - RNA, 19 nt, Artificial Sequence
  Description of Artificial Sequence: Synthetic oligonucleotide
ugaggagagaacucuuucg

SEQ ID NO: 2663018 - RNA, 19 nt, Artificial Sequence
  Description of Artificial Sequence: Synthetic oligonucleotide
caaacgaagaaguuacagc

SEQ ID NO: 2663019 - RNA, 19 nt, Artificial Sequence
  Description of Artificial Sequence: Synthetic oligonucleotide
gaggagagaacucuuucgg

SEQ ID NO: 2663020 - RNA, 19 nt, Artificial Sequence
  Description of Artificial Sequence: Synthetic oligonucleotide
ucuacagaaaggauggguc

SEQ ID NO: 2663021 - RNA, 19 nt, Artificial Sequence
  Description of Artificial Sequence: Synthetic oligonucleotide
ucucuagaguguuuuagag

SEQ ID NO: 2663022 - RNA, 19 nt, Artificial Sequence
  Description of Artificial Sequence: Synthetic oligonucleotide
uacgucacugauaaaggcc

SEQ ID NO: 2663023 - RNA, 19 nt, Artificial Sequence
  Description of Artificial Sequence: Synthetic oligonucleotide
uugugucaaacgaagaagu

SEQ ID NO: 2663024 - RNA, 19 nt, Artificial Sequence
  Description of Artificial Sequence: Synthetic oligonucleotide
uccuacaguauccaaggcc

SEQ ID NO: 2663025 - RNA, 19 nt, Artificial Sequence
  Description of Artificial Sequence: Synthetic oligonucleotide
aacucuuucggucaaugaa

SEQ ID NO: 2663026 - RNA, 19 nt, Artificial Sequence
  Description of Artificial Sequence: Synthetic oligonucleotide
gucucgaugauccagcacc

SEQ ID NO: 2663027 - RNA, 19 nt, Artificial Sequence
  Description of Artificial Sequence: Synthetic oligonucleotide
uggauaugggccuugauau

SEQ ID NO: 2663028 - RNA, 19 nt, Artificial Sequence
  Description of Artificial Sequence: Synthetic oligonucleotide
ucaaacgaagaaguuacag

SEQ ID NO: 2663029 - RNA, 19 nt, Artificial Sequence
  Description of Artificial Sequence: Synthetic oligonucleotide
uagagguucuacagaaagg

SEQ ID NO: 2663030 - RNA, 19 nt, Artificial Sequence
  Description of Artificial Sequence: Synthetic oligonucleotide
ucuuuaauauuagauggga

SEQ ID NO: 2663031 - RNA, 19 nt, Artificial Sequence
  Description of Artificial Sequence: Synthetic oligonucleotide
cucuuuaauauuagauggg

SEQ ID NO: 2663032 - RNA, 19 nt, Artificial Sequence
  Description of Artificial Sequence: Synthetic oligonucleotide
acuccgagugcuuaguuuc

SEQ ID NO: 2663033 - RNA, 19 nt, Artificial Sequence
  Description of Artificial Sequence: Synthetic oligonucleotide
aacgaagaaguuacagccc

SEQ ID NO: 2663034 - RNA, 19 nt, Artificial Sequence
  Description of Artificial Sequence: Synthetic oligonucleotide
ugaagguauacagacagcu

SEQ ID NO: 2663035 - RNA, 19 nt, Artificial Sequence
  Description of Artificial Sequence: Synthetic oligonucleotide
cugauaaaggccucguacc

SEQ ID NO: 2663036 - RNA, 19 nt, Artificial Sequence
  Description of Artificial Sequence: Synthetic oligonucleotide
acagcccaaauccaccugc

SEQ ID NO: 2663037 - RNA, 19 nt, Artificial Sequence
  Description of Artificial Sequence: Synthetic oligonucleotide
uugauauucauggaguccu

SEQ ID NO: 2663038 - RNA, 19 nt, Artificial Sequence
  Description of Artificial Sequence: Synthetic oligonucleotide
auauauaacuccgagugcu

SEQ ID NO: 2663039 - RNA, 19 nt, Artificial Sequence
  Description of Artificial Sequence: Synthetic oligonucleotide
uucucuaagucccucuagc

SEQ ID NO: 2663040 - RNA, 19 nt, Artificial Sequence
  Description of Artificial Sequence: Synthetic oligonucleotide
cacauugugucaaacgaag

SEQ ID NO: 2663041 - RNA, 19 nt, Artificial Sequence
  Description of Artificial Sequence: Synthetic oligonucleotide
caguugaagguauacagac

SEQ ID NO: 2663042 - RNA, 19 nt, Artificial Sequence
  Description of Artificial Sequence: Synthetic oligonucleotide
aauccaccugcauauauaa

SEQ ID NO: 2663043 - RNA, 19 nt, Artificial Sequence
  Description of Artificial Sequence: Synthetic oligonucleotide
aaaggccucguaccgcagc

SEQ ID NO: 2663044 - RNA, 19 nt, Artificial Sequence
  Description of Artificial Sequence: Synthetic oligonucleotide
auugugucaaacgaagaag

SEQ ID NO: 2663045 - RNA, 19 nt, Artificial Sequence
  Description of Artificial Sequence: Synthetic oligonucleotide
aaaggaugggucuuccagu

SEQ ID NO: 2663046 - RNA, 19 nt, Artificial Sequence
  Description of Artificial Sequence: Synthetic oligonucleotide
ucaguugaagguauacaga

SEQ ID NO: 2663047 - RNA, 19 nt, Artificial Sequence
  Description of Artificial Sequence: Synthetic oligonucleotide
ucuaagucccucuagcauc

SEQ ID NO: 2663048 - RNA, 19 nt, Artificial Sequence
  Description of Artificial Sequence: Synthetic oligonucleotide
uucauggaguccuugguga

SEQ ID NO: 2663049 - RNA, 19 nt, Artificial Sequence
  Description of Artificial Sequence: Synthetic oligonucleotide
uuucggucaaugaacuuga

SEQ ID NO: 2663050 - RNA, 19 nt, Artificial Sequence
  Description of Artificial Sequence: Synthetic oligonucleotide
cucuagaguguuuuagagg

SEQ ID NO: 2663051 - RNA, 19 nt, Artificial Sequence
  Description of Artificial Sequence: Synthetic oligonucleotide
caguacgucacugauaaag

SEQ ID NO: 2663052 - RNA, 19 nt, Artificial Sequence
  Description of Artificial Sequence: Synthetic oligonucleotide
ucuuccaguaacuuugguc

SEQ ID NO: 2663053 - RNA, 19 nt, Artificial Sequence
  Description of Artificial Sequence: Synthetic oligonucleotide
uauaacuccgagugcuuag

SEQ ID NO: 2663054 - RNA, 19 nt, Artificial Sequence
  Description of Artificial Sequence: Synthetic oligonucleotide
auuagaugggaugaagcag

SEQ ID NO: 2663055 - RNA, 19 nt, Artificial Sequence
  Description of Artificial Sequence: Synthetic oligonucleotide
ggcuaugugauuccuaagg

SEQ ID NO: 2663056 - RNA, 19 nt, Artificial Sequence
  Description of Artificial Sequence: Synthetic oligonucleotide
agaagggcuaugugauucc

SEQ ID NO: 2663057 - RNA, 19 nt, Artificial Sequence
  Description of Artificial Sequence: Synthetic oligonucleotide
gaugggaugaagcagucaa

SEQ ID NO: 2663058 - RNA, 19 nt, Artificial Sequence
  Description of Artificial Sequence: Synthetic oligonucleotide
cauaaagucauguggaaaa

SEQ ID NO: 2663059 - RNA, 19 nt, Artificial Sequence
  Description of Artificial Sequence: Synthetic oligonucleotide
aagcauaaagucaugugga

SEQ ID NO: 2663060 - RNA, 19 nt, Artificial Sequence
  Description of Artificial Sequence: Synthetic oligonucleotide
cagacagcugcucauauac

SEQ ID NO: 2663061 - RNA, 19 nt, Artificial Sequence
  Description of Artificial Sequence: Synthetic oligonucleotide
caaagcauaaagucaugug

SEQ ID NO: 2663062 - RNA, 19 nt, Artificial Sequence
  Description of Artificial Sequence: Synthetic oligonucleotide
gauuccuaaggcauucuag

SEQ ID NO: 2663063 - RNA, 19 nt, Artificial Sequence
  Description of Artificial Sequence: Synthetic oligonucleotide
auaucccaaggccacauug

SEQ ID NO: 2663064 - RNA, 19 nt, Artificial Sequence
  Description of Artificial Sequence: Synthetic oligonucleotide
acuugagagcuucagccag

SEQ ID NO: 2663065 - RNA, 19 nt, Artificial Sequence
  Description of Artificial Sequence: Synthetic oligonucleotide
agagguucuacagaaagga

SEQ ID NO: 2663066 - RNA, 19 nt, Artificial Sequence
  Description of Artificial Sequence: Synthetic oligonucleotide
ucccucuagcaucaugugg

SEQ ID NO: 2663067 - RNA, 19 nt, Artificial Sequence
  Description of Artificial Sequence: Synthetic oligonucleotide
auauaccuugucucgauga

SEQ ID NO: 2663068 - RNA, 19 nt, Artificial Sequence
  Description of Artificial Sequence: Synthetic oligonucleotide
aacuugagagcuucagcca

SEQ ID NO: 2663069 - RNA, 19 nt, Artificial Sequence
  Description of Artificial Sequence: Synthetic oligonucleotide
aaauacaaauuggaggcaa

SEQ ID NO: 2663070 - RNA, 19 nt, Artificial Sequence
  Description of Artificial Sequence: Synthetic oligonucleotide
aaccauaucccaaggccac

SEQ ID NO: 2663071 - RNA, 19 nt, Artificial Sequence
  Description of Artificial Sequence: Synthetic oligonucleotide
ugcauauauaacuccgagu

SEQ ID NO: 2663072 - RNA, 19 nt, Artificial Sequence
  Description of Artificial Sequence: Synthetic oligonucleotide
cuuaguuuccuggagucgc

SEQ ID NO: 2663073 - RNA, 19 nt, Artificial Sequence
  Description of Artificial Sequence: Synthetic oligonucleotide
uauucauggaguccuuggu

SEQ ID NO: 2663074 - RNA, 19 nt, Artificial Sequence
  Description of Artificial Sequence: Synthetic oligonucleotide
gaucucuagaguguuuuag

SEQ ID NO: 2663075 - RNA, 19 nt, Artificial Sequence
  Description of Artificial Sequence: Synthetic oligonucleotide
ggcucuuuaauauuagaug

SEQ ID NO: 2663076 - RNA, 19 nt, Artificial Sequence
  Description of Artificial Sequence: Synthetic oligonucleotide
auucuaggcucuuuaauau

SEQ ID NO: 2663077 - RNA, 19 nt, Artificial Sequence
  Description of Artificial Sequence: Synthetic oligonucleotide
ugucgcugagcucugugag

SEQ ID NO: 2663078 - RNA, 19 nt, Artificial Sequence
  Description of Artificial Sequence: Synthetic oligonucleotide
cauauauaacuccgagugc

SEQ ID NO: 2663079 - RNA, 19 nt, Artificial Sequence
  Description of Artificial Sequence: Synthetic oligonucleotide
aauacaaauuggaggcaag

SEQ ID NO: 2663080 - RNA, 19 nt, Artificial Sequence
  Description of Artificial Sequence: Synthetic oligonucleotide
cuuucggucaaugaacuug

SEQ ID NO: 2663081 - RNA, 19 nt, Artificial Sequence
  Description of Artificial Sequence: Synthetic oligonucleotide
aggcaagaucucuagagug

SEQ ID NO: 2663082 - RNA, 19 nt, Artificial Sequence
  Description of Artificial Sequence: Synthetic oligonucleotide
aguacgucacugauaaagg

SEQ ID NO: 2663083 - RNA, 19 nt, Artificial Sequence
  Description of Artificial Sequence: Synthetic oligonucleotide
gaaagagaagggcuaugug

SEQ ID NO: 2663084 - RNA, 19 nt, Artificial Sequence
  Description of Artificial Sequence: Synthetic oligonucleotide
ccuacaguauccaaggccc

SEQ ID NO: 2663085 - RNA, 19 nt, Artificial Sequence
  Description of Artificial Sequence: Synthetic oligonucleotide
agugcuuaguuuccuggag

SEQ ID NO: 2663086 - RNA, 19 nt, Artificial Sequence
  Description of Artificial Sequence: Synthetic oligonucleotide
ggaggcaagaucucuagag

SEQ ID NO: 2663087 - RNA, 19 nt, Artificial Sequence
  Description of Artificial Sequence: Synthetic oligonucleotide
acgaagaaguuacagccca

SEQ ID NO: 2663088 - RNA, 19 nt, Artificial Sequence
  Description of Artificial Sequence: Synthetic oligonucleotide
cuugauauucauggagucc

SEQ ID NO: 2663089 - RNA, 19 nt, Artificial Sequence
  Description of Artificial Sequence: Synthetic oligonucleotide
cuuccaguaacuuuggucu

SEQ ID NO: 2663090 - RNA, 19 nt, Artificial Sequence
  Description of Artificial Sequence: Synthetic oligonucleotide
aagagaagggcuaugugau

SEQ ID NO: 2663091 - RNA, 19 nt, Artificial Sequence
  Description of Artificial Sequence: Synthetic oligonucleotide
aagaaguuacagcccaaau

SEQ ID NO: 2663092 - RNA, 19 nt, Artificial Sequence
  Description of Artificial Sequence: Synthetic oligonucleotide
ugggaugaagcagucaaug

SEQ ID NO: 2663093 - RNA, 19 nt, Artificial Sequence
  Description of Artificial Sequence: Synthetic oligonucleotide
gauaugggccuugauauuc

SEQ ID NO: 2663094 - RNA, 19 nt, Artificial Sequence
  Description of Artificial Sequence: Synthetic oligonucleotide
ucucuaagucccucuagca

SEQ ID NO: 2663095 - RNA, 19 nt, Artificial Sequence
  Description of Artificial Sequence: Synthetic oligonucleotide
ugaagcagucaauggggag

SEQ ID NO: 2663096 - RNA, 19 nt, Artificial Sequence
  Description of Artificial Sequence: Synthetic oligonucleotide
uauacagacagcugcucau

SEQ ID NO: 2663097 - RNA, 19 nt, Artificial Sequence
  Description of Artificial Sequence: Synthetic oligonucleotide
cugcauauauaacuccgag

SEQ ID NO: 2663098 - RNA, 19 nt, Artificial Sequence
  Description of Artificial Sequence: Synthetic oligonucleotide
aauuggaggcaagaucucu

SEQ ID NO: 2663099 - RNA, 19 nt, Artificial Sequence
  Description of Artificial Sequence: Synthetic oligonucleotide
ucaauggggagauggcucu

SEQ ID NO: 2663100 - RNA, 19 nt, Artificial Sequence
  Description of Artificial Sequence: Synthetic oligonucleotide
agucauguggaaaauacaa

SEQ ID NO: 2663101 - RNA, 19 nt, Artificial Sequence
  Description of Artificial Sequence: Synthetic oligonucleotide
uagucaaucagugauuauu

SEQ ID NO: 2663102 - RNA, 19 nt, Artificial Sequence
  Description of Artificial Sequence: Synthetic oligonucleotide
aucauguggauaugggccu

SEQ ID NO: 2663103 - RNA, 19 nt, Artificial Sequence
  Description of Artificial Sequence: Synthetic oligonucleotide
uaacuuuggucuccagggc

SEQ ID NO: 2663104 - RNA, 19 nt, Artificial Sequence
  Description of Artificial Sequence: Synthetic oligonucleotide
gagagaacucuuucgguca

SEQ ID NO: 2663105 - RNA, 19 nt, Artificial Sequence
  Description of Artificial Sequence: Synthetic oligonucleotide
caagucucgcugcaguacg

SEQ ID NO: 2663106 - RNA, 19 nt, Artificial Sequence
  Description of Artificial Sequence: Synthetic oligonucleotide
uuuugcaagucucgcugca

SEQ ID NO: 2663107 - RNA, 19 nt, Artificial Sequence
  Description of Artificial Sequence: Synthetic oligonucleotide
aucucuagaguguuuuaga

SEQ ID NO: 2663108 - RNA, 19 nt, Artificial Sequence
  Description of Artificial Sequence: Synthetic oligonucleotide
uaucccaaggccacauugu

SEQ ID NO: 2663109 - RNA, 19 nt, Artificial Sequence
  Description of Artificial Sequence: Synthetic oligonucleotide
uugaagguauacagacagc

SEQ ID NO: 2663110 - RNA, 19 nt, Artificial Sequence
  Description of Artificial Sequence: Synthetic oligonucleotide
gucaaucagugauuauuag

SEQ ID NO: 2663111 - RNA, 19 nt, Artificial Sequence
  Description of Artificial Sequence: Synthetic oligonucleotide
aauggggagauggcucugg

SEQ ID NO: 2663112 - RNA, 19 nt, Artificial Sequence
  Description of Artificial Sequence: Synthetic oligonucleotide
uucuacagaaaggaugggu

SEQ ID NO: 2663113 - RNA, 19 nt, Artificial Sequence
  Description of Artificial Sequence: Synthetic oligonucleotide
accugcauauauaacuccg

SEQ ID NO: 2663114 - RNA, 19 nt, Artificial Sequence
  Description of Artificial Sequence: Synthetic oligonucleotide
accgcagcacuuucucucc

SEQ ID NO: 2663115 - RNA, 19 nt, Artificial Sequence
  Description of Artificial Sequence: Synthetic oligonucleotide
cuaggcucuuuaauauuag

SEQ ID NO: 2663116 - RNA, 19 nt, Artificial Sequence
  Description of Artificial Sequence: Synthetic oligonucleotide
uagcaucauguggauaugg

SEQ ID NO: 2663117 - RNA, 19 nt, Artificial Sequence
  Description of Artificial Sequence: Synthetic oligonucleotide
gaugauccagcaccuuuug

SEQ ID NO: 2663118 - RNA, 19 nt, Artificial Sequence
  Description of Artificial Sequence: Synthetic oligonucleotide
agggcacuuagucaaucag

SEQ ID NO: 2663119 - RNA, 19 nt, Artificial Sequence
  Description of Artificial Sequence: Synthetic oligonucleotide
cuuuugcaagucucgcugc

SEQ ID NO: 2663120 - RNA, 19 nt, Artificial Sequence
  Description of Artificial Sequence: Synthetic oligonucleotide
uauaccuugucucgaugau

SEQ ID NO: 2663121 - RNA, 19 nt, Artificial Sequence
  Description of Artificial Sequence: Synthetic oligonucleotide
acaaagcauaaagucaugu

SEQ ID NO: 2663122 - RNA, 19 nt, Artificial Sequence
  Description of Artificial Sequence: Synthetic oligonucleotide
uuacagcccaaauccaccu

SEQ ID NO: 2663123 - RNA, 19 nt, Artificial Sequence
  Description of Artificial Sequence: Synthetic oligonucleotide
acaguauccaaggcccgcc

SEQ ID NO: 2663124 - RNA, 19 nt, Artificial Sequence
  Description of Artificial Sequence: Synthetic oligonucleotide
aaauuggaggcaagaucuc

SEQ ID NO: 2663125 - RNA, 19 nt, Artificial Sequence
  Description of Artificial Sequence: Synthetic oligonucleotide
cuaugugauuccuaaggca

SEQ ID NO: 2663126 - RNA, 19 nt, Artificial Sequence
  Description of Artificial Sequence: Synthetic oligonucleotide
aaggaugggucuuccagua

SEQ ID NO: 2663127 - RNA, 19 nt, Artificial Sequence
  Description of Artificial Sequence: Synthetic oligonucleotide
ugcuuaguuuccuggaguc

SEQ ID NO: 2663128 - RNA, 19 nt, Artificial Sequence
  Description of Artificial Sequence: Synthetic oligonucleotide
guuuuagagguucuacaga

SEQ ID NO: 2663129 - RNA, 19 nt, Artificial Sequence
  Description of Artificial Sequence: Synthetic oligonucleotide
uuuagagguucuacagaaa

SEQ ID NO: 2663130 - RNA, 19 nt, Artificial Sequence
  Description of Artificial Sequence: Synthetic oligonucleotide
gauaaaggccucguaccgc

SEQ ID NO: 2663131 - RNA, 19 nt, Artificial Sequence
  Description of Artificial Sequence: Synthetic oligonucleotide
ucucaguugaagguauaca

SEQ ID NO: 2663132 - RNA, 19 nt, Artificial Sequence
  Description of Artificial Sequence: Synthetic oligonucleotide
cauucuaggcucuuuaaua

SEQ ID NO: 2663133 - RNA, 19 nt, Artificial Sequence
  Description of Artificial Sequence: Synthetic oligonucleotide
gaagcagucaauggggaga

SEQ ID NO: 2663134 - RNA, 19 nt, Artificial Sequence
  Description of Artificial Sequence: Synthetic oligonucleotide
agcaccuuuugcaagucuc

SEQ ID NO: 2663135 - RNA, 19 nt, Artificial Sequence
  Description of Artificial Sequence: Synthetic oligonucleotide
agggcuaugugauuccuaa

SEQ ID NO: 2663136 - RNA, 19 nt, Artificial Sequence
  Description of Artificial Sequence: Synthetic oligonucleotide
guguuuuagagguucuaca

SEQ ID NO: 2663137 - RNA, 19 nt, Artificial Sequence
  Description of Artificial Sequence: Synthetic oligonucleotide
gaagguauacagacagcug

SEQ ID NO: 2663138 - RNA, 19 nt, Artificial Sequence
  Description of Artificial Sequence: Synthetic oligonucleotide
gagaagggcuaugugauuc

SEQ ID NO: 2663139 - RNA, 19 nt, Artificial Sequence
  Description of Artificial Sequence: Synthetic oligonucleotide
gauauucauggaguccuug

SEQ ID NO: 2663140 - RNA, 19 nt, Artificial Sequence
  Description of Artificial Sequence: Synthetic oligonucleotide
gcagucaauggggagaugg

SEQ ID NO: 2663141 - RNA, 19 nt, Artificial Sequence
  Description of Artificial Sequence: Synthetic oligonucleotide
gcuaugugauuccuaaggc

SEQ ID NO: 2663142 - RNA, 19 nt, Artificial Sequence
  Description of Artificial Sequence: Synthetic oligonucleotide
ugugucaaacgaagaaguu

SEQ ID NO: 2663143 - RNA, 19 nt, Artificial Sequence
  Description of Artificial Sequence: Synthetic oligonucleotide
uguaguucucuaagucccu

SEQ ID NO: 2663144 - RNA, 19 nt, Artificial Sequence
  Description of Artificial Sequence: Synthetic oligonucleotide
cauugugucaaacgaagaa

SEQ ID NO: 2663145 - RNA, 19 nt, Artificial Sequence
  Description of Artificial Sequence: Synthetic oligonucleotide
aagucauguggaaaauaca

SEQ ID NO: 2663146 - RNA, 19 nt, Artificial Sequence
  Description of Artificial Sequence: Synthetic oligonucleotide
ugugauuccuaaggcauuc

SEQ ID NO: 2663147 - RNA, 19 nt, Artificial Sequence
  Description of Artificial Sequence: Synthetic oligonucleotide
uacaaauuggaggcaagau

SEQ ID NO: 2663148 - RNA, 19 nt, Artificial Sequence
  Description of Artificial Sequence: Synthetic oligonucleotide
gcucaauuacauuucucag

SEQ ID NO: 2663149 - RNA, 19 nt, Artificial Sequence
  Description of Artificial Sequence: Synthetic oligonucleotide
ucauauaccuugucucgau

SEQ ID NO: 2663150 - RNA, 19 nt, Artificial Sequence
  Description of Artificial Sequence: Synthetic oligonucleotide
aacuccgagugcuuaguuu

SEQ ID NO: 2663151 - RNA, 19 nt, Artificial Sequence
  Description of Artificial Sequence: Synthetic oligonucleotide
ggccuugauauucauggag

SEQ ID NO: 2663152 - RNA, 19 nt, Artificial Sequence
  Description of Artificial Sequence: Synthetic oligonucleotide
guauacagacagcugcuca

SEQ ID NO: 2663153 - RNA, 19 nt, Artificial Sequence
  Description of Artificial Sequence: Synthetic oligonucleotide
ucgaugauccagcaccuuu

SEQ ID NO: 2663154 - RNA, 19 nt, Artificial Sequence
  Description of Artificial Sequence: Synthetic oligonucleotide
aaggccucguaccgcagca

SEQ ID NO: 2663155 - RNA, 19 nt, Artificial Sequence
  Description of Artificial Sequence: Synthetic oligonucleotide
guucucuaagucccucuag

SEQ ID NO: 2663156 - RNA, 19 nt, Artificial Sequence
  Description of Artificial Sequence: Synthetic oligonucleotide
ugauuccuaaggcauucua

SEQ ID NO: 2663157 - RNA, 19 nt, Artificial Sequence
  Description of Artificial Sequence: Synthetic oligonucleotide
gacagcugcucauauaccu

SEQ ID NO: 2663158 - RNA, 19 nt, Artificial Sequence
  Description of Artificial Sequence: Synthetic oligonucleotide
agcauaaagucauguggaa

SEQ ID NO: 2663159 - RNA, 19 nt, Artificial Sequence
  Description of Artificial Sequence: Synthetic oligonucleotide
aaggcccgccguuucgggg

SEQ ID NO: 2663160 - RNA, 19 nt, Artificial Sequence
  Description of Artificial Sequence: Synthetic oligonucleotide
ucucgaugauccagcaccu

SEQ ID NO: 2663161 - RNA, 19 nt, Artificial Sequence
  Description of Artificial Sequence: Synthetic oligonucleotide
uuaguuuccuggagucgcu

SEQ ID NO: 2663162 - RNA, 19 nt, Artificial Sequence
  Description of Artificial Sequence: Synthetic oligonucleotide
uaauauuagaugggaugaa

SEQ ID NO: 2663163 - RNA, 19 nt, Artificial Sequence
  Description of Artificial Sequence: Synthetic oligonucleotide
ugugaggagagaacucuuu

SEQ ID NO: 2663164 - RNA, 19 nt, Artificial Sequence
  Description of Artificial Sequence: Synthetic oligonucleotide
auacaaauuggaggcaaga

SEQ ID NO: 2663165 - RNA, 19 nt, Artificial Sequence
  Description of Artificial Sequence: Synthetic oligonucleotide
uccaguaacuuuggucucc

SEQ ID NO: 2663166 - RNA, 19 nt, Artificial Sequence
  Description of Artificial Sequence: Synthetic oligonucleotide
uaccgcagcacuuucucuc

SEQ ID NO: 2663167 - RNA, 19 nt, Artificial Sequence
  Description of Artificial Sequence: Synthetic oligonucleotide
caccugcauauauaacucc

SEQ ID NO: 2663168 - RNA, 19 nt, Artificial Sequence
  Description of Artificial Sequence: Synthetic oligonucleotide
uucucaguugaagguauac

SEQ ID NO: 2663169 - RNA, 19 nt, Artificial Sequence
  Description of Artificial Sequence: Synthetic oligonucleotide
acagaaaggaugggucuuc

SEQ ID NO: 2663170 - RNA, 19 nt, Artificial Sequence
  Description of Artificial Sequence: Synthetic oligonucleotide
cuacaguauccaaggcccg

SEQ ID NO: 2663171 - RNA, 19 nt, Artificial Sequence
  Description of Artificial Sequence: Synthetic oligonucleotide
auaccuugucucgaugauc

SEQ ID NO: 2663172 - RNA, 19 nt, Artificial Sequence
  Description of Artificial Sequence: Synthetic oligonucleotide
aucccaaggccacauugug

SEQ ID NO: 2663173 - RNA, 19 nt, Artificial Sequence
  Description of Artificial Sequence: Synthetic oligonucleotide
aaauucugcaggccuugua

SEQ ID NO: 2663174 - RNA, 19 nt, Artificial Sequence
  Description of Artificial Sequence: Synthetic oligonucleotide
aggagagaacucuuucggu

SEQ ID NO: 2663175 - RNA, 19 nt, Artificial Sequence
  Description of Artificial Sequence: Synthetic oligonucleotide
ggcacuuagucaaucagug

SEQ ID NO: 2663176 - RNA, 19 nt, Artificial Sequence
  Description of Artificial Sequence: Synthetic oligonucleotide
agucgcucaauuacauuuc

SEQ ID NO: 2663177 - RNA, 19 nt, Artificial Sequence
  Description of Artificial Sequence: Synthetic oligonucleotide
ggagagaacucuuucgguc

SEQ ID NO: 2663178 - RNA, 19 nt, Artificial Sequence
  Description of Artificial Sequence: Synthetic oligonucleotide
agaacucuuucggucaaug

SEQ ID NO: 2663179 - RNA, 19 nt, Artificial Sequence
  Description of Artificial Sequence: Synthetic oligonucleotide
gagucgcucaauuacauuu

SEQ ID NO: 2663180 - RNA, 19 nt, Artificial Sequence
  Description of Artificial Sequence: Synthetic oligonucleotide
guggauaugggccuugaua

SEQ ID NO: 2663181 - RNA, 19 nt, Artificial Sequence
  Description of Artificial Sequence: Synthetic oligonucleotide
ggccacauugugucaaacg

SEQ ID NO: 2663182 - RNA, 19 nt, Artificial Sequence
  Description of Artificial Sequence: Synthetic oligonucleotide
cauauaccuugucucgaug

SEQ ID NO: 2663183 - RNA, 19 nt, Artificial Sequence
  Description of Artificial Sequence: Synthetic oligonucleotide
acgucacugauaaaggccu

SEQ ID NO: 2663184 - RNA, 19 nt, Artificial Sequence
  Description of Artificial Sequence: Synthetic oligonucleotide
cuuggugaggcugucgcug

SEQ ID NO: 2663185 - RNA, 19 nt, Artificial Sequence
  Description of Artificial Sequence: Synthetic oligonucleotide
cucaauuacauuucucagu

SEQ ID NO: 2663186 - RNA, 19 nt, Artificial Sequence
  Description of Artificial Sequence: Synthetic oligonucleotide
uggagucgcucaauuacau

SEQ ID NO: 2663187 - RNA, 19 nt, Artificial Sequence
  Description of Artificial Sequence: Synthetic oligonucleotide
gaacucuuucggucaauga

SEQ ID NO: 2663188 - RNA, 19 nt, Artificial Sequence
  Description of Artificial Sequence: Synthetic oligonucleotide
gcaucauguggauaugggc

SEQ ID NO: 2663189 - RNA, 19 nt, Artificial Sequence
  Description of Artificial Sequence: Synthetic oligonucleotide
agauggcucugggaaauuc

SEQ ID NO: 2663190 - RNA, 19 nt, Artificial Sequence
  Description of Artificial Sequence: Synthetic oligonucleotide
cagucaauggggagauggc

SEQ ID NO: 2663191 - RNA, 19 nt, Artificial Sequence
  Description of Artificial Sequence: Synthetic oligonucleotide
cuaagucccucuagcauca

SEQ ID NO: 2663192 - RNA, 19 nt, Artificial Sequence
  Description of Artificial Sequence: Synthetic oligonucleotide
ucgcugagcucugugagga

SEQ ID NO: 2663193 - RNA, 19 nt, Artificial Sequence
  Description of Artificial Sequence: Synthetic oligonucleotide
uacagcccaaauccaccug

SEQ ID NO: 2663194 - RNA, 19 nt, Artificial Sequence
  Description of Artificial Sequence: Synthetic oligonucleotide
agugucaacuccaggaaaa

SEQ ID NO: 2663195 - RNA, 19 nt, Artificial Sequence
  Description of Artificial Sequence: Synthetic oligonucleotide
gucgcugagcucugugagg

SEQ ID NO: 2663196 - RNA, 19 nt, Artificial Sequence
  Description of Artificial Sequence: Synthetic oligonucleotide
gccacauugugucaaacga

SEQ ID NO: 2663197 - RNA, 19 nt, Artificial Sequence
  Description of Artificial Sequence: Synthetic oligonucleotide
agacagcugcucauauacc

SEQ ID NO: 2663198 - RNA, 19 nt, Artificial Sequence
  Description of Artificial Sequence: Synthetic oligonucleotide
gagugcuuaguuuccugga

SEQ ID NO: 2663199 - RNA, 19 nt, Artificial Sequence
  Description of Artificial Sequence: Synthetic oligonucleotide
gugaggagagaacucuuuc

SEQ ID NO: 2663200 - RNA, 19 nt, Artificial Sequence
  Description of Artificial Sequence: Synthetic oligonucleotide
agucaauggggagauggcu

SEQ ID NO: 2663201 - RNA, 19 nt, Artificial Sequence
  Description of Artificial Sequence: Synthetic oligonucleotide
uugucucgaugauccagca

SEQ ID NO: 2663202 - RNA, 19 nt, Artificial Sequence
  Description of Artificial Sequence: Synthetic oligonucleotide
aaguuacagcccaaaucca

SEQ ID NO: 2663203 - RNA, 19 nt, Artificial Sequence
  Description of Artificial Sequence: Synthetic oligonucleotide
ugucucgaugauccagcac

SEQ ID NO: 2663204 - RNA, 19 nt, Artificial Sequence
  Description of Artificial Sequence: Synthetic oligonucleotide
uucggucaaugaacuugag

SEQ ID NO: 2663205 - RNA, 19 nt, Artificial Sequence
  Description of Artificial Sequence: Synthetic oligonucleotide
auggggagauggcucuggg

SEQ ID NO: 2663206 - RNA, 19 nt, Artificial Sequence
  Description of Artificial Sequence: Synthetic oligonucleotide
auaaagucauguggaaaau

SEQ ID NO: 2663207 - RNA, 19 nt, Artificial Sequence
  Description of Artificial Sequence: Synthetic oligonucleotide
uucucuccuacaguaucca

SEQ ID NO: 2663208 - RNA, 19 nt, Artificial Sequence
  Description of Artificial Sequence: Synthetic oligonucleotide
agagcuucagccaguguca

SEQ ID NO: 2663209 - RNA, 19 nt, Artificial Sequence
  Description of Artificial Sequence: Synthetic oligonucleotide
cacuuagucaaucagugau

SEQ ID NO: 2663210 - RNA, 19 nt, Artificial Sequence
  Description of Artificial Sequence: Synthetic oligonucleotide
uuagucaaucagugauuau

SEQ ID NO: 2663211 - RNA, 19 nt, Artificial Sequence
  Description of Artificial Sequence: Synthetic oligonucleotide
agaaaggaugggucuucca

SEQ ID NO: 2663212 - RNA, 19 nt, Artificial Sequence
  Description of Artificial Sequence: Synthetic oligonucleotide
uucuaggcucuuuaauauu

SEQ ID NO: 2663213 - RNA, 19 nt, Artificial Sequence
  Description of Artificial Sequence: Synthetic oligonucleotide
aagcagucaauggggagau

SEQ ID NO: 2663214 - RNA, 19 nt, Artificial Sequence
  Description of Artificial Sequence: Synthetic oligonucleotide
ccuggagucgcucaauuac

SEQ ID NO: 2663215 - RNA, 19 nt, Artificial Sequence
  Description of Artificial Sequence: Synthetic oligonucleotide
auuucucaguugaagguau

SEQ ID NO: 2663216 - RNA, 19 nt, Artificial Sequence
  Description of Artificial Sequence: Synthetic oligonucleotide
uaaaggccucguaccgcag

SEQ ID NO: 2663217 - RNA, 19 nt, Artificial Sequence
  Description of Artificial Sequence: Synthetic oligonucleotide
uagaugggaugaagcaguc

SEQ ID NO: 2663218 - RNA, 19 nt, Artificial Sequence
  Description of Artificial Sequence: Synthetic oligonucleotide
gggacaaagcauaaaguca

SEQ ID NO: 2663219 - RNA, 19 nt, Artificial Sequence
  Description of Artificial Sequence: Synthetic oligonucleotide
uugagagcuucagccagug

SEQ ID NO: 2663220 - RNA, 19 nt, Artificial Sequence
  Description of Artificial Sequence: Synthetic oligonucleotide
ggaugggucuuccaguaac

SEQ ID NO: 2663221 - RNA, 19 nt, Artificial Sequence
  Description of Artificial Sequence: Synthetic oligonucleotide
cacuuucucuccuacagua

SEQ ID NO: 2663222 - RNA, 19 nt, Artificial Sequence
  Description of Artificial Sequence: Synthetic oligonucleotide
aguucucuaagucccucua

SEQ ID NO: 2663223 - RNA, 19 nt, Artificial Sequence
  Description of Artificial Sequence: Synthetic oligonucleotide
gaggcugucgcugagcucu

SEQ ID NO: 2663224 - RNA, 19 nt, Artificial Sequence
  Description of Artificial Sequence: Synthetic oligonucleotide
gaagaaguuacagcccaaa

SEQ ID NO: 2663225 - RNA, 19 nt, Artificial Sequence
  Description of Artificial Sequence: Synthetic oligonucleotide
cuuagucaaucagugauua

SEQ ID NO: 2663226 - RNA, 19 nt, Artificial Sequence
  Description of Artificial Sequence: Synthetic oligonucleotide
agcuucagccagugucaac

SEQ ID NO: 2663227 - RNA, 19 nt, Artificial Sequence
  Description of Artificial Sequence: Synthetic oligonucleotide
ucgcucaauuacauuucuc

SEQ ID NO: 2663228 - RNA, 19 nt, Artificial Sequence
  Description of Artificial Sequence: Synthetic oligonucleotide
aguugaagguauacagaca

SEQ ID NO: 2663229 - RNA, 19 nt, Artificial Sequence
  Description of Artificial Sequence: Synthetic oligonucleotide
ucacugauaaaggccucgu

SEQ ID NO: 2663230 - RNA, 19 nt, Artificial Sequence
  Description of Artificial Sequence: Synthetic oligonucleotide
gucaauggggagauggcuc

SEQ ID NO: 2663231 - RNA, 19 nt, Artificial Sequence
  Description of Artificial Sequence: Synthetic oligonucleotide
aguauccaaggcccgccgu

SEQ ID NO: 2663232 - RNA, 19 nt, Artificial Sequence
  Description of Artificial Sequence: Synthetic oligonucleotide
gaggcaagaucucuagagu

SEQ ID NO: 2663233 - RNA, 19 nt, Artificial Sequence
  Description of Artificial Sequence: Synthetic oligonucleotide
cuuuaauauuagaugggau

SEQ ID NO: 2663234 - RNA, 19 nt, Artificial Sequence
  Description of Artificial Sequence: Synthetic oligonucleotide
auaacuccgagugcuuagu

SEQ ID NO: 2663235 - RNA, 19 nt, Artificial Sequence
  Description of Artificial Sequence: Synthetic oligonucleotide
cuccgagugcuuaguuucc

SEQ ID NO: 2663236 - RNA, 19 nt, Artificial Sequence
  Description of Artificial Sequence: Synthetic oligonucleotide
agccagugucaacuccagg

SEQ ID NO: 2663237 - RNA, 19 nt, Artificial Sequence
  Description of Artificial Sequence: Synthetic oligonucleotide
uacagaaaggaugggucuu

SEQ ID NO: 2663238 - RNA, 19 nt, Artificial Sequence
  Description of Artificial Sequence: Synthetic oligonucleotide
uuccaguaacuuuggucuc

SEQ ID NO: 2663239 - RNA, 19 nt, Artificial Sequence
  Description of Artificial Sequence: Synthetic oligonucleotide
uuucucaguugaagguaua

SEQ ID NO: 2663240 - RNA, 19 nt, Artificial Sequence
  Description of Artificial Sequence: Synthetic oligonucleotide
caguauccaaggcccgccg

SEQ ID NO: 2663241 - RNA, 19 nt, Artificial Sequence
  Description of Artificial Sequence: Synthetic oligonucleotide
gugucaaacgaagaaguua

SEQ ID NO: 2663242 - RNA, 19 nt, Artificial Sequence
  Description of Artificial Sequence: Synthetic oligonucleotide
cuggagucgcucaauuaca

SEQ ID NO: 2663243 - RNA, 19 nt, Artificial Sequence
  Description of Artificial Sequence: Synthetic oligonucleotide
aaggccacauugugucaaa

SEQ ID NO: 2663244 - RNA, 19 nt, Artificial Sequence
  Description of Artificial Sequence: Synthetic oligonucleotide
ugcaagucucgcugcagua

SEQ ID NO: 2663245 - RNA, 19 nt, Artificial Sequence
  Description of Artificial Sequence: Synthetic oligonucleotide
ggggagauggcucugggaa

SEQ ID NO: 2663246 - RNA, 19 nt, Artificial Sequence
  Description of Artificial Sequence: Synthetic oligonucleotide
uguggauaugggccuugau

SEQ ID NO: 2663247 - RNA, 19 nt, Artificial Sequence
  Description of Artificial Sequence: Synthetic oligonucleotide
agguauacagacagcugcu

SEQ ID NO: 2663248 - RNA, 19 nt, Artificial Sequence
  Description of Artificial Sequence: Synthetic oligonucleotide
caccuuuugcaagucucgc

SEQ ID NO: 2663249 - RNA, 19 nt, Artificial Sequence
  Description of Artificial Sequence: Synthetic oligonucleotide
acauugugucaaacgaaga

SEQ ID NO: 2663250 - RNA, 19 nt, Artificial Sequence
  Description of Artificial Sequence: Synthetic oligonucleotide
cuccuacaguauccaaggc

SEQ ID NO: 2663251 - RNA, 19 nt, Artificial Sequence
  Description of Artificial Sequence: Synthetic oligonucleotide
gucauguggaaaauacaaa

SEQ ID NO: 2663252 - RNA, 19 nt, Artificial Sequence
  Description of Artificial Sequence: Synthetic oligonucleotide
uggggagauggcucuggga

SEQ ID NO: 2663253 - RNA, 19 nt, Artificial Sequence
  Description of Artificial Sequence: Synthetic oligonucleotide
cugggaaauucugcaggcc

SEQ ID NO: 2663254 - RNA, 19 nt, Artificial Sequence
  Description of Artificial Sequence: Synthetic oligonucleotide
cuacagaaaggaugggucu

SEQ ID NO: 2663255 - RNA, 19 nt, Artificial Sequence
  Description of Artificial Sequence: Synthetic oligonucleotide
agucucgcugcaguacguc

SEQ ID NO: 2663256 - RNA, 19 nt, Artificial Sequence
  Description of Artificial Sequence: Synthetic oligonucleotide
auauaacuccgagugcuua

SEQ ID NO: 2663257 - RNA, 19 nt, Artificial Sequence
  Description of Artificial Sequence: Synthetic oligonucleotide
aggcauucuaggcucuuua

SEQ ID NO: 2663258 - RNA, 19 nt, Artificial Sequence
  Description of Artificial Sequence: Synthetic oligonucleotide
ccuugauauucauggaguc

SEQ ID NO: 2663259 - RNA, 19 nt, Artificial Sequence
  Description of Artificial Sequence: Synthetic oligonucleotide
cagaaaggaugggucuucc

SEQ ID NO: 2663260 - RNA, 19 nt, Artificial Sequence
  Description of Artificial Sequence: Synthetic oligonucleotide
aggccuuguaguucucuaa

SEQ ID NO: 2663261 - RNA, 19 nt, Artificial Sequence
  Description of Artificial Sequence: Synthetic oligonucleotide
ucuuucggucaaugaacuu

SEQ ID NO: 2663262 - RNA, 19 nt, Artificial Sequence
  Description of Artificial Sequence: Synthetic oligonucleotide
acuuagucaaucagugauu

SEQ ID NO: 2663263 - RNA, 19 nt, Artificial Sequence
  Description of Artificial Sequence: Synthetic oligonucleotide
uaugggccuugauauucau

SEQ ID NO: 2663264 - RNA, 19 nt, Artificial Sequence
  Description of Artificial Sequence: Synthetic oligonucleotide
uccuggagucgcucaauua

SEQ ID NO: 2663265 - RNA, 19 nt, Artificial Sequence
  Description of Artificial Sequence: Synthetic oligonucleotide
agaucucuagaguguuuua

SEQ ID NO: 2663266 - RNA, 19 nt, Artificial Sequence
  Description of Artificial Sequence: Synthetic oligonucleotide
cauuucucaguugaaggua

SEQ ID NO: 2663267 - RNA, 19 nt, Artificial Sequence
  Description of Artificial Sequence: Synthetic oligonucleotide
gcuuaguuuccuggagucg

SEQ ID NO: 2663268 - RNA, 19 nt, Artificial Sequence
  Description of Artificial Sequence: Synthetic oligonucleotide
acagacagcugcucauaua

SEQ ID NO: 2663269 - RNA, 19 nt, Artificial Sequence
  Description of Artificial Sequence: Synthetic oligonucleotide
gcaccuuuugcaagucucg

SEQ ID NO: 2663270 - RNA, 19 nt, Artificial Sequence
  Description of Artificial Sequence: Synthetic oligonucleotide
cgagugcuuaguuuccugg

SEQ ID NO: 2663271 - RNA, 19 nt, Artificial Sequence
  Description of Artificial Sequence: Synthetic oligonucleotide
gucccucuagcaucaugug

SEQ ID NO: 2663272 - RNA, 19 nt, Artificial Sequence
  Description of Artificial Sequence: Synthetic oligonucleotide
auaugggccuugauauuca

SEQ ID NO: 2663273 - RNA, 19 nt, Artificial Sequence
  Description of Artificial Sequence: Synthetic oligonucleotide
ggaaauucugcaggccuug

SEQ ID NO: 2663274 - RNA, 19 nt, Artificial Sequence
  Description of Artificial Sequence: Synthetic oligonucleotide
cucuuucggucaaugaacu

SEQ ID NO: 2663275 - RNA, 19 nt, Artificial Sequence
  Description of Artificial Sequence: Synthetic oligonucleotide
cgcucaauuacauuucuca

SEQ ID NO: 2663276 - RNA, 19 nt, Artificial Sequence
  Description of Artificial Sequence: Synthetic oligonucleotide
agaguguuuuagagguucu

SEQ ID NO: 2663277 - RNA, 19 nt, Artificial Sequence
  Description of Artificial Sequence: Synthetic oligonucleotide
caaggcccgccguuucggg

SEQ ID NO: 2663278 - RNA, 19 nt, Artificial Sequence
  Description of Artificial Sequence: Synthetic oligonucleotide
cuagcaucauguggauaug

SEQ ID NO: 2663279 - RNA, 19 nt, Artificial Sequence
  Description of Artificial Sequence: Synthetic oligonucleotide
agagaagggcuaugugauu

SEQ ID NO: 2663280 - RNA, 19 nt, Artificial Sequence
  Description of Artificial Sequence: Synthetic oligonucleotide
auuggaggcaagaucucua

SEQ ID NO: 2663281 - RNA, 19 nt, Artificial Sequence
  Description of Artificial Sequence: Synthetic oligonucleotide
uccgagugcuuaguuuccu

SEQ ID NO: 2663282 - RNA, 19 nt, Artificial Sequence
  Description of Artificial Sequence: Synthetic oligonucleotide
gauggcucugggaaauucu

SEQ ID NO: 2663283 - RNA, 19 nt, Artificial Sequence
  Description of Artificial Sequence: Synthetic oligonucleotide
ggacaaagcauaaagucau

SEQ ID NO: 2663284 - RNA, 19 nt, Artificial Sequence
  Description of Artificial Sequence: Synthetic oligonucleotide
guaguucucuaagucccuc

SEQ ID NO: 2663285 - RNA, 19 nt, Artificial Sequence
  Description of Artificial Sequence: Synthetic oligonucleotide
aaggcauucuaggcucuuu

SEQ ID NO: 2663286 - RNA, 19 nt, Artificial Sequence
  Description of Artificial Sequence: Synthetic oligonucleotide
aagucucgcugcaguacgu

SEQ ID NO: 2663287 - RNA, 19 nt, Artificial Sequence
  Description of Artificial Sequence: Synthetic oligonucleotide
cugucgcugagcucuguga

SEQ ID NO: 2663288 - RNA, 19 nt, Artificial Sequence
  Description of Artificial Sequence: Synthetic oligonucleotide
agaugggaugaagcaguca

SEQ ID NO: 2663289 - RNA, 19 nt, Artificial Sequence
  Description of Artificial Sequence: Synthetic oligonucleotide
gagcucugugaggagagaa

SEQ ID NO: 2663290 - RNA, 19 nt, Artificial Sequence
  Description of Artificial Sequence: Synthetic oligonucleotide
cugcucauauaccuugucu

SEQ ID NO: 2663291 - RNA, 19 nt, Artificial Sequence
  Description of Artificial Sequence: Synthetic oligonucleotide
gugcuuaguuuccuggagu

SEQ ID NO: 2663292 - RNA, 19 nt, Artificial Sequence
  Description of Artificial Sequence: Synthetic oligonucleotide
acuuucucuccuacaguau

SEQ ID NO: 2663293 - RNA, 19 nt, Artificial Sequence
  Description of Artificial Sequence: Synthetic oligonucleotide
ugagcucugugaggagaga

SEQ ID NO: 2663294 - RNA, 19 nt, Artificial Sequence
  Description of Artificial Sequence: Synthetic oligonucleotide
auacagacagcugcucaua

SEQ ID NO: 2663295 - RNA, 19 nt, Artificial Sequence
  Description of Artificial Sequence: Synthetic oligonucleotide
caguaacuuuggucuccag

SEQ ID NO: 2663296 - RNA, 19 nt, Artificial Sequence
  Description of Artificial Sequence: Synthetic oligonucleotide
cauguggauaugggccuug

SEQ ID NO: 2663297 - RNA, 19 nt, Artificial Sequence
  Description of Artificial Sequence: Synthetic oligonucleotide
uauccaaggcccgccguuu

SEQ ID NO: 2663298 - RNA, 19 nt, Artificial Sequence
  Description of Artificial Sequence: Synthetic oligonucleotide
ccuugucucgaugauccag

SEQ ID NO: 2663299 - RNA, 19 nt, Artificial Sequence
  Description of Artificial Sequence: Synthetic oligonucleotide
gucgcucaauuacauuucu

SEQ ID NO: 2663300 - RNA, 19 nt, Artificial Sequence
  Description of Artificial Sequence: Synthetic oligonucleotide
augggccuugauauucaug

SEQ ID NO: 2663301 - RNA, 19 nt, Artificial Sequence
  Description of Artificial Sequence: Synthetic oligonucleotide
cagugucaacuccaggaaa

SEQ ID NO: 2663302 - RNA, 19 nt, Artificial Sequence
  Description of Artificial Sequence: Synthetic oligonucleotide
gggcuaugugauuccuaag

SEQ ID NO: 2663303 - RNA, 19 nt, Artificial Sequence
  Description of Artificial Sequence: Synthetic oligonucleotide
aggaugggucuuccaguaa

SEQ ID NO: 2663304 - RNA, 19 nt, Artificial Sequence
  Description of Artificial Sequence: Synthetic oligonucleotide
gcuucagccagugucaacu

SEQ ID NO: 2663305 - RNA, 19 nt, Artificial Sequence
  Description of Artificial Sequence: Synthetic oligonucleotide
aagggcuaugugauuccua

SEQ ID NO: 2663306 - RNA, 19 nt, Artificial Sequence
  Description of Artificial Sequence: Synthetic oligonucleotide
ggaaagagaagggcuaugu

SEQ ID NO: 2663307 - RNA, 19 nt, Artificial Sequence
  Description of Artificial Sequence: Synthetic oligonucleotide
cucuaagucccucuagcau

SEQ ID NO: 2663308 - RNA, 19 nt, Artificial Sequence
  Description of Artificial Sequence: Synthetic oligonucleotide
gcauaaagucauguggaaa

SEQ ID NO: 2663309 - RNA, 19 nt, Artificial Sequence
  Description of Artificial Sequence: Synthetic oligonucleotide
accuugucucgaugaucca

SEQ ID NO: 2663310 - RNA, 19 nt, Artificial Sequence
  Description of Artificial Sequence: Synthetic oligonucleotide
gguauacagacagcugcuc

SEQ ID NO: 2663311 - RNA, 19 nt, Artificial Sequence
  Description of Artificial Sequence: Synthetic oligonucleotide
ugaggcugucgcugagcuc

SEQ ID NO: 2663312 - RNA, 19 nt, Artificial Sequence
  Description of Artificial Sequence: Synthetic oligonucleotide
ccugcauauauaacuccga

SEQ ID NO: 2663313 - RNA, 19 nt, Artificial Sequence
  Description of Artificial Sequence: Synthetic oligonucleotide
gcacuuagucaaucaguga

SEQ ID NO: 2663314 - RNA, 19 nt, Artificial Sequence
  Description of Artificial Sequence: Synthetic oligonucleotide
ggcauucuaggcucuuuaa

SEQ ID NO: 2663315 - RNA, 19 nt, Artificial Sequence
  Description of Artificial Sequence: Synthetic oligonucleotide
accauaucccaaggccaca

SEQ ID NO: 2663316 - RNA, 19 nt, Artificial Sequence
  Description of Artificial Sequence: Synthetic oligonucleotide
ucauguggauaugggccuu

SEQ ID NO: 2663317 - RNA, 19 nt, Artificial Sequence
  Description of Artificial Sequence: Synthetic oligonucleotide
caaggccacauugugucaa

SEQ ID NO: 2663318 - RNA, 19 nt, Artificial Sequence
  Description of Artificial Sequence: Synthetic oligonucleotide
auguggauaugggccuuga

SEQ ID NO: 2663319 - RNA, 19 nt, Artificial Sequence
  Description of Artificial Sequence: Synthetic oligonucleotide
gcaagucucgcugcaguac

SEQ ID NO: 2663320 - RNA, 19 nt, Artificial Sequence
  Description of Artificial Sequence: Synthetic oligonucleotide
augugauuccuaaggcauu

SEQ ID NO: 2663321 - RNA, 19 nt, Artificial Sequence
  Description of Artificial Sequence: Synthetic oligonucleotide
augggaugaagcagucaau

SEQ ID NO: 2663322 - RNA, 19 nt, Artificial Sequence
  Description of Artificial Sequence: Synthetic oligonucleotide
aggccucguaccgcagcac

SEQ ID NO: 2663323 - RNA, 19 nt, Artificial Sequence
  Description of Artificial Sequence: Synthetic oligonucleotide
gcugucgcugagcucugug

SEQ ID NO: 2663324 - RNA, 19 nt, Artificial Sequence
  Description of Artificial Sequence: Synthetic oligonucleotide
cagcccaaauccaccugca

SEQ ID NO: 2663325 - RNA, 19 nt, Artificial Sequence
  Description of Artificial Sequence: Synthetic oligonucleotide
cuugagagcuucagccagu

SEQ ID NO: 2663326 - RNA, 19 nt, Artificial Sequence
  Description of Artificial Sequence: Synthetic oligonucleotide
gggaaagagaagggcuaug

SEQ ID NO: 2663327 - RNA, 19 nt, Artificial Sequence
  Description of Artificial Sequence: Synthetic oligonucleotide
gaagggcuaugugauuccu

SEQ ID NO: 2663328 - RNA, 19 nt, Artificial Sequence
  Description of Artificial Sequence: Synthetic oligonucleotide
ccacauugugucaaacgaa

SEQ ID NO: 2663329 - RNA, 19 nt, Artificial Sequence
  Description of Artificial Sequence: Synthetic oligonucleotide
caauggggagauggcucug

SEQ ID NO: 2663330 - RNA, 19 nt, Artificial Sequence
  Description of Artificial Sequence: Synthetic oligonucleotide
gccuugauauucauggagu

SEQ ID NO: 2663331 - RNA, 19 nt, Artificial Sequence
  Description of Artificial Sequence: Synthetic oligonucleotide
gagguucuacagaaaggau

SEQ ID NO: 2663332 - RNA, 19 nt, Artificial Sequence
  Description of Artificial Sequence: Synthetic oligonucleotide
caggccuuguaguucucua

SEQ ID NO: 2663333 - RNA, 19 nt, Artificial Sequence
  Description of Artificial Sequence: Synthetic oligonucleotide
ggcaagaucucuagagugu

SEQ ID NO: 2663334 - RNA, 19 nt, Artificial Sequence
  Description of Artificial Sequence: Synthetic oligonucleotide
cacugauaaaggccucgua

SEQ ID NO: 2663335 - RNA, 19 nt, Artificial Sequence
  Description of Artificial Sequence: Synthetic oligonucleotide
gcauucuaggcucuuuaau

SEQ ID NO: 2663336 - RNA, 19 nt, Artificial Sequence
  Description of Artificial Sequence: Synthetic oligonucleotide
cguaccgcagcacuuucuc

SEQ ID NO: 2663337 - RNA, 19 nt, Artificial Sequence
  Description of Artificial Sequence: Synthetic oligonucleotide
ccgagugcuuaguuuccug

SEQ ID NO: 2663338 - RNA, 19 nt, Artificial Sequence
  Description of Artificial Sequence: Synthetic oligonucleotide
ccagugucaacuccaggaa

SEQ ID NO: 2663339 - RNA, 19 nt, Artificial Sequence
  Description of Artificial Sequence: Synthetic oligonucleotide
guauccaaggcccgccguu

SEQ ID NO: 2663340 - RNA, 19 nt, Artificial Sequence
  Description of Artificial Sequence: Synthetic oligonucleotide
gggccuugauauucaugga

SEQ ID NO: 2663341 - RNA, 19 nt, Artificial Sequence
  Description of Artificial Sequence: Synthetic oligonucleotide
gccuuguaguucucuaagu

SEQ ID NO: 2663342 - RNA, 19 nt, Artificial Sequence
  Description of Artificial Sequence: Synthetic oligonucleotide
ccaaggcccgccguuucgg

SEQ ID NO: 2663343 - RNA, 19 nt, Artificial Sequence
  Description of Artificial Sequence: Synthetic oligonucleotide
agcagucaauggggagaug

SEQ ID NO: 2663344 - RNA, 19 nt, Artificial Sequence
  Description of Artificial Sequence: Synthetic oligonucleotide
gggcacuuagucaaucagu

SEQ ID NO: 2663345 - RNA, 19 nt, Artificial Sequence
  Description of Artificial Sequence: Synthetic oligonucleotide
uaagucccucuagcaucau

SEQ ID NO: 2663346 - RNA, 19 nt, Artificial Sequence
  Description of Artificial Sequence: Synthetic oligonucleotide
caagaucucuagaguguuu

SEQ ID NO: 2663347 - RNA, 19 nt, Artificial Sequence
  Description of Artificial Sequence: Synthetic oligonucleotide
cucgcugcaguacgucacu

SEQ ID NO: 2663348 - RNA, 19 nt, Artificial Sequence
  Description of Artificial Sequence: Synthetic oligonucleotide
gcacuuucucuccuacagu

SEQ ID NO: 2663349 - RNA, 19 nt, Artificial Sequence
  Description of Artificial Sequence: Synthetic oligonucleotide
cucuagcaucauguggaua

SEQ ID NO: 2663350 - RNA, 19 nt, Artificial Sequence
  Description of Artificial Sequence: Synthetic oligonucleotide
ggauaugggccuugauauu

SEQ ID NO: 2663351 - RNA, 19 nt, Artificial Sequence
  Description of Artificial Sequence: Synthetic oligonucleotide
gagaacucuuucggucaau

SEQ ID NO: 2663352 - RNA, 19 nt, Artificial Sequence
  Description of Artificial Sequence: Synthetic oligonucleotide
ggccucguaccgcagcacu

SEQ ID NO: 2663353 - RNA, 19 nt, Artificial Sequence
  Description of Artificial Sequence: Synthetic oligonucleotide
ccaaggccacauuguguca

SEQ ID NO: 2663354 - RNA, 19 nt, Artificial Sequence
  Description of Artificial Sequence: Synthetic oligonucleotide
cagcaccuuuugcaagucu

SEQ ID NO: 2663355 - RNA, 19 nt, Artificial Sequence
  Description of Artificial Sequence: Synthetic oligonucleotide
ggagucgcucaauuacauu

SEQ ID NO: 2663356 - RNA, 19 nt, Artificial Sequence
  Description of Artificial Sequence: Synthetic oligonucleotide
cgucacugauaaaggccuc

SEQ ID NO: 2663357 - RNA, 19 nt, Artificial Sequence
  Description of Artificial Sequence: Synthetic oligonucleotide
cauaucccaaggccacauu

SEQ ID NO: 2663358 - RNA, 19 nt, Artificial Sequence
  Description of Artificial Sequence: Synthetic oligonucleotide
gggaaauucugcaggccuu

SEQ ID NO: 2663359 - RNA, 19 nt, Artificial Sequence
  Description of Artificial Sequence: Synthetic oligonucleotide
aggcugucgcugagcucug

SEQ ID NO: 2663360 - RNA, 19 nt, Artificial Sequence
  Description of Artificial Sequence: Synthetic oligonucleotide
cgaagaaguuacagcccaa

SEQ ID NO: 2663361 - RNA, 19 nt, Artificial Sequence
  Description of Artificial Sequence: Synthetic oligonucleotide
gcaguacgucacugauaaa

SEQ ID NO: 2663362 - RNA, 19 nt, Artificial Sequence
  Description of Artificial Sequence: Synthetic oligonucleotide
cgcugcaguacgucacuga

SEQ ID NO: 2663363 - RNA, 19 nt, Artificial Sequence
  Description of Artificial Sequence: Synthetic oligonucleotide
cgaugauccagcaccuuuu

SEQ ID NO: 2663364 - RNA, 19 nt, Artificial Sequence
  Description of Artificial Sequence: Synthetic oligonucleotide
gcaggccuuguaguucucu

SEQ ID NO: 2663365 - RNA, 19 nt, Artificial Sequence
  Description of Artificial Sequence: Synthetic oligonucleotide
cucgaugauccagcaccuu

SEQ ID NO: 2663366 - RNA, 19 nt, Artificial Sequence
  Description of Artificial Sequence: Synthetic oligonucleotide
ccauaucccaaggccacau

SEQ ID NO: 2663367 - RNA, 19 nt, Artificial Sequence
  Description of Artificial Sequence: Synthetic oligonucleotide
cgcagcacuuucucuccua

SEQ ID NO: 2663368 - RNA, 19 nt, Artificial Sequence
  Description of Artificial Sequence: Synthetic oligonucleotide
ccucguaccgcagcacuuu

SEQ ID NO: 2663369 - RNA, 19 nt, Artificial Sequence
  Description of Artificial Sequence: Synthetic oligonucleotide
gccucguaccgcagcacuu

SEQ ID NO: 2663370 - RNA, 19 nt, Artificial Sequence
  Description of Artificial Sequence: Synthetic oligonucleotide
ccgcagcacuuucucuccu

SEQ ID NO: 2663371 - RNA, 19 nt, Artificial Sequence
  Description of Artificial Sequence: Synthetic oligonucleotide
ggcugucgcugagcucugu

SEQ ID NO: 2663372 - RNA, 19 nt, Artificial Sequence
  Description of Artificial Sequence: Synthetic oligonucleotide
uagguuuuaaagcugaugg

SEQ ID NO: 2663373 - RNA, 19 nt, Artificial Sequence
  Description of Artificial Sequence: Synthetic oligonucleotide
aaaagagcaccauggaagc

SEQ ID NO: 2663374 - RNA, 19 nt, Artificial Sequence
  Description of Artificial Sequence: Synthetic oligonucleotide
agaaauagguuuuaaagcu

SEQ ID NO: 2663375 - RNA, 19 nt, Artificial Sequence
  Description of Artificial Sequence: Synthetic oligonucleotide
aauguaagacagcagaaca

SEQ ID NO: 2663376 - RNA, 19 nt, Artificial Sequence
  Description of Artificial Sequence: Synthetic oligonucleotide
uaaaagugcagaaaagagc

SEQ ID NO: 2663377 - RNA, 19 nt, Artificial Sequence
  Description of Artificial Sequence: Synthetic oligonucleotide
aaaagugcagaaaagagca

SEQ ID NO: 2663378 - RNA, 19 nt, Artificial Sequence
  Description of Artificial Sequence: Synthetic oligonucleotide
gaaaagagcaccauggaag

SEQ ID NO: 2663379 - RNA, 19 nt, Artificial Sequence
  Description of Artificial Sequence: Synthetic oligonucleotide
gacaaggucacucagaguc

SEQ ID NO: 2663380 - RNA, 19 nt, Artificial Sequence
  Description of Artificial Sequence: Synthetic oligonucleotide
gaucugauagcccacuucg

SEQ ID NO: 2663381 - RNA, 19 nt, Artificial Sequence
  Description of Artificial Sequence: Synthetic oligonucleotide
aagacaaggucacucagag

SEQ ID NO: 2663382 - RNA, 19 nt, Artificial Sequence
  Description of Artificial Sequence: Synthetic oligonucleotide
uaaccguugcaauagaucc

SEQ ID NO: 2663383 - RNA, 19 nt, Artificial Sequence
  Description of Artificial Sequence: Synthetic oligonucleotide
guugcuuccacucaauggg

SEQ ID NO: 2663384 - RNA, 19 nt, Artificial Sequence
  Description of Artificial Sequence: Synthetic oligonucleotide
gguuguaagaucuucaucc

SEQ ID NO: 2663385 - RNA, 19 nt, Artificial Sequence
  Description of Artificial Sequence: Synthetic oligonucleotide
uugccuuaauguaagacag

SEQ ID NO: 2663386 - RNA, 19 nt, Artificial Sequence
  Description of Artificial Sequence: Synthetic oligonucleotide
uguaagaucuucauccgca

SEQ ID NO: 2663387 - RNA, 19 nt, Artificial Sequence
  Description of Artificial Sequence: Synthetic oligonucleotide
gacauugaggaccaguugc

SEQ ID NO: 2663388 - RNA, 19 nt, Artificial Sequence
  Description of Artificial Sequence: Synthetic oligonucleotide
cuuaauguaagacagcaga

SEQ ID NO: 2663389 - RNA, 19 nt, Artificial Sequence
  Description of Artificial Sequence: Synthetic oligonucleotide
gagacagggauuuuccccg

SEQ ID NO: 2663390 - RNA, 19 nt, Artificial Sequence
  Description of Artificial Sequence: Synthetic oligonucleotide
aguugcuuccacucaaugg

SEQ ID NO: 2663391 - RNA, 19 nt, Artificial Sequence
  Description of Artificial Sequence: Synthetic oligonucleotide
uggguaaaagugcagaaaa

SEQ ID NO: 2663392 - RNA, 19 nt, Artificial Sequence
  Description of Artificial Sequence: Synthetic oligonucleotide
aaagucgaagacaagguca

SEQ ID NO: 2663393 - RNA, 19 nt, Artificial Sequence
  Description of Artificial Sequence: Synthetic oligonucleotide
augggaaaccgcucgaugg

SEQ ID NO: 2663394 - RNA, 19 nt, Artificial Sequence
  Description of Artificial Sequence: Synthetic oligonucleotide
ucucacuuggguuggagag

SEQ ID NO: 2663395 - RNA, 19 nt, Artificial Sequence
  Description of Artificial Sequence: Synthetic oligonucleotide
ucuuguacgagucuucaaa

SEQ ID NO: 2663396 - RNA, 19 nt, Artificial Sequence
  Description of Artificial Sequence: Synthetic oligonucleotide
auacagcccaaucuugacc

SEQ ID NO: 2663397 - RNA, 19 nt, Artificial Sequence
  Description of Artificial Sequence: Synthetic oligonucleotide
ucaaagucgaagacaaggu

SEQ ID NO: 2663398 - RNA, 19 nt, Artificial Sequence
  Description of Artificial Sequence: Synthetic oligonucleotide
aaagcugaugggaaaccgc

SEQ ID NO: 2663399 - RNA, 19 nt, Artificial Sequence
  Description of Artificial Sequence: Synthetic oligonucleotide
augaacaacaguugcaggu

SEQ ID NO: 2663400 - RNA, 19 nt, Artificial Sequence
  Description of Artificial Sequence: Synthetic oligonucleotide
uguacgagucuucaaaguc

SEQ ID NO: 2663401 - RNA, 19 nt, Artificial Sequence
  Description of Artificial Sequence: Synthetic oligonucleotide
uuaauguaagacagcagaa

SEQ ID NO: 2663402 - RNA, 19 nt, Artificial Sequence
  Description of Artificial Sequence: Synthetic oligonucleotide
uuugagacauugaggacca

SEQ ID NO: 2663403 - RNA, 19 nt, Artificial Sequence
  Description of Artificial Sequence: Synthetic oligonucleotide
cucagaguccgaaaggugc

SEQ ID NO: 2663404 - RNA, 19 nt, Artificial Sequence
  Description of Artificial Sequence: Synthetic oligonucleotide
caucuuugagacauugagg

SEQ ID NO: 2663405 - RNA, 19 nt, Artificial Sequence
  Description of Artificial Sequence: Synthetic oligonucleotide
gacagcagaacacaugaac

SEQ ID NO: 2663406 - RNA, 19 nt, Artificial Sequence
  Description of Artificial Sequence: Synthetic oligonucleotide
ugcagguauuucuuguacg

SEQ ID NO: 2663407 - RNA, 19 nt, Artificial Sequence
  Description of Artificial Sequence: Synthetic oligonucleotide
aucagcucagcccuucggc

SEQ ID NO: 2663408 - RNA, 19 nt, Artificial Sequence
  Description of Artificial Sequence: Synthetic oligonucleotide
uguaagacagcagaacaca

SEQ ID NO: 2663409 - RNA, 19 nt, Artificial Sequence
  Description of Artificial Sequence: Synthetic oligonucleotide
uugcaauagauccccagca

SEQ ID NO: 2663410 - RNA, 19 nt, Artificial Sequence
  Description of Artificial Sequence: Synthetic oligonucleotide
auugaggaccaguugcuuc

SEQ ID NO: 2663411 - RNA, 19 nt, Artificial Sequence
  Description of Artificial Sequence: Synthetic oligonucleotide
gaaaccgcucgauggaagg

SEQ ID NO: 2663412 - RNA, 19 nt, Artificial Sequence
  Description of Artificial Sequence: Synthetic oligonucleotide
aagucgaagacaaggucac

SEQ ID NO: 2663413 - RNA, 19 nt, Artificial Sequence
  Description of Artificial Sequence: Synthetic oligonucleotide
uaugucagaccucagcauc

SEQ ID NO: 2663414 - RNA, 19 nt, Artificial Sequence
  Description of Artificial Sequence: Synthetic oligonucleotide
agauccggaucugauagcc

SEQ ID NO: 2663415 - RNA, 19 nt, Artificial Sequence
  Description of Artificial Sequence: Synthetic oligonucleotide
uacagcccaaucuugaccu

SEQ ID NO: 2663416 - RNA, 19 nt, Artificial Sequence
  Description of Artificial Sequence: Synthetic oligonucleotide
agucuucaaagucgaagac

SEQ ID NO: 2663417 - RNA, 19 nt, Artificial Sequence
  Description of Artificial Sequence: Synthetic oligonucleotide
uaagacagcagaacacaug

SEQ ID NO: 2663418 - RNA, 19 nt, Artificial Sequence
  Description of Artificial Sequence: Synthetic oligonucleotide
uuuaaagcugaugggaaac

SEQ ID NO: 2663419 - RNA, 19 nt, Artificial Sequence
  Description of Artificial Sequence: Synthetic oligonucleotide
uaaagcugaugggaaaccg

SEQ ID NO: 2663420 - RNA, 19 nt, Artificial Sequence
  Description of Artificial Sequence: Synthetic oligonucleotide
aacacaugaacaacaguug

SEQ ID NO: 2663421 - RNA, 19 nt, Artificial Sequence
  Description of Artificial Sequence: Synthetic oligonucleotide
cuuguacgagucuucaaag

SEQ ID NO: 2663422 - RNA, 19 nt, Artificial Sequence
  Description of Artificial Sequence: Synthetic oligonucleotide
agcuggcguggcuagaucc

SEQ ID NO: 2663423 - RNA, 19 nt, Artificial Sequence
  Description of Artificial Sequence: Synthetic oligonucleotide
ugccgagccuccuugaggg

SEQ ID NO: 2663424 - RNA, 19 nt, Artificial Sequence
  Description of Artificial Sequence: Synthetic oligonucleotide
acguggugaaaguaguuuc

SEQ ID NO: 2663425 - RNA, 19 nt, Artificial Sequence
  Description of Artificial Sequence: Synthetic oligonucleotide
cuucuucucagguagagca

SEQ ID NO: 2663426 - RNA, 19 nt, Artificial Sequence
  Description of Artificial Sequence: Synthetic oligonucleotide
guaguaaccguugcaauag

SEQ ID NO: 2663427 - RNA, 19 nt, Artificial Sequence
  Description of Artificial Sequence: Synthetic oligonucleotide
aauagauccccagcacgac

SEQ ID NO: 2663428 - RNA, 19 nt, Artificial Sequence
  Description of Artificial Sequence: Synthetic oligonucleotide
accguugcaauagaucccc

SEQ ID NO: 2663429 - RNA, 19 nt, Artificial Sequence
  Description of Artificial Sequence: Synthetic oligonucleotide
guugcaauagauccccagc

SEQ ID NO: 2663430 - RNA, 19 nt, Artificial Sequence
  Description of Artificial Sequence: Synthetic oligonucleotide
cuuaugucagaccucagca

SEQ ID NO: 2663431 - RNA, 19 nt, Artificial Sequence
  Description of Artificial Sequence: Synthetic oligonucleotide
uuguaagaucuucauccgc

SEQ ID NO: 2663432 - RNA, 19 nt, Artificial Sequence
  Description of Artificial Sequence: Synthetic oligonucleotide
gucacucagaguccgaaag

SEQ ID NO: 2663433 - RNA, 19 nt, Artificial Sequence
  Description of Artificial Sequence: Synthetic oligonucleotide
uuuuaaagcugaugggaaa

SEQ ID NO: 2663434 - RNA, 19 nt, Artificial Sequence
  Description of Artificial Sequence: Synthetic oligonucleotide
aaagagcaccauggaagcc

SEQ ID NO: 2663435 - RNA, 19 nt, Artificial Sequence
  Description of Artificial Sequence: Synthetic oligonucleotide
gcaucuuugagacauugag

SEQ ID NO: 2663436 - RNA, 19 nt, Artificial Sequence
  Description of Artificial Sequence: Synthetic oligonucleotide
uaauguaagacagcagaac

SEQ ID NO: 2663437 - RNA, 19 nt, Artificial Sequence
  Description of Artificial Sequence: Synthetic oligonucleotide
acuugcagguuguaagauc

SEQ ID NO: 2663438 - RNA, 19 nt, Artificial Sequence
  Description of Artificial Sequence: Synthetic oligonucleotide
guacgagucuucaaagucg

SEQ ID NO: 2663439 - RNA, 19 nt, Artificial Sequence
  Description of Artificial Sequence: Synthetic oligonucleotide
ucguucagagugcugaggu

SEQ ID NO: 2663440 - RNA, 19 nt, Artificial Sequence
  Description of Artificial Sequence: Synthetic oligonucleotide
agaaaagagcaccauggaa

SEQ ID NO: 2663441 - RNA, 19 nt, Artificial Sequence
  Description of Artificial Sequence: Synthetic oligonucleotide
aaccguugcaauagauccc

SEQ ID NO: 2663442 - RNA, 19 nt, Artificial Sequence
  Description of Artificial Sequence: Synthetic oligonucleotide
ugauagcccacuucguuca

SEQ ID NO: 2663443 - RNA, 19 nt, Artificial Sequence
  Description of Artificial Sequence: Synthetic oligonucleotide
auggguuggaagcugugag

SEQ ID NO: 2663444 - RNA, 19 nt, Artificial Sequence
  Description of Artificial Sequence: Synthetic oligonucleotide
auagauccccagcacgacg

SEQ ID NO: 2663445 - RNA, 19 nt, Artificial Sequence
  Description of Artificial Sequence: Synthetic oligonucleotide
acugugugcagguauuucu

SEQ ID NO: 2663446 - RNA, 19 nt, Artificial Sequence
  Description of Artificial Sequence: Synthetic oligonucleotide
agguauuucuuguacgagu

SEQ ID NO: 2663447 - RNA, 19 nt, Artificial Sequence
  Description of Artificial Sequence: Synthetic oligonucleotide
auguaagacagcagaacac

SEQ ID NO: 2663448 - RNA, 19 nt, Artificial Sequence
  Description of Artificial Sequence: Synthetic oligonucleotide
uacgagucuucaaagucga

SEQ ID NO: 2663449 - RNA, 19 nt, Artificial Sequence
  Description of Artificial Sequence: Synthetic oligonucleotide
aagagcaccauggaagccu

SEQ ID NO: 2663450 - RNA, 19 nt, Artificial Sequence
  Description of Artificial Sequence: Synthetic oligonucleotide
agguuguaagaucuucauc

SEQ ID NO: 2663451 - RNA, 19 nt, Artificial Sequence
  Description of Artificial Sequence: Synthetic oligonucleotide
aacaguugcagguccuccu

SEQ ID NO: 2663452 - RNA, 19 nt, Artificial Sequence
  Description of Artificial Sequence: Synthetic oligonucleotide
auuuuccccggcuucucac

SEQ ID NO: 2663453 - RNA, 19 nt, Artificial Sequence
  Description of Artificial Sequence: Synthetic oligonucleotide
aaaccgcucgauggaaggc

SEQ ID NO: 2663454 - RNA, 19 nt, Artificial Sequence
  Description of Artificial Sequence: Synthetic oligonucleotide
gaacaacaguugcaggucc

SEQ ID NO: 2663455 - RNA, 19 nt, Artificial Sequence
  Description of Artificial Sequence: Synthetic oligonucleotide
ugagccguaguaaccguug

SEQ ID NO: 2663456 - RNA, 19 nt, Artificial Sequence
  Description of Artificial Sequence: Synthetic oligonucleotide
uccgaaaggugcuugucca

SEQ ID NO: 2663457 - RNA, 19 nt, Artificial Sequence
  Description of Artificial Sequence: Synthetic oligonucleotide
cagaacacaugaacaacag

SEQ ID NO: 2663458 - RNA, 19 nt, Artificial Sequence
  Description of Artificial Sequence: Synthetic oligonucleotide
uggguuggaagcugugagg

SEQ ID NO: 2663459 - RNA, 19 nt, Artificial Sequence
  Description of Artificial Sequence: Synthetic oligonucleotide
caugaacaacaguugcagg

SEQ ID NO: 2663460 - RNA, 19 nt, Artificial Sequence
  Description of Artificial Sequence: Synthetic oligonucleotide
uuggaagcugugaggcucg

SEQ ID NO: 2663461 - RNA, 19 nt, Artificial Sequence
  Description of Artificial Sequence: Synthetic oligonucleotide
uggaagccucaccagcugg

SEQ ID NO: 2663462 - RNA, 19 nt, Artificial Sequence
  Description of Artificial Sequence: Synthetic oligonucleotide
uuaaagcugaugggaaacc

SEQ ID NO: 2663463 - RNA, 19 nt, Artificial Sequence
  Description of Artificial Sequence: Synthetic oligonucleotide
ucgaagacaaggucacuca

SEQ ID NO: 2663464 - RNA, 19 nt, Artificial Sequence
  Description of Artificial Sequence: Synthetic oligonucleotide
uuccuuaugucagaccuca

SEQ ID NO: 2663465 - RNA, 19 nt, Artificial Sequence
  Description of Artificial Sequence: Synthetic oligonucleotide
ugcaauagauccccagcac

SEQ ID NO: 2663466 - RNA, 19 nt, Artificial Sequence
  Description of Artificial Sequence: Synthetic oligonucleotide
uaagaucuucauccgcaug

SEQ ID NO: 2663467 - RNA, 19 nt, Artificial Sequence
  Description of Artificial Sequence: Synthetic oligonucleotide
aaagugcagaaaagagcac

SEQ ID NO: 2663468 - RNA, 19 nt, Artificial Sequence
  Description of Artificial Sequence: Synthetic oligonucleotide
cacgacguggugaaaguag

SEQ ID NO: 2663469 - RNA, 19 nt, Artificial Sequence
  Description of Artificial Sequence: Synthetic oligonucleotide
gcaauagauccccagcacg

SEQ ID NO: 2663470 - RNA, 19 nt, Artificial Sequence
  Description of Artificial Sequence: Synthetic oligonucleotide
uagauccccagcacgacgu

SEQ ID NO: 2663471 - RNA, 19 nt, Artificial Sequence
  Description of Artificial Sequence: Synthetic oligonucleotide
ucggcucaugcccagugag

SEQ ID NO: 2663472 - RNA, 19 nt, Artificial Sequence
  Description of Artificial Sequence: Synthetic oligonucleotide
uuggagagugggcacuugc

SEQ ID NO: 2663473 - RNA, 19 nt, Artificial Sequence
  Description of Artificial Sequence: Synthetic oligonucleotide
gaugggaaaccgcucgaug

SEQ ID NO: 2663474 - RNA, 19 nt, Artificial Sequence
  Description of Artificial Sequence: Synthetic oligonucleotide
auagguuuuaaagcugaug

SEQ ID NO: 2663475 - RNA, 19 nt, Artificial Sequence
  Description of Artificial Sequence: Synthetic oligonucleotide
ucagaguccgaaaggugcu

SEQ ID NO: 2663476 - RNA, 19 nt, Artificial Sequence
  Description of Artificial Sequence: Synthetic oligonucleotide
ucugauagcccacuucguu

SEQ ID NO: 2663477 - RNA, 19 nt, Artificial Sequence
  Description of Artificial Sequence: Synthetic oligonucleotide
gaacacaugaacaacaguu

SEQ ID NO: 2663478 - RNA, 19 nt, Artificial Sequence
  Description of Artificial Sequence: Synthetic oligonucleotide
ugugugcagguauuucuug

SEQ ID NO: 2663479 - RNA, 19 nt, Artificial Sequence
  Description of Artificial Sequence: Synthetic oligonucleotide
agggauuuuccccggcuuc

SEQ ID NO: 2663480 - RNA, 19 nt, Artificial Sequence
  Description of Artificial Sequence: Synthetic oligonucleotide
ugcuuguccaucagcucag

SEQ ID NO: 2663481 - RNA, 19 nt, Artificial Sequence
  Description of Artificial Sequence: Synthetic oligonucleotide
uuguacgagucuucaaagu

SEQ ID NO: 2663482 - RNA, 19 nt, Artificial Sequence
  Description of Artificial Sequence: Synthetic oligonucleotide
gaccucagcaucuuugaga

SEQ ID NO: 2663483 - RNA, 19 nt, Artificial Sequence
  Description of Artificial Sequence: Synthetic oligonucleotide
agcugcuggguaaaagugc

SEQ ID NO: 2663484 - RNA, 19 nt, Artificial Sequence
  Description of Artificial Sequence: Synthetic oligonucleotide
ggugaaaguaguuuccuga

SEQ ID NO: 2663485 - RNA, 19 nt, Artificial Sequence
  Description of Artificial Sequence: Synthetic oligonucleotide
uagcccacuucguucagag

SEQ ID NO: 2663486 - RNA, 19 nt, Artificial Sequence
  Description of Artificial Sequence: Synthetic oligonucleotide
ggcacuugcagguuguaag

SEQ ID NO: 2663487 - RNA, 19 nt, Artificial Sequence
  Description of Artificial Sequence: Synthetic oligonucleotide
uuggguuggagagugggca

SEQ ID NO: 2663488 - RNA, 19 nt, Artificial Sequence
  Description of Artificial Sequence: Synthetic oligonucleotide
acuuggguuggagaguggg

SEQ ID NO: 2663489 - RNA, 19 nt, Artificial Sequence
  Description of Artificial Sequence: Synthetic oligonucleotide
uagagcaggcgauuugucu

SEQ ID NO: 2663490 - RNA, 19 nt, Artificial Sequence
  Description of Artificial Sequence: Synthetic oligonucleotide
aauggguuggaagcuguga

SEQ ID NO: 2663491 - RNA, 19 nt, Artificial Sequence
  Description of Artificial Sequence: Synthetic oligonucleotide
uucagagugcugaggucag

SEQ ID NO: 2663492 - RNA, 19 nt, Artificial Sequence
  Description of Artificial Sequence: Synthetic oligonucleotide
caaagucgaagacaagguc

SEQ ID NO: 2663493 - RNA, 19 nt, Artificial Sequence
  Description of Artificial Sequence: Synthetic oligonucleotide
agaacacaugaacaacagu

SEQ ID NO: 2663494 - RNA, 19 nt, Artificial Sequence
  Description of Artificial Sequence: Synthetic oligonucleotide
ugaacaacaguugcagguc

SEQ ID NO: 2663495 - RNA, 19 nt, Artificial Sequence
  Description of Artificial Sequence: Synthetic oligonucleotide
ucuuugagacauugaggac

SEQ ID NO: 2663496 - RNA, 19 nt, Artificial Sequence
  Description of Artificial Sequence: Synthetic oligonucleotide
ucuucauccgcaugucccu

SEQ ID NO: 2663497 - RNA, 19 nt, Artificial Sequence
  Description of Artificial Sequence: Synthetic oligonucleotide
uggugaaaguaguuuccug

SEQ ID NO: 2663498 - RNA, 19 nt, Artificial Sequence
  Description of Artificial Sequence: Synthetic oligonucleotide
gaaaggugcuuguccauca

SEQ ID NO: 2663499 - RNA, 19 nt, Artificial Sequence
  Description of Artificial Sequence: Synthetic oligonucleotide
cugauagcccacuucguuc

SEQ ID NO: 2663500 - RNA, 19 nt, Artificial Sequence
  Description of Artificial Sequence: Synthetic oligonucleotide
uauuucuuguacgagucuu

SEQ ID NO: 2663501 - RNA, 19 nt, Artificial Sequence
  Description of Artificial Sequence: Synthetic oligonucleotide
ucacuuggguuggagagug

SEQ ID NO: 2663502 - RNA, 19 nt, Artificial Sequence
  Description of Artificial Sequence: Synthetic oligonucleotide
ugggaaaccgcucgaugga

SEQ ID NO: 2663503 - RNA, 19 nt, Artificial Sequence
  Description of Artificial Sequence: Synthetic oligonucleotide
uuaugucagaccucagcau

SEQ ID NO: 2663504 - RNA, 19 nt, Artificial Sequence
  Description of Artificial Sequence: Synthetic oligonucleotide
agacauugaggaccaguug

SEQ ID NO: 2663505 - RNA, 19 nt, Artificial Sequence
  Description of Artificial Sequence: Synthetic oligonucleotide
gaagcugcuggguaaaagu

SEQ ID NO: 2663506 - RNA, 19 nt, Artificial Sequence
  Description of Artificial Sequence: Synthetic oligonucleotide
aagcugaugggaaaccgcu

SEQ ID NO: 2663507 - RNA, 19 nt, Artificial Sequence
  Description of Artificial Sequence: Synthetic oligonucleotide
ugagacauugaggaccagu

SEQ ID NO: 2663508 - RNA, 19 nt, Artificial Sequence
  Description of Artificial Sequence: Synthetic oligonucleotide
uucauccgcaugucccugg

SEQ ID NO: 2663509 - RNA, 19 nt, Artificial Sequence
  Description of Artificial Sequence: Synthetic oligonucleotide
caauagauccccagcacga

SEQ ID NO: 2663510 - RNA, 19 nt, Artificial Sequence
  Description of Artificial Sequence: Synthetic oligonucleotide
uucucacuuggguuggaga

SEQ ID NO: 2663511 - RNA, 19 nt, Artificial Sequence
  Description of Artificial Sequence: Synthetic oligonucleotide
ugccuuaauguaagacagc

SEQ ID NO: 2663512 - RNA, 19 nt, Artificial Sequence
  Description of Artificial Sequence: Synthetic oligonucleotide
caaucuugaccuucuugac

SEQ ID NO: 2663513 - RNA, 19 nt, Artificial Sequence
  Description of Artificial Sequence: Synthetic oligonucleotide
agugcugaggucagccacc

SEQ ID NO: 2663514 - RNA, 19 nt, Artificial Sequence
  Description of Artificial Sequence: Synthetic oligonucleotide
cauacagcccaaucuugac

SEQ ID NO: 2663515 - RNA, 19 nt, Artificial Sequence
  Description of Artificial Sequence: Synthetic oligonucleotide
ugcuggguaaaagugcaga

SEQ ID NO: 2663516 - RNA, 19 nt, Artificial Sequence
  Description of Artificial Sequence: Synthetic oligonucleotide
cuugcagguuguaagaucu

SEQ ID NO: 2663517 - RNA, 19 nt, Artificial Sequence
  Description of Artificial Sequence: Synthetic oligonucleotide
agcugugaggcucgugggg

SEQ ID NO: 2663518 - RNA, 19 nt, Artificial Sequence
  Description of Artificial Sequence: Synthetic oligonucleotide
cagugagccguaguaaccg

SEQ ID NO: 2663519 - RNA, 19 nt, Artificial Sequence
  Description of Artificial Sequence: Synthetic oligonucleotide
ggcguauuucuccagcucc

SEQ ID NO: 2663520 - RNA, 19 nt, Artificial Sequence
  Description of Artificial Sequence: Synthetic oligonucleotide
uccccggcuucucacuugg

SEQ ID NO: 2663521 - RNA, 19 nt, Artificial Sequence
  Description of Artificial Sequence: Synthetic oligonucleotide
uucuugacugugugcaggu

SEQ ID NO: 2663522 - RNA, 19 nt, Artificial Sequence
  Description of Artificial Sequence: Synthetic oligonucleotide
gcccacuucguucagagug

SEQ ID NO: 2663523 - RNA, 19 nt, Artificial Sequence
  Description of Artificial Sequence: Synthetic oligonucleotide
cuuccacucaauggguugg

SEQ ID NO: 2663524 - RNA, 19 nt, Artificial Sequence
  Description of Artificial Sequence: Synthetic oligonucleotide
gacauacagcccaaucuug

SEQ ID NO: 2663525 - RNA, 19 nt, Artificial Sequence
  Description of Artificial Sequence: Synthetic oligonucleotide
uuccugagaaauagguuuu

SEQ ID NO: 2663526 - RNA, 19 nt, Artificial Sequence
  Description of Artificial Sequence: Synthetic oligonucleotide
guccgaaaggugcuugucc

SEQ ID NO: 2663527 - RNA, 19 nt, Artificial Sequence
  Description of Artificial Sequence: Synthetic oligonucleotide
cuuggguuggagagugggc

SEQ ID NO: 2663528 - RNA, 19 nt, Artificial Sequence
  Description of Artificial Sequence: Synthetic oligonucleotide
guucagagugcugagguca

SEQ ID NO: 2663529 - RNA, 19 nt, Artificial Sequence
  Description of Artificial Sequence: Synthetic oligonucleotide
auuugucuccccugccgag

SEQ ID NO: 2663530 - RNA, 19 nt, Artificial Sequence
  Description of Artificial Sequence: Synthetic oligonucleotide
caaggucacucagaguccg

SEQ ID NO: 2663531 - RNA, 19 nt, Artificial Sequence
  Description of Artificial Sequence: Synthetic oligonucleotide
cuggcuugccuccuccugg

SEQ ID NO: 2663532 - RNA, 19 nt, Artificial Sequence
  Description of Artificial Sequence: Synthetic oligonucleotide
cacaugaacaacaguugca

SEQ ID NO: 2663533 - RNA, 19 nt, Artificial Sequence
  Description of Artificial Sequence: Synthetic oligonucleotide
accauggaagccucaccag

SEQ ID NO: 2663534 - RNA, 19 nt, Artificial Sequence
  Description of Artificial Sequence: Synthetic oligonucleotide
guaaccguugcaauagauc

SEQ ID NO: 2663535 - RNA, 19 nt, Artificial Sequence
  Description of Artificial Sequence: Synthetic oligonucleotide
ugugcagguauuucuugua

SEQ ID NO: 2663536 - RNA, 19 nt, Artificial Sequence
  Description of Artificial Sequence: Synthetic oligonucleotide
cuucucagguagagcaggc

SEQ ID NO: 2663537 - RNA, 19 nt, Artificial Sequence
  Description of Artificial Sequence: Synthetic oligonucleotide
acaguugcagguccuccug

SEQ ID NO: 2663538 - RNA, 19 nt, Artificial Sequence
  Description of Artificial Sequence: Synthetic oligonucleotide
gucccuggcguauuucucc

SEQ ID NO: 2663539 - RNA, 19 nt, Artificial Sequence
  Description of Artificial Sequence: Synthetic oligonucleotide
agugcagaaaagagcacca

SEQ ID NO: 2663540 - RNA, 19 nt, Artificial Sequence
  Description of Artificial Sequence: Synthetic oligonucleotide
gaagacaaggucacucaga

SEQ ID NO: 2663541 - RNA, 19 nt, Artificial Sequence
  Description of Artificial Sequence: Synthetic oligonucleotide
guuggaagcugugaggcuc

SEQ ID NO: 2663542 - RNA, 19 nt, Artificial Sequence
  Description of Artificial Sequence: Synthetic oligonucleotide
gaagccucaccagcuggcg

SEQ ID NO: 2663543 - RNA, 19 nt, Artificial Sequence
  Description of Artificial Sequence: Synthetic oligonucleotide
uugacugugugcagguauu

SEQ ID NO: 2663544 - RNA, 19 nt, Artificial Sequence
  Description of Artificial Sequence: Synthetic oligonucleotide
uugcuuccacucaaugggu

SEQ ID NO: 2663545 - RNA, 19 nt, Artificial Sequence
  Description of Artificial Sequence: Synthetic oligonucleotide
cuuguccaucagcucagcc

SEQ ID NO: 2663546 - RNA, 19 nt, Artificial Sequence
  Description of Artificial Sequence: Synthetic oligonucleotide
agccucaccagcuggcgug

SEQ ID NO: 2663547 - RNA, 19 nt, Artificial Sequence
  Description of Artificial Sequence: Synthetic oligonucleotide
gaccuucuugacugugugc

SEQ ID NO: 2663548 - RNA, 19 nt, Artificial Sequence
  Description of Artificial Sequence: Synthetic oligonucleotide
uaguaaccguugcaauaga

SEQ ID NO: 2663549 - RNA, 19 nt, Artificial Sequence
  Description of Artificial Sequence: Synthetic oligonucleotide
cuucguucagagugcugag

SEQ ID NO: 2663550 - RNA, 19 nt, Artificial Sequence
  Description of Artificial Sequence: Synthetic oligonucleotide
uggcuugccuccuccuggg

SEQ ID NO: 2663551 - RNA, 19 nt, Artificial Sequence
  Description of Artificial Sequence: Synthetic oligonucleotide
uuugucuccccugccgagc

SEQ ID NO: 2663552 - RNA, 19 nt, Artificial Sequence
  Description of Artificial Sequence: Synthetic oligonucleotide
cagagugcugaggucagcc

SEQ ID NO: 2663553 - RNA, 19 nt, Artificial Sequence
  Description of Artificial Sequence: Synthetic oligonucleotide
agacagggauuuuccccgg

SEQ ID NO: 2663554 - RNA, 19 nt, Artificial Sequence
  Description of Artificial Sequence: Synthetic oligonucleotide
aaccgcucgauggaaggcu

SEQ ID NO: 2663555 - RNA, 19 nt, Artificial Sequence
  Description of Artificial Sequence: Synthetic oligonucleotide
cuucaaagucgaagacaag

SEQ ID NO: 2663556 - RNA, 19 nt, Artificial Sequence
  Description of Artificial Sequence: Synthetic oligonucleotide
ugcagguuguaagaucuuc

SEQ ID NO: 2663557 - RNA, 19 nt, Artificial Sequence
  Description of Artificial Sequence: Synthetic oligonucleotide
ucauccgcaugucccuggc

SEQ ID NO: 2663558 - RNA, 19 nt, Artificial Sequence
  Description of Artificial Sequence: Synthetic oligonucleotide
uagauccggaucugauagc

SEQ ID NO: 2663559 - RNA, 19 nt, Artificial Sequence
  Description of Artificial Sequence: Synthetic oligonucleotide
uccuuccuuaugucagacc

SEQ ID NO: 2663560 - RNA, 19 nt, Artificial Sequence
  Description of Artificial Sequence: Synthetic oligonucleotide
gucgaagacaaggucacuc

SEQ ID NO: 2663561 - RNA, 19 nt, Artificial Sequence
  Description of Artificial Sequence: Synthetic oligonucleotide
aauagguuuuaaagcugau

SEQ ID NO: 2663562 - RNA, 19 nt, Artificial Sequence
  Description of Artificial Sequence: Synthetic oligonucleotide
ugcccagugagccguagua

SEQ ID NO: 2663563 - RNA, 19 nt, Artificial Sequence
  Description of Artificial Sequence: Synthetic oligonucleotide
caccauggaagccucacca

SEQ ID NO: 2663564 - RNA, 19 nt, Artificial Sequence
  Description of Artificial Sequence: Synthetic oligonucleotide
ccuuaugucagaccucagc

SEQ ID NO: 2663565 - RNA, 19 nt, Artificial Sequence
  Description of Artificial Sequence: Synthetic oligonucleotide
aacaacaguugcagguccu

SEQ ID NO: 2663566 - RNA, 19 nt, Artificial Sequence
  Description of Artificial Sequence: Synthetic oligonucleotide
uuuuccccggcuucucacu

SEQ ID NO: 2663567 - RNA, 19 nt, Artificial Sequence
  Description of Artificial Sequence: Synthetic oligonucleotide
acagggauuuuccccggcu

SEQ ID NO: 2663568 - RNA, 19 nt, Artificial Sequence
  Description of Artificial Sequence: Synthetic oligonucleotide
accaguugcuuccacucaa

SEQ ID NO: 2663569 - RNA, 19 nt, Artificial Sequence
  Description of Artificial Sequence: Synthetic oligonucleotide
aggaccaguugcuuccacu

SEQ ID NO: 2663570 - RNA, 19 nt, Artificial Sequence
  Description of Artificial Sequence: Synthetic oligonucleotide
acauacagcccaaucuuga

SEQ ID NO: 2663571 - RNA, 19 nt, Artificial Sequence
  Description of Artificial Sequence: Synthetic oligonucleotide
gcugaggucagccaccuuc

SEQ ID NO: 2663572 - RNA, 19 nt, Artificial Sequence
  Description of Artificial Sequence: Synthetic oligonucleotide
agcacgacguggugaaagu

SEQ ID NO: 2663573 - RNA, 19 nt, Artificial Sequence
  Description of Artificial Sequence: Synthetic oligonucleotide
agguagagcaggcgauuug

SEQ ID NO: 2663574 - RNA, 19 nt, Artificial Sequence
  Description of Artificial Sequence: Synthetic oligonucleotide
uucggcucaugcccaguga

SEQ ID NO: 2663575 - RNA, 19 nt, Artificial Sequence
  Description of Artificial Sequence: Synthetic oligonucleotide
gcagguauuucuuguacga

SEQ ID NO: 2663576 - RNA, 19 nt, Artificial Sequence
  Description of Artificial Sequence: Synthetic oligonucleotide
gauuuuccccggcuucuca

SEQ ID NO: 2663577 - RNA, 19 nt, Artificial Sequence
  Description of Artificial Sequence: Synthetic oligonucleotide
cagguauuucuuguacgag

SEQ ID NO: 2663578 - RNA, 19 nt, Artificial Sequence
  Description of Artificial Sequence: Synthetic oligonucleotide
gagccguaguaaccguugc

SEQ ID NO: 2663579 - RNA, 19 nt, Artificial Sequence
  Description of Artificial Sequence: Synthetic oligonucleotide
cuuccuuaugucagaccuc

SEQ ID NO: 2663580 - RNA, 19 nt, Artificial Sequence
  Description of Artificial Sequence: Synthetic oligonucleotide
uggcguauuucuccagcuc

SEQ ID NO: 2663581 - RNA, 19 nt, Artificial Sequence
  Description of Artificial Sequence: Synthetic oligonucleotide
aguccgaaaggugcuuguc

SEQ ID NO: 2663582 - RNA, 19 nt, Artificial Sequence
  Description of Artificial Sequence: Synthetic oligonucleotide
uucuuguacgagucuucaa

SEQ ID NO: 2663583 - RNA, 19 nt, Artificial Sequence
  Description of Artificial Sequence: Synthetic oligonucleotide
ggguuggaagcugugaggc

SEQ ID NO: 2663584 - RNA, 19 nt, Artificial Sequence
  Description of Artificial Sequence: Synthetic oligonucleotide
agagugcugaggucagcca

SEQ ID NO: 2663585 - RNA, 19 nt, Artificial Sequence
  Description of Artificial Sequence: Synthetic oligonucleotide
cugccgagccuccuugagg

SEQ ID NO: 2663586 - RNA, 19 nt, Artificial Sequence
  Description of Artificial Sequence: Synthetic oligonucleotide
acucaauggguuggaagcu

SEQ ID NO: 2663587 - RNA, 19 nt, Artificial Sequence
  Description of Artificial Sequence: Synthetic oligonucleotide
uccuuaugucagaccucag

SEQ ID NO: 2663588 - RNA, 19 nt, Artificial Sequence
  Description of Artificial Sequence: Synthetic oligonucleotide
ugucccuggcguauuucuc

SEQ ID NO: 2663589 - RNA, 19 nt, Artificial Sequence
  Description of Artificial Sequence: Synthetic oligonucleotide
ggcgauuugucuccccugc

SEQ ID NO: 2663590 - RNA, 19 nt, Artificial Sequence
  Description of Artificial Sequence: Synthetic oligonucleotide
gccuuaauguaagacagca

SEQ ID NO: 2663591 - RNA, 19 nt, Artificial Sequence
  Description of Artificial Sequence: Synthetic oligonucleotide
caacaguugcagguccucc

SEQ ID NO: 2663592 - RNA, 19 nt, Artificial Sequence
  Description of Artificial Sequence: Synthetic oligonucleotide
agugagccguaguaaccgu

SEQ ID NO: 2663593 - RNA, 19 nt, Artificial Sequence
  Description of Artificial Sequence: Synthetic oligonucleotide
cagcacgacguggugaaag

SEQ ID NO: 2663594 - RNA, 19 nt, Artificial Sequence
  Description of Artificial Sequence: Synthetic oligonucleotide
ccuuaauguaagacagcag

SEQ ID NO: 2663595 - RNA, 19 nt, Artificial Sequence
  Description of Artificial Sequence: Synthetic oligonucleotide
ucccuggcguauuucucca

SEQ ID NO: 2663596 - RNA, 19 nt, Artificial Sequence
  Description of Artificial Sequence: Synthetic oligonucleotide
gacagggauuuuccccggc

SEQ ID NO: 2663597 - RNA, 19 nt, Artificial Sequence
  Description of Artificial Sequence: Synthetic oligonucleotide
caguugcuuccacucaaug

SEQ ID NO: 2663598 - RNA, 19 nt, Artificial Sequence
  Description of Artificial Sequence: Synthetic oligonucleotide
agccguaguaaccguugca

SEQ ID NO: 2663599 - RNA, 19 nt, Artificial Sequence
  Description of Artificial Sequence: Synthetic oligonucleotide
agaguccgaaaggugcuug

SEQ ID NO: 2663600 - RNA, 19 nt, Artificial Sequence
  Description of Artificial Sequence: Synthetic oligonucleotide
cuucggcucaugcccagug

SEQ ID NO: 2663601 - RNA, 19 nt, Artificial Sequence
  Description of Artificial Sequence: Synthetic oligonucleotide
aguaaccguugcaauagau

SEQ ID NO: 2663602 - RNA, 19 nt, Artificial Sequence
  Description of Artificial Sequence: Synthetic oligonucleotide
ucuugaccuucuugacugu

SEQ ID NO: 2663603 - RNA, 19 nt, Artificial Sequence
  Description of Artificial Sequence: Synthetic oligonucleotide
caauggguuggaagcugug

SEQ ID NO: 2663604 - RNA, 19 nt, Artificial Sequence
  Description of Artificial Sequence: Synthetic oligonucleotide
gauccggaucugauagccc

SEQ ID NO: 2663605 - RNA, 19 nt, Artificial Sequence
  Description of Artificial Sequence: Synthetic oligonucleotide
agacaaggucacucagagu

SEQ ID NO: 2663606 - RNA, 19 nt, Artificial Sequence
  Description of Artificial Sequence: Synthetic oligonucleotide
aggcgauuugucuccccug

SEQ ID NO: 2663607 - RNA, 19 nt, Artificial Sequence
  Description of Artificial Sequence: Synthetic oligonucleotide
ggcucaugcccagugagcc

SEQ ID NO: 2663608 - RNA, 19 nt, Artificial Sequence
  Description of Artificial Sequence: Synthetic oligonucleotide
ggaccaguugcuuccacuc

SEQ ID NO: 2663609 - RNA, 19 nt, Artificial Sequence
  Description of Artificial Sequence: Synthetic oligonucleotide
gaccaguugcuuccacuca

SEQ ID NO: 2663610 - RNA, 19 nt, Artificial Sequence
  Description of Artificial Sequence: Synthetic oligonucleotide
gcuuccacucaauggguug

SEQ ID NO: 2663611 - RNA, 19 nt, Artificial Sequence
  Description of Artificial Sequence: Synthetic oligonucleotide
gggacauacagcccaaucu

SEQ ID NO: 2663612 - RNA, 19 nt, Artificial Sequence
  Description of Artificial Sequence: Synthetic oligonucleotide
augucagaccucagcaucu

SEQ ID NO: 2663613 - RNA, 19 nt, Artificial Sequence
  Description of Artificial Sequence: Synthetic oligonucleotide
ccacucaauggguuggaag

SEQ ID NO: 2663614 - RNA, 19 nt, Artificial Sequence
  Description of Artificial Sequence: Synthetic oligonucleotide
cugggagacagggauuuuc

SEQ ID NO: 2663615 - RNA, 19 nt, Artificial Sequence
  Description of Artificial Sequence: Synthetic oligonucleotide
cuucucacuuggguuggag

SEQ ID NO: 2663616 - RNA, 19 nt, Artificial Sequence
  Description of Artificial Sequence: Synthetic oligonucleotide
ggaucugauagcccacuuc

SEQ ID NO: 2663617 - RNA, 19 nt, Artificial Sequence
  Description of Artificial Sequence: Synthetic oligonucleotide
agcaggcgauuugucuccc

SEQ ID NO: 2663618 - RNA, 19 nt, Artificial Sequence
  Description of Artificial Sequence: Synthetic oligonucleotide
ccagugagccguaguaacc

SEQ ID NO: 2663619 - RNA, 19 nt, Artificial Sequence
  Description of Artificial Sequence: Synthetic oligonucleotide
uuuccccggcuucucacuu

SEQ ID NO: 2663620 - RNA, 19 nt, Artificial Sequence
  Description of Artificial Sequence: Synthetic oligonucleotide
ugaugggaaaccgcucgau

SEQ ID NO: 2663621 - RNA, 19 nt, Artificial Sequence
  Description of Artificial Sequence: Synthetic oligonucleotide
gacugugugcagguauuuc

SEQ ID NO: 2663622 - RNA, 19 nt, Artificial Sequence
  Description of Artificial Sequence: Synthetic oligonucleotide
agcugaugggaaaccgcuc

SEQ ID NO: 2663623 - RNA, 19 nt, Artificial Sequence
  Description of Artificial Sequence: Synthetic oligonucleotide
acgacguggugaaaguagu

SEQ ID NO: 2663624 - RNA, 19 nt, Artificial Sequence
  Description of Artificial Sequence: Synthetic oligonucleotide
gcuugccuccuccugggag

SEQ ID NO: 2663625 - RNA, 19 nt, Artificial Sequence
  Description of Artificial Sequence: Synthetic oligonucleotide
uuccccggcuucucacuug

SEQ ID NO: 2663626 - RNA, 19 nt, Artificial Sequence
  Description of Artificial Sequence: Synthetic oligonucleotide
cauccgcaugucccuggcg

SEQ ID NO: 2663627 - RNA, 19 nt, Artificial Sequence
  Description of Artificial Sequence: Synthetic oligonucleotide
ucagguagagcaggcgauu

SEQ ID NO: 2663628 - RNA, 19 nt, Artificial Sequence
  Description of Artificial Sequence: Synthetic oligonucleotide
cgagucuucaaagucgaag

SEQ ID NO: 2663629 - RNA, 19 nt, Artificial Sequence
  Description of Artificial Sequence: Synthetic oligonucleotide
cccagugagccguaguaac

SEQ ID NO: 2663630 - RNA, 19 nt, Artificial Sequence
  Description of Artificial Sequence: Synthetic oligonucleotide
cuugacugugugcagguau

SEQ ID NO: 2663631 - RNA, 19 nt, Artificial Sequence
  Description of Artificial Sequence: Synthetic oligonucleotide
cuggcguggcuagauccgg

SEQ ID NO: 2663632 - RNA, 19 nt, Artificial Sequence
  Description of Artificial Sequence: Synthetic oligonucleotide
uggcguggcuagauccgga

SEQ ID NO: 2663633 - RNA, 19 nt, Artificial Sequence
  Description of Artificial Sequence: Synthetic oligonucleotide
cgauuugucuccccugccg

SEQ ID NO: 2663634 - RNA, 19 nt, Artificial Sequence
  Description of Artificial Sequence: Synthetic oligonucleotide
cagcucagcccuucggcuc

SEQ ID NO: 2663635 - RNA, 19 nt, Artificial Sequence
  Description of Artificial Sequence: Synthetic oligonucleotide
agauccccagcacgacgug

SEQ ID NO: 2663636 - RNA, 19 nt, Artificial Sequence
  Description of Artificial Sequence: Synthetic oligonucleotide
cuggguaaaagugcagaaa

SEQ ID NO: 2663637 - RNA, 19 nt, Artificial Sequence
  Description of Artificial Sequence: Synthetic oligonucleotide
guauuucuuguacgagucu

SEQ ID NO: 2663638 - RNA, 19 nt, Artificial Sequence
  Description of Artificial Sequence: Synthetic oligonucleotide
uuccacucaauggguugga

SEQ ID NO: 2663639 - RNA, 19 nt, Artificial Sequence
  Description of Artificial Sequence: Synthetic oligonucleotide
gcacuugcagguuguaaga

SEQ ID NO: 2663640 - RNA, 19 nt, Artificial Sequence
  Description of Artificial Sequence: Synthetic oligonucleotide
ggaaaccgcucgauggaag

SEQ ID NO: 2663641 - RNA, 19 nt, Artificial Sequence
  Description of Artificial Sequence: Synthetic oligonucleotide
cuccuuccuuaugucagac

SEQ ID NO: 2663642 - RNA, 19 nt, Artificial Sequence
  Description of Artificial Sequence: Synthetic oligonucleotide
ccuuccuuaugucagaccu

SEQ ID NO: 2663643 - RNA, 19 nt, Artificial Sequence
  Description of Artificial Sequence: Synthetic oligonucleotide
cccaaucuugaccuucuug

SEQ ID NO: 2663644 - RNA, 19 nt, Artificial Sequence
  Description of Artificial Sequence: Synthetic oligonucleotide
ccuggcguauuucuccagc

SEQ ID NO: 2663645 - RNA, 19 nt, Artificial Sequence
  Description of Artificial Sequence: Synthetic oligonucleotide
uccaucagcucagcccuuc

SEQ ID NO: 2663646 - RNA, 19 nt, Artificial Sequence
  Description of Artificial Sequence: Synthetic oligonucleotide
guaagaucuucauccgcau

SEQ ID NO: 2663647 - RNA, 19 nt, Artificial Sequence
  Description of Artificial Sequence: Synthetic oligonucleotide
gacguggugaaaguaguuu

SEQ ID NO: 2663648 - RNA, 19 nt, Artificial Sequence
  Description of Artificial Sequence: Synthetic oligonucleotide
gcugcuggguaaaagugca

SEQ ID NO: 2663649 - RNA, 19 nt, Artificial Sequence
  Description of Artificial Sequence: Synthetic oligonucleotide
uccccagcacgacguggug

SEQ ID NO: 2663650 - RNA, 19 nt, Artificial Sequence
  Description of Artificial Sequence: Synthetic oligonucleotide
cuucauccgcaugucccug

SEQ ID NO: 2663651 - RNA, 19 nt, Artificial Sequence
  Description of Artificial Sequence: Synthetic oligonucleotide
uugcagguuguaagaucuu

SEQ ID NO: 2663652 - RNA, 19 nt, Artificial Sequence
  Description of Artificial Sequence: Synthetic oligonucleotide
gaggaccaguugcuuccac

SEQ ID NO: 2663653 - RNA, 19 nt, Artificial Sequence
  Description of Artificial Sequence: Synthetic oligonucleotide
ggggacauacagcccaauc

SEQ ID NO: 2663654 - RNA, 19 nt, Artificial Sequence
  Description of Artificial Sequence: Synthetic oligonucleotide
cguugcaauagauccccag

SEQ ID NO: 2663655 - RNA, 19 nt, Artificial Sequence
  Description of Artificial Sequence: Synthetic oligonucleotide
ugacugugugcagguauuu

SEQ ID NO: 2663656 - RNA, 19 nt, Artificial Sequence
  Description of Artificial Sequence: Synthetic oligonucleotide
aucugauagcccacuucgu

SEQ ID NO: 2663657 - RNA, 19 nt, Artificial Sequence
  Description of Artificial Sequence: Synthetic oligonucleotide
aggucacucagaguccgaa

SEQ ID NO: 2663658 - RNA, 19 nt, Artificial Sequence
  Description of Artificial Sequence: Synthetic oligonucleotide
cacuucguucagagugcug

SEQ ID NO: 2663659 - RNA, 19 nt, Artificial Sequence
  Description of Artificial Sequence: Synthetic oligonucleotide
uccacucaauggguuggaa

SEQ ID NO: 2663660 - RNA, 19 nt, Artificial Sequence
  Description of Artificial Sequence: Synthetic oligonucleotide
uccgcaugucccuggcgua

SEQ ID NO: 2663661 - RNA, 19 nt, Artificial Sequence
  Description of Artificial Sequence: Synthetic oligonucleotide
auagcccacuucguucaga

SEQ ID NO: 2663662 - RNA, 19 nt, Artificial Sequence
  Description of Artificial Sequence: Synthetic oligonucleotide
augcccagugagccguagu

SEQ ID NO: 2663663 - RNA, 19 nt, Artificial Sequence
  Description of Artificial Sequence: Synthetic oligonucleotide
cugaugggaaaccgcucga

SEQ ID NO: 2663664 - RNA, 19 nt, Artificial Sequence
  Description of Artificial Sequence: Synthetic oligonucleotide
gcuggcguggcuagauccg

SEQ ID NO: 2663665 - RNA, 19 nt, Artificial Sequence
  Description of Artificial Sequence: Synthetic oligonucleotide
guagagcaggcgauuuguc

SEQ ID NO: 2663666 - RNA, 19 nt, Artificial Sequence
  Description of Artificial Sequence: Synthetic oligonucleotide
cagguuguaagaucuucau

SEQ ID NO: 2663667 - RNA, 19 nt, Artificial Sequence
  Description of Artificial Sequence: Synthetic oligonucleotide
cgaagacaaggucacucag

SEQ ID NO: 2663668 - RNA, 19 nt, Artificial Sequence
  Description of Artificial Sequence: Synthetic oligonucleotide
guggcuagauccggaucug

SEQ ID NO: 2663669 - RNA, 19 nt, Artificial Sequence
  Description of Artificial Sequence: Synthetic oligonucleotide
gaguccgaaaggugcuugu

SEQ ID NO: 2663670 - RNA, 19 nt, Artificial Sequence
  Description of Artificial Sequence: Synthetic oligonucleotide
aaggucacucagaguccga

SEQ ID NO: 2663671 - RNA, 19 nt, Artificial Sequence
  Description of Artificial Sequence: Synthetic oligonucleotide
gcuagauccggaucugaua

SEQ ID NO: 2663672 - RNA, 19 nt, Artificial Sequence
  Description of Artificial Sequence: Synthetic oligonucleotide
ugucagaccucagcaucuu

SEQ ID NO: 2663673 - RNA, 19 nt, Artificial Sequence
  Description of Artificial Sequence: Synthetic oligonucleotide
ccuucuugacugugugcag

SEQ ID NO: 2663674 - RNA, 19 nt, Artificial Sequence
  Description of Artificial Sequence: Synthetic oligonucleotide
uugagacauugaggaccag

SEQ ID NO: 2663675 - RNA, 19 nt, Artificial Sequence
  Description of Artificial Sequence: Synthetic oligonucleotide
guuggagagugggcacuug

SEQ ID NO: 2663676 - RNA, 19 nt, Artificial Sequence
  Description of Artificial Sequence: Synthetic oligonucleotide
caugucccuggcguauuuc

SEQ ID NO: 2663677 - RNA, 19 nt, Artificial Sequence
  Description of Artificial Sequence: Synthetic oligonucleotide
agucgaagacaaggucacu

SEQ ID NO: 2663678 - RNA, 19 nt, Artificial Sequence
  Description of Artificial Sequence: Synthetic oligonucleotide
agcccacuucguucagagu

SEQ ID NO: 2663679 - RNA, 19 nt, Artificial Sequence
  Description of Artificial Sequence: Synthetic oligonucleotide
accgcucgauggaaggcug

SEQ ID NO: 2663680 - RNA, 19 nt, Artificial Sequence
  Description of Artificial Sequence: Synthetic oligonucleotide
gguagagcaggcgauuugu

SEQ ID NO: 2663681 - RNA, 19 nt, Artificial Sequence
  Description of Artificial Sequence: Synthetic oligonucleotide
cuugaggggcuggcuugcc

SEQ ID NO: 2663682 - RNA, 19 nt, Artificial Sequence
  Description of Artificial Sequence: Synthetic oligonucleotide
gcuggcuugccuccuccug

SEQ ID NO: 2663683 - RNA, 19 nt, Artificial Sequence
  Description of Artificial Sequence: Synthetic oligonucleotide
gcgauuugucuccccugcc

SEQ ID NO: 2663684 - RNA, 19 nt, Artificial Sequence
  Description of Artificial Sequence: Synthetic oligonucleotide
gccguaguaaccguugcaa

SEQ ID NO: 2663685 - RNA, 19 nt, Artificial Sequence
  Description of Artificial Sequence: Synthetic oligonucleotide
cuggcguauuucuccagcu

SEQ ID NO: 2663686 - RNA, 19 nt, Artificial Sequence
  Description of Artificial Sequence: Synthetic oligonucleotide
caguugcagguccuccuga

SEQ ID NO: 2663687 - RNA, 19 nt, Artificial Sequence
  Description of Artificial Sequence: Synthetic oligonucleotide
caugcccagugagccguag

SEQ ID NO: 2663688 - RNA, 19 nt, Artificial Sequence
  Description of Artificial Sequence: Synthetic oligonucleotide
agacagcagaacacaugaa

SEQ ID NO: 2663689 - RNA, 19 nt, Artificial Sequence
  Description of Artificial Sequence: Synthetic oligonucleotide
cuccugaagcugcugggua

SEQ ID NO: 2663690 - RNA, 19 nt, Artificial Sequence
  Description of Artificial Sequence: Synthetic oligonucleotide
acagcccaaucuugaccuu

SEQ ID NO: 2663691 - RNA, 19 nt, Artificial Sequence
  Description of Artificial Sequence: Synthetic oligonucleotide
cguaguaaccguugcaaua

SEQ ID NO: 2663692 - RNA, 19 nt, Artificial Sequence
  Description of Artificial Sequence: Synthetic oligonucleotide
ucaugcccagugagccgua

SEQ ID NO: 2663693 - RNA, 19 nt, Artificial Sequence
  Description of Artificial Sequence: Synthetic oligonucleotide
ggucacucagaguccgaaa

SEQ ID NO: 2663694 - RNA, 19 nt, Artificial Sequence
  Description of Artificial Sequence: Synthetic oligonucleotide
cugugugcagguauuucuu

SEQ ID NO: 2663695 - RNA, 19 nt, Artificial Sequence
  Description of Artificial Sequence: Synthetic oligonucleotide
caggcgauuugucuccccu

SEQ ID NO: 2663696 - RNA, 19 nt, Artificial Sequence
  Description of Artificial Sequence: Synthetic oligonucleotide
caccuucuucucagguaga

SEQ ID NO: 2663697 - RNA, 19 nt, Artificial Sequence
  Description of Artificial Sequence: Synthetic oligonucleotide
gucuccccugccgagccuc

SEQ ID NO: 2663698 - RNA, 19 nt, Artificial Sequence
  Description of Artificial Sequence: Synthetic oligonucleotide
cagcuggcguggcuagauc

SEQ ID NO: 2663699 - RNA, 19 nt, Artificial Sequence
  Description of Artificial Sequence: Synthetic oligonucleotide
ccgagccuccuugaggggc

SEQ ID NO: 2663700 - RNA, 19 nt, Artificial Sequence
  Description of Artificial Sequence: Synthetic oligonucleotide
ccugccgagccuccuugag

SEQ ID NO: 2663701 - RNA, 19 nt, Artificial Sequence
  Description of Artificial Sequence: Synthetic oligonucleotide
gcaggcgauuugucucccc

SEQ ID NO: 2663702 - RNA, 19 nt, Artificial Sequence
  Description of Artificial Sequence: Synthetic oligonucleotide
gguuggaagcugugaggcu

SEQ ID NO: 2663703 - RNA, 19 nt, Artificial Sequence
  Description of Artificial Sequence: Synthetic oligonucleotide
cgaaaggugcuuguccauc

SEQ ID NO: 2663704 - RNA, 19 nt, Artificial Sequence
  Description of Artificial Sequence: Synthetic oligonucleotide
gccgagccuccuugagggg

SEQ ID NO: 2663705 - RNA, 19 nt, Artificial Sequence
  Description of Artificial Sequence: Synthetic oligonucleotide
cguggcuagauccggaucu

SEQ ID NO: 2663706 - RNA, 19 nt, Artificial Sequence
  Description of Artificial Sequence: Synthetic oligonucleotide
cguucagagugcugagguc

SEQ ID NO: 2663707 - RNA, 19 nt, Artificial Sequence
  Description of Artificial Sequence: Synthetic oligonucleotide
ugggcacuugcagguugua

SEQ ID NO: 2663708 - RNA, 19 nt, Artificial Sequence
  Description of Artificial Sequence: Synthetic oligonucleotide
gcguggcuagauccggauc

SEQ ID NO: 2663709 - RNA, 19 nt, Artificial Sequence
  Description of Artificial Sequence: Synthetic oligonucleotide
gggaaaccgcucgauggaa

SEQ ID NO: 2663710 - RNA, 19 nt, Artificial Sequence
  Description of Artificial Sequence: Synthetic oligonucleotide
ccgcucgauggaaggcugc

SEQ ID NO: 2663711 - RNA, 19 nt, Artificial Sequence
  Description of Artificial Sequence: Synthetic oligonucleotide
cggcucaugcccagugagc

SEQ ID NO: 2663712 - RNA, 19 nt, Artificial Sequence
  Description of Artificial Sequence: Synthetic oligonucleotide
acgagucuucaaagucgaa

SEQ ID NO: 2663713 - RNA, 19 nt, Artificial Sequence
  Description of Artificial Sequence: Synthetic oligonucleotide
gggauuuuccccggcuucu

SEQ ID NO: 2663714 - RNA, 19 nt, Artificial Sequence
  Description of Artificial Sequence: Synthetic oligonucleotide
gugcagaaaagagcaccau

SEQ ID NO: 2663715 - RNA, 19 nt, Artificial Sequence
  Description of Artificial Sequence: Synthetic oligonucleotide
gguccuccugaagcugcug

SEQ ID NO: 2663716 - RNA, 19 nt, Artificial Sequence
  Description of Artificial Sequence: Synthetic oligonucleotide
cugaagcugcuggguaaaa

SEQ ID NO: 2663717 - RNA, 19 nt, Artificial Sequence
  Description of Artificial Sequence: Synthetic oligonucleotide
gucagaccucagcaucuuu

SEQ ID NO: 2663718 - RNA, 19 nt, Artificial Sequence
  Description of Artificial Sequence: Synthetic oligonucleotide
gugcugaggucagccaccu

SEQ ID NO: 2663719 - RNA, 19 nt, Artificial Sequence
  Description of Artificial Sequence: Synthetic oligonucleotide
cgcucgauggaaggcugcc

SEQ ID NO: 2663720 - RNA, 19 nt, Artificial Sequence
  Description of Artificial Sequence: Synthetic oligonucleotide
gggcacuugcagguuguaa

SEQ ID NO: 2663721 - RNA, 19 nt, Artificial Sequence
  Description of Artificial Sequence: Synthetic oligonucleotide
gcccagugagccguaguaa

SEQ ID NO: 2663722 - RNA, 19 nt, Artificial Sequence
  Description of Artificial Sequence: Synthetic oligonucleotide
gugagccguaguaaccguu

SEQ ID NO: 2663723 - RNA, 19 nt, Artificial Sequence
  Description of Artificial Sequence: Synthetic oligonucleotide
ggcuagauccggaucugau

SEQ ID NO: 2663724 - RNA, 19 nt, Artificial Sequence
  Description of Artificial Sequence: Synthetic oligonucleotide
ccugaagcugcuggguaaa

SEQ ID NO: 2663725 - RNA, 19 nt, Artificial Sequence
  Description of Artificial Sequence: Synthetic oligonucleotide
cagguagagcaggcgauuu

SEQ ID NO: 2663726 - RNA, 19 nt, Artificial Sequence
  Description of Artificial Sequence: Synthetic oligonucleotide
cucagcccuucggcucaug

SEQ ID NO: 2663727 - RNA, 19 nt, Artificial Sequence
  Description of Artificial Sequence: Synthetic oligonucleotide
cuccugggagacagggauu

SEQ ID NO: 2663728 - RNA, 19 nt, Artificial Sequence
  Description of Artificial Sequence: Synthetic oligonucleotide
gcacgacguggugaaagua

SEQ ID NO: 2663729 - RNA, 19 nt, Artificial Sequence
  Description of Artificial Sequence: Synthetic oligonucleotide
ggcuugccuccuccuggga

SEQ ID NO: 2663730 - RNA, 19 nt, Artificial Sequence
  Description of Artificial Sequence: Synthetic oligonucleotide
ccguaguaaccguugcaau

SEQ ID NO: 2663731 - RNA, 19 nt, Artificial Sequence
  Description of Artificial Sequence: Synthetic oligonucleotide
ccggcuucucacuuggguu

SEQ ID NO: 2663732 - RNA, 19 nt, Artificial Sequence
  Description of Artificial Sequence: Synthetic oligonucleotide
ccccggcuucucacuuggg

SEQ ID NO: 2663733 - RNA, 19 nt, Artificial Sequence
  Description of Artificial Sequence: Synthetic oligonucleotide
ccguugcaauagaucccca

SEQ ID NO: 2663734 - RNA, 19 nt, Artificial Sequence
  Description of Artificial Sequence: Synthetic oligonucleotide
ccaguugcuuccacucaau

SEQ ID NO: 2663735 - RNA, 19 nt, Artificial Sequence
  Description of Artificial Sequence: Synthetic oligonucleotide
ggcuggcuugccuccuccu

SEQ ID NO: 2663736 - RNA, 19 nt, Artificial Sequence
  Description of Artificial Sequence: Synthetic oligonucleotide
cagaguccgaaaggugcuu

SEQ ID NO: 2663737 - RNA, 19 nt, Artificial Sequence
  Description of Artificial Sequence: Synthetic oligonucleotide
ccgaaaggugcuuguccau

SEQ ID NO: 2663738 - RNA, 19 nt, Artificial Sequence
  Description of Artificial Sequence: Synthetic oligonucleotide
cccugccgagccuccuuga

SEQ ID NO: 2663739 - RNA, 19 nt, Artificial Sequence
  Description of Artificial Sequence: Synthetic oligonucleotide
ccacuucguucagagugcu

SEQ ID NO: 2663740 - RNA, 19 nt, Artificial Sequence
  Description of Artificial Sequence: Synthetic oligonucleotide
ccggaucugauagcccacu

SEQ ID NO: 2663741 - RNA, 19 nt, Artificial Sequence
  Description of Artificial Sequence: Synthetic oligonucleotide
guccaucagcucagcccuu

SEQ ID NO: 2663742 - RNA, 19 nt, Artificial Sequence
  Description of Artificial Sequence: Synthetic oligonucleotide
cgacguggugaaaguaguu

SEQ ID NO: 2663743 - RNA, 19 nt, Artificial Sequence
  Description of Artificial Sequence: Synthetic oligonucleotide
ccgcaugucccuggcguau

SEQ ID NO: 2663744 - RNA, 19 nt, Artificial Sequence
  Description of Artificial Sequence: Synthetic oligonucleotide
ccuucggcucaugcccagu

SEQ ID NO: 2663745 - RNA, 19 nt, Artificial Sequence
  Description of Artificial Sequence: Synthetic oligonucleotide
cggaucugauagcccacuu

SEQ ID NO: 2663746 - RNA, 19 nt, Artificial Sequence
  Description of Artificial Sequence: Synthetic oligonucleotide
ccugggagacagggauuuu

SEQ ID NO: 2663747 - RNA, 19 nt, Artificial Sequence
  Description of Artificial Sequence: Synthetic oligonucleotide
gcucagcccuucggcucau

SEQ ID NO: 2663748 - RNA, 19 nt, Artificial Sequence
  Description of Artificial Sequence: Synthetic oligonucleotide
cgcaugucccuggcguauu

SEQ ID NO: 2663749 - RNA, 19 nt, Artificial Sequence
  Description of Artificial Sequence: Synthetic oligonucleotide
aaaacaucagguccaaugg

SEQ ID NO: 2663750 - RNA, 19 nt, Artificial Sequence
  Description of Artificial Sequence: Synthetic oligonucleotide
gaaaauugacuuuugggcc

SEQ ID NO: 2663751 - RNA, 19 nt, Artificial Sequence
  Description of Artificial Sequence: Synthetic oligonucleotide
auccagauuacacuguucc

SEQ ID NO: 2663752 - RNA, 19 nt, Artificial Sequence
  Description of Artificial Sequence: Synthetic oligonucleotide
uguaauccagauuacacug

SEQ ID NO: 2663753 - RNA, 19 nt, Artificial Sequence
  Description of Artificial Sequence: Synthetic oligonucleotide
uuggacagcucucugaagg

SEQ ID NO: 2663754 - RNA, 19 nt, Artificial Sequence
  Description of Artificial Sequence: Synthetic oligonucleotide
ugggcuguaauccagauua

SEQ ID NO: 2663755 - RNA, 19 nt, Artificial Sequence
  Description of Artificial Sequence: Synthetic oligonucleotide
aaaauugacuuuugggcca

SEQ ID NO: 2663756 - RNA, 19 nt, Artificial Sequence
  Description of Artificial Sequence: Synthetic oligonucleotide
acugagagagcuuccaggg

SEQ ID NO: 2663757 - RNA, 19 nt, Artificial Sequence
  Description of Artificial Sequence: Synthetic oligonucleotide
ugacuuuugggccauaguc

SEQ ID NO: 2663758 - RNA, 19 nt, Artificial Sequence
  Description of Artificial Sequence: Synthetic oligonucleotide
acugaugccgggcagcccc

SEQ ID NO: 2663759 - RNA, 19 nt, Artificial Sequence
  Description of Artificial Sequence: Synthetic oligonucleotide
aguccuguuuccuucgccc

SEQ ID NO: 2663760 - RNA, 19 nt, Artificial Sequence
  Description of Artificial Sequence: Synthetic oligonucleotide
uccgaaaauugacuuuugg

SEQ ID NO: 2663761 - RNA, 19 nt, Artificial Sequence
  Description of Artificial Sequence: Synthetic oligonucleotide
gacugagagagcuuccagg

SEQ ID NO: 2663762 - RNA, 19 nt, Artificial Sequence
  Description of Artificial Sequence: Synthetic oligonucleotide
gauuacacuguuccacagg

SEQ ID NO: 2663763 - RNA, 19 nt, Artificial Sequence
  Description of Artificial Sequence: Synthetic oligonucleotide
acagauggcuaccuccacc

SEQ ID NO: 2663764 - RNA, 19 nt, Artificial Sequence
  Description of Artificial Sequence: Synthetic oligonucleotide
gcagauagcagguugaggc

SEQ ID NO: 2663765 - RNA, 19 nt, Artificial Sequence
  Description of Artificial Sequence: Synthetic oligonucleotide
ugagagagcuuccaggggu

SEQ ID NO: 2663766 - RNA, 19 nt, Artificial Sequence
  Description of Artificial Sequence: Synthetic oligonucleotide
aacaucagguccaauggag

SEQ ID NO: 2663767 - RNA, 19 nt, Artificial Sequence
  Description of Artificial Sequence: Synthetic oligonucleotide
cauguguccacugaugccg

SEQ ID NO: 2663768 - RNA, 19 nt, Artificial Sequence
  Description of Artificial Sequence: Synthetic oligonucleotide
uguuccacaggcuggaagu

SEQ ID NO: 2663769 - RNA, 19 nt, Artificial Sequence
  Description of Artificial Sequence: Synthetic oligonucleotide
caggacauggacaccacgg

SEQ ID NO: 2663770 - RNA, 19 nt, Artificial Sequence
  Description of Artificial Sequence: Synthetic oligonucleotide
cacgguggcagauagcagg

SEQ ID NO: 2663771 - RNA, 19 nt, Artificial Sequence
  Description of Artificial Sequence: Synthetic oligonucleotide
cauacacaccaucucagcc

SEQ ID NO: 2663772 - RNA, 19 nt, Artificial Sequence
  Description of Artificial Sequence: Synthetic oligonucleotide
cugaagguggcgcagacac

SEQ ID NO: 2663773 - RNA, 19 nt, Artificial Sequence
  Description of Artificial Sequence: Synthetic oligonucleotide
ccaggcaucauccaggugg

SEQ ID NO: 2663774 - RNA, 19 nt, Artificial Sequence
  Description of Artificial Sequence: Synthetic oligonucleotide
uucgcccagacugagagag

SEQ ID NO: 2663775 - RNA, 19 nt, Artificial Sequence
  Description of Artificial Sequence: Synthetic oligonucleotide
caagggacagaccugcuag

SEQ ID NO: 2663776 - RNA, 19 nt, Artificial Sequence
  Description of Artificial Sequence: Synthetic oligonucleotide
gacuuuugggccauagucc

SEQ ID NO: 2663777 - RNA, 19 nt, Artificial Sequence
  Description of Artificial Sequence: Synthetic oligonucleotide
acuuuugggccauaguccu

SEQ ID NO: 2663778 - RNA, 19 nt, Artificial Sequence
  Description of Artificial Sequence: Synthetic oligonucleotide
cuucccuggaaggagaggg

SEQ ID NO: 2663779 - RNA, 19 nt, Artificial Sequence
  Description of Artificial Sequence: Synthetic oligonucleotide
ugggccauaguccuguuuc

SEQ ID NO: 2663780 - RNA, 19 nt, Artificial Sequence
  Description of Artificial Sequence: Synthetic oligonucleotide
auacacaccaucucagccu

SEQ ID NO: 2663781 - RNA, 19 nt, Artificial Sequence
  Description of Artificial Sequence: Synthetic oligonucleotide
cuaggggccacgaugcugc

SEQ ID NO: 2663782 - RNA, 19 nt, Artificial Sequence
  Description of Artificial Sequence: Synthetic oligonucleotide
uucugcuuccgaaaauuga

SEQ ID NO: 2663783 - RNA, 19 nt, Artificial Sequence
  Description of Artificial Sequence: Synthetic oligonucleotide
gacacgacgggccacgaug

SEQ ID NO: 2663784 - RNA, 19 nt, Artificial Sequence
  Description of Artificial Sequence: Synthetic oligonucleotide
aagggacagaccugcuagg

SEQ ID NO: 2663785 - RNA, 19 nt, Artificial Sequence
  Description of Artificial Sequence: Synthetic oligonucleotide
guuguugccgcuucccucc

SEQ ID NO: 2663786 - RNA, 19 nt, Artificial Sequence
  Description of Artificial Sequence: Synthetic oligonucleotide
aguuguugccgcuucccuc

SEQ ID NO: 2663787 - RNA, 19 nt, Artificial Sequence
  Description of Artificial Sequence: Synthetic oligonucleotide
caucagguccaauggagag

SEQ ID NO: 2663788 - RNA, 19 nt, Artificial Sequence
  Description of Artificial Sequence: Synthetic oligonucleotide
cauaguccuguuuccuucg

SEQ ID NO: 2663789 - RNA, 19 nt, Artificial Sequence
  Description of Artificial Sequence: Synthetic oligonucleotide
ccgaaaauugacuuuuggg

SEQ ID NO: 2663790 - RNA, 19 nt, Artificial Sequence
  Description of Artificial Sequence: Synthetic oligonucleotide
agauuacacuguuccacag

SEQ ID NO: 2663791 - RNA, 19 nt, Artificial Sequence
  Description of Artificial Sequence: Synthetic oligonucleotide
aggcgcucgccccacagcc

SEQ ID NO: 2663792 - RNA, 19 nt, Artificial Sequence
  Description of Artificial Sequence: Synthetic oligonucleotide
aacucauuggacagcucuc

SEQ ID NO: 2663793 - RNA, 19 nt, Artificial Sequence
  Description of Artificial Sequence: Synthetic oligonucleotide
auaguccuguuuccuucgc

SEQ ID NO: 2663794 - RNA, 19 nt, Artificial Sequence
  Description of Artificial Sequence: Synthetic oligonucleotide
acagccaggcaucauccag

SEQ ID NO: 2663795 - RNA, 19 nt, Artificial Sequence
  Description of Artificial Sequence: Synthetic oligonucleotide
aauccagauuacacuguuc

SEQ ID NO: 2663796 - RNA, 19 nt, Artificial Sequence
  Description of Artificial Sequence: Synthetic oligonucleotide
cuucccuccaggcaggaac

SEQ ID NO: 2663797 - RNA, 19 nt, Artificial Sequence
  Description of Artificial Sequence: Synthetic oligonucleotide
guugaggcucaccaggcgc

SEQ ID NO: 2663798 - RNA, 19 nt, Artificial Sequence
  Description of Artificial Sequence: Synthetic oligonucleotide
uaauccagauuacacuguu

SEQ ID NO: 2663799 - RNA, 19 nt, Artificial Sequence
  Description of Artificial Sequence: Synthetic oligonucleotide
guagacgcccauucucugg

SEQ ID NO: 2663800 - RNA, 19 nt, Artificial Sequence
  Description of Artificial Sequence: Synthetic oligonucleotide
agauagcagguugaggcuc

SEQ ID NO: 2663801 - RNA, 19 nt, Artificial Sequence
  Description of Artificial Sequence: Synthetic oligonucleotide
cuggaagccagccaucuuc

SEQ ID NO: 2663802 - RNA, 19 nt, Artificial Sequence
  Description of Artificial Sequence: Synthetic oligonucleotide
aucauacacaccaucucag

SEQ ID NO: 2663803 - RNA, 19 nt, Artificial Sequence
  Description of Artificial Sequence: Synthetic oligonucleotide
agggcacacagauggcuac

SEQ ID NO: 2663804 - RNA, 19 nt, Artificial Sequence
  Description of Artificial Sequence: Synthetic oligonucleotide
uagacgcccauucucugga

SEQ ID NO: 2663805 - RNA, 19 nt, Artificial Sequence
  Description of Artificial Sequence: Synthetic oligonucleotide
cugcuaggggccacgaugc

SEQ ID NO: 2663806 - RNA, 19 nt, Artificial Sequence
  Description of Artificial Sequence: Synthetic oligonucleotide
uuuugggccauaguccugu

SEQ ID NO: 2663807 - RNA, 19 nt, Artificial Sequence
  Description of Artificial Sequence: Synthetic oligonucleotide
acaggacauggacaccacg

SEQ ID NO: 2663808 - RNA, 19 nt, Artificial Sequence
  Description of Artificial Sequence: Synthetic oligonucleotide
uuuccuucgcccagacuga

SEQ ID NO: 2663809 - RNA, 19 nt, Artificial Sequence
  Description of Artificial Sequence: Synthetic oligonucleotide
uggguagacgcccauucuc

SEQ ID NO: 2663810 - RNA, 19 nt, Artificial Sequence
  Description of Artificial Sequence: Synthetic oligonucleotide
ugaagguggcgcagacacg

SEQ ID NO: 2663811 - RNA, 19 nt, Artificial Sequence
  Description of Artificial Sequence: Synthetic oligonucleotide
uccagauuacacuguucca

SEQ ID NO: 2663812 - RNA, 19 nt, Artificial Sequence
  Description of Artificial Sequence: Synthetic oligonucleotide
gaagguggcgcagacacga

SEQ ID NO: 2663813 - RNA, 19 nt, Artificial Sequence
  Description of Artificial Sequence: Synthetic oligonucleotide
ugcuuccgaaaauugacuu

SEQ ID NO: 2663814 - RNA, 19 nt, Artificial Sequence
  Description of Artificial Sequence: Synthetic oligonucleotide
uguccacugaugccgggca

SEQ ID NO: 2663815 - RNA, 19 nt, Artificial Sequence
  Description of Artificial Sequence: Synthetic oligonucleotide
cacgaugugucugcggugg

SEQ ID NO: 2663816 - RNA, 19 nt, Artificial Sequence
  Description of Artificial Sequence: Synthetic oligonucleotide
gaugugucugcgguggaug

SEQ ID NO: 2663817 - RNA, 19 nt, Artificial Sequence
  Description of Artificial Sequence: Synthetic oligonucleotide
uccagcccuggguagacgc

SEQ ID NO: 2663818 - RNA, 19 nt, Artificial Sequence
  Description of Artificial Sequence: Synthetic oligonucleotide
cuuccaggggucacugucc

SEQ ID NO: 2663819 - RNA, 19 nt, Artificial Sequence
  Description of Artificial Sequence: Synthetic oligonucleotide
cagccaggcaucauccagg

SEQ ID NO: 2663820 - RNA, 19 nt, Artificial Sequence
  Description of Artificial Sequence: Synthetic oligonucleotide
uccuguuuccuucgcccag

SEQ ID NO: 2663821 - RNA, 19 nt, Artificial Sequence
  Description of Artificial Sequence: Synthetic oligonucleotide
uugaggcucaccaggcgcu

SEQ ID NO: 2663822 - RNA, 19 nt, Artificial Sequence
  Description of Artificial Sequence: Synthetic oligonucleotide
acaccacgguggcagauag

SEQ ID NO: 2663823 - RNA, 19 nt, Artificial Sequence
  Description of Artificial Sequence: Synthetic oligonucleotide
uuccgaaaauugacuuuug

SEQ ID NO: 2663824 - RNA, 19 nt, Artificial Sequence
  Description of Artificial Sequence: Synthetic oligonucleotide
caggcaucauccagguggg

SEQ ID NO: 2663825 - RNA, 19 nt, Artificial Sequence
  Description of Artificial Sequence: Synthetic oligonucleotide
uaguccuguuuccuucgcc

SEQ ID NO: 2663826 - RNA, 19 nt, Artificial Sequence
  Description of Artificial Sequence: Synthetic oligonucleotide
agcggcagggcacacagau

SEQ ID NO: 2663827 - RNA, 19 nt, Artificial Sequence
  Description of Artificial Sequence: Synthetic oligonucleotide
guugccgcuucccuccagg

SEQ ID NO: 2663828 - RNA, 19 nt, Artificial Sequence
  Description of Artificial Sequence: Synthetic oligonucleotide
auuggacagcucucugaag

SEQ ID NO: 2663829 - RNA, 19 nt, Artificial Sequence
  Description of Artificial Sequence: Synthetic oligonucleotide
gcuggggagacccuggaag

SEQ ID NO: 2663830 - RNA, 19 nt, Artificial Sequence
  Description of Artificial Sequence: Synthetic oligonucleotide
uggcaagggacagaccugc

SEQ ID NO: 2663831 - RNA, 19 nt, Artificial Sequence
  Description of Artificial Sequence: Synthetic oligonucleotide
agguggcgcagacacgacg

SEQ ID NO: 2663832 - RNA, 19 nt, Artificial Sequence
  Description of Artificial Sequence: Synthetic oligonucleotide
aggacauggacaccacggu

SEQ ID NO: 2663833 - RNA, 19 nt, Artificial Sequence
  Description of Artificial Sequence: Synthetic oligonucleotide
ucugcgguggauggcaugu

SEQ ID NO: 2663834 - RNA, 19 nt, Artificial Sequence
  Description of Artificial Sequence: Synthetic oligonucleotide
uuacacuguuccacaggcu

SEQ ID NO: 2663835 - RNA, 19 nt, Artificial Sequence
  Description of Artificial Sequence: Synthetic oligonucleotide
cugagagagcuuccagggg

SEQ ID NO: 2663836 - RNA, 19 nt, Artificial Sequence
  Description of Artificial Sequence: Synthetic oligonucleotide
cagauuacacuguuccaca

SEQ ID NO: 2663837 - RNA, 19 nt, Artificial Sequence
  Description of Artificial Sequence: Synthetic oligonucleotide
aggaacucauuggacagcu

SEQ ID NO: 2663838 - RNA, 19 nt, Artificial Sequence
  Description of Artificial Sequence: Synthetic oligonucleotide
gugagcaccagcagggagc

SEQ ID NO: 2663839 - RNA, 19 nt, Artificial Sequence
  Description of Artificial Sequence: Synthetic oligonucleotide
ugaagcuggggagacccug

SEQ ID NO: 2663840 - RNA, 19 nt, Artificial Sequence
  Description of Artificial Sequence: Synthetic oligonucleotide
cacgaugcugccaucaaaa

SEQ ID NO: 2663841 - RNA, 19 nt, Artificial Sequence
  Description of Artificial Sequence: Synthetic oligonucleotide
uucccuccaggcaggaacu

SEQ ID NO: 2663842 - RNA, 19 nt, Artificial Sequence
  Description of Artificial Sequence: Synthetic oligonucleotide
gacgcccauucucuggacc

SEQ ID NO: 2663843 - RNA, 19 nt, Artificial Sequence
  Description of Artificial Sequence: Synthetic oligonucleotide
uuccaggggucacugucca

SEQ ID NO: 2663844 - RNA, 19 nt, Artificial Sequence
  Description of Artificial Sequence: Synthetic oligonucleotide
uucucuggaccaccuucug

SEQ ID NO: 2663845 - RNA, 19 nt, Artificial Sequence
  Description of Artificial Sequence: Synthetic oligonucleotide
aaauugacuuuugggccau

SEQ ID NO: 2663846 - RNA, 19 nt, Artificial Sequence
  Description of Artificial Sequence: Synthetic oligonucleotide
aguuucugcuuccgaaaau

SEQ ID NO: 2663847 - RNA, 19 nt, Artificial Sequence
  Description of Artificial Sequence: Synthetic oligonucleotide
agccccugugagcaccagc

SEQ ID NO: 2663848 - RNA, 19 nt, Artificial Sequence
  Description of Artificial Sequence: Synthetic oligonucleotide
uucccuggaaggagagggc

SEQ ID NO: 2663849 - RNA, 19 nt, Artificial Sequence
  Description of Artificial Sequence: Synthetic oligonucleotide
ugcgguggauggcaugugu

SEQ ID NO: 2663850 - RNA, 19 nt, Artificial Sequence
  Description of Artificial Sequence: Synthetic oligonucleotide
gagggcugagcagagcagc

SEQ ID NO: 2663851 - RNA, 19 nt, Artificial Sequence
  Description of Artificial Sequence: Synthetic oligonucleotide
agguccaauggagagggcu

SEQ ID NO: 2663852 - RNA, 19 nt, Artificial Sequence
  Description of Artificial Sequence: Synthetic oligonucleotide
ggaaggagagggcagccug

SEQ ID NO: 2663853 - RNA, 19 nt, Artificial Sequence
  Description of Artificial Sequence: Synthetic oligonucleotide
cuguaauccagauuacacu

SEQ ID NO: 2663854 - RNA, 19 nt, Artificial Sequence
  Description of Artificial Sequence: Synthetic oligonucleotide
acgcccauucucuggacca

SEQ ID NO: 2663855 - RNA, 19 nt, Artificial Sequence
  Description of Artificial Sequence: Synthetic oligonucleotide
uguguccacugaugccggg

SEQ ID NO: 2663856 - RNA, 19 nt, Artificial Sequence
  Description of Artificial Sequence: Synthetic oligonucleotide
cauuggacagcucucugaa

SEQ ID NO: 2663857 - RNA, 19 nt, Artificial Sequence
  Description of Artificial Sequence: Synthetic oligonucleotide
gaaggagagggcagccugc

SEQ ID NO: 2663858 - RNA, 19 nt, Artificial Sequence
  Description of Artificial Sequence: Synthetic oligonucleotide
ggagcggcagggcacacag

SEQ ID NO: 2663859 - RNA, 19 nt, Artificial Sequence
  Description of Artificial Sequence: Synthetic oligonucleotide
gguggcgcagacacgacgg

SEQ ID NO: 2663860 - RNA, 19 nt, Artificial Sequence
  Description of Artificial Sequence: Synthetic oligonucleotide
ccagauuacacuguuccac

SEQ ID NO: 2663861 - RNA, 19 nt, Artificial Sequence
  Description of Artificial Sequence: Synthetic oligonucleotide
ucuggaccaccuucuggcu

SEQ ID NO: 2663862 - RNA, 19 nt, Artificial Sequence
  Description of Artificial Sequence: Synthetic oligonucleotide
uggcagauagcagguugag

SEQ ID NO: 2663863 - RNA, 19 nt, Artificial Sequence
  Description of Artificial Sequence: Synthetic oligonucleotide
ccuucgcccagacugagag

SEQ ID NO: 2663864 - RNA, 19 nt, Artificial Sequence
  Description of Artificial Sequence: Synthetic oligonucleotide
gggucgauggcugagcccc

SEQ ID NO: 2663865 - RNA, 19 nt, Artificial Sequence
  Description of Artificial Sequence: Synthetic oligonucleotide
cucauuggacagcucucug

SEQ ID NO: 2663866 - RNA, 19 nt, Artificial Sequence
  Description of Artificial Sequence: Synthetic oligonucleotide
gagacccuggaagccagcc

SEQ ID NO: 2663867 - RNA, 19 nt, Artificial Sequence
  Description of Artificial Sequence: Synthetic oligonucleotide
auucucuggaccaccuucu

SEQ ID NO: 2663868 - RNA, 19 nt, Artificial Sequence
  Description of Artificial Sequence: Synthetic oligonucleotide
gccgcuucccuccaggcag

SEQ ID NO: 2663869 - RNA, 19 nt, Artificial Sequence
  Description of Artificial Sequence: Synthetic oligonucleotide
acaucagguccaauggaga

SEQ ID NO: 2663870 - RNA, 19 nt, Artificial Sequence
  Description of Artificial Sequence: Synthetic oligonucleotide
acacagauggcuaccucca

SEQ ID NO: 2663871 - RNA, 19 nt, Artificial Sequence
  Description of Artificial Sequence: Synthetic oligonucleotide
aagcuggggagacccugga

SEQ ID NO: 2663872 - RNA, 19 nt, Artificial Sequence
  Description of Artificial Sequence: Synthetic oligonucleotide
uguuuccuucgcccagacu

SEQ ID NO: 2663873 - RNA, 19 nt, Artificial Sequence
  Description of Artificial Sequence: Synthetic oligonucleotide
ucugaagguggcgcagaca

SEQ ID NO: 2663874 - RNA, 19 nt, Artificial Sequence
  Description of Artificial Sequence: Synthetic oligonucleotide
agacgcccauucucuggac

SEQ ID NO: 2663875 - RNA, 19 nt, Artificial Sequence
  Description of Artificial Sequence: Synthetic oligonucleotide
ccugcuaggggccacgaug

SEQ ID NO: 2663876 - RNA, 19 nt, Artificial Sequence
  Description of Artificial Sequence: Synthetic oligonucleotide
cuccuggcaagggacagac

SEQ ID NO: 2663877 - RNA, 19 nt, Artificial Sequence
  Description of Artificial Sequence: Synthetic oligonucleotide
cuuuugggccauaguccug

SEQ ID NO: 2663878 - RNA, 19 nt, Artificial Sequence
  Description of Artificial Sequence: Synthetic oligonucleotide
agccaggcaucauccaggu

SEQ ID NO: 2663879 - RNA, 19 nt, Artificial Sequence
  Description of Artificial Sequence: Synthetic oligonucleotide
ugccgcuucccuccaggca

SEQ ID NO: 2663880 - RNA, 19 nt, Artificial Sequence
  Description of Artificial Sequence: Synthetic oligonucleotide
ucgccccacagccaggcau

SEQ ID NO: 2663881 - RNA, 19 nt, Artificial Sequence
  Description of Artificial Sequence: Synthetic oligonucleotide
ucaccaggcgcucgcccca

SEQ ID NO: 2663882 - RNA, 19 nt, Artificial Sequence
  Description of Artificial Sequence: Synthetic oligonucleotide
guggauggcauguguccac

SEQ ID NO: 2663883 - RNA, 19 nt, Artificial Sequence
  Description of Artificial Sequence: Synthetic oligonucleotide
cuggaccaccuucuggcug

SEQ ID NO: 2663884 - RNA, 19 nt, Artificial Sequence
  Description of Artificial Sequence: Synthetic oligonucleotide
agacccuggaagccagcca

SEQ ID NO: 2663885 - RNA, 19 nt, Artificial Sequence
  Description of Artificial Sequence: Synthetic oligonucleotide
aagguggcgcagacacgac

SEQ ID NO: 2663886 - RNA, 19 nt, Artificial Sequence
  Description of Artificial Sequence: Synthetic oligonucleotide
gcauguguccacugaugcc

SEQ ID NO: 2663887 - RNA, 19 nt, Artificial Sequence
  Description of Artificial Sequence: Synthetic oligonucleotide
cacaggcuggaaguccucc

SEQ ID NO: 2663888 - RNA, 19 nt, Artificial Sequence
  Description of Artificial Sequence: Synthetic oligonucleotide
uggauggcauguguccacu

SEQ ID NO: 2663889 - RNA, 19 nt, Artificial Sequence
  Description of Artificial Sequence: Synthetic oligonucleotide
cucugaagguggcgcagac

SEQ ID NO: 2663890 - RNA, 19 nt, Artificial Sequence
  Description of Artificial Sequence: Synthetic oligonucleotide
uguugccgcuucccuccag

SEQ ID NO: 2663891 - RNA, 19 nt, Artificial Sequence
  Description of Artificial Sequence: Synthetic oligonucleotide
auguguccacugaugccgg

SEQ ID NO: 2663892 - RNA, 19 nt, Artificial Sequence
  Description of Artificial Sequence: Synthetic oligonucleotide
uaccuccaccuccuggcaa

SEQ ID NO: 2663893 - RNA, 19 nt, Artificial Sequence
  Description of Artificial Sequence: Synthetic oligonucleotide
cuucuggcugaagcugggg

SEQ ID NO: 2663894 - RNA, 19 nt, Artificial Sequence
  Description of Artificial Sequence: Synthetic oligonucleotide
uuccuucgcccagacugag

SEQ ID NO: 2663895 - RNA, 19 nt, Artificial Sequence
  Description of Artificial Sequence: Synthetic oligonucleotide
ggcuaccuccaccuccugg

SEQ ID NO: 2663896 - RNA, 19 nt, Artificial Sequence
  Description of Artificial Sequence: Synthetic oligonucleotide
ggggccucacaggacaugg

SEQ ID NO: 2663897 - RNA, 19 nt, Artificial Sequence
  Description of Artificial Sequence: Synthetic oligonucleotide
gacccuggaagccagccau

SEQ ID NO: 2663898 - RNA, 19 nt, Artificial Sequence
  Description of Artificial Sequence: Synthetic oligonucleotide
cccugugagcaccagcagg

SEQ ID NO: 2663899 - RNA, 19 nt, Artificial Sequence
  Description of Artificial Sequence: Synthetic oligonucleotide
cuggaaggagagggcagcc

SEQ ID NO: 2663900 - RNA, 19 nt, Artificial Sequence
  Description of Artificial Sequence: Synthetic oligonucleotide
ggcagauagcagguugagg

SEQ ID NO: 2663901 - RNA, 19 nt, Artificial Sequence
  Description of Artificial Sequence: Synthetic oligonucleotide
uccuucgcccagacugaga

SEQ ID NO: 2663902 - RNA, 19 nt, Artificial Sequence
  Description of Artificial Sequence: Synthetic oligonucleotide
gcuuccaggggucacuguc

SEQ ID NO: 2663903 - RNA, 19 nt, Artificial Sequence
  Description of Artificial Sequence: Synthetic oligonucleotide
cuccugccccaguuguugc

SEQ ID NO: 2663904 - RNA, 19 nt, Artificial Sequence
  Description of Artificial Sequence: Synthetic oligonucleotide
gguccaauggagagggcug

SEQ ID NO: 2663905 - RNA, 19 nt, Artificial Sequence
  Description of Artificial Sequence: Synthetic oligonucleotide
cagauggcuaccuccaccu

SEQ ID NO: 2663906 - RNA, 19 nt, Artificial Sequence
  Description of Artificial Sequence: Synthetic oligonucleotide
guggcgcagacacgacggg

SEQ ID NO: 2663907 - RNA, 19 nt, Artificial Sequence
  Description of Artificial Sequence: Synthetic oligonucleotide
auagcagguugaggcucac

SEQ ID NO: 2663908 - RNA, 19 nt, Artificial Sequence
  Description of Artificial Sequence: Synthetic oligonucleotide
uggcgcagacacgacgggc

SEQ ID NO: 2663909 - RNA, 19 nt, Artificial Sequence
  Description of Artificial Sequence: Synthetic oligonucleotide
gagagagcuuccagggguc

SEQ ID NO: 2663910 - RNA, 19 nt, Artificial Sequence
  Description of Artificial Sequence: Synthetic oligonucleotide
guggcagauagcagguuga

SEQ ID NO: 2663911 - RNA, 19 nt, Artificial Sequence
  Description of Artificial Sequence: Synthetic oligonucleotide
agaccugcuaggggccacg

SEQ ID NO: 2663912 - RNA, 19 nt, Artificial Sequence
  Description of Artificial Sequence: Synthetic oligonucleotide
gggucacuguccaucauac

SEQ ID NO: 2663913 - RNA, 19 nt, Artificial Sequence
  Description of Artificial Sequence: Synthetic oligonucleotide
guccuguuuccuucgccca

SEQ ID NO: 2663914 - RNA, 19 nt, Artificial Sequence
  Description of Artificial Sequence: Synthetic oligonucleotide
gaggcucaccaggcgcucg

SEQ ID NO: 2663915 - RNA, 19 nt, Artificial Sequence
  Description of Artificial Sequence: Synthetic oligonucleotide
cacagauggcuaccuccac

SEQ ID NO: 2663916 - RNA, 19 nt, Artificial Sequence
  Description of Artificial Sequence: Synthetic oligonucleotide
ucgauggcugagccccgcu

SEQ ID NO: 2663917 - RNA, 19 nt, Artificial Sequence
  Description of Artificial Sequence: Synthetic oligonucleotide
guccacugaugccgggcag

SEQ ID NO: 2663918 - RNA, 19 nt, Artificial Sequence
  Description of Artificial Sequence: Synthetic oligonucleotide
uugggccauaguccuguuu

SEQ ID NO: 2663919 - RNA, 19 nt, Artificial Sequence
  Description of Artificial Sequence: Synthetic oligonucleotide
cuuccgaaaauugacuuuu

SEQ ID NO: 2663920 - RNA, 19 nt, Artificial Sequence
  Description of Artificial Sequence: Synthetic oligonucleotide
gugucugcgguggauggca

SEQ ID NO: 2663921 - RNA, 19 nt, Artificial Sequence
  Description of Artificial Sequence: Synthetic oligonucleotide
uuguugccgcuucccucca

SEQ ID NO: 2663922 - RNA, 19 nt, Artificial Sequence
  Description of Artificial Sequence: Synthetic oligonucleotide
ucgcccagacugagagagc

SEQ ID NO: 2663923 - RNA, 19 nt, Artificial Sequence
  Description of Artificial Sequence: Synthetic oligonucleotide
acgacgggccacgaugugu

SEQ ID NO: 2663924 - RNA, 19 nt, Artificial Sequence
  Description of Artificial Sequence: Synthetic oligonucleotide
cuguuuccuucgcccagac

SEQ ID NO: 2663925 - RNA, 19 nt, Artificial Sequence
  Description of Artificial Sequence: Synthetic oligonucleotide
ccuggguagacgcccauuc

SEQ ID NO: 2663926 - RNA, 19 nt, Artificial Sequence
  Description of Artificial Sequence: Synthetic oligonucleotide
uggcugaagcuggggagac

SEQ ID NO: 2663927 - RNA, 19 nt, Artificial Sequence
  Description of Artificial Sequence: Synthetic oligonucleotide
acacgacgggccacgaugu

SEQ ID NO: 2663928 - RNA, 19 nt, Artificial Sequence
  Description of Artificial Sequence: Synthetic oligonucleotide
gcagacacgacgggccacg

SEQ ID NO: 2663929 - RNA, 19 nt, Artificial Sequence
  Description of Artificial Sequence: Synthetic oligonucleotide
ugucugcgguggauggcau

SEQ ID NO: 2663930 - RNA, 19 nt, Artificial Sequence
  Description of Artificial Sequence: Synthetic oligonucleotide
cagacugagagagcuucca

SEQ ID NO: 2663931 - RNA, 19 nt, Artificial Sequence
  Description of Artificial Sequence: Synthetic oligonucleotide
acgguggcagauagcaggu

SEQ ID NO: 2663932 - RNA, 19 nt, Artificial Sequence
  Description of Artificial Sequence: Synthetic oligonucleotide
caggggucacuguccauca

SEQ ID NO: 2663933 - RNA, 19 nt, Artificial Sequence
  Description of Artificial Sequence: Synthetic oligonucleotide
cugccccaguuguugccgc

SEQ ID NO: 2663934 - RNA, 19 nt, Artificial Sequence
  Description of Artificial Sequence: Synthetic oligonucleotide
cugcuuccgaaaauugacu

SEQ ID NO: 2663935 - RNA, 19 nt, Artificial Sequence
  Description of Artificial Sequence: Synthetic oligonucleotide
agagagcuuccagggguca

SEQ ID NO: 2663936 - RNA, 19 nt, Artificial Sequence
  Description of Artificial Sequence: Synthetic oligonucleotide
gucugcgguggauggcaug

SEQ ID NO: 2663937 - RNA, 19 nt, Artificial Sequence
  Description of Artificial Sequence: Synthetic oligonucleotide
cagauagcagguugaggcu

SEQ ID NO: 2663938 - RNA, 19 nt, Artificial Sequence
  Description of Artificial Sequence: Synthetic oligonucleotide
guuccacaggcuggaaguc

SEQ ID NO: 2663939 - RNA, 19 nt, Artificial Sequence
  Description of Artificial Sequence: Synthetic oligonucleotide
cuggcugaagcuggggaga

SEQ ID NO: 2663940 - RNA, 19 nt, Artificial Sequence
  Description of Artificial Sequence: Synthetic oligonucleotide
ggacagcucucugaaggug

SEQ ID NO: 2663941 - RNA, 19 nt, Artificial Sequence
  Description of Artificial Sequence: Synthetic oligonucleotide
cgguggauggcaugugucc

SEQ ID NO: 2663942 - RNA, 19 nt, Artificial Sequence
  Description of Artificial Sequence: Synthetic oligonucleotide
acgaugugucugcggugga

SEQ ID NO: 2663943 - RNA, 19 nt, Artificial Sequence
  Description of Artificial Sequence: Synthetic oligonucleotide
cagcucucugaagguggcg

SEQ ID NO: 2663944 - RNA, 19 nt, Artificial Sequence
  Description of Artificial Sequence: Synthetic oligonucleotide
ggauggcauguguccacug

SEQ ID NO: 2663945 - RNA, 19 nt, Artificial Sequence
  Description of Artificial Sequence: Synthetic oligonucleotide
ugccccaguuguugccgcu

SEQ ID NO: 2663946 - RNA, 19 nt, Artificial Sequence
  Description of Artificial Sequence: Synthetic oligonucleotide
cccagacugagagagcuuc

SEQ ID NO: 2663947 - RNA, 19 nt, Artificial Sequence
  Description of Artificial Sequence: Synthetic oligonucleotide
acgggccacgaugugucug

SEQ ID NO: 2663948 - RNA, 19 nt, Artificial Sequence
  Description of Artificial Sequence: Synthetic oligonucleotide
agacacgacgggccacgau

SEQ ID NO: 2663949 - RNA, 19 nt, Artificial Sequence
  Description of Artificial Sequence: Synthetic oligonucleotide
agggcugagcagagcagca

SEQ ID NO: 2663950 - RNA, 19 nt, Artificial Sequence
  Description of Artificial Sequence: Synthetic oligonucleotide
ccaguuguugccgcuuccc

SEQ ID NO: 2663951 - RNA, 19 nt, Artificial Sequence
  Description of Artificial Sequence: Synthetic oligonucleotide
gcuccugccccaguuguug

SEQ ID NO: 2663952 - RNA, 19 nt, Artificial Sequence
  Description of Artificial Sequence: Synthetic oligonucleotide
gccacgaugugucugcggu

SEQ ID NO: 2663953 - RNA, 19 nt, Artificial Sequence
  Description of Artificial Sequence: Synthetic oligonucleotide
uaggggccacgaugcugcc

SEQ ID NO: 2663954 - RNA, 19 nt, Artificial Sequence
  Description of Artificial Sequence: Synthetic oligonucleotide
uuugggccauaguccuguu

SEQ ID NO: 2663955 - RNA, 19 nt, Artificial Sequence
  Description of Artificial Sequence: Synthetic oligonucleotide
gacaccacgguggcagaua

SEQ ID NO: 2663956 - RNA, 19 nt, Artificial Sequence
  Description of Artificial Sequence: Synthetic oligonucleotide
uggcuaccuccaccuccug

SEQ ID NO: 2663957 - RNA, 19 nt, Artificial Sequence
  Description of Artificial Sequence: Synthetic oligonucleotide
cacagccaggcaucaucca

SEQ ID NO: 2663958 - RNA, 19 nt, Artificial Sequence
  Description of Artificial Sequence: Synthetic oligonucleotide
aauugacuuuugggccaua

SEQ ID NO: 2663959 - RNA, 19 nt, Artificial Sequence
  Description of Artificial Sequence: Synthetic oligonucleotide
caccuccuggcaagggaca

SEQ ID NO: 2663960 - RNA, 19 nt, Artificial Sequence
  Description of Artificial Sequence: Synthetic oligonucleotide
ccugccccaguuguugccg

SEQ ID NO: 2663961 - RNA, 19 nt, Artificial Sequence
  Description of Artificial Sequence: Synthetic oligonucleotide
gcgcucgccccacagccag

SEQ ID NO: 2663962 - RNA, 19 nt, Artificial Sequence
  Description of Artificial Sequence: Synthetic oligonucleotide
gucgauggcugagccccgc

SEQ ID NO: 2663963 - RNA, 19 nt, Artificial Sequence
  Description of Artificial Sequence: Synthetic oligonucleotide
cugagccccgcucugggcu

SEQ ID NO: 2663964 - RNA, 19 nt, Artificial Sequence
  Description of Artificial Sequence: Synthetic oligonucleotide
ggucacuguccaucauaca

SEQ ID NO: 2663965 - RNA, 19 nt, Artificial Sequence
  Description of Artificial Sequence: Synthetic oligonucleotide
cacgacgggccacgaugug

SEQ ID NO: 2663966 - RNA, 19 nt, Artificial Sequence
  Description of Artificial Sequence: Synthetic oligonucleotide
ccaggggccucacaggaca

SEQ ID NO: 2663967 - RNA, 19 nt, Artificial Sequence
  Description of Artificial Sequence: Synthetic oligonucleotide
accugcuaggggccacgau

SEQ ID NO: 2663968 - RNA, 19 nt, Artificial Sequence
  Description of Artificial Sequence: Synthetic oligonucleotide
aggggccucacaggacaug

SEQ ID NO: 2663969 - RNA, 19 nt, Artificial Sequence
  Description of Artificial Sequence: Synthetic oligonucleotide
gcaagggacagaccugcua

SEQ ID NO: 2663970 - RNA, 19 nt, Artificial Sequence
  Description of Artificial Sequence: Synthetic oligonucleotide
gggcugagcagagcagcag

SEQ ID NO: 2663971 - RNA, 19 nt, Artificial Sequence
  Description of Artificial Sequence: Synthetic oligonucleotide
ggcagccccugugagcacc

SEQ ID NO: 2663972 - RNA, 19 nt, Artificial Sequence
  Description of Artificial Sequence: Synthetic oligonucleotide
cacugaugccgggcagccc

SEQ ID NO: 2663973 - RNA, 19 nt, Artificial Sequence
  Description of Artificial Sequence: Synthetic oligonucleotide
ugaugccgggcagccccug

SEQ ID NO: 2663974 - RNA, 19 nt, Artificial Sequence
  Description of Artificial Sequence: Synthetic oligonucleotide
cccaguuguugccgcuucc

SEQ ID NO: 2663975 - RNA, 19 nt, Artificial Sequence
  Description of Artificial Sequence: Synthetic oligonucleotide
gggcacacagauggcuacc

SEQ ID NO: 2663976 - RNA, 19 nt, Artificial Sequence
  Description of Artificial Sequence: Synthetic oligonucleotide
gcugagccccgcucugggc

SEQ ID NO: 2663977 - RNA, 19 nt, Artificial Sequence
  Description of Artificial Sequence: Synthetic oligonucleotide
cgggccacgaugugucugc

SEQ ID NO: 2663978 - RNA, 19 nt, Artificial Sequence
  Description of Artificial Sequence: Synthetic oligonucleotide
caguuguugccgcuucccu

SEQ ID NO: 2663979 - RNA, 19 nt, Artificial Sequence
  Description of Artificial Sequence: Synthetic oligonucleotide
ccacgguggcagauagcag

SEQ ID NO: 2663980 - RNA, 19 nt, Artificial Sequence
  Description of Artificial Sequence: Synthetic oligonucleotide
cuggguagacgcccauucu

SEQ ID NO: 2663981 - RNA, 19 nt, Artificial Sequence
  Description of Artificial Sequence: Synthetic oligonucleotide
gcuuccgaaaauugacuuu

SEQ ID NO: 2663982 - RNA, 19 nt, Artificial Sequence
  Description of Artificial Sequence: Synthetic oligonucleotide
cgacgggccacgauguguc

SEQ ID NO: 2663983 - RNA, 19 nt, Artificial Sequence
  Description of Artificial Sequence: Synthetic oligonucleotide
gcagggagcggcagggcac

SEQ ID NO: 2663984 - RNA, 19 nt, Artificial Sequence
  Description of Artificial Sequence: Synthetic oligonucleotide
ggagagggcugagcagagc

SEQ ID NO: 2663985 - RNA, 19 nt, Artificial Sequence
  Description of Artificial Sequence: Synthetic oligonucleotide
ggguagacgcccauucucu

SEQ ID NO: 2663986 - RNA, 19 nt, Artificial Sequence
  Description of Artificial Sequence: Synthetic oligonucleotide
agggagcggcagggcacac

SEQ ID NO: 2663987 - RNA, 19 nt, Artificial Sequence
  Description of Artificial Sequence: Synthetic oligonucleotide
ggggccacgaugcugccau

SEQ ID NO: 2663988 - RNA, 19 nt, Artificial Sequence
  Description of Artificial Sequence: Synthetic oligonucleotide
gaugccgggcagccccugu

SEQ ID NO: 2663989 - RNA, 19 nt, Artificial Sequence
  Description of Artificial Sequence: Synthetic oligonucleotide
ggccacgaugcugccauca

SEQ ID NO: 2663990 - RNA, 19 nt, Artificial Sequence
  Description of Artificial Sequence: Synthetic oligonucleotide
gaccugcuaggggccacga

SEQ ID NO: 2663991 - RNA, 19 nt, Artificial Sequence
  Description of Artificial Sequence: Synthetic oligonucleotide
ccuucccuggaaggagagg

SEQ ID NO: 2663992 - RNA, 19 nt, Artificial Sequence
  Description of Artificial Sequence: Synthetic oligonucleotide
ggucgauggcugagccccg

SEQ ID NO: 2663993 - RNA, 19 nt, Artificial Sequence
  Description of Artificial Sequence: Synthetic oligonucleotide
cugcgguggauggcaugug

SEQ ID NO: 2663994 - RNA, 19 nt, Artificial Sequence
  Description of Artificial Sequence: Synthetic oligonucleotide
gcgguggauggcauguguc

SEQ ID NO: 2663995 - RNA, 19 nt, Artificial Sequence
  Description of Artificial Sequence: Synthetic oligonucleotide
gcucgccccacagccaggc

SEQ ID NO: 2663996 - RNA, 19 nt, Artificial Sequence
  Description of Artificial Sequence: Synthetic oligonucleotide
cagcuccugccccaguugu

SEQ ID NO: 2663997 - RNA, 19 nt, Artificial Sequence
  Description of Artificial Sequence: Synthetic oligonucleotide
ccgggcagccccugugagc

SEQ ID NO: 2663998 - RNA, 19 nt, Artificial Sequence
  Description of Artificial Sequence: Synthetic oligonucleotide
gggcuguaauccagauuac

SEQ ID NO: 2663999 - RNA, 19 nt, Artificial Sequence
  Description of Artificial Sequence: Synthetic oligonucleotide
aggggccacgaugcugcca

SEQ ID NO: 2664000 - RNA, 19 nt, Artificial Sequence
  Description of Artificial Sequence: Synthetic oligonucleotide
cagggagcggcagggcaca

SEQ ID NO: 2664001 - RNA, 19 nt, Artificial Sequence
  Description of Artificial Sequence: Synthetic oligonucleotide
agcccuggguagacgccca

SEQ ID NO: 2664002 - RNA, 19 nt, Artificial Sequence
  Description of Artificial Sequence: Synthetic oligonucleotide
acacaccaucucagccucu

SEQ ID NO: 2664003 - RNA, 19 nt, Artificial Sequence
  Description of Artificial Sequence: Synthetic oligonucleotide
gggccacgaugugucugcg

SEQ ID NO: 2664004 - RNA, 19 nt, Artificial Sequence
  Description of Artificial Sequence: Synthetic oligonucleotide
gacgggccacgaugugucu

SEQ ID NO: 2664005 - RNA, 19 nt, Artificial Sequence
  Description of Artificial Sequence: Synthetic oligonucleotide
accaggcgcucgccccaca

SEQ ID NO: 2664006 - RNA, 19 nt, Artificial Sequence
  Description of Artificial Sequence: Synthetic oligonucleotide
ccccugugagcaccagcag

SEQ ID NO: 2664007 - RNA, 19 nt, Artificial Sequence
  Description of Artificial Sequence: Synthetic oligonucleotide
gccacgaugcugccaucaa

SEQ ID NO: 2664008 - RNA, 19 nt, Artificial Sequence
  Description of Artificial Sequence: Synthetic oligonucleotide
ggagacccuggaagccagc

SEQ ID NO: 2664009 - RNA, 19 nt, Artificial Sequence
  Description of Artificial Sequence: Synthetic oligonucleotide
gcagggcacacagauggcu

SEQ ID NO: 2664010 - RNA, 19 nt, Artificial Sequence
  Description of Artificial Sequence: Synthetic oligonucleotide
gccauaguccuguuuccuu

SEQ ID NO: 2664011 - RNA, 19 nt, Artificial Sequence
  Description of Artificial Sequence: Synthetic oligonucleotide
gccaggcaucauccaggug

SEQ ID NO: 2664012 - RNA, 19 nt, Artificial Sequence
  Description of Artificial Sequence: Synthetic oligonucleotide
ggcacacagauggcuaccu

SEQ ID NO: 2664013 - RNA, 19 nt, Artificial Sequence
  Description of Artificial Sequence: Synthetic oligonucleotide
cugggcuguaauccagauu

SEQ ID NO: 2664014 - RNA, 19 nt, Artificial Sequence
  Description of Artificial Sequence: Synthetic oligonucleotide
cugaagcuggggagacccu

SEQ ID NO: 2664015 - RNA, 19 nt, Artificial Sequence
  Description of Artificial Sequence: Synthetic oligonucleotide
ccacgaugcugccaucaaa

SEQ ID NO: 2664016 - RNA, 19 nt, Artificial Sequence
  Description of Artificial Sequence: Synthetic oligonucleotide
caccaggcgcucgccccac

SEQ ID NO: 2664017 - RNA, 19 nt, Artificial Sequence
  Description of Artificial Sequence: Synthetic oligonucleotide
gagcggcagggcacacaga

SEQ ID NO: 2664018 - RNA, 19 nt, Artificial Sequence
  Description of Artificial Sequence: Synthetic oligonucleotide
cacaccaucucagccucuu

SEQ ID NO: 2664019 - RNA, 19 nt, Artificial Sequence
  Description of Artificial Sequence: Synthetic oligonucleotide
cagacacgacgggccacga

SEQ ID NO: 2664020 - RNA, 19 nt, Artificial Sequence
  Description of Artificial Sequence: Synthetic oligonucleotide
cucgccccacagccaggca

SEQ ID NO: 2664021 - RNA, 19 nt, Artificial Sequence
  Description of Artificial Sequence: Synthetic oligonucleotide
cugaugccgggcagccccu

SEQ ID NO: 2664022 - RNA, 19 nt, Artificial Sequence
  Description of Artificial Sequence: Synthetic oligonucleotide
gccaggggccucacaggac

SEQ ID NO: 2664023 - RNA, 19 nt, Artificial Sequence
  Description of Artificial Sequence: Synthetic oligonucleotide
cuccaggcaggaacucauu

SEQ ID NO: 2664024 - RNA, 19 nt, Artificial Sequence
  Description of Artificial Sequence: Synthetic oligonucleotide
gggccucacaggacaugga

SEQ ID NO: 2664025 - RNA, 19 nt, Artificial Sequence
  Description of Artificial Sequence: Synthetic oligonucleotide
gggagcggcagggcacaca

SEQ ID NO: 2664026 - RNA, 19 nt, Artificial Sequence
  Description of Artificial Sequence: Synthetic oligonucleotide
caggggccucacaggacau

SEQ ID NO: 2664027 - RNA, 19 nt, Artificial Sequence
  Description of Artificial Sequence: Synthetic oligonucleotide
gggcagccccugugagcac

SEQ ID NO: 2664028 - RNA, 19 nt, Artificial Sequence
  Description of Artificial Sequence: Synthetic oligonucleotide
cgcccauucucuggaccac

SEQ ID NO: 2664029 - RNA, 19 nt, Artificial Sequence
  Description of Artificial Sequence: Synthetic oligonucleotide
cgcucgccccacagccagg

SEQ ID NO: 2664030 - RNA, 19 nt, Artificial Sequence
  Description of Artificial Sequence: Synthetic oligonucleotide
gggccacgaugcugccauc

SEQ ID NO: 2664031 - RNA, 19 nt, Artificial Sequence
  Description of Artificial Sequence: Synthetic oligonucleotide
cgcccagacugagagagcu

SEQ ID NO: 2664032 - RNA, 19 nt, Artificial Sequence
  Description of Artificial Sequence: Synthetic oligonucleotide
cgcagacacgacgggccac

SEQ ID NO: 2664033 - RNA, 19 nt, Artificial Sequence
  Description of Artificial Sequence: Synthetic oligonucleotide
gcagagcagcaggcugcca

SEQ ID NO: 2664034 - RNA, 19 nt, Artificial Sequence
  Description of Artificial Sequence: Synthetic oligonucleotide
gagccccgcucugggcugu

SEQ ID NO: 2664035 - RNA, 19 nt, Artificial Sequence
  Description of Artificial Sequence: Synthetic oligonucleotide
ggacaccacgguggcagau

SEQ ID NO: 2664036 - RNA, 19 nt, Artificial Sequence
  Description of Artificial Sequence: Synthetic oligonucleotide
ggaccaccuucuggcugaa

SEQ ID NO: 2664037 - RNA, 19 nt, Artificial Sequence
  Description of Artificial Sequence: Synthetic oligonucleotide
ccauucucuggaccaccuu

SEQ ID NO: 2664038 - RNA, 19 nt, Artificial Sequence
  Description of Artificial Sequence: Synthetic oligonucleotide
agccccgcucugggcugua

SEQ ID NO: 2664039 - RNA, 19 nt, Artificial Sequence
  Description of Artificial Sequence: Synthetic oligonucleotide
gccccaguuguugccgcuu

SEQ ID NO: 2664040 - RNA, 19 nt, Artificial Sequence
  Description of Artificial Sequence: Synthetic oligonucleotide
gcccuggguagacgcccau

SEQ ID NO: 2664041 - RNA, 19 nt, Artificial Sequence
  Description of Artificial Sequence: Synthetic oligonucleotide
ccccgcucugggcuguaau

SEQ ID NO: 2664042 - RNA, 19 nt, Artificial Sequence
  Description of Artificial Sequence: Synthetic oligonucleotide
gcccagacugagagagcuu

SEQ ID NO: 2664043 - RNA, 19 nt, Artificial Sequence
  Description of Artificial Sequence: Synthetic oligonucleotide
gccccgcucugggcuguaa

SEQ ID NO: 2664044 - RNA, 19 nt, Artificial Sequence
  Description of Artificial Sequence: Synthetic oligonucleotide
cccuggguagacgcccauu

SEQ ID NO: 2664045 - RNA, 19 nt, Artificial Sequence
  Description of Artificial Sequence: Synthetic oligonucleotide
cgguggcagauagcagguu

SEQ ID NO: 2664046 - RNA, 19 nt, Artificial Sequence
  Description of Artificial Sequence: Synthetic oligonucleotide
aaauauuccacuuugcagc

SEQ ID NO: 2664047 - RNA, 19 nt, Artificial Sequence
  Description of Artificial Sequence: Synthetic oligonucleotide
aauaggaucgaauaacccc

SEQ ID NO: 2664048 - RNA, 19 nt, Artificial Sequence
  Description of Artificial Sequence: Synthetic oligonucleotide
aaaguauaccuacagaugu

SEQ ID NO: 2664049 - RNA, 19 nt, Artificial Sequence
  Description of Artificial Sequence: Synthetic oligonucleotide
augauaaacagucaacugg

SEQ ID NO: 2664050 - RNA, 19 nt, Artificial Sequence
  Description of Artificial Sequence: Synthetic oligonucleotide
aauuucaccucuucaauag

SEQ ID NO: 2664051 - RNA, 19 nt, Artificial Sequence
  Description of Artificial Sequence: Synthetic oligonucleotide
uucacaauucauuucaucc

SEQ ID NO: 2664052 - RNA, 19 nt, Artificial Sequence
  Description of Artificial Sequence: Synthetic oligonucleotide
uaugggugaaauaggaucg

SEQ ID NO: 2664053 - RNA, 19 nt, Artificial Sequence
  Description of Artificial Sequence: Synthetic oligonucleotide
aaagauuccacugacucuc

SEQ ID NO: 2664054 - RNA, 19 nt, Artificial Sequence
  Description of Artificial Sequence: Synthetic oligonucleotide
uaaacugagucucaaaaga

SEQ ID NO: 2664055 - RNA, 19 nt, Artificial Sequence
  Description of Artificial Sequence: Synthetic oligonucleotide
auugauuuaaauauuccac

SEQ ID NO: 2664056 - RNA, 19 nt, Artificial Sequence
  Description of Artificial Sequence: Synthetic oligonucleotide
uuaaauauuccacuuugca

SEQ ID NO: 2664057 - RNA, 19 nt, Artificial Sequence
  Description of Artificial Sequence: Synthetic oligonucleotide
uguucuuaauuucaaagga

SEQ ID NO: 2664058 - RNA, 19 nt, Artificial Sequence
  Description of Artificial Sequence: Synthetic oligonucleotide
uuguccaccaucaaacugg

SEQ ID NO: 2664059 - RNA, 19 nt, Artificial Sequence
  Description of Artificial Sequence: Synthetic oligonucleotide
uuuacuagccucagaauag

SEQ ID NO: 2664060 - RNA, 19 nt, Artificial Sequence
  Description of Artificial Sequence: Synthetic oligonucleotide
uauugauuuaaauauucca

SEQ ID NO: 2664061 - RNA, 19 nt, Artificial Sequence
  Description of Artificial Sequence: Synthetic oligonucleotide
uuggagacaagauaaacug

SEQ ID NO: 2664062 - RNA, 19 nt, Artificial Sequence
  Description of Artificial Sequence: Synthetic oligonucleotide
agacaagauaaacugaguc

SEQ ID NO: 2664063 - RNA, 19 nt, Artificial Sequence
  Description of Artificial Sequence: Synthetic oligonucleotide
agauguuggaauuccgucc

SEQ ID NO: 2664064 - RNA, 19 nt, Artificial Sequence
  Description of Artificial Sequence: Synthetic oligonucleotide
uuuaaauggcuguaaagca

SEQ ID NO: 2664065 - RNA, 19 nt, Artificial Sequence
  Description of Artificial Sequence: Synthetic oligonucleotide
uccaccaucaaacuggucu

SEQ ID NO: 2664066 - RNA, 19 nt, Artificial Sequence
  Description of Artificial Sequence: Synthetic oligonucleotide
aaguccauuuuauugaggu

SEQ ID NO: 2664067 - RNA, 19 nt, Artificial Sequence
  Description of Artificial Sequence: Synthetic oligonucleotide
uuauugauuuaaauauucc

SEQ ID NO: 2664068 - RNA, 19 nt, Artificial Sequence
  Description of Artificial Sequence: Synthetic oligonucleotide
accuuauugauuuaaauau

SEQ ID NO: 2664069 - RNA, 19 nt, Artificial Sequence
  Description of Artificial Sequence: Synthetic oligonucleotide
ugauaaacagucaacugga

SEQ ID NO: 2664070 - RNA, 19 nt, Artificial Sequence
  Description of Artificial Sequence: Synthetic oligonucleotide
auuucauccauuucuguag

SEQ ID NO: 2664071 - RNA, 19 nt, Artificial Sequence
  Description of Artificial Sequence: Synthetic oligonucleotide
auuccguccaaauuucacc

SEQ ID NO: 2664072 - RNA, 19 nt, Artificial Sequence
  Description of Artificial Sequence: Synthetic oligonucleotide
ugugucagcgucuucaaag

SEQ ID NO: 2664073 - RNA, 19 nt, Artificial Sequence
  Description of Artificial Sequence: Synthetic oligonucleotide
aaauaggaucgaauaaccc

SEQ ID NO: 2664074 - RNA, 19 nt, Artificial Sequence
  Description of Artificial Sequence: Synthetic oligonucleotide
uguugcaaaaccuuauuga

SEQ ID NO: 2664075 - RNA, 19 nt, Artificial Sequence
  Description of Artificial Sequence: Synthetic oligonucleotide
uuuuacuagccucagaaua

SEQ ID NO: 2664076 - RNA, 19 nt, Artificial Sequence
  Description of Artificial Sequence: Synthetic oligonucleotide
uugauuuaaauauuccacu

SEQ ID NO: 2664077 - RNA, 19 nt, Artificial Sequence
  Description of Artificial Sequence: Synthetic oligonucleotide
uucaauagaaggaaauuuc

SEQ ID NO: 2664078 - RNA, 19 nt, Artificial Sequence
  Description of Artificial Sequence: Synthetic oligonucleotide
acaagauaaacugagucuc

SEQ ID NO: 2664079 - RNA, 19 nt, Artificial Sequence
  Description of Artificial Sequence: Synthetic oligonucleotide
aagaggaacugauacucuc

SEQ ID NO: 2664080 - RNA, 19 nt, Artificial Sequence
  Description of Artificial Sequence: Synthetic oligonucleotide
ucaauagaaggaaauuucu

SEQ ID NO: 2664081 - RNA, 19 nt, Artificial Sequence
  Description of Artificial Sequence: Synthetic oligonucleotide
aaccuuauugauuuaaaua

SEQ ID NO: 2664082 - RNA, 19 nt, Artificial Sequence
  Description of Artificial Sequence: Synthetic oligonucleotide
uuuaaauauuccacuuugc

SEQ ID NO: 2664083 - RNA, 19 nt, Artificial Sequence
  Description of Artificial Sequence: Synthetic oligonucleotide
ugagcaggcacuuguaagg

SEQ ID NO: 2664084 - RNA, 19 nt, Artificial Sequence
  Description of Artificial Sequence: Synthetic oligonucleotide
auaaacugagucucaaaag

SEQ ID NO: 2664085 - RNA, 19 nt, Artificial Sequence
  Description of Artificial Sequence: Synthetic oligonucleotide
ucuguguuggccuaguugu

SEQ ID NO: 2664086 - RNA, 19 nt, Artificial Sequence
  Description of Artificial Sequence: Synthetic oligonucleotide
uguccugaaaaguauaccu

SEQ ID NO: 2664087 - RNA, 19 nt, Artificial Sequence
  Description of Artificial Sequence: Synthetic oligonucleotide
auuuuauugagguagccaa

SEQ ID NO: 2664088 - RNA, 19 nt, Artificial Sequence
  Description of Artificial Sequence: Synthetic oligonucleotide
aguccuaugggugaaauag

SEQ ID NO: 2664089 - RNA, 19 nt, Artificial Sequence
  Description of Artificial Sequence: Synthetic oligonucleotide
ugaaauaggaucgaauaac

SEQ ID NO: 2664090 - RNA, 19 nt, Artificial Sequence
  Description of Artificial Sequence: Synthetic oligonucleotide
agaugucuuccuuuugucc

SEQ ID NO: 2664091 - RNA, 19 nt, Artificial Sequence
  Description of Artificial Sequence: Synthetic oligonucleotide
ugcaaaaccuuauugauuu

SEQ ID NO: 2664092 - RNA, 19 nt, Artificial Sequence
  Description of Artificial Sequence: Synthetic oligonucleotide
ucugguauaggacucugug

SEQ ID NO: 2664093 - RNA, 19 nt, Artificial Sequence
  Description of Artificial Sequence: Synthetic oligonucleotide
gaugauaaacagucaacug

SEQ ID NO: 2664094 - RNA, 19 nt, Artificial Sequence
  Description of Artificial Sequence: Synthetic oligonucleotide
auggcuguaaagcaaacug

SEQ ID NO: 2664095 - RNA, 19 nt, Artificial Sequence
  Description of Artificial Sequence: Synthetic oligonucleotide
uguaaagcaaacugaacuc

SEQ ID NO: 2664096 - RNA, 19 nt, Artificial Sequence
  Description of Artificial Sequence: Synthetic oligonucleotide
gauaaacugagucucaaaa

SEQ ID NO: 2664097 - RNA, 19 nt, Artificial Sequence
  Description of Artificial Sequence: Synthetic oligonucleotide
ugaaaaguauaccuacaga

SEQ ID NO: 2664098 - RNA, 19 nt, Artificial Sequence
  Description of Artificial Sequence: Synthetic oligonucleotide
aaaaguauaccuacagaug

SEQ ID NO: 2664099 - RNA, 19 nt, Artificial Sequence
  Description of Artificial Sequence: Synthetic oligonucleotide
acugauacucuccaaaccu

SEQ ID NO: 2664100 - RNA, 19 nt, Artificial Sequence
  Description of Artificial Sequence: Synthetic oligonucleotide
uggaauuccguccaaauuu

SEQ ID NO: 2664101 - RNA, 19 nt, Artificial Sequence
  Description of Artificial Sequence: Synthetic oligonucleotide
uuaaauggcuguaaagcaa

SEQ ID NO: 2664102 - RNA, 19 nt, Artificial Sequence
  Description of Artificial Sequence: Synthetic oligonucleotide
cuaugggugaaauaggauc

SEQ ID NO: 2664103 - RNA, 19 nt, Artificial Sequence
  Description of Artificial Sequence: Synthetic oligonucleotide
aauauuccacuuugcagcu

SEQ ID NO: 2664104 - RNA, 19 nt, Artificial Sequence
  Description of Artificial Sequence: Synthetic oligonucleotide
aacucgggaaaccuguuug

SEQ ID NO: 2664105 - RNA, 19 nt, Artificial Sequence
  Description of Artificial Sequence: Synthetic oligonucleotide
gaaaaguauaccuacagau

SEQ ID NO: 2664106 - RNA, 19 nt, Artificial Sequence
  Description of Artificial Sequence: Synthetic oligonucleotide
gaaauaggaucgaauaacc

SEQ ID NO: 2664107 - RNA, 19 nt, Artificial Sequence
  Description of Artificial Sequence: Synthetic oligonucleotide
ucucaaaagauuccacuga

SEQ ID NO: 2664108 - RNA, 19 nt, Artificial Sequence
  Description of Artificial Sequence: Synthetic oligonucleotide
uccgcuuggacucuguuca

SEQ ID NO: 2664109 - RNA, 19 nt, Artificial Sequence
  Description of Artificial Sequence: Synthetic oligonucleotide
uucaaaggaggacaugaug

SEQ ID NO: 2664110 - RNA, 19 nt, Artificial Sequence
  Description of Artificial Sequence: Synthetic oligonucleotide
cuaguuguuuucuugcaag

SEQ ID NO: 2664111 - RNA, 19 nt, Artificial Sequence
  Description of Artificial Sequence: Synthetic oligonucleotide
uuuuauugagguagccaag

SEQ ID NO: 2664112 - RNA, 19 nt, Artificial Sequence
  Description of Artificial Sequence: Synthetic oligonucleotide
guagccaagcuccugauug

SEQ ID NO: 2664113 - RNA, 19 nt, Artificial Sequence
  Description of Artificial Sequence: Synthetic oligonucleotide
guccauuuuauugagguag

SEQ ID NO: 2664114 - RNA, 19 nt, Artificial Sequence
  Description of Artificial Sequence: Synthetic oligonucleotide
ucacaauucauuucaucca

SEQ ID NO: 2664115 - RNA, 19 nt, Artificial Sequence
  Description of Artificial Sequence: Synthetic oligonucleotide
uuuauugagguagccaagc

SEQ ID NO: 2664116 - RNA, 19 nt, Artificial Sequence
  Description of Artificial Sequence: Synthetic oligonucleotide
uguuuucuugcaagagugg

SEQ ID NO: 2664117 - RNA, 19 nt, Artificial Sequence
  Description of Artificial Sequence: Synthetic oligonucleotide
cugaaaaguauaccuacag

SEQ ID NO: 2664118 - RNA, 19 nt, Artificial Sequence
  Description of Artificial Sequence: Synthetic oligonucleotide
aaggagagaacagagcugu

SEQ ID NO: 2664119 - RNA, 19 nt, Artificial Sequence
  Description of Artificial Sequence: Synthetic oligonucleotide
aauuccguccaaauuucac

SEQ ID NO: 2664120 - RNA, 19 nt, Artificial Sequence
  Description of Artificial Sequence: Synthetic oligonucleotide
aaccuguuuguccugaaaa

SEQ ID NO: 2664121 - RNA, 19 nt, Artificial Sequence
  Description of Artificial Sequence: Synthetic oligonucleotide
uccugaaaaguauaccuac

SEQ ID NO: 2664122 - RNA, 19 nt, Artificial Sequence
  Description of Artificial Sequence: Synthetic oligonucleotide
aauagaugucuuccuuuug

SEQ ID NO: 2664123 - RNA, 19 nt, Artificial Sequence
  Description of Artificial Sequence: Synthetic oligonucleotide
ugcaagaguggucuuggag

SEQ ID NO: 2664124 - RNA, 19 nt, Artificial Sequence
  Description of Artificial Sequence: Synthetic oligonucleotide
aaacugaacucgggaaacc

SEQ ID NO: 2664125 - RNA, 19 nt, Artificial Sequence
  Description of Artificial Sequence: Synthetic oligonucleotide
ucucuuuguugcaaaaccu

SEQ ID NO: 2664126 - RNA, 19 nt, Artificial Sequence
  Description of Artificial Sequence: Synthetic oligonucleotide
ugguauaggacucuguguu

SEQ ID NO: 2664127 - RNA, 19 nt, Artificial Sequence
  Description of Artificial Sequence: Synthetic oligonucleotide
uuucuugcaagaguggucu

SEQ ID NO: 2664128 - RNA, 19 nt, Artificial Sequence
  Description of Artificial Sequence: Synthetic oligonucleotide
cucagaauagaugucuucc

SEQ ID NO: 2664129 - RNA, 19 nt, Artificial Sequence
  Description of Artificial Sequence: Synthetic oligonucleotide
uucaccucuucaauagaag

SEQ ID NO: 2664130 - RNA, 19 nt, Artificial Sequence
  Description of Artificial Sequence: Synthetic oligonucleotide
uccuaugggugaaauagga

SEQ ID NO: 2664131 - RNA, 19 nt, Artificial Sequence
  Description of Artificial Sequence: Synthetic oligonucleotide
uuucuguaggagaaguccu

SEQ ID NO: 2664132 - RNA, 19 nt, Artificial Sequence
  Description of Artificial Sequence: Synthetic oligonucleotide
gucucaaaagauuccacug

SEQ ID NO: 2664133 - RNA, 19 nt, Artificial Sequence
  Description of Artificial Sequence: Synthetic oligonucleotide
cuguugaacuguuuaaaug

SEQ ID NO: 2664134 - RNA, 19 nt, Artificial Sequence
  Description of Artificial Sequence: Synthetic oligonucleotide
uuucaaaggagagaacaga

SEQ ID NO: 2664135 - RNA, 19 nt, Artificial Sequence
  Description of Artificial Sequence: Synthetic oligonucleotide
aagcaaacugaacucggga

SEQ ID NO: 2664136 - RNA, 19 nt, Artificial Sequence
  Description of Artificial Sequence: Synthetic oligonucleotide
uccacuuugcagcuggcca

SEQ ID NO: 2664137 - RNA, 19 nt, Artificial Sequence
  Description of Artificial Sequence: Synthetic oligonucleotide
ugauacucuccaaaccuga

SEQ ID NO: 2664138 - RNA, 19 nt, Artificial Sequence
  Description of Artificial Sequence: Synthetic oligonucleotide
guaggagaaguccuauggg

SEQ ID NO: 2664139 - RNA, 19 nt, Artificial Sequence
  Description of Artificial Sequence: Synthetic oligonucleotide
gaacugauacucuccaaac

SEQ ID NO: 2664140 - RNA, 19 nt, Artificial Sequence
  Description of Artificial Sequence: Synthetic oligonucleotide
uguuucuccgcuuggacuc

SEQ ID NO: 2664141 - RNA, 19 nt, Artificial Sequence
  Description of Artificial Sequence: Synthetic oligonucleotide
uccugauuguccaccauca

SEQ ID NO: 2664142 - RNA, 19 nt, Artificial Sequence
  Description of Artificial Sequence: Synthetic oligonucleotide
aacuggagacaagucacgg

SEQ ID NO: 2664143 - RNA, 19 nt, Artificial Sequence
  Description of Artificial Sequence: Synthetic oligonucleotide
uaggagaaguccuaugggu

SEQ ID NO: 2664144 - RNA, 19 nt, Artificial Sequence
  Description of Artificial Sequence: Synthetic oligonucleotide
guucuuaauuucaaaggag

SEQ ID NO: 2664145 - RNA, 19 nt, Artificial Sequence
  Description of Artificial Sequence: Synthetic oligonucleotide
uccauuuuauugagguagc

SEQ ID NO: 2664146 - RNA, 19 nt, Artificial Sequence
  Description of Artificial Sequence: Synthetic oligonucleotide
gaggacaugaugcucucug

SEQ ID NO: 2664147 - RNA, 19 nt, Artificial Sequence
  Description of Artificial Sequence: Synthetic oligonucleotide
uugaacuguuuaaauggcu

SEQ ID NO: 2664148 - RNA, 19 nt, Artificial Sequence
  Description of Artificial Sequence: Synthetic oligonucleotide
cuccaagaggaacugauac

SEQ ID NO: 2664149 - RNA, 19 nt, Artificial Sequence
  Description of Artificial Sequence: Synthetic oligonucleotide
caauagaaggaaauuucuc

SEQ ID NO: 2664150 - RNA, 19 nt, Artificial Sequence
  Description of Artificial Sequence: Synthetic oligonucleotide
uucauguuucuccgcuugg

SEQ ID NO: 2664151 - RNA, 19 nt, Artificial Sequence
  Description of Artificial Sequence: Synthetic oligonucleotide
uguuuguccugaaaaguau

SEQ ID NO: 2664152 - RNA, 19 nt, Artificial Sequence
  Description of Artificial Sequence: Synthetic oligonucleotide
cucaaaagauuccacugac

SEQ ID NO: 2664153 - RNA, 19 nt, Artificial Sequence
  Description of Artificial Sequence: Synthetic oligonucleotide
ucuuuguugcaaaaccuua

SEQ ID NO: 2664154 - RNA, 19 nt, Artificial Sequence
  Description of Artificial Sequence: Synthetic oligonucleotide
gacaagauaaacugagucu

SEQ ID NO: 2664155 - RNA, 19 nt, Artificial Sequence
  Description of Artificial Sequence: Synthetic oligonucleotide
ucaaaagauuccacugacu

SEQ ID NO: 2664156 - RNA, 19 nt, Artificial Sequence
  Description of Artificial Sequence: Synthetic oligonucleotide
auagaaggaaauuucucuu

SEQ ID NO: 2664157 - RNA, 19 nt, Artificial Sequence
  Description of Artificial Sequence: Synthetic oligonucleotide
uggcuguaaagcaaacuga

SEQ ID NO: 2664158 - RNA, 19 nt, Artificial Sequence
  Description of Artificial Sequence: Synthetic oligonucleotide
agaggaacugauacucucc

SEQ ID NO: 2664159 - RNA, 19 nt, Artificial Sequence
  Description of Artificial Sequence: Synthetic oligonucleotide
guauaggacucuguguugg

SEQ ID NO: 2664160 - RNA, 19 nt, Artificial Sequence
  Description of Artificial Sequence: Synthetic oligonucleotide
uuuucuugcaagagugguc

SEQ ID NO: 2664161 - RNA, 19 nt, Artificial Sequence
  Description of Artificial Sequence: Synthetic oligonucleotide
gagagaacagagcuguuga

SEQ ID NO: 2664162 - RNA, 19 nt, Artificial Sequence
  Description of Artificial Sequence: Synthetic oligonucleotide
uuccguccaaauuucaccu

SEQ ID NO: 2664163 - RNA, 19 nt, Artificial Sequence
  Description of Artificial Sequence: Synthetic oligonucleotide
uggagacaagauaaacuga

SEQ ID NO: 2664164 - RNA, 19 nt, Artificial Sequence
  Description of Artificial Sequence: Synthetic oligonucleotide
aggaugauaaacagucaac

SEQ ID NO: 2664165 - RNA, 19 nt, Artificial Sequence
  Description of Artificial Sequence: Synthetic oligonucleotide
aguauaccuacagauguug

SEQ ID NO: 2664166 - RNA, 19 nt, Artificial Sequence
  Description of Artificial Sequence: Synthetic oligonucleotide
aagcuccugauuguccacc

SEQ ID NO: 2664167 - RNA, 19 nt, Artificial Sequence
  Description of Artificial Sequence: Synthetic oligonucleotide
uuauugagguagccaagcu

SEQ ID NO: 2664168 - RNA, 19 nt, Artificial Sequence
  Description of Artificial Sequence: Synthetic oligonucleotide
ggagacaagauaaacugag

SEQ ID NO: 2664169 - RNA, 19 nt, Artificial Sequence
  Description of Artificial Sequence: Synthetic oligonucleotide
uuggacucuguucacaauu

SEQ ID NO: 2664170 - RNA, 19 nt, Artificial Sequence
  Description of Artificial Sequence: Synthetic oligonucleotide
ucgggaaaccuguuugucc

SEQ ID NO: 2664171 - RNA, 19 nt, Artificial Sequence
  Description of Artificial Sequence: Synthetic oligonucleotide
aauggcuguaaagcaaacu

SEQ ID NO: 2664172 - RNA, 19 nt, Artificial Sequence
  Description of Artificial Sequence: Synthetic oligonucleotide
cuagccucagaauagaugu

SEQ ID NO: 2664173 - RNA, 19 nt, Artificial Sequence
  Description of Artificial Sequence: Synthetic oligonucleotide
cuggagacaagucacgguc

SEQ ID NO: 2664174 - RNA, 19 nt, Artificial Sequence
  Description of Artificial Sequence: Synthetic oligonucleotide
gucaacuggagacaaguca

SEQ ID NO: 2664175 - RNA, 19 nt, Artificial Sequence
  Description of Artificial Sequence: Synthetic oligonucleotide
gugucagcgucuucaaagg

SEQ ID NO: 2664176 - RNA, 19 nt, Artificial Sequence
  Description of Artificial Sequence: Synthetic oligonucleotide
aaaggagagaacagagcug

SEQ ID NO: 2664177 - RNA, 19 nt, Artificial Sequence
  Description of Artificial Sequence: Synthetic oligonucleotide
cugagucucaaaagauucc

SEQ ID NO: 2664178 - RNA, 19 nt, Artificial Sequence
  Description of Artificial Sequence: Synthetic oligonucleotide
ucuccaaaccugagcaggc

SEQ ID NO: 2664179 - RNA, 19 nt, Artificial Sequence
  Description of Artificial Sequence: Synthetic oligonucleotide
ucuuggagacaagauaaac

SEQ ID NO: 2664180 - RNA, 19 nt, Artificial Sequence
  Description of Artificial Sequence: Synthetic oligonucleotide
caagaguggucuuggagac

SEQ ID NO: 2664181 - RNA, 19 nt, Artificial Sequence
  Description of Artificial Sequence: Synthetic oligonucleotide
aaggaggacaugaugcucu

SEQ ID NO: 2664182 - RNA, 19 nt, Artificial Sequence
  Description of Artificial Sequence: Synthetic oligonucleotide
cuguaaagcaaacugaacu

SEQ ID NO: 2664183 - RNA, 19 nt, Artificial Sequence
  Description of Artificial Sequence: Synthetic oligonucleotide
gaaauuucucuuuguugca

SEQ ID NO: 2664184 - RNA, 19 nt, Artificial Sequence
  Description of Artificial Sequence: Synthetic oligonucleotide
auaggacucuguguuggcc

SEQ ID NO: 2664185 - RNA, 19 nt, Artificial Sequence
  Description of Artificial Sequence: Synthetic oligonucleotide
uucuuacucauguucuuaa

SEQ ID NO: 2664186 - RNA, 19 nt, Artificial Sequence
  Description of Artificial Sequence: Synthetic oligonucleotide
uacucauguucuuaauuuc

SEQ ID NO: 2664187 - RNA, 19 nt, Artificial Sequence
  Description of Artificial Sequence: Synthetic oligonucleotide
aguuguuuucuugcaagag

SEQ ID NO: 2664188 - RNA, 19 nt, Artificial Sequence
  Description of Artificial Sequence: Synthetic oligonucleotide
uccaagaggaacugauacu

SEQ ID NO: 2664189 - RNA, 19 nt, Artificial Sequence
  Description of Artificial Sequence: Synthetic oligonucleotide
aacagagcuguugaacugu

SEQ ID NO: 2664190 - RNA, 19 nt, Artificial Sequence
  Description of Artificial Sequence: Synthetic oligonucleotide
aaauggcuguaaagcaaac

SEQ ID NO: 2664191 - RNA, 19 nt, Artificial Sequence
  Description of Artificial Sequence: Synthetic oligonucleotide
gaugucuuccuuuuguccu

SEQ ID NO: 2664192 - RNA, 19 nt, Artificial Sequence
  Description of Artificial Sequence: Synthetic oligonucleotide
cuugcaagaguggucuugg

SEQ ID NO: 2664193 - RNA, 19 nt, Artificial Sequence
  Description of Artificial Sequence: Synthetic oligonucleotide
caaacuggucuucuuacuc

SEQ ID NO: 2664194 - RNA, 19 nt, Artificial Sequence
  Description of Artificial Sequence: Synthetic oligonucleotide
cugagcaggcacuuguaag

SEQ ID NO: 2664195 - RNA, 19 nt, Artificial Sequence
  Description of Artificial Sequence: Synthetic oligonucleotide
agcaaacugaacucgggaa

SEQ ID NO: 2664196 - RNA, 19 nt, Artificial Sequence
  Description of Artificial Sequence: Synthetic oligonucleotide
aaacugagucucaaaagau

SEQ ID NO: 2664197 - RNA, 19 nt, Artificial Sequence
  Description of Artificial Sequence: Synthetic oligonucleotide
uaauuucaaaggagagaac

SEQ ID NO: 2664198 - RNA, 19 nt, Artificial Sequence
  Description of Artificial Sequence: Synthetic oligonucleotide
aaaaccuuauugauuuaaa

SEQ ID NO: 2664199 - RNA, 19 nt, Artificial Sequence
  Description of Artificial Sequence: Synthetic oligonucleotide
ucaaacuggucuucuuacu

SEQ ID NO: 2664200 - RNA, 19 nt, Artificial Sequence
  Description of Artificial Sequence: Synthetic oligonucleotide
aacuggucuucuuacucau

SEQ ID NO: 2664201 - RNA, 19 nt, Artificial Sequence
  Description of Artificial Sequence: Synthetic oligonucleotide
caaaggagagaacagagcu

SEQ ID NO: 2664202 - RNA, 19 nt, Artificial Sequence
  Description of Artificial Sequence: Synthetic oligonucleotide
ggugaaauaggaucgaaua

SEQ ID NO: 2664203 - RNA, 19 nt, Artificial Sequence
  Description of Artificial Sequence: Synthetic oligonucleotide
uugcaaaaccuuauugauu

SEQ ID NO: 2664204 - RNA, 19 nt, Artificial Sequence
  Description of Artificial Sequence: Synthetic oligonucleotide
cagauguuggaauuccguc

SEQ ID NO: 2664205 - RNA, 19 nt, Artificial Sequence
  Description of Artificial Sequence: Synthetic oligonucleotide
auguuucuccgcuuggacu

SEQ ID NO: 2664206 - RNA, 19 nt, Artificial Sequence
  Description of Artificial Sequence: Synthetic oligonucleotide
aacugaacucgggaaaccu

SEQ ID NO: 2664207 - RNA, 19 nt, Artificial Sequence
  Description of Artificial Sequence: Synthetic oligonucleotide
uuggaauuccguccaaauu

SEQ ID NO: 2664208 - RNA, 19 nt, Artificial Sequence
  Description of Artificial Sequence: Synthetic oligonucleotide
acaagucacggucucuucu

SEQ ID NO: 2664209 - RNA, 19 nt, Artificial Sequence
  Description of Artificial Sequence: Synthetic oligonucleotide
uuucucuuuguugcaaaac

SEQ ID NO: 2664210 - RNA, 19 nt, Artificial Sequence
  Description of Artificial Sequence: Synthetic oligonucleotide
caaguccauuuuauugagg

SEQ ID NO: 2664211 - RNA, 19 nt, Artificial Sequence
  Description of Artificial Sequence: Synthetic oligonucleotide
aagauaaacugagucucaa

SEQ ID NO: 2664212 - RNA, 19 nt, Artificial Sequence
  Description of Artificial Sequence: Synthetic oligonucleotide
cugauacucuccaaaccug

SEQ ID NO: 2664213 - RNA, 19 nt, Artificial Sequence
  Description of Artificial Sequence: Synthetic oligonucleotide
uuguaaggcaaguccauuu

SEQ ID NO: 2664214 - RNA, 19 nt, Artificial Sequence
  Description of Artificial Sequence: Synthetic oligonucleotide
uggacucuguucacaauuc

SEQ ID NO: 2664215 - RNA, 19 nt, Artificial Sequence
  Description of Artificial Sequence: Synthetic oligonucleotide
guauaccuacagauguugg

SEQ ID NO: 2664216 - RNA, 19 nt, Artificial Sequence
  Description of Artificial Sequence: Synthetic oligonucleotide
aagauuccacugacucucc

SEQ ID NO: 2664217 - RNA, 19 nt, Artificial Sequence
  Description of Artificial Sequence: Synthetic oligonucleotide
uccaaaccugagcaggcac

SEQ ID NO: 2664218 - RNA, 19 nt, Artificial Sequence
  Description of Artificial Sequence: Synthetic oligonucleotide
gugaaauaggaucgaauaa

SEQ ID NO: 2664219 - RNA, 19 nt, Artificial Sequence
  Description of Artificial Sequence: Synthetic oligonucleotide
aaaccuguuuguccugaaa

SEQ ID NO: 2664220 - RNA, 19 nt, Artificial Sequence
  Description of Artificial Sequence: Synthetic oligonucleotide
ucuugcaagaguggucuug

SEQ ID NO: 2664221 - RNA, 19 nt, Artificial Sequence
  Description of Artificial Sequence: Synthetic oligonucleotide
cuuggagacaagauaaacu

SEQ ID NO: 2664222 - RNA, 19 nt, Artificial Sequence
  Description of Artificial Sequence: Synthetic oligonucleotide
gauacucuccaaaccugag

SEQ ID NO: 2664223 - RNA, 19 nt, Artificial Sequence
  Description of Artificial Sequence: Synthetic oligonucleotide
caaacugaacucgggaaac

SEQ ID NO: 2664224 - RNA, 19 nt, Artificial Sequence
  Description of Artificial Sequence: Synthetic oligonucleotide
gaggaacugauacucucca

SEQ ID NO: 2664225 - RNA, 19 nt, Artificial Sequence
  Description of Artificial Sequence: Synthetic oligonucleotide
uggagacaagucacggucu

SEQ ID NO: 2664226 - RNA, 19 nt, Artificial Sequence
  Description of Artificial Sequence: Synthetic oligonucleotide
uggccuaguuguuuucuug

SEQ ID NO: 2664227 - RNA, 19 nt, Artificial Sequence
  Description of Artificial Sequence: Synthetic oligonucleotide
auccuucauguuucuccgc

SEQ ID NO: 2664228 - RNA, 19 nt, Artificial Sequence
  Description of Artificial Sequence: Synthetic oligonucleotide
gucagcgucuucaaaggag

SEQ ID NO: 2664229 - RNA, 19 nt, Artificial Sequence
  Description of Artificial Sequence: Synthetic oligonucleotide
aacagucaacuggagacaa

SEQ ID NO: 2664230 - RNA, 19 nt, Artificial Sequence
  Description of Artificial Sequence: Synthetic oligonucleotide
caagucacggucucuucug

SEQ ID NO: 2664231 - RNA, 19 nt, Artificial Sequence
  Description of Artificial Sequence: Synthetic oligonucleotide
ugucagcgucuucaaagga

SEQ ID NO: 2664232 - RNA, 19 nt, Artificial Sequence
  Description of Artificial Sequence: Synthetic oligonucleotide
acucauguucuuaauuuca

SEQ ID NO: 2664233 - RNA, 19 nt, Artificial Sequence
  Description of Artificial Sequence: Synthetic oligonucleotide
agcgucuucaaaggaggac

SEQ ID NO: 2664234 - RNA, 19 nt, Artificial Sequence
  Description of Artificial Sequence: Synthetic oligonucleotide
cauccauuucuguaggaga

SEQ ID NO: 2664235 - RNA, 19 nt, Artificial Sequence
  Description of Artificial Sequence: Synthetic oligonucleotide
cacugacucuccaucuucc

SEQ ID NO: 2664236 - RNA, 19 nt, Artificial Sequence
  Description of Artificial Sequence: Synthetic oligonucleotide
guugcaaaaccuuauugau

SEQ ID NO: 2664237 - RNA, 19 nt, Artificial Sequence
  Description of Artificial Sequence: Synthetic oligonucleotide
gcaagaguggucuuggaga

SEQ ID NO: 2664238 - RNA, 19 nt, Artificial Sequence
  Description of Artificial Sequence: Synthetic oligonucleotide
uuacuagccucagaauaga

SEQ ID NO: 2664239 - RNA, 19 nt, Artificial Sequence
  Description of Artificial Sequence: Synthetic oligonucleotide
auuucaccucuucaauaga

SEQ ID NO: 2664240 - RNA, 19 nt, Artificial Sequence
  Description of Artificial Sequence: Synthetic oligonucleotide
aacugagucucaaaagauu

SEQ ID NO: 2664241 - RNA, 19 nt, Artificial Sequence
  Description of Artificial Sequence: Synthetic oligonucleotide
acuagccucagaauagaug

SEQ ID NO: 2664242 - RNA, 19 nt, Artificial Sequence
  Description of Artificial Sequence: Synthetic oligonucleotide
uguucacaauucauuucau

SEQ ID NO: 2664243 - RNA, 19 nt, Artificial Sequence
  Description of Artificial Sequence: Synthetic oligonucleotide
agauaaacugagucucaaa

SEQ ID NO: 2664244 - RNA, 19 nt, Artificial Sequence
  Description of Artificial Sequence: Synthetic oligonucleotide
cauuucuguaggagaaguc

SEQ ID NO: 2664245 - RNA, 19 nt, Artificial Sequence
  Description of Artificial Sequence: Synthetic oligonucleotide
aagucacggucucuucugu

SEQ ID NO: 2664246 - RNA, 19 nt, Artificial Sequence
  Description of Artificial Sequence: Synthetic oligonucleotide
aacuguuuaaauggcugua

SEQ ID NO: 2664247 - RNA, 19 nt, Artificial Sequence
  Description of Artificial Sequence: Synthetic oligonucleotide
gagguagccaagcuccuga

SEQ ID NO: 2664248 - RNA, 19 nt, Artificial Sequence
  Description of Artificial Sequence: Synthetic oligonucleotide
gccaggaugauaaacaguc

SEQ ID NO: 2664249 - RNA, 19 nt, Artificial Sequence
  Description of Artificial Sequence: Synthetic oligonucleotide
cauuucauccauuucugua

SEQ ID NO: 2664250 - RNA, 19 nt, Artificial Sequence
  Description of Artificial Sequence: Synthetic oligonucleotide
cauuuuauugagguagcca

SEQ ID NO: 2664251 - RNA, 19 nt, Artificial Sequence
  Description of Artificial Sequence: Synthetic oligonucleotide
acuggagacaagucacggu

SEQ ID NO: 2664252 - RNA, 19 nt, Artificial Sequence
  Description of Artificial Sequence: Synthetic oligonucleotide
accucuucaauagaaggaa

SEQ ID NO: 2664253 - RNA, 19 nt, Artificial Sequence
  Description of Artificial Sequence: Synthetic oligonucleotide
uguccaccaucaaacuggu

SEQ ID NO: 2664254 - RNA, 19 nt, Artificial Sequence
  Description of Artificial Sequence: Synthetic oligonucleotide
aggagaaguccuaugggug

SEQ ID NO: 2664255 - RNA, 19 nt, Artificial Sequence
  Description of Artificial Sequence: Synthetic oligonucleotide
caggaugauaaacagucaa

SEQ ID NO: 2664256 - RNA, 19 nt, Artificial Sequence
  Description of Artificial Sequence: Synthetic oligonucleotide
uucuguaggagaaguccua

SEQ ID NO: 2664257 - RNA, 19 nt, Artificial Sequence
  Description of Artificial Sequence: Synthetic oligonucleotide
ucuuacucauguucuuaau

SEQ ID NO: 2664258 - RNA, 19 nt, Artificial Sequence
  Description of Artificial Sequence: Synthetic oligonucleotide
aguggucuuggagacaaga

SEQ ID NO: 2664259 - RNA, 19 nt, Artificial Sequence
  Description of Artificial Sequence: Synthetic oligonucleotide
agccucagaauagaugucu

SEQ ID NO: 2664260 - RNA, 19 nt, Artificial Sequence
  Description of Artificial Sequence: Synthetic oligonucleotide
gcaaguccauuuuauugag

SEQ ID NO: 2664261 - RNA, 19 nt, Artificial Sequence
  Description of Artificial Sequence: Synthetic oligonucleotide
agaguggucuuggagacaa

SEQ ID NO: 2664262 - RNA, 19 nt, Artificial Sequence
  Description of Artificial Sequence: Synthetic oligonucleotide
ucuccaagaggaacugaua

SEQ ID NO: 2664263 - RNA, 19 nt, Artificial Sequence
  Description of Artificial Sequence: Synthetic oligonucleotide
acagauguuggaauuccgu

SEQ ID NO: 2664264 - RNA, 19 nt, Artificial Sequence
  Description of Artificial Sequence: Synthetic oligonucleotide
ggaacugauacucuccaaa

SEQ ID NO: 2664265 - RNA, 19 nt, Artificial Sequence
  Description of Artificial Sequence: Synthetic oligonucleotide
cuguuuguccugaaaagua

SEQ ID NO: 2664266 - RNA, 19 nt, Artificial Sequence
  Description of Artificial Sequence: Synthetic oligonucleotide
aggaggacaugaugcucuc

SEQ ID NO: 2664267 - RNA, 19 nt, Artificial Sequence
  Description of Artificial Sequence: Synthetic oligonucleotide
acuguuuaaauggcuguaa

SEQ ID NO: 2664268 - RNA, 19 nt, Artificial Sequence
  Description of Artificial Sequence: Synthetic oligonucleotide
acucgggaaaccuguuugu

SEQ ID NO: 2664269 - RNA, 19 nt, Artificial Sequence
  Description of Artificial Sequence: Synthetic oligonucleotide
aaguccuaugggugaaaua

SEQ ID NO: 2664270 - RNA, 19 nt, Artificial Sequence
  Description of Artificial Sequence: Synthetic oligonucleotide
cuccugauuguccaccauc

SEQ ID NO: 2664271 - RNA, 19 nt, Artificial Sequence
  Description of Artificial Sequence: Synthetic oligonucleotide
agucaacuggagacaaguc

SEQ ID NO: 2664272 - RNA, 19 nt, Artificial Sequence
  Description of Artificial Sequence: Synthetic oligonucleotide
accuacagauguuggaauu

SEQ ID NO: 2664273 - RNA, 19 nt, Artificial Sequence
  Description of Artificial Sequence: Synthetic oligonucleotide
guccuaugggugaaauagg

SEQ ID NO: 2664274 - RNA, 19 nt, Artificial Sequence
  Description of Artificial Sequence: Synthetic oligonucleotide
gaauagaugucuuccuuuu

SEQ ID NO: 2664275 - RNA, 19 nt, Artificial Sequence
  Description of Artificial Sequence: Synthetic oligonucleotide
ggucuuggagacaagauaa

SEQ ID NO: 2664276 - RNA, 19 nt, Artificial Sequence
  Description of Artificial Sequence: Synthetic oligonucleotide
ggccuaguuguuuucuugc

SEQ ID NO: 2664277 - RNA, 19 nt, Artificial Sequence
  Description of Artificial Sequence: Synthetic oligonucleotide
gagcaggcacuuguaaggc

SEQ ID NO: 2664278 - RNA, 19 nt, Artificial Sequence
  Description of Artificial Sequence: Synthetic oligonucleotide
uacuagccucagaauagau

SEQ ID NO: 2664279 - RNA, 19 nt, Artificial Sequence
  Description of Artificial Sequence: Synthetic oligonucleotide
gagcuguugaacuguuuaa

SEQ ID NO: 2664280 - RNA, 19 nt, Artificial Sequence
  Description of Artificial Sequence: Synthetic oligonucleotide
gguauaggacucuguguug

SEQ ID NO: 2664281 - RNA, 19 nt, Artificial Sequence
  Description of Artificial Sequence: Synthetic oligonucleotide
agagaacagagcuguugaa

SEQ ID NO: 2664282 - RNA, 19 nt, Artificial Sequence
  Description of Artificial Sequence: Synthetic oligonucleotide
auccauuucuguaggagaa

SEQ ID NO: 2664283 - RNA, 19 nt, Artificial Sequence
  Description of Artificial Sequence: Synthetic oligonucleotide
gagucucaaaagauuccac

SEQ ID NO: 2664284 - RNA, 19 nt, Artificial Sequence
  Description of Artificial Sequence: Synthetic oligonucleotide
ccaagaggaacugauacuc

SEQ ID NO: 2664285 - RNA, 19 nt, Artificial Sequence
  Description of Artificial Sequence: Synthetic oligonucleotide
agucacggucucuucugug

SEQ ID NO: 2664286 - RNA, 19 nt, Artificial Sequence
  Description of Artificial Sequence: Synthetic oligonucleotide
agcuguugaacuguuuaaa

SEQ ID NO: 2664287 - RNA, 19 nt, Artificial Sequence
  Description of Artificial Sequence: Synthetic oligonucleotide
uugagguagccaagcuccu

SEQ ID NO: 2664288 - RNA, 19 nt, Artificial Sequence
  Description of Artificial Sequence: Synthetic oligonucleotide
uguuggaauuccguccaaa

SEQ ID NO: 2664289 - RNA, 19 nt, Artificial Sequence
  Description of Artificial Sequence: Synthetic oligonucleotide
aaguauaccuacagauguu

SEQ ID NO: 2664290 - RNA, 19 nt, Artificial Sequence
  Description of Artificial Sequence: Synthetic oligonucleotide
ggagagaacagagcuguug

SEQ ID NO: 2664291 - RNA, 19 nt, Artificial Sequence
  Description of Artificial Sequence: Synthetic oligonucleotide
ggagaaguccuauggguga

SEQ ID NO: 2664292 - RNA, 19 nt, Artificial Sequence
  Description of Artificial Sequence: Synthetic oligonucleotide
gauuguccaccaucaaacu

SEQ ID NO: 2664293 - RNA, 19 nt, Artificial Sequence
  Description of Artificial Sequence: Synthetic oligonucleotide
acugaacucgggaaaccug

SEQ ID NO: 2664294 - RNA, 19 nt, Artificial Sequence
  Description of Artificial Sequence: Synthetic oligonucleotide
cauccucugguauaggacu

SEQ ID NO: 2664295 - RNA, 19 nt, Artificial Sequence
  Description of Artificial Sequence: Synthetic oligonucleotide
uagccaagcuccugauugu

SEQ ID NO: 2664296 - RNA, 19 nt, Artificial Sequence
  Description of Artificial Sequence: Synthetic oligonucleotide
cuguuuaaauggcuguaaa

SEQ ID NO: 2664297 - RNA, 19 nt, Artificial Sequence
  Description of Artificial Sequence: Synthetic oligonucleotide
gacaagucacggucucuuc

SEQ ID NO: 2664298 - RNA, 19 nt, Artificial Sequence
  Description of Artificial Sequence: Synthetic oligonucleotide
ggaugauaaacagucaacu

SEQ ID NO: 2664299 - RNA, 19 nt, Artificial Sequence
  Description of Artificial Sequence: Synthetic oligonucleotide
auccucugguauaggacuc

SEQ ID NO: 2664300 - RNA, 19 nt, Artificial Sequence
  Description of Artificial Sequence: Synthetic oligonucleotide
uguguuggccuaguuguuu

SEQ ID NO: 2664301 - RNA, 19 nt, Artificial Sequence
  Description of Artificial Sequence: Synthetic oligonucleotide
guccaaauuucaccucuuc

SEQ ID NO: 2664302 - RNA, 19 nt, Artificial Sequence
  Description of Artificial Sequence: Synthetic oligonucleotide
aaaccugagcaggcacuug

SEQ ID NO: 2664303 - RNA, 19 nt, Artificial Sequence
  Description of Artificial Sequence: Synthetic oligonucleotide
ugagguagccaagcuccug

SEQ ID NO: 2664304 - RNA, 19 nt, Artificial Sequence
  Description of Artificial Sequence: Synthetic oligonucleotide
uagccucagaauagauguc

SEQ ID NO: 2664305 - RNA, 19 nt, Artificial Sequence
  Description of Artificial Sequence: Synthetic oligonucleotide
guaaggcaaguccauuuua

SEQ ID NO: 2664306 - RNA, 19 nt, Artificial Sequence
  Description of Artificial Sequence: Synthetic oligonucleotide
agccaagcuccugauuguc

SEQ ID NO: 2664307 - RNA, 19 nt, Artificial Sequence
  Description of Artificial Sequence: Synthetic oligonucleotide
cuccgcuuggacucuguuc

SEQ ID NO: 2664308 - RNA, 19 nt, Artificial Sequence
  Description of Artificial Sequence: Synthetic oligonucleotide
guuuucuugcaagaguggu

SEQ ID NO: 2664309 - RNA, 19 nt, Artificial Sequence
  Description of Artificial Sequence: Synthetic oligonucleotide
ugaacucgggaaaccuguu

SEQ ID NO: 2664310 - RNA, 19 nt, Artificial Sequence
  Description of Artificial Sequence: Synthetic oligonucleotide
acggucucuucugugucag

SEQ ID NO: 2664311 - RNA, 19 nt, Artificial Sequence
  Description of Artificial Sequence: Synthetic oligonucleotide
caggcacuuguaaggcaag

SEQ ID NO: 2664312 - RNA, 19 nt, Artificial Sequence
  Description of Artificial Sequence: Synthetic oligonucleotide
cugaacucgggaaaccugu

SEQ ID NO: 2664313 - RNA, 19 nt, Artificial Sequence
  Description of Artificial Sequence: Synthetic oligonucleotide
cuuuguugcaaaaccuuau

SEQ ID NO: 2664314 - RNA, 19 nt, Artificial Sequence
  Description of Artificial Sequence: Synthetic oligonucleotide
cacuuugcagcuggccagg

SEQ ID NO: 2664315 - RNA, 19 nt, Artificial Sequence
  Description of Artificial Sequence: Synthetic oligonucleotide
caagcuccugauuguccac

SEQ ID NO: 2664316 - RNA, 19 nt, Artificial Sequence
  Description of Artificial Sequence: Synthetic oligonucleotide
guuggaauuccguccaaau

SEQ ID NO: 2664317 - RNA, 19 nt, Artificial Sequence
  Description of Artificial Sequence: Synthetic oligonucleotide
uccguccaaauuucaccuc

SEQ ID NO: 2664318 - RNA, 19 nt, Artificial Sequence
  Description of Artificial Sequence: Synthetic oligonucleotide
gaauuccguccaaauuuca

SEQ ID NO: 2664319 - RNA, 19 nt, Artificial Sequence
  Description of Artificial Sequence: Synthetic oligonucleotide
caaaggaggacaugaugcu

SEQ ID NO: 2664320 - RNA, 19 nt, Artificial Sequence
  Description of Artificial Sequence: Synthetic oligonucleotide
ugggugaaauaggaucgaa

SEQ ID NO: 2664321 - RNA, 19 nt, Artificial Sequence
  Description of Artificial Sequence: Synthetic oligonucleotide
agacaagucacggucucuu

SEQ ID NO: 2664322 - RNA, 19 nt, Artificial Sequence
  Description of Artificial Sequence: Synthetic oligonucleotide
aagaguggucuuggagaca

SEQ ID NO: 2664323 - RNA, 19 nt, Artificial Sequence
  Description of Artificial Sequence: Synthetic oligonucleotide
aggaacugauacucuccaa

SEQ ID NO: 2664324 - RNA, 19 nt, Artificial Sequence
  Description of Artificial Sequence: Synthetic oligonucleotide
uugcaagaguggucuugga

SEQ ID NO: 2664325 - RNA, 19 nt, Artificial Sequence
  Description of Artificial Sequence: Synthetic oligonucleotide
ggaauuccguccaaauuuc

SEQ ID NO: 2664326 - RNA, 19 nt, Artificial Sequence
  Description of Artificial Sequence: Synthetic oligonucleotide
cacaauucauuucauccau

SEQ ID NO: 2664327 - RNA, 19 nt, Artificial Sequence
  Description of Artificial Sequence: Synthetic oligonucleotide
ccauccucugguauaggac

SEQ ID NO: 2664328 - RNA, 19 nt, Artificial Sequence
  Description of Artificial Sequence: Synthetic oligonucleotide
gaaaccuguuuguccugaa

SEQ ID NO: 2664329 - RNA, 19 nt, Artificial Sequence
  Description of Artificial Sequence: Synthetic oligonucleotide
ccacuuugcagcuggccag

SEQ ID NO: 2664330 - RNA, 19 nt, Artificial Sequence
  Description of Artificial Sequence: Synthetic oligonucleotide
uccucugguauaggacucu

SEQ ID NO: 2664331 - RNA, 19 nt, Artificial Sequence
  Description of Artificial Sequence: Synthetic oligonucleotide
ggcuguaaagcaaacugaa

SEQ ID NO: 2664332 - RNA, 19 nt, Artificial Sequence
  Description of Artificial Sequence: Synthetic oligonucleotide
augggugaaauaggaucga

SEQ ID NO: 2664333 - RNA, 19 nt, Artificial Sequence
  Description of Artificial Sequence: Synthetic oligonucleotide
cucgggaaaccuguuuguc

SEQ ID NO: 2664334 - RNA, 19 nt, Artificial Sequence
  Description of Artificial Sequence: Synthetic oligonucleotide
cugguauaggacucugugu

SEQ ID NO: 2664335 - RNA, 19 nt, Artificial Sequence
  Description of Artificial Sequence: Synthetic oligonucleotide
acagucaacuggagacaag

SEQ ID NO: 2664336 - RNA, 19 nt, Artificial Sequence
  Description of Artificial Sequence: Synthetic oligonucleotide
ggagacaagucacggucuc

SEQ ID NO: 2664337 - RNA, 19 nt, Artificial Sequence
  Description of Artificial Sequence: Synthetic oligonucleotide
guccugaaaaguauaccua

SEQ ID NO: 2664338 - RNA, 19 nt, Artificial Sequence
  Description of Artificial Sequence: Synthetic oligonucleotide
cucuuuguugcaaaaccuu

SEQ ID NO: 2664339 - RNA, 19 nt, Artificial Sequence
  Description of Artificial Sequence: Synthetic oligonucleotide
ccugaaaaguauaccuaca

SEQ ID NO: 2664340 - RNA, 19 nt, Artificial Sequence
  Description of Artificial Sequence: Synthetic oligonucleotide
auauuccacuuugcagcug

SEQ ID NO: 2664341 - RNA, 19 nt, Artificial Sequence
  Description of Artificial Sequence: Synthetic oligonucleotide
gucuucaaaggaggacaug

SEQ ID NO: 2664342 - RNA, 19 nt, Artificial Sequence
  Description of Artificial Sequence: Synthetic oligonucleotide
uucuccgcuuggacucugu

SEQ ID NO: 2664343 - RNA, 19 nt, Artificial Sequence
  Description of Artificial Sequence: Synthetic oligonucleotide
ccauuuuauugagguagcc

SEQ ID NO: 2664344 - RNA, 19 nt, Artificial Sequence
  Description of Artificial Sequence: Synthetic oligonucleotide
aggacucuguguuggccua

SEQ ID NO: 2664345 - RNA, 19 nt, Artificial Sequence
  Description of Artificial Sequence: Synthetic oligonucleotide
gagaaguccuaugggugaa

SEQ ID NO: 2664346 - RNA, 19 nt, Artificial Sequence
  Description of Artificial Sequence: Synthetic oligonucleotide
ccucagaauagaugucuuc

SEQ ID NO: 2664347 - RNA, 19 nt, Artificial Sequence
  Description of Artificial Sequence: Synthetic oligonucleotide
agguagccaagcuccugau

SEQ ID NO: 2664348 - RNA, 19 nt, Artificial Sequence
  Description of Artificial Sequence: Synthetic oligonucleotide
cagucaacuggagacaagu

SEQ ID NO: 2664349 - RNA, 19 nt, Artificial Sequence
  Description of Artificial Sequence: Synthetic oligonucleotide
ggacucuguucacaauuca

SEQ ID NO: 2664350 - RNA, 19 nt, Artificial Sequence
  Description of Artificial Sequence: Synthetic oligonucleotide
ucuccgcuuggacucuguu

SEQ ID NO: 2664351 - RNA, 19 nt, Artificial Sequence
  Description of Artificial Sequence: Synthetic oligonucleotide
caagaggaacugauacucu

SEQ ID NO: 2664352 - RNA, 19 nt, Artificial Sequence
  Description of Artificial Sequence: Synthetic oligonucleotide
ccuacagauguuggaauuc

SEQ ID NO: 2664353 - RNA, 19 nt, Artificial Sequence
  Description of Artificial Sequence: Synthetic oligonucleotide
gcuuggacucuguucacaa

SEQ ID NO: 2664354 - RNA, 19 nt, Artificial Sequence
  Description of Artificial Sequence: Synthetic oligonucleotide
aggcacuuguaaggcaagu

SEQ ID NO: 2664355 - RNA, 19 nt, Artificial Sequence
  Description of Artificial Sequence: Synthetic oligonucleotide
ccaagcuccugauugucca

SEQ ID NO: 2664356 - RNA, 19 nt, Artificial Sequence
  Description of Artificial Sequence: Synthetic oligonucleotide
uuucuccgcuuggacucug

SEQ ID NO: 2664357 - RNA, 19 nt, Artificial Sequence
  Description of Artificial Sequence: Synthetic oligonucleotide
cacggucucuucuguguca

SEQ ID NO: 2664358 - RNA, 19 nt, Artificial Sequence
  Description of Artificial Sequence: Synthetic oligonucleotide
gcuguugaacuguuuaaau

SEQ ID NO: 2664359 - RNA, 19 nt, Artificial Sequence
  Description of Artificial Sequence: Synthetic oligonucleotide
ggcacuuguaaggcaaguc

SEQ ID NO: 2664360 - RNA, 19 nt, Artificial Sequence
  Description of Artificial Sequence: Synthetic oligonucleotide
cuucaaaggaggacaugau

SEQ ID NO: 2664361 - RNA, 19 nt, Artificial Sequence
  Description of Artificial Sequence: Synthetic oligonucleotide
gaaguccuaugggugaaau

SEQ ID NO: 2664362 - RNA, 19 nt, Artificial Sequence
  Description of Artificial Sequence: Synthetic oligonucleotide
cucauccuucauguuucuc

SEQ ID NO: 2664363 - RNA, 19 nt, Artificial Sequence
  Description of Artificial Sequence: Synthetic oligonucleotide
uucuugcaagaguggucuu

SEQ ID NO: 2664364 - RNA, 19 nt, Artificial Sequence
  Description of Artificial Sequence: Synthetic oligonucleotide
ggaaaccuguuuguccuga

SEQ ID NO: 2664365 - RNA, 19 nt, Artificial Sequence
  Description of Artificial Sequence: Synthetic oligonucleotide
gaacucgggaaaccuguuu

SEQ ID NO: 2664366 - RNA, 19 nt, Artificial Sequence
  Description of Artificial Sequence: Synthetic oligonucleotide
gucuuggagacaagauaaa

SEQ ID NO: 2664367 - RNA, 19 nt, Artificial Sequence
  Description of Artificial Sequence: Synthetic oligonucleotide
agaaguccuaugggugaaa

SEQ ID NO: 2664368 - RNA, 19 nt, Artificial Sequence
  Description of Artificial Sequence: Synthetic oligonucleotide
guuggccuaguuguuuucu

SEQ ID NO: 2664369 - RNA, 19 nt, Artificial Sequence
  Description of Artificial Sequence: Synthetic oligonucleotide
gucucuucugugucagcgu

SEQ ID NO: 2664370 - RNA, 19 nt, Artificial Sequence
  Description of Artificial Sequence: Synthetic oligonucleotide
gcaggcacuuguaaggcaa

SEQ ID NO: 2664371 - RNA, 19 nt, Artificial Sequence
  Description of Artificial Sequence: Synthetic oligonucleotide
gaguggucuuggagacaag

SEQ ID NO: 2664372 - RNA, 19 nt, Artificial Sequence
  Description of Artificial Sequence: Synthetic oligonucleotide
ccuaguuguuuucuugcaa

SEQ ID NO: 2664373 - RNA, 19 nt, Artificial Sequence
  Description of Artificial Sequence: Synthetic oligonucleotide
gagacaagucacggucucu

SEQ ID NO: 2664374 - RNA, 19 nt, Artificial Sequence
  Description of Artificial Sequence: Synthetic oligonucleotide
guguuggccuaguuguuuu

SEQ ID NO: 2664375 - RNA, 19 nt, Artificial Sequence
  Description of Artificial Sequence: Synthetic oligonucleotide
cucuucugugucagcgucu

SEQ ID NO: 2664376 - RNA, 19 nt, Artificial Sequence
  Description of Artificial Sequence: Synthetic oligonucleotide
ccuuauugauuuaaauauu

SEQ ID NO: 2664377 - RNA, 19 nt, Artificial Sequence
  Description of Artificial Sequence: Synthetic oligonucleotide
cucugguauaggacucugu

SEQ ID NO: 2664378 - RNA, 19 nt, Artificial Sequence
  Description of Artificial Sequence: Synthetic oligonucleotide
ggacucuguguuggccuag

SEQ ID NO: 2664379 - RNA, 19 nt, Artificial Sequence
  Description of Artificial Sequence: Synthetic oligonucleotide
cuuggacucuguucacaau

SEQ ID NO: 2664380 - RNA, 19 nt, Artificial Sequence
  Description of Artificial Sequence: Synthetic oligonucleotide
cuuguaaggcaaguccauu

SEQ ID NO: 2664381 - RNA, 19 nt, Artificial Sequence
  Description of Artificial Sequence: Synthetic oligonucleotide
gcaaaaccuuauugauuua

SEQ ID NO: 2664382 - RNA, 19 nt, Artificial Sequence
  Description of Artificial Sequence: Synthetic oligonucleotide
ccuguuuguccugaaaagu

SEQ ID NO: 2664383 - RNA, 19 nt, Artificial Sequence
  Description of Artificial Sequence: Synthetic oligonucleotide
gacucuguguuggccuagu

SEQ ID NO: 2664384 - RNA, 19 nt, Artificial Sequence
  Description of Artificial Sequence: Synthetic oligonucleotide
gggugaaauaggaucgaau

SEQ ID NO: 2664385 - RNA, 19 nt, Artificial Sequence
  Description of Artificial Sequence: Synthetic oligonucleotide
ccugagcaggcacuuguaa

SEQ ID NO: 2664386 - RNA, 19 nt, Artificial Sequence
  Description of Artificial Sequence: Synthetic oligonucleotide
ccucugguauaggacucug

SEQ ID NO: 2664387 - RNA, 19 nt, Artificial Sequence
  Description of Artificial Sequence: Synthetic oligonucleotide
ccaaaccugagcaggcacu

SEQ ID NO: 2664388 - RNA, 19 nt, Artificial Sequence
  Description of Artificial Sequence: Synthetic oligonucleotide
caaaccugagcaggcacuu

SEQ ID NO: 2664389 - RNA, 19 nt, Artificial Sequence
  Description of Artificial Sequence: Synthetic oligonucleotide
ccuaugggugaaauaggau

SEQ ID NO: 2664390 - RNA, 19 nt, Artificial Sequence
  Description of Artificial Sequence: Synthetic oligonucleotide
guuucuccgcuuggacucu

SEQ ID NO: 2664391 - RNA, 19 nt, Artificial Sequence
  Description of Artificial Sequence: Synthetic oligonucleotide
aggagagaacagagcuguu

SEQ ID NO: 2664392 - RNA, 19 nt, Artificial Sequence
  Description of Artificial Sequence: Synthetic oligonucleotide
cuuugcagcuggccaggau

SEQ ID NO: 2664393 - RNA, 19 nt, Artificial Sequence
  Description of Artificial Sequence: Synthetic oligonucleotide
ccugauuguccaccaucaa

SEQ ID NO: 2664394 - RNA, 19 nt, Artificial Sequence
  Description of Artificial Sequence: Synthetic oligonucleotide
cuguguuggccuaguuguu

SEQ ID NO: 2664395 - RNA, 19 nt, Artificial Sequence
  Description of Artificial Sequence: Synthetic oligonucleotide
ccgcuuggacucuguucac

SEQ ID NO: 2664396 - RNA, 19 nt, Artificial Sequence
  Description of Artificial Sequence: Synthetic oligonucleotide
ggaggacaugaugcucucu

SEQ ID NO: 2664397 - RNA, 19 nt, Artificial Sequence
  Description of Artificial Sequence: Synthetic oligonucleotide
cggucucuucugugucagc

SEQ ID NO: 2664398 - RNA, 19 nt, Artificial Sequence
  Description of Artificial Sequence: Synthetic oligonucleotide
gcuccugauuguccaccau

SEQ ID NO: 2664399 - RNA, 19 nt, Artificial Sequence
  Description of Artificial Sequence: Synthetic oligonucleotide
cgcuuggacucuguucaca

SEQ ID NO: 2664400 - RNA, 19 nt, Artificial Sequence
  Description of Artificial Sequence: Synthetic oligonucleotide
aauaaggagauagacaggc

SEQ ID NO: 2664401 - RNA, 19 nt, Artificial Sequence
  Description of Artificial Sequence: Synthetic oligonucleotide
uuaagaaaagaacaaagcc

SEQ ID NO: 2664402 - RNA, 19 nt, Artificial Sequence
  Description of Artificial Sequence: Synthetic oligonucleotide
agaacaaagccauaaaucg

SEQ ID NO: 2664403 - RNA, 19 nt, Artificial Sequence
  Description of Artificial Sequence: Synthetic oligonucleotide
gauuacaacagcaauaagg

SEQ ID NO: 2664404 - RNA, 19 nt, Artificial Sequence
  Description of Artificial Sequence: Synthetic oligonucleotide
acaaauucaaaguauuuac

SEQ ID NO: 2664405 - RNA, 19 nt, Artificial Sequence
  Description of Artificial Sequence: Synthetic oligonucleotide
acaagauaaaguaugaagc

SEQ ID NO: 2664406 - RNA, 19 nt, Artificial Sequence
  Description of Artificial Sequence: Synthetic oligonucleotide
aagccuaaggaguuuagcc

SEQ ID NO: 2664407 - RNA, 19 nt, Artificial Sequence
  Description of Artificial Sequence: Synthetic oligonucleotide
guuaaauccaaacaagagg

SEQ ID NO: 2664408 - RNA, 19 nt, Artificial Sequence
  Description of Artificial Sequence: Synthetic oligonucleotide
uaaaguaugaagccgaacu

SEQ ID NO: 2664409 - RNA, 19 nt, Artificial Sequence
  Description of Artificial Sequence: Synthetic oligonucleotide
uacaagauaaaguaugaag

SEQ ID NO: 2664410 - RNA, 19 nt, Artificial Sequence
  Description of Artificial Sequence: Synthetic oligonucleotide
uaugaagccgaacugagag

SEQ ID NO: 2664411 - RNA, 19 nt, Artificial Sequence
  Description of Artificial Sequence: Synthetic oligonucleotide
aaacuuguaacuguuuggc

SEQ ID NO: 2664412 - RNA, 19 nt, Artificial Sequence
  Description of Artificial Sequence: Synthetic oligonucleotide
ucaauuuaagaaaucaacu

SEQ ID NO: 2664413 - RNA, 19 nt, Artificial Sequence
  Description of Artificial Sequence: Synthetic oligonucleotide
uuuuauaguauaauguggu

SEQ ID NO: 2664414 - RNA, 19 nt, Artificial Sequence
  Description of Artificial Sequence: Synthetic oligonucleotide
uuguuuacuucacuaaugg

SEQ ID NO: 2664415 - RNA, 19 nt, Artificial Sequence
  Description of Artificial Sequence: Synthetic oligonucleotide
uacaacagcaauaaggaga

SEQ ID NO: 2664416 - RNA, 19 nt, Artificial Sequence
  Description of Artificial Sequence: Synthetic oligonucleotide
uguuaaauccaaacaagag

SEQ ID NO: 2664417 - RNA, 19 nt, Artificial Sequence
  Description of Artificial Sequence: Synthetic oligonucleotide
aacaagaggacauagccga

SEQ ID NO: 2664418 - RNA, 19 nt, Artificial Sequence
  Description of Artificial Sequence: Synthetic oligonucleotide
uauaauuaugcucaaaauu

SEQ ID NO: 2664419 - RNA, 19 nt, Artificial Sequence
  Description of Artificial Sequence: Synthetic oligonucleotide
uuuacaauacuaauugaac

SEQ ID NO: 2664420 - RNA, 19 nt, Artificial Sequence
  Description of Artificial Sequence: Synthetic oligonucleotide
aacagcaauaaggagauag

SEQ ID NO: 2664421 - RNA, 19 nt, Artificial Sequence
  Description of Artificial Sequence: Synthetic oligonucleotide
aguaaguuaagccuaagga

SEQ ID NO: 2664422 - RNA, 19 nt, Artificial Sequence
  Description of Artificial Sequence: Synthetic oligonucleotide
uaaguuaagccuaaggagu

SEQ ID NO: 2664423 - RNA, 19 nt, Artificial Sequence
  Description of Artificial Sequence: Synthetic oligonucleotide
ucugugaucguaugaaugg

SEQ ID NO: 2664424 - RNA, 19 nt, Artificial Sequence
  Description of Artificial Sequence: Synthetic oligonucleotide
aacuguuuggcguuaggac

SEQ ID NO: 2664425 - RNA, 19 nt, Artificial Sequence
  Description of Artificial Sequence: Synthetic oligonucleotide
aauugaacucaauuuaaga

SEQ ID NO: 2664426 - RNA, 19 nt, Artificial Sequence
  Description of Artificial Sequence: Synthetic oligonucleotide
ucauguuaaauccaaacaa

SEQ ID NO: 2664427 - RNA, 19 nt, Artificial Sequence
  Description of Artificial Sequence: Synthetic oligonucleotide
aagauaaaguaugaagccg

SEQ ID NO: 2664428 - RNA, 19 nt, Artificial Sequence
  Description of Artificial Sequence: Synthetic oligonucleotide
guaaguuaagccuaaggag

SEQ ID NO: 2664429 - RNA, 19 nt, Artificial Sequence
  Description of Artificial Sequence: Synthetic oligonucleotide
caaacaagaggacauagcc

SEQ ID NO: 2664430 - RNA, 19 nt, Artificial Sequence
  Description of Artificial Sequence: Synthetic oligonucleotide
guaugaauggaguugagug

SEQ ID NO: 2664431 - RNA, 19 nt, Artificial Sequence
  Description of Artificial Sequence: Synthetic oligonucleotide
cucaauuuaagaaaucaac

SEQ ID NO: 2664432 - RNA, 19 nt, Artificial Sequence
  Description of Artificial Sequence: Synthetic oligonucleotide
uaugaauggaguugagugg

SEQ ID NO: 2664433 - RNA, 19 nt, Artificial Sequence
  Description of Artificial Sequence: Synthetic oligonucleotide
gcaauaaggagauagacag

SEQ ID NO: 2664434 - RNA, 19 nt, Artificial Sequence
  Description of Artificial Sequence: Synthetic oligonucleotide
aaagaacaaagccauaaau

SEQ ID NO: 2664435 - RNA, 19 nt, Artificial Sequence
  Description of Artificial Sequence: Synthetic oligonucleotide
uuacaauacuaauugaacu

SEQ ID NO: 2664436 - RNA, 19 nt, Artificial Sequence
  Description of Artificial Sequence: Synthetic oligonucleotide
uacucaucauguuaaaucc

SEQ ID NO: 2664437 - RNA, 19 nt, Artificial Sequence
  Description of Artificial Sequence: Synthetic oligonucleotide
ugguauuuuauuuauucug

SEQ ID NO: 2664438 - RNA, 19 nt, Artificial Sequence
  Description of Artificial Sequence: Synthetic oligonucleotide
caagauaaaguaugaagcc

SEQ ID NO: 2664439 - RNA, 19 nt, Artificial Sequence
  Description of Artificial Sequence: Synthetic oligonucleotide
aaugggaacgucucucaac

SEQ ID NO: 2664440 - RNA, 19 nt, Artificial Sequence
  Description of Artificial Sequence: Synthetic oligonucleotide
acagucaguauaauuaugc

SEQ ID NO: 2664441 - RNA, 19 nt, Artificial Sequence
  Description of Artificial Sequence: Synthetic oligonucleotide
ucaauacugaguauuaaaa

SEQ ID NO: 2664442 - RNA, 19 nt, Artificial Sequence
  Description of Artificial Sequence: Synthetic oligonucleotide
guauuaaaaggacagucag

SEQ ID NO: 2664443 - RNA, 19 nt, Artificial Sequence
  Description of Artificial Sequence: Synthetic oligonucleotide
aaaguaugaagccgaacug

SEQ ID NO: 2664444 - RNA, 19 nt, Artificial Sequence
  Description of Artificial Sequence: Synthetic oligonucleotide
acuguuuggcguuaggacg

SEQ ID NO: 2664445 - RNA, 19 nt, Artificial Sequence
  Description of Artificial Sequence: Synthetic oligonucleotide
uuugaggccaguaaguuaa

SEQ ID NO: 2664446 - RNA, 19 nt, Artificial Sequence
  Description of Artificial Sequence: Synthetic oligonucleotide
agucaguauaauuaugcuc

SEQ ID NO: 2664447 - RNA, 19 nt, Artificial Sequence
  Description of Artificial Sequence: Synthetic oligonucleotide
uuuguuuacuucacuaaug

SEQ ID NO: 2664448 - RNA, 19 nt, Artificial Sequence
  Description of Artificial Sequence: Synthetic oligonucleotide
ugugguauuuuauuuauuc

SEQ ID NO: 2664449 - RNA, 19 nt, Artificial Sequence
  Description of Artificial Sequence: Synthetic oligonucleotide
uuuacuucacuaaugggaa

SEQ ID NO: 2664450 - RNA, 19 nt, Artificial Sequence
  Description of Artificial Sequence: Synthetic oligonucleotide
cauaaaucgcucuuucugg

SEQ ID NO: 2664451 - RNA, 19 nt, Artificial Sequence
  Description of Artificial Sequence: Synthetic oligonucleotide
auaaaucgcucuuucuggc

SEQ ID NO: 2664452 - RNA, 19 nt, Artificial Sequence
  Description of Artificial Sequence: Synthetic oligonucleotide
uacaauacuaauugaacuc

SEQ ID NO: 2664453 - RNA, 19 nt, Artificial Sequence
  Description of Artificial Sequence: Synthetic oligonucleotide
uuaugcucaaaauuauuca

SEQ ID NO: 2664454 - RNA, 19 nt, Artificial Sequence
  Description of Artificial Sequence: Synthetic oligonucleotide
ugcucaaaauuauucaccc

SEQ ID NO: 2664455 - RNA, 19 nt, Artificial Sequence
  Description of Artificial Sequence: Synthetic oligonucleotide
aacucaauuuaagaaauca

SEQ ID NO: 2664456 - RNA, 19 nt, Artificial Sequence
  Description of Artificial Sequence: Synthetic oligonucleotide
uugaacucaauuuaagaaa

SEQ ID NO: 2664457 - RNA, 19 nt, Artificial Sequence
  Description of Artificial Sequence: Synthetic oligonucleotide
gagauagacaggcaaugcg

SEQ ID NO: 2664458 - RNA, 19 nt, Artificial Sequence
  Description of Artificial Sequence: Synthetic oligonucleotide
ugaacucaauuuaagaaau

SEQ ID NO: 2664459 - RNA, 19 nt, Artificial Sequence
  Description of Artificial Sequence: Synthetic oligonucleotide
aggacguucacacacagcu

SEQ ID NO: 2664460 - RNA, 19 nt, Artificial Sequence
  Description of Artificial Sequence: Synthetic oligonucleotide
gacauagccgauuacaaca

SEQ ID NO: 2664461 - RNA, 19 nt, Artificial Sequence
  Description of Artificial Sequence: Synthetic oligonucleotide
acuaauugaacucaauuua

SEQ ID NO: 2664462 - RNA, 19 nt, Artificial Sequence
  Description of Artificial Sequence: Synthetic oligonucleotide
gaacauuuuguuuacuuca

SEQ ID NO: 2664463 - RNA, 19 nt, Artificial Sequence
  Description of Artificial Sequence: Synthetic oligonucleotide
uuucaugucaauacugagu

SEQ ID NO: 2664464 - RNA, 19 nt, Artificial Sequence
  Description of Artificial Sequence: Synthetic oligonucleotide
caggauucaggaaugaaag

SEQ ID NO: 2664465 - RNA, 19 nt, Artificial Sequence
  Description of Artificial Sequence: Synthetic oligonucleotide
augggaacgucucucaacg

SEQ ID NO: 2664466 - RNA, 19 nt, Artificial Sequence
  Description of Artificial Sequence: Synthetic oligonucleotide
uaugcucaaaauuauucac

SEQ ID NO: 2664467 - RNA, 19 nt, Artificial Sequence
  Description of Artificial Sequence: Synthetic oligonucleotide
uggagaaguacucaucaug

SEQ ID NO: 2664468 - RNA, 19 nt, Artificial Sequence
  Description of Artificial Sequence: Synthetic oligonucleotide
auaauuaugcucaaaauua

SEQ ID NO: 2664469 - RNA, 19 nt, Artificial Sequence
  Description of Artificial Sequence: Synthetic oligonucleotide
uuuaagaaaucaacuucca

SEQ ID NO: 2664470 - RNA, 19 nt, Artificial Sequence
  Description of Artificial Sequence: Synthetic oligonucleotide
aaacaagaggacauagccg

SEQ ID NO: 2664471 - RNA, 19 nt, Artificial Sequence
  Description of Artificial Sequence: Synthetic oligonucleotide
caaacuuguaacuguuugg

SEQ ID NO: 2664472 - RNA, 19 nt, Artificial Sequence
  Description of Artificial Sequence: Synthetic oligonucleotide
uacuucacuaaugggaacg

SEQ ID NO: 2664473 - RNA, 19 nt, Artificial Sequence
  Description of Artificial Sequence: Synthetic oligonucleotide
uauaaugugguauuuuauu

SEQ ID NO: 2664474 - RNA, 19 nt, Artificial Sequence
  Description of Artificial Sequence: Synthetic oligonucleotide
uacuaauugaacucaauuu

SEQ ID NO: 2664475 - RNA, 19 nt, Artificial Sequence
  Description of Artificial Sequence: Synthetic oligonucleotide
gucaguauaauuaugcuca

SEQ ID NO: 2664476 - RNA, 19 nt, Artificial Sequence
  Description of Artificial Sequence: Synthetic oligonucleotide
aacauuuuguuuacuucac

SEQ ID NO: 2664477 - RNA, 19 nt, Artificial Sequence
  Description of Artificial Sequence: Synthetic oligonucleotide
aaugcgaccgcccaguauu

SEQ ID NO: 2664478 - RNA, 19 nt, Artificial Sequence
  Description of Artificial Sequence: Synthetic oligonucleotide
uauaguauaaugugguauu

SEQ ID NO: 2664479 - RNA, 19 nt, Artificial Sequence
  Description of Artificial Sequence: Synthetic oligonucleotide
acuuguaacuguuuggcgu

SEQ ID NO: 2664480 - RNA, 19 nt, Artificial Sequence
  Description of Artificial Sequence: Synthetic oligonucleotide
aaggaguuuagccaggauu

SEQ ID NO: 2664481 - RNA, 19 nt, Artificial Sequence
  Description of Artificial Sequence: Synthetic oligonucleotide
aggaagaacauuuuguuua

SEQ ID NO: 2664482 - RNA, 19 nt, Artificial Sequence
  Description of Artificial Sequence: Synthetic oligonucleotide
uaaggagauagacaggcaa

SEQ ID NO: 2664483 - RNA, 19 nt, Artificial Sequence
  Description of Artificial Sequence: Synthetic oligonucleotide
uagacaggcaaugcgaccg

SEQ ID NO: 2664484 - RNA, 19 nt, Artificial Sequence
  Description of Artificial Sequence: Synthetic oligonucleotide
caucauguuaaauccaaac

SEQ ID NO: 2664485 - RNA, 19 nt, Artificial Sequence
  Description of Artificial Sequence: Synthetic oligonucleotide
gauggcgucuuccugguag

SEQ ID NO: 2664486 - RNA, 19 nt, Artificial Sequence
  Description of Artificial Sequence: Synthetic oligonucleotide
ugugaucguaugaauggag

SEQ ID NO: 2664487 - RNA, 19 nt, Artificial Sequence
  Description of Artificial Sequence: Synthetic oligonucleotide
auuaaaaggacagucagua

SEQ ID NO: 2664488 - RNA, 19 nt, Artificial Sequence
  Description of Artificial Sequence: Synthetic oligonucleotide
aguggagaaguacucauca

SEQ ID NO: 2664489 - RNA, 19 nt, Artificial Sequence
  Description of Artificial Sequence: Synthetic oligonucleotide
guacucaucauguuaaauc

SEQ ID NO: 2664490 - RNA, 19 nt, Artificial Sequence
  Description of Artificial Sequence: Synthetic oligonucleotide
gaggccaguaaguuaagcc

SEQ ID NO: 2664491 - RNA, 19 nt, Artificial Sequence
  Description of Artificial Sequence: Synthetic oligonucleotide
aggauucaggaaugaaagc

SEQ ID NO: 2664492 - RNA, 19 nt, Artificial Sequence
  Description of Artificial Sequence: Synthetic oligonucleotide
guuuacuucacuaauggga

SEQ ID NO: 2664493 - RNA, 19 nt, Artificial Sequence
  Description of Artificial Sequence: Synthetic oligonucleotide
ucucucaacgcugggaugg

SEQ ID NO: 2664494 - RNA, 19 nt, Artificial Sequence
  Description of Artificial Sequence: Synthetic oligonucleotide
agcauaguuaucugugauc

SEQ ID NO: 2664495 - RNA, 19 nt, Artificial Sequence
  Description of Artificial Sequence: Synthetic oligonucleotide
uauuuacaauacuaauuga

SEQ ID NO: 2664496 - RNA, 19 nt, Artificial Sequence
  Description of Artificial Sequence: Synthetic oligonucleotide
aauggaguugaguggagaa

SEQ ID NO: 2664497 - RNA, 19 nt, Artificial Sequence
  Description of Artificial Sequence: Synthetic oligonucleotide
uaauuaugcucaaaauuau

SEQ ID NO: 2664498 - RNA, 19 nt, Artificial Sequence
  Description of Artificial Sequence: Synthetic oligonucleotide
augcucaaaauuauucacc

SEQ ID NO: 2664499 - RNA, 19 nt, Artificial Sequence
  Description of Artificial Sequence: Synthetic oligonucleotide
aagcccauacaagauaaag

SEQ ID NO: 2664500 - RNA, 19 nt, Artificial Sequence
  Description of Artificial Sequence: Synthetic oligonucleotide
aguauaaugugguauuuua

SEQ ID NO: 2664501 - RNA, 19 nt, Artificial Sequence
  Description of Artificial Sequence: Synthetic oligonucleotide
auaaugugguauuuuauuu

SEQ ID NO: 2664502 - RNA, 19 nt, Artificial Sequence
  Description of Artificial Sequence: Synthetic oligonucleotide
aggaguuuagccaggauuc

SEQ ID NO: 2664503 - RNA, 19 nt, Artificial Sequence
  Description of Artificial Sequence: Synthetic oligonucleotide
auacuaauugaacucaauu

SEQ ID NO: 2664504 - RNA, 19 nt, Artificial Sequence
  Description of Artificial Sequence: Synthetic oligonucleotide
gaguauuaaaaggacaguc

SEQ ID NO: 2664505 - RNA, 19 nt, Artificial Sequence
  Description of Artificial Sequence: Synthetic oligonucleotide
aaagccauaaaucgcucuu

SEQ ID NO: 2664506 - RNA, 19 nt, Artificial Sequence
  Description of Artificial Sequence: Synthetic oligonucleotide
gagagcuuaagaaaagaac

SEQ ID NO: 2664507 - RNA, 19 nt, Artificial Sequence
  Description of Artificial Sequence: Synthetic oligonucleotide
gcauaguuaucugugaucg

SEQ ID NO: 2664508 - RNA, 19 nt, Artificial Sequence
  Description of Artificial Sequence: Synthetic oligonucleotide
gaaugaaagcccauacaag

SEQ ID NO: 2664509 - RNA, 19 nt, Artificial Sequence
  Description of Artificial Sequence: Synthetic oligonucleotide
auuuacaauacuaauugaa

SEQ ID NO: 2664510 - RNA, 19 nt, Artificial Sequence
  Description of Artificial Sequence: Synthetic oligonucleotide
uuagcauaguuaucuguga

SEQ ID NO: 2664511 - RNA, 19 nt, Artificial Sequence
  Description of Artificial Sequence: Synthetic oligonucleotide
uuaggacguucacacacag

SEQ ID NO: 2664512 - RNA, 19 nt, Artificial Sequence
  Description of Artificial Sequence: Synthetic oligonucleotide
aaguaugaagccgaacuga

SEQ ID NO: 2664513 - RNA, 19 nt, Artificial Sequence
  Description of Artificial Sequence: Synthetic oligonucleotide
aauccaaacaagaggacau

SEQ ID NO: 2664514 - RNA, 19 nt, Artificial Sequence
  Description of Artificial Sequence: Synthetic oligonucleotide
uuaucugugaucguaugaa

SEQ ID NO: 2664515 - RNA, 19 nt, Artificial Sequence
  Description of Artificial Sequence: Synthetic oligonucleotide
gaucguaugaauggaguug

SEQ ID NO: 2664516 - RNA, 19 nt, Artificial Sequence
  Description of Artificial Sequence: Synthetic oligonucleotide
caguaaguuaagccuaagg

SEQ ID NO: 2664517 - RNA, 19 nt, Artificial Sequence
  Description of Artificial Sequence: Synthetic oligonucleotide
aguauuaaaaggacaguca

SEQ ID NO: 2664518 - RNA, 19 nt, Artificial Sequence
  Description of Artificial Sequence: Synthetic oligonucleotide
ugaagccgaacugagagcu

SEQ ID NO: 2664519 - RNA, 19 nt, Artificial Sequence
  Description of Artificial Sequence: Synthetic oligonucleotide
agaaguacucaucauguua

SEQ ID NO: 2664520 - RNA, 19 nt, Artificial Sequence
  Description of Artificial Sequence: Synthetic oligonucleotide
aguauuuacaauacuaauu

SEQ ID NO: 2664521 - RNA, 19 nt, Artificial Sequence
  Description of Artificial Sequence: Synthetic oligonucleotide
acaauacuaauugaacuca

SEQ ID NO: 2664522 - RNA, 19 nt, Artificial Sequence
  Description of Artificial Sequence: Synthetic oligonucleotide
aaacacaaauucaaaguau

SEQ ID NO: 2664523 - RNA, 19 nt, Artificial Sequence
  Description of Artificial Sequence: Synthetic oligonucleotide
augaagccgaacugagagc

SEQ ID NO: 2664524 - RNA, 19 nt, Artificial Sequence
  Description of Artificial Sequence: Synthetic oligonucleotide
gacguucacacacagcuca

SEQ ID NO: 2664525 - RNA, 19 nt, Artificial Sequence
  Description of Artificial Sequence: Synthetic oligonucleotide
acagcucaguucugggugc

SEQ ID NO: 2664526 - RNA, 19 nt, Artificial Sequence
  Description of Artificial Sequence: Synthetic oligonucleotide
uuuggcguuaggacguuca

SEQ ID NO: 2664527 - RNA, 19 nt, Artificial Sequence
  Description of Artificial Sequence: Synthetic oligonucleotide
ggauucaggaaugaaagcc

SEQ ID NO: 2664528 - RNA, 19 nt, Artificial Sequence
  Description of Artificial Sequence: Synthetic oligonucleotide
aguuuuccaccaucuuccc

SEQ ID NO: 2664529 - RNA, 19 nt, Artificial Sequence
  Description of Artificial Sequence: Synthetic oligonucleotide
uccaaacaagaggacauag

SEQ ID NO: 2664530 - RNA, 19 nt, Artificial Sequence
  Description of Artificial Sequence: Synthetic oligonucleotide
aacugagagcuuaagaaaa

SEQ ID NO: 2664531 - RNA, 19 nt, Artificial Sequence
  Description of Artificial Sequence: Synthetic oligonucleotide
uucaccccaaacuuguaac

SEQ ID NO: 2664532 - RNA, 19 nt, Artificial Sequence
  Description of Artificial Sequence: Synthetic oligonucleotide
uuucuggcaauggcgacgg

SEQ ID NO: 2664533 - RNA, 19 nt, Artificial Sequence
  Description of Artificial Sequence: Synthetic oligonucleotide
aggccaguaaguuaagccu

SEQ ID NO: 2664534 - RNA, 19 nt, Artificial Sequence
  Description of Artificial Sequence: Synthetic oligonucleotide
uuuauaguauaauguggua

SEQ ID NO: 2664535 - RNA, 19 nt, Artificial Sequence
  Description of Artificial Sequence: Synthetic oligonucleotide
ugaaagcccauacaagaua

SEQ ID NO: 2664536 - RNA, 19 nt, Artificial Sequence
  Description of Artificial Sequence: Synthetic oligonucleotide
ccauacaagauaaaguaug

SEQ ID NO: 2664537 - RNA, 19 nt, Artificial Sequence
  Description of Artificial Sequence: Synthetic oligonucleotide
uuaagccuaaggaguuuag

SEQ ID NO: 2664538 - RNA, 19 nt, Artificial Sequence
  Description of Artificial Sequence: Synthetic oligonucleotide
aaaucgcucuuucuggcaa

SEQ ID NO: 2664539 - RNA, 19 nt, Artificial Sequence
  Description of Artificial Sequence: Synthetic oligonucleotide
aacacaaauucaaaguauu

SEQ ID NO: 2664540 - RNA, 19 nt, Artificial Sequence
  Description of Artificial Sequence: Synthetic oligonucleotide
aaaucaacuuccaugcuuu

SEQ ID NO: 2664541 - RNA, 19 nt, Artificial Sequence
  Description of Artificial Sequence: Synthetic oligonucleotide
agauaaaguaugaagccga

SEQ ID NO: 2664542 - RNA, 19 nt, Artificial Sequence
  Description of Artificial Sequence: Synthetic oligonucleotide
cauacaagauaaaguauga

SEQ ID NO: 2664543 - RNA, 19 nt, Artificial Sequence
  Description of Artificial Sequence: Synthetic oligonucleotide
agccauaaaucgcucuuuc

SEQ ID NO: 2664544 - RNA, 19 nt, Artificial Sequence
  Description of Artificial Sequence: Synthetic oligonucleotide
gaacugagagcuuaagaaa

SEQ ID NO: 2664545 - RNA, 19 nt, Artificial Sequence
  Description of Artificial Sequence: Synthetic oligonucleotide
caauaaggagauagacagg

SEQ ID NO: 2664546 - RNA, 19 nt, Artificial Sequence
  Description of Artificial Sequence: Synthetic oligonucleotide
cuaauugaacucaauuuaa

SEQ ID NO: 2664547 - RNA, 19 nt, Artificial Sequence
  Description of Artificial Sequence: Synthetic oligonucleotide
ucacuaaugggaacgucuc

SEQ ID NO: 2664548 - RNA, 19 nt, Artificial Sequence
  Description of Artificial Sequence: Synthetic oligonucleotide
aguuuagccaggauucagg

SEQ ID NO: 2664549 - RNA, 19 nt, Artificial Sequence
  Description of Artificial Sequence: Synthetic oligonucleotide
gaaguacucaucauguuaa

SEQ ID NO: 2664550 - RNA, 19 nt, Artificial Sequence
  Description of Artificial Sequence: Synthetic oligonucleotide
ggaaugaaagcccauacaa

SEQ ID NO: 2664551 - RNA, 19 nt, Artificial Sequence
  Description of Artificial Sequence: Synthetic oligonucleotide
uggaguugaguggagaagu

SEQ ID NO: 2664552 - RNA, 19 nt, Artificial Sequence
  Description of Artificial Sequence: Synthetic oligonucleotide
auguuaaauccaaacaaga

SEQ ID NO: 2664553 - RNA, 19 nt, Artificial Sequence
  Description of Artificial Sequence: Synthetic oligonucleotide
uaacuguuuggcguuagga

SEQ ID NO: 2664554 - RNA, 19 nt, Artificial Sequence
  Description of Artificial Sequence: Synthetic oligonucleotide
auuauucaccccaaacuug

SEQ ID NO: 2664555 - RNA, 19 nt, Artificial Sequence
  Description of Artificial Sequence: Synthetic oligonucleotide
aguaugaagccgaacugag

SEQ ID NO: 2664556 - RNA, 19 nt, Artificial Sequence
  Description of Artificial Sequence: Synthetic oligonucleotide
aggaaugaaagcccauaca

SEQ ID NO: 2664557 - RNA, 19 nt, Artificial Sequence
  Description of Artificial Sequence: Synthetic oligonucleotide
aguuaucugugaucguaug

SEQ ID NO: 2664558 - RNA, 19 nt, Artificial Sequence
  Description of Artificial Sequence: Synthetic oligonucleotide
augaauggaguugagugga

SEQ ID NO: 2664559 - RNA, 19 nt, Artificial Sequence
  Description of Artificial Sequence: Synthetic oligonucleotide
gauagacaggcaaugcgac

SEQ ID NO: 2664560 - RNA, 19 nt, Artificial Sequence
  Description of Artificial Sequence: Synthetic oligonucleotide
ugaguggagaaguacucau

SEQ ID NO: 2664561 - RNA, 19 nt, Artificial Sequence
  Description of Artificial Sequence: Synthetic oligonucleotide
ggagcuucaaggaagaaca

SEQ ID NO: 2664562 - RNA, 19 nt, Artificial Sequence
  Description of Artificial Sequence: Synthetic oligonucleotide
aauacuaauugaacucaau

SEQ ID NO: 2664563 - RNA, 19 nt, Artificial Sequence
  Description of Artificial Sequence: Synthetic oligonucleotide
cuuucuggcaauggcgacg

SEQ ID NO: 2664564 - RNA, 19 nt, Artificial Sequence
  Description of Artificial Sequence: Synthetic oligonucleotide
cacagcucaguucugggug

SEQ ID NO: 2664565 - RNA, 19 nt, Artificial Sequence
  Description of Artificial Sequence: Synthetic oligonucleotide
uaagccuaaggaguuuagc

SEQ ID NO: 2664566 - RNA, 19 nt, Artificial Sequence
  Description of Artificial Sequence: Synthetic oligonucleotide
cauuuuguuuacuucacua

SEQ ID NO: 2664567 - RNA, 19 nt, Artificial Sequence
  Description of Artificial Sequence: Synthetic oligonucleotide
ugaauggaguugaguggag

SEQ ID NO: 2664568 - RNA, 19 nt, Artificial Sequence
  Description of Artificial Sequence: Synthetic oligonucleotide
uagcauaguuaucugugau

SEQ ID NO: 2664569 - RNA, 19 nt, Artificial Sequence
  Description of Artificial Sequence: Synthetic oligonucleotide
uggagcuucaaggaagaac

SEQ ID NO: 2664570 - RNA, 19 nt, Artificial Sequence
  Description of Artificial Sequence: Synthetic oligonucleotide
ugaucguaugaauggaguu

SEQ ID NO: 2664571 - RNA, 19 nt, Artificial Sequence
  Description of Artificial Sequence: Synthetic oligonucleotide
ggcguuaggacguucacac

SEQ ID NO: 2664572 - RNA, 19 nt, Artificial Sequence
  Description of Artificial Sequence: Synthetic oligonucleotide
aucguaugaauggaguuga

SEQ ID NO: 2664573 - RNA, 19 nt, Artificial Sequence
  Description of Artificial Sequence: Synthetic oligonucleotide
uaguuaucugugaucguau

SEQ ID NO: 2664574 - RNA, 19 nt, Artificial Sequence
  Description of Artificial Sequence: Synthetic oligonucleotide
gaaagcccauacaagauaa

SEQ ID NO: 2664575 - RNA, 19 nt, Artificial Sequence
  Description of Artificial Sequence: Synthetic oligonucleotide
uuuugaggccaguaaguua

SEQ ID NO: 2664576 - RNA, 19 nt, Artificial Sequence
  Description of Artificial Sequence: Synthetic oligonucleotide
acauuuuguuuacuucacu

SEQ ID NO: 2664577 - RNA, 19 nt, Artificial Sequence
  Description of Artificial Sequence: Synthetic oligonucleotide
auaguuaucugugaucgua

SEQ ID NO: 2664578 - RNA, 19 nt, Artificial Sequence
  Description of Artificial Sequence: Synthetic oligonucleotide
acugaguauuaaaaggaca

SEQ ID NO: 2664579 - RNA, 19 nt, Artificial Sequence
  Description of Artificial Sequence: Synthetic oligonucleotide
aauggcgacggugaguuuu

SEQ ID NO: 2664580 - RNA, 19 nt, Artificial Sequence
  Description of Artificial Sequence: Synthetic oligonucleotide
gaggacauagccgauuaca

SEQ ID NO: 2664581 - RNA, 19 nt, Artificial Sequence
  Description of Artificial Sequence: Synthetic oligonucleotide
aguugaguggagaaguacu

SEQ ID NO: 2664582 - RNA, 19 nt, Artificial Sequence
  Description of Artificial Sequence: Synthetic oligonucleotide
ucaucauguuaaauccaaa

SEQ ID NO: 2664583 - RNA, 19 nt, Artificial Sequence
  Description of Artificial Sequence: Synthetic oligonucleotide
uuaaaaggacagucaguau

SEQ ID NO: 2664584 - RNA, 19 nt, Artificial Sequence
  Description of Artificial Sequence: Synthetic oligonucleotide
uucacacacagcucaguuc

SEQ ID NO: 2664585 - RNA, 19 nt, Artificial Sequence
  Description of Artificial Sequence: Synthetic oligonucleotide
aucugugaucguaugaaug

SEQ ID NO: 2664586 - RNA, 19 nt, Artificial Sequence
  Description of Artificial Sequence: Synthetic oligonucleotide
aacgucucucaacgcuggg

SEQ ID NO: 2664587 - RNA, 19 nt, Artificial Sequence
  Description of Artificial Sequence: Synthetic oligonucleotide
ccauaaaucgcucuuucug

SEQ ID NO: 2664588 - RNA, 19 nt, Artificial Sequence
  Description of Artificial Sequence: Synthetic oligonucleotide
guuuagccaggauucagga

SEQ ID NO: 2664589 - RNA, 19 nt, Artificial Sequence
  Description of Artificial Sequence: Synthetic oligonucleotide
guaacuguuuggcguuagg

SEQ ID NO: 2664590 - RNA, 19 nt, Artificial Sequence
  Description of Artificial Sequence: Synthetic oligonucleotide
agacaggcaaugcgaccgc

SEQ ID NO: 2664591 - RNA, 19 nt, Artificial Sequence
  Description of Artificial Sequence: Synthetic oligonucleotide
auagccgauuacaacagca

SEQ ID NO: 2664592 - RNA, 19 nt, Artificial Sequence
  Description of Artificial Sequence: Synthetic oligonucleotide
uagccgauuacaacagcaa

SEQ ID NO: 2664593 - RNA, 19 nt, Artificial Sequence
  Description of Artificial Sequence: Synthetic oligonucleotide
uugaguggagaaguacuca

SEQ ID NO: 2664594 - RNA, 19 nt, Artificial Sequence
  Description of Artificial Sequence: Synthetic oligonucleotide
caauuuaagaaaucaacuu

SEQ ID NO: 2664595 - RNA, 19 nt, Artificial Sequence
  Description of Artificial Sequence: Synthetic oligonucleotide
aggagauagacaggcaaug

SEQ ID NO: 2664596 - RNA, 19 nt, Artificial Sequence
  Description of Artificial Sequence: Synthetic oligonucleotide
gacagucaguauaauuaug

SEQ ID NO: 2664597 - RNA, 19 nt, Artificial Sequence
  Description of Artificial Sequence: Synthetic oligonucleotide
auucaccccaaacuuguaa

SEQ ID NO: 2664598 - RNA, 19 nt, Artificial Sequence
  Description of Artificial Sequence: Synthetic oligonucleotide
gaaaucaacuuccaugcuu

SEQ ID NO: 2664599 - RNA, 19 nt, Artificial Sequence
  Description of Artificial Sequence: Synthetic oligonucleotide
gaacgucucucaacgcugg

SEQ ID NO: 2664600 - RNA, 19 nt, Artificial Sequence
  Description of Artificial Sequence: Synthetic oligonucleotide
gaguuuagccaggauucag

SEQ ID NO: 2664601 - RNA, 19 nt, Artificial Sequence
  Description of Artificial Sequence: Synthetic oligonucleotide
gacggugaguuuuccacca

SEQ ID NO: 2664602 - RNA, 19 nt, Artificial Sequence
  Description of Artificial Sequence: Synthetic oligonucleotide
agaaaucaacuuccaugcu

SEQ ID NO: 2664603 - RNA, 19 nt, Artificial Sequence
  Description of Artificial Sequence: Synthetic oligonucleotide
aaggagauagacaggcaau

SEQ ID NO: 2664604 - RNA, 19 nt, Artificial Sequence
  Description of Artificial Sequence: Synthetic oligonucleotide
acugagagcuuaagaaaag

SEQ ID NO: 2664605 - RNA, 19 nt, Artificial Sequence
  Description of Artificial Sequence: Synthetic oligonucleotide
agcuuaagaaaagaacaaa

SEQ ID NO: 2664606 - RNA, 19 nt, Artificial Sequence
  Description of Artificial Sequence: Synthetic oligonucleotide
uaucugugaucguaugaau

SEQ ID NO: 2664607 - RNA, 19 nt, Artificial Sequence
  Description of Artificial Sequence: Synthetic oligonucleotide
uuuagccaggauucaggaa

SEQ ID NO: 2664608 - RNA, 19 nt, Artificial Sequence
  Description of Artificial Sequence: Synthetic oligonucleotide
cacacagcucaguucuggg

SEQ ID NO: 2664609 - RNA, 19 nt, Artificial Sequence
  Description of Artificial Sequence: Synthetic oligonucleotide
acauagccgauuacaacag

SEQ ID NO: 2664610 - RNA, 19 nt, Artificial Sequence
  Description of Artificial Sequence: Synthetic oligonucleotide
uuacuucacuaaugggaac

SEQ ID NO: 2664611 - RNA, 19 nt, Artificial Sequence
  Description of Artificial Sequence: Synthetic oligonucleotide
aaguacucaucauguuaaa

SEQ ID NO: 2664612 - RNA, 19 nt, Artificial Sequence
  Description of Artificial Sequence: Synthetic oligonucleotide
ccaaacuuguaacuguuug

SEQ ID NO: 2664613 - RNA, 19 nt, Artificial Sequence
  Description of Artificial Sequence: Synthetic oligonucleotide
gagcuuaagaaaagaacaa

SEQ ID NO: 2664614 - RNA, 19 nt, Artificial Sequence
  Description of Artificial Sequence: Synthetic oligonucleotide
acucaauuuaagaaaucaa

SEQ ID NO: 2664615 - RNA, 19 nt, Artificial Sequence
  Description of Artificial Sequence: Synthetic oligonucleotide
uguaacuguuuggcguuag

SEQ ID NO: 2664616 - RNA, 19 nt, Artificial Sequence
  Description of Artificial Sequence: Synthetic oligonucleotide
uaaugggaacgucucucaa

SEQ ID NO: 2664617 - RNA, 19 nt, Artificial Sequence
  Description of Artificial Sequence: Synthetic oligonucleotide
ggaagaacauuuuguuuac

SEQ ID NO: 2664618 - RNA, 19 nt, Artificial Sequence
  Description of Artificial Sequence: Synthetic oligonucleotide
guauaauuaugcucaaaau

SEQ ID NO: 2664619 - RNA, 19 nt, Artificial Sequence
  Description of Artificial Sequence: Synthetic oligonucleotide
cucuuucuggcaauggcga

SEQ ID NO: 2664620 - RNA, 19 nt, Artificial Sequence
  Description of Artificial Sequence: Synthetic oligonucleotide
aaguuaagccuaaggaguu

SEQ ID NO: 2664621 - RNA, 19 nt, Artificial Sequence
  Description of Artificial Sequence: Synthetic oligonucleotide
agcccauacaagauaaagu

SEQ ID NO: 2664622 - RNA, 19 nt, Artificial Sequence
  Description of Artificial Sequence: Synthetic oligonucleotide
auggaguugaguggagaag

SEQ ID NO: 2664623 - RNA, 19 nt, Artificial Sequence
  Description of Artificial Sequence: Synthetic oligonucleotide
ucaggaaugaaagcccaua

SEQ ID NO: 2664624 - RNA, 19 nt, Artificial Sequence
  Description of Artificial Sequence: Synthetic oligonucleotide
ucguaugaauggaguugag

SEQ ID NO: 2664625 - RNA, 19 nt, Artificial Sequence
  Description of Artificial Sequence: Synthetic oligonucleotide
ugucaauacugaguauuaa

SEQ ID NO: 2664626 - RNA, 19 nt, Artificial Sequence
  Description of Artificial Sequence: Synthetic oligonucleotide
gaguugaguggagaaguac

SEQ ID NO: 2664627 - RNA, 19 nt, Artificial Sequence
  Description of Artificial Sequence: Synthetic oligonucleotide
cuaaugggaacgucucuca

SEQ ID NO: 2664628 - RNA, 19 nt, Artificial Sequence
  Description of Artificial Sequence: Synthetic oligonucleotide
uaggacguucacacacagc

SEQ ID NO: 2664629 - RNA, 19 nt, Artificial Sequence
  Description of Artificial Sequence: Synthetic oligonucleotide
agccgauuacaacagcaau

SEQ ID NO: 2664630 - RNA, 19 nt, Artificial Sequence
  Description of Artificial Sequence: Synthetic oligonucleotide
gcccauacaagauaaagua

SEQ ID NO: 2664631 - RNA, 19 nt, Artificial Sequence
  Description of Artificial Sequence: Synthetic oligonucleotide
gcucuuucuggcaauggcg

SEQ ID NO: 2664632 - RNA, 19 nt, Artificial Sequence
  Description of Artificial Sequence: Synthetic oligonucleotide
cauagccgauuacaacagc

SEQ ID NO: 2664633 - RNA, 19 nt, Artificial Sequence
  Description of Artificial Sequence: Synthetic oligonucleotide
uccugguaguucuuccacu

SEQ ID NO: 2664634 - RNA, 19 nt, Artificial Sequence
  Description of Artificial Sequence: Synthetic oligonucleotide
auacaagauaaaguaugaa

SEQ ID NO: 2664635 - RNA, 19 nt, Artificial Sequence
  Description of Artificial Sequence: Synthetic oligonucleotide
aaucgcucuuucuggcaau

SEQ ID NO: 2664636 - RNA, 19 nt, Artificial Sequence
  Description of Artificial Sequence: Synthetic oligonucleotide
ccaaacaagaggacauagc

SEQ ID NO: 2664637 - RNA, 19 nt, Artificial Sequence
  Description of Artificial Sequence: Synthetic oligonucleotide
acaaagccauaaaucgcuc

SEQ ID NO: 2664638 - RNA, 19 nt, Artificial Sequence
  Description of Artificial Sequence: Synthetic oligonucleotide
acaggcaaugcgaccgccc

SEQ ID NO: 2664639 - RNA, 19 nt, Artificial Sequence
  Description of Artificial Sequence: Synthetic oligonucleotide
uaguucuuccacuguuggu

SEQ ID NO: 2664640 - RNA, 19 nt, Artificial Sequence
  Description of Artificial Sequence: Synthetic oligonucleotide
aguacucaucauguuaaau

SEQ ID NO: 2664641 - RNA, 19 nt, Artificial Sequence
  Description of Artificial Sequence: Synthetic oligonucleotide
uaguauaaugugguauuuu

SEQ ID NO: 2664642 - RNA, 19 nt, Artificial Sequence
  Description of Artificial Sequence: Synthetic oligonucleotide
uucaggaaugaaagcccau

SEQ ID NO: 2664643 - RNA, 19 nt, Artificial Sequence
  Description of Artificial Sequence: Synthetic oligonucleotide
gggugcuaagcucuggagc

SEQ ID NO: 2664644 - RNA, 19 nt, Artificial Sequence
  Description of Artificial Sequence: Synthetic oligonucleotide
gaacucaauuuaagaaauc

SEQ ID NO: 2664645 - RNA, 19 nt, Artificial Sequence
  Description of Artificial Sequence: Synthetic oligonucleotide
uuggcguuaggacguucac

SEQ ID NO: 2664646 - RNA, 19 nt, Artificial Sequence
  Description of Artificial Sequence: Synthetic oligonucleotide
gauaaaguaugaagccgaa

SEQ ID NO: 2664647 - RNA, 19 nt, Artificial Sequence
  Description of Artificial Sequence: Synthetic oligonucleotide
uugaggccaguaaguuaag

SEQ ID NO: 2664648 - RNA, 19 nt, Artificial Sequence
  Description of Artificial Sequence: Synthetic oligonucleotide
auaguauaaugugguauuu

SEQ ID NO: 2664649 - RNA, 19 nt, Artificial Sequence
  Description of Artificial Sequence: Synthetic oligonucleotide
caauacuaauugaacucaa

SEQ ID NO: 2664650 - RNA, 19 nt, Artificial Sequence
  Description of Artificial Sequence: Synthetic oligonucleotide
gaauggaguugaguggaga

SEQ ID NO: 2664651 - RNA, 19 nt, Artificial Sequence
  Description of Artificial Sequence: Synthetic oligonucleotide
ggacauagccgauuacaac

SEQ ID NO: 2664652 - RNA, 19 nt, Artificial Sequence
  Description of Artificial Sequence: Synthetic oligonucleotide
ucucaacgcugggauggcg

SEQ ID NO: 2664653 - RNA, 19 nt, Artificial Sequence
  Description of Artificial Sequence: Synthetic oligonucleotide
augaaagcccauacaagau

SEQ ID NO: 2664654 - RNA, 19 nt, Artificial Sequence
  Description of Artificial Sequence: Synthetic oligonucleotide
aagccgaacugagagcuua

SEQ ID NO: 2664655 - RNA, 19 nt, Artificial Sequence
  Description of Artificial Sequence: Synthetic oligonucleotide
gcucaaaauuauucacccc

SEQ ID NO: 2664656 - RNA, 19 nt, Artificial Sequence
  Description of Artificial Sequence: Synthetic oligonucleotide
ucaacgcugggauggcguc

SEQ ID NO: 2664657 - RNA, 19 nt, Artificial Sequence
  Description of Artificial Sequence: Synthetic oligonucleotide
acuucacuaaugggaacgu

SEQ ID NO: 2664658 - RNA, 19 nt, Artificial Sequence
  Description of Artificial Sequence: Synthetic oligonucleotide
uucugggugcuaagcucug

SEQ ID NO: 2664659 - RNA, 19 nt, Artificial Sequence
  Description of Artificial Sequence: Synthetic oligonucleotide
acucaucauguuaaaucca

SEQ ID NO: 2664660 - RNA, 19 nt, Artificial Sequence
  Description of Artificial Sequence: Synthetic oligonucleotide
ggagauagacaggcaaugc

SEQ ID NO: 2664661 - RNA, 19 nt, Artificial Sequence
  Description of Artificial Sequence: Synthetic oligonucleotide
ucgcucuuucuggcaaugg

SEQ ID NO: 2664662 - RNA, 19 nt, Artificial Sequence
  Description of Artificial Sequence: Synthetic oligonucleotide
uggcaauggcgacggugag

SEQ ID NO: 2664663 - RNA, 19 nt, Artificial Sequence
  Description of Artificial Sequence: Synthetic oligonucleotide
aagccauaaaucgcucuuu

SEQ ID NO: 2664664 - RNA, 19 nt, Artificial Sequence
  Description of Artificial Sequence: Synthetic oligonucleotide
cguuaggacguucacacac

SEQ ID NO: 2664665 - RNA, 19 nt, Artificial Sequence
  Description of Artificial Sequence: Synthetic oligonucleotide
ugggaacgucucucaacgc

SEQ ID NO: 2664666 - RNA, 19 nt, Artificial Sequence
  Description of Artificial Sequence: Synthetic oligonucleotide
caaggaagaacauuuuguu

SEQ ID NO: 2664667 - RNA, 19 nt, Artificial Sequence
  Description of Artificial Sequence: Synthetic oligonucleotide
aaaggacagucaguauaau

SEQ ID NO: 2664668 - RNA, 19 nt, Artificial Sequence
  Description of Artificial Sequence: Synthetic oligonucleotide
aggacauagccgauuacaa

SEQ ID NO: 2664669 - RNA, 19 nt, Artificial Sequence
  Description of Artificial Sequence: Synthetic oligonucleotide
gcgacggugaguuuuccac

SEQ ID NO: 2664670 - RNA, 19 nt, Artificial Sequence
  Description of Artificial Sequence: Synthetic oligonucleotide
uggcguuaggacguucaca

SEQ ID NO: 2664671 - RNA, 19 nt, Artificial Sequence
  Description of Artificial Sequence: Synthetic oligonucleotide
cugagagcuuaagaaaaga

SEQ ID NO: 2664672 - RNA, 19 nt, Artificial Sequence
  Description of Artificial Sequence: Synthetic oligonucleotide
auaaggagauagacaggca

SEQ ID NO: 2664673 - RNA, 19 nt, Artificial Sequence
  Description of Artificial Sequence: Synthetic oligonucleotide
gaguggagaaguacucauc

SEQ ID NO: 2664674 - RNA, 19 nt, Artificial Sequence
  Description of Artificial Sequence: Synthetic oligonucleotide
ggaacgucucucaacgcug

SEQ ID NO: 2664675 - RNA, 19 nt, Artificial Sequence
  Description of Artificial Sequence: Synthetic oligonucleotide
ugcuaagcucuggagcuuc

SEQ ID NO: 2664676 - RNA, 19 nt, Artificial Sequence
  Description of Artificial Sequence: Synthetic oligonucleotide
ggagaaguacucaucaugu

SEQ ID NO: 2664677 - RNA, 19 nt, Artificial Sequence
  Description of Artificial Sequence: Synthetic oligonucleotide
augucaauacugaguauua

SEQ ID NO: 2664678 - RNA, 19 nt, Artificial Sequence
  Description of Artificial Sequence: Synthetic oligonucleotide
guuaagccuaaggaguuua

SEQ ID NO: 2664679 - RNA, 19 nt, Artificial Sequence
  Description of Artificial Sequence: Synthetic oligonucleotide
auggcgucuuccugguagu

SEQ ID NO: 2664680 - RNA, 19 nt, Artificial Sequence
  Description of Artificial Sequence: Synthetic oligonucleotide
caugucaauacugaguauu

SEQ ID NO: 2664681 - RNA, 19 nt, Artificial Sequence
  Description of Artificial Sequence: Synthetic oligonucleotide
ccuaaggaguuuagccagg

SEQ ID NO: 2664682 - RNA, 19 nt, Artificial Sequence
  Description of Artificial Sequence: Synthetic oligonucleotide
agcuucaaggaagaacauu

SEQ ID NO: 2664683 - RNA, 19 nt, Artificial Sequence
  Description of Artificial Sequence: Synthetic oligonucleotide
aaagcccauacaagauaaa

SEQ ID NO: 2664684 - RNA, 19 nt, Artificial Sequence
  Description of Artificial Sequence: Synthetic oligonucleotide
ccaggauucaggaaugaaa

SEQ ID NO: 2664685 - RNA, 19 nt, Artificial Sequence
  Description of Artificial Sequence: Synthetic oligonucleotide
cugggauggcgucuuccug

SEQ ID NO: 2664686 - RNA, 19 nt, Artificial Sequence
  Description of Artificial Sequence: Synthetic oligonucleotide
auggcgacggugaguuuuc

SEQ ID NO: 2664687 - RNA, 19 nt, Artificial Sequence
  Description of Artificial Sequence: Synthetic oligonucleotide
cagucaguauaauuaugcu

SEQ ID NO: 2664688 - RNA, 19 nt, Artificial Sequence
  Description of Artificial Sequence: Synthetic oligonucleotide
cuucacuaaugggaacguc

SEQ ID NO: 2664689 - RNA, 19 nt, Artificial Sequence
  Description of Artificial Sequence: Synthetic oligonucleotide
aucgcucuuucuggcaaug

SEQ ID NO: 2664690 - RNA, 19 nt, Artificial Sequence
  Description of Artificial Sequence: Synthetic oligonucleotide
cuaaggaguuuagccagga

SEQ ID NO: 2664691 - RNA, 19 nt, Artificial Sequence
  Description of Artificial Sequence: Synthetic oligonucleotide
guaugaagccgaacugaga

SEQ ID NO: 2664692 - RNA, 19 nt, Artificial Sequence
  Description of Artificial Sequence: Synthetic oligonucleotide
cuuguaacuguuuggcguu

SEQ ID NO: 2664693 - RNA, 19 nt, Artificial Sequence
  Description of Artificial Sequence: Synthetic oligonucleotide
aacgcugggauggcgucuu

SEQ ID NO: 2664694 - RNA, 19 nt, Artificial Sequence
  Description of Artificial Sequence: Synthetic oligonucleotide
caaagccauaaaucgcucu

SEQ ID NO: 2664695 - RNA, 19 nt, Artificial Sequence
  Description of Artificial Sequence: Synthetic oligonucleotide
gugaucguaugaauggagu

SEQ ID NO: 2664696 - RNA, 19 nt, Artificial Sequence
  Description of Artificial Sequence: Synthetic oligonucleotide
cugugaucguaugaaugga

SEQ ID NO: 2664697 - RNA, 19 nt, Artificial Sequence
  Description of Artificial Sequence: Synthetic oligonucleotide
acgucucucaacgcuggga

SEQ ID NO: 2664698 - RNA, 19 nt, Artificial Sequence
  Description of Artificial Sequence: Synthetic oligonucleotide
caggcaaugcgaccgccca

SEQ ID NO: 2664699 - RNA, 19 nt, Artificial Sequence
  Description of Artificial Sequence: Synthetic oligonucleotide
aguuaagccuaaggaguuu

SEQ ID NO: 2664700 - RNA, 19 nt, Artificial Sequence
  Description of Artificial Sequence: Synthetic oligonucleotide
agaaaagaacaaagccaua

SEQ ID NO: 2664701 - RNA, 19 nt, Artificial Sequence
  Description of Artificial Sequence: Synthetic oligonucleotide
cacacacagcucaguucug

SEQ ID NO: 2664702 - RNA, 19 nt, Artificial Sequence
  Description of Artificial Sequence: Synthetic oligonucleotide
ccgauuacaacagcaauaa

SEQ ID NO: 2664703 - RNA, 19 nt, Artificial Sequence
  Description of Artificial Sequence: Synthetic oligonucleotide
gagaaguacucaucauguu

SEQ ID NO: 2664704 - RNA, 19 nt, Artificial Sequence
  Description of Artificial Sequence: Synthetic oligonucleotide
acguucacacacagcucag

SEQ ID NO: 2664705 - RNA, 19 nt, Artificial Sequence
  Description of Artificial Sequence: Synthetic oligonucleotide
ggacagucaguauaauuau

SEQ ID NO: 2664706 - RNA, 19 nt, Artificial Sequence
  Description of Artificial Sequence: Synthetic oligonucleotide
auccaaacaagaggacaua

SEQ ID NO: 2664707 - RNA, 19 nt, Artificial Sequence
  Description of Artificial Sequence: Synthetic oligonucleotide
uuguaacuguuuggcguua

SEQ ID NO: 2664708 - RNA, 19 nt, Artificial Sequence
  Description of Artificial Sequence: Synthetic oligonucleotide
gggaacgucucucaacgcu

SEQ ID NO: 2664709 - RNA, 19 nt, Artificial Sequence
  Description of Artificial Sequence: Synthetic oligonucleotide
cucucaacgcugggauggc

SEQ ID NO: 2664710 - RNA, 19 nt, Artificial Sequence
  Description of Artificial Sequence: Synthetic oligonucleotide
cucaacgcugggauggcgu

SEQ ID NO: 2664711 - RNA, 19 nt, Artificial Sequence
  Description of Artificial Sequence: Synthetic oligonucleotide
gccgauuacaacagcaaua

SEQ ID NO: 2664712 - RNA, 19 nt, Artificial Sequence
  Description of Artificial Sequence: Synthetic oligonucleotide
caguucugggugcuaagcu

SEQ ID NO: 2664713 - RNA, 19 nt, Artificial Sequence
  Description of Artificial Sequence: Synthetic oligonucleotide
cauaguuaucugugaucgu

SEQ ID NO: 2664714 - RNA, 19 nt, Artificial Sequence
  Description of Artificial Sequence: Synthetic oligonucleotide
acggugaguuuuccaccau

SEQ ID NO: 2664715 - RNA, 19 nt, Artificial Sequence
  Description of Artificial Sequence: Synthetic oligonucleotide
caguauaauuaugcucaaa

SEQ ID NO: 2664716 - RNA, 19 nt, Artificial Sequence
  Description of Artificial Sequence: Synthetic oligonucleotide
ccgaacugagagcuuaaga

SEQ ID NO: 2664717 - RNA, 19 nt, Artificial Sequence
  Description of Artificial Sequence: Synthetic oligonucleotide
agccaggauucaggaauga

SEQ ID NO: 2664718 - RNA, 19 nt, Artificial Sequence
  Description of Artificial Sequence: Synthetic oligonucleotide
cgacggugaguuuuccacc

SEQ ID NO: 2664719 - RNA, 19 nt, Artificial Sequence
  Description of Artificial Sequence: Synthetic oligonucleotide
guucuuccacuguugguuu

SEQ ID NO: 2664720 - RNA, 19 nt, Artificial Sequence
  Description of Artificial Sequence: Synthetic oligonucleotide
ggaguuuagccaggauuca

SEQ ID NO: 2664721 - RNA, 19 nt, Artificial Sequence
  Description of Artificial Sequence: Synthetic oligonucleotide
uggcgacggugaguuuucc

SEQ ID NO: 2664722 - RNA, 19 nt, Artificial Sequence
  Description of Artificial Sequence: Synthetic oligonucleotide
cacuaaugggaacgucucu

SEQ ID NO: 2664723 - RNA, 19 nt, Artificial Sequence
  Description of Artificial Sequence: Synthetic oligonucleotide
uguuuggcguuaggacguu

SEQ ID NO: 2664724 - RNA, 19 nt, Artificial Sequence
  Description of Artificial Sequence: Synthetic oligonucleotide
gccauaaaucgcucuuucu

SEQ ID NO: 2664725 - RNA, 19 nt, Artificial Sequence
  Description of Artificial Sequence: Synthetic oligonucleotide
cgauuacaacagcaauaag

SEQ ID NO: 2664726 - RNA, 19 nt, Artificial Sequence
  Description of Artificial Sequence: Synthetic oligonucleotide
gccgaacugagagcuuaag

SEQ ID NO: 2664727 - RNA, 19 nt, Artificial Sequence
  Description of Artificial Sequence: Synthetic oligonucleotide
uucuggcaauggcgacggu

SEQ ID NO: 2664728 - RNA, 19 nt, Artificial Sequence
  Description of Artificial Sequence: Synthetic oligonucleotide
acgcugggauggcgucuuc

SEQ ID NO: 2664729 - RNA, 19 nt, Artificial Sequence
  Description of Artificial Sequence: Synthetic oligonucleotide
ggcgacggugaguuuucca

SEQ ID NO: 2664730 - RNA, 19 nt, Artificial Sequence
  Description of Artificial Sequence: Synthetic oligonucleotide
gcaauggcgacggugaguu

SEQ ID NO: 2664731 - RNA, 19 nt, Artificial Sequence
  Description of Artificial Sequence: Synthetic oligonucleotide
ccaguaaguuaagccuaag

SEQ ID NO: 2664732 - RNA, 19 nt, Artificial Sequence
  Description of Artificial Sequence: Synthetic oligonucleotide
cuaagcucuggagcuucaa

SEQ ID NO: 2664733 - RNA, 19 nt, Artificial Sequence
  Description of Artificial Sequence: Synthetic oligonucleotide
guuuggcguuaggacguuc

SEQ ID NO: 2664734 - RNA, 19 nt, Artificial Sequence
  Description of Artificial Sequence: Synthetic oligonucleotide
cugguaguucuuccacugu

SEQ ID NO: 2664735 - RNA, 19 nt, Artificial Sequence
  Description of Artificial Sequence: Synthetic oligonucleotide
ggcgucuuccugguaguuc

SEQ ID NO: 2664736 - RNA, 19 nt, Artificial Sequence
  Description of Artificial Sequence: Synthetic oligonucleotide
ggacguucacacacagcuc

SEQ ID NO: 2664737 - RNA, 19 nt, Artificial Sequence
  Description of Artificial Sequence: Synthetic oligonucleotide
cccauacaagauaaaguau

SEQ ID NO: 2664738 - RNA, 19 nt, Artificial Sequence
  Description of Artificial Sequence: Synthetic oligonucleotide
gccaguaaguuaagccuaa

SEQ ID NO: 2664739 - RNA, 19 nt, Artificial Sequence
  Description of Artificial Sequence: Synthetic oligonucleotide
ggaguugaguggagaagua

SEQ ID NO: 2664740 - RNA, 19 nt, Artificial Sequence
  Description of Artificial Sequence: Synthetic oligonucleotide
ugcgaccgcccaguauuuu

SEQ ID NO: 2664741 - RNA, 19 nt, Artificial Sequence
  Description of Artificial Sequence: Synthetic oligonucleotide
agccgaacugagagcuuaa

SEQ ID NO: 2664742 - RNA, 19 nt, Artificial Sequence
  Description of Artificial Sequence: Synthetic oligonucleotide
gcguuaggacguucacaca

SEQ ID NO: 2664743 - RNA, 19 nt, Artificial Sequence
  Description of Artificial Sequence: Synthetic oligonucleotide
uggcgucuuccugguaguu

SEQ ID NO: 2664744 - RNA, 19 nt, Artificial Sequence
  Description of Artificial Sequence: Synthetic oligonucleotide
caagaggacauagccgauu

SEQ ID NO: 2664745 - RNA, 19 nt, Artificial Sequence
  Description of Artificial Sequence: Synthetic oligonucleotide
ggcaaugcgaccgcccagu

SEQ ID NO: 2664746 - RNA, 19 nt, Artificial Sequence
  Description of Artificial Sequence: Synthetic oligonucleotide
cggugaguuuuccaccauc

SEQ ID NO: 2664747 - RNA, 19 nt, Artificial Sequence
  Description of Artificial Sequence: Synthetic oligonucleotide
gccaggauucaggaaugaa

SEQ ID NO: 2664748 - RNA, 19 nt, Artificial Sequence
  Description of Artificial Sequence: Synthetic oligonucleotide
caaugcgaccgcccaguau

SEQ ID NO: 2664749 - RNA, 19 nt, Artificial Sequence
  Description of Artificial Sequence: Synthetic oligonucleotide
gggauggcgucuuccuggu

SEQ ID NO: 2664750 - RNA, 19 nt, Artificial Sequence
  Description of Artificial Sequence: Synthetic oligonucleotide
augcgaccgcccaguauuu

SEQ ID NO: 2664751 - RNA, 19 nt, Artificial Sequence
  Description of Artificial Sequence: Synthetic oligonucleotide
gcuaagcucuggagcuuca

SEQ ID NO: 2664752 - RNA, 19 nt, Artificial Sequence
  Description of Artificial Sequence: Synthetic oligonucleotide
agcucaguucugggugcua

SEQ ID NO: 2664753 - RNA, 19 nt, Artificial Sequence
  Description of Artificial Sequence: Synthetic oligonucleotide
cuggagcuucaaggaagaa

SEQ ID NO: 2664754 - RNA, 19 nt, Artificial Sequence
  Description of Artificial Sequence: Synthetic oligonucleotide
caccaucuucccugcggcu

SEQ ID NO: 2664755 - RNA, 19 nt, Artificial Sequence
  Description of Artificial Sequence: Synthetic oligonucleotide
gaagccgaacugagagcuu

SEQ ID NO: 2664756 - RNA, 19 nt, Artificial Sequence
  Description of Artificial Sequence: Synthetic oligonucleotide
ggcaauggcgacggugagu

SEQ ID NO: 2664757 - RNA, 19 nt, Artificial Sequence
  Description of Artificial Sequence: Synthetic oligonucleotide
cguaugaauggaguugagu

SEQ ID NO: 2664758 - RNA, 19 nt, Artificial Sequence
  Description of Artificial Sequence: Synthetic oligonucleotide
caacgcugggauggcgucu

SEQ ID NO: 2664759 - RNA, 19 nt, Artificial Sequence
  Description of Artificial Sequence: Synthetic oligonucleotide
gcaaugcgaccgcccagua

SEQ ID NO: 2664760 - RNA, 19 nt, Artificial Sequence
  Description of Artificial Sequence: Synthetic oligonucleotide
cgucucucaacgcugggau

SEQ ID NO: 2664761 - RNA, 19 nt, Artificial Sequence
  Description of Artificial Sequence: Synthetic oligonucleotide
gugcuaagcucuggagcuu

SEQ ID NO: 2664762 - RNA, 19 nt, Artificial Sequence
  Description of Artificial Sequence: Synthetic oligonucleotide
ggauggcgucuuccuggua

SEQ ID NO: 2664763 - RNA, 19 nt, Artificial Sequence
  Description of Artificial Sequence: Synthetic oligonucleotide
caauggcgacggugaguuu

SEQ ID NO: 2664764 - RNA, 19 nt, Artificial Sequence
  Description of Artificial Sequence: Synthetic oligonucleotide
cguucacacacagcucagu

SEQ ID NO: 2664765 - RNA, 19 nt, Artificial Sequence
  Description of Artificial Sequence: Synthetic oligonucleotide
ucaaauuuuaagcagaaug

SEQ ID NO: 2664766 - RNA, 19 nt, Artificial Sequence
  Description of Artificial Sequence: Synthetic oligonucleotide
aauacaucuacccugagcu

SEQ ID NO: 2664767 - RNA, 19 nt, Artificial Sequence
  Description of Artificial Sequence: Synthetic oligonucleotide
aaaacugaauccugggugc

SEQ ID NO: 2664768 - RNA, 19 nt, Artificial Sequence
  Description of Artificial Sequence: Synthetic oligonucleotide
uuuguuauagccuucccgg

SEQ ID NO: 2664769 - RNA, 19 nt, Artificial Sequence
  Description of Artificial Sequence: Synthetic oligonucleotide
caaauuuuaagcagaaugg

SEQ ID NO: 2664770 - RNA, 19 nt, Artificial Sequence
  Description of Artificial Sequence: Synthetic oligonucleotide
aaauuuuaagcagaauggc

SEQ ID NO: 2664771 - RNA, 19 nt, Artificial Sequence
  Description of Artificial Sequence: Synthetic oligonucleotide
aucccuucaaauuuuaagc

SEQ ID NO: 2664772 - RNA, 19 nt, Artificial Sequence
  Description of Artificial Sequence: Synthetic oligonucleotide
aauuuuaagcagaauggcc

SEQ ID NO: 2664773 - RNA, 19 nt, Artificial Sequence
  Description of Artificial Sequence: Synthetic oligonucleotide
caaaguaccauaauuguag

SEQ ID NO: 2664774 - RNA, 19 nt, Artificial Sequence
  Description of Artificial Sequence: Synthetic oligonucleotide
aaacugcuuuguuauagcc

SEQ ID NO: 2664775 - RNA, 19 nt, Artificial Sequence
  Description of Artificial Sequence: Synthetic oligonucleotide
aaucccuucaaauuuuaag

SEQ ID NO: 2664776 - RNA, 19 nt, Artificial Sequence
  Description of Artificial Sequence: Synthetic oligonucleotide
uuuguaauagacuucggca

SEQ ID NO: 2664777 - RNA, 19 nt, Artificial Sequence
  Description of Artificial Sequence: Synthetic oligonucleotide
aaaucaguuuguaauagac

SEQ ID NO: 2664778 - RNA, 19 nt, Artificial Sequence
  Description of Artificial Sequence: Synthetic oligonucleotide
aguagauuuggucaucuac

SEQ ID NO: 2664779 - RNA, 19 nt, Artificial Sequence
  Description of Artificial Sequence: Synthetic oligonucleotide
ugcugcauugcucuaaugg

SEQ ID NO: 2664780 - RNA, 19 nt, Artificial Sequence
  Description of Artificial Sequence: Synthetic oligonucleotide
cuucucaaaauuuccacgg

SEQ ID NO: 2664781 - RNA, 19 nt, Artificial Sequence
  Description of Artificial Sequence: Synthetic oligonucleotide
aaaauuuccacggaacuca

SEQ ID NO: 2664782 - RNA, 19 nt, Artificial Sequence
  Description of Artificial Sequence: Synthetic oligonucleotide
auaauuguagucuucuaca

SEQ ID NO: 2664783 - RNA, 19 nt, Artificial Sequence
  Description of Artificial Sequence: Synthetic oligonucleotide
auagacuucggcaugcugc

SEQ ID NO: 2664784 - RNA, 19 nt, Artificial Sequence
  Description of Artificial Sequence: Synthetic oligonucleotide
ugaguuucaggaacugugg

SEQ ID NO: 2664785 - RNA, 19 nt, Artificial Sequence
  Description of Artificial Sequence: Synthetic oligonucleotide
acuuuggugaguuucagga

SEQ ID NO: 2664786 - RNA, 19 nt, Artificial Sequence
  Description of Artificial Sequence: Synthetic oligonucleotide
ugauuugaguucuucuggg

SEQ ID NO: 2664787 - RNA, 19 nt, Artificial Sequence
  Description of Artificial Sequence: Synthetic oligonucleotide
uggucaucuacuuugguga

SEQ ID NO: 2664788 - RNA, 19 nt, Artificial Sequence
  Description of Artificial Sequence: Synthetic oligonucleotide
auuugaguucuucuggguc

SEQ ID NO: 2664789 - RNA, 19 nt, Artificial Sequence
  Description of Artificial Sequence: Synthetic oligonucleotide
uuugaguucuucugggucc

SEQ ID NO: 2664790 - RNA, 19 nt, Artificial Sequence
  Description of Artificial Sequence: Synthetic oligonucleotide
gaacaauccagucucagca

SEQ ID NO: 2664791 - RNA, 19 nt, Artificial Sequence
  Description of Artificial Sequence: Synthetic oligonucleotide
aguaccauaauuguagucu

SEQ ID NO: 2664792 - RNA, 19 nt, Artificial Sequence
  Description of Artificial Sequence: Synthetic oligonucleotide
cauaauuguagucuucuac

SEQ ID NO: 2664793 - RNA, 19 nt, Artificial Sequence
  Description of Artificial Sequence: Synthetic oligonucleotide
cuuuguuauagccuucccg

SEQ ID NO: 2664794 - RNA, 19 nt, Artificial Sequence
  Description of Artificial Sequence: Synthetic oligonucleotide
ugagcuucucaaaauuucc

SEQ ID NO: 2664795 - RNA, 19 nt, Artificial Sequence
  Description of Artificial Sequence: Synthetic oligonucleotide
aaguaccauaauuguaguc

SEQ ID NO: 2664796 - RNA, 19 nt, Artificial Sequence
  Description of Artificial Sequence: Synthetic oligonucleotide
uguaauagacuucggcaug

SEQ ID NO: 2664797 - RNA, 19 nt, Artificial Sequence
  Description of Artificial Sequence: Synthetic oligonucleotide
guuuguaauagacuucggc

SEQ ID NO: 2664798 - RNA, 19 nt, Artificial Sequence
  Description of Artificial Sequence: Synthetic oligonucleotide
caucucaauaucagggucg

SEQ ID NO: 2664799 - RNA, 19 nt, Artificial Sequence
  Description of Artificial Sequence: Synthetic oligonucleotide
ucuacaaucccuucaaauu

SEQ ID NO: 2664800 - RNA, 19 nt, Artificial Sequence
  Description of Artificial Sequence: Synthetic oligonucleotide
ucagcaaaguaccauaauu

SEQ ID NO: 2664801 - RNA, 19 nt, Artificial Sequence
  Description of Artificial Sequence: Synthetic oligonucleotide
uccagucucagcaaaguac

SEQ ID NO: 2664802 - RNA, 19 nt, Artificial Sequence
  Description of Artificial Sequence: Synthetic oligonucleotide
cugauuugaguucuucugg

SEQ ID NO: 2664803 - RNA, 19 nt, Artificial Sequence
  Description of Artificial Sequence: Synthetic oligonucleotide
auuuuaagcagaauggccu

SEQ ID NO: 2664804 - RNA, 19 nt, Artificial Sequence
  Description of Artificial Sequence: Synthetic oligonucleotide
acucagaguagauuugguc

SEQ ID NO: 2664805 - RNA, 19 nt, Artificial Sequence
  Description of Artificial Sequence: Synthetic oligonucleotide
ucaacugaugaaaucaguu

SEQ ID NO: 2664806 - RNA, 19 nt, Artificial Sequence
  Description of Artificial Sequence: Synthetic oligonucleotide
ucaauaucagggucguugc

SEQ ID NO: 2664807 - RNA, 19 nt, Artificial Sequence
  Description of Artificial Sequence: Synthetic oligonucleotide
caguuuguaauagacuucg

SEQ ID NO: 2664808 - RNA, 19 nt, Artificial Sequence
  Description of Artificial Sequence: Synthetic oligonucleotide
aaaguaccauaauuguagu

SEQ ID NO: 2664809 - RNA, 19 nt, Artificial Sequence
  Description of Artificial Sequence: Synthetic oligonucleotide
ugagucacucgauucuugg

SEQ ID NO: 2664810 - RNA, 19 nt, Artificial Sequence
  Description of Artificial Sequence: Synthetic oligonucleotide
uuggucaucuacuuuggug

SEQ ID NO: 2664811 - RNA, 19 nt, Artificial Sequence
  Description of Artificial Sequence: Synthetic oligonucleotide
ucuacuuuggugaguuuca

SEQ ID NO: 2664812 - RNA, 19 nt, Artificial Sequence
  Description of Artificial Sequence: Synthetic oligonucleotide
agcaaaguaccauaauugu

SEQ ID NO: 2664813 - RNA, 19 nt, Artificial Sequence
  Description of Artificial Sequence: Synthetic oligonucleotide
gagagcaugugccacagac

SEQ ID NO: 2664814 - RNA, 19 nt, Artificial Sequence
  Description of Artificial Sequence: Synthetic oligonucleotide
acaccacuuccccagaaac

SEQ ID NO: 2664815 - RNA, 19 nt, Artificial Sequence
  Description of Artificial Sequence: Synthetic oligonucleotide
uccacuaucagcuccuuuc

SEQ ID NO: 2664816 - RNA, 19 nt, Artificial Sequence
  Description of Artificial Sequence: Synthetic oligonucleotide
aauaucagggucguugcca

SEQ ID NO: 2664817 - RNA, 19 nt, Artificial Sequence
  Description of Artificial Sequence: Synthetic oligonucleotide
cucaaaauuuccacggaac

SEQ ID NO: 2664818 - RNA, 19 nt, Artificial Sequence
  Description of Artificial Sequence: Synthetic oligonucleotide
ucggguuggagagagagag

SEQ ID NO: 2664819 - RNA, 19 nt, Artificial Sequence
  Description of Artificial Sequence: Synthetic oligonucleotide
uuguaauagacuucggcau

SEQ ID NO: 2664820 - RNA, 19 nt, Artificial Sequence
  Description of Artificial Sequence: Synthetic oligonucleotide
ucuucuacaaucccuucaa

SEQ ID NO: 2664821 - RNA, 19 nt, Artificial Sequence
  Description of Artificial Sequence: Synthetic oligonucleotide
ugcauugcucuaauggccc

SEQ ID NO: 2664822 - RNA, 19 nt, Artificial Sequence
  Description of Artificial Sequence: Synthetic oligonucleotide
ugcucuaauggcccaagcc

SEQ ID NO: 2664823 - RNA, 19 nt, Artificial Sequence
  Description of Artificial Sequence: Synthetic oligonucleotide
ucccuucaaauuuuaagca

SEQ ID NO: 2664824 - RNA, 19 nt, Artificial Sequence
  Description of Artificial Sequence: Synthetic oligonucleotide
uccaauacaucuacccuga

SEQ ID NO: 2664825 - RNA, 19 nt, Artificial Sequence
  Description of Artificial Sequence: Synthetic oligonucleotide
uucauugucagcuccuuuc

SEQ ID NO: 2664826 - RNA, 19 nt, Artificial Sequence
  Description of Artificial Sequence: Synthetic oligonucleotide
uuccacggaacucagagua

SEQ ID NO: 2664827 - RNA, 19 nt, Artificial Sequence
  Description of Artificial Sequence: Synthetic oligonucleotide
ugccauaggacucggguug

SEQ ID NO: 2664828 - RNA, 19 nt, Artificial Sequence
  Description of Artificial Sequence: Synthetic oligonucleotide
aauuguagucuucuacaau

SEQ ID NO: 2664829 - RNA, 19 nt, Artificial Sequence
  Description of Artificial Sequence: Synthetic oligonucleotide
cucaauaucagggucguug

SEQ ID NO: 2664830 - RNA, 19 nt, Artificial Sequence
  Description of Artificial Sequence: Synthetic oligonucleotide
ucuguugacuccuuccucu

SEQ ID NO: 2664831 - RNA, 19 nt, Artificial Sequence
  Description of Artificial Sequence: Synthetic oligonucleotide
caagccaucucaauaucag

SEQ ID NO: 2664832 - RNA, 19 nt, Artificial Sequence
  Description of Artificial Sequence: Synthetic oligonucleotide
gaaacugcuuuguuauagc

SEQ ID NO: 2664833 - RNA, 19 nt, Artificial Sequence
  Description of Artificial Sequence: Synthetic oligonucleotide
uaggacucggguuggagag

SEQ ID NO: 2664834 - RNA, 19 nt, Artificial Sequence
  Description of Artificial Sequence: Synthetic oligonucleotide
gagagagagagcaugugcc

SEQ ID NO: 2664835 - RNA, 19 nt, Artificial Sequence
  Description of Artificial Sequence: Synthetic oligonucleotide
gaguuucaggaacuguggg

SEQ ID NO: 2664836 - RNA, 19 nt, Artificial Sequence
  Description of Artificial Sequence: Synthetic oligonucleotide
aauagacuucggcaugcug

SEQ ID NO: 2664837 - RNA, 19 nt, Artificial Sequence
  Description of Artificial Sequence: Synthetic oligonucleotide
gaacucagaguagauuugg

SEQ ID NO: 2664838 - RNA, 19 nt, Artificial Sequence
  Description of Artificial Sequence: Synthetic oligonucleotide
uuuguccugaacacugaug

SEQ ID NO: 2664839 - RNA, 19 nt, Artificial Sequence
  Description of Artificial Sequence: Synthetic oligonucleotide
auugucagcuccuuucucu

SEQ ID NO: 2664840 - RNA, 19 nt, Artificial Sequence
  Description of Artificial Sequence: Synthetic oligonucleotide
uucuacaaucccuucaaau

SEQ ID NO: 2664841 - RNA, 19 nt, Artificial Sequence
  Description of Artificial Sequence: Synthetic oligonucleotide
agccaucucaauaucaggg

SEQ ID NO: 2664842 - RNA, 19 nt, Artificial Sequence
  Description of Artificial Sequence: Synthetic oligonucleotide
agucacucgauucuuggcu

SEQ ID NO: 2664843 - RNA, 19 nt, Artificial Sequence
  Description of Artificial Sequence: Synthetic oligonucleotide
uaauuguagucuucuacaa

SEQ ID NO: 2664844 - RNA, 19 nt, Artificial Sequence
  Description of Artificial Sequence: Synthetic oligonucleotide
acugcuuuguuauagccuu

SEQ ID NO: 2664845 - RNA, 19 nt, Artificial Sequence
  Description of Artificial Sequence: Synthetic oligonucleotide
cugggaacaauccagucuc

SEQ ID NO: 2664846 - RNA, 19 nt, Artificial Sequence
  Description of Artificial Sequence: Synthetic oligonucleotide
uacuuuggugaguuucagg

SEQ ID NO: 2664847 - RNA, 19 nt, Artificial Sequence
  Description of Artificial Sequence: Synthetic oligonucleotide
cugcauugcucuaauggcc

SEQ ID NO: 2664848 - RNA, 19 nt, Artificial Sequence
  Description of Artificial Sequence: Synthetic oligonucleotide
uuacuuuucucuguugacu

SEQ ID NO: 2664849 - RNA, 19 nt, Artificial Sequence
  Description of Artificial Sequence: Synthetic oligonucleotide
caauacaucuacccugagc

SEQ ID NO: 2664850 - RNA, 19 nt, Artificial Sequence
  Description of Artificial Sequence: Synthetic oligonucleotide
ucaguuuguaauagacuuc

SEQ ID NO: 2664851 - RNA, 19 nt, Artificial Sequence
  Description of Artificial Sequence: Synthetic oligonucleotide
uuagcugauucugauuuga

SEQ ID NO: 2664852 - RNA, 19 nt, Artificial Sequence
  Description of Artificial Sequence: Synthetic oligonucleotide
ucucuguugacuccuuccu

SEQ ID NO: 2664853 - RNA, 19 nt, Artificial Sequence
  Description of Artificial Sequence: Synthetic oligonucleotide
ucagaguagauuuggucau

SEQ ID NO: 2664854 - RNA, 19 nt, Artificial Sequence
  Description of Artificial Sequence: Synthetic oligonucleotide
auacuuguggguucagcug

SEQ ID NO: 2664855 - RNA, 19 nt, Artificial Sequence
  Description of Artificial Sequence: Synthetic oligonucleotide
augaaaucaguuuguaaua

SEQ ID NO: 2664856 - RNA, 19 nt, Artificial Sequence
  Description of Artificial Sequence: Synthetic oligonucleotide
ucucuuuagcugauucuga

SEQ ID NO: 2664857 - RNA, 19 nt, Artificial Sequence
  Description of Artificial Sequence: Synthetic oligonucleotide
uucucaaaauuuccacgga

SEQ ID NO: 2664858 - RNA, 19 nt, Artificial Sequence
  Description of Artificial Sequence: Synthetic oligonucleotide
gauacuuguggguucagcu

SEQ ID NO: 2664859 - RNA, 19 nt, Artificial Sequence
  Description of Artificial Sequence: Synthetic oligonucleotide
uuuagcugauucugauuug

SEQ ID NO: 2664860 - RNA, 19 nt, Artificial Sequence
  Description of Artificial Sequence: Synthetic oligonucleotide
ugugggucaacugaugaaa

SEQ ID NO: 2664861 - RNA, 19 nt, Artificial Sequence
  Description of Artificial Sequence: Synthetic oligonucleotide
uuucucugauuccucuucu

SEQ ID NO: 2664862 - RNA, 19 nt, Artificial Sequence
  Description of Artificial Sequence: Synthetic oligonucleotide
ugcaaagaugguguucucc

SEQ ID NO: 2664863 - RNA, 19 nt, Artificial Sequence
  Description of Artificial Sequence: Synthetic oligonucleotide
cugauucugauuugaguuc

SEQ ID NO: 2664864 - RNA, 19 nt, Artificial Sequence
  Description of Artificial Sequence: Synthetic oligonucleotide
aacaauccagucucagcaa

SEQ ID NO: 2664865 - RNA, 19 nt, Artificial Sequence
  Description of Artificial Sequence: Synthetic oligonucleotide
aagcagaauggccuccacu

SEQ ID NO: 2664866 - RNA, 19 nt, Artificial Sequence
  Description of Artificial Sequence: Synthetic oligonucleotide
ucucagcaaaguaccauaa

SEQ ID NO: 2664867 - RNA, 19 nt, Artificial Sequence
  Description of Artificial Sequence: Synthetic oligonucleotide
uuggugaguuucaggaacu

SEQ ID NO: 2664868 - RNA, 19 nt, Artificial Sequence
  Description of Artificial Sequence: Synthetic oligonucleotide
aauccagucucagcaaagu

SEQ ID NO: 2664869 - RNA, 19 nt, Artificial Sequence
  Description of Artificial Sequence: Synthetic oligonucleotide
ugugccacagacaccacuu

SEQ ID NO: 2664870 - RNA, 19 nt, Artificial Sequence
  Description of Artificial Sequence: Synthetic oligonucleotide
aacugcuuuguuauagccu

SEQ ID NO: 2664871 - RNA, 19 nt, Artificial Sequence
  Description of Artificial Sequence: Synthetic oligonucleotide
uuggagagagagagcaugu

SEQ ID NO: 2664872 - RNA, 19 nt, Artificial Sequence
  Description of Artificial Sequence: Synthetic oligonucleotide
uagacuucggcaugcugca

SEQ ID NO: 2664873 - RNA, 19 nt, Artificial Sequence
  Description of Artificial Sequence: Synthetic oligonucleotide
aauccugggugcaaagaug

SEQ ID NO: 2664874 - RNA, 19 nt, Artificial Sequence
  Description of Artificial Sequence: Synthetic oligonucleotide
agcugauucugauuugagu

SEQ ID NO: 2664875 - RNA, 19 nt, Artificial Sequence
  Description of Artificial Sequence: Synthetic oligonucleotide
accauaauuguagucuucu

SEQ ID NO: 2664876 - RNA, 19 nt, Artificial Sequence
  Description of Artificial Sequence: Synthetic oligonucleotide
gugcaccugauacuugugg

SEQ ID NO: 2664877 - RNA, 19 nt, Artificial Sequence
  Description of Artificial Sequence: Synthetic oligonucleotide
ucugauuccucuucuucau

SEQ ID NO: 2664878 - RNA, 19 nt, Artificial Sequence
  Description of Artificial Sequence: Synthetic oligonucleotide
uccugaacacugauggaaa

SEQ ID NO: 2664879 - RNA, 19 nt, Artificial Sequence
  Description of Artificial Sequence: Synthetic oligonucleotide
uagcugauucugauuugag

SEQ ID NO: 2664880 - RNA, 19 nt, Artificial Sequence
  Description of Artificial Sequence: Synthetic oligonucleotide
uacaucuacccugagcuuc

SEQ ID NO: 2664881 - RNA, 19 nt, Artificial Sequence
  Description of Artificial Sequence: Synthetic oligonucleotide
auaggacucggguuggaga

SEQ ID NO: 2664882 - RNA, 19 nt, Artificial Sequence
  Description of Artificial Sequence: Synthetic oligonucleotide
ggaaacugcuuuguuauag

SEQ ID NO: 2664883 - RNA, 19 nt, Artificial Sequence
  Description of Artificial Sequence: Synthetic oligonucleotide
guaauagacuucggcaugc

SEQ ID NO: 2664884 - RNA, 19 nt, Artificial Sequence
  Description of Artificial Sequence: Synthetic oligonucleotide
ugcuuuguuauagccuucc

SEQ ID NO: 2664885 - RNA, 19 nt, Artificial Sequence
  Description of Artificial Sequence: Synthetic oligonucleotide
uacccugagcuucucaaaa

SEQ ID NO: 2664886 - RNA, 19 nt, Artificial Sequence
  Description of Artificial Sequence: Synthetic oligonucleotide
cuaucagcuccuuucucug

SEQ ID NO: 2664887 - RNA, 19 nt, Artificial Sequence
  Description of Artificial Sequence: Synthetic oligonucleotide
uguuauagccuucccgguu

SEQ ID NO: 2664888 - RNA, 19 nt, Artificial Sequence
  Description of Artificial Sequence: Synthetic oligonucleotide
acucggguuggagagagag

SEQ ID NO: 2664889 - RNA, 19 nt, Artificial Sequence
  Description of Artificial Sequence: Synthetic oligonucleotide
aaauuuccacggaacucag

SEQ ID NO: 2664890 - RNA, 19 nt, Artificial Sequence
  Description of Artificial Sequence: Synthetic oligonucleotide
accacuuccccagaaacca

SEQ ID NO: 2664891 - RNA, 19 nt, Artificial Sequence
  Description of Artificial Sequence: Synthetic oligonucleotide
agcugagucacucgauucu

SEQ ID NO: 2664892 - RNA, 19 nt, Artificial Sequence
  Description of Artificial Sequence: Synthetic oligonucleotide
gcugcauugcucuaauggc

SEQ ID NO: 2664893 - RNA, 19 nt, Artificial Sequence
  Description of Artificial Sequence: Synthetic oligonucleotide
ggguccaauacaucuaccc

SEQ ID NO: 2664894 - RNA, 19 nt, Artificial Sequence
  Description of Artificial Sequence: Synthetic oligonucleotide
accugauacuuguggguuc

SEQ ID NO: 2664895 - RNA, 19 nt, Artificial Sequence
  Description of Artificial Sequence: Synthetic oligonucleotide
caauccagucucagcaaag

SEQ ID NO: 2664896 - RNA, 19 nt, Artificial Sequence
  Description of Artificial Sequence: Synthetic oligonucleotide
accagcucuucgcuuucgc

SEQ ID NO: 2664897 - RNA, 19 nt, Artificial Sequence
  Description of Artificial Sequence: Synthetic oligonucleotide
ccagucucagcaaaguacc

SEQ ID NO: 2664898 - RNA, 19 nt, Artificial Sequence
  Description of Artificial Sequence: Synthetic oligonucleotide
acuucggcaugcugcauug

SEQ ID NO: 2664899 - RNA, 19 nt, Artificial Sequence
  Description of Artificial Sequence: Synthetic oligonucleotide
uccacggaacucagaguag

SEQ ID NO: 2664900 - RNA, 19 nt, Artificial Sequence
  Description of Artificial Sequence: Synthetic oligonucleotide
uuguggguucagcugaguc

SEQ ID NO: 2664901 - RNA, 19 nt, Artificial Sequence
  Description of Artificial Sequence: Synthetic oligonucleotide
ucaguguagcccugggaac

SEQ ID NO: 2664902 - RNA, 19 nt, Artificial Sequence
  Description of Artificial Sequence: Synthetic oligonucleotide
uguagcccugggaacaauc

SEQ ID NO: 2664903 - RNA, 19 nt, Artificial Sequence
  Description of Artificial Sequence: Synthetic oligonucleotide
uuauagccuucccgguucc

SEQ ID NO: 2664904 - RNA, 19 nt, Artificial Sequence
  Description of Artificial Sequence: Synthetic oligonucleotide
ugguguucuccucagugua

SEQ ID NO: 2664905 - RNA, 19 nt, Artificial Sequence
  Description of Artificial Sequence: Synthetic oligonucleotide
aaggggucugugcaccuga

SEQ ID NO: 2664906 - RNA, 19 nt, Artificial Sequence
  Description of Artificial Sequence: Synthetic oligonucleotide
uuucaggaacuguggguca

SEQ ID NO: 2664907 - RNA, 19 nt, Artificial Sequence
  Description of Artificial Sequence: Synthetic oligonucleotide
gagucacucgauucuuggc

SEQ ID NO: 2664908 - RNA, 19 nt, Artificial Sequence
  Description of Artificial Sequence: Synthetic oligonucleotide
gggucugugcaccugauac

SEQ ID NO: 2664909 - RNA, 19 nt, Artificial Sequence
  Description of Artificial Sequence: Synthetic oligonucleotide
acugaugaaaucaguuugu

SEQ ID NO: 2664910 - RNA, 19 nt, Artificial Sequence
  Description of Artificial Sequence: Synthetic oligonucleotide
ucagcugagucacucgauu

SEQ ID NO: 2664911 - RNA, 19 nt, Artificial Sequence
  Description of Artificial Sequence: Synthetic oligonucleotide
caccacuuccccagaaacc

SEQ ID NO: 2664912 - RNA, 19 nt, Artificial Sequence
  Description of Artificial Sequence: Synthetic oligonucleotide
agagagagcaugugccaca

SEQ ID NO: 2664913 - RNA, 19 nt, Artificial Sequence
  Description of Artificial Sequence: Synthetic oligonucleotide
uuguuauagccuucccggu

SEQ ID NO: 2664914 - RNA, 19 nt, Artificial Sequence
  Description of Artificial Sequence: Synthetic oligonucleotide
cuucaaauuuuaagcagaa

SEQ ID NO: 2664915 - RNA, 19 nt, Artificial Sequence
  Description of Artificial Sequence: Synthetic oligonucleotide
cucaguguagcccugggaa

SEQ ID NO: 2664916 - RNA, 19 nt, Artificial Sequence
  Description of Artificial Sequence: Synthetic oligonucleotide
uuaagcagaauggccucca

SEQ ID NO: 2664917 - RNA, 19 nt, Artificial Sequence
  Description of Artificial Sequence: Synthetic oligonucleotide
ucuaauggcccaagccauc

SEQ ID NO: 2664918 - RNA, 19 nt, Artificial Sequence
  Description of Artificial Sequence: Synthetic oligonucleotide
uccucaguguagcccuggg

SEQ ID NO: 2664919 - RNA, 19 nt, Artificial Sequence
  Description of Artificial Sequence: Synthetic oligonucleotide
ggaacaauccagucucagc

SEQ ID NO: 2664920 - RNA, 19 nt, Artificial Sequence
  Description of Artificial Sequence: Synthetic oligonucleotide
ugauacuuguggguucagc

SEQ ID NO: 2664921 - RNA, 19 nt, Artificial Sequence
  Description of Artificial Sequence: Synthetic oligonucleotide
cacuuccccagaaaccagc

SEQ ID NO: 2664922 - RNA, 19 nt, Artificial Sequence
  Description of Artificial Sequence: Synthetic oligonucleotide
ucuuuagcugauucugauu

SEQ ID NO: 2664923 - RNA, 19 nt, Artificial Sequence
  Description of Artificial Sequence: Synthetic oligonucleotide
ugugcaccugauacuugug

SEQ ID NO: 2664924 - RNA, 19 nt, Artificial Sequence
  Description of Artificial Sequence: Synthetic oligonucleotide
agggucguugccauaggac

SEQ ID NO: 2664925 - RNA, 19 nt, Artificial Sequence
  Description of Artificial Sequence: Synthetic oligonucleotide
ugaauccugggugcaaaga

SEQ ID NO: 2664926 - RNA, 19 nt, Artificial Sequence
  Description of Artificial Sequence: Synthetic oligonucleotide
ccagaaaccagcucuucgc

SEQ ID NO: 2664927 - RNA, 19 nt, Artificial Sequence
  Description of Artificial Sequence: Synthetic oligonucleotide
cuuuagcugauucugauuu

SEQ ID NO: 2664928 - RNA, 19 nt, Artificial Sequence
  Description of Artificial Sequence: Synthetic oligonucleotide
auaucagggucguugccau

SEQ ID NO: 2664929 - RNA, 19 nt, Artificial Sequence
  Description of Artificial Sequence: Synthetic oligonucleotide
uaccauaauuguagucuuc

SEQ ID NO: 2664930 - RNA, 19 nt, Artificial Sequence
  Description of Artificial Sequence: Synthetic oligonucleotide
ucagggucguugccauagg

SEQ ID NO: 2664931 - RNA, 19 nt, Artificial Sequence
  Description of Artificial Sequence: Synthetic oligonucleotide
uuuccacggaacucagagu

SEQ ID NO: 2664932 - RNA, 19 nt, Artificial Sequence
  Description of Artificial Sequence: Synthetic oligonucleotide
agaguagauuuggucaucu

SEQ ID NO: 2664933 - RNA, 19 nt, Artificial Sequence
  Description of Artificial Sequence: Synthetic oligonucleotide
aguucuucuggguccaaua

SEQ ID NO: 2664934 - RNA, 19 nt, Artificial Sequence
  Description of Artificial Sequence: Synthetic oligonucleotide
ugggucaacugaugaaauc

SEQ ID NO: 2664935 - RNA, 19 nt, Artificial Sequence
  Description of Artificial Sequence: Synthetic oligonucleotide
gcucuaauggcccaagcca

SEQ ID NO: 2664936 - RNA, 19 nt, Artificial Sequence
  Description of Artificial Sequence: Synthetic oligonucleotide
ucugugcaccugauacuug

SEQ ID NO: 2664937 - RNA, 19 nt, Artificial Sequence
  Description of Artificial Sequence: Synthetic oligonucleotide
aggaacugugggucaacug

SEQ ID NO: 2664938 - RNA, 19 nt, Artificial Sequence
  Description of Artificial Sequence: Synthetic oligonucleotide
gucguugccauaggacucg

SEQ ID NO: 2664939 - RNA, 19 nt, Artificial Sequence
  Description of Artificial Sequence: Synthetic oligonucleotide
guagauuuggucaucuacu

SEQ ID NO: 2664940 - RNA, 19 nt, Artificial Sequence
  Description of Artificial Sequence: Synthetic oligonucleotide
caauaucagggucguugcc

SEQ ID NO: 2664941 - RNA, 19 nt, Artificial Sequence
  Description of Artificial Sequence: Synthetic oligonucleotide
aaacugaauccugggugca

SEQ ID NO: 2664942 - RNA, 19 nt, Artificial Sequence
  Description of Artificial Sequence: Synthetic oligonucleotide
gagagagcaugugccacag

SEQ ID NO: 2664943 - RNA, 19 nt, Artificial Sequence
  Description of Artificial Sequence: Synthetic oligonucleotide
ucgauucuuggcuuucuuu

SEQ ID NO: 2664944 - RNA, 19 nt, Artificial Sequence
  Description of Artificial Sequence: Synthetic oligonucleotide
uggguccaauacaucuacc

SEQ ID NO: 2664945 - RNA, 19 nt, Artificial Sequence
  Description of Artificial Sequence: Synthetic oligonucleotide
guucagcugagucacucga

SEQ ID NO: 2664946 - RNA, 19 nt, Artificial Sequence
  Description of Artificial Sequence: Synthetic oligonucleotide
uagccuucccgguuccgag

SEQ ID NO: 2664947 - RNA, 19 nt, Artificial Sequence
  Description of Artificial Sequence: Synthetic oligonucleotide
guugccauaggacucgggu

SEQ ID NO: 2664948 - RNA, 19 nt, Artificial Sequence
  Description of Artificial Sequence: Synthetic oligonucleotide
cugaauccugggugcaaag

SEQ ID NO: 2664949 - RNA, 19 nt, Artificial Sequence
  Description of Artificial Sequence: Synthetic oligonucleotide
aacucagaguagauuuggu

SEQ ID NO: 2664950 - RNA, 19 nt, Artificial Sequence
  Description of Artificial Sequence: Synthetic oligonucleotide
agauuuggucaucuacuuu

SEQ ID NO: 2664951 - RNA, 19 nt, Artificial Sequence
  Description of Artificial Sequence: Synthetic oligonucleotide
auugcucuaauggcccaag

SEQ ID NO: 2664952 - RNA, 19 nt, Artificial Sequence
  Description of Artificial Sequence: Synthetic oligonucleotide
gguucagcugagucacucg

SEQ ID NO: 2664953 - RNA, 19 nt, Artificial Sequence
  Description of Artificial Sequence: Synthetic oligonucleotide
caaagaugguguucuccuc

SEQ ID NO: 2664954 - RNA, 19 nt, Artificial Sequence
  Description of Artificial Sequence: Synthetic oligonucleotide
aguuuguaauagacuucgg

SEQ ID NO: 2664955 - RNA, 19 nt, Artificial Sequence
  Description of Artificial Sequence: Synthetic oligonucleotide
guagcccugggaacaaucc

SEQ ID NO: 2664956 - RNA, 19 nt, Artificial Sequence
  Description of Artificial Sequence: Synthetic oligonucleotide
gaauccugggugcaaagau

SEQ ID NO: 2664957 - RNA, 19 nt, Artificial Sequence
  Description of Artificial Sequence: Synthetic oligonucleotide
ucggcaugcugcauugcuc

SEQ ID NO: 2664958 - RNA, 19 nt, Artificial Sequence
  Description of Artificial Sequence: Synthetic oligonucleotide
uaagcagaauggccuccac

SEQ ID NO: 2664959 - RNA, 19 nt, Artificial Sequence
  Description of Artificial Sequence: Synthetic oligonucleotide
ccuucaaauuuuaagcaga

SEQ ID NO: 2664960 - RNA, 19 nt, Artificial Sequence
  Description of Artificial Sequence: Synthetic oligonucleotide
uugccauaggacucggguu

SEQ ID NO: 2664961 - RNA, 19 nt, Artificial Sequence
  Description of Artificial Sequence: Synthetic oligonucleotide
uucagcugagucacucgau

SEQ ID NO: 2664962 - RNA, 19 nt, Artificial Sequence
  Description of Artificial Sequence: Synthetic oligonucleotide
cugagucacucgauucuug

SEQ ID NO: 2664963 - RNA, 19 nt, Artificial Sequence
  Description of Artificial Sequence: Synthetic oligonucleotide
gauuugaguucuucugggu

SEQ ID NO: 2664964 - RNA, 19 nt, Artificial Sequence
  Description of Artificial Sequence: Synthetic oligonucleotide
aucucaauaucagggucgu

SEQ ID NO: 2664965 - RNA, 19 nt, Artificial Sequence
  Description of Artificial Sequence: Synthetic oligonucleotide
uggagagagagagcaugug

SEQ ID NO: 2664966 - RNA, 19 nt, Artificial Sequence
  Description of Artificial Sequence: Synthetic oligonucleotide
aaaggggucugugcaccug

SEQ ID NO: 2664967 - RNA, 19 nt, Artificial Sequence
  Description of Artificial Sequence: Synthetic oligonucleotide
ggucaacugaugaaaucag

SEQ ID NO: 2664968 - RNA, 19 nt, Artificial Sequence
  Description of Artificial Sequence: Synthetic oligonucleotide
aacugugggucaacugaug

SEQ ID NO: 2664969 - RNA, 19 nt, Artificial Sequence
  Description of Artificial Sequence: Synthetic oligonucleotide
gcaugugccacagacacca

SEQ ID NO: 2664970 - RNA, 19 nt, Artificial Sequence
  Description of Artificial Sequence: Synthetic oligonucleotide
cagcugagucacucgauuc

SEQ ID NO: 2664971 - RNA, 19 nt, Artificial Sequence
  Description of Artificial Sequence: Synthetic oligonucleotide
gucucagcaaaguaccaua

SEQ ID NO: 2664972 - RNA, 19 nt, Artificial Sequence
  Description of Artificial Sequence: Synthetic oligonucleotide
gcugauucugauuugaguu

SEQ ID NO: 2664973 - RNA, 19 nt, Artificial Sequence
  Description of Artificial Sequence: Synthetic oligonucleotide
cuacuuuggugaguuucag

SEQ ID NO: 2664974 - RNA, 19 nt, Artificial Sequence
  Description of Artificial Sequence: Synthetic oligonucleotide
cauaggacucggguuggag

SEQ ID NO: 2664975 - RNA, 19 nt, Artificial Sequence
  Description of Artificial Sequence: Synthetic oligonucleotide
guccugaacacugauggaa

SEQ ID NO: 2664976 - RNA, 19 nt, Artificial Sequence
  Description of Artificial Sequence: Synthetic oligonucleotide
uauagccuucccgguuccg

SEQ ID NO: 2664977 - RNA, 19 nt, Artificial Sequence
  Description of Artificial Sequence: Synthetic oligonucleotide
agucucagcaaaguaccau

SEQ ID NO: 2664978 - RNA, 19 nt, Artificial Sequence
  Description of Artificial Sequence: Synthetic oligonucleotide
aauuuccacggaacucaga

SEQ ID NO: 2664979 - RNA, 19 nt, Artificial Sequence
  Description of Artificial Sequence: Synthetic oligonucleotide
uaauagacuucggcaugcu

SEQ ID NO: 2664980 - RNA, 19 nt, Artificial Sequence
  Description of Artificial Sequence: Synthetic oligonucleotide
uguugacuccuuccucuuu

SEQ ID NO: 2664981 - RNA, 19 nt, Artificial Sequence
  Description of Artificial Sequence: Synthetic oligonucleotide
cccagaaaccagcucuucg

SEQ ID NO: 2664982 - RNA, 19 nt, Artificial Sequence
  Description of Artificial Sequence: Synthetic oligonucleotide
auccagucucagcaaagua

SEQ ID NO: 2664983 - RNA, 19 nt, Artificial Sequence
  Description of Artificial Sequence: Synthetic oligonucleotide
gacaccacuuccccagaaa

SEQ ID NO: 2664984 - RNA, 19 nt, Artificial Sequence
  Description of Artificial Sequence: Synthetic oligonucleotide
uucucugauuccucuucuu

SEQ ID NO: 2664985 - RNA, 19 nt, Artificial Sequence
  Description of Artificial Sequence: Synthetic oligonucleotide
acugaauccugggugcaaa

SEQ ID NO: 2664986 - RNA, 19 nt, Artificial Sequence
  Description of Artificial Sequence: Synthetic oligonucleotide
ucuccuucuuuguccugaa

SEQ ID NO: 2664987 - RNA, 19 nt, Artificial Sequence
  Description of Artificial Sequence: Synthetic oligonucleotide
agagcaugugccacagaca

SEQ ID NO: 2664988 - RNA, 19 nt, Artificial Sequence
  Description of Artificial Sequence: Synthetic oligonucleotide
aacugaauccugggugcaa

SEQ ID NO: 2664989 - RNA, 19 nt, Artificial Sequence
  Description of Artificial Sequence: Synthetic oligonucleotide
auagccuucccgguuccga

SEQ ID NO: 2664990 - RNA, 19 nt, Artificial Sequence
  Description of Artificial Sequence: Synthetic oligonucleotide
ggugcaaagaugguguucu

SEQ ID NO: 2664991 - RNA, 19 nt, Artificial Sequence
  Description of Artificial Sequence: Synthetic oligonucleotide
auacaucuacccugagcuu

SEQ ID NO: 2664992 - RNA, 19 nt, Artificial Sequence
  Description of Artificial Sequence: Synthetic oligonucleotide
agaugguguucuccucagu

SEQ ID NO: 2664993 - RNA, 19 nt, Artificial Sequence
  Description of Artificial Sequence: Synthetic oligonucleotide
ucacucgauucuuggcuuu

SEQ ID NO: 2664994 - RNA, 19 nt, Artificial Sequence
  Description of Artificial Sequence: Synthetic oligonucleotide
acaucuacccugagcuucu

SEQ ID NO: 2664995 - RNA, 19 nt, Artificial Sequence
  Description of Artificial Sequence: Synthetic oligonucleotide
cacuaucagcuccuuucuc

SEQ ID NO: 2664996 - RNA, 19 nt, Artificial Sequence
  Description of Artificial Sequence: Synthetic oligonucleotide
uccccagaaaccagcucuu

SEQ ID NO: 2664997 - RNA, 19 nt, Artificial Sequence
  Description of Artificial Sequence: Synthetic oligonucleotide
uccugggugcaaagauggu

SEQ ID NO: 2664998 - RNA, 19 nt, Artificial Sequence
  Description of Artificial Sequence: Synthetic oligonucleotide
ccugaacacugauggaaac

SEQ ID NO: 2664999 - RNA, 19 nt, Artificial Sequence
  Description of Artificial Sequence: Synthetic oligonucleotide
gcuuuguuauagccuuccc

SEQ ID NO: 2665000 - RNA, 19 nt, Artificial Sequence
  Description of Artificial Sequence: Synthetic oligonucleotide
gggaacaauccagucucag

SEQ ID NO: 2665001 - RNA, 19 nt, Artificial Sequence
  Description of Artificial Sequence: Synthetic oligonucleotide
acuuccccagaaaccagcu

SEQ ID NO: 2665002 - RNA, 19 nt, Artificial Sequence
  Description of Artificial Sequence: Synthetic oligonucleotide
augcugcauugcucuaaug

SEQ ID NO: 2665003 - RNA, 19 nt, Artificial Sequence
  Description of Artificial Sequence: Synthetic oligonucleotide
ucguugccauaggacucgg

SEQ ID NO: 2665004 - RNA, 19 nt, Artificial Sequence
  Description of Artificial Sequence: Synthetic oligonucleotide
guaccauaauuguagucuu

SEQ ID NO: 2665005 - RNA, 19 nt, Artificial Sequence
  Description of Artificial Sequence: Synthetic oligonucleotide
gguguucuccucaguguag

SEQ ID NO: 2665006 - RNA, 19 nt, Artificial Sequence
  Description of Artificial Sequence: Synthetic oligonucleotide
caguguagcccugggaaca

SEQ ID NO: 2665007 - RNA, 19 nt, Artificial Sequence
  Description of Artificial Sequence: Synthetic oligonucleotide
cucuaauggcccaagccau

SEQ ID NO: 2665008 - RNA, 19 nt, Artificial Sequence
  Description of Artificial Sequence: Synthetic oligonucleotide
ggacucggguuggagagag

SEQ ID NO: 2665009 - RNA, 19 nt, Artificial Sequence
  Description of Artificial Sequence: Synthetic oligonucleotide
agacaccacuuccccagaa

SEQ ID NO: 2665010 - RNA, 19 nt, Artificial Sequence
  Description of Artificial Sequence: Synthetic oligonucleotide
gaguagauuuggucaucua

SEQ ID NO: 2665011 - RNA, 19 nt, Artificial Sequence
  Description of Artificial Sequence: Synthetic oligonucleotide
cugugggucaacugaugaa

SEQ ID NO: 2665012 - RNA, 19 nt, Artificial Sequence
  Description of Artificial Sequence: Synthetic oligonucleotide
uucuccucucugguuaguu

SEQ ID NO: 2665013 - RNA, 19 nt, Artificial Sequence
  Description of Artificial Sequence: Synthetic oligonucleotide
acggaacucagaguagauu

SEQ ID NO: 2665014 - RNA, 19 nt, Artificial Sequence
  Description of Artificial Sequence: Synthetic oligonucleotide
ugggugcaaagaugguguu

SEQ ID NO: 2665015 - RNA, 19 nt, Artificial Sequence
  Description of Artificial Sequence: Synthetic oligonucleotide
guugacuccuuccucuuuu

SEQ ID NO: 2665016 - RNA, 19 nt, Artificial Sequence
  Description of Artificial Sequence: Synthetic oligonucleotide
uggccuccacuucucuuua

SEQ ID NO: 2665017 - RNA, 19 nt, Artificial Sequence
  Description of Artificial Sequence: Synthetic oligonucleotide
cuuuucucuguugacuccu

SEQ ID NO: 2665018 - RNA, 19 nt, Artificial Sequence
  Description of Artificial Sequence: Synthetic oligonucleotide
cagaguagauuuggucauc

SEQ ID NO: 2665019 - RNA, 19 nt, Artificial Sequence
  Description of Artificial Sequence: Synthetic oligonucleotide
ccugggugcaaagauggug

SEQ ID NO: 2665020 - RNA, 19 nt, Artificial Sequence
  Description of Artificial Sequence: Synthetic oligonucleotide
ccaagccaucucaauauca

SEQ ID NO: 2665021 - RNA, 19 nt, Artificial Sequence
  Description of Artificial Sequence: Synthetic oligonucleotide
cugaugaaaucaguuugua

SEQ ID NO: 2665022 - RNA, 19 nt, Artificial Sequence
  Description of Artificial Sequence: Synthetic oligonucleotide
gcaaaguaccauaauugua

SEQ ID NO: 2665023 - RNA, 19 nt, Artificial Sequence
  Description of Artificial Sequence: Synthetic oligonucleotide
uggcccaagccaucucaau

SEQ ID NO: 2665024 - RNA, 19 nt, Artificial Sequence
  Description of Artificial Sequence: Synthetic oligonucleotide
cagucucagcaaaguacca

SEQ ID NO: 2665025 - RNA, 19 nt, Artificial Sequence
  Description of Artificial Sequence: Synthetic oligonucleotide
cuccuucuuuguccugaac

SEQ ID NO: 2665026 - RNA, 19 nt, Artificial Sequence
  Description of Artificial Sequence: Synthetic oligonucleotide
uuucuccucucugguuagu

SEQ ID NO: 2665027 - RNA, 19 nt, Artificial Sequence
  Description of Artificial Sequence: Synthetic oligonucleotide
gucaacugaugaaaucagu

SEQ ID NO: 2665028 - RNA, 19 nt, Artificial Sequence
  Description of Artificial Sequence: Synthetic oligonucleotide
agagagcaugugccacaga

SEQ ID NO: 2665029 - RNA, 19 nt, Artificial Sequence
  Description of Artificial Sequence: Synthetic oligonucleotide
gacuucggcaugcugcauu

SEQ ID NO: 2665030 - RNA, 19 nt, Artificial Sequence
  Description of Artificial Sequence: Synthetic oligonucleotide
aguguagcccugggaacaa

SEQ ID NO: 2665031 - RNA, 19 nt, Artificial Sequence
  Description of Artificial Sequence: Synthetic oligonucleotide
cucggguuggagagagaga

SEQ ID NO: 2665032 - RNA, 19 nt, Artificial Sequence
  Description of Artificial Sequence: Synthetic oligonucleotide
cagggucguugccauagga

SEQ ID NO: 2665033 - RNA, 19 nt, Artificial Sequence
  Description of Artificial Sequence: Synthetic oligonucleotide
cacucgauucuuggcuuuc

SEQ ID NO: 2665034 - RNA, 19 nt, Artificial Sequence
  Description of Artificial Sequence: Synthetic oligonucleotide
caugugccacagacaccac

SEQ ID NO: 2665035 - RNA, 19 nt, Artificial Sequence
  Description of Artificial Sequence: Synthetic oligonucleotide
uaucagggucguugccaua

SEQ ID NO: 2665036 - RNA, 19 nt, Artificial Sequence
  Description of Artificial Sequence: Synthetic oligonucleotide
cuaauggcccaagccaucu

SEQ ID NO: 2665037 - RNA, 19 nt, Artificial Sequence
  Description of Artificial Sequence: Synthetic oligonucleotide
cugauacuuguggguucag

SEQ ID NO: 2665038 - RNA, 19 nt, Artificial Sequence
  Description of Artificial Sequence: Synthetic oligonucleotide
ggcccaagccaucucaaua

SEQ ID NO: 2665039 - RNA, 19 nt, Artificial Sequence
  Description of Artificial Sequence: Synthetic oligonucleotide
cuucggcaugcugcauugc

SEQ ID NO: 2665040 - RNA, 19 nt, Artificial Sequence
  Description of Artificial Sequence: Synthetic oligonucleotide
gccaucucaauaucagggu

SEQ ID NO: 2665041 - RNA, 19 nt, Artificial Sequence
  Description of Artificial Sequence: Synthetic oligonucleotide
gccauaggacucggguugg

SEQ ID NO: 2665042 - RNA, 19 nt, Artificial Sequence
  Description of Artificial Sequence: Synthetic oligonucleotide
gucacucgauucuuggcuu

SEQ ID NO: 2665043 - RNA, 19 nt, Artificial Sequence
  Description of Artificial Sequence: Synthetic oligonucleotide
ccgguuccgagcaauuuca

SEQ ID NO: 2665044 - RNA, 19 nt, Artificial Sequence
  Description of Artificial Sequence: Synthetic oligonucleotide
cccgguuccgagcaauuuc

SEQ ID NO: 2665045 - RNA, 19 nt, Artificial Sequence
  Description of Artificial Sequence: Synthetic oligonucleotide
cuucuuuguccugaacacu

SEQ ID NO: 2665046 - RNA, 19 nt, Artificial Sequence
  Description of Artificial Sequence: Synthetic oligonucleotide
cuuuguccugaacacugau

SEQ ID NO: 2665047 - RNA, 19 nt, Artificial Sequence
  Description of Artificial Sequence: Synthetic oligonucleotide
gucugugcaccugauacuu

SEQ ID NO: 2665048 - RNA, 19 nt, Artificial Sequence
  Description of Artificial Sequence: Synthetic oligonucleotide
ggguucagcugagucacuc

SEQ ID NO: 2665049 - RNA, 19 nt, Artificial Sequence
  Description of Artificial Sequence: Synthetic oligonucleotide
ucccgguuccgagcaauuu

SEQ ID NO: 2665050 - RNA, 19 nt, Artificial Sequence
  Description of Artificial Sequence: Synthetic oligonucleotide
cucagcaaaguaccauaau

SEQ ID NO: 2665051 - RNA, 19 nt, Artificial Sequence
  Description of Artificial Sequence: Synthetic oligonucleotide
cauugcucuaauggcccaa

SEQ ID NO: 2665052 - RNA, 19 nt, Artificial Sequence
  Description of Artificial Sequence: Synthetic oligonucleotide
caugcugcauugcucuaau

SEQ ID NO: 2665053 - RNA, 19 nt, Artificial Sequence
  Description of Artificial Sequence: Synthetic oligonucleotide
ccugggaacaauccagucu

SEQ ID NO: 2665054 - RNA, 19 nt, Artificial Sequence
  Description of Artificial Sequence: Synthetic oligonucleotide
ccaauacaucuacccugag

SEQ ID NO: 2665055 - RNA, 19 nt, Artificial Sequence
  Description of Artificial Sequence: Synthetic oligonucleotide
ggucugugcaccugauacu

SEQ ID NO: 2665056 - RNA, 19 nt, Artificial Sequence
  Description of Artificial Sequence: Synthetic oligonucleotide
gcauugcucuaauggccca

SEQ ID NO: 2665057 - RNA, 19 nt, Artificial Sequence
  Description of Artificial Sequence: Synthetic oligonucleotide
ugaguucuucuggguccaa

SEQ ID NO: 2665058 - RNA, 19 nt, Artificial Sequence
  Description of Artificial Sequence: Synthetic oligonucleotide
ucucaauaucagggucguu

SEQ ID NO: 2665059 - RNA, 19 nt, Artificial Sequence
  Description of Artificial Sequence: Synthetic oligonucleotide
ccugauacuuguggguuca

SEQ ID NO: 2665060 - RNA, 19 nt, Artificial Sequence
  Description of Artificial Sequence: Synthetic oligonucleotide
gggugcaaagaugguguuc

SEQ ID NO: 2665061 - RNA, 19 nt, Artificial Sequence
  Description of Artificial Sequence: Synthetic oligonucleotide
gguuccgagcaauuucaau

SEQ ID NO: 2665062 - RNA, 19 nt, Artificial Sequence
  Description of Artificial Sequence: Synthetic oligonucleotide
gucaucuacuuuggugagu

SEQ ID NO: 2665063 - RNA, 19 nt, Artificial Sequence
  Description of Artificial Sequence: Synthetic oligonucleotide
caaaggggucugugcaccu

SEQ ID NO: 2665064 - RNA, 19 nt, Artificial Sequence
  Description of Artificial Sequence: Synthetic oligonucleotide
ccauaauuguagucuucua

SEQ ID NO: 2665065 - RNA, 19 nt, Artificial Sequence
  Description of Artificial Sequence: Synthetic oligonucleotide
cacggaacucagaguagau

SEQ ID NO: 2665066 - RNA, 19 nt, Artificial Sequence
  Description of Artificial Sequence: Synthetic oligonucleotide
gaguucuucuggguccaau

SEQ ID NO: 2665067 - RNA, 19 nt, Artificial Sequence
  Description of Artificial Sequence: Synthetic oligonucleotide
ccacggaacucagaguaga

SEQ ID NO: 2665068 - RNA, 19 nt, Artificial Sequence
  Description of Artificial Sequence: Synthetic oligonucleotide
caccugauacuuguggguu

SEQ ID NO: 2665069 - RNA, 19 nt, Artificial Sequence
  Description of Artificial Sequence: Synthetic oligonucleotide
gcaugcugcauugcucuaa

SEQ ID NO: 2665070 - RNA, 19 nt, Artificial Sequence
  Description of Artificial Sequence: Synthetic oligonucleotide
caucuacccugagcuucuc

SEQ ID NO: 2665071 - RNA, 19 nt, Artificial Sequence
  Description of Artificial Sequence: Synthetic oligonucleotide
cguugccauaggacucggg

SEQ ID NO: 2665072 - RNA, 19 nt, Artificial Sequence
  Description of Artificial Sequence: Synthetic oligonucleotide
agacuucggcaugcugcau

SEQ ID NO: 2665073 - RNA, 19 nt, Artificial Sequence
  Description of Artificial Sequence: Synthetic oligonucleotide
ccugagcuucucaaaauuu

SEQ ID NO: 2665074 - RNA, 19 nt, Artificial Sequence
  Description of Artificial Sequence: Synthetic oligonucleotide
caggaacugugggucaacu

SEQ ID NO: 2665075 - RNA, 19 nt, Artificial Sequence
  Description of Artificial Sequence: Synthetic oligonucleotide
cgauucuuggcuuucuuuu

SEQ ID NO: 2665076 - RNA, 19 nt, Artificial Sequence
  Description of Artificial Sequence: Synthetic oligonucleotide
cucgauucuuggcuuucuu

SEQ ID NO: 2665077 - RNA, 19 nt, Artificial Sequence
  Description of Artificial Sequence: Synthetic oligonucleotide
cggguuggagagagagagc

SEQ ID NO: 2665078 - RNA, 19 nt, Artificial Sequence
  Description of Artificial Sequence: Synthetic oligonucleotide
cugauuccucuucuucauu

SEQ ID NO: 2665079 - RNA, 19 nt, Artificial Sequence
  Description of Artificial Sequence: Synthetic oligonucleotide
ccacuaucagcuccuuucu

SEQ ID NO: 2665080 - RNA, 19 nt, Artificial Sequence
  Description of Artificial Sequence: Synthetic oligonucleotide
cuucccgguuccgagcaau

SEQ ID NO: 2665081 - RNA, 19 nt, Artificial Sequence
  Description of Artificial Sequence: Synthetic oligonucleotide
ggggucugugcaccugaua

SEQ ID NO: 2665082 - RNA, 19 nt, Artificial Sequence
  Description of Artificial Sequence: Synthetic oligonucleotide
ggcaugcugcauugcucua

SEQ ID NO: 2665083 - RNA, 19 nt, Artificial Sequence
  Description of Artificial Sequence: Synthetic oligonucleotide
cuuguggguucagcugagu

SEQ ID NO: 2665084 - RNA, 19 nt, Artificial Sequence
  Description of Artificial Sequence: Synthetic oligonucleotide
cccugagcuucucaaaauu

SEQ ID NO: 2665085 - RNA, 19 nt, Artificial Sequence
  Description of Artificial Sequence: Synthetic oligonucleotide
cuccacuaucagcuccuuu

SEQ ID NO: 2665086 - RNA, 19 nt, Artificial Sequence
  Description of Artificial Sequence: Synthetic oligonucleotide
ccccagaaaccagcucuuc

SEQ ID NO: 2665087 - RNA, 19 nt, Artificial Sequence
  Description of Artificial Sequence: Synthetic oligonucleotide
cacuucucuuuagcugauu

SEQ ID NO: 2665088 - RNA, 19 nt, Artificial Sequence
  Description of Artificial Sequence: Synthetic oligonucleotide
ccauaggacucggguugga

SEQ ID NO: 2665089 - RNA, 19 nt, Artificial Sequence
  Description of Artificial Sequence: Synthetic oligonucleotide
cgguuccgagcaauuucaa

SEQ ID NO: 2665090 - RNA, 19 nt, Artificial Sequence
  Description of Artificial Sequence: Synthetic oligonucleotide
ccuucccgguuccgagcaa

SEQ ID NO: 2665091 - RNA, 19 nt, Artificial Sequence
  Description of Artificial Sequence: Synthetic oligonucleotide
ucugguagccaccauagag

SEQ ID NO: 2665092 - RNA, 19 nt, Artificial Sequence
  Description of Artificial Sequence: Synthetic oligonucleotide
auaggcacaagccuggcac

SEQ ID NO: 2665093 - RNA, 19 nt, Artificial Sequence
  Description of Artificial Sequence: Synthetic oligonucleotide
aacccaauccgucugguag

SEQ ID NO: 2665094 - RNA, 19 nt, Artificial Sequence
  Description of Artificial Sequence: Synthetic oligonucleotide
ucuuggaagccccuggacg

SEQ ID NO: 2665095 - RNA, 19 nt, Artificial Sequence
  Description of Artificial Sequence: Synthetic oligonucleotide
ugacaaguagcccagcaug

SEQ ID NO: 2665096 - RNA, 19 nt, Artificial Sequence
  Description of Artificial Sequence: Synthetic oligonucleotide
uguauuuucucucucucuc

SEQ ID NO: 2665097 - RNA, 19 nt, Artificial Sequence
  Description of Artificial Sequence: Synthetic oligonucleotide
ucuaccaauacccgagccc

SEQ ID NO: 2665098 - RNA, 19 nt, Artificial Sequence
  Description of Artificial Sequence: Synthetic oligonucleotide
aaaggcagcgggcgggagc

SEQ ID NO: 2665099 - RNA, 19 nt, Artificial Sequence
  Description of Artificial Sequence: Synthetic oligonucleotide
uucucucucucucucgagg

SEQ ID NO: 2665100 - RNA, 19 nt, Artificial Sequence
  Description of Artificial Sequence: Synthetic oligonucleotide
ugucccacgaucaguugcg

SEQ ID NO: 2665101 - RNA, 19 nt, Artificial Sequence
  Description of Artificial Sequence: Synthetic oligonucleotide
cauggcauuccacuggccg

SEQ ID NO: 2665102 - RNA, 19 nt, Artificial Sequence
  Description of Artificial Sequence: Synthetic oligonucleotide
ucucucucucucucgaggg

SEQ ID NO: 2665103 - RNA, 19 nt, Artificial Sequence
  Description of Artificial Sequence: Synthetic oligonucleotide
cuuggaagccccuggacgc

SEQ ID NO: 2665104 - RNA, 19 nt, Artificial Sequence
  Description of Artificial Sequence: Synthetic oligonucleotide
auggcauuccacuggccgc

SEQ ID NO: 2665105 - RNA, 19 nt, Artificial Sequence
  Description of Artificial Sequence: Synthetic oligonucleotide
uuuucucucucucucucga

SEQ ID NO: 2665106 - RNA, 19 nt, Artificial Sequence
  Description of Artificial Sequence: Synthetic oligonucleotide
auuuucucucucucucucg

SEQ ID NO: 2665107 - RNA, 19 nt, Artificial Sequence
  Description of Artificial Sequence: Synthetic oligonucleotide
ugaugguggaaauggugag

SEQ ID NO: 2665108 - RNA, 19 nt, Artificial Sequence
  Description of Artificial Sequence: Synthetic oligonucleotide
aucaguugcgcagucugcc

SEQ ID NO: 2665109 - RNA, 19 nt, Artificial Sequence
  Description of Artificial Sequence: Synthetic oligonucleotide
uguuuguguauuuucucuc

SEQ ID NO: 2665110 - RNA, 19 nt, Artificial Sequence
  Description of Artificial Sequence: Synthetic oligonucleotide
agggugauggugccgaguc

SEQ ID NO: 2665111 - RNA, 19 nt, Artificial Sequence
  Description of Artificial Sequence: Synthetic oligonucleotide
gacaaguagcccagcaugg

SEQ ID NO: 2665112 - RNA, 19 nt, Artificial Sequence
  Description of Artificial Sequence: Synthetic oligonucleotide
ucggucuuuccccaggccc

SEQ ID NO: 2665113 - RNA, 19 nt, Artificial Sequence
  Description of Artificial Sequence: Synthetic oligonucleotide
ggaguaagcgccaaaaggc

SEQ ID NO: 2665114 - RNA, 19 nt, Artificial Sequence
  Description of Artificial Sequence: Synthetic oligonucleotide
uauuuucucucucucucuc

SEQ ID NO: 2665115 - RNA, 19 nt, Artificial Sequence
  Description of Artificial Sequence: Synthetic oligonucleotide
cuaccaauacccgagcccc

SEQ ID NO: 2665116 - RNA, 19 nt, Artificial Sequence
  Description of Artificial Sequence: Synthetic oligonucleotide
acccaauccgucugguagc

SEQ ID NO: 2665117 - RNA, 19 nt, Artificial Sequence
  Description of Artificial Sequence: Synthetic oligonucleotide
uccacuggccgccacaaac

SEQ ID NO: 2665118 - RNA, 19 nt, Artificial Sequence
  Description of Artificial Sequence: Synthetic oligonucleotide
agggaacaugaccaccagc

SEQ ID NO: 2665119 - RNA, 19 nt, Artificial Sequence
  Description of Artificial Sequence: Synthetic oligonucleotide
gaaauggugagcaggguga

SEQ ID NO: 2665120 - RNA, 19 nt, Artificial Sequence
  Description of Artificial Sequence: Synthetic oligonucleotide
gauggugccgagucggccc

SEQ ID NO: 2665121 - RNA, 19 nt, Artificial Sequence
  Description of Artificial Sequence: Synthetic oligonucleotide
acaaacccaauccgucugg

SEQ ID NO: 2665122 - RNA, 19 nt, Artificial Sequence
  Description of Artificial Sequence: Synthetic oligonucleotide
uuuguguauuuucucucuc

SEQ ID NO: 2665123 - RNA, 19 nt, Artificial Sequence
  Description of Artificial Sequence: Synthetic oligonucleotide
guggaaauggugagcaggg

SEQ ID NO: 2665124 - RNA, 19 nt, Artificial Sequence
  Description of Artificial Sequence: Synthetic oligonucleotide
acagcgcugacaaguagcc

SEQ ID NO: 2665125 - RNA, 19 nt, Artificial Sequence
  Description of Artificial Sequence: Synthetic oligonucleotide
cacagcgcugacaaguagc

SEQ ID NO: 2665126 - RNA, 19 nt, Artificial Sequence
  Description of Artificial Sequence: Synthetic oligonucleotide
ucaguugcgcagucugccg

SEQ ID NO: 2665127 - RNA, 19 nt, Artificial Sequence
  Description of Artificial Sequence: Synthetic oligonucleotide
aaggcagcgggcgggagcg

SEQ ID NO: 2665128 - RNA, 19 nt, Artificial Sequence
  Description of Artificial Sequence: Synthetic oligonucleotide
agucggucuuuccccaggc

SEQ ID NO: 2665129 - RNA, 19 nt, Artificial Sequence
  Description of Artificial Sequence: Synthetic oligonucleotide
aauacccgagccccggcca

SEQ ID NO: 2665130 - RNA, 19 nt, Artificial Sequence
  Description of Artificial Sequence: Synthetic oligonucleotide
acaaguagcccagcauggc

SEQ ID NO: 2665131 - RNA, 19 nt, Artificial Sequence
  Description of Artificial Sequence: Synthetic oligonucleotide
accagcuccaggccgucgc

SEQ ID NO: 2665132 - RNA, 19 nt, Artificial Sequence
  Description of Artificial Sequence: Synthetic oligonucleotide
uaagcgccaaaaggcagcg

SEQ ID NO: 2665133 - RNA, 19 nt, Artificial Sequence
  Description of Artificial Sequence: Synthetic oligonucleotide
agccccuggacgcccaugc

SEQ ID NO: 2665134 - RNA, 19 nt, Artificial Sequence
  Description of Artificial Sequence: Synthetic oligonucleotide
aauccgucugguagccacc

SEQ ID NO: 2665135 - RNA, 19 nt, Artificial Sequence
  Description of Artificial Sequence: Synthetic oligonucleotide
auagagccgcggcaagcgc

SEQ ID NO: 2665136 - RNA, 19 nt, Artificial Sequence
  Description of Artificial Sequence: Synthetic oligonucleotide
gaugguggaaauggugagc

SEQ ID NO: 2665137 - RNA, 19 nt, Artificial Sequence
  Description of Artificial Sequence: Synthetic oligonucleotide
gaugcguggagccccgggc

SEQ ID NO: 2665138 - RNA, 19 nt, Artificial Sequence
  Description of Artificial Sequence: Synthetic oligonucleotide
cauagagccgcggcaagcg

SEQ ID NO: 2665139 - RNA, 19 nt, Artificial Sequence
  Description of Artificial Sequence: Synthetic oligonucleotide
uccgugggcagaagaaaca

SEQ ID NO: 2665140 - RNA, 19 nt, Artificial Sequence
  Description of Artificial Sequence: Synthetic oligonucleotide
ugaugcguggagccccggg

SEQ ID NO: 2665141 - RNA, 19 nt, Artificial Sequence
  Description of Artificial Sequence: Synthetic oligonucleotide
uugaggagguccacaggca

SEQ ID NO: 2665142 - RNA, 19 nt, Artificial Sequence
  Description of Artificial Sequence: Synthetic oligonucleotide
uuucucucucucucucgag

SEQ ID NO: 2665143 - RNA, 19 nt, Artificial Sequence
  Description of Artificial Sequence: Synthetic oligonucleotide
ucgaggggugcccuuguug

SEQ ID NO: 2665144 - RNA, 19 nt, Artificial Sequence
  Description of Artificial Sequence: Synthetic oligonucleotide
gugaugguggaaaugguga

SEQ ID NO: 2665145 - RNA, 19 nt, Artificial Sequence
  Description of Artificial Sequence: Synthetic oligonucleotide
gugucccacgaucaguugc

SEQ ID NO: 2665146 - RNA, 19 nt, Artificial Sequence
  Description of Artificial Sequence: Synthetic oligonucleotide
aguaagcgccaaaaggcag

SEQ ID NO: 2665147 - RNA, 19 nt, Artificial Sequence
  Description of Artificial Sequence: Synthetic oligonucleotide
guaagcgccaaaaggcagc

SEQ ID NO: 2665148 - RNA, 19 nt, Artificial Sequence
  Description of Artificial Sequence: Synthetic oligonucleotide
uaccaauacccgagccccg

SEQ ID NO: 2665149 - RNA, 19 nt, Artificial Sequence
  Description of Artificial Sequence: Synthetic oligonucleotide
ggugauggugccgagucgg

SEQ ID NO: 2665150 - RNA, 19 nt, Artificial Sequence
  Description of Artificial Sequence: Synthetic oligonucleotide
cccgcgucuaccaauaccc

SEQ ID NO: 2665151 - RNA, 19 nt, Artificial Sequence
  Description of Artificial Sequence: Synthetic oligonucleotide
cuccgugggcagaagaaac

SEQ ID NO: 2665152 - RNA, 19 nt, Artificial Sequence
  Description of Artificial Sequence: Synthetic oligonucleotide
gccgugaugguggaaaugg

SEQ ID NO: 2665153 - RNA, 19 nt, Artificial Sequence
  Description of Artificial Sequence: Synthetic oligonucleotide
ugcgcagucugccgcuccg

SEQ ID NO: 2665154 - RNA, 19 nt, Artificial Sequence
  Description of Artificial Sequence: Synthetic oligonucleotide
gugcgcgcgaguuugagga

SEQ ID NO: 2665155 - RNA, 19 nt, Artificial Sequence
  Description of Artificial Sequence: Synthetic oligonucleotide
augcguggagccccgggcg

SEQ ID NO: 2665156 - RNA, 19 nt, Artificial Sequence
  Description of Artificial Sequence: Synthetic oligonucleotide
aggggugcccuuguugccc

SEQ ID NO: 2665157 - RNA, 19 nt, Artificial Sequence
  Description of Artificial Sequence: Synthetic oligonucleotide
agaggagcggagccccugg

SEQ ID NO: 2665158 - RNA, 19 nt, Artificial Sequence
  Description of Artificial Sequence: Synthetic oligonucleotide
gaguaagcgccaaaaggca

SEQ ID NO: 2665159 - RNA, 19 nt, Artificial Sequence
  Description of Artificial Sequence: Synthetic oligonucleotide
gccgccacaaacccaaucc

SEQ ID NO: 2665160 - RNA, 19 nt, Artificial Sequence
  Description of Artificial Sequence: Synthetic oligonucleotide
gucuaccaauacccgagcc

SEQ ID NO: 2665161 - RNA, 19 nt, Artificial Sequence
  Description of Artificial Sequence: Synthetic oligonucleotide
gcacaagccuggcacagcg

SEQ ID NO: 2665162 - RNA, 19 nt, Artificial Sequence
  Description of Artificial Sequence: Synthetic oligonucleotide
uugcccacgugucccacga

SEQ ID NO: 2665163 - RNA, 19 nt, Artificial Sequence
  Description of Artificial Sequence: Synthetic oligonucleotide
cggaguaagcgccaaaagg

SEQ ID NO: 2665164 - RNA, 19 nt, Artificial Sequence
  Description of Artificial Sequence: Synthetic oligonucleotide
gccccauucggccagucgg

SEQ ID NO: 2665165 - RNA, 19 nt, Artificial Sequence
  Description of Artificial Sequence: Synthetic oligonucleotide
uggugaugcguggagcccc

SEQ ID NO: 2665166 - RNA, 19 nt, Artificial Sequence
  Description of Artificial Sequence: Synthetic oligonucleotide
acucuuggaagccccugga

SEQ ID NO: 2665167 - RNA, 19 nt, Artificial Sequence
  Description of Artificial Sequence: Synthetic oligonucleotide
ucucucucucucgaggggu

SEQ ID NO: 2665168 - RNA, 19 nt, Artificial Sequence
  Description of Artificial Sequence: Synthetic oligonucleotide
gacggugcgcgcgaguuug

SEQ ID NO: 2665169 - RNA, 19 nt, Artificial Sequence
  Description of Artificial Sequence: Synthetic oligonucleotide
guuuguguauuuucucucu

SEQ ID NO: 2665170 - RNA, 19 nt, Artificial Sequence
  Description of Artificial Sequence: Synthetic oligonucleotide
caugcuuccuccgugggca

SEQ ID NO: 2665171 - RNA, 19 nt, Artificial Sequence
  Description of Artificial Sequence: Synthetic oligonucleotide
gaucaguugcgcagucugc

SEQ ID NO: 2665172 - RNA, 19 nt, Artificial Sequence
  Description of Artificial Sequence: Synthetic oligonucleotide
cucucucucucucgagggg

SEQ ID NO: 2665173 - RNA, 19 nt, Artificial Sequence
  Description of Artificial Sequence: Synthetic oligonucleotide
aaacccaauccgucuggua

SEQ ID NO: 2665174 - RNA, 19 nt, Artificial Sequence
  Description of Artificial Sequence: Synthetic oligonucleotide
accaauacccgagccccgg

SEQ ID NO: 2665175 - RNA, 19 nt, Artificial Sequence
  Description of Artificial Sequence: Synthetic oligonucleotide
caauacccgagccccggcc

SEQ ID NO: 2665176 - RNA, 19 nt, Artificial Sequence
  Description of Artificial Sequence: Synthetic oligonucleotide
gacgcccaugcuuccuccg

SEQ ID NO: 2665177 - RNA, 19 nt, Artificial Sequence
  Description of Artificial Sequence: Synthetic oligonucleotide
uggcauuccacuggccgcc

SEQ ID NO: 2665178 - RNA, 19 nt, Artificial Sequence
  Description of Artificial Sequence: Synthetic oligonucleotide
ugguggaaauggugagcag

SEQ ID NO: 2665179 - RNA, 19 nt, Artificial Sequence
  Description of Artificial Sequence: Synthetic oligonucleotide
cagcuggcggugcaggugc

SEQ ID NO: 2665180 - RNA, 19 nt, Artificial Sequence
  Description of Artificial Sequence: Synthetic oligonucleotide
accauagagccgcggcaag

SEQ ID NO: 2665181 - RNA, 19 nt, Artificial Sequence
  Description of Artificial Sequence: Synthetic oligonucleotide
caguugcgcagucugccgc

SEQ ID NO: 2665182 - RNA, 19 nt, Artificial Sequence
  Description of Artificial Sequence: Synthetic oligonucleotide
uggcgcgagacggugcgcg

SEQ ID NO: 2665183 - RNA, 19 nt, Artificial Sequence
  Description of Artificial Sequence: Synthetic oligonucleotide
cccacgaucaguugcgcag

SEQ ID NO: 2665184 - RNA, 19 nt, Artificial Sequence
  Description of Artificial Sequence: Synthetic oligonucleotide
cacuggccgccacaaaccc

SEQ ID NO: 2665185 - RNA, 19 nt, Artificial Sequence
  Description of Artificial Sequence: Synthetic oligonucleotide
ugauggugccgagucggcc

SEQ ID NO: 2665186 - RNA, 19 nt, Artificial Sequence
  Description of Artificial Sequence: Synthetic oligonucleotide
caaguagcccagcauggca

SEQ ID NO: 2665187 - RNA, 19 nt, Artificial Sequence
  Description of Artificial Sequence: Synthetic oligonucleotide
aguugcgcagucugccgcu

SEQ ID NO: 2665188 - RNA, 19 nt, Artificial Sequence
  Description of Artificial Sequence: Synthetic oligonucleotide
guugcccacgugucccacg

SEQ ID NO: 2665189 - RNA, 19 nt, Artificial Sequence
  Description of Artificial Sequence: Synthetic oligonucleotide
ccuggugaugcguggagcc

SEQ ID NO: 2665190 - RNA, 19 nt, Artificial Sequence
  Description of Artificial Sequence: Synthetic oligonucleotide
gaggagguccacaggcacc

SEQ ID NO: 2665191 - RNA, 19 nt, Artificial Sequence
  Description of Artificial Sequence: Synthetic oligonucleotide
agcagggugauggugccga

SEQ ID NO: 2665192 - RNA, 19 nt, Artificial Sequence
  Description of Artificial Sequence: Synthetic oligonucleotide
cucuuggaagccccuggac

SEQ ID NO: 2665193 - RNA, 19 nt, Artificial Sequence
  Description of Artificial Sequence: Synthetic oligonucleotide
cagucugccgcuccgccug

SEQ ID NO: 2665194 - RNA, 19 nt, Artificial Sequence
  Description of Artificial Sequence: Synthetic oligonucleotide
cagucggucuuuccccagg

SEQ ID NO: 2665195 - RNA, 19 nt, Artificial Sequence
  Description of Artificial Sequence: Synthetic oligonucleotide
ucccacgaucaguugcgca

SEQ ID NO: 2665196 - RNA, 19 nt, Artificial Sequence
  Description of Artificial Sequence: Synthetic oligonucleotide
cuccgccuggcaccgacgg

SEQ ID NO: 2665197 - RNA, 19 nt, Artificial Sequence
  Description of Artificial Sequence: Synthetic oligonucleotide
aaaaggcagcgggcgggag

SEQ ID NO: 2665198 - RNA, 19 nt, Artificial Sequence
  Description of Artificial Sequence: Synthetic oligonucleotide
ugccgagucggccccgcgc

SEQ ID NO: 2665199 - RNA, 19 nt, Artificial Sequence
  Description of Artificial Sequence: Synthetic oligonucleotide
auacccgagccccggccag

SEQ ID NO: 2665200 - RNA, 19 nt, Artificial Sequence
  Description of Artificial Sequence: Synthetic oligonucleotide
guauuuucucucucucucu

SEQ ID NO: 2665201 - RNA, 19 nt, Artificial Sequence
  Description of Artificial Sequence: Synthetic oligonucleotide
ugccgcuccgccuggcacc

SEQ ID NO: 2665202 - RNA, 19 nt, Artificial Sequence
  Description of Artificial Sequence: Synthetic oligonucleotide
gaggggugcccuuguugcc

SEQ ID NO: 2665203 - RNA, 19 nt, Artificial Sequence
  Description of Artificial Sequence: Synthetic oligonucleotide
gcgucuaccaauacccgag

SEQ ID NO: 2665204 - RNA, 19 nt, Artificial Sequence
  Description of Artificial Sequence: Synthetic oligonucleotide
uggacgcccaugcuuccuc

SEQ ID NO: 2665205 - RNA, 19 nt, Artificial Sequence
  Description of Artificial Sequence: Synthetic oligonucleotide
cucucucucucgaggggug

SEQ ID NO: 2665206 - RNA, 19 nt, Artificial Sequence
  Description of Artificial Sequence: Synthetic oligonucleotide
gggaacaugaccaccagcu

SEQ ID NO: 2665207 - RNA, 19 nt, Artificial Sequence
  Description of Artificial Sequence: Synthetic oligonucleotide
gaguuugaggagguccaca

SEQ ID NO: 2665208 - RNA, 19 nt, Artificial Sequence
  Description of Artificial Sequence: Synthetic oligonucleotide
ggcaccacagccccgggac

SEQ ID NO: 2665209 - RNA, 19 nt, Artificial Sequence
  Description of Artificial Sequence: Synthetic oligonucleotide
gcggcaagcgccgagcccg

SEQ ID NO: 2665210 - RNA, 19 nt, Artificial Sequence
  Description of Artificial Sequence: Synthetic oligonucleotide
aggagcggagccccuggug

SEQ ID NO: 2665211 - RNA, 19 nt, Artificial Sequence
  Description of Artificial Sequence: Synthetic oligonucleotide
ucucucucgaggggugccc

SEQ ID NO: 2665212 - RNA, 19 nt, Artificial Sequence
  Description of Artificial Sequence: Synthetic oligonucleotide
uggaaauggugagcagggu

SEQ ID NO: 2665213 - RNA, 19 nt, Artificial Sequence
  Description of Artificial Sequence: Synthetic oligonucleotide
gcaccgacggccccauucg

SEQ ID NO: 2665214 - RNA, 19 nt, Artificial Sequence
  Description of Artificial Sequence: Synthetic oligonucleotide
ggugcgcgcgaguuugagg

SEQ ID NO: 2665215 - RNA, 19 nt, Artificial Sequence
  Description of Artificial Sequence: Synthetic oligonucleotide
gugcugcugcugcugcugg

SEQ ID NO: 2665216 - RNA, 19 nt, Artificial Sequence
  Description of Artificial Sequence: Synthetic oligonucleotide
uugcgcagucugccgcucc

SEQ ID NO: 2665217 - RNA, 19 nt, Artificial Sequence
  Description of Artificial Sequence: Synthetic oligonucleotide
gccaaaaggcagcgggcgg

SEQ ID NO: 2665218 - RNA, 19 nt, Artificial Sequence
  Description of Artificial Sequence: Synthetic oligonucleotide
ucgccgcccggauaggcac

SEQ ID NO: 2665219 - RNA, 19 nt, Artificial Sequence
  Description of Artificial Sequence: Synthetic oligonucleotide
gcuggcgcgagacggugcg

SEQ ID NO: 2665220 - RNA, 19 nt, Artificial Sequence
  Description of Artificial Sequence: Synthetic oligonucleotide
ugcgcgcgaguuugaggag

SEQ ID NO: 2665221 - RNA, 19 nt, Artificial Sequence
  Description of Artificial Sequence: Synthetic oligonucleotide
ucucucucucgaggggugc

SEQ ID NO: 2665222 - RNA, 19 nt, Artificial Sequence
  Description of Artificial Sequence: Synthetic oligonucleotide
ucucgaggggugcccuugu

SEQ ID NO: 2665223 - RNA, 19 nt, Artificial Sequence
  Description of Artificial Sequence: Synthetic oligonucleotide
gccaccauagagccgcggc

SEQ ID NO: 2665224 - RNA, 19 nt, Artificial Sequence
  Description of Artificial Sequence: Synthetic oligonucleotide
ggccagucggucuuucccc

SEQ ID NO: 2665225 - RNA, 19 nt, Artificial Sequence
  Description of Artificial Sequence: Synthetic oligonucleotide
agccccgggcgcuagggcu

SEQ ID NO: 2665226 - RNA, 19 nt, Artificial Sequence
  Description of Artificial Sequence: Synthetic oligonucleotide
aagcgccaaaaggcagcgg

SEQ ID NO: 2665227 - RNA, 19 nt, Artificial Sequence
  Description of Artificial Sequence: Synthetic oligonucleotide
ucggccagucggucuuucc

SEQ ID NO: 2665228 - RNA, 19 nt, Artificial Sequence
  Description of Artificial Sequence: Synthetic oligonucleotide
aguagcccagcauggcauu

SEQ ID NO: 2665229 - RNA, 19 nt, Artificial Sequence
  Description of Artificial Sequence: Synthetic oligonucleotide
ugcuggcgcgagacggugc

SEQ ID NO: 2665230 - RNA, 19 nt, Artificial Sequence
  Description of Artificial Sequence: Synthetic oligonucleotide
ggagcggagccccugguga

SEQ ID NO: 2665231 - RNA, 19 nt, Artificial Sequence
  Description of Artificial Sequence: Synthetic oligonucleotide
ggcgcuagggcugcuggcg

SEQ ID NO: 2665232 - RNA, 19 nt, Artificial Sequence
  Description of Artificial Sequence: Synthetic oligonucleotide
gucggucuuuccccaggcc

SEQ ID NO: 2665233 - RNA, 19 nt, Artificial Sequence
  Description of Artificial Sequence: Synthetic oligonucleotide
ugcccuuguugcccacgug

SEQ ID NO: 2665234 - RNA, 19 nt, Artificial Sequence
  Description of Artificial Sequence: Synthetic oligonucleotide
cuggcggugcaggugcugc

SEQ ID NO: 2665235 - RNA, 19 nt, Artificial Sequence
  Description of Artificial Sequence: Synthetic oligonucleotide
uagccaccauagagccgcg

SEQ ID NO: 2665236 - RNA, 19 nt, Artificial Sequence
  Description of Artificial Sequence: Synthetic oligonucleotide
agcccagcauggcauucca

SEQ ID NO: 2665237 - RNA, 19 nt, Artificial Sequence
  Description of Artificial Sequence: Synthetic oligonucleotide
gccgucgccgcccggauag

SEQ ID NO: 2665238 - RNA, 19 nt, Artificial Sequence
  Description of Artificial Sequence: Synthetic oligonucleotide
ccaaaaggcagcgggcggg

SEQ ID NO: 2665239 - RNA, 19 nt, Artificial Sequence
  Description of Artificial Sequence: Synthetic oligonucleotide
ugcugcugcugcugcuggc

SEQ ID NO: 2665240 - RNA, 19 nt, Artificial Sequence
  Description of Artificial Sequence: Synthetic oligonucleotide
gcugacaaguagcccagca

SEQ ID NO: 2665241 - RNA, 19 nt, Artificial Sequence
  Description of Artificial Sequence: Synthetic oligonucleotide
uccccaggccccagggaac

SEQ ID NO: 2665242 - RNA, 19 nt, Artificial Sequence
  Description of Artificial Sequence: Synthetic oligonucleotide
cgaggggugcccuuguugc

SEQ ID NO: 2665243 - RNA, 19 nt, Artificial Sequence
  Description of Artificial Sequence: Synthetic oligonucleotide
agcccgcgucuaccaauac

SEQ ID NO: 2665244 - RNA, 19 nt, Artificial Sequence
  Description of Artificial Sequence: Synthetic oligonucleotide
ggcgggugcagcccaggcg

SEQ ID NO: 2665245 - RNA, 19 nt, Artificial Sequence
  Description of Artificial Sequence: Synthetic oligonucleotide
ggcugcuggcggcagcugg

SEQ ID NO: 2665246 - RNA, 19 nt, Artificial Sequence
  Description of Artificial Sequence: Synthetic oligonucleotide
agccccggccagcggaggg

SEQ ID NO: 2665247 - RNA, 19 nt, Artificial Sequence
  Description of Artificial Sequence: Synthetic oligonucleotide
caccacagccccgggacag

SEQ ID NO: 2665248 - RNA, 19 nt, Artificial Sequence
  Description of Artificial Sequence: Synthetic oligonucleotide
uggaagccccuggacgccc

SEQ ID NO: 2665249 - RNA, 19 nt, Artificial Sequence
  Description of Artificial Sequence: Synthetic oligonucleotide
ccagggaacaugaccacca

SEQ ID NO: 2665250 - RNA, 19 nt, Artificial Sequence
  Description of Artificial Sequence: Synthetic oligonucleotide
agucugccgcuccgccugg

SEQ ID NO: 2665251 - RNA, 19 nt, Artificial Sequence
  Description of Artificial Sequence: Synthetic oligonucleotide
cgaucaguugcgcagucug

SEQ ID NO: 2665252 - RNA, 19 nt, Artificial Sequence
  Description of Artificial Sequence: Synthetic oligonucleotide
cucucucucgaggggugcc

SEQ ID NO: 2665253 - RNA, 19 nt, Artificial Sequence
  Description of Artificial Sequence: Synthetic oligonucleotide
uccgccuggcaccgacggc

SEQ ID NO: 2665254 - RNA, 19 nt, Artificial Sequence
  Description of Artificial Sequence: Synthetic oligonucleotide
agccccgggacagcgcuuc

SEQ ID NO: 2665255 - RNA, 19 nt, Artificial Sequence
  Description of Artificial Sequence: Synthetic oligonucleotide
ccgccacaaacccaauccg

SEQ ID NO: 2665256 - RNA, 19 nt, Artificial Sequence
  Description of Artificial Sequence: Synthetic oligonucleotide
gagcagggugauggugccg

SEQ ID NO: 2665257 - RNA, 19 nt, Artificial Sequence
  Description of Artificial Sequence: Synthetic oligonucleotide
acgcccaugcuuccuccgu

SEQ ID NO: 2665258 - RNA, 19 nt, Artificial Sequence
  Description of Artificial Sequence: Synthetic oligonucleotide
cgcuuggccgugauggugg

SEQ ID NO: 2665259 - RNA, 19 nt, Artificial Sequence
  Description of Artificial Sequence: Synthetic oligonucleotide
caagcgccgagcccgcguc

SEQ ID NO: 2665260 - RNA, 19 nt, Artificial Sequence
  Description of Artificial Sequence: Synthetic oligonucleotide
ggcaccgacggccccauuc

SEQ ID NO: 2665261 - RNA, 19 nt, Artificial Sequence
  Description of Artificial Sequence: Synthetic oligonucleotide
gagccccuggugaugcgug

SEQ ID NO: 2665262 - RNA, 19 nt, Artificial Sequence
  Description of Artificial Sequence: Synthetic oligonucleotide
acgugucccacgaucaguu

SEQ ID NO: 2665263 - RNA, 19 nt, Artificial Sequence
  Description of Artificial Sequence: Synthetic oligonucleotide
uggccgugaugguggaaau

SEQ ID NO: 2665264 - RNA, 19 nt, Artificial Sequence
  Description of Artificial Sequence: Synthetic oligonucleotide
acgaucaguugcgcagucu

SEQ ID NO: 2665265 - RNA, 19 nt, Artificial Sequence
  Description of Artificial Sequence: Synthetic oligonucleotide
gcggcagaggagcggagcc

SEQ ID NO: 2665266 - RNA, 19 nt, Artificial Sequence
  Description of Artificial Sequence: Synthetic oligonucleotide
auccgucugguagccacca

SEQ ID NO: 2665267 - RNA, 19 nt, Artificial Sequence
  Description of Artificial Sequence: Synthetic oligonucleotide
aagcgccgagcccgcgucu

SEQ ID NO: 2665268 - RNA, 19 nt, Artificial Sequence
  Description of Artificial Sequence: Synthetic oligonucleotide
cucucgaggggugcccuug

SEQ ID NO: 2665269 - RNA, 19 nt, Artificial Sequence
  Description of Artificial Sequence: Synthetic oligonucleotide
ccggaguaagcgccaaaag

SEQ ID NO: 2665270 - RNA, 19 nt, Artificial Sequence
  Description of Artificial Sequence: Synthetic oligonucleotide
cuggcacagcgcugacaag

SEQ ID NO: 2665271 - RNA, 19 nt, Artificial Sequence
  Description of Artificial Sequence: Synthetic oligonucleotide
gcccggauaggcacaagcc

SEQ ID NO: 2665272 - RNA, 19 nt, Artificial Sequence
  Description of Artificial Sequence: Synthetic oligonucleotide
ggugcugcugcugcugcug

SEQ ID NO: 2665273 - RNA, 19 nt, Artificial Sequence
  Description of Artificial Sequence: Synthetic oligonucleotide
gcacagcgcugacaaguag

SEQ ID NO: 2665274 - RNA, 19 nt, Artificial Sequence
  Description of Artificial Sequence: Synthetic oligonucleotide
ggugaugcguggagccccg

SEQ ID NO: 2665275 - RNA, 19 nt, Artificial Sequence
  Description of Artificial Sequence: Synthetic oligonucleotide
gugauggugccgagucggc

SEQ ID NO: 2665276 - RNA, 19 nt, Artificial Sequence
  Description of Artificial Sequence: Synthetic oligonucleotide
cccuggacgcccaugcuuc

SEQ ID NO: 2665277 - RNA, 19 nt, Artificial Sequence
  Description of Artificial Sequence: Synthetic oligonucleotide
ggccccauucggccagucg

SEQ ID NO: 2665278 - RNA, 19 nt, Artificial Sequence
  Description of Artificial Sequence: Synthetic oligonucleotide
gucugguagccaccauaga

SEQ ID NO: 2665279 - RNA, 19 nt, Artificial Sequence
  Description of Artificial Sequence: Synthetic oligonucleotide
cgcgaguuugaggaggucc

SEQ ID NO: 2665280 - RNA, 19 nt, Artificial Sequence
  Description of Artificial Sequence: Synthetic oligonucleotide
cugccgcuccgccuggcac

SEQ ID NO: 2665281 - RNA, 19 nt, Artificial Sequence
  Description of Artificial Sequence: Synthetic oligonucleotide
gcccgcgucuaccaauacc

SEQ ID NO: 2665282 - RNA, 19 nt, Artificial Sequence
  Description of Artificial Sequence: Synthetic oligonucleotide
cggcgcuuggccgugaugg

SEQ ID NO: 2665283 - RNA, 19 nt, Artificial Sequence
  Description of Artificial Sequence: Synthetic oligonucleotide
cccgggacagcgcuucucc

SEQ ID NO: 2665284 - RNA, 19 nt, Artificial Sequence
  Description of Artificial Sequence: Synthetic oligonucleotide
cugcugcuggcgcgagacg

SEQ ID NO: 2665285 - RNA, 19 nt, Artificial Sequence
  Description of Artificial Sequence: Synthetic oligonucleotide
uuccacuggccgccacaaa

SEQ ID NO: 2665286 - RNA, 19 nt, Artificial Sequence
  Description of Artificial Sequence: Synthetic oligonucleotide
cagcgcugacaaguagccc

SEQ ID NO: 2665287 - RNA, 19 nt, Artificial Sequence
  Description of Artificial Sequence: Synthetic oligonucleotide
ccgugggcagaagaaacag

SEQ ID NO: 2665288 - RNA, 19 nt, Artificial Sequence
  Description of Artificial Sequence: Synthetic oligonucleotide
ccaugcuuccuccgugggc

SEQ ID NO: 2665289 - RNA, 19 nt, Artificial Sequence
  Description of Artificial Sequence: Synthetic oligonucleotide
agccaccauagagccgcgg

SEQ ID NO: 2665290 - RNA, 19 nt, Artificial Sequence
  Description of Artificial Sequence: Synthetic oligonucleotide
gccgagucggccccgcgcc

SEQ ID NO: 2665291 - RNA, 19 nt, Artificial Sequence
  Description of Artificial Sequence: Synthetic oligonucleotide
gcgaguuugaggaggucca

SEQ ID NO: 2665292 - RNA, 19 nt, Artificial Sequence
  Description of Artificial Sequence: Synthetic oligonucleotide
guagcccagcauggcauuc

SEQ ID NO: 2665293 - RNA, 19 nt, Artificial Sequence
  Description of Artificial Sequence: Synthetic oligonucleotide
uccgucugguagccaccau

SEQ ID NO: 2665294 - RNA, 19 nt, Artificial Sequence
  Description of Artificial Sequence: Synthetic oligonucleotide
gcgcgcgaguuugaggagg

SEQ ID NO: 2665295 - RNA, 19 nt, Artificial Sequence
  Description of Artificial Sequence: Synthetic oligonucleotide
caaaaggcagcgggcggga

SEQ ID NO: 2665296 - RNA, 19 nt, Artificial Sequence
  Description of Artificial Sequence: Synthetic oligonucleotide
ccgcgucuaccaauacccg

SEQ ID NO: 2665297 - RNA, 19 nt, Artificial Sequence
  Description of Artificial Sequence: Synthetic oligonucleotide
agcggagccccuggugaug

SEQ ID NO: 2665298 - RNA, 19 nt, Artificial Sequence
  Description of Artificial Sequence: Synthetic oligonucleotide
ccauagagccgcggcaagc

SEQ ID NO: 2665299 - RNA, 19 nt, Artificial Sequence
  Description of Artificial Sequence: Synthetic oligonucleotide
cagaggagcggagccccug

SEQ ID NO: 2665300 - RNA, 19 nt, Artificial Sequence
  Description of Artificial Sequence: Synthetic oligonucleotide
cccuuguugcccacguguc

SEQ ID NO: 2665301 - RNA, 19 nt, Artificial Sequence
  Description of Artificial Sequence: Synthetic oligonucleotide
gcccacgugucccacgauc

SEQ ID NO: 2665302 - RNA, 19 nt, Artificial Sequence
  Description of Artificial Sequence: Synthetic oligonucleotide
ucucucgaggggugcccuu

SEQ ID NO: 2665303 - RNA, 19 nt, Artificial Sequence
  Description of Artificial Sequence: Synthetic oligonucleotide
agacggugcgcgcgaguuu

SEQ ID NO: 2665304 - RNA, 19 nt, Artificial Sequence
  Description of Artificial Sequence: Synthetic oligonucleotide
gcccuuguugcccacgugu

SEQ ID NO: 2665305 - RNA, 19 nt, Artificial Sequence
  Description of Artificial Sequence: Synthetic oligonucleotide
cgccaaaaggcagcgggcg

SEQ ID NO: 2665306 - RNA, 19 nt, Artificial Sequence
  Description of Artificial Sequence: Synthetic oligonucleotide
ccgccuggcaccgacggcc

SEQ ID NO: 2665307 - RNA, 19 nt, Artificial Sequence
  Description of Artificial Sequence: Synthetic oligonucleotide
cccaugcuuccuccguggg

SEQ ID NO: 2665308 - RNA, 19 nt, Artificial Sequence
  Description of Artificial Sequence: Synthetic oligonucleotide
cccaauccgucugguagcc

SEQ ID NO: 2665309 - RNA, 19 nt, Artificial Sequence
  Description of Artificial Sequence: Synthetic oligonucleotide
gucccacgaucaguugcgc

SEQ ID NO: 2665310 - RNA, 19 nt, Artificial Sequence
  Description of Artificial Sequence: Synthetic oligonucleotide
cccagggaacaugaccacc

SEQ ID NO: 2665311 - RNA, 19 nt, Artificial Sequence
  Description of Artificial Sequence: Synthetic oligonucleotide
uacccgagccccggccagc

SEQ ID NO: 2665312 - RNA, 19 nt, Artificial Sequence
  Description of Artificial Sequence: Synthetic oligonucleotide
cgcccggauaggcacaagc

SEQ ID NO: 2665313 - RNA, 19 nt, Artificial Sequence
  Description of Artificial Sequence: Synthetic oligonucleotide
gcgcugacaaguagcccag

SEQ ID NO: 2665314 - RNA, 19 nt, Artificial Sequence
  Description of Artificial Sequence: Synthetic oligonucleotide
gugccgagucggccccgcg

SEQ ID NO: 2665315 - RNA, 19 nt, Artificial Sequence
  Description of Artificial Sequence: Synthetic oligonucleotide
cccaggcggcgcuuggccg

SEQ ID NO: 2665316 - RNA, 19 nt, Artificial Sequence
  Description of Artificial Sequence: Synthetic oligonucleotide
cgucuaccaauacccgagc

SEQ ID NO: 2665317 - RNA, 19 nt, Artificial Sequence
  Description of Artificial Sequence: Synthetic oligonucleotide
cuuccuccgugggcagaag

SEQ ID NO: 2665318 - RNA, 19 nt, Artificial Sequence
  Description of Artificial Sequence: Synthetic oligonucleotide
ccaauacccgagccccggc

SEQ ID NO: 2665319 - RNA, 19 nt, Artificial Sequence
  Description of Artificial Sequence: Synthetic oligonucleotide
uucggccagucggucuuuc

SEQ ID NO: 2665320 - RNA, 19 nt, Artificial Sequence
  Description of Artificial Sequence: Synthetic oligonucleotide
cgggacagcgcuucuccag

SEQ ID NO: 2665321 - RNA, 19 nt, Artificial Sequence
  Description of Artificial Sequence: Synthetic oligonucleotide
uggugccgagucggccccg

SEQ ID NO: 2665322 - RNA, 19 nt, Artificial Sequence
  Description of Artificial Sequence: Synthetic oligonucleotide
gagacggugcgcgcgaguu

SEQ ID NO: 2665323 - RNA, 19 nt, Artificial Sequence
  Description of Artificial Sequence: Synthetic oligonucleotide
gagcccgcgucuaccaaua

SEQ ID NO: 2665324 - RNA, 19 nt, Artificial Sequence
  Description of Artificial Sequence: Synthetic oligonucleotide
cggccagucggucuuuccc

SEQ ID NO: 2665325 - RNA, 19 nt, Artificial Sequence
  Description of Artificial Sequence: Synthetic oligonucleotide
ggcggcagaggagcggagc

SEQ ID NO: 2665326 - RNA, 19 nt, Artificial Sequence
  Description of Artificial Sequence: Synthetic oligonucleotide
gccagucggucuuucccca

SEQ ID NO: 2665327 - RNA, 19 nt, Artificial Sequence
  Description of Artificial Sequence: Synthetic oligonucleotide
cauucggccagucggucuu

SEQ ID NO: 2665328 - RNA, 19 nt, Artificial Sequence
  Description of Artificial Sequence: Synthetic oligonucleotide
gcccaggcggcgcuuggcc

SEQ ID NO: 2665329 - RNA, 19 nt, Artificial Sequence
  Description of Artificial Sequence: Synthetic oligonucleotide
aggccccagggaacaugac

SEQ ID NO: 2665330 - RNA, 19 nt, Artificial Sequence
  Description of Artificial Sequence: Synthetic oligonucleotide
ccacgugucccacgaucag

SEQ ID NO: 2665331 - RNA, 19 nt, Artificial Sequence
  Description of Artificial Sequence: Synthetic oligonucleotide
caccagcuccaggccgucg

SEQ ID NO: 2665332 - RNA, 19 nt, Artificial Sequence
  Description of Artificial Sequence: Synthetic oligonucleotide
cagcggaggggcggcggcg

SEQ ID NO: 2665333 - RNA, 19 nt, Artificial Sequence
  Description of Artificial Sequence: Synthetic oligonucleotide
gugaugcguggagccccgg

SEQ ID NO: 2665334 - RNA, 19 nt, Artificial Sequence
  Description of Artificial Sequence: Synthetic oligonucleotide
gucgccgcccggauaggca

SEQ ID NO: 2665335 - RNA, 19 nt, Artificial Sequence
  Description of Artificial Sequence: Synthetic oligonucleotide
ccagucggucuuuccccag

SEQ ID NO: 2665336 - RNA, 19 nt, Artificial Sequence
  Description of Artificial Sequence: Synthetic oligonucleotide
ggccgccacaaacccaauc

SEQ ID NO: 2665337 - RNA, 19 nt, Artificial Sequence
  Description of Artificial Sequence: Synthetic oligonucleotide
ccuggacgcccaugcuucc

SEQ ID NO: 2665338 - RNA, 19 nt, Artificial Sequence
  Description of Artificial Sequence: Synthetic oligonucleotide
ccaccauagagccgcggca

SEQ ID NO: 2665339 - RNA, 19 nt, Artificial Sequence
  Description of Artificial Sequence: Synthetic oligonucleotide
guugcgcagucugccgcuc

SEQ ID NO: 2665340 - RNA, 19 nt, Artificial Sequence
  Description of Artificial Sequence: Synthetic oligonucleotide
gcagggugauggugccgag

SEQ ID NO: 2665341 - RNA, 19 nt, Artificial Sequence
  Description of Artificial Sequence: Synthetic oligonucleotide
gcggagccccuggugaugc

SEQ ID NO: 2665342 - RNA, 19 nt, Artificial Sequence
  Description of Artificial Sequence: Synthetic oligonucleotide
gaggggcggcggcgggugc

SEQ ID NO: 2665343 - RNA, 19 nt, Artificial Sequence
  Description of Artificial Sequence: Synthetic oligonucleotide
gggcgcuagggcugcuggc

SEQ ID NO: 2665344 - RNA, 19 nt, Artificial Sequence
  Description of Artificial Sequence: Synthetic oligonucleotide
gaggagcggagccccuggu

SEQ ID NO: 2665345 - RNA, 19 nt, Artificial Sequence
  Description of Artificial Sequence: Synthetic oligonucleotide
caaacccaauccgucuggu

SEQ ID NO: 2665346 - RNA, 19 nt, Artificial Sequence
  Description of Artificial Sequence: Synthetic oligonucleotide
ggcgcgagacggugcgcgc

SEQ ID NO: 2665347 - RNA, 19 nt, Artificial Sequence
  Description of Artificial Sequence: Synthetic oligonucleotide
gagcggagccccuggugau

SEQ ID NO: 2665348 - RNA, 19 nt, Artificial Sequence
  Description of Artificial Sequence: Synthetic oligonucleotide
ccccuggugaugcguggag

SEQ ID NO: 2665349 - RNA, 19 nt, Artificial Sequence
  Description of Artificial Sequence: Synthetic oligonucleotide
ccccagggaacaugaccac

SEQ ID NO: 2665350 - RNA, 19 nt, Artificial Sequence
  Description of Artificial Sequence: Synthetic oligonucleotide
gcgcuuggccgugauggug

SEQ ID NO: 2665351 - RNA, 19 nt, Artificial Sequence
  Description of Artificial Sequence: Synthetic oligonucleotide
ccacagccccgggacagcg

SEQ ID NO: 2665352 - RNA, 19 nt, Artificial Sequence
  Description of Artificial Sequence: Synthetic oligonucleotide
ggggugcccuuguugccca

SEQ ID NO: 2665353 - RNA, 19 nt, Artificial Sequence
  Description of Artificial Sequence: Synthetic oligonucleotide
uggccgccacaaacccaau

SEQ ID NO: 2665354 - RNA, 19 nt, Artificial Sequence
  Description of Artificial Sequence: Synthetic oligonucleotide
cacgugucccacgaucagu

SEQ ID NO: 2665355 - RNA, 19 nt, Artificial Sequence
  Description of Artificial Sequence: Synthetic oligonucleotide
cuggcgcgagacggugcgc

SEQ ID NO: 2665356 - RNA, 19 nt, Artificial Sequence
  Description of Artificial Sequence: Synthetic oligonucleotide
gcauggcauuccacuggcc

SEQ ID NO: 2665357 - RNA, 19 nt, Artificial Sequence
  Description of Artificial Sequence: Synthetic oligonucleotide
cccggauaggcacaagccu

SEQ ID NO: 2665358 - RNA, 19 nt, Artificial Sequence
  Description of Artificial Sequence: Synthetic oligonucleotide
cgggcgcuagggcugcugg

SEQ ID NO: 2665359 - RNA, 19 nt, Artificial Sequence
  Description of Artificial Sequence: Synthetic oligonucleotide
ccagcggaggggcggcggc

SEQ ID NO: 2665360 - RNA, 19 nt, Artificial Sequence
  Description of Artificial Sequence: Synthetic oligonucleotide
gcagcgggcgggagcggcg

SEQ ID NO: 2665361 - RNA, 19 nt, Artificial Sequence
  Description of Artificial Sequence: Synthetic oligonucleotide
cgcgucuaccaauacccga

SEQ ID NO: 2665362 - RNA, 19 nt, Artificial Sequence
  Description of Artificial Sequence: Synthetic oligonucleotide
ggucuuuccccaggcccca

SEQ ID NO: 2665363 - RNA, 19 nt, Artificial Sequence
  Description of Artificial Sequence: Synthetic oligonucleotide
ggcacagcgcugacaagua

SEQ ID NO: 2665364 - RNA, 19 nt, Artificial Sequence
  Description of Artificial Sequence: Synthetic oligonucleotide
gccgcggcaagcgccgagc

SEQ ID NO: 2665365 - RNA, 19 nt, Artificial Sequence
  Description of Artificial Sequence: Synthetic oligonucleotide
cccggaguaagcgccaaaa

SEQ ID NO: 2665366 - RNA, 19 nt, Artificial Sequence
  Description of Artificial Sequence: Synthetic oligonucleotide
gccagcggaggggcggcgg

SEQ ID NO: 2665367 - RNA, 19 nt, Artificial Sequence
  Description of Artificial Sequence: Synthetic oligonucleotide
cgugucccacgaucaguug

SEQ ID NO: 2665368 - RNA, 19 nt, Artificial Sequence
  Description of Artificial Sequence: Synthetic oligonucleotide
gcuccgccuggcaccgacg

SEQ ID NO: 2665369 - RNA, 19 nt, Artificial Sequence
  Description of Artificial Sequence: Synthetic oligonucleotide
ccgucugguagccaccaua

SEQ ID NO: 2665370 - RNA, 19 nt, Artificial Sequence
  Description of Artificial Sequence: Synthetic oligonucleotide
gcuuggccgugauggugga

SEQ ID NO: 2665371 - RNA, 19 nt, Artificial Sequence
  Description of Artificial Sequence: Synthetic oligonucleotide
auucggccagucggucuuu

SEQ ID NO: 2665372 - RNA, 19 nt, Artificial Sequence
  Description of Artificial Sequence: Synthetic oligonucleotide
gcaccacagccccgggaca

SEQ ID NO: 2665373 - RNA, 19 nt, Artificial Sequence
  Description of Artificial Sequence: Synthetic oligonucleotide
ggugccgagucggccccgc

SEQ ID NO: 2665374 - RNA, 19 nt, Artificial Sequence
  Description of Artificial Sequence: Synthetic oligonucleotide
caggcggcgcuuggccgug

SEQ ID NO: 2665375 - RNA, 19 nt, Artificial Sequence
  Description of Artificial Sequence: Synthetic oligonucleotide
gccccggccagcggagggg

SEQ ID NO: 2665376 - RNA, 19 nt, Artificial Sequence
  Description of Artificial Sequence: Synthetic oligonucleotide
ccgcggcaagcgccgagcc

SEQ ID NO: 2665377 - RNA, 19 nt, Artificial Sequence
  Description of Artificial Sequence: Synthetic oligonucleotide
ggcaagcgccgagcccgcg

SEQ ID NO: 2665378 - RNA, 19 nt, Artificial Sequence
  Description of Artificial Sequence: Synthetic oligonucleotide
gcggcggcagaggagcgga

SEQ ID NO: 2665379 - RNA, 19 nt, Artificial Sequence
  Description of Artificial Sequence: Synthetic oligonucleotide
gcgggcgggagcggcggcg

SEQ ID NO: 2665380 - RNA, 19 nt, Artificial Sequence
  Description of Artificial Sequence: Synthetic oligonucleotide
gcagucugccgcuccgccu

SEQ ID NO: 2665381 - RNA, 19 nt, Artificial Sequence
  Description of Artificial Sequence: Synthetic oligonucleotide
gaagccccuggacgcccau

SEQ ID NO: 2665382 - RNA, 19 nt, Artificial Sequence
  Description of Artificial Sequence: Synthetic oligonucleotide
agcuggcggugcaggugcu

SEQ ID NO: 2665383 - RNA, 19 nt, Artificial Sequence
  Description of Artificial Sequence: Synthetic oligonucleotide
gcggcagcuggcggugcag

SEQ ID NO: 2665384 - RNA, 19 nt, Artificial Sequence
  Description of Artificial Sequence: Synthetic oligonucleotide
ccuccgugggcagaagaaa

SEQ ID NO: 2665385 - RNA, 19 nt, Artificial Sequence
  Description of Artificial Sequence: Synthetic oligonucleotide
cccauucggccagucgguc

SEQ ID NO: 2665386 - RNA, 19 nt, Artificial Sequence
  Description of Artificial Sequence: Synthetic oligonucleotide
cgagccccggccagcggag

SEQ ID NO: 2665387 - RNA, 19 nt, Artificial Sequence
  Description of Artificial Sequence: Synthetic oligonucleotide
acggugcgcgcgaguuuga

SEQ ID NO: 2665388 - RNA, 19 nt, Artificial Sequence
  Description of Artificial Sequence: Synthetic oligonucleotide
cuuggccgugaugguggaa

SEQ ID NO: 2665389 - RNA, 19 nt, Artificial Sequence
  Description of Artificial Sequence: Synthetic oligonucleotide
cucucucgaggggugcccu

SEQ ID NO: 2665390 - RNA, 19 nt, Artificial Sequence
  Description of Artificial Sequence: Synthetic oligonucleotide
cagggugauggugccgagu

SEQ ID NO: 2665391 - RNA, 19 nt, Artificial Sequence
  Description of Artificial Sequence: Synthetic oligonucleotide
gccccgggcgcuagggcug

SEQ ID NO: 2665392 - RNA, 19 nt, Artificial Sequence
  Description of Artificial Sequence: Synthetic oligonucleotide
cgcggcaagcgccgagccc

SEQ ID NO: 2665393 - RNA, 19 nt, Artificial Sequence
  Description of Artificial Sequence: Synthetic oligonucleotide
gcaagcgccgagcccgcgu

SEQ ID NO: 2665394 - RNA, 19 nt, Artificial Sequence
  Description of Artificial Sequence: Synthetic oligonucleotide
ccauucggccagucggucu

SEQ ID NO: 2665395 - RNA, 19 nt, Artificial Sequence
  Description of Artificial Sequence: Synthetic oligonucleotide
gugcagcccaggcggcgcu

SEQ ID NO: 2665396 - RNA, 19 nt, Artificial Sequence
  Description of Artificial Sequence: Synthetic oligonucleotide
ccgagucggccccgcgccc

SEQ ID NO: 2665397 - RNA, 19 nt, Artificial Sequence
  Description of Artificial Sequence: Synthetic oligonucleotide
gcgagacggugcgcgcgag

SEQ ID NO: 2665398 - RNA, 19 nt, Artificial Sequence
  Description of Artificial Sequence: Synthetic oligonucleotide
gcccagcauggcauuccac

SEQ ID NO: 2665399 - RNA, 19 nt, Artificial Sequence
  Description of Artificial Sequence: Synthetic oligonucleotide
cgccuggcaccgacggccc

SEQ ID NO: 2665400 - RNA, 19 nt, Artificial Sequence
  Description of Artificial Sequence: Synthetic oligonucleotide
cgccacaaacccaauccgu

SEQ ID NO: 2665401 - RNA, 19 nt, Artificial Sequence
  Description of Artificial Sequence: Synthetic oligonucleotide
cuggacgcccaugcuuccu

SEQ ID NO: 2665402 - RNA, 19 nt, Artificial Sequence
  Description of Artificial Sequence: Synthetic oligonucleotide
cccggccagcggaggggcg

SEQ ID NO: 2665403 - RNA, 19 nt, Artificial Sequence
  Description of Artificial Sequence: Synthetic oligonucleotide
acggccccauucggccagu

SEQ ID NO: 2665404 - RNA, 19 nt, Artificial Sequence
  Description of Artificial Sequence: Synthetic oligonucleotide
cgcuccgccuggcaccgac

SEQ ID NO: 2665405 - RNA, 19 nt, Artificial Sequence
  Description of Artificial Sequence: Synthetic oligonucleotide
ggccagcggaggggcggcg

SEQ ID NO: 2665406 - RNA, 19 nt, Artificial Sequence
  Description of Artificial Sequence: Synthetic oligonucleotide
ccuggcaccgacggcccca

SEQ ID NO: 2665407 - RNA, 19 nt, Artificial Sequence
  Description of Artificial Sequence: Synthetic oligonucleotide
cgagucggccccgcgcccc

SEQ ID NO: 2665408 - RNA, 19 nt, Artificial Sequence
  Description of Artificial Sequence: Synthetic oligonucleotide
uggcaccgacggccccauu

SEQ ID NO: 2665409 - RNA, 19 nt, Artificial Sequence
  Description of Artificial Sequence: Synthetic oligonucleotide
gcgccgagcccgcgucuac

SEQ ID NO: 2665410 - RNA, 19 nt, Artificial Sequence
  Description of Artificial Sequence: Synthetic oligonucleotide
cgucgccgcccggauaggc

SEQ ID NO: 2665411 - RNA, 19 nt, Artificial Sequence
  Description of Artificial Sequence: Synthetic oligonucleotide
ccccauucggccagucggu

SEQ ID NO: 2665412 - RNA, 19 nt, Artificial Sequence
  Description of Artificial Sequence: Synthetic oligonucleotide
gcugcuggcgcgagacggu

SEQ ID NO: 2665413 - RNA, 19 nt, Artificial Sequence
  Description of Artificial Sequence: Synthetic oligonucleotide
ccaggcggcgcuuggccgu

SEQ ID NO: 2665414 - RNA, 19 nt, Artificial Sequence
  Description of Artificial Sequence: Synthetic oligonucleotide
cgcugacaaguagcccagc

SEQ ID NO: 2665415 - RNA, 19 nt, Artificial Sequence
  Description of Artificial Sequence: Synthetic oligonucleotide
cggugcgcgcgaguuugag

SEQ ID NO: 2665416 - RNA, 19 nt, Artificial Sequence
  Description of Artificial Sequence: Synthetic oligonucleotide
cgccgagcccgcgucuacc

SEQ ID NO: 2665417 - RNA, 19 nt, Artificial Sequence
  Description of Artificial Sequence: Synthetic oligonucleotide
cggcaagcgccgagcccgc

SEQ ID NO: 2665418 - RNA, 19 nt, Artificial Sequence
  Description of Artificial Sequence: Synthetic oligonucleotide
ccaauccgucugguagcca

SEQ ID NO: 2665419 - RNA, 19 nt, Artificial Sequence
  Description of Artificial Sequence: Synthetic oligonucleotide
gccgcccggauaggcacaa

SEQ ID NO: 2665420 - RNA, 19 nt, Artificial Sequence
  Description of Artificial Sequence: Synthetic oligonucleotide
gcgcgaguuugaggagguc

SEQ ID NO: 2665421 - RNA, 19 nt, Artificial Sequence
  Description of Artificial Sequence: Synthetic oligonucleotide
aggcggcgcuuggccguga

SEQ ID NO: 2665422 - RNA, 19 nt, Artificial Sequence
  Description of Artificial Sequence: Synthetic oligonucleotide
cgcgagacggugcgcgcga

SEQ ID NO: 2665423 - RNA, 19 nt, Artificial Sequence
  Description of Artificial Sequence: Synthetic oligonucleotide
ccgggcgcuagggcugcug

SEQ ID NO: 2665424 - RNA, 19 nt, Artificial Sequence
  Description of Artificial Sequence: Synthetic oligonucleotide
ccccgggcgcuagggcugc

SEQ ID NO: 2665425 - RNA, 19 nt, Artificial Sequence
  Description of Artificial Sequence: Synthetic oligonucleotide
cgcgcgaguuugaggaggu

SEQ ID NO: 2665426 - RNA, 19 nt, Artificial Sequence
  Description of Artificial Sequence: Synthetic oligonucleotide
ccccuggacgcccaugcuu

SEQ ID NO: 2665427 - RNA, 19 nt, Artificial Sequence
  Description of Artificial Sequence: Synthetic oligonucleotide
ggccgucgccgcccggaua

SEQ ID NO: 2665428 - RNA, 19 nt, Artificial Sequence
  Description of Artificial Sequence: Synthetic oligonucleotide
ccgucgccgcccggauagg

SEQ ID NO: 2665429 - RNA, 19 nt, Artificial Sequence
  Description of Artificial Sequence: Synthetic oligonucleotide
cggcggcagaggagcggag

SEQ ID NO: 2665430 - RNA, 19 nt, Artificial Sequence
  Description of Artificial Sequence: Synthetic oligonucleotide
gccccuggacgcccaugcu

SEQ ID NO: 2665431 - RNA, 19 nt, Artificial Sequence
  Description of Artificial Sequence: Synthetic oligonucleotide
cuggcaccgacggccccau

SEQ ID NO: 2665432 - RNA, 19 nt, Artificial Sequence
  Description of Artificial Sequence: Synthetic oligonucleotide
ccgagcccgcgucuaccaa

SEQ ID NO: 2665433 - RNA, 19 nt, Artificial Sequence
  Description of Artificial Sequence: Synthetic oligonucleotide
cgagcccgcgucuaccaau

SEQ ID NO: 2665434 - RNA, 19 nt, Artificial Sequence
  Description of Artificial Sequence: Synthetic oligonucleotide
ccccggaguaagcgccaaa

SEQ ID NO: 2665435 - RNA, 19 nt, Artificial Sequence
  Description of Artificial Sequence: Synthetic oligonucleotide
ggcggcgcuuggccgugau

SEQ ID NO: 2665436 - RNA, 19 nt, Artificial Sequence
  Description of Artificial Sequence: Synthetic oligonucleotide
ccgcccggauaggcacaag

SEQ ID NO: 2665437 - RNA, 19 nt, Artificial Sequence
  Description of Artificial Sequence: Synthetic oligonucleotide
cgccgcccggauaggcaca

SEQ ID NO: 2665438 - RNA, 19 nt, Artificial Sequence
  Description of Artificial Sequence: Synthetic oligonucleotide
cgagacggugcgcgcgagu

SEQ ID NO: 2665439 - RNA, 19 nt, Artificial Sequence
  Description of Artificial Sequence: Synthetic oligonucleotide
cggcggcgggugcagccca

SEQ ID NO: 2665440 - RNA, 19 nt, Artificial Sequence
  Description of Artificial Sequence: Synthetic oligonucleotide
cggccccauucggccaguc

SEQ ID NO: 2665441 - RNA, 19 nt, Artificial Sequence
  Description of Artificial Sequence: Synthetic oligonucleotide
cguggagccccgggcgcua

SEQ ID NO: 2665442 - RNA, 19 nt, Artificial Sequence
  Description of Artificial Sequence: Synthetic oligonucleotide
ccgcuccgccuggcaccga

SEQ ID NO: 2665443 - RNA, 19 nt, Artificial Sequence
  Description of Artificial Sequence: Synthetic oligonucleotide
cccgggcgcuagggcugcu

SEQ ID NO: 2665444 - RNA, 19 nt, Artificial Sequence
  Description of Artificial Sequence: Synthetic oligonucleotide
ucacauacaccuuugaggg

SEQ ID NO: 2665445 - RNA, 19 nt, Artificial Sequence
  Description of Artificial Sequence: Synthetic oligonucleotide
acuaucuucugauguagcc

SEQ ID NO: 2665446 - RNA, 19 nt, Artificial Sequence
  Description of Artificial Sequence: Synthetic oligonucleotide
gucacauacaccuuugagg

SEQ ID NO: 2665447 - RNA, 19 nt, Artificial Sequence
  Description of Artificial Sequence: Synthetic oligonucleotide
aaguccauggcacccacgg

SEQ ID NO: 2665448 - RNA, 19 nt, Artificial Sequence
  Description of Artificial Sequence: Synthetic oligonucleotide
gagacuucuccacaguucg

SEQ ID NO: 2665449 - RNA, 19 nt, Artificial Sequence
  Description of Artificial Sequence: Synthetic oligonucleotide
aaguccgcuguccaggucg

SEQ ID NO: 2665450 - RNA, 19 nt, Artificial Sequence
  Description of Artificial Sequence: Synthetic oligonucleotide
uguagccucaucaccaggg

SEQ ID NO: 2665451 - RNA, 19 nt, Artificial Sequence
  Description of Artificial Sequence: Synthetic oligonucleotide
ggucguuccagucagaacg

SEQ ID NO: 2665452 - RNA, 19 nt, Artificial Sequence
  Description of Artificial Sequence: Synthetic oligonucleotide
gacguugcagcgcaggucg

SEQ ID NO: 2665453 - RNA, 19 nt, Artificial Sequence
  Description of Artificial Sequence: Synthetic oligonucleotide
ugauguagccucaucacca

SEQ ID NO: 2665454 - RNA, 19 nt, Artificial Sequence
  Description of Artificial Sequence: Synthetic oligonucleotide
guuaauggcauccucgcgc

SEQ ID NO: 2665455 - RNA, 19 nt, Artificial Sequence
  Description of Artificial Sequence: Synthetic oligonucleotide
guagggaugcaucaguggg

SEQ ID NO: 2665456 - RNA, 19 nt, Artificial Sequence
  Description of Artificial Sequence: Synthetic oligonucleotide
aacgcagcagcucgaaguc

SEQ ID NO: 2665457 - RNA, 19 nt, Artificial Sequence
  Description of Artificial Sequence: Synthetic oligonucleotide
auuaagccgcuccauguac

SEQ ID NO: 2665458 - RNA, 19 nt, Artificial Sequence
  Description of Artificial Sequence: Synthetic oligonucleotide
acugucuaacaguuccugc

SEQ ID NO: 2665459 - RNA, 19 nt, Artificial Sequence
  Description of Artificial Sequence: Synthetic oligonucleotide
ugcgcugccaguuaauggc

SEQ ID NO: 2665460 - RNA, 19 nt, Artificial Sequence
  Description of Artificial Sequence: Synthetic oligonucleotide
agcagcucgaaguccaugg

SEQ ID NO: 2665461 - RNA, 19 nt, Artificial Sequence
  Description of Artificial Sequence: Synthetic oligonucleotide
ucucucagugcccuugggg

SEQ ID NO: 2665462 - RNA, 19 nt, Artificial Sequence
  Description of Artificial Sequence: Synthetic oligonucleotide
cauggcgugcauuaagccg

SEQ ID NO: 2665463 - RNA, 19 nt, Artificial Sequence
  Description of Artificial Sequence: Synthetic oligonucleotide
ugaggcccaauucagugcc

SEQ ID NO: 2665464 - RNA, 19 nt, Artificial Sequence
  Description of Artificial Sequence: Synthetic oligonucleotide
gucagaacgcagcagcucg

SEQ ID NO: 2665465 - RNA, 19 nt, Artificial Sequence
  Description of Artificial Sequence: Synthetic oligonucleotide
aucagugggcuccagacug

SEQ ID NO: 2665466 - RNA, 19 nt, Artificial Sequence
  Description of Artificial Sequence: Synthetic oligonucleotide
aauucagugcccgggagug

SEQ ID NO: 2665467 - RNA, 19 nt, Artificial Sequence
  Description of Artificial Sequence: Synthetic oligonucleotide
auggcgugcauuaagccgc

SEQ ID NO: 2665468 - RNA, 19 nt, Artificial Sequence
  Description of Artificial Sequence: Synthetic oligonucleotide
uuaauggcauccucgcgcc

SEQ ID NO: 2665469 - RNA, 19 nt, Artificial Sequence
  Description of Artificial Sequence: Synthetic oligonucleotide
gaaagggcgggccagggug

SEQ ID NO: 2665470 - RNA, 19 nt, Artificial Sequence
  Description of Artificial Sequence: Synthetic oligonucleotide
ugucuguaguuccagggga

SEQ ID NO: 2665471 - RNA, 19 nt, Artificial Sequence
  Description of Artificial Sequence: Synthetic oligonucleotide
cuuugagggagacuucucc

SEQ ID NO: 2665472 - RNA, 19 nt, Artificial Sequence
  Description of Artificial Sequence: Synthetic oligonucleotide
aaugccagggaaagggcgg

SEQ ID NO: 2665473 - RNA, 19 nt, Artificial Sequence
  Description of Artificial Sequence: Synthetic oligonucleotide
ucuugugacucugucguag

SEQ ID NO: 2665474 - RNA, 19 nt, Artificial Sequence
  Description of Artificial Sequence: Synthetic oligonucleotide
aguuaauggcauccucgcg

SEQ ID NO: 2665475 - RNA, 19 nt, Artificial Sequence
  Description of Artificial Sequence: Synthetic oligonucleotide
gacuucuccacaguucggg

SEQ ID NO: 2665476 - RNA, 19 nt, Artificial Sequence
  Description of Artificial Sequence: Synthetic oligonucleotide
gaaugccagggaaagggcg

SEQ ID NO: 2665477 - RNA, 19 nt, Artificial Sequence
  Description of Artificial Sequence: Synthetic oligonucleotide
aacaguuccugcucauccu

SEQ ID NO: 2665478 - RNA, 19 nt, Artificial Sequence
  Description of Artificial Sequence: Synthetic oligonucleotide
agccucaucaccaggggcc

SEQ ID NO: 2665479 - RNA, 19 nt, Artificial Sequence
  Description of Artificial Sequence: Synthetic oligonucleotide
caguuaauggcauccucgc

SEQ ID NO: 2665480 - RNA, 19 nt, Artificial Sequence
  Description of Artificial Sequence: Synthetic oligonucleotide
gacucugucguagggaugc

SEQ ID NO: 2665481 - RNA, 19 nt, Artificial Sequence
  Description of Artificial Sequence: Synthetic oligonucleotide
gauguagccucaucaccag

SEQ ID NO: 2665482 - RNA, 19 nt, Artificial Sequence
  Description of Artificial Sequence: Synthetic oligonucleotide
ucaugggugggguaggggu

SEQ ID NO: 2665483 - RNA, 19 nt, Artificial Sequence
  Description of Artificial Sequence: Synthetic oligonucleotide
aauggcauccucgcgccag

SEQ ID NO: 2665484 - RNA, 19 nt, Artificial Sequence
  Description of Artificial Sequence: Synthetic oligonucleotide
gugucuguaguuccagggg

SEQ ID NO: 2665485 - RNA, 19 nt, Artificial Sequence
  Description of Artificial Sequence: Synthetic oligonucleotide
cugauguagccucaucacc

SEQ ID NO: 2665486 - RNA, 19 nt, Artificial Sequence
  Description of Artificial Sequence: Synthetic oligonucleotide
ucauccucgucaucaagga

SEQ ID NO: 2665487 - RNA, 19 nt, Artificial Sequence
  Description of Artificial Sequence: Synthetic oligonucleotide
ggugucuguaguuccaggg

SEQ ID NO: 2665488 - RNA, 19 nt, Artificial Sequence
  Description of Artificial Sequence: Synthetic oligonucleotide
uugugacucugucguaggg

SEQ ID NO: 2665489 - RNA, 19 nt, Artificial Sequence
  Description of Artificial Sequence: Synthetic oligonucleotide
gaggacuggucaugggugg

SEQ ID NO: 2665490 - RNA, 19 nt, Artificial Sequence
  Description of Artificial Sequence: Synthetic oligonucleotide
uccgcagcugcacucuggg

SEQ ID NO: 2665491 - RNA, 19 nt, Artificial Sequence
  Description of Artificial Sequence: Synthetic oligonucleotide
ugucuaacaguuccugcuc

SEQ ID NO: 2665492 - RNA, 19 nt, Artificial Sequence
  Description of Artificial Sequence: Synthetic oligonucleotide
uagggaugcaucagugggc

SEQ ID NO: 2665493 - RNA, 19 nt, Artificial Sequence
  Description of Artificial Sequence: Synthetic oligonucleotide
cuugugacucugucguagg

SEQ ID NO: 2665494 - RNA, 19 nt, Artificial Sequence
  Description of Artificial Sequence: Synthetic oligonucleotide
ccaguuaauggcauccucg

SEQ ID NO: 2665495 - RNA, 19 nt, Artificial Sequence
  Description of Artificial Sequence: Synthetic oligonucleotide
agggugagucucucagugc

SEQ ID NO: 2665496 - RNA, 19 nt, Artificial Sequence
  Description of Artificial Sequence: Synthetic oligonucleotide
aaugugcgcugccaguuaa

SEQ ID NO: 2665497 - RNA, 19 nt, Artificial Sequence
  Description of Artificial Sequence: Synthetic oligonucleotide
ugagggagacuucuccaca

SEQ ID NO: 2665498 - RNA, 19 nt, Artificial Sequence
  Description of Artificial Sequence: Synthetic oligonucleotide
uuccccgagacguugcagc

SEQ ID NO: 2665499 - RNA, 19 nt, Artificial Sequence
  Description of Artificial Sequence: Synthetic oligonucleotide
uuaagccgcuccauguacu

SEQ ID NO: 2665500 - RNA, 19 nt, Artificial Sequence
  Description of Artificial Sequence: Synthetic oligonucleotide
gaagaaugccagggaaagg

SEQ ID NO: 2665501 - RNA, 19 nt, Artificial Sequence
  Description of Artificial Sequence: Synthetic oligonucleotide
agaaugccagggaaagggc

SEQ ID NO: 2665502 - RNA, 19 nt, Artificial Sequence
  Description of Artificial Sequence: Synthetic oligonucleotide
uccagaggacuggucaugg

SEQ ID NO: 2665503 - RNA, 19 nt, Artificial Sequence
  Description of Artificial Sequence: Synthetic oligonucleotide
uuccucacuaucuucugau

SEQ ID NO: 2665504 - RNA, 19 nt, Artificial Sequence
  Description of Artificial Sequence: Synthetic oligonucleotide
uugagggagacuucuccac

SEQ ID NO: 2665505 - RNA, 19 nt, Artificial Sequence
  Description of Artificial Sequence: Synthetic oligonucleotide
uuccagucagaacgcagca

SEQ ID NO: 2665506 - RNA, 19 nt, Artificial Sequence
  Description of Artificial Sequence: Synthetic oligonucleotide
uccucgucaucaaggaagu

SEQ ID NO: 2665507 - RNA, 19 nt, Artificial Sequence
  Description of Artificial Sequence: Synthetic oligonucleotide
aguucggggagguggagcu

SEQ ID NO: 2665508 - RNA, 19 nt, Artificial Sequence
  Description of Artificial Sequence: Synthetic oligonucleotide
acaccuuugagggagacuu

SEQ ID NO: 2665509 - RNA, 19 nt, Artificial Sequence
  Description of Artificial Sequence: Synthetic oligonucleotide
ggaagaaugccagggaaag

SEQ ID NO: 2665510 - RNA, 19 nt, Artificial Sequence
  Description of Artificial Sequence: Synthetic oligonucleotide
guagccucaucaccagggg

SEQ ID NO: 2665511 - RNA, 19 nt, Artificial Sequence
  Description of Artificial Sequence: Synthetic oligonucleotide
uguacugagccaccacauc

SEQ ID NO: 2665512 - RNA, 19 nt, Artificial Sequence
  Description of Artificial Sequence: Synthetic oligonucleotide
ugugacucugucguaggga

SEQ ID NO: 2665513 - RNA, 19 nt, Artificial Sequence
  Description of Artificial Sequence: Synthetic oligonucleotide
ggucacauacaccuuugag

SEQ ID NO: 2665514 - RNA, 19 nt, Artificial Sequence
  Description of Artificial Sequence: Synthetic oligonucleotide
guuccagucagaacgcagc

SEQ ID NO: 2665515 - RNA, 19 nt, Artificial Sequence
  Description of Artificial Sequence: Synthetic oligonucleotide
uaagccgcuccauguacug

SEQ ID NO: 2665516 - RNA, 19 nt, Artificial Sequence
  Description of Artificial Sequence: Synthetic oligonucleotide
cagggugagucucucagug

SEQ ID NO: 2665517 - RNA, 19 nt, Artificial Sequence
  Description of Artificial Sequence: Synthetic oligonucleotide
agccgcuccauguacugag

SEQ ID NO: 2665518 - RNA, 19 nt, Artificial Sequence
  Description of Artificial Sequence: Synthetic oligonucleotide
ggugguaaggaagaaugcc

SEQ ID NO: 2665519 - RNA, 19 nt, Artificial Sequence
  Description of Artificial Sequence: Synthetic oligonucleotide
agaggcuuggggugguaag

SEQ ID NO: 2665520 - RNA, 19 nt, Artificial Sequence
  Description of Artificial Sequence: Synthetic oligonucleotide
gaggcuuggggugguaagg

SEQ ID NO: 2665521 - RNA, 19 nt, Artificial Sequence
  Description of Artificial Sequence: Synthetic oligonucleotide
cacuaucuucugauguagc

SEQ ID NO: 2665522 - RNA, 19 nt, Artificial Sequence
  Description of Artificial Sequence: Synthetic oligonucleotide
uccccgagacguugcagcg

SEQ ID NO: 2665523 - RNA, 19 nt, Artificial Sequence
  Description of Artificial Sequence: Synthetic oligonucleotide
aggucguuccagucagaac

SEQ ID NO: 2665524 - RNA, 19 nt, Artificial Sequence
  Description of Artificial Sequence: Synthetic oligonucleotide
uagccucaucaccaggggc

SEQ ID NO: 2665525 - RNA, 19 nt, Artificial Sequence
  Description of Artificial Sequence: Synthetic oligonucleotide
uccauggcacccacggcug

SEQ ID NO: 2665526 - RNA, 19 nt, Artificial Sequence
  Description of Artificial Sequence: Synthetic oligonucleotide
agucucucagugcccuugg

SEQ ID NO: 2665527 - RNA, 19 nt, Artificial Sequence
  Description of Artificial Sequence: Synthetic oligonucleotide
agcucuccccaagaaaagg

SEQ ID NO: 2665528 - RNA, 19 nt, Artificial Sequence
  Description of Artificial Sequence: Synthetic oligonucleotide
ggucugcucauccagagga

SEQ ID NO: 2665529 - RNA, 19 nt, Artificial Sequence
  Description of Artificial Sequence: Synthetic oligonucleotide
gacugucuaacaguuccug

SEQ ID NO: 2665530 - RNA, 19 nt, Artificial Sequence
  Description of Artificial Sequence: Synthetic oligonucleotide
cugccaguuaauggcaucc

SEQ ID NO: 2665531 - RNA, 19 nt, Artificial Sequence
  Description of Artificial Sequence: Synthetic oligonucleotide
ggggugguaaggaagaaug

SEQ ID NO: 2665532 - RNA, 19 nt, Artificial Sequence
  Description of Artificial Sequence: Synthetic oligonucleotide
gugcgcugccaguuaaugg

SEQ ID NO: 2665533 - RNA, 19 nt, Artificial Sequence
  Description of Artificial Sequence: Synthetic oligonucleotide
gagcgugaggcccaauuca

SEQ ID NO: 2665534 - RNA, 19 nt, Artificial Sequence
  Description of Artificial Sequence: Synthetic oligonucleotide
gggugagucucucagugcc

SEQ ID NO: 2665535 - RNA, 19 nt, Artificial Sequence
  Description of Artificial Sequence: Synthetic oligonucleotide
gaagcugcagguuccccga

SEQ ID NO: 2665536 - RNA, 19 nt, Artificial Sequence
  Description of Artificial Sequence: Synthetic oligonucleotide
ugugcgcugccaguuaaug

SEQ ID NO: 2665537 - RNA, 19 nt, Artificial Sequence
  Description of Artificial Sequence: Synthetic oligonucleotide
uggagcucuccccaagaaa

SEQ ID NO: 2665538 - RNA, 19 nt, Artificial Sequence
  Description of Artificial Sequence: Synthetic oligonucleotide
agaggacuggucaugggug

SEQ ID NO: 2665539 - RNA, 19 nt, Artificial Sequence
  Description of Artificial Sequence: Synthetic oligonucleotide
agucagaacgcagcagcuc

SEQ ID NO: 2665540 - RNA, 19 nt, Artificial Sequence
  Description of Artificial Sequence: Synthetic oligonucleotide
ucuaacaguuccugcucau

SEQ ID NO: 2665541 - RNA, 19 nt, Artificial Sequence
  Description of Artificial Sequence: Synthetic oligonucleotide
ccagucagaacgcagcagc

SEQ ID NO: 2665542 - RNA, 19 nt, Artificial Sequence
  Description of Artificial Sequence: Synthetic oligonucleotide
ugucguagggaugcaucag

SEQ ID NO: 2665543 - RNA, 19 nt, Artificial Sequence
  Description of Artificial Sequence: Synthetic oligonucleotide
gugaggcccaauucagugc

SEQ ID NO: 2665544 - RNA, 19 nt, Artificial Sequence
  Description of Artificial Sequence: Synthetic oligonucleotide
agcgcaggucguuccaguc

SEQ ID NO: 2665545 - RNA, 19 nt, Artificial Sequence
  Description of Artificial Sequence: Synthetic oligonucleotide
auggcauccucgcgccagc

SEQ ID NO: 2665546 - RNA, 19 nt, Artificial Sequence
  Description of Artificial Sequence: Synthetic oligonucleotide
uggucacauacaccuuuga

SEQ ID NO: 2665547 - RNA, 19 nt, Artificial Sequence
  Description of Artificial Sequence: Synthetic oligonucleotide
uguccaggucgcacccugg

SEQ ID NO: 2665548 - RNA, 19 nt, Artificial Sequence
  Description of Artificial Sequence: Synthetic oligonucleotide
acggcugaaugugcgcugc

SEQ ID NO: 2665549 - RNA, 19 nt, Artificial Sequence
  Description of Artificial Sequence: Synthetic oligonucleotide
gggucuugugacucugucg

SEQ ID NO: 2665550 - RNA, 19 nt, Artificial Sequence
  Description of Artificial Sequence: Synthetic oligonucleotide
ucgcacccuggucacauac

SEQ ID NO: 2665551 - RNA, 19 nt, Artificial Sequence
  Description of Artificial Sequence: Synthetic oligonucleotide
cuggucaugggugggguag

SEQ ID NO: 2665552 - RNA, 19 nt, Artificial Sequence
  Description of Artificial Sequence: Synthetic oligonucleotide
cuggucacauacaccuuug

SEQ ID NO: 2665553 - RNA, 19 nt, Artificial Sequence
  Description of Artificial Sequence: Synthetic oligonucleotide
ggaugcaucagugggcucc

SEQ ID NO: 2665554 - RNA, 19 nt, Artificial Sequence
  Description of Artificial Sequence: Synthetic oligonucleotide
uccagucagaacgcagcag

SEQ ID NO: 2665555 - RNA, 19 nt, Artificial Sequence
  Description of Artificial Sequence: Synthetic oligonucleotide
ugaaugugcgcugccaguu

SEQ ID NO: 2665556 - RNA, 19 nt, Artificial Sequence
  Description of Artificial Sequence: Synthetic oligonucleotide
ugacucugucguagggaug

SEQ ID NO: 2665557 - RNA, 19 nt, Artificial Sequence
  Description of Artificial Sequence: Synthetic oligonucleotide
auacaccuuugagggagac

SEQ ID NO: 2665558 - RNA, 19 nt, Artificial Sequence
  Description of Artificial Sequence: Synthetic oligonucleotide
agacguugcagcgcagguc

SEQ ID NO: 2665559 - RNA, 19 nt, Artificial Sequence
  Description of Artificial Sequence: Synthetic oligonucleotide
agggaugcaucagugggcu

SEQ ID NO: 2665560 - RNA, 19 nt, Artificial Sequence
  Description of Artificial Sequence: Synthetic oligonucleotide
ucucagugcccuuggggaa

SEQ ID NO: 2665561 - RNA, 19 nt, Artificial Sequence
  Description of Artificial Sequence: Synthetic oligonucleotide
gucuaacaguuccugcuca

SEQ ID NO: 2665562 - RNA, 19 nt, Artificial Sequence
  Description of Artificial Sequence: Synthetic oligonucleotide
gcugaaugugcgcugccag

SEQ ID NO: 2665563 - RNA, 19 nt, Artificial Sequence
  Description of Artificial Sequence: Synthetic oligonucleotide
ggucuugugacucugucgu

SEQ ID NO: 2665564 - RNA, 19 nt, Artificial Sequence
  Description of Artificial Sequence: Synthetic oligonucleotide
ucaccaggggccccaucug

SEQ ID NO: 2665565 - RNA, 19 nt, Artificial Sequence
  Description of Artificial Sequence: Synthetic oligonucleotide
gucuguaguuccaggggag

SEQ ID NO: 2665566 - RNA, 19 nt, Artificial Sequence
  Description of Artificial Sequence: Synthetic oligonucleotide
cugucuaacaguuccugcu

SEQ ID NO: 2665567 - RNA, 19 nt, Artificial Sequence
  Description of Artificial Sequence: Synthetic oligonucleotide
cugucguagggaugcauca

SEQ ID NO: 2665568 - RNA, 19 nt, Artificial Sequence
  Description of Artificial Sequence: Synthetic oligonucleotide
agcgugaggcccaauucag

SEQ ID NO: 2665569 - RNA, 19 nt, Artificial Sequence
  Description of Artificial Sequence: Synthetic oligonucleotide
aggcccaauucagugcccg

SEQ ID NO: 2665570 - RNA, 19 nt, Artificial Sequence
  Description of Artificial Sequence: Synthetic oligonucleotide
gccagggugagucucucag

SEQ ID NO: 2665571 - RNA, 19 nt, Artificial Sequence
  Description of Artificial Sequence: Synthetic oligonucleotide
uucggggagguggagcucu

SEQ ID NO: 2665572 - RNA, 19 nt, Artificial Sequence
  Description of Artificial Sequence: Synthetic oligonucleotide
gcucuccccaagaaaaggg

SEQ ID NO: 2665573 - RNA, 19 nt, Artificial Sequence
  Description of Artificial Sequence: Synthetic oligonucleotide
gagcucuccccaagaaaag

SEQ ID NO: 2665574 - RNA, 19 nt, Artificial Sequence
  Description of Artificial Sequence: Synthetic oligonucleotide
gggaaguccgcuguccagg

SEQ ID NO: 2665575 - RNA, 19 nt, Artificial Sequence
  Description of Artificial Sequence: Synthetic oligonucleotide
cacccuggucacauacacc

SEQ ID NO: 2665576 - RNA, 19 nt, Artificial Sequence
  Description of Artificial Sequence: Synthetic oligonucleotide
ugcagcgcaggucguucca

SEQ ID NO: 2665577 - RNA, 19 nt, Artificial Sequence
  Description of Artificial Sequence: Synthetic oligonucleotide
uggcacccacggcugaaug

SEQ ID NO: 2665578 - RNA, 19 nt, Artificial Sequence
  Description of Artificial Sequence: Synthetic oligonucleotide
uugcagcgcaggucguucc

SEQ ID NO: 2665579 - RNA, 19 nt, Artificial Sequence
  Description of Artificial Sequence: Synthetic oligonucleotide
ucgaaguccauggcaccca

SEQ ID NO: 2665580 - RNA, 19 nt, Artificial Sequence
  Description of Artificial Sequence: Synthetic oligonucleotide
uggucaugggugggguagg

SEQ ID NO: 2665581 - RNA, 19 nt, Artificial Sequence
  Description of Artificial Sequence: Synthetic oligonucleotide
uccgccucaggaagcugca

SEQ ID NO: 2665582 - RNA, 19 nt, Artificial Sequence
  Description of Artificial Sequence: Synthetic oligonucleotide
guaggggugucuguaguuc

SEQ ID NO: 2665583 - RNA, 19 nt, Artificial Sequence
  Description of Artificial Sequence: Synthetic oligonucleotide
cuaacaguuccugcucauc

SEQ ID NO: 2665584 - RNA, 19 nt, Artificial Sequence
  Description of Artificial Sequence: Synthetic oligonucleotide
ucuccacaguucggggagg

SEQ ID NO: 2665585 - RNA, 19 nt, Artificial Sequence
  Description of Artificial Sequence: Synthetic oligonucleotide
ggagcucuccccaagaaaa

SEQ ID NO: 2665586 - RNA, 19 nt, Artificial Sequence
  Description of Artificial Sequence: Synthetic oligonucleotide
ugcccuuggggaaguccgc

SEQ ID NO: 2665587 - RNA, 19 nt, Artificial Sequence
  Description of Artificial Sequence: Synthetic oligonucleotide
agggagacuucuccacagu

SEQ ID NO: 2665588 - RNA, 19 nt, Artificial Sequence
  Description of Artificial Sequence: Synthetic oligonucleotide
agugcccgggagugucugg

SEQ ID NO: 2665589 - RNA, 19 nt, Artificial Sequence
  Description of Artificial Sequence: Synthetic oligonucleotide
aggacuggucauggguggg

SEQ ID NO: 2665590 - RNA, 19 nt, Artificial Sequence
  Description of Artificial Sequence: Synthetic oligonucleotide
gucucucagugcccuuggg

SEQ ID NO: 2665591 - RNA, 19 nt, Artificial Sequence
  Description of Artificial Sequence: Synthetic oligonucleotide
gcgugcauuaagccgcucc

SEQ ID NO: 2665592 - RNA, 19 nt, Artificial Sequence
  Description of Artificial Sequence: Synthetic oligonucleotide
cauccucgcgccagcggcc

SEQ ID NO: 2665593 - RNA, 19 nt, Artificial Sequence
  Description of Artificial Sequence: Synthetic oligonucleotide
uaauggcauccucgcgcca

SEQ ID NO: 2665594 - RNA, 19 nt, Artificial Sequence
  Description of Artificial Sequence: Synthetic oligonucleotide
uccaggucgcacccugguc

SEQ ID NO: 2665595 - RNA, 19 nt, Artificial Sequence
  Description of Artificial Sequence: Synthetic oligonucleotide
uguccgcagcugcacucug

SEQ ID NO: 2665596 - RNA, 19 nt, Artificial Sequence
  Description of Artificial Sequence: Synthetic oligonucleotide
gcauccucgcgccagcggc

SEQ ID NO: 2665597 - RNA, 19 nt, Artificial Sequence
  Description of Artificial Sequence: Synthetic oligonucleotide
aaagggcgggccaggguga

SEQ ID NO: 2665598 - RNA, 19 nt, Artificial Sequence
  Description of Artificial Sequence: Synthetic oligonucleotide
uggggugguaaggaagaau

SEQ ID NO: 2665599 - RNA, 19 nt, Artificial Sequence
  Description of Artificial Sequence: Synthetic oligonucleotide
aguccgcuguccaggucgc

SEQ ID NO: 2665600 - RNA, 19 nt, Artificial Sequence
  Description of Artificial Sequence: Synthetic oligonucleotide
auguacugagccaccacau

SEQ ID NO: 2665601 - RNA, 19 nt, Artificial Sequence
  Description of Artificial Sequence: Synthetic oligonucleotide
auccagaggacuggucaug

SEQ ID NO: 2665602 - RNA, 19 nt, Artificial Sequence
  Description of Artificial Sequence: Synthetic oligonucleotide
gucaugggugggguagggg

SEQ ID NO: 2665603 - RNA, 19 nt, Artificial Sequence
  Description of Artificial Sequence: Synthetic oligonucleotide
ugccaguuaauggcauccu

SEQ ID NO: 2665604 - RNA, 19 nt, Artificial Sequence
  Description of Artificial Sequence: Synthetic oligonucleotide
acccacggcugaaugugcg

SEQ ID NO: 2665605 - RNA, 19 nt, Artificial Sequence
  Description of Artificial Sequence: Synthetic oligonucleotide
auccucgcgccagcggccc

SEQ ID NO: 2665606 - RNA, 19 nt, Artificial Sequence
  Description of Artificial Sequence: Synthetic oligonucleotide
agacuucuccacaguucgg

SEQ ID NO: 2665607 - RNA, 19 nt, Artificial Sequence
  Description of Artificial Sequence: Synthetic oligonucleotide
uccgcuguccaggucgcac

SEQ ID NO: 2665608 - RNA, 19 nt, Artificial Sequence
  Description of Artificial Sequence: Synthetic oligonucleotide
cauuaagccgcuccaugua

SEQ ID NO: 2665609 - RNA, 19 nt, Artificial Sequence
  Description of Artificial Sequence: Synthetic oligonucleotide
agguuccccgagacguugc

SEQ ID NO: 2665610 - RNA, 19 nt, Artificial Sequence
  Description of Artificial Sequence: Synthetic oligonucleotide
cugcagguuccccgagacg

SEQ ID NO: 2665611 - RNA, 19 nt, Artificial Sequence
  Description of Artificial Sequence: Synthetic oligonucleotide
ucagugcccgggagugucu

SEQ ID NO: 2665612 - RNA, 19 nt, Artificial Sequence
  Description of Artificial Sequence: Synthetic oligonucleotide
cuaucuucugauguagccu

SEQ ID NO: 2665613 - RNA, 19 nt, Artificial Sequence
  Description of Artificial Sequence: Synthetic oligonucleotide
cguagggaugcaucagugg

SEQ ID NO: 2665614 - RNA, 19 nt, Artificial Sequence
  Description of Artificial Sequence: Synthetic oligonucleotide
cacggcugaaugugcgcug

SEQ ID NO: 2665615 - RNA, 19 nt, Artificial Sequence
  Description of Artificial Sequence: Synthetic oligonucleotide
ggagcgugaggcccaauuc

SEQ ID NO: 2665616 - RNA, 19 nt, Artificial Sequence
  Description of Artificial Sequence: Synthetic oligonucleotide
cuuggggaaguccgcuguc

SEQ ID NO: 2665617 - RNA, 19 nt, Artificial Sequence
  Description of Artificial Sequence: Synthetic oligonucleotide
cagcucgaaguccauggca

SEQ ID NO: 2665618 - RNA, 19 nt, Artificial Sequence
  Description of Artificial Sequence: Synthetic oligonucleotide
ugggguaggggugucugua

SEQ ID NO: 2665619 - RNA, 19 nt, Artificial Sequence
  Description of Artificial Sequence: Synthetic oligonucleotide
caguucggggagguggagc

SEQ ID NO: 2665620 - RNA, 19 nt, Artificial Sequence
  Description of Artificial Sequence: Synthetic oligonucleotide
accgccuccgccucaggaa

SEQ ID NO: 2665621 - RNA, 19 nt, Artificial Sequence
  Description of Artificial Sequence: Synthetic oligonucleotide
ugggcuccagacugucuaa

SEQ ID NO: 2665622 - RNA, 19 nt, Artificial Sequence
  Description of Artificial Sequence: Synthetic oligonucleotide
gggucugcucauccagagg

SEQ ID NO: 2665623 - RNA, 19 nt, Artificial Sequence
  Description of Artificial Sequence: Synthetic oligonucleotide
ggagguggagcucucccca

SEQ ID NO: 2665624 - RNA, 19 nt, Artificial Sequence
  Description of Artificial Sequence: Synthetic oligonucleotide
cacaguucggggaggugga

SEQ ID NO: 2665625 - RNA, 19 nt, Artificial Sequence
  Description of Artificial Sequence: Synthetic oligonucleotide
agacugucuaacaguuccu

SEQ ID NO: 2665626 - RNA, 19 nt, Artificial Sequence
  Description of Artificial Sequence: Synthetic oligonucleotide
gaaugugcgcugccaguua

SEQ ID NO: 2665627 - RNA, 19 nt, Artificial Sequence
  Description of Artificial Sequence: Synthetic oligonucleotide
gggagguggagcucucccc

SEQ ID NO: 2665628 - RNA, 19 nt, Artificial Sequence
  Description of Artificial Sequence: Synthetic oligonucleotide
gucguagggaugcaucagu

SEQ ID NO: 2665629 - RNA, 19 nt, Artificial Sequence
  Description of Artificial Sequence: Synthetic oligonucleotide
caggucgcacccuggucac

SEQ ID NO: 2665630 - RNA, 19 nt, Artificial Sequence
  Description of Artificial Sequence: Synthetic oligonucleotide
ucguuccagucagaacgca

SEQ ID NO: 2665631 - RNA, 19 nt, Artificial Sequence
  Description of Artificial Sequence: Synthetic oligonucleotide
aggcuuggggugguaagga

SEQ ID NO: 2665632 - RNA, 19 nt, Artificial Sequence
  Description of Artificial Sequence: Synthetic oligonucleotide
guugcagcgcaggucguuc

SEQ ID NO: 2665633 - RNA, 19 nt, Artificial Sequence
  Description of Artificial Sequence: Synthetic oligonucleotide
uggcgugcauuaagccgcu

SEQ ID NO: 2665634 - RNA, 19 nt, Artificial Sequence
  Description of Artificial Sequence: Synthetic oligonucleotide
gagacguugcagcgcaggu

SEQ ID NO: 2665635 - RNA, 19 nt, Artificial Sequence
  Description of Artificial Sequence: Synthetic oligonucleotide
gcccaauucagugcccggg

SEQ ID NO: 2665636 - RNA, 19 nt, Artificial Sequence
  Description of Artificial Sequence: Synthetic oligonucleotide
cagaggacuggucaugggu

SEQ ID NO: 2665637 - RNA, 19 nt, Artificial Sequence
  Description of Artificial Sequence: Synthetic oligonucleotide
ggggagguggagcucuccc

SEQ ID NO: 2665638 - RNA, 19 nt, Artificial Sequence
  Description of Artificial Sequence: Synthetic oligonucleotide
gggguaggggugucuguag

SEQ ID NO: 2665639 - RNA, 19 nt, Artificial Sequence
  Description of Artificial Sequence: Synthetic oligonucleotide
gcauuaagccgcuccaugu

SEQ ID NO: 2665640 - RNA, 19 nt, Artificial Sequence
  Description of Artificial Sequence: Synthetic oligonucleotide
ccaauucagugcccgggag

SEQ ID NO: 2665641 - RNA, 19 nt, Artificial Sequence
  Description of Artificial Sequence: Synthetic oligonucleotide
aagggcgggccagggugag

SEQ ID NO: 2665642 - RNA, 19 nt, Artificial Sequence
  Description of Artificial Sequence: Synthetic oligonucleotide
ggggaaguccgcuguccag

SEQ ID NO: 2665643 - RNA, 19 nt, Artificial Sequence
  Description of Artificial Sequence: Synthetic oligonucleotide
gaaguccgcuguccagguc

SEQ ID NO: 2665644 - RNA, 19 nt, Artificial Sequence
  Description of Artificial Sequence: Synthetic oligonucleotide
guuccccgagacguugcag

SEQ ID NO: 2665645 - RNA, 19 nt, Artificial Sequence
  Description of Artificial Sequence: Synthetic oligonucleotide
gcagcucgaaguccauggc

SEQ ID NO: 2665646 - RNA, 19 nt, Artificial Sequence
  Description of Artificial Sequence: Synthetic oligonucleotide
caccuuugagggagacuuc

SEQ ID NO: 2665647 - RNA, 19 nt, Artificial Sequence
  Description of Artificial Sequence: Synthetic oligonucleotide
cagguuccccgagacguug

SEQ ID NO: 2665648 - RNA, 19 nt, Artificial Sequence
  Description of Artificial Sequence: Synthetic oligonucleotide
ucgcgccagcggcccaugg

SEQ ID NO: 2665649 - RNA, 19 nt, Artificial Sequence
  Description of Artificial Sequence: Synthetic oligonucleotide
ucagugcccuuggggaagu

SEQ ID NO: 2665650 - RNA, 19 nt, Artificial Sequence
  Description of Artificial Sequence: Synthetic oligonucleotide
ggcccaauucagugcccgg

SEQ ID NO: 2665651 - RNA, 19 nt, Artificial Sequence
  Description of Artificial Sequence: Synthetic oligonucleotide
ggcauccucgcgccagcgg

SEQ ID NO: 2665652 - RNA, 19 nt, Artificial Sequence
  Description of Artificial Sequence: Synthetic oligonucleotide
acaguucggggagguggag

SEQ ID NO: 2665653 - RNA, 19 nt, Artificial Sequence
  Description of Artificial Sequence: Synthetic oligonucleotide
gguguccgcagcugcacuc

SEQ ID NO: 2665654 - RNA, 19 nt, Artificial Sequence
  Description of Artificial Sequence: Synthetic oligonucleotide
caauucagugcccgggagu

SEQ ID NO: 2665655 - RNA, 19 nt, Artificial Sequence
  Description of Artificial Sequence: Synthetic oligonucleotide
guggagcucuccccaagaa

SEQ ID NO: 2665656 - RNA, 19 nt, Artificial Sequence
  Description of Artificial Sequence: Synthetic oligonucleotide
acuggucauggguggggua

SEQ ID NO: 2665657 - RNA, 19 nt, Artificial Sequence
  Description of Artificial Sequence: Synthetic oligonucleotide
guuccaggggaggcuguug

SEQ ID NO: 2665658 - RNA, 19 nt, Artificial Sequence
  Description of Artificial Sequence: Synthetic oligonucleotide
ccaggucgcacccugguca

SEQ ID NO: 2665659 - RNA, 19 nt, Artificial Sequence
  Description of Artificial Sequence: Synthetic oligonucleotide
ccaggggccccaucugugg

SEQ ID NO: 2665660 - RNA, 19 nt, Artificial Sequence
  Description of Artificial Sequence: Synthetic oligonucleotide
gagccaccacauccaccgc

SEQ ID NO: 2665661 - RNA, 19 nt, Artificial Sequence
  Description of Artificial Sequence: Synthetic oligonucleotide
cguuccagucagaacgcag

SEQ ID NO: 2665662 - RNA, 19 nt, Artificial Sequence
  Description of Artificial Sequence: Synthetic oligonucleotide
gcgccagcggcccaugggc

SEQ ID NO: 2665663 - RNA, 19 nt, Artificial Sequence
  Description of Artificial Sequence: Synthetic oligonucleotide
gucugcucauccagaggac

SEQ ID NO: 2665664 - RNA, 19 nt, Artificial Sequence
  Description of Artificial Sequence: Synthetic oligonucleotide
cugaaugugcgcugccagu

SEQ ID NO: 2665665 - RNA, 19 nt, Artificial Sequence
  Description of Artificial Sequence: Synthetic oligonucleotide
cauccucgucaucaaggaa

SEQ ID NO: 2665666 - RNA, 19 nt, Artificial Sequence
  Description of Artificial Sequence: Synthetic oligonucleotide
gagguggagcucuccccaa

SEQ ID NO: 2665667 - RNA, 19 nt, Artificial Sequence
  Description of Artificial Sequence: Synthetic oligonucleotide
cgcaggucguuccagucag

SEQ ID NO: 2665668 - RNA, 19 nt, Artificial Sequence
  Description of Artificial Sequence: Synthetic oligonucleotide
ugccagggaaagggcgggc

SEQ ID NO: 2665669 - RNA, 19 nt, Artificial Sequence
  Description of Artificial Sequence: Synthetic oligonucleotide
ccgcuccauguacugagcc

SEQ ID NO: 2665670 - RNA, 19 nt, Artificial Sequence
  Description of Artificial Sequence: Synthetic oligonucleotide
cgccucaggaagcugcagg

SEQ ID NO: 2665671 - RNA, 19 nt, Artificial Sequence
  Description of Artificial Sequence: Synthetic oligonucleotide
gcugccaguuaauggcauc

SEQ ID NO: 2665672 - RNA, 19 nt, Artificial Sequence
  Description of Artificial Sequence: Synthetic oligonucleotide
caggucguuccagucagaa

SEQ ID NO: 2665673 - RNA, 19 nt, Artificial Sequence
  Description of Artificial Sequence: Synthetic oligonucleotide
cagucagaacgcagcagcu

SEQ ID NO: 2665674 - RNA, 19 nt, Artificial Sequence
  Description of Artificial Sequence: Synthetic oligonucleotide
cagcagcucgaaguccaug

SEQ ID NO: 2665675 - RNA, 19 nt, Artificial Sequence
  Description of Artificial Sequence: Synthetic oligonucleotide
cauccagaggacuggucau

SEQ ID NO: 2665676 - RNA, 19 nt, Artificial Sequence
  Description of Artificial Sequence: Synthetic oligonucleotide
ccgcuguccaggucgcacc

SEQ ID NO: 2665677 - RNA, 19 nt, Artificial Sequence
  Description of Artificial Sequence: Synthetic oligonucleotide
cccacggcugaaugugcgc

SEQ ID NO: 2665678 - RNA, 19 nt, Artificial Sequence
  Description of Artificial Sequence: Synthetic oligonucleotide
aguuccaggggaggcuguu

SEQ ID NO: 2665679 - RNA, 19 nt, Artificial Sequence
  Description of Artificial Sequence: Synthetic oligonucleotide
gacuggucauggguggggu

SEQ ID NO: 2665680 - RNA, 19 nt, Artificial Sequence
  Description of Artificial Sequence: Synthetic oligonucleotide
ucggggagguggagcucuc

SEQ ID NO: 2665681 - RNA, 19 nt, Artificial Sequence
  Description of Artificial Sequence: Synthetic oligonucleotide
caggggaggcuguuggggu

SEQ ID NO: 2665682 - RNA, 19 nt, Artificial Sequence
  Description of Artificial Sequence: Synthetic oligonucleotide
cgugcauuaagccgcucca

SEQ ID NO: 2665683 - RNA, 19 nt, Artificial Sequence
  Description of Artificial Sequence: Synthetic oligonucleotide
cgagacguugcagcgcagg

SEQ ID NO: 2665684 - RNA, 19 nt, Artificial Sequence
  Description of Artificial Sequence: Synthetic oligonucleotide
cagugcccgggagugucug

SEQ ID NO: 2665685 - RNA, 19 nt, Artificial Sequence
  Description of Artificial Sequence: Synthetic oligonucleotide
gguuccccgagacguugca

SEQ ID NO: 2665686 - RNA, 19 nt, Artificial Sequence
  Description of Artificial Sequence: Synthetic oligonucleotide
gcgcaggucguuccaguca

SEQ ID NO: 2665687 - RNA, 19 nt, Artificial Sequence
  Description of Artificial Sequence: Synthetic oligonucleotide
auggcacccacggcugaau

SEQ ID NO: 2665688 - RNA, 19 nt, Artificial Sequence
  Description of Artificial Sequence: Synthetic oligonucleotide
ccgccuccgccucaggaag

SEQ ID NO: 2665689 - RNA, 19 nt, Artificial Sequence
  Description of Artificial Sequence: Synthetic oligonucleotide
ggcugaaugugcgcugcca

SEQ ID NO: 2665690 - RNA, 19 nt, Artificial Sequence
  Description of Artificial Sequence: Synthetic oligonucleotide
caccgccuccgccucagga

SEQ ID NO: 2665691 - RNA, 19 nt, Artificial Sequence
  Description of Artificial Sequence: Synthetic oligonucleotide
gccucaucaccaggggccc

SEQ ID NO: 2665692 - RNA, 19 nt, Artificial Sequence
  Description of Artificial Sequence: Synthetic oligonucleotide
cccgagacguugcagcgca

SEQ ID NO: 2665693 - RNA, 19 nt, Artificial Sequence
  Description of Artificial Sequence: Synthetic oligonucleotide
cccaauucagugcccggga

SEQ ID NO: 2665694 - RNA, 19 nt, Artificial Sequence
  Description of Artificial Sequence: Synthetic oligonucleotide
ggcuuggggugguaaggaa

SEQ ID NO: 2665695 - RNA, 19 nt, Artificial Sequence
  Description of Artificial Sequence: Synthetic oligonucleotide
gcugcacucugggcagagg

SEQ ID NO: 2665696 - RNA, 19 nt, Artificial Sequence
  Description of Artificial Sequence: Synthetic oligonucleotide
uccucgcgccagcggccca

SEQ ID NO: 2665697 - RNA, 19 nt, Artificial Sequence
  Description of Artificial Sequence: Synthetic oligonucleotide
guccaggucgcacccuggu

SEQ ID NO: 2665698 - RNA, 19 nt, Artificial Sequence
  Description of Artificial Sequence: Synthetic oligonucleotide
gcagcgcaggucguuccag

SEQ ID NO: 2665699 - RNA, 19 nt, Artificial Sequence
  Description of Artificial Sequence: Synthetic oligonucleotide
cccuuggggaaguccgcug

SEQ ID NO: 2665700 - RNA, 19 nt, Artificial Sequence
  Description of Artificial Sequence: Synthetic oligonucleotide
cgccauggcgugcauuaag

SEQ ID NO: 2665701 - RNA, 19 nt, Artificial Sequence
  Description of Artificial Sequence: Synthetic oligonucleotide
gggagacuucuccacaguu

SEQ ID NO: 2665702 - RNA, 19 nt, Artificial Sequence
  Description of Artificial Sequence: Synthetic oligonucleotide
gguaggggugucuguaguu

SEQ ID NO: 2665703 - RNA, 19 nt, Artificial Sequence
  Description of Artificial Sequence: Synthetic oligonucleotide
gggcgggccagggugaguc

SEQ ID NO: 2665704 - RNA, 19 nt, Artificial Sequence
  Description of Artificial Sequence: Synthetic oligonucleotide
augugcgcugccaguuaau

SEQ ID NO: 2665705 - RNA, 19 nt, Artificial Sequence
  Description of Artificial Sequence: Synthetic oligonucleotide
ggcacccacggcugaaugu

SEQ ID NO: 2665706 - RNA, 19 nt, Artificial Sequence
  Description of Artificial Sequence: Synthetic oligonucleotide
cagaggcuuggggugguaa

SEQ ID NO: 2665707 - RNA, 19 nt, Artificial Sequence
  Description of Artificial Sequence: Synthetic oligonucleotide
agcggcccaugggccgccc

SEQ ID NO: 2665708 - RNA, 19 nt, Artificial Sequence
  Description of Artificial Sequence: Synthetic oligonucleotide
gggcuccagacugucuaac

SEQ ID NO: 2665709 - RNA, 19 nt, Artificial Sequence
  Description of Artificial Sequence: Synthetic oligonucleotide
cauggcacccacggcugaa

SEQ ID NO: 2665710 - RNA, 19 nt, Artificial Sequence
  Description of Artificial Sequence: Synthetic oligonucleotide
ggguaggggugucuguagu

SEQ ID NO: 2665711 - RNA, 19 nt, Artificial Sequence
  Description of Artificial Sequence: Synthetic oligonucleotide
cccgccauggcgugcauua

SEQ ID NO: 2665712 - RNA, 19 nt, Artificial Sequence
  Description of Artificial Sequence: Synthetic oligonucleotide
guucggggagguggagcuc

SEQ ID NO: 2665713 - RNA, 19 nt, Artificial Sequence
  Description of Artificial Sequence: Synthetic oligonucleotide
gggguguccgcagcugcac

SEQ ID NO: 2665714 - RNA, 19 nt, Artificial Sequence
  Description of Artificial Sequence: Synthetic oligonucleotide
ggaaagggcgggccagggu

SEQ ID NO: 2665715 - RNA, 19 nt, Artificial Sequence
  Description of Artificial Sequence: Synthetic oligonucleotide
gccgcuccauguacugagc

SEQ ID NO: 2665716 - RNA, 19 nt, Artificial Sequence
  Description of Artificial Sequence: Synthetic oligonucleotide
gggagcgugaggcccaauu

SEQ ID NO: 2665717 - RNA, 19 nt, Artificial Sequence
  Description of Artificial Sequence: Synthetic oligonucleotide
ccuggucacauacaccuuu

SEQ ID NO: 2665718 - RNA, 19 nt, Artificial Sequence
  Description of Artificial Sequence: Synthetic oligonucleotide
cgcgccagcggcccauggg

SEQ ID NO: 2665719 - RNA, 19 nt, Artificial Sequence
  Description of Artificial Sequence: Synthetic oligonucleotide
gcgcugccaguuaauggca

SEQ ID NO: 2665720 - RNA, 19 nt, Artificial Sequence
  Description of Artificial Sequence: Synthetic oligonucleotide
cccaugggccgcccagcag

SEQ ID NO: 2665721 - RNA, 19 nt, Artificial Sequence
  Description of Artificial Sequence: Synthetic oligonucleotide
gcagggagcgugaggccca

SEQ ID NO: 2665722 - RNA, 19 nt, Artificial Sequence
  Description of Artificial Sequence: Synthetic oligonucleotide
aggucgcacccuggucaca

SEQ ID NO: 2665723 - RNA, 19 nt, Artificial Sequence
  Description of Artificial Sequence: Synthetic oligonucleotide
acguugcagcgcaggucgu

SEQ ID NO: 2665724 - RNA, 19 nt, Artificial Sequence
  Description of Artificial Sequence: Synthetic oligonucleotide
cagcgcaggucguuccagu

SEQ ID NO: 2665725 - RNA, 19 nt, Artificial Sequence
  Description of Artificial Sequence: Synthetic oligonucleotide
gcccaugggccgcccagca

SEQ ID NO: 2665726 - RNA, 19 nt, Artificial Sequence
  Description of Artificial Sequence: Synthetic oligonucleotide
ggcccaugggccgcccagc

SEQ ID NO: 2665727 - RNA, 19 nt, Artificial Sequence
  Description of Artificial Sequence: Synthetic oligonucleotide
ccuuggggaaguccgcugu

SEQ ID NO: 2665728 - RNA, 19 nt, Artificial Sequence
  Description of Artificial Sequence: Synthetic oligonucleotide
gucgcacccuggucacaua

SEQ ID NO: 2665729 - RNA, 19 nt, Artificial Sequence
  Description of Artificial Sequence: Synthetic oligonucleotide
cucgcgccagcggcccaug

SEQ ID NO: 2665730 - RNA, 19 nt, Artificial Sequence
  Description of Artificial Sequence: Synthetic oligonucleotide
ggucgcacccuggucacau

SEQ ID NO: 2665731 - RNA, 19 nt, Artificial Sequence
  Description of Artificial Sequence: Synthetic oligonucleotide
cucugucguagggaugcau

SEQ ID NO: 2665732 - RNA, 19 nt, Artificial Sequence
  Description of Artificial Sequence: Synthetic oligonucleotide
ccgagacguugcagcgcag

SEQ ID NO: 2665733 - RNA, 19 nt, Artificial Sequence
  Description of Artificial Sequence: Synthetic oligonucleotide
cagcggcccaugggccgcc

SEQ ID NO: 2665734 - RNA, 19 nt, Artificial Sequence
  Description of Artificial Sequence: Synthetic oligonucleotide
agggcgggccagggugagu

SEQ ID NO: 2665735 - RNA, 19 nt, Artificial Sequence
  Description of Artificial Sequence: Synthetic oligonucleotide
gcgggccagggugagucuc

SEQ ID NO: 2665736 - RNA, 19 nt, Artificial Sequence
  Description of Artificial Sequence: Synthetic oligonucleotide
ggguguccgcagcugcacu

SEQ ID NO: 2665737 - RNA, 19 nt, Artificial Sequence
  Description of Artificial Sequence: Synthetic oligonucleotide
cggcugaaugugcgcugcc

SEQ ID NO: 2665738 - RNA, 19 nt, Artificial Sequence
  Description of Artificial Sequence: Synthetic oligonucleotide
cagugcccuuggggaaguc

SEQ ID NO: 2665739 - RNA, 19 nt, Artificial Sequence
  Description of Artificial Sequence: Synthetic oligonucleotide
ccagggugagucucucagu

SEQ ID NO: 2665740 - RNA, 19 nt, Artificial Sequence
  Description of Artificial Sequence: Synthetic oligonucleotide
cgcacccuggucacauaca

SEQ ID NO: 2665741 - RNA, 19 nt, Artificial Sequence
  Description of Artificial Sequence: Synthetic oligonucleotide
ccucgucaucaaggaaguc

SEQ ID NO: 2665742 - RNA, 19 nt, Artificial Sequence
  Description of Artificial Sequence: Synthetic oligonucleotide
gggccagggugagucucuc

SEQ ID NO: 2665743 - RNA, 19 nt, Artificial Sequence
  Description of Artificial Sequence: Synthetic oligonucleotide
guccgcuguccaggucgca

SEQ ID NO: 2665744 - RNA, 19 nt, Artificial Sequence
  Description of Artificial Sequence: Synthetic oligonucleotide
ccacggcugaaugugcgcu

SEQ ID NO: 2665745 - RNA, 19 nt, Artificial Sequence
  Description of Artificial Sequence: Synthetic oligonucleotide
ccgccucaggaagcugcag

SEQ ID NO: 2665746 - RNA, 19 nt, Artificial Sequence
  Description of Artificial Sequence: Synthetic oligonucleotide
gcgugaggcccaauucagu

SEQ ID NO: 2665747 - RNA, 19 nt, Artificial Sequence
  Description of Artificial Sequence: Synthetic oligonucleotide
gcaggucguuccagucaga

SEQ ID NO: 2665748 - RNA, 19 nt, Artificial Sequence
  Description of Artificial Sequence: Synthetic oligonucleotide
agggagcgugaggcccaau

SEQ ID NO: 2665749 - RNA, 19 nt, Artificial Sequence
  Description of Artificial Sequence: Synthetic oligonucleotide
cagggagcgugaggcccaa

SEQ ID NO: 2665750 - RNA, 19 nt, Artificial Sequence
  Description of Artificial Sequence: Synthetic oligonucleotide
gcccuuggggaaguccgcu

SEQ ID NO: 2665751 - RNA, 19 nt, Artificial Sequence
  Description of Artificial Sequence: Synthetic oligonucleotide
gccgcccagcagccuguuc

SEQ ID NO: 2665752 - RNA, 19 nt, Artificial Sequence
  Description of Artificial Sequence: Synthetic oligonucleotide
ccuccgccucaggaagcug

SEQ ID NO: 2665753 - RNA, 19 nt, Artificial Sequence
  Description of Artificial Sequence: Synthetic oligonucleotide
ggcgugcauuaagccgcuc

SEQ ID NO: 2665754 - RNA, 19 nt, Artificial Sequence
  Description of Artificial Sequence: Synthetic oligonucleotide
cggggagguggagcucucc

SEQ ID NO: 2665755 - RNA, 19 nt, Artificial Sequence
  Description of Artificial Sequence: Synthetic oligonucleotide
ggcagaggcuugggguggu

SEQ ID NO: 2665756 - RNA, 19 nt, Artificial Sequence
  Description of Artificial Sequence: Synthetic oligonucleotide
ggcgggccagggugagucu

SEQ ID NO: 2665757 - RNA, 19 nt, Artificial Sequence
  Description of Artificial Sequence: Synthetic oligonucleotide
gcggcccaugggccgccca

SEQ ID NO: 2665758 - RNA, 19 nt, Artificial Sequence
  Description of Artificial Sequence: Synthetic oligonucleotide
ccucaggaagcugcagguu

SEQ ID NO: 2665759 - RNA, 19 nt, Artificial Sequence
  Description of Artificial Sequence: Synthetic oligonucleotide
cgcugccaguuaauggcau

SEQ ID NO: 2665760 - RNA, 19 nt, Artificial Sequence
  Description of Artificial Sequence: Synthetic oligonucleotide
cgggccagggugagucucu

SEQ ID NO: 2665761 - RNA, 19 nt, Artificial Sequence
  Description of Artificial Sequence: Synthetic oligonucleotide
gggccgcccagcagccugu

SEQ ID NO: 2665762 - RNA, 19 nt, Artificial Sequence
  Description of Artificial Sequence: Synthetic oligonucleotide
ccgccauggcgugcauuaa

SEQ ID NO: 2665763 - RNA, 19 nt, Artificial Sequence
  Description of Artificial Sequence: Synthetic oligonucleotide
cguugcagcgcaggucguu

SEQ ID NO: 2665764 - RNA, 19 nt, Artificial Sequence
  Description of Artificial Sequence: Synthetic oligonucleotide
ccucgcgccagcggcccau

SEQ ID NO: 2665765 - RNA, 19 nt, Artificial Sequence
  Description of Artificial Sequence: Synthetic oligonucleotide
uguaagaucacggugaucc

SEQ ID NO: 2665766 - RNA, 19 nt, Artificial Sequence
  Description of Artificial Sequence: Synthetic oligonucleotide
aauacauuagagguuuuac

SEQ ID NO: 2665767 - RNA, 19 nt, Artificial Sequence
  Description of Artificial Sequence: Synthetic oligonucleotide
uguaauguucaaauggccc

SEQ ID NO: 2665768 - RNA, 19 nt, Artificial Sequence
  Description of Artificial Sequence: Synthetic oligonucleotide
gcaaaugacacuuugauug

SEQ ID NO: 2665769 - RNA, 19 nt, Artificial Sequence
  Description of Artificial Sequence: Synthetic oligonucleotide
aucacggugauccaccugc

SEQ ID NO: 2665770 - RNA, 19 nt, Artificial Sequence
  Description of Artificial Sequence: Synthetic oligonucleotide
ggauguaauguucaaaugg

SEQ ID NO: 2665771 - RNA, 19 nt, Artificial Sequence
  Description of Artificial Sequence: Synthetic oligonucleotide
ucucggagaagaaaguccg

SEQ ID NO: 2665772 - RNA, 19 nt, Artificial Sequence
  Description of Artificial Sequence: Synthetic oligonucleotide
auagcagcgccucauggcc

SEQ ID NO: 2665773 - RNA, 19 nt, Artificial Sequence
  Description of Artificial Sequence: Synthetic oligonucleotide
agcugcuuauaauagcagc

SEQ ID NO: 2665774 - RNA, 19 nt, Artificial Sequence
  Description of Artificial Sequence: Synthetic oligonucleotide
gauguaauguucaaauggc

SEQ ID NO: 2665775 - RNA, 19 nt, Artificial Sequence
  Description of Artificial Sequence: Synthetic oligonucleotide
uacauuagagguuuuacau

SEQ ID NO: 2665776 - RNA, 19 nt, Artificial Sequence
  Description of Artificial Sequence: Synthetic oligonucleotide
acagucugcauacagacca

SEQ ID NO: 2665777 - RNA, 19 nt, Artificial Sequence
  Description of Artificial Sequence: Synthetic oligonucleotide
uggccaaauacauuagagg

SEQ ID NO: 2665778 - RNA, 19 nt, Artificial Sequence
  Description of Artificial Sequence: Synthetic oligonucleotide
agcuuuugcauguggaagg

SEQ ID NO: 2665779 - RNA, 19 nt, Artificial Sequence
  Description of Artificial Sequence: Synthetic oligonucleotide
uuggauguaauguucaaau

SEQ ID NO: 2665780 - RNA, 19 nt, Artificial Sequence
  Description of Artificial Sequence: Synthetic oligonucleotide
aaaguccgagagcacacgg

SEQ ID NO: 2665781 - RNA, 19 nt, Artificial Sequence
  Description of Artificial Sequence: Synthetic oligonucleotide
ucuggguugcaaaugacac

SEQ ID NO: 2665782 - RNA, 19 nt, Artificial Sequence
  Description of Artificial Sequence: Synthetic oligonucleotide
ugguguaagaucacgguga

SEQ ID NO: 2665783 - RNA, 19 nt, Artificial Sequence
  Description of Artificial Sequence: Synthetic oligonucleotide
acauuagagguuuuacauc

SEQ ID NO: 2665784 - RNA, 19 nt, Artificial Sequence
  Description of Artificial Sequence: Synthetic oligonucleotide
uaauagcagcgccucaugg

SEQ ID NO: 2665785 - RNA, 19 nt, Artificial Sequence
  Description of Artificial Sequence: Synthetic oligonucleotide
uucucggagaagaaagucc

SEQ ID NO: 2665786 - RNA, 19 nt, Artificial Sequence
  Description of Artificial Sequence: Synthetic oligonucleotide
gagggaguuucgcaaaucg

SEQ ID NO: 2665787 - RNA, 19 nt, Artificial Sequence
  Description of Artificial Sequence: Synthetic oligonucleotide
ucucucucauucucgaagg

SEQ ID NO: 2665788 - RNA, 19 nt, Artificial Sequence
  Description of Artificial Sequence: Synthetic oligonucleotide
aagaucacggugauccacc

SEQ ID NO: 2665789 - RNA, 19 nt, Artificial Sequence
  Description of Artificial Sequence: Synthetic oligonucleotide
uugcagaugcgacaggugc

SEQ ID NO: 2665790 - RNA, 19 nt, Artificial Sequence
  Description of Artificial Sequence: Synthetic oligonucleotide
aauguucaaauggcccucc

SEQ ID NO: 2665791 - RNA, 19 nt, Artificial Sequence
  Description of Artificial Sequence: Synthetic oligonucleotide
cugcauacagaccacacag

SEQ ID NO: 2665792 - RNA, 19 nt, Artificial Sequence
  Description of Artificial Sequence: Synthetic oligonucleotide
uagagguuuuacaucuggg

SEQ ID NO: 2665793 - RNA, 19 nt, Artificial Sequence
  Description of Artificial Sequence: Synthetic oligonucleotide
ugauuggauguaauguuca

SEQ ID NO: 2665794 - RNA, 19 nt, Artificial Sequence
  Description of Artificial Sequence: Synthetic oligonucleotide
agguuuuacaucuggguug

SEQ ID NO: 2665795 - RNA, 19 nt, Artificial Sequence
  Description of Artificial Sequence: Synthetic oligonucleotide
uuugauuggauguaauguu

SEQ ID NO: 2665796 - RNA, 19 nt, Artificial Sequence
  Description of Artificial Sequence: Synthetic oligonucleotide
uguagugcuuggcagggcc

SEQ ID NO: 2665797 - RNA, 19 nt, Artificial Sequence
  Description of Artificial Sequence: Synthetic oligonucleotide
ugacacuuugauuggaugu

SEQ ID NO: 2665798 - RNA, 19 nt, Artificial Sequence
  Description of Artificial Sequence: Synthetic oligonucleotide
ugacagucugcauacagac

SEQ ID NO: 2665799 - RNA, 19 nt, Artificial Sequence
  Description of Artificial Sequence: Synthetic oligonucleotide
auacauuagagguuuuaca

SEQ ID NO: 2665800 - RNA, 19 nt, Artificial Sequence
  Description of Artificial Sequence: Synthetic oligonucleotide
ugcuuauaauagcagcgcc

SEQ ID NO: 2665801 - RNA, 19 nt, Artificial Sequence
  Description of Artificial Sequence: Synthetic oligonucleotide
caaaugacacuuugauugg

SEQ ID NO: 2665802 - RNA, 19 nt, Artificial Sequence
  Description of Artificial Sequence: Synthetic oligonucleotide
acauguagugcuuggcagg

SEQ ID NO: 2665803 - RNA, 19 nt, Artificial Sequence
  Description of Artificial Sequence: Synthetic oligonucleotide
uucucgaaggucaucuggc

SEQ ID NO: 2665804 - RNA, 19 nt, Artificial Sequence
  Description of Artificial Sequence: Synthetic oligonucleotide
ucaaauggcccuccccacg

SEQ ID NO: 2665805 - RNA, 19 nt, Artificial Sequence
  Description of Artificial Sequence: Synthetic oligonucleotide
uugauuggauguaauguuc

SEQ ID NO: 2665806 - RNA, 19 nt, Artificial Sequence
  Description of Artificial Sequence: Synthetic oligonucleotide
uuuacaucuggguugcaaa

SEQ ID NO: 2665807 - RNA, 19 nt, Artificial Sequence
  Description of Artificial Sequence: Synthetic oligonucleotide
ggagaagaaaguccgagag

SEQ ID NO: 2665808 - RNA, 19 nt, Artificial Sequence
  Description of Artificial Sequence: Synthetic oligonucleotide
ugcucaauaaacuccuccu

SEQ ID NO: 2665809 - RNA, 19 nt, Artificial Sequence
  Description of Artificial Sequence: Synthetic oligonucleotide
agaucucucucucauucuc

SEQ ID NO: 2665810 - RNA, 19 nt, Artificial Sequence
  Description of Artificial Sequence: Synthetic oligonucleotide
agagguuuuacaucugggu

SEQ ID NO: 2665811 - RNA, 19 nt, Artificial Sequence
  Description of Artificial Sequence: Synthetic oligonucleotide
aagccagugagggaguuuc

SEQ ID NO: 2665812 - RNA, 19 nt, Artificial Sequence
  Description of Artificial Sequence: Synthetic oligonucleotide
auguaauguucaaauggcc

SEQ ID NO: 2665813 - RNA, 19 nt, Artificial Sequence
  Description of Artificial Sequence: Synthetic oligonucleotide
cuugcugugggucaccuug

SEQ ID NO: 2665814 - RNA, 19 nt, Artificial Sequence
  Description of Artificial Sequence: Synthetic oligonucleotide
aagaaaguccgagagcaca

SEQ ID NO: 2665815 - RNA, 19 nt, Artificial Sequence
  Description of Artificial Sequence: Synthetic oligonucleotide
ucugcauacagaccacaca

SEQ ID NO: 2665816 - RNA, 19 nt, Artificial Sequence
  Description of Artificial Sequence: Synthetic oligonucleotide
agaugggacacauguagug

SEQ ID NO: 2665817 - RNA, 19 nt, Artificial Sequence
  Description of Artificial Sequence: Synthetic oligonucleotide
cuggcagugcucaauaaac

SEQ ID NO: 2665818 - RNA, 19 nt, Artificial Sequence
  Description of Artificial Sequence: Synthetic oligonucleotide
uguucaaauggcccucccc

SEQ ID NO: 2665819 - RNA, 19 nt, Artificial Sequence
  Description of Artificial Sequence: Synthetic oligonucleotide
uuugcauguggaaggugcc

SEQ ID NO: 2665820 - RNA, 19 nt, Artificial Sequence
  Description of Artificial Sequence: Synthetic oligonucleotide
uggauguaauguucaaaug

SEQ ID NO: 2665821 - RNA, 19 nt, Artificial Sequence
  Description of Artificial Sequence: Synthetic oligonucleotide
aguuucgcaaaucggggug

SEQ ID NO: 2665822 - RNA, 19 nt, Artificial Sequence
  Description of Artificial Sequence: Synthetic oligonucleotide
gcauacagaccacacagcg

SEQ ID NO: 2665823 - RNA, 19 nt, Artificial Sequence
  Description of Artificial Sequence: Synthetic oligonucleotide
cauacagaccacacagcgg

SEQ ID NO: 2665824 - RNA, 19 nt, Artificial Sequence
  Description of Artificial Sequence: Synthetic oligonucleotide
ucugguguaagaucacggu

SEQ ID NO: 2665825 - RNA, 19 nt, Artificial Sequence
  Description of Artificial Sequence: Synthetic oligonucleotide
ucaucuggcacuugauaca

SEQ ID NO: 2665826 - RNA, 19 nt, Artificial Sequence
  Description of Artificial Sequence: Synthetic oligonucleotide
gagaagaaaguccgagagc

SEQ ID NO: 2665827 - RNA, 19 nt, Artificial Sequence
  Description of Artificial Sequence: Synthetic oligonucleotide
aaaucggggugcaucuggc

SEQ ID NO: 2665828 - RNA, 19 nt, Artificial Sequence
  Description of Artificial Sequence: Synthetic oligonucleotide
cacauguagugcuuggcag

SEQ ID NO: 2665829 - RNA, 19 nt, Artificial Sequence
  Description of Artificial Sequence: Synthetic oligonucleotide
cacuugauacacugguacg

SEQ ID NO: 2665830 - RNA, 19 nt, Artificial Sequence
  Description of Artificial Sequence: Synthetic oligonucleotide
uggcacuugauacacuggu

SEQ ID NO: 2665831 - RNA, 19 nt, Artificial Sequence
  Description of Artificial Sequence: Synthetic oligonucleotide
cucucucucauucucgaag

SEQ ID NO: 2665832 - RNA, 19 nt, Artificial Sequence
  Description of Artificial Sequence: Synthetic oligonucleotide
cuuauaauagcagcgccuc

SEQ ID NO: 2665833 - RNA, 19 nt, Artificial Sequence
  Description of Artificial Sequence: Synthetic oligonucleotide
ucgaaggucaucuggcacu

SEQ ID NO: 2665834 - RNA, 19 nt, Artificial Sequence
  Description of Artificial Sequence: Synthetic oligonucleotide
acaucuggguugcaaauga

SEQ ID NO: 2665835 - RNA, 19 nt, Artificial Sequence
  Description of Artificial Sequence: Synthetic oligonucleotide
gaggugacagucugcauac

SEQ ID NO: 2665836 - RNA, 19 nt, Artificial Sequence
  Description of Artificial Sequence: Synthetic oligonucleotide
uguggcucgcagcugagcu

SEQ ID NO: 2665837 - RNA, 19 nt, Artificial Sequence
  Description of Artificial Sequence: Synthetic oligonucleotide
cucauggccaaauacauua

SEQ ID NO: 2665838 - RNA, 19 nt, Artificial Sequence
  Description of Artificial Sequence: Synthetic oligonucleotide
caaaucggggugcaucugg

SEQ ID NO: 2665839 - RNA, 19 nt, Artificial Sequence
  Description of Artificial Sequence: Synthetic oligonucleotide
ucauggccaaauacauuag

SEQ ID NO: 2665840 - RNA, 19 nt, Artificial Sequence
  Description of Artificial Sequence: Synthetic oligonucleotide
gaaggugccauggaucuug

SEQ ID NO: 2665841 - RNA, 19 nt, Artificial Sequence
  Description of Artificial Sequence: Synthetic oligonucleotide
auggccaaauacauuagag

SEQ ID NO: 2665842 - RNA, 19 nt, Artificial Sequence
  Description of Artificial Sequence: Synthetic oligonucleotide
cucagugagcgucagcagc

SEQ ID NO: 2665843 - RNA, 19 nt, Artificial Sequence
  Description of Artificial Sequence: Synthetic oligonucleotide
ucuggcagugcucaauaaa

SEQ ID NO: 2665844 - RNA, 19 nt, Artificial Sequence
  Description of Artificial Sequence: Synthetic oligonucleotide
guucaaauggcccucccca

SEQ ID NO: 2665845 - RNA, 19 nt, Artificial Sequence
  Description of Artificial Sequence: Synthetic oligonucleotide
ucggagaagaaaguccgag

SEQ ID NO: 2665846 - RNA, 19 nt, Artificial Sequence
  Description of Artificial Sequence: Synthetic oligonucleotide
cauuagagguuuuacaucu

SEQ ID NO: 2665847 - RNA, 19 nt, Artificial Sequence
  Description of Artificial Sequence: Synthetic oligonucleotide
uauaauagcagcgccucau

SEQ ID NO: 2665848 - RNA, 19 nt, Artificial Sequence
  Description of Artificial Sequence: Synthetic oligonucleotide
uuuuccggggcaccgguga

SEQ ID NO: 2665849 - RNA, 19 nt, Artificial Sequence
  Description of Artificial Sequence: Synthetic oligonucleotide
augacacuuugauuggaug

SEQ ID NO: 2665850 - RNA, 19 nt, Artificial Sequence
  Description of Artificial Sequence: Synthetic oligonucleotide
aaauggcccuccccacggc

SEQ ID NO: 2665851 - RNA, 19 nt, Artificial Sequence
  Description of Artificial Sequence: Synthetic oligonucleotide
ggugccauggaucuugagc

SEQ ID NO: 2665852 - RNA, 19 nt, Artificial Sequence
  Description of Artificial Sequence: Synthetic oligonucleotide
ugcagaugcgacaggugcc

SEQ ID NO: 2665853 - RNA, 19 nt, Artificial Sequence
  Description of Artificial Sequence: Synthetic oligonucleotide
ugcauacagaccacacagc

SEQ ID NO: 2665854 - RNA, 19 nt, Artificial Sequence
  Description of Artificial Sequence: Synthetic oligonucleotide
uuauaauagcagcgccuca

SEQ ID NO: 2665855 - RNA, 19 nt, Artificial Sequence
  Description of Artificial Sequence: Synthetic oligonucleotide
acacauguagugcuuggca

SEQ ID NO: 2665856 - RNA, 19 nt, Artificial Sequence
  Description of Artificial Sequence: Synthetic oligonucleotide
agaaaguccgagagcacac

SEQ ID NO: 2665857 - RNA, 19 nt, Artificial Sequence
  Description of Artificial Sequence: Synthetic oligonucleotide
gcugcuuauaauagcagcg

SEQ ID NO: 2665858 - RNA, 19 nt, Artificial Sequence
  Description of Artificial Sequence: Synthetic oligonucleotide
uccagcguggaggugacag

SEQ ID NO: 2665859 - RNA, 19 nt, Artificial Sequence
  Description of Artificial Sequence: Synthetic oligonucleotide
uguguccaggcucuugcug

SEQ ID NO: 2665860 - RNA, 19 nt, Artificial Sequence
  Description of Artificial Sequence: Synthetic oligonucleotide
gugcucaauaaacuccucc

SEQ ID NO: 2665861 - RNA, 19 nt, Artificial Sequence
  Description of Artificial Sequence: Synthetic oligonucleotide
aaauacauuagagguuuua

SEQ ID NO: 2665862 - RNA, 19 nt, Artificial Sequence
  Description of Artificial Sequence: Synthetic oligonucleotide
cacagcggaagccagugag

SEQ ID NO: 2665863 - RNA, 19 nt, Artificial Sequence
  Description of Artificial Sequence: Synthetic oligonucleotide
gggaguuucgcaaaucggg

SEQ ID NO: 2665864 - RNA, 19 nt, Artificial Sequence
  Description of Artificial Sequence: Synthetic oligonucleotide
accuugugcucagugagcg

SEQ ID NO: 2665865 - RNA, 19 nt, Artificial Sequence
  Description of Artificial Sequence: Synthetic oligonucleotide
auaauagcagcgccucaug

SEQ ID NO: 2665866 - RNA, 19 nt, Artificial Sequence
  Description of Artificial Sequence: Synthetic oligonucleotide
ucagcagcgaggggaagcg

SEQ ID NO: 2665867 - RNA, 19 nt, Artificial Sequence
  Description of Artificial Sequence: Synthetic oligonucleotide
accggugacgucugggcac

SEQ ID NO: 2665868 - RNA, 19 nt, Artificial Sequence
  Description of Artificial Sequence: Synthetic oligonucleotide
caaauggcccuccccacgg

SEQ ID NO: 2665869 - RNA, 19 nt, Artificial Sequence
  Description of Artificial Sequence: Synthetic oligonucleotide
acuugauacacugguacgu

SEQ ID NO: 2665870 - RNA, 19 nt, Artificial Sequence
  Description of Artificial Sequence: Synthetic oligonucleotide
uccgagagcacacgggagu

SEQ ID NO: 2665871 - RNA, 19 nt, Artificial Sequence
  Description of Artificial Sequence: Synthetic oligonucleotide
cugguguaagaucacggug

SEQ ID NO: 2665872 - RNA, 19 nt, Artificial Sequence
  Description of Artificial Sequence: Synthetic oligonucleotide
uggguugcaaaugacacuu

SEQ ID NO: 2665873 - RNA, 19 nt, Artificial Sequence
  Description of Artificial Sequence: Synthetic oligonucleotide
acggugauccaccugcaug

SEQ ID NO: 2665874 - RNA, 19 nt, Artificial Sequence
  Description of Artificial Sequence: Synthetic oligonucleotide
uugauacacugguacgucu

SEQ ID NO: 2665875 - RNA, 19 nt, Artificial Sequence
  Description of Artificial Sequence: Synthetic oligonucleotide
ucuugcagaugcgacaggu

SEQ ID NO: 2665876 - RNA, 19 nt, Artificial Sequence
  Description of Artificial Sequence: Synthetic oligonucleotide
aucggggugcaucuggcag

SEQ ID NO: 2665877 - RNA, 19 nt, Artificial Sequence
  Description of Artificial Sequence: Synthetic oligonucleotide
auguucaaauggcccuccc

SEQ ID NO: 2665878 - RNA, 19 nt, Artificial Sequence
  Description of Artificial Sequence: Synthetic oligonucleotide
augggacacauguagugcu

SEQ ID NO: 2665879 - RNA, 19 nt, Artificial Sequence
  Description of Artificial Sequence: Synthetic oligonucleotide
cauguggaaggugccaugg

SEQ ID NO: 2665880 - RNA, 19 nt, Artificial Sequence
  Description of Artificial Sequence: Synthetic oligonucleotide
uggcagugcucaauaaacu

SEQ ID NO: 2665881 - RNA, 19 nt, Artificial Sequence
  Description of Artificial Sequence: Synthetic oligonucleotide
uccggcaagaucucucucu

SEQ ID NO: 2665882 - RNA, 19 nt, Artificial Sequence
  Description of Artificial Sequence: Synthetic oligonucleotide
guaauguucaaauggcccu

SEQ ID NO: 2665883 - RNA, 19 nt, Artificial Sequence
  Description of Artificial Sequence: Synthetic oligonucleotide
aguccgagagcacacggga

SEQ ID NO: 2665884 - RNA, 19 nt, Artificial Sequence
  Description of Artificial Sequence: Synthetic oligonucleotide
uuuuacaucuggguugcaa

SEQ ID NO: 2665885 - RNA, 19 nt, Artificial Sequence
  Description of Artificial Sequence: Synthetic oligonucleotide
cugcuuauaauagcagcgc

SEQ ID NO: 2665886 - RNA, 19 nt, Artificial Sequence
  Description of Artificial Sequence: Synthetic oligonucleotide
uuacaucuggguugcaaau

SEQ ID NO: 2665887 - RNA, 19 nt, Artificial Sequence
  Description of Artificial Sequence: Synthetic oligonucleotide
gaaaguccgagagcacacg

SEQ ID NO: 2665888 - RNA, 19 nt, Artificial Sequence
  Description of Artificial Sequence: Synthetic oligonucleotide
aaaugacacuuugauugga

SEQ ID NO: 2665889 - RNA, 19 nt, Artificial Sequence
  Description of Artificial Sequence: Synthetic oligonucleotide
ugcagguguucccggagcc

SEQ ID NO: 2665890 - RNA, 19 nt, Artificial Sequence
  Description of Artificial Sequence: Synthetic oligonucleotide
aaugacacuuugauuggau

SEQ ID NO: 2665891 - RNA, 19 nt, Artificial Sequence
  Description of Artificial Sequence: Synthetic oligonucleotide
gagagcacacgggaguccg

SEQ ID NO: 2665892 - RNA, 19 nt, Artificial Sequence
  Description of Artificial Sequence: Synthetic oligonucleotide
ugauacacugguacgucuu

SEQ ID NO: 2665893 - RNA, 19 nt, Artificial Sequence
  Description of Artificial Sequence: Synthetic oligonucleotide
aaguccgagagcacacggg

SEQ ID NO: 2665894 - RNA, 19 nt, Artificial Sequence
  Description of Artificial Sequence: Synthetic oligonucleotide
uaagaucacggugauccac

SEQ ID NO: 2665895 - RNA, 19 nt, Artificial Sequence
  Description of Artificial Sequence: Synthetic oligonucleotide
ggugacagucugcauacag

SEQ ID NO: 2665896 - RNA, 19 nt, Artificial Sequence
  Description of Artificial Sequence: Synthetic oligonucleotide
ucucgaaggucaucuggca

SEQ ID NO: 2665897 - RNA, 19 nt, Artificial Sequence
  Description of Artificial Sequence: Synthetic oligonucleotide
gcacuugauacacugguac

SEQ ID NO: 2665898 - RNA, 19 nt, Artificial Sequence
  Description of Artificial Sequence: Synthetic oligonucleotide
ggccaaauacauuagaggu

SEQ ID NO: 2665899 - RNA, 19 nt, Artificial Sequence
  Description of Artificial Sequence: Synthetic oligonucleotide
uucaaauggcccuccccac

SEQ ID NO: 2665900 - RNA, 19 nt, Artificial Sequence
  Description of Artificial Sequence: Synthetic oligonucleotide
ggaguuucgcaaaucgggg

SEQ ID NO: 2665901 - RNA, 19 nt, Artificial Sequence
  Description of Artificial Sequence: Synthetic oligonucleotide
cuuugauuggauguaaugu

SEQ ID NO: 2665902 - RNA, 19 nt, Artificial Sequence
  Description of Artificial Sequence: Synthetic oligonucleotide
cuugugcucagugagcguc

SEQ ID NO: 2665903 - RNA, 19 nt, Artificial Sequence
  Description of Artificial Sequence: Synthetic oligonucleotide
acgucugggcaccuuuccg

SEQ ID NO: 2665904 - RNA, 19 nt, Artificial Sequence
  Description of Artificial Sequence: Synthetic oligonucleotide
gugccauggaucuugagcu

SEQ ID NO: 2665905 - RNA, 19 nt, Artificial Sequence
  Description of Artificial Sequence: Synthetic oligonucleotide
uaauguucaaauggcccuc

SEQ ID NO: 2665906 - RNA, 19 nt, Artificial Sequence
  Description of Artificial Sequence: Synthetic oligonucleotide
agcgucagcagcgagggga

SEQ ID NO: 2665907 - RNA, 19 nt, Artificial Sequence
  Description of Artificial Sequence: Synthetic oligonucleotide
gacacauguagugcuuggc

SEQ ID NO: 2665908 - RNA, 19 nt, Artificial Sequence
  Description of Artificial Sequence: Synthetic oligonucleotide
ucuccggcaagaucucucu

SEQ ID NO: 2665909 - RNA, 19 nt, Artificial Sequence
  Description of Artificial Sequence: Synthetic oligonucleotide
uccggaggccacucggccg

SEQ ID NO: 2665910 - RNA, 19 nt, Artificial Sequence
  Description of Artificial Sequence: Synthetic oligonucleotide
gugauccaccugcaugugg

SEQ ID NO: 2665911 - RNA, 19 nt, Artificial Sequence
  Description of Artificial Sequence: Synthetic oligonucleotide
ugcgacaggugccuguguc

SEQ ID NO: 2665912 - RNA, 19 nt, Artificial Sequence
  Description of Artificial Sequence: Synthetic oligonucleotide
gauuggauguaauguucaa

SEQ ID NO: 2665913 - RNA, 19 nt, Artificial Sequence
  Description of Artificial Sequence: Synthetic oligonucleotide
uggucucugguguaagauc

SEQ ID NO: 2665914 - RNA, 19 nt, Artificial Sequence
  Description of Artificial Sequence: Synthetic oligonucleotide
auuggauguaauguucaaa

SEQ ID NO: 2665915 - RNA, 19 nt, Artificial Sequence
  Description of Artificial Sequence: Synthetic oligonucleotide
ucucucauucucgaagguc

SEQ ID NO: 2665916 - RNA, 19 nt, Artificial Sequence
  Description of Artificial Sequence: Synthetic oligonucleotide
cacacgggaguccggaggc

SEQ ID NO: 2665917 - RNA, 19 nt, Artificial Sequence
  Description of Artificial Sequence: Synthetic oligonucleotide
cuugcagaugcgacaggug

SEQ ID NO: 2665918 - RNA, 19 nt, Artificial Sequence
  Description of Artificial Sequence: Synthetic oligonucleotide
gacgucugggcaccuuucc

SEQ ID NO: 2665919 - RNA, 19 nt, Artificial Sequence
  Description of Artificial Sequence: Synthetic oligonucleotide
agggaguuucgcaaaucgg

SEQ ID NO: 2665920 - RNA, 19 nt, Artificial Sequence
  Description of Artificial Sequence: Synthetic oligonucleotide
agugagggaguuucgcaaa

SEQ ID NO: 2665921 - RNA, 19 nt, Artificial Sequence
  Description of Artificial Sequence: Synthetic oligonucleotide
cagcggaagccagugaggg

SEQ ID NO: 2665922 - RNA, 19 nt, Artificial Sequence
  Description of Artificial Sequence: Synthetic oligonucleotide
cucgaaggucaucuggcac

SEQ ID NO: 2665923 - RNA, 19 nt, Artificial Sequence
  Description of Artificial Sequence: Synthetic oligonucleotide
cuugauacacugguacguc

SEQ ID NO: 2665924 - RNA, 19 nt, Artificial Sequence
  Description of Artificial Sequence: Synthetic oligonucleotide
accugcauguggcucgcag

SEQ ID NO: 2665925 - RNA, 19 nt, Artificial Sequence
  Description of Artificial Sequence: Synthetic oligonucleotide
gguuuuacaucuggguugc

SEQ ID NO: 2665926 - RNA, 19 nt, Artificial Sequence
  Description of Artificial Sequence: Synthetic oligonucleotide
caucuggcacuugauacac

SEQ ID NO: 2665927 - RNA, 19 nt, Artificial Sequence
  Description of Artificial Sequence: Synthetic oligonucleotide
gugagcgucagcagcgagg

SEQ ID NO: 2665928 - RNA, 19 nt, Artificial Sequence
  Description of Artificial Sequence: Synthetic oligonucleotide
gagguuuuacaucuggguu

SEQ ID NO: 2665929 - RNA, 19 nt, Artificial Sequence
  Description of Artificial Sequence: Synthetic oligonucleotide
uugugcucagugagcguca

SEQ ID NO: 2665930 - RNA, 19 nt, Artificial Sequence
  Description of Artificial Sequence: Synthetic oligonucleotide
ccguucucggagaagaaag

SEQ ID NO: 2665931 - RNA, 19 nt, Artificial Sequence
  Description of Artificial Sequence: Synthetic oligonucleotide
gaugcgacaggugccugug

SEQ ID NO: 2665932 - RNA, 19 nt, Artificial Sequence
  Description of Artificial Sequence: Synthetic oligonucleotide
gcagugcucaauaaacucc

SEQ ID NO: 2665933 - RNA, 19 nt, Artificial Sequence
  Description of Artificial Sequence: Synthetic oligonucleotide
gacagucugcauacagacc

SEQ ID NO: 2665934 - RNA, 19 nt, Artificial Sequence
  Description of Artificial Sequence: Synthetic oligonucleotide
ggcagugcucaauaaacuc

SEQ ID NO: 2665935 - RNA, 19 nt, Artificial Sequence
  Description of Artificial Sequence: Synthetic oligonucleotide
agcgaggggaagcgcucgc

SEQ ID NO: 2665936 - RNA, 19 nt, Artificial Sequence
  Description of Artificial Sequence: Synthetic oligonucleotide
aggccacucggccgagucc

SEQ ID NO: 2665937 - RNA, 19 nt, Artificial Sequence
  Description of Artificial Sequence: Synthetic oligonucleotide
ugagcugccgccagcuuuu

SEQ ID NO: 2665938 - RNA, 19 nt, Artificial Sequence
  Description of Artificial Sequence: Synthetic oligonucleotide
ggacacauguagugcuugg

SEQ ID NO: 2665939 - RNA, 19 nt, Artificial Sequence
  Description of Artificial Sequence: Synthetic oligonucleotide
cucgccacagaugggacac

SEQ ID NO: 2665940 - RNA, 19 nt, Artificial Sequence
  Description of Artificial Sequence: Synthetic oligonucleotide
ucucauucucgaaggucau

SEQ ID NO: 2665941 - RNA, 19 nt, Artificial Sequence
  Description of Artificial Sequence: Synthetic oligonucleotide
aucuggguugcaaaugaca

SEQ ID NO: 2665942 - RNA, 19 nt, Artificial Sequence
  Description of Artificial Sequence: Synthetic oligonucleotide
guuucgcaaaucggggugc

SEQ ID NO: 2665943 - RNA, 19 nt, Artificial Sequence
  Description of Artificial Sequence: Synthetic oligonucleotide
gucaccuugugcucaguga

SEQ ID NO: 2665944 - RNA, 19 nt, Artificial Sequence
  Description of Artificial Sequence: Synthetic oligonucleotide
gacacuuugauuggaugua

SEQ ID NO: 2665945 - RNA, 19 nt, Artificial Sequence
  Description of Artificial Sequence: Synthetic oligonucleotide
agugagcgucagcagcgag

SEQ ID NO: 2665946 - RNA, 19 nt, Artificial Sequence
  Description of Artificial Sequence: Synthetic oligonucleotide
guucucggagaagaaaguc

SEQ ID NO: 2665947 - RNA, 19 nt, Artificial Sequence
  Description of Artificial Sequence: Synthetic oligonucleotide
cucgcagcugagcugccgc

SEQ ID NO: 2665948 - RNA, 19 nt, Artificial Sequence
  Description of Artificial Sequence: Synthetic oligonucleotide
uuccggggcccacuggucu

SEQ ID NO: 2665949 - RNA, 19 nt, Artificial Sequence
  Description of Artificial Sequence: Synthetic oligonucleotide
cauggccaaauacauuaga

SEQ ID NO: 2665950 - RNA, 19 nt, Artificial Sequence
  Description of Artificial Sequence: Synthetic oligonucleotide
caccuugugcucagugagc

SEQ ID NO: 2665951 - RNA, 19 nt, Artificial Sequence
  Description of Artificial Sequence: Synthetic oligonucleotide
caucuggguugcaaaugac

SEQ ID NO: 2665952 - RNA, 19 nt, Artificial Sequence
  Description of Artificial Sequence: Synthetic oligonucleotide
agaugcgacaggugccugu

SEQ ID NO: 2665953 - RNA, 19 nt, Artificial Sequence
  Description of Artificial Sequence: Synthetic oligonucleotide
ugcgucugcagguguuccc

SEQ ID NO: 2665954 - RNA, 19 nt, Artificial Sequence
  Description of Artificial Sequence: Synthetic oligonucleotide
aucuugcagaugcgacagg

SEQ ID NO: 2665955 - RNA, 19 nt, Artificial Sequence
  Description of Artificial Sequence: Synthetic oligonucleotide
ugugggucaccuugugcuc

SEQ ID NO: 2665956 - RNA, 19 nt, Artificial Sequence
  Description of Artificial Sequence: Synthetic oligonucleotide
ggucucugguguaagauca

SEQ ID NO: 2665957 - RNA, 19 nt, Artificial Sequence
  Description of Artificial Sequence: Synthetic oligonucleotide
ucgcaaaucggggugcauc

SEQ ID NO: 2665958 - RNA, 19 nt, Artificial Sequence
  Description of Artificial Sequence: Synthetic oligonucleotide
ucggggugcaucuggcagu

SEQ ID NO: 2665959 - RNA, 19 nt, Artificial Sequence
  Description of Artificial Sequence: Synthetic oligonucleotide
acagcggaagccagugagg

SEQ ID NO: 2665960 - RNA, 19 nt, Artificial Sequence
  Description of Artificial Sequence: Synthetic oligonucleotide
gaucacggugauccaccug

SEQ ID NO: 2665961 - RNA, 19 nt, Artificial Sequence
  Description of Artificial Sequence: Synthetic oligonucleotide
agcuccagcguggagguga

SEQ ID NO: 2665962 - RNA, 19 nt, Artificial Sequence
  Description of Artificial Sequence: Synthetic oligonucleotide
gaagaaaguccgagagcac

SEQ ID NO: 2665963 - RNA, 19 nt, Artificial Sequence
  Description of Artificial Sequence: Synthetic oligonucleotide
aguccggaggccacucggc

SEQ ID NO: 2665964 - RNA, 19 nt, Artificial Sequence
  Description of Artificial Sequence: Synthetic oligonucleotide
auuagagguuuuacaucug

SEQ ID NO: 2665965 - RNA, 19 nt, Artificial Sequence
  Description of Artificial Sequence: Synthetic oligonucleotide
uugcugugggucaccuugu

SEQ ID NO: 2665966 - RNA, 19 nt, Artificial Sequence
  Description of Artificial Sequence: Synthetic oligonucleotide
ggaggugacagucugcaua

SEQ ID NO: 2665967 - RNA, 19 nt, Artificial Sequence
  Description of Artificial Sequence: Synthetic oligonucleotide
ucacggugauccaccugca

SEQ ID NO: 2665968 - RNA, 19 nt, Artificial Sequence
  Description of Artificial Sequence: Synthetic oligonucleotide
gucagcagcgaggggaagc

SEQ ID NO: 2665969 - RNA, 19 nt, Artificial Sequence
  Description of Artificial Sequence: Synthetic oligonucleotide
gaguuucgcaaaucggggu

SEQ ID NO: 2665970 - RNA, 19 nt, Artificial Sequence
  Description of Artificial Sequence: Synthetic oligonucleotide
ucacucugcaggggcaucu

SEQ ID NO: 2665971 - RNA, 19 nt, Artificial Sequence
  Description of Artificial Sequence: Synthetic oligonucleotide
ugacgucugggcaccuuuc

SEQ ID NO: 2665972 - RNA, 19 nt, Artificial Sequence
  Description of Artificial Sequence: Synthetic oligonucleotide
guggaggugacagucugca

SEQ ID NO: 2665973 - RNA, 19 nt, Artificial Sequence
  Description of Artificial Sequence: Synthetic oligonucleotide
ggugccuguguccaggcuc

SEQ ID NO: 2665974 - RNA, 19 nt, Artificial Sequence
  Description of Artificial Sequence: Synthetic oligonucleotide
uuucgcaaaucggggugca

SEQ ID NO: 2665975 - RNA, 19 nt, Artificial Sequence
  Description of Artificial Sequence: Synthetic oligonucleotide
auguggcucgcagcugagc

SEQ ID NO: 2665976 - RNA, 19 nt, Artificial Sequence
  Description of Artificial Sequence: Synthetic oligonucleotide
agugcucaauaaacuccuc

SEQ ID NO: 2665977 - RNA, 19 nt, Artificial Sequence
  Description of Artificial Sequence: Synthetic oligonucleotide
guaagaucacggugaucca

SEQ ID NO: 2665978 - RNA, 19 nt, Artificial Sequence
  Description of Artificial Sequence: Synthetic oligonucleotide
gcacacgggaguccggagg

SEQ ID NO: 2665979 - RNA, 19 nt, Artificial Sequence
  Description of Artificial Sequence: Synthetic oligonucleotide
auguggaaggugccaugga

SEQ ID NO: 2665980 - RNA, 19 nt, Artificial Sequence
  Description of Artificial Sequence: Synthetic oligonucleotide
gaguccgaguuaugcaaaa

SEQ ID NO: 2665981 - RNA, 19 nt, Artificial Sequence
  Description of Artificial Sequence: Synthetic oligonucleotide
ugggacacauguagugcuu

SEQ ID NO: 2665982 - RNA, 19 nt, Artificial Sequence
  Description of Artificial Sequence: Synthetic oligonucleotide
aggggaagcgcucgccaca

SEQ ID NO: 2665983 - RNA, 19 nt, Artificial Sequence
  Description of Artificial Sequence: Synthetic oligonucleotide
uuuccggggcaccggugac

SEQ ID NO: 2665984 - RNA, 19 nt, Artificial Sequence
  Description of Artificial Sequence: Synthetic oligonucleotide
agcacacgggaguccggag

SEQ ID NO: 2665985 - RNA, 19 nt, Artificial Sequence
  Description of Artificial Sequence: Synthetic oligonucleotide
cuuuugcauguggaaggug

SEQ ID NO: 2665986 - RNA, 19 nt, Artificial Sequence
  Description of Artificial Sequence: Synthetic oligonucleotide
gaggccacucggccgaguc

SEQ ID NO: 2665987 - RNA, 19 nt, Artificial Sequence
  Description of Artificial Sequence: Synthetic oligonucleotide
cagucugcauacagaccac

SEQ ID NO: 2665988 - RNA, 19 nt, Artificial Sequence
  Description of Artificial Sequence: Synthetic oligonucleotide
agucugcauacagaccaca

SEQ ID NO: 2665989 - RNA, 19 nt, Artificial Sequence
  Description of Artificial Sequence: Synthetic oligonucleotide
gcaucuugcagaugcgaca

SEQ ID NO: 2665990 - RNA, 19 nt, Artificial Sequence
  Description of Artificial Sequence: Synthetic oligonucleotide
ugccauggaucuugagcuc

SEQ ID NO: 2665991 - RNA, 19 nt, Artificial Sequence
  Description of Artificial Sequence: Synthetic oligonucleotide
ugccgccagcuuuugcaug

SEQ ID NO: 2665992 - RNA, 19 nt, Artificial Sequence
  Description of Artificial Sequence: Synthetic oligonucleotide
ucggccgaguccgaguuau

SEQ ID NO: 2665993 - RNA, 19 nt, Artificial Sequence
  Description of Artificial Sequence: Synthetic oligonucleotide
ucgcagcugagcugccgcc

SEQ ID NO: 2665994 - RNA, 19 nt, Artificial Sequence
  Description of Artificial Sequence: Synthetic oligonucleotide
cugcaggggcaucuugcag

SEQ ID NO: 2665995 - RNA, 19 nt, Artificial Sequence
  Description of Artificial Sequence: Synthetic oligonucleotide
ggccacucggccgaguccg

SEQ ID NO: 2665996 - RNA, 19 nt, Artificial Sequence
  Description of Artificial Sequence: Synthetic oligonucleotide
agcagcgaggggaagcgcu

SEQ ID NO: 2665997 - RNA, 19 nt, Artificial Sequence
  Description of Artificial Sequence: Synthetic oligonucleotide
guagugcuuggcagggccc

SEQ ID NO: 2665998 - RNA, 19 nt, Artificial Sequence
  Description of Artificial Sequence: Synthetic oligonucleotide
aucuggcagugcucaauaa

SEQ ID NO: 2665999 - RNA, 19 nt, Artificial Sequence
  Description of Artificial Sequence: Synthetic oligonucleotide
cagcguggaggugacaguc

SEQ ID NO: 2666000 - RNA, 19 nt, Artificial Sequence
  Description of Artificial Sequence: Synthetic oligonucleotide
accuuuccggggcccacug

SEQ ID NO: 2666001 - RNA, 19 nt, Artificial Sequence
  Description of Artificial Sequence: Synthetic oligonucleotide
acucggccgaguccgaguu

SEQ ID NO: 2666002 - RNA, 19 nt, Artificial Sequence
  Description of Artificial Sequence: Synthetic oligonucleotide
ccugcauguggcucgcagc

SEQ ID NO: 2666003 - RNA, 19 nt, Artificial Sequence
  Description of Artificial Sequence: Synthetic oligonucleotide
agcggaagccagugaggga

SEQ ID NO: 2666004 - RNA, 19 nt, Artificial Sequence
  Description of Artificial Sequence: Synthetic oligonucleotide
caggugccuguguccaggc

SEQ ID NO: 2666005 - RNA, 19 nt, Artificial Sequence
  Description of Artificial Sequence: Synthetic oligonucleotide
agugcuuggcagggccccg

SEQ ID NO: 2666006 - RNA, 19 nt, Artificial Sequence
  Description of Artificial Sequence: Synthetic oligonucleotide
uccggggcaccggugacgu

SEQ ID NO: 2666007 - RNA, 19 nt, Artificial Sequence
  Description of Artificial Sequence: Synthetic oligonucleotide
gccauggaucuugagcucc

SEQ ID NO: 2666008 - RNA, 19 nt, Artificial Sequence
  Description of Artificial Sequence: Synthetic oligonucleotide
ggcaucuugcagaugcgac

SEQ ID NO: 2666009 - RNA, 19 nt, Artificial Sequence
  Description of Artificial Sequence: Synthetic oligonucleotide
ggcgucuccggcaagaucu

SEQ ID NO: 2666010 - RNA, 19 nt, Artificial Sequence
  Description of Artificial Sequence: Synthetic oligonucleotide
gauacacugguacgucuuu

SEQ ID NO: 2666011 - RNA, 19 nt, Artificial Sequence
  Description of Artificial Sequence: Synthetic oligonucleotide
caucuggcagugcucaaua

SEQ ID NO: 2666012 - RNA, 19 nt, Artificial Sequence
  Description of Artificial Sequence: Synthetic oligonucleotide
agcagcgccucauggccaa

SEQ ID NO: 2666013 - RNA, 19 nt, Artificial Sequence
  Description of Artificial Sequence: Synthetic oligonucleotide
guccgagagcacacgggag

SEQ ID NO: 2666014 - RNA, 19 nt, Artificial Sequence
  Description of Artificial Sequence: Synthetic oligonucleotide
aggugccauggaucuugag

SEQ ID NO: 2666015 - RNA, 19 nt, Artificial Sequence
  Description of Artificial Sequence: Synthetic oligonucleotide
gcgacaggugccugugucc

SEQ ID NO: 2666016 - RNA, 19 nt, Artificial Sequence
  Description of Artificial Sequence: Synthetic oligonucleotide
gagcacacgggaguccgga

SEQ ID NO: 2666017 - RNA, 19 nt, Artificial Sequence
  Description of Artificial Sequence: Synthetic oligonucleotide
cucggagaagaaaguccga

SEQ ID NO: 2666018 - RNA, 19 nt, Artificial Sequence
  Description of Artificial Sequence: Synthetic oligonucleotide
ggccgaguccgaguuaugc

SEQ ID NO: 2666019 - RNA, 19 nt, Artificial Sequence
  Description of Artificial Sequence: Synthetic oligonucleotide
agggccccggugcgucugc

SEQ ID NO: 2666020 - RNA, 19 nt, Artificial Sequence
  Description of Artificial Sequence: Synthetic oligonucleotide
auacacugguacgucuuuu

SEQ ID NO: 2666021 - RNA, 19 nt, Artificial Sequence
  Description of Artificial Sequence: Synthetic oligonucleotide
gcgucugcagguguucccg

SEQ ID NO: 2666022 - RNA, 19 nt, Artificial Sequence
  Description of Artificial Sequence: Synthetic oligonucleotide
aaggugccauggaucuuga

SEQ ID NO: 2666023 - RNA, 19 nt, Artificial Sequence
  Description of Artificial Sequence: Synthetic oligonucleotide
uggaggugacagucugcau

SEQ ID NO: 2666024 - RNA, 19 nt, Artificial Sequence
  Description of Artificial Sequence: Synthetic oligonucleotide
cugcauguggcucgcagcu

SEQ ID NO: 2666025 - RNA, 19 nt, Artificial Sequence
  Description of Artificial Sequence: Synthetic oligonucleotide
ugcaucuggcagugcucaa

SEQ ID NO: 2666026 - RNA, 19 nt, Artificial Sequence
  Description of Artificial Sequence: Synthetic oligonucleotide
ugcuuggcagggccccggu

SEQ ID NO: 2666027 - RNA, 19 nt, Artificial Sequence
  Description of Artificial Sequence: Synthetic oligonucleotide
ggucaucuggcacuugaua

SEQ ID NO: 2666028 - RNA, 19 nt, Artificial Sequence
  Description of Artificial Sequence: Synthetic oligonucleotide
cacuggucucugguguaag

SEQ ID NO: 2666029 - RNA, 19 nt, Artificial Sequence
  Description of Artificial Sequence: Synthetic oligonucleotide
gcguggaggugacagucug

SEQ ID NO: 2666030 - RNA, 19 nt, Artificial Sequence
  Description of Artificial Sequence: Synthetic oligonucleotide
gcauguggaaggugccaug

SEQ ID NO: 2666031 - RNA, 19 nt, Artificial Sequence
  Description of Artificial Sequence: Synthetic oligonucleotide
gggacacauguagugcuug

SEQ ID NO: 2666032 - RNA, 19 nt, Artificial Sequence
  Description of Artificial Sequence: Synthetic oligonucleotide
cagcgaggggaagcgcucg

SEQ ID NO: 2666033 - RNA, 19 nt, Artificial Sequence
  Description of Artificial Sequence: Synthetic oligonucleotide
cuuuccggggcccacuggu

SEQ ID NO: 2666034 - RNA, 19 nt, Artificial Sequence
  Description of Artificial Sequence: Synthetic oligonucleotide
ggaguccggaggccacucg

SEQ ID NO: 2666035 - RNA, 19 nt, Artificial Sequence
  Description of Artificial Sequence: Synthetic oligonucleotide
gcgccucauggccaaauac

SEQ ID NO: 2666036 - RNA, 19 nt, Artificial Sequence
  Description of Artificial Sequence: Synthetic oligonucleotide
gucuccggcaagaucucuc

SEQ ID NO: 2666037 - RNA, 19 nt, Artificial Sequence
  Description of Artificial Sequence: Synthetic oligonucleotide
cuggguugcaaaugacacu

SEQ ID NO: 2666038 - RNA, 19 nt, Artificial Sequence
  Description of Artificial Sequence: Synthetic oligonucleotide
uccccacggcgucuccggc

SEQ ID NO: 2666039 - RNA, 19 nt, Artificial Sequence
  Description of Artificial Sequence: Synthetic oligonucleotide
gcuuauaauagcagcgccu

SEQ ID NO: 2666040 - RNA, 19 nt, Artificial Sequence
  Description of Artificial Sequence: Synthetic oligonucleotide
agagcacacgggaguccgg

SEQ ID NO: 2666041 - RNA, 19 nt, Artificial Sequence
  Description of Artificial Sequence: Synthetic oligonucleotide
agccagugagggaguuucg

SEQ ID NO: 2666042 - RNA, 19 nt, Artificial Sequence
  Description of Artificial Sequence: Synthetic oligonucleotide
gccccggugcgucugcagg

SEQ ID NO: 2666043 - RNA, 19 nt, Artificial Sequence
  Description of Artificial Sequence: Synthetic oligonucleotide
agcgccucauggccaaaua

SEQ ID NO: 2666044 - RNA, 19 nt, Artificial Sequence
  Description of Artificial Sequence: Synthetic oligonucleotide
gaaggucaucuggcacuug

SEQ ID NO: 2666045 - RNA, 19 nt, Artificial Sequence
  Description of Artificial Sequence: Synthetic oligonucleotide
gugcgucugcagguguucc

SEQ ID NO: 2666046 - RNA, 19 nt, Artificial Sequence
  Description of Artificial Sequence: Synthetic oligonucleotide
acgggaguccggaggccac

SEQ ID NO: 2666047 - RNA, 19 nt, Artificial Sequence
  Description of Artificial Sequence: Synthetic oligonucleotide
ggcaccggugacgucuggg

SEQ ID NO: 2666048 - RNA, 19 nt, Artificial Sequence
  Description of Artificial Sequence: Synthetic oligonucleotide
gccagugagggaguuucgc

SEQ ID NO: 2666049 - RNA, 19 nt, Artificial Sequence
  Description of Artificial Sequence: Synthetic oligonucleotide
gccgaguccgaguuaugca

SEQ ID NO: 2666050 - RNA, 19 nt, Artificial Sequence
  Description of Artificial Sequence: Synthetic oligonucleotide
aggugccuguguccaggcu

SEQ ID NO: 2666051 - RNA, 19 nt, Artificial Sequence
  Description of Artificial Sequence: Synthetic oligonucleotide
agcguggaggugacagucu

SEQ ID NO: 2666052 - RNA, 19 nt, Artificial Sequence
  Description of Artificial Sequence: Synthetic oligonucleotide
caccggugacgucugggca

SEQ ID NO: 2666053 - RNA, 19 nt, Artificial Sequence
  Description of Artificial Sequence: Synthetic oligonucleotide
cuccggcaagaucucucuc

SEQ ID NO: 2666054 - RNA, 19 nt, Artificial Sequence
  Description of Artificial Sequence: Synthetic oligonucleotide
gugcucagugagcgucagc

SEQ ID NO: 2666055 - RNA, 19 nt, Artificial Sequence
  Description of Artificial Sequence: Synthetic oligonucleotide
uucgcaaaucggggugcau

SEQ ID NO: 2666056 - RNA, 19 nt, Artificial Sequence
  Description of Artificial Sequence: Synthetic oligonucleotide
aggucaucuggcacuugau

SEQ ID NO: 2666057 - RNA, 19 nt, Artificial Sequence
  Description of Artificial Sequence: Synthetic oligonucleotide
ccgaguccgaguuaugcaa

SEQ ID NO: 2666058 - RNA, 19 nt, Artificial Sequence
  Description of Artificial Sequence: Synthetic oligonucleotide
gggugcaucuggcagugcu

SEQ ID NO: 2666059 - RNA, 19 nt, Artificial Sequence
  Description of Artificial Sequence: Synthetic oligonucleotide
ccggcaagaucucucucuc

SEQ ID NO: 2666060 - RNA, 19 nt, Artificial Sequence
  Description of Artificial Sequence: Synthetic oligonucleotide
gguguaagaucacggugau

SEQ ID NO: 2666061 - RNA, 19 nt, Artificial Sequence
  Description of Artificial Sequence: Synthetic oligonucleotide
guguaagaucacggugauc

SEQ ID NO: 2666062 - RNA, 19 nt, Artificial Sequence
  Description of Artificial Sequence: Synthetic oligonucleotide
ggugauccaccugcaugug

SEQ ID NO: 2666063 - RNA, 19 nt, Artificial Sequence
  Description of Artificial Sequence: Synthetic oligonucleotide
ggugcaucuggcagugcuc

SEQ ID NO: 2666064 - RNA, 19 nt, Artificial Sequence
  Description of Artificial Sequence: Synthetic oligonucleotide
agcgcucgccacagauggg

SEQ ID NO: 2666065 - RNA, 19 nt, Artificial Sequence
  Description of Artificial Sequence: Synthetic oligonucleotide
cgccucauggccaaauaca

SEQ ID NO: 2666066 - RNA, 19 nt, Artificial Sequence
  Description of Artificial Sequence: Synthetic oligonucleotide
gugagggaguuucgcaaau

SEQ ID NO: 2666067 - RNA, 19 nt, Artificial Sequence
  Description of Artificial Sequence: Synthetic oligonucleotide
cucacucugcaggggcauc

SEQ ID NO: 2666068 - RNA, 19 nt, Artificial Sequence
  Description of Artificial Sequence: Synthetic oligonucleotide
cacgggaguccggaggcca

SEQ ID NO: 2666069 - RNA, 19 nt, Artificial Sequence
  Description of Artificial Sequence: Synthetic oligonucleotide
cguggaggugacagucugc

SEQ ID NO: 2666070 - RNA, 19 nt, Artificial Sequence
  Description of Artificial Sequence: Synthetic oligonucleotide
cuggucucugguguaagau

SEQ ID NO: 2666071 - RNA, 19 nt, Artificial Sequence
  Description of Artificial Sequence: Synthetic oligonucleotide
gugacgucugggcaccuuu

SEQ ID NO: 2666072 - RNA, 19 nt, Artificial Sequence
  Description of Artificial Sequence: Synthetic oligonucleotide
cucucucauucucgaaggu

SEQ ID NO: 2666073 - RNA, 19 nt, Artificial Sequence
  Description of Artificial Sequence: Synthetic oligonucleotide
aggugacagucugcauaca

SEQ ID NO: 2666074 - RNA, 19 nt, Artificial Sequence
  Description of Artificial Sequence: Synthetic oligonucleotide
gcucgccacagaugggaca

SEQ ID NO: 2666075 - RNA, 19 nt, Artificial Sequence
  Description of Artificial Sequence: Synthetic oligonucleotide
gcagguguucccggagccc

SEQ ID NO: 2666076 - RNA, 19 nt, Artificial Sequence
  Description of Artificial Sequence: Synthetic oligonucleotide
ucgccacagaugggacaca

SEQ ID NO: 2666077 - RNA, 19 nt, Artificial Sequence
  Description of Artificial Sequence: Synthetic oligonucleotide
guguucccggagcccguuc

SEQ ID NO: 2666078 - RNA, 19 nt, Artificial Sequence
  Description of Artificial Sequence: Synthetic oligonucleotide
cggagaagaaaguccgaga

SEQ ID NO: 2666079 - RNA, 19 nt, Artificial Sequence
  Description of Artificial Sequence: Synthetic oligonucleotide
cacggcgucuccggcaaga

SEQ ID NO: 2666080 - RNA, 19 nt, Artificial Sequence
  Description of Artificial Sequence: Synthetic oligonucleotide
cagcagcgaggggaagcgc

SEQ ID NO: 2666081 - RNA, 19 nt, Artificial Sequence
  Description of Artificial Sequence: Synthetic oligonucleotide
gcucgcagcugagcugccg

SEQ ID NO: 2666082 - RNA, 19 nt, Artificial Sequence
  Description of Artificial Sequence: Synthetic oligonucleotide
gccaaauacauuagagguu

SEQ ID NO: 2666083 - RNA, 19 nt, Artificial Sequence
  Description of Artificial Sequence: Synthetic oligonucleotide
ggcacuugauacacuggua

SEQ ID NO: 2666084 - RNA, 19 nt, Artificial Sequence
  Description of Artificial Sequence: Synthetic oligonucleotide
guuuuacaucuggguugca

SEQ ID NO: 2666085 - RNA, 19 nt, Artificial Sequence
  Description of Artificial Sequence: Synthetic oligonucleotide
gcgcucgccacagauggga

SEQ ID NO: 2666086 - RNA, 19 nt, Artificial Sequence
  Description of Artificial Sequence: Synthetic oligonucleotide
ccauggaucuugagcucca

SEQ ID NO: 2666087 - RNA, 19 nt, Artificial Sequence
  Description of Artificial Sequence: Synthetic oligonucleotide
gcuuggcagggccccggug

SEQ ID NO: 2666088 - RNA, 19 nt, Artificial Sequence
  Description of Artificial Sequence: Synthetic oligonucleotide
ggagcccguucucggagaa

SEQ ID NO: 2666089 - RNA, 19 nt, Artificial Sequence
  Description of Artificial Sequence: Synthetic oligonucleotide
gcagaugcgacaggugccu

SEQ ID NO: 2666090 - RNA, 19 nt, Artificial Sequence
  Description of Artificial Sequence: Synthetic oligonucleotide
gagcugccgccagcuuuug

SEQ ID NO: 2666091 - RNA, 19 nt, Artificial Sequence
  Description of Artificial Sequence: Synthetic oligonucleotide
ccgagagcacacgggaguc

SEQ ID NO: 2666092 - RNA, 19 nt, Artificial Sequence
  Description of Artificial Sequence: Synthetic oligonucleotide
cagugagcgucagcagcga

SEQ ID NO: 2666093 - RNA, 19 nt, Artificial Sequence
  Description of Artificial Sequence: Synthetic oligonucleotide
gaagccagugagggaguuu

SEQ ID NO: 2666094 - RNA, 19 nt, Artificial Sequence
  Description of Artificial Sequence: Synthetic oligonucleotide
cggugauccaccugcaugu

SEQ ID NO: 2666095 - RNA, 19 nt, Artificial Sequence
  Description of Artificial Sequence: Synthetic oligonucleotide
gcgaggggaagcgcucgcc

SEQ ID NO: 2666096 - RNA, 19 nt, Artificial Sequence
  Description of Artificial Sequence: Synthetic oligonucleotide
ggccccggugcgucugcag

SEQ ID NO: 2666097 - RNA, 19 nt, Artificial Sequence
  Description of Artificial Sequence: Synthetic oligonucleotide
cacucggccgaguccgagu

SEQ ID NO: 2666098 - RNA, 19 nt, Artificial Sequence
  Description of Artificial Sequence: Synthetic oligonucleotide
gcagcgaggggaagcgcuc

SEQ ID NO: 2666099 - RNA, 19 nt, Artificial Sequence
  Description of Artificial Sequence: Synthetic oligonucleotide
gccuguguccaggcucuug

SEQ ID NO: 2666100 - RNA, 19 nt, Artificial Sequence
  Description of Artificial Sequence: Synthetic oligonucleotide
uggcagggccccggugcgu

SEQ ID NO: 2666101 - RNA, 19 nt, Artificial Sequence
  Description of Artificial Sequence: Synthetic oligonucleotide
cagggccccggugcgucug

SEQ ID NO: 2666102 - RNA, 19 nt, Artificial Sequence
  Description of Artificial Sequence: Synthetic oligonucleotide
ccuccccacggcgucuccg

SEQ ID NO: 2666103 - RNA, 19 nt, Artificial Sequence
  Description of Artificial Sequence: Synthetic oligonucleotide
cgagagcacacgggagucc

SEQ ID NO: 2666104 - RNA, 19 nt, Artificial Sequence
  Description of Artificial Sequence: Synthetic oligonucleotide
ccggaggccacucggccga

SEQ ID NO: 2666105 - RNA, 19 nt, Artificial Sequence
  Description of Artificial Sequence: Synthetic oligonucleotide
cgaguccgaguuaugcaaa

SEQ ID NO: 2666106 - RNA, 19 nt, Artificial Sequence
  Description of Artificial Sequence: Synthetic oligonucleotide
ggggcaccggugacgucug

SEQ ID NO: 2666107 - RNA, 19 nt, Artificial Sequence
  Description of Artificial Sequence: Synthetic oligonucleotide
gggaguccggaggccacuc

SEQ ID NO: 2666108 - RNA, 19 nt, Artificial Sequence
  Description of Artificial Sequence: Synthetic oligonucleotide
gggcaccggugacgucugg

SEQ ID NO: 2666109 - RNA, 19 nt, Artificial Sequence
  Description of Artificial Sequence: Synthetic oligonucleotide
ggcagggccccggugcguc

SEQ ID NO: 2666110 - RNA, 19 nt, Artificial Sequence
  Description of Artificial Sequence: Synthetic oligonucleotide
ccaccugcauguggcucgc

SEQ ID NO: 2666111 - RNA, 19 nt, Artificial Sequence
  Description of Artificial Sequence: Synthetic oligonucleotide
ggcaccuuuccggggccca

SEQ ID NO: 2666112 - RNA, 19 nt, Artificial Sequence
  Description of Artificial Sequence: Synthetic oligonucleotide
cguucucggagaagaaagu

SEQ ID NO: 2666113 - RNA, 19 nt, Artificial Sequence
  Description of Artificial Sequence: Synthetic oligonucleotide
cacggugauccaccugcau

SEQ ID NO: 2666114 - RNA, 19 nt, Artificial Sequence
  Description of Artificial Sequence: Synthetic oligonucleotide
cgcucgccacagaugggac

SEQ ID NO: 2666115 - RNA, 19 nt, Artificial Sequence
  Description of Artificial Sequence: Synthetic oligonucleotide
cgacaggugccugugucca

SEQ ID NO: 2666116 - RNA, 19 nt, Artificial Sequence
  Description of Artificial Sequence: Synthetic oligonucleotide
cgaggggaagcgcucgcca

SEQ ID NO: 2666117 - RNA, 19 nt, Artificial Sequence
  Description of Artificial Sequence: Synthetic oligonucleotide
cccggugcgucugcaggug

SEQ ID NO: 2666118 - RNA, 19 nt, Artificial Sequence
  Description of Artificial Sequence: Synthetic oligonucleotide
gcgucagcagcgaggggaa

SEQ ID NO: 2666119 - RNA, 19 nt, Artificial Sequence
  Description of Artificial Sequence: Synthetic oligonucleotide
ccacucggccgaguccgag

SEQ ID NO: 2666120 - RNA, 19 nt, Artificial Sequence
  Description of Artificial Sequence: Synthetic oligonucleotide
gggcaccuuuccggggccc

SEQ ID NO: 2666121 - RNA, 19 nt, Artificial Sequence
  Description of Artificial Sequence: Synthetic oligonucleotide
cucggccgaguccgaguua

SEQ ID NO: 2666122 - RNA, 19 nt, Artificial Sequence
  Description of Artificial Sequence: Synthetic oligonucleotide
gcaccuuuccggggcccac

SEQ ID NO: 2666123 - RNA, 19 nt, Artificial Sequence
  Description of Artificial Sequence: Synthetic oligonucleotide
cggggugcaucuggcagug

SEQ ID NO: 2666124 - RNA, 19 nt, Artificial Sequence
  Description of Artificial Sequence: Synthetic oligonucleotide
cccacggcgucuccggcaa

SEQ ID NO: 2666125 - RNA, 19 nt, Artificial Sequence
  Description of Artificial Sequence: Synthetic oligonucleotide
cccacuggucucuggugua

SEQ ID NO: 2666126 - RNA, 19 nt, Artificial Sequence
  Description of Artificial Sequence: Synthetic oligonucleotide
ccccacggcgucuccggca

SEQ ID NO: 2666127 - RNA, 19 nt, Artificial Sequence
  Description of Artificial Sequence: Synthetic oligonucleotide
cggcaagaucucucucuca

SEQ ID NO: 2666128 - RNA, 19 nt, Artificial Sequence
  Description of Artificial Sequence: Synthetic oligonucleotide
ggggugcaucuggcagugc

SEQ ID NO: 2666129 - RNA, 19 nt, Artificial Sequence
  Description of Artificial Sequence: Synthetic oligonucleotide
caccuuuccggggcccacu

SEQ ID NO: 2666130 - RNA, 19 nt, Artificial Sequence
  Description of Artificial Sequence: Synthetic oligonucleotide
cuccagcguggaggugaca

SEQ ID NO: 2666131 - RNA, 19 nt, Artificial Sequence
  Description of Artificial Sequence: Synthetic oligonucleotide
ccgccagcuuuugcaugug

SEQ ID NO: 2666132 - RNA, 19 nt, Artificial Sequence
  Description of Artificial Sequence: Synthetic oligonucleotide
cagcgccucauggccaaau

SEQ ID NO: 2666133 - RNA, 19 nt, Artificial Sequence
  Description of Artificial Sequence: Synthetic oligonucleotide
cggagcccguucucggaga

SEQ ID NO: 2666134 - RNA, 19 nt, Artificial Sequence
  Description of Artificial Sequence: Synthetic oligonucleotide
ccacggcgucuccggcaag

SEQ ID NO: 2666135 - RNA, 19 nt, Artificial Sequence
  Description of Artificial Sequence: Synthetic oligonucleotide
caccugcauguggcucgca

SEQ ID NO: 2666136 - RNA, 19 nt, Artificial Sequence
  Description of Artificial Sequence: Synthetic oligonucleotide
cccuccccacggcgucucc

SEQ ID NO: 2666137 - RNA, 19 nt, Artificial Sequence
  Description of Artificial Sequence: Synthetic oligonucleotide
cacucugcaggggcaucuu

SEQ ID NO: 2666138 - RNA, 19 nt, Artificial Sequence
  Description of Artificial Sequence: Synthetic oligonucleotide
cggggcaccggugacgucu

SEQ ID NO: 2666139 - RNA, 19 nt, Artificial Sequence
  Description of Artificial Sequence: Synthetic oligonucleotide
ccccggugcgucugcaggu

SEQ ID NO: 2666140 - RNA, 19 nt, Artificial Sequence
  Description of Artificial Sequence: Synthetic oligonucleotide
ggugacgucugggcaccuu

SEQ ID NO: 2666141 - RNA, 19 nt, Artificial Sequence
  Description of Artificial Sequence: Synthetic oligonucleotide
gguguucccggagcccguu

SEQ ID NO: 2666142 - RNA, 19 nt, Artificial Sequence
  Description of Artificial Sequence: Synthetic oligonucleotide
cggccgaguccgaguuaug

SEQ ID NO: 2666143 - RNA, 19 nt, Artificial Sequence
  Description of Artificial Sequence: Synthetic oligonucleotide
gccacucggccgaguccga

SEQ ID NO: 2666144 - RNA, 19 nt, Artificial Sequence
  Description of Artificial Sequence: Synthetic oligonucleotide
cgaaggucaucuggcacuu

SEQ ID NO: 2666145 - RNA, 19 nt, Artificial Sequence
  Description of Artificial Sequence: Synthetic oligonucleotide
gggccccggugcgucugca

SEQ ID NO: 2666146 - RNA, 19 nt, Artificial Sequence
  Description of Artificial Sequence: Synthetic oligonucleotide
ccggugcgucugcaggugu

SEQ ID NO: 2666147 - RNA, 19 nt, Artificial Sequence
  Description of Artificial Sequence: Synthetic oligonucleotide
ggaggccacucggccgagu

SEQ ID NO: 2666148 - RNA, 19 nt, Artificial Sequence
  Description of Artificial Sequence: Synthetic oligonucleotide
gcagcgccucauggccaaa

SEQ ID NO: 2666149 - RNA, 19 nt, Artificial Sequence
  Description of Artificial Sequence: Synthetic oligonucleotide
ccggggcaccggugacguc

SEQ ID NO: 2666150 - RNA, 19 nt, Artificial Sequence
  Description of Artificial Sequence: Synthetic oligonucleotide
ggcccuccccacggcgucu

SEQ ID NO: 2666151 - RNA, 19 nt, Artificial Sequence
  Description of Artificial Sequence: Synthetic oligonucleotide
cggaggccacucggccgag

SEQ ID NO: 2666152 - RNA, 19 nt, Artificial Sequence
  Description of Artificial Sequence: Synthetic oligonucleotide
cggggcccacuggucucug

SEQ ID NO: 2666153 - RNA, 19 nt, Artificial Sequence
  Description of Artificial Sequence: Synthetic oligonucleotide
cgucuccggcaagaucucu

SEQ ID NO: 2666154 - RNA, 19 nt, Artificial Sequence
  Description of Artificial Sequence: Synthetic oligonucleotide
ccggggcccacuggucucu

SEQ ID NO: 2666155 - RNA, 19 nt, Artificial Sequence
  Description of Artificial Sequence: Synthetic oligonucleotide
cgggaguccggaggccacu

SEQ ID NO: 2666156 - RNA, 19 nt, Artificial Sequence
  Description of Artificial Sequence: Synthetic oligonucleotide
cggugacgucugggcaccu

SEQ ID NO: 2666157 - RNA, 19 nt, Artificial Sequence
  Description of Artificial Sequence: Synthetic oligonucleotide
aagaagaccaugcagccuc

SEQ ID NO: 2666158 - RNA, 19 nt, Artificial Sequence
  Description of Artificial Sequence: Synthetic oligonucleotide
ucucguuaagcccacaggg

SEQ ID NO: 2666159 - RNA, 19 nt, Artificial Sequence
  Description of Artificial Sequence: Synthetic oligonucleotide
auaucaguggccaagaggg

SEQ ID NO: 2666160 - RNA, 19 nt, Artificial Sequence
  Description of Artificial Sequence: Synthetic oligonucleotide
acgaacaacagaaaggugg

SEQ ID NO: 2666161 - RNA, 19 nt, Artificial Sequence
  Description of Artificial Sequence: Synthetic oligonucleotide
aaagguggcagcugagcgg

SEQ ID NO: 2666162 - RNA, 19 nt, Artificial Sequence
  Description of Artificial Sequence: Synthetic oligonucleotide
acaacagaaagguggcagc

SEQ ID NO: 2666163 - RNA, 19 nt, Artificial Sequence
  Description of Artificial Sequence: Synthetic oligonucleotide
aacaacagaaagguggcag

SEQ ID NO: 2666164 - RNA, 19 nt, Artificial Sequence
  Description of Artificial Sequence: Synthetic oligonucleotide
uguugucucguccacuagg

SEQ ID NO: 2666165 - RNA, 19 nt, Artificial Sequence
  Description of Artificial Sequence: Synthetic oligonucleotide
gaaagguggcagcugagcg

SEQ ID NO: 2666166 - RNA, 19 nt, Artificial Sequence
  Description of Artificial Sequence: Synthetic oligonucleotide
aaugacaggccccgccagc

SEQ ID NO: 2666167 - RNA, 19 nt, Artificial Sequence
  Description of Artificial Sequence: Synthetic oligonucleotide
cauaucaguggccaagagg

SEQ ID NO: 2666168 - RNA, 19 nt, Artificial Sequence
  Description of Artificial Sequence: Synthetic oligonucleotide
acggccugcagcuugugcc

SEQ ID NO: 2666169 - RNA, 19 nt, Artificial Sequence
  Description of Artificial Sequence: Synthetic oligonucleotide
ucguuaagcccacaggggc

SEQ ID NO: 2666170 - RNA, 19 nt, Artificial Sequence
  Description of Artificial Sequence: Synthetic oligonucleotide
agggucauggagaagauag

SEQ ID NO: 2666171 - RNA, 19 nt, Artificial Sequence
  Description of Artificial Sequence: Synthetic oligonucleotide
aggggcucauaucaguggc

SEQ ID NO: 2666172 - RNA, 19 nt, Artificial Sequence
  Description of Artificial Sequence: Synthetic oligonucleotide
uaggcucucguuaagccca

SEQ ID NO: 2666173 - RNA, 19 nt, Artificial Sequence
  Description of Artificial Sequence: Synthetic oligonucleotide
uggccugccaggucgaugg

SEQ ID NO: 2666174 - RNA, 19 nt, Artificial Sequence
  Description of Artificial Sequence: Synthetic oligonucleotide
acacguuguugucucgucc

SEQ ID NO: 2666175 - RNA, 19 nt, Artificial Sequence
  Description of Artificial Sequence: Synthetic oligonucleotide
auacaggcgaagcaccagg

SEQ ID NO: 2666176 - RNA, 19 nt, Artificial Sequence
  Description of Artificial Sequence: Synthetic oligonucleotide
aucaguggccaagagggcc

SEQ ID NO: 2666177 - RNA, 19 nt, Artificial Sequence
  Description of Artificial Sequence: Synthetic oligonucleotide
cuggcaacgaacaacagaa

SEQ ID NO: 2666178 - RNA, 19 nt, Artificial Sequence
  Description of Artificial Sequence: Synthetic oligonucleotide
agaaagguggcagcugagc

SEQ ID NO: 2666179 - RNA, 19 nt, Artificial Sequence
  Description of Artificial Sequence: Synthetic oligonucleotide
aaaugacaggccccgccag

SEQ ID NO: 2666180 - RNA, 19 nt, Artificial Sequence
  Description of Artificial Sequence: Synthetic oligonucleotide
cacauggccugccaggucg

SEQ ID NO: 2666181 - RNA, 19 nt, Artificial Sequence
  Description of Artificial Sequence: Synthetic oligonucleotide
gagaagauaggcagcacug

SEQ ID NO: 2666182 - RNA, 19 nt, Artificial Sequence
  Description of Artificial Sequence: Synthetic oligonucleotide
ugaugugccggaaucgccu

SEQ ID NO: 2666183 - RNA, 19 nt, Artificial Sequence
  Description of Artificial Sequence: Synthetic oligonucleotide
aacgcccugcagcauacag

SEQ ID NO: 2666184 - RNA, 19 nt, Artificial Sequence
  Description of Artificial Sequence: Synthetic oligonucleotide
cucguuaagcccacagggg

SEQ ID NO: 2666185 - RNA, 19 nt, Artificial Sequence
  Description of Artificial Sequence: Synthetic oligonucleotide
ggcaacgaacaacagaaag

SEQ ID NO: 2666186 - RNA, 19 nt, Artificial Sequence
  Description of Artificial Sequence: Synthetic oligonucleotide
acagaaagguggcagcuga

SEQ ID NO: 2666187 - RNA, 19 nt, Artificial Sequence
  Description of Artificial Sequence: Synthetic oligonucleotide
gcaacgaacaacagaaagg

SEQ ID NO: 2666188 - RNA, 19 nt, Artificial Sequence
  Description of Artificial Sequence: Synthetic oligonucleotide
cuaggcucucguuaagccc

SEQ ID NO: 2666189 - RNA, 19 nt, Artificial Sequence
  Description of Artificial Sequence: Synthetic oligonucleotide
ugucucguccacuaggcuc

SEQ ID NO: 2666190 - RNA, 19 nt, Artificial Sequence
  Description of Artificial Sequence: Synthetic oligonucleotide
ggaacuaggcuccugcugc

SEQ ID NO: 2666191 - RNA, 19 nt, Artificial Sequence
  Description of Artificial Sequence: Synthetic oligonucleotide
ugccggaaucgccuggugg

SEQ ID NO: 2666192 - RNA, 19 nt, Artificial Sequence
  Description of Artificial Sequence: Synthetic oligonucleotide
agcgccagcacguuggaca

SEQ ID NO: 2666193 - RNA, 19 nt, Artificial Sequence
  Description of Artificial Sequence: Synthetic oligonucleotide
ucauaucaguggccaagag

SEQ ID NO: 2666194 - RNA, 19 nt, Artificial Sequence
  Description of Artificial Sequence: Synthetic oligonucleotide
acacaggccgaagaagacc

SEQ ID NO: 2666195 - RNA, 19 nt, Artificial Sequence
  Description of Artificial Sequence: Synthetic oligonucleotide
agaagauaggcagcacugg

SEQ ID NO: 2666196 - RNA, 19 nt, Artificial Sequence
  Description of Artificial Sequence: Synthetic oligonucleotide
aucgccugguggcagcacc

SEQ ID NO: 2666197 - RNA, 19 nt, Artificial Sequence
  Description of Artificial Sequence: Synthetic oligonucleotide
ccgaagaagaccaugcagc

SEQ ID NO: 2666198 - RNA, 19 nt, Artificial Sequence
  Description of Artificial Sequence: Synthetic oligonucleotide
gacgcagacggccugcagc

SEQ ID NO: 2666199 - RNA, 19 nt, Artificial Sequence
  Description of Artificial Sequence: Synthetic oligonucleotide
aagauaggcagcacuggug

SEQ ID NO: 2666200 - RNA, 19 nt, Artificial Sequence
  Description of Artificial Sequence: Synthetic oligonucleotide
cucugugccgccuccaccc

SEQ ID NO: 2666201 - RNA, 19 nt, Artificial Sequence
  Description of Artificial Sequence: Synthetic oligonucleotide
agcaccgcagauguguugg

SEQ ID NO: 2666202 - RNA, 19 nt, Artificial Sequence
  Description of Artificial Sequence: Synthetic oligonucleotide
cucccaggaaaugacaggc

SEQ ID NO: 2666203 - RNA, 19 nt, Artificial Sequence
  Description of Artificial Sequence: Synthetic oligonucleotide
gaaaugacaggccccgcca

SEQ ID NO: 2666204 - RNA, 19 nt, Artificial Sequence
  Description of Artificial Sequence: Synthetic oligonucleotide
cucucguuaagcccacagg

SEQ ID NO: 2666205 - RNA, 19 nt, Artificial Sequence
  Description of Artificial Sequence: Synthetic oligonucleotide
gauguguuggggacccugg

SEQ ID NO: 2666206 - RNA, 19 nt, Artificial Sequence
  Description of Artificial Sequence: Synthetic oligonucleotide
cuggguguugcacacguug

SEQ ID NO: 2666207 - RNA, 19 nt, Artificial Sequence
  Description of Artificial Sequence: Synthetic oligonucleotide
aggccgaagaagaccaugc

SEQ ID NO: 2666208 - RNA, 19 nt, Artificial Sequence
  Description of Artificial Sequence: Synthetic oligonucleotide
uccacuaggcucucguuaa

SEQ ID NO: 2666209 - RNA, 19 nt, Artificial Sequence
  Description of Artificial Sequence: Synthetic oligonucleotide
cacgcagcgcuccacagcc

SEQ ID NO: 2666210 - RNA, 19 nt, Artificial Sequence
  Description of Artificial Sequence: Synthetic oligonucleotide
agcacguuggacacggcac

SEQ ID NO: 2666211 - RNA, 19 nt, Artificial Sequence
  Description of Artificial Sequence: Synthetic oligonucleotide
caggcgaacgcccugcagc

SEQ ID NO: 2666212 - RNA, 19 nt, Artificial Sequence
  Description of Artificial Sequence: Synthetic oligonucleotide
aacuaggcuccugcugccc

SEQ ID NO: 2666213 - RNA, 19 nt, Artificial Sequence
  Description of Artificial Sequence: Synthetic oligonucleotide
caggaaaugacaggccccg

SEQ ID NO: 2666214 - RNA, 19 nt, Artificial Sequence
  Description of Artificial Sequence: Synthetic oligonucleotide
acuaggcuccugcugcccg

SEQ ID NO: 2666215 - RNA, 19 nt, Artificial Sequence
  Description of Artificial Sequence: Synthetic oligonucleotide
aacagaaagguggcagcug

SEQ ID NO: 2666216 - RNA, 19 nt, Artificial Sequence
  Description of Artificial Sequence: Synthetic oligonucleotide
uguguuggggacccugggu

SEQ ID NO: 2666217 - RNA, 19 nt, Artificial Sequence
  Description of Artificial Sequence: Synthetic oligonucleotide
guguuggggacccugggug

SEQ ID NO: 2666218 - RNA, 19 nt, Artificial Sequence
  Description of Artificial Sequence: Synthetic oligonucleotide
ugcgugacacccacgcagc

SEQ ID NO: 2666219 - RNA, 19 nt, Artificial Sequence
  Description of Artificial Sequence: Synthetic oligonucleotide
ggaugcaggguccccaugg

SEQ ID NO: 2666220 - RNA, 19 nt, Artificial Sequence
  Description of Artificial Sequence: Synthetic oligonucleotide
uggugaugugccggaaucg

SEQ ID NO: 2666221 - RNA, 19 nt, Artificial Sequence
  Description of Artificial Sequence: Synthetic oligonucleotide
aguggacacaggccgaaga

SEQ ID NO: 2666222 - RNA, 19 nt, Artificial Sequence
  Description of Artificial Sequence: Synthetic oligonucleotide
ugcucaggaugcagggucc

SEQ ID NO: 2666223 - RNA, 19 nt, Artificial Sequence
  Description of Artificial Sequence: Synthetic oligonucleotide
agccaugccgcagccaagc

SEQ ID NO: 2666224 - RNA, 19 nt, Artificial Sequence
  Description of Artificial Sequence: Synthetic oligonucleotide
uggguguugcacacguugu

SEQ ID NO: 2666225 - RNA, 19 nt, Artificial Sequence
  Description of Artificial Sequence: Synthetic oligonucleotide
gguugcgugacacccacgc

SEQ ID NO: 2666226 - RNA, 19 nt, Artificial Sequence
  Description of Artificial Sequence: Synthetic oligonucleotide
guugucucguccacuaggc

SEQ ID NO: 2666227 - RNA, 19 nt, Artificial Sequence
  Description of Artificial Sequence: Synthetic oligonucleotide
auggagaagauaggcagca

SEQ ID NO: 2666228 - RNA, 19 nt, Artificial Sequence
  Description of Artificial Sequence: Synthetic oligonucleotide
ugcugcguggagcagcggu

SEQ ID NO: 2666229 - RNA, 19 nt, Artificial Sequence
  Description of Artificial Sequence: Synthetic oligonucleotide
uaucaguggccaagagggc

SEQ ID NO: 2666230 - RNA, 19 nt, Artificial Sequence
  Description of Artificial Sequence: Synthetic oligonucleotide
aggcgaagcaccagggcgc

SEQ ID NO: 2666231 - RNA, 19 nt, Artificial Sequence
  Description of Artificial Sequence: Synthetic oligonucleotide
uuguugucucguccacuag

SEQ ID NO: 2666232 - RNA, 19 nt, Artificial Sequence
  Description of Artificial Sequence: Synthetic oligonucleotide
auguguuggggacccuggg

SEQ ID NO: 2666233 - RNA, 19 nt, Artificial Sequence
  Description of Artificial Sequence: Synthetic oligonucleotide
ucccaggaaaugacaggcc

SEQ ID NO: 2666234 - RNA, 19 nt, Artificial Sequence
  Description of Artificial Sequence: Synthetic oligonucleotide
aacgaacaacagaaaggug

SEQ ID NO: 2666235 - RNA, 19 nt, Artificial Sequence
  Description of Artificial Sequence: Synthetic oligonucleotide
gacaggccccgccagcagg

SEQ ID NO: 2666236 - RNA, 19 nt, Artificial Sequence
  Description of Artificial Sequence: Synthetic oligonucleotide
uacacgugcugcguggagc

SEQ ID NO: 2666237 - RNA, 19 nt, Artificial Sequence
  Description of Artificial Sequence: Synthetic oligonucleotide
cacaggccgaagaagacca

SEQ ID NO: 2666238 - RNA, 19 nt, Artificial Sequence
  Description of Artificial Sequence: Synthetic oligonucleotide
gaugcaggguccccauggc

SEQ ID NO: 2666239 - RNA, 19 nt, Artificial Sequence
  Description of Artificial Sequence: Synthetic oligonucleotide
accgcagauguguugggga

SEQ ID NO: 2666240 - RNA, 19 nt, Artificial Sequence
  Description of Artificial Sequence: Synthetic oligonucleotide
uggcccggaacuaggcucc

SEQ ID NO: 2666241 - RNA, 19 nt, Artificial Sequence
  Description of Artificial Sequence: Synthetic oligonucleotide
ucgccugguggcagcaccg

SEQ ID NO: 2666242 - RNA, 19 nt, Artificial Sequence
  Description of Artificial Sequence: Synthetic oligonucleotide
gaugugccggaaucgccug

SEQ ID NO: 2666243 - RNA, 19 nt, Artificial Sequence
  Description of Artificial Sequence: Synthetic oligonucleotide
ucguccacuaggcucucgu

SEQ ID NO: 2666244 - RNA, 19 nt, Artificial Sequence
  Description of Artificial Sequence: Synthetic oligonucleotide
ggaaaugacaggccccgcc

SEQ ID NO: 2666245 - RNA, 19 nt, Artificial Sequence
  Description of Artificial Sequence: Synthetic oligonucleotide
uggagcagcgguugcguga

SEQ ID NO: 2666246 - RNA, 19 nt, Artificial Sequence
  Description of Artificial Sequence: Synthetic oligonucleotide
cuggugaugugccggaauc

SEQ ID NO: 2666247 - RNA, 19 nt, Artificial Sequence
  Description of Artificial Sequence: Synthetic oligonucleotide
cugcucaggaugcaggguc

SEQ ID NO: 2666248 - RNA, 19 nt, Artificial Sequence
  Description of Artificial Sequence: Synthetic oligonucleotide
caccgauacacgugcugcg

SEQ ID NO: 2666249 - RNA, 19 nt, Artificial Sequence
  Description of Artificial Sequence: Synthetic oligonucleotide
gaacuaggcuccugcugcc

SEQ ID NO: 2666250 - RNA, 19 nt, Artificial Sequence
  Description of Artificial Sequence: Synthetic oligonucleotide
uugcacacguuguugucuc

SEQ ID NO: 2666251 - RNA, 19 nt, Artificial Sequence
  Description of Artificial Sequence: Synthetic oligonucleotide
caugccgcagccaagcaaa

SEQ ID NO: 2666252 - RNA, 19 nt, Artificial Sequence
  Description of Artificial Sequence: Synthetic oligonucleotide
gccgaagaagaccaugcag

SEQ ID NO: 2666253 - RNA, 19 nt, Artificial Sequence
  Description of Artificial Sequence: Synthetic oligonucleotide
acacgugcugcguggagca

SEQ ID NO: 2666254 - RNA, 19 nt, Artificial Sequence
  Description of Artificial Sequence: Synthetic oligonucleotide
cagcauacaggcgaagcac

SEQ ID NO: 2666255 - RNA, 19 nt, Artificial Sequence
  Description of Artificial Sequence: Synthetic oligonucleotide
caacgaacaacagaaaggu

SEQ ID NO: 2666256 - RNA, 19 nt, Artificial Sequence
  Description of Artificial Sequence: Synthetic oligonucleotide
caugcagccucccaggaaa

SEQ ID NO: 2666257 - RNA, 19 nt, Artificial Sequence
  Description of Artificial Sequence: Synthetic oligonucleotide
guuguugucucguccacua

SEQ ID NO: 2666258 - RNA, 19 nt, Artificial Sequence
  Description of Artificial Sequence: Synthetic oligonucleotide
gccagugcugcucaggaug

SEQ ID NO: 2666259 - RNA, 19 nt, Artificial Sequence
  Description of Artificial Sequence: Synthetic oligonucleotide
ugcacacguuguugucucg

SEQ ID NO: 2666260 - RNA, 19 nt, Artificial Sequence
  Description of Artificial Sequence: Synthetic oligonucleotide
ucugugccgccuccacccg

SEQ ID NO: 2666261 - RNA, 19 nt, Artificial Sequence
  Description of Artificial Sequence: Synthetic oligonucleotide
aaaguggacacaggccgaa

SEQ ID NO: 2666262 - RNA, 19 nt, Artificial Sequence
  Description of Artificial Sequence: Synthetic oligonucleotide
acgugcugcguggagcagc

SEQ ID NO: 2666263 - RNA, 19 nt, Artificial Sequence
  Description of Artificial Sequence: Synthetic oligonucleotide
acgcagacggccugcagcu

SEQ ID NO: 2666264 - RNA, 19 nt, Artificial Sequence
  Description of Artificial Sequence: Synthetic oligonucleotide
acggcacccagggucaugg

SEQ ID NO: 2666265 - RNA, 19 nt, Artificial Sequence
  Description of Artificial Sequence: Synthetic oligonucleotide
cgaacaacagaaagguggc

SEQ ID NO: 2666266 - RNA, 19 nt, Artificial Sequence
  Description of Artificial Sequence: Synthetic oligonucleotide
agauguguuggggacccug

SEQ ID NO: 2666267 - RNA, 19 nt, Artificial Sequence
  Description of Artificial Sequence: Synthetic oligonucleotide
gcuagcgccagcacguugg

SEQ ID NO: 2666268 - RNA, 19 nt, Artificial Sequence
  Description of Artificial Sequence: Synthetic oligonucleotide
auacacgugcugcguggag

SEQ ID NO: 2666269 - RNA, 19 nt, Artificial Sequence
  Description of Artificial Sequence: Synthetic oligonucleotide
cagcgcuagcgccagcacg

SEQ ID NO: 2666270 - RNA, 19 nt, Artificial Sequence
  Description of Artificial Sequence: Synthetic oligonucleotide
cccaggaaaugacaggccc

SEQ ID NO: 2666271 - RNA, 19 nt, Artificial Sequence
  Description of Artificial Sequence: Synthetic oligonucleotide
ggcuccucggcucugugcc

SEQ ID NO: 2666272 - RNA, 19 nt, Artificial Sequence
  Description of Artificial Sequence: Synthetic oligonucleotide
ggacacggcacccaggguc

SEQ ID NO: 2666273 - RNA, 19 nt, Artificial Sequence
  Description of Artificial Sequence: Synthetic oligonucleotide
cagaaagguggcagcugag

SEQ ID NO: 2666274 - RNA, 19 nt, Artificial Sequence
  Description of Artificial Sequence: Synthetic oligonucleotide
ggcgcccgggaucacaugg

SEQ ID NO: 2666275 - RNA, 19 nt, Artificial Sequence
  Description of Artificial Sequence: Synthetic oligonucleotide
gcucauaucaguggccaag

SEQ ID NO: 2666276 - RNA, 19 nt, Artificial Sequence
  Description of Artificial Sequence: Synthetic oligonucleotide
cauacaggcgaagcaccag

SEQ ID NO: 2666277 - RNA, 19 nt, Artificial Sequence
  Description of Artificial Sequence: Synthetic oligonucleotide
aggcgaacgcccugcagca

SEQ ID NO: 2666278 - RNA, 19 nt, Artificial Sequence
  Description of Artificial Sequence: Synthetic oligonucleotide
aucacauggccugccaggu

SEQ ID NO: 2666279 - RNA, 19 nt, Artificial Sequence
  Description of Artificial Sequence: Synthetic oligonucleotide
augugccggaaucgccugg

SEQ ID NO: 2666280 - RNA, 19 nt, Artificial Sequence
  Description of Artificial Sequence: Synthetic oligonucleotide
aggaaaugacaggccccgc

SEQ ID NO: 2666281 - RNA, 19 nt, Artificial Sequence
  Description of Artificial Sequence: Synthetic oligonucleotide
acuggugaugugccggaau

SEQ ID NO: 2666282 - RNA, 19 nt, Artificial Sequence
  Description of Artificial Sequence: Synthetic oligonucleotide
ugcugcccgcgccagcugc

SEQ ID NO: 2666283 - RNA, 19 nt, Artificial Sequence
  Description of Artificial Sequence: Synthetic oligonucleotide
aaucgccugguggcagcac

SEQ ID NO: 2666284 - RNA, 19 nt, Artificial Sequence
  Description of Artificial Sequence: Synthetic oligonucleotide
cagcgguugcgugacaccc

SEQ ID NO: 2666285 - RNA, 19 nt, Artificial Sequence
  Description of Artificial Sequence: Synthetic oligonucleotide
aaguggacacaggccgaag

SEQ ID NO: 2666286 - RNA, 19 nt, Artificial Sequence
  Description of Artificial Sequence: Synthetic oligonucleotide
gcagcuugugccagcagcg

SEQ ID NO: 2666287 - RNA, 19 nt, Artificial Sequence
  Description of Artificial Sequence: Synthetic oligonucleotide
cgaagaagaccaugcagcc

SEQ ID NO: 2666288 - RNA, 19 nt, Artificial Sequence
  Description of Artificial Sequence: Synthetic oligonucleotide
gacccuggguguugcacac

SEQ ID NO: 2666289 - RNA, 19 nt, Artificial Sequence
  Description of Artificial Sequence: Synthetic oligonucleotide
gguguugcacacguuguug

SEQ ID NO: 2666290 - RNA, 19 nt, Artificial Sequence
  Description of Artificial Sequence: Synthetic oligonucleotide
ggaucacauggccugccag

SEQ ID NO: 2666291 - RNA, 19 nt, Artificial Sequence
  Description of Artificial Sequence: Synthetic oligonucleotide
gccggaaucgccugguggc

SEQ ID NO: 2666292 - RNA, 19 nt, Artificial Sequence
  Description of Artificial Sequence: Synthetic oligonucleotide
ccaggaaaugacaggcccc

SEQ ID NO: 2666293 - RNA, 19 nt, Artificial Sequence
  Description of Artificial Sequence: Synthetic oligonucleotide
ugacaggccccgccagcag

SEQ ID NO: 2666294 - RNA, 19 nt, Artificial Sequence
  Description of Artificial Sequence: Synthetic oligonucleotide
cuaggcuccugcugcccgc

SEQ ID NO: 2666295 - RNA, 19 nt, Artificial Sequence
  Description of Artificial Sequence: Synthetic oligonucleotide
agcgcuccacagccaugcc

SEQ ID NO: 2666296 - RNA, 19 nt, Artificial Sequence
  Description of Artificial Sequence: Synthetic oligonucleotide
uggcaacgaacaacagaaa

SEQ ID NO: 2666297 - RNA, 19 nt, Artificial Sequence
  Description of Artificial Sequence: Synthetic oligonucleotide
ggugaugugccggaaucgc

SEQ ID NO: 2666298 - RNA, 19 nt, Artificial Sequence
  Description of Artificial Sequence: Synthetic oligonucleotide
acccgcaccccacuggccu

SEQ ID NO: 2666299 - RNA, 19 nt, Artificial Sequence
  Description of Artificial Sequence: Synthetic oligonucleotide
cagccucccaggaaaugac

SEQ ID NO: 2666300 - RNA, 19 nt, Artificial Sequence
  Description of Artificial Sequence: Synthetic oligonucleotide
gcuggcaacgaacaacaga

SEQ ID NO: 2666301 - RNA, 19 nt, Artificial Sequence
  Description of Artificial Sequence: Synthetic oligonucleotide
guggcagcaccgcagaugu

SEQ ID NO: 2666302 - RNA, 19 nt, Artificial Sequence
  Description of Artificial Sequence: Synthetic oligonucleotide
ugcucccuggcucccggca

SEQ ID NO: 2666303 - RNA, 19 nt, Artificial Sequence
  Description of Artificial Sequence: Synthetic oligonucleotide
uccuggggcggcuccucgg

SEQ ID NO: 2666304 - RNA, 19 nt, Artificial Sequence
  Description of Artificial Sequence: Synthetic oligonucleotide
gcucucguuaagcccacag

SEQ ID NO: 2666305 - RNA, 19 nt, Artificial Sequence
  Description of Artificial Sequence: Synthetic oligonucleotide
ugagcggcgccgacgcaga

SEQ ID NO: 2666306 - RNA, 19 nt, Artificial Sequence
  Description of Artificial Sequence: Synthetic oligonucleotide
gaagcaccagggcgcccgg

SEQ ID NO: 2666307 - RNA, 19 nt, Artificial Sequence
  Description of Artificial Sequence: Synthetic oligonucleotide
agcgcuagcgccagcacgu

SEQ ID NO: 2666308 - RNA, 19 nt, Artificial Sequence
  Description of Artificial Sequence: Synthetic oligonucleotide
ugcguggagcagcgguugc

SEQ ID NO: 2666309 - RNA, 19 nt, Artificial Sequence
  Description of Artificial Sequence: Synthetic oligonucleotide
guggccaagagggccagug

SEQ ID NO: 2666310 - RNA, 19 nt, Artificial Sequence
  Description of Artificial Sequence: Synthetic oligonucleotide
gcggcgccgacgcagacgg

SEQ ID NO: 2666311 - RNA, 19 nt, Artificial Sequence
  Description of Artificial Sequence: Synthetic oligonucleotide
cacacguuguugucucguc

SEQ ID NO: 2666312 - RNA, 19 nt, Artificial Sequence
  Description of Artificial Sequence: Synthetic oligonucleotide
ggagaagauaggcagcacu

SEQ ID NO: 2666313 - RNA, 19 nt, Artificial Sequence
  Description of Artificial Sequence: Synthetic oligonucleotide
guuggacacggcacccagg

SEQ ID NO: 2666314 - RNA, 19 nt, Artificial Sequence
  Description of Artificial Sequence: Synthetic oligonucleotide
gacacccacgcagcgcucc

SEQ ID NO: 2666315 - RNA, 19 nt, Artificial Sequence
  Description of Artificial Sequence: Synthetic oligonucleotide
gugaugugccggaaucgcc

SEQ ID NO: 2666316 - RNA, 19 nt, Artificial Sequence
  Description of Artificial Sequence: Synthetic oligonucleotide
ugugccggaaucgccuggu

SEQ ID NO: 2666317 - RNA, 19 nt, Artificial Sequence
  Description of Artificial Sequence: Synthetic oligonucleotide
guuaagcccacaggggcuc

SEQ ID NO: 2666318 - RNA, 19 nt, Artificial Sequence
  Description of Artificial Sequence: Synthetic oligonucleotide
ggcacccagggucauggag

SEQ ID NO: 2666319 - RNA, 19 nt, Artificial Sequence
  Description of Artificial Sequence: Synthetic oligonucleotide
gcagcauacaggcgaagca

SEQ ID NO: 2666320 - RNA, 19 nt, Artificial Sequence
  Description of Artificial Sequence: Synthetic oligonucleotide
gaacaacagaaagguggca

SEQ ID NO: 2666321 - RNA, 19 nt, Artificial Sequence
  Description of Artificial Sequence: Synthetic oligonucleotide
gauacacgugcugcgugga

SEQ ID NO: 2666322 - RNA, 19 nt, Artificial Sequence
  Description of Artificial Sequence: Synthetic oligonucleotide
gacacggcacccaggguca

SEQ ID NO: 2666323 - RNA, 19 nt, Artificial Sequence
  Description of Artificial Sequence: Synthetic oligonucleotide
cgcccugcagcauacaggc

SEQ ID NO: 2666324 - RNA, 19 nt, Artificial Sequence
  Description of Artificial Sequence: Synthetic oligonucleotide
cagcacuggugaugugccg

SEQ ID NO: 2666325 - RNA, 19 nt, Artificial Sequence
  Description of Artificial Sequence: Synthetic oligonucleotide
agcaccagggcgcccggga

SEQ ID NO: 2666326 - RNA, 19 nt, Artificial Sequence
  Description of Artificial Sequence: Synthetic oligonucleotide
gugacacccacgcagcgcu

SEQ ID NO: 2666327 - RNA, 19 nt, Artificial Sequence
  Description of Artificial Sequence: Synthetic oligonucleotide
ucacauggccugccagguc

SEQ ID NO: 2666328 - RNA, 19 nt, Artificial Sequence
  Description of Artificial Sequence: Synthetic oligonucleotide
augacaggccccgccagca

SEQ ID NO: 2666329 - RNA, 19 nt, Artificial Sequence
  Description of Artificial Sequence: Synthetic oligonucleotide
gcacguuggacacggcacc

SEQ ID NO: 2666330 - RNA, 19 nt, Artificial Sequence
  Description of Artificial Sequence: Synthetic oligonucleotide
gcagauguguuggggaccc

SEQ ID NO: 2666331 - RNA, 19 nt, Artificial Sequence
  Description of Artificial Sequence: Synthetic oligonucleotide
gggccaccgauacacgugc

SEQ ID NO: 2666332 - RNA, 19 nt, Artificial Sequence
  Description of Artificial Sequence: Synthetic oligonucleotide
caccgcagauguguugggg

SEQ ID NO: 2666333 - RNA, 19 nt, Artificial Sequence
  Description of Artificial Sequence: Synthetic oligonucleotide
cacguuggacacggcaccc

SEQ ID NO: 2666334 - RNA, 19 nt, Artificial Sequence
  Description of Artificial Sequence: Synthetic oligonucleotide
accgauacacgugcugcgu

SEQ ID NO: 2666335 - RNA, 19 nt, Artificial Sequence
  Description of Artificial Sequence: Synthetic oligonucleotide
uggagaagauaggcagcac

SEQ ID NO: 2666336 - RNA, 19 nt, Artificial Sequence
  Description of Artificial Sequence: Synthetic oligonucleotide
gggucauggagaagauagg

SEQ ID NO: 2666337 - RNA, 19 nt, Artificial Sequence
  Description of Artificial Sequence: Synthetic oligonucleotide
caggccgaagaagaccaug

SEQ ID NO: 2666338 - RNA, 19 nt, Artificial Sequence
  Description of Artificial Sequence: Synthetic oligonucleotide
ugcagccucccaggaaaug

SEQ ID NO: 2666339 - RNA, 19 nt, Artificial Sequence
  Description of Artificial Sequence: Synthetic oligonucleotide
cccgggaucacauggccug

SEQ ID NO: 2666340 - RNA, 19 nt, Artificial Sequence
  Description of Artificial Sequence: Synthetic oligonucleotide
ggccgcucccucuuccugg

SEQ ID NO: 2666341 - RNA, 19 nt, Artificial Sequence
  Description of Artificial Sequence: Synthetic oligonucleotide
cgauacacgugcugcgugg

SEQ ID NO: 2666342 - RNA, 19 nt, Artificial Sequence
  Description of Artificial Sequence: Synthetic oligonucleotide
ggaaucgccugguggcagc

SEQ ID NO: 2666343 - RNA, 19 nt, Artificial Sequence
  Description of Artificial Sequence: Synthetic oligonucleotide
cagcacguuggacacggca

SEQ ID NO: 2666344 - RNA, 19 nt, Artificial Sequence
  Description of Artificial Sequence: Synthetic oligonucleotide
gcagacggccugcagcuug

SEQ ID NO: 2666345 - RNA, 19 nt, Artificial Sequence
  Description of Artificial Sequence: Synthetic oligonucleotide
guugcgugacacccacgca

SEQ ID NO: 2666346 - RNA, 19 nt, Artificial Sequence
  Description of Artificial Sequence: Synthetic oligonucleotide
gccucccaggaaaugacag

SEQ ID NO: 2666347 - RNA, 19 nt, Artificial Sequence
  Description of Artificial Sequence: Synthetic oligonucleotide
gaagaagaccaugcagccu

SEQ ID NO: 2666348 - RNA, 19 nt, Artificial Sequence
  Description of Artificial Sequence: Synthetic oligonucleotide
ccuggcucccggcaggccg

SEQ ID NO: 2666349 - RNA, 19 nt, Artificial Sequence
  Description of Artificial Sequence: Synthetic oligonucleotide
cccggaacuaggcuccugc

SEQ ID NO: 2666350 - RNA, 19 nt, Artificial Sequence
  Description of Artificial Sequence: Synthetic oligonucleotide
guggagcagcgguugcgug

SEQ ID NO: 2666351 - RNA, 19 nt, Artificial Sequence
  Description of Artificial Sequence: Synthetic oligonucleotide
uuaagcccacaggggcuca

SEQ ID NO: 2666352 - RNA, 19 nt, Artificial Sequence
  Description of Artificial Sequence: Synthetic oligonucleotide
accagggcgcccgggauca

SEQ ID NO: 2666353 - RNA, 19 nt, Artificial Sequence
  Description of Artificial Sequence: Synthetic oligonucleotide
agcggcgccgacgcagacg

SEQ ID NO: 2666354 - RNA, 19 nt, Artificial Sequence
  Description of Artificial Sequence: Synthetic oligonucleotide
cagcaccgcagauguguug

SEQ ID NO: 2666355 - RNA, 19 nt, Artificial Sequence
  Description of Artificial Sequence: Synthetic oligonucleotide
cagcuugugccagcagcgc

SEQ ID NO: 2666356 - RNA, 19 nt, Artificial Sequence
  Description of Artificial Sequence: Synthetic oligonucleotide
cccagggucauggagaaga

SEQ ID NO: 2666357 - RNA, 19 nt, Artificial Sequence
  Description of Artificial Sequence: Synthetic oligonucleotide
ggacccuggguguugcaca

SEQ ID NO: 2666358 - RNA, 19 nt, Artificial Sequence
  Description of Artificial Sequence: Synthetic oligonucleotide
cagcaggcgaacgcccugc

SEQ ID NO: 2666359 - RNA, 19 nt, Artificial Sequence
  Description of Artificial Sequence: Synthetic oligonucleotide
gaaucgccugguggcagca

SEQ ID NO: 2666360 - RNA, 19 nt, Artificial Sequence
  Description of Artificial Sequence: Synthetic oligonucleotide
aggcuccugcugcccgcgc

SEQ ID NO: 2666361 - RNA, 19 nt, Artificial Sequence
  Description of Artificial Sequence: Synthetic oligonucleotide
cccauggcccggaacuagg

SEQ ID NO: 2666362 - RNA, 19 nt, Artificial Sequence
  Description of Artificial Sequence: Synthetic oligonucleotide
gccaccgauacacgugcug

SEQ ID NO: 2666363 - RNA, 19 nt, Artificial Sequence
  Description of Artificial Sequence: Synthetic oligonucleotide
agcaggcgaacgcccugca

SEQ ID NO: 2666364 - RNA, 19 nt, Artificial Sequence
  Description of Artificial Sequence: Synthetic oligonucleotide
gggcucauaucaguggcca

SEQ ID NO: 2666365 - RNA, 19 nt, Artificial Sequence
  Description of Artificial Sequence: Synthetic oligonucleotide
cacccagggucauggagaa

SEQ ID NO: 2666366 - RNA, 19 nt, Artificial Sequence
  Description of Artificial Sequence: Synthetic oligonucleotide
cugccaggucgauggccag

SEQ ID NO: 2666367 - RNA, 19 nt, Artificial Sequence
  Description of Artificial Sequence: Synthetic oligonucleotide
cucccucuuccuggggcgg

SEQ ID NO: 2666368 - RNA, 19 nt, Artificial Sequence
  Description of Artificial Sequence: Synthetic oligonucleotide
ggagcagcgguugcgugac

SEQ ID NO: 2666369 - RNA, 19 nt, Artificial Sequence
  Description of Artificial Sequence: Synthetic oligonucleotide
auggccugccaggucgaug

SEQ ID NO: 2666370 - RNA, 19 nt, Artificial Sequence
  Description of Artificial Sequence: Synthetic oligonucleotide
gauaggcagcacuggugau

SEQ ID NO: 2666371 - RNA, 19 nt, Artificial Sequence
  Description of Artificial Sequence: Synthetic oligonucleotide
cugugccgccuccacccgc

SEQ ID NO: 2666372 - RNA, 19 nt, Artificial Sequence
  Description of Artificial Sequence: Synthetic oligonucleotide
cagccaugccgcagccaag

SEQ ID NO: 2666373 - RNA, 19 nt, Artificial Sequence
  Description of Artificial Sequence: Synthetic oligonucleotide
cgugcugcguggagcagcg

SEQ ID NO: 2666374 - RNA, 19 nt, Artificial Sequence
  Description of Artificial Sequence: Synthetic oligonucleotide
caacagaaagguggcagcu

SEQ ID NO: 2666375 - RNA, 19 nt, Artificial Sequence
  Description of Artificial Sequence: Synthetic oligonucleotide
gcacccagggucauggaga

SEQ ID NO: 2666376 - RNA, 19 nt, Artificial Sequence
  Description of Artificial Sequence: Synthetic oligonucleotide
acacccacgcagcgcucca

SEQ ID NO: 2666377 - RNA, 19 nt, Artificial Sequence
  Description of Artificial Sequence: Synthetic oligonucleotide
ccgcagauguguuggggac

SEQ ID NO: 2666378 - RNA, 19 nt, Artificial Sequence
  Description of Artificial Sequence: Synthetic oligonucleotide
ccauggcccggaacuaggc

SEQ ID NO: 2666379 - RNA, 19 nt, Artificial Sequence
  Description of Artificial Sequence: Synthetic oligonucleotide
gcugcucccuggcucccgg

SEQ ID NO: 2666380 - RNA, 19 nt, Artificial Sequence
  Description of Artificial Sequence: Synthetic oligonucleotide
cacaggggcucauaucagu

SEQ ID NO: 2666381 - RNA, 19 nt, Artificial Sequence
  Description of Artificial Sequence: Synthetic oligonucleotide
ugguggcagcaccgcagau

SEQ ID NO: 2666382 - RNA, 19 nt, Artificial Sequence
  Description of Artificial Sequence: Synthetic oligonucleotide
gcagcgguugcgugacacc

SEQ ID NO: 2666383 - RNA, 19 nt, Artificial Sequence
  Description of Artificial Sequence: Synthetic oligonucleotide
aggcucucguuaagcccac

SEQ ID NO: 2666384 - RNA, 19 nt, Artificial Sequence
  Description of Artificial Sequence: Synthetic oligonucleotide
agccucccaggaaaugaca

SEQ ID NO: 2666385 - RNA, 19 nt, Artificial Sequence
  Description of Artificial Sequence: Synthetic oligonucleotide
ggccgaagaagaccaugca

SEQ ID NO: 2666386 - RNA, 19 nt, Artificial Sequence
  Description of Artificial Sequence: Synthetic oligonucleotide
gcgugacacccacgcagcg

SEQ ID NO: 2666387 - RNA, 19 nt, Artificial Sequence
  Description of Artificial Sequence: Synthetic oligonucleotide
ccugccaggucgauggcca

SEQ ID NO: 2666388 - RNA, 19 nt, Artificial Sequence
  Description of Artificial Sequence: Synthetic oligonucleotide
ugacacccacgcagcgcuc

SEQ ID NO: 2666389 - RNA, 19 nt, Artificial Sequence
  Description of Artificial Sequence: Synthetic oligonucleotide
gccgcucccucuuccuggg

SEQ ID NO: 2666390 - RNA, 19 nt, Artificial Sequence
  Description of Artificial Sequence: Synthetic oligonucleotide
gcgguugcgugacacccac

SEQ ID NO: 2666391 - RNA, 19 nt, Artificial Sequence
  Description of Artificial Sequence: Synthetic oligonucleotide
acguuggacacggcaccca

SEQ ID NO: 2666392 - RNA, 19 nt, Artificial Sequence
  Description of Artificial Sequence: Synthetic oligonucleotide
uggcagcaccgcagaugug

SEQ ID NO: 2666393 - RNA, 19 nt, Artificial Sequence
  Description of Artificial Sequence: Synthetic oligonucleotide
cacccgcaccccacuggcc

SEQ ID NO: 2666394 - RNA, 19 nt, Artificial Sequence
  Description of Artificial Sequence: Synthetic oligonucleotide
gccaagagggccagugcug

SEQ ID NO: 2666395 - RNA, 19 nt, Artificial Sequence
  Description of Artificial Sequence: Synthetic oligonucleotide
ccacaggggcucauaucag

SEQ ID NO: 2666396 - RNA, 19 nt, Artificial Sequence
  Description of Artificial Sequence: Synthetic oligonucleotide
gcaccgcagauguguuggg

SEQ ID NO: 2666397 - RNA, 19 nt, Artificial Sequence
  Description of Artificial Sequence: Synthetic oligonucleotide
ggggcucauaucaguggcc

SEQ ID NO: 2666398 - RNA, 19 nt, Artificial Sequence
  Description of Artificial Sequence: Synthetic oligonucleotide
ggcagcaccgcagaugugu

SEQ ID NO: 2666399 - RNA, 19 nt, Artificial Sequence
  Description of Artificial Sequence: Synthetic oligonucleotide
acccuggguguugcacacg

SEQ ID NO: 2666400 - RNA, 19 nt, Artificial Sequence
  Description of Artificial Sequence: Synthetic oligonucleotide
cugcagcuugugccagcag

SEQ ID NO: 2666401 - RNA, 19 nt, Artificial Sequence
  Description of Artificial Sequence: Synthetic oligonucleotide
ccgauacacgugcugcgug

SEQ ID NO: 2666402 - RNA, 19 nt, Artificial Sequence
  Description of Artificial Sequence: Synthetic oligonucleotide
cccgccagcaggcgaacgc

SEQ ID NO: 2666403 - RNA, 19 nt, Artificial Sequence
  Description of Artificial Sequence: Synthetic oligonucleotide
cuccacccgcaccccacug

SEQ ID NO: 2666404 - RNA, 19 nt, Artificial Sequence
  Description of Artificial Sequence: Synthetic oligonucleotide
cucccggcaggccgcuccc

SEQ ID NO: 2666405 - RNA, 19 nt, Artificial Sequence
  Description of Artificial Sequence: Synthetic oligonucleotide
gcucccggcaggccgcucc

SEQ ID NO: 2666406 - RNA, 19 nt, Artificial Sequence
  Description of Artificial Sequence: Synthetic oligonucleotide
gcauacaggcgaagcacca

SEQ ID NO: 2666407 - RNA, 19 nt, Artificial Sequence
  Description of Artificial Sequence: Synthetic oligonucleotide
agcgguugcgugacaccca

SEQ ID NO: 2666408 - RNA, 19 nt, Artificial Sequence
  Description of Artificial Sequence: Synthetic oligonucleotide
gugccggaaucgccuggug

SEQ ID NO: 2666409 - RNA, 19 nt, Artificial Sequence
  Description of Artificial Sequence: Synthetic oligonucleotide
ccacccgcaccccacuggc

SEQ ID NO: 2666410 - RNA, 19 nt, Artificial Sequence
  Description of Artificial Sequence: Synthetic oligonucleotide
gcaggcgaacgcccugcag

SEQ ID NO: 2666411 - RNA, 19 nt, Artificial Sequence
  Description of Artificial Sequence: Synthetic oligonucleotide
gggcugcuccaccccaugc

SEQ ID NO: 2666412 - RNA, 19 nt, Artificial Sequence
  Description of Artificial Sequence: Synthetic oligonucleotide
gcguggagcagcgguugcg

SEQ ID NO: 2666413 - RNA, 19 nt, Artificial Sequence
  Description of Artificial Sequence: Synthetic oligonucleotide
cuagcgccagcacguugga

SEQ ID NO: 2666414 - RNA, 19 nt, Artificial Sequence
  Description of Artificial Sequence: Synthetic oligonucleotide
gcaggccgcucccucuucc

SEQ ID NO: 2666415 - RNA, 19 nt, Artificial Sequence
  Description of Artificial Sequence: Synthetic oligonucleotide
cugcucccuggcucccggc

SEQ ID NO: 2666416 - RNA, 19 nt, Artificial Sequence
  Description of Artificial Sequence: Synthetic oligonucleotide
caguggccaagagggccag

SEQ ID NO: 2666417 - RNA, 19 nt, Artificial Sequence
  Description of Artificial Sequence: Synthetic oligonucleotide
uaagcccacaggggcucau

SEQ ID NO: 2666418 - RNA, 19 nt, Artificial Sequence
  Description of Artificial Sequence: Synthetic oligonucleotide
cguuggacacggcacccag

SEQ ID NO: 2666419 - RNA, 19 nt, Artificial Sequence
  Description of Artificial Sequence: Synthetic oligonucleotide
aagcccacaggggcucaua

SEQ ID NO: 2666420 - RNA, 19 nt, Artificial Sequence
  Description of Artificial Sequence: Synthetic oligonucleotide
cggaacuaggcuccugcug

SEQ ID NO: 2666421 - RNA, 19 nt, Artificial Sequence
  Description of Artificial Sequence: Synthetic oligonucleotide
uccccauggcccggaacua

SEQ ID NO: 2666422 - RNA, 19 nt, Artificial Sequence
  Description of Artificial Sequence: Synthetic oligonucleotide
uagcgccagcacguuggac

SEQ ID NO: 2666423 - RNA, 19 nt, Artificial Sequence
  Description of Artificial Sequence: Synthetic oligonucleotide
aggccccgccagcaggcga

SEQ ID NO: 2666424 - RNA, 19 nt, Artificial Sequence
  Description of Artificial Sequence: Synthetic oligonucleotide
gggacccuggguguugcac

SEQ ID NO: 2666425 - RNA, 19 nt, Artificial Sequence
  Description of Artificial Sequence: Synthetic oligonucleotide
ggcgaagcaccagggcgcc

SEQ ID NO: 2666426 - RNA, 19 nt, Artificial Sequence
  Description of Artificial Sequence: Synthetic oligonucleotide
ccuggggcggcuccucggc

SEQ ID NO: 2666427 - RNA, 19 nt, Artificial Sequence
  Description of Artificial Sequence: Synthetic oligonucleotide
ccacuaggcucucguuaag

SEQ ID NO: 2666428 - RNA, 19 nt, Artificial Sequence
  Description of Artificial Sequence: Synthetic oligonucleotide
gcucaggaugcaggguccc

SEQ ID NO: 2666429 - RNA, 19 nt, Artificial Sequence
  Description of Artificial Sequence: Synthetic oligonucleotide
cccacgcagcgcuccacag

SEQ ID NO: 2666430 - RNA, 19 nt, Artificial Sequence
  Description of Artificial Sequence: Synthetic oligonucleotide
cgaacgcccugcagcauac

SEQ ID NO: 2666431 - RNA, 19 nt, Artificial Sequence
  Description of Artificial Sequence: Synthetic oligonucleotide
ggcuggcaacgaacaacag

SEQ ID NO: 2666432 - RNA, 19 nt, Artificial Sequence
  Description of Artificial Sequence: Synthetic oligonucleotide
cgcucccucuuccuggggc

SEQ ID NO: 2666433 - RNA, 19 nt, Artificial Sequence
  Description of Artificial Sequence: Synthetic oligonucleotide
gguccccauggcccggaac

SEQ ID NO: 2666434 - RNA, 19 nt, Artificial Sequence
  Description of Artificial Sequence: Synthetic oligonucleotide
cacgugcugcguggagcag

SEQ ID NO: 2666435 - RNA, 19 nt, Artificial Sequence
  Description of Artificial Sequence: Synthetic oligonucleotide
ggcucauaucaguggccaa

SEQ ID NO: 2666436 - RNA, 19 nt, Artificial Sequence
  Description of Artificial Sequence: Synthetic oligonucleotide
agggcgcccgggaucacau

SEQ ID NO: 2666437 - RNA, 19 nt, Artificial Sequence
  Description of Artificial Sequence: Synthetic oligonucleotide
gcgaacgcccugcagcaua

SEQ ID NO: 2666438 - RNA, 19 nt, Artificial Sequence
  Description of Artificial Sequence: Synthetic oligonucleotide
augcagccucccaggaaau

SEQ ID NO: 2666439 - RNA, 19 nt, Artificial Sequence
  Description of Artificial Sequence: Synthetic oligonucleotide
gaacgcccugcagcauaca

SEQ ID NO: 2666440 - RNA, 19 nt, Artificial Sequence
  Description of Artificial Sequence: Synthetic oligonucleotide
caggccccgccagcaggcg

SEQ ID NO: 2666441 - RNA, 19 nt, Artificial Sequence
  Description of Artificial Sequence: Synthetic oligonucleotide
gcccacaggggcucauauc

SEQ ID NO: 2666442 - RNA, 19 nt, Artificial Sequence
  Description of Artificial Sequence: Synthetic oligonucleotide
gcagcgcuagcgccagcac

SEQ ID NO: 2666443 - RNA, 19 nt, Artificial Sequence
  Description of Artificial Sequence: Synthetic oligonucleotide
ccugcagcauacaggcgaa

SEQ ID NO: 2666444 - RNA, 19 nt, Artificial Sequence
  Description of Artificial Sequence: Synthetic oligonucleotide
gagcggcgccgacgcagac

SEQ ID NO: 2666445 - RNA, 19 nt, Artificial Sequence
  Description of Artificial Sequence: Synthetic oligonucleotide
gcuugugccagcagcgcua

SEQ ID NO: 2666446 - RNA, 19 nt, Artificial Sequence
  Description of Artificial Sequence: Synthetic oligonucleotide
ccacagccaugccgcagcc

SEQ ID NO: 2666447 - RNA, 19 nt, Artificial Sequence
  Description of Artificial Sequence: Synthetic oligonucleotide
ccaccccaugcaugucugc

SEQ ID NO: 2666448 - RNA, 19 nt, Artificial Sequence
  Description of Artificial Sequence: Synthetic oligonucleotide
ccagcaggcgaacgcccug

SEQ ID NO: 2666449 - RNA, 19 nt, Artificial Sequence
  Description of Artificial Sequence: Synthetic oligonucleotide
agacggccugcagcuugug

SEQ ID NO: 2666450 - RNA, 19 nt, Artificial Sequence
  Description of Artificial Sequence: Synthetic oligonucleotide
gcgccagcugcucccuggc

SEQ ID NO: 2666451 - RNA, 19 nt, Artificial Sequence
  Description of Artificial Sequence: Synthetic oligonucleotide
ccgccagcaggcgaacgcc

SEQ ID NO: 2666452 - RNA, 19 nt, Artificial Sequence
  Description of Artificial Sequence: Synthetic oligonucleotide
cacggcacccagggucaug

SEQ ID NO: 2666453 - RNA, 19 nt, Artificial Sequence
  Description of Artificial Sequence: Synthetic oligonucleotide
aguggccaagagggccagu

SEQ ID NO: 2666454 - RNA, 19 nt, Artificial Sequence
  Description of Artificial Sequence: Synthetic oligonucleotide
cagggucauggagaagaua

SEQ ID NO: 2666455 - RNA, 19 nt, Artificial Sequence
  Description of Artificial Sequence: Synthetic oligonucleotide
cagacggccugcagcuugu

SEQ ID NO: 2666456 - RNA, 19 nt, Artificial Sequence
  Description of Artificial Sequence: Synthetic oligonucleotide
cacccacgcagcgcuccac

SEQ ID NO: 2666457 - RNA, 19 nt, Artificial Sequence
  Description of Artificial Sequence: Synthetic oligonucleotide
ccccauggcccggaacuag

SEQ ID NO: 2666458 - RNA, 19 nt, Artificial Sequence
  Description of Artificial Sequence: Synthetic oligonucleotide
caggaugcaggguccccau

SEQ ID NO: 2666459 - RNA, 19 nt, Artificial Sequence
  Description of Artificial Sequence: Synthetic oligonucleotide
gugcugcguggagcagcgg

SEQ ID NO: 2666460 - RNA, 19 nt, Artificial Sequence
  Description of Artificial Sequence: Synthetic oligonucleotide
ccaugccgcagccaagcaa

SEQ ID NO: 2666461 - RNA, 19 nt, Artificial Sequence
  Description of Artificial Sequence: Synthetic oligonucleotide
ccugcagcuugugccagca

SEQ ID NO: 2666462 - RNA, 19 nt, Artificial Sequence
  Description of Artificial Sequence: Synthetic oligonucleotide
gccugguggcagcaccgca

SEQ ID NO: 2666463 - RNA, 19 nt, Artificial Sequence
  Description of Artificial Sequence: Synthetic oligonucleotide
gccgacgcagacggccugc

SEQ ID NO: 2666464 - RNA, 19 nt, Artificial Sequence
  Description of Artificial Sequence: Synthetic oligonucleotide
cacagccaugccgcagcca

SEQ ID NO: 2666465 - RNA, 19 nt, Artificial Sequence
  Description of Artificial Sequence: Synthetic oligonucleotide
ggguguugcacacguuguu

SEQ ID NO: 2666466 - RNA, 19 nt, Artificial Sequence
  Description of Artificial Sequence: Synthetic oligonucleotide
gccaugccgcagccaagca

SEQ ID NO: 2666467 - RNA, 19 nt, Artificial Sequence
  Description of Artificial Sequence: Synthetic oligonucleotide
ccgggaucacauggccugc

SEQ ID NO: 2666468 - RNA, 19 nt, Artificial Sequence
  Description of Artificial Sequence: Synthetic oligonucleotide
gcgcccgggaucacauggc

SEQ ID NO: 2666469 - RNA, 19 nt, Artificial Sequence
  Description of Artificial Sequence: Synthetic oligonucleotide
gcacacguuguugucucgu

SEQ ID NO: 2666470 - RNA, 19 nt, Artificial Sequence
  Description of Artificial Sequence: Synthetic oligonucleotide
cguuaagcccacaggggcu

SEQ ID NO: 2666471 - RNA, 19 nt, Artificial Sequence
  Description of Artificial Sequence: Synthetic oligonucleotide
cagcagcgcuagcgccagc

SEQ ID NO: 2666472 - RNA, 19 nt, Artificial Sequence
  Description of Artificial Sequence: Synthetic oligonucleotide
cacuggccuccaggggcug

SEQ ID NO: 2666473 - RNA, 19 nt, Artificial Sequence
  Description of Artificial Sequence: Synthetic oligonucleotide
cagggcgcccgggaucaca

SEQ ID NO: 2666474 - RNA, 19 nt, Artificial Sequence
  Description of Artificial Sequence: Synthetic oligonucleotide
ucccggcaggccgcucccu

SEQ ID NO: 2666475 - RNA, 19 nt, Artificial Sequence
  Description of Artificial Sequence: Synthetic oligonucleotide
ccagcacguuggacacggc

SEQ ID NO: 2666476 - RNA, 19 nt, Artificial Sequence
  Description of Artificial Sequence: Synthetic oligonucleotide
gcagcgcuccacagccaug

SEQ ID NO: 2666477 - RNA, 19 nt, Artificial Sequence
  Description of Artificial Sequence: Synthetic oligonucleotide
cggaaucgccugguggcag

SEQ ID NO: 2666478 - RNA, 19 nt, Artificial Sequence
  Description of Artificial Sequence: Synthetic oligonucleotide
gccagcaggcuggcaacga

SEQ ID NO: 2666479 - RNA, 19 nt, Artificial Sequence
  Description of Artificial Sequence: Synthetic oligonucleotide
cugcccgcgccagcugcuc

SEQ ID NO: 2666480 - RNA, 19 nt, Artificial Sequence
  Description of Artificial Sequence: Synthetic oligonucleotide
ggcaggccgcucccucuuc

SEQ ID NO: 2666481 - RNA, 19 nt, Artificial Sequence
  Description of Artificial Sequence: Synthetic oligonucleotide
acgcagcgcuccacagcca

SEQ ID NO: 2666482 - RNA, 19 nt, Artificial Sequence
  Description of Artificial Sequence: Synthetic oligonucleotide
cccuggguguugcacacgu

SEQ ID NO: 2666483 - RNA, 19 nt, Artificial Sequence
  Description of Artificial Sequence: Synthetic oligonucleotide
acacggcacccagggucau

SEQ ID NO: 2666484 - RNA, 19 nt, Artificial Sequence
  Description of Artificial Sequence: Synthetic oligonucleotide
cgggaucacauggccugcc

SEQ ID NO: 2666485 - RNA, 19 nt, Artificial Sequence
  Description of Artificial Sequence: Synthetic oligonucleotide
cgguugcgugacacccacg

SEQ ID NO: 2666486 - RNA, 19 nt, Artificial Sequence
  Description of Artificial Sequence: Synthetic oligonucleotide
gggcgcccgggaucacaug

SEQ ID NO: 2666487 - RNA, 19 nt, Artificial Sequence
  Description of Artificial Sequence: Synthetic oligonucleotide
cgcuagcgccagcacguug

SEQ ID NO: 2666488 - RNA, 19 nt, Artificial Sequence
  Description of Artificial Sequence: Synthetic oligonucleotide
cccgcaccccacuggccuc

SEQ ID NO: 2666489 - RNA, 19 nt, Artificial Sequence
  Description of Artificial Sequence: Synthetic oligonucleotide
ggccccgccagcaggcgaa

SEQ ID NO: 2666490 - RNA, 19 nt, Artificial Sequence
  Description of Artificial Sequence: Synthetic oligonucleotide
ccgcaccccacuggccucc

SEQ ID NO: 2666491 - RNA, 19 nt, Artificial Sequence
  Description of Artificial Sequence: Synthetic oligonucleotide
cccggcaggccgcucccuc

SEQ ID NO: 2666492 - RNA, 19 nt, Artificial Sequence
  Description of Artificial Sequence: Synthetic oligonucleotide
ccggaaucgccugguggca

SEQ ID NO: 2666493 - RNA, 19 nt, Artificial Sequence
  Description of Artificial Sequence: Synthetic oligonucleotide
cuggggcggcuccucggcu

SEQ ID NO: 2666494 - RNA, 19 nt, Artificial Sequence
  Description of Artificial Sequence: Synthetic oligonucleotide
ggggcggcuccucggcucu

SEQ ID NO: 2666495 - RNA, 19 nt, Artificial Sequence
  Description of Artificial Sequence: Synthetic oligonucleotide
ccggaacuaggcuccugcu

SEQ ID NO: 2666496 - RNA, 19 nt, Artificial Sequence
  Description of Artificial Sequence: Synthetic oligonucleotide
gcccggaacuaggcuccug

SEQ ID NO: 2666497 - RNA, 19 nt, Artificial Sequence
  Description of Artificial Sequence: Synthetic oligonucleotide
gcgaagcaccagggcgccc

SEQ ID NO: 2666498 - RNA, 19 nt, Artificial Sequence
  Description of Artificial Sequence: Synthetic oligonucleotide
ccccgccagcaggcgaacg

SEQ ID NO: 2666499 - RNA, 19 nt, Artificial Sequence
  Description of Artificial Sequence: Synthetic oligonucleotide
ccagggucauggagaagau

SEQ ID NO: 2666500 - RNA, 19 nt, Artificial Sequence
  Description of Artificial Sequence: Synthetic oligonucleotide
gcugcguggagcagcgguu

SEQ ID NO: 2666501 - RNA, 19 nt, Artificial Sequence
  Description of Artificial Sequence: Synthetic oligonucleotide
ggcucucguuaagcccaca

SEQ ID NO: 2666502 - RNA, 19 nt, Artificial Sequence
  Description of Artificial Sequence: Synthetic oligonucleotide
gcccgggaucacauggccu

SEQ ID NO: 2666503 - RNA, 19 nt, Artificial Sequence
  Description of Artificial Sequence: Synthetic oligonucleotide
gcaccagggcgcccgggau

SEQ ID NO: 2666504 - RNA, 19 nt, Artificial Sequence
  Description of Artificial Sequence: Synthetic oligonucleotide
cgccagcacguuggacacg

SEQ ID NO: 2666505 - RNA, 19 nt, Artificial Sequence
  Description of Artificial Sequence: Synthetic oligonucleotide
cagauguguuggggacccu

SEQ ID NO: 2666506 - RNA, 19 nt, Artificial Sequence
  Description of Artificial Sequence: Synthetic oligonucleotide
cguuguugucucguccacu

SEQ ID NO: 2666507 - RNA, 19 nt, Artificial Sequence
  Description of Artificial Sequence: Synthetic oligonucleotide
cgccgacgcagacggccug

SEQ ID NO: 2666508 - RNA, 19 nt, Artificial Sequence
  Description of Artificial Sequence: Synthetic oligonucleotide
cauggccugccaggucgau

SEQ ID NO: 2666509 - RNA, 19 nt, Artificial Sequence
  Description of Artificial Sequence: Synthetic oligonucleotide
ggccaccgauacacgugcu

SEQ ID NO: 2666510 - RNA, 19 nt, Artificial Sequence
  Description of Artificial Sequence: Synthetic oligonucleotide
ccggcaggccgcucccucu

SEQ ID NO: 2666511 - RNA, 19 nt, Artificial Sequence
  Description of Artificial Sequence: Synthetic oligonucleotide
gcgccgacgcagacggccu

SEQ ID NO: 2666512 - RNA, 19 nt, Artificial Sequence
  Description of Artificial Sequence: Synthetic oligonucleotide
cgcagcgcuccacagccau

SEQ ID NO: 2666513 - RNA, 19 nt, Artificial Sequence
  Description of Artificial Sequence: Synthetic oligonucleotide
ccuccacccgcaccccacu

SEQ ID NO: 2666514 - RNA, 19 nt, Artificial Sequence
  Description of Artificial Sequence: Synthetic oligonucleotide
ggcggcuccucggcucugu

SEQ ID NO: 2666515 - RNA, 19 nt, Artificial Sequence
  Description of Artificial Sequence: Synthetic oligonucleotide
gcugcccgcgccagcugcu

SEQ ID NO: 2666516 - RNA, 19 nt, Artificial Sequence
  Description of Artificial Sequence: Synthetic oligonucleotide
gccccgccagcaggcgaac

SEQ ID NO: 2666517 - RNA, 19 nt, Artificial Sequence
  Description of Artificial Sequence: Synthetic oligonucleotide
ggcgaacgcccugcagcau

SEQ ID NO: 2666518 - RNA, 19 nt, Artificial Sequence
  Description of Artificial Sequence: Synthetic oligonucleotide
ccuggguguugcacacguu

SEQ ID NO: 2666519 - RNA, 19 nt, Artificial Sequence
  Description of Artificial Sequence: Synthetic oligonucleotide
ggcccggaacuaggcuccu

SEQ ID NO: 2666520 - RNA, 19 nt, Artificial Sequence
  Description of Artificial Sequence: Synthetic oligonucleotide
ggcucccggcaggccgcuc

SEQ ID NO: 2666521 - RNA, 19 nt, Artificial Sequence
  Description of Artificial Sequence: Synthetic oligonucleotide
ccagggcgcccgggaucac

SEQ ID NO: 2666522 - RNA, 19 nt, Artificial Sequence
  Description of Artificial Sequence: Synthetic oligonucleotide
cggcacccagggucaugga

SEQ ID NO: 2666523 - RNA, 19 nt, Artificial Sequence
  Description of Artificial Sequence: Synthetic oligonucleotide
cggcgccgacgcagacggc

SEQ ID NO: 2666524 - RNA, 19 nt, Artificial Sequence
  Description of Artificial Sequence: Synthetic oligonucleotide
ccucggcucugugccgccu

SEQ ID NO: 2666525 - RNA, 19 nt, Artificial Sequence
  Description of Artificial Sequence: Synthetic oligonucleotide
gcgcuagcgccagcacguu

SEQ ID NO: 2666526 - RNA, 19 nt, Artificial Sequence
  Description of Artificial Sequence: Synthetic oligonucleotide
cccgcgccagcugcucccu

SEQ ID NO: 2666527 - RNA, 19 nt, Artificial Sequence
  Description of Artificial Sequence: Synthetic oligonucleotide
cggcaggccgcucccucuu

SEQ ID NO: 2666528 - RNA, 19 nt, Artificial Sequence
  Description of Artificial Sequence: Synthetic oligonucleotide
cgcagacggccugcagcuu

SEQ ID NO: 2666529 - RNA, 19 nt, Artificial Sequence
  Description of Artificial Sequence: Synthetic oligonucleotide
aauugcgcaaaauagagag

SEQ ID NO: 2666530 - RNA, 19 nt, Artificial Sequence
  Description of Artificial Sequence: Synthetic oligonucleotide
auacguucagcuuaaaacc

SEQ ID NO: 2666531 - RNA, 19 nt, Artificial Sequence
  Description of Artificial Sequence: Synthetic oligonucleotide
  modified_base (10)..(10): a, c, u, g, unknown or other
uuggagaucnguuaaaucu

SEQ ID NO: 2666532 - RNA, 19 nt, Artificial Sequence
  Description of Artificial Sequence: Synthetic oligonucleotide
uuucaauugcgcaaaauag

SEQ ID NO: 2666533 - RNA, 19 nt, Artificial Sequence
  Description of Artificial Sequence: Synthetic oligonucleotide
ucaauuacauauaugagaa

SEQ ID NO: 2666534 - RNA, 19 nt, Artificial Sequence
  Description of Artificial Sequence: Synthetic oligonucleotide
  modified_base (4)..(4): a, c, u, g, unknown or other
aucnguuaaaucuacagcu

SEQ ID NO: 2666535 - RNA, 19 nt, Artificial Sequence
  Description of Artificial Sequence: Synthetic oligonucleotide
ucaauugcgcaaaauagag

SEQ ID NO: 2666536 - RNA, 19 nt, Artificial Sequence
  Description of Artificial Sequence: Synthetic oligonucleotide
uacauauaugagaauaucc

SEQ ID NO: 2666537 - RNA, 19 nt, Artificial Sequence
  Description of Artificial Sequence: Synthetic oligonucleotide
ugcuuguuagcaaagauga

SEQ ID NO: 2666538 - RNA, 19 nt, Artificial Sequence
  Description of Artificial Sequence: Synthetic oligonucleotide
aaagccuucagucaggaaa

SEQ ID NO: 2666539 - RNA, 19 nt, Artificial Sequence
  Description of Artificial Sequence: Synthetic oligonucleotide
cauacguucagcuuaaaac

SEQ ID NO: 2666540 - RNA, 19 nt, Artificial Sequence
  Description of Artificial Sequence: Synthetic oligonucleotide
aaaucuacagcuggaaggg

SEQ ID NO: 2666541 - RNA, 19 nt, Artificial Sequence
  Description of Artificial Sequence: Synthetic oligonucleotide
ucagcuuaaaaccuuguga

SEQ ID NO: 2666542 - RNA, 19 nt, Artificial Sequence
  Description of Artificial Sequence: Synthetic oligonucleotide
aaaaccuugugauuguaca

SEQ ID NO: 2666543 - RNA, 19 nt, Artificial Sequence
  Description of Artificial Sequence: Synthetic oligonucleotide
auggugugcagguugagcc

SEQ ID NO: 2666544 - RNA, 19 nt, Artificial Sequence
  Description of Artificial Sequence: Synthetic oligonucleotide
aauuacauauaugagaaua

SEQ ID NO: 2666545 - RNA, 19 nt, Artificial Sequence
  Description of Artificial Sequence: Synthetic oligonucleotide
aauagagagcaagccaucc

SEQ ID NO: 2666546 - RNA, 19 nt, Artificial Sequence
  Description of Artificial Sequence: Synthetic oligonucleotide
aaaccuugugauuguacac

SEQ ID NO: 2666547 - RNA, 19 nt, Artificial Sequence
  Description of Artificial Sequence: Synthetic oligonucleotide
uuguuagcaaagaugagca

SEQ ID NO: 2666548 - RNA, 19 nt, Artificial Sequence
  Description of Artificial Sequence: Synthetic oligonucleotide
acauauaugagaauauccg

SEQ ID NO: 2666549 - RNA, 19 nt, Artificial Sequence
  Description of Artificial Sequence: Synthetic oligonucleotide
ugauuguacacuuuugaug

SEQ ID NO: 2666550 - RNA, 19 nt, Artificial Sequence
  Description of Artificial Sequence: Synthetic oligonucleotide
aauaacuccuccaguaugg

SEQ ID NO: 2666551 - RNA, 19 nt, Artificial Sequence
  Description of Artificial Sequence: Synthetic oligonucleotide
  modified_base (6)..(6): a, c, u, g, unknown or other
agaucnguuaaaucuacag

SEQ ID NO: 2666552 - RNA, 19 nt, Artificial Sequence
  Description of Artificial Sequence: Synthetic oligonucleotide
  modified_base (5)..(5): a, c, u, g, unknown or other
gaucnguuaaaucuacagc

SEQ ID NO: 2666553 - RNA, 19 nt, Artificial Sequence
  Description of Artificial Sequence: Synthetic oligonucleotide
uuaaaucuacagcuggaag

SEQ ID NO: 2666554 - RNA, 19 nt, Artificial Sequence
  Description of Artificial Sequence: Synthetic oligonucleotide
cugucaauuacauauauga

SEQ ID NO: 2666555 - RNA, 19 nt, Artificial Sequence
  Description of Artificial Sequence: Synthetic oligonucleotide
accaaugucccauacguuc

SEQ ID NO: 2666556 - RNA, 19 nt, Artificial Sequence
  Description of Artificial Sequence: Synthetic oligonucleotide
ugugauuguacacuuuuga

SEQ ID NO: 2666557 - RNA, 19 nt, Artificial Sequence
  Description of Artificial Sequence: Synthetic oligonucleotide
ugucaauuacauauaugag

SEQ ID NO: 2666558 - RNA, 19 nt, Artificial Sequence
  Description of Artificial Sequence: Synthetic oligonucleotide
uucaauugcgcaaaauaga

SEQ ID NO: 2666559 - RNA, 19 nt, Artificial Sequence
  Description of Artificial Sequence: Synthetic oligonucleotide
uaaaacccuguguaggugg

SEQ ID NO: 2666560 - RNA, 19 nt, Artificial Sequence
  Description of Artificial Sequence: Synthetic oligonucleotide
uauaugagaauauccgugu

SEQ ID NO: 2666561 - RNA, 19 nt, Artificial Sequence
  Description of Artificial Sequence: Synthetic oligonucleotide
gauguuaaaacccugugua

SEQ ID NO: 2666562 - RNA, 19 nt, Artificial Sequence
  Description of Artificial Sequence: Synthetic oligonucleotide
acaacucagcuuuucuucc

SEQ ID NO: 2666563 - RNA, 19 nt, Artificial Sequence
  Description of Artificial Sequence: Synthetic oligonucleotide
ucagucaggaaacagcaac

SEQ ID NO: 2666564 - RNA, 19 nt, Artificial Sequence
  Description of Artificial Sequence: Synthetic oligonucleotide
gauuguacacuuuugaugu

SEQ ID NO: 2666565 - RNA, 19 nt, Artificial Sequence
  Description of Artificial Sequence: Synthetic oligonucleotide
uuugauguuaaaacccugu

SEQ ID NO: 2666566 - RNA, 19 nt, Artificial Sequence
  Description of Artificial Sequence: Synthetic oligonucleotide
aaaauagagagcaagccau

SEQ ID NO: 2666567 - RNA, 19 nt, Artificial Sequence
  Description of Artificial Sequence: Synthetic oligonucleotide
cacuuuugauguuaaaacc

SEQ ID NO: 2666568 - RNA, 19 nt, Artificial Sequence
  Description of Artificial Sequence: Synthetic oligonucleotide
  modified_base (3)..(3): a, c, u, g, unknown or other
ucnguuaaaucuacagcug

SEQ ID NO: 2666569 - RNA, 19 nt, Artificial Sequence
  Description of Artificial Sequence: Synthetic oligonucleotide
uucuucuucgcauugacau

SEQ ID NO: 2666570 - RNA, 19 nt, Artificial Sequence
  Description of Artificial Sequence: Synthetic oligonucleotide
aaaacgauaccgaaccuug

SEQ ID NO: 2666571 - RNA, 19 nt, Artificial Sequence
  Description of Artificial Sequence: Synthetic oligonucleotide
uguguagguggucuggugc

SEQ ID NO: 2666572 - RNA, 19 nt, Artificial Sequence
  Description of Artificial Sequence: Synthetic oligonucleotide
  modified_base (2)..(2): a, c, u, g, unknown or other
cnguuaaaucuacagcugg

SEQ ID NO: 2666573 - RNA, 19 nt, Artificial Sequence
  Description of Artificial Sequence: Synthetic oligonucleotide
uugauguuaaaacccugug

SEQ ID NO: 2666574 - RNA, 19 nt, Artificial Sequence
  Description of Artificial Sequence: Synthetic oligonucleotide
ucaaaauaacuccuccagu

SEQ ID NO: 2666575 - RNA, 19 nt, Artificial Sequence
  Description of Artificial Sequence: Synthetic oligonucleotide
uugcgcaaaauagagagca

SEQ ID NO: 2666576 - RNA, 19 nt, Artificial Sequence
  Description of Artificial Sequence: Synthetic oligonucleotide
aguuccguuaguuccugac

SEQ ID NO: 2666577 - RNA, 19 nt, Artificial Sequence
  Description of Artificial Sequence: Synthetic oligonucleotide
uucagcuuaaaaccuugug

SEQ ID NO: 2666578 - RNA, 19 nt, Artificial Sequence
  Description of Artificial Sequence: Synthetic oligonucleotide
auauaugagaauauccgug

SEQ ID NO: 2666579 - RNA, 19 nt, Artificial Sequence
  Description of Artificial Sequence: Synthetic oligonucleotide
  modified_base (14)..(14): a, c, u, g, unknown or other
aaccuuggagaucnguuaa

SEQ ID NO: 2666580 - RNA, 19 nt, Artificial Sequence
  Description of Artificial Sequence: Synthetic oligonucleotide
gacuuuauuucuucuucgc

SEQ ID NO: 2666581 - RNA, 19 nt, Artificial Sequence
  Description of Artificial Sequence: Synthetic oligonucleotide
aagccuucagucaggaaac

SEQ ID NO: 2666582 - RNA, 19 nt, Artificial Sequence
  Description of Artificial Sequence: Synthetic oligonucleotide
ucuggugcacuuucaauug

SEQ ID NO: 2666583 - RNA, 19 nt, Artificial Sequence
  Description of Artificial Sequence: Synthetic oligonucleotide
aacgauaccgaaccuugga

SEQ ID NO: 2666584 - RNA, 19 nt, Artificial Sequence
  Description of Artificial Sequence: Synthetic oligonucleotide
uggugcacuuucaauugcg

SEQ ID NO: 2666585 - RNA, 19 nt, Artificial Sequence
  Description of Artificial Sequence: Synthetic oligonucleotide
ugagagcugagcaggacug

SEQ ID NO: 2666586 - RNA, 19 nt, Artificial Sequence
  Description of Artificial Sequence: Synthetic oligonucleotide
uuccguuaguuccugaccu

SEQ ID NO: 2666587 - RNA, 19 nt, Artificial Sequence
  Description of Artificial Sequence: Synthetic oligonucleotide
agucaggaaacagcaaccc

SEQ ID NO: 2666588 - RNA, 19 nt, Artificial Sequence
  Description of Artificial Sequence: Synthetic oligonucleotide
ugcacuuucaauugcgcaa

SEQ ID NO: 2666589 - RNA, 19 nt, Artificial Sequence
  Description of Artificial Sequence: Synthetic oligonucleotide
uuugggcucccacagcucc

SEQ ID NO: 2666590 - RNA, 19 nt, Artificial Sequence
  Description of Artificial Sequence: Synthetic oligonucleotide
ucggcaaucucagaggcag

SEQ ID NO: 2666591 - RNA, 19 nt, Artificial Sequence
  Description of Artificial Sequence: Synthetic oligonucleotide
uaaaaccuugugauuguac

SEQ ID NO: 2666592 - RNA, 19 nt, Artificial Sequence
  Description of Artificial Sequence: Synthetic oligonucleotide
uauggccugauuuuccucu

SEQ ID NO: 2666593 - RNA, 19 nt, Artificial Sequence
  Description of Artificial Sequence: Synthetic oligonucleotide
auguuaaaacccuguguag

SEQ ID NO: 2666594 - RNA, 19 nt, Artificial Sequence
  Description of Artificial Sequence: Synthetic oligonucleotide
uccaccaaugucccauacg

SEQ ID NO: 2666595 - RNA, 19 nt, Artificial Sequence
  Description of Artificial Sequence: Synthetic oligonucleotide
guucaugccauccuggaca

SEQ ID NO: 2666596 - RNA, 19 nt, Artificial Sequence
  Description of Artificial Sequence: Synthetic oligonucleotide
uugcagacccaguucaugc

SEQ ID NO: 2666597 - RNA, 19 nt, Artificial Sequence
  Description of Artificial Sequence: Synthetic oligonucleotide
caaaauagagagcaagcca

SEQ ID NO: 2666598 - RNA, 19 nt, Artificial Sequence
  Description of Artificial Sequence: Synthetic oligonucleotide
cagcaguuccguuaguucc

SEQ ID NO: 2666599 - RNA, 19 nt, Artificial Sequence
  Description of Artificial Sequence: Synthetic oligonucleotide
aaauagagagcaagccauc

SEQ ID NO: 2666600 - RNA, 19 nt, Artificial Sequence
  Description of Artificial Sequence: Synthetic oligonucleotide
uaugagaauauccguguuu

SEQ ID NO: 2666601 - RNA, 19 nt, Artificial Sequence
  Description of Artificial Sequence: Synthetic oligonucleotide
aguucaugccauccuggac

SEQ ID NO: 2666602 - RNA, 19 nt, Artificial Sequence
  Description of Artificial Sequence: Synthetic oligonucleotide
cugggcacagaugagaaag

SEQ ID NO: 2666603 - RNA, 19 nt, Artificial Sequence
  Description of Artificial Sequence: Synthetic oligonucleotide
aaccuugugauuguacacu

SEQ ID NO: 2666604 - RNA, 19 nt, Artificial Sequence
  Description of Artificial Sequence: Synthetic oligonucleotide
gaaacagcaacccagcgau

SEQ ID NO: 2666605 - RNA, 19 nt, Artificial Sequence
  Description of Artificial Sequence: Synthetic oligonucleotide
  modified_base (9)..(9): a, c, u, g, unknown or other
uggagaucnguuaaaucua

SEQ ID NO: 2666606 - RNA, 19 nt, Artificial Sequence
  Description of Artificial Sequence: Synthetic oligonucleotide
ugauuuuccucuguccacc

SEQ ID NO: 2666607 - RNA, 19 nt, Artificial Sequence
  Description of Artificial Sequence: Synthetic oligonucleotide
uuuccucuguccaccaaug

SEQ ID NO: 2666608 - RNA, 19 nt, Artificial Sequence
  Description of Artificial Sequence: Synthetic oligonucleotide
ugagcacgggcacacaacu

SEQ ID NO: 2666609 - RNA, 19 nt, Artificial Sequence
  Description of Artificial Sequence: Synthetic oligonucleotide
uugugauuguacacuuuug

SEQ ID NO: 2666610 - RNA, 19 nt, Artificial Sequence
  Description of Artificial Sequence: Synthetic oligonucleotide
uuucuguccgcacugucaa

SEQ ID NO: 2666611 - RNA, 19 nt, Artificial Sequence
  Description of Artificial Sequence: Synthetic oligonucleotide
caaaauaacuccuccagua

SEQ ID NO: 2666612 - RNA, 19 nt, Artificial Sequence
  Description of Artificial Sequence: Synthetic oligonucleotide
uucagggccgguuugggcu

SEQ ID NO: 2666613 - RNA, 19 nt, Artificial Sequence
  Description of Artificial Sequence: Synthetic oligonucleotide
agaauauccguguuuucaa

SEQ ID NO: 2666614 - RNA, 19 nt, Artificial Sequence
  Description of Artificial Sequence: Synthetic oligonucleotide
uguacacuuuugauguuaa

SEQ ID NO: 2666615 - RNA, 19 nt, Artificial Sequence
  Description of Artificial Sequence: Synthetic oligonucleotide
cuuucaauugcgcaaaaua

SEQ ID NO: 2666616 - RNA, 19 nt, Artificial Sequence
  Description of Artificial Sequence: Synthetic oligonucleotide
acgauaccgaaccuuggag

SEQ ID NO: 2666617 - RNA, 19 nt, Artificial Sequence
  Description of Artificial Sequence: Synthetic oligonucleotide
uuuuccucuguccaccaau

SEQ ID NO: 2666618 - RNA, 19 nt, Artificial Sequence
  Description of Artificial Sequence: Synthetic oligonucleotide
  modified_base (19)..(19): a, c, u, g, unknown or other
uaccgaaccuuggagaucn

SEQ ID NO: 2666619 - RNA, 19 nt, Artificial Sequence
  Description of Artificial Sequence: Synthetic oligonucleotide
cagucaggaaacagcaacc

SEQ ID NO: 2666620 - RNA, 19 nt, Artificial Sequence
  Description of Artificial Sequence: Synthetic oligonucleotide
caugccauccuggacaccc

SEQ ID NO: 2666621 - RNA, 19 nt, Artificial Sequence
  Description of Artificial Sequence: Synthetic oligonucleotide
uccguguuuucaaaauaac

SEQ ID NO: 2666622 - RNA, 19 nt, Artificial Sequence
  Description of Artificial Sequence: Synthetic oligonucleotide
cuucggcaaucucagaggc

SEQ ID NO: 2666623 - RNA, 19 nt, Artificial Sequence
  Description of Artificial Sequence: Synthetic oligonucleotide
uuucuucuucgcauugaca

SEQ ID NO: 2666624 - RNA, 19 nt, Artificial Sequence
  Description of Artificial Sequence: Synthetic oligonucleotide
cguguuuucaaaauaacuc

SEQ ID NO: 2666625 - RNA, 19 nt, Artificial Sequence
  Description of Artificial Sequence: Synthetic oligonucleotide
auuacauauaugagaauau

SEQ ID NO: 2666626 - RNA, 19 nt, Artificial Sequence
  Description of Artificial Sequence: Synthetic oligonucleotide
  modified_base (11)..(11): a, c, u, g, unknown or other
cuuggagaucnguuaaauc

SEQ ID NO: 2666627 - RNA, 19 nt, Artificial Sequence
  Description of Artificial Sequence: Synthetic oligonucleotide
agcacgggcacacaacuca

SEQ ID NO: 2666628 - RNA, 19 nt, Artificial Sequence
  Description of Artificial Sequence: Synthetic oligonucleotide
uauccguguuuucaaaaua

SEQ ID NO: 2666629 - RNA, 19 nt, Artificial Sequence
  Description of Artificial Sequence: Synthetic oligonucleotide
agugguccagacuuuauuu

SEQ ID NO: 2666630 - RNA, 19 nt, Artificial Sequence
  Description of Artificial Sequence: Synthetic oligonucleotide
aguauggccugauuuuccu

SEQ ID NO: 2666631 - RNA, 19 nt, Artificial Sequence
  Description of Artificial Sequence: Synthetic oligonucleotide
auaacuccuccaguauggc

SEQ ID NO: 2666632 - RNA, 19 nt, Artificial Sequence
  Description of Artificial Sequence: Synthetic oligonucleotide
auugcgcaaaauagagagc

SEQ ID NO: 2666633 - RNA, 19 nt, Artificial Sequence
  Description of Artificial Sequence: Synthetic oligonucleotide
uuaaaacccuguguaggug

SEQ ID NO: 2666634 - RNA, 19 nt, Artificial Sequence
  Description of Artificial Sequence: Synthetic oligonucleotide
ucucgucacacagcggugg

SEQ ID NO: 2666635 - RNA, 19 nt, Artificial Sequence
  Description of Artificial Sequence: Synthetic oligonucleotide
uccucuguccaccaauguc

SEQ ID NO: 2666636 - RNA, 19 nt, Artificial Sequence
  Description of Artificial Sequence: Synthetic oligonucleotide
aaacgauaccgaaccuugg

SEQ ID NO: 2666637 - RNA, 19 nt, Artificial Sequence
  Description of Artificial Sequence: Synthetic oligonucleotide
aaucuacagcuggaagggg

SEQ ID NO: 2666638 - RNA, 19 nt, Artificial Sequence
  Description of Artificial Sequence: Synthetic oligonucleotide
guuccguuaguuccugacc

SEQ ID NO: 2666639 - RNA, 19 nt, Artificial Sequence
  Description of Artificial Sequence: Synthetic oligonucleotide
gcaaaauagagagcaagcc

SEQ ID NO: 2666640 - RNA, 19 nt, Artificial Sequence
  Description of Artificial Sequence: Synthetic oligonucleotide
uuugcagacccaguucaug

SEQ ID NO: 2666641 - RNA, 19 nt, Artificial Sequence
  Description of Artificial Sequence: Synthetic oligonucleotide
cugauuuuccucuguccac

SEQ ID NO: 2666642 - RNA, 19 nt, Artificial Sequence
  Description of Artificial Sequence: Synthetic oligonucleotide
uuuucagggccgguuuggg

SEQ ID NO: 2666643 - RNA, 19 nt, Artificial Sequence
  Description of Artificial Sequence: Synthetic oligonucleotide
aaagaugagcacgggcaca

SEQ ID NO: 2666644 - RNA, 19 nt, Artificial Sequence
  Description of Artificial Sequence: Synthetic oligonucleotide
uguuagcaaagaugagcac

SEQ ID NO: 2666645 - RNA, 19 nt, Artificial Sequence
  Description of Artificial Sequence: Synthetic oligonucleotide
cauauaugagaauauccgu

SEQ ID NO: 2666646 - RNA, 19 nt, Artificial Sequence
  Description of Artificial Sequence: Synthetic oligonucleotide
augucccauacguucagcu

SEQ ID NO: 2666647 - RNA, 19 nt, Artificial Sequence
  Description of Artificial Sequence: Synthetic oligonucleotide
gauggugugcagguugagc

SEQ ID NO: 2666648 - RNA, 19 nt, Artificial Sequence
  Description of Artificial Sequence: Synthetic oligonucleotide
caguauggccugauuuucc

SEQ ID NO: 2666649 - RNA, 19 nt, Artificial Sequence
  Description of Artificial Sequence: Synthetic oligonucleotide
guuuucaaaauaacuccuc

SEQ ID NO: 2666650 - RNA, 19 nt, Artificial Sequence
  Description of Artificial Sequence: Synthetic oligonucleotide
uucugaagcuguugucccc

SEQ ID NO: 2666651 - RNA, 19 nt, Artificial Sequence
  Description of Artificial Sequence: Synthetic oligonucleotide
gagaaagccuucagucagg

SEQ ID NO: 2666652 - RNA, 19 nt, Artificial Sequence
  Description of Artificial Sequence: Synthetic oligonucleotide
aggacuggaucugccagac

SEQ ID NO: 2666653 - RNA, 19 nt, Artificial Sequence
  Description of Artificial Sequence: Synthetic oligonucleotide
uccgcacugucaauuacau

SEQ ID NO: 2666654 - RNA, 19 nt, Artificial Sequence
  Description of Artificial Sequence: Synthetic oligonucleotide
aaucucagaggcaggggcu

SEQ ID NO: 2666655 - RNA, 19 nt, Artificial Sequence
  Description of Artificial Sequence: Synthetic oligonucleotide
acacccucgccugugagag

SEQ ID NO: 2666656 - RNA, 19 nt, Artificial Sequence
  Description of Artificial Sequence: Synthetic oligonucleotide
cuuuauuucuucuucgcau

SEQ ID NO: 2666657 - RNA, 19 nt, Artificial Sequence
  Description of Artificial Sequence: Synthetic oligonucleotide
  modified_base (15)..(15): a, c, u, g, unknown or other
gaaccuuggagaucnguua

SEQ ID NO: 2666658 - RNA, 19 nt, Artificial Sequence
  Description of Artificial Sequence: Synthetic oligonucleotide
acgggcacacaacucagcu

SEQ ID NO: 2666659 - RNA, 19 nt, Artificial Sequence
  Description of Artificial Sequence: Synthetic oligonucleotide
acagaugagaaagccuuca

SEQ ID NO: 2666660 - RNA, 19 nt, Artificial Sequence
  Description of Artificial Sequence: Synthetic oligonucleotide
gauaccgaaccuuggagau

SEQ ID NO: 2666661 - RNA, 19 nt, Artificial Sequence
  Description of Artificial Sequence: Synthetic oligonucleotide
acugucaauuacauauaug

SEQ ID NO: 2666662 - RNA, 19 nt, Artificial Sequence
  Description of Artificial Sequence: Synthetic oligonucleotide
ucugaagcuguuguccccu

SEQ ID NO: 2666663 - RNA, 19 nt, Artificial Sequence
  Description of Artificial Sequence: Synthetic oligonucleotide
gaauauccguguuuucaaa

SEQ ID NO: 2666664 - RNA, 19 nt, Artificial Sequence
  Description of Artificial Sequence: Synthetic oligonucleotide
cagacucggucccggaugg

SEQ ID NO: 2666665 - RNA, 19 nt, Artificial Sequence
  Description of Artificial Sequence: Synthetic oligonucleotide
uaguuccugaccugucucu

SEQ ID NO: 2666666 - RNA, 19 nt, Artificial Sequence
  Description of Artificial Sequence: Synthetic oligonucleotide
acacaacucagcuuuucuu

SEQ ID NO: 2666667 - RNA, 19 nt, Artificial Sequence
  Description of Artificial Sequence: Synthetic oligonucleotide
guuaaaucuacagcuggaa

SEQ ID NO: 2666668 - RNA, 19 nt, Artificial Sequence
  Description of Artificial Sequence: Synthetic oligonucleotide
uccuccagcaguuccguua

SEQ ID NO: 2666669 - RNA, 19 nt, Artificial Sequence
  Description of Artificial Sequence: Synthetic oligonucleotide
auaugagaauauccguguu

SEQ ID NO: 2666670 - RNA, 19 nt, Artificial Sequence
  Description of Artificial Sequence: Synthetic oligonucleotide
gaugagcacgggcacacaa

SEQ ID NO: 2666671 - RNA, 19 nt, Artificial Sequence
  Description of Artificial Sequence: Synthetic oligonucleotide
uucagucaggaaacagcaa

SEQ ID NO: 2666672 - RNA, 19 nt, Artificial Sequence
  Description of Artificial Sequence: Synthetic oligonucleotide
uguccgcacugucaauuac

SEQ ID NO: 2666673 - RNA, 19 nt, Artificial Sequence
  Description of Artificial Sequence: Synthetic oligonucleotide
uucggcaaucucagaggca

SEQ ID NO: 2666674 - RNA, 19 nt, Artificial Sequence
  Description of Artificial Sequence: Synthetic oligonucleotide
uccguuaguuccugaccug

SEQ ID NO: 2666675 - RNA, 19 nt, Artificial Sequence
  Description of Artificial Sequence: Synthetic oligonucleotide
uuuugcagacccaguucau

SEQ ID NO: 2666676 - RNA, 19 nt, Artificial Sequence
  Description of Artificial Sequence: Synthetic oligonucleotide
guccccucucgucacacag

SEQ ID NO: 2666677 - RNA, 19 nt, Artificial Sequence
  Description of Artificial Sequence: Synthetic oligonucleotide
ugaagcuguuguccccucu

SEQ ID NO: 2666678 - RNA, 19 nt, Artificial Sequence
  Description of Artificial Sequence: Synthetic oligonucleotide
cuggugcacuuucaauugc

SEQ ID NO: 2666679 - RNA, 19 nt, Artificial Sequence
  Description of Artificial Sequence: Synthetic oligonucleotide
auccguguuuucaaaauaa

SEQ ID NO: 2666680 - RNA, 19 nt, Artificial Sequence
  Description of Artificial Sequence: Synthetic oligonucleotide
  modified_base (7)..(7): a, c, u, g, unknown or other
gagaucnguuaaaucuaca

SEQ ID NO: 2666681 - RNA, 19 nt, Artificial Sequence
  Description of Artificial Sequence: Synthetic oligonucleotide
cagcuuaaaaccuugugau

SEQ ID NO: 2666682 - RNA, 19 nt, Artificial Sequence
  Description of Artificial Sequence: Synthetic oligonucleotide
aaaacccuguguagguggu

SEQ ID NO: 2666683 - RNA, 19 nt, Artificial Sequence
  Description of Artificial Sequence: Synthetic oligonucleotide
agcuuaaaaccuugugauu

SEQ ID NO: 2666684 - RNA, 19 nt, Artificial Sequence
  Description of Artificial Sequence: Synthetic oligonucleotide
ggaucugccagacucgguc

SEQ ID NO: 2666685 - RNA, 19 nt, Artificial Sequence
  Description of Artificial Sequence: Synthetic oligonucleotide
ucccauacguucagcuuaa

SEQ ID NO: 2666686 - RNA, 19 nt, Artificial Sequence
  Description of Artificial Sequence: Synthetic oligonucleotide
uggucuggugcacuuucaa

SEQ ID NO: 2666687 - RNA, 19 nt, Artificial Sequence
  Description of Artificial Sequence: Synthetic oligonucleotide
augagcacgggcacacaac

SEQ ID NO: 2666688 - RNA, 19 nt, Artificial Sequence
  Description of Artificial Sequence: Synthetic oligonucleotide
caauugcgcaaaauagaga

SEQ ID NO: 2666689 - RNA, 19 nt, Artificial Sequence
  Description of Artificial Sequence: Synthetic oligonucleotide
ggcaaucucagaggcaggg

SEQ ID NO: 2666690 - RNA, 19 nt, Artificial Sequence
  Description of Artificial Sequence: Synthetic oligonucleotide
caaugucccauacguucag

SEQ ID NO: 2666691 - RNA, 19 nt, Artificial Sequence
  Description of Artificial Sequence: Synthetic oligonucleotide
uguuguccccucucgucac

SEQ ID NO: 2666692 - RNA, 19 nt, Artificial Sequence
  Description of Artificial Sequence: Synthetic oligonucleotide
cgcaaaauagagagcaagc

SEQ ID NO: 2666693 - RNA, 19 nt, Artificial Sequence
  Description of Artificial Sequence: Synthetic oligonucleotide
gacccaguucaugccaucc

SEQ ID NO: 2666694 - RNA, 19 nt, Artificial Sequence
  Description of Artificial Sequence: Synthetic oligonucleotide
gucccauacguucagcuua

SEQ ID NO: 2666695 - RNA, 19 nt, Artificial Sequence
  Description of Artificial Sequence: Synthetic oligonucleotide
ccuucggcaaucucagagg

SEQ ID NO: 2666696 - RNA, 19 nt, Artificial Sequence
  Description of Artificial Sequence: Synthetic oligonucleotide
ugcgcaaaauagagagcaa

SEQ ID NO: 2666697 - RNA, 19 nt, Artificial Sequence
  Description of Artificial Sequence: Synthetic oligonucleotide
gaccugucucuucaaaucu

SEQ ID NO: 2666698 - RNA, 19 nt, Artificial Sequence
  Description of Artificial Sequence: Synthetic oligonucleotide
accuugugauuguacacuu

SEQ ID NO: 2666699 - RNA, 19 nt, Artificial Sequence
  Description of Artificial Sequence: Synthetic oligonucleotide
ucuguccgcacugucaauu

SEQ ID NO: 2666700 - RNA, 19 nt, Artificial Sequence
  Description of Artificial Sequence: Synthetic oligonucleotide
gugcacuuucaauugcgca

SEQ ID NO: 2666701 - RNA, 19 nt, Artificial Sequence
  Description of Artificial Sequence: Synthetic oligonucleotide
ugucccauacguucagcuu

SEQ ID NO: 2666702 - RNA, 19 nt, Artificial Sequence
  Description of Artificial Sequence: Synthetic oligonucleotide
cuggaucugccagacucgg

SEQ ID NO: 2666703 - RNA, 19 nt, Artificial Sequence
  Description of Artificial Sequence: Synthetic oligonucleotide
agacccaguucaugccauc

SEQ ID NO: 2666704 - RNA, 19 nt, Artificial Sequence
  Description of Artificial Sequence: Synthetic oligonucleotide
ucugccagacucggucccg

SEQ ID NO: 2666705 - RNA, 19 nt, Artificial Sequence
  Description of Artificial Sequence: Synthetic oligonucleotide
guccagacuuuauuucuuc

SEQ ID NO: 2666706 - RNA, 19 nt, Artificial Sequence
  Description of Artificial Sequence: Synthetic oligonucleotide
auaccgaaccuuggagauc

SEQ ID NO: 2666707 - RNA, 19 nt, Artificial Sequence
  Description of Artificial Sequence: Synthetic oligonucleotide
gcgcaaaauagagagcaag

SEQ ID NO: 2666708 - RNA, 19 nt, Artificial Sequence
  Description of Artificial Sequence: Synthetic oligonucleotide
ucguucugaagcuguuguc

SEQ ID NO: 2666709 - RNA, 19 nt, Artificial Sequence
  Description of Artificial Sequence: Synthetic oligonucleotide
ccaguucaugccauccugg

SEQ ID NO: 2666710 - RNA, 19 nt, Artificial Sequence
  Description of Artificial Sequence: Synthetic oligonucleotide
cagguugagcccuucggca

SEQ ID NO: 2666711 - RNA, 19 nt, Artificial Sequence
  Description of Artificial Sequence: Synthetic oligonucleotide
gcaggacuggaucugccag

SEQ ID NO: 2666712 - RNA, 19 nt, Artificial Sequence
  Description of Artificial Sequence: Synthetic oligonucleotide
ucgccugugagagcugagc

SEQ ID NO: 2666713 - RNA, 19 nt, Artificial Sequence
  Description of Artificial Sequence: Synthetic oligonucleotide
agguugagcccuucggcaa

SEQ ID NO: 2666714 - RNA, 19 nt, Artificial Sequence
  Description of Artificial Sequence: Synthetic oligonucleotide
gugauuguacacuuuugau

SEQ ID NO: 2666715 - RNA, 19 nt, Artificial Sequence
  Description of Artificial Sequence: Synthetic oligonucleotide
agcccuucggcaaucucag

SEQ ID NO: 2666716 - RNA, 19 nt, Artificial Sequence
  Description of Artificial Sequence: Synthetic oligonucleotide
cuugugauuguacacuuuu

SEQ ID NO: 2666717 - RNA, 19 nt, Artificial Sequence
  Description of Artificial Sequence: Synthetic oligonucleotide
cuguuguccccucucguca

SEQ ID NO: 2666718 - RNA, 19 nt, Artificial Sequence
  Description of Artificial Sequence: Synthetic oligonucleotide
gucguucugaagcuguugu

SEQ ID NO: 2666719 - RNA, 19 nt, Artificial Sequence
  Description of Artificial Sequence: Synthetic oligonucleotide
agcuguuguccccucucgu

SEQ ID NO: 2666720 - RNA, 19 nt, Artificial Sequence
  Description of Artificial Sequence: Synthetic oligonucleotide
gacacccucgccugugaga

SEQ ID NO: 2666721 - RNA, 19 nt, Artificial Sequence
  Description of Artificial Sequence: Synthetic oligonucleotide
cuguguagguggucuggug

SEQ ID NO: 2666722 - RNA, 19 nt, Artificial Sequence
  Description of Artificial Sequence: Synthetic oligonucleotide
  modified_base (8)..(8): a, c, u, g, unknown or other
ggagaucnguuaaaucuac

SEQ ID NO: 2666723 - RNA, 19 nt, Artificial Sequence
  Description of Artificial Sequence: Synthetic oligonucleotide
gcucccacagcuccugcgg

SEQ ID NO: 2666724 - RNA, 19 nt, Artificial Sequence
  Description of Artificial Sequence: Synthetic oligonucleotide
gugcagguugagcccuucg

SEQ ID NO: 2666725 - RNA, 19 nt, Artificial Sequence
  Description of Artificial Sequence: Synthetic oligonucleotide
auuguacacuuuugauguu

SEQ ID NO: 2666726 - RNA, 19 nt, Artificial Sequence
  Description of Artificial Sequence: Synthetic oligonucleotide
gccugauuuuccucugucc

SEQ ID NO: 2666727 - RNA, 19 nt, Artificial Sequence
  Description of Artificial Sequence: Synthetic oligonucleotide
cucgucacacagcgguggc

SEQ ID NO: 2666728 - RNA, 19 nt, Artificial Sequence
  Description of Artificial Sequence: Synthetic oligonucleotide
cauccuggacacccucgcc

SEQ ID NO: 2666729 - RNA, 19 nt, Artificial Sequence
  Description of Artificial Sequence: Synthetic oligonucleotide
uggccugauuuuccucugu

SEQ ID NO: 2666730 - RNA, 19 nt, Artificial Sequence
  Description of Artificial Sequence: Synthetic oligonucleotide
acccucgccugugagagcu

SEQ ID NO: 2666731 - RNA, 19 nt, Artificial Sequence
  Description of Artificial Sequence: Synthetic oligonucleotide
ugcugugagcagguccugc

SEQ ID NO: 2666732 - RNA, 19 nt, Artificial Sequence
  Description of Artificial Sequence: Synthetic oligonucleotide
agcaguuccguuaguuccu

SEQ ID NO: 2666733 - RNA, 19 nt, Artificial Sequence
  Description of Artificial Sequence: Synthetic oligonucleotide
cacgggcacacaacucagc

SEQ ID NO: 2666734 - RNA, 19 nt, Artificial Sequence
  Description of Artificial Sequence: Synthetic oligonucleotide
guauggccugauuuuccuc

SEQ ID NO: 2666735 - RNA, 19 nt, Artificial Sequence
  Description of Artificial Sequence: Synthetic oligonucleotide
cguucugaagcuguugucc

SEQ ID NO: 2666736 - RNA, 19 nt, Artificial Sequence
  Description of Artificial Sequence: Synthetic oligonucleotide
uguagguggucuggugcac

SEQ ID NO: 2666737 - RNA, 19 nt, Artificial Sequence
  Description of Artificial Sequence: Synthetic oligonucleotide
uggacacccucgccuguga

SEQ ID NO: 2666738 - RNA, 19 nt, Artificial Sequence
  Description of Artificial Sequence: Synthetic oligonucleotide
cucucgucacacagcggug

SEQ ID NO: 2666739 - RNA, 19 nt, Artificial Sequence
  Description of Artificial Sequence: Synthetic oligonucleotide
gugagagcugagcaggacu

SEQ ID NO: 2666740 - RNA, 19 nt, Artificial Sequence
  Description of Artificial Sequence: Synthetic oligonucleotide
ccccucucgucacacagcg

SEQ ID NO: 2666741 - RNA, 19 nt, Artificial Sequence
  Description of Artificial Sequence: Synthetic oligonucleotide
cgcacugucaauuacauau

SEQ ID NO: 2666742 - RNA, 19 nt, Artificial Sequence
  Description of Artificial Sequence: Synthetic oligonucleotide
gucccggauggugugcagg

SEQ ID NO: 2666743 - RNA, 19 nt, Artificial Sequence
  Description of Artificial Sequence: Synthetic oligonucleotide
ugagcccuucggcaaucuc

SEQ ID NO: 2666744 - RNA, 19 nt, Artificial Sequence
  Description of Artificial Sequence: Synthetic oligonucleotide
ggugcacuuucaauugcgc

SEQ ID NO: 2666745 - RNA, 19 nt, Artificial Sequence
  Description of Artificial Sequence: Synthetic oligonucleotide
cucccacagcuccugcggc

SEQ ID NO: 2666746 - RNA, 19 nt, Artificial Sequence
  Description of Artificial Sequence: Synthetic oligonucleotide
gggcacagaugagaaagcc

SEQ ID NO: 2666747 - RNA, 19 nt, Artificial Sequence
  Description of Artificial Sequence: Synthetic oligonucleotide
ucagggccgguuugggcuc

SEQ ID NO: 2666748 - RNA, 19 nt, Artificial Sequence
  Description of Artificial Sequence: Synthetic oligonucleotide
uccagugguccagacuuua

SEQ ID NO: 2666749 - RNA, 19 nt, Artificial Sequence
  Description of Artificial Sequence: Synthetic oligonucleotide
acagcgguggcugggcaca

SEQ ID NO: 2666750 - RNA, 19 nt, Artificial Sequence
  Description of Artificial Sequence: Synthetic oligonucleotide
cacagcgguggcugggcac

SEQ ID NO: 2666751 - RNA, 19 nt, Artificial Sequence
  Description of Artificial Sequence: Synthetic oligonucleotide
uguccaccaaugucccaua

SEQ ID NO: 2666752 - RNA, 19 nt, Artificial Sequence
  Description of Artificial Sequence: Synthetic oligonucleotide
cucggucccggauggugug

SEQ ID NO: 2666753 - RNA, 19 nt, Artificial Sequence
  Description of Artificial Sequence: Synthetic oligonucleotide
gcaaucucagaggcagggg

SEQ ID NO: 2666754 - RNA, 19 nt, Artificial Sequence
  Description of Artificial Sequence: Synthetic oligonucleotide
guccgcacugucaauuaca

SEQ ID NO: 2666755 - RNA, 19 nt, Artificial Sequence
  Description of Artificial Sequence: Synthetic oligonucleotide
gguuugggcucccacagcu

SEQ ID NO: 2666756 - RNA, 19 nt, Artificial Sequence
  Description of Artificial Sequence: Synthetic oligonucleotide
cguucagcuuaaaaccuug

SEQ ID NO: 2666757 - RNA, 19 nt, Artificial Sequence
  Description of Artificial Sequence: Synthetic oligonucleotide
gaaagccuucagucaggaa

SEQ ID NO: 2666758 - RNA, 19 nt, Artificial Sequence
  Description of Artificial Sequence: Synthetic oligonucleotide
gcuguuguccccucucguc

SEQ ID NO: 2666759 - RNA, 19 nt, Artificial Sequence
  Description of Artificial Sequence: Synthetic oligonucleotide
caggacuggaucugccaga

SEQ ID NO: 2666760 - RNA, 19 nt, Artificial Sequence
  Description of Artificial Sequence: Synthetic oligonucleotide
guacacuuuugauguuaaa

SEQ ID NO: 2666761 - RNA, 19 nt, Artificial Sequence
  Description of Artificial Sequence: Synthetic oligonucleotide
cacacagcgguggcugggc

SEQ ID NO: 2666762 - RNA, 19 nt, Artificial Sequence
  Description of Artificial Sequence: Synthetic oligonucleotide
gcuuguuagcaaagaugag

SEQ ID NO: 2666763 - RNA, 19 nt, Artificial Sequence
  Description of Artificial Sequence: Synthetic oligonucleotide
ccgguuugggcucccacag

SEQ ID NO: 2666764 - RNA, 19 nt, Artificial Sequence
  Description of Artificial Sequence: Synthetic oligonucleotide
cccaguucaugccauccug

SEQ ID NO: 2666765 - RNA, 19 nt, Artificial Sequence
  Description of Artificial Sequence: Synthetic oligonucleotide
gcagacccaguucaugcca

SEQ ID NO: 2666766 - RNA, 19 nt, Artificial Sequence
  Description of Artificial Sequence: Synthetic oligonucleotide
acucggucccggauggugu

SEQ ID NO: 2666767 - RNA, 19 nt, Artificial Sequence
  Description of Artificial Sequence: Synthetic oligonucleotide
cucgccugugagagcugag

SEQ ID NO: 2666768 - RNA, 19 nt, Artificial Sequence
  Description of Artificial Sequence: Synthetic oligonucleotide
cuucuucgcauugacauuu

SEQ ID NO: 2666769 - RNA, 19 nt, Artificial Sequence
  Description of Artificial Sequence: Synthetic oligonucleotide
ccggauggugugcagguug

SEQ ID NO: 2666770 - RNA, 19 nt, Artificial Sequence
  Description of Artificial Sequence: Synthetic oligonucleotide
gggcacacaacucagcuuu

SEQ ID NO: 2666771 - RNA, 19 nt, Artificial Sequence
  Description of Artificial Sequence: Synthetic oligonucleotide
ccagacucggucccggaug

SEQ ID NO: 2666772 - RNA, 19 nt, Artificial Sequence
  Description of Artificial Sequence: Synthetic oligonucleotide
ucgucacacagcgguggcu

SEQ ID NO: 2666773 - RNA, 19 nt, Artificial Sequence
  Description of Artificial Sequence: Synthetic oligonucleotide
gccuucagucaggaaacag

SEQ ID NO: 2666774 - RNA, 19 nt, Artificial Sequence
  Description of Artificial Sequence: Synthetic oligonucleotide
ccaccaaugucccauacgu

SEQ ID NO: 2666775 - RNA, 19 nt, Artificial Sequence
  Description of Artificial Sequence: Synthetic oligonucleotide
acguucagcuuaaaaccuu

SEQ ID NO: 2666776 - RNA, 19 nt, Artificial Sequence
  Description of Artificial Sequence: Synthetic oligonucleotide
cugaagcuguuguccccuc

SEQ ID NO: 2666777 - RNA, 19 nt, Artificial Sequence
  Description of Artificial Sequence: Synthetic oligonucleotide
uucuguccgcacugucaau

SEQ ID NO: 2666778 - RNA, 19 nt, Artificial Sequence
  Description of Artificial Sequence: Synthetic oligonucleotide
uccugcggcuccagugguc

SEQ ID NO: 2666779 - RNA, 19 nt, Artificial Sequence
  Description of Artificial Sequence: Synthetic oligonucleotide
ggucguucugaagcuguug

SEQ ID NO: 2666780 - RNA, 19 nt, Artificial Sequence
  Description of Artificial Sequence: Synthetic oligonucleotide
  modified_base (13)..(13): a, c, u, g, unknown or other
accuuggagaucnguuaaa

SEQ ID NO: 2666781 - RNA, 19 nt, Artificial Sequence
  Description of Artificial Sequence: Synthetic oligonucleotide
ccguguuuucaaaauaacu

SEQ ID NO: 2666782 - RNA, 19 nt, Artificial Sequence
  Description of Artificial Sequence: Synthetic oligonucleotide
cuggacacccucgccugug

SEQ ID NO: 2666783 - RNA, 19 nt, Artificial Sequence
  Description of Artificial Sequence: Synthetic oligonucleotide
ccaguauggccugauuuuc

SEQ ID NO: 2666784 - RNA, 19 nt, Artificial Sequence
  Description of Artificial Sequence: Synthetic oligonucleotide
ugugcagguugagcccuuc

SEQ ID NO: 2666785 - RNA, 19 nt, Artificial Sequence
  Description of Artificial Sequence: Synthetic oligonucleotide
guggcugggcacagaugag

SEQ ID NO: 2666786 - RNA, 19 nt, Artificial Sequence
  Description of Artificial Sequence: Synthetic oligonucleotide
gccauccuggacacccucg

SEQ ID NO: 2666787 - RNA, 19 nt, Artificial Sequence
  Description of Artificial Sequence: Synthetic oligonucleotide
gagcacgggcacacaacuc

SEQ ID NO: 2666788 - RNA, 19 nt, Artificial Sequence
  Description of Artificial Sequence: Synthetic oligonucleotide
ggacacccucgccugugag

SEQ ID NO: 2666789 - RNA, 19 nt, Artificial Sequence
  Description of Artificial Sequence: Synthetic oligonucleotide
ucggucccggauggugugc

SEQ ID NO: 2666790 - RNA, 19 nt, Artificial Sequence
  Description of Artificial Sequence: Synthetic oligonucleotide
cgauaccgaaccuuggaga

SEQ ID NO: 2666791 - RNA, 19 nt, Artificial Sequence
  Description of Artificial Sequence: Synthetic oligonucleotide
gcacuuucaauugcgcaaa

SEQ ID NO: 2666792 - RNA, 19 nt, Artificial Sequence
  Description of Artificial Sequence: Synthetic oligonucleotide
ccugcggcuccaguggucc

SEQ ID NO: 2666793 - RNA, 19 nt, Artificial Sequence
  Description of Artificial Sequence: Synthetic oligonucleotide
guugagcccuucggcaauc

SEQ ID NO: 2666794 - RNA, 19 nt, Artificial Sequence
  Description of Artificial Sequence: Synthetic oligonucleotide
cuguccgcacugucaauua

SEQ ID NO: 2666795 - RNA, 19 nt, Artificial Sequence
  Description of Artificial Sequence: Synthetic oligonucleotide
aaacagcaacccagcgauu

SEQ ID NO: 2666796 - RNA, 19 nt, Artificial Sequence
  Description of Artificial Sequence: Synthetic oligonucleotide
guuugggcucccacagcuc

SEQ ID NO: 2666797 - RNA, 19 nt, Artificial Sequence
  Description of Artificial Sequence: Synthetic oligonucleotide
gccgguuugggcucccaca

SEQ ID NO: 2666798 - RNA, 19 nt, Artificial Sequence
  Description of Artificial Sequence: Synthetic oligonucleotide
guucagcuuaaaaccuugu

SEQ ID NO: 2666799 - RNA, 19 nt, Artificial Sequence
  Description of Artificial Sequence: Synthetic oligonucleotide
ccucucgucacacagcggu

SEQ ID NO: 2666800 - RNA, 19 nt, Artificial Sequence
  Description of Artificial Sequence: Synthetic oligonucleotide
agaugagcacgggcacaca

SEQ ID NO: 2666801 - RNA, 19 nt, Artificial Sequence
  Description of Artificial Sequence: Synthetic oligonucleotide
ccauacguucagcuuaaaa

SEQ ID NO: 2666802 - RNA, 19 nt, Artificial Sequence
  Description of Artificial Sequence: Synthetic oligonucleotide
gcugcugugagcagguccu

SEQ ID NO: 2666803 - RNA, 19 nt, Artificial Sequence
  Description of Artificial Sequence: Synthetic oligonucleotide
guggucuggugcacuuuca

SEQ ID NO: 2666804 - RNA, 19 nt, Artificial Sequence
  Description of Artificial Sequence: Synthetic oligonucleotide
ggcacagaugagaaagccu

SEQ ID NO: 2666805 - RNA, 19 nt, Artificial Sequence
  Description of Artificial Sequence: Synthetic oligonucleotide
cacccucgccugugagagc

SEQ ID NO: 2666806 - RNA, 19 nt, Artificial Sequence
  Description of Artificial Sequence: Synthetic oligonucleotide
gcaguuccguuaguuccug

SEQ ID NO: 2666807 - RNA, 19 nt, Artificial Sequence
  Description of Artificial Sequence: Synthetic oligonucleotide
cgucacacagcgguggcug

SEQ ID NO: 2666808 - RNA, 19 nt, Artificial Sequence
  Description of Artificial Sequence: Synthetic oligonucleotide
ggcugggcacagaugagaa

SEQ ID NO: 2666809 - RNA, 19 nt, Artificial Sequence
  Description of Artificial Sequence: Synthetic oligonucleotide
ggucuggugcacuuucaau

SEQ ID NO: 2666810 - RNA, 19 nt, Artificial Sequence
  Description of Artificial Sequence: Synthetic oligonucleotide
ggucccggauggugugcag

SEQ ID NO: 2666811 - RNA, 19 nt, Artificial Sequence
  Description of Artificial Sequence: Synthetic oligonucleotide
agggccgguuugggcuccc

SEQ ID NO: 2666812 - RNA, 19 nt, Artificial Sequence
  Description of Artificial Sequence: Synthetic oligonucleotide
guagguggucuggugcacu

SEQ ID NO: 2666813 - RNA, 19 nt, Artificial Sequence
  Description of Artificial Sequence: Synthetic oligonucleotide
augccauccuggacacccu

SEQ ID NO: 2666814 - RNA, 19 nt, Artificial Sequence
  Description of Artificial Sequence: Synthetic oligonucleotide
cagacccaguucaugccau

SEQ ID NO: 2666815 - RNA, 19 nt, Artificial Sequence
  Description of Artificial Sequence: Synthetic oligonucleotide
  modified_base (16)..(16): a, c, u, g, unknown or other
cgaaccuuggagaucnguu

SEQ ID NO: 2666816 - RNA, 19 nt, Artificial Sequence
  Description of Artificial Sequence: Synthetic oligonucleotide
ggugugcagguugagcccu

SEQ ID NO: 2666817 - RNA, 19 nt, Artificial Sequence
  Description of Artificial Sequence: Synthetic oligonucleotide
gcacugucaauuacauaua

SEQ ID NO: 2666818 - RNA, 19 nt, Artificial Sequence
  Description of Artificial Sequence: Synthetic oligonucleotide
gagcugagcaggacuggau

SEQ ID NO: 2666819 - RNA, 19 nt, Artificial Sequence
  Description of Artificial Sequence: Synthetic oligonucleotide
ggccgguuugggcucccac

SEQ ID NO: 2666820 - RNA, 19 nt, Artificial Sequence
  Description of Artificial Sequence: Synthetic oligonucleotide
  modified_base (18)..(18): a, c, u, g, unknown or other
accgaaccuuggagaucng

SEQ ID NO: 2666821 - RNA, 19 nt, Artificial Sequence
  Description of Artificial Sequence: Synthetic oligonucleotide
cccucucgucacacagcgg

SEQ ID NO: 2666822 - RNA, 19 nt, Artificial Sequence
  Description of Artificial Sequence: Synthetic oligonucleotide
ccugaccugucucuucaaa

SEQ ID NO: 2666823 - RNA, 19 nt, Artificial Sequence
  Description of Artificial Sequence: Synthetic oligonucleotide
caccaaugucccauacguu

SEQ ID NO: 2666824 - RNA, 19 nt, Artificial Sequence
  Description of Artificial Sequence: Synthetic oligonucleotide
gguugagcccuucggcaau

SEQ ID NO: 2666825 - RNA, 19 nt, Artificial Sequence
  Description of Artificial Sequence: Synthetic oligonucleotide
agacucggucccggauggu

SEQ ID NO: 2666826 - RNA, 19 nt, Artificial Sequence
  Description of Artificial Sequence: Synthetic oligonucleotide
cggcaaucucagaggcagg

SEQ ID NO: 2666827 - RNA, 19 nt, Artificial Sequence
  Description of Artificial Sequence: Synthetic oligonucleotide
ggggucguucugaagcugu

SEQ ID NO: 2666828 - RNA, 19 nt, Artificial Sequence
  Description of Artificial Sequence: Synthetic oligonucleotide
agcgguggcugggcacaga

SEQ ID NO: 2666829 - RNA, 19 nt, Artificial Sequence
  Description of Artificial Sequence: Synthetic oligonucleotide
gguccagacuuuauuucuu

SEQ ID NO: 2666830 - RNA, 19 nt, Artificial Sequence
  Description of Artificial Sequence: Synthetic oligonucleotide
  modified_base (12)..(12): a, c, u, g, unknown or other
ccuuggagaucnguuaaau

SEQ ID NO: 2666831 - RNA, 19 nt, Artificial Sequence
  Description of Artificial Sequence: Synthetic oligonucleotide
cugugagcagguccugcuu

SEQ ID NO: 2666832 - RNA, 19 nt, Artificial Sequence
  Description of Artificial Sequence: Synthetic oligonucleotide
cgguuugggcucccacagc

SEQ ID NO: 2666833 - RNA, 19 nt, Artificial Sequence
  Description of Artificial Sequence: Synthetic oligonucleotide
cuccugcggcuccaguggu

SEQ ID NO: 2666834 - RNA, 19 nt, Artificial Sequence
  Description of Artificial Sequence: Synthetic oligonucleotide
gcgguggcugggcacagau

SEQ ID NO: 2666835 - RNA, 19 nt, Artificial Sequence
  Description of Artificial Sequence: Synthetic oligonucleotide
cuccagugguccagacuuu

SEQ ID NO: 2666836 - RNA, 19 nt, Artificial Sequence
  Description of Artificial Sequence: Synthetic oligonucleotide
ccguuaguuccugaccugu

SEQ ID NO: 2666837 - RNA, 19 nt, Artificial Sequence
  Description of Artificial Sequence: Synthetic oligonucleotide
ccucgccugugagagcuga

SEQ ID NO: 2666838 - RNA, 19 nt, Artificial Sequence
  Description of Artificial Sequence: Synthetic oligonucleotide
gccagacucggucccggau

SEQ ID NO: 2666839 - RNA, 19 nt, Artificial Sequence
  Description of Artificial Sequence: Synthetic oligonucleotide
cuccuccaguauggccuga

SEQ ID NO: 2666840 - RNA, 19 nt, Artificial Sequence
  Description of Artificial Sequence: Synthetic oligonucleotide
ccuugugauuguacacuuu

SEQ ID NO: 2666841 - RNA, 19 nt, Artificial Sequence
  Description of Artificial Sequence: Synthetic oligonucleotide
gcccuucggcaaucucaga

SEQ ID NO: 2666842 - RNA, 19 nt, Artificial Sequence
  Description of Artificial Sequence: Synthetic oligonucleotide
gcggcuccagugguccaga

SEQ ID NO: 2666843 - RNA, 19 nt, Artificial Sequence
  Description of Artificial Sequence: Synthetic oligonucleotide
ccgcacugucaauuacaua

SEQ ID NO: 2666844 - RNA, 19 nt, Artificial Sequence
  Description of Artificial Sequence: Synthetic oligonucleotide
cccucgccugugagagcug

SEQ ID NO: 2666845 - RNA, 19 nt, Artificial Sequence
  Description of Artificial Sequence: Synthetic oligonucleotide
  modified_base (17)..(17): a, c, u, g, unknown or other
ccgaaccuuggagaucngu

SEQ ID NO: 2666846 - RNA, 19 nt, Artificial Sequence
  Description of Artificial Sequence: Synthetic oligonucleotide
cggcuccagugguccagac

SEQ ID NO: 2666847 - RNA, 19 nt, Artificial Sequence
  Description of Artificial Sequence: Synthetic oligonucleotide
gggucguucugaagcuguu

SEQ ID NO: 2666848 - RNA, 19 nt, Artificial Sequence
  Description of Artificial Sequence: Synthetic oligonucleotide
gugugcagguugagcccuu

SEQ ID NO: 2666849 - RNA, 19 nt, Artificial Sequence
  Description of Artificial Sequence: Synthetic oligonucleotide
ccuggacacccucgccugu

SEQ ID NO: 2666850 - RNA, 19 nt, Artificial Sequence
  Description of Artificial Sequence: Synthetic oligonucleotide
cgggcacacaacucagcuu

SEQ ID NO: 2666851 - RNA, 19 nt, Artificial Sequence
  Description of Artificial Sequence: Synthetic oligonucleotide
cccauacguucagcuuaaa

SEQ ID NO: 2666852 - RNA, 19 nt, Artificial Sequence
  Description of Artificial Sequence: Synthetic oligonucleotide
cccggauggugugcagguu

SEQ ID NO: 2666853 - RNA, 19 nt, Artificial Sequence
  Description of Artificial Sequence: Synthetic oligonucleotide
  modified_base (1)..(1): a, c, u, g, unknown or other
nguuaaaucuacagcugga

SEQ ID NO: 2666854 - RNA, 19 nt, Artificial Sequence
  Description of Artificial Sequence: Synthetic oligonucleotide
auuaccuuuauuuucagcu

SEQ ID NO: 2666855 - RNA, 19 nt, Artificial Sequence
  Description of Artificial Sequence: Synthetic oligonucleotide
uuaauuaccuuuauuuuca

SEQ ID NO: 2666856 - RNA, 19 nt, Artificial Sequence
  Description of Artificial Sequence: Synthetic oligonucleotide
uguaccaacguggagaucg

SEQ ID NO: 2666857 - RNA, 19 nt, Artificial Sequence
  Description of Artificial Sequence: Synthetic oligonucleotide
ugcagaaccucgcugaucg

SEQ ID NO: 2666858 - RNA, 19 nt, Artificial Sequence
  Description of Artificial Sequence: Synthetic oligonucleotide
aauuaccuuuauuuucagc

SEQ ID NO: 2666859 - RNA, 19 nt, Artificial Sequence
  Description of Artificial Sequence: Synthetic oligonucleotide
uuuaauuaccuuuauuuuc

SEQ ID NO: 2666860 - RNA, 19 nt, Artificial Sequence
  Description of Artificial Sequence: Synthetic oligonucleotide
uaccuuuauuuucagcugg

SEQ ID NO: 2666861 - RNA, 19 nt, Artificial Sequence
  Description of Artificial Sequence: Synthetic oligonucleotide
ugcagauucggcaucaaac

SEQ ID NO: 2666862 - RNA, 19 nt, Artificial Sequence
  Description of Artificial Sequence: Synthetic oligonucleotide
uucgugaggagcauuggag

SEQ ID NO: 2666863 - RNA, 19 nt, Artificial Sequence
  Description of Artificial Sequence: Synthetic oligonucleotide
uguucugacacuccuggug

SEQ ID NO: 2666864 - RNA, 19 nt, Artificial Sequence
  Description of Artificial Sequence: Synthetic oligonucleotide
gaagucguggugcuggccg

SEQ ID NO: 2666865 - RNA, 19 nt, Artificial Sequence
  Description of Artificial Sequence: Synthetic oligonucleotide
ucgcugaucgccuccaugg

SEQ ID NO: 2666866 - RNA, 19 nt, Artificial Sequence
  Description of Artificial Sequence: Synthetic oligonucleotide
acuccgauaacucgggaag

SEQ ID NO: 2666867 - RNA, 19 nt, Artificial Sequence
  Description of Artificial Sequence: Synthetic oligonucleotide
cuggcggugagcuuggucc

SEQ ID NO: 2666868 - RNA, 19 nt, Artificial Sequence
  Description of Artificial Sequence: Synthetic oligonucleotide
ucggcaucaaaccugaguu

SEQ ID NO: 2666869 - RNA, 19 nt, Artificial Sequence
  Description of Artificial Sequence: Synthetic oligonucleotide
cuuuauuucgugaggagca

SEQ ID NO: 2666870 - RNA, 19 nt, Artificial Sequence
  Description of Artificial Sequence: Synthetic oligonucleotide
ucgugaggagcauuggagg

SEQ ID NO: 2666871 - RNA, 19 nt, Artificial Sequence
  Description of Artificial Sequence: Synthetic oligonucleotide
uuaccuuuauuuucagcug

SEQ ID NO: 2666872 - RNA, 19 nt, Artificial Sequence
  Description of Artificial Sequence: Synthetic oligonucleotide
agaauucuuuauuucguga

SEQ ID NO: 2666873 - RNA, 19 nt, Artificial Sequence
  Description of Artificial Sequence: Synthetic oligonucleotide
uccaugguuuuaauuaccu

SEQ ID NO: 2666874 - RNA, 19 nt, Artificial Sequence
  Description of Artificial Sequence: Synthetic oligonucleotide
uucuuuauuucgugaggag

SEQ ID NO: 2666875 - RNA, 19 nt, Artificial Sequence
  Description of Artificial Sequence: Synthetic oligonucleotide
ugcgggagcguccacagca

SEQ ID NO: 2666876 - RNA, 19 nt, Artificial Sequence
  Description of Artificial Sequence: Synthetic oligonucleotide
uucggcaucaaaccugagu

SEQ ID NO: 2666877 - RNA, 19 nt, Artificial Sequence
  Description of Artificial Sequence: Synthetic oligonucleotide
uggauccucuguaccaacg

SEQ ID NO: 2666878 - RNA, 19 nt, Artificial Sequence
  Description of Artificial Sequence: Synthetic oligonucleotide
acgacacuccgauaacucg

SEQ ID NO: 2666879 - RNA, 19 nt, Artificial Sequence
  Description of Artificial Sequence: Synthetic oligonucleotide
uccacugccaguaccuccc

SEQ ID NO: 2666880 - RNA, 19 nt, Artificial Sequence
  Description of Artificial Sequence: Synthetic oligonucleotide
aagucguggugcuggccgc

SEQ ID NO: 2666881 - RNA, 19 nt, Artificial Sequence
  Description of Artificial Sequence: Synthetic oligonucleotide
cacgaccucagccagcugg

SEQ ID NO: 2666882 - RNA, 19 nt, Artificial Sequence
  Description of Artificial Sequence: Synthetic oligonucleotide
uuucgugaggagcauugga

SEQ ID NO: 2666883 - RNA, 19 nt, Artificial Sequence
  Description of Artificial Sequence: Synthetic oligonucleotide
auucuuuauuucgugagga

SEQ ID NO: 2666884 - RNA, 19 nt, Artificial Sequence
  Description of Artificial Sequence: Synthetic oligonucleotide
uaauuaccuuuauuuucag

SEQ ID NO: 2666885 - RNA, 19 nt, Artificial Sequence
  Description of Artificial Sequence: Synthetic oligonucleotide
acgccggcuccguagaugc

SEQ ID NO: 2666886 - RNA, 19 nt, Artificial Sequence
  Description of Artificial Sequence: Synthetic oligonucleotide
ucucuccaggcccacgccg

SEQ ID NO: 2666887 - RNA, 19 nt, Artificial Sequence
  Description of Artificial Sequence: Synthetic oligonucleotide
agcuggugcaacuuuucag

SEQ ID NO: 2666888 - RNA, 19 nt, Artificial Sequence
  Description of Artificial Sequence: Synthetic oligonucleotide
aaccucgcugaucgccucc

SEQ ID NO: 2666889 - RNA, 19 nt, Artificial Sequence
  Description of Artificial Sequence: Synthetic oligonucleotide
ucccaucuuccucuggucc

SEQ ID NO: 2666890 - RNA, 19 nt, Artificial Sequence
  Description of Artificial Sequence: Synthetic oligonucleotide
auaacucgggaagucgugg

SEQ ID NO: 2666891 - RNA, 19 nt, Artificial Sequence
  Description of Artificial Sequence: Synthetic oligonucleotide
acgaggccccgcuaguucc

SEQ ID NO: 2666892 - RNA, 19 nt, Artificial Sequence
  Description of Artificial Sequence: Synthetic oligonucleotide
acugccaguaccucccgag

SEQ ID NO: 2666893 - RNA, 19 nt, Artificial Sequence
  Description of Artificial Sequence: Synthetic oligonucleotide
acucgggaagucguggugc

SEQ ID NO: 2666894 - RNA, 19 nt, Artificial Sequence
  Description of Artificial Sequence: Synthetic oligonucleotide
ucugccguggcggugagca

SEQ ID NO: 2666895 - RNA, 19 nt, Artificial Sequence
  Description of Artificial Sequence: Synthetic oligonucleotide
ugccaguaccucccgagag

SEQ ID NO: 2666896 - RNA, 19 nt, Artificial Sequence
  Description of Artificial Sequence: Synthetic oligonucleotide
gcagauucggcaucaaacc

SEQ ID NO: 2666897 - RNA, 19 nt, Artificial Sequence
  Description of Artificial Sequence: Synthetic oligonucleotide
ugagcuugguccaggcggc

SEQ ID NO: 2666898 - RNA, 19 nt, Artificial Sequence
  Description of Artificial Sequence: Synthetic oligonucleotide
guggcggugagcaugacug

SEQ ID NO: 2666899 - RNA, 19 nt, Artificial Sequence
  Description of Artificial Sequence: Synthetic oligonucleotide
ucuguaccaacguggagau

SEQ ID NO: 2666900 - RNA, 19 nt, Artificial Sequence
  Description of Artificial Sequence: Synthetic oligonucleotide
gaugcgggagcguccacag

SEQ ID NO: 2666901 - RNA, 19 nt, Artificial Sequence
  Description of Artificial Sequence: Synthetic oligonucleotide
gauccucuguaccaacgug

SEQ ID NO: 2666902 - RNA, 19 nt, Artificial Sequence
  Description of Artificial Sequence: Synthetic oligonucleotide
ugcuggauccucuguacca

SEQ ID NO: 2666903 - RNA, 19 nt, Artificial Sequence
  Description of Artificial Sequence: Synthetic oligonucleotide
aacucgggaagucguggug

SEQ ID NO: 2666904 - RNA, 19 nt, Artificial Sequence
  Description of Artificial Sequence: Synthetic oligonucleotide
gcuaguuccgcuuccacug

SEQ ID NO: 2666905 - RNA, 19 nt, Artificial Sequence
  Description of Artificial Sequence: Synthetic oligonucleotide
agcauuggagggcagccug

SEQ ID NO: 2666906 - RNA, 19 nt, Artificial Sequence
  Description of Artificial Sequence: Synthetic oligonucleotide
cuccaugguuuuaauuacc

SEQ ID NO: 2666907 - RNA, 19 nt, Artificial Sequence
  Description of Artificial Sequence: Synthetic oligonucleotide
auuuucagcuggugcaacu

SEQ ID NO: 2666908 - RNA, 19 nt, Artificial Sequence
  Description of Artificial Sequence: Synthetic oligonucleotide
agagggagaauucuuuauu

SEQ ID NO: 2666909 - RNA, 19 nt, Artificial Sequence
  Description of Artificial Sequence: Synthetic oligonucleotide
aguuccugcagaaccucgc

SEQ ID NO: 2666910 - RNA, 19 nt, Artificial Sequence
  Description of Artificial Sequence: Synthetic oligonucleotide
gacacuccgauaacucggg

SEQ ID NO: 2666911 - RNA, 19 nt, Artificial Sequence
  Description of Artificial Sequence: Synthetic oligonucleotide
caaaccugaguuccugcag

SEQ ID NO: 2666912 - RNA, 19 nt, Artificial Sequence
  Description of Artificial Sequence: Synthetic oligonucleotide
agcggcgaaggccuggguc

SEQ ID NO: 2666913 - RNA, 19 nt, Artificial Sequence
  Description of Artificial Sequence: Synthetic oligonucleotide
gauaacucgggaagucgug

SEQ ID NO: 2666914 - RNA, 19 nt, Artificial Sequence
  Description of Artificial Sequence: Synthetic oligonucleotide
agccuggaggggcacgacc

SEQ ID NO: 2666915 - RNA, 19 nt, Artificial Sequence
  Description of Artificial Sequence: Synthetic oligonucleotide
ucgugcacgacacuccgau

SEQ ID NO: 2666916 - RNA, 19 nt, Artificial Sequence
  Description of Artificial Sequence: Synthetic oligonucleotide
caugguuuuaauuaccuuu

SEQ ID NO: 2666917 - RNA, 19 nt, Artificial Sequence
  Description of Artificial Sequence: Synthetic oligonucleotide
ugguccaggcggcggaagg

SEQ ID NO: 2666918 - RNA, 19 nt, Artificial Sequence
  Description of Artificial Sequence: Synthetic oligonucleotide
uuccucuggucccugggga

SEQ ID NO: 2666919 - RNA, 19 nt, Artificial Sequence
  Description of Artificial Sequence: Synthetic oligonucleotide
uggggagccgcccucacuc

SEQ ID NO: 2666920 - RNA, 19 nt, Artificial Sequence
  Description of Artificial Sequence: Synthetic oligonucleotide
accaacguggagaucgggg

SEQ ID NO: 2666921 - RNA, 19 nt, Artificial Sequence
  Description of Artificial Sequence: Synthetic oligonucleotide
caacguggagaucggggcg

SEQ ID NO: 2666922 - RNA, 19 nt, Artificial Sequence
  Description of Artificial Sequence: Synthetic oligonucleotide
uggugcuggccgcugagca

SEQ ID NO: 2666923 - RNA, 19 nt, Artificial Sequence
  Description of Artificial Sequence: Synthetic oligonucleotide
ugaggagcauuggagggca

SEQ ID NO: 2666924 - RNA, 19 nt, Artificial Sequence
  Description of Artificial Sequence: Synthetic oligonucleotide
ccuguucugacacuccugg

SEQ ID NO: 2666925 - RNA, 19 nt, Artificial Sequence
  Description of Artificial Sequence: Synthetic oligonucleotide
gauucggcaucaaaccuga

SEQ ID NO: 2666926 - RNA, 19 nt, Artificial Sequence
  Description of Artificial Sequence: Synthetic oligonucleotide
uccuguucugacacuccug

SEQ ID NO: 2666927 - RNA, 19 nt, Artificial Sequence
  Description of Artificial Sequence: Synthetic oligonucleotide
gaggggcacgaccucagcc

SEQ ID NO: 2666928 - RNA, 19 nt, Artificial Sequence
  Description of Artificial Sequence: Synthetic oligonucleotide
auuucgugaggagcauugg

SEQ ID NO: 2666929 - RNA, 19 nt, Artificial Sequence
  Description of Artificial Sequence: Synthetic oligonucleotide
ucugacacuccuggugucc

SEQ ID NO: 2666930 - RNA, 19 nt, Artificial Sequence
  Description of Artificial Sequence: Synthetic oligonucleotide
cacgacacuccgauaacuc

SEQ ID NO: 2666931 - RNA, 19 nt, Artificial Sequence
  Description of Artificial Sequence: Synthetic oligonucleotide
gguacuggcggugagcuug

SEQ ID NO: 2666932 - RNA, 19 nt, Artificial Sequence
  Description of Artificial Sequence: Synthetic oligonucleotide
cuuccucuggucccugggg

SEQ ID NO: 2666933 - RNA, 19 nt, Artificial Sequence
  Description of Artificial Sequence: Synthetic oligonucleotide
aucggggcgucucuccagg

SEQ ID NO: 2666934 - RNA, 19 nt, Artificial Sequence
  Description of Artificial Sequence: Synthetic oligonucleotide
uucagcuggugcaacuuuu

SEQ ID NO: 2666935 - RNA, 19 nt, Artificial Sequence
  Description of Artificial Sequence: Synthetic oligonucleotide
uaacucgggaagucguggu

SEQ ID NO: 2666936 - RNA, 19 nt, Artificial Sequence
  Description of Artificial Sequence: Synthetic oligonucleotide
aggggcacgaccucagcca

SEQ ID NO: 2666937 - RNA, 19 nt, Artificial Sequence
  Description of Artificial Sequence: Synthetic oligonucleotide
cuguuccagguccugcagg

SEQ ID NO: 2666938 - RNA, 19 nt, Artificial Sequence
  Description of Artificial Sequence: Synthetic oligonucleotide
cagaaccucgcugaucgcc

SEQ ID NO: 2666939 - RNA, 19 nt, Artificial Sequence
  Description of Artificial Sequence: Synthetic oligonucleotide
aacguggagaucggggcgu

SEQ ID NO: 2666940 - RNA, 19 nt, Artificial Sequence
  Description of Artificial Sequence: Synthetic oligonucleotide
gugcacgacacuccgauaa

SEQ ID NO: 2666941 - RNA, 19 nt, Artificial Sequence
  Description of Artificial Sequence: Synthetic oligonucleotide
acuggcggugagcuugguc

SEQ ID NO: 2666942 - RNA, 19 nt, Artificial Sequence
  Description of Artificial Sequence: Synthetic oligonucleotide
cacguggcgagcgagcacc

SEQ ID NO: 2666943 - RNA, 19 nt, Artificial Sequence
  Description of Artificial Sequence: Synthetic oligonucleotide
uuuauuucgugaggagcau

SEQ ID NO: 2666944 - RNA, 19 nt, Artificial Sequence
  Description of Artificial Sequence: Synthetic oligonucleotide
uaguuccgcuuccacugcc

SEQ ID NO: 2666945 - RNA, 19 nt, Artificial Sequence
  Description of Artificial Sequence: Synthetic oligonucleotide
agcgccaccguggccaggc

SEQ ID NO: 2666946 - RNA, 19 nt, Artificial Sequence
  Description of Artificial Sequence: Synthetic oligonucleotide
uggcgaucagggcugggcu

SEQ ID NO: 2666947 - RNA, 19 nt, Artificial Sequence
  Description of Artificial Sequence: Synthetic oligonucleotide
ugcacgacacuccgauaac

SEQ ID NO: 2666948 - RNA, 19 nt, Artificial Sequence
  Description of Artificial Sequence: Synthetic oligonucleotide
acuuuucaggguccuccug

SEQ ID NO: 2666949 - RNA, 19 nt, Artificial Sequence
  Description of Artificial Sequence: Synthetic oligonucleotide
accggcugcgcacgaggcc

SEQ ID NO: 2666950 - RNA, 19 nt, Artificial Sequence
  Description of Artificial Sequence: Synthetic oligonucleotide
uauuuucagcuggugcaac

SEQ ID NO: 2666951 - RNA, 19 nt, Artificial Sequence
  Description of Artificial Sequence: Synthetic oligonucleotide
accucgugcacgacacucc

SEQ ID NO: 2666952 - RNA, 19 nt, Artificial Sequence
  Description of Artificial Sequence: Synthetic oligonucleotide
ugggucaccucgugcacga

SEQ ID NO: 2666953 - RNA, 19 nt, Artificial Sequence
  Description of Artificial Sequence: Synthetic oligonucleotide
caucaccugcagcagcgcc

SEQ ID NO: 2666954 - RNA, 19 nt, Artificial Sequence
  Description of Artificial Sequence: Synthetic oligonucleotide
ucuuucccaucuuccucug

SEQ ID NO: 2666955 - RNA, 19 nt, Artificial Sequence
  Description of Artificial Sequence: Synthetic oligonucleotide
caucaaaccugaguuccug

SEQ ID NO: 2666956 - RNA, 19 nt, Artificial Sequence
  Description of Artificial Sequence: Synthetic oligonucleotide
ccaacguggagaucggggc

SEQ ID NO: 2666957 - RNA, 19 nt, Artificial Sequence
  Description of Artificial Sequence: Synthetic oligonucleotide
agcagccggcaccucugcc

SEQ ID NO: 2666958 - RNA, 19 nt, Artificial Sequence
  Description of Artificial Sequence: Synthetic oligonucleotide
cuaguuccgcuuccacugc

SEQ ID NO: 2666959 - RNA, 19 nt, Artificial Sequence
  Description of Artificial Sequence: Synthetic oligonucleotide
cuccguagaugcgggagcg

SEQ ID NO: 2666960 - RNA, 19 nt, Artificial Sequence
  Description of Artificial Sequence: Synthetic oligonucleotide
gaucggggcgucucuccag

SEQ ID NO: 2666961 - RNA, 19 nt, Artificial Sequence
  Description of Artificial Sequence: Synthetic oligonucleotide
cuggccgcugagcagguac

SEQ ID NO: 2666962 - RNA, 19 nt, Artificial Sequence
  Description of Artificial Sequence: Synthetic oligonucleotide
guucugacacuccuggugu

SEQ ID NO: 2666963 - RNA, 19 nt, Artificial Sequence
  Description of Artificial Sequence: Synthetic oligonucleotide
gagggagaauucuuuauuu

SEQ ID NO: 2666964 - RNA, 19 nt, Artificial Sequence
  Description of Artificial Sequence: Synthetic oligonucleotide
gagcguccacagcagccgg

SEQ ID NO: 2666965 - RNA, 19 nt, Artificial Sequence
  Description of Artificial Sequence: Synthetic oligonucleotide
uccgauaacucgggaaguc

SEQ ID NO: 2666966 - RNA, 19 nt, Artificial Sequence
  Description of Artificial Sequence: Synthetic oligonucleotide
gugcuggccgcugagcagg

SEQ ID NO: 2666967 - RNA, 19 nt, Artificial Sequence
  Description of Artificial Sequence: Synthetic oligonucleotide
aucuuccucuggucccugg

SEQ ID NO: 2666968 - RNA, 19 nt, Artificial Sequence
  Description of Artificial Sequence: Synthetic oligonucleotide
guggcgagcgagcaccggc

SEQ ID NO: 2666969 - RNA, 19 nt, Artificial Sequence
  Description of Artificial Sequence: Synthetic oligonucleotide
uccuccuguucugacacuc

SEQ ID NO: 2666970 - RNA, 19 nt, Artificial Sequence
  Description of Artificial Sequence: Synthetic oligonucleotide
gugaggagcauuggagggc

SEQ ID NO: 2666971 - RNA, 19 nt, Artificial Sequence
  Description of Artificial Sequence: Synthetic oligonucleotide
augggccucuuucccaucu

SEQ ID NO: 2666972 - RNA, 19 nt, Artificial Sequence
  Description of Artificial Sequence: Synthetic oligonucleotide
gucaccucgugcacgacac

SEQ ID NO: 2666973 - RNA, 19 nt, Artificial Sequence
  Description of Artificial Sequence: Synthetic oligonucleotide
uggagaucggggcgucucu

SEQ ID NO: 2666974 - RNA, 19 nt, Artificial Sequence
  Description of Artificial Sequence: Synthetic oligonucleotide
guuccgcuuccacugccag

SEQ ID NO: 2666975 - RNA, 19 nt, Artificial Sequence
  Description of Artificial Sequence: Synthetic oligonucleotide
gcagccggcaccucugccg

SEQ ID NO: 2666976 - RNA, 19 nt, Artificial Sequence
  Description of Artificial Sequence: Synthetic oligonucleotide
gcguucauucugcagcugc

SEQ ID NO: 2666977 - RNA, 19 nt, Artificial Sequence
  Description of Artificial Sequence: Synthetic oligonucleotide
gccaguaccucccgagagg

SEQ ID NO: 2666978 - RNA, 19 nt, Artificial Sequence
  Description of Artificial Sequence: Synthetic oligonucleotide
uaccaacguggagaucggg

SEQ ID NO: 2666979 - RNA, 19 nt, Artificial Sequence
  Description of Artificial Sequence: Synthetic oligonucleotide
ccuccaugguuuuaauuac

SEQ ID NO: 2666980 - RNA, 19 nt, Artificial Sequence
  Description of Artificial Sequence: Synthetic oligonucleotide
cuggcgaucagggcugggc

SEQ ID NO: 2666981 - RNA, 19 nt, Artificial Sequence
  Description of Artificial Sequence: Synthetic oligonucleotide
uucccaucuuccucugguc

SEQ ID NO: 2666982 - RNA, 19 nt, Artificial Sequence
  Description of Artificial Sequence: Synthetic oligonucleotide
uggcgagcgagcaccggcu

SEQ ID NO: 2666983 - RNA, 19 nt, Artificial Sequence
  Description of Artificial Sequence: Synthetic oligonucleotide
agaucggggcgucucucca

SEQ ID NO: 2666984 - RNA, 19 nt, Artificial Sequence
  Description of Artificial Sequence: Synthetic oligonucleotide
ggugagcuugguccaggcg

SEQ ID NO: 2666985 - RNA, 19 nt, Artificial Sequence
  Description of Artificial Sequence: Synthetic oligonucleotide
ggagcguccacagcagccg

SEQ ID NO: 2666986 - RNA, 19 nt, Artificial Sequence
  Description of Artificial Sequence: Synthetic oligonucleotide
uaccucccgagaggcagcg

SEQ ID NO: 2666987 - RNA, 19 nt, Artificial Sequence
  Description of Artificial Sequence: Synthetic oligonucleotide
ggcaccucugccguggcgg

SEQ ID NO: 2666988 - RNA, 19 nt, Artificial Sequence
  Description of Artificial Sequence: Synthetic oligonucleotide
ugacacuccuggugucccc

SEQ ID NO: 2666989 - RNA, 19 nt, Artificial Sequence
  Description of Artificial Sequence: Synthetic oligonucleotide
cugcgcgcguucauucugc

SEQ ID NO: 2666990 - RNA, 19 nt, Artificial Sequence
  Description of Artificial Sequence: Synthetic oligonucleotide
cgacacuccgauaacucgg

SEQ ID NO: 2666991 - RNA, 19 nt, Artificial Sequence
  Description of Artificial Sequence: Synthetic oligonucleotide
agaaccucgcugaucgccu

SEQ ID NO: 2666992 - RNA, 19 nt, Artificial Sequence
  Description of Artificial Sequence: Synthetic oligonucleotide
cugacacuccugguguccc

SEQ ID NO: 2666993 - RNA, 19 nt, Artificial Sequence
  Description of Artificial Sequence: Synthetic oligonucleotide
cuggauccucuguaccaac

SEQ ID NO: 2666994 - RNA, 19 nt, Artificial Sequence
  Description of Artificial Sequence: Synthetic oligonucleotide
cagcuggcgaucagggcug

SEQ ID NO: 2666995 - RNA, 19 nt, Artificial Sequence
  Description of Artificial Sequence: Synthetic oligonucleotide
augcgggagcguccacagc

SEQ ID NO: 2666996 - RNA, 19 nt, Artificial Sequence
  Description of Artificial Sequence: Synthetic oligonucleotide
uucugacacuccugguguc

SEQ ID NO: 2666997 - RNA, 19 nt, Artificial Sequence
  Description of Artificial Sequence: Synthetic oligonucleotide
guaccaacguggagaucgg

SEQ ID NO: 2666998 - RNA, 19 nt, Artificial Sequence
  Description of Artificial Sequence: Synthetic oligonucleotide
cgcgcguucauucugcagc

SEQ ID NO: 2666999 - RNA, 19 nt, Artificial Sequence
  Description of Artificial Sequence: Synthetic oligonucleotide
cacuccgauaacucgggaa

SEQ ID NO: 2667000 - RNA, 19 nt, Artificial Sequence
  Description of Artificial Sequence: Synthetic oligonucleotide
uggcggugagcuuggucca

SEQ ID NO: 2667001 - RNA, 19 nt, Artificial Sequence
  Description of Artificial Sequence: Synthetic oligonucleotide
aucgccuccaugguuuuaa

SEQ ID NO: 2667002 - RNA, 19 nt, Artificial Sequence
  Description of Artificial Sequence: Synthetic oligonucleotide
agaugcgggagcguccaca

SEQ ID NO: 2667003 - RNA, 19 nt, Artificial Sequence
  Description of Artificial Sequence: Synthetic oligonucleotide
ugcgcacguggcgagcgag

SEQ ID NO: 2667004 - RNA, 19 nt, Artificial Sequence
  Description of Artificial Sequence: Synthetic oligonucleotide
uggcggugagcaugacugc

SEQ ID NO: 2667005 - RNA, 19 nt, Artificial Sequence
  Description of Artificial Sequence: Synthetic oligonucleotide
guagaugcgggagcgucca

SEQ ID NO: 2667006 - RNA, 19 nt, Artificial Sequence
  Description of Artificial Sequence: Synthetic oligonucleotide
uggccgcugagcagguacu

SEQ ID NO: 2667007 - RNA, 19 nt, Artificial Sequence
  Description of Artificial Sequence: Synthetic oligonucleotide
uuccgcuuccacugccagu

SEQ ID NO: 2667008 - RNA, 19 nt, Artificial Sequence
  Description of Artificial Sequence: Synthetic oligonucleotide
ggggcgucucuccaggccc

SEQ ID NO: 2667009 - RNA, 19 nt, Artificial Sequence
  Description of Artificial Sequence: Synthetic oligonucleotide
agcuugguccaggcggcgg

SEQ ID NO: 2667010 - RNA, 19 nt, Artificial Sequence
  Description of Artificial Sequence: Synthetic oligonucleotide
caccucgugcacgacacuc

SEQ ID NO: 2667011 - RNA, 19 nt, Artificial Sequence
  Description of Artificial Sequence: Synthetic oligonucleotide
agcguccacagcagccggc

SEQ ID NO: 2667012 - RNA, 19 nt, Artificial Sequence
  Description of Artificial Sequence: Synthetic oligonucleotide
gcggcggaaggccugcgcg

SEQ ID NO: 2667013 - RNA, 19 nt, Artificial Sequence
  Description of Artificial Sequence: Synthetic oligonucleotide
ccgauaacucgggaagucg

SEQ ID NO: 2667014 - RNA, 19 nt, Artificial Sequence
  Description of Artificial Sequence: Synthetic oligonucleotide
ggagaauucuuuauuucgu

SEQ ID NO: 2667015 - RNA, 19 nt, Artificial Sequence
  Description of Artificial Sequence: Synthetic oligonucleotide
guacuggcggugagcuugg

SEQ ID NO: 2667016 - RNA, 19 nt, Artificial Sequence
  Description of Artificial Sequence: Synthetic oligonucleotide
aaggccugggucaccucgu

SEQ ID NO: 2667017 - RNA, 19 nt, Artificial Sequence
  Description of Artificial Sequence: Synthetic oligonucleotide
aaggccugcgcgcguucau

SEQ ID NO: 2667018 - RNA, 19 nt, Artificial Sequence
  Description of Artificial Sequence: Synthetic oligonucleotide
gaaccucgcugaucgccuc

SEQ ID NO: 2667019 - RNA, 19 nt, Artificial Sequence
  Description of Artificial Sequence: Synthetic oligonucleotide
caccggcugcgcacgaggc

SEQ ID NO: 2667020 - RNA, 19 nt, Artificial Sequence
  Description of Artificial Sequence: Synthetic oligonucleotide
cagauucggcaucaaaccu

SEQ ID NO: 2667021 - RNA, 19 nt, Artificial Sequence
  Description of Artificial Sequence: Synthetic oligonucleotide
gugcaacuuuucagggucc

SEQ ID NO: 2667022 - RNA, 19 nt, Artificial Sequence
  Description of Artificial Sequence: Synthetic oligonucleotide
cacgaggccccgcuaguuc

SEQ ID NO: 2667023 - RNA, 19 nt, Artificial Sequence
  Description of Artificial Sequence: Synthetic oligonucleotide
acacuccgauaacucggga

SEQ ID NO: 2667024 - RNA, 19 nt, Artificial Sequence
  Description of Artificial Sequence: Synthetic oligonucleotide
ucguggugcuggccgcuga

SEQ ID NO: 2667025 - RNA, 19 nt, Artificial Sequence
  Description of Artificial Sequence: Synthetic oligonucleotide
gcgcgucuguuccaggucc

SEQ ID NO: 2667026 - RNA, 19 nt, Artificial Sequence
  Description of Artificial Sequence: Synthetic oligonucleotide
ugcgcgcguucauucugca

SEQ ID NO: 2667027 - RNA, 19 nt, Artificial Sequence
  Description of Artificial Sequence: Synthetic oligonucleotide
gcuccguagaugcgggagc

SEQ ID NO: 2667028 - RNA, 19 nt, Artificial Sequence
  Description of Artificial Sequence: Synthetic oligonucleotide
gacacuccuggugucccca

SEQ ID NO: 2667029 - RNA, 19 nt, Artificial Sequence
  Description of Artificial Sequence: Synthetic oligonucleotide
ccaguaccucccgagaggc

SEQ ID NO: 2667030 - RNA, 19 nt, Artificial Sequence
  Description of Artificial Sequence: Synthetic oligonucleotide
ccucgugcacgacacuccg

SEQ ID NO: 2667031 - RNA, 19 nt, Artificial Sequence
  Description of Artificial Sequence: Synthetic oligonucleotide
ucaccucgugcacgacacu

SEQ ID NO: 2667032 - RNA, 19 nt, Artificial Sequence
  Description of Artificial Sequence: Synthetic oligonucleotide
gcccucacucugcagauuc

SEQ ID NO: 2667033 - RNA, 19 nt, Artificial Sequence
  Description of Artificial Sequence: Synthetic oligonucleotide
gcgaucagggcugggcugg

SEQ ID NO: 2667034 - RNA, 19 nt, Artificial Sequence
  Description of Artificial Sequence: Synthetic oligonucleotide
gcaggcugcgcacguggcg

SEQ ID NO: 2667035 - RNA, 19 nt, Artificial Sequence
  Description of Artificial Sequence: Synthetic oligonucleotide
ggcuccguagaugcgggag

SEQ ID NO: 2667036 - RNA, 19 nt, Artificial Sequence
  Description of Artificial Sequence: Synthetic oligonucleotide
ggccaggcgcgucuguucc

SEQ ID NO: 2667037 - RNA, 19 nt, Artificial Sequence
  Description of Artificial Sequence: Synthetic oligonucleotide
cugaucgccuccaugguuu

SEQ ID NO: 2667038 - RNA, 19 nt, Artificial Sequence
  Description of Artificial Sequence: Synthetic oligonucleotide
guccaggcggcggaaggcc

SEQ ID NO: 2667039 - RNA, 19 nt, Artificial Sequence
  Description of Artificial Sequence: Synthetic oligonucleotide
ucccgagaggcagcggcga

SEQ ID NO: 2667040 - RNA, 19 nt, Artificial Sequence
  Description of Artificial Sequence: Synthetic oligonucleotide
aguuccgcuuccacugcca

SEQ ID NO: 2667041 - RNA, 19 nt, Artificial Sequence
  Description of Artificial Sequence: Synthetic oligonucleotide
gagcuugguccaggcggcg

SEQ ID NO: 2667042 - RNA, 19 nt, Artificial Sequence
  Description of Artificial Sequence: Synthetic oligonucleotide
gggcuggacgccaugggcc

SEQ ID NO: 2667043 - RNA, 19 nt, Artificial Sequence
  Description of Artificial Sequence: Synthetic oligonucleotide
ugaucgccuccaugguuuu

SEQ ID NO: 2667044 - RNA, 19 nt, Artificial Sequence
  Description of Artificial Sequence: Synthetic oligonucleotide
ggcgaucagggcugggcug

SEQ ID NO: 2667045 - RNA, 19 nt, Artificial Sequence
  Description of Artificial Sequence: Synthetic oligonucleotide
gccggcuccguagaugcgg

SEQ ID NO: 2667046 - RNA, 19 nt, Artificial Sequence
  Description of Artificial Sequence: Synthetic oligonucleotide
agcgagcaccggcugcgca

SEQ ID NO: 2667047 - RNA, 19 nt, Artificial Sequence
  Description of Artificial Sequence: Synthetic oligonucleotide
guuccugcagaaccucgcu

SEQ ID NO: 2667048 - RNA, 19 nt, Artificial Sequence
  Description of Artificial Sequence: Synthetic oligonucleotide
ucggggcgucucuccaggc

SEQ ID NO: 2667049 - RNA, 19 nt, Artificial Sequence
  Description of Artificial Sequence: Synthetic oligonucleotide
gcggcgaaggccuggguca

SEQ ID NO: 2667050 - RNA, 19 nt, Artificial Sequence
  Description of Artificial Sequence: Synthetic oligonucleotide
ggucaccucgugcacgaca

SEQ ID NO: 2667051 - RNA, 19 nt, Artificial Sequence
  Description of Artificial Sequence: Synthetic oligonucleotide
uggucccuggggagccgcc

SEQ ID NO: 2667052 - RNA, 19 nt, Artificial Sequence
  Description of Artificial Sequence: Synthetic oligonucleotide
gggagcguccacagcagcc

SEQ ID NO: 2667053 - RNA, 19 nt, Artificial Sequence
  Description of Artificial Sequence: Synthetic oligonucleotide
guggagaucggggcgucuc

SEQ ID NO: 2667054 - RNA, 19 nt, Artificial Sequence
  Description of Artificial Sequence: Synthetic oligonucleotide
ucgggaagucguggugcug

SEQ ID NO: 2667055 - RNA, 19 nt, Artificial Sequence
  Description of Artificial Sequence: Synthetic oligonucleotide
gcagagggagaauucuuua

SEQ ID NO: 2667056 - RNA, 19 nt, Artificial Sequence
  Description of Artificial Sequence: Synthetic oligonucleotide
cguagaugcgggagcgucc

SEQ ID NO: 2667057 - RNA, 19 nt, Artificial Sequence
  Description of Artificial Sequence: Synthetic oligonucleotide
uagaugcgggagcguccac

SEQ ID NO: 2667058 - RNA, 19 nt, Artificial Sequence
  Description of Artificial Sequence: Synthetic oligonucleotide
ccuccuguucugacacucc

SEQ ID NO: 2667059 - RNA, 19 nt, Artificial Sequence
  Description of Artificial Sequence: Synthetic oligonucleotide
cugcagauucggcaucaaa

SEQ ID NO: 2667060 - RNA, 19 nt, Artificial Sequence
  Description of Artificial Sequence: Synthetic oligonucleotide
cugccaguaccucccgaga

SEQ ID NO: 2667061 - RNA, 19 nt, Artificial Sequence
  Description of Artificial Sequence: Synthetic oligonucleotide
gaaggccugcgcgcguuca

SEQ ID NO: 2667062 - RNA, 19 nt, Artificial Sequence
  Description of Artificial Sequence: Synthetic oligonucleotide
gcugcgcacguggcgagcg

SEQ ID NO: 2667063 - RNA, 19 nt, Artificial Sequence
  Description of Artificial Sequence: Synthetic oligonucleotide
cacgccggcuccguagaug

SEQ ID NO: 2667064 - RNA, 19 nt, Artificial Sequence
  Description of Artificial Sequence: Synthetic oligonucleotide
uccguagaugcgggagcgu

SEQ ID NO: 2667065 - RNA, 19 nt, Artificial Sequence
  Description of Artificial Sequence: Synthetic oligonucleotide
ucgccuccaugguuuuaau

SEQ ID NO: 2667066 - RNA, 19 nt, Artificial Sequence
  Description of Artificial Sequence: Synthetic oligonucleotide
caggcugcgcacguggcga

SEQ ID NO: 2667067 - RNA, 19 nt, Artificial Sequence
  Description of Artificial Sequence: Synthetic oligonucleotide
acguggagaucggggcguc

SEQ ID NO: 2667068 - RNA, 19 nt, Artificial Sequence
  Description of Artificial Sequence: Synthetic oligonucleotide
cgggaagucguggugcugg

SEQ ID NO: 2667069 - RNA, 19 nt, Artificial Sequence
  Description of Artificial Sequence: Synthetic oligonucleotide
ugcuggccgcugagcaggu

SEQ ID NO: 2667070 - RNA, 19 nt, Artificial Sequence
  Description of Artificial Sequence: Synthetic oligonucleotide
gaggagcauuggagggcag

SEQ ID NO: 2667071 - RNA, 19 nt, Artificial Sequence
  Description of Artificial Sequence: Synthetic oligonucleotide
caugggccucuuucccauc

SEQ ID NO: 2667072 - RNA, 19 nt, Artificial Sequence
  Description of Artificial Sequence: Synthetic oligonucleotide
cuccuguucugacacuccu

SEQ ID NO: 2667073 - RNA, 19 nt, Artificial Sequence
  Description of Artificial Sequence: Synthetic oligonucleotide
guggugcuggccgcugagc

SEQ ID NO: 2667074 - RNA, 19 nt, Artificial Sequence
  Description of Artificial Sequence: Synthetic oligonucleotide
ggguccuccuguucugaca

SEQ ID NO: 2667075 - RNA, 19 nt, Artificial Sequence
  Description of Artificial Sequence: Synthetic oligonucleotide
gcgcacgaggccccgcuag

SEQ ID NO: 2667076 - RNA, 19 nt, Artificial Sequence
  Description of Artificial Sequence: Synthetic oligonucleotide
cgucucuccaggcccacgc

SEQ ID NO: 2667077 - RNA, 19 nt, Artificial Sequence
  Description of Artificial Sequence: Synthetic oligonucleotide
accucgcugaucgccucca

SEQ ID NO: 2667078 - RNA, 19 nt, Artificial Sequence
  Description of Artificial Sequence: Synthetic oligonucleotide
gguccaggcggcggaaggc

SEQ ID NO: 2667079 - RNA, 19 nt, Artificial Sequence
  Description of Artificial Sequence: Synthetic oligonucleotide
agcaccggcugcgcacgag

SEQ ID NO: 2667080 - RNA, 19 nt, Artificial Sequence
  Description of Artificial Sequence: Synthetic oligonucleotide
gaucagggcugggcuggac

SEQ ID NO: 2667081 - RNA, 19 nt, Artificial Sequence
  Description of Artificial Sequence: Synthetic oligonucleotide
agucguggugcuggccgcu

SEQ ID NO: 2667082 - RNA, 19 nt, Artificial Sequence
  Description of Artificial Sequence: Synthetic oligonucleotide
gaggccccgcuaguuccgc

SEQ ID NO: 2667083 - RNA, 19 nt, Artificial Sequence
  Description of Artificial Sequence: Synthetic oligonucleotide
ggaagucguggugcuggcc

SEQ ID NO: 2667084 - RNA, 19 nt, Artificial Sequence
  Description of Artificial Sequence: Synthetic oligonucleotide
agcuggcgaucagggcugg

SEQ ID NO: 2667085 - RNA, 19 nt, Artificial Sequence
  Description of Artificial Sequence: Synthetic oligonucleotide
cuggaggggcacgaccuca

SEQ ID NO: 2667086 - RNA, 19 nt, Artificial Sequence
  Description of Artificial Sequence: Synthetic oligonucleotide
cucgugcacgacacuccga

SEQ ID NO: 2667087 - RNA, 19 nt, Artificial Sequence
  Description of Artificial Sequence: Synthetic oligonucleotide
gcccacgccggcuccguag

SEQ ID NO: 2667088 - RNA, 19 nt, Artificial Sequence
  Description of Artificial Sequence: Synthetic oligonucleotide
auucggcaucaaaccugag

SEQ ID NO: 2667089 - RNA, 19 nt, Artificial Sequence
  Description of Artificial Sequence: Synthetic oligonucleotide
gccggcaccucugccgugg

SEQ ID NO: 2667090 - RNA, 19 nt, Artificial Sequence
  Description of Artificial Sequence: Synthetic oligonucleotide
acguggcgagcgagcaccg

SEQ ID NO: 2667091 - RNA, 19 nt, Artificial Sequence
  Description of Artificial Sequence: Synthetic oligonucleotide
ccugcgcgcguucauucug

SEQ ID NO: 2667092 - RNA, 19 nt, Artificial Sequence
  Description of Artificial Sequence: Synthetic oligonucleotide
ggccugggucaccucgugc

SEQ ID NO: 2667093 - RNA, 19 nt, Artificial Sequence
  Description of Artificial Sequence: Synthetic oligonucleotide
ggaggggcacgaccucagc

SEQ ID NO: 2667094 - RNA, 19 nt, Artificial Sequence
  Description of Artificial Sequence: Synthetic oligonucleotide
agccgcccucacucugcag

SEQ ID NO: 2667095 - RNA, 19 nt, Artificial Sequence
  Description of Artificial Sequence: Synthetic oligonucleotide
gcgagcgagcaccggcugc

SEQ ID NO: 2667096 - RNA, 19 nt, Artificial Sequence
  Description of Artificial Sequence: Synthetic oligonucleotide
ggcgcgucuguuccagguc

SEQ ID NO: 2667097 - RNA, 19 nt, Artificial Sequence
  Description of Artificial Sequence: Synthetic oligonucleotide
gagcauuggagggcagccu

SEQ ID NO: 2667098 - RNA, 19 nt, Artificial Sequence
  Description of Artificial Sequence: Synthetic oligonucleotide
ggccugcgcgcguucauuc

SEQ ID NO: 2667099 - RNA, 19 nt, Artificial Sequence
  Description of Artificial Sequence: Synthetic oligonucleotide
cucgggaagucguggugcu

SEQ ID NO: 2667100 - RNA, 19 nt, Artificial Sequence
  Description of Artificial Sequence: Synthetic oligonucleotide
gcggugagcuugguccagg

SEQ ID NO: 2667101 - RNA, 19 nt, Artificial Sequence
  Description of Artificial Sequence: Synthetic oligonucleotide
gcagaaccucgcugaucgc

SEQ ID NO: 2667102 - RNA, 19 nt, Artificial Sequence
  Description of Artificial Sequence: Synthetic oligonucleotide
gagcgagcaccggcugcgc

SEQ ID NO: 2667103 - RNA, 19 nt, Artificial Sequence
  Description of Artificial Sequence: Synthetic oligonucleotide
agguacuggcggugagcuu

SEQ ID NO: 2667104 - RNA, 19 nt, Artificial Sequence
  Description of Artificial Sequence: Synthetic oligonucleotide
ggcgagcgagcaccggcug

SEQ ID NO: 2667105 - RNA, 19 nt, Artificial Sequence
  Description of Artificial Sequence: Synthetic oligonucleotide
caguaccucccgagaggca

SEQ ID NO: 2667106 - RNA, 19 nt, Artificial Sequence
  Description of Artificial Sequence: Synthetic oligonucleotide
cgagcgagcaccggcugcg

SEQ ID NO: 2667107 - RNA, 19 nt, Artificial Sequence
  Description of Artificial Sequence: Synthetic oligonucleotide
ggcagcggcgaaggccugg

SEQ ID NO: 2667108 - RNA, 19 nt, Artificial Sequence
  Description of Artificial Sequence: Synthetic oligonucleotide
gucguggugcuggccgcug

SEQ ID NO: 2667109 - RNA, 19 nt, Artificial Sequence
  Description of Artificial Sequence: Synthetic oligonucleotide
cuguucugacacuccuggu

SEQ ID NO: 2667110 - RNA, 19 nt, Artificial Sequence
  Description of Artificial Sequence: Synthetic oligonucleotide
gcgcgcguucauucugcag

SEQ ID NO: 2667111 - RNA, 19 nt, Artificial Sequence
  Description of Artificial Sequence: Synthetic oligonucleotide
ccguagaugcgggagcguc

SEQ ID NO: 2667112 - RNA, 19 nt, Artificial Sequence
  Description of Artificial Sequence: Synthetic oligonucleotide
aggccccgcuaguuccgcu

SEQ ID NO: 2667113 - RNA, 19 nt, Artificial Sequence
  Description of Artificial Sequence: Synthetic oligonucleotide
accucccgagaggcagcgg

SEQ ID NO: 2667114 - RNA, 19 nt, Artificial Sequence
  Description of Artificial Sequence: Synthetic oligonucleotide
ggagaucggggcgucucuc

SEQ ID NO: 2667115 - RNA, 19 nt, Artificial Sequence
  Description of Artificial Sequence: Synthetic oligonucleotide
caggcccacgccggcuccg

SEQ ID NO: 2667116 - RNA, 19 nt, Artificial Sequence
  Description of Artificial Sequence: Synthetic oligonucleotide
ggcagccuggaggggcacg

SEQ ID NO: 2667117 - RNA, 19 nt, Artificial Sequence
  Description of Artificial Sequence: Synthetic oligonucleotide
gcaacuuuucaggguccuc

SEQ ID NO: 2667118 - RNA, 19 nt, Artificial Sequence
  Description of Artificial Sequence: Synthetic oligonucleotide
cuccgauaacucgggaagu

SEQ ID NO: 2667119 - RNA, 19 nt, Artificial Sequence
  Description of Artificial Sequence: Synthetic oligonucleotide
cggcaucaaaccugaguuc

SEQ ID NO: 2667120 - RNA, 19 nt, Artificial Sequence
  Description of Artificial Sequence: Synthetic oligonucleotide
cagcagcgccaccguggcc

SEQ ID NO: 2667121 - RNA, 19 nt, Artificial Sequence
  Description of Artificial Sequence: Synthetic oligonucleotide
agccggcaccucugccgug

SEQ ID NO: 2667122 - RNA, 19 nt, Artificial Sequence
  Description of Artificial Sequence: Synthetic oligonucleotide
cuguaccaacguggagauc

SEQ ID NO: 2667123 - RNA, 19 nt, Artificial Sequence
  Description of Artificial Sequence: Synthetic oligonucleotide
ggcggugagcuugguccag

SEQ ID NO: 2667124 - RNA, 19 nt, Artificial Sequence
  Description of Artificial Sequence: Synthetic oligonucleotide
gcgggagcguccacagcag

SEQ ID NO: 2667125 - RNA, 19 nt, Artificial Sequence
  Description of Artificial Sequence: Synthetic oligonucleotide
ggucccuggggagccgccc

SEQ ID NO: 2667126 - RNA, 19 nt, Artificial Sequence
  Description of Artificial Sequence: Synthetic oligonucleotide
ggcuggacgccaugggccu

SEQ ID NO: 2667127 - RNA, 19 nt, Artificial Sequence
  Description of Artificial Sequence: Synthetic oligonucleotide
gaucgccuccaugguuuua

SEQ ID NO: 2667128 - RNA, 19 nt, Artificial Sequence
  Description of Artificial Sequence: Synthetic oligonucleotide
cgaggccccgcuaguuccg

SEQ ID NO: 2667129 - RNA, 19 nt, Artificial Sequence
  Description of Artificial Sequence: Synthetic oligonucleotide
cgauaacucgggaagucgu

SEQ ID NO: 2667130 - RNA, 19 nt, Artificial Sequence
  Description of Artificial Sequence: Synthetic oligonucleotide
gagcaccggcugcgcacga

SEQ ID NO: 2667131 - RNA, 19 nt, Artificial Sequence
  Description of Artificial Sequence: Synthetic oligonucleotide
gcgcguucauucugcagcu

SEQ ID NO: 2667132 - RNA, 19 nt, Artificial Sequence
  Description of Artificial Sequence: Synthetic oligonucleotide
aggccugcgcgcguucauu

SEQ ID NO: 2667133 - RNA, 19 nt, Artificial Sequence
  Description of Artificial Sequence: Synthetic oligonucleotide
ggaaggccugcgcgcguuc

SEQ ID NO: 2667134 - RNA, 19 nt, Artificial Sequence
  Description of Artificial Sequence: Synthetic oligonucleotide
ccaucaccugcagcagcgc

SEQ ID NO: 2667135 - RNA, 19 nt, Artificial Sequence
  Description of Artificial Sequence: Synthetic oligonucleotide
cgagcaccggcugcgcacg

SEQ ID NO: 2667136 - RNA, 19 nt, Artificial Sequence
  Description of Artificial Sequence: Synthetic oligonucleotide
cguggugcuggccgcugag

SEQ ID NO: 2667137 - RNA, 19 nt, Artificial Sequence
  Description of Artificial Sequence: Synthetic oligonucleotide
gcacguggcgagcgagcac

SEQ ID NO: 2667138 - RNA, 19 nt, Artificial Sequence
  Description of Artificial Sequence: Synthetic oligonucleotide
gcagccuggaggggcacga

SEQ ID NO: 2667139 - RNA, 19 nt, Artificial Sequence
  Description of Artificial Sequence: Synthetic oligonucleotide
ccgcuaguuccgcuuccac

SEQ ID NO: 2667140 - RNA, 19 nt, Artificial Sequence
  Description of Artificial Sequence: Synthetic oligonucleotide
uacuggcggugagcuuggu

SEQ ID NO: 2667141 - RNA, 19 nt, Artificial Sequence
  Description of Artificial Sequence: Synthetic oligonucleotide
gcacgacacuccgauaacu

SEQ ID NO: 2667142 - RNA, 19 nt, Artificial Sequence
  Description of Artificial Sequence: Synthetic oligonucleotide
ggcugggcuggacgccaug

SEQ ID NO: 2667143 - RNA, 19 nt, Artificial Sequence
  Description of Artificial Sequence: Synthetic oligonucleotide
cagccuggaggggcacgac

SEQ ID NO: 2667144 - RNA, 19 nt, Artificial Sequence
  Description of Artificial Sequence: Synthetic oligonucleotide
cucugccguggcggugagc

SEQ ID NO: 2667145 - RNA, 19 nt, Artificial Sequence
  Description of Artificial Sequence: Synthetic oligonucleotide
gcugaucgccuccaugguu

SEQ ID NO: 2667146 - RNA, 19 nt, Artificial Sequence
  Description of Artificial Sequence: Synthetic oligonucleotide
ccuggaggggcacgaccuc

SEQ ID NO: 2667147 - RNA, 19 nt, Artificial Sequence
  Description of Artificial Sequence: Synthetic oligonucleotide
gccccgcuaguuccgcuuc

SEQ ID NO: 2667148 - RNA, 19 nt, Artificial Sequence
  Description of Artificial Sequence: Synthetic oligonucleotide
cggggcgucucuccaggcc

SEQ ID NO: 2667149 - RNA, 19 nt, Artificial Sequence
  Description of Artificial Sequence: Synthetic oligonucleotide
ccccgcuaguuccgcuucc

SEQ ID NO: 2667150 - RNA, 19 nt, Artificial Sequence
  Description of Artificial Sequence: Synthetic oligonucleotide
gcgucuguuccagguccug

SEQ ID NO: 2667151 - RNA, 19 nt, Artificial Sequence
  Description of Artificial Sequence: Synthetic oligonucleotide
cggcggaaggccugcgcgc

SEQ ID NO: 2667152 - RNA, 19 nt, Artificial Sequence
  Description of Artificial Sequence: Synthetic oligonucleotide
gccuggaggggcacgaccu

SEQ ID NO: 2667153 - RNA, 19 nt, Artificial Sequence
  Description of Artificial Sequence: Synthetic oligonucleotide
gcgucucuccaggcccacg

SEQ ID NO: 2667154 - RNA, 19 nt, Artificial Sequence
  Description of Artificial Sequence: Synthetic oligonucleotide
gcaucaaaccugaguuccu

SEQ ID NO: 2667155 - RNA, 19 nt, Artificial Sequence
  Description of Artificial Sequence: Synthetic oligonucleotide
gccguggcggugagcauga

SEQ ID NO: 2667156 - RNA, 19 nt, Artificial Sequence
  Description of Artificial Sequence: Synthetic oligonucleotide
cugcgcacguggcgagcga

SEQ ID NO: 2667157 - RNA, 19 nt, Artificial Sequence
  Description of Artificial Sequence: Synthetic oligonucleotide
gcuggcgaucagggcuggg

SEQ ID NO: 2667158 - RNA, 19 nt, Artificial Sequence
  Description of Artificial Sequence: Synthetic oligonucleotide
gggcacgaccucagccagc

SEQ ID NO: 2667159 - RNA, 19 nt, Artificial Sequence
  Description of Artificial Sequence: Synthetic oligonucleotide
gcgcacguggcgagcgagc

SEQ ID NO: 2667160 - RNA, 19 nt, Artificial Sequence
  Description of Artificial Sequence: Synthetic oligonucleotide
cgggagcguccacagcagc

SEQ ID NO: 2667161 - RNA, 19 nt, Artificial Sequence
  Description of Artificial Sequence: Synthetic oligonucleotide
ggcugcgcacgaggccccg

SEQ ID NO: 2667162 - RNA, 19 nt, Artificial Sequence
  Description of Artificial Sequence: Synthetic oligonucleotide
cuggacgccaugggccucu

SEQ ID NO: 2667163 - RNA, 19 nt, Artificial Sequence
  Description of Artificial Sequence: Synthetic oligonucleotide
ggcugcgcacguggcgagc

SEQ ID NO: 2667164 - RNA, 19 nt, Artificial Sequence
  Description of Artificial Sequence: Synthetic oligonucleotide
cuggggagccgcccucacu

SEQ ID NO: 2667165 - RNA, 19 nt, Artificial Sequence
  Description of Artificial Sequence: Synthetic oligonucleotide
ccuggggagccgcccucac

SEQ ID NO: 2667166 - RNA, 19 nt, Artificial Sequence
  Description of Artificial Sequence: Synthetic oligonucleotide
gcgaaggccugggucaccu

SEQ ID NO: 2667167 - RNA, 19 nt, Artificial Sequence
  Description of Artificial Sequence: Synthetic oligonucleotide
gcgccaccguggccaggcg

SEQ ID NO: 2667168 - RNA, 19 nt, Artificial Sequence
  Description of Artificial Sequence: Synthetic oligonucleotide
gccaggcgcgucuguucca

SEQ ID NO: 2667169 - RNA, 19 nt, Artificial Sequence
  Description of Artificial Sequence: Synthetic oligonucleotide
cgcuaguuccgcuuccacu

SEQ ID NO: 2667170 - RNA, 19 nt, Artificial Sequence
  Description of Artificial Sequence: Synthetic oligonucleotide
cccacgccggcuccguaga

SEQ ID NO: 2667171 - RNA, 19 nt, Artificial Sequence
  Description of Artificial Sequence: Synthetic oligonucleotide
aggcagcggcgaaggccug

SEQ ID NO: 2667172 - RNA, 19 nt, Artificial Sequence
  Description of Artificial Sequence: Synthetic oligonucleotide
ggcgucucuccaggcccac

SEQ ID NO: 2667173 - RNA, 19 nt, Artificial Sequence
  Description of Artificial Sequence: Synthetic oligonucleotide
uggacgccaugggccucuu

SEQ ID NO: 2667174 - RNA, 19 nt, Artificial Sequence
  Description of Artificial Sequence: Synthetic oligonucleotide
gccugcgcgcguucauucu

SEQ ID NO: 2667175 - RNA, 19 nt, Artificial Sequence
  Description of Artificial Sequence: Synthetic oligonucleotide
gcugcgcacgaggccccgc

SEQ ID NO: 2667176 - RNA, 19 nt, Artificial Sequence
  Description of Artificial Sequence: Synthetic oligonucleotide
guggccaggcgcgucuguu

SEQ ID NO: 2667177 - RNA, 19 nt, Artificial Sequence
  Description of Artificial Sequence: Synthetic oligonucleotide
ccggcaccucugccguggc

SEQ ID NO: 2667178 - RNA, 19 nt, Artificial Sequence
  Description of Artificial Sequence: Synthetic oligonucleotide
cguggcgagcgagcaccgg

SEQ ID NO: 2667179 - RNA, 19 nt, Artificial Sequence
  Description of Artificial Sequence: Synthetic oligonucleotide
gcaccucugccguggcggu

SEQ ID NO: 2667180 - RNA, 19 nt, Artificial Sequence
  Description of Artificial Sequence: Synthetic oligonucleotide
cccgcuaguuccgcuucca

SEQ ID NO: 2667181 - RNA, 19 nt, Artificial Sequence
  Description of Artificial Sequence: Synthetic oligonucleotide
ggggagccgcccucacucu

SEQ ID NO: 2667182 - RNA, 19 nt, Artificial Sequence
  Description of Artificial Sequence: Synthetic oligonucleotide
cggcaccucugccguggcg

SEQ ID NO: 2667183 - RNA, 19 nt, Artificial Sequence
  Description of Artificial Sequence: Synthetic oligonucleotide
gcuggacgccaugggccuc

SEQ ID NO: 2667184 - RNA, 19 nt, Artificial Sequence
  Description of Artificial Sequence: Synthetic oligonucleotide
cgccggcuccguagaugcg

SEQ ID NO: 2667185 - RNA, 19 nt, Artificial Sequence
  Description of Artificial Sequence: Synthetic oligonucleotide
cgcacguggcgagcgagca

SEQ ID NO: 2667186 - RNA, 19 nt, Artificial Sequence
  Description of Artificial Sequence: Synthetic oligonucleotide
ggccccgcuaguuccgcuu

SEQ ID NO: 2667187 - RNA, 19 nt, Artificial Sequence
  Description of Artificial Sequence: Synthetic oligonucleotide
cgcguucauucugcagcug

SEQ ID NO: 2667188 - RNA, 19 nt, Artificial Sequence
  Description of Artificial Sequence: Synthetic oligonucleotide
cguggcggugagcaugacu

SEQ ID NO: 2667189 - RNA, 19 nt, Artificial Sequence
  Description of Artificial Sequence: Synthetic oligonucleotide
cccgagaggcagcggcgaa

SEQ ID NO: 2667190 - RNA, 19 nt, Artificial Sequence
  Description of Artificial Sequence: Synthetic oligonucleotide
cgugcacgacacuccgaua

SEQ ID NO: 2667191 - RNA, 19 nt, Artificial Sequence
  Description of Artificial Sequence: Synthetic oligonucleotide
cugccguggcggugagcau

SEQ ID NO: 2667192 - RNA, 19 nt, Artificial Sequence
  Description of Artificial Sequence: Synthetic oligonucleotide
cagcggcgaaggccugggu

SEQ ID NO: 2667193 - RNA, 19 nt, Artificial Sequence
  Description of Artificial Sequence: Synthetic oligonucleotide
ccgcccucacucugcagau

SEQ ID NO: 2667194 - RNA, 19 nt, Artificial Sequence
  Description of Artificial Sequence: Synthetic oligonucleotide
gcacgaggccccgcuaguu

SEQ ID NO: 2667195 - RNA, 19 nt, Artificial Sequence
  Description of Artificial Sequence: Synthetic oligonucleotide
cgcugaucgccuccauggu

SEQ ID NO: 2667196 - RNA, 19 nt, Artificial Sequence
  Description of Artificial Sequence: Synthetic oligonucleotide
ggcccacgccggcuccgua

SEQ ID NO: 2667197 - RNA, 19 nt, Artificial Sequence
  Description of Artificial Sequence: Synthetic oligonucleotide
cgccuccaugguuuuaauu

SEQ ID NO: 2667198 - RNA, 19 nt, Artificial Sequence
  Description of Artificial Sequence: Synthetic oligonucleotide
cgcgucuguuccagguccu

SEQ ID NO: 2667199 - RNA, 19 nt, Artificial Sequence
  Description of Artificial Sequence: Synthetic oligonucleotide
gcuggccgcugagcaggua

SEQ ID NO: 2667200 - RNA, 19 nt, Artificial Sequence
  Description of Artificial Sequence: Synthetic oligonucleotide
cgcacgaggccccgcuagu

SEQ ID NO: 2667201 - RNA, 19 nt, Artificial Sequence
  Description of Artificial Sequence: Synthetic oligonucleotide
ccguggcggugagcaugac

SEQ ID NO: 2667202 - RNA, 19 nt, Artificial Sequence
  Description of Artificial Sequence: Synthetic oligonucleotide
cgaucagggcugggcugga

SEQ ID NO: 2667203 - RNA, 19 nt, Artificial Sequence
  Description of Artificial Sequence: Synthetic oligonucleotide
ccucgcugaucgccuccau

SEQ ID NO: 2667204 - RNA, 19 nt, Artificial Sequence
  Description of Artificial Sequence: Synthetic oligonucleotide
ccacgccggcuccguagau

SEQ ID NO: 2667205 - RNA, 19 nt, Artificial Sequence
  Description of Artificial Sequence: Synthetic oligonucleotide
cguggagaucggggcgucu

SEQ ID NO: 2667206 - RNA, 19 nt, Artificial Sequence
  Description of Artificial Sequence: Synthetic oligonucleotide
cggaaggccugcgcgcguu

SEQ ID NO: 2667207 - RNA, 19 nt, Artificial Sequence
  Description of Artificial Sequence: Synthetic oligonucleotide
aagacgaauauccagaagc

SEQ ID NO: 2667208 - RNA, 19 nt, Artificial Sequence
  Description of Artificial Sequence: Synthetic oligonucleotide
aaacuuggaaccuggaugc

SEQ ID NO: 2667209 - RNA, 19 nt, Artificial Sequence
  Description of Artificial Sequence: Synthetic oligonucleotide
aaaacuuggaaccuggaug

SEQ ID NO: 2667210 - RNA, 19 nt, Artificial Sequence
  Description of Artificial Sequence: Synthetic oligonucleotide
caaaagauggauuugguag

SEQ ID NO: 2667211 - RNA, 19 nt, Artificial Sequence
  Description of Artificial Sequence: Synthetic oligonucleotide
aaugguuccacacacuuug

SEQ ID NO: 2667212 - RNA, 19 nt, Artificial Sequence
  Description of Artificial Sequence: Synthetic oligonucleotide
uauaauaucugugaaaacu

SEQ ID NO: 2667213 - RNA, 19 nt, Artificial Sequence
  Description of Artificial Sequence: Synthetic oligonucleotide
ucugugaaaacuuggaacc

SEQ ID NO: 2667214 - RNA, 19 nt, Artificial Sequence
  Description of Artificial Sequence: Synthetic oligonucleotide
aaagaucuguggcaugucc

SEQ ID NO: 2667215 - RNA, 19 nt, Artificial Sequence
  Description of Artificial Sequence: Synthetic oligonucleotide
uccuccaaaauuuugacca

SEQ ID NO: 2667216 - RNA, 19 nt, Artificial Sequence
  Description of Artificial Sequence: Synthetic oligonucleotide
uuugguagaacuuagccuc

SEQ ID NO: 2667217 - RNA, 19 nt, Artificial Sequence
  Description of Artificial Sequence: Synthetic oligonucleotide
acacuuugcaucuuccucc

SEQ ID NO: 2667218 - RNA, 19 nt, Artificial Sequence
  Description of Artificial Sequence: Synthetic oligonucleotide
gauuugguagaacuuagcc

SEQ ID NO: 2667219 - RNA, 19 nt, Artificial Sequence
  Description of Artificial Sequence: Synthetic oligonucleotide
uguaguuuggcacucccag

SEQ ID NO: 2667220 - RNA, 19 nt, Artificial Sequence
  Description of Artificial Sequence: Synthetic oligonucleotide
aaaagauggauuugguaga

SEQ ID NO: 2667221 - RNA, 19 nt, Artificial Sequence
  Description of Artificial Sequence: Synthetic oligonucleotide
uucaccaaagaucuguggc

SEQ ID NO: 2667222 - RNA, 19 nt, Artificial Sequence
  Description of Artificial Sequence: Synthetic oligonucleotide
guagaacuuagccucaugg

SEQ ID NO: 2667223 - RNA, 19 nt, Artificial Sequence
  Description of Artificial Sequence: Synthetic oligonucleotide
uugacaaucgcauugccac

SEQ ID NO: 2667224 - RNA, 19 nt, Artificial Sequence
  Description of Artificial Sequence: Synthetic oligonucleotide
auaggcccaaaguaggugc

SEQ ID NO: 2667225 - RNA, 19 nt, Artificial Sequence
  Description of Artificial Sequence: Synthetic oligonucleotide
aaauuugacaacagguguc

SEQ ID NO: 2667226 - RNA, 19 nt, Artificial Sequence
  Description of Artificial Sequence: Synthetic oligonucleotide
gaucaaugaagacacggcc

SEQ ID NO: 2667227 - RNA, 19 nt, Artificial Sequence
  Description of Artificial Sequence: Synthetic oligonucleotide
caaaguaggugccaggacg

SEQ ID NO: 2667228 - RNA, 19 nt, Artificial Sequence
  Description of Artificial Sequence: Synthetic oligonucleotide
ucaggaauguacucugugg

SEQ ID NO: 2667229 - RNA, 19 nt, Artificial Sequence
  Description of Artificial Sequence: Synthetic oligonucleotide
aucaccaccaagugaagac

SEQ ID NO: 2667230 - RNA, 19 nt, Artificial Sequence
  Description of Artificial Sequence: Synthetic oligonucleotide
auaugcaaugguuccacac

SEQ ID NO: 2667231 - RNA, 19 nt, Artificial Sequence
  Description of Artificial Sequence: Synthetic oligonucleotide
caagauaggcccaaaguag

SEQ ID NO: 2667232 - RNA, 19 nt, Artificial Sequence
  Description of Artificial Sequence: Synthetic oligonucleotide
agugaagacgaauauccag

SEQ ID NO: 2667233 - RNA, 19 nt, Artificial Sequence
  Description of Artificial Sequence: Synthetic oligonucleotide
caagauaugcaaugguucc

SEQ ID NO: 2667234 - RNA, 19 nt, Artificial Sequence
  Description of Artificial Sequence: Synthetic oligonucleotide
uauaccucaggaauguacu

SEQ ID NO: 2667235 - RNA, 19 nt, Artificial Sequence
  Description of Artificial Sequence: Synthetic oligonucleotide
aacaaacaguccccauucc

SEQ ID NO: 2667236 - RNA, 19 nt, Artificial Sequence
  Description of Artificial Sequence: Synthetic oligonucleotide
auugccacggccucugccc

SEQ ID NO: 2667237 - RNA, 19 nt, Artificial Sequence
  Description of Artificial Sequence: Synthetic oligonucleotide
auuccuggggaucaccacc

SEQ ID NO: 2667238 - RNA, 19 nt, Artificial Sequence
  Description of Artificial Sequence: Synthetic oligonucleotide
uuucccagugcguagguag

SEQ ID NO: 2667239 - RNA, 19 nt, Artificial Sequence
  Description of Artificial Sequence: Synthetic oligonucleotide
auuugguagaacuuagccu

SEQ ID NO: 2667240 - RNA, 19 nt, Artificial Sequence
  Description of Artificial Sequence: Synthetic oligonucleotide
uaugcaaugguuccacaca

SEQ ID NO: 2667241 - RNA, 19 nt, Artificial Sequence
  Description of Artificial Sequence: Synthetic oligonucleotide
aaauuuugaccaaaagaug

SEQ ID NO: 2667242 - RNA, 19 nt, Artificial Sequence
  Description of Artificial Sequence: Synthetic oligonucleotide
agauggauuugguagaacu

SEQ ID NO: 2667243 - RNA, 19 nt, Artificial Sequence
  Description of Artificial Sequence: Synthetic oligonucleotide
aucgguauaauaucuguga

SEQ ID NO: 2667244 - RNA, 19 nt, Artificial Sequence
  Description of Artificial Sequence: Synthetic oligonucleotide
aucccuguagcauuucucg

SEQ ID NO: 2667245 - RNA, 19 nt, Artificial Sequence
  Description of Artificial Sequence: Synthetic oligonucleotide
ucucuuuguaguuuggcac

SEQ ID NO: 2667246 - RNA, 19 nt, Artificial Sequence
  Description of Artificial Sequence: Synthetic oligonucleotide
gaggggacaccuuauaccc

SEQ ID NO: 2667247 - RNA, 19 nt, Artificial Sequence
  Description of Artificial Sequence: Synthetic oligonucleotide
acaccuuauaccccugggc

SEQ ID NO: 2667248 - RNA, 19 nt, Artificial Sequence
  Description of Artificial Sequence: Synthetic oligonucleotide
ucucggaucgguauaauau

SEQ ID NO: 2667249 - RNA, 19 nt, Artificial Sequence
  Description of Artificial Sequence: Synthetic oligonucleotide
guaugcaccacacacacca

SEQ ID NO: 2667250 - RNA, 19 nt, Artificial Sequence
  Description of Artificial Sequence: Synthetic oligonucleotide
uaacaaacaguccccauuc

SEQ ID NO: 2667251 - RNA, 19 nt, Artificial Sequence
  Description of Artificial Sequence: Synthetic oligonucleotide
uuugacaaucgcauugcca

SEQ ID NO: 2667252 - RNA, 19 nt, Artificial Sequence
  Description of Artificial Sequence: Synthetic oligonucleotide
uugaccaaaagauggauuu

SEQ ID NO: 2667253 - RNA, 19 nt, Artificial Sequence
  Description of Artificial Sequence: Synthetic oligonucleotide
gaccaaaagauggauuugg

SEQ ID NO: 2667254 - RNA, 19 nt, Artificial Sequence
  Description of Artificial Sequence: Synthetic oligonucleotide
ugaggggacaccuuauacc

SEQ ID NO: 2667255 - RNA, 19 nt, Artificial Sequence
  Description of Artificial Sequence: Synthetic oligonucleotide
uaguuuggcacucccagca

SEQ ID NO: 2667256 - RNA, 19 nt, Artificial Sequence
  Description of Artificial Sequence: Synthetic oligonucleotide
uggauuugguagaacuuag

SEQ ID NO: 2667257 - RNA, 19 nt, Artificial Sequence
  Description of Artificial Sequence: Synthetic oligonucleotide
aauuugacaacaggugucu

SEQ ID NO: 2667258 - RNA, 19 nt, Artificial Sequence
  Description of Artificial Sequence: Synthetic oligonucleotide
caggcaguacacaaggucc

SEQ ID NO: 2667259 - RNA, 19 nt, Artificial Sequence
  Description of Artificial Sequence: Synthetic oligonucleotide
acuuguucaccaaagaucu

SEQ ID NO: 2667260 - RNA, 19 nt, Artificial Sequence
  Description of Artificial Sequence: Synthetic oligonucleotide
caggaauguacucuguggg

SEQ ID NO: 2667261 - RNA, 19 nt, Artificial Sequence
  Description of Artificial Sequence: Synthetic oligonucleotide
cucuguaugcaccacacac

SEQ ID NO: 2667262 - RNA, 19 nt, Artificial Sequence
  Description of Artificial Sequence: Synthetic oligonucleotide
uuuguaguuuggcacuccc

SEQ ID NO: 2667263 - RNA, 19 nt, Artificial Sequence
  Description of Artificial Sequence: Synthetic oligonucleotide
cacuuguucaccaaagauc

SEQ ID NO: 2667264 - RNA, 19 nt, Artificial Sequence
  Description of Artificial Sequence: Synthetic oligonucleotide
ucaggugguaccucugagg

SEQ ID NO: 2667265 - RNA, 19 nt, Artificial Sequence
  Description of Artificial Sequence: Synthetic oligonucleotide
ucuguaugcaccacacaca

SEQ ID NO: 2667266 - RNA, 19 nt, Artificial Sequence
  Description of Artificial Sequence: Synthetic oligonucleotide
uuagccucaugguauaccu

SEQ ID NO: 2667267 - RNA, 19 nt, Artificial Sequence
  Description of Artificial Sequence: Synthetic oligonucleotide
acgaucaaugaagacacgg

SEQ ID NO: 2667268 - RNA, 19 nt, Artificial Sequence
  Description of Artificial Sequence: Synthetic oligonucleotide
accuuugacaaucgcauug

SEQ ID NO: 2667269 - RNA, 19 nt, Artificial Sequence
  Description of Artificial Sequence: Synthetic oligonucleotide
gaagacacggcccugugca

SEQ ID NO: 2667270 - RNA, 19 nt, Artificial Sequence
  Description of Artificial Sequence: Synthetic oligonucleotide
ucaccaaagaucuguggca

SEQ ID NO: 2667271 - RNA, 19 nt, Artificial Sequence
  Description of Artificial Sequence: Synthetic oligonucleotide
gguaguccaagauaggccc

SEQ ID NO: 2667272 - RNA, 19 nt, Artificial Sequence
  Description of Artificial Sequence: Synthetic oligonucleotide
agauaugcaaugguuccac

SEQ ID NO: 2667273 - RNA, 19 nt, Artificial Sequence
  Description of Artificial Sequence: Synthetic oligonucleotide
uaucugugaaaacuuggaa

SEQ ID NO: 2667274 - RNA, 19 nt, Artificial Sequence
  Description of Artificial Sequence: Synthetic oligonucleotide
uccaagauaugcaaugguu

SEQ ID NO: 2667275 - RNA, 19 nt, Artificial Sequence
  Description of Artificial Sequence: Synthetic oligonucleotide
uccaaaauuuugaccaaaa

SEQ ID NO: 2667276 - RNA, 19 nt, Artificial Sequence
  Description of Artificial Sequence: Synthetic oligonucleotide
uccagguucucuuuguagu

SEQ ID NO: 2667277 - RNA, 19 nt, Artificial Sequence
  Description of Artificial Sequence: Synthetic oligonucleotide
accuggaugcuucaucagg

SEQ ID NO: 2667278 - RNA, 19 nt, Artificial Sequence
  Description of Artificial Sequence: Synthetic oligonucleotide
uacucugugggcacuuucc

SEQ ID NO: 2667279 - RNA, 19 nt, Artificial Sequence
  Description of Artificial Sequence: Synthetic oligonucleotide
agaucuguggcauguccuc

SEQ ID NO: 2667280 - RNA, 19 nt, Artificial Sequence
  Description of Artificial Sequence: Synthetic oligonucleotide
uguucaccaaagaucugug

SEQ ID NO: 2667281 - RNA, 19 nt, Artificial Sequence
  Description of Artificial Sequence: Synthetic oligonucleotide
agaacuuagccucauggua

SEQ ID NO: 2667282 - RNA, 19 nt, Artificial Sequence
  Description of Artificial Sequence: Synthetic oligonucleotide
ugggcacuuucccagugcg

SEQ ID NO: 2667283 - RNA, 19 nt, Artificial Sequence
  Description of Artificial Sequence: Synthetic oligonucleotide
ucggaucgguauaauaucu

SEQ ID NO: 2667284 - RNA, 19 nt, Artificial Sequence
  Description of Artificial Sequence: Synthetic oligonucleotide
uuguucaccaaagaucugu

SEQ ID NO: 2667285 - RNA, 19 nt, Artificial Sequence
  Description of Artificial Sequence: Synthetic oligonucleotide
agguaguccaagauaggcc

SEQ ID NO: 2667286 - RNA, 19 nt, Artificial Sequence
  Description of Artificial Sequence: Synthetic oligonucleotide
uguggcauguccuccaaaa

SEQ ID NO: 2667287 - RNA, 19 nt, Artificial Sequence
  Description of Artificial Sequence: Synthetic oligonucleotide
gacaaucgcauugccacgg

SEQ ID NO: 2667288 - RNA, 19 nt, Artificial Sequence
  Description of Artificial Sequence: Synthetic oligonucleotide
uagaacuuagccucauggu

SEQ ID NO: 2667289 - RNA, 19 nt, Artificial Sequence
  Description of Artificial Sequence: Synthetic oligonucleotide
gaaccuggaugcuucauca

SEQ ID NO: 2667290 - RNA, 19 nt, Artificial Sequence
  Description of Artificial Sequence: Synthetic oligonucleotide
gacaccuuauaccccuggg

SEQ ID NO: 2667291 - RNA, 19 nt, Artificial Sequence
  Description of Artificial Sequence: Synthetic oligonucleotide
cuguaugcaccacacacac

SEQ ID NO: 2667292 - RNA, 19 nt, Artificial Sequence
  Description of Artificial Sequence: Synthetic oligonucleotide
uuugaccaaaagauggauu

SEQ ID NO: 2667293 - RNA, 19 nt, Artificial Sequence
  Description of Artificial Sequence: Synthetic oligonucleotide
gaagacgaauauccagaag

SEQ ID NO: 2667294 - RNA, 19 nt, Artificial Sequence
  Description of Artificial Sequence: Synthetic oligonucleotide
acgaauauccagaagcaug

SEQ ID NO: 2667295 - RNA, 19 nt, Artificial Sequence
  Description of Artificial Sequence: Synthetic oligonucleotide
uguaggggucccuauucag

SEQ ID NO: 2667296 - RNA, 19 nt, Artificial Sequence
  Description of Artificial Sequence: Synthetic oligonucleotide
ucgguauaauaucugugaa

SEQ ID NO: 2667297 - RNA, 19 nt, Artificial Sequence
  Description of Artificial Sequence: Synthetic oligonucleotide
gguauaauaucugugaaaa

SEQ ID NO: 2667298 - RNA, 19 nt, Artificial Sequence
  Description of Artificial Sequence: Synthetic oligonucleotide
cuccaggcaguacacaagg

SEQ ID NO: 2667299 - RNA, 19 nt, Artificial Sequence
  Description of Artificial Sequence: Synthetic oligonucleotide
ucaccaccaagugaagacg

SEQ ID NO: 2667300 - RNA, 19 nt, Artificial Sequence
  Description of Artificial Sequence: Synthetic oligonucleotide
uuuggccuccaagauaugc

SEQ ID NO: 2667301 - RNA, 19 nt, Artificial Sequence
  Description of Artificial Sequence: Synthetic oligonucleotide
uguguaggggucccuauuc

SEQ ID NO: 2667302 - RNA, 19 nt, Artificial Sequence
  Description of Artificial Sequence: Synthetic oligonucleotide
acaaacaguccccauuccu

SEQ ID NO: 2667303 - RNA, 19 nt, Artificial Sequence
  Description of Artificial Sequence: Synthetic oligonucleotide
agccucaugguauaccuca

SEQ ID NO: 2667304 - RNA, 19 nt, Artificial Sequence
  Description of Artificial Sequence: Synthetic oligonucleotide
ugacaaucgcauugccacg

SEQ ID NO: 2667305 - RNA, 19 nt, Artificial Sequence
  Description of Artificial Sequence: Synthetic oligonucleotide
ugaagacgaauauccagaa

SEQ ID NO: 2667306 - RNA, 19 nt, Artificial Sequence
  Description of Artificial Sequence: Synthetic oligonucleotide
uuuggcacucccagcagga

SEQ ID NO: 2667307 - RNA, 19 nt, Artificial Sequence
  Description of Artificial Sequence: Synthetic oligonucleotide
uguccuccaaaauuuugac

SEQ ID NO: 2667308 - RNA, 19 nt, Artificial Sequence
  Description of Artificial Sequence: Synthetic oligonucleotide
gugaaaacuuggaaccugg

SEQ ID NO: 2667309 - RNA, 19 nt, Artificial Sequence
  Description of Artificial Sequence: Synthetic oligonucleotide
uggaugcuucaucagggug

SEQ ID NO: 2667310 - RNA, 19 nt, Artificial Sequence
  Description of Artificial Sequence: Synthetic oligonucleotide
acaagguccucguucccgg

SEQ ID NO: 2667311 - RNA, 19 nt, Artificial Sequence
  Description of Artificial Sequence: Synthetic oligonucleotide
auaccucaggaauguacuc

SEQ ID NO: 2667312 - RNA, 19 nt, Artificial Sequence
  Description of Artificial Sequence: Synthetic oligonucleotide
cuuggaaccuggaugcuuc

SEQ ID NO: 2667313 - RNA, 19 nt, Artificial Sequence
  Description of Artificial Sequence: Synthetic oligonucleotide
uucaggugguaccucugag

SEQ ID NO: 2667314 - RNA, 19 nt, Artificial Sequence
  Description of Artificial Sequence: Synthetic oligonucleotide
uaccccugggcucuaaugu

SEQ ID NO: 2667315 - RNA, 19 nt, Artificial Sequence
  Description of Artificial Sequence: Synthetic oligonucleotide
aagguccucguucccgggg

SEQ ID NO: 2667316 - RNA, 19 nt, Artificial Sequence
  Description of Artificial Sequence: Synthetic oligonucleotide
caggaacugcauucgagcc

SEQ ID NO: 2667317 - RNA, 19 nt, Artificial Sequence
  Description of Artificial Sequence: Synthetic oligonucleotide
aaaguaggugccaggacga

SEQ ID NO: 2667318 - RNA, 19 nt, Artificial Sequence
  Description of Artificial Sequence: Synthetic oligonucleotide
gaucgguauaauaucugug

SEQ ID NO: 2667319 - RNA, 19 nt, Artificial Sequence
  Description of Artificial Sequence: Synthetic oligonucleotide
uuugcaucuuccuccucug

SEQ ID NO: 2667320 - RNA, 19 nt, Artificial Sequence
  Description of Artificial Sequence: Synthetic oligonucleotide
aagauggauuugguagaac

SEQ ID NO: 2667321 - RNA, 19 nt, Artificial Sequence
  Description of Artificial Sequence: Synthetic oligonucleotide
uccucuguaugcaccacac

SEQ ID NO: 2667322 - RNA, 19 nt, Artificial Sequence
  Description of Artificial Sequence: Synthetic oligonucleotide
ucccuauucaggugguacc

SEQ ID NO: 2667323 - RNA, 19 nt, Artificial Sequence
  Description of Artificial Sequence: Synthetic oligonucleotide
accuuauaccccugggcuc

SEQ ID NO: 2667324 - RNA, 19 nt, Artificial Sequence
  Description of Artificial Sequence: Synthetic oligonucleotide
ugaaaacuuggaaccugga

SEQ ID NO: 2667325 - RNA, 19 nt, Artificial Sequence
  Description of Artificial Sequence: Synthetic oligonucleotide
cguagguaguccaagauag

SEQ ID NO: 2667326 - RNA, 19 nt, Artificial Sequence
  Description of Artificial Sequence: Synthetic oligonucleotide
aagauaugcaaugguucca

SEQ ID NO: 2667327 - RNA, 19 nt, Artificial Sequence
  Description of Artificial Sequence: Synthetic oligonucleotide
uuugacaacaggugucuuu

SEQ ID NO: 2667328 - RNA, 19 nt, Artificial Sequence
  Description of Artificial Sequence: Synthetic oligonucleotide
uggcauguccuccaaaauu

SEQ ID NO: 2667329 - RNA, 19 nt, Artificial Sequence
  Description of Artificial Sequence: Synthetic oligonucleotide
ucaugguauaccucaggaa

SEQ ID NO: 2667330 - RNA, 19 nt, Artificial Sequence
  Description of Artificial Sequence: Synthetic oligonucleotide
ugaagacacggcccugugc

SEQ ID NO: 2667331 - RNA, 19 nt, Artificial Sequence
  Description of Artificial Sequence: Synthetic oligonucleotide
aaucgcauugccacggccu

SEQ ID NO: 2667332 - RNA, 19 nt, Artificial Sequence
  Description of Artificial Sequence: Synthetic oligonucleotide
ucccuguagcauuucucgg

SEQ ID NO: 2667333 - RNA, 19 nt, Artificial Sequence
  Description of Artificial Sequence: Synthetic oligonucleotide
guauaauaucugugaaaac

SEQ ID NO: 2667334 - RNA, 19 nt, Artificial Sequence
  Description of Artificial Sequence: Synthetic oligonucleotide
acaaucgcauugccacggc

SEQ ID NO: 2667335 - RNA, 19 nt, Artificial Sequence
  Description of Artificial Sequence: Synthetic oligonucleotide
accucaggaauguacucug

SEQ ID NO: 2667336 - RNA, 19 nt, Artificial Sequence
  Description of Artificial Sequence: Synthetic oligonucleotide
auaucugugaaaacuugga

SEQ ID NO: 2667337 - RNA, 19 nt, Artificial Sequence
  Description of Artificial Sequence: Synthetic oligonucleotide
cauucgagccacuuguuca

SEQ ID NO: 2667338 - RNA, 19 nt, Artificial Sequence
  Description of Artificial Sequence: Synthetic oligonucleotide
acugcauucgagccacuug

SEQ ID NO: 2667339 - RNA, 19 nt, Artificial Sequence
  Description of Artificial Sequence: Synthetic oligonucleotide
guacacaagguccucguuc

SEQ ID NO: 2667340 - RNA, 19 nt, Artificial Sequence
  Description of Artificial Sequence: Synthetic oligonucleotide
gccccuaacaaacaguccc

SEQ ID NO: 2667341 - RNA, 19 nt, Artificial Sequence
  Description of Artificial Sequence: Synthetic oligonucleotide
aaagauggauuugguagaa

SEQ ID NO: 2667342 - RNA, 19 nt, Artificial Sequence
  Description of Artificial Sequence: Synthetic oligonucleotide
acaguccccauuccugggg

SEQ ID NO: 2667343 - RNA, 19 nt, Artificial Sequence
  Description of Artificial Sequence: Synthetic oligonucleotide
uaggggucccuauucaggu

SEQ ID NO: 2667344 - RNA, 19 nt, Artificial Sequence
  Description of Artificial Sequence: Synthetic oligonucleotide
cucggaucgguauaauauc

SEQ ID NO: 2667345 - RNA, 19 nt, Artificial Sequence
  Description of Artificial Sequence: Synthetic oligonucleotide
agguccucguucccggggc

SEQ ID NO: 2667346 - RNA, 19 nt, Artificial Sequence
  Description of Artificial Sequence: Synthetic oligonucleotide
uuguaguuuggcacuccca

SEQ ID NO: 2667347 - RNA, 19 nt, Artificial Sequence
  Description of Artificial Sequence: Synthetic oligonucleotide
aagaucuguggcauguccu

SEQ ID NO: 2667348 - RNA, 19 nt, Artificial Sequence
  Description of Artificial Sequence: Synthetic oligonucleotide
accaagugaagacgaauau

SEQ ID NO: 2667349 - RNA, 19 nt, Artificial Sequence
  Description of Artificial Sequence: Synthetic oligonucleotide
gaugcuucaucagggugcc

SEQ ID NO: 2667350 - RNA, 19 nt, Artificial Sequence
  Description of Artificial Sequence: Synthetic oligonucleotide
cacacuuugcaucuuccuc

SEQ ID NO: 2667351 - RNA, 19 nt, Artificial Sequence
  Description of Artificial Sequence: Synthetic oligonucleotide
aucgcauugccacggccuc

SEQ ID NO: 2667352 - RNA, 19 nt, Artificial Sequence
  Description of Artificial Sequence: Synthetic oligonucleotide
ugguuccacacacuuugca

SEQ ID NO: 2667353 - RNA, 19 nt, Artificial Sequence
  Description of Artificial Sequence: Synthetic oligonucleotide
guauaccucaggaauguac

SEQ ID NO: 2667354 - RNA, 19 nt, Artificial Sequence
  Description of Artificial Sequence: Synthetic oligonucleotide
cuuccagggcccaaauuug

SEQ ID NO: 2667355 - RNA, 19 nt, Artificial Sequence
  Description of Artificial Sequence: Synthetic oligonucleotide
caaauuugacaacaggugu

SEQ ID NO: 2667356 - RNA, 19 nt, Artificial Sequence
  Description of Artificial Sequence: Synthetic oligonucleotide
ugguauaccucaggaaugu

SEQ ID NO: 2667357 - RNA, 19 nt, Artificial Sequence
  Description of Artificial Sequence: Synthetic oligonucleotide
cuuugacaaucgcauugcc

SEQ ID NO: 2667358 - RNA, 19 nt, Artificial Sequence
  Description of Artificial Sequence: Synthetic oligonucleotide
guaggggucccuauucagg

SEQ ID NO: 2667359 - RNA, 19 nt, Artificial Sequence
  Description of Artificial Sequence: Synthetic oligonucleotide
auuuugaccaaaagaugga

SEQ ID NO: 2667360 - RNA, 19 nt, Artificial Sequence
  Description of Artificial Sequence: Synthetic oligonucleotide
ggcucuaauguccuucucc

SEQ ID NO: 2667361 - RNA, 19 nt, Artificial Sequence
  Description of Artificial Sequence: Synthetic oligonucleotide
cucaggaauguacucugug

SEQ ID NO: 2667362 - RNA, 19 nt, Artificial Sequence
  Description of Artificial Sequence: Synthetic oligonucleotide
cucaugguauaccucagga

SEQ ID NO: 2667363 - RNA, 19 nt, Artificial Sequence
  Description of Artificial Sequence: Synthetic oligonucleotide
gaagcauguguaggggucc

SEQ ID NO: 2667364 - RNA, 19 nt, Artificial Sequence
  Description of Artificial Sequence: Synthetic oligonucleotide
uugguagaacuuagccuca

SEQ ID NO: 2667365 - RNA, 19 nt, Artificial Sequence
  Description of Artificial Sequence: Synthetic oligonucleotide
ugaccaaaagauggauuug

SEQ ID NO: 2667366 - RNA, 19 nt, Artificial Sequence
  Description of Artificial Sequence: Synthetic oligonucleotide
cagccccuaacaaacaguc

SEQ ID NO: 2667367 - RNA, 19 nt, Artificial Sequence
  Description of Artificial Sequence: Synthetic oligonucleotide
uguaugcaccacacacacc

SEQ ID NO: 2667368 - RNA, 19 nt, Artificial Sequence
  Description of Artificial Sequence: Synthetic oligonucleotide
ccaagauaugcaaugguuc

SEQ ID NO: 2667369 - RNA, 19 nt, Artificial Sequence
  Description of Artificial Sequence: Synthetic oligonucleotide
auauccagaagcaugugua

SEQ ID NO: 2667370 - RNA, 19 nt, Artificial Sequence
  Description of Artificial Sequence: Synthetic oligonucleotide
ugcguagguaguccaagau

SEQ ID NO: 2667371 - RNA, 19 nt, Artificial Sequence
  Description of Artificial Sequence: Synthetic oligonucleotide
cuuagccucaugguauacc

SEQ ID NO: 2667372 - RNA, 19 nt, Artificial Sequence
  Description of Artificial Sequence: Synthetic oligonucleotide
uugacaacaggugucuuuu

SEQ ID NO: 2667373 - RNA, 19 nt, Artificial Sequence
  Description of Artificial Sequence: Synthetic oligonucleotide
aggaacugcauucgagcca

SEQ ID NO: 2667374 - RNA, 19 nt, Artificial Sequence
  Description of Artificial Sequence: Synthetic oligonucleotide
aacuuagccucaugguaua

SEQ ID NO: 2667375 - RNA, 19 nt, Artificial Sequence
  Description of Artificial Sequence: Synthetic oligonucleotide
caugguauaccucaggaau

SEQ ID NO: 2667376 - RNA, 19 nt, Artificial Sequence
  Description of Artificial Sequence: Synthetic oligonucleotide
cugaggggacaccuuauac

SEQ ID NO: 2667377 - RNA, 19 nt, Artificial Sequence
  Description of Artificial Sequence: Synthetic oligonucleotide
guaguuuggcacucccagc

SEQ ID NO: 2667378 - RNA, 19 nt, Artificial Sequence
  Description of Artificial Sequence: Synthetic oligonucleotide
gacacggcccugugcaucc

SEQ ID NO: 2667379 - RNA, 19 nt, Artificial Sequence
  Description of Artificial Sequence: Synthetic oligonucleotide
aagugaagacgaauaucca

SEQ ID NO: 2667380 - RNA, 19 nt, Artificial Sequence
  Description of Artificial Sequence: Synthetic oligonucleotide
ggggucccuauucaggugg

SEQ ID NO: 2667381 - RNA, 19 nt, Artificial Sequence
  Description of Artificial Sequence: Synthetic oligonucleotide
acacaagguccucguuccc

SEQ ID NO: 2667382 - RNA, 19 nt, Artificial Sequence
  Description of Artificial Sequence: Synthetic oligonucleotide
ggugccaggacgaucaaug

SEQ ID NO: 2667383 - RNA, 19 nt, Artificial Sequence
  Description of Artificial Sequence: Synthetic oligonucleotide
ugccaggacgaucaaugaa

SEQ ID NO: 2667384 - RNA, 19 nt, Artificial Sequence
  Description of Artificial Sequence: Synthetic oligonucleotide
agacgaauauccagaagca

SEQ ID NO: 2667385 - RNA, 19 nt, Artificial Sequence
  Description of Artificial Sequence: Synthetic oligonucleotide
augguauaccucaggaaug

SEQ ID NO: 2667386 - RNA, 19 nt, Artificial Sequence
  Description of Artificial Sequence: Synthetic oligonucleotide
auggauuugguagaacuua

SEQ ID NO: 2667387 - RNA, 19 nt, Artificial Sequence
  Description of Artificial Sequence: Synthetic oligonucleotide
agugcguagguaguccaag

SEQ ID NO: 2667388 - RNA, 19 nt, Artificial Sequence
  Description of Artificial Sequence: Synthetic oligonucleotide
aguuuggcacucccagcag

SEQ ID NO: 2667389 - RNA, 19 nt, Artificial Sequence
  Description of Artificial Sequence: Synthetic oligonucleotide
ugcaaugguuccacacacu

SEQ ID NO: 2667390 - RNA, 19 nt, Artificial Sequence
  Description of Artificial Sequence: Synthetic oligonucleotide
guccaagauaggcccaaag

SEQ ID NO: 2667391 - RNA, 19 nt, Artificial Sequence
  Description of Artificial Sequence: Synthetic oligonucleotide
caccacacacaccaccacc

SEQ ID NO: 2667392 - RNA, 19 nt, Artificial Sequence
  Description of Artificial Sequence: Synthetic oligonucleotide
agggcccaaauuugacaac

SEQ ID NO: 2667393 - RNA, 19 nt, Artificial Sequence
  Description of Artificial Sequence: Synthetic oligonucleotide
accccugggcucuaauguc

SEQ ID NO: 2667394 - RNA, 19 nt, Artificial Sequence
  Description of Artificial Sequence: Synthetic oligonucleotide
gccaggacgaucaaugaag

SEQ ID NO: 2667395 - RNA, 19 nt, Artificial Sequence
  Description of Artificial Sequence: Synthetic oligonucleotide
gaaaacuuggaaccuggau

SEQ ID NO: 2667396 - RNA, 19 nt, Artificial Sequence
  Description of Artificial Sequence: Synthetic oligonucleotide
aauguacucugugggcacu

SEQ ID NO: 2667397 - RNA, 19 nt, Artificial Sequence
  Description of Artificial Sequence: Synthetic oligonucleotide
gauaugcaaugguuccaca

SEQ ID NO: 2667398 - RNA, 19 nt, Artificial Sequence
  Description of Artificial Sequence: Synthetic oligonucleotide
aguaggugccaggacgauc

SEQ ID NO: 2667399 - RNA, 19 nt, Artificial Sequence
  Description of Artificial Sequence: Synthetic oligonucleotide
ucugaggggacaccuuaua

SEQ ID NO: 2667400 - RNA, 19 nt, Artificial Sequence
  Description of Artificial Sequence: Synthetic oligonucleotide
accaccuuugacaaucgca

SEQ ID NO: 2667401 - RNA, 19 nt, Artificial Sequence
  Description of Artificial Sequence: Synthetic oligonucleotide
uggccuccaagauaugcaa

SEQ ID NO: 2667402 - RNA, 19 nt, Artificial Sequence
  Description of Artificial Sequence: Synthetic oligonucleotide
uggcacucccagcaggaac

SEQ ID NO: 2667403 - RNA, 19 nt, Artificial Sequence
  Description of Artificial Sequence: Synthetic oligonucleotide
caucccuguagcauuucuc

SEQ ID NO: 2667404 - RNA, 19 nt, Artificial Sequence
  Description of Artificial Sequence: Synthetic oligonucleotide
uucucggaucgguauaaua

SEQ ID NO: 2667405 - RNA, 19 nt, Artificial Sequence
  Description of Artificial Sequence: Synthetic oligonucleotide
guagguaguccaagauagg

SEQ ID NO: 2667406 - RNA, 19 nt, Artificial Sequence
  Description of Artificial Sequence: Synthetic oligonucleotide
caucagggugcccauggug

SEQ ID NO: 2667407 - RNA, 19 nt, Artificial Sequence
  Description of Artificial Sequence: Synthetic oligonucleotide
agcaggaacugcauucgag

SEQ ID NO: 2667408 - RNA, 19 nt, Artificial Sequence
  Description of Artificial Sequence: Synthetic oligonucleotide
gaucuguggcauguccucc

SEQ ID NO: 2667409 - RNA, 19 nt, Artificial Sequence
  Description of Artificial Sequence: Synthetic oligonucleotide
gccuccaagauaugcaaug

SEQ ID NO: 2667410 - RNA, 19 nt, Artificial Sequence
  Description of Artificial Sequence: Synthetic oligonucleotide
ucgagccacuuguucacca

SEQ ID NO: 2667411 - RNA, 19 nt, Artificial Sequence
  Description of Artificial Sequence: Synthetic oligonucleotide
gaauauccagaagcaugug

SEQ ID NO: 2667412 - RNA, 19 nt, Artificial Sequence
  Description of Artificial Sequence: Synthetic oligonucleotide
ucuuuguaguuuggcacuc

SEQ ID NO: 2667413 - RNA, 19 nt, Artificial Sequence
  Description of Artificial Sequence: Synthetic oligonucleotide
caaucgcauugccacggcc

SEQ ID NO: 2667414 - RNA, 19 nt, Artificial Sequence
  Description of Artificial Sequence: Synthetic oligonucleotide
uaugcaccacacacaccac

SEQ ID NO: 2667415 - RNA, 19 nt, Artificial Sequence
  Description of Artificial Sequence: Synthetic oligonucleotide
uucccagugcguagguagu

SEQ ID NO: 2667416 - RNA, 19 nt, Artificial Sequence
  Description of Artificial Sequence: Synthetic oligonucleotide
guagcauuucucggaucgg

SEQ ID NO: 2667417 - RNA, 19 nt, Artificial Sequence
  Description of Artificial Sequence: Synthetic oligonucleotide
acuuagccucaugguauac

SEQ ID NO: 2667418 - RNA, 19 nt, Artificial Sequence
  Description of Artificial Sequence: Synthetic oligonucleotide
auuucucggaucgguauaa

SEQ ID NO: 2667419 - RNA, 19 nt, Artificial Sequence
  Description of Artificial Sequence: Synthetic oligonucleotide
gaacuuagccucaugguau

SEQ ID NO: 2667420 - RNA, 19 nt, Artificial Sequence
  Description of Artificial Sequence: Synthetic oligonucleotide
cacuuucccagugcguagg

SEQ ID NO: 2667421 - RNA, 19 nt, Artificial Sequence
  Description of Artificial Sequence: Synthetic oligonucleotide
cauugccacggccucugcc

SEQ ID NO: 2667422 - RNA, 19 nt, Artificial Sequence
  Description of Artificial Sequence: Synthetic oligonucleotide
cagggcccaaauuugacaa

SEQ ID NO: 2667423 - RNA, 19 nt, Artificial Sequence
  Description of Artificial Sequence: Synthetic oligonucleotide
augaagacacggcccugug

SEQ ID NO: 2667424 - RNA, 19 nt, Artificial Sequence
  Description of Artificial Sequence: Synthetic oligonucleotide
agggugcccaugguggugg

SEQ ID NO: 2667425 - RNA, 19 nt, Artificial Sequence
  Description of Artificial Sequence: Synthetic oligonucleotide
agccccuaacaaacagucc

SEQ ID NO: 2667426 - RNA, 19 nt, Artificial Sequence
  Description of Artificial Sequence: Synthetic oligonucleotide
cuuuguaguuuggcacucc

SEQ ID NO: 2667427 - RNA, 19 nt, Artificial Sequence
  Description of Artificial Sequence: Synthetic oligonucleotide
caccaagugaagacgaaua

SEQ ID NO: 2667428 - RNA, 19 nt, Artificial Sequence
  Description of Artificial Sequence: Synthetic oligonucleotide
ggaacugcauucgagccac

SEQ ID NO: 2667429 - RNA, 19 nt, Artificial Sequence
  Description of Artificial Sequence: Synthetic oligonucleotide
cuuguucaccaaagaucug

SEQ ID NO: 2667430 - RNA, 19 nt, Artificial Sequence
  Description of Artificial Sequence: Synthetic oligonucleotide
gacgaucaaugaagacacg

SEQ ID NO: 2667431 - RNA, 19 nt, Artificial Sequence
  Description of Artificial Sequence: Synthetic oligonucleotide
agccacuuguucaccaaag

SEQ ID NO: 2667432 - RNA, 19 nt, Artificial Sequence
  Description of Artificial Sequence: Synthetic oligonucleotide
ggaauguacucugugggca

SEQ ID NO: 2667433 - RNA, 19 nt, Artificial Sequence
  Description of Artificial Sequence: Synthetic oligonucleotide
cgaucaaugaagacacggc

SEQ ID NO: 2667434 - RNA, 19 nt, Artificial Sequence
  Description of Artificial Sequence: Synthetic oligonucleotide
caggacgaucaaugaagac

SEQ ID NO: 2667435 - RNA, 19 nt, Artificial Sequence
  Description of Artificial Sequence: Synthetic oligonucleotide
cuuugcaucuuccuccucu

SEQ ID NO: 2667436 - RNA, 19 nt, Artificial Sequence
  Description of Artificial Sequence: Synthetic oligonucleotide
agacacggcccugugcauc

SEQ ID NO: 2667437 - RNA, 19 nt, Artificial Sequence
  Description of Artificial Sequence: Synthetic oligonucleotide
cagcaggaccuccagguuc

SEQ ID NO: 2667438 - RNA, 19 nt, Artificial Sequence
  Description of Artificial Sequence: Synthetic oligonucleotide
gucccuauucaggugguac

SEQ ID NO: 2667439 - RNA, 19 nt, Artificial Sequence
  Description of Artificial Sequence: Synthetic oligonucleotide
accaaaagauggauuuggu

SEQ ID NO: 2667440 - RNA, 19 nt, Artificial Sequence
  Description of Artificial Sequence: Synthetic oligonucleotide
uccccauuccuggggauca

SEQ ID NO: 2667441 - RNA, 19 nt, Artificial Sequence
  Description of Artificial Sequence: Synthetic oligonucleotide
aggggacaccuuauacccc

SEQ ID NO: 2667442 - RNA, 19 nt, Artificial Sequence
  Description of Artificial Sequence: Synthetic oligonucleotide
uaccucugaggggacaccu

SEQ ID NO: 2667443 - RNA, 19 nt, Artificial Sequence
  Description of Artificial Sequence: Synthetic oligonucleotide
ggaaccuggaugcuucauc

SEQ ID NO: 2667444 - RNA, 19 nt, Artificial Sequence
  Description of Artificial Sequence: Synthetic oligonucleotide
caccuuauaccccugggcu

SEQ ID NO: 2667445 - RNA, 19 nt, Artificial Sequence
  Description of Artificial Sequence: Synthetic oligonucleotide
caccaccaagugaagacga

SEQ ID NO: 2667446 - RNA, 19 nt, Artificial Sequence
  Description of Artificial Sequence: Synthetic oligonucleotide
aguacacaagguccucguu

SEQ ID NO: 2667447 - RNA, 19 nt, Artificial Sequence
  Description of Artificial Sequence: Synthetic oligonucleotide
caagguccucguucccggg

SEQ ID NO: 2667448 - RNA, 19 nt, Artificial Sequence
  Description of Artificial Sequence: Synthetic oligonucleotide
cuaacaaacaguccccauu

SEQ ID NO: 2667449 - RNA, 19 nt, Artificial Sequence
  Description of Artificial Sequence: Synthetic oligonucleotide
ccuuugacaaucgcauugc

SEQ ID NO: 2667450 - RNA, 19 nt, Artificial Sequence
  Description of Artificial Sequence: Synthetic oligonucleotide
aacugcauucgagccacuu

SEQ ID NO: 2667451 - RNA, 19 nt, Artificial Sequence
  Description of Artificial Sequence: Synthetic oligonucleotide
aagacacggcccugugcau

SEQ ID NO: 2667452 - RNA, 19 nt, Artificial Sequence
  Description of Artificial Sequence: Synthetic oligonucleotide
uagccucaugguauaccuc

SEQ ID NO: 2667453 - RNA, 19 nt, Artificial Sequence
  Description of Artificial Sequence: Synthetic oligonucleotide
cugcauucgagccacuugu

SEQ ID NO: 2667454 - RNA, 19 nt, Artificial Sequence
  Description of Artificial Sequence: Synthetic oligonucleotide
gguagaacuuagccucaug

SEQ ID NO: 2667455 - RNA, 19 nt, Artificial Sequence
  Description of Artificial Sequence: Synthetic oligonucleotide
ggauuugguagaacuuagc

SEQ ID NO: 2667456 - RNA, 19 nt, Artificial Sequence
  Description of Artificial Sequence: Synthetic oligonucleotide
uaguccaagauaggcccaa

SEQ ID NO: 2667457 - RNA, 19 nt, Artificial Sequence
  Description of Artificial Sequence: Synthetic oligonucleotide
gcaguacacaagguccucg

SEQ ID NO: 2667458 - RNA, 19 nt, Artificial Sequence
  Description of Artificial Sequence: Synthetic oligonucleotide
cuauucaggugguaccucu

SEQ ID NO: 2667459 - RNA, 19 nt, Artificial Sequence
  Description of Artificial Sequence: Synthetic oligonucleotide
uucgagccacuuguucacc

SEQ ID NO: 2667460 - RNA, 19 nt, Artificial Sequence
  Description of Artificial Sequence: Synthetic oligonucleotide
ugcauucgagccacuuguu

SEQ ID NO: 2667461 - RNA, 19 nt, Artificial Sequence
  Description of Artificial Sequence: Synthetic oligonucleotide
cacggccucugcccgagcc

SEQ ID NO: 2667462 - RNA, 19 nt, Artificial Sequence
  Description of Artificial Sequence: Synthetic oligonucleotide
acagccccuaacaaacagu

SEQ ID NO: 2667463 - RNA, 19 nt, Artificial Sequence
  Description of Artificial Sequence: Synthetic oligonucleotide
auguguaggggucccuauu

SEQ ID NO: 2667464 - RNA, 19 nt, Artificial Sequence
  Description of Artificial Sequence: Synthetic oligonucleotide
agcaggaccuccagguucu

SEQ ID NO: 2667465 - RNA, 19 nt, Artificial Sequence
  Description of Artificial Sequence: Synthetic oligonucleotide
guguaggggucccuauuca

SEQ ID NO: 2667466 - RNA, 19 nt, Artificial Sequence
  Description of Artificial Sequence: Synthetic oligonucleotide
guacucugugggcacuuuc

SEQ ID NO: 2667467 - RNA, 19 nt, Artificial Sequence
  Description of Artificial Sequence: Synthetic oligonucleotide
ggaucgguauaauaucugu

SEQ ID NO: 2667468 - RNA, 19 nt, Artificial Sequence
  Description of Artificial Sequence: Synthetic oligonucleotide
aggggucccuauucaggug

SEQ ID NO: 2667469 - RNA, 19 nt, Artificial Sequence
  Description of Artificial Sequence: Synthetic oligonucleotide
gauggauuugguagaacuu

SEQ ID NO: 2667470 - RNA, 19 nt, Artificial Sequence
  Description of Artificial Sequence: Synthetic oligonucleotide
cucugugggcacuuuccca

SEQ ID NO: 2667471 - RNA, 19 nt, Artificial Sequence
  Description of Artificial Sequence: Synthetic oligonucleotide
ccccuaacaaacagucccc

SEQ ID NO: 2667472 - RNA, 19 nt, Artificial Sequence
  Description of Artificial Sequence: Synthetic oligonucleotide
ccagaagcauguguagggg

SEQ ID NO: 2667473 - RNA, 19 nt, Artificial Sequence
  Description of Artificial Sequence: Synthetic oligonucleotide
gugcguagguaguccaaga

SEQ ID NO: 2667474 - RNA, 19 nt, Artificial Sequence
  Description of Artificial Sequence: Synthetic oligonucleotide
caccaccuuugacaaucgc

SEQ ID NO: 2667475 - RNA, 19 nt, Artificial Sequence
  Description of Artificial Sequence: Synthetic oligonucleotide
ccucaugguauaccucagg

SEQ ID NO: 2667476 - RNA, 19 nt, Artificial Sequence
  Description of Artificial Sequence: Synthetic oligonucleotide
cauuucucggaucgguaua

SEQ ID NO: 2667477 - RNA, 19 nt, Artificial Sequence
  Description of Artificial Sequence: Synthetic oligonucleotide
acuuggaaccuggaugcuu

SEQ ID NO: 2667478 - RNA, 19 nt, Artificial Sequence
  Description of Artificial Sequence: Synthetic oligonucleotide
caaagaucuguggcauguc

SEQ ID NO: 2667479 - RNA, 19 nt, Artificial Sequence
  Description of Artificial Sequence: Synthetic oligonucleotide
gugccaggacgaucaauga

SEQ ID NO: 2667480 - RNA, 19 nt, Artificial Sequence
  Description of Artificial Sequence: Synthetic oligonucleotide
gcauucgagccacuuguuc

SEQ ID NO: 2667481 - RNA, 19 nt, Artificial Sequence
  Description of Artificial Sequence: Synthetic oligonucleotide
cccugugcaucccuguagc

SEQ ID NO: 2667482 - RNA, 19 nt, Artificial Sequence
  Description of Artificial Sequence: Synthetic oligonucleotide
gcacuuucccagugcguag

SEQ ID NO: 2667483 - RNA, 19 nt, Artificial Sequence
  Description of Artificial Sequence: Synthetic oligonucleotide
aaguaggugccaggacgau

SEQ ID NO: 2667484 - RNA, 19 nt, Artificial Sequence
  Description of Artificial Sequence: Synthetic oligonucleotide
caaugaagacacggcccug

SEQ ID NO: 2667485 - RNA, 19 nt, Artificial Sequence
  Description of Artificial Sequence: Synthetic oligonucleotide
cuccucuguaugcaccaca

SEQ ID NO: 2667486 - RNA, 19 nt, Artificial Sequence
  Description of Artificial Sequence: Synthetic oligonucleotide
gguaccucugaggggacac

SEQ ID NO: 2667487 - RNA, 19 nt, Artificial Sequence
  Description of Artificial Sequence: Synthetic oligonucleotide
gacgaauauccagaagcau

SEQ ID NO: 2667488 - RNA, 19 nt, Artificial Sequence
  Description of Artificial Sequence: Synthetic oligonucleotide
ugguagaacuuagccucau

SEQ ID NO: 2667489 - RNA, 19 nt, Artificial Sequence
  Description of Artificial Sequence: Synthetic oligonucleotide
gggcccaaauuugacaaca

SEQ ID NO: 2667490 - RNA, 19 nt, Artificial Sequence
  Description of Artificial Sequence: Synthetic oligonucleotide
gcccaaaguaggugccagg

SEQ ID NO: 2667491 - RNA, 19 nt, Artificial Sequence
  Description of Artificial Sequence: Synthetic oligonucleotide
ccaaaguaggugccaggac

SEQ ID NO: 2667492 - RNA, 19 nt, Artificial Sequence
  Description of Artificial Sequence: Synthetic oligonucleotide
ugcccgagccaggugcagc

SEQ ID NO: 2667493 - RNA, 19 nt, Artificial Sequence
  Description of Artificial Sequence: Synthetic oligonucleotide
uuucucggaucgguauaau

SEQ ID NO: 2667494 - RNA, 19 nt, Artificial Sequence
  Description of Artificial Sequence: Synthetic oligonucleotide
guaguccaagauaggccca

SEQ ID NO: 2667495 - RNA, 19 nt, Artificial Sequence
  Description of Artificial Sequence: Synthetic oligonucleotide
gccacuuguucaccaaaga

SEQ ID NO: 2667496 - RNA, 19 nt, Artificial Sequence
  Description of Artificial Sequence: Synthetic oligonucleotide
gguuccacacacuuugcau

SEQ ID NO: 2667497 - RNA, 19 nt, Artificial Sequence
  Description of Artificial Sequence: Synthetic oligonucleotide
gcccugugcaucccuguag

SEQ ID NO: 2667498 - RNA, 19 nt, Artificial Sequence
  Description of Artificial Sequence: Synthetic oligonucleotide
cagaagcauguguaggggu

SEQ ID NO: 2667499 - RNA, 19 nt, Artificial Sequence
  Description of Artificial Sequence: Synthetic oligonucleotide
cuucaucagggugcccaug

SEQ ID NO: 2667500 - RNA, 19 nt, Artificial Sequence
  Description of Artificial Sequence: Synthetic oligonucleotide
ggcccaaauuugacaacag

SEQ ID NO: 2667501 - RNA, 19 nt, Artificial Sequence
  Description of Artificial Sequence: Synthetic oligonucleotide
acggccucugcccgagcca

SEQ ID NO: 2667502 - RNA, 19 nt, Artificial Sequence
  Description of Artificial Sequence: Synthetic oligonucleotide
ucccagugcguagguaguc

SEQ ID NO: 2667503 - RNA, 19 nt, Artificial Sequence
  Description of Artificial Sequence: Synthetic oligonucleotide
agcauuucucggaucggua

SEQ ID NO: 2667504 - RNA, 19 nt, Artificial Sequence
  Description of Artificial Sequence: Synthetic oligonucleotide
ugguaccucugaggggaca

SEQ ID NO: 2667505 - RNA, 19 nt, Artificial Sequence
  Description of Artificial Sequence: Synthetic oligonucleotide
guaccucugaggggacacc

SEQ ID NO: 2667506 - RNA, 19 nt, Artificial Sequence
  Description of Artificial Sequence: Synthetic oligonucleotide
uccucguucccggggccug

SEQ ID NO: 2667507 - RNA, 19 nt, Artificial Sequence
  Description of Artificial Sequence: Synthetic oligonucleotide
ccaggacgaucaaugaaga

SEQ ID NO: 2667508 - RNA, 19 nt, Artificial Sequence
  Description of Artificial Sequence: Synthetic oligonucleotide
uguacucugugggcacuuu

SEQ ID NO: 2667509 - RNA, 19 nt, Artificial Sequence
  Description of Artificial Sequence: Synthetic oligonucleotide
guucccggggccugccuuc

SEQ ID NO: 2667510 - RNA, 19 nt, Artificial Sequence
  Description of Artificial Sequence: Synthetic oligonucleotide
ggcccaaaguaggugccag

SEQ ID NO: 2667511 - RNA, 19 nt, Artificial Sequence
  Description of Artificial Sequence: Synthetic oligonucleotide
gcguagguaguccaagaua

SEQ ID NO: 2667512 - RNA, 19 nt, Artificial Sequence
  Description of Artificial Sequence: Synthetic oligonucleotide
ggcacuuucccagugcgua

SEQ ID NO: 2667513 - RNA, 19 nt, Artificial Sequence
  Description of Artificial Sequence: Synthetic oligonucleotide
caguacacaagguccucgu

SEQ ID NO: 2667514 - RNA, 19 nt, Artificial Sequence
  Description of Artificial Sequence: Synthetic oligonucleotide
cacuuugcaucuuccuccu

SEQ ID NO: 2667515 - RNA, 19 nt, Artificial Sequence
  Description of Artificial Sequence: Synthetic oligonucleotide
uuggcacucccagcaggaa

SEQ ID NO: 2667516 - RNA, 19 nt, Artificial Sequence
  Description of Artificial Sequence: Synthetic oligonucleotide
cggaucgguauaauaucug

SEQ ID NO: 2667517 - RNA, 19 nt, Artificial Sequence
  Description of Artificial Sequence: Synthetic oligonucleotide
ucgcauugccacggccucu

SEQ ID NO: 2667518 - RNA, 19 nt, Artificial Sequence
  Description of Artificial Sequence: Synthetic oligonucleotide
ccaccuuugacaaucgcau

SEQ ID NO: 2667519 - RNA, 19 nt, Artificial Sequence
  Description of Artificial Sequence: Synthetic oligonucleotide
aggcccaaaguaggugcca

SEQ ID NO: 2667520 - RNA, 19 nt, Artificial Sequence
  Description of Artificial Sequence: Synthetic oligonucleotide
ccacacacuuugcaucuuc

SEQ ID NO: 2667521 - RNA, 19 nt, Artificial Sequence
  Description of Artificial Sequence: Synthetic oligonucleotide
cuggaugcuucaucagggu

SEQ ID NO: 2667522 - RNA, 19 nt, Artificial Sequence
  Description of Artificial Sequence: Synthetic oligonucleotide
ggaucaccaccaagugaag

SEQ ID NO: 2667523 - RNA, 19 nt, Artificial Sequence
  Description of Artificial Sequence: Synthetic oligonucleotide
cugugaaaacuuggaaccu

SEQ ID NO: 2667524 - RNA, 19 nt, Artificial Sequence
  Description of Artificial Sequence: Synthetic oligonucleotide
acacggcccugugcauccc

SEQ ID NO: 2667525 - RNA, 19 nt, Artificial Sequence
  Description of Artificial Sequence: Synthetic oligonucleotide
ccagggcccaaauuugaca

SEQ ID NO: 2667526 - RNA, 19 nt, Artificial Sequence
  Description of Artificial Sequence: Synthetic oligonucleotide
uuauaccccugggcucuaa

SEQ ID NO: 2667527 - RNA, 19 nt, Artificial Sequence
  Description of Artificial Sequence: Synthetic oligonucleotide
accaccaagugaagacgaa

SEQ ID NO: 2667528 - RNA, 19 nt, Artificial Sequence
  Description of Artificial Sequence: Synthetic oligonucleotide
uucccggggccugccuucc

SEQ ID NO: 2667529 - RNA, 19 nt, Artificial Sequence
  Description of Artificial Sequence: Synthetic oligonucleotide
ugcaucccuguagcauuuc

SEQ ID NO: 2667530 - RNA, 19 nt, Artificial Sequence
  Description of Artificial Sequence: Synthetic oligonucleotide
ccgagccaggugcagcagg

SEQ ID NO: 2667531 - RNA, 19 nt, Artificial Sequence
  Description of Artificial Sequence: Synthetic oligonucleotide
gcauuucucggaucgguau

SEQ ID NO: 2667532 - RNA, 19 nt, Artificial Sequence
  Description of Artificial Sequence: Synthetic oligonucleotide
guccccauuccuggggauc

SEQ ID NO: 2667533 - RNA, 19 nt, Artificial Sequence
  Description of Artificial Sequence: Synthetic oligonucleotide
ucguucccggggccugccu

SEQ ID NO: 2667534 - RNA, 19 nt, Artificial Sequence
  Description of Artificial Sequence: Synthetic oligonucleotide
cccagugcguagguagucc

SEQ ID NO: 2667535 - RNA, 19 nt, Artificial Sequence
  Description of Artificial Sequence: Synthetic oligonucleotide
cagcaggaacugcauucga

SEQ ID NO: 2667536 - RNA, 19 nt, Artificial Sequence
  Description of Artificial Sequence: Synthetic oligonucleotide
auguacucugugggcacuu

SEQ ID NO: 2667537 - RNA, 19 nt, Artificial Sequence
  Description of Artificial Sequence: Synthetic oligonucleotide
cgguauaauaucugugaaa

SEQ ID NO: 2667538 - RNA, 19 nt, Artificial Sequence
  Description of Artificial Sequence: Synthetic oligonucleotide
cagugcguagguaguccaa

SEQ ID NO: 2667539 - RNA, 19 nt, Artificial Sequence
  Description of Artificial Sequence: Synthetic oligonucleotide
aguccaagauaggcccaaa

SEQ ID NO: 2667540 - RNA, 19 nt, Artificial Sequence
  Description of Artificial Sequence: Synthetic oligonucleotide
ccuuccagggcccaaauuu

SEQ ID NO: 2667541 - RNA, 19 nt, Artificial Sequence
  Description of Artificial Sequence: Synthetic oligonucleotide
cagggugcccaugguggug

SEQ ID NO: 2667542 - RNA, 19 nt, Artificial Sequence
  Description of Artificial Sequence: Synthetic oligonucleotide
ggcacucccagcaggaacu

SEQ ID NO: 2667543 - RNA, 19 nt, Artificial Sequence
  Description of Artificial Sequence: Synthetic oligonucleotide
cauguguaggggucccuau

SEQ ID NO: 2667544 - RNA, 19 nt, Artificial Sequence
  Description of Artificial Sequence: Synthetic oligonucleotide
gguccucguucccggggcc

SEQ ID NO: 2667545 - RNA, 19 nt, Artificial Sequence
  Description of Artificial Sequence: Synthetic oligonucleotide
uccacacacuuugcaucuu

SEQ ID NO: 2667546 - RNA, 19 nt, Artificial Sequence
  Description of Artificial Sequence: Synthetic oligonucleotide
caccaaagaucuguggcau

SEQ ID NO: 2667547 - RNA, 19 nt, Artificial Sequence
  Description of Artificial Sequence: Synthetic oligonucleotide
aggugccaggacgaucaau

SEQ ID NO: 2667548 - RNA, 19 nt, Artificial Sequence
  Description of Artificial Sequence: Synthetic oligonucleotide
ggggccugccuuccagggc

SEQ ID NO: 2667549 - RNA, 19 nt, Artificial Sequence
  Description of Artificial Sequence: Synthetic oligonucleotide
cucguucccggggccugcc

SEQ ID NO: 2667550 - RNA, 19 nt, Artificial Sequence
  Description of Artificial Sequence: Synthetic oligonucleotide
ccagugcguagguagucca

SEQ ID NO: 2667551 - RNA, 19 nt, Artificial Sequence
  Description of Artificial Sequence: Synthetic oligonucleotide
acggcccugugcaucccug

SEQ ID NO: 2667552 - RNA, 19 nt, Artificial Sequence
  Description of Artificial Sequence: Synthetic oligonucleotide
ccaaagaucuguggcaugu

SEQ ID NO: 2667553 - RNA, 19 nt, Artificial Sequence
  Description of Artificial Sequence: Synthetic oligonucleotide
ccacuuguucaccaaagau

SEQ ID NO: 2667554 - RNA, 19 nt, Artificial Sequence
  Description of Artificial Sequence: Synthetic oligonucleotide
cugugcaucccuguagcau

SEQ ID NO: 2667555 - RNA, 19 nt, Artificial Sequence
  Description of Artificial Sequence: Synthetic oligonucleotide
ccuauucaggugguaccuc

SEQ ID NO: 2667556 - RNA, 19 nt, Artificial Sequence
  Description of Artificial Sequence: Synthetic oligonucleotide
ccuccaaaauuuugaccaa

SEQ ID NO: 2667557 - RNA, 19 nt, Artificial Sequence
  Description of Artificial Sequence: Synthetic oligonucleotide
ggcaguacacaagguccuc

SEQ ID NO: 2667558 - RNA, 19 nt, Artificial Sequence
  Description of Artificial Sequence: Synthetic oligonucleotide
cucugaggggacaccuuau

SEQ ID NO: 2667559 - RNA, 19 nt, Artificial Sequence
  Description of Artificial Sequence: Synthetic oligonucleotide
cuguggcauguccuccaaa

SEQ ID NO: 2667560 - RNA, 19 nt, Artificial Sequence
  Description of Artificial Sequence: Synthetic oligonucleotide
ccggggccugccuuccagg

SEQ ID NO: 2667561 - RNA, 19 nt, Artificial Sequence
  Description of Artificial Sequence: Synthetic oligonucleotide
gugguaccucugaggggac

SEQ ID NO: 2667562 - RNA, 19 nt, Artificial Sequence
  Description of Artificial Sequence: Synthetic oligonucleotide
gggcucuaauguccuucuc

SEQ ID NO: 2667563 - RNA, 19 nt, Artificial Sequence
  Description of Artificial Sequence: Synthetic oligonucleotide
ccuuauaccccugggcucu

SEQ ID NO: 2667564 - RNA, 19 nt, Artificial Sequence
  Description of Artificial Sequence: Synthetic oligonucleotide
ccugugcaucccuguagca

SEQ ID NO: 2667565 - RNA, 19 nt, Artificial Sequence
  Description of Artificial Sequence: Synthetic oligonucleotide
cccuaacaaacagucccca

SEQ ID NO: 2667566 - RNA, 19 nt, Artificial Sequence
  Description of Artificial Sequence: Synthetic oligonucleotide
caccuuugacaaucgcauu

SEQ ID NO: 2667567 - RNA, 19 nt, Artificial Sequence
  Description of Artificial Sequence: Synthetic oligonucleotide
gggacaccuuauaccccug

SEQ ID NO: 2667568 - RNA, 19 nt, Artificial Sequence
  Description of Artificial Sequence: Synthetic oligonucleotide
gguauaccucaggaaugua

SEQ ID NO: 2667569 - RNA, 19 nt, Artificial Sequence
  Description of Artificial Sequence: Synthetic oligonucleotide
gcauguguaggggucccua

SEQ ID NO: 2667570 - RNA, 19 nt, Artificial Sequence
  Description of Artificial Sequence: Synthetic oligonucleotide
gccacggccucugcccgag

SEQ ID NO: 2667571 - RNA, 19 nt, Artificial Sequence
  Description of Artificial Sequence: Synthetic oligonucleotide
ccacagccccuaacaaaca

SEQ ID NO: 2667572 - RNA, 19 nt, Artificial Sequence
  Description of Artificial Sequence: Synthetic oligonucleotide
ccuaacaaacaguccccau

SEQ ID NO: 2667573 - RNA, 19 nt, Artificial Sequence
  Description of Artificial Sequence: Synthetic oligonucleotide
cuuauaccccugggcucua

SEQ ID NO: 2667574 - RNA, 19 nt, Artificial Sequence
  Description of Artificial Sequence: Synthetic oligonucleotide
cccuauucaggugguaccu

SEQ ID NO: 2667575 - RNA, 19 nt, Artificial Sequence
  Description of Artificial Sequence: Synthetic oligonucleotide
gugcaucccuguagcauuu

SEQ ID NO: 2667576 - RNA, 19 nt, Artificial Sequence
  Description of Artificial Sequence: Synthetic oligonucleotide
ccucaggaauguacucugu

SEQ ID NO: 2667577 - RNA, 19 nt, Artificial Sequence
  Description of Artificial Sequence: Synthetic oligonucleotide
caggaccuccagguucucu

SEQ ID NO: 2667578 - RNA, 19 nt, Artificial Sequence
  Description of Artificial Sequence: Synthetic oligonucleotide
cgagccacuuguucaccaa

SEQ ID NO: 2667579 - RNA, 19 nt, Artificial Sequence
  Description of Artificial Sequence: Synthetic oligonucleotide
guccucguucccggggccu

SEQ ID NO: 2667580 - RNA, 19 nt, Artificial Sequence
  Description of Artificial Sequence: Synthetic oligonucleotide
gaacugcauucgagccacu

SEQ ID NO: 2667581 - RNA, 19 nt, Artificial Sequence
  Description of Artificial Sequence: Synthetic oligonucleotide
ccucugcccgagccaggug

SEQ ID NO: 2667582 - RNA, 19 nt, Artificial Sequence
  Description of Artificial Sequence: Synthetic oligonucleotide
ggccugccuuccagggccc

SEQ ID NO: 2667583 - RNA, 19 nt, Artificial Sequence
  Description of Artificial Sequence: Synthetic oligonucleotide
ccucguucccggggccugc

SEQ ID NO: 2667584 - RNA, 19 nt, Artificial Sequence
  Description of Artificial Sequence: Synthetic oligonucleotide
cacggcccugugcaucccu

SEQ ID NO: 2667585 - RNA, 19 nt, Artificial Sequence
  Description of Artificial Sequence: Synthetic oligonucleotide
ccaccaagugaagacgaau

SEQ ID NO: 2667586 - RNA, 19 nt, Artificial Sequence
  Description of Artificial Sequence: Synthetic oligonucleotide
ggccuccaagauaugcaau

SEQ ID NO: 2667587 - RNA, 19 nt, Artificial Sequence
  Description of Artificial Sequence: Synthetic oligonucleotide
ggucccuauucagguggua

SEQ ID NO: 2667588 - RNA, 19 nt, Artificial Sequence
  Description of Artificial Sequence: Synthetic oligonucleotide
cccgagccaggugcagcag

SEQ ID NO: 2667589 - RNA, 19 nt, Artificial Sequence
  Description of Artificial Sequence: Synthetic oligonucleotide
gggcacuuucccagugcgu

SEQ ID NO: 2667590 - RNA, 19 nt, Artificial Sequence
  Description of Artificial Sequence: Synthetic oligonucleotide
gggucccuauucagguggu

SEQ ID NO: 2667591 - RNA, 19 nt, Artificial Sequence
  Description of Artificial Sequence: Synthetic oligonucleotide
gccuuccagggcccaaauu

SEQ ID NO: 2667592 - RNA, 19 nt, Artificial Sequence
  Description of Artificial Sequence: Synthetic oligonucleotide
ccacggccucugcccgagc

SEQ ID NO: 2667593 - RNA, 19 nt, Artificial Sequence
  Description of Artificial Sequence: Synthetic oligonucleotide
gccugccuuccagggccca

SEQ ID NO: 2667594 - RNA, 19 nt, Artificial Sequence
  Description of Artificial Sequence: Synthetic oligonucleotide
cggcccugugcaucccugu

SEQ ID NO: 2667595 - RNA, 19 nt, Artificial Sequence
  Description of Artificial Sequence: Synthetic oligonucleotide
cguucccggggccugccuu

SEQ ID NO: 2667596 - RNA, 19 nt, Artificial Sequence
  Description of Artificial Sequence: Synthetic oligonucleotide
aagaauaaaguccaauugc

SEQ ID NO: 2667597 - RNA, 19 nt, Artificial Sequence
  Description of Artificial Sequence: Synthetic oligonucleotide
uuugcuauggauuugagca

SEQ ID NO: 2667598 - RNA, 19 nt, Artificial Sequence
  Description of Artificial Sequence: Synthetic oligonucleotide
aaaauccuuacacucuucc

SEQ ID NO: 2667599 - RNA, 19 nt, Artificial Sequence
  Description of Artificial Sequence: Synthetic oligonucleotide
aaauugguucaauaaauuc

SEQ ID NO: 2667600 - RNA, 19 nt, Artificial Sequence
  Description of Artificial Sequence: Synthetic oligonucleotide
aacaagcucaauuagacca

SEQ ID NO: 2667601 - RNA, 19 nt, Artificial Sequence
  Description of Artificial Sequence: Synthetic oligonucleotide
ucaggaaagaauaaagucc

SEQ ID NO: 2667602 - RNA, 19 nt, Artificial Sequence
  Description of Artificial Sequence: Synthetic oligonucleotide
uucauauucaacucgauac

SEQ ID NO: 2667603 - RNA, 19 nt, Artificial Sequence
  Description of Artificial Sequence: Synthetic oligonucleotide
aauaaauugguucaauaaa

SEQ ID NO: 2667604 - RNA, 19 nt, Artificial Sequence
  Description of Artificial Sequence: Synthetic oligonucleotide
auaaugaaaauuucaguuc

SEQ ID NO: 2667605 - RNA, 19 nt, Artificial Sequence
  Description of Artificial Sequence: Synthetic oligonucleotide
ucuuacuuuacacaaagcu

SEQ ID NO: 2667606 - RNA, 19 nt, Artificial Sequence
  Description of Artificial Sequence: Synthetic oligonucleotide
aaagaugaaugcaacaugg

SEQ ID NO: 2667607 - RNA, 19 nt, Artificial Sequence
  Description of Artificial Sequence: Synthetic oligonucleotide
ucuuuucuugcuauuagcg

SEQ ID NO: 2667608 - RNA, 19 nt, Artificial Sequence
  Description of Artificial Sequence: Synthetic oligonucleotide
aaauaaauugguucaauaa

SEQ ID NO: 2667609 - RNA, 19 nt, Artificial Sequence
  Description of Artificial Sequence: Synthetic oligonucleotide
aaagcuucauauucaacuc

SEQ ID NO: 2667610 - RNA, 19 nt, Artificial Sequence
  Description of Artificial Sequence: Synthetic oligonucleotide
auggauuugagcaaguucc

SEQ ID NO: 2667611 - RNA, 19 nt, Artificial Sequence
  Description of Artificial Sequence: Synthetic oligonucleotide
ucuuccuugagcucuaugg

SEQ ID NO: 2667612 - RNA, 19 nt, Artificial Sequence
  Description of Artificial Sequence: Synthetic oligonucleotide
aacucgauaccuuucuaac

SEQ ID NO: 2667613 - RNA, 19 nt, Artificial Sequence
  Description of Artificial Sequence: Synthetic oligonucleotide
uuacuuuacacaaagcuuc

SEQ ID NO: 2667614 - RNA, 19 nt, Artificial Sequence
  Description of Artificial Sequence: Synthetic oligonucleotide
augaaugcaacauggugcc

SEQ ID NO: 2667615 - RNA, 19 nt, Artificial Sequence
  Description of Artificial Sequence: Synthetic oligonucleotide
uauuuucugaaacuggcca

SEQ ID NO: 2667616 - RNA, 19 nt, Artificial Sequence
  Description of Artificial Sequence: Synthetic oligonucleotide
gaugaaugcaacauggugc

SEQ ID NO: 2667617 - RNA, 19 nt, Artificial Sequence
  Description of Artificial Sequence: Synthetic oligonucleotide
ucaacaagcucaauuagac

SEQ ID NO: 2667618 - RNA, 19 nt, Artificial Sequence
  Description of Artificial Sequence: Synthetic oligonucleotide
aauugguucaauaaauuca

SEQ ID NO: 2667619 - RNA, 19 nt, Artificial Sequence
  Description of Artificial Sequence: Synthetic oligonucleotide
uacacaaagcuucauauuc

SEQ ID NO: 2667620 - RNA, 19 nt, Artificial Sequence
  Description of Artificial Sequence: Synthetic oligonucleotide
ucaacauacauuucuugag

SEQ ID NO: 2667621 - RNA, 19 nt, Artificial Sequence
  Description of Artificial Sequence: Synthetic oligonucleotide
auuugagcaaguuccgagc

SEQ ID NO: 2667622 - RNA, 19 nt, Artificial Sequence
  Description of Artificial Sequence: Synthetic oligonucleotide
accaacuauuuucugaaac

SEQ ID NO: 2667623 - RNA, 19 nt, Artificial Sequence
  Description of Artificial Sequence: Synthetic oligonucleotide
ugggguguaaagaugaaug

SEQ ID NO: 2667624 - RNA, 19 nt, Artificial Sequence
  Description of Artificial Sequence: Synthetic oligonucleotide
aaugcaacauggugccugc

SEQ ID NO: 2667625 - RNA, 19 nt, Artificial Sequence
  Description of Artificial Sequence: Synthetic oligonucleotide
acuauuuucugaaacuggc

SEQ ID NO: 2667626 - RNA, 19 nt, Artificial Sequence
  Description of Artificial Sequence: Synthetic oligonucleotide
aaguccaauugcuugucac

SEQ ID NO: 2667627 - RNA, 19 nt, Artificial Sequence
  Description of Artificial Sequence: Synthetic oligonucleotide
uuuucuugcuauuagcgcu

SEQ ID NO: 2667628 - RNA, 19 nt, Artificial Sequence
  Description of Artificial Sequence: Synthetic oligonucleotide
aagcuucauauucaacucg

SEQ ID NO: 2667629 - RNA, 19 nt, Artificial Sequence
  Description of Artificial Sequence: Synthetic oligonucleotide
uucaguucauuucugaaaa

SEQ ID NO: 2667630 - RNA, 19 nt, Artificial Sequence
  Description of Artificial Sequence: Synthetic oligonucleotide
ucauauucaacucgauacc

SEQ ID NO: 2667631 - RNA, 19 nt, Artificial Sequence
  Description of Artificial Sequence: Synthetic oligonucleotide
agcuguuucccuuccaggc

SEQ ID NO: 2667632 - RNA, 19 nt, Artificial Sequence
  Description of Artificial Sequence: Synthetic oligonucleotide
gauuugagcaaguuccgag

SEQ ID NO: 2667633 - RNA, 19 nt, Artificial Sequence
  Description of Artificial Sequence: Synthetic oligonucleotide
auaaauaaugaaaauuuca

SEQ ID NO: 2667634 - RNA, 19 nt, Artificial Sequence
  Description of Artificial Sequence: Synthetic oligonucleotide
aauugcuugucacaggcau

SEQ ID NO: 2667635 - RNA, 19 nt, Artificial Sequence
  Description of Artificial Sequence: Synthetic oligonucleotide
aauuucaguucauuucuga

SEQ ID NO: 2667636 - RNA, 19 nt, Artificial Sequence
  Description of Artificial Sequence: Synthetic oligonucleotide
uaugucauaggagcaaggg

SEQ ID NO: 2667637 - RNA, 19 nt, Artificial Sequence
  Description of Artificial Sequence: Synthetic oligonucleotide
aacacugcuagaugcuggg

SEQ ID NO: 2667638 - RNA, 19 nt, Artificial Sequence
  Description of Artificial Sequence: Synthetic oligonucleotide
aaauucauuuuguucugcu

SEQ ID NO: 2667639 - RNA, 19 nt, Artificial Sequence
  Description of Artificial Sequence: Synthetic oligonucleotide
uagaccaccaacuauuuuc

SEQ ID NO: 2667640 - RNA, 19 nt, Artificial Sequence
  Description of Artificial Sequence: Synthetic oligonucleotide
aaccucuggguccaacacc

SEQ ID NO: 2667641 - RNA, 19 nt, Artificial Sequence
  Description of Artificial Sequence: Synthetic oligonucleotide
aacuauuuucugaaacugg

SEQ ID NO: 2667642 - RNA, 19 nt, Artificial Sequence
  Description of Artificial Sequence: Synthetic oligonucleotide
aagcugaucaacaagcuca

SEQ ID NO: 2667643 - RNA, 19 nt, Artificial Sequence
  Description of Artificial Sequence: Synthetic oligonucleotide
uucuuucgcaagcugauca

SEQ ID NO: 2667644 - RNA, 19 nt, Artificial Sequence
  Description of Artificial Sequence: Synthetic oligonucleotide
agaugaaugcaacauggug

SEQ ID NO: 2667645 - RNA, 19 nt, Artificial Sequence
  Description of Artificial Sequence: Synthetic oligonucleotide
gagaaguucugcuuugaag

SEQ ID NO: 2667646 - RNA, 19 nt, Artificial Sequence
  Description of Artificial Sequence: Synthetic oligonucleotide
aauccuuacacucuuccuu

SEQ ID NO: 2667647 - RNA, 19 nt, Artificial Sequence
  Description of Artificial Sequence: Synthetic oligonucleotide
ucugcuucuuacuuuacac

SEQ ID NO: 2667648 - RNA, 19 nt, Artificial Sequence
  Description of Artificial Sequence: Synthetic oligonucleotide
gaaguucugcuuugaaggg

SEQ ID NO: 2667649 - RNA, 19 nt, Artificial Sequence
  Description of Artificial Sequence: Synthetic oligonucleotide
uacaugccaacacugcuag

SEQ ID NO: 2667650 - RNA, 19 nt, Artificial Sequence
  Description of Artificial Sequence: Synthetic oligonucleotide
caucguucauucaacauac

SEQ ID NO: 2667651 - RNA, 19 nt, Artificial Sequence
  Description of Artificial Sequence: Synthetic oligonucleotide
aauuagaccaccaacuauu

SEQ ID NO: 2667652 - RNA, 19 nt, Artificial Sequence
  Description of Artificial Sequence: Synthetic oligonucleotide
auaaaguccaauugcuugu

SEQ ID NO: 2667653 - RNA, 19 nt, Artificial Sequence
  Description of Artificial Sequence: Synthetic oligonucleotide
gaucaacaagcucaauuag

SEQ ID NO: 2667654 - RNA, 19 nt, Artificial Sequence
  Description of Artificial Sequence: Synthetic oligonucleotide
uauggauuugagcaaguuc

SEQ ID NO: 2667655 - RNA, 19 nt, Artificial Sequence
  Description of Artificial Sequence: Synthetic oligonucleotide
cuuuucuugcuauuagcgc

SEQ ID NO: 2667656 - RNA, 19 nt, Artificial Sequence
  Description of Artificial Sequence: Synthetic oligonucleotide
ggagguaugucauaggagc

SEQ ID NO: 2667657 - RNA, 19 nt, Artificial Sequence
  Description of Artificial Sequence: Synthetic oligonucleotide
uucagcucaucaaagugca

SEQ ID NO: 2667658 - RNA, 19 nt, Artificial Sequence
  Description of Artificial Sequence: Synthetic oligonucleotide
gucaggaaagaauaaaguc

SEQ ID NO: 2667659 - RNA, 19 nt, Artificial Sequence
  Description of Artificial Sequence: Synthetic oligonucleotide
auaaauucauuuuguucug

SEQ ID NO: 2667660 - RNA, 19 nt, Artificial Sequence
  Description of Artificial Sequence: Synthetic oligonucleotide
uuugagcaaguuccgagca

SEQ ID NO: 2667661 - RNA, 19 nt, Artificial Sequence
  Description of Artificial Sequence: Synthetic oligonucleotide
aaguuccgagcaccgaugg

SEQ ID NO: 2667662 - RNA, 19 nt, Artificial Sequence
  Description of Artificial Sequence: Synthetic oligonucleotide
cucgauaccuuucuaacug

SEQ ID NO: 2667663 - RNA, 19 nt, Artificial Sequence
  Description of Artificial Sequence: Synthetic oligonucleotide
ugguucaauaaauucauuu

SEQ ID NO: 2667664 - RNA, 19 nt, Artificial Sequence
  Description of Artificial Sequence: Synthetic oligonucleotide
uaaauugguucaauaaauu

SEQ ID NO: 2667665 - RNA, 19 nt, Artificial Sequence
  Description of Artificial Sequence: Synthetic oligonucleotide
uucuuuucuugcuauuagc

SEQ ID NO: 2667666 - RNA, 19 nt, Artificial Sequence
  Description of Artificial Sequence: Synthetic oligonucleotide
ugcuucuuacuuuacacaa

SEQ ID NO: 2667667 - RNA, 19 nt, Artificial Sequence
  Description of Artificial Sequence: Synthetic oligonucleotide
uggauuugagcaaguuccg

SEQ ID NO: 2667668 - RNA, 19 nt, Artificial Sequence
  Description of Artificial Sequence: Synthetic oligonucleotide
cuauuuucugaaacuggcc

SEQ ID NO: 2667669 - RNA, 19 nt, Artificial Sequence
  Description of Artificial Sequence: Synthetic oligonucleotide
auucaacauacauuucuug

SEQ ID NO: 2667670 - RNA, 19 nt, Artificial Sequence
  Description of Artificial Sequence: Synthetic oligonucleotide
auaaauugguucaauaaau

SEQ ID NO: 2667671 - RNA, 19 nt, Artificial Sequence
  Description of Artificial Sequence: Synthetic oligonucleotide
uugcuauuagcgcuugcag

SEQ ID NO: 2667672 - RNA, 19 nt, Artificial Sequence
  Description of Artificial Sequence: Synthetic oligonucleotide
ucugaaacuggccaauuuu

SEQ ID NO: 2667673 - RNA, 19 nt, Artificial Sequence
  Description of Artificial Sequence: Synthetic oligonucleotide
uucaacucgauaccuuucu

SEQ ID NO: 2667674 - RNA, 19 nt, Artificial Sequence
  Description of Artificial Sequence: Synthetic oligonucleotide
agcucuauggucugcuggg

SEQ ID NO: 2667675 - RNA, 19 nt, Artificial Sequence
  Description of Artificial Sequence: Synthetic oligonucleotide
guccacaaaauccuuacac

SEQ ID NO: 2667676 - RNA, 19 nt, Artificial Sequence
  Description of Artificial Sequence: Synthetic oligonucleotide
ucaauuagaccaccaacua

SEQ ID NO: 2667677 - RNA, 19 nt, Artificial Sequence
  Description of Artificial Sequence: Synthetic oligonucleotide
agaauaaaguccaauugcu

SEQ ID NO: 2667678 - RNA, 19 nt, Artificial Sequence
  Description of Artificial Sequence: Synthetic oligonucleotide
ugccaacacugcuagaugc

SEQ ID NO: 2667679 - RNA, 19 nt, Artificial Sequence
  Description of Artificial Sequence: Synthetic oligonucleotide
cuuugcuauggauuugagc

SEQ ID NO: 2667680 - RNA, 19 nt, Artificial Sequence
  Description of Artificial Sequence: Synthetic oligonucleotide
ugcugggguguaaagauga

SEQ ID NO: 2667681 - RNA, 19 nt, Artificial Sequence
  Description of Artificial Sequence: Synthetic oligonucleotide
cugaaacuggccaauuuug

SEQ ID NO: 2667682 - RNA, 19 nt, Artificial Sequence
  Description of Artificial Sequence: Synthetic oligonucleotide
aaguucugcuuugaagggg

SEQ ID NO: 2667683 - RNA, 19 nt, Artificial Sequence
  Description of Artificial Sequence: Synthetic oligonucleotide
cuugucacaggcaucguuc

SEQ ID NO: 2667684 - RNA, 19 nt, Artificial Sequence
  Description of Artificial Sequence: Synthetic oligonucleotide
uuuuguucugcuucuuacu

SEQ ID NO: 2667685 - RNA, 19 nt, Artificial Sequence
  Description of Artificial Sequence: Synthetic oligonucleotide
uucuugagugccuacuaca

SEQ ID NO: 2667686 - RNA, 19 nt, Artificial Sequence
  Description of Artificial Sequence: Synthetic oligonucleotide
uacuacaugccaacacugc

SEQ ID NO: 2667687 - RNA, 19 nt, Artificial Sequence
  Description of Artificial Sequence: Synthetic oligonucleotide
ugcuucuuucgcaagcuga

SEQ ID NO: 2667688 - RNA, 19 nt, Artificial Sequence
  Description of Artificial Sequence: Synthetic oligonucleotide
ucguucauucaacauacau

SEQ ID NO: 2667689 - RNA, 19 nt, Artificial Sequence
  Description of Artificial Sequence: Synthetic oligonucleotide
auuuuguccacaaaauccu

SEQ ID NO: 2667690 - RNA, 19 nt, Artificial Sequence
  Description of Artificial Sequence: Synthetic oligonucleotide
gaaagaauaaaguccaauu

SEQ ID NO: 2667691 - RNA, 19 nt, Artificial Sequence
  Description of Artificial Sequence: Synthetic oligonucleotide
uuucuugagugccuacuac

SEQ ID NO: 2667692 - RNA, 19 nt, Artificial Sequence
  Description of Artificial Sequence: Synthetic oligonucleotide
gagcucuauggucugcugg

SEQ ID NO: 2667693 - RNA, 19 nt, Artificial Sequence
  Description of Artificial Sequence: Synthetic oligonucleotide
ugcuuugaaggggugacag

SEQ ID NO: 2667694 - RNA, 19 nt, Artificial Sequence
  Description of Artificial Sequence: Synthetic oligonucleotide
ugcaacauggugccugccc

SEQ ID NO: 2667695 - RNA, 19 nt, Artificial Sequence
  Description of Artificial Sequence: Synthetic oligonucleotide
ugcuauuagcgcuugcagu

SEQ ID NO: 2667696 - RNA, 19 nt, Artificial Sequence
  Description of Artificial Sequence: Synthetic oligonucleotide
gaaugcaacauggugccug

SEQ ID NO: 2667697 - RNA, 19 nt, Artificial Sequence
  Description of Artificial Sequence: Synthetic oligonucleotide
uauucaacucgauaccuuu

SEQ ID NO: 2667698 - RNA, 19 nt, Artificial Sequence
  Description of Artificial Sequence: Synthetic oligonucleotide
acuacaugccaacacugcu

SEQ ID NO: 2667699 - RNA, 19 nt, Artificial Sequence
  Description of Artificial Sequence: Synthetic oligonucleotide
accaccaacuauuuucuga

SEQ ID NO: 2667700 - RNA, 19 nt, Artificial Sequence
  Description of Artificial Sequence: Synthetic oligonucleotide
ugagcaaguuccgagcacc

SEQ ID NO: 2667701 - RNA, 19 nt, Artificial Sequence
  Description of Artificial Sequence: Synthetic oligonucleotide
ucugcuggguaaccucugg

SEQ ID NO: 2667702 - RNA, 19 nt, Artificial Sequence
  Description of Artificial Sequence: Synthetic oligonucleotide
uauuagcgcuugcaguugc

SEQ ID NO: 2667703 - RNA, 19 nt, Artificial Sequence
  Description of Artificial Sequence: Synthetic oligonucleotide
caacuauuuucugaaacug

SEQ ID NO: 2667704 - RNA, 19 nt, Artificial Sequence
  Description of Artificial Sequence: Synthetic oligonucleotide
cuacuacaugccaacacug

SEQ ID NO: 2667705 - RNA, 19 nt, Artificial Sequence
  Description of Artificial Sequence: Synthetic oligonucleotide
uccaauugcuugucacagg

SEQ ID NO: 2667706 - RNA, 19 nt, Artificial Sequence
  Description of Artificial Sequence: Synthetic oligonucleotide
uuggccauagcuguuuccc

SEQ ID NO: 2667707 - RNA, 19 nt, Artificial Sequence
  Description of Artificial Sequence: Synthetic oligonucleotide
acaggcaucguucauucaa

SEQ ID NO: 2667708 - RNA, 19 nt, Artificial Sequence
  Description of Artificial Sequence: Synthetic oligonucleotide
cuggguaaccucugggucc

SEQ ID NO: 2667709 - RNA, 19 nt, Artificial Sequence
  Description of Artificial Sequence: Synthetic oligonucleotide
auugguucaauaaauucau

SEQ ID NO: 2667710 - RNA, 19 nt, Artificial Sequence
  Description of Artificial Sequence: Synthetic oligonucleotide
guucagcucaucaaagugc

SEQ ID NO: 2667711 - RNA, 19 nt, Artificial Sequence
  Description of Artificial Sequence: Synthetic oligonucleotide
ugcuauggauuugagcaag

SEQ ID NO: 2667712 - RNA, 19 nt, Artificial Sequence
  Description of Artificial Sequence: Synthetic oligonucleotide
uaaauucauuuuguucugc

SEQ ID NO: 2667713 - RNA, 19 nt, Artificial Sequence
  Description of Artificial Sequence: Synthetic oligonucleotide
ucgcaagcugaucaacaag

SEQ ID NO: 2667714 - RNA, 19 nt, Artificial Sequence
  Description of Artificial Sequence: Synthetic oligonucleotide
uccugcuauaaauaaugaa

SEQ ID NO: 2667715 - RNA, 19 nt, Artificial Sequence
  Description of Artificial Sequence: Synthetic oligonucleotide
aaaguccaauugcuuguca

SEQ ID NO: 2667716 - RNA, 19 nt, Artificial Sequence
  Description of Artificial Sequence: Synthetic oligonucleotide
ucaggagguaugucauagg

SEQ ID NO: 2667717 - RNA, 19 nt, Artificial Sequence
  Description of Artificial Sequence: Synthetic oligonucleotide
uagcuguuucccuuccagg

SEQ ID NO: 2667718 - RNA, 19 nt, Artificial Sequence
  Description of Artificial Sequence: Synthetic oligonucleotide
auuuucugaaacuggccaa

SEQ ID NO: 2667719 - RNA, 19 nt, Artificial Sequence
  Description of Artificial Sequence: Synthetic oligonucleotide
caacacugcuagaugcugg

SEQ ID NO: 2667720 - RNA, 19 nt, Artificial Sequence
  Description of Artificial Sequence: Synthetic oligonucleotide
aaauuucaguucauuucug

SEQ ID NO: 2667721 - RNA, 19 nt, Artificial Sequence
  Description of Artificial Sequence: Synthetic oligonucleotide
auggugccugcccuggagc

SEQ ID NO: 2667722 - RNA, 19 nt, Artificial Sequence
  Description of Artificial Sequence: Synthetic oligonucleotide
cucaauuagaccaccaacu

SEQ ID NO: 2667723 - RNA, 19 nt, Artificial Sequence
  Description of Artificial Sequence: Synthetic oligonucleotide
aguccaauugcuugucaca

SEQ ID NO: 2667724 - RNA, 19 nt, Artificial Sequence
  Description of Artificial Sequence: Synthetic oligonucleotide
ucaucaaagugcagcccug

SEQ ID NO: 2667725 - RNA, 19 nt, Artificial Sequence
  Description of Artificial Sequence: Synthetic oligonucleotide
ucgauaccuuucuaacugc

SEQ ID NO: 2667726 - RNA, 19 nt, Artificial Sequence
  Description of Artificial Sequence: Synthetic oligonucleotide
acucgauaccuuucuaacu

SEQ ID NO: 2667727 - RNA, 19 nt, Artificial Sequence
  Description of Artificial Sequence: Synthetic oligonucleotide
auaccuuucuaacugcauu

SEQ ID NO: 2667728 - RNA, 19 nt, Artificial Sequence
  Description of Artificial Sequence: Synthetic oligonucleotide
ccugcuauaaauaaugaaa

SEQ ID NO: 2667729 - RNA, 19 nt, Artificial Sequence
  Description of Artificial Sequence: Synthetic oligonucleotide
acaagcucaauuagaccac

SEQ ID NO: 2667730 - RNA, 19 nt, Artificial Sequence
  Description of Artificial Sequence: Synthetic oligonucleotide
cuagagaaguucugcuuug

SEQ ID NO: 2667731 - RNA, 19 nt, Artificial Sequence
  Description of Artificial Sequence: Synthetic oligonucleotide
acauuucuugagugccuac

SEQ ID NO: 2667732 - RNA, 19 nt, Artificial Sequence
  Description of Artificial Sequence: Synthetic oligonucleotide
guuccgagcaccgauggcc

SEQ ID NO: 2667733 - RNA, 19 nt, Artificial Sequence
  Description of Artificial Sequence: Synthetic oligonucleotide
gucaggagguaugucauag

SEQ ID NO: 2667734 - RNA, 19 nt, Artificial Sequence
  Description of Artificial Sequence: Synthetic oligonucleotide
cauucucugcuucuuucgc

SEQ ID NO: 2667735 - RNA, 19 nt, Artificial Sequence
  Description of Artificial Sequence: Synthetic oligonucleotide
ucugcuuugaaggggugac

SEQ ID NO: 2667736 - RNA, 19 nt, Artificial Sequence
  Description of Artificial Sequence: Synthetic oligonucleotide
uuacacaaagcuucauauu

SEQ ID NO: 2667737 - RNA, 19 nt, Artificial Sequence
  Description of Artificial Sequence: Synthetic oligonucleotide
aguuccgagcaccgauggc

SEQ ID NO: 2667738 - RNA, 19 nt, Artificial Sequence
  Description of Artificial Sequence: Synthetic oligonucleotide
uucgcaagcugaucaacaa

SEQ ID NO: 2667739 - RNA, 19 nt, Artificial Sequence
  Description of Artificial Sequence: Synthetic oligonucleotide
uucucugcuucuuucgcaa

SEQ ID NO: 2667740 - RNA, 19 nt, Artificial Sequence
  Description of Artificial Sequence: Synthetic oligonucleotide
ccaauugcuugucacaggc

SEQ ID NO: 2667741 - RNA, 19 nt, Artificial Sequence
  Description of Artificial Sequence: Synthetic oligonucleotide
caagggucaggaaagaaua

SEQ ID NO: 2667742 - RNA, 19 nt, Artificial Sequence
  Description of Artificial Sequence: Synthetic oligonucleotide
aagaugaaugcaacauggu

SEQ ID NO: 2667743 - RNA, 19 nt, Artificial Sequence
  Description of Artificial Sequence: Synthetic oligonucleotide
gaugcugggguguaaagau

SEQ ID NO: 2667744 - RNA, 19 nt, Artificial Sequence
  Description of Artificial Sequence: Synthetic oligonucleotide
ucuggguccaacacccgaa

SEQ ID NO: 2667745 - RNA, 19 nt, Artificial Sequence
  Description of Artificial Sequence: Synthetic oligonucleotide
agcaccgauggccuucauc

SEQ ID NO: 2667746 - RNA, 19 nt, Artificial Sequence
  Description of Artificial Sequence: Synthetic oligonucleotide
ucccuagagaaguucugcu

SEQ ID NO: 2667747 - RNA, 19 nt, Artificial Sequence
  Description of Artificial Sequence: Synthetic oligonucleotide
auuucuugagugccuacua

SEQ ID NO: 2667748 - RNA, 19 nt, Artificial Sequence
  Description of Artificial Sequence: Synthetic oligonucleotide
uucauucaacauacauuuc

SEQ ID NO: 2667749 - RNA, 19 nt, Artificial Sequence
  Description of Artificial Sequence: Synthetic oligonucleotide
gccaauuuuguccacaaaa

SEQ ID NO: 2667750 - RNA, 19 nt, Artificial Sequence
  Description of Artificial Sequence: Synthetic oligonucleotide
gggguguaaagaugaaugc

SEQ ID NO: 2667751 - RNA, 19 nt, Artificial Sequence
  Description of Artificial Sequence: Synthetic oligonucleotide
caagcugaucaacaagcuc

SEQ ID NO: 2667752 - RNA, 19 nt, Artificial Sequence
  Description of Artificial Sequence: Synthetic oligonucleotide
guaaagaugaaugcaacau

SEQ ID NO: 2667753 - RNA, 19 nt, Artificial Sequence
  Description of Artificial Sequence: Synthetic oligonucleotide
uucugaaacuggccaauuu

SEQ ID NO: 2667754 - RNA, 19 nt, Artificial Sequence
  Description of Artificial Sequence: Synthetic oligonucleotide
cuuacuuuacacaaagcuu

SEQ ID NO: 2667755 - RNA, 19 nt, Artificial Sequence
  Description of Artificial Sequence: Synthetic oligonucleotide
ugcuguugggcuucucucu

SEQ ID NO: 2667756 - RNA, 19 nt, Artificial Sequence
  Description of Artificial Sequence: Synthetic oligonucleotide
ucuuucgcaagcugaucaa

SEQ ID NO: 2667757 - RNA, 19 nt, Artificial Sequence
  Description of Artificial Sequence: Synthetic oligonucleotide
auucaacucgauaccuuuc

SEQ ID NO: 2667758 - RNA, 19 nt, Artificial Sequence
  Description of Artificial Sequence: Synthetic oligonucleotide
gauguccuuggccauagcu

SEQ ID NO: 2667759 - RNA, 19 nt, Artificial Sequence
  Description of Artificial Sequence: Synthetic oligonucleotide
ggagcaagggucaggaaag

SEQ ID NO: 2667760 - RNA, 19 nt, Artificial Sequence
  Description of Artificial Sequence: Synthetic oligonucleotide
cuugagugccuacuacaug

SEQ ID NO: 2667761 - RNA, 19 nt, Artificial Sequence
  Description of Artificial Sequence: Synthetic oligonucleotide
guaugucauaggagcaagg

SEQ ID NO: 2667762 - RNA, 19 nt, Artificial Sequence
  Description of Artificial Sequence: Synthetic oligonucleotide
agcucaauuagaccaccaa

SEQ ID NO: 2667763 - RNA, 19 nt, Artificial Sequence
  Description of Artificial Sequence: Synthetic oligonucleotide
guguaaagaugaaugcaac

SEQ ID NO: 2667764 - RNA, 19 nt, Artificial Sequence
  Description of Artificial Sequence: Synthetic oligonucleotide
gcucaauuagaccaccaac

SEQ ID NO: 2667765 - RNA, 19 nt, Artificial Sequence
  Description of Artificial Sequence: Synthetic oligonucleotide
uugcuauggauuugagcaa

SEQ ID NO: 2667766 - RNA, 19 nt, Artificial Sequence
  Description of Artificial Sequence: Synthetic oligonucleotide
caaguuccgagcaccgaug

SEQ ID NO: 2667767 - RNA, 19 nt, Artificial Sequence
  Description of Artificial Sequence: Synthetic oligonucleotide
uccaacacccgaagcuugu

SEQ ID NO: 2667768 - RNA, 19 nt, Artificial Sequence
  Description of Artificial Sequence: Synthetic oligonucleotide
caggagguaugucauagga

SEQ ID NO: 2667769 - RNA, 19 nt, Artificial Sequence
  Description of Artificial Sequence: Synthetic oligonucleotide
uguuucccuuccaggcucc

SEQ ID NO: 2667770 - RNA, 19 nt, Artificial Sequence
  Description of Artificial Sequence: Synthetic oligonucleotide
agcuucauauucaacucga

SEQ ID NO: 2667771 - RNA, 19 nt, Artificial Sequence
  Description of Artificial Sequence: Synthetic oligonucleotide
caggcaucguucauucaac

SEQ ID NO: 2667772 - RNA, 19 nt, Artificial Sequence
  Description of Artificial Sequence: Synthetic oligonucleotide
acacaaagcuucauauuca

SEQ ID NO: 2667773 - RNA, 19 nt, Artificial Sequence
  Description of Artificial Sequence: Synthetic oligonucleotide
aguucugcuuugaaggggu

SEQ ID NO: 2667774 - RNA, 19 nt, Artificial Sequence
  Description of Artificial Sequence: Synthetic oligonucleotide
augccaacacugcuagaug

SEQ ID NO: 2667775 - RNA, 19 nt, Artificial Sequence
  Description of Artificial Sequence: Synthetic oligonucleotide
uaaaguccaauugcuuguc

SEQ ID NO: 2667776 - RNA, 19 nt, Artificial Sequence
  Description of Artificial Sequence: Synthetic oligonucleotide
aggagguaugucauaggag

SEQ ID NO: 2667777 - RNA, 19 nt, Artificial Sequence
  Description of Artificial Sequence: Synthetic oligonucleotide
ucaacucgauaccuuucua

SEQ ID NO: 2667778 - RNA, 19 nt, Artificial Sequence
  Description of Artificial Sequence: Synthetic oligonucleotide
cgcaagcugaucaacaagc

SEQ ID NO: 2667779 - RNA, 19 nt, Artificial Sequence
  Description of Artificial Sequence: Synthetic oligonucleotide
agaugcugggguguaaaga

SEQ ID NO: 2667780 - RNA, 19 nt, Artificial Sequence
  Description of Artificial Sequence: Synthetic oligonucleotide
agagaaguucugcuuugaa

SEQ ID NO: 2667781 - RNA, 19 nt, Artificial Sequence
  Description of Artificial Sequence: Synthetic oligonucleotide
uggguccaacacccgaagc

SEQ ID NO: 2667782 - RNA, 19 nt, Artificial Sequence
  Description of Artificial Sequence: Synthetic oligonucleotide
gguguaaagaugaaugcaa

SEQ ID NO: 2667783 - RNA, 19 nt, Artificial Sequence
  Description of Artificial Sequence: Synthetic oligonucleotide
ucuugcuauuagcgcuugc

SEQ ID NO: 2667784 - RNA, 19 nt, Artificial Sequence
  Description of Artificial Sequence: Synthetic oligonucleotide
uuccgagcaccgauggccu

SEQ ID NO: 2667785 - RNA, 19 nt, Artificial Sequence
  Description of Artificial Sequence: Synthetic oligonucleotide
uuagcgcuugcaguugcug

SEQ ID NO: 2667786 - RNA, 19 nt, Artificial Sequence
  Description of Artificial Sequence: Synthetic oligonucleotide
caaaauccuuacacucuuc

SEQ ID NO: 2667787 - RNA, 19 nt, Artificial Sequence
  Description of Artificial Sequence: Synthetic oligonucleotide
uuagaccaccaacuauuuu

SEQ ID NO: 2667788 - RNA, 19 nt, Artificial Sequence
  Description of Artificial Sequence: Synthetic oligonucleotide
ugagcucuauggucugcug

SEQ ID NO: 2667789 - RNA, 19 nt, Artificial Sequence
  Description of Artificial Sequence: Synthetic oligonucleotide
uucucucugcuuugcuaug

SEQ ID NO: 2667790 - RNA, 19 nt, Artificial Sequence
  Description of Artificial Sequence: Synthetic oligonucleotide
caagcucaauuagaccacc

SEQ ID NO: 2667791 - RNA, 19 nt, Artificial Sequence
  Description of Artificial Sequence: Synthetic oligonucleotide
uucugcuuugaagggguga

SEQ ID NO: 2667792 - RNA, 19 nt, Artificial Sequence
  Description of Artificial Sequence: Synthetic oligonucleotide
agaccaccaacuauuuucu

SEQ ID NO: 2667793 - RNA, 19 nt, Artificial Sequence
  Description of Artificial Sequence: Synthetic oligonucleotide
uacauuucuugagugccua

SEQ ID NO: 2667794 - RNA, 19 nt, Artificial Sequence
  Description of Artificial Sequence: Synthetic oligonucleotide
cugcuggguaaccucuggg

SEQ ID NO: 2667795 - RNA, 19 nt, Artificial Sequence
  Description of Artificial Sequence: Synthetic oligonucleotide
caacucgauaccuuucuaa

SEQ ID NO: 2667796 - RNA, 19 nt, Artificial Sequence
  Description of Artificial Sequence: Synthetic oligonucleotide
cuguuucccuuccaggcuc

SEQ ID NO: 2667797 - RNA, 19 nt, Artificial Sequence
  Description of Artificial Sequence: Synthetic oligonucleotide
cacaaaauccuuacacucu

SEQ ID NO: 2667798 - RNA, 19 nt, Artificial Sequence
  Description of Artificial Sequence: Synthetic oligonucleotide
gugccuacuacaugccaac

SEQ ID NO: 2667799 - RNA, 19 nt, Artificial Sequence
  Description of Artificial Sequence: Synthetic oligonucleotide
uugguucaauaaauucauu

SEQ ID NO: 2667800 - RNA, 19 nt, Artificial Sequence
  Description of Artificial Sequence: Synthetic oligonucleotide
cuuucgcaagcugaucaac

SEQ ID NO: 2667801 - RNA, 19 nt, Artificial Sequence
  Description of Artificial Sequence: Synthetic oligonucleotide
caucaaagugcagcccugc

SEQ ID NO: 2667802 - RNA, 19 nt, Artificial Sequence
  Description of Artificial Sequence: Synthetic oligonucleotide
agauguccuuggccauagc

SEQ ID NO: 2667803 - RNA, 19 nt, Artificial Sequence
  Description of Artificial Sequence: Synthetic oligonucleotide
aggcaucguucauucaaca

SEQ ID NO: 2667804 - RNA, 19 nt, Artificial Sequence
  Description of Artificial Sequence: Synthetic oligonucleotide
uggguaaccucugggucca

SEQ ID NO: 2667805 - RNA, 19 nt, Artificial Sequence
  Description of Artificial Sequence: Synthetic oligonucleotide
cuauuagcgcuugcaguug

SEQ ID NO: 2667806 - RNA, 19 nt, Artificial Sequence
  Description of Artificial Sequence: Synthetic oligonucleotide
agggucaggaaagaauaaa

SEQ ID NO: 2667807 - RNA, 19 nt, Artificial Sequence
  Description of Artificial Sequence: Synthetic oligonucleotide
cuacaugccaacacugcua

SEQ ID NO: 2667808 - RNA, 19 nt, Artificial Sequence
  Description of Artificial Sequence: Synthetic oligonucleotide
gcaucguucauucaacaua

SEQ ID NO: 2667809 - RNA, 19 nt, Artificial Sequence
  Description of Artificial Sequence: Synthetic oligonucleotide
agugccuacuacaugccaa

SEQ ID NO: 2667810 - RNA, 19 nt, Artificial Sequence
  Description of Artificial Sequence: Synthetic oligonucleotide
aagcucaauuagaccacca

SEQ ID NO: 2667811 - RNA, 19 nt, Artificial Sequence
  Description of Artificial Sequence: Synthetic oligonucleotide
gucauaggagcaaggguca

SEQ ID NO: 2667812 - RNA, 19 nt, Artificial Sequence
  Description of Artificial Sequence: Synthetic oligonucleotide
cugaucaacaagcucaauu

SEQ ID NO: 2667813 - RNA, 19 nt, Artificial Sequence
  Description of Artificial Sequence: Synthetic oligonucleotide
cuggguccaacacccgaag

SEQ ID NO: 2667814 - RNA, 19 nt, Artificial Sequence
  Description of Artificial Sequence: Synthetic oligonucleotide
aaggggugacaguggcagu

SEQ ID NO: 2667815 - RNA, 19 nt, Artificial Sequence
  Description of Artificial Sequence: Synthetic oligonucleotide
gcaccgauggccuucaucu

SEQ ID NO: 2667816 - RNA, 19 nt, Artificial Sequence
  Description of Artificial Sequence: Synthetic oligonucleotide
uggccauagcuguuucccu

SEQ ID NO: 2667817 - RNA, 19 nt, Artificial Sequence
  Description of Artificial Sequence: Synthetic oligonucleotide
caacacccgaagcuuguuc

SEQ ID NO: 2667818 - RNA, 19 nt, Artificial Sequence
  Description of Artificial Sequence: Synthetic oligonucleotide
agguaugucauaggagcaa

SEQ ID NO: 2667819 - RNA, 19 nt, Artificial Sequence
  Description of Artificial Sequence: Synthetic oligonucleotide
cauauucaacucgauaccu

SEQ ID NO: 2667820 - RNA, 19 nt, Artificial Sequence
  Description of Artificial Sequence: Synthetic oligonucleotide
ugucacaggcaucguucau

SEQ ID NO: 2667821 - RNA, 19 nt, Artificial Sequence
  Description of Artificial Sequence: Synthetic oligonucleotide
guggcagucaggagguaug

SEQ ID NO: 2667822 - RNA, 19 nt, Artificial Sequence
  Description of Artificial Sequence: Synthetic oligonucleotide
caacauggugccugcccug

SEQ ID NO: 2667823 - RNA, 19 nt, Artificial Sequence
  Description of Artificial Sequence: Synthetic oligonucleotide
auauucaacucgauaccuu

SEQ ID NO: 2667824 - RNA, 19 nt, Artificial Sequence
  Description of Artificial Sequence: Synthetic oligonucleotide
ggguguaaagaugaaugca

SEQ ID NO: 2667825 - RNA, 19 nt, Artificial Sequence
  Description of Artificial Sequence: Synthetic oligonucleotide
aguggcagucaggagguau

SEQ ID NO: 2667826 - RNA, 19 nt, Artificial Sequence
  Description of Artificial Sequence: Synthetic oligonucleotide
cuugagcucuauggucugc

SEQ ID NO: 2667827 - RNA, 19 nt, Artificial Sequence
  Description of Artificial Sequence: Synthetic oligonucleotide
cauucaacauacauuucuu

SEQ ID NO: 2667828 - RNA, 19 nt, Artificial Sequence
  Description of Artificial Sequence: Synthetic oligonucleotide
cuuccaggcucccuagaga

SEQ ID NO: 2667829 - RNA, 19 nt, Artificial Sequence
  Description of Artificial Sequence: Synthetic oligonucleotide
gccuacuacaugccaacac

SEQ ID NO: 2667830 - RNA, 19 nt, Artificial Sequence
  Description of Artificial Sequence: Synthetic oligonucleotide
aggcucccuagagaaguuc

SEQ ID NO: 2667831 - RNA, 19 nt, Artificial Sequence
  Description of Artificial Sequence: Synthetic oligonucleotide
gcuggguaaccucuggguc

SEQ ID NO: 2667832 - RNA, 19 nt, Artificial Sequence
  Description of Artificial Sequence: Synthetic oligonucleotide
caauugcuugucacaggca

SEQ ID NO: 2667833 - RNA, 19 nt, Artificial Sequence
  Description of Artificial Sequence: Synthetic oligonucleotide
cuuccuugagcucuauggu

SEQ ID NO: 2667834 - RNA, 19 nt, Artificial Sequence
  Description of Artificial Sequence: Synthetic oligonucleotide
augcaacauggugccugcc

SEQ ID NO: 2667835 - RNA, 19 nt, Artificial Sequence
  Description of Artificial Sequence: Synthetic oligonucleotide
ugccuacuacaugccaaca

SEQ ID NO: 2667836 - RNA, 19 nt, Artificial Sequence
  Description of Artificial Sequence: Synthetic oligonucleotide
caugccaacacugcuagau

SEQ ID NO: 2667837 - RNA, 19 nt, Artificial Sequence
  Description of Artificial Sequence: Synthetic oligonucleotide
caauuagaccaccaacuau

SEQ ID NO: 2667838 - RNA, 19 nt, Artificial Sequence
  Description of Artificial Sequence: Synthetic oligonucleotide
gcuauuagcgcuugcaguu

SEQ ID NO: 2667839 - RNA, 19 nt, Artificial Sequence
  Description of Artificial Sequence: Synthetic oligonucleotide
cuucuuucgcaagcugauc

SEQ ID NO: 2667840 - RNA, 19 nt, Artificial Sequence
  Description of Artificial Sequence: Synthetic oligonucleotide
acuuuacacaaagcuucau

SEQ ID NO: 2667841 - RNA, 19 nt, Artificial Sequence
  Description of Artificial Sequence: Synthetic oligonucleotide
ugaaugcaacauggugccu

SEQ ID NO: 2667842 - RNA, 19 nt, Artificial Sequence
  Description of Artificial Sequence: Synthetic oligonucleotide
ccaacuauuuucugaaacu

SEQ ID NO: 2667843 - RNA, 19 nt, Artificial Sequence
  Description of Artificial Sequence: Synthetic oligonucleotide
agucaggagguaugucaua

SEQ ID NO: 2667844 - RNA, 19 nt, Artificial Sequence
  Description of Artificial Sequence: Synthetic oligonucleotide
agcaagggucaggaaagaa

SEQ ID NO: 2667845 - RNA, 19 nt, Artificial Sequence
  Description of Artificial Sequence: Synthetic oligonucleotide
accuuucuaacugcauuuu

SEQ ID NO: 2667846 - RNA, 19 nt, Artificial Sequence
  Description of Artificial Sequence: Synthetic oligonucleotide
ccaccaacuauuuucugaa

SEQ ID NO: 2667847 - RNA, 19 nt, Artificial Sequence
  Description of Artificial Sequence: Synthetic oligonucleotide
ccuuucuaacugcauuuuc

SEQ ID NO: 2667848 - RNA, 19 nt, Artificial Sequence
  Description of Artificial Sequence: Synthetic oligonucleotide
gauaccuuucuaacugcau

SEQ ID NO: 2667849 - RNA, 19 nt, Artificial Sequence
  Description of Artificial Sequence: Synthetic oligonucleotide
cuagaugcugggguguaaa

SEQ ID NO: 2667850 - RNA, 19 nt, Artificial Sequence
  Description of Artificial Sequence: Synthetic oligonucleotide
augcugggguguaaagaug

SEQ ID NO: 2667851 - RNA, 19 nt, Artificial Sequence
  Description of Artificial Sequence: Synthetic oligonucleotide
cucuggguccaacacccga

SEQ ID NO: 2667852 - RNA, 19 nt, Artificial Sequence
  Description of Artificial Sequence: Synthetic oligonucleotide
agcugaucaacaagcucaa

SEQ ID NO: 2667853 - RNA, 19 nt, Artificial Sequence
  Description of Artificial Sequence: Synthetic oligonucleotide
uuucccuuccaggcucccu

SEQ ID NO: 2667854 - RNA, 19 nt, Artificial Sequence
  Description of Artificial Sequence: Synthetic oligonucleotide
agcaaguuccgagcaccga

SEQ ID NO: 2667855 - RNA, 19 nt, Artificial Sequence
  Description of Artificial Sequence: Synthetic oligonucleotide
ggguccaacacccgaagcu

SEQ ID NO: 2667856 - RNA, 19 nt, Artificial Sequence
  Description of Artificial Sequence: Synthetic oligonucleotide
cauuucuugagugccuacu

SEQ ID NO: 2667857 - RNA, 19 nt, Artificial Sequence
  Description of Artificial Sequence: Synthetic oligonucleotide
auuagcgcuugcaguugcu

SEQ ID NO: 2667858 - RNA, 19 nt, Artificial Sequence
  Description of Artificial Sequence: Synthetic oligonucleotide
acaugccaacacugcuaga

SEQ ID NO: 2667859 - RNA, 19 nt, Artificial Sequence
  Description of Artificial Sequence: Synthetic oligonucleotide
ccccaagauguccuuggcc

SEQ ID NO: 2667860 - RNA, 19 nt, Artificial Sequence
  Description of Artificial Sequence: Synthetic oligonucleotide
aggaaagaauaaaguccaa

SEQ ID NO: 2667861 - RNA, 19 nt, Artificial Sequence
  Description of Artificial Sequence: Synthetic oligonucleotide
gccauagcuguuucccuuc

SEQ ID NO: 2667862 - RNA, 19 nt, Artificial Sequence
  Description of Artificial Sequence: Synthetic oligonucleotide
ccuacuacaugccaacacu

SEQ ID NO: 2667863 - RNA, 19 nt, Artificial Sequence
  Description of Artificial Sequence: Synthetic oligonucleotide
ggauuugagcaaguuccga

SEQ ID NO: 2667864 - RNA, 19 nt, Artificial Sequence
  Description of Artificial Sequence: Synthetic oligonucleotide
cugcuuugcuauggauuug

SEQ ID NO: 2667865 - RNA, 19 nt, Artificial Sequence
  Description of Artificial Sequence: Synthetic oligonucleotide
gagcaagggucaggaaaga

SEQ ID NO: 2667866 - RNA, 19 nt, Artificial Sequence
  Description of Artificial Sequence: Synthetic oligonucleotide
ccauagcuguuucccuucc

SEQ ID NO: 2667867 - RNA, 19 nt, Artificial Sequence
  Description of Artificial Sequence: Synthetic oligonucleotide
guucugcuucuuacuuuac

SEQ ID NO: 2667868 - RNA, 19 nt, Artificial Sequence
  Description of Artificial Sequence: Synthetic oligonucleotide
ccaacacugcuagaugcug

SEQ ID NO: 2667869 - RNA, 19 nt, Artificial Sequence
  Description of Artificial Sequence: Synthetic oligonucleotide
aucguucauucaacauaca

SEQ ID NO: 2667870 - RNA, 19 nt, Artificial Sequence
  Description of Artificial Sequence: Synthetic oligonucleotide
gcaacauggugccugcccu

SEQ ID NO: 2667871 - RNA, 19 nt, Artificial Sequence
  Description of Artificial Sequence: Synthetic oligonucleotide
ccuugagcucuauggucug

SEQ ID NO: 2667872 - RNA, 19 nt, Artificial Sequence
  Description of Artificial Sequence: Synthetic oligonucleotide
gcaaguuccgagcaccgau

SEQ ID NO: 2667873 - RNA, 19 nt, Artificial Sequence
  Description of Artificial Sequence: Synthetic oligonucleotide
ugcuugucacaggcaucgu

SEQ ID NO: 2667874 - RNA, 19 nt, Artificial Sequence
  Description of Artificial Sequence: Synthetic oligonucleotide
guuucccuuccaggcuccc

SEQ ID NO: 2667875 - RNA, 19 nt, Artificial Sequence
  Description of Artificial Sequence: Synthetic oligonucleotide
gcucccuagagaaguucug

SEQ ID NO: 2667876 - RNA, 19 nt, Artificial Sequence
  Description of Artificial Sequence: Synthetic oligonucleotide
ggcaucguucauucaacau

SEQ ID NO: 2667877 - RNA, 19 nt, Artificial Sequence
  Description of Artificial Sequence: Synthetic oligonucleotide
caagauguccuuggccaua

SEQ ID NO: 2667878 - RNA, 19 nt, Artificial Sequence
  Description of Artificial Sequence: Synthetic oligonucleotide
gguaaccucuggguccaac

SEQ ID NO: 2667879 - RNA, 19 nt, Artificial Sequence
  Description of Artificial Sequence: Synthetic oligonucleotide
gcaagggucaggaaagaau

SEQ ID NO: 2667880 - RNA, 19 nt, Artificial Sequence
  Description of Artificial Sequence: Synthetic oligonucleotide
cacaggcaucguucauuca

SEQ ID NO: 2667881 - RNA, 19 nt, Artificial Sequence
  Description of Artificial Sequence: Synthetic oligonucleotide
cguucauucaacauacauu

SEQ ID NO: 2667882 - RNA, 19 nt, Artificial Sequence
  Description of Artificial Sequence: Synthetic oligonucleotide
ccuagagaaguucugcuuu

SEQ ID NO: 2667883 - RNA, 19 nt, Artificial Sequence
  Description of Artificial Sequence: Synthetic oligonucleotide
ggugccugcccuggagcag

SEQ ID NO: 2667884 - RNA, 19 nt, Artificial Sequence
  Description of Artificial Sequence: Synthetic oligonucleotide
cugcuuugaaggggugaca

SEQ ID NO: 2667885 - RNA, 19 nt, Artificial Sequence
  Description of Artificial Sequence: Synthetic oligonucleotide
uccgagcaccgauggccuu

SEQ ID NO: 2667886 - RNA, 19 nt, Artificial Sequence
  Description of Artificial Sequence: Synthetic oligonucleotide
cuauggauuugagcaaguu

SEQ ID NO: 2667887 - RNA, 19 nt, Artificial Sequence
  Description of Artificial Sequence: Synthetic oligonucleotide
gcaagcugaucaacaagcu

SEQ ID NO: 2667888 - RNA, 19 nt, Artificial Sequence
  Description of Artificial Sequence: Synthetic oligonucleotide
cugggguguaaagaugaau

SEQ ID NO: 2667889 - RNA, 19 nt, Artificial Sequence
  Description of Artificial Sequence: Synthetic oligonucleotide
ccuuggccauagcuguuuc

SEQ ID NO: 2667890 - RNA, 19 nt, Artificial Sequence
  Description of Artificial Sequence: Synthetic oligonucleotide
gcuucuuucgcaagcugau

SEQ ID NO: 2667891 - RNA, 19 nt, Artificial Sequence
  Description of Artificial Sequence: Synthetic oligonucleotide
ggcucccuagagaaguucu

SEQ ID NO: 2667892 - RNA, 19 nt, Artificial Sequence
  Description of Artificial Sequence: Synthetic oligonucleotide
ccuuccugcuauaaauaau

SEQ ID NO: 2667893 - RNA, 19 nt, Artificial Sequence
  Description of Artificial Sequence: Synthetic oligonucleotide
ggcagucaggagguauguc

SEQ ID NO: 2667894 - RNA, 19 nt, Artificial Sequence
  Description of Artificial Sequence: Synthetic oligonucleotide
gguccaacacccgaagcuu

SEQ ID NO: 2667895 - RNA, 19 nt, Artificial Sequence
  Description of Artificial Sequence: Synthetic oligonucleotide
gcuugucacaggcaucguu

SEQ ID NO: 2667896 - RNA, 19 nt, Artificial Sequence
  Description of Artificial Sequence: Synthetic oligonucleotide
cugcuagaugcuggggugu

SEQ ID NO: 2667897 - RNA, 19 nt, Artificial Sequence
  Description of Artificial Sequence: Synthetic oligonucleotide
ccaggcucccuagagaagu

SEQ ID NO: 2667898 - RNA, 19 nt, Artificial Sequence
  Description of Artificial Sequence: Synthetic oligonucleotide
gccaacacugcuagaugcu

SEQ ID NO: 2667899 - RNA, 19 nt, Artificial Sequence
  Description of Artificial Sequence: Synthetic oligonucleotide
gcuauggauuugagcaagu

SEQ ID NO: 2667900 - RNA, 19 nt, Artificial Sequence
  Description of Artificial Sequence: Synthetic oligonucleotide
ccgagcaccgauggccuuc

SEQ ID NO: 2667901 - RNA, 19 nt, Artificial Sequence
  Description of Artificial Sequence: Synthetic oligonucleotide
gcuagaugcugggguguaa

SEQ ID NO: 2667902 - RNA, 19 nt, Artificial Sequence
  Description of Artificial Sequence: Synthetic oligonucleotide
gcugggguguaaagaugaa

SEQ ID NO: 2667903 - RNA, 19 nt, Artificial Sequence
  Description of Artificial Sequence: Synthetic oligonucleotide
cccuagagaaguucugcuu

SEQ ID NO: 2667904 - RNA, 19 nt, Artificial Sequence
  Description of Artificial Sequence: Synthetic oligonucleotide
caggcucccuagagaaguu

SEQ ID NO: 2667905 - RNA, 19 nt, Artificial Sequence
  Description of Artificial Sequence: Synthetic oligonucleotide
caccgauggccuucaucuu

SEQ ID NO: 2667906 - RNA, 19 nt, Artificial Sequence
  Description of Artificial Sequence: Synthetic oligonucleotide
gcuugcaguugcugcuguu

SEQ ID NO: 2667907 - RNA, 19 nt, Artificial Sequence
  Description of Artificial Sequence: Synthetic oligonucleotide
gcugaucaacaagcucaau

SEQ ID NO: 2667908 - RNA, 19 nt, Artificial Sequence
  Description of Artificial Sequence: Synthetic oligonucleotide
gagcaccgauggccuucau

SEQ ID NO: 2667909 - RNA, 19 nt, Artificial Sequence
  Description of Artificial Sequence: Synthetic oligonucleotide
cgagcaccgauggccuuca

SEQ ID NO: 2667910 - RNA, 19 nt, Artificial Sequence
  Description of Artificial Sequence: Synthetic oligonucleotide
caguggcagucaggaggua

SEQ ID NO: 2667911 - RNA, 19 nt, Artificial Sequence
  Description of Artificial Sequence: Synthetic oligonucleotide
ggguaaccucuggguccaa

SEQ ID NO: 2667912 - RNA, 19 nt, Artificial Sequence
  Description of Artificial Sequence: Synthetic oligonucleotide
ccaacacccgaagcuuguu

SEQ ID NO: 2667913 - RNA, 19 nt, Artificial Sequence
  Description of Artificial Sequence: Synthetic oligonucleotide
aauuaaauaaaucacaugu

SEQ ID NO: 2667914 - RNA, 19 nt, Artificial Sequence
  Description of Artificial Sequence: Synthetic oligonucleotide
aaccuauggaaacagaugc

SEQ ID NO: 2667915 - RNA, 19 nt, Artificial Sequence
  Description of Artificial Sequence: Synthetic oligonucleotide
ugaaauagacuuuacaggg

SEQ ID NO: 2667916 - RNA, 19 nt, Artificial Sequence
  Description of Artificial Sequence: Synthetic oligonucleotide
uuuuauuagaaucccaggg

SEQ ID NO: 2667917 - RNA, 19 nt, Artificial Sequence
  Description of Artificial Sequence: Synthetic oligonucleotide
aaauggaaaauacaaaugu

SEQ ID NO: 2667918 - RNA, 19 nt, Artificial Sequence
  Description of Artificial Sequence: Synthetic oligonucleotide
ucuuaaaguacuaaaaccu

SEQ ID NO: 2667919 - RNA, 19 nt, Artificial Sequence
  Description of Artificial Sequence: Synthetic oligonucleotide
aaaguacuaaaaccuaugg

SEQ ID NO: 2667920 - RNA, 19 nt, Artificial Sequence
  Description of Artificial Sequence: Synthetic oligonucleotide
ucaaaggugaaaauaaaug

SEQ ID NO: 2667921 - RNA, 19 nt, Artificial Sequence
  Description of Artificial Sequence: Synthetic oligonucleotide
aaaucugaguccuuguuuc

SEQ ID NO: 2667922 - RNA, 19 nt, Artificial Sequence
  Description of Artificial Sequence: Synthetic oligonucleotide
uaaauauacaaaucaaaug

SEQ ID NO: 2667923 - RNA, 19 nt, Artificial Sequence
  Description of Artificial Sequence: Synthetic oligonucleotide
acaaaagagaauuaaauaa

SEQ ID NO: 2667924 - RNA, 19 nt, Artificial Sequence
  Description of Artificial Sequence: Synthetic oligonucleotide
auaacuuacacuuucauua

SEQ ID NO: 2667925 - RNA, 19 nt, Artificial Sequence
  Description of Artificial Sequence: Synthetic oligonucleotide
ucaucuaagguacaaaaga

SEQ ID NO: 2667926 - RNA, 19 nt, Artificial Sequence
  Description of Artificial Sequence: Synthetic oligonucleotide
guauaauuucuccagaucc

SEQ ID NO: 2667927 - RNA, 19 nt, Artificial Sequence
  Description of Artificial Sequence: Synthetic oligonucleotide
uauguaacaacacauguau

SEQ ID NO: 2667928 - RNA, 19 nt, Artificial Sequence
  Description of Artificial Sequence: Synthetic oligonucleotide
ucauuaguaguuaugucag

SEQ ID NO: 2667929 - RNA, 19 nt, Artificial Sequence
  Description of Artificial Sequence: Synthetic oligonucleotide
aaguagacacucuauugcg

SEQ ID NO: 2667930 - RNA, 19 nt, Artificial Sequence
  Description of Artificial Sequence: Synthetic oligonucleotide
uaaguagacacucuauugc

SEQ ID NO: 2667931 - RNA, 19 nt, Artificial Sequence
  Description of Artificial Sequence: Synthetic oligonucleotide
agagaauuaaauaaaucac

SEQ ID NO: 2667932 - RNA, 19 nt, Artificial Sequence
  Description of Artificial Sequence: Synthetic oligonucleotide
uuuauuagaaucccaggga

SEQ ID NO: 2667933 - RNA, 19 nt, Artificial Sequence
  Description of Artificial Sequence: Synthetic oligonucleotide
ucuaagguacaaaagagaa

SEQ ID NO: 2667934 - RNA, 19 nt, Artificial Sequence
  Description of Artificial Sequence: Synthetic oligonucleotide
uccaugaugaaacugaaau

SEQ ID NO: 2667935 - RNA, 19 nt, Artificial Sequence
  Description of Artificial Sequence: Synthetic oligonucleotide
uucaggauauguaacaaca

SEQ ID NO: 2667936 - RNA, 19 nt, Artificial Sequence
  Description of Artificial Sequence: Synthetic oligonucleotide
aaauagacuuuacagggga

SEQ ID NO: 2667937 - RNA, 19 nt, Artificial Sequence
  Description of Artificial Sequence: Synthetic oligonucleotide
ucuauugcgccugagaucc

SEQ ID NO: 2667938 - RNA, 19 nt, Artificial Sequence
  Description of Artificial Sequence: Synthetic oligonucleotide
guaaguaacaaguggagug

SEQ ID NO: 2667939 - RNA, 19 nt, Artificial Sequence
  Description of Artificial Sequence: Synthetic oligonucleotide
acacauguauaauuucucc

SEQ ID NO: 2667940 - RNA, 19 nt, Artificial Sequence
  Description of Artificial Sequence: Synthetic oligonucleotide
ugaugaaacugaaauagac

SEQ ID NO: 2667941 - RNA, 19 nt, Artificial Sequence
  Description of Artificial Sequence: Synthetic oligonucleotide
uuuacaggggaugagaagc

SEQ ID NO: 2667942 - RNA, 19 nt, Artificial Sequence
  Description of Artificial Sequence: Synthetic oligonucleotide
acaaaucaaaugaaaaugg

SEQ ID NO: 2667943 - RNA, 19 nt, Artificial Sequence
  Description of Artificial Sequence: Synthetic oligonucleotide
uuauuagaaucccagggac

SEQ ID NO: 2667944 - RNA, 19 nt, Artificial Sequence
  Description of Artificial Sequence: Synthetic oligonucleotide
uaaaguacuaaaaccuaug

SEQ ID NO: 2667945 - RNA, 19 nt, Artificial Sequence
  Description of Artificial Sequence: Synthetic oligonucleotide
uggagaauagaucuggggu

SEQ ID NO: 2667946 - RNA, 19 nt, Artificial Sequence
  Description of Artificial Sequence: Synthetic oligonucleotide
aacacggucauuuggagaa

SEQ ID NO: 2667947 - RNA, 19 nt, Artificial Sequence
  Description of Artificial Sequence: Synthetic oligonucleotide
ucuugaugcucauaaaucu

SEQ ID NO: 2667948 - RNA, 19 nt, Artificial Sequence
  Description of Artificial Sequence: Synthetic oligonucleotide
uguuuaugaauaaauuaaa

SEQ ID NO: 2667949 - RNA, 19 nt, Artificial Sequence
  Description of Artificial Sequence: Synthetic oligonucleotide
uugaauaacuuacacuuuc

SEQ ID NO: 2667950 - RNA, 19 nt, Artificial Sequence
  Description of Artificial Sequence: Synthetic oligonucleotide
ugcguaaguaacaagugga

SEQ ID NO: 2667951 - RNA, 19 nt, Artificial Sequence
  Description of Artificial Sequence: Synthetic oligonucleotide
uaugucagcagugaugucc

SEQ ID NO: 2667952 - RNA, 19 nt, Artificial Sequence
  Description of Artificial Sequence: Synthetic oligonucleotide
aauaacuuacacuuucauu

SEQ ID NO: 2667953 - RNA, 19 nt, Artificial Sequence
  Description of Artificial Sequence: Synthetic oligonucleotide
gagccuaccaccuuuacac

SEQ ID NO: 2667954 - RNA, 19 nt, Artificial Sequence
  Description of Artificial Sequence: Synthetic oligonucleotide
auacaaaucaaaugaaaau

SEQ ID NO: 2667955 - RNA, 19 nt, Artificial Sequence
  Description of Artificial Sequence: Synthetic oligonucleotide
aaaggugaaaauaaauggu

SEQ ID NO: 2667956 - RNA, 19 nt, Artificial Sequence
  Description of Artificial Sequence: Synthetic oligonucleotide
aaguacuaaaaccuaugga

SEQ ID NO: 2667957 - RNA, 19 nt, Artificial Sequence
  Description of Artificial Sequence: Synthetic oligonucleotide
caucuaagguacaaaagag

SEQ ID NO: 2667958 - RNA, 19 nt, Artificial Sequence
  Description of Artificial Sequence: Synthetic oligonucleotide
aaugaaaauggaaaauaca

SEQ ID NO: 2667959 - RNA, 19 nt, Artificial Sequence
  Description of Artificial Sequence: Synthetic oligonucleotide
uauaauuucuccagauccu

SEQ ID NO: 2667960 - RNA, 19 nt, Artificial Sequence
  Description of Artificial Sequence: Synthetic oligonucleotide
uacacuuucauuaguaguu

SEQ ID NO: 2667961 - RNA, 19 nt, Artificial Sequence
  Description of Artificial Sequence: Synthetic oligonucleotide
uggaaaauacaaauguuua

SEQ ID NO: 2667962 - RNA, 19 nt, Artificial Sequence
  Description of Artificial Sequence: Synthetic oligonucleotide
uuaaaguacuaaaaccuau

SEQ ID NO: 2667963 - RNA, 19 nt, Artificial Sequence
  Description of Artificial Sequence: Synthetic oligonucleotide
gguaaugcaucuuuuggcg

SEQ ID NO: 2667964 - RNA, 19 nt, Artificial Sequence
  Description of Artificial Sequence: Synthetic oligonucleotide
auuuggagaauagaucugg

SEQ ID NO: 2667965 - RNA, 19 nt, Artificial Sequence
  Description of Artificial Sequence: Synthetic oligonucleotide
auuagaaucccagggacuc

SEQ ID NO: 2667966 - RNA, 19 nt, Artificial Sequence
  Description of Artificial Sequence: Synthetic oligonucleotide
guaaguagacacucuauug

SEQ ID NO: 2667967 - RNA, 19 nt, Artificial Sequence
  Description of Artificial Sequence: Synthetic oligonucleotide
uuggagaauagaucugggg

SEQ ID NO: 2667968 - RNA, 19 nt, Artificial Sequence
  Description of Artificial Sequence: Synthetic oligonucleotide
uaggcguccauuuucagga

SEQ ID NO: 2667969 - RNA, 19 nt, Artificial Sequence
  Description of Artificial Sequence: Synthetic oligonucleotide
uuaguaguuaugucagcag

SEQ ID NO: 2667970 - RNA, 19 nt, Artificial Sequence
  Description of Artificial Sequence: Synthetic oligonucleotide
uuguuucccaguauaagac

SEQ ID NO: 2667971 - RNA, 19 nt, Artificial Sequence
  Description of Artificial Sequence: Synthetic oligonucleotide
ugggaguccaugaugaaac

SEQ ID NO: 2667972 - RNA, 19 nt, Artificial Sequence
  Description of Artificial Sequence: Synthetic oligonucleotide
uucuugaugcucauaaauc

SEQ ID NO: 2667973 - RNA, 19 nt, Artificial Sequence
  Description of Artificial Sequence: Synthetic oligonucleotide
uacuaaaaccuauggaaac

SEQ ID NO: 2667974 - RNA, 19 nt, Artificial Sequence
  Description of Artificial Sequence: Synthetic oligonucleotide
aaagacggucuuaaaguac

SEQ ID NO: 2667975 - RNA, 19 nt, Artificial Sequence
  Description of Artificial Sequence: Synthetic oligonucleotide
augcguaaguaacaagugg

SEQ ID NO: 2667976 - RNA, 19 nt, Artificial Sequence
  Description of Artificial Sequence: Synthetic oligonucleotide
acaacacauguauaauuuc

SEQ ID NO: 2667977 - RNA, 19 nt, Artificial Sequence
  Description of Artificial Sequence: Synthetic oligonucleotide
gugguaaugcaucuuuugg

SEQ ID NO: 2667978 - RNA, 19 nt, Artificial Sequence
  Description of Artificial Sequence: Synthetic oligonucleotide
uaaugcaucuuuuggcgag

SEQ ID NO: 2667979 - RNA, 19 nt, Artificial Sequence
  Description of Artificial Sequence: Synthetic oligonucleotide
uguauaauuucuccagauc

SEQ ID NO: 2667980 - RNA, 19 nt, Artificial Sequence
  Description of Artificial Sequence: Synthetic oligonucleotide
ugaauaacuuacacuuuca

SEQ ID NO: 2667981 - RNA, 19 nt, Artificial Sequence
  Description of Artificial Sequence: Synthetic oligonucleotide
uaacuuacacuuucauuag

SEQ ID NO: 2667982 - RNA, 19 nt, Artificial Sequence
  Description of Artificial Sequence: Synthetic oligonucleotide
aaaagacggucuuaaagua

SEQ ID NO: 2667983 - RNA, 19 nt, Artificial Sequence
  Description of Artificial Sequence: Synthetic oligonucleotide
aauaaaugguuuauuguaa

SEQ ID NO: 2667984 - RNA, 19 nt, Artificial Sequence
  Description of Artificial Sequence: Synthetic oligonucleotide
uucuuucucauagacaaca

SEQ ID NO: 2667985 - RNA, 19 nt, Artificial Sequence
  Description of Artificial Sequence: Synthetic oligonucleotide
uuacacuuucauuaguagu

SEQ ID NO: 2667986 - RNA, 19 nt, Artificial Sequence
  Description of Artificial Sequence: Synthetic oligonucleotide
aaaaccuauggaaacagau

SEQ ID NO: 2667987 - RNA, 19 nt, Artificial Sequence
  Description of Artificial Sequence: Synthetic oligonucleotide
cuuacacuuucauuaguag

SEQ ID NO: 2667988 - RNA, 19 nt, Artificial Sequence
  Description of Artificial Sequence: Synthetic oligonucleotide
uguaaguagacacucuauu

SEQ ID NO: 2667989 - RNA, 19 nt, Artificial Sequence
  Description of Artificial Sequence: Synthetic oligonucleotide
ugcucauaaaucugagucc

SEQ ID NO: 2667990 - RNA, 19 nt, Artificial Sequence
  Description of Artificial Sequence: Synthetic oligonucleotide
gaaauagacuuuacagggg

SEQ ID NO: 2667991 - RNA, 19 nt, Artificial Sequence
  Description of Artificial Sequence: Synthetic oligonucleotide
uguuguugaauaacuuaca

SEQ ID NO: 2667992 - RNA, 19 nt, Artificial Sequence
  Description of Artificial Sequence: Synthetic oligonucleotide
gaaauaggcguccauuuuc

SEQ ID NO: 2667993 - RNA, 19 nt, Artificial Sequence
  Description of Artificial Sequence: Synthetic oligonucleotide
uugugggaguccaugauga

SEQ ID NO: 2667994 - RNA, 19 nt, Artificial Sequence
  Description of Artificial Sequence: Synthetic oligonucleotide
guuguugaauaacuuacac

SEQ ID NO: 2667995 - RNA, 19 nt, Artificial Sequence
  Description of Artificial Sequence: Synthetic oligonucleotide
ucuguuguugaauaacuua

SEQ ID NO: 2667996 - RNA, 19 nt, Artificial Sequence
  Description of Artificial Sequence: Synthetic oligonucleotide
uaguaguuaugucagcagu

SEQ ID NO: 2667997 - RNA, 19 nt, Artificial Sequence
  Description of Artificial Sequence: Synthetic oligonucleotide
caccuuuacacucacaguc

SEQ ID NO: 2667998 - RNA, 19 nt, Artificial Sequence
  Description of Artificial Sequence: Synthetic oligonucleotide
agaucuggggugguaaugc

SEQ ID NO: 2667999 - RNA, 19 nt, Artificial Sequence
  Description of Artificial Sequence: Synthetic oligonucleotide
gauauguaacaacacaugu

SEQ ID NO: 2668000 - RNA, 19 nt, Artificial Sequence
  Description of Artificial Sequence: Synthetic oligonucleotide
gagaauagaucuggggugg

SEQ ID NO: 2668001 - RNA, 19 nt, Artificial Sequence
  Description of Artificial Sequence: Synthetic oligonucleotide
aaauguuuaugaauaaauu

SEQ ID NO: 2668002 - RNA, 19 nt, Artificial Sequence
  Description of Artificial Sequence: Synthetic oligonucleotide
ucacauguggcuguguaag

SEQ ID NO: 2668003 - RNA, 19 nt, Artificial Sequence
  Description of Artificial Sequence: Synthetic oligonucleotide
ucauaaaucugaguccuug

SEQ ID NO: 2668004 - RNA, 19 nt, Artificial Sequence
  Description of Artificial Sequence: Synthetic oligonucleotide
aaugcaucuuuuggcgagc

SEQ ID NO: 2668005 - RNA, 19 nt, Artificial Sequence
  Description of Artificial Sequence: Synthetic oligonucleotide
agaauuaaauaaaucacau

SEQ ID NO: 2668006 - RNA, 19 nt, Artificial Sequence
  Description of Artificial Sequence: Synthetic oligonucleotide
uccauuuucaggauaugua

SEQ ID NO: 2668007 - RNA, 19 nt, Artificial Sequence
  Description of Artificial Sequence: Synthetic oligonucleotide
auuaguaguuaugucagca

SEQ ID NO: 2668008 - RNA, 19 nt, Artificial Sequence
  Description of Artificial Sequence: Synthetic oligonucleotide
aaaccuauggaaacagaug

SEQ ID NO: 2668009 - RNA, 19 nt, Artificial Sequence
  Description of Artificial Sequence: Synthetic oligonucleotide
uauuagaaucccagggacu

SEQ ID NO: 2668010 - RNA, 19 nt, Artificial Sequence
  Description of Artificial Sequence: Synthetic oligonucleotide
ugaugcucauaaaucugag

SEQ ID NO: 2668011 - RNA, 19 nt, Artificial Sequence
  Description of Artificial Sequence: Synthetic oligonucleotide
aacaacacauguauaauuu

SEQ ID NO: 2668012 - RNA, 19 nt, Artificial Sequence
  Description of Artificial Sequence: Synthetic oligonucleotide
gguucuuucucauagacaa

SEQ ID NO: 2668013 - RNA, 19 nt, Artificial Sequence
  Description of Artificial Sequence: Synthetic oligonucleotide
guagacacucuauugcgcc

SEQ ID NO: 2668014 - RNA, 19 nt, Artificial Sequence
  Description of Artificial Sequence: Synthetic oligonucleotide
agacaacacggucauuugg

SEQ ID NO: 2668015 - RNA, 19 nt, Artificial Sequence
  Description of Artificial Sequence: Synthetic oligonucleotide
auaaaugguuuauuguaaa

SEQ ID NO: 2668016 - RNA, 19 nt, Artificial Sequence
  Description of Artificial Sequence: Synthetic oligonucleotide
uccaccagaucucauugug

SEQ ID NO: 2668017 - RNA, 19 nt, Artificial Sequence
  Description of Artificial Sequence: Synthetic oligonucleotide
gaaacagaugcguaaguaa

SEQ ID NO: 2668018 - RNA, 19 nt, Artificial Sequence
  Description of Artificial Sequence: Synthetic oligonucleotide
agaugcguaaguaacaagu

SEQ ID NO: 2668019 - RNA, 19 nt, Artificial Sequence
  Description of Artificial Sequence: Synthetic oligonucleotide
ucaggauauguaacaacac

SEQ ID NO: 2668020 - RNA, 19 nt, Artificial Sequence
  Description of Artificial Sequence: Synthetic oligonucleotide
uaaguaacaaguggaguga

SEQ ID NO: 2668021 - RNA, 19 nt, Artificial Sequence
  Description of Artificial Sequence: Synthetic oligonucleotide
uaaaucugaguccuuguuu

SEQ ID NO: 2668022 - RNA, 19 nt, Artificial Sequence
  Description of Artificial Sequence: Synthetic oligonucleotide
acucaucuaagguacaaaa

SEQ ID NO: 2668023 - RNA, 19 nt, Artificial Sequence
  Description of Artificial Sequence: Synthetic oligonucleotide
cuaaaaccuauggaaacag

SEQ ID NO: 2668024 - RNA, 19 nt, Artificial Sequence
  Description of Artificial Sequence: Synthetic oligonucleotide
auacaaauguuuaugaaua

SEQ ID NO: 2668025 - RNA, 19 nt, Artificial Sequence
  Description of Artificial Sequence: Synthetic oligonucleotide
uggugaggugaaauaggcg

SEQ ID NO: 2668026 - RNA, 19 nt, Artificial Sequence
  Description of Artificial Sequence: Synthetic oligonucleotide
auugugggaguccaugaug

SEQ ID NO: 2668027 - RNA, 19 nt, Artificial Sequence
  Description of Artificial Sequence: Synthetic oligonucleotide
ggucuuaaaguacuaaaac

SEQ ID NO: 2668028 - RNA, 19 nt, Artificial Sequence
  Description of Artificial Sequence: Synthetic oligonucleotide
uaacaacacauguauaauu

SEQ ID NO: 2668029 - RNA, 19 nt, Artificial Sequence
  Description of Artificial Sequence: Synthetic oligonucleotide
aauggaaaauacaaauguu

SEQ ID NO: 2668030 - RNA, 19 nt, Artificial Sequence
  Description of Artificial Sequence: Synthetic oligonucleotide
aagacggucuuaaaguacu

SEQ ID NO: 2668031 - RNA, 19 nt, Artificial Sequence
  Description of Artificial Sequence: Synthetic oligonucleotide
aguagacacucuauugcgc

SEQ ID NO: 2668032 - RNA, 19 nt, Artificial Sequence
  Description of Artificial Sequence: Synthetic oligonucleotide
acucuauugcgccugagau

SEQ ID NO: 2668033 - RNA, 19 nt, Artificial Sequence
  Description of Artificial Sequence: Synthetic oligonucleotide
acacucacaguccugguga

SEQ ID NO: 2668034 - RNA, 19 nt, Artificial Sequence
  Description of Artificial Sequence: Synthetic oligonucleotide
uguuucccaguauaagaca

SEQ ID NO: 2668035 - RNA, 19 nt, Artificial Sequence
  Description of Artificial Sequence: Synthetic oligonucleotide
uaaaaccuauggaaacaga

SEQ ID NO: 2668036 - RNA, 19 nt, Artificial Sequence
  Description of Artificial Sequence: Synthetic oligonucleotide
uucuucccaucaauggucc

SEQ ID NO: 2668037 - RNA, 19 nt, Artificial Sequence
  Description of Artificial Sequence: Synthetic oligonucleotide
gaugcguaaguaacaagug

SEQ ID NO: 2668038 - RNA, 19 nt, Artificial Sequence
  Description of Artificial Sequence: Synthetic oligonucleotide
aacuuacacuuucauuagu

SEQ ID NO: 2668039 - RNA, 19 nt, Artificial Sequence
  Description of Artificial Sequence: Synthetic oligonucleotide
aauagaucuggggugguaa

SEQ ID NO: 2668040 - RNA, 19 nt, Artificial Sequence
  Description of Artificial Sequence: Synthetic oligonucleotide
aauaggcguccauuuucag

SEQ ID NO: 2668041 - RNA, 19 nt, Artificial Sequence
  Description of Artificial Sequence: Synthetic oligonucleotide
cucauagacaacacgguca

SEQ ID NO: 2668042 - RNA, 19 nt, Artificial Sequence
  Description of Artificial Sequence: Synthetic oligonucleotide
aaucacauguggcugugua

SEQ ID NO: 2668043 - RNA, 19 nt, Artificial Sequence
  Description of Artificial Sequence: Synthetic oligonucleotide
ucuuuuggcgagccuacca

SEQ ID NO: 2668044 - RNA, 19 nt, Artificial Sequence
  Description of Artificial Sequence: Synthetic oligonucleotide
aacaaguggagugauguuu

SEQ ID NO: 2668045 - RNA, 19 nt, Artificial Sequence
  Description of Artificial Sequence: Synthetic oligonucleotide
ugauguuuuguuucccagu

SEQ ID NO: 2668046 - RNA, 19 nt, Artificial Sequence
  Description of Artificial Sequence: Synthetic oligonucleotide
uggcuguguaaguagacac

SEQ ID NO: 2668047 - RNA, 19 nt, Artificial Sequence
  Description of Artificial Sequence: Synthetic oligonucleotide
auguauaauuucuccagau

SEQ ID NO: 2668048 - RNA, 19 nt, Artificial Sequence
  Description of Artificial Sequence: Synthetic oligonucleotide
auagacaacacggucauuu

SEQ ID NO: 2668049 - RNA, 19 nt, Artificial Sequence
  Description of Artificial Sequence: Synthetic oligonucleotide
uacacucacaguccuggug

SEQ ID NO: 2668050 - RNA, 19 nt, Artificial Sequence
  Description of Artificial Sequence: Synthetic oligonucleotide
ugaaacugaaauagacuuu

SEQ ID NO: 2668051 - RNA, 19 nt, Artificial Sequence
  Description of Artificial Sequence: Synthetic oligonucleotide
acuaaaaccuauggaaaca

SEQ ID NO: 2668052 - RNA, 19 nt, Artificial Sequence
  Description of Artificial Sequence: Synthetic oligonucleotide
ggagaauagaucuggggug

SEQ ID NO: 2668053 - RNA, 19 nt, Artificial Sequence
  Description of Artificial Sequence: Synthetic oligonucleotide
aaauaggcguccauuuuca

SEQ ID NO: 2668054 - RNA, 19 nt, Artificial Sequence
  Description of Artificial Sequence: Synthetic oligonucleotide
agugauguuuuguuuccca

SEQ ID NO: 2668055 - RNA, 19 nt, Artificial Sequence
  Description of Artificial Sequence: Synthetic oligonucleotide
auaauuucuccagauccug

SEQ ID NO: 2668056 - RNA, 19 nt, Artificial Sequence
  Description of Artificial Sequence: Synthetic oligonucleotide
cuuuacaggggaugagaag

SEQ ID NO: 2668057 - RNA, 19 nt, Artificial Sequence
  Description of Artificial Sequence: Synthetic oligonucleotide
aaucugaguccuuguuuca

SEQ ID NO: 2668058 - RNA, 19 nt, Artificial Sequence
  Description of Artificial Sequence: Synthetic oligonucleotide
aguuaugucagcagugaug

SEQ ID NO: 2668059 - RNA, 19 nt, Artificial Sequence
  Description of Artificial Sequence: Synthetic oligonucleotide
auagacuuuacaggggaug

SEQ ID NO: 2668060 - RNA, 19 nt, Artificial Sequence
  Description of Artificial Sequence: Synthetic oligonucleotide
uuuuggcgagccuaccacc

SEQ ID NO: 2668061 - RNA, 19 nt, Artificial Sequence
  Description of Artificial Sequence: Synthetic oligonucleotide
gugauguuuuguuucccag

SEQ ID NO: 2668062 - RNA, 19 nt, Artificial Sequence
  Description of Artificial Sequence: Synthetic oligonucleotide
acaacacggucauuuggag

SEQ ID NO: 2668063 - RNA, 19 nt, Artificial Sequence
  Description of Artificial Sequence: Synthetic oligonucleotide
gaguccaugaugaaacuga

SEQ ID NO: 2668064 - RNA, 19 nt, Artificial Sequence
  Description of Artificial Sequence: Synthetic oligonucleotide
cugguucuuucucauagac

SEQ ID NO: 2668065 - RNA, 19 nt, Artificial Sequence
  Description of Artificial Sequence: Synthetic oligonucleotide
uuuggcgagccuaccaccu

SEQ ID NO: 2668066 - RNA, 19 nt, Artificial Sequence
  Description of Artificial Sequence: Synthetic oligonucleotide
aggauauguaacaacacau

SEQ ID NO: 2668067 - RNA, 19 nt, Artificial Sequence
  Description of Artificial Sequence: Synthetic oligonucleotide
aguaguuaugucagcagug

SEQ ID NO: 2668068 - RNA, 19 nt, Artificial Sequence
  Description of Artificial Sequence: Synthetic oligonucleotide
aacagaugcguaaguaaca

SEQ ID NO: 2668069 - RNA, 19 nt, Artificial Sequence
  Description of Artificial Sequence: Synthetic oligonucleotide
ugaggugaaauaggcgucc

SEQ ID NO: 2668070 - RNA, 19 nt, Artificial Sequence
  Description of Artificial Sequence: Synthetic oligonucleotide
cuuaaaguacuaaaaccua

SEQ ID NO: 2668071 - RNA, 19 nt, Artificial Sequence
  Description of Artificial Sequence: Synthetic oligonucleotide
ugaaauaggcguccauuuu

SEQ ID NO: 2668072 - RNA, 19 nt, Artificial Sequence
  Description of Artificial Sequence: Synthetic oligonucleotide
auaaaucugaguccuuguu

SEQ ID NO: 2668073 - RNA, 19 nt, Artificial Sequence
  Description of Artificial Sequence: Synthetic oligonucleotide
gaguccuuguuucaucuuc

SEQ ID NO: 2668074 - RNA, 19 nt, Artificial Sequence
  Description of Artificial Sequence: Synthetic oligonucleotide
uuacaggggaugagaagcu

SEQ ID NO: 2668075 - RNA, 19 nt, Artificial Sequence
  Description of Artificial Sequence: Synthetic oligonucleotide
cacauguauaauuucucca

SEQ ID NO: 2668076 - RNA, 19 nt, Artificial Sequence
  Description of Artificial Sequence: Synthetic oligonucleotide
aguggagugauguuuuguu

SEQ ID NO: 2668077 - RNA, 19 nt, Artificial Sequence
  Description of Artificial Sequence: Synthetic oligonucleotide
cagauccugguuuuggcug

SEQ ID NO: 2668078 - RNA, 19 nt, Artificial Sequence
  Description of Artificial Sequence: Synthetic oligonucleotide
cuuuuggcgagccuaccac

SEQ ID NO: 2668079 - RNA, 19 nt, Artificial Sequence
  Description of Artificial Sequence: Synthetic oligonucleotide
uagacaacacggucauuug

SEQ ID NO: 2668080 - RNA, 19 nt, Artificial Sequence
  Description of Artificial Sequence: Synthetic oligonucleotide
acggucuuaaaguacuaaa

SEQ ID NO: 2668081 - RNA, 19 nt, Artificial Sequence
  Description of Artificial Sequence: Synthetic oligonucleotide
aggggugucuuucuugaug

SEQ ID NO: 2668082 - RNA, 19 nt, Artificial Sequence
  Description of Artificial Sequence: Synthetic oligonucleotide
guuaugucagcagugaugu

SEQ ID NO: 2668083 - RNA, 19 nt, Artificial Sequence
  Description of Artificial Sequence: Synthetic oligonucleotide
uccagauccugguuuuggc

SEQ ID NO: 2668084 - RNA, 19 nt, Artificial Sequence
  Description of Artificial Sequence: Synthetic oligonucleotide
uggaaacagaugcguaagu

SEQ ID NO: 2668085 - RNA, 19 nt, Artificial Sequence
  Description of Artificial Sequence: Synthetic oligonucleotide
caggauauguaacaacaca

SEQ ID NO: 2668086 - RNA, 19 nt, Artificial Sequence
  Description of Artificial Sequence: Synthetic oligonucleotide
gacaacacggucauuugga

SEQ ID NO: 2668087 - RNA, 19 nt, Artificial Sequence
  Description of Artificial Sequence: Synthetic oligonucleotide
uguggcuguguaaguagac

SEQ ID NO: 2668088 - RNA, 19 nt, Artificial Sequence
  Description of Artificial Sequence: Synthetic oligonucleotide
aucuaagguacaaaagaga

SEQ ID NO: 2668089 - RNA, 19 nt, Artificial Sequence
  Description of Artificial Sequence: Synthetic oligonucleotide
aaugguccaccagaucuca

SEQ ID NO: 2668090 - RNA, 19 nt, Artificial Sequence
  Description of Artificial Sequence: Synthetic oligonucleotide
uucuguuguugaauaacuu

SEQ ID NO: 2668091 - RNA, 19 nt, Artificial Sequence
  Description of Artificial Sequence: Synthetic oligonucleotide
acuuucauuaguaguuaug

SEQ ID NO: 2668092 - RNA, 19 nt, Artificial Sequence
  Description of Artificial Sequence: Synthetic oligonucleotide
ggggugucuuucuugaugc

SEQ ID NO: 2668093 - RNA, 19 nt, Artificial Sequence
  Description of Artificial Sequence: Synthetic oligonucleotide
guaacaaguggagugaugu

SEQ ID NO: 2668094 - RNA, 19 nt, Artificial Sequence
  Description of Artificial Sequence: Synthetic oligonucleotide
ggugguaaugcaucuuuug

SEQ ID NO: 2668095 - RNA, 19 nt, Artificial Sequence
  Description of Artificial Sequence: Synthetic oligonucleotide
ugcgccugagauccucagg

SEQ ID NO: 2668096 - RNA, 19 nt, Artificial Sequence
  Description of Artificial Sequence: Synthetic oligonucleotide
agguacaaaagagaauuaa

SEQ ID NO: 2668097 - RNA, 19 nt, Artificial Sequence
  Description of Artificial Sequence: Synthetic oligonucleotide
ggagugauguuuuguuucc

SEQ ID NO: 2668098 - RNA, 19 nt, Artificial Sequence
  Description of Artificial Sequence: Synthetic oligonucleotide
ggauauguaacaacacaug

SEQ ID NO: 2668099 - RNA, 19 nt, Artificial Sequence
  Description of Artificial Sequence: Synthetic oligonucleotide
uaaaucacauguggcugug

SEQ ID NO: 2668100 - RNA, 19 nt, Artificial Sequence
  Description of Artificial Sequence: Synthetic oligonucleotide
uguuucaucuucuguuguu

SEQ ID NO: 2668101 - RNA, 19 nt, Artificial Sequence
  Description of Artificial Sequence: Synthetic oligonucleotide
cauguauaauuucuccaga

SEQ ID NO: 2668102 - RNA, 19 nt, Artificial Sequence
  Description of Artificial Sequence: Synthetic oligonucleotide
ggugaggugaaauaggcgu

SEQ ID NO: 2668103 - RNA, 19 nt, Artificial Sequence
  Description of Artificial Sequence: Synthetic oligonucleotide
caucuuuuggcgagccuac

SEQ ID NO: 2668104 - RNA, 19 nt, Artificial Sequence
  Description of Artificial Sequence: Synthetic oligonucleotide
aucccagggacucaucuaa

SEQ ID NO: 2668105 - RNA, 19 nt, Artificial Sequence
  Description of Artificial Sequence: Synthetic oligonucleotide
guacuaaaaccuauggaaa

SEQ ID NO: 2668106 - RNA, 19 nt, Artificial Sequence
  Description of Artificial Sequence: Synthetic oligonucleotide
aaguggagugauguuuugu

SEQ ID NO: 2668107 - RNA, 19 nt, Artificial Sequence
  Description of Artificial Sequence: Synthetic oligonucleotide
auauguaacaacacaugua

SEQ ID NO: 2668108 - RNA, 19 nt, Artificial Sequence
  Description of Artificial Sequence: Synthetic oligonucleotide
gacuuuacaggggaugaga

SEQ ID NO: 2668109 - RNA, 19 nt, Artificial Sequence
  Description of Artificial Sequence: Synthetic oligonucleotide
accuauggaaacagaugcg

SEQ ID NO: 2668110 - RNA, 19 nt, Artificial Sequence
  Description of Artificial Sequence: Synthetic oligonucleotide
gcgccugagauccucaggg

SEQ ID NO: 2668111 - RNA, 19 nt, Artificial Sequence
  Description of Artificial Sequence: Synthetic oligonucleotide
uaguuaugucagcagugau

SEQ ID NO: 2668112 - RNA, 19 nt, Artificial Sequence
  Description of Artificial Sequence: Synthetic oligonucleotide
aaucccagggacucaucua

SEQ ID NO: 2668113 - RNA, 19 nt, Artificial Sequence
  Description of Artificial Sequence: Synthetic oligonucleotide
ggugaaaauaaaugguuua

SEQ ID NO: 2668114 - RNA, 19 nt, Artificial Sequence
  Description of Artificial Sequence: Synthetic oligonucleotide
caacacauguauaauuucu

SEQ ID NO: 2668115 - RNA, 19 nt, Artificial Sequence
  Description of Artificial Sequence: Synthetic oligonucleotide
uuucccaguauaagacaau

SEQ ID NO: 2668116 - RNA, 19 nt, Artificial Sequence
  Description of Artificial Sequence: Synthetic oligonucleotide
guaaugcaucuuuuggcga

SEQ ID NO: 2668117 - RNA, 19 nt, Artificial Sequence
  Description of Artificial Sequence: Synthetic oligonucleotide
uucccaucaaugguccacc

SEQ ID NO: 2668118 - RNA, 19 nt, Artificial Sequence
  Description of Artificial Sequence: Synthetic oligonucleotide
cuuuacacucacaguccug

SEQ ID NO: 2668119 - RNA, 19 nt, Artificial Sequence
  Description of Artificial Sequence: Synthetic oligonucleotide
guaguuaugucagcaguga

SEQ ID NO: 2668120 - RNA, 19 nt, Artificial Sequence
  Description of Artificial Sequence: Synthetic oligonucleotide
cucuauugcgccugagauc

SEQ ID NO: 2668121 - RNA, 19 nt, Artificial Sequence
  Description of Artificial Sequence: Synthetic oligonucleotide
acuuacacuuucauuagua

SEQ ID NO: 2668122 - RNA, 19 nt, Artificial Sequence
  Description of Artificial Sequence: Synthetic oligonucleotide
agauccugguuuuggcugu

SEQ ID NO: 2668123 - RNA, 19 nt, Artificial Sequence
  Description of Artificial Sequence: Synthetic oligonucleotide
ugguuuuggcuguucgagu

SEQ ID NO: 2668124 - RNA, 19 nt, Artificial Sequence
  Description of Artificial Sequence: Synthetic oligonucleotide
gaauaacuuacacuuucau

SEQ ID NO: 2668125 - RNA, 19 nt, Artificial Sequence
  Description of Artificial Sequence: Synthetic oligonucleotide
gaugagaagcuccucuccu

SEQ ID NO: 2668126 - RNA, 19 nt, Artificial Sequence
  Description of Artificial Sequence: Synthetic oligonucleotide
acagaugcguaaguaacaa

SEQ ID NO: 2668127 - RNA, 19 nt, Artificial Sequence
  Description of Artificial Sequence: Synthetic oligonucleotide
aauagacuuuacaggggau

SEQ ID NO: 2668128 - RNA, 19 nt, Artificial Sequence
  Description of Artificial Sequence: Synthetic oligonucleotide
cagaugcguaaguaacaag

SEQ ID NO: 2668129 - RNA, 19 nt, Artificial Sequence
  Description of Artificial Sequence: Synthetic oligonucleotide
gaucucauugugggagucc

SEQ ID NO: 2668130 - RNA, 19 nt, Artificial Sequence
  Description of Artificial Sequence: Synthetic oligonucleotide
caaugguccaccagaucuc

SEQ ID NO: 2668131 - RNA, 19 nt, Artificial Sequence
  Description of Artificial Sequence: Synthetic oligonucleotide
uagaucuggggugguaaug

SEQ ID NO: 2668132 - RNA, 19 nt, Artificial Sequence
  Description of Artificial Sequence: Synthetic oligonucleotide
aaguaacaaguggagugau

SEQ ID NO: 2668133 - RNA, 19 nt, Artificial Sequence
  Description of Artificial Sequence: Synthetic oligonucleotide
cucaggggugucuuucuug

SEQ ID NO: 2668134 - RNA, 19 nt, Artificial Sequence
  Description of Artificial Sequence: Synthetic oligonucleotide
uagacacucuauugcgccu

SEQ ID NO: 2668135 - RNA, 19 nt, Artificial Sequence
  Description of Artificial Sequence: Synthetic oligonucleotide
caguauaagacaauauuuu

SEQ ID NO: 2668136 - RNA, 19 nt, Artificial Sequence
  Description of Artificial Sequence: Synthetic oligonucleotide
gguccaccagaucucauug

SEQ ID NO: 2668137 - RNA, 19 nt, Artificial Sequence
  Description of Artificial Sequence: Synthetic oligonucleotide
cuucuguuguugaauaacu

SEQ ID NO: 2668138 - RNA, 19 nt, Artificial Sequence
  Description of Artificial Sequence: Synthetic oligonucleotide
aucuuuuggcgagccuacc

SEQ ID NO: 2668139 - RNA, 19 nt, Artificial Sequence
  Description of Artificial Sequence: Synthetic oligonucleotide
cuucccaucaaugguccac

SEQ ID NO: 2668140 - RNA, 19 nt, Artificial Sequence
  Description of Artificial Sequence: Synthetic oligonucleotide
aagcuccucuccugguucu

SEQ ID NO: 2668141 - RNA, 19 nt, Artificial Sequence
  Description of Artificial Sequence: Synthetic oligonucleotide
aucucauugugggagucca

SEQ ID NO: 2668142 - RNA, 19 nt, Artificial Sequence
  Description of Artificial Sequence: Synthetic oligonucleotide
aucacauguggcuguguaa

SEQ ID NO: 2668143 - RNA, 19 nt, Artificial Sequence
  Description of Artificial Sequence: Synthetic oligonucleotide
ucccagggacucaucuaag

SEQ ID NO: 2668144 - RNA, 19 nt, Artificial Sequence
  Description of Artificial Sequence: Synthetic oligonucleotide
guuucccaguauaagacaa

SEQ ID NO: 2668145 - RNA, 19 nt, Artificial Sequence
  Description of Artificial Sequence: Synthetic oligonucleotide
auagaucuggggugguaau

SEQ ID NO: 2668146 - RNA, 19 nt, Artificial Sequence
  Description of Artificial Sequence: Synthetic oligonucleotide
gaugcucauaaaucugagu

SEQ ID NO: 2668147 - RNA, 19 nt, Artificial Sequence
  Description of Artificial Sequence: Synthetic oligonucleotide
cuccagauccugguuuugg

SEQ ID NO: 2668148 - RNA, 19 nt, Artificial Sequence
  Description of Artificial Sequence: Synthetic oligonucleotide
aucuucuguuguugaauaa

SEQ ID NO: 2668149 - RNA, 19 nt, Artificial Sequence
  Description of Artificial Sequence: Synthetic oligonucleotide
uuagaaucccagggacuca

SEQ ID NO: 2668150 - RNA, 19 nt, Artificial Sequence
  Description of Artificial Sequence: Synthetic oligonucleotide
uucuccagauccugguuuu

SEQ ID NO: 2668151 - RNA, 19 nt, Artificial Sequence
  Description of Artificial Sequence: Synthetic oligonucleotide
acuuuacaggggaugagaa

SEQ ID NO: 2668152 - RNA, 19 nt, Artificial Sequence
  Description of Artificial Sequence: Synthetic oligonucleotide
gagugauguuuuguuuccc

SEQ ID NO: 2668153 - RNA, 19 nt, Artificial Sequence
  Description of Artificial Sequence: Synthetic oligonucleotide
agacuuuacaggggaugag

SEQ ID NO: 2668154 - RNA, 19 nt, Artificial Sequence
  Description of Artificial Sequence: Synthetic oligonucleotide
agacacucuauugcgccug

SEQ ID NO: 2668155 - RNA, 19 nt, Artificial Sequence
  Description of Artificial Sequence: Synthetic oligonucleotide
caucuucuguuguugaaua

SEQ ID NO: 2668156 - RNA, 19 nt, Artificial Sequence
  Description of Artificial Sequence: Synthetic oligonucleotide
aagguacaaaagagaauua

SEQ ID NO: 2668157 - RNA, 19 nt, Artificial Sequence
  Description of Artificial Sequence: Synthetic oligonucleotide
caaguggagugauguuuug

SEQ ID NO: 2668158 - RNA, 19 nt, Artificial Sequence
  Description of Artificial Sequence: Synthetic oligonucleotide
uuacacucacaguccuggu

SEQ ID NO: 2668159 - RNA, 19 nt, Artificial Sequence
  Description of Artificial Sequence: Synthetic oligonucleotide
uaacaaguggagugauguu

SEQ ID NO: 2668160 - RNA, 19 nt, Artificial Sequence
  Description of Artificial Sequence: Synthetic oligonucleotide
gaucuggggugguaaugca

SEQ ID NO: 2668161 - RNA, 19 nt, Artificial Sequence
  Description of Artificial Sequence: Synthetic oligonucleotide
uagaaucccagggacucau

SEQ ID NO: 2668162 - RNA, 19 nt, Artificial Sequence
  Description of Artificial Sequence: Synthetic oligonucleotide
ccauuuucaggauauguaa

SEQ ID NO: 2668163 - RNA, 19 nt, Artificial Sequence
  Description of Artificial Sequence: Synthetic oligonucleotide
ugcaucuuuuggcgagccu

SEQ ID NO: 2668164 - RNA, 19 nt, Artificial Sequence
  Description of Artificial Sequence: Synthetic oligonucleotide
acaaguggagugauguuuu

SEQ ID NO: 2668165 - RNA, 19 nt, Artificial Sequence
  Description of Artificial Sequence: Synthetic oligonucleotide
guccuuguuucaucuucug

SEQ ID NO: 2668166 - RNA, 19 nt, Artificial Sequence
  Description of Artificial Sequence: Synthetic oligonucleotide
aguccuuguuucaucuucu

SEQ ID NO: 2668167 - RNA, 19 nt, Artificial Sequence
  Description of Artificial Sequence: Synthetic oligonucleotide
gugaaaauaaaugguuuau

SEQ ID NO: 2668168 - RNA, 19 nt, Artificial Sequence
  Description of Artificial Sequence: Synthetic oligonucleotide
caacacggucauuuggaga

SEQ ID NO: 2668169 - RNA, 19 nt, Artificial Sequence
  Description of Artificial Sequence: Synthetic oligonucleotide
uugcgccugagauccucag

SEQ ID NO: 2668170 - RNA, 19 nt, Artificial Sequence
  Description of Artificial Sequence: Synthetic oligonucleotide
ucacaguccuggugaggug

SEQ ID NO: 2668171 - RNA, 19 nt, Artificial Sequence
  Description of Artificial Sequence: Synthetic oligonucleotide
acggucauuuggagaauag

SEQ ID NO: 2668172 - RNA, 19 nt, Artificial Sequence
  Description of Artificial Sequence: Synthetic oligonucleotide
ucuucccaucaauggucca

SEQ ID NO: 2668173 - RNA, 19 nt, Artificial Sequence
  Description of Artificial Sequence: Synthetic oligonucleotide
gcguaaguaacaaguggag

SEQ ID NO: 2668174 - RNA, 19 nt, Artificial Sequence
  Description of Artificial Sequence: Synthetic oligonucleotide
gcuguguaaguagacacuc

SEQ ID NO: 2668175 - RNA, 19 nt, Artificial Sequence
  Description of Artificial Sequence: Synthetic oligonucleotide
cucuccugguucuuucuca

SEQ ID NO: 2668176 - RNA, 19 nt, Artificial Sequence
  Description of Artificial Sequence: Synthetic oligonucleotide
cauaaaucugaguccuugu

SEQ ID NO: 2668177 - RNA, 19 nt, Artificial Sequence
  Description of Artificial Sequence: Synthetic oligonucleotide
uauugcgccugagauccuc

SEQ ID NO: 2668178 - RNA, 19 nt, Artificial Sequence
  Description of Artificial Sequence: Synthetic oligonucleotide
cacucacaguccuggugag

SEQ ID NO: 2668179 - RNA, 19 nt, Artificial Sequence
  Description of Artificial Sequence: Synthetic oligonucleotide
ugugggaguccaugaugaa

SEQ ID NO: 2668180 - RNA, 19 nt, Artificial Sequence
  Description of Artificial Sequence: Synthetic oligonucleotide
gugaaauaggcguccauuu

SEQ ID NO: 2668181 - RNA, 19 nt, Artificial Sequence
  Description of Artificial Sequence: Synthetic oligonucleotide
ugucuuucuugaugcucau

SEQ ID NO: 2668182 - RNA, 19 nt, Artificial Sequence
  Description of Artificial Sequence: Synthetic oligonucleotide
cacucuauugcgccugaga

SEQ ID NO: 2668183 - RNA, 19 nt, Artificial Sequence
  Description of Artificial Sequence: Synthetic oligonucleotide
ucccaucaaugguccacca

SEQ ID NO: 2668184 - RNA, 19 nt, Artificial Sequence
  Description of Artificial Sequence: Synthetic oligonucleotide
cuaagguacaaaagagaau

SEQ ID NO: 2668185 - RNA, 19 nt, Artificial Sequence
  Description of Artificial Sequence: Synthetic oligonucleotide
gacucaucuaagguacaaa

SEQ ID NO: 2668186 - RNA, 19 nt, Artificial Sequence
  Description of Artificial Sequence: Synthetic oligonucleotide
acucacaguccuggugagg

SEQ ID NO: 2668187 - RNA, 19 nt, Artificial Sequence
  Description of Artificial Sequence: Synthetic oligonucleotide
gacggucuuaaaguacuaa

SEQ ID NO: 2668188 - RNA, 19 nt, Artificial Sequence
  Description of Artificial Sequence: Synthetic oligonucleotide
cuaccaccuuuacacucac

SEQ ID NO: 2668189 - RNA, 19 nt, Artificial Sequence
  Description of Artificial Sequence: Synthetic oligonucleotide
agccuaccaccuuuacacu

SEQ ID NO: 2668190 - RNA, 19 nt, Artificial Sequence
  Description of Artificial Sequence: Synthetic oligonucleotide
ggaguccaugaugaaacug

SEQ ID NO: 2668191 - RNA, 19 nt, Artificial Sequence
  Description of Artificial Sequence: Synthetic oligonucleotide
gugaggugaaauaggcguc

SEQ ID NO: 2668192 - RNA, 19 nt, Artificial Sequence
  Description of Artificial Sequence: Synthetic oligonucleotide
guggcuguguaaguagaca

SEQ ID NO: 2668193 - RNA, 19 nt, Artificial Sequence
  Description of Artificial Sequence: Synthetic oligonucleotide
ucucauugugggaguccau

SEQ ID NO: 2668194 - RNA, 19 nt, Artificial Sequence
  Description of Artificial Sequence: Synthetic oligonucleotide
uuaugucagcagugauguc

SEQ ID NO: 2668195 - RNA, 19 nt, Artificial Sequence
  Description of Artificial Sequence: Synthetic oligonucleotide
ugaguccuuguuucaucuu

SEQ ID NO: 2668196 - RNA, 19 nt, Artificial Sequence
  Description of Artificial Sequence: Synthetic oligonucleotide
uacaggggaugagaagcuc

SEQ ID NO: 2668197 - RNA, 19 nt, Artificial Sequence
  Description of Artificial Sequence: Synthetic oligonucleotide
uaccaccuuuacacucaca

SEQ ID NO: 2668198 - RNA, 19 nt, Artificial Sequence
  Description of Artificial Sequence: Synthetic oligonucleotide
uggcgagccuaccaccuuu

SEQ ID NO: 2668199 - RNA, 19 nt, Artificial Sequence
  Description of Artificial Sequence: Synthetic oligonucleotide
aggugaaauaggcguccau

SEQ ID NO: 2668200 - RNA, 19 nt, Artificial Sequence
  Description of Artificial Sequence: Synthetic oligonucleotide
guucuuucucauagacaac

SEQ ID NO: 2668201 - RNA, 19 nt, Artificial Sequence
  Description of Artificial Sequence: Synthetic oligonucleotide
gacacucuauugcgccuga

SEQ ID NO: 2668202 - RNA, 19 nt, Artificial Sequence
  Description of Artificial Sequence: Synthetic oligonucleotide
ccaguauaagacaauauuu

SEQ ID NO: 2668203 - RNA, 19 nt, Artificial Sequence
  Description of Artificial Sequence: Synthetic oligonucleotide
ggaaacagaugcguaagua

SEQ ID NO: 2668204 - RNA, 19 nt, Artificial Sequence
  Description of Artificial Sequence: Synthetic oligonucleotide
guccauuuucaggauaugu

SEQ ID NO: 2668205 - RNA, 19 nt, Artificial Sequence
  Description of Artificial Sequence: Synthetic oligonucleotide
agaauagaucugggguggu

SEQ ID NO: 2668206 - RNA, 19 nt, Artificial Sequence
  Description of Artificial Sequence: Synthetic oligonucleotide
agaaucccagggacucauc

SEQ ID NO: 2668207 - RNA, 19 nt, Artificial Sequence
  Description of Artificial Sequence: Synthetic oligonucleotide
cucacaguccuggugaggu

SEQ ID NO: 2668208 - RNA, 19 nt, Artificial Sequence
  Description of Artificial Sequence: Synthetic oligonucleotide
gugggaguccaugaugaaa

SEQ ID NO: 2668209 - RNA, 19 nt, Artificial Sequence
  Description of Artificial Sequence: Synthetic oligonucleotide
gaggugaaauaggcgucca

SEQ ID NO: 2668210 - RNA, 19 nt, Artificial Sequence
  Description of Artificial Sequence: Synthetic oligonucleotide
auguaacaacacauguaua

SEQ ID NO: 2668211 - RNA, 19 nt, Artificial Sequence
  Description of Artificial Sequence: Synthetic oligonucleotide
gccuaccaccuuuacacuc

SEQ ID NO: 2668212 - RNA, 19 nt, Artificial Sequence
  Description of Artificial Sequence: Synthetic oligonucleotide
gaauagaucugggguggua

SEQ ID NO: 2668213 - RNA, 19 nt, Artificial Sequence
  Description of Artificial Sequence: Synthetic oligonucleotide
agauccucaggggugucuu

SEQ ID NO: 2668214 - RNA, 19 nt, Artificial Sequence
  Description of Artificial Sequence: Synthetic oligonucleotide
ccuaccaccuuuacacuca

SEQ ID NO: 2668215 - RNA, 19 nt, Artificial Sequence
  Description of Artificial Sequence: Synthetic oligonucleotide
auugcgccugagauccuca

SEQ ID NO: 2668216 - RNA, 19 nt, Artificial Sequence
  Description of Artificial Sequence: Synthetic oligonucleotide
uuggcgagccuaccaccuu

SEQ ID NO: 2668217 - RNA, 19 nt, Artificial Sequence
  Description of Artificial Sequence: Synthetic oligonucleotide
ggggaugagaagcuccucu

SEQ ID NO: 2668218 - RNA, 19 nt, Artificial Sequence
  Description of Artificial Sequence: Synthetic oligonucleotide
gcaucuuuuggcgagccua

SEQ ID NO: 2668219 - RNA, 19 nt, Artificial Sequence
  Description of Artificial Sequence: Synthetic oligonucleotide
ccuuguuucaucuucuguu

SEQ ID NO: 2668220 - RNA, 19 nt, Artificial Sequence
  Description of Artificial Sequence: Synthetic oligonucleotide
acacucuauugcgccugag

SEQ ID NO: 2668221 - RNA, 19 nt, Artificial Sequence
  Description of Artificial Sequence: Synthetic oligonucleotide
cuguguaaguagacacucu

SEQ ID NO: 2668222 - RNA, 19 nt, Artificial Sequence
  Description of Artificial Sequence: Synthetic oligonucleotide
cggucuuaaaguacuaaaa

SEQ ID NO: 2668223 - RNA, 19 nt, Artificial Sequence
  Description of Artificial Sequence: Synthetic oligonucleotide
guguaaguagacacucuau

SEQ ID NO: 2668224 - RNA, 19 nt, Artificial Sequence
  Description of Artificial Sequence: Synthetic oligonucleotide
cacuuucauuaguaguuau

SEQ ID NO: 2668225 - RNA, 19 nt, Artificial Sequence
  Description of Artificial Sequence: Synthetic oligonucleotide
cccaguauaagacaauauu

SEQ ID NO: 2668226 - RNA, 19 nt, Artificial Sequence
  Description of Artificial Sequence: Synthetic oligonucleotide
guccaugaugaaacugaaa

SEQ ID NO: 2668227 - RNA, 19 nt, Artificial Sequence
  Description of Artificial Sequence: Synthetic oligonucleotide
cauugugggaguccaugau

SEQ ID NO: 2668228 - RNA, 19 nt, Artificial Sequence
  Description of Artificial Sequence: Synthetic oligonucleotide
uggggugguaaugcaucuu

SEQ ID NO: 2668229 - RNA, 19 nt, Artificial Sequence
  Description of Artificial Sequence: Synthetic oligonucleotide
aggcguccauuuucaggau

SEQ ID NO: 2668230 - RNA, 19 nt, Artificial Sequence
  Description of Artificial Sequence: Synthetic oligonucleotide
cagaucucauugugggagu

SEQ ID NO: 2668231 - RNA, 19 nt, Artificial Sequence
  Description of Artificial Sequence: Synthetic oligonucleotide
ggacucaucuaagguacaa

SEQ ID NO: 2668232 - RNA, 19 nt, Artificial Sequence
  Description of Artificial Sequence: Synthetic oligonucleotide
ccugguuuuggcuguucga

SEQ ID NO: 2668233 - RNA, 19 nt, Artificial Sequence
  Description of Artificial Sequence: Synthetic oligonucleotide
guccaccagaucucauugu

SEQ ID NO: 2668234 - RNA, 19 nt, Artificial Sequence
  Description of Artificial Sequence: Synthetic oligonucleotide
agacggucuuaaaguacua

SEQ ID NO: 2668235 - RNA, 19 nt, Artificial Sequence
  Description of Artificial Sequence: Synthetic oligonucleotide
gccugagauccucaggggu

SEQ ID NO: 2668236 - RNA, 19 nt, Artificial Sequence
  Description of Artificial Sequence: Synthetic oligonucleotide
ggggugguaaugcaucuuu

SEQ ID NO: 2668237 - RNA, 19 nt, Artificial Sequence
  Description of Artificial Sequence: Synthetic oligonucleotide
acaguccuggugaggugaa

SEQ ID NO: 2668238 - RNA, 19 nt, Artificial Sequence
  Description of Artificial Sequence: Synthetic oligonucleotide
cacggucauuuggagaaua

SEQ ID NO: 2668239 - RNA, 19 nt, Artificial Sequence
  Description of Artificial Sequence: Synthetic oligonucleotide
acacggucauuuggagaau

SEQ ID NO: 2668240 - RNA, 19 nt, Artificial Sequence
  Description of Artificial Sequence: Synthetic oligonucleotide
ggcguccauuuucaggaua

SEQ ID NO: 2668241 - RNA, 19 nt, Artificial Sequence
  Description of Artificial Sequence: Synthetic oligonucleotide
cgccugagauccucagggg

SEQ ID NO: 2668242 - RNA, 19 nt, Artificial Sequence
  Description of Artificial Sequence: Synthetic oligonucleotide
ccuuuacacucacaguccu

SEQ ID NO: 2668243 - RNA, 19 nt, Artificial Sequence
  Description of Artificial Sequence: Synthetic oligonucleotide
gggaguccaugaugaaacu

SEQ ID NO: 2668244 - RNA, 19 nt, Artificial Sequence
  Description of Artificial Sequence: Synthetic oligonucleotide
ccagauccugguuuuggcu

SEQ ID NO: 2668245 - RNA, 19 nt, Artificial Sequence
  Description of Artificial Sequence: Synthetic oligonucleotide
gcgagccuaccaccuuuac

SEQ ID NO: 2668246 - RNA, 19 nt, Artificial Sequence
  Description of Artificial Sequence: Synthetic oligonucleotide
gcguccauuuucaggauau

SEQ ID NO: 2668247 - RNA, 19 nt, Artificial Sequence
  Description of Artificial Sequence: Synthetic oligonucleotide
augguccaccagaucucau

SEQ ID NO: 2668248 - RNA, 19 nt, Artificial Sequence
  Description of Artificial Sequence: Synthetic oligonucleotide
cgagccuaccaccuuuaca

SEQ ID NO: 2668249 - RNA, 19 nt, Artificial Sequence
  Description of Artificial Sequence: Synthetic oligonucleotide
ccaccuuuacacucacagu

SEQ ID NO: 2668250 - RNA, 19 nt, Artificial Sequence
  Description of Artificial Sequence: Synthetic oligonucleotide
cggucauuuggagaauaga

SEQ ID NO: 2668251 - RNA, 19 nt, Artificial Sequence
  Description of Artificial Sequence: Synthetic oligonucleotide
gggugucuuucuugaugcu

SEQ ID NO: 2668252 - RNA, 19 nt, Artificial Sequence
  Description of Artificial Sequence: Synthetic oligonucleotide
cuauugcgccugagauccu

SEQ ID NO: 2668253 - RNA, 19 nt, Artificial Sequence
  Description of Artificial Sequence: Synthetic oligonucleotide
caggggugucuuucuugau

SEQ ID NO: 2668254 - RNA, 19 nt, Artificial Sequence
  Description of Artificial Sequence: Synthetic oligonucleotide
ggcgagccuaccaccuuua

SEQ ID NO: 2668255 - RNA, 19 nt, Artificial Sequence
  Description of Artificial Sequence: Synthetic oligonucleotide
cauagacaacacggucauu

SEQ ID NO: 2668256 - RNA, 19 nt, Artificial Sequence
  Description of Artificial Sequence: Synthetic oligonucleotide
ccucaggggugucuuucuu

SEQ ID NO: 2668257 - RNA, 19 nt, Artificial Sequence
  Description of Artificial Sequence: Synthetic oligonucleotide
aaacauuaagugcagaucu

SEQ ID NO: 2668258 - RNA, 19 nt, Artificial Sequence
  Description of Artificial Sequence: Synthetic oligonucleotide
aaucaagaagucuaaagca

SEQ ID NO: 2668259 - RNA, 19 nt, Artificial Sequence
  Description of Artificial Sequence: Synthetic oligonucleotide
aaaggaaggagauguagag

SEQ ID NO: 2668260 - RNA, 19 nt, Artificial Sequence
  Description of Artificial Sequence: Synthetic oligonucleotide
aacuguaagaucagaaggc

SEQ ID NO: 2668261 - RNA, 19 nt, Artificial Sequence
  Description of Artificial Sequence: Synthetic oligonucleotide
uuuucucgcccucagagcg

SEQ ID NO: 2668262 - RNA, 19 nt, Artificial Sequence
  Description of Artificial Sequence: Synthetic oligonucleotide
aaaacaaggcauccucagc

SEQ ID NO: 2668263 - RNA, 19 nt, Artificial Sequence
  Description of Artificial Sequence: Synthetic oligonucleotide
gagauugacaaucaagaag

SEQ ID NO: 2668264 - RNA, 19 nt, Artificial Sequence
  Description of Artificial Sequence: Synthetic oligonucleotide
uguaagaucagaaggcacc

SEQ ID NO: 2668265 - RNA, 19 nt, Artificial Sequence
  Description of Artificial Sequence: Synthetic oligonucleotide
aagucuaaagcagaguggg

SEQ ID NO: 2668266 - RNA, 19 nt, Artificial Sequence
  Description of Artificial Sequence: Synthetic oligonucleotide
uagaaagaagucuucuucg

SEQ ID NO: 2668267 - RNA, 19 nt, Artificial Sequence
  Description of Artificial Sequence: Synthetic oligonucleotide
uuaagugcagaucuugaag

SEQ ID NO: 2668268 - RNA, 19 nt, Artificial Sequence
  Description of Artificial Sequence: Synthetic oligonucleotide
uggagaaucagccucaaac

SEQ ID NO: 2668269 - RNA, 19 nt, Artificial Sequence
  Description of Artificial Sequence: Synthetic oligonucleotide
caaucaagaagucuaaagc

SEQ ID NO: 2668270 - RNA, 19 nt, Artificial Sequence
  Description of Artificial Sequence: Synthetic oligonucleotide
agaagucuaaagcagagug

SEQ ID NO: 2668271 - RNA, 19 nt, Artificial Sequence
  Description of Artificial Sequence: Synthetic oligonucleotide
ucaagaaguagaauugacc

SEQ ID NO: 2668272 - RNA, 19 nt, Artificial Sequence
  Description of Artificial Sequence: Synthetic oligonucleotide
guaggcaauguauagaaag

SEQ ID NO: 2668273 - RNA, 19 nt, Artificial Sequence
  Description of Artificial Sequence: Synthetic oligonucleotide
aaugacguuguugacaaag

SEQ ID NO: 2668274 - RNA, 19 nt, Artificial Sequence
  Description of Artificial Sequence: Synthetic oligonucleotide
aaacaaggcauccucagca

SEQ ID NO: 2668275 - RNA, 19 nt, Artificial Sequence
  Description of Artificial Sequence: Synthetic oligonucleotide
gauuuucucgcccucagag

SEQ ID NO: 2668276 - RNA, 19 nt, Artificial Sequence
  Description of Artificial Sequence: Synthetic oligonucleotide
caacuguaagaucagaagg

SEQ ID NO: 2668277 - RNA, 19 nt, Artificial Sequence
  Description of Artificial Sequence: Synthetic oligonucleotide
uugacaaucaagaagucua

SEQ ID NO: 2668278 - RNA, 19 nt, Artificial Sequence
  Description of Artificial Sequence: Synthetic oligonucleotide
uuguacacgaacuucauuc

SEQ ID NO: 2668279 - RNA, 19 nt, Artificial Sequence
  Description of Artificial Sequence: Synthetic oligonucleotide
aguagaauugaccaacugu

SEQ ID NO: 2668280 - RNA, 19 nt, Artificial Sequence
  Description of Artificial Sequence: Synthetic oligonucleotide
ucuuuguacacgaacuuca

SEQ ID NO: 2668281 - RNA, 19 nt, Artificial Sequence
  Description of Artificial Sequence: Synthetic oligonucleotide
agauugacaaucaagaagu

SEQ ID NO: 2668282 - RNA, 19 nt, Artificial Sequence
  Description of Artificial Sequence: Synthetic oligonucleotide
auagcugucccaucguggc

SEQ ID NO: 2668283 - RNA, 19 nt, Artificial Sequence
  Description of Artificial Sequence: Synthetic oligonucleotide
ucuaccauuaccccucuug

SEQ ID NO: 2668284 - RNA, 19 nt, Artificial Sequence
  Description of Artificial Sequence: Synthetic oligonucleotide
uaagugcagaucuugaaga

SEQ ID NO: 2668285 - RNA, 19 nt, Artificial Sequence
  Description of Artificial Sequence: Synthetic oligonucleotide
agccucaaacauuaagugc

SEQ ID NO: 2668286 - RNA, 19 nt, Artificial Sequence
  Description of Artificial Sequence: Synthetic oligonucleotide
uccacuaucaccgggaccc

SEQ ID NO: 2668287 - RNA, 19 nt, Artificial Sequence
  Description of Artificial Sequence: Synthetic oligonucleotide
aaguagaugucaaggaagg

SEQ ID NO: 2668288 - RNA, 19 nt, Artificial Sequence
  Description of Artificial Sequence: Synthetic oligonucleotide
accguagacacuuucauca

SEQ ID NO: 2668289 - RNA, 19 nt, Artificial Sequence
  Description of Artificial Sequence: Synthetic oligonucleotide
uauagcugucccaucgugg

SEQ ID NO: 2668290 - RNA, 19 nt, Artificial Sequence
  Description of Artificial Sequence: Synthetic oligonucleotide
acggagaugaauucgcuuc

SEQ ID NO: 2668291 - RNA, 19 nt, Artificial Sequence
  Description of Artificial Sequence: Synthetic oligonucleotide
agaauugaccaacuguaag

SEQ ID NO: 2668292 - RNA, 19 nt, Artificial Sequence
  Description of Artificial Sequence: Synthetic oligonucleotide
acggaugugacagagauug

SEQ ID NO: 2668293 - RNA, 19 nt, Artificial Sequence
  Description of Artificial Sequence: Synthetic oligonucleotide
gaggaaguagaugucaagg

SEQ ID NO: 2668294 - RNA, 19 nt, Artificial Sequence
  Description of Artificial Sequence: Synthetic oligonucleotide
gauguuuucgccugaagga

SEQ ID NO: 2668295 - RNA, 19 nt, Artificial Sequence
  Description of Artificial Sequence: Synthetic oligonucleotide
gaaguagaugucaaggaag

SEQ ID NO: 2668296 - RNA, 19 nt, Artificial Sequence
  Description of Artificial Sequence: Synthetic oligonucleotide
ucaagaagucuaaagcaga

SEQ ID NO: 2668297 - RNA, 19 nt, Artificial Sequence
  Description of Artificial Sequence: Synthetic oligonucleotide
uacacgaacuucauucucc

SEQ ID NO: 2668298 - RNA, 19 nt, Artificial Sequence
  Description of Artificial Sequence: Synthetic oligonucleotide
gaauugaccaacuguaaga

SEQ ID NO: 2668299 - RNA, 19 nt, Artificial Sequence
  Description of Artificial Sequence: Synthetic oligonucleotide
caaucaacggaugugacag

SEQ ID NO: 2668300 - RNA, 19 nt, Artificial Sequence
  Description of Artificial Sequence: Synthetic oligonucleotide
aacaaggcauccucagcac

SEQ ID NO: 2668301 - RNA, 19 nt, Artificial Sequence
  Description of Artificial Sequence: Synthetic oligonucleotide
uuguccaaaucuccuaucc

SEQ ID NO: 2668302 - RNA, 19 nt, Artificial Sequence
  Description of Artificial Sequence: Synthetic oligonucleotide
aaacaaggagaaaggaagg

SEQ ID NO: 2668303 - RNA, 19 nt, Artificial Sequence
  Description of Artificial Sequence: Synthetic oligonucleotide
ucaaacauuaagugcagau

SEQ ID NO: 2668304 - RNA, 19 nt, Artificial Sequence
  Description of Artificial Sequence: Synthetic oligonucleotide
agggcaaacaaggagaaag

SEQ ID NO: 2668305 - RNA, 19 nt, Artificial Sequence
  Description of Artificial Sequence: Synthetic oligonucleotide
uguccaaaucuccuauccg

SEQ ID NO: 2668306 - RNA, 19 nt, Artificial Sequence
  Description of Artificial Sequence: Synthetic oligonucleotide
auuuucucgcccucagagc

SEQ ID NO: 2668307 - RNA, 19 nt, Artificial Sequence
  Description of Artificial Sequence: Synthetic oligonucleotide
uuuuccacuaucaccggga

SEQ ID NO: 2668308 - RNA, 19 nt, Artificial Sequence
  Description of Artificial Sequence: Synthetic oligonucleotide
uguuuucgccugaaggagg

SEQ ID NO: 2668309 - RNA, 19 nt, Artificial Sequence
  Description of Artificial Sequence: Synthetic oligonucleotide
uccucuuuguacacgaacu

SEQ ID NO: 2668310 - RNA, 19 nt, Artificial Sequence
  Description of Artificial Sequence: Synthetic oligonucleotide
acacgaacuucauucuccc

SEQ ID NO: 2668311 - RNA, 19 nt, Artificial Sequence
  Description of Artificial Sequence: Synthetic oligonucleotide
guagaugucaaggaaggag

SEQ ID NO: 2668312 - RNA, 19 nt, Artificial Sequence
  Description of Artificial Sequence: Synthetic oligonucleotide
uaggcaauguauagaaaga

SEQ ID NO: 2668313 - RNA, 19 nt, Artificial Sequence
  Description of Artificial Sequence: Synthetic oligonucleotide
uccaaaucuccuauccgag

SEQ ID NO: 2668314 - RNA, 19 nt, Artificial Sequence
  Description of Artificial Sequence: Synthetic oligonucleotide
gaagucuaaagcagagugg

SEQ ID NO: 2668315 - RNA, 19 nt, Artificial Sequence
  Description of Artificial Sequence: Synthetic oligonucleotide
augaauucgcuuccggauc

SEQ ID NO: 2668316 - RNA, 19 nt, Artificial Sequence
  Description of Artificial Sequence: Synthetic oligonucleotide
cuucacagaccguagacac

SEQ ID NO: 2668317 - RNA, 19 nt, Artificial Sequence
  Description of Artificial Sequence: Synthetic oligonucleotide
gaaggagauguagagacug

SEQ ID NO: 2668318 - RNA, 19 nt, Artificial Sequence
  Description of Artificial Sequence: Synthetic oligonucleotide
uguauagaaagaagucuuc

SEQ ID NO: 2668319 - RNA, 19 nt, Artificial Sequence
  Description of Artificial Sequence: Synthetic oligonucleotide
uucuucgugguguuccugg

SEQ ID NO: 2668320 - RNA, 19 nt, Artificial Sequence
  Description of Artificial Sequence: Synthetic oligonucleotide
aacuucauucucccgagaa

SEQ ID NO: 2668321 - RNA, 19 nt, Artificial Sequence
  Description of Artificial Sequence: Synthetic oligonucleotide
uucauucucccgagaaccg

SEQ ID NO: 2668322 - RNA, 19 nt, Artificial Sequence
  Description of Artificial Sequence: Synthetic oligonucleotide
aaguagaauugaccaacug

SEQ ID NO: 2668323 - RNA, 19 nt, Artificial Sequence
  Description of Artificial Sequence: Synthetic oligonucleotide
agcuucacagaccguagac

SEQ ID NO: 2668324 - RNA, 19 nt, Artificial Sequence
  Description of Artificial Sequence: Synthetic oligonucleotide
gacugugucuaccauuacc

SEQ ID NO: 2668325 - RNA, 19 nt, Artificial Sequence
  Description of Artificial Sequence: Synthetic oligonucleotide
uuuuguccaaaucuccuau

SEQ ID NO: 2668326 - RNA, 19 nt, Artificial Sequence
  Description of Artificial Sequence: Synthetic oligonucleotide
ucucuuuguggaauggaac

SEQ ID NO: 2668327 - RNA, 19 nt, Artificial Sequence
  Description of Artificial Sequence: Synthetic oligonucleotide
accauuaccccucuugcug

SEQ ID NO: 2668328 - RNA, 19 nt, Artificial Sequence
  Description of Artificial Sequence: Synthetic oligonucleotide
aucagccucaaacauuaag

SEQ ID NO: 2668329 - RNA, 19 nt, Artificial Sequence
  Description of Artificial Sequence: Synthetic oligonucleotide
aagggagaugauguuuucg

SEQ ID NO: 2668330 - RNA, 19 nt, Artificial Sequence
  Description of Artificial Sequence: Synthetic oligonucleotide
ugaauucgcuuccggauca

SEQ ID NO: 2668331 - RNA, 19 nt, Artificial Sequence
  Description of Artificial Sequence: Synthetic oligonucleotide
aagaagucuucuucguggu

SEQ ID NO: 2668332 - RNA, 19 nt, Artificial Sequence
  Description of Artificial Sequence: Synthetic oligonucleotide
gagauguagagacuguguc

SEQ ID NO: 2668333 - RNA, 19 nt, Artificial Sequence
  Description of Artificial Sequence: Synthetic oligonucleotide
uuaccccucuugcugagag

SEQ ID NO: 2668334 - RNA, 19 nt, Artificial Sequence
  Description of Artificial Sequence: Synthetic oligonucleotide
aucaagaaguagaauugac

SEQ ID NO: 2668335 - RNA, 19 nt, Artificial Sequence
  Description of Artificial Sequence: Synthetic oligonucleotide
uguacacgaacuucauucu

SEQ ID NO: 2668336 - RNA, 19 nt, Artificial Sequence
  Description of Artificial Sequence: Synthetic oligonucleotide
gguggaaugacguuguuga

SEQ ID NO: 2668337 - RNA, 19 nt, Artificial Sequence
  Description of Artificial Sequence: Synthetic oligonucleotide
aucagaaggcaccagguau

SEQ ID NO: 2668338 - RNA, 19 nt, Artificial Sequence
  Description of Artificial Sequence: Synthetic oligonucleotide
gagaugaauucgcuuccgg

SEQ ID NO: 2668339 - RNA, 19 nt, Artificial Sequence
  Description of Artificial Sequence: Synthetic oligonucleotide
agauguagagacugugucu

SEQ ID NO: 2668340 - RNA, 19 nt, Artificial Sequence
  Description of Artificial Sequence: Synthetic oligonucleotide
agaaagaagucuucuucgu

SEQ ID NO: 2668341 - RNA, 19 nt, Artificial Sequence
  Description of Artificial Sequence: Synthetic oligonucleotide
acguuguugacaaagaaaa

SEQ ID NO: 2668342 - RNA, 19 nt, Artificial Sequence
  Description of Artificial Sequence: Synthetic oligonucleotide
cuaccauuaccccucuugc

SEQ ID NO: 2668343 - RNA, 19 nt, Artificial Sequence
  Description of Artificial Sequence: Synthetic oligonucleotide
aacaaggagaaaggaagga

SEQ ID NO: 2668344 - RNA, 19 nt, Artificial Sequence
  Description of Artificial Sequence: Synthetic oligonucleotide
ucuuuguggaauggaaccc

SEQ ID NO: 2668345 - RNA, 19 nt, Artificial Sequence
  Description of Artificial Sequence: Synthetic oligonucleotide
auuaagugcagaucuugaa

SEQ ID NO: 2668346 - RNA, 19 nt, Artificial Sequence
  Description of Artificial Sequence: Synthetic oligonucleotide
agaugaauucgcuuccgga

SEQ ID NO: 2668347 - RNA, 19 nt, Artificial Sequence
  Description of Artificial Sequence: Synthetic oligonucleotide
agcacggagaugaauucgc

SEQ ID NO: 2668348 - RNA, 19 nt, Artificial Sequence
  Description of Artificial Sequence: Synthetic oligonucleotide
ugacagagauugacaauca

SEQ ID NO: 2668349 - RNA, 19 nt, Artificial Sequence
  Description of Artificial Sequence: Synthetic oligonucleotide
uagaauugaccaacuguaa

SEQ ID NO: 2668350 - RNA, 19 nt, Artificial Sequence
  Description of Artificial Sequence: Synthetic oligonucleotide
auugacaaucaagaagucu

SEQ ID NO: 2668351 - RNA, 19 nt, Artificial Sequence
  Description of Artificial Sequence: Synthetic oligonucleotide
ugggaaugagggcaaacaa

SEQ ID NO: 2668352 - RNA, 19 nt, Artificial Sequence
  Description of Artificial Sequence: Synthetic oligonucleotide
aaagcagagugggaaugag

SEQ ID NO: 2668353 - RNA, 19 nt, Artificial Sequence
  Description of Artificial Sequence: Synthetic oligonucleotide
uccuauccgagcuuuggga

SEQ ID NO: 2668354 - RNA, 19 nt, Artificial Sequence
  Description of Artificial Sequence: Synthetic oligonucleotide
agagauugacaaucaagaa

SEQ ID NO: 2668355 - RNA, 19 nt, Artificial Sequence
  Description of Artificial Sequence: Synthetic oligonucleotide
uucgcuuccggaucaagaa

SEQ ID NO: 2668356 - RNA, 19 nt, Artificial Sequence
  Description of Artificial Sequence: Synthetic oligonucleotide
ugacaaucaagaagucuaa

SEQ ID NO: 2668357 - RNA, 19 nt, Artificial Sequence
  Description of Artificial Sequence: Synthetic oligonucleotide
cagccucaaacauuaagug

SEQ ID NO: 2668358 - RNA, 19 nt, Artificial Sequence
  Description of Artificial Sequence: Synthetic oligonucleotide
cauucucccgagaaccggg

SEQ ID NO: 2668359 - RNA, 19 nt, Artificial Sequence
  Description of Artificial Sequence: Synthetic oligonucleotide
guagaauugaccaacugua

SEQ ID NO: 2668360 - RNA, 19 nt, Artificial Sequence
  Description of Artificial Sequence: Synthetic oligonucleotide
ucuaaagcagagugggaau

SEQ ID NO: 2668361 - RNA, 19 nt, Artificial Sequence
  Description of Artificial Sequence: Synthetic oligonucleotide
ugaccaacuguaagaucag

SEQ ID NO: 2668362 - RNA, 19 nt, Artificial Sequence
  Description of Artificial Sequence: Synthetic oligonucleotide
caaacauuaagugcagauc

SEQ ID NO: 2668363 - RNA, 19 nt, Artificial Sequence
  Description of Artificial Sequence: Synthetic oligonucleotide
uucgugguguuccugguau

SEQ ID NO: 2668364 - RNA, 19 nt, Artificial Sequence
  Description of Artificial Sequence: Synthetic oligonucleotide
agagcggcgcuucucgaac

SEQ ID NO: 2668365 - RNA, 19 nt, Artificial Sequence
  Description of Artificial Sequence: Synthetic oligonucleotide
ucuccuauccgagcuuugg

SEQ ID NO: 2668366 - RNA, 19 nt, Artificial Sequence
  Description of Artificial Sequence: Synthetic oligonucleotide
acagaccguagacacuuuc

SEQ ID NO: 2668367 - RNA, 19 nt, Artificial Sequence
  Description of Artificial Sequence: Synthetic oligonucleotide
gaaggcaccagguauuucu

SEQ ID NO: 2668368 - RNA, 19 nt, Artificial Sequence
  Description of Artificial Sequence: Synthetic oligonucleotide
ugagggcaaacaaggagaa

SEQ ID NO: 2668369 - RNA, 19 nt, Artificial Sequence
  Description of Artificial Sequence: Synthetic oligonucleotide
auccucagcacggagauga

SEQ ID NO: 2668370 - RNA, 19 nt, Artificial Sequence
  Description of Artificial Sequence: Synthetic oligonucleotide
auguuuucgccugaaggag

SEQ ID NO: 2668371 - RNA, 19 nt, Artificial Sequence
  Description of Artificial Sequence: Synthetic oligonucleotide
uucgccugaaggaggaagu

SEQ ID NO: 2668372 - RNA, 19 nt, Artificial Sequence
  Description of Artificial Sequence: Synthetic oligonucleotide
gaaucagccucaaacauua

SEQ ID NO: 2668373 - RNA, 19 nt, Artificial Sequence
  Description of Artificial Sequence: Synthetic oligonucleotide
uuucgccugaaggaggaag

SEQ ID NO: 2668374 - RNA, 19 nt, Artificial Sequence
  Description of Artificial Sequence: Synthetic oligonucleotide
cuuucggauuuucucgccc

SEQ ID NO: 2668375 - RNA, 19 nt, Artificial Sequence
  Description of Artificial Sequence: Synthetic oligonucleotide
aaggagaaaggaaggagau

SEQ ID NO: 2668376 - RNA, 19 nt, Artificial Sequence
  Description of Artificial Sequence: Synthetic oligonucleotide
ucauucucccgagaaccgg

SEQ ID NO: 2668377 - RNA, 19 nt, Artificial Sequence
  Description of Artificial Sequence: Synthetic oligonucleotide
augagggcaaacaaggaga

SEQ ID NO: 2668378 - RNA, 19 nt, Artificial Sequence
  Description of Artificial Sequence: Synthetic oligonucleotide
guccaaaucuccuauccga

SEQ ID NO: 2668379 - RNA, 19 nt, Artificial Sequence
  Description of Artificial Sequence: Synthetic oligonucleotide
aagaagucuaaagcagagu

SEQ ID NO: 2668380 - RNA, 19 nt, Artificial Sequence
  Description of Artificial Sequence: Synthetic oligonucleotide
ucuggguauuucuuucgga

SEQ ID NO: 2668381 - RNA, 19 nt, Artificial Sequence
  Description of Artificial Sequence: Synthetic oligonucleotide
uuucggauuuucucgcccu

SEQ ID NO: 2668382 - RNA, 19 nt, Artificial Sequence
  Description of Artificial Sequence: Synthetic oligonucleotide
aacggaugcuccucuuugu

SEQ ID NO: 2668383 - RNA, 19 nt, Artificial Sequence
  Description of Artificial Sequence: Synthetic oligonucleotide
cuguaagaucagaaggcac

SEQ ID NO: 2668384 - RNA, 19 nt, Artificial Sequence
  Description of Artificial Sequence: Synthetic oligonucleotide
agaugucaaggaaggagcg

SEQ ID NO: 2668385 - RNA, 19 nt, Artificial Sequence
  Description of Artificial Sequence: Synthetic oligonucleotide
ucgcuuccggaucaagaag

SEQ ID NO: 2668386 - RNA, 19 nt, Artificial Sequence
  Description of Artificial Sequence: Synthetic oligonucleotide
accccucuugcugagaggg

SEQ ID NO: 2668387 - RNA, 19 nt, Artificial Sequence
  Description of Artificial Sequence: Synthetic oligonucleotide
ccaacuguaagaucagaag

SEQ ID NO: 2668388 - RNA, 19 nt, Artificial Sequence
  Description of Artificial Sequence: Synthetic oligonucleotide
gauguagagacugugucua

SEQ ID NO: 2668389 - RNA, 19 nt, Artificial Sequence
  Description of Artificial Sequence: Synthetic oligonucleotide
cucagagcggcgcuucucg

SEQ ID NO: 2668390 - RNA, 19 nt, Artificial Sequence
  Description of Artificial Sequence: Synthetic oligonucleotide
aaggaaggagcgccaccuc

SEQ ID NO: 2668391 - RNA, 19 nt, Artificial Sequence
  Description of Artificial Sequence: Synthetic oligonucleotide
uuccugguauagcuguccc

SEQ ID NO: 2668392 - RNA, 19 nt, Artificial Sequence
  Description of Artificial Sequence: Synthetic oligonucleotide
ucagaaggcaccagguauu

SEQ ID NO: 2668393 - RNA, 19 nt, Artificial Sequence
  Description of Artificial Sequence: Synthetic oligonucleotide
gucuggguauuucuuucgg

SEQ ID NO: 2668394 - RNA, 19 nt, Artificial Sequence
  Description of Artificial Sequence: Synthetic oligonucleotide
uaaagcagagugggaauga

SEQ ID NO: 2668395 - RNA, 19 nt, Artificial Sequence
  Description of Artificial Sequence: Synthetic oligonucleotide
ucucccgagaaccgggcug

SEQ ID NO: 2668396 - RNA, 19 nt, Artificial Sequence
  Description of Artificial Sequence: Synthetic oligonucleotide
cuauccgagcuuugggagc

SEQ ID NO: 2668397 - RNA, 19 nt, Artificial Sequence
  Description of Artificial Sequence: Synthetic oligonucleotide
gaugaauucgcuuccggau

SEQ ID NO: 2668398 - RNA, 19 nt, Artificial Sequence
  Description of Artificial Sequence: Synthetic oligonucleotide
uuucucgcccucagagcgg

SEQ ID NO: 2668399 - RNA, 19 nt, Artificial Sequence
  Description of Artificial Sequence: Synthetic oligonucleotide
cuucucgaacggaugcucc

SEQ ID NO: 2668400 - RNA, 19 nt, Artificial Sequence
  Description of Artificial Sequence: Synthetic oligonucleotide
auguauagaaagaagucuu

SEQ ID NO: 2668401 - RNA, 19 nt, Artificial Sequence
  Description of Artificial Sequence: Synthetic oligonucleotide
cuguaggcaauguauagaa

SEQ ID NO: 2668402 - RNA, 19 nt, Artificial Sequence
  Description of Artificial Sequence: Synthetic oligonucleotide
ucuuucggauuuucucgcc

SEQ ID NO: 2668403 - RNA, 19 nt, Artificial Sequence
  Description of Artificial Sequence: Synthetic oligonucleotide
cuaaagcagagugggaaug

SEQ ID NO: 2668404 - RNA, 19 nt, Artificial Sequence
  Description of Artificial Sequence: Synthetic oligonucleotide
uuuccacuaucaccgggac

SEQ ID NO: 2668405 - RNA, 19 nt, Artificial Sequence
  Description of Artificial Sequence: Synthetic oligonucleotide
ggagaaucagccucaaaca

SEQ ID NO: 2668406 - RNA, 19 nt, Artificial Sequence
  Description of Artificial Sequence: Synthetic oligonucleotide
auguagagacugugucuac

SEQ ID NO: 2668407 - RNA, 19 nt, Artificial Sequence
  Description of Artificial Sequence: Synthetic oligonucleotide
guagagacugugucuacca

SEQ ID NO: 2668408 - RNA, 19 nt, Artificial Sequence
  Description of Artificial Sequence: Synthetic oligonucleotide
agcugucccaucguggcac

SEQ ID NO: 2668409 - RNA, 19 nt, Artificial Sequence
  Description of Artificial Sequence: Synthetic oligonucleotide
ugugacagagauugacaau

SEQ ID NO: 2668410 - RNA, 19 nt, Artificial Sequence
  Description of Artificial Sequence: Synthetic oligonucleotide
cauuaagugcagaucuuga

SEQ ID NO: 2668411 - RNA, 19 nt, Artificial Sequence
  Description of Artificial Sequence: Synthetic oligonucleotide
guauagcugucccaucgug

SEQ ID NO: 2668412 - RNA, 19 nt, Artificial Sequence
  Description of Artificial Sequence: Synthetic oligonucleotide
gaugucaaggaaggagcgc

SEQ ID NO: 2668413 - RNA, 19 nt, Artificial Sequence
  Description of Artificial Sequence: Synthetic oligonucleotide
ucagcacggagaugaauuc

SEQ ID NO: 2668414 - RNA, 19 nt, Artificial Sequence
  Description of Artificial Sequence: Synthetic oligonucleotide
acuguaggcaauguauaga

SEQ ID NO: 2668415 - RNA, 19 nt, Artificial Sequence
  Description of Artificial Sequence: Synthetic oligonucleotide
augauguuuucgccugaag

SEQ ID NO: 2668416 - RNA, 19 nt, Artificial Sequence
  Description of Artificial Sequence: Synthetic oligonucleotide
ggaaugacguuguugacaa

SEQ ID NO: 2668417 - RNA, 19 nt, Artificial Sequence
  Description of Artificial Sequence: Synthetic oligonucleotide
gaugcuccucuuuguacac

SEQ ID NO: 2668418 - RNA, 19 nt, Artificial Sequence
  Description of Artificial Sequence: Synthetic oligonucleotide
ucaacggaugugacagaga

SEQ ID NO: 2668419 - RNA, 19 nt, Artificial Sequence
  Description of Artificial Sequence: Synthetic oligonucleotide
ggcaauguauagaaagaag

SEQ ID NO: 2668420 - RNA, 19 nt, Artificial Sequence
  Description of Artificial Sequence: Synthetic oligonucleotide
gacguuguugacaaagaaa

SEQ ID NO: 2668421 - RNA, 19 nt, Artificial Sequence
  Description of Artificial Sequence: Synthetic oligonucleotide
ucacagaccguagacacuu

SEQ ID NO: 2668422 - RNA, 19 nt, Artificial Sequence
  Description of Artificial Sequence: Synthetic oligonucleotide
aaucaacggaugugacaga

SEQ ID NO: 2668423 - RNA, 19 nt, Artificial Sequence
  Description of Artificial Sequence: Synthetic oligonucleotide
aaaucuccuauccgagcuu

SEQ ID NO: 2668424 - RNA, 19 nt, Artificial Sequence
  Description of Artificial Sequence: Synthetic oligonucleotide
agcgccaccucucuuugug

SEQ ID NO: 2668425 - RNA, 19 nt, Artificial Sequence
  Description of Artificial Sequence: Synthetic oligonucleotide
ugucccaucguggcacugg

SEQ ID NO: 2668426 - RNA, 19 nt, Artificial Sequence
  Description of Artificial Sequence: Synthetic oligonucleotide
cuccuauccgagcuuuggg

SEQ ID NO: 2668427 - RNA, 19 nt, Artificial Sequence
  Description of Artificial Sequence: Synthetic oligonucleotide
uggaccuagacugggcuga

SEQ ID NO: 2668428 - RNA, 19 nt, Artificial Sequence
  Description of Artificial Sequence: Synthetic oligonucleotide
aauucgcuuccggaucaag

SEQ ID NO: 2668429 - RNA, 19 nt, Artificial Sequence
  Description of Artificial Sequence: Synthetic oligonucleotide
uucacagaccguagacacu

SEQ ID NO: 2668430 - RNA, 19 nt, Artificial Sequence
  Description of Artificial Sequence: Synthetic oligonucleotide
uaccauuaccccucuugcu

SEQ ID NO: 2668431 - RNA, 19 nt, Artificial Sequence
  Description of Artificial Sequence: Synthetic oligonucleotide
agagacugugucuaccauu

SEQ ID NO: 2668432 - RNA, 19 nt, Artificial Sequence
  Description of Artificial Sequence: Synthetic oligonucleotide
uuccacuaucaccgggacc

SEQ ID NO: 2668433 - RNA, 19 nt, Artificial Sequence
  Description of Artificial Sequence: Synthetic oligonucleotide
agagggacuggagaaucag

SEQ ID NO: 2668434 - RNA, 19 nt, Artificial Sequence
  Description of Artificial Sequence: Synthetic oligonucleotide
ugagagggacuggagaauc

SEQ ID NO: 2668435 - RNA, 19 nt, Artificial Sequence
  Description of Artificial Sequence: Synthetic oligonucleotide
aggaaggagcgccaccucu

SEQ ID NO: 2668436 - RNA, 19 nt, Artificial Sequence
  Description of Artificial Sequence: Synthetic oligonucleotide
uucucgaacggaugcuccu

SEQ ID NO: 2668437 - RNA, 19 nt, Artificial Sequence
  Description of Artificial Sequence: Synthetic oligonucleotide
aucaccgggacccggucug

SEQ ID NO: 2668438 - RNA, 19 nt, Artificial Sequence
  Description of Artificial Sequence: Synthetic oligonucleotide
ggagaaaggaaggagaugu

SEQ ID NO: 2668439 - RNA, 19 nt, Artificial Sequence
  Description of Artificial Sequence: Synthetic oligonucleotide
aggagauguagagacugug

SEQ ID NO: 2668440 - RNA, 19 nt, Artificial Sequence
  Description of Artificial Sequence: Synthetic oligonucleotide
acugguggguggaaugacg

SEQ ID NO: 2668441 - RNA, 19 nt, Artificial Sequence
  Description of Artificial Sequence: Synthetic oligonucleotide
ggucuggguauuucuuucg

SEQ ID NO: 2668442 - RNA, 19 nt, Artificial Sequence
  Description of Artificial Sequence: Synthetic oligonucleotide
gaccguagacacuuucauc

SEQ ID NO: 2668443 - RNA, 19 nt, Artificial Sequence
  Description of Artificial Sequence: Synthetic oligonucleotide
cagagugggaaugagggca

SEQ ID NO: 2668444 - RNA, 19 nt, Artificial Sequence
  Description of Artificial Sequence: Synthetic oligonucleotide
cccaucguggcacuggugg

SEQ ID NO: 2668445 - RNA, 19 nt, Artificial Sequence
  Description of Artificial Sequence: Synthetic oligonucleotide
agaagucuucuucguggug

SEQ ID NO: 2668446 - RNA, 19 nt, Artificial Sequence
  Description of Artificial Sequence: Synthetic oligonucleotide
gaagucuucuucguggugu

SEQ ID NO: 2668447 - RNA, 19 nt, Artificial Sequence
  Description of Artificial Sequence: Synthetic oligonucleotide
uggguauuucuuucggauu

SEQ ID NO: 2668448 - RNA, 19 nt, Artificial Sequence
  Description of Artificial Sequence: Synthetic oligonucleotide
agacugugucuaccauuac

SEQ ID NO: 2668449 - RNA, 19 nt, Artificial Sequence
  Description of Artificial Sequence: Synthetic oligonucleotide
gagaaucagccucaaacau

SEQ ID NO: 2668450 - RNA, 19 nt, Artificial Sequence
  Description of Artificial Sequence: Synthetic oligonucleotide
ggaggaaguagaugucaag

SEQ ID NO: 2668451 - RNA, 19 nt, Artificial Sequence
  Description of Artificial Sequence: Synthetic oligonucleotide
gcaauguauagaaagaagu

SEQ ID NO: 2668452 - RNA, 19 nt, Artificial Sequence
  Description of Artificial Sequence: Synthetic oligonucleotide
uaucaccgggacccggucu

SEQ ID NO: 2668453 - RNA, 19 nt, Artificial Sequence
  Description of Artificial Sequence: Synthetic oligonucleotide
cacgaacuucauucucccg

SEQ ID NO: 2668454 - RNA, 19 nt, Artificial Sequence
  Description of Artificial Sequence: Synthetic oligonucleotide
aacauuaagugcagaucuu

SEQ ID NO: 2668455 - RNA, 19 nt, Artificial Sequence
  Description of Artificial Sequence: Synthetic oligonucleotide
accaacuguaagaucagaa

SEQ ID NO: 2668456 - RNA, 19 nt, Artificial Sequence
  Description of Artificial Sequence: Synthetic oligonucleotide
guacacgaacuucauucuc

SEQ ID NO: 2668457 - RNA, 19 nt, Artificial Sequence
  Description of Artificial Sequence: Synthetic oligonucleotide
cucucuuuguggaauggaa

SEQ ID NO: 2668458 - RNA, 19 nt, Artificial Sequence
  Description of Artificial Sequence: Synthetic oligonucleotide
auucucccgagaaccgggc

SEQ ID NO: 2668459 - RNA, 19 nt, Artificial Sequence
  Description of Artificial Sequence: Synthetic oligonucleotide
uagagacugugucuaccau

SEQ ID NO: 2668460 - RNA, 19 nt, Artificial Sequence
  Description of Artificial Sequence: Synthetic oligonucleotide
caaaucuccuauccgagcu

SEQ ID NO: 2668461 - RNA, 19 nt, Artificial Sequence
  Description of Artificial Sequence: Synthetic oligonucleotide
gguggguggaaugacguug

SEQ ID NO: 2668462 - RNA, 19 nt, Artificial Sequence
  Description of Artificial Sequence: Synthetic oligonucleotide
ccgggcuggaccuagacug

SEQ ID NO: 2668463 - RNA, 19 nt, Artificial Sequence
  Description of Artificial Sequence: Synthetic oligonucleotide
ggaugcuccucuuuguaca

SEQ ID NO: 2668464 - RNA, 19 nt, Artificial Sequence
  Description of Artificial Sequence: Synthetic oligonucleotide
ccuauccgagcuuugggag

SEQ ID NO: 2668465 - RNA, 19 nt, Artificial Sequence
  Description of Artificial Sequence: Synthetic oligonucleotide
guuccugguauagcugucc

SEQ ID NO: 2668466 - RNA, 19 nt, Artificial Sequence
  Description of Artificial Sequence: Synthetic oligonucleotide
ggaugugacagagauugac

SEQ ID NO: 2668467 - RNA, 19 nt, Artificial Sequence
  Description of Artificial Sequence: Synthetic oligonucleotide
cagcacggagaugaauucg

SEQ ID NO: 2668468 - RNA, 19 nt, Artificial Sequence
  Description of Artificial Sequence: Synthetic oligonucleotide
aaggagauguagagacugu

SEQ ID NO: 2668469 - RNA, 19 nt, Artificial Sequence
  Description of Artificial Sequence: Synthetic oligonucleotide
ucuucgugguguuccuggu

SEQ ID NO: 2668470 - RNA, 19 nt, Artificial Sequence
  Description of Artificial Sequence: Synthetic oligonucleotide
gauugacaaucaagaaguc

SEQ ID NO: 2668471 - RNA, 19 nt, Artificial Sequence
  Description of Artificial Sequence: Synthetic oligonucleotide
gugucuaccauuaccccuc

SEQ ID NO: 2668472 - RNA, 19 nt, Artificial Sequence
  Description of Artificial Sequence: Synthetic oligonucleotide
gagcggcgcuucucgaacg

SEQ ID NO: 2668473 - RNA, 19 nt, Artificial Sequence
  Description of Artificial Sequence: Synthetic oligonucleotide
agcagcuucacagaccgua

SEQ ID NO: 2668474 - RNA, 19 nt, Artificial Sequence
  Description of Artificial Sequence: Synthetic oligonucleotide
guauagaaagaagucuucu

SEQ ID NO: 2668475 - RNA, 19 nt, Artificial Sequence
  Description of Artificial Sequence: Synthetic oligonucleotide
gaaugagggcaaacaagga

SEQ ID NO: 2668476 - RNA, 19 nt, Artificial Sequence
  Description of Artificial Sequence: Synthetic oligonucleotide
agcggcgcuucucgaacgg

SEQ ID NO: 2668477 - RNA, 19 nt, Artificial Sequence
  Description of Artificial Sequence: Synthetic oligonucleotide
uaccccucuugcugagagg

SEQ ID NO: 2668478 - RNA, 19 nt, Artificial Sequence
  Description of Artificial Sequence: Synthetic oligonucleotide
uucggauuuucucgcccuc

SEQ ID NO: 2668479 - RNA, 19 nt, Artificial Sequence
  Description of Artificial Sequence: Synthetic oligonucleotide
agaaucagccucaaacauu

SEQ ID NO: 2668480 - RNA, 19 nt, Artificial Sequence
  Description of Artificial Sequence: Synthetic oligonucleotide
cauuaccccucuugcugag

SEQ ID NO: 2668481 - RNA, 19 nt, Artificial Sequence
  Description of Artificial Sequence: Synthetic oligonucleotide
agaugauguuuucgccuga

SEQ ID NO: 2668482 - RNA, 19 nt, Artificial Sequence
  Description of Artificial Sequence: Synthetic oligonucleotide
aguagaugucaaggaagga

SEQ ID NO: 2668483 - RNA, 19 nt, Artificial Sequence
  Description of Artificial Sequence: Synthetic oligonucleotide
cagaccguagacacuuuca

SEQ ID NO: 2668484 - RNA, 19 nt, Artificial Sequence
  Description of Artificial Sequence: Synthetic oligonucleotide
accucucuuuguggaaugg

SEQ ID NO: 2668485 - RNA, 19 nt, Artificial Sequence
  Description of Artificial Sequence: Synthetic oligonucleotide
cuggaccuagacugggcug

SEQ ID NO: 2668486 - RNA, 19 nt, Artificial Sequence
  Description of Artificial Sequence: Synthetic oligonucleotide
cucccgagaaccgggcugg

SEQ ID NO: 2668487 - RNA, 19 nt, Artificial Sequence
  Description of Artificial Sequence: Synthetic oligonucleotide
augacguuguugacaaaga

SEQ ID NO: 2668488 - RNA, 19 nt, Artificial Sequence
  Description of Artificial Sequence: Synthetic oligonucleotide
ucggauuuucucgcccuca

SEQ ID NO: 2668489 - RNA, 19 nt, Artificial Sequence
  Description of Artificial Sequence: Synthetic oligonucleotide
ugucuaccauuaccccucu

SEQ ID NO: 2668490 - RNA, 19 nt, Artificial Sequence
  Description of Artificial Sequence: Synthetic oligonucleotide
guuuucgccugaaggagga

SEQ ID NO: 2668491 - RNA, 19 nt, Artificial Sequence
  Description of Artificial Sequence: Synthetic oligonucleotide
agaaccgggcuggaccuag

SEQ ID NO: 2668492 - RNA, 19 nt, Artificial Sequence
  Description of Artificial Sequence: Synthetic oligonucleotide
uucucccgagaaccgggcu

SEQ ID NO: 2668493 - RNA, 19 nt, Artificial Sequence
  Description of Artificial Sequence: Synthetic oligonucleotide
ccaaaucuccuauccgagc

SEQ ID NO: 2668494 - RNA, 19 nt, Artificial Sequence
  Description of Artificial Sequence: Synthetic oligonucleotide
caacggaugugacagagau

SEQ ID NO: 2668495 - RNA, 19 nt, Artificial Sequence
  Description of Artificial Sequence: Synthetic oligonucleotide
aaggcauccucagcacgga

SEQ ID NO: 2668496 - RNA, 19 nt, Artificial Sequence
  Description of Artificial Sequence: Synthetic oligonucleotide
uagcugucccaucguggca

SEQ ID NO: 2668497 - RNA, 19 nt, Artificial Sequence
  Description of Artificial Sequence: Synthetic oligonucleotide
aggagcgccaccucucuuu

SEQ ID NO: 2668498 - RNA, 19 nt, Artificial Sequence
  Description of Artificial Sequence: Synthetic oligonucleotide
gaaguagaauugaccaacu

SEQ ID NO: 2668499 - RNA, 19 nt, Artificial Sequence
  Description of Artificial Sequence: Synthetic oligonucleotide
gaugauguuuucgccugaa

SEQ ID NO: 2668500 - RNA, 19 nt, Artificial Sequence
  Description of Artificial Sequence: Synthetic oligonucleotide
ccgagaaccgggcuggacc

SEQ ID NO: 2668501 - RNA, 19 nt, Artificial Sequence
  Description of Artificial Sequence: Synthetic oligonucleotide
guggaaugacguuguugac

SEQ ID NO: 2668502 - RNA, 19 nt, Artificial Sequence
  Description of Artificial Sequence: Synthetic oligonucleotide
cucagcacggagaugaauu

SEQ ID NO: 2668503 - RNA, 19 nt, Artificial Sequence
  Description of Artificial Sequence: Synthetic oligonucleotide
caccucucuuuguggaaug

SEQ ID NO: 2668504 - RNA, 19 nt, Artificial Sequence
  Description of Artificial Sequence: Synthetic oligonucleotide
cuggguauuucuuucggau

SEQ ID NO: 2668505 - RNA, 19 nt, Artificial Sequence
  Description of Artificial Sequence: Synthetic oligonucleotide
ccucaaacauuaagugcag

SEQ ID NO: 2668506 - RNA, 19 nt, Artificial Sequence
  Description of Artificial Sequence: Synthetic oligonucleotide
gaacuucauucucccgaga

SEQ ID NO: 2668507 - RNA, 19 nt, Artificial Sequence
  Description of Artificial Sequence: Synthetic oligonucleotide
ucguggcacuggugggugg

SEQ ID NO: 2668508 - RNA, 19 nt, Artificial Sequence
  Description of Artificial Sequence: Synthetic oligonucleotide
ucucgaacggaugcuccuc

SEQ ID NO: 2668509 - RNA, 19 nt, Artificial Sequence
  Description of Artificial Sequence: Synthetic oligonucleotide
augcuccucuuuguacacg

SEQ ID NO: 2668510 - RNA, 19 nt, Artificial Sequence
  Description of Artificial Sequence: Synthetic oligonucleotide
accgggcuggaccuagacu

SEQ ID NO: 2668511 - RNA, 19 nt, Artificial Sequence
  Description of Artificial Sequence: Synthetic oligonucleotide
ggcaaacaaggagaaagga

SEQ ID NO: 2668512 - RNA, 19 nt, Artificial Sequence
  Description of Artificial Sequence: Synthetic oligonucleotide
acuaucaccgggacccggu

SEQ ID NO: 2668513 - RNA, 19 nt, Artificial Sequence
  Description of Artificial Sequence: Synthetic oligonucleotide
aggaggaaguagaugucaa

SEQ ID NO: 2668514 - RNA, 19 nt, Artificial Sequence
  Description of Artificial Sequence: Synthetic oligonucleotide
gugguguuccugguauagc

SEQ ID NO: 2668515 - RNA, 19 nt, Artificial Sequence
  Description of Artificial Sequence: Synthetic oligonucleotide
gguguuccugguauagcug

SEQ ID NO: 2668516 - RNA, 19 nt, Artificial Sequence
  Description of Artificial Sequence: Synthetic oligonucleotide
ucccaucguggcacuggug

SEQ ID NO: 2668517 - RNA, 19 nt, Artificial Sequence
  Description of Artificial Sequence: Synthetic oligonucleotide
cgaacuucauucucccgag

SEQ ID NO: 2668518 - RNA, 19 nt, Artificial Sequence
  Description of Artificial Sequence: Synthetic oligonucleotide
aucguggcacuggugggug

SEQ ID NO: 2668519 - RNA, 19 nt, Artificial Sequence
  Description of Artificial Sequence: Synthetic oligonucleotide
agucuaaagcagaguggga

SEQ ID NO: 2668520 - RNA, 19 nt, Artificial Sequence
  Description of Artificial Sequence: Synthetic oligonucleotide
gcgcuucucgaacggaugc

SEQ ID NO: 2668521 - RNA, 19 nt, Artificial Sequence
  Description of Artificial Sequence: Synthetic oligonucleotide
gaccaacuguaagaucaga

SEQ ID NO: 2668522 - RNA, 19 nt, Artificial Sequence
  Description of Artificial Sequence: Synthetic oligonucleotide
cucgcccucagagcggcgc

SEQ ID NO: 2668523 - RNA, 19 nt, Artificial Sequence
  Description of Artificial Sequence: Synthetic oligonucleotide
ggguggaaugacguuguug

SEQ ID NO: 2668524 - RNA, 19 nt, Artificial Sequence
  Description of Artificial Sequence: Synthetic oligonucleotide
cacuaucaccgggacccgg

SEQ ID NO: 2668525 - RNA, 19 nt, Artificial Sequence
  Description of Artificial Sequence: Synthetic oligonucleotide
cuaucaccgggacccgguc

SEQ ID NO: 2668526 - RNA, 19 nt, Artificial Sequence
  Description of Artificial Sequence: Synthetic oligonucleotide
aaggagcgccaccucucuu

SEQ ID NO: 2668527 - RNA, 19 nt, Artificial Sequence
  Description of Artificial Sequence: Synthetic oligonucleotide
aacggaugugacagagauu

SEQ ID NO: 2668528 - RNA, 19 nt, Artificial Sequence
  Description of Artificial Sequence: Synthetic oligonucleotide
cucaaacauuaagugcaga

SEQ ID NO: 2668529 - RNA, 19 nt, Artificial Sequence
  Description of Artificial Sequence: Synthetic oligonucleotide
gaaggagcgccaccucucu

SEQ ID NO: 2668530 - RNA, 19 nt, Artificial Sequence
  Description of Artificial Sequence: Synthetic oligonucleotide
cugguggguggaaugacgu

SEQ ID NO: 2668531 - RNA, 19 nt, Artificial Sequence
  Description of Artificial Sequence: Synthetic oligonucleotide
ucaccgggacccggucugg

SEQ ID NO: 2668532 - RNA, 19 nt, Artificial Sequence
  Description of Artificial Sequence: Synthetic oligonucleotide
gagaaaggaaggagaugua

SEQ ID NO: 2668533 - RNA, 19 nt, Artificial Sequence
  Description of Artificial Sequence: Synthetic oligonucleotide
ccaucguggcacugguggg

SEQ ID NO: 2668534 - RNA, 19 nt, Artificial Sequence
  Description of Artificial Sequence: Synthetic oligonucleotide
cuuuguacacgaacuucau

SEQ ID NO: 2668535 - RNA, 19 nt, Artificial Sequence
  Description of Artificial Sequence: Synthetic oligonucleotide
ugguggguggaaugacguu

SEQ ID NO: 2668536 - RNA, 19 nt, Artificial Sequence
  Description of Artificial Sequence: Synthetic oligonucleotide
ucgcccucagagcggcgcu

SEQ ID NO: 2668537 - RNA, 19 nt, Artificial Sequence
  Description of Artificial Sequence: Synthetic oligonucleotide
uccucagcacggagaugaa

SEQ ID NO: 2668538 - RNA, 19 nt, Artificial Sequence
  Description of Artificial Sequence: Synthetic oligonucleotide
ggagcgccaccucucuuug

SEQ ID NO: 2668539 - RNA, 19 nt, Artificial Sequence
  Description of Artificial Sequence: Synthetic oligonucleotide
gcuucacagaccguagaca

SEQ ID NO: 2668540 - RNA, 19 nt, Artificial Sequence
  Description of Artificial Sequence: Synthetic oligonucleotide
aggcaccagguauuucuuu

SEQ ID NO: 2668541 - RNA, 19 nt, Artificial Sequence
  Description of Artificial Sequence: Synthetic oligonucleotide
cacugguggguggaaugac

SEQ ID NO: 2668542 - RNA, 19 nt, Artificial Sequence
  Description of Artificial Sequence: Synthetic oligonucleotide
ucgaacggaugcuccucuu

SEQ ID NO: 2668543 - RNA, 19 nt, Artificial Sequence
  Description of Artificial Sequence: Synthetic oligonucleotide
cggagaugaauucgcuucc

SEQ ID NO: 2668544 - RNA, 19 nt, Artificial Sequence
  Description of Artificial Sequence: Synthetic oligonucleotide
auuaccccucuugcugaga

SEQ ID NO: 2668545 - RNA, 19 nt, Artificial Sequence
  Description of Artificial Sequence: Synthetic oligonucleotide
ucgugguguuccugguaua

SEQ ID NO: 2668546 - RNA, 19 nt, Artificial Sequence
  Description of Artificial Sequence: Synthetic oligonucleotide
aaucagccucaaacauuaa

SEQ ID NO: 2668547 - RNA, 19 nt, Artificial Sequence
  Description of Artificial Sequence: Synthetic oligonucleotide
ucgccugaaggaggaagua

SEQ ID NO: 2668548 - RNA, 19 nt, Artificial Sequence
  Description of Artificial Sequence: Synthetic oligonucleotide
uuuucgccugaaggaggaa

SEQ ID NO: 2668549 - RNA, 19 nt, Artificial Sequence
  Description of Artificial Sequence: Synthetic oligonucleotide
gaaugacguuguugacaaa

SEQ ID NO: 2668550 - RNA, 19 nt, Artificial Sequence
  Description of Artificial Sequence: Synthetic oligonucleotide
ccguagacacuuucaucac

SEQ ID NO: 2668551 - RNA, 19 nt, Artificial Sequence
  Description of Artificial Sequence: Synthetic oligonucleotide
ccauuaccccucuugcuga

SEQ ID NO: 2668552 - RNA, 19 nt, Artificial Sequence
  Description of Artificial Sequence: Synthetic oligonucleotide
cggaucaagaaguagaauu

SEQ ID NO: 2668553 - RNA, 19 nt, Artificial Sequence
  Description of Artificial Sequence: Synthetic oligonucleotide
gcgccaccucucuuugugg

SEQ ID NO: 2668554 - RNA, 19 nt, Artificial Sequence
  Description of Artificial Sequence: Synthetic oligonucleotide
ggagauguagagacugugu

SEQ ID NO: 2668555 - RNA, 19 nt, Artificial Sequence
  Description of Artificial Sequence: Synthetic oligonucleotide
uggguggaaugacguuguu

SEQ ID NO: 2668556 - RNA, 19 nt, Artificial Sequence
  Description of Artificial Sequence: Synthetic oligonucleotide
ggaaggagcgccaccucuc

SEQ ID NO: 2668557 - RNA, 19 nt, Artificial Sequence
  Description of Artificial Sequence: Synthetic oligonucleotide
aucuccuauccgagcuuug

SEQ ID NO: 2668558 - RNA, 19 nt, Artificial Sequence
  Description of Artificial Sequence: Synthetic oligonucleotide
cuugaagaagggagaugau

SEQ ID NO: 2668559 - RNA, 19 nt, Artificial Sequence
  Description of Artificial Sequence: Synthetic oligonucleotide
cccucuugcugagagggac

SEQ ID NO: 2668560 - RNA, 19 nt, Artificial Sequence
  Description of Artificial Sequence: Synthetic oligonucleotide
gcuucucgaacggaugcuc

SEQ ID NO: 2668561 - RNA, 19 nt, Artificial Sequence
  Description of Artificial Sequence: Synthetic oligonucleotide
gguauagcugucccaucgu

SEQ ID NO: 2668562 - RNA, 19 nt, Artificial Sequence
  Description of Artificial Sequence: Synthetic oligonucleotide
cgugguguuccugguauag

SEQ ID NO: 2668563 - RNA, 19 nt, Artificial Sequence
  Description of Artificial Sequence: Synthetic oligonucleotide
cagagcggcgcuucucgaa

SEQ ID NO: 2668564 - RNA, 19 nt, Artificial Sequence
  Description of Artificial Sequence: Synthetic oligonucleotide
caccucagggacagcagcu

SEQ ID NO: 2668565 - RNA, 19 nt, Artificial Sequence
  Description of Artificial Sequence: Synthetic oligonucleotide
gggcuggaccuagacuggg

SEQ ID NO: 2668566 - RNA, 19 nt, Artificial Sequence
  Description of Artificial Sequence: Synthetic oligonucleotide
gagggcaaacaaggagaaa

SEQ ID NO: 2668567 - RNA, 19 nt, Artificial Sequence
  Description of Artificial Sequence: Synthetic oligonucleotide
uccgagcuuugggagcuuu

SEQ ID NO: 2668568 - RNA, 19 nt, Artificial Sequence
  Description of Artificial Sequence: Synthetic oligonucleotide
cuucgugguguuccuggua

SEQ ID NO: 2668569 - RNA, 19 nt, Artificial Sequence
  Description of Artificial Sequence: Synthetic oligonucleotide
uggcacugguggguggaau

SEQ ID NO: 2668570 - RNA, 19 nt, Artificial Sequence
  Description of Artificial Sequence: Synthetic oligonucleotide
gaauucgcuuccggaucaa

SEQ ID NO: 2668571 - RNA, 19 nt, Artificial Sequence
  Description of Artificial Sequence: Synthetic oligonucleotide
gcuggaccuagacugggcu

SEQ ID NO: 2668572 - RNA, 19 nt, Artificial Sequence
  Description of Artificial Sequence: Synthetic oligonucleotide
cucgaacggaugcuccucu

SEQ ID NO: 2668573 - RNA, 19 nt, Artificial Sequence
  Description of Artificial Sequence: Synthetic oligonucleotide
gcauccucagcacggagau

SEQ ID NO: 2668574 - RNA, 19 nt, Artificial Sequence
  Description of Artificial Sequence: Synthetic oligonucleotide
cauccucagcacggagaug

SEQ ID NO: 2668575 - RNA, 19 nt, Artificial Sequence
  Description of Artificial Sequence: Synthetic oligonucleotide
cggauuuucucgcccucag

SEQ ID NO: 2668576 - RNA, 19 nt, Artificial Sequence
  Description of Artificial Sequence: Synthetic oligonucleotide
cacggagaugaauucgcuu

SEQ ID NO: 2668577 - RNA, 19 nt, Artificial Sequence
  Description of Artificial Sequence: Synthetic oligonucleotide
cggucuggguauuucuuuc

SEQ ID NO: 2668578 - RNA, 19 nt, Artificial Sequence
  Description of Artificial Sequence: Synthetic oligonucleotide
caccgggacccggucuggg

SEQ ID NO: 2668579 - RNA, 19 nt, Artificial Sequence
  Description of Artificial Sequence: Synthetic oligonucleotide
ggcuggaccuagacugggc

SEQ ID NO: 2668580 - RNA, 19 nt, Artificial Sequence
  Description of Artificial Sequence: Synthetic oligonucleotide
gucccaucguggcacuggu

SEQ ID NO: 2668581 - RNA, 19 nt, Artificial Sequence
  Description of Artificial Sequence: Synthetic oligonucleotide
cuggagaaucagccucaaa

SEQ ID NO: 2668582 - RNA, 19 nt, Artificial Sequence
  Description of Artificial Sequence: Synthetic oligonucleotide
gcacugguggguggaauga

SEQ ID NO: 2668583 - RNA, 19 nt, Artificial Sequence
  Description of Artificial Sequence: Synthetic oligonucleotide
ggaccuagacugggcugag

SEQ ID NO: 2668584 - RNA, 19 nt, Artificial Sequence
  Description of Artificial Sequence: Synthetic oligonucleotide
cgggcuggaccuagacugg

SEQ ID NO: 2668585 - RNA, 19 nt, Artificial Sequence
  Description of Artificial Sequence: Synthetic oligonucleotide
caucguggcacuggugggu

SEQ ID NO: 2668586 - RNA, 19 nt, Artificial Sequence
  Description of Artificial Sequence: Synthetic oligonucleotide
cugucccaucguggcacug

SEQ ID NO: 2668587 - RNA, 19 nt, Artificial Sequence
  Description of Artificial Sequence: Synthetic oligonucleotide
gaaccgggcuggaccuaga

SEQ ID NO: 2668588 - RNA, 19 nt, Artificial Sequence
  Description of Artificial Sequence: Synthetic oligonucleotide
ucccgagaaccgggcugga

SEQ ID NO: 2668589 - RNA, 19 nt, Artificial Sequence
  Description of Artificial Sequence: Synthetic oligonucleotide
ccucucuuuguggaaugga

SEQ ID NO: 2668590 - RNA, 19 nt, Artificial Sequence
  Description of Artificial Sequence: Synthetic oligonucleotide
ccacuaucaccgggacccg

SEQ ID NO: 2668591 - RNA, 19 nt, Artificial Sequence
  Description of Artificial Sequence: Synthetic oligonucleotide
gagcgccaccucucuuugu

SEQ ID NO: 2668592 - RNA, 19 nt, Artificial Sequence
  Description of Artificial Sequence: Synthetic oligonucleotide
gagaaccgggcuggaccua

SEQ ID NO: 2668593 - RNA, 19 nt, Artificial Sequence
  Description of Artificial Sequence: Synthetic oligonucleotide
ccucuuuguacacgaacuu

SEQ ID NO: 2668594 - RNA, 19 nt, Artificial Sequence
  Description of Artificial Sequence: Synthetic oligonucleotide
cguagacacuuucaucacu

SEQ ID NO: 2668595 - RNA, 19 nt, Artificial Sequence
  Description of Artificial Sequence: Synthetic oligonucleotide
ccucuugcugagagggacu

SEQ ID NO: 2668596 - RNA, 19 nt, Artificial Sequence
  Description of Artificial Sequence: Synthetic oligonucleotide
cgagaaccgggcuggaccu

SEQ ID NO: 2668597 - RNA, 19 nt, Artificial Sequence
  Description of Artificial Sequence: Synthetic oligonucleotide
cccgagaaccgggcuggac

SEQ ID NO: 2668598 - RNA, 19 nt, Artificial Sequence
  Description of Artificial Sequence: Synthetic oligonucleotide
gcccucagagcggcgcuuc

SEQ ID NO: 2668599 - RNA, 19 nt, Artificial Sequence
  Description of Artificial Sequence: Synthetic oligonucleotide
gcuccucuuuguacacgaa

SEQ ID NO: 2668600 - RNA, 19 nt, Artificial Sequence
  Description of Artificial Sequence: Synthetic oligonucleotide
auccgagcuuugggagcuu

SEQ ID NO: 2668601 - RNA, 19 nt, Artificial Sequence
  Description of Artificial Sequence: Synthetic oligonucleotide
cacagaccguagacacuuu

SEQ ID NO: 2668602 - RNA, 19 nt, Artificial Sequence
  Description of Artificial Sequence: Synthetic oligonucleotide
gcugucccaucguggcacu

SEQ ID NO: 2668603 - RNA, 19 nt, Artificial Sequence
  Description of Artificial Sequence: Synthetic oligonucleotide
gucuaccauuaccccucuu

SEQ ID NO: 2668604 - RNA, 19 nt, Artificial Sequence
  Description of Artificial Sequence: Synthetic oligonucleotide
ccccucuugcugagaggga

SEQ ID NO: 2668605 - RNA, 19 nt, Artificial Sequence
  Description of Artificial Sequence: Synthetic oligonucleotide
ccggucuggguauuucuuu

SEQ ID NO: 2668606 - RNA, 19 nt, Artificial Sequence
  Description of Artificial Sequence: Synthetic oligonucleotide
cggaugugacagagauuga

SEQ ID NO: 2668607 - RNA, 19 nt, Artificial Sequence
  Description of Artificial Sequence: Synthetic oligonucleotide
gcggcgcuucucgaacgga

SEQ ID NO: 2668608 - RNA, 19 nt, Artificial Sequence
  Description of Artificial Sequence: Synthetic oligonucleotide
cguggcacuggugggugga

SEQ ID NO: 2668609 - RNA, 19 nt, Artificial Sequence
  Description of Artificial Sequence: Synthetic oligonucleotide
cagcagcuucacagaccgu

SEQ ID NO: 2668610 - RNA, 19 nt, Artificial Sequence
  Description of Artificial Sequence: Synthetic oligonucleotide
ccaccucucuuuguggaau

SEQ ID NO: 2668611 - RNA, 19 nt, Artificial Sequence
  Description of Artificial Sequence: Synthetic oligonucleotide
ccggaucaagaaguagaau

SEQ ID NO: 2668612 - RNA, 19 nt, Artificial Sequence
  Description of Artificial Sequence: Synthetic oligonucleotide
cgaacggaugcuccucuuu

SEQ ID NO: 2668613 - RNA, 19 nt, Artificial Sequence
  Description of Artificial Sequence: Synthetic oligonucleotide
ccgagcuuugggagcuuuu

SEQ ID NO: 2668614 - RNA, 19 nt, Artificial Sequence
  Description of Artificial Sequence: Synthetic oligonucleotide
ggacccggucuggguauuu

SEQ ID NO: 2668615 - RNA, 19 nt, Artificial Sequence
  Description of Artificial Sequence: Synthetic oligonucleotide
cgggacccggucuggguau

SEQ ID NO: 2668616 - RNA, 19 nt, Artificial Sequence
  Description of Artificial Sequence: Synthetic oligonucleotide
gggacccggucuggguauu

SEQ ID NO: 2668617 - RNA, 19 nt, Artificial Sequence
  Description of Artificial Sequence: Synthetic oligonucleotide
aauugguacacucauaguc

SEQ ID NO: 2668618 - RNA, 19 nt, Artificial Sequence
  Description of Artificial Sequence: Synthetic oligonucleotide
aaauacaacucucauacca

SEQ ID NO: 2668619 - RNA, 19 nt, Artificial Sequence
  Description of Artificial Sequence: Synthetic oligonucleotide
aaggacuuguucuacacac

SEQ ID NO: 2668620 - RNA, 19 nt, Artificial Sequence
  Description of Artificial Sequence: Synthetic oligonucleotide
uuuaccuucaucaaggcaa

SEQ ID NO: 2668621 - RNA, 19 nt, Artificial Sequence
  Description of Artificial Sequence: Synthetic oligonucleotide
aaugaauguggucucguac

SEQ ID NO: 2668622 - RNA, 19 nt, Artificial Sequence
  Description of Artificial Sequence: Synthetic oligonucleotide
guuaaauguacaaagagcc

SEQ ID NO: 2668623 - RNA, 19 nt, Artificial Sequence
  Description of Artificial Sequence: Synthetic oligonucleotide
uguacaaagagccauccgc

SEQ ID NO: 2668624 - RNA, 19 nt, Artificial Sequence
  Description of Artificial Sequence: Synthetic oligonucleotide
uccauuuccacacaaagga

SEQ ID NO: 2668625 - RNA, 19 nt, Artificial Sequence
  Description of Artificial Sequence: Synthetic oligonucleotide
aguuaaauguacaaagagc

SEQ ID NO: 2668626 - RNA, 19 nt, Artificial Sequence
  Description of Artificial Sequence: Synthetic oligonucleotide
aaaccugcaagucauguug

SEQ ID NO: 2668627 - RNA, 19 nt, Artificial Sequence
  Description of Artificial Sequence: Synthetic oligonucleotide
caguugaccauuuauagcc

SEQ ID NO: 2668628 - RNA, 19 nt, Artificial Sequence
  Description of Artificial Sequence: Synthetic oligonucleotide
uuauuuuaccuucaucaag

SEQ ID NO: 2668629 - RNA, 19 nt, Artificial Sequence
  Description of Artificial Sequence: Synthetic oligonucleotide
uaagacaucgauuaguguc

SEQ ID NO: 2668630 - RNA, 19 nt, Artificial Sequence
  Description of Artificial Sequence: Synthetic oligonucleotide
aagacaucgauuagugucc

SEQ ID NO: 2668631 - RNA, 19 nt, Artificial Sequence
  Description of Artificial Sequence: Synthetic oligonucleotide
guacaggagaaauuggucg

SEQ ID NO: 2668632 - RNA, 19 nt, Artificial Sequence
  Description of Artificial Sequence: Synthetic oligonucleotide
agaaauuggucgcacacuc

SEQ ID NO: 2668633 - RNA, 19 nt, Artificial Sequence
  Description of Artificial Sequence: Synthetic oligonucleotide
auaaguacaggagaaauug

SEQ ID NO: 2668634 - RNA, 19 nt, Artificial Sequence
  Description of Artificial Sequence: Synthetic oligonucleotide
gaugcucagagcuagagca

SEQ ID NO: 2668635 - RNA, 19 nt, Artificial Sequence
  Description of Artificial Sequence: Synthetic oligonucleotide
ucucguacugugcaguugg

SEQ ID NO: 2668636 - RNA, 19 nt, Artificial Sequence
  Description of Artificial Sequence: Synthetic oligonucleotide
uuaguguccauauucccag

SEQ ID NO: 2668637 - RNA, 19 nt, Artificial Sequence
  Description of Artificial Sequence: Synthetic oligonucleotide
ucgauuaguguccauauuc

SEQ ID NO: 2668638 - RNA, 19 nt, Artificial Sequence
  Description of Artificial Sequence: Synthetic oligonucleotide
guaacagaagguuucacug

SEQ ID NO: 2668639 - RNA, 19 nt, Artificial Sequence
  Description of Artificial Sequence: Synthetic oligonucleotide
aucaguaagacaucgauua

SEQ ID NO: 2668640 - RNA, 19 nt, Artificial Sequence
  Description of Artificial Sequence: Synthetic oligonucleotide
uguuucaggaagcugccag

SEQ ID NO: 2668641 - RNA, 19 nt, Artificial Sequence
  Description of Artificial Sequence: Synthetic oligonucleotide
agcaguugaccauuuauag

SEQ ID NO: 2668642 - RNA, 19 nt, Artificial Sequence
  Description of Artificial Sequence: Synthetic oligonucleotide
uuguucuacacacugcucu

SEQ ID NO: 2668643 - RNA, 19 nt, Artificial Sequence
  Description of Artificial Sequence: Synthetic oligonucleotide
ucauaccacauccauuucc

SEQ ID NO: 2668644 - RNA, 19 nt, Artificial Sequence
  Description of Artificial Sequence: Synthetic oligonucleotide
caguuaaauguacaaagag

SEQ ID NO: 2668645 - RNA, 19 nt, Artificial Sequence
  Description of Artificial Sequence: Synthetic oligonucleotide
uuaaauguacaaagagcca

SEQ ID NO: 2668646 - RNA, 19 nt, Artificial Sequence
  Description of Artificial Sequence: Synthetic oligonucleotide
auuuuaccuucaucaaggc

SEQ ID NO: 2668647 - RNA, 19 nt, Artificial Sequence
  Description of Artificial Sequence: Synthetic oligonucleotide
ucucccgaagcacauaacc

SEQ ID NO: 2668648 - RNA, 19 nt, Artificial Sequence
  Description of Artificial Sequence: Synthetic oligonucleotide
agagcuagagcaguugacc

SEQ ID NO: 2668649 - RNA, 19 nt, Artificial Sequence
  Description of Artificial Sequence: Synthetic oligonucleotide
uuuauuuuaccuucaucaa

SEQ ID NO: 2668650 - RNA, 19 nt, Artificial Sequence
  Description of Artificial Sequence: Synthetic oligonucleotide
uuacaauacagcaguuuug

SEQ ID NO: 2668651 - RNA, 19 nt, Artificial Sequence
  Description of Artificial Sequence: Synthetic oligonucleotide
uucacuguacagucaaaag

SEQ ID NO: 2668652 - RNA, 19 nt, Artificial Sequence
  Description of Artificial Sequence: Synthetic oligonucleotide
aguguccauauucccaggc

SEQ ID NO: 2668653 - RNA, 19 nt, Artificial Sequence
  Description of Artificial Sequence: Synthetic oligonucleotide
aacauaaauacaacucuca

SEQ ID NO: 2668654 - RNA, 19 nt, Artificial Sequence
  Description of Artificial Sequence: Synthetic oligonucleotide
cauagucuguuucaggaag

SEQ ID NO: 2668655 - RNA, 19 nt, Artificial Sequence
  Description of Artificial Sequence: Synthetic oligonucleotide
acuuguucuacacacugcu

SEQ ID NO: 2668656 - RNA, 19 nt, Artificial Sequence
  Description of Artificial Sequence: Synthetic oligonucleotide
cuugccgaggccuucacgc

SEQ ID NO: 2668657 - RNA, 19 nt, Artificial Sequence
  Description of Artificial Sequence: Synthetic oligonucleotide
gauuaguguccauauuccc

SEQ ID NO: 2668658 - RNA, 19 nt, Artificial Sequence
  Description of Artificial Sequence: Synthetic oligonucleotide
uguggaauugguacacuca

SEQ ID NO: 2668659 - RNA, 19 nt, Artificial Sequence
  Description of Artificial Sequence: Synthetic oligonucleotide
aaaguccgguuacccaggc

SEQ ID NO: 2668660 - RNA, 19 nt, Artificial Sequence
  Description of Artificial Sequence: Synthetic oligonucleotide
caacgcagguaacagaagg

SEQ ID NO: 2668661 - RNA, 19 nt, Artificial Sequence
  Description of Artificial Sequence: Synthetic oligonucleotide
caacucucauaccacaucc

SEQ ID NO: 2668662 - RNA, 19 nt, Artificial Sequence
  Description of Artificial Sequence: Synthetic oligonucleotide
accuucaucaaggcaagcc

SEQ ID NO: 2668663 - RNA, 19 nt, Artificial Sequence
  Description of Artificial Sequence: Synthetic oligonucleotide
aaauuggucgcacacucua

SEQ ID NO: 2668664 - RNA, 19 nt, Artificial Sequence
  Description of Artificial Sequence: Synthetic oligonucleotide
uuuuaccuucaucaaggca

SEQ ID NO: 2668665 - RNA, 19 nt, Artificial Sequence
  Description of Artificial Sequence: Synthetic oligonucleotide
caagucauguugaugauga

SEQ ID NO: 2668666 - RNA, 19 nt, Artificial Sequence
  Description of Artificial Sequence: Synthetic oligonucleotide
ucaaggcaagccaaguaca

SEQ ID NO: 2668667 - RNA, 19 nt, Artificial Sequence
  Description of Artificial Sequence: Synthetic oligonucleotide
auucccaggccaccaaagc

SEQ ID NO: 2668668 - RNA, 19 nt, Artificial Sequence
  Description of Artificial Sequence: Synthetic oligonucleotide
augaauguggucucguacu

SEQ ID NO: 2668669 - RNA, 19 nt, Artificial Sequence
  Description of Artificial Sequence: Synthetic oligonucleotide
gguagaagcgaucugcucc

SEQ ID NO: 2668670 - RNA, 19 nt, Artificial Sequence
  Description of Artificial Sequence: Synthetic oligonucleotide
ugaugaaguuccucugggg

SEQ ID NO: 2668671 - RNA, 19 nt, Artificial Sequence
  Description of Artificial Sequence: Synthetic oligonucleotide
aaagugacaggcuuccaua

SEQ ID NO: 2668672 - RNA, 19 nt, Artificial Sequence
  Description of Artificial Sequence: Synthetic oligonucleotide
uuugggaaaguccgguuac

SEQ ID NO: 2668673 - RNA, 19 nt, Artificial Sequence
  Description of Artificial Sequence: Synthetic oligonucleotide
acaacucucauaccacauc

SEQ ID NO: 2668674 - RNA, 19 nt, Artificial Sequence
  Description of Artificial Sequence: Synthetic oligonucleotide
uucaucaaggcaagccaag

SEQ ID NO: 2668675 - RNA, 19 nt, Artificial Sequence
  Description of Artificial Sequence: Synthetic oligonucleotide
uguggucucguacugugca

SEQ ID NO: 2668676 - RNA, 19 nt, Artificial Sequence
  Description of Artificial Sequence: Synthetic oligonucleotide
uuccauaaguacaggagaa

SEQ ID NO: 2668677 - RNA, 19 nt, Artificial Sequence
  Description of Artificial Sequence: Synthetic oligonucleotide
ucaguaagacaucgauuag

SEQ ID NO: 2668678 - RNA, 19 nt, Artificial Sequence
  Description of Artificial Sequence: Synthetic oligonucleotide
aguaagacaucgauuagug

SEQ ID NO: 2668679 - RNA, 19 nt, Artificial Sequence
  Description of Artificial Sequence: Synthetic oligonucleotide
acaaagagccauccgccgg

SEQ ID NO: 2668680 - RNA, 19 nt, Artificial Sequence
  Description of Artificial Sequence: Synthetic oligonucleotide
uuaccuucaucaaggcaag

SEQ ID NO: 2668681 - RNA, 19 nt, Artificial Sequence
  Description of Artificial Sequence: Synthetic oligonucleotide
cugcaagucauguugauga

SEQ ID NO: 2668682 - RNA, 19 nt, Artificial Sequence
  Description of Artificial Sequence: Synthetic oligonucleotide
uugaccauuuauagccucc

SEQ ID NO: 2668683 - RNA, 19 nt, Artificial Sequence
  Description of Artificial Sequence: Synthetic oligonucleotide
uuucuuuauuuuaccuuca

SEQ ID NO: 2668684 - RNA, 19 nt, Artificial Sequence
  Description of Artificial Sequence: Synthetic oligonucleotide
agagccauccgccgguccc

SEQ ID NO: 2668685 - RNA, 19 nt, Artificial Sequence
  Description of Artificial Sequence: Synthetic oligonucleotide
ugaucaacgcagguaacag

SEQ ID NO: 2668686 - RNA, 19 nt, Artificial Sequence
  Description of Artificial Sequence: Synthetic oligonucleotide
ugaauguggucucguacug

SEQ ID NO: 2668687 - RNA, 19 nt, Artificial Sequence
  Description of Artificial Sequence: Synthetic oligonucleotide
aaguacaggagaaauuggu

SEQ ID NO: 2668688 - RNA, 19 nt, Artificial Sequence
  Description of Artificial Sequence: Synthetic oligonucleotide
uauucccaggccaccaaag

SEQ ID NO: 2668689 - RNA, 19 nt, Artificial Sequence
  Description of Artificial Sequence: Synthetic oligonucleotide
ucagagcuagagcaguuga

SEQ ID NO: 2668690 - RNA, 19 nt, Artificial Sequence
  Description of Artificial Sequence: Synthetic oligonucleotide
aacagaagguuucacugua

SEQ ID NO: 2668691 - RNA, 19 nt, Artificial Sequence
  Description of Artificial Sequence: Synthetic oligonucleotide
cauuuauagccuccagucc

SEQ ID NO: 2668692 - RNA, 19 nt, Artificial Sequence
  Description of Artificial Sequence: Synthetic oligonucleotide
agucauguugaugaugaag

SEQ ID NO: 2668693 - RNA, 19 nt, Artificial Sequence
  Description of Artificial Sequence: Synthetic oligonucleotide
uuuugggaaaguccgguua

SEQ ID NO: 2668694 - RNA, 19 nt, Artificial Sequence
  Description of Artificial Sequence: Synthetic oligonucleotide
acauaaauacaacucucau

SEQ ID NO: 2668695 - RNA, 19 nt, Artificial Sequence
  Description of Artificial Sequence: Synthetic oligonucleotide
ugaggucuugaucaacgca

SEQ ID NO: 2668696 - RNA, 19 nt, Artificial Sequence
  Description of Artificial Sequence: Synthetic oligonucleotide
cagcuuguggaauugguac

SEQ ID NO: 2668697 - RNA, 19 nt, Artificial Sequence
  Description of Artificial Sequence: Synthetic oligonucleotide
aguacaggagaaauugguc

SEQ ID NO: 2668698 - RNA, 19 nt, Artificial Sequence
  Description of Artificial Sequence: Synthetic oligonucleotide
acucauagucuguuucagg

SEQ ID NO: 2668699 - RNA, 19 nt, Artificial Sequence
  Description of Artificial Sequence: Synthetic oligonucleotide
cucauagucuguuucagga

SEQ ID NO: 2668700 - RNA, 19 nt, Artificial Sequence
  Description of Artificial Sequence: Synthetic oligonucleotide
aagauagcgcugccgagga

SEQ ID NO: 2668701 - RNA, 19 nt, Artificial Sequence
  Description of Artificial Sequence: Synthetic oligonucleotide
agcacauaaccacaguuaa

SEQ ID NO: 2668702 - RNA, 19 nt, Artificial Sequence
  Description of Artificial Sequence: Synthetic oligonucleotide
caguccaguuacaauacag

SEQ ID NO: 2668703 - RNA, 19 nt, Artificial Sequence
  Description of Artificial Sequence: Synthetic oligonucleotide
auagucuguuucaggaagc

SEQ ID NO: 2668704 - RNA, 19 nt, Artificial Sequence
  Description of Artificial Sequence: Synthetic oligonucleotide
uaacagaagguuucacugu

SEQ ID NO: 2668705 - RNA, 19 nt, Artificial Sequence
  Description of Artificial Sequence: Synthetic oligonucleotide
gcaguuuugggaaaguccg

SEQ ID NO: 2668706 - RNA, 19 nt, Artificial Sequence
  Description of Artificial Sequence: Synthetic oligonucleotide
aacucccaaucaguaagac

SEQ ID NO: 2668707 - RNA, 19 nt, Artificial Sequence
  Description of Artificial Sequence: Synthetic oligonucleotide
cauaaccacaguuaaaugu

SEQ ID NO: 2668708 - RNA, 19 nt, Artificial Sequence
  Description of Artificial Sequence: Synthetic oligonucleotide
uaaauacaacucucauacc

SEQ ID NO: 2668709 - RNA, 19 nt, Artificial Sequence
  Description of Artificial Sequence: Synthetic oligonucleotide
agagcaguugaccauuuau

SEQ ID NO: 2668710 - RNA, 19 nt, Artificial Sequence
  Description of Artificial Sequence: Synthetic oligonucleotide
uugguacacucauagucug

SEQ ID NO: 2668711 - RNA, 19 nt, Artificial Sequence
  Description of Artificial Sequence: Synthetic oligonucleotide
aaaaccugcaagucauguu

SEQ ID NO: 2668712 - RNA, 19 nt, Artificial Sequence
  Description of Artificial Sequence: Synthetic oligonucleotide
ucccgaagcacauaaccac

SEQ ID NO: 2668713 - RNA, 19 nt, Artificial Sequence
  Description of Artificial Sequence: Synthetic oligonucleotide
gaagcugccagcaaaaccu

SEQ ID NO: 2668714 - RNA, 19 nt, Artificial Sequence
  Description of Artificial Sequence: Synthetic oligonucleotide
agcgcugccgaggacaagc

SEQ ID NO: 2668715 - RNA, 19 nt, Artificial Sequence
  Description of Artificial Sequence: Synthetic oligonucleotide
gaggccuucacgccacugg

SEQ ID NO: 2668716 - RNA, 19 nt, Artificial Sequence
  Description of Artificial Sequence: Synthetic oligonucleotide
auguacaaagagccauccg

SEQ ID NO: 2668717 - RNA, 19 nt, Artificial Sequence
  Description of Artificial Sequence: Synthetic oligonucleotide
accacaguuaaauguacaa

SEQ ID NO: 2668718 - RNA, 19 nt, Artificial Sequence
  Description of Artificial Sequence: Synthetic oligonucleotide
uuucacuguacagucaaaa

SEQ ID NO: 2668719 - RNA, 19 nt, Artificial Sequence
  Description of Artificial Sequence: Synthetic oligonucleotide
aguccgguuacccaggcaa

SEQ ID NO: 2668720 - RNA, 19 nt, Artificial Sequence
  Description of Artificial Sequence: Synthetic oligonucleotide
uugaucaacgcagguaaca

SEQ ID NO: 2668721 - RNA, 19 nt, Artificial Sequence
  Description of Artificial Sequence: Synthetic oligonucleotide
cuuccauaaguacaggaga

SEQ ID NO: 2668722 - RNA, 19 nt, Artificial Sequence
  Description of Artificial Sequence: Synthetic oligonucleotide
ucuacacacugcucucccg

SEQ ID NO: 2668723 - RNA, 19 nt, Artificial Sequence
  Description of Artificial Sequence: Synthetic oligonucleotide
auacaacucucauaccaca

SEQ ID NO: 2668724 - RNA, 19 nt, Artificial Sequence
  Description of Artificial Sequence: Synthetic oligonucleotide
cucccaaucaguaagacau

SEQ ID NO: 2668725 - RNA, 19 nt, Artificial Sequence
  Description of Artificial Sequence: Synthetic oligonucleotide
aagagccauccgccggucc

SEQ ID NO: 2668726 - RNA, 19 nt, Artificial Sequence
  Description of Artificial Sequence: Synthetic oligonucleotide
ugccagcaaaaccugcaag

SEQ ID NO: 2668727 - RNA, 19 nt, Artificial Sequence
  Description of Artificial Sequence: Synthetic oligonucleotide
aggcaagccaaguacagau

SEQ ID NO: 2668728 - RNA, 19 nt, Artificial Sequence
  Description of Artificial Sequence: Synthetic oligonucleotide
guccaguuacaauacagca

SEQ ID NO: 2668729 - RNA, 19 nt, Artificial Sequence
  Description of Artificial Sequence: Synthetic oligonucleotide
caagauagcgcugccgagg

SEQ ID NO: 2668730 - RNA, 19 nt, Artificial Sequence
  Description of Artificial Sequence: Synthetic oligonucleotide
cauaccacauccauuucca

SEQ ID NO: 2668731 - RNA, 19 nt, Artificial Sequence
  Description of Artificial Sequence: Synthetic oligonucleotide
ggucgcacacucuauacag

SEQ ID NO: 2668732 - RNA, 19 nt, Artificial Sequence
  Description of Artificial Sequence: Synthetic oligonucleotide
caaggcaagccaaguacag

SEQ ID NO: 2668733 - RNA, 19 nt, Artificial Sequence
  Description of Artificial Sequence: Synthetic oligonucleotide
cauaaauacaacucucaua

SEQ ID NO: 2668734 - RNA, 19 nt, Artificial Sequence
  Description of Artificial Sequence: Synthetic oligonucleotide
uucccaggccaccaaagcu

SEQ ID NO: 2668735 - RNA, 19 nt, Artificial Sequence
  Description of Artificial Sequence: Synthetic oligonucleotide
guacaaagagccauccgcc

SEQ ID NO: 2668736 - RNA, 19 nt, Artificial Sequence
  Description of Artificial Sequence: Synthetic oligonucleotide
ucaacgcagguaacagaag

SEQ ID NO: 2668737 - RNA, 19 nt, Artificial Sequence
  Description of Artificial Sequence: Synthetic oligonucleotide
acaguuaaauguacaaaga

SEQ ID NO: 2668738 - RNA, 19 nt, Artificial Sequence
  Description of Artificial Sequence: Synthetic oligonucleotide
gagggugaugcucagagcu

SEQ ID NO: 2668739 - RNA, 19 nt, Artificial Sequence
  Description of Artificial Sequence: Synthetic oligonucleotide
uugaggucuugaucaacgc

SEQ ID NO: 2668740 - RNA, 19 nt, Artificial Sequence
  Description of Artificial Sequence: Synthetic oligonucleotide
acagaugcuguacauuaaa

SEQ ID NO: 2668741 - RNA, 19 nt, Artificial Sequence
  Description of Artificial Sequence: Synthetic oligonucleotide
uuguggaauugguacacuc

SEQ ID NO: 2668742 - RNA, 19 nt, Artificial Sequence
  Description of Artificial Sequence: Synthetic oligonucleotide
gccacugucaugcagcuug

SEQ ID NO: 2668743 - RNA, 19 nt, Artificial Sequence
  Description of Artificial Sequence: Synthetic oligonucleotide
gcaagccaaguacagaugc

SEQ ID NO: 2668744 - RNA, 19 nt, Artificial Sequence
  Description of Artificial Sequence: Synthetic oligonucleotide
acaaaggacuuguucuaca

SEQ ID NO: 2668745 - RNA, 19 nt, Artificial Sequence
  Description of Artificial Sequence: Synthetic oligonucleotide
uucuuuauuuuaccuucau

SEQ ID NO: 2668746 - RNA, 19 nt, Artificial Sequence
  Description of Artificial Sequence: Synthetic oligonucleotide
auaaccacaguuaaaugua

SEQ ID NO: 2668747 - RNA, 19 nt, Artificial Sequence
  Description of Artificial Sequence: Synthetic oligonucleotide
guacagaugcuguacauua

SEQ ID NO: 2668748 - RNA, 19 nt, Artificial Sequence
  Description of Artificial Sequence: Synthetic oligonucleotide
uacaacucucauaccacau

SEQ ID NO: 2668749 - RNA, 19 nt, Artificial Sequence
  Description of Artificial Sequence: Synthetic oligonucleotide
auaccacauccauuuccac

SEQ ID NO: 2668750 - RNA, 19 nt, Artificial Sequence
  Description of Artificial Sequence: Synthetic oligonucleotide
ggacaagccacugucaugc

SEQ ID NO: 2668751 - RNA, 19 nt, Artificial Sequence
  Description of Artificial Sequence: Synthetic oligonucleotide
accaaagcugaagagcuug

SEQ ID NO: 2668752 - RNA, 19 nt, Artificial Sequence
  Description of Artificial Sequence: Synthetic oligonucleotide
ucauagucuguuucaggaa

SEQ ID NO: 2668753 - RNA, 19 nt, Artificial Sequence
  Description of Artificial Sequence: Synthetic oligonucleotide
cacacugcucucccgaagc

SEQ ID NO: 2668754 - RNA, 19 nt, Artificial Sequence
  Description of Artificial Sequence: Synthetic oligonucleotide
uacagcaguuuugggaaag

SEQ ID NO: 2668755 - RNA, 19 nt, Artificial Sequence
  Description of Artificial Sequence: Synthetic oligonucleotide
uagccuccaguccaguuac

SEQ ID NO: 2668756 - RNA, 19 nt, Artificial Sequence
  Description of Artificial Sequence: Synthetic oligonucleotide
uguucuacacacugcucuc

SEQ ID NO: 2668757 - RNA, 19 nt, Artificial Sequence
  Description of Artificial Sequence: Synthetic oligonucleotide
aaucaguaagacaucgauu

SEQ ID NO: 2668758 - RNA, 19 nt, Artificial Sequence
  Description of Artificial Sequence: Synthetic oligonucleotide
acgccacuggcccagguag

SEQ ID NO: 2668759 - RNA, 19 nt, Artificial Sequence
  Description of Artificial Sequence: Synthetic oligonucleotide
gauagcgcugccgaggaca

SEQ ID NO: 2668760 - RNA, 19 nt, Artificial Sequence
  Description of Artificial Sequence: Synthetic oligonucleotide
uuggucgcacacucuauac

SEQ ID NO: 2668761 - RNA, 19 nt, Artificial Sequence
  Description of Artificial Sequence: Synthetic oligonucleotide
aagcacauaaccacaguua

SEQ ID NO: 2668762 - RNA, 19 nt, Artificial Sequence
  Description of Artificial Sequence: Synthetic oligonucleotide
agguagaagcgaucugcuc

SEQ ID NO: 2668763 - RNA, 19 nt, Artificial Sequence
  Description of Artificial Sequence: Synthetic oligonucleotide
acucucauaccacauccau

SEQ ID NO: 2668764 - RNA, 19 nt, Artificial Sequence
  Description of Artificial Sequence: Synthetic oligonucleotide
gagcuagagcaguugacca

SEQ ID NO: 2668765 - RNA, 19 nt, Artificial Sequence
  Description of Artificial Sequence: Synthetic oligonucleotide
gucauguugaugaugaagu

SEQ ID NO: 2668766 - RNA, 19 nt, Artificial Sequence
  Description of Artificial Sequence: Synthetic oligonucleotide
ggacuuguucuacacacug

SEQ ID NO: 2668767 - RNA, 19 nt, Artificial Sequence
  Description of Artificial Sequence: Synthetic oligonucleotide
acucccaaucaguaagaca

SEQ ID NO: 2668768 - RNA, 19 nt, Artificial Sequence
  Description of Artificial Sequence: Synthetic oligonucleotide
aacgcagguaacagaaggu

SEQ ID NO: 2668769 - RNA, 19 nt, Artificial Sequence
  Description of Artificial Sequence: Synthetic oligonucleotide
aguuuugggaaaguccggu

SEQ ID NO: 2668770 - RNA, 19 nt, Artificial Sequence
  Description of Artificial Sequence: Synthetic oligonucleotide
ucccaccauagccaacucc

SEQ ID NO: 2668771 - RNA, 19 nt, Artificial Sequence
  Description of Artificial Sequence: Synthetic oligonucleotide
uacccaggcaaugaaugug

SEQ ID NO: 2668772 - RNA, 19 nt, Artificial Sequence
  Description of Artificial Sequence: Synthetic oligonucleotide
gaucaacgcagguaacaga

SEQ ID NO: 2668773 - RNA, 19 nt, Artificial Sequence
  Description of Artificial Sequence: Synthetic oligonucleotide
guagaagcgaucugcucca

SEQ ID NO: 2668774 - RNA, 19 nt, Artificial Sequence
  Description of Artificial Sequence: Synthetic oligonucleotide
gaccauuuauagccuccag

SEQ ID NO: 2668775 - RNA, 19 nt, Artificial Sequence
  Description of Artificial Sequence: Synthetic oligonucleotide
caguuuugggaaaguccgg

SEQ ID NO: 2668776 - RNA, 19 nt, Artificial Sequence
  Description of Artificial Sequence: Synthetic oligonucleotide
cuccaguccaguuacaaua

SEQ ID NO: 2668777 - RNA, 19 nt, Artificial Sequence
  Description of Artificial Sequence: Synthetic oligonucleotide
acccaggcaaugaaugugg

SEQ ID NO: 2668778 - RNA, 19 nt, Artificial Sequence
  Description of Artificial Sequence: Synthetic oligonucleotide
guguccauauucccaggcc

SEQ ID NO: 2668779 - RNA, 19 nt, Artificial Sequence
  Description of Artificial Sequence: Synthetic oligonucleotide
aaccacaguuaaauguaca

SEQ ID NO: 2668780 - RNA, 19 nt, Artificial Sequence
  Description of Artificial Sequence: Synthetic oligonucleotide
ucaucaaggcaagccaagu

SEQ ID NO: 2668781 - RNA, 19 nt, Artificial Sequence
  Description of Artificial Sequence: Synthetic oligonucleotide
accauagccaacucccaau

SEQ ID NO: 2668782 - RNA, 19 nt, Artificial Sequence
  Description of Artificial Sequence: Synthetic oligonucleotide
ugaccauuuauagccucca

SEQ ID NO: 2668783 - RNA, 19 nt, Artificial Sequence
  Description of Artificial Sequence: Synthetic oligonucleotide
cacacucuauacagucugc

SEQ ID NO: 2668784 - RNA, 19 nt, Artificial Sequence
  Description of Artificial Sequence: Synthetic oligonucleotide
gaagcacauaaccacaguu

SEQ ID NO: 2668785 - RNA, 19 nt, Artificial Sequence
  Description of Artificial Sequence: Synthetic oligonucleotide
aaggcaagccaaguacaga

SEQ ID NO: 2668786 - RNA, 19 nt, Artificial Sequence
  Description of Artificial Sequence: Synthetic oligonucleotide
acagaagguuucacuguac

SEQ ID NO: 2668787 - RNA, 19 nt, Artificial Sequence
  Description of Artificial Sequence: Synthetic oligonucleotide
cuugaucaacgcagguaac

SEQ ID NO: 2668788 - RNA, 19 nt, Artificial Sequence
  Description of Artificial Sequence: Synthetic oligonucleotide
gcacacucuauacagucug

SEQ ID NO: 2668789 - RNA, 19 nt, Artificial Sequence
  Description of Artificial Sequence: Synthetic oligonucleotide
aggacaagccacugucaug

SEQ ID NO: 2668790 - RNA, 19 nt, Artificial Sequence
  Description of Artificial Sequence: Synthetic oligonucleotide
cuuguucuacacacugcuc

SEQ ID NO: 2668791 - RNA, 19 nt, Artificial Sequence
  Description of Artificial Sequence: Synthetic oligonucleotide
aguuacaauacagcaguuu

SEQ ID NO: 2668792 - RNA, 19 nt, Artificial Sequence
  Description of Artificial Sequence: Synthetic oligonucleotide
gaagcgaucugcuccaaau

SEQ ID NO: 2668793 - RNA, 19 nt, Artificial Sequence
  Description of Artificial Sequence: Synthetic oligonucleotide
agguaacagaagguuucac

SEQ ID NO: 2668794 - RNA, 19 nt, Artificial Sequence
  Description of Artificial Sequence: Synthetic oligonucleotide
uuggcaagauagcgcugcc

SEQ ID NO: 2668795 - RNA, 19 nt, Artificial Sequence
  Description of Artificial Sequence: Synthetic oligonucleotide
uccauaaguacaggagaaa

SEQ ID NO: 2668796 - RNA, 19 nt, Artificial Sequence
  Description of Artificial Sequence: Synthetic oligonucleotide
auuggucgcacacucuaua

SEQ ID NO: 2668797 - RNA, 19 nt, Artificial Sequence
  Description of Artificial Sequence: Synthetic oligonucleotide
aggagaaauuggucgcaca

SEQ ID NO: 2668798 - RNA, 19 nt, Artificial Sequence
  Description of Artificial Sequence: Synthetic oligonucleotide
cagagcuagagcaguugac

SEQ ID NO: 2668799 - RNA, 19 nt, Artificial Sequence
  Description of Artificial Sequence: Synthetic oligonucleotide
uggaauugguacacucaua

SEQ ID NO: 2668800 - RNA, 19 nt, Artificial Sequence
  Description of Artificial Sequence: Synthetic oligonucleotide
uccgccggucccaccauag

SEQ ID NO: 2668801 - RNA, 19 nt, Artificial Sequence
  Description of Artificial Sequence: Synthetic oligonucleotide
uggcaagauagcgcugccg

SEQ ID NO: 2668802 - RNA, 19 nt, Artificial Sequence
  Description of Artificial Sequence: Synthetic oligonucleotide
ucaugcagcuuguggaauu

SEQ ID NO: 2668803 - RNA, 19 nt, Artificial Sequence
  Description of Artificial Sequence: Synthetic oligonucleotide
uagucuguuucaggaagcu

SEQ ID NO: 2668804 - RNA, 19 nt, Artificial Sequence
  Description of Artificial Sequence: Synthetic oligonucleotide
cucccgaagcacauaacca

SEQ ID NO: 2668805 - RNA, 19 nt, Artificial Sequence
  Description of Artificial Sequence: Synthetic oligonucleotide
cacucauagucuguuucag

SEQ ID NO: 2668806 - RNA, 19 nt, Artificial Sequence
  Description of Artificial Sequence: Synthetic oligonucleotide
aacucucauaccacaucca

SEQ ID NO: 2668807 - RNA, 19 nt, Artificial Sequence
  Description of Artificial Sequence: Synthetic oligonucleotide
acaucgauuaguguccaua

SEQ ID NO: 2668808 - RNA, 19 nt, Artificial Sequence
  Description of Artificial Sequence: Synthetic oligonucleotide
cgauuaguguccauauucc

SEQ ID NO: 2668809 - RNA, 19 nt, Artificial Sequence
  Description of Artificial Sequence: Synthetic oligonucleotide
acacacugcucucccgaag

SEQ ID NO: 2668810 - RNA, 19 nt, Artificial Sequence
  Description of Artificial Sequence: Synthetic oligonucleotide
cacauaaccacaguuaaau

SEQ ID NO: 2668811 - RNA, 19 nt, Artificial Sequence
  Description of Artificial Sequence: Synthetic oligonucleotide
gguuucacuguacagucaa

SEQ ID NO: 2668812 - RNA, 19 nt, Artificial Sequence
  Description of Artificial Sequence: Synthetic oligonucleotide
guugaugaugaaguuccuc

SEQ ID NO: 2668813 - RNA, 19 nt, Artificial Sequence
  Description of Artificial Sequence: Synthetic oligonucleotide
cagaagguuucacuguaca

SEQ ID NO: 2668814 - RNA, 19 nt, Artificial Sequence
  Description of Artificial Sequence: Synthetic oligonucleotide
agcuagagcaguugaccau

SEQ ID NO: 2668815 - RNA, 19 nt, Artificial Sequence
  Description of Artificial Sequence: Synthetic oligonucleotide
ggcaagauagcgcugccga

SEQ ID NO: 2668816 - RNA, 19 nt, Artificial Sequence
  Description of Artificial Sequence: Synthetic oligonucleotide
aaccugcaagucauguuga

SEQ ID NO: 2668817 - RNA, 19 nt, Artificial Sequence
  Description of Artificial Sequence: Synthetic oligonucleotide
auauucccaggccaccaaa

SEQ ID NO: 2668818 - RNA, 19 nt, Artificial Sequence
  Description of Artificial Sequence: Synthetic oligonucleotide
cacaaaggacuuguucuac

SEQ ID NO: 2668819 - RNA, 19 nt, Artificial Sequence
  Description of Artificial Sequence: Synthetic oligonucleotide
aagucauguugaugaugaa

SEQ ID NO: 2668820 - RNA, 19 nt, Artificial Sequence
  Description of Artificial Sequence: Synthetic oligonucleotide
caaucaguaagacaucgau

SEQ ID NO: 2668821 - RNA, 19 nt, Artificial Sequence
  Description of Artificial Sequence: Synthetic oligonucleotide
guucuacacacugcucucc

SEQ ID NO: 2668822 - RNA, 19 nt, Artificial Sequence
  Description of Artificial Sequence: Synthetic oligonucleotide
uugggaaaguccgguuacc

SEQ ID NO: 2668823 - RNA, 19 nt, Artificial Sequence
  Description of Artificial Sequence: Synthetic oligonucleotide
cccaaucaguaagacaucg

SEQ ID NO: 2668824 - RNA, 19 nt, Artificial Sequence
  Description of Artificial Sequence: Synthetic oligonucleotide
uucaggaagcugccagcaa

SEQ ID NO: 2668825 - RNA, 19 nt, Artificial Sequence
  Description of Artificial Sequence: Synthetic oligonucleotide
ugcaagucauguugaugau

SEQ ID NO: 2668826 - RNA, 19 nt, Artificial Sequence
  Description of Artificial Sequence: Synthetic oligonucleotide
uauagccuccaguccaguu

SEQ ID NO: 2668827 - RNA, 19 nt, Artificial Sequence
  Description of Artificial Sequence: Synthetic oligonucleotide
ucguacugugcaguuggca

SEQ ID NO: 2668828 - RNA, 19 nt, Artificial Sequence
  Description of Artificial Sequence: Synthetic oligonucleotide
gccaccaaagcugaagagc

SEQ ID NO: 2668829 - RNA, 19 nt, Artificial Sequence
  Description of Artificial Sequence: Synthetic oligonucleotide
cagcaaaaccugcaaguca

SEQ ID NO: 2668830 - RNA, 19 nt, Artificial Sequence
  Description of Artificial Sequence: Synthetic oligonucleotide
cuacacacugcucucccga

SEQ ID NO: 2668831 - RNA, 19 nt, Artificial Sequence
  Description of Artificial Sequence: Synthetic oligonucleotide
gagcaguugaccauuuaua

SEQ ID NO: 2668832 - RNA, 19 nt, Artificial Sequence
  Description of Artificial Sequence: Synthetic oligonucleotide
ucccaaucaguaagacauc

SEQ ID NO: 2668833 - RNA, 19 nt, Artificial Sequence
  Description of Artificial Sequence: Synthetic oligonucleotide
aauuggucgcacacucuau

SEQ ID NO: 2668834 - RNA, 19 nt, Artificial Sequence
  Description of Artificial Sequence: Synthetic oligonucleotide
uccgguuacccaggcaaug

SEQ ID NO: 2668835 - RNA, 19 nt, Artificial Sequence
  Description of Artificial Sequence: Synthetic oligonucleotide
aaguccgguuacccaggca

SEQ ID NO: 2668836 - RNA, 19 nt, Artificial Sequence
  Description of Artificial Sequence: Synthetic oligonucleotide
caggccaccaaagcugaag

SEQ ID NO: 2668837 - RNA, 19 nt, Artificial Sequence
  Description of Artificial Sequence: Synthetic oligonucleotide
uugccgaggccuucacgcc

SEQ ID NO: 2668838 - RNA, 19 nt, Artificial Sequence
  Description of Artificial Sequence: Synthetic oligonucleotide
cagaugcuguacauuaaaa

SEQ ID NO: 2668839 - RNA, 19 nt, Artificial Sequence
  Description of Artificial Sequence: Synthetic oligonucleotide
uggucucguacugugcagu

SEQ ID NO: 2668840 - RNA, 19 nt, Artificial Sequence
  Description of Artificial Sequence: Synthetic oligonucleotide
acugcucucccgaagcaca

SEQ ID NO: 2668841 - RNA, 19 nt, Artificial Sequence
  Description of Artificial Sequence: Synthetic oligonucleotide
agauagcgcugccgaggac

SEQ ID NO: 2668842 - RNA, 19 nt, Artificial Sequence
  Description of Artificial Sequence: Synthetic oligonucleotide
guggucucguacugugcag

SEQ ID NO: 2668843 - RNA, 19 nt, Artificial Sequence
  Description of Artificial Sequence: Synthetic oligonucleotide
aucgauuaguguccauauu

SEQ ID NO: 2668844 - RNA, 19 nt, Artificial Sequence
  Description of Artificial Sequence: Synthetic oligonucleotide
caugcagcuuguggaauug

SEQ ID NO: 2668845 - RNA, 19 nt, Artificial Sequence
  Description of Artificial Sequence: Synthetic oligonucleotide
agucuguuucaggaagcug

SEQ ID NO: 2668846 - RNA, 19 nt, Artificial Sequence
  Description of Artificial Sequence: Synthetic oligonucleotide
caguuggcaagauagcgcu

SEQ ID NO: 2668847 - RNA, 19 nt, Artificial Sequence
  Description of Artificial Sequence: Synthetic oligonucleotide
aguugaccauuuauagccu

SEQ ID NO: 2668848 - RNA, 19 nt, Artificial Sequence
  Description of Artificial Sequence: Synthetic oligonucleotide
ccgagggugaugcucagag

SEQ ID NO: 2668849 - RNA, 19 nt, Artificial Sequence
  Description of Artificial Sequence: Synthetic oligonucleotide
gcaguuggcaagauagcgc

SEQ ID NO: 2668850 - RNA, 19 nt, Artificial Sequence
  Description of Artificial Sequence: Synthetic oligonucleotide
guggaauugguacacucau

SEQ ID NO: 2668851 - RNA, 19 nt, Artificial Sequence
  Description of Artificial Sequence: Synthetic oligonucleotide
aagcugccagcaaaaccug

SEQ ID NO: 2668852 - RNA, 19 nt, Artificial Sequence
  Description of Artificial Sequence: Synthetic oligonucleotide
cauaaguacaggagaaauu

SEQ ID NO: 2668853 - RNA, 19 nt, Artificial Sequence
  Description of Artificial Sequence: Synthetic oligonucleotide
gcagguaacagaagguuuc

SEQ ID NO: 2668854 - RNA, 19 nt, Artificial Sequence
  Description of Artificial Sequence: Synthetic oligonucleotide
cauagccaacucccaauca

SEQ ID NO: 2668855 - RNA, 19 nt, Artificial Sequence
  Description of Artificial Sequence: Synthetic oligonucleotide
gccuucacgccacuggccc

SEQ ID NO: 2668856 - RNA, 19 nt, Artificial Sequence
  Description of Artificial Sequence: Synthetic oligonucleotide
caacucccaaucaguaaga

SEQ ID NO: 2668857 - RNA, 19 nt, Artificial Sequence
  Description of Artificial Sequence: Synthetic oligonucleotide
cucguacugugcaguuggc

SEQ ID NO: 2668858 - RNA, 19 nt, Artificial Sequence
  Description of Artificial Sequence: Synthetic oligonucleotide
gaggacaagccacugucau

SEQ ID NO: 2668859 - RNA, 19 nt, Artificial Sequence
  Description of Artificial Sequence: Synthetic oligonucleotide
ccaaguacagaugcuguac

SEQ ID NO: 2668860 - RNA, 19 nt, Artificial Sequence
  Description of Artificial Sequence: Synthetic oligonucleotide
acacugcucucccgaagca

SEQ ID NO: 2668861 - RNA, 19 nt, Artificial Sequence
  Description of Artificial Sequence: Synthetic oligonucleotide
uagagcaguugaccauuua

SEQ ID NO: 2668862 - RNA, 19 nt, Artificial Sequence
  Description of Artificial Sequence: Synthetic oligonucleotide
agccaaguacagaugcugu

SEQ ID NO: 2668863 - RNA, 19 nt, Artificial Sequence
  Description of Artificial Sequence: Synthetic oligonucleotide
agcuugccgaggccuucac

SEQ ID NO: 2668864 - RNA, 19 nt, Artificial Sequence
  Description of Artificial Sequence: Synthetic oligonucleotide
cuucacgccacuggcccag

SEQ ID NO: 2668865 - RNA, 19 nt, Artificial Sequence
  Description of Artificial Sequence: Synthetic oligonucleotide
gagaaauuggucgcacacu

SEQ ID NO: 2668866 - RNA, 19 nt, Artificial Sequence
  Description of Artificial Sequence: Synthetic oligonucleotide
agagcuugccgaggccuuc

SEQ ID NO: 2668867 - RNA, 19 nt, Artificial Sequence
  Description of Artificial Sequence: Synthetic oligonucleotide
ccgaagcacauaaccacag

SEQ ID NO: 2668868 - RNA, 19 nt, Artificial Sequence
  Description of Artificial Sequence: Synthetic oligonucleotide
guaagacaucgauuagugu

SEQ ID NO: 2668869 - RNA, 19 nt, Artificial Sequence
  Description of Artificial Sequence: Synthetic oligonucleotide
agaagcgaucugcuccaaa

SEQ ID NO: 2668870 - RNA, 19 nt, Artificial Sequence
  Description of Artificial Sequence: Synthetic oligonucleotide
caggagaaauuggucgcac

SEQ ID NO: 2668871 - RNA, 19 nt, Artificial Sequence
  Description of Artificial Sequence: Synthetic oligonucleotide
acgcagguaacagaagguu

SEQ ID NO: 2668872 - RNA, 19 nt, Artificial Sequence
  Description of Artificial Sequence: Synthetic oligonucleotide
ccacacaaaggacuuguuc

SEQ ID NO: 2668873 - RNA, 19 nt, Artificial Sequence
  Description of Artificial Sequence: Synthetic oligonucleotide
gcaagauagcgcugccgag

SEQ ID NO: 2668874 - RNA, 19 nt, Artificial Sequence
  Description of Artificial Sequence: Synthetic oligonucleotide
caucgauuaguguccauau

SEQ ID NO: 2668875 - RNA, 19 nt, Artificial Sequence
  Description of Artificial Sequence: Synthetic oligonucleotide
gcaagucauguugaugaug

SEQ ID NO: 2668876 - RNA, 19 nt, Artificial Sequence
  Description of Artificial Sequence: Synthetic oligonucleotide
agacaucgauuagugucca

SEQ ID NO: 2668877 - RNA, 19 nt, Artificial Sequence
  Description of Artificial Sequence: Synthetic oligonucleotide
acagcaguuuugggaaagu

SEQ ID NO: 2668878 - RNA, 19 nt, Artificial Sequence
  Description of Artificial Sequence: Synthetic oligonucleotide
uuauagccuccaguccagu

SEQ ID NO: 2668879 - RNA, 19 nt, Artificial Sequence
  Description of Artificial Sequence: Synthetic oligonucleotide
accugcaagucauguugau

SEQ ID NO: 2668880 - RNA, 19 nt, Artificial Sequence
  Description of Artificial Sequence: Synthetic oligonucleotide
cucucccgaagcacauaac

SEQ ID NO: 2668881 - RNA, 19 nt, Artificial Sequence
  Description of Artificial Sequence: Synthetic oligonucleotide
ccgaggacaagccacuguc

SEQ ID NO: 2668882 - RNA, 19 nt, Artificial Sequence
  Description of Artificial Sequence: Synthetic oligonucleotide
caaugaauguggucucgua

SEQ ID NO: 2668883 - RNA, 19 nt, Artificial Sequence
  Description of Artificial Sequence: Synthetic oligonucleotide
aggcuuccauaaguacagg

SEQ ID NO: 2668884 - RNA, 19 nt, Artificial Sequence
  Description of Artificial Sequence: Synthetic oligonucleotide
caguaagacaucgauuagu

SEQ ID NO: 2668885 - RNA, 19 nt, Artificial Sequence
  Description of Artificial Sequence: Synthetic oligonucleotide
aggacuuguucuacacacu

SEQ ID NO: 2668886 - RNA, 19 nt, Artificial Sequence
  Description of Artificial Sequence: Synthetic oligonucleotide
gccagcaaaaccugcaagu

SEQ ID NO: 2668887 - RNA, 19 nt, Artificial Sequence
  Description of Artificial Sequence: Synthetic oligonucleotide
gcugccgaggacaagccac

SEQ ID NO: 2668888 - RNA, 19 nt, Artificial Sequence
  Description of Artificial Sequence: Synthetic oligonucleotide
gucucguacugugcaguug

SEQ ID NO: 2668889 - RNA, 19 nt, Artificial Sequence
  Description of Artificial Sequence: Synthetic oligonucleotide
gaaauuggucgcacacucu

SEQ ID NO: 2668890 - RNA, 19 nt, Artificial Sequence
  Description of Artificial Sequence: Synthetic oligonucleotide
uaccuucaucaaggcaagc

SEQ ID NO: 2668891 - RNA, 19 nt, Artificial Sequence
  Description of Artificial Sequence: Synthetic oligonucleotide
gacaagccacugucaugca

SEQ ID NO: 2668892 - RNA, 19 nt, Artificial Sequence
  Description of Artificial Sequence: Synthetic oligonucleotide
cauauucccaggccaccaa

SEQ ID NO: 2668893 - RNA, 19 nt, Artificial Sequence
  Description of Artificial Sequence: Synthetic oligonucleotide
ccagcaaaaccugcaaguc

SEQ ID NO: 2668894 - RNA, 19 nt, Artificial Sequence
  Description of Artificial Sequence: Synthetic oligonucleotide
gcuugccgaggccuucacg

SEQ ID NO: 2668895 - RNA, 19 nt, Artificial Sequence
  Description of Artificial Sequence: Synthetic oligonucleotide
aguuggcaagauagcgcug

SEQ ID NO: 2668896 - RNA, 19 nt, Artificial Sequence
  Description of Artificial Sequence: Synthetic oligonucleotide
agguuucacuguacaguca

SEQ ID NO: 2668897 - RNA, 19 nt, Artificial Sequence
  Description of Artificial Sequence: Synthetic oligonucleotide
caaagagccauccgccggu

SEQ ID NO: 2668898 - RNA, 19 nt, Artificial Sequence
  Description of Artificial Sequence: Synthetic oligonucleotide
caccauagccaacucccaa

SEQ ID NO: 2668899 - RNA, 19 nt, Artificial Sequence
  Description of Artificial Sequence: Synthetic oligonucleotide
agccaacucccaaucagua

SEQ ID NO: 2668900 - RNA, 19 nt, Artificial Sequence
  Description of Artificial Sequence: Synthetic oligonucleotide
cagguagaagcgaucugcu

SEQ ID NO: 2668901 - RNA, 19 nt, Artificial Sequence
  Description of Artificial Sequence: Synthetic oligonucleotide
ggcaagccaaguacagaug

SEQ ID NO: 2668902 - RNA, 19 nt, Artificial Sequence
  Description of Artificial Sequence: Synthetic oligonucleotide
ugccgaggacaagccacug

SEQ ID NO: 2668903 - RNA, 19 nt, Artificial Sequence
  Description of Artificial Sequence: Synthetic oligonucleotide
gcucucccgaagcacauaa

SEQ ID NO: 2668904 - RNA, 19 nt, Artificial Sequence
  Description of Artificial Sequence: Synthetic oligonucleotide
ccugcaagucauguugaug

SEQ ID NO: 2668905 - RNA, 19 nt, Artificial Sequence
  Description of Artificial Sequence: Synthetic oligonucleotide
ucacgccacuggcccaggu

SEQ ID NO: 2668906 - RNA, 19 nt, Artificial Sequence
  Description of Artificial Sequence: Synthetic oligonucleotide
uucacgccacuggcccagg

SEQ ID NO: 2668907 - RNA, 19 nt, Artificial Sequence
  Description of Artificial Sequence: Synthetic oligonucleotide
ccaaucaguaagacaucga

SEQ ID NO: 2668908 - RNA, 19 nt, Artificial Sequence
  Description of Artificial Sequence: Synthetic oligonucleotide
cguacugugcaguuggcaa

SEQ ID NO: 2668909 - RNA, 19 nt, Artificial Sequence
  Description of Artificial Sequence: Synthetic oligonucleotide
guuuugggaaaguccgguu

SEQ ID NO: 2668910 - RNA, 19 nt, Artificial Sequence
  Description of Artificial Sequence: Synthetic oligonucleotide
auagcgcugccgaggacaa

SEQ ID NO: 2668911 - RNA, 19 nt, Artificial Sequence
  Description of Artificial Sequence: Synthetic oligonucleotide
cccgaagcacauaaccaca

SEQ ID NO: 2668912 - RNA, 19 nt, Artificial Sequence
  Description of Artificial Sequence: Synthetic oligonucleotide
cucucauaccacauccauu

SEQ ID NO: 2668913 - RNA, 19 nt, Artificial Sequence
  Description of Artificial Sequence: Synthetic oligonucleotide
guuucacuguacagucaaa

SEQ ID NO: 2668914 - RNA, 19 nt, Artificial Sequence
  Description of Artificial Sequence: Synthetic oligonucleotide
gccaacucccaaucaguaa

SEQ ID NO: 2668915 - RNA, 19 nt, Artificial Sequence
  Description of Artificial Sequence: Synthetic oligonucleotide
agccauccgccggucccac

SEQ ID NO: 2668916 - RNA, 19 nt, Artificial Sequence
  Description of Artificial Sequence: Synthetic oligonucleotide
gccaaguacagaugcugua

SEQ ID NO: 2668917 - RNA, 19 nt, Artificial Sequence
  Description of Artificial Sequence: Synthetic oligonucleotide
gagcuugccgaggccuuca

SEQ ID NO: 2668918 - RNA, 19 nt, Artificial Sequence
  Description of Artificial Sequence: Synthetic oligonucleotide
ggucccaccauagccaacu

SEQ ID NO: 2668919 - RNA, 19 nt, Artificial Sequence
  Description of Artificial Sequence: Synthetic oligonucleotide
ccacaguuaaauguacaaa

SEQ ID NO: 2668920 - RNA, 19 nt, Artificial Sequence
  Description of Artificial Sequence: Synthetic oligonucleotide
agggugaugcucagagcua

SEQ ID NO: 2668921 - RNA, 19 nt, Artificial Sequence
  Description of Artificial Sequence: Synthetic oligonucleotide
gagccauccgccgguccca

SEQ ID NO: 2668922 - RNA, 19 nt, Artificial Sequence
  Description of Artificial Sequence: Synthetic oligonucleotide
cacugucaugcagcuugug

SEQ ID NO: 2668923 - RNA, 19 nt, Artificial Sequence
  Description of Artificial Sequence: Synthetic oligonucleotide
cgccggucccaccauagcc

SEQ ID NO: 2668924 - RNA, 19 nt, Artificial Sequence
  Description of Artificial Sequence: Synthetic oligonucleotide
gguacacucauagucuguu

SEQ ID NO: 2668925 - RNA, 19 nt, Artificial Sequence
  Description of Artificial Sequence: Synthetic oligonucleotide
gcagcuuguggaauuggua

SEQ ID NO: 2668926 - RNA, 19 nt, Artificial Sequence
  Description of Artificial Sequence: Synthetic oligonucleotide
ugcucucccgaagcacaua

SEQ ID NO: 2668927 - RNA, 19 nt, Artificial Sequence
  Description of Artificial Sequence: Synthetic oligonucleotide
ggucuugaucaacgcaggu

SEQ ID NO: 2668928 - RNA, 19 nt, Artificial Sequence
  Description of Artificial Sequence: Synthetic oligonucleotide
ccauaaguacaggagaaau

SEQ ID NO: 2668929 - RNA, 19 nt, Artificial Sequence
  Description of Artificial Sequence: Synthetic oligonucleotide
gccggucccaccauagcca

SEQ ID NO: 2668930 - RNA, 19 nt, Artificial Sequence
  Description of Artificial Sequence: Synthetic oligonucleotide
gacaucgauuaguguccau

SEQ ID NO: 2668931 - RNA, 19 nt, Artificial Sequence
  Description of Artificial Sequence: Synthetic oligonucleotide
cuuguggaauugguacacu

SEQ ID NO: 2668932 - RNA, 19 nt, Artificial Sequence
  Description of Artificial Sequence: Synthetic oligonucleotide
gcacauaaccacaguuaaa

SEQ ID NO: 2668933 - RNA, 19 nt, Artificial Sequence
  Description of Artificial Sequence: Synthetic oligonucleotide
ggccuucacgccacuggcc

SEQ ID NO: 2668934 - RNA, 19 nt, Artificial Sequence
  Description of Artificial Sequence: Synthetic oligonucleotide
uagcgcugccgaggacaag

SEQ ID NO: 2668935 - RNA, 19 nt, Artificial Sequence
  Description of Artificial Sequence: Synthetic oligonucleotide
cugccgaggacaagccacu

SEQ ID NO: 2668936 - RNA, 19 nt, Artificial Sequence
  Description of Artificial Sequence: Synthetic oligonucleotide
cgagggugaugcucagagc

SEQ ID NO: 2668937 - RNA, 19 nt, Artificial Sequence
  Description of Artificial Sequence: Synthetic oligonucleotide
gucgcacacucuauacagu

SEQ ID NO: 2668938 - RNA, 19 nt, Artificial Sequence
  Description of Artificial Sequence: Synthetic oligonucleotide
cuagagcaguugaccauuu

SEQ ID NO: 2668939 - RNA, 19 nt, Artificial Sequence
  Description of Artificial Sequence: Synthetic oligonucleotide
ccauccgccggucccacca

SEQ ID NO: 2668940 - RNA, 19 nt, Artificial Sequence
  Description of Artificial Sequence: Synthetic oligonucleotide
cacgccacuggcccaggua

SEQ ID NO: 2668941 - RNA, 19 nt, Artificial Sequence
  Description of Artificial Sequence: Synthetic oligonucleotide
ccauauucccaggccacca

SEQ ID NO: 2668942 - RNA, 19 nt, Artificial Sequence
  Description of Artificial Sequence: Synthetic oligonucleotide
gcaaugaauguggucucgu

SEQ ID NO: 2668943 - RNA, 19 nt, Artificial Sequence
  Description of Artificial Sequence: Synthetic oligonucleotide
cccaggccaccaaagcuga

SEQ ID NO: 2668944 - RNA, 19 nt, Artificial Sequence
  Description of Artificial Sequence: Synthetic oligonucleotide
gucaugcagcuuguggaau

SEQ ID NO: 2668945 - RNA, 19 nt, Artificial Sequence
  Description of Artificial Sequence: Synthetic oligonucleotide
gguuacccaggcaaugaau

SEQ ID NO: 2668946 - RNA, 19 nt, Artificial Sequence
  Description of Artificial Sequence: Synthetic oligonucleotide
auccgccggucccaccaua

SEQ ID NO: 2668947 - RNA, 19 nt, Artificial Sequence
  Description of Artificial Sequence: Synthetic oligonucleotide
ggugaugcucagagcuaga

SEQ ID NO: 2668948 - RNA, 19 nt, Artificial Sequence
  Description of Artificial Sequence: Synthetic oligonucleotide
caguuacaauacagcaguu

SEQ ID NO: 2668949 - RNA, 19 nt, Artificial Sequence
  Description of Artificial Sequence: Synthetic oligonucleotide
gcuagagcaguugaccauu

SEQ ID NO: 2668950 - RNA, 19 nt, Artificial Sequence
  Description of Artificial Sequence: Synthetic oligonucleotide
ccaccauagccaacuccca

SEQ ID NO: 2668951 - RNA, 19 nt, Artificial Sequence
  Description of Artificial Sequence: Synthetic oligonucleotide
cgaggacaagccacuguca

SEQ ID NO: 2668952 - RNA, 19 nt, Artificial Sequence
  Description of Artificial Sequence: Synthetic oligonucleotide
ccgguuacccaggcaauga

SEQ ID NO: 2668953 - RNA, 19 nt, Artificial Sequence
  Description of Artificial Sequence: Synthetic oligonucleotide
gccgaggccuucacgccac

SEQ ID NO: 2668954 - RNA, 19 nt, Artificial Sequence
  Description of Artificial Sequence: Synthetic oligonucleotide
ggucucguacugugcaguu

SEQ ID NO: 2668955 - RNA, 19 nt, Artificial Sequence
  Description of Artificial Sequence: Synthetic oligonucleotide
gccgaggacaagccacugu

SEQ ID NO: 2668956 - RNA, 19 nt, Artificial Sequence
  Description of Artificial Sequence: Synthetic oligonucleotide
agccuccaguccaguuaca

SEQ ID NO: 2668957 - RNA, 19 nt, Artificial Sequence
  Description of Artificial Sequence: Synthetic oligonucleotide
gccacuggcccagguagaa

SEQ ID NO: 2668958 - RNA, 19 nt, Artificial Sequence
  Description of Artificial Sequence: Synthetic oligonucleotide
ccuucacgccacuggccca

SEQ ID NO: 2668959 - RNA, 19 nt, Artificial Sequence
  Description of Artificial Sequence: Synthetic oligonucleotide
ccgccggucccaccauagc

SEQ ID NO: 2668960 - RNA, 19 nt, Artificial Sequence
  Description of Artificial Sequence: Synthetic oligonucleotide
guccgguuacccaggcaau

SEQ ID NO: 2668961 - RNA, 19 nt, Artificial Sequence
  Description of Artificial Sequence: Synthetic oligonucleotide
ccggucccaccauagccaa

SEQ ID NO: 2668962 - RNA, 19 nt, Artificial Sequence
  Description of Artificial Sequence: Synthetic oligonucleotide
gccauccgccggucccacc

SEQ ID NO: 2668963 - RNA, 19 nt, Artificial Sequence
  Description of Artificial Sequence: Synthetic oligonucleotide
ccuccaguccaguuacaau

SEQ ID NO: 2668964 - RNA, 19 nt, Artificial Sequence
  Description of Artificial Sequence: Synthetic oligonucleotide
ccccgagggugaugcucag

SEQ ID NO: 2668965 - RNA, 19 nt, Artificial Sequence
  Description of Artificial Sequence: Synthetic oligonucleotide
cgcacacucuauacagucu

SEQ ID NO: 2668966 - RNA, 19 nt, Artificial Sequence
  Description of Artificial Sequence: Synthetic oligonucleotide
cgguuacccaggcaaugaa

SEQ ID NO: 2668967 - RNA, 19 nt, Artificial Sequence
  Description of Artificial Sequence: Synthetic oligonucleotide
cgaagcacauaaccacagu

SEQ ID NO: 2668968 - RNA, 19 nt, Artificial Sequence
  Description of Artificial Sequence: Synthetic oligonucleotide
cgaggccuucacgccacug

SEQ ID NO: 2668969 - RNA, 19 nt, Artificial Sequence
  Description of Artificial Sequence: Synthetic oligonucleotide
cauccgccggucccaccau

SEQ ID NO: 2668970 - RNA, 19 nt, Artificial Sequence
  Description of Artificial Sequence: Synthetic oligonucleotide
cgcugccgaggacaagcca

SEQ ID NO: 2668971 - RNA, 19 nt, Artificial Sequence
  Description of Artificial Sequence: Synthetic oligonucleotide
ccaggccaccaaagcugaa

SEQ ID NO: 2668972 - RNA, 19 nt, Artificial Sequence
  Description of Artificial Sequence: Synthetic oligonucleotide
cccgagggugaugcucaga

SEQ ID NO: 2668973 - RNA, 19 nt, Artificial Sequence
  Description of Artificial Sequence: Synthetic oligonucleotide
ccgaggccuucacgccacu

SEQ ID NO: 2668974 - RNA, 19 nt, Artificial Sequence
  Description of Artificial Sequence: Synthetic oligonucleotide
aaauuauucacaaaggugc

SEQ ID NO: 2668975 - RNA, 19 nt, Artificial Sequence
  Description of Artificial Sequence: Synthetic oligonucleotide
ugagcgaucucuaacaagg

SEQ ID NO: 2668976 - RNA, 19 nt, Artificial Sequence
  Description of Artificial Sequence: Synthetic oligonucleotide
aaaagcaaaugguagcaac

SEQ ID NO: 2668977 - RNA, 19 nt, Artificial Sequence
  Description of Artificial Sequence: Synthetic oligonucleotide
aaugguagcaaccuggugu

SEQ ID NO: 2668978 - RNA, 19 nt, Artificial Sequence
  Description of Artificial Sequence: Synthetic oligonucleotide
auugugugccaacaaaugc

SEQ ID NO: 2668979 - RNA, 19 nt, Artificial Sequence
  Description of Artificial Sequence: Synthetic oligonucleotide
ucuacaaagagcugcauca

SEQ ID NO: 2668980 - RNA, 19 nt, Artificial Sequence
  Description of Artificial Sequence: Synthetic oligonucleotide
aaagcaaaugguagcaacc

SEQ ID NO: 2668981 - RNA, 19 nt, Artificial Sequence
  Description of Artificial Sequence: Synthetic oligonucleotide
gauggguacagucagaaca

SEQ ID NO: 2668982 - RNA, 19 nt, Artificial Sequence
  Description of Artificial Sequence: Synthetic oligonucleotide
aauuauucacaaaggugcc

SEQ ID NO: 2668983 - RNA, 19 nt, Artificial Sequence
  Description of Artificial Sequence: Synthetic oligonucleotide
uugacagaaggugagacgg

SEQ ID NO: 2668984 - RNA, 19 nt, Artificial Sequence
  Description of Artificial Sequence: Synthetic oligonucleotide
ucuucgaccagccagcagc

SEQ ID NO: 2668985 - RNA, 19 nt, Artificial Sequence
  Description of Artificial Sequence: Synthetic oligonucleotide
uuaucaguuguacagggcu

SEQ ID NO: 2668986 - RNA, 19 nt, Artificial Sequence
  Description of Artificial Sequence: Synthetic oligonucleotide
ucgacagcaacauacagga

SEQ ID NO: 2668987 - RNA, 19 nt, Artificial Sequence
  Description of Artificial Sequence: Synthetic oligonucleotide
cacaauucuugacagaagg

SEQ ID NO: 2668988 - RNA, 19 nt, Artificial Sequence
  Description of Artificial Sequence: Synthetic oligonucleotide
uguuaucaguuguacaggg

SEQ ID NO: 2668989 - RNA, 19 nt, Artificial Sequence
  Description of Artificial Sequence: Synthetic oligonucleotide
uguagaaaagcaaauggua

SEQ ID NO: 2668990 - RNA, 19 nt, Artificial Sequence
  Description of Artificial Sequence: Synthetic oligonucleotide
caugucgacagcaacauac

SEQ ID NO: 2668991 - RNA, 19 nt, Artificial Sequence
  Description of Artificial Sequence: Synthetic oligonucleotide
uacaggaaaagccucuucc

SEQ ID NO: 2668992 - RNA, 19 nt, Artificial Sequence
  Description of Artificial Sequence: Synthetic oligonucleotide
agcugcaucagcuugaggu

SEQ ID NO: 2668993 - RNA, 19 nt, Artificial Sequence
  Description of Artificial Sequence: Synthetic oligonucleotide
uagaaaagcaaaugguagc

SEQ ID NO: 2668994 - RNA, 19 nt, Artificial Sequence
  Description of Artificial Sequence: Synthetic oligonucleotide
gaacagaugaggcuccugg

SEQ ID NO: 2668995 - RNA, 19 nt, Artificial Sequence
  Description of Artificial Sequence: Synthetic oligonucleotide
aaaaucgugcuucuguuau

SEQ ID NO: 2668996 - RNA, 19 nt, Artificial Sequence
  Description of Artificial Sequence: Synthetic oligonucleotide
ugggagagaucaaagcugg

SEQ ID NO: 2668997 - RNA, 19 nt, Artificial Sequence
  Description of Artificial Sequence: Synthetic oligonucleotide
acaccacacagcuucaagc

SEQ ID NO: 2668998 - RNA, 19 nt, Artificial Sequence
  Description of Artificial Sequence: Synthetic oligonucleotide
aucagcuugagguacaugu

SEQ ID NO: 2668999 - RNA, 19 nt, Artificial Sequence
  Description of Artificial Sequence: Synthetic oligonucleotide
agcaacauacaggaaaagc

SEQ ID NO: 2669000 - RNA, 19 nt, Artificial Sequence
  Description of Artificial Sequence: Synthetic oligonucleotide
aaagaguucugugcuuucc

SEQ ID NO: 2669001 - RNA, 19 nt, Artificial Sequence
  Description of Artificial Sequence: Synthetic oligonucleotide
uugagguacaugucgacag

SEQ ID NO: 2669002 - RNA, 19 nt, Artificial Sequence
  Description of Artificial Sequence: Synthetic oligonucleotide
ugccaacaaaugcugagcg

SEQ ID NO: 2669003 - RNA, 19 nt, Artificial Sequence
  Description of Artificial Sequence: Synthetic oligonucleotide
uguucacugaaguaggaga

SEQ ID NO: 2669004 - RNA, 19 nt, Artificial Sequence
  Description of Artificial Sequence: Synthetic oligonucleotide
aacacugugcaugugaaga

SEQ ID NO: 2669005 - RNA, 19 nt, Artificial Sequence
  Description of Artificial Sequence: Synthetic oligonucleotide
uauugugugccaacaaaug

SEQ ID NO: 2669006 - RNA, 19 nt, Artificial Sequence
  Description of Artificial Sequence: Synthetic oligonucleotide
caaggaguggccuuggagc

SEQ ID NO: 2669007 - RNA, 19 nt, Artificial Sequence
  Description of Artificial Sequence: Synthetic oligonucleotide
ucauguuggagaaacacuu

SEQ ID NO: 2669008 - RNA, 19 nt, Artificial Sequence
  Description of Artificial Sequence: Synthetic oligonucleotide
caugcaguagcucuuguag

SEQ ID NO: 2669009 - RNA, 19 nt, Artificial Sequence
  Description of Artificial Sequence: Synthetic oligonucleotide
agcuggugcacugagaugg

SEQ ID NO: 2669010 - RNA, 19 nt, Artificial Sequence
  Description of Artificial Sequence: Synthetic oligonucleotide
aaaggugccagcuggugca

SEQ ID NO: 2669011 - RNA, 19 nt, Artificial Sequence
  Description of Artificial Sequence: Synthetic oligonucleotide
uugugugccaacaaaugcu

SEQ ID NO: 2669012 - RNA, 19 nt, Artificial Sequence
  Description of Artificial Sequence: Synthetic oligonucleotide
gagaagacuguagaaaagc

SEQ ID NO: 2669013 - RNA, 19 nt, Artificial Sequence
  Description of Artificial Sequence: Synthetic oligonucleotide
ugugccaacaaaugcugag

SEQ ID NO: 2669014 - RNA, 19 nt, Artificial Sequence
  Description of Artificial Sequence: Synthetic oligonucleotide
acagucagaacagaugagg

SEQ ID NO: 2669015 - RNA, 19 nt, Artificial Sequence
  Description of Artificial Sequence: Synthetic oligonucleotide
gagacgggagaacauauug

SEQ ID NO: 2669016 - RNA, 19 nt, Artificial Sequence
  Description of Artificial Sequence: Synthetic oligonucleotide
gacgggagaacauauugug

SEQ ID NO: 2669017 - RNA, 19 nt, Artificial Sequence
  Description of Artificial Sequence: Synthetic oligonucleotide
aacauacaggaaaagccuc

SEQ ID NO: 2669018 - RNA, 19 nt, Artificial Sequence
  Description of Artificial Sequence: Synthetic oligonucleotide
ucuaacaaggaagacaguu

SEQ ID NO: 2669019 - RNA, 19 nt, Artificial Sequence
  Description of Artificial Sequence: Synthetic oligonucleotide
gcaauaaagaguucugugc

SEQ ID NO: 2669020 - RNA, 19 nt, Artificial Sequence
  Description of Artificial Sequence: Synthetic oligonucleotide
cuugacagaaggugagacg

SEQ ID NO: 2669021 - RNA, 19 nt, Artificial Sequence
  Description of Artificial Sequence: Synthetic oligonucleotide
ugcaugugaagacaccaca

SEQ ID NO: 2669022 - RNA, 19 nt, Artificial Sequence
  Description of Artificial Sequence: Synthetic oligonucleotide
uauuagcugcagcagaaaa

SEQ ID NO: 2669023 - RNA, 19 nt, Artificial Sequence
  Description of Artificial Sequence: Synthetic oligonucleotide
aaaucgugcuucuguuauc

SEQ ID NO: 2669024 - RNA, 19 nt, Artificial Sequence
  Description of Artificial Sequence: Synthetic oligonucleotide
uuguaggcucacaacacug

SEQ ID NO: 2669025 - RNA, 19 nt, Artificial Sequence
  Description of Artificial Sequence: Synthetic oligonucleotide
ucuuguaggcucacaacac

SEQ ID NO: 2669026 - RNA, 19 nt, Artificial Sequence
  Description of Artificial Sequence: Synthetic oligonucleotide
caauucuugacagaaggug

SEQ ID NO: 2669027 - RNA, 19 nt, Artificial Sequence
  Description of Artificial Sequence: Synthetic oligonucleotide
aacauauugugugccaaca

SEQ ID NO: 2669028 - RNA, 19 nt, Artificial Sequence
  Description of Artificial Sequence: Synthetic oligonucleotide
aggaaaagccucuuccuug

SEQ ID NO: 2669029 - RNA, 19 nt, Artificial Sequence
  Description of Artificial Sequence: Synthetic oligonucleotide
aauaaagaguucugugcuu

SEQ ID NO: 2669030 - RNA, 19 nt, Artificial Sequence
  Description of Artificial Sequence: Synthetic oligonucleotide
agaaaagcaaaugguagca

SEQ ID NO: 2669031 - RNA, 19 nt, Artificial Sequence
  Description of Artificial Sequence: Synthetic oligonucleotide
aaucgugcuucuguuauca

SEQ ID NO: 2669032 - RNA, 19 nt, Artificial Sequence
  Description of Artificial Sequence: Synthetic oligonucleotide
ugucauguuggagaaacac

SEQ ID NO: 2669033 - RNA, 19 nt, Artificial Sequence
  Description of Artificial Sequence: Synthetic oligonucleotide
uuuguuccgagcugagcag

SEQ ID NO: 2669034 - RNA, 19 nt, Artificial Sequence
  Description of Artificial Sequence: Synthetic oligonucleotide
cuugaugauggcauguuca

SEQ ID NO: 2669035 - RNA, 19 nt, Artificial Sequence
  Description of Artificial Sequence: Synthetic oligonucleotide
ugugcaugugaagacacca

SEQ ID NO: 2669036 - RNA, 19 nt, Artificial Sequence
  Description of Artificial Sequence: Synthetic oligonucleotide
ugcugagcgaucucuaaca

SEQ ID NO: 2669037 - RNA, 19 nt, Artificial Sequence
  Description of Artificial Sequence: Synthetic oligonucleotide
ugucgacagcaacauacag

SEQ ID NO: 2669038 - RNA, 19 nt, Artificial Sequence
  Description of Artificial Sequence: Synthetic oligonucleotide
acacugugcaugugaagac

SEQ ID NO: 2669039 - RNA, 19 nt, Artificial Sequence
  Description of Artificial Sequence: Synthetic oligonucleotide
uguuggagaaacacuuuuc

SEQ ID NO: 2669040 - RNA, 19 nt, Artificial Sequence
  Description of Artificial Sequence: Synthetic oligonucleotide
cuuuguuccgagcugagca

SEQ ID NO: 2669041 - RNA, 19 nt, Artificial Sequence
  Description of Artificial Sequence: Synthetic oligonucleotide
ucagaacagaugaggcucc

SEQ ID NO: 2669042 - RNA, 19 nt, Artificial Sequence
  Description of Artificial Sequence: Synthetic oligonucleotide
cugggagagaucaaagcug

SEQ ID NO: 2669043 - RNA, 19 nt, Artificial Sequence
  Description of Artificial Sequence: Synthetic oligonucleotide
aagcaaaugguagcaaccu

SEQ ID NO: 2669044 - RNA, 19 nt, Artificial Sequence
  Description of Artificial Sequence: Synthetic oligonucleotide
cagcuugagguacaugucg

SEQ ID NO: 2669045 - RNA, 19 nt, Artificial Sequence
  Description of Artificial Sequence: Synthetic oligonucleotide
aaaugguagcaaccuggug

SEQ ID NO: 2669046 - RNA, 19 nt, Artificial Sequence
  Description of Artificial Sequence: Synthetic oligonucleotide
cugagauggguacagucag

SEQ ID NO: 2669047 - RNA, 19 nt, Artificial Sequence
  Description of Artificial Sequence: Synthetic oligonucleotide
aagcaauaaagaguucugu

SEQ ID NO: 2669048 - RNA, 19 nt, Artificial Sequence
  Description of Artificial Sequence: Synthetic oligonucleotide
uugaugauggcauguucac

SEQ ID NO: 2669049 - RNA, 19 nt, Artificial Sequence
  Description of Artificial Sequence: Synthetic oligonucleotide
uacagucagaacagaugag

SEQ ID NO: 2669050 - RNA, 19 nt, Artificial Sequence
  Description of Artificial Sequence: Synthetic oligonucleotide
aggaagacaguuucuuucu

SEQ ID NO: 2669051 - RNA, 19 nt, Artificial Sequence
  Description of Artificial Sequence: Synthetic oligonucleotide
uaggcucacaacacugugc

SEQ ID NO: 2669052 - RNA, 19 nt, Artificial Sequence
  Description of Artificial Sequence: Synthetic oligonucleotide
ggcauguucacugaaguag

SEQ ID NO: 2669053 - RNA, 19 nt, Artificial Sequence
  Description of Artificial Sequence: Synthetic oligonucleotide
augcugagcgaucucuaac

SEQ ID NO: 2669054 - RNA, 19 nt, Artificial Sequence
  Description of Artificial Sequence: Synthetic oligonucleotide
augguagcaaccuggugug

SEQ ID NO: 2669055 - RNA, 19 nt, Artificial Sequence
  Description of Artificial Sequence: Synthetic oligonucleotide
agucagaacagaugaggcu

SEQ ID NO: 2669056 - RNA, 19 nt, Artificial Sequence
  Description of Artificial Sequence: Synthetic oligonucleotide
uguaggcucacaacacugu

SEQ ID NO: 2669057 - RNA, 19 nt, Artificial Sequence
  Description of Artificial Sequence: Synthetic oligonucleotide
ucuugacagaaggugagac

SEQ ID NO: 2669058 - RNA, 19 nt, Artificial Sequence
  Description of Artificial Sequence: Synthetic oligonucleotide
aucaguuguacagggcuac

SEQ ID NO: 2669059 - RNA, 19 nt, Artificial Sequence
  Description of Artificial Sequence: Synthetic oligonucleotide
aaugcugagcgaucucuaa

SEQ ID NO: 2669060 - RNA, 19 nt, Artificial Sequence
  Description of Artificial Sequence: Synthetic oligonucleotide
ugcaggagggcguugcuca

SEQ ID NO: 2669061 - RNA, 19 nt, Artificial Sequence
  Description of Artificial Sequence: Synthetic oligonucleotide
uccugggagagaucaaagc

SEQ ID NO: 2669062 - RNA, 19 nt, Artificial Sequence
  Description of Artificial Sequence: Synthetic oligonucleotide
ugagguacaugucgacagc

SEQ ID NO: 2669063 - RNA, 19 nt, Artificial Sequence
  Description of Artificial Sequence: Synthetic oligonucleotide
gauggcauguucacugaag

SEQ ID NO: 2669064 - RNA, 19 nt, Artificial Sequence
  Description of Artificial Sequence: Synthetic oligonucleotide
acaggaaaagccucuuccu

SEQ ID NO: 2669065 - RNA, 19 nt, Artificial Sequence
  Description of Artificial Sequence: Synthetic oligonucleotide
gcaaaugguagcaaccugg

SEQ ID NO: 2669066 - RNA, 19 nt, Artificial Sequence
  Description of Artificial Sequence: Synthetic oligonucleotide
aguuguacagggcuacccu

SEQ ID NO: 2669067 - RNA, 19 nt, Artificial Sequence
  Description of Artificial Sequence: Synthetic oligonucleotide
gaacauauugugugccaac

SEQ ID NO: 2669068 - RNA, 19 nt, Artificial Sequence
  Description of Artificial Sequence: Synthetic oligonucleotide
aggugccccaugcaguagc

SEQ ID NO: 2669069 - RNA, 19 nt, Artificial Sequence
  Description of Artificial Sequence: Synthetic oligonucleotide
aaggugagacgggagaaca

SEQ ID NO: 2669070 - RNA, 19 nt, Artificial Sequence
  Description of Artificial Sequence: Synthetic oligonucleotide
gucaucgucucuucgacca

SEQ ID NO: 2669071 - RNA, 19 nt, Artificial Sequence
  Description of Artificial Sequence: Synthetic oligonucleotide
acugugcaugugaagacac

SEQ ID NO: 2669072 - RNA, 19 nt, Artificial Sequence
  Description of Artificial Sequence: Synthetic oligonucleotide
cucuuguaggcucacaaca

SEQ ID NO: 2669073 - RNA, 19 nt, Artificial Sequence
  Description of Artificial Sequence: Synthetic oligonucleotide
gaaacacuuuucugggcac

SEQ ID NO: 2669074 - RNA, 19 nt, Artificial Sequence
  Description of Artificial Sequence: Synthetic oligonucleotide
cuucaagcaauaaagaguu

SEQ ID NO: 2669075 - RNA, 19 nt, Artificial Sequence
  Description of Artificial Sequence: Synthetic oligonucleotide
uccgagcugagcagcacag

SEQ ID NO: 2669076 - RNA, 19 nt, Artificial Sequence
  Description of Artificial Sequence: Synthetic oligonucleotide
gucagaacagaugaggcuc

SEQ ID NO: 2669077 - RNA, 19 nt, Artificial Sequence
  Description of Artificial Sequence: Synthetic oligonucleotide
cuguuaucaguuguacagg

SEQ ID NO: 2669078 - RNA, 19 nt, Artificial Sequence
  Description of Artificial Sequence: Synthetic oligonucleotide
ucgaccagccagcagcucu

SEQ ID NO: 2669079 - RNA, 19 nt, Artificial Sequence
  Description of Artificial Sequence: Synthetic oligonucleotide
agauggguacagucagaac

SEQ ID NO: 2669080 - RNA, 19 nt, Artificial Sequence
  Description of Artificial Sequence: Synthetic oligonucleotide
auucuugacagaaggugag

SEQ ID NO: 2669081 - RNA, 19 nt, Artificial Sequence
  Description of Artificial Sequence: Synthetic oligonucleotide
agguauuagcugcagcaga

SEQ ID NO: 2669082 - RNA, 19 nt, Artificial Sequence
  Description of Artificial Sequence: Synthetic oligonucleotide
cuuucuuuguuccgagcug

SEQ ID NO: 2669083 - RNA, 19 nt, Artificial Sequence
  Description of Artificial Sequence: Synthetic oligonucleotide
acaaaugcugagcgaucuc

SEQ ID NO: 2669084 - RNA, 19 nt, Artificial Sequence
  Description of Artificial Sequence: Synthetic oligonucleotide
gagguauuagcugcagcag

SEQ ID NO: 2669085 - RNA, 19 nt, Artificial Sequence
  Description of Artificial Sequence: Synthetic oligonucleotide
caaagcuggggacagccug

SEQ ID NO: 2669086 - RNA, 19 nt, Artificial Sequence
  Description of Artificial Sequence: Synthetic oligonucleotide
ggugugcugaccuggagcc

SEQ ID NO: 2669087 - RNA, 19 nt, Artificial Sequence
  Description of Artificial Sequence: Synthetic oligonucleotide
guuguacagggcuacccug

SEQ ID NO: 2669088 - RNA, 19 nt, Artificial Sequence
  Description of Artificial Sequence: Synthetic oligonucleotide
ucgugcuucuguuaucagu

SEQ ID NO: 2669089 - RNA, 19 nt, Artificial Sequence
  Description of Artificial Sequence: Synthetic oligonucleotide
auauugugugccaacaaau

SEQ ID NO: 2669090 - RNA, 19 nt, Artificial Sequence
  Description of Artificial Sequence: Synthetic oligonucleotide
agagaagacuguagaaaag

SEQ ID NO: 2669091 - RNA, 19 nt, Artificial Sequence
  Description of Artificial Sequence: Synthetic oligonucleotide
auggguacagucagaacag

SEQ ID NO: 2669092 - RNA, 19 nt, Artificial Sequence
  Description of Artificial Sequence: Synthetic oligonucleotide
auguuggagaaacacuuuu

SEQ ID NO: 2669093 - RNA, 19 nt, Artificial Sequence
  Description of Artificial Sequence: Synthetic oligonucleotide
agaucaaagcuggggacag

SEQ ID NO: 2669094 - RNA, 19 nt, Artificial Sequence
  Description of Artificial Sequence: Synthetic oligonucleotide
gagaacauauugugugcca

SEQ ID NO: 2669095 - RNA, 19 nt, Artificial Sequence
  Description of Artificial Sequence: Synthetic oligonucleotide
gaagacuguagaaaagcaa

SEQ ID NO: 2669096 - RNA, 19 nt, Artificial Sequence
  Description of Artificial Sequence: Synthetic oligonucleotide
uaucaguuguacagggcua

SEQ ID NO: 2669097 - RNA, 19 nt, Artificial Sequence
  Description of Artificial Sequence: Synthetic oligonucleotide
agaagacuguagaaaagca

SEQ ID NO: 2669098 - RNA, 19 nt, Artificial Sequence
  Description of Artificial Sequence: Synthetic oligonucleotide
aucucagggucaucgucuc

SEQ ID NO: 2669099 - RNA, 19 nt, Artificial Sequence
  Description of Artificial Sequence: Synthetic oligonucleotide
cauauugugugccaacaaa

SEQ ID NO: 2669100 - RNA, 19 nt, Artificial Sequence
  Description of Artificial Sequence: Synthetic oligonucleotide
uucuuuguuccgagcugag

SEQ ID NO: 2669101 - RNA, 19 nt, Artificial Sequence
  Description of Artificial Sequence: Synthetic oligonucleotide
acugagauggguacaguca

SEQ ID NO: 2669102 - RNA, 19 nt, Artificial Sequence
  Description of Artificial Sequence: Synthetic oligonucleotide
ucugugcuuuccacaauuc

SEQ ID NO: 2669103 - RNA, 19 nt, Artificial Sequence
  Description of Artificial Sequence: Synthetic oligonucleotide
caauaaagaguucugugcu

SEQ ID NO: 2669104 - RNA, 19 nt, Artificial Sequence
  Description of Artificial Sequence: Synthetic oligonucleotide
guaggagagaagacuguag

SEQ ID NO: 2669105 - RNA, 19 nt, Artificial Sequence
  Description of Artificial Sequence: Synthetic oligonucleotide
uacaugucgacagcaacau

SEQ ID NO: 2669106 - RNA, 19 nt, Artificial Sequence
  Description of Artificial Sequence: Synthetic oligonucleotide
aggagagaagacuguagaa

SEQ ID NO: 2669107 - RNA, 19 nt, Artificial Sequence
  Description of Artificial Sequence: Synthetic oligonucleotide
gugaagacaccacacagcu

SEQ ID NO: 2669108 - RNA, 19 nt, Artificial Sequence
  Description of Artificial Sequence: Synthetic oligonucleotide
cuucuguuaucaguuguac

SEQ ID NO: 2669109 - RNA, 19 nt, Artificial Sequence
  Description of Artificial Sequence: Synthetic oligonucleotide
cugagcgaucucuaacaag

SEQ ID NO: 2669110 - RNA, 19 nt, Artificial Sequence
  Description of Artificial Sequence: Synthetic oligonucleotide
guaggcucacaacacugug

SEQ ID NO: 2669111 - RNA, 19 nt, Artificial Sequence
  Description of Artificial Sequence: Synthetic oligonucleotide
cacugagauggguacaguc

SEQ ID NO: 2669112 - RNA, 19 nt, Artificial Sequence
  Description of Artificial Sequence: Synthetic oligonucleotide
ugagauggguacagucaga

SEQ ID NO: 2669113 - RNA, 19 nt, Artificial Sequence
  Description of Artificial Sequence: Synthetic oligonucleotide
ggcguugcucaucucaggg

SEQ ID NO: 2669114 - RNA, 19 nt, Artificial Sequence
  Description of Artificial Sequence: Synthetic oligonucleotide
auuauucacaaaggugcca

SEQ ID NO: 2669115 - RNA, 19 nt, Artificial Sequence
  Description of Artificial Sequence: Synthetic oligonucleotide
auaaagaguucugugcuuu

SEQ ID NO: 2669116 - RNA, 19 nt, Artificial Sequence
  Description of Artificial Sequence: Synthetic oligonucleotide
gcgaucucuaacaaggaag

SEQ ID NO: 2669117 - RNA, 19 nt, Artificial Sequence
  Description of Artificial Sequence: Synthetic oligonucleotide
ggcacugagguauuagcug

SEQ ID NO: 2669118 - RNA, 19 nt, Artificial Sequence
  Description of Artificial Sequence: Synthetic oligonucleotide
caacauacaggaaaagccu

SEQ ID NO: 2669119 - RNA, 19 nt, Artificial Sequence
  Description of Artificial Sequence: Synthetic oligonucleotide
gagggcguugcucaucuca

SEQ ID NO: 2669120 - RNA, 19 nt, Artificial Sequence
  Description of Artificial Sequence: Synthetic oligonucleotide
uuccgagcugagcagcaca

SEQ ID NO: 2669121 - RNA, 19 nt, Artificial Sequence
  Description of Artificial Sequence: Synthetic oligonucleotide
acauauugugugccaacaa

SEQ ID NO: 2669122 - RNA, 19 nt, Artificial Sequence
  Description of Artificial Sequence: Synthetic oligonucleotide
uguuccgagcugagcagca

SEQ ID NO: 2669123 - RNA, 19 nt, Artificial Sequence
  Description of Artificial Sequence: Synthetic oligonucleotide
aaacacuuuucugggcacu

SEQ ID NO: 2669124 - RNA, 19 nt, Artificial Sequence
  Description of Artificial Sequence: Synthetic oligonucleotide
uguacagggcuacccugga

SEQ ID NO: 2669125 - RNA, 19 nt, Artificial Sequence
  Description of Artificial Sequence: Synthetic oligonucleotide
agggucaucgucucuucga

SEQ ID NO: 2669126 - RNA, 19 nt, Artificial Sequence
  Description of Artificial Sequence: Synthetic oligonucleotide
acuuuucugggcacugagg

SEQ ID NO: 2669127 - RNA, 19 nt, Artificial Sequence
  Description of Artificial Sequence: Synthetic oligonucleotide
guuaucaguuguacagggc

SEQ ID NO: 2669128 - RNA, 19 nt, Artificial Sequence
  Description of Artificial Sequence: Synthetic oligonucleotide
uaaagaguucugugcuuuc

SEQ ID NO: 2669129 - RNA, 19 nt, Artificial Sequence
  Description of Artificial Sequence: Synthetic oligonucleotide
guacaugucgacagcaaca

SEQ ID NO: 2669130 - RNA, 19 nt, Artificial Sequence
  Description of Artificial Sequence: Synthetic oligonucleotide
ucaucgucucuucgaccag

SEQ ID NO: 2669131 - RNA, 19 nt, Artificial Sequence
  Description of Artificial Sequence: Synthetic oligonucleotide
cuuuucugggcacugaggu

SEQ ID NO: 2669132 - RNA, 19 nt, Artificial Sequence
  Description of Artificial Sequence: Synthetic oligonucleotide
agcgaucucuaacaaggaa

SEQ ID NO: 2669133 - RNA, 19 nt, Artificial Sequence
  Description of Artificial Sequence: Synthetic oligonucleotide
gcucaucucagggucaucg

SEQ ID NO: 2669134 - RNA, 19 nt, Artificial Sequence
  Description of Artificial Sequence: Synthetic oligonucleotide
cuccugggagagaucaaag

SEQ ID NO: 2669135 - RNA, 19 nt, Artificial Sequence
  Description of Artificial Sequence: Synthetic oligonucleotide
acaauucuugacagaaggu

SEQ ID NO: 2669136 - RNA, 19 nt, Artificial Sequence
  Description of Artificial Sequence: Synthetic oligonucleotide
ucuuuguuccgagcugagc

SEQ ID NO: 2669137 - RNA, 19 nt, Artificial Sequence
  Description of Artificial Sequence: Synthetic oligonucleotide
gggagaacauauugugugc

SEQ ID NO: 2669138 - RNA, 19 nt, Artificial Sequence
  Description of Artificial Sequence: Synthetic oligonucleotide
cuacaaagagcugcaucag

SEQ ID NO: 2669139 - RNA, 19 nt, Artificial Sequence
  Description of Artificial Sequence: Synthetic oligonucleotide
ucaaagcuggggacagccu

SEQ ID NO: 2669140 - RNA, 19 nt, Artificial Sequence
  Description of Artificial Sequence: Synthetic oligonucleotide
agaacauauugugugccaa

SEQ ID NO: 2669141 - RNA, 19 nt, Artificial Sequence
  Description of Artificial Sequence: Synthetic oligonucleotide
uggugcacugagaugggua

SEQ ID NO: 2669142 - RNA, 19 nt, Artificial Sequence
  Description of Artificial Sequence: Synthetic oligonucleotide
gcauguucacugaaguagg

SEQ ID NO: 2669143 - RNA, 19 nt, Artificial Sequence
  Description of Artificial Sequence: Synthetic oligonucleotide
cacugaaguaggagagaag

SEQ ID NO: 2669144 - RNA, 19 nt, Artificial Sequence
  Description of Artificial Sequence: Synthetic oligonucleotide
aggagggcguugcucaucu

SEQ ID NO: 2669145 - RNA, 19 nt, Artificial Sequence
  Description of Artificial Sequence: Synthetic oligonucleotide
guagcaaccuggugugcug

SEQ ID NO: 2669146 - RNA, 19 nt, Artificial Sequence
  Description of Artificial Sequence: Synthetic oligonucleotide
uuccacaauucuugacaga

SEQ ID NO: 2669147 - RNA, 19 nt, Artificial Sequence
  Description of Artificial Sequence: Synthetic oligonucleotide
agggcuacccuggagcaag

SEQ ID NO: 2669148 - RNA, 19 nt, Artificial Sequence
  Description of Artificial Sequence: Synthetic oligonucleotide
agcaaccuggugugcugac

SEQ ID NO: 2669149 - RNA, 19 nt, Artificial Sequence
  Description of Artificial Sequence: Synthetic oligonucleotide
gcucacaacacugugcaug

SEQ ID NO: 2669150 - RNA, 19 nt, Artificial Sequence
  Description of Artificial Sequence: Synthetic oligonucleotide
cugugcaugugaagacacc

SEQ ID NO: 2669151 - RNA, 19 nt, Artificial Sequence
  Description of Artificial Sequence: Synthetic oligonucleotide
ugaugauggcauguucacu

SEQ ID NO: 2669152 - RNA, 19 nt, Artificial Sequence
  Description of Artificial Sequence: Synthetic oligonucleotide
acagggcuacccuggagca

SEQ ID NO: 2669153 - RNA, 19 nt, Artificial Sequence
  Description of Artificial Sequence: Synthetic oligonucleotide
ugaggcuccugggagagau

SEQ ID NO: 2669154 - RNA, 19 nt, Artificial Sequence
  Description of Artificial Sequence: Synthetic oligonucleotide
ggugcacugagauggguac

SEQ ID NO: 2669155 - RNA, 19 nt, Artificial Sequence
  Description of Artificial Sequence: Synthetic oligonucleotide
uucaagcaauaaagaguuc

SEQ ID NO: 2669156 - RNA, 19 nt, Artificial Sequence
  Description of Artificial Sequence: Synthetic oligonucleotide
caacaaaugcugagcgauc

SEQ ID NO: 2669157 - RNA, 19 nt, Artificial Sequence
  Description of Artificial Sequence: Synthetic oligonucleotide
uuguuccgagcugagcagc

SEQ ID NO: 2669158 - RNA, 19 nt, Artificial Sequence
  Description of Artificial Sequence: Synthetic oligonucleotide
gacagaaggugagacggga

SEQ ID NO: 2669159 - RNA, 19 nt, Artificial Sequence
  Description of Artificial Sequence: Synthetic oligonucleotide
uucuugacagaaggugaga

SEQ ID NO: 2669160 - RNA, 19 nt, Artificial Sequence
  Description of Artificial Sequence: Synthetic oligonucleotide
gugccaacaaaugcugagc

SEQ ID NO: 2669161 - RNA, 19 nt, Artificial Sequence
  Description of Artificial Sequence: Synthetic oligonucleotide
aaccuggugugcugaccug

SEQ ID NO: 2669162 - RNA, 19 nt, Artificial Sequence
  Description of Artificial Sequence: Synthetic oligonucleotide
caguuguacagggcuaccc

SEQ ID NO: 2669163 - RNA, 19 nt, Artificial Sequence
  Description of Artificial Sequence: Synthetic oligonucleotide
gucucuucgaccagccagc

SEQ ID NO: 2669164 - RNA, 19 nt, Artificial Sequence
  Description of Artificial Sequence: Synthetic oligonucleotide
gaucucuaacaaggaagac

SEQ ID NO: 2669165 - RNA, 19 nt, Artificial Sequence
  Description of Artificial Sequence: Synthetic oligonucleotide
ugagacgggagaacauauu

SEQ ID NO: 2669166 - RNA, 19 nt, Artificial Sequence
  Description of Artificial Sequence: Synthetic oligonucleotide
aguaggagagaagacugua

SEQ ID NO: 2669167 - RNA, 19 nt, Artificial Sequence
  Description of Artificial Sequence: Synthetic oligonucleotide
agcacaggguggcugggcu

SEQ ID NO: 2669168 - RNA, 19 nt, Artificial Sequence
  Description of Artificial Sequence: Synthetic oligonucleotide
acugagguauuagcugcag

SEQ ID NO: 2669169 - RNA, 19 nt, Artificial Sequence
  Description of Artificial Sequence: Synthetic oligonucleotide
gaaggugagacgggagaac

SEQ ID NO: 2669170 - RNA, 19 nt, Artificial Sequence
  Description of Artificial Sequence: Synthetic oligonucleotide
gaaaagcaaaugguagcaa

SEQ ID NO: 2669171 - RNA, 19 nt, Artificial Sequence
  Description of Artificial Sequence: Synthetic oligonucleotide
cagcuucaagcaauaaaga

SEQ ID NO: 2669172 - RNA, 19 nt, Artificial Sequence
  Description of Artificial Sequence: Synthetic oligonucleotide
agacgggagaacauauugu

SEQ ID NO: 2669173 - RNA, 19 nt, Artificial Sequence
  Description of Artificial Sequence: Synthetic oligonucleotide
agaaggugagacgggagaa

SEQ ID NO: 2669174 - RNA, 19 nt, Artificial Sequence
  Description of Artificial Sequence: Synthetic oligonucleotide
cuacccuggagcaaggagu

SEQ ID NO: 2669175 - RNA, 19 nt, Artificial Sequence
  Description of Artificial Sequence: Synthetic oligonucleotide
cuugagguacaugucgaca

SEQ ID NO: 2669176 - RNA, 19 nt, Artificial Sequence
  Description of Artificial Sequence: Synthetic oligonucleotide
cgggagaacauauugugug

SEQ ID NO: 2669177 - RNA, 19 nt, Artificial Sequence
  Description of Artificial Sequence: Synthetic oligonucleotide
agacuguagaaaagcaaau

SEQ ID NO: 2669178 - RNA, 19 nt, Artificial Sequence
  Description of Artificial Sequence: Synthetic oligonucleotide
aaggugccagcuggugcac

SEQ ID NO: 2669179 - RNA, 19 nt, Artificial Sequence
  Description of Artificial Sequence: Synthetic oligonucleotide
aguggccuuggagcuuucc

SEQ ID NO: 2669180 - RNA, 19 nt, Artificial Sequence
  Description of Artificial Sequence: Synthetic oligonucleotide
accacacagcuucaagcaa

SEQ ID NO: 2669181 - RNA, 19 nt, Artificial Sequence
  Description of Artificial Sequence: Synthetic oligonucleotide
aucgugcuucuguuaucag

SEQ ID NO: 2669182 - RNA, 19 nt, Artificial Sequence
  Description of Artificial Sequence: Synthetic oligonucleotide
gaagacaguuucuuucuuu

SEQ ID NO: 2669183 - RNA, 19 nt, Artificial Sequence
  Description of Artificial Sequence: Synthetic oligonucleotide
gcuacccuggagcaaggag

SEQ ID NO: 2669184 - RNA, 19 nt, Artificial Sequence
  Description of Artificial Sequence: Synthetic oligonucleotide
cauguucacugaaguagga

SEQ ID NO: 2669185 - RNA, 19 nt, Artificial Sequence
  Description of Artificial Sequence: Synthetic oligonucleotide
gcuggggacagccugccgc

SEQ ID NO: 2669186 - RNA, 19 nt, Artificial Sequence
  Description of Artificial Sequence: Synthetic oligonucleotide
cagggucaucgucucuucg

SEQ ID NO: 2669187 - RNA, 19 nt, Artificial Sequence
  Description of Artificial Sequence: Synthetic oligonucleotide
cacaggguggcugggcucc

SEQ ID NO: 2669188 - RNA, 19 nt, Artificial Sequence
  Description of Artificial Sequence: Synthetic oligonucleotide
aggcuccugggagagauca

SEQ ID NO: 2669189 - RNA, 19 nt, Artificial Sequence
  Description of Artificial Sequence: Synthetic oligonucleotide
agcuugagguacaugucga

SEQ ID NO: 2669190 - RNA, 19 nt, Artificial Sequence
  Description of Artificial Sequence: Synthetic oligonucleotide
ucagggucaucgucucuuc

SEQ ID NO: 2669191 - RNA, 19 nt, Artificial Sequence
  Description of Artificial Sequence: Synthetic oligonucleotide
aguagcucuuguaggcuca

SEQ ID NO: 2669192 - RNA, 19 nt, Artificial Sequence
  Description of Artificial Sequence: Synthetic oligonucleotide
guacagggcuacccuggag

SEQ ID NO: 2669193 - RNA, 19 nt, Artificial Sequence
  Description of Artificial Sequence: Synthetic oligonucleotide
agccugccgccucugcagg

SEQ ID NO: 2669194 - RNA, 19 nt, Artificial Sequence
  Description of Artificial Sequence: Synthetic oligonucleotide
agggcguugcucaucucag

SEQ ID NO: 2669195 - RNA, 19 nt, Artificial Sequence
  Description of Artificial Sequence: Synthetic oligonucleotide
acgggagaacauauugugu

SEQ ID NO: 2669196 - RNA, 19 nt, Artificial Sequence
  Description of Artificial Sequence: Synthetic oligonucleotide
augucgacagcaacauaca

SEQ ID NO: 2669197 - RNA, 19 nt, Artificial Sequence
  Description of Artificial Sequence: Synthetic oligonucleotide
cucacaacacugugcaugu

SEQ ID NO: 2669198 - RNA, 19 nt, Artificial Sequence
  Description of Artificial Sequence: Synthetic oligonucleotide
caaaugguagcaaccuggu

SEQ ID NO: 2669199 - RNA, 19 nt, Artificial Sequence
  Description of Artificial Sequence: Synthetic oligonucleotide
uagcaaccuggugugcuga

SEQ ID NO: 2669200 - RNA, 19 nt, Artificial Sequence
  Description of Artificial Sequence: Synthetic oligonucleotide
uggagcaaggaguggccuu

SEQ ID NO: 2669201 - RNA, 19 nt, Artificial Sequence
  Description of Artificial Sequence: Synthetic oligonucleotide
agaacagaugaggcuccug

SEQ ID NO: 2669202 - RNA, 19 nt, Artificial Sequence
  Description of Artificial Sequence: Synthetic oligonucleotide
gguauuagcugcagcagaa

SEQ ID NO: 2669203 - RNA, 19 nt, Artificial Sequence
  Description of Artificial Sequence: Synthetic oligonucleotide
gaucaaagcuggggacagc

SEQ ID NO: 2669204 - RNA, 19 nt, Artificial Sequence
  Description of Artificial Sequence: Synthetic oligonucleotide
ucgucucuucgaccagcca

SEQ ID NO: 2669205 - RNA, 19 nt, Artificial Sequence
  Description of Artificial Sequence: Synthetic oligonucleotide
uggguacagucagaacaga

SEQ ID NO: 2669206 - RNA, 19 nt, Artificial Sequence
  Description of Artificial Sequence: Synthetic oligonucleotide
gucauguuggagaaacacu

SEQ ID NO: 2669207 - RNA, 19 nt, Artificial Sequence
  Description of Artificial Sequence: Synthetic oligonucleotide
gcuuuccacaauucuugac

SEQ ID NO: 2669208 - RNA, 19 nt, Artificial Sequence
  Description of Artificial Sequence: Synthetic oligonucleotide
gagcaaggaguggccuugg

SEQ ID NO: 2669209 - RNA, 19 nt, Artificial Sequence
  Description of Artificial Sequence: Synthetic oligonucleotide
ggucaucgucucuucgacc

SEQ ID NO: 2669210 - RNA, 19 nt, Artificial Sequence
  Description of Artificial Sequence: Synthetic oligonucleotide
uccuugaugauggcauguu

SEQ ID NO: 2669211 - RNA, 19 nt, Artificial Sequence
  Description of Artificial Sequence: Synthetic oligonucleotide
ucucuucgaccagccagca

SEQ ID NO: 2669212 - RNA, 19 nt, Artificial Sequence
  Description of Artificial Sequence: Synthetic oligonucleotide
gggucaucgucucuucgac

SEQ ID NO: 2669213 - RNA, 19 nt, Artificial Sequence
  Description of Artificial Sequence: Synthetic oligonucleotide
gugcaugugaagacaccac

SEQ ID NO: 2669214 - RNA, 19 nt, Artificial Sequence
  Description of Artificial Sequence: Synthetic oligonucleotide
accagccagcagcucuguc

SEQ ID NO: 2669215 - RNA, 19 nt, Artificial Sequence
  Description of Artificial Sequence: Synthetic oligonucleotide
ggagcaaggaguggccuug

SEQ ID NO: 2669216 - RNA, 19 nt, Artificial Sequence
  Description of Artificial Sequence: Synthetic oligonucleotide
caaaugcugagcgaucucu

SEQ ID NO: 2669217 - RNA, 19 nt, Artificial Sequence
  Description of Artificial Sequence: Synthetic oligonucleotide
cgaucucuaacaaggaaga

SEQ ID NO: 2669218 - RNA, 19 nt, Artificial Sequence
  Description of Artificial Sequence: Synthetic oligonucleotide
aggaggugccccaugcagu

SEQ ID NO: 2669219 - RNA, 19 nt, Artificial Sequence
  Description of Artificial Sequence: Synthetic oligonucleotide
cacugagguauuagcugca

SEQ ID NO: 2669220 - RNA, 19 nt, Artificial Sequence
  Description of Artificial Sequence: Synthetic oligonucleotide
cucuucgaccagccagcag

SEQ ID NO: 2669221 - RNA, 19 nt, Artificial Sequence
  Description of Artificial Sequence: Synthetic oligonucleotide
gcuugagguacaugucgac

SEQ ID NO: 2669222 - RNA, 19 nt, Artificial Sequence
  Description of Artificial Sequence: Synthetic oligonucleotide
agcaaggaguggccuugga

SEQ ID NO: 2669223 - RNA, 19 nt, Artificial Sequence
  Description of Artificial Sequence: Synthetic oligonucleotide
agcuggggacagccugccg

SEQ ID NO: 2669224 - RNA, 19 nt, Artificial Sequence
  Description of Artificial Sequence: Synthetic oligonucleotide
gagcgaucucuaacaagga

SEQ ID NO: 2669225 - RNA, 19 nt, Artificial Sequence
  Description of Artificial Sequence: Synthetic oligonucleotide
caaccuggugugcugaccu

SEQ ID NO: 2669226 - RNA, 19 nt, Artificial Sequence
  Description of Artificial Sequence: Synthetic oligonucleotide
cugucauguuggagaaaca

SEQ ID NO: 2669227 - RNA, 19 nt, Artificial Sequence
  Description of Artificial Sequence: Synthetic oligonucleotide
cagcuggugcacugagaug

SEQ ID NO: 2669228 - RNA, 19 nt, Artificial Sequence
  Description of Artificial Sequence: Synthetic oligonucleotide
cguugcucaucucaggguc

SEQ ID NO: 2669229 - RNA, 19 nt, Artificial Sequence
  Description of Artificial Sequence: Synthetic oligonucleotide
ccuugaugauggcauguuc

SEQ ID NO: 2669230 - RNA, 19 nt, Artificial Sequence
  Description of Artificial Sequence: Synthetic oligonucleotide
gggcguugcucaucucagg

SEQ ID NO: 2669231 - RNA, 19 nt, Artificial Sequence
  Description of Artificial Sequence: Synthetic oligonucleotide
acaugucgacagcaacaua

SEQ ID NO: 2669232 - RNA, 19 nt, Artificial Sequence
  Description of Artificial Sequence: Synthetic oligonucleotide
guauuagcugcagcagaaa

SEQ ID NO: 2669233 - RNA, 19 nt, Artificial Sequence
  Description of Artificial Sequence: Synthetic oligonucleotide
ugguagcaaccuggugugc

SEQ ID NO: 2669234 - RNA, 19 nt, Artificial Sequence
  Description of Artificial Sequence: Synthetic oligonucleotide
ccugggagagaucaaagcu

SEQ ID NO: 2669235 - RNA, 19 nt, Artificial Sequence
  Description of Artificial Sequence: Synthetic oligonucleotide
cccuggagcaaggaguggc

SEQ ID NO: 2669236 - RNA, 19 nt, Artificial Sequence
  Description of Artificial Sequence: Synthetic oligonucleotide
agguacaugucgacagcaa

SEQ ID NO: 2669237 - RNA, 19 nt, Artificial Sequence
  Description of Artificial Sequence: Synthetic oligonucleotide
gaggugccccaugcaguag

SEQ ID NO: 2669238 - RNA, 19 nt, Artificial Sequence
  Description of Artificial Sequence: Synthetic oligonucleotide
caucagcuugagguacaug

SEQ ID NO: 2669239 - RNA, 19 nt, Artificial Sequence
  Description of Artificial Sequence: Synthetic oligonucleotide
guagcucuuguaggcucac

SEQ ID NO: 2669240 - RNA, 19 nt, Artificial Sequence
  Description of Artificial Sequence: Synthetic oligonucleotide
cauguuggagaaacacuuu

SEQ ID NO: 2669241 - RNA, 19 nt, Artificial Sequence
  Description of Artificial Sequence: Synthetic oligonucleotide
ggugagacgggagaacaua

SEQ ID NO: 2669242 - RNA, 19 nt, Artificial Sequence
  Description of Artificial Sequence: Synthetic oligonucleotide
gugugccaacaaaugcuga

SEQ ID NO: 2669243 - RNA, 19 nt, Artificial Sequence
  Description of Artificial Sequence: Synthetic oligonucleotide
gggagagaucaaagcuggg

SEQ ID NO: 2669244 - RNA, 19 nt, Artificial Sequence
  Description of Artificial Sequence: Synthetic oligonucleotide
gcugagcgaucucuaacaa

SEQ ID NO: 2669245 - RNA, 19 nt, Artificial Sequence
  Description of Artificial Sequence: Synthetic oligonucleotide
ucugggcacugagguauua

SEQ ID NO: 2669246 - RNA, 19 nt, Artificial Sequence
  Description of Artificial Sequence: Synthetic oligonucleotide
guuccgagcugagcagcac

SEQ ID NO: 2669247 - RNA, 19 nt, Artificial Sequence
  Description of Artificial Sequence: Synthetic oligonucleotide
caaagagcugcaucagcuu

SEQ ID NO: 2669248 - RNA, 19 nt, Artificial Sequence
  Description of Artificial Sequence: Synthetic oligonucleotide
cuucgaccagccagcagcu

SEQ ID NO: 2669249 - RNA, 19 nt, Artificial Sequence
  Description of Artificial Sequence: Synthetic oligonucleotide
gaaaagccucuuccuugau

SEQ ID NO: 2669250 - RNA, 19 nt, Artificial Sequence
  Description of Artificial Sequence: Synthetic oligonucleotide
cagcacaggguggcugggc

SEQ ID NO: 2669251 - RNA, 19 nt, Artificial Sequence
  Description of Artificial Sequence: Synthetic oligonucleotide
aggugagacgggagaacau

SEQ ID NO: 2669252 - RNA, 19 nt, Artificial Sequence
  Description of Artificial Sequence: Synthetic oligonucleotide
gugagacgggagaacauau

SEQ ID NO: 2669253 - RNA, 19 nt, Artificial Sequence
  Description of Artificial Sequence: Synthetic oligonucleotide
gcuggugcacugagauggg

SEQ ID NO: 2669254 - RNA, 19 nt, Artificial Sequence
  Description of Artificial Sequence: Synthetic oligonucleotide
ccaacaaaugcugagcgau

SEQ ID NO: 2669255 - RNA, 19 nt, Artificial Sequence
  Description of Artificial Sequence: Synthetic oligonucleotide
cucaucucagggucaucgu

SEQ ID NO: 2669256 - RNA, 19 nt, Artificial Sequence
  Description of Artificial Sequence: Synthetic oligonucleotide
gguagcaaccuggugugcu

SEQ ID NO: 2669257 - RNA, 19 nt, Artificial Sequence
  Description of Artificial Sequence: Synthetic oligonucleotide
cacaaaggugccagcuggu

SEQ ID NO: 2669258 - RNA, 19 nt, Artificial Sequence
  Description of Artificial Sequence: Synthetic oligonucleotide
ggaggaggugccccaugca

SEQ ID NO: 2669259 - RNA, 19 nt, Artificial Sequence
  Description of Artificial Sequence: Synthetic oligonucleotide
uucgaccagccagcagcuc

SEQ ID NO: 2669260 - RNA, 19 nt, Artificial Sequence
  Description of Artificial Sequence: Synthetic oligonucleotide
gcuccugggagagaucaaa

SEQ ID NO: 2669261 - RNA, 19 nt, Artificial Sequence
  Description of Artificial Sequence: Synthetic oligonucleotide
caggagggcguugcucauc

SEQ ID NO: 2669262 - RNA, 19 nt, Artificial Sequence
  Description of Artificial Sequence: Synthetic oligonucleotide
ugcucaucucagggucauc

SEQ ID NO: 2669263 - RNA, 19 nt, Artificial Sequence
  Description of Artificial Sequence: Synthetic oligonucleotide
gggcacugagguauuagcu

SEQ ID NO: 2669264 - RNA, 19 nt, Artificial Sequence
  Description of Artificial Sequence: Synthetic oligonucleotide
cauacaggaaaagccucuu

SEQ ID NO: 2669265 - RNA, 19 nt, Artificial Sequence
  Description of Artificial Sequence: Synthetic oligonucleotide
ccagcuggugcacugagau

SEQ ID NO: 2669266 - RNA, 19 nt, Artificial Sequence
  Description of Artificial Sequence: Synthetic oligonucleotide
cgugcuucuguuaucaguu

SEQ ID NO: 2669267 - RNA, 19 nt, Artificial Sequence
  Description of Artificial Sequence: Synthetic oligonucleotide
guucugugcuuuccacaau

SEQ ID NO: 2669268 - RNA, 19 nt, Artificial Sequence
  Description of Artificial Sequence: Synthetic oligonucleotide
gaggcuccugggagagauc

SEQ ID NO: 2669269 - RNA, 19 nt, Artificial Sequence
  Description of Artificial Sequence: Synthetic oligonucleotide
aggugccagcuggugcacu

SEQ ID NO: 2669270 - RNA, 19 nt, Artificial Sequence
  Description of Artificial Sequence: Synthetic oligonucleotide
ggaagacaguuucuuucuu

SEQ ID NO: 2669271 - RNA, 19 nt, Artificial Sequence
  Description of Artificial Sequence: Synthetic oligonucleotide
ccacacagcuucaagcaau

SEQ ID NO: 2669272 - RNA, 19 nt, Artificial Sequence
  Description of Artificial Sequence: Synthetic oligonucleotide
ccaugcaguagcucuugua

SEQ ID NO: 2669273 - RNA, 19 nt, Artificial Sequence
  Description of Artificial Sequence: Synthetic oligonucleotide
ggguacagucagaacagau

SEQ ID NO: 2669274 - RNA, 19 nt, Artificial Sequence
  Description of Artificial Sequence: Synthetic oligonucleotide
augaggcuccugggagaga

SEQ ID NO: 2669275 - RNA, 19 nt, Artificial Sequence
  Description of Artificial Sequence: Synthetic oligonucleotide
ccgagcugagcagcacagg

SEQ ID NO: 2669276 - RNA, 19 nt, Artificial Sequence
  Description of Artificial Sequence: Synthetic oligonucleotide
ggggacagccugccgccuc

SEQ ID NO: 2669277 - RNA, 19 nt, Artificial Sequence
  Description of Artificial Sequence: Synthetic oligonucleotide
gcguugcucaucucagggu

SEQ ID NO: 2669278 - RNA, 19 nt, Artificial Sequence
  Description of Artificial Sequence: Synthetic oligonucleotide
gggcuacccuggagcaagg

SEQ ID NO: 2669279 - RNA, 19 nt, Artificial Sequence
  Description of Artificial Sequence: Synthetic oligonucleotide
caucuacaaagagcugcau

SEQ ID NO: 2669280 - RNA, 19 nt, Artificial Sequence
  Description of Artificial Sequence: Synthetic oligonucleotide
ggcuacccuggagcaagga

SEQ ID NO: 2669281 - RNA, 19 nt, Artificial Sequence
  Description of Artificial Sequence: Synthetic oligonucleotide
cagggcuacccuggagcaa

SEQ ID NO: 2669282 - RNA, 19 nt, Artificial Sequence
  Description of Artificial Sequence: Synthetic oligonucleotide
ggaguggccuuggagcuuu

SEQ ID NO: 2669283 - RNA, 19 nt, Artificial Sequence
  Description of Artificial Sequence: Synthetic oligonucleotide
gaccagccagcagcucugu

SEQ ID NO: 2669284 - RNA, 19 nt, Artificial Sequence
  Description of Artificial Sequence: Synthetic oligonucleotide
gccagcuggugcacugaga

SEQ ID NO: 2669285 - RNA, 19 nt, Artificial Sequence
  Description of Artificial Sequence: Synthetic oligonucleotide
ggagggcguugcucaucuc

SEQ ID NO: 2669286 - RNA, 19 nt, Artificial Sequence
  Description of Artificial Sequence: Synthetic oligonucleotide
ggugccccaugcaguagcu

SEQ ID NO: 2669287 - RNA, 19 nt, Artificial Sequence
  Description of Artificial Sequence: Synthetic oligonucleotide
ggcucacaacacugugcau

SEQ ID NO: 2669288 - RNA, 19 nt, Artificial Sequence
  Description of Artificial Sequence: Synthetic oligonucleotide
ggcuccugggagagaucaa

SEQ ID NO: 2669289 - RNA, 19 nt, Artificial Sequence
  Description of Artificial Sequence: Synthetic oligonucleotide
gcacugagauggguacagu

SEQ ID NO: 2669290 - RNA, 19 nt, Artificial Sequence
  Description of Artificial Sequence: Synthetic oligonucleotide
gcaggagggcguugcucau

SEQ ID NO: 2669291 - RNA, 19 nt, Artificial Sequence
  Description of Artificial Sequence: Synthetic oligonucleotide
cccaugcaguagcucuugu

SEQ ID NO: 2669292 - RNA, 19 nt, Artificial Sequence
  Description of Artificial Sequence: Synthetic oligonucleotide
aaauauuucacuuugaguc

SEQ ID NO: 2669293 - RNA, 19 nt, Artificial Sequence
  Description of Artificial Sequence: Synthetic oligonucleotide
aaagacacacacuacacac

SEQ ID NO: 2669294 - RNA, 19 nt, Artificial Sequence
  Description of Artificial Sequence: Synthetic oligonucleotide
aaucccaucaagcacagag

SEQ ID NO: 2669295 - RNA, 19 nt, Artificial Sequence
  Description of Artificial Sequence: Synthetic oligonucleotide
uacacaaacacuacgauca

SEQ ID NO: 2669296 - RNA, 19 nt, Artificial Sequence
  Description of Artificial Sequence: Synthetic oligonucleotide
aacaaaucccaucaagcac

SEQ ID NO: 2669297 - RNA, 19 nt, Artificial Sequence
  Description of Artificial Sequence: Synthetic oligonucleotide
uuugucaagucaaagacca

SEQ ID NO: 2669298 - RNA, 19 nt, Artificial Sequence
  Description of Artificial Sequence: Synthetic oligonucleotide
ucuuagaaaguugugagcg

SEQ ID NO: 2669299 - RNA, 19 nt, Artificial Sequence
  Description of Artificial Sequence: Synthetic oligonucleotide
aaagcuggaauggaggugc

SEQ ID NO: 2669300 - RNA, 19 nt, Artificial Sequence
  Description of Artificial Sequence: Synthetic oligonucleotide
cuuugcuagaugaugaugg

SEQ ID NO: 2669301 - RNA, 19 nt, Artificial Sequence
  Description of Artificial Sequence: Synthetic oligonucleotide
uauguugcaggaauggagg

SEQ ID NO: 2669302 - RNA, 19 nt, Artificial Sequence
  Description of Artificial Sequence: Synthetic oligonucleotide
acuacacacacacacacac

SEQ ID NO: 2669303 - RNA, 19 nt, Artificial Sequence
  Description of Artificial Sequence: Synthetic oligonucleotide
acuuugagucaacaaaucc

SEQ ID NO: 2669304 - RNA, 19 nt, Artificial Sequence
  Description of Artificial Sequence: Synthetic oligonucleotide
gauuccaacagccucaccc

SEQ ID NO: 2669305 - RNA, 19 nt, Artificial Sequence
  Description of Artificial Sequence: Synthetic oligonucleotide
ucaacaaaucccaucaagc

SEQ ID NO: 2669306 - RNA, 19 nt, Artificial Sequence
  Description of Artificial Sequence: Synthetic oligonucleotide
aaaaguauguugcaggaau

SEQ ID NO: 2669307 - RNA, 19 nt, Artificial Sequence
  Description of Artificial Sequence: Synthetic oligonucleotide
aaaguugugagcgaacggg

SEQ ID NO: 2669308 - RNA, 19 nt, Artificial Sequence
  Description of Artificial Sequence: Synthetic oligonucleotide
acacacuacacacacacac

SEQ ID NO: 2669309 - RNA, 19 nt, Artificial Sequence
  Description of Artificial Sequence: Synthetic oligonucleotide
acacacacuacacacacac

SEQ ID NO: 2669310 - RNA, 19 nt, Artificial Sequence
  Description of Artificial Sequence: Synthetic oligonucleotide
uuugagucaacaaauccca

SEQ ID NO: 2669311 - RNA, 19 nt, Artificial Sequence
  Description of Artificial Sequence: Synthetic oligonucleotide
cuuugagucaacaaauccc

SEQ ID NO: 2669312 - RNA, 19 nt, Artificial Sequence
  Description of Artificial Sequence: Synthetic oligonucleotide
aauauuucacuuugaguca

SEQ ID NO: 2669313 - RNA, 19 nt, Artificial Sequence
  Description of Artificial Sequence: Synthetic oligonucleotide
aggaaaaguauguugcagg

SEQ ID NO: 2669314 - RNA, 19 nt, Artificial Sequence
  Description of Artificial Sequence: Synthetic oligonucleotide
uucacuuugagucaacaaa

SEQ ID NO: 2669315 - RNA, 19 nt, Artificial Sequence
  Description of Artificial Sequence: Synthetic oligonucleotide
agaagaugggcacuccucc

SEQ ID NO: 2669316 - RNA, 19 nt, Artificial Sequence
  Description of Artificial Sequence: Synthetic oligonucleotide
caaagaccagagaagaugg

SEQ ID NO: 2669317 - RNA, 19 nt, Artificial Sequence
  Description of Artificial Sequence: Synthetic oligonucleotide
aacacuacgaucaggagca

SEQ ID NO: 2669318 - RNA, 19 nt, Artificial Sequence
  Description of Artificial Sequence: Synthetic oligonucleotide
uuuugucaagucaaagacc

SEQ ID NO: 2669319 - RNA, 19 nt, Artificial Sequence
  Description of Artificial Sequence: Synthetic oligonucleotide
agacacacacuacacacac

SEQ ID NO: 2669320 - RNA, 19 nt, Artificial Sequence
  Description of Artificial Sequence: Synthetic oligonucleotide
aaaagacacacacuacaca

SEQ ID NO: 2669321 - RNA, 19 nt, Artificial Sequence
  Description of Artificial Sequence: Synthetic oligonucleotide
acacuacacacacacacac

SEQ ID NO: 2669322 - RNA, 19 nt, Artificial Sequence
  Description of Artificial Sequence: Synthetic oligonucleotide
aagacuauuaucuccuuua

SEQ ID NO: 2669323 - RNA, 19 nt, Artificial Sequence
  Description of Artificial Sequence: Synthetic oligonucleotide
uacacacacacacacacac

SEQ ID NO: 2669324 - RNA, 19 nt, Artificial Sequence
  Description of Artificial Sequence: Synthetic oligonucleotide
ucaaagaccagagaagaug

SEQ ID NO: 2669325 - RNA, 19 nt, Artificial Sequence
  Description of Artificial Sequence: Synthetic oligonucleotide
aaugcuguccucuuagaaa

SEQ ID NO: 2669326 - RNA, 19 nt, Artificial Sequence
  Description of Artificial Sequence: Synthetic oligonucleotide
agaaaugcuguccucuuag

SEQ ID NO: 2669327 - RNA, 19 nt, Artificial Sequence
  Description of Artificial Sequence: Synthetic oligonucleotide
aaguauguugcaggaaugg

SEQ ID NO: 2669328 - RNA, 19 nt, Artificial Sequence
  Description of Artificial Sequence: Synthetic oligonucleotide
ugcuagaugaugaugggaa

SEQ ID NO: 2669329 - RNA, 19 nt, Artificial Sequence
  Description of Artificial Sequence: Synthetic oligonucleotide
gagucaacaaaucccauca

SEQ ID NO: 2669330 - RNA, 19 nt, Artificial Sequence
  Description of Artificial Sequence: Synthetic oligonucleotide
aauggagggagggugggac

SEQ ID NO: 2669331 - RNA, 19 nt, Artificial Sequence
  Description of Artificial Sequence: Synthetic oligonucleotide
aggaccacaauccucuguc

SEQ ID NO: 2669332 - RNA, 19 nt, Artificial Sequence
  Description of Artificial Sequence: Synthetic oligonucleotide
uuugcuagaugaugauggg

SEQ ID NO: 2669333 - RNA, 19 nt, Artificial Sequence
  Description of Artificial Sequence: Synthetic oligonucleotide
gaugaugggaagaugugcc

SEQ ID NO: 2669334 - RNA, 19 nt, Artificial Sequence
  Description of Artificial Sequence: Synthetic oligonucleotide
ucacuuugagucaacaaau

SEQ ID NO: 2669335 - RNA, 19 nt, Artificial Sequence
  Description of Artificial Sequence: Synthetic oligonucleotide
uuggaugucuccuucuuug

SEQ ID NO: 2669336 - RNA, 19 nt, Artificial Sequence
  Description of Artificial Sequence: Synthetic oligonucleotide
cacacacacacacacaccc

SEQ ID NO: 2669337 - RNA, 19 nt, Artificial Sequence
  Description of Artificial Sequence: Synthetic oligonucleotide
agaaaguugugagcgaacg

SEQ ID NO: 2669338 - RNA, 19 nt, Artificial Sequence
  Description of Artificial Sequence: Synthetic oligonucleotide
gaaaguugugagcgaacgg

SEQ ID NO: 2669339 - RNA, 19 nt, Artificial Sequence
  Description of Artificial Sequence: Synthetic oligonucleotide
ggaagaugugcccagagag

SEQ ID NO: 2669340 - RNA, 19 nt, Artificial Sequence
  Description of Artificial Sequence: Synthetic oligonucleotide
accguagugaucugcugcc

SEQ ID NO: 2669341 - RNA, 19 nt, Artificial Sequence
  Description of Artificial Sequence: Synthetic oligonucleotide
gucaacaaaucccaucaag

SEQ ID NO: 2669342 - RNA, 19 nt, Artificial Sequence
  Description of Artificial Sequence: Synthetic oligonucleotide
aagucaaagaccagagaag

SEQ ID NO: 2669343 - RNA, 19 nt, Artificial Sequence
  Description of Artificial Sequence: Synthetic oligonucleotide
cucugcagaggaaagcugg

SEQ ID NO: 2669344 - RNA, 19 nt, Artificial Sequence
  Description of Artificial Sequence: Synthetic oligonucleotide
cacauacacaaacacuacg

SEQ ID NO: 2669345 - RNA, 19 nt, Artificial Sequence
  Description of Artificial Sequence: Synthetic oligonucleotide
aggucuuggaggaaggacc

SEQ ID NO: 2669346 - RNA, 19 nt, Artificial Sequence
  Description of Artificial Sequence: Synthetic oligonucleotide
augaugggaagaugugccc

SEQ ID NO: 2669347 - RNA, 19 nt, Artificial Sequence
  Description of Artificial Sequence: Synthetic oligonucleotide
uauuaucuccuuuauucaa

SEQ ID NO: 2669348 - RNA, 19 nt, Artificial Sequence
  Description of Artificial Sequence: Synthetic oligonucleotide
aaaugcuguccucuuagaa

SEQ ID NO: 2669349 - RNA, 19 nt, Artificial Sequence
  Description of Artificial Sequence: Synthetic oligonucleotide
caagucaaagaccagagaa

SEQ ID NO: 2669350 - RNA, 19 nt, Artificial Sequence
  Description of Artificial Sequence: Synthetic oligonucleotide
acaaacacuacgaucagga

SEQ ID NO: 2669351 - RNA, 19 nt, Artificial Sequence
  Description of Artificial Sequence: Synthetic oligonucleotide
gaaaagacacacacuacac

SEQ ID NO: 2669352 - RNA, 19 nt, Artificial Sequence
  Description of Artificial Sequence: Synthetic oligonucleotide
ugucaagucaaagaccaga

SEQ ID NO: 2669353 - RNA, 19 nt, Artificial Sequence
  Description of Artificial Sequence: Synthetic oligonucleotide
cacacacacacacacacac

SEQ ID NO: 2669354 - RNA, 19 nt, Artificial Sequence
  Description of Artificial Sequence: Synthetic oligonucleotide
uccucuuagaaaguuguga

SEQ ID NO: 2669355 - RNA, 19 nt, Artificial Sequence
  Description of Artificial Sequence: Synthetic oligonucleotide
ugaugaugggaagaugugc

SEQ ID NO: 2669356 - RNA, 19 nt, Artificial Sequence
  Description of Artificial Sequence: Synthetic oligonucleotide
caauccucuguccaggcag

SEQ ID NO: 2669357 - RNA, 19 nt, Artificial Sequence
  Description of Artificial Sequence: Synthetic oligonucleotide
guauguugcaggaauggag

SEQ ID NO: 2669358 - RNA, 19 nt, Artificial Sequence
  Description of Artificial Sequence: Synthetic oligonucleotide
agucaaagaccagagaaga

SEQ ID NO: 2669359 - RNA, 19 nt, Artificial Sequence
  Description of Artificial Sequence: Synthetic oligonucleotide
acaaaucccaucaagcaca

SEQ ID NO: 2669360 - RNA, 19 nt, Artificial Sequence
  Description of Artificial Sequence: Synthetic oligonucleotide
gaagaugugcccagagagg

SEQ ID NO: 2669361 - RNA, 19 nt, Artificial Sequence
  Description of Artificial Sequence: Synthetic oligonucleotide
ucccaucaagcacagagaa

SEQ ID NO: 2669362 - RNA, 19 nt, Artificial Sequence
  Description of Artificial Sequence: Synthetic oligonucleotide
auuguaggcgucucugcag

SEQ ID NO: 2669363 - RNA, 19 nt, Artificial Sequence
  Description of Artificial Sequence: Synthetic oligonucleotide
aaaguauguugcaggaaug

SEQ ID NO: 2669364 - RNA, 19 nt, Artificial Sequence
  Description of Artificial Sequence: Synthetic oligonucleotide
ugagucaacaaaucccauc

SEQ ID NO: 2669365 - RNA, 19 nt, Artificial Sequence
  Description of Artificial Sequence: Synthetic oligonucleotide
agcaccaccguagugaucu

SEQ ID NO: 2669366 - RNA, 19 nt, Artificial Sequence
  Description of Artificial Sequence: Synthetic oligonucleotide
ggaaaagacacacacuaca

SEQ ID NO: 2669367 - RNA, 19 nt, Artificial Sequence
  Description of Artificial Sequence: Synthetic oligonucleotide
gaugggaagaugugcccag

SEQ ID NO: 2669368 - RNA, 19 nt, Artificial Sequence
  Description of Artificial Sequence: Synthetic oligonucleotide
ucaagucaaagaccagaga

SEQ ID NO: 2669369 - RNA, 19 nt, Artificial Sequence
  Description of Artificial Sequence: Synthetic oligonucleotide
guugcaggaauggagggag

SEQ ID NO: 2669370 - RNA, 19 nt, Artificial Sequence
  Description of Artificial Sequence: Synthetic oligonucleotide
uuagaaaguugugagcgaa

SEQ ID NO: 2669371 - RNA, 19 nt, Artificial Sequence
  Description of Artificial Sequence: Synthetic oligonucleotide
agaagaaaugcuguccucu

SEQ ID NO: 2669372 - RNA, 19 nt, Artificial Sequence
  Description of Artificial Sequence: Synthetic oligonucleotide
gaugaugaugggaagaugu

SEQ ID NO: 2669373 - RNA, 19 nt, Artificial Sequence
  Description of Artificial Sequence: Synthetic oligonucleotide
cuuucccuugagcugacgc

SEQ ID NO: 2669374 - RNA, 19 nt, Artificial Sequence
  Description of Artificial Sequence: Synthetic oligonucleotide
caacaaaucccaucaagca

SEQ ID NO: 2669375 - RNA, 19 nt, Artificial Sequence
  Description of Artificial Sequence: Synthetic oligonucleotide
uggaugucuccuucuuugg

SEQ ID NO: 2669376 - RNA, 19 nt, Artificial Sequence
  Description of Artificial Sequence: Synthetic oligonucleotide
auguugcaggaauggaggg

SEQ ID NO: 2669377 - RNA, 19 nt, Artificial Sequence
  Description of Artificial Sequence: Synthetic oligonucleotide
gacugauuccaacagccuc

SEQ ID NO: 2669378 - RNA, 19 nt, Artificial Sequence
  Description of Artificial Sequence: Synthetic oligonucleotide
uuucccuugagcugacgca

SEQ ID NO: 2669379 - RNA, 19 nt, Artificial Sequence
  Description of Artificial Sequence: Synthetic oligonucleotide
guagugaucugcugccggg

SEQ ID NO: 2669380 - RNA, 19 nt, Artificial Sequence
  Description of Artificial Sequence: Synthetic oligonucleotide
caucuuugcuagaugauga

SEQ ID NO: 2669381 - RNA, 19 nt, Artificial Sequence
  Description of Artificial Sequence: Synthetic oligonucleotide
gucaagucaaagaccagag

SEQ ID NO: 2669382 - RNA, 19 nt, Artificial Sequence
  Description of Artificial Sequence: Synthetic oligonucleotide
acgcaucuuugcuagauga

SEQ ID NO: 2669383 - RNA, 19 nt, Artificial Sequence
  Description of Artificial Sequence: Synthetic oligonucleotide
uaggcgucucugcagagga

SEQ ID NO: 2669384 - RNA, 19 nt, Artificial Sequence
  Description of Artificial Sequence: Synthetic oligonucleotide
ugcagaggaaagcuggaau

SEQ ID NO: 2669385 - RNA, 19 nt, Artificial Sequence
  Description of Artificial Sequence: Synthetic oligonucleotide
accacaauccucuguccag

SEQ ID NO: 2669386 - RNA, 19 nt, Artificial Sequence
  Description of Artificial Sequence: Synthetic oligonucleotide
uuguaggcgucucugcaga

SEQ ID NO: 2669387 - RNA, 19 nt, Artificial Sequence
  Description of Artificial Sequence: Synthetic oligonucleotide
ucuuugcuagaugaugaug

SEQ ID NO: 2669388 - RNA, 19 nt, Artificial Sequence
  Description of Artificial Sequence: Synthetic oligonucleotide
uggccacauacacaaacac

SEQ ID NO: 2669389 - RNA, 19 nt, Artificial Sequence
  Description of Artificial Sequence: Synthetic oligonucleotide
ugagcgaacgggagcagga

SEQ ID NO: 2669390 - RNA, 19 nt, Artificial Sequence
  Description of Artificial Sequence: Synthetic oligonucleotide
uaagacuauuaucuccuuu

SEQ ID NO: 2669391 - RNA, 19 nt, Artificial Sequence
  Description of Artificial Sequence: Synthetic oligonucleotide
uacgaucaggagcaccacc

SEQ ID NO: 2669392 - RNA, 19 nt, Artificial Sequence
  Description of Artificial Sequence: Synthetic oligonucleotide
uugagcugacgcaucuuug

SEQ ID NO: 2669393 - RNA, 19 nt, Artificial Sequence
  Description of Artificial Sequence: Synthetic oligonucleotide
ugggaagaugugcccagag

SEQ ID NO: 2669394 - RNA, 19 nt, Artificial Sequence
  Description of Artificial Sequence: Synthetic oligonucleotide
ugggacugauuccaacagc

SEQ ID NO: 2669395 - RNA, 19 nt, Artificial Sequence
  Description of Artificial Sequence: Synthetic oligonucleotide
acuacgaucaggagcacca

SEQ ID NO: 2669396 - RNA, 19 nt, Artificial Sequence
  Description of Artificial Sequence: Synthetic oligonucleotide
guugugagcgaacgggagc

SEQ ID NO: 2669397 - RNA, 19 nt, Artificial Sequence
  Description of Artificial Sequence: Synthetic oligonucleotide
caccguagugaucugcugc

SEQ ID NO: 2669398 - RNA, 19 nt, Artificial Sequence
  Description of Artificial Sequence: Synthetic oligonucleotide
ccucuuagaaaguugugag

SEQ ID NO: 2669399 - RNA, 19 nt, Artificial Sequence
  Description of Artificial Sequence: Synthetic oligonucleotide
uagaaaguugugagcgaac

SEQ ID NO: 2669400 - RNA, 19 nt, Artificial Sequence
  Description of Artificial Sequence: Synthetic oligonucleotide
uugugagcgaacgggagca

SEQ ID NO: 2669401 - RNA, 19 nt, Artificial Sequence
  Description of Artificial Sequence: Synthetic oligonucleotide
ucucugcagaggaaagcug

SEQ ID NO: 2669402 - RNA, 19 nt, Artificial Sequence
  Description of Artificial Sequence: Synthetic oligonucleotide
gugggacugauuccaacag

SEQ ID NO: 2669403 - RNA, 19 nt, Artificial Sequence
  Description of Artificial Sequence: Synthetic oligonucleotide
ucuuggaggaaggaccaca

SEQ ID NO: 2669404 - RNA, 19 nt, Artificial Sequence
  Description of Artificial Sequence: Synthetic oligonucleotide
aauccucuguccaggcagg

SEQ ID NO: 2669405 - RNA, 19 nt, Artificial Sequence
  Description of Artificial Sequence: Synthetic oligonucleotide
ucugcagaggaaagcugga

SEQ ID NO: 2669406 - RNA, 19 nt, Artificial Sequence
  Description of Artificial Sequence: Synthetic oligonucleotide
aacgggagcaggaaaagua

SEQ ID NO: 2669407 - RNA, 19 nt, Artificial Sequence
  Description of Artificial Sequence: Synthetic oligonucleotide
agagaagaugggcacuccu

SEQ ID NO: 2669408 - RNA, 19 nt, Artificial Sequence
  Description of Artificial Sequence: Synthetic oligonucleotide
aagaaaugcuguccucuua

SEQ ID NO: 2669409 - RNA, 19 nt, Artificial Sequence
  Description of Artificial Sequence: Synthetic oligonucleotide
caggaaaaguauguugcag

SEQ ID NO: 2669410 - RNA, 19 nt, Artificial Sequence
  Description of Artificial Sequence: Synthetic oligonucleotide
gcugacgcaucuuugcuag

SEQ ID NO: 2669411 - RNA, 19 nt, Artificial Sequence
  Description of Artificial Sequence: Synthetic oligonucleotide
ugaugggaagaugugccca

SEQ ID NO: 2669412 - RNA, 19 nt, Artificial Sequence
  Description of Artificial Sequence: Synthetic oligonucleotide
gccucuuuacuucaaauuc

SEQ ID NO: 2669413 - RNA, 19 nt, Artificial Sequence
  Description of Artificial Sequence: Synthetic oligonucleotide
gcagaggaaagcuggaaug

SEQ ID NO: 2669414 - RNA, 19 nt, Artificial Sequence
  Description of Artificial Sequence: Synthetic oligonucleotide
uugucaagucaaagaccag

SEQ ID NO: 2669415 - RNA, 19 nt, Artificial Sequence
  Description of Artificial Sequence: Synthetic oligonucleotide
ucuuuggcuuucccuugag

SEQ ID NO: 2669416 - RNA, 19 nt, Artificial Sequence
  Description of Artificial Sequence: Synthetic oligonucleotide
cacuuugagucaacaaauc

SEQ ID NO: 2669417 - RNA, 19 nt, Artificial Sequence
  Description of Artificial Sequence: Synthetic oligonucleotide
uggaggugcucacucggug

SEQ ID NO: 2669418 - RNA, 19 nt, Artificial Sequence
  Description of Artificial Sequence: Synthetic oligonucleotide
acacaaacacuacgaucag

SEQ ID NO: 2669419 - RNA, 19 nt, Artificial Sequence
  Description of Artificial Sequence: Synthetic oligonucleotide
agcacagagaagaaaugcu

SEQ ID NO: 2669420 - RNA, 19 nt, Artificial Sequence
  Description of Artificial Sequence: Synthetic oligonucleotide
caaaucccaucaagcacag

SEQ ID NO: 2669421 - RNA, 19 nt, Artificial Sequence
  Description of Artificial Sequence: Synthetic oligonucleotide
uauuucacuuugagucaac

SEQ ID NO: 2669422 - RNA, 19 nt, Artificial Sequence
  Description of Artificial Sequence: Synthetic oligonucleotide
agacuauuaucuccuuuau

SEQ ID NO: 2669423 - RNA, 19 nt, Artificial Sequence
  Description of Artificial Sequence: Synthetic oligonucleotide
accaccacggccagggugg

SEQ ID NO: 2669424 - RNA, 19 nt, Artificial Sequence
  Description of Artificial Sequence: Synthetic oligonucleotide
aaguugugagcgaacggga

SEQ ID NO: 2669425 - RNA, 19 nt, Artificial Sequence
  Description of Artificial Sequence: Synthetic oligonucleotide
uguugcaggaauggaggga

SEQ ID NO: 2669426 - RNA, 19 nt, Artificial Sequence
  Description of Artificial Sequence: Synthetic oligonucleotide
agaccagagaagaugggca

SEQ ID NO: 2669427 - RNA, 19 nt, Artificial Sequence
  Description of Artificial Sequence: Synthetic oligonucleotide
gaccacaauccucugucca

SEQ ID NO: 2669428 - RNA, 19 nt, Artificial Sequence
  Description of Artificial Sequence: Synthetic oligonucleotide
gggacugauuccaacagcc

SEQ ID NO: 2669429 - RNA, 19 nt, Artificial Sequence
  Description of Artificial Sequence: Synthetic oligonucleotide
aguauguugcaggaaugga

SEQ ID NO: 2669430 - RNA, 19 nt, Artificial Sequence
  Description of Artificial Sequence: Synthetic oligonucleotide
acacacacacacacacacc

SEQ ID NO: 2669431 - RNA, 19 nt, Artificial Sequence
  Description of Artificial Sequence: Synthetic oligonucleotide
auuucacuuugagucaaca

SEQ ID NO: 2669432 - RNA, 19 nt, Artificial Sequence
  Description of Artificial Sequence: Synthetic oligonucleotide
uugcuagaugaugauggga

SEQ ID NO: 2669433 - RNA, 19 nt, Artificial Sequence
  Description of Artificial Sequence: Synthetic oligonucleotide
cucacucggugacuguggg

SEQ ID NO: 2669434 - RNA, 19 nt, Artificial Sequence
  Description of Artificial Sequence: Synthetic oligonucleotide
cacaaacacuacgaucagg

SEQ ID NO: 2669435 - RNA, 19 nt, Artificial Sequence
  Description of Artificial Sequence: Synthetic oligonucleotide
cuguccucuuagaaaguug

SEQ ID NO: 2669436 - RNA, 19 nt, Artificial Sequence
  Description of Artificial Sequence: Synthetic oligonucleotide
uugcaggaauggagggagg

SEQ ID NO: 2669437 - RNA, 19 nt, Artificial Sequence
  Description of Artificial Sequence: Synthetic oligonucleotide
ucacucggugacugugggg

SEQ ID NO: 2669438 - RNA, 19 nt, Artificial Sequence
  Description of Artificial Sequence: Synthetic oligonucleotide
aggaaggaccacaauccuc

SEQ ID NO: 2669439 - RNA, 19 nt, Artificial Sequence
  Description of Artificial Sequence: Synthetic oligonucleotide
acacacacacacacacccc

SEQ ID NO: 2669440 - RNA, 19 nt, Artificial Sequence
  Description of Artificial Sequence: Synthetic oligonucleotide
cuuagaaaguugugagcga

SEQ ID NO: 2669441 - RNA, 19 nt, Artificial Sequence
  Description of Artificial Sequence: Synthetic oligonucleotide
cuagaugaugaugggaaga

SEQ ID NO: 2669442 - RNA, 19 nt, Artificial Sequence
  Description of Artificial Sequence: Synthetic oligonucleotide
auauuucacuuugagucaa

SEQ ID NO: 2669443 - RNA, 19 nt, Artificial Sequence
  Description of Artificial Sequence: Synthetic oligonucleotide
uguaggcgucucugcagag

SEQ ID NO: 2669444 - RNA, 19 nt, Artificial Sequence
  Description of Artificial Sequence: Synthetic oligonucleotide
agagaggccucugcucccc

SEQ ID NO: 2669445 - RNA, 19 nt, Artificial Sequence
  Description of Artificial Sequence: Synthetic oligonucleotide
aucuuugcuagaugaugau

SEQ ID NO: 2669446 - RNA, 19 nt, Artificial Sequence
  Description of Artificial Sequence: Synthetic oligonucleotide
uugagucaacaaaucccau

SEQ ID NO: 2669447 - RNA, 19 nt, Artificial Sequence
  Description of Artificial Sequence: Synthetic oligonucleotide
gaggugcucacucggugac

SEQ ID NO: 2669448 - RNA, 19 nt, Artificial Sequence
  Description of Artificial Sequence: Synthetic oligonucleotide
aguugugagcgaacgggag

SEQ ID NO: 2669449 - RNA, 19 nt, Artificial Sequence
  Description of Artificial Sequence: Synthetic oligonucleotide
cacaauccucuguccaggc

SEQ ID NO: 2669450 - RNA, 19 nt, Artificial Sequence
  Description of Artificial Sequence: Synthetic oligonucleotide
gagaagaugggcacuccuc

SEQ ID NO: 2669451 - RNA, 19 nt, Artificial Sequence
  Description of Artificial Sequence: Synthetic oligonucleotide
acgaucaggagcaccacca

SEQ ID NO: 2669452 - RNA, 19 nt, Artificial Sequence
  Description of Artificial Sequence: Synthetic oligonucleotide
augggcacuccuccucagg

SEQ ID NO: 2669453 - RNA, 19 nt, Artificial Sequence
  Description of Artificial Sequence: Synthetic oligonucleotide
cauuguaggcgucucugca

SEQ ID NO: 2669454 - RNA, 19 nt, Artificial Sequence
  Description of Artificial Sequence: Synthetic oligonucleotide
caaacaaguagagaaauuu

SEQ ID NO: 2669455 - RNA, 19 nt, Artificial Sequence
  Description of Artificial Sequence: Synthetic oligonucleotide
uuaagacuauuaucuccuu

SEQ ID NO: 2669456 - RNA, 19 nt, Artificial Sequence
  Description of Artificial Sequence: Synthetic oligonucleotide
gggagggugggacugauuc

SEQ ID NO: 2669457 - RNA, 19 nt, Artificial Sequence
  Description of Artificial Sequence: Synthetic oligonucleotide
gcuagaugaugaugggaag

SEQ ID NO: 2669458 - RNA, 19 nt, Artificial Sequence
  Description of Artificial Sequence: Synthetic oligonucleotide
augaugaugggaagaugug

SEQ ID NO: 2669459 - RNA, 19 nt, Artificial Sequence
  Description of Artificial Sequence: Synthetic oligonucleotide
gaaaaguauguugcaggaa

SEQ ID NO: 2669460 - RNA, 19 nt, Artificial Sequence
  Description of Artificial Sequence: Synthetic oligonucleotide
cacacuacacacacacaca

SEQ ID NO: 2669461 - RNA, 19 nt, Artificial Sequence
  Description of Artificial Sequence: Synthetic oligonucleotide
agaggaaagcuggaaugga

SEQ ID NO: 2669462 - RNA, 19 nt, Artificial Sequence
  Description of Artificial Sequence: Synthetic oligonucleotide
acaauccucuguccaggca

SEQ ID NO: 2669463 - RNA, 19 nt, Artificial Sequence
  Description of Artificial Sequence: Synthetic oligonucleotide
ggugggacugauuccaaca

SEQ ID NO: 2669464 - RNA, 19 nt, Artificial Sequence
  Description of Artificial Sequence: Synthetic oligonucleotide
ugacgcaucuuugcuagau

SEQ ID NO: 2669465 - RNA, 19 nt, Artificial Sequence
  Description of Artificial Sequence: Synthetic oligonucleotide
ggaauggaggugcucacuc

SEQ ID NO: 2669466 - RNA, 19 nt, Artificial Sequence
  Description of Artificial Sequence: Synthetic oligonucleotide
gaugggcacuccuccucag

SEQ ID NO: 2669467 - RNA, 19 nt, Artificial Sequence
  Description of Artificial Sequence: Synthetic oligonucleotide
acucggugacuguggggcg

SEQ ID NO: 2669468 - RNA, 19 nt, Artificial Sequence
  Description of Artificial Sequence: Synthetic oligonucleotide
agggugggcagcaccaccg

SEQ ID NO: 2669469 - RNA, 19 nt, Artificial Sequence
  Description of Artificial Sequence: Synthetic oligonucleotide
guaggcgucucugcagagg

SEQ ID NO: 2669470 - RNA, 19 nt, Artificial Sequence
  Description of Artificial Sequence: Synthetic oligonucleotide
ucuuguccuuggaugucuc

SEQ ID NO: 2669471 - RNA, 19 nt, Artificial Sequence
  Description of Artificial Sequence: Synthetic oligonucleotide
ccagagaggccucugcucc

SEQ ID NO: 2669472 - RNA, 19 nt, Artificial Sequence
  Description of Artificial Sequence: Synthetic oligonucleotide
aucaagcacagagaagaaa

SEQ ID NO: 2669473 - RNA, 19 nt, Artificial Sequence
  Description of Artificial Sequence: Synthetic oligonucleotide
gaugugcccagagaggucu

SEQ ID NO: 2669474 - RNA, 19 nt, Artificial Sequence
  Description of Artificial Sequence: Synthetic oligonucleotide
gaaggaccacaauccucug

SEQ ID NO: 2669475 - RNA, 19 nt, Artificial Sequence
  Description of Artificial Sequence: Synthetic oligonucleotide
ggaugucuccuucuuuggc

SEQ ID NO: 2669476 - RNA, 19 nt, Artificial Sequence
  Description of Artificial Sequence: Synthetic oligonucleotide
cuggaauggaggugcucac

SEQ ID NO: 2669477 - RNA, 19 nt, Artificial Sequence
  Description of Artificial Sequence: Synthetic oligonucleotide
cagccucacccagagaggc

SEQ ID NO: 2669478 - RNA, 19 nt, Artificial Sequence
  Description of Artificial Sequence: Synthetic oligonucleotide
agaggccucugcuccccgg

SEQ ID NO: 2669479 - RNA, 19 nt, Artificial Sequence
  Description of Artificial Sequence: Synthetic oligonucleotide
uggaauggaggugcucacu

SEQ ID NO: 2669480 - RNA, 19 nt, Artificial Sequence
  Description of Artificial Sequence: Synthetic oligonucleotide
gugagcgaacgggagcagg

SEQ ID NO: 2669481 - RNA, 19 nt, Artificial Sequence
  Description of Artificial Sequence: Synthetic oligonucleotide
uuggaggaaggaccacaau

SEQ ID NO: 2669482 - RNA, 19 nt, Artificial Sequence
  Description of Artificial Sequence: Synthetic oligonucleotide
cuacacacacacacacaca

SEQ ID NO: 2669483 - RNA, 19 nt, Artificial Sequence
  Description of Artificial Sequence: Synthetic oligonucleotide
agcugacgcaucuuugcua

SEQ ID NO: 2669484 - RNA, 19 nt, Artificial Sequence
  Description of Artificial Sequence: Synthetic oligonucleotide
agcgaacgggagcaggaaa

SEQ ID NO: 2669485 - RNA, 19 nt, Artificial Sequence
  Description of Artificial Sequence: Synthetic oligonucleotide
ccucuuuacuucaaauuca

SEQ ID NO: 2669486 - RNA, 19 nt, Artificial Sequence
  Description of Artificial Sequence: Synthetic oligonucleotide
ccaacagccucacccagag

SEQ ID NO: 2669487 - RNA, 19 nt, Artificial Sequence
  Description of Artificial Sequence: Synthetic oligonucleotide
cacuacgaucaggagcacc

SEQ ID NO: 2669488 - RNA, 19 nt, Artificial Sequence
  Description of Artificial Sequence: Synthetic oligonucleotide
accacggccagggugggca

SEQ ID NO: 2669489 - RNA, 19 nt, Artificial Sequence
  Description of Artificial Sequence: Synthetic oligonucleotide
cagagaggccucugcuccc

SEQ ID NO: 2669490 - RNA, 19 nt, Artificial Sequence
  Description of Artificial Sequence: Synthetic oligonucleotide
cauacacaaacacuacgau

SEQ ID NO: 2669491 - RNA, 19 nt, Artificial Sequence
  Description of Artificial Sequence: Synthetic oligonucleotide
gaagaugggcacuccuccu

SEQ ID NO: 2669492 - RNA, 19 nt, Artificial Sequence
  Description of Artificial Sequence: Synthetic oligonucleotide
caccaccacggccagggug

SEQ ID NO: 2669493 - RNA, 19 nt, Artificial Sequence
  Description of Artificial Sequence: Synthetic oligonucleotide
accaccguagugaucugcu

SEQ ID NO: 2669494 - RNA, 19 nt, Artificial Sequence
  Description of Artificial Sequence: Synthetic oligonucleotide
cacuacacacacacacaca

SEQ ID NO: 2669495 - RNA, 19 nt, Artificial Sequence
  Description of Artificial Sequence: Synthetic oligonucleotide
accagagaagaugggcacu

SEQ ID NO: 2669496 - RNA, 19 nt, Artificial Sequence
  Description of Artificial Sequence: Synthetic oligonucleotide
cacccagagaggccucugc

SEQ ID NO: 2669497 - RNA, 19 nt, Artificial Sequence
  Description of Artificial Sequence: Synthetic oligonucleotide
ugugagcgaacgggagcag

SEQ ID NO: 2669498 - RNA, 19 nt, Artificial Sequence
  Description of Artificial Sequence: Synthetic oligonucleotide
agaugugcccagagagguc

SEQ ID NO: 2669499 - RNA, 19 nt, Artificial Sequence
  Description of Artificial Sequence: Synthetic oligonucleotide
gacuauuaucuccuuuauu

SEQ ID NO: 2669500 - RNA, 19 nt, Artificial Sequence
  Description of Artificial Sequence: Synthetic oligonucleotide
gagaggccucugcuccccg

SEQ ID NO: 2669501 - RNA, 19 nt, Artificial Sequence
  Description of Artificial Sequence: Synthetic oligonucleotide
ugugcccagagaggucuug

SEQ ID NO: 2669502 - RNA, 19 nt, Artificial Sequence
  Description of Artificial Sequence: Synthetic oligonucleotide
ggugcucacucggugacug

SEQ ID NO: 2669503 - RNA, 19 nt, Artificial Sequence
  Description of Artificial Sequence: Synthetic oligonucleotide
gcccagagaggucuuggag

SEQ ID NO: 2669504 - RNA, 19 nt, Artificial Sequence
  Description of Artificial Sequence: Synthetic oligonucleotide
acgggagcaggaaaaguau

SEQ ID NO: 2669505 - RNA, 19 nt, Artificial Sequence
  Description of Artificial Sequence: Synthetic oligonucleotide
ggcgcguggccacauacac

SEQ ID NO: 2669506 - RNA, 19 nt, Artificial Sequence
  Description of Artificial Sequence: Synthetic oligonucleotide
gucucugcagaggaaagcu

SEQ ID NO: 2669507 - RNA, 19 nt, Artificial Sequence
  Description of Artificial Sequence: Synthetic oligonucleotide
agaggucuuggaggaagga

SEQ ID NO: 2669508 - RNA, 19 nt, Artificial Sequence
  Description of Artificial Sequence: Synthetic oligonucleotide
agccucacccagagaggcc

SEQ ID NO: 2669509 - RNA, 19 nt, Artificial Sequence
  Description of Artificial Sequence: Synthetic oligonucleotide
ucccuugagcugacgcauc

SEQ ID NO: 2669510 - RNA, 19 nt, Artificial Sequence
  Description of Artificial Sequence: Synthetic oligonucleotide
cagagaagaugggcacucc

SEQ ID NO: 2669511 - RNA, 19 nt, Artificial Sequence
  Description of Artificial Sequence: Synthetic oligonucleotide
ggaccacaauccucugucc

SEQ ID NO: 2669512 - RNA, 19 nt, Artificial Sequence
  Description of Artificial Sequence: Synthetic oligonucleotide
caucaagcacagagaagaa

SEQ ID NO: 2669513 - RNA, 19 nt, Artificial Sequence
  Description of Artificial Sequence: Synthetic oligonucleotide
ggaggugcucacucgguga

SEQ ID NO: 2669514 - RNA, 19 nt, Artificial Sequence
  Description of Artificial Sequence: Synthetic oligonucleotide
cucggugacuguggggcgc

SEQ ID NO: 2669515 - RNA, 19 nt, Artificial Sequence
  Description of Artificial Sequence: Synthetic oligonucleotide
cguggccacauacacaaac

SEQ ID NO: 2669516 - RNA, 19 nt, Artificial Sequence
  Description of Artificial Sequence: Synthetic oligonucleotide
gagcugacgcaucuuugcu

SEQ ID NO: 2669517 - RNA, 19 nt, Artificial Sequence
  Description of Artificial Sequence: Synthetic oligonucleotide
agcaucauuucaggaggaa

SEQ ID NO: 2669518 - RNA, 19 nt, Artificial Sequence
  Description of Artificial Sequence: Synthetic oligonucleotide
gggaagaugugcccagaga

SEQ ID NO: 2669519 - RNA, 19 nt, Artificial Sequence
  Description of Artificial Sequence: Synthetic oligonucleotide
acacacacacacacacaca

SEQ ID NO: 2669520 - RNA, 19 nt, Artificial Sequence
  Description of Artificial Sequence: Synthetic oligonucleotide
auccucuguccaggcaggg

SEQ ID NO: 2669521 - RNA, 19 nt, Artificial Sequence
  Description of Artificial Sequence: Synthetic oligonucleotide
cacacacuacacacacaca

SEQ ID NO: 2669522 - RNA, 19 nt, Artificial Sequence
  Description of Artificial Sequence: Synthetic oligonucleotide
caccaccguagugaucugc

SEQ ID NO: 2669523 - RNA, 19 nt, Artificial Sequence
  Description of Artificial Sequence: Synthetic oligonucleotide
cguagugaucugcugccgg

SEQ ID NO: 2669524 - RNA, 19 nt, Artificial Sequence
  Description of Artificial Sequence: Synthetic oligonucleotide
cccaucaagcacagagaag

SEQ ID NO: 2669525 - RNA, 19 nt, Artificial Sequence
  Description of Artificial Sequence: Synthetic oligonucleotide
gacacacacuacacacaca

SEQ ID NO: 2669526 - RNA, 19 nt, Artificial Sequence
  Description of Artificial Sequence: Synthetic oligonucleotide
ccacaauccucuguccagg

SEQ ID NO: 2669527 - RNA, 19 nt, Artificial Sequence
  Description of Artificial Sequence: Synthetic oligonucleotide
cuacgaucaggagcaccac

SEQ ID NO: 2669528 - RNA, 19 nt, Artificial Sequence
  Description of Artificial Sequence: Synthetic oligonucleotide
ugggcauuguaggcgucuc

SEQ ID NO: 2669529 - RNA, 19 nt, Artificial Sequence
  Description of Artificial Sequence: Synthetic oligonucleotide
ggucuuggaggaaggacca

SEQ ID NO: 2669530 - RNA, 19 nt, Artificial Sequence
  Description of Artificial Sequence: Synthetic oligonucleotide
ucacccagagaggccucug

SEQ ID NO: 2669531 - RNA, 19 nt, Artificial Sequence
  Description of Artificial Sequence: Synthetic oligonucleotide
gcucacucggugacugugg

SEQ ID NO: 2669532 - RNA, 19 nt, Artificial Sequence
  Description of Artificial Sequence: Synthetic oligonucleotide
cuugagcugacgcaucuuu

SEQ ID NO: 2669533 - RNA, 19 nt, Artificial Sequence
  Description of Artificial Sequence: Synthetic oligonucleotide
acacuacgaucaggagcac

SEQ ID NO: 2669534 - RNA, 19 nt, Artificial Sequence
  Description of Artificial Sequence: Synthetic oligonucleotide
augggaagaugugcccaga

SEQ ID NO: 2669535 - RNA, 19 nt, Artificial Sequence
  Description of Artificial Sequence: Synthetic oligonucleotide
gaacgggagcaggaaaagu

SEQ ID NO: 2669536 - RNA, 19 nt, Artificial Sequence
  Description of Artificial Sequence: Synthetic oligonucleotide
auggaggugcucacucggu

SEQ ID NO: 2669537 - RNA, 19 nt, Artificial Sequence
  Description of Artificial Sequence: Synthetic oligonucleotide
ggagcaccaccacggccag

SEQ ID NO: 2669538 - RNA, 19 nt, Artificial Sequence
  Description of Artificial Sequence: Synthetic oligonucleotide
gggugggacugauuccaac

SEQ ID NO: 2669539 - RNA, 19 nt, Artificial Sequence
  Description of Artificial Sequence: Synthetic oligonucleotide
ggggcgcguggccacauac

SEQ ID NO: 2669540 - RNA, 19 nt, Artificial Sequence
  Description of Artificial Sequence: Synthetic oligonucleotide
cgcguggccacauacacaa

SEQ ID NO: 2669541 - RNA, 19 nt, Artificial Sequence
  Description of Artificial Sequence: Synthetic oligonucleotide
ggcacuccuccucagggcu

SEQ ID NO: 2669542 - RNA, 19 nt, Artificial Sequence
  Description of Artificial Sequence: Synthetic oligonucleotide
uguggggcgcguggccaca

SEQ ID NO: 2669543 - RNA, 19 nt, Artificial Sequence
  Description of Artificial Sequence: Synthetic oligonucleotide
ggcgucucugcagaggaaa

SEQ ID NO: 2669544 - RNA, 19 nt, Artificial Sequence
  Description of Artificial Sequence: Synthetic oligonucleotide
acggccagggugggcagca

SEQ ID NO: 2669545 - RNA, 19 nt, Artificial Sequence
  Description of Artificial Sequence: Synthetic oligonucleotide
gagcgaacgggagcaggaa

SEQ ID NO: 2669546 - RNA, 19 nt, Artificial Sequence
  Description of Artificial Sequence: Synthetic oligonucleotide
gcgucucugcagaggaaag

SEQ ID NO: 2669547 - RNA, 19 nt, Artificial Sequence
  Description of Artificial Sequence: Synthetic oligonucleotide
gucuuggaggaaggaccac

SEQ ID NO: 2669548 - RNA, 19 nt, Artificial Sequence
  Description of Artificial Sequence: Synthetic oligonucleotide
gcgaacgggagcaggaaaa

SEQ ID NO: 2669549 - RNA, 19 nt, Artificial Sequence
  Description of Artificial Sequence: Synthetic oligonucleotide
cuuggaugucuccuucuuu

SEQ ID NO: 2669550 - RNA, 19 nt, Artificial Sequence
  Description of Artificial Sequence: Synthetic oligonucleotide
cugcagaggaaagcuggaa

SEQ ID NO: 2669551 - RNA, 19 nt, Artificial Sequence
  Description of Artificial Sequence: Synthetic oligonucleotide
cgggagcaggaaaaguaug

SEQ ID NO: 2669552 - RNA, 19 nt, Artificial Sequence
  Description of Artificial Sequence: Synthetic oligonucleotide
ccccaaacaaguagagaaa

SEQ ID NO: 2669553 - RNA, 19 nt, Artificial Sequence
  Description of Artificial Sequence: Synthetic oligonucleotide
ggccacauacacaaacacu

SEQ ID NO: 2669554 - RNA, 19 nt, Artificial Sequence
  Description of Artificial Sequence: Synthetic oligonucleotide
aggugcucacucggugacu

SEQ ID NO: 2669555 - RNA, 19 nt, Artificial Sequence
  Description of Artificial Sequence: Synthetic oligonucleotide
cuccccgggugcagcucag

SEQ ID NO: 2669556 - RNA, 19 nt, Artificial Sequence
  Description of Artificial Sequence: Synthetic oligonucleotide
cugacgcaucuuugcuaga

SEQ ID NO: 2669557 - RNA, 19 nt, Artificial Sequence
  Description of Artificial Sequence: Synthetic oligonucleotide
ccaccguagugaucugcug

SEQ ID NO: 2669558 - RNA, 19 nt, Artificial Sequence
  Description of Artificial Sequence: Synthetic oligonucleotide
cgucucugcagaggaaagc

SEQ ID NO: 2669559 - RNA, 19 nt, Artificial Sequence
  Description of Artificial Sequence: Synthetic oligonucleotide
cgaacgggagcaggaaaag

SEQ ID NO: 2669560 - RNA, 19 nt, Artificial Sequence
  Description of Artificial Sequence: Synthetic oligonucleotide
ggugacuguggggcgcgug

SEQ ID NO: 2669561 - RNA, 19 nt, Artificial Sequence
  Description of Artificial Sequence: Synthetic oligonucleotide
cagcaccaccguagugauc

SEQ ID NO: 2669562 - RNA, 19 nt, Artificial Sequence
  Description of Artificial Sequence: Synthetic oligonucleotide
ggcugggcauuguaggcgu

SEQ ID NO: 2669563 - RNA, 19 nt, Artificial Sequence
  Description of Artificial Sequence: Synthetic oligonucleotide
ccguagugaucugcugccg

SEQ ID NO: 2669564 - RNA, 19 nt, Artificial Sequence
  Description of Artificial Sequence: Synthetic oligonucleotide
uccccgggugcagcucagc

SEQ ID NO: 2669565 - RNA, 19 nt, Artificial Sequence
  Description of Artificial Sequence: Synthetic oligonucleotide
ggggccucuuuacuucaaa

SEQ ID NO: 2669566 - RNA, 19 nt, Artificial Sequence
  Description of Artificial Sequence: Synthetic oligonucleotide
gcuuucccuugagcugacg

SEQ ID NO: 2669567 - RNA, 19 nt, Artificial Sequence
  Description of Artificial Sequence: Synthetic oligonucleotide
gggccucuuuacuucaaau

SEQ ID NO: 2669568 - RNA, 19 nt, Artificial Sequence
  Description of Artificial Sequence: Synthetic oligonucleotide
gggcagcaccaccguagug

SEQ ID NO: 2669569 - RNA, 19 nt, Artificial Sequence
  Description of Artificial Sequence: Synthetic oligonucleotide
cccaaacaaguagagaaau

SEQ ID NO: 2669570 - RNA, 19 nt, Artificial Sequence
  Description of Artificial Sequence: Synthetic oligonucleotide
caacagccucacccagaga

SEQ ID NO: 2669571 - RNA, 19 nt, Artificial Sequence
  Description of Artificial Sequence: Synthetic oligonucleotide
gcuccccgggugcagcuca

SEQ ID NO: 2669572 - RNA, 19 nt, Artificial Sequence
  Description of Artificial Sequence: Synthetic oligonucleotide
ccaaacaaguagagaaauu

SEQ ID NO: 2669573 - RNA, 19 nt, Artificial Sequence
  Description of Artificial Sequence: Synthetic oligonucleotide
uggggcgcguggccacaua

SEQ ID NO: 2669574 - RNA, 19 nt, Artificial Sequence
  Description of Artificial Sequence: Synthetic oligonucleotide
cugggcauuguaggcgucu

SEQ ID NO: 2669575 - RNA, 19 nt, Artificial Sequence
  Description of Artificial Sequence: Synthetic oligonucleotide
ugcuccccgggugcagcuc

SEQ ID NO: 2669576 - RNA, 19 nt, Artificial Sequence
  Description of Artificial Sequence: Synthetic oligonucleotide
ggacugauuccaacagccu

SEQ ID NO: 2669577 - RNA, 19 nt, Artificial Sequence
  Description of Artificial Sequence: Synthetic oligonucleotide
gcagcaccaccguagugau

SEQ ID NO: 2669578 - RNA, 19 nt, Artificial Sequence
  Description of Artificial Sequence: Synthetic oligonucleotide
ccgggccuccugcauggcc

SEQ ID NO: 2669579 - RNA, 19 nt, Artificial Sequence
  Description of Artificial Sequence: Synthetic oligonucleotide
ggugcagcucagcaucauu

SEQ ID NO: 2669580 - RNA, 19 nt, Artificial Sequence
  Description of Artificial Sequence: Synthetic oligonucleotide
gcaccaccguagugaucug

SEQ ID NO: 2669581 - RNA, 19 nt, Artificial Sequence
  Description of Artificial Sequence: Synthetic oligonucleotide
cagagaggucuuggaggaa

SEQ ID NO: 2669582 - RNA, 19 nt, Artificial Sequence
  Description of Artificial Sequence: Synthetic oligonucleotide
aggcgucucugcagaggaa

SEQ ID NO: 2669583 - RNA, 19 nt, Artificial Sequence
  Description of Artificial Sequence: Synthetic oligonucleotide
gugcucacucggugacugu

SEQ ID NO: 2669584 - RNA, 19 nt, Artificial Sequence
  Description of Artificial Sequence: Synthetic oligonucleotide
gggcauuguaggcgucucu

SEQ ID NO: 2669585 - RNA, 19 nt, Artificial Sequence
  Description of Artificial Sequence: Synthetic oligonucleotide
gggcgcguggccacauaca

SEQ ID NO: 2669586 - RNA, 19 nt, Artificial Sequence
  Description of Artificial Sequence: Synthetic oligonucleotide
agggagggugggacugauu

SEQ ID NO: 2669587 - RNA, 19 nt, Artificial Sequence
  Description of Artificial Sequence: Synthetic oligonucleotide
ccacggccagggugggcag

SEQ ID NO: 2669588 - RNA, 19 nt, Artificial Sequence
  Description of Artificial Sequence: Synthetic oligonucleotide
gcgcguggccacauacaca

SEQ ID NO: 2669589 - RNA, 19 nt, Artificial Sequence
  Description of Artificial Sequence: Synthetic oligonucleotide
cccuugagcugacgcaucu

SEQ ID NO: 2669590 - RNA, 19 nt, Artificial Sequence
  Description of Artificial Sequence: Synthetic oligonucleotide
cugcuccccgggugcagcu

SEQ ID NO: 2669591 - RNA, 19 nt, Artificial Sequence
  Description of Artificial Sequence: Synthetic oligonucleotide
cgggugcagcucagcauca

SEQ ID NO: 2669592 - RNA, 19 nt, Artificial Sequence
  Description of Artificial Sequence: Synthetic oligonucleotide
gggugcagcucagcaucau

SEQ ID NO: 2669593 - RNA, 19 nt, Artificial Sequence
  Description of Artificial Sequence: Synthetic oligonucleotide
gcguggccacauacacaaa

SEQ ID NO: 2669594 - RNA, 19 nt, Artificial Sequence
  Description of Artificial Sequence: Synthetic oligonucleotide
guggggcgcguggccacau

SEQ ID NO: 2669595 - RNA, 19 nt, Artificial Sequence
  Description of Artificial Sequence: Synthetic oligonucleotide
ccuugagcugacgcaucuu

SEQ ID NO: 2669596 - RNA, 19 nt, Artificial Sequence
  Description of Artificial Sequence: Synthetic oligonucleotide
cggugacuguggggcgcgu

SEQ ID NO: 2669597 - RNA, 19 nt, Artificial Sequence
  Description of Artificial Sequence: Synthetic oligonucleotide
auaacagaguuccaggccc

SEQ ID NO: 2669598 - RNA, 19 nt, Artificial Sequence
  Description of Artificial Sequence: Synthetic oligonucleotide
aagacugccacauagcgcu

SEQ ID NO: 2669599 - RNA, 19 nt, Artificial Sequence
  Description of Artificial Sequence: Synthetic oligonucleotide
ugagagauaacagaguucc

SEQ ID NO: 2669600 - RNA, 19 nt, Artificial Sequence
  Description of Artificial Sequence: Synthetic oligonucleotide
agugucgccacauaggguc

SEQ ID NO: 2669601 - RNA, 19 nt, Artificial Sequence
  Description of Artificial Sequence: Synthetic oligonucleotide
agauaacagaguuccaggc

SEQ ID NO: 2669602 - RNA, 19 nt, Artificial Sequence
  Description of Artificial Sequence: Synthetic oligonucleotide
cuuaggaagaagcagccgg

SEQ ID NO: 2669603 - RNA, 19 nt, Artificial Sequence
  Description of Artificial Sequence: Synthetic oligonucleotide
gaaaggaaggagaaguugg

SEQ ID NO: 2669604 - RNA, 19 nt, Artificial Sequence
  Description of Artificial Sequence: Synthetic oligonucleotide
aacaggcuuaggaagaagc

SEQ ID NO: 2669605 - RNA, 19 nt, Artificial Sequence
  Description of Artificial Sequence: Synthetic oligonucleotide
cuaauucaagcccaggucc

SEQ ID NO: 2669606 - RNA, 19 nt, Artificial Sequence
  Description of Artificial Sequence: Synthetic oligonucleotide
uuggcgacgacgaugaggc

SEQ ID NO: 2669607 - RNA, 19 nt, Artificial Sequence
  Description of Artificial Sequence: Synthetic oligonucleotide
uguagcguugaucagccag

SEQ ID NO: 2669608 - RNA, 19 nt, Artificial Sequence
  Description of Artificial Sequence: Synthetic oligonucleotide
aaugcuggggccuggacug

SEQ ID NO: 2669609 - RNA, 19 nt, Artificial Sequence
  Description of Artificial Sequence: Synthetic oligonucleotide
gagaugagagauaacagag

SEQ ID NO: 2669610 - RNA, 19 nt, Artificial Sequence
  Description of Artificial Sequence: Synthetic oligonucleotide
cauaagccaacacugacag

SEQ ID NO: 2669611 - RNA, 19 nt, Artificial Sequence
  Description of Artificial Sequence: Synthetic oligonucleotide
ugcacuagcagcagauugg

SEQ ID NO: 2669612 - RNA, 19 nt, Artificial Sequence
  Description of Artificial Sequence: Synthetic oligonucleotide
agugagaugagagauaaca

SEQ ID NO: 2669613 - RNA, 19 nt, Artificial Sequence
  Description of Artificial Sequence: Synthetic oligonucleotide
gaaguugggugccaagugg

SEQ ID NO: 2669614 - RNA, 19 nt, Artificial Sequence
  Description of Artificial Sequence: Synthetic oligonucleotide
gauaacagaguuccaggcc

SEQ ID NO: 2669615 - RNA, 19 nt, Artificial Sequence
  Description of Artificial Sequence: Synthetic oligonucleotide
acuagcagcagauuggcga

SEQ ID NO: 2669616 - RNA, 19 nt, Artificial Sequence
  Description of Artificial Sequence: Synthetic oligonucleotide
ucauaagccaacacugaca

SEQ ID NO: 2669617 - RNA, 19 nt, Artificial Sequence
  Description of Artificial Sequence: Synthetic oligonucleotide
uguguagcguugaucagcc

SEQ ID NO: 2669618 - RNA, 19 nt, Artificial Sequence
  Description of Artificial Sequence: Synthetic oligonucleotide
agagauaacagaguuccag

SEQ ID NO: 2669619 - RNA, 19 nt, Artificial Sequence
  Description of Artificial Sequence: Synthetic oligonucleotide
agaagcagccggcaggugg

SEQ ID NO: 2669620 - RNA, 19 nt, Artificial Sequence
  Description of Artificial Sequence: Synthetic oligonucleotide
ucuuccucgaagcacucgc

SEQ ID NO: 2669621 - RNA, 19 nt, Artificial Sequence
  Description of Artificial Sequence: Synthetic oligonucleotide
aggaaggaugggcagugcc

SEQ ID NO: 2669622 - RNA, 19 nt, Artificial Sequence
  Description of Artificial Sequence: Synthetic oligonucleotide
gcguugaucagccagaccc

SEQ ID NO: 2669623 - RNA, 19 nt, Artificial Sequence
  Description of Artificial Sequence: Synthetic oligonucleotide
gaugaggcuugccagggcc

SEQ ID NO: 2669624 - RNA, 19 nt, Artificial Sequence
  Description of Artificial Sequence: Synthetic oligonucleotide
cucgcagccaccuuugggc

SEQ ID NO: 2669625 - RNA, 19 nt, Artificial Sequence
  Description of Artificial Sequence: Synthetic oligonucleotide
caguaacaggcuuaggaag

SEQ ID NO: 2669626 - RNA, 19 nt, Artificial Sequence
  Description of Artificial Sequence: Synthetic oligonucleotide
uggacugucccucuuggcu

SEQ ID NO: 2669627 - RNA, 19 nt, Artificial Sequence
  Description of Artificial Sequence: Synthetic oligonucleotide
ugguaggcaaugcuggggc

SEQ ID NO: 2669628 - RNA, 19 nt, Artificial Sequence
  Description of Artificial Sequence: Synthetic oligonucleotide
uaauucaagcccaggucca

SEQ ID NO: 2669629 - RNA, 19 nt, Artificial Sequence
  Description of Artificial Sequence: Synthetic oligonucleotide
aagcccagguccaugcugc

SEQ ID NO: 2669630 - RNA, 19 nt, Artificial Sequence
  Description of Artificial Sequence: Synthetic oligonucleotide
cagguggcgauccagggcg

SEQ ID NO: 2669631 - RNA, 19 nt, Artificial Sequence
  Description of Artificial Sequence: Synthetic oligonucleotide
gacgaugaggcuugccagg

SEQ ID NO: 2669632 - RNA, 19 nt, Artificial Sequence
  Description of Artificial Sequence: Synthetic oligonucleotide
agggaaaggaaggagaagu

SEQ ID NO: 2669633 - RNA, 19 nt, Artificial Sequence
  Description of Artificial Sequence: Synthetic oligonucleotide
uccagggcgaugccuaggg

SEQ ID NO: 2669634 - RNA, 19 nt, Artificial Sequence
  Description of Artificial Sequence: Synthetic oligonucleotide
ugugguaggcaaugcuggg

SEQ ID NO: 2669635 - RNA, 19 nt, Artificial Sequence
  Description of Artificial Sequence: Synthetic oligonucleotide
agguccaugcugcuuuggc

SEQ ID NO: 2669636 - RNA, 19 nt, Artificial Sequence
  Description of Artificial Sequence: Synthetic oligonucleotide
augcacuagcagcagauug

SEQ ID NO: 2669637 - RNA, 19 nt, Artificial Sequence
  Description of Artificial Sequence: Synthetic oligonucleotide
guggacgccgcucauaagc

SEQ ID NO: 2669638 - RNA, 19 nt, Artificial Sequence
  Description of Artificial Sequence: Synthetic oligonucleotide
ugcaagacugccacauagc

SEQ ID NO: 2669639 - RNA, 19 nt, Artificial Sequence
  Description of Artificial Sequence: Synthetic oligonucleotide
agccaacacugacaggagc

SEQ ID NO: 2669640 - RNA, 19 nt, Artificial Sequence
  Description of Artificial Sequence: Synthetic oligonucleotide
agaaguugggugccaagug

SEQ ID NO: 2669641 - RNA, 19 nt, Artificial Sequence
  Description of Artificial Sequence: Synthetic oligonucleotide
cuccccaugcacuagcagc

SEQ ID NO: 2669642 - RNA, 19 nt, Artificial Sequence
  Description of Artificial Sequence: Synthetic oligonucleotide
uucaagcccagguccaugc

SEQ ID NO: 2669643 - RNA, 19 nt, Artificial Sequence
  Description of Artificial Sequence: Synthetic oligonucleotide
cugcaagacugccacauag

SEQ ID NO: 2669644 - RNA, 19 nt, Artificial Sequence
  Description of Artificial Sequence: Synthetic oligonucleotide
cuagcagcagauuggcgag

SEQ ID NO: 2669645 - RNA, 19 nt, Artificial Sequence
  Description of Artificial Sequence: Synthetic oligonucleotide
cucauaagccaacacugac

SEQ ID NO: 2669646 - RNA, 19 nt, Artificial Sequence
  Description of Artificial Sequence: Synthetic oligonucleotide
gcaagacugccacauagcg

SEQ ID NO: 2669647 - RNA, 19 nt, Artificial Sequence
  Description of Artificial Sequence: Synthetic oligonucleotide
acgacgaugaggcuugcca

SEQ ID NO: 2669648 - RNA, 19 nt, Artificial Sequence
  Description of Artificial Sequence: Synthetic oligonucleotide
caagacugccacauagcgc

SEQ ID NO: 2669649 - RNA, 19 nt, Artificial Sequence
  Description of Artificial Sequence: Synthetic oligonucleotide
gaugagagauaacagaguu

SEQ ID NO: 2669650 - RNA, 19 nt, Artificial Sequence
  Description of Artificial Sequence: Synthetic oligonucleotide
acuggcgcugcccagugag

SEQ ID NO: 2669651 - RNA, 19 nt, Artificial Sequence
  Description of Artificial Sequence: Synthetic oligonucleotide
cauaggguccccagcacag

SEQ ID NO: 2669652 - RNA, 19 nt, Artificial Sequence
  Description of Artificial Sequence: Synthetic oligonucleotide
ggaagaagcagccggcagg

SEQ ID NO: 2669653 - RNA, 19 nt, Artificial Sequence
  Description of Artificial Sequence: Synthetic oligonucleotide
uuccucgaagcacucgcag

SEQ ID NO: 2669654 - RNA, 19 nt, Artificial Sequence
  Description of Artificial Sequence: Synthetic oligonucleotide
aggaugggcagugccagcc

SEQ ID NO: 2669655 - RNA, 19 nt, Artificial Sequence
  Description of Artificial Sequence: Synthetic oligonucleotide
aggcaggaccaguagcccc
